(19) United States
(12) Patent Application Publication
(10) Pub. No.: US 2025/0387517 A1
(43) Pub. Date: Dec. 25, 2025

(54) COMPOSITIONS FOR ACTIVATING AND SILENCING GENE EXPRESSION

(71) Applicant: The Board of Trustees of the Leland Stanford Junior University, Stanford, CA (US)

(72) Inventors: Nicole Delrosso, Stanford, CA (US); Adi Mukund, Stanford, CA (US); Peter Suzuki, Stanford, CA (US); Joshua Tycko, Stanford, CA (US); Michael C. Bassik, Stanford, CA (US); Lacramioara Bintu, Stanford, CA (US)

(21) Appl. No.: 18/843,896

(22) PCT Filed: Mar. 9, 2023
(86) PCT No.: PCT/US2023/064036

§ 371 Date: Sep. 4, 2024

Related U.S. Application Data
(60) Provisional application No. 63/318,144, filed on Mar. 9, 2022.

(51) Int. Cl. A61K 48/00; C12N 9/22; C12N 15/11; C12N 15/90

(52) U.S. Cl. CPC A61K 48/0066; A61K 48/0058; C12N 9/226; C12N 15/11; C12N 15/907; C12N 2310/20; C12N 2830/001

(57) ABSTRACT

Provided herein are compositions, systems, and kits comprising effector domains for activating and silencing gene expression. In particular, synthetic transcription factors comprising the effector domains are provided.

### CROSS-REFERENCE TO RELATED APPLICATIONS

[0001] This application claims the benefit of U.S. Provisional Application No. 63/318,144, filed Mar. 9, 2022, the content of which is herein incorporated by reference in its entirety.

### STATEMENT REGARDING FEDERALLY SPONSORED RESEARCH

[0002] This invention was made with Government support under contracts HG009436, HG011866, and GM128947 awarded by the National Institutes of Health. The Government has certain rights in the invention.

### FIELD

[0003] Provided herein are compositions, systems, and kits for activating and silencing gene expression. In particular, synthetic transcription factors comprising one or more of the effector domains and methods of using thereof are provided.

### SEQUENCE LISTING STATEMENT

[0004] The contents of the electronic sequence listing titled 40702_601_SequenceListing.xml (Size: 26,606,746 bytes; and Date of Creation: Mar. 8, 2023) is herein incorporated by reference in its entirety.

### BACKGROUND

[0005] Human gene expression is regulated by over two thousand transcription factors and chromatin regulators. Large scale efforts have mapped where in the human genome transcription factors (TFs) and chromatin regulators (CRs) bind. However, equivalent maps of transcriptional effector domains (EDs) are incomplete: ED annotations are currently missing for about 60% of human TFs. Moreover, the sequence characteristics of what makes a good human activation or repression domain are still under investigation.

[0006] Previous efforts to engineer synthetic transcription factors have pulled activation and repression domains from a small toolbox of previously discovered effector domains. One useful assay for characterizing individual EDs and testing specific sequence requirements consists of recruitment of domains and mutants to reporter genes. This approach has been extended from recruiting single domains to high-throughput assays in yeast, drosophila, and human cells with a subset of transcriptional domains or a subset of full length transcription factors. New methods are needed to identify new effector domains, including systematically mapping EDs across the thousands of human transcriptional proteins.

### SUMMARY

[0007] Provided herein are synthetic transcription factors comprising an effector domain. In some embodiments, the synthetic transcription factor comprises one or more activator domains, one or more repressor domains, or a combination thereof fused to a heterologous DNA binding domain.

[0008] In some embodiments, at least one of the one or more activator domains or at least one of the one or more repressor domains comprises an amino acid sequence having at least 70% (e.g., at least 75%, at least 80%, at least 85%, at least 90%, at least 95%, at least 98%, at least 99%, or 100%) identity to any of SEQ ID NOs: 1-12567 and 28214-28404. In some embodiments, at least one of the one or more activator domains or at least one of the one or more repressor domains comprises an amino acid sequence of any of SEQ ID NOs: 1-12567 and 28214-28404.

[0009] In some embodiments, at least one of the one or more activator domains or the one or more repressor domains comprises at least 10 contiguous amino acids of any of SEQ ID NOs: 1-12567 and 28214-28404.

[0010] In some embodiments, at least one of the one or more activator domains comprises an amino acid sequence having at least 70% identity to any of SEQ ID NOs: 31, 36, 111, 113, 153, 158, 165, 182, 184, 189, 224, 291, 311, 313, 352, 362, 367, 369, 375, 381, 407, 410, 415, 426, 430, 436, 472, 476, 478, 480, 483, 487-489, 494, 496, 498, 509, 512-517, 524, 526, 527, 530, 532, 533, 537, 541, 542, 545-547, 549, 552, 554, 557, 560-562, 565-568, 570-576, 578, 579, 580, 581, 582, 585, 587, 589, 590, 592, 595-598, 601, 603, 605, 607, 613, 617, 620, 622-624, 626, 627, 629, 630, 634-636, 639, 643, 646, 648, 651, 654, 658, 659, 662, 664, 666, 673, 675, 677, 678, 681, 684, 685, 686, 687, 689, 695, 696, 697, 699, 704, 705, 707-711, 713, 715, 716, 721, 723-725, 728, 729, 731-733, 735, 744, 746, 747, 753, 755, 760, 761, 764, 766-769, 773, and 775-984.

[0011] In some embodiments, at least one of the one or more activator domains comprises an amino acid sequence having at least 70% identity to any of SEQ ID NOs: 88, 144, 147, 148, 149, 234, 280, 281, 282, 283, 302, 306, 307, 322, 355, 356, 440, 441, 442, 443, 444, 445, 446, 447, 448, 449, 477, 488, 501, 532, 548, 593, 610, 618, 676, 738, 757, and 28365-28404.

[0012] In some embodiments, at least one of the one or more activator domains comprises an amino acid sequence having at least 70% identity to any of SEQ ID NOs: 12568-13273.

[0013] In some embodiments, at least one of the one or more activator domains comprises an amino acid sequence having at least 70% identity to any of SEQ ID NOs: 13274-17423.

[0014] In some embodiments, at least one of the one or more activator domains comprises one or more of SEQ ID NOs: 17424-17841.

[0015] In some embodiments, at least one of the one or more repressor domains comprises an amino acid sequence having at least 70% identity to any of SEQ ID NOs: 1036, 1054, 1055, 1069, 1120, 1144, 1182, 1183, 1200, 1208, 1314, 1318, 1366, 1402, 1417, 1442, 1516, 1518, 1543, 1598, 1627, 1655, 1665, 1667, 1670, 1706, 1710, 1711, 1735, 1738, 1742, 1747, 1748, 1752, 1756, 1763, 1777, 1783, 1786, 1789, 1793, 1794, 1808, 1811, 1822, 1831, 1838, 1839, 1854, 1859, 1862, 1865, 1866, 1869, 1870, 1872, 1875, 1883, 1889, 1891, 1893, 1901, 1902, 1905, 1907, 1910, 1912, 1913, 1914, 1915, 1916, 1922, 1923, 1927, 1930, 1934, 1940, 1944, 1946, 1948, 1951, 1952, 1956, 1957, 1968, 1969, 1972, 1987, 1992, 1994, 1996, 2004, 2007, 2010, 2017, 2022, 2029, 2033, 2041, 2042, 2043, 2048, 2050, 2051, 2053, 2057, 2064, 2095, 2107, 2112, 2119, 2123, 2128, 2131, 2139, 2150, 2157, 2160, 2163, 2176, 2182, 2188, 2190, 2192, 2193, 2194, 2205, 2206, 2207, 2208, 2211, 2212, 2213, 2216, 2218, 2221, 2224, 2227, 2231, 2232, 2239, 2245, 2246, 2254, 2262, 2263, 2265, 2271, 2274, 2275, 2277, 2278, 2282, 2283, 2288, 2292, 2295, 2296, 2298, 2302, 2312, 2313, 2316, 2320, 2321, 2323, 2324, 2325, 2334, 2338, 2341, 2348, 2361, 2364, 2365, and 2370-6094.

[0016] In some embodiments, at least one of the one or more repressor domains comprises an amino acid sequence having at least 70% identity to any of SEQ ID NOs: 985, 986, 1005, 1042, 1050, 1063, 1064, 1090, 1098, 1099, 1124, 1126, 1127, 1129, 1276, 1277, 1280, 1284, 1342, 1367, 1375, 1397, 1406, 1409, 1410, 1427, 1428, 1430, 1442, 1447, 1459, 1486, 1487, 1492, 1494, 1511, 1512, 1513, 1564, 1569, 1650, 1651, 1652, 1653, 1661, 1680, 1681, 1723, 1730, 1733, 1740, 1741, 1795, 1848, 1864, 1865, 1914, 1915, 1991, 1998, 2007, 2017, 2092, 2100, 2103, 2142, 2147, 2155, 2168, 2224, 2235, 2251, 2264, 2278, 2283, 2298, 2306, 2312, 2320, 2323, 2331, 2339, 2356, 2366, 2471, 2481, 2617, 2731, 3150, 3336, 3853, 4713, 4797, 5742, 5743, 5870, 5878, 5940, 5945, and 28214-28364.

[0017] In some embodiments, at least one of the one or more repressor domains comprises an amino acid sequence having at least 70% identity to any of SEQ ID NOs: 17842-24889.

[0018] In some embodiments, at least one of the one or more repressor domains comprises one or more of SEQ ID NOs: 24890-25651.

[0019] In some embodiments, the heterologous DNA binding domain is a programmable DNA binding domain. In some embodiments, the heterologous DNA binding domain is derived from a Clustered Regularly Interspaced Short Palindromic Repeats associated (Cas) protein.

[0020] In some embodiments, the heterologous DNA binding domain is derived from a Transcription activator-like effectors (TALEs) domain.

[0021] In some embodiments, the heterologous DNA binding domain is part of an inducible DNA binding system.

[0022] Also provided herein are nucleic acids and vectors encoding the synthetic transcription factors disclosed herein.

[0023] Further provided are cells comprising the synthetic transcription factor disclosed herein, or nucleic acids encoding the synthetic transcription factors. In some embodiments, the cell comprises two or more synthetic transcription factors, nucleic acids, or vectors. In some embodiments, the cell is a prokaryotic cell. In some embodiments, the cell is a eukaryotic cell. In some embodiments, the cell is a human cell.

[0024] Compositions and systems comprising a synthetic transcription factor disclosed herein, a nucleic acid encoding a synthetic transcription factor, or a cell comprising a synthetic transcription factor are further provided. In some embodiments, the composition or system comprises two or more synthetic transcription factors, nucleic acids, vectors, or cells. In some embodiments, the composition or system further comprises an exogenous factor for use with the DNA binding domain (e.g., a guide RNA or a nucleic acid encoding a guide RNA).

[0025] Additionally provided are methods of using the synthetic transcription factors disclosed herein, or nucleic acids encoding the synthetic transcription factors. In some embodiments, the methods comprise modulating the expression of at least one target gene in a cell comprising introducing into the cell at least one synthetic transcription factors disclosed herein, nucleic acid encoding at least one synthetic transcription factor, or a composition or system comprising thereof. In some embodiments, the at least one target gene is an endogenous gene, an exogenous gene, or a combination thereof. In some embodiments, the cell is in a subject. In some embodiments, the method comprises administering the at least one synthetic transcription factor, nucleic acid, vector, or composition or system to the subject. In some embodiments, the gene expression of at least two genes is modulated.

[0026] In some embodiments, the methods comprise treating a disease or condition in a subject in need thereof, the method comprising: administering to the subject at least one synthetic transcription factors disclosed herein, nucleic acid encoding at least one synthetic transcription factor, or a composition or system comprising thereof. In some embodiments, the subject is human. In some embodiments, the synthetic transcription factor alters the expression of a disease-related gene.

[0027] Other aspects and embodiments of the disclosure will be apparent in light of the following detailed description.

### BRIEF DESCRIPTION OF THE DRAWINGS

[0028] FIGS. 1A-1J show that a high-throughput tiling screen across 2,047 human transcription factors (TFs) and chromatin regulators (CRs) finds hundreds of effector domains. FIG. 1A is a schematic of HT-recruit. A pooled library of protein tiles is synthesized, cloned as a fusion to rTetR-3xFLAG, and delivered to reporter cells. The reporter includes fluorescent citrine and a synthetic surface marker for magnetic bead separation of ON and OFF cells. FIG. 1B is activation and repression enrichment scores for MYB. Each horizontal line is a tile, and each vertical bar is the range of measurements from 2 biologically independent screens. Dashed horizontal line is the hit calling threshold based on random controls. Points with larger marker sizes are hits in the validation screen. Marker hues indicate FLAG-stained expression levels. FIGS. 1C and 1D show the distribution of the strongest effector domains (Eds) from the top 40 gene families. Average enrichment scores are from the maximum tile within each domain measured in the validation screen (n=2). All points shown are above the hit thresholds. FIG. 1E is tiling results for BRD4, TET2, ARID3B, and ETV1 (n=2 screens, dots are the mean, vertical bars the range). FIG. 1F is citrine fluorescence distributions from flow cytometry for cell lines expressing individual activating tiles (n=2). Vertical line is the citrine gate used to determine the fraction of cells ON (written above each distribution). FIG. 1G is a comparison between screen measurements and individually recruited tiles at minCMV (n=2, dots are the mean, bars the range) with logistic model fit plotted as solid line (r²=0.67, n=23). Dashed line is the hits threshold. FIG. 1H is flow cytometry citrine distributions for individual validations of repressing tiles (n=2). FIG. 1I is a comparison between screen measurements and individually recruited tiles at pEF (n=2, dots are the mean, bars the range) with logistic model fit as solid line (r²=0.84, n=22). FIG. 1J is effector domain counts identified herein shown above the black line, and domain counts from prior work not tested herein shown below. Repression domains (RDs) are annotated from tiles that were hits in both pEF and PGK promoter screens (FIG. 8).

[0029] FIGS. 2A-2I show hydrophobic amino acids interspersed with acidic, serine, proline or glutamine residues facilitate activation domain (AD) activity. FIG. 2A shows the fraction of activating tiles that contain compositional biases. FIG. 2B is the enrichment ratio for each aa across all activating tiles. Dashed line is at 1. FIG. 2C is a deletion scan across ADs of NFAT5 (SEQ ID NO: 684). Yellow rectangle is WT enrichment score, its height the range of two biologically independent screens. Each horizontal line represents which residues were deleted, dots are the mean, vertical bars the range, and p-values less than 0.05 (one-sided z-test compared to WT) are labeled in grey as decrease. FIG. 2D shows counts of deletion sequences containing a homotypic repeat of 3 or more amino acids of the indicated type binned according to their effect compared to WT (Fisher's exact test compared with AAA+ and LLL+ distribution, two-sided, Ser p=5.1e-5, Pro=1.9e-2, acidic=1.2e-4, Gln=1.5e-2, Gly=2.3e-2). FIG. 2E is the distribution of average activation enrichment scores (n=2) for WT and W,F,Y,L mutant tiles for all well-expressed W,F,Y,L-containing activating tiles (Mann-Whitney one-sided U test, p=9.2e-241). Shown are SEQ ID NOs: 28199 and 28200. FIG. 2F is the distribution of average activation enrichment scores (n=2) for WT and D,E mutant tiles for all well-expressed D,E containing activating tiles (Mann-Whitney one-sided U test, p=2.6e-61). Shown are SEQ ID NOs: 28201 and 28202. FIG. 2G, top, is distributions of average activation enrichment scores (n=2) for WT (colors) and comp. bias mutants (gray). FIG. 2G, bottom, is mutant enrichment scores subtracted from WT plotted for each comp. bias that was replaced with Ala. Dashed line is 2 times the average standard deviation (across all mutants) above 0. Probability these distributions would be observed for L: 7.7e-19, D: 0.0006, E: 0.0005, S: 0.56, and P: 0.006 (Mann-Whitney one-sided U test). Shown are SEQ ID NOs: 28203 and 28204. FIG. 2H is counts of all regions within comp. biased tiles that lost activity upon mutation, colored by containing W, F, Y, L or not (Fisher's exact test, two-sided, compared to the same tiles' comp. biased sequences that had no change upon deletion, Ser: p=3.8e-4, acidic: p=3.0e-3, Pro: p=5.5e-1). FIG. 2I is a summary of findings: AD sequences (ATF4 (SEQ ID NO: 17445), JADE2 (SEQ ID NO: 17594), NR4A1 (SEQ ID NO: 71674), TET2 (SEQ ID NO: 17798), KLF4 (SEQ ID NO: 17749), BRD4 (SEQ ID NO: 17455), BRD4 (SEQ ID NO: 17454), OCT4 (SEQ ID NO: 17706), which facilitate activity consist of hydrophobic residues that are interspersed with acidic, prolines, serines and/or glutamine residues.

[0030] FIGS. 3A-3F show repression domain (RD) sequences contain either sites for SUMOylation, short interaction motifs for recruiting co-repressors, or are structured binding domains for recruiting other repressive proteins. FIG. 3A is a count of RDs (repressive in both pEF and PGK promoter screens) that overlap annotations from UniProt and ELM (Eukaryotic Linear Motifs). Annotations that had at least 6 counts are shown. P-values from a one-sided proportions z-test stating how likely it is to find an annotation (e.g., zinc finger) overlapping an activating tile versus a repressing tile: SUMO p=3.7e-26, zinc finger=2.9e-21, DNA binding domain p=1.1e-22, co-repressor binding p=4.7e-4. FIG. 3B is repression enrichment scores (n=2, dots are the mean, vertical bars the range) for tiles that contain a co-repressor binding motif versus a replacement with Ala (Mutant). TLE-binding: 6 lost all repressive activity upon motif removal. Fraction of non-hit sequences containing motif=0. HP1-binding: 8/13 significantly decreased activity upon motif removal (one-tailed z-test). Fraction of non-hit sequences containing motif=0.002. CtBP-binding: 14/17 significantly decreased activity upon motif removal. Fraction of non-hit sequences containing motif-0.002. FIG. 3C is deletion scan across SP3's RD (SEQ ID NO: 2179). SUMOylation motif is “IKEE” (SEQ ID NO: 28213). Blue rectangle is the WT enrichment score, its height the range of two biologically independent screens. Each horizontal line represents which residues were deleted, dots are the mean, vertical bars the range, and p-values less than 0.05 (one-sided z test compared to WT) are labeled in grey as decrease. FIG. 3D shows the fraction of deletion sequences containing a SUMOylation motif binned according to their effect on activity (blue=no change relative to WT, gray=decreased, one-tailed z test, n=166 total RDs). FIG. 3E is a deletion scan across IKZF5's RD (SEQ ID NO: 2063) (n=2, dots are the mean, bars the range). AlphaFold's predicted secondary structure (prediction from whole protein sequence) shown below: alpha helices in green and beta sheets in orange. FIG. 3F is a summary of RD functional sequence categories (n indicated in Figure). SEQ ID NO: 28205 in (1) and SEQ ID NO: 28206 in (2).

[0031] FIGS. 4A-4F show bifunctional activating and repressing domains. Bifunctional tiles were discovered by observing both activation above the hits threshold (vertical dashed line in FIG. 4A) in the minCMV promoter CRTF validation screen (x-axis) and repression above the hits threshold (horizontal dashed line) in the pEF promoter CRTF validation screen (y-axis) (n=2 biological replicates for each point). FIG. 4B is citrine distributions from flow cytometry for individual validations of bifunctional tiles. Untreated cells (gray) and dox-treated cells (colors) (n=2 biological replicates in each condition). Vertical line is the citrine gate used to determine the fraction of cells ON for activation and OFF for repression. FIG. 4C is a tiling plot for ARGFX (n=2, dots are the mean, bars the range). Bifunctional domains are regions where the sequence is both activating at the minCMV promoter and repressing at the pEF promoter. FIG. 4D is deletion scans across ARGFX-161:240 (SEQ ID NO: 280) at minCMV promoter (top), and at pEF promoter (bottom). Yellow and blue rectangles represent WT enrichment scores, its height the range of two biologically independent screens. Each horizontal line represents which residues were deleted, dots are the mean, vertical bars the range. The 3 deletions that caused no activation and no repression across both screens are shown in shading and with a bar above the sequence. FIG. 4E is citrine distributions after recruitment of bifunctional tile ARGFX-161:240 to the PGK promoter (n=2). Left vertical gate as used for measuring the fraction of cells OFF to its left. Right vertical gate was used for measuring the fraction of cells HIGH to its right. The fraction of LOW cells was measured by quantifying the number of cells between the two gates. FIG. 4F is fraction of cells with citrine OFF (navy), LOW (gray), and HIGH (pink) over time after recruitment of ARGFX-161:240 (n=2 biological replicates, average plotted as a line).

[0032] FIGS. 5A-5G show CRTF tiling screens' separation purity, reproducibility, and validation. FIG. 5A is a comparison between the set of proteins tiled in Tycko et al (See, Tycko, J. et al. Cell 183, 2020-2035.e16 (2020), incorporated herein by reference in its entirety) and those protein identified herein. FIG. 5B is flow cytometry data showing citrine reporter distributions for the minCMV promoter screen on the day localization was induced with dox (Pre-induction), on the day of magnetic separation (Pre-separation), and after separation (Bound). Overlapping histograms are shown for two separately transduced biological replicates. The average percentage of cells ON is shown to the right of the vertical line showing the citrine level gate. FIG. 5C is citrine reporter distributions for the pEF promoter screen (n=2). FIGS. 5D-5E are biological replicate screen reproducibility (for hits above the threshold: pearson r²=0.78 for minCMV and r²=0.19 for pEF; for all data, including noise under the hit threshold: pearson r²=0.66 for minCMV and r²=0.16 for pEF). FIG. 5F is comparison between average repression enrichment scores of tiles that were screened in the CRTF tiling pEF screen (x-axis) and previous silencer tiling screen (y-axis). Dashed lines are the hits thresholds for each screen. Tiles were identical with a 1 aa register shift (as Silencer library tiles included an initial methionine absent from the CRTF tiling library). Pink dots are tiles that were individually validated in FIG. 5G. FIG. 5G is citrine reporter distributions of individually validated CRTF tiling pEF screen hits that were not identified within the Silencer tiling screen (n=2).

[0033] FIG. 6A-6D show CRTF tiling FLAG protein expression screen separation purity, reproducibility, validation, and example of how the data were used. FIG. 6A is Alexa Fluor 647 distributions from anti-FLAG staining of the CRTF tiling library in minCMV promoter reporter cells (n=2). FIG. 6B is biological replicate screen reproducibility (pearson r²=0.49). FIG. 6C is validations of FLAG protein expression screen. Expression levels were measured by Western blot with an anti-FLAG antibody. Anti-histone H3 was used as a loading control for normalization. Lane 1: rTetR-3xFLAG (no tile) theoretical molecular weight of 29 kDa; lanes 2-6: rTetR-3xFLAG-screened P53 deletions, theoretical molecular weight of 39 kDa; lanes 7-9: rTetR-3xFLAG-P53's AD loaded at increasing amounts; lanes 10-14: rTetR-3xFLAG-screened random control. Shift from expected molecular weight of the expressed P53 proteins is likely due to post-translational modifications P53's AD undergoes. Comparison between high-throughput measurements of expression and Western blot protein levels (r²=0.87, n=10 proteins, n=2 blot replicates, dots are the mean, bars the range). FIG. 6D is tiling plot for BCL11A (n=2, dots are the mean, bars the range). Example of a domain that was annotated at position 571-710. This domain had a low expression tile in the middle but the domain was left unsegmented.

[0034] FIGS. 7A-7F show CRTF tile hits validation screens' separation purity, reproducibility, and validation. FIG. 7A is flow cytometry data showing citrine reporter distributions for the minCMV promoter screen on the day localization was induced with dox (Pre-induction), on the day of magnetic separation (Pre-separation), and after separation (Bound). Overlapping histograms are shown for 2 biological replicates. The average percentage of cells ON is shown to the right of the vertical line showing the citrine level gate. FIG. 7B is citrine reporter distributions for the pEF promoter validation screen (n=2). FIGS. 7C-7D are biological replicate screen reproducibility. FIG. 7E is comparison between individually recruited measurements and minCMV promoter validation screen measurements (n=2, dots are the mean, bars the range) with logistic model fit plotted as solid line (r²=0.91, n=20). Dashed line is the hits threshold. Note, both screen thresholds are below 0, with several validated screen measurements below 0. FIG. 7F is comparison between individually recruited measurements and pEF promoter validation screen measurements (n=2, dots are the mean, bars the range) with logistic model fit plotted as solid line (r²=0.94, n=19).

[0035] FIGS. 8A-8H show validations of CR & TF EDs. FIG. 8A is a comparison between set of proteins screened in Alerasool et al. (See, Alerasool, N., et al., Mol. Cell 82, 393 677-695.e7 (2022)) and CRTF tiles. FIG. 8B is net charge per residue distributions (calculated by CIDER) of activation domains identified by HT-recruit compared to their PADDLE-predicted function (Mann-Whitney p-value=1.4e-15, boxes: median and interquartile range (IQR); whiskers: Q1-1.5*IQR and +Q3). FIG. 8C is CRTF tiling library screened at three different promoters with distinct expression levels. minCMV is a minimal promoter with all cells off. PGK is a low expression, medium strength promoter, and pEF is a high expression, strong promoter. FIG. 8D is flow cytometry data showing citrine reporter distributions for the PGK promoter screen on the day localization was induced with dox (Pre-induction), 5 days later on the day of magnetic separation (Pre-separation), and after separation (Bound). Overlapping histograms are shown for 2 biological replicates. The average percentage of cells ON is shown to the right of the vertical line showing the citrine level gate. FIG. 8E is biological replicate PGK promoter screen reproducibility (for hits above the threshold: pearson r²=0.27 for repression hits; for all data, including noise under the hit threshold: pearson r²=0.11 for all data). Although it is possible to detect activators at the PGK promoter, the dynamic range is very small (ten of the strongest activating tiles at the minCMV promoter (black dots) are very close to the random controls (grey dots)). FIG. 8F is validation screen biological replicate reproducibility of tiles that were hits in both the PGK and pEF promoter screens. FIG. 8G is tiling plots for MEF2C and KLF11 (n=2, dots are the mean, bars the range). PGK repression domains annotated in teal. FIG. 8H is comparison of each repression domain's max tile average repression scores in PGK (x-axis) and pEF promoter screen (y-axis). Dashed lines are the hits thresholds for each screen.

[0036] FIGS. 9A-9G show mutant AD screen's separation purity, reproducibility, and validation. FIG. 9A is citrine distributions after 2 days recruitment to minCMV of UniProt-annotated Q-rich ADs with or without an 11 aa acidic sequence from VP64 (n=2). FIG. 9B, top, is deletion scan across P53's AD (SEQ ID NO: 28211): Deletions that caused a complete loss of activation, meaning they are below the experimentally validated activation threshold (dotted line, determined in FIG. 1G for the screen that included these constructs), and deletions that retained some activation (n=2, dots are the mean, bars the range). FIG. 9B, bottom, is individual validations of tiles including 15 aa deletions (deleted sequences shown above each panel—SEQ ID NOs: 28207-28210, left to right). Untreated cells (gray) and dox-treated cells (colors) shown with two biological replicates in each condition. Vertical line is the citrine gate used to determine the fraction of cells ON (written above each distribution). FIG. 9C is flow cytometry data showing citrine reporter distributions for the Mutant AD transcriptional activity screen on the day localization was induced with dox (Pre-induction), on the day of magnetic separation (Pre-separation), and after separation (Bound). Overlapping histograms are shown for 2 separately transduced biological replicates. The average percentage of cells ON is shown to the right of the vertical line showing the citrine level gate. FIG. 9D is biological replicate Mutant AD transcriptional activity screen reproducibility. FIG. 9E is comparison between individually recruited measurements and Mutant AD screen measurements (n=2, dots are the mean, bars the range) with logistic model fit plotted as solid line (r²=0.95, n=23). FIG. 9F is Alexa Fluor 647 distributions from anti-FLAG staining. FIG. 9G is biological replicate Mutant AD protein expression screen reproducibility.

[0037] FIGS. 10A-10F are mutant AD screen follow-up. FIG. 10A is a deletion scan across SMARCA4's AD (SEQ ID NO: 532) (n=2, dots are the mean, bars the range). Predicted secondary structure (prediction from whole protein sequence using AlphaFold) shown below, where green regions are alpha helices. Deletions that are significantly different from WT are colored in gray (p<0.05, one-tailed z-test). FIG. 10B is enrichment scores comparing WT versus the W, F, Y, L mutant of DUX4 tile 35 (p-value=3.3e-13, one-tailed z-test, n=2, dots are the mean, bars the range). FIG. 10C is violin plots of average FLAG enrichment scores from 2 biological replicates binned by each sublibrary. Dashed line represents the hit threshold for this screen. P-values computed from Mann-Whitney one-sided U tests. Boxes: median and interquartile range (IQR); whiskers: Q1-1.5*IQR and +Q3. FIG. 10D is correlations between each tile's activation strength in the minCMV validation screen and the count of indicated aa. FIG. 10E is a boxplot of acidic count for each mutant's activation category (Decrease n=33, No change n=18). Mann-Whitney one-sided U test, p-value=2.25e-3. Boxes: median and interquartile range (IQR); whiskers: Q1-1.5*IQR and +Q3. FIG. 10F is a boxplot of average activation enrichment scores with interquartile range shown for tiles that contain a single sequence across each category (Acidic n=9 S, P, Q n=9, Mixed n=64). P-values computed from Mann-Whitney one-sided U tests. Boxes: median and interquartile range (IQR); whiskers: Q1-1.5*IQR and +Q3.

[0038] FIGS. 11A-11G are distribution of tile's predicted secondary structure, mutant RD screen's separation purity and reproducibility, and HES family tiling plot examples. FIG. 11A is distributions of activating and repressing tile's fraction of the sequence predicted to be structured from AlphaFold's predictions on the full length protein sequence. p-value=4.1e-8 (Mann Whitney U test, one-sided, boxes: median and interquartile range (IQR); whiskers: Q1-1.5*IQR and +Q3). FIG. 11B is flow cytometry data showing citrine reporter distributions for the Mutant RD transcriptional activity screen on the day localization was induced with dox (Pre-induction), on the day of magnetic separation (Pre-separation), and after separation (Bound). Overlapping histograms are shown for 2 separately transduced biological replicates. The average percentage of cells ON is shown to the right of the vertical line showing the citrine level gate. FIG. 11C is biological replicate Mutant RD transcriptional activity screen reproducibility. FIG. 11D is a comparison between individually recruited measurements and mutant RD screen measurements (n=2, dots are the mean, bars the range) with logistic model fit plotted as solid line (r²=0.91, n=9). There are significantly fewer points for this plot compared to others because unlike the mutant AD screen which included all hits that contained a W, F, Y or L, the mutant RD screen had much fewer hits that overlapped the set of validations since only the strongest tiles within domains or hits that contained co-repressor binding motifs were included in the library design FIG. 11E is Alexa Fluor 647 staining distributions for the Mutant RD FLAG protein expression screen. FIG. 11F is biological replicate Mutant RD protein expression screen reproducibility. FIG. 11G is tiling plots for all 7 HES family members (n=2, dots are the mean, bars the range).

[0039] FIGS. 12A-12I are mutant RD screen follow-up. FIG. 12A is repression enrichment scores for a subset of repressing tiles (n indicated in figure) that contain a relatively more flexible CtBP-binding motif (regex shown above), excluding the more refined CtBP-binding motif (regex shown on second line). Mutants have their binding motifs replaced with alanines (p-values computed from one-tailed z-test). FIG. 12B is repression enrichment scores for repressing tiles that contain a flexible SUMO-binding motif (fraction of non-hit sequences containing motif=0.155). (n=2, dots are the mean, bars the range, p-values computed from one-tailed z-test). FIG. 12C is the fraction of AD deletion sequences containing a SUMOylation motif binned according to their effect on activity (yellow=no change on activation relative to WT, gray=decreased activation). 11 total ADs. FIG. 12D is a deletion scan across TCF15's RD (SEQ ID NO: 1947) (n=2, dots are the mean, bars the range). Deletions are colored by whether they were above or below the experimentally validated detection threshold for repression (dotted line). AlphaFold60's predicted secondary structure (prediction from whole protein sequence) shown below where green regions are alpha helices. Annotations shown from protein accession NP_004600.3 FIG. 12E is distribution of bHLH classifications of RDs overlapping bHLH UniProt annotations. Classifications taken from Torres-Machorro, A. L. Int. J. Mol. Sci. 22, (2021), incorporated herein by reference in its entirety. FIG. 12F is a deletion scan across REST's RD (n=2, dots are the mean, bars the range). Deletions are colored by whether they were above or below the validated threshold. AlphaFold's predicted secondary structure (prediction from whole protein sequence) shown below where green regions are alpha helices and orange arrows are beta sheets. FIG. 12G is tiling plots for IKZF family members (n=2, dots are the mean, bars the range. FIG. 12H is deletion scan across IKZF1, 2 and 4's RDs (n=2, dots are the mean, bars the range). Deletions are colored by whether they were above or below the validated threshold. FIG. 12I is a cartoon model of potential mechanisms corresponding to the RD categories in FIG. 3F.

[0040] FIGS. 13A-13G are bifunctional domain deletion scan screen's separation purity, reproducibility, and examples. FIG. 13A is counts of bifunctional domains from proteins that contain the indicated DNA binding domains. Homeodomains are enriched among TFs containing bifunctional domains compared to the frequency of homeodomains among all TFs (p=2.5e-4, Fisher's exact test, two-sided). FIG. 13B is a tiling plot for NANOG (n=2, dots are the mean, bars the range). FIG. 13C is flow cytometry data showing citrine reporter distributions for the bifunctional deletion scan minCMV promoter screen on the day localization was induced with dox (Pre-induction), on the day of magnetic separation (Pre-separation), and after separation marker (Bound). Overlapping histograms are shown for 2 separately transduced biological replicates. The average percentage of cells ON is shown to the right of the vertical line showing the citrine level gate. FIG. 13D is a biological replicate bifunctional deletion scan minCMV promoter screen reproducibility. FIG. 13E is citrine reporter distributions for the bifunctional deletion scan pEF promoter screen (n=2). FIG. 13F is biological replicate bifunctional deletion scan pEF promoter screen reproducibility. FIG. 13G is example of a bifunctional domain from NANOG (SEQ ID NO: 238) with independent activating and repressing regions (n=2, dots are the mean, bars the range). Note, deletion of the sequence for activation, caused an increase in repression, and vice-versa.

[0041] FIGS. 14A-14F are examples of bifunctional domain sequences at three different promoters. FIG. 14A is a tiling plot for LEUTX (n=2, dots are the mean, bars the range). FIG. 14B is a deletion scan across one of LEUTX's bifunctional tiles (SEQ ID NO: 757) (n=2, dots are the mean, bars the range). Deletions were binned by their statistical significance into those that decreased activity (gray lines) compared to the WT tile and those that did not (one-tailed z-test). The sequence for another gene family member, ARGFX, is highlighted in teal. FIG. 14C is bifunctional domain region location categories. Overlapping regions were defined as any tile that contained a deletion that facilitated activation and repression. FIG. 14D is citrine distributions of ARGFX-161:240 recruited to minCMV (n=2, left), and recruited to pEF (n=2, right). FIG. 14E is citrine distributions of bifunctional tiles identified from minCMV and pEF CRTF tiling screens recruited to PGK promoter (n=2). Asterisks denote p-values<0.05 for the percentage of cells on (right) and off (left) in the dox population (one-sided Welch's t-test, unequal variance). ARGFX-191:270 off p=0.0003, on p=0.02; FOXO1-561:640 off p=0.017, on p=2.44e-5; NANOG 191:270 off p=2.12e-5, on p=0.0002; NANOG 225:304 off p=0.202, on p=0.0004; KLF7 1:80 off p=0.99, on p=0.0005. FIG. 14F is comparison between set of proteins screened in Alerasool et al. (See, Alerasool, N., et al., Mol. Cell 82, 393 677-695.e7 (2022)), and this study.

[0042] FIG. 15 is a schematic of high-throughput recruitment (HT-recruit) to quantify transcriptional effector function at scale while varying the context of DNA-binding domains (DBDs), cell type, and target reporters or endogenous genes. A pooled library of tiles is synthesized as 300-mer DNA oligonucleotides, cloned downstream of the doxycycline (dox)-inducible rTetR DNA-binding domain (DBD) or dCas9, and delivered to K562 cells at a low multiplicity of infection (MOI) such that the majority of cells express a single DBD-domain fusion. The target gene (inset) can be silenced or activated by recruitment of repressor or activator domains to the promoter. The synthetic reporters can be driven by different promoters and encode a synthetic surface marker (Igκ-hIgG1-Fc-PDGFRβ, purple) and fluorescent marker (Citrine, yellow), separated by a T2A self-cleaving peptide (gray). These reporters are stably integrated into the AAVS1 safe harbor locus using TALEN-mediated homology directed repair. The endogenous target genes encode for surface markers. After recruitment of Pfam domains, ON and OFF cells were magnetically separated using beads that bind these synthetic or endogenous surface markers (when stained with antibodies), and the domains were sequenced in the Bound and Unbound populations to compute enrichments.

[0043] FIG. 16 is a schematic of lentiviruses used for HT-recruit with dCas9 to target endogenous genes. One lentivirus encodes dCas9 and a cloning site for the library of protein sequences, and the second delivers an sgRNA that targets the transcriptional start site of an endogenous gene.

[0044] FIG. 17 is graphs of the validation of sgRNAs to silence or repress endogenous surface markers with known effector domains. Expression of endogenous surface marker genes CD2 and CD43 in K562 cells as measured by immunostaining and flow cytometry. dCas9 fusions and sgRNAs were delivered by lentivirus and selected for by blasticidin and puromycin. Data shown after gating for sgRNA delivery (mCherry⁺ in CD43 and GFP⁺ in CD2 samples) and for dCas9 (BFP⁺) (n=1 infection replicate).

[0045] FIGS. 18A-18E show dCas9 fusions to tiles of all human chromatin regulator and transcription factors uncovers unannotated effectors. FIG. 18A is a schematic of a library tiling all human chromatin regulator and transcription factor (CR & TF) proteins in 80 amino acid tiles with a 10 amino acid step size (n=128,565 elements) fused to dCas9 and used to target CD43 with sg15 and CD2 with sg717. FIG. 18B shows dCas9 recruitment of CR & TF tiles to CD2 compared with rTetR recruitment to minCMV. Dashed lines show hit threshold at 2 standard deviations below the median of the random controls (n=2 replicates per screen). FIG. 18C shows tiling of SWI/SNF proteins SMARCA4 and SMARCC2, and the PHD protein JADE1. Each horizontal line is a tile, and vertical bars show the range (n=2 screen replicates). Dashed horizontal line is the hit calling threshold based on random controls. UniProt annotations and Pfam domains are shown below. FIG. 18D shows the comparison of dCas9 recruitment to CD43 with rTetR recruitment to pEF1a. Dashed lines show hit threshold at 2 standard deviations above the median of the random controls (n=2 replicates per screen). FIG. 18E is tiling of methyl-binding domain related proteins GATAD2B and MBD3. Each horizontal line is a tile, and vertical bars show the range (n=2 screen replicates). Dashed horizontal line is the hit calling threshold based on random controls.

[0046] FIGS. 19A-19E show the CRISPR HT-recruit of library tiling human transcription factors and chromatin regulators. FIG. 19A is replicate correlation of CR & TF library fused to dCas9 and recruited to CD43 or CD2 in K562 cells. Hit threshold shown at 2 standard deviations above (for CD43 screen) or below (CD2) the median of the random controls. FIG. 19B is ranking of tiles and random controls by the sum of their mean repression scores from the pEF and CD43 screens (n=2 replicates per screen). The ZNF705E tile is 99% identical to the ZNF705B/D/F KRAB described earlier, which was not itself included in the library. FIG. 19C is tiling of HLH protein NeuroG2. Each horizontal line is a tile, and vertical bars show the range (n=2 screen replicates). Blue lines show repression of pEF and orange lines show activation of CD2. Dashed horizontal line is the hit calling threshold based on random controls. Red box shows shared hit region for both repression and activation. UniProt annotations and Pfam domains are shown below. FIG. 19D is tiling of HLH protein ASCL4. FIG. 19E is a comparison of dCas9 recruitment to CD2 with rTetR recruitment to pEF1a. Dashed lines show hit threshold at 2 standard deviations below or above the median of the random controls (n=2 replicates per screen). Some example hits are labeled with their protein, and the labels are orange for HLH proteins.

### DETAILED DESCRIPTION

[0047] Human gene expression is regulated by over 2,000 transcription factors and chromatin regulators. Effector domains within these proteins can activate or repress transcription. However, for many of these regulators it is unknown what type of effector domains they contain, their location in the protein, their activation and repression strengths, and the sequences that are necessary for their functions. Here, the effector activity of >100,000 protein fragments tiling across most chromatin regulators and transcription factors in human cells (2,047 proteins) was systematically measured. By testing the effect they have when recruited at reporter genes, 374 activation domains and 715 repression domains were identified, ˜80% of which were not previously known. Rational mutagenesis and deletion scans across the effector domains revealed aromatic and/or leucine residues interspersed with acidic, proline, serine, and/or glutamine residues facilitate activation domain activity. Additionally, most repression domain sequences contained either sites for SUMOylation, short interaction motifs for recruiting co-repressors, or structured binding domains for recruiting other repressive proteins. Surprisingly, bifunctional domains were discovered that can both activate and repress, some of which dynamically split a cell population into high- and low-expression subpopulations.

[0048] The provided catalog of effector domains, which when fused onto DNA binding domains, can be used to engineer synthetic transcription factors. These find use to perform targeted and tunable regulation of gene expression in cells (e.g., eukaryotic cells). A high-throughput platform was used to screen and characterize tens of thousands of synthetic transcription factors in cells. These synthetic transcription factors are fusions between a DNA binding domain and a transcriptional effector domain. The targeting of these fusions generates local regulation of mRNA transcription, either negatively or positively depending on the effector domain. Some of these synthetic transcription factors mediate long-term epigenetic regulation that persists after the factor itself has been released from the target.

[0049] Previously, a limited number of transcriptional effector domains were available for the engineering of synthetic transcription factors. A high-throughput approach was used to screen and quantify the function of transcriptional effectors domains, identifying domains that can upregulate or downregulate transcription in a targeted manner when fused onto a DNA binding domain. This process also finds use to identify mutants of effector domains with enhanced activity. These effector domains find use to engineer synthetic transcription factors for applications in gene and cell therapy, synthetic biology, and functional genomics.

[0050] Exemplary applications include, but are not limited to: targeted repression/activation of endogenous genes with fusions of programmable DNA binding domains (e.g., dCas9, dCas12a, zinc finger, TALE) to transcriptional effector domains; gene and cell therapy (e.g., to silence a pathogenic transcript in a patient) or in research; perturbation of the expression of multiple genes simultaneously (e.g., to perform high-throughput genetic interaction mapping with CRISPRi/a screens using multiple guide RNAs) and use as synthetic transcription factors in genetic circuits, e.g., inducible gene expression or more complex circuits, which find use in gene therapy (e.g., AAV delivery of antibodies) and cell therapy (e.g., ex vivo engineering of CAR-T cells) to achieve therapeutic gene expression outputs in response to environmental and small molecule inputs.

[0051] The new transcriptional effector domains provided herein have several advantages for applications that rely on synthetic transcription factors. In some embodiments, the domains are extracted from human proteins, which provides the advantage of reducing immunogenicity in comparison to viral effector domains. Most of the domains generated have not been reported as transcriptional effectors previously. In addition, a high-throughput process may be used for testing mutations in these domains in order to identify enhanced variants.

### 1. DEFINITIONS

[0052] The terms “comprise(s),” “include(s),” “having,” “has,” “can,” “contain(s),” and variants thereof, as used herein, are intended to be open-ended transitional phrases, terms, or words that do not preclude the possibility of additional acts or structures. As used herein, comprising a certain sequence or a certain SEQ ID NO usually implies that at least one copy of said sequence is present in recited peptide or polynucleotide. However, two or more copies are also contemplated. The singular forms “a,” “and” and “the” include plural references unless the context clearly dictates otherwise. The present disclosure also contemplates other embodiments “comprising,” “consisting of” and “consisting essentially of,” the embodiments or elements presented herein, whether explicitly set forth or not.

[0053] For the recitation of numeric ranges herein, each intervening number there between with the same degree of precision is explicitly contemplated. For example, for the range of 6-9, the numbers 7 and 8 are contemplated in addition to 6 and 9, and for the range 6.0-7.0, the number 6.0, 6.1, 6.2, 6.3, 6.4, 6.5, 6.6, 6.7, 6.8, 6.9, and 7.0 are explicitly contemplated.

[0054] Unless otherwise defined herein, scientific, and technical terms used in connection with the present disclosure shall have the meanings that are commonly understood by those of ordinary skill in the art. For example, any nomenclature used in connection with, and techniques of, cell and tissue culture, molecular biology, immunology, genetics and protein and nucleic acid chemistry and hybridization described herein are those that are well known and commonly used in the art. The meaning and scope of the terms should be clear; in the event, however of any latent ambiguity, definitions provided herein take precedent over any dictionary or extrinsic definition. Further, unless otherwise required by context, singular terms shall include pluralities and plural terms shall include the singular.

[0055] “Heterologous” as used herein, refers to a macromolecules and compounds (e.g., nucleic acids, proteins, polypeptides, etc.) which originate from a foreign source (or species) or, if from the same source, is modified from its original form. As such, when used in the context of a nucleic acid or polypeptide heterologous refers to a nucleic acid or protein that is not normally found in a given cell in nature. The term encompasses a nucleic acid or polypeptide wherein at least one of the following is true: (a) a nucleic acid or polypeptide that is exogenously introduced into a given cell; (b) the nucleic acid or polypeptide is recombinant or was produced by synthetic means; and (c) the nucleic acid or polypeptide may comprise sequences, segments, domains, or other portions that are not found in the same relationship to each other in nature.

[0056] As used herein, a “nucleic acid” or a “nucleic acid sequence” refers to a polymer or oligomer of pyrimidine and/or purine bases, preferably cytosine, thymine, and uracil, and adenine and guanine, respectively (See Albert L. Lehninger, Principles of Biochemistry, at 793-800 (Worth Pub. 1982)). The present technology contemplates any deoxyribonucleotide, ribonucleotide, or peptide nucleic acid component, and any chemical variants thereof, such as methylated, hydroxymethylated, or glycosylated forms of these bases, and the like. The polymers or oligomers may be heterogenous or homogenous in composition and may be isolated from naturally occurring sources or may be artificially or synthetically produced. In addition, the nucleic acids may be DNA or RNA, or a mixture thereof, and may exist permanently or transitionally in single-stranded or double-stranded form, including homoduplex, heteroduplex, and hybrid states. In some embodiments, a nucleic acid or nucleic acid sequence comprises other kinds of nucleic acid structures such as, for instance, a DNA/RNA helix, peptide nucleic acid (PNA), morpholino nucleic acid (see, e.g., Braasch and Corey, Biochemistry, 41(14): 4503-4510 (2002)) and U.S. Pat. No. 5,034,506), locked nucleic acid (LNA; see Wahlestedt et al., Proc. Natl. Acad. Sci. U.S.A., 97: 5633-5638 (2000)), cyclohexenyl nucleic acids (see Wang, J. Am. Chem. Soc., 122: 8595-8602 (2000)), and/or a ribozyme. Hence, the term “nucleic acid” or “nucleic acid sequence” may also encompass a chain comprising non-natural nucleotides, modified nucleotides, and/or non-nucleotide building blocks that can exhibit the same function as natural nucleotides (e.g., “nucleotide analogs”); further, the term “nucleic acid sequence” as used herein refers to an oligonucleotide, nucleotide or polynucleotide, and fragments or portions thereof, and to DNA or RNA of genomic or synthetic origin, which may be single or double-stranded, and represent the sense or antisense strand. The terms “nucleic acid,” “polynucleotide,” “nucleotide sequence,” and “oligonucleotide” are used interchangeably. They refer to a polymeric form of nucleotides of any length, either deoxyribonucleotides or ribonucleotides, or analogs thereof.

[0057] A “peptide” or “polypeptide” is a linked sequence of two or more amino acids linked by peptide bonds. The peptide or polypeptide can be natural, synthetic, or a modification or combination of natural and synthetic. Polypeptides include proteins such as binding proteins, receptors, and antibodies. The proteins may be modified by the addition of sugars, lipids or other moieties not included in the amino acid chain. The terms “polypeptide” and “protein,” are used interchangeably herein.

[0058] As used herein, the term “percent sequence identity” refers to the percentage of nucleotides or nucleotide analogs in a nucleic acid sequence, or amino acids in an amino acid sequence, that is identical with the corresponding nucleotides or amino acids in a reference sequence after aligning the two sequences and introducing gaps, if necessary, to achieve the maximum percent identity. Hence, in case a nucleic acid according to the technology is longer than a reference sequence, additional nucleotides in the nucleic acid, that do not align with the reference sequence, are not taken into account for determining sequence identity. A number of mathematical algorithms for obtaining the optimal alignment and calculating identity between two or more sequences are known and incorporated into a number of available software programs. Examples of such programs include CLUSTAL-W, T-Coffee, and ALIGN (for alignment of nucleic acid and amino acid sequences), BLAST programs (e.g., BLAST 2.1, BL2SEQ, and later versions thereof) and FASTA programs (e.g., FASTA3x, FAS™, and SSEARCH) (for sequence alignment and sequence similarity searches). Sequence alignment algorithms also are disclosed in, for example, Altschul et al., J. Molecular Biol., 215(3): 403-410 (1990), Beigert et al., Proc. Natl. Acad. Sci. USA, 106(10): 3770-3775 (2009), Durbin et al., eds., Biological Sequence Analysis: Probabilistic Models of Proteins and Nucleic Acids, Cambridge University Press, Cambridge, UK (2009), Soding, Bioinformatics, 21(7): 951-960 (2005), Altschul et al., Nucleic Acids Res., 25(17): 3389-3402 (1997), and Gusfield, Algorithms on Strings, Trees and Sequences, Cambridge University Press, Cambridge UK (1997)).

[0059] As used herein, “treat,” “treating,” and the like means a slowing, stopping, or reversing of progression of a disease or disorder. The term also means a reversing of the progression of such a disease or disorder to a point of eliminating or greatly reducing the symptoms. As such, “treating” means an application or administration of the compositions or conjugates described herein to a subject, where the subject has a disease or a symptom of a disease, where the purpose is to cure, heal, alleviate, relieve, alter, remedy, ameliorate, improve, or affect the disease or symptoms of the disease.

[0060] A “vector” or “expression vector” is a replicon, such as plasmid, phage, virus, or cosmid, to which another DNA segment, e.g., an “insert,” may be attached or incorporated so as to bring about the replication of the attached segment in a cell.

[0061] The term “wild-type” refers to a gene or a gene product that has the characteristics of that gene or gene product when isolated from a naturally occurring source. A wild-type gene is that which is most frequently observed in a population and is thus arbitrarily designated the “normal” or “wild-type” form of the gene. In contrast, the term “modified,” “mutant,” or “polymorphic” refers to a gene or gene product that displays modifications in sequence and or functional properties (e.g., altered characteristics) when compared to the wild-type gene or gene product. It is noted that naturally occurring mutants can be isolated; these are identified by the fact that they have altered characteristics when compared to the wild-type gene or gene product.

### 2. TRANSCRIPTION FACTORS

[0062] The present disclosure provides synthetic transcription factors comprising one or more transcriptional effector domains fused to a heterologous DNA binding domain. As used herein, the term “transcription factor” refers to a protein or polypeptide that interacts with, directly or indirectly, specific DNA sequences associated with a genomic locus or gene of interest to block or recruit RNA polymerase activity to the promoter site for a gene or set of genes.

[0063] In some embodiments the synthetic transcription factor comprises one or more activator domains, one or more repressor domains, or a combination thereof fused to a heterologous DNA binding domain. In some embodiments, the one or more activator domains or the one or more repressor domains comprises an amino acid sequence having at least 70% (e.g., at least 75%, at least 80%, at least 85%, at least 90%, at least 95%, at least 98%, at least 99%) identity to any of SEQ ID NOS: 1-12567 and 28214-28404. In some embodiments, the one or more activator domains or the one or more repressor domains comprises SEQ ID NOS: 1-12567 and 28214-28404. In some embodiments, the one or more activator domains or the one or more repressor domains comprises an amino acid sequence comprising at least 10, at least 20, at least 30, at least 40, at least 50, at least 60, or at least 70 contiguous amino acids of any one of SEQ ID NOS: 1-12567 and 28214-28404.

[0064] In some embodiments, the one or more activator domains comprises an amino acid sequence having at least 70% (e.g., at least 75%, at least 80%, at least 85%, at least 90%, at least 95%, at least 98%, at least 99%) identity to any of SEQ ID NOs: 31, 36, 111, 113, 153, 158, 165, 182, 184, 189, 224, 291, 311, 313, 352, 362, 367, 369, 375, 381, 407, 410, 415, 426, 430, 436, 472, 476, 478, 480, 483, 487-489, 494, 496, 498, 509, 512-517, 524, 526, 527, 530, 532, 533, 537, 541, 542, 545-547, 549, 552, 554, 557, 560-562, 565-568, 570-576, 578, 579, 580, 581, 582, 585, 587, 589, 590, 592, 595-598, 601, 603, 605, 607, 613, 617, 620, 622-624, 626, 627, 629, 630, 634-636, 639, 643, 646, 648, 651, 654, 658, 659, 662, 664, 666, 673, 675, 677, 678, 681, 684, 685, 686, 687, 689, 695, 696, 697, 699, 704, 705, 707-711, 713, 715, 716, 721, 723-725, 728, 729, 731-733, 735, 744, 746, 747, 753, 755, 760, 761, 764, 766-769, 773, and 775-984. In some embodiments, the one or more activator domains comprises SEQ ID NOs: 31, 36, 111, 113, 153, 158, 165, 182, 184, 189, 224, 291, 311, 313, 352, 362, 367, 369, 375, 381, 407, 410, 415, 426, 430, 436, 472, 476, 478, 480, 483, 487-489, 494, 496, 498, 509, 512-517, 524, 526, 527, 530, 532, 533, 537, 541, 542, 545-547, 549, 552, 554, 557, 560-562, 565-568, 570-576, 578, 579, 580, 581, 582, 585, 587, 589, 590, 592, 595-598, 601, 603, 605, 607, 613, 617, 620, 622-624, 626, 627, 629, 630, 634-636, 639, 643, 646, 648, 651, 654, 658, 659, 662, 664, 666, 673, 675, 677, 678, 681, 684, 685, 686, 687, 689, 695, 696, 697, 699, 704, 705, 707-711, 713, 715, 716, 721, 723-725, 728, 729, 731-733, 735, 744, 746, 747, 753, 755, 760, 761, 764, 766-769, 773, and 775-984. In some embodiments, the one or more activator domains comprises an amino acid sequence comprising at least 10, at least 20, at least 30, at least 40, at least 50, at least 60, or at least 70contiguous amino acids of any one of SEQ ID NOs: 31, 36, 111, 113, 153, 158, 165, 182, 184, 189, 224, 291, 311, 313, 352, 362, 367, 369, 375, 381, 407, 410, 415, 426, 430, 436, 472, 476, 478, 480, 483, 487-489, 494, 496, 498, 509, 512-517, 524, 526, 527, 530, 532, 533, 537, 541, 542, 545-547, 549, 552, 554, 557, 560-562, 565-568, 570-576, 578, 579, 580, 581, 582, 585, 587, 589, 590, 592, 595-598, 601, 603, 605, 607, 613, 617, 620, 622-624, 626, 627, 629, 630, 634-636, 639, 643, 646, 648, 651, 654, 658, 659, 662, 664, 666, 673, 675, 677, 678, 681, 684, 685, 686, 687, 689, 695, 696, 697, 699, 704, 705, 707-711, 713, 715, 716, 721, 723-725, 728, 729, 731-733, 735, 744, 746, 747, 753, 755, 760, 761, 764, 766-769, 773, and 775-984.

[0065] In some embodiments, at least one of the one or more activator domains comprises an amino acid sequence having at least 70% identity to any of SEQ ID NOs: 88, 144, 147, 148, 149, 234, 280 281, 282, 283, 302, 306, 307, 322, 355, 356, 440, 441, 442, 443, 444, 445, 446, 447, 448, 449, 477, 488, 501, 532, 548, 593, 610, 618, 676, 738, 757, and 28365-28404.

[0066] In some embodiments, the one or more activator domains comprises an amino acid sequence having at least 70% (e.g., at least 75%, at least 80%, at least 85%, at least 90%, at least 95%, at least 98%, at least 99%) identity to any of SEQ ID NOs: 12568-13273. In some embodiments, the one or more activator domains comprises SEQ ID NOs: 12568-13273.

[0067] In some embodiments, the one or more activator domains comprises an amino acid sequence having at least 70% (e.g., at least 75%, at least 80%, at least 85%, at least 90%, at least 95%, at least 98%, at least 99%) identity to any of SEQ ID NOs: 13274-17423. In some embodiments, the one or more activator domains comprises SEQ ID NOs: 13274-17423.

[0068] In some embodiments, the one or more activator domains comprises one or more of SEQ ID NOs: 17424-17841.

[0069] In some embodiments, the one or more repressor domains comprises an amino acid sequence having at least 70% (e.g., at least 75%, at least 80%, at least 85%, at least 90%, at least 95%, at least 98%, at least 99%) identity to any of SEQ ID NOs: 1036, 1054, 1055, 1069, 1120, 1144, 1182, 1183, 1200, 1208, 1314, 1318, 1366, 1402, 1417, 1442, 1516, 1518, 1543, 1598, 1627, 1655, 1665, 1667, 1670, 1706, 1710, 1711, 1735, 1738, 1742, 1747, 1748, 1752, 1756, 1763, 1777, 1783, 1786, 1789, 1793, 1794, 1808, 1811, 1822, 1831, 1838, 1839, 1854, 1859, 1862, 1865, 1866, 1869, 1870, 1872, 1875, 1883, 1889, 1891, 1893, 1901, 1902, 1905, 1907, 1910, 1912, 1913, 1914, 1915, 1916, 1922, 1923, 1927, 1930, 1934, 1940, 1944, 1946, 1948, 1951, 1952, 1956, 1957, 1968, 1969, 1972, 1987, 1992, 1994, 1996, 2004, 2007, 2010, 2017, 2022, 2029, 2033, 2041, 2042, 2043, 2048, 2050, 2051, 2053, 2057, 2064, 2095, 2107, 2112, 2119, 2123, 2128, 2131, 2139, 2150, 2157, 2160, 2163, 2176, 2182, 2188, 2190, 2192, 2193, 2194, 2205, 2206, 2207, 2208, 2211, 2212, 2213, 2216, 2218, 2221, 2224, 2227, 2231, 2232, 2239, 2245, 2246, 2254, 2262, 2263, 2265, 2271, 2274, 2275, 2277, 2278, 2282, 2283, 2288, 2292, 2295, 2296, 2298, 2302, 2312, 2313, 2316, 2320, 2321, 2323, 2324, 2325, 2334, 2338, 2341, 2348, 2361, 2364, 2365, and 2370-6094. In some embodiments, the one or more repressor domains comprises SEQ ID NOs: 1036, 1054, 1055, 1069, 1120, 1144, 1182, 1183, 1200, 1208, 1314, 1318, 1366, 1402, 1417, 1442, 1516, 1518, 1543, 1598, 1627, 1655, 1665, 1667, 1670, 1706, 1710, 1711, 1735, 1738, 1742, 1747, 1748, 1752, 1756, 1763, 1777, 1783, 1786, 1789, 1793, 1794, 1808, 1811, 1822, 1831, 1838, 1839, 1854, 1859, 1862, 1865, 1866, 1869, 1870, 1872, 1875, 1883, 1889, 1891, 1893, 1901, 1902, 1905, 1907, 1910, 1912, 1913, 1914, 1915, 1916, 1922, 1923, 1927, 1930, 1934, 1940, 1944, 1946, 1948, 1951, 1952, 1956, 1957, 1968, 1969, 1972, 1987, 1992, 1994, 1996, 2004, 2007, 2010, 2017, 2022, 2029, 2033, 2041, 2042, 2043, 2048, 2050, 2051, 2053, 2057, 2064, 2095, 2107, 2112, 2119, 2123, 2128, 2131, 2139, 2150, 2157, 2160, 2163, 2176, 2182, 2188, 2190, 2192, 2193, 2194, 2205, 2206, 2207, 2208, 2211, 2212, 2213, 2216, 2218, 2221, 2224, 2227, 2231, 2232, 2239, 2245, 2246, 2254, 2262, 2263, 2265, 2271, 2274, 2275, 2277, 2278, 2282, 2283, 2288, 2292, 2295, 2296, 2298, 2302, 2312, 2313, 2316, 2320, 2321, 2323, 2324, 2325, 2334, 2338, 2341, 2348, 2361, 2364, 2365, and 2370-6094. In some embodiments, the one or more repressor domains comprises an amino acid sequence comprising at least 10, at least 20, at least 30, at least 40, at least 50, at least 60, or at least 70 contiguous amino acids of any one of SEQ ID NOs: 1036, 1054, 1055, 1069, 1120, 1144, 1182, 1183, 1200, 1208, 1314, 1318, 1366, 1402, 1417, 1442, 1516, 1518, 1543, 1598, 1627, 1655, 1665, 1667, 1670, 1706, 1710, 1711, 1735, 1738, 1742, 1747, 1748, 1752, 1756, 1763, 1777, 1783, 1786, 1789, 1793, 1794, 1808, 1811, 1822, 1831, 1838, 1839, 1854, 1859, 1862, 1865, 1866, 1869, 1870, 1872, 1875, 1883, 1889, 1891, 1893, 1901, 1902, 1905, 1907, 1910, 1912, 1913, 1914, 1915, 1916, 1922, 1923, 1927, 1930, 1934, 1940, 1944, 1946, 1948, 1951, 1952, 1956, 1957, 1968, 1969, 1972, 1987, 1992, 1994, 1996, 2004, 2007, 2010, 2017, 2022, 2029, 2033, 2041, 2042, 2043, 2048, 2050, 2051, 2053, 2057, 2064, 2095, 2107, 2112, 2119, 2123, 2128, 2131, 2139, 2150, 2157, 2160, 2163, 2176, 2182, 2188, 2190, 2192, 2193, 2194, 2205, 2206, 2207, 2208, 2211, 2212, 2213, 2216, 2218, 2221, 2224, 2227, 2231, 2232, 2239, 2245, 2246, 2254, 2262, 2263, 2265, 2271, 2274, 2275, 2277, 2278, 2282, 2283, 2288, 2292, 2295, 2296, 2298, 2302, 2312, 2313, 2316, 2320, 2321, 2323, 2324, 2325, 2334, 2338, 2341, 2348, 2361, 2364, 2365, and 2370-6094.

[0070] In some embodiments, the one or more repressor domains comprises an amino acid sequence having at least 70% (e.g., at least 75%, at least 80%, at least 85%, at least 90%, at least 95%, at least 98%, at least 99%) identity to any of SEQ ID NOs: 17842-24889. In some embodiments, the one or more repressor domains comprises SEQ ID NOs: 17842-24889.

[0071] In some embodiments, the one or more repressor domains comprises one or more of SEQ ID NOs: 24890-25651.

[0072] In some embodiments, the one or more activator domains or the one or more repressor domains comprises an amino acid sequence having at least 70% (e.g., at least 75%, at least 80%, at least 85%, at least 90%, at least 95%, at least 98%, at least 99%) identity to any of the sequences found in SEQ ID NOs: 25652-28198. In some embodiments, the one or more activator domains or the one or more repressor domains comprises SEQ ID NOs: 25652-28198.

[0073] In some embodiments, the synthetic transcription factor comprises two or more transcription effector domains (e.g., activator domains, repressor domains, or a combination thereof) fused to a heterologous DNA binding domain. In some embodiments, the synthetic transcription factor comprises two or more activator domains or two or more repressors domains fused to a heterologous DNA binding domain. The two or more effector domains can be fused to the DNA binding domain in any orientation, and may be separated from each other with an amino acid linker. In select embodiments, the synthetic transcription factor comprises two or more transcription effector domains (e.g., activator domains, repressor domains, or a combination thereof) fused to a heterologous DNA binding domain.

[0074] In some embodiments, when the synthetic transcription factor comprises more than one transcription effector domains, the synthetic transcription factor may comprise at least one activator domain or at least one repressor domain as disclosed herein with at least one additional effector domain known in the art. See for example, Tycko J. et al., Cell. 2020 Dec 23;183(7):2020-2035, incorporated herein by reference in its entirety. In some embodiments, the one or more activator domain, the one or more repressor domain is identified by the methods described herein.

[0075] In some embodiments, when the synthetic transcription factor comprises more than one transcription effector domains, at least one of the one or more transcriptional effector domains comprising an effector domain as disclosed above and herein. For example, in some embodiments, at least one of the one or more transcriptional effector domains comprises an amino acid sequence having at least 70% identity to any of SEQ ID NOS: 1-12567 and 28214-28404.

[0076] The DNA binding domain is any polypeptide which is capable of binding double- or single-stranded DNA, generally or with sequence specificity. DNA binding domains include those polypeptides having helix-turn-helix motifs, zinc fingers, leucine zippers, HMG-box (high mobility group box) domains, winged helix region, winged helix-turn-helix region, helix-loop-helix region, immunoglobulin fold, B3 domain, Wor3 domain, TAL effector DNA-binding domain and the like. The heterologous DNA binding domains may be a natural binding domain. In some embodiments, the heterologous DNA binding domain comprises a programmable DNA binding domain, e.g., a DNA binding domain engineered, for example by altering one or more amino acids of a natural DNA binding domain to bind to a predetermined nucleotide sequence.

[0077] In some embodiments, the DNA binding domain is capable of binding directly to the target DNA sequences.

[0078] The DNA-binding domain may be derived from domains found in naturally occurring Transcription activator-like effectors (TALEs), such as AvrBs3, Hax2, Hax3 or Hax4 (Bonas et al. 1989. Mol Gen Genet 218(1): 127-36; Kay et al. 2005 Mol Plant Microbe Interact 18(8): 838-48). TALEs have a modular DNA-binding domain consisting of repetitive sequences of residues; each repeat region consists of 34 amino acids. A pair of residues at the 12th and 13th position of each repeat region determines the nucleotide specificity and combining of the regions allows synthesis of sequence-specific TALE DNA-binding domains. In some embodiments, the TALE DNA binding domains may be engineered using known methods to provide a DNA binding domain with chosen specificity for any target sequence. The DNA binding domain may comprise multiple (e.g., 2, 3, 4, 5, 6, 10, 20, or more) Tal effector DNA-binding motifs. In particular, any number of nucleotide-specific Tal effector motifs can be combined to form a sequence-specific DNA-binding domain to be employed in the present transcription factor.

[0079] In some embodiments, the DNA binding domain associates with the target DNA in concert with an exogenous factor.

[0080] In some embodiments, the DNA binding domain is derived from a Clustered Regularly Interspaced Short Palindromic Repeats associated (Cas) protein (e.g., catalytically dead Cas9) and associates with the target DNA through a guide RNA. The gRNA itself comprises a sequence complementary to one strand of the DNA target sequence and a scaffold sequence which binds and recruits Cas9 to the target DNA sequence. The transcription factors described herein may be useful for CRISPR interference (CRISPRi) or CRISPR activation (CRISPRa).

[0081] The guide RNA (gRNA) may be a crRNA, crRNA/tracrRNA (or single guide RNA, sgRNA). The gRNA may be a non-naturally occurring gRNA. The terms “gRNA,” “guide RNA” and “guide sequence” may be used interchangeably throughout and refer to a nucleic acid comprising a sequence that determines the binding specificity of the Cas protein. A gRNA hybridizes to (complementary to, partially or completely) the DNA target sequence.

[0082] The gRNA or portion thereof that hybridizes to the target nucleic acid (a target site) may be any length necessary for selective hybridization. gRNAs or sgRNA(s) can be between about 5 and about 100 nucleotides long, or longer (e.g., 5, 6, 7, 8, 9, 10, 11, 12, 13, 14, 15, 16, 17, 18, 19, 20, 21, 22, 23, 24, 25, 26, 27, 28, 29, 30, 31, 32, 33, 34, 35, 36, 37, 38, 39, 40, 41, 42, 43, 44, 45, 46, 47, 48, 49, 50, 51, 52, 53, 54, 55, 56, 57, 58, 59 60, 61, 62, 63, 63, 64, 65, 66, 67, 68, 69, 70, 71, 72, 73, 74, 75, 76, 77, 78, 79, 80, 81, 82, 83, 84, 85, 86, 87, 88, 89, 90, 91 92, 93, 94, 95, 96, 97, 98, 99, or 100 nucleotides in length, or longer).

[0083] To facilitate gRNA design, many computational tools have been developed (See Prykhozhij et al. (PLOS ONE, 10(3): (2015)); Zhu et al. (PLOS ONE, 9(9) (2014)); Xiao et al. (Bioinformatics. Jan 21 (2014)); Heigwer et al. (Nat Methods, 11(2): 122-123 (2014)). Methods and tools for guide RNA design are discussed by Zhu (Frontiers in Biology, 10 (4) pp 289-296 (2015)), which is incorporated by reference herein. Additionally, there are many publicly available software tools that can be used to facilitate the design of sgRNA(s); including but not limited to, Genscript Interactive CRISPR gRNA Design Tool, WU-CRISPR, and Broad Institute GPP sgRNA Designer. There are also publicly available pre-designed gRNA sequences to target many genes and locations within the genomes of many species (human, mouse, rat, zebrafish, C. elegans), including but not limited to, IDT DNA Predesigned Alt-R CRISPR-Cas9 guide RNAs, Addgene Validated gRNA Target Sequences, and GenScript Genome-wide gRNA databases.

[0084] The present disclosure also provides synthetic transcription factors comprising one or more transcriptional effector domains fused to an exogenous factor which associates with a second exogenous factor comprising a DNA binding domain. Such inducible systems include, but not limited to, tetracycline Tet,/DOX inducible systems, light inducible systems, Abscisic acid (ABA) inducible systems, cumate systems, 40HT/estrogen inducible systems, ecdysone-based inducible systems, and FKBP12/FRAP (FKBP12-rapamycin complex) inducible systems.

[0085] The transcription effector domain(s) and the DNA binding domain(s) may be fused in any orientation. In some embodiments, the transcription effector domain(s) are N-terminal to the DNA binding domain(s). In some embodiments, the transcription effector domain(s) are C-terminal to the DNA binding domain(s). For example, in some embodiments, the N-terminus of the transcription effector domain(s) are fused to the C-terminus of the DNA binding domain(s). In some embodiments, the C-terminus of the transcription effector domain(s) are fused to the N-terminus of the DNA binding domain(s). In some embodiments, the N-terminus of the transcription effector domain(s) are fused to the N-terminus of the DNA binding domain(s). In some embodiments, the C-terminus of the transcription effector domain(s) are fused to the C-terminus of the DNA binding domain(s).

[0086] The transcription effector domain(s) and the DNA binding domain(s) may be fused via a linker polypeptide. The linker polypeptide may have any of a variety of amino acid sequences. Proteins can be joined by a spacer peptide, generally of a flexible nature, although other chemical linkages are not excluded. Suitable linkers include polypeptides of between 4 amino acids and 100 amino acids in length. These linkers can be produced by using synthetic, linker-encoding oligonucleotides to couple the transcription effector domain(s) and the DNA binding domain(s), or can be encoded by a nucleic acid sequence encoding the transcription factors.

[0087] In some embodiments, the linker peptides are flexible linkers. The linking peptides may have virtually any amino acid sequence, with preferred linkers having a sequence that results in a generally flexible peptide. A variety of different linkers are suitable for use, including but not limited to, glycine-serine polymers, glycine-alanine polymers, and alanine-serine polymers. In some embodiments, the linker comprises at least one glycine and at least one serine. In some embodiments, the linker comprises an amino acid sequence consisting of (Gly2Ser) n, where n is the number of repeats comprising an integer from 2-20.

[0088] In some embodiments, the transcription factors comprise a nuclear localization sequence (NLS). The nuclear localization sequence may be appended, for example, to the N-terminus, a C-terminus, or a combination thereof of the transcription factor. The transcription factor may comprise two or more NLSs. The two or more NLSs may be in tandem, separated by a linker, at either end terminus of the transcription factor, or one or more may be embedded in the transcription factor (e.g., between the transcription effector domain(s) and the DNA binding domain(s)).

[0089] The nuclear localization sequence may comprise any amino acid sequence known in the art to functionally tag or direct a protein for import into a cell's nucleus (e.g., for nuclear transport). Usually, a nuclear localization sequence comprises one or more positively charged amino acids, such as lysine and arginine. The NLS may be appended to the nuclease by a linker. The linker may be a polypeptide of any amino acid sequence and length.

[0090] In some embodiments, the NLS is a monopartite sequence. A monopartite NLS comprise a single cluster of positively charged or basic amino acids. In some embodiments, the monopartite NLS comprises a sequence of K-K/R-X-K/R, wherein X can be any amino acid. Exemplary monopartite NLS sequences include those from the SV40 large T-antigen, c-Myc, and TUS-proteins. In some embodiments, the NLS is a bipartite sequence. Bipartite NLSs comprise two clusters of basic amino acids, separated by a spacer of about 9-12 amino acids. Exemplary bipartite NLSs include the nuclear localization sequences of nucleoplasmin, EGL-12, or bipartite SV40.

[0091] The transcription factors may comprise an epitope tag (e.g., 3xFLAG tag, an HA tag, a Myc tag, and the like). The epitope tags may be at the N-terminus, a C-terminus, or a combination thereof of the transcription factors. In some embodiments, the epitope tag may be adjacent, either upstream or downstream, to a nuclear localization sequence.

[0092] The transcription factors may comprise another protein or protein domain. For example, the transcription factors may be fused to another protein or protein domain that provides for tagging or visualization (e.g., GFP). The transcription factors may be fused to a protein or protein domain that has another functionality or activity useful to target to certain DNA sequences (e.g., nuclease activity such as that provide by FokI nuclease, protein modification activity such as histone modification activity including acetylation or deacetylation or demethylation or methyltransferase activity, base editing activity such as deaminase activity, DNA modifying activity such as DNA methylation activity, and the like).

[0093] In some embodiments, the transcription factors may be fused with one or more (e.g., two, three, four, or more) protein transduction domains or PTDs, also known as a CPP-cell penetrating peptide. A protein transduction domains is a polypeptide, polynucleotide, carbohydrate, or organic or inorganic compound that facilitates traversing a lipid bilayer, micelle, cell membrane, organelle membrane, or vesicle membrane. A PTD attached to another molecule, facilitates the molecule traversing a membrane, for example going from extracellular space to intracellular space, or cytosol to within an organelle. In some embodiments, a PTD is covalently linked to a terminus of the transcription factor (e.g., N-terminus, C-terminus, or both). In some embodiments, the PTD is inserted internally at a suitable insertion site. Examples of PTDs include but are not limited to a minimal undecapeptide protein transduction domain (corresponding to residues 47-57 of HIV-1 TAT comprising); a polyarginine sequence comprising a number of arginines sufficient to direct entry into a cell (e.g., 3, 4, 5, 6, 7, 8, 9, 10, or 10-50 arginines); a VP22 domain (Zender et al. (2002) Cancer Gene Ther. 9 (6): 489-96); a Drosophila Antennapedia protein transduction domain (Noguchi et al. (2003) Diabetes 52(7):1732-1737); a truncated human calcitonin peptide (Trehin et al. (2004) Pharm. Research 21:1248-1256); polylysine (Wender et al. (2000) Proc. Natl. Acad. Sci. USA 97:13003-13008); Transportan, and the like.

[0094] The present disclosure also provides nucleic acids encoding a synthetic transcription factor or a transcriptional effector (e.g., activator or repressor) domain, as disclosed herein. In some embodiments, the nucleic acid encodes one or more synthetic transcription factor or one or more effector domain.

[0095] Nucleic acids of the present disclosure can comprise any of a number of promoters known to the art, wherein the promoter is constitutive, regulatable or inducible, cell type specific, tissue-specific, or species specific. In addition to the sequence sufficient to direct transcription, a promoter sequence of the invention can also include sequences of other regulatory elements that are involved in modulating transcription (e.g., enhancers, Kozak sequences and introns). Many promoter/regulatory sequences useful for driving constitutive expression of a gene are available in the art and include, but are not limited to, for example, CMV (cytomegalovirus promoter), EF1a (human elongation factor 1 alpha promoter), SV40 (simian vacuolating virus 40 promoter), PGK (mammalian phosphoglycerate kinase promoter), Ubc (human ubiquitin C promoter), human beta-actin promoter, rodent beta-actin promoter, CBh (chicken beta-actin promoter), CAG (hybrid promoter contains CMV enhancer, chicken beta actin promoter, and rabbit beta-globin splice acceptor), TRE (Tetracycline response element promoter), H1 (human polymerase III RNA promoter), U6 (human U6 small nuclear promoter), and the like. Additional promoters that can be used for expression of the components of the present system, include, without limitation, cytomegalovirus (CMV) intermediate early promoter, a viral LTR such as the Rous sarcoma virus LTR, HIV-LTR, HTLV-1 LTR, Maloney murine leukemia virus (MMLV) LTR, myeoloproliferative sarcoma virus (MPSV) LTR, spleen focus-forming virus (SFFV) LTR, the simian virus 40 (SV40) early promoter, herpes simplex tk virus promoter, elongation factor 1-alpha (EF1-α) promoter with or without the EF1-α intron. Additional promoters include any constitutively active promoter. Alternatively, any regulatable promoter may be used, such that its expression can be modulated within a cell.

[0096] Moreover, inducible expression can be accomplished by placing the nucleic acid encoding such a molecule under the control of an inducible promoter/regulatory sequence. Promoters that are well known in the art can be induced in response to inducing agents such as metals, glucocorticoids, tetracycline, hormones, and the like, are also contemplated for use with the invention. Thus, it will be appreciated that the present disclosure includes the use of any promoter/regulatory sequence known in the art that is capable of driving expression of the desired protein operably linked thereto.

[0097] The present disclosure also provides for vectors containing the nucleic acids and cells containing the nucleic acids or vectors, thereof. The vectors may be used to propagate the nucleic acid in an appropriate cell and/or to allow expression from the nucleic acid (e.g., an expression vector). The person of ordinary skill in the art would be aware of the various vectors available for propagation and expression of a nucleic acid sequence.

[0098] To construct cells that express the present transcription factors, expression vectors for stable or transient expression of the present system may be constructed via conventional methods and introduced into cells. For example, nucleic acids encoding the components the disclose transcription factors, or other nucleic acids or proteins, may be cloned into a suitable expression vector, such as a plasmid or a viral vector in operable linkage to a suitable promoter. The selection of expression vectors/plasmids/viral vectors should be suitable for integration and replication in eukaryotic cells.

[0099] In certain embodiments, vectors of the present disclosure can drive the expression of one or more sequences in mammalian cells using a mammalian expression vector. Examples of mammalian expression vectors include pCDM8 (Seed, Nature (1987) 329:840, incorporated herein by reference) and pMT2PC (Kaufman, et al., EMBO J. (1987) 6:187, incorporated herein by reference). When used in mammalian cells, the expression vector's control functions are typically provided by one or more regulatory elements. For example, commonly used promoters are derived from polyoma, adenovirus 2,cytomegalovirus, simian virus 40, and others disclosed herein and known in the art. For other suitable expression systems for both prokaryotic and eukaryotic cells see, e.g., Chapters 16 and 17 of Sambrook, et al., MOLECULAR CLONING: A LABORATORY MANUAL. 2nd eds., Cold Spring Harbor Laboratory, Cold Spring Harbor Laboratory Press, Cold Spring Harbor, N.Y., 1989, incorporated herein by reference.

[0100] The vectors of the present disclosure may direct the expression of the nucleic acid in a particular cell type (e.g., tissue-specific regulatory elements are used to express the nucleic acid). Such regulatory elements include promoters that may be tissue specific or cell specific. The term “tissue specific” as it applies to a promoter refers to a promoter that is capable of directing selective expression of a nucleotide sequence of interest to a specific type of tissue (e.g., seeds) in the relative absence of expression of the same nucleotide sequence of interest in a different type of tissue. The term “cell type specific” as applied to a promoter refers to a promoter that is capable of directing selective expression of a nucleotide sequence of interest in a specific type of cell in the relative absence of expression of the same nucleotide sequence of interest in a different type of cell within the same tissue. The term “cell type specific” when applied to a promoter also means a promoter capable of promoting selective expression of a nucleotide sequence of interest in a region within a single tissue. Cell type specificity of a promoter may be assessed using methods well known in the art, e.g., immunohistochemical staining.

[0101] Additionally, the vector may contain, for example, some or all of the following: a selectable marker gene for selection of stable or transient transfectants in host cells; transcription termination and RNA processing signals; 5′- and 3′-untranslated regions; internal ribosome binding sites (IRESes), versatile multiple cloning sites; and reporter gene for assessing expression of the chimeric receptor. Suitable vectors and methods for producing vectors containing transgenes are well known and available in the art. Selectable markers include chloramphenicol resistance, tetracycline resistance, spectinomycin resistance, neomycin, streptomycin resistance, erythromycin resistance, rifampicin resistance, bleomycin resistance, thermally adapted kanamycin resistance, gentamycin resistance, hygromycin resistance, trimethoprim resistance, dihydrofolate reductase (DHFR), GPT; the URA3, HIS4, LEU2, and TRP1 genes of S. cerevisiae.

[0102] When introduced into a cell, the vectors may be maintained as an autonomously replicating sequence or extrachromosomal element or may be integrated into host DNA.

[0103] Thus, the disclosure further provides for cells comprising a synthetic transcription factor, a nucleic acid, or a vector, as disclosed herein.

[0104] Conventional viral and non-viral based gene transfer methods can be used to introduce the nucleic acids into cells, tissues, or a subject. Such methods can be used to administer the nucleic acids to cells in culture, or in a host organism. Non-viral vector delivery systems include DNA plasmids, cosmids, RNA (e.g., a transcript of a vector described herein), a nucleic acid, and a nucleic acid complexed with a delivery vehicle.

[0105] Viral vector delivery systems include DNA and RNA viruses, which have either episomal or integrated genomes after delivery to the cell. A variety of viral constructs may be used to deliver the present nucleic acids to the cells, tissues and/or a subject. Viral vectors include, for example, retroviral, lentiviral, adenoviral, adeno-associated and herpes simplex viral vectors. Nonlimiting examples of such recombinant viruses include recombinant adeno-associated virus (AAV), recombinant adenoviruses, recombinant lentiviruses, recombinant retroviruses, recombinant herpes simplex viruses, recombinant poxviruses, phages, etc. The present disclosure provides vectors capable of integration in the host genome, such as retrovirus or lentivirus. See, e.g., Ausubel et al., Current Protocols in Molecular Biology, John Wiley & Sons, New York, 1989; Kay, M. A., et al., 2001 Nat. Medic. 7(1):33-40; and Walther W. and Stein U., 2000 Drugs, 60(2):249-71, incorporated herein by reference.

[0106] The nucleic acids or transcription factors may be delivered by any suitable means. In certain embodiments, the nucleic acids or proteins thereof are delivered in vivo. In other embodiments, the nucleic acids or proteins thereof are delivered to isolated/cultured cells in vitro or ex vivo to provide modified cells useful for in vivo delivery to patients afflicted with a disease or condition.

[0107] Vectors according to the present disclosure can be transformed, transfected, or otherwise introduced into a wide variety of host cells. Transfection refers to the taking up of a vector by a cell whether or not any coding sequences are in fact expressed. Numerous methods of transfection are known to the ordinarily skilled artisan, for example, lipofectamine, calcium phosphate co-precipitation, electroporation, DEAE-dextran treatment, microinjection, viral infection, and other methods known in the art. Transduction refers to entry of a virus into the cell and expression (e.g., transcription and/or translation) of sequences delivered by the viral vector genome. In the case of a recombinant vector, “transduction” generally refers to entry of the recombinant viral vector into the cell and expression of a nucleic acid of interest delivered by the vector genome.

[0108] Methods of delivering vectors to cells are well known in the art and may include DNA or RNA electroporation, transfection reagents such as liposomes or nanoparticles to delivery DNA or RNA; delivery of DNA, RNA, or protein by mechanical deformation (see, e.g., Sharei et al. Proc. Natl. Acad. Sci. USA (2013) 110(6): 2082-2087, incorporated herein by reference); or viral transduction. In some embodiments, the vectors are delivered to host cells by viral transduction. Nucleic acids can be delivered as part of a larger construct, such as a plasmid or viral vector, or directly, e.g., by electroporation, lipid vesicles, viral transporters, microinjection, and biolistics (high-speed particle bombardment). Similarly, the construct containing the one or more transgenes can be delivered by any method appropriate for introducing nucleic acids into a cell. In some embodiments, the construct or the nucleic acid encoding the components of the present system is a DNA molecule. In some embodiments, the nucleic acid encoding the components of the present system is a DNA vector and may be electroporated to cells. In some embodiments, the nucleic acid encoding the components of the present system is an RNA molecule, which may be electroporated to cells.

[0109] Additionally, delivery vehicles such as nanoparticle- and lipid-based delivery systems can be used. Further examples of delivery vehicles include lentiviral vectors, ribonucleoprotein (RNP) complexes, lipid-based delivery system, gene gun, hydrodynamic, electroporation or nucleofection microinjection, and biolistics. Various gene delivery methods are discussed in detail by Nayerossadat et al. (Adv Biomed Res. 2012; 1: 27) and Ibraheem et al. (Int J Pharm. 2014 Jan 1;459(1-2):70-83), incorporated herein by reference.

[0110] As such, the disclosure provides an isolated cell comprising the vector(s) or nucleic acid(s) disclosed herein. Preferred cells are those that can be easily and reliably grown, have reasonably fast growth rates, have well characterized expression systems, and can be transformed or transfected easily and efficiently. Examples of suitable prokaryotic cells include, but are not limited to, cells from the genera Bacillus (such as Bacillus subtilis and Bacillus brevis), Escherichia (such as E. coli), Pseudomonas, Streptomyces, Salmonella, and Envinia. Suitable eukaryotic cells are known in the art and include, for example, yeast cells, insect cells, and mammalian cells. Examples of suitable yeast cells include those from the genera Kluyveromyces, Pichia, Rhino-sporidium, Saccharomyces, and Schizosaccharomyces. Exemplary insect cells include Sf-9 and HIS (Invitrogen, Carlsbad, Calif.) and are described in, for example, Kitts et al., Biotechniques, 14: 810-817 (1993); Lucklow, Curr. Opin. Biotechnol., 4: 564-572 (1993); and Lucklow et al., J. Virol., 67: 4566-4579 (1993), incorporated herein by reference. Desirably, the cell is a mammalian cell, and in some embodiments, the cell is a human cell. A number of suitable mammalian and human host cells are known in the art, and many are available from the American Type Culture Collection (ATCC, Manassas, Va.). Examples of suitable mammalian cells include, but are not limited to, Chinese hamster ovary cells (CHO) (ATCC No. CCL61), CHO DHFR-cells (Urlaub et al., Proc. Natl. Acad. Sci. USA, 97: 4216-4220 (1980)), human embryonic kidney (HEK) 293 or 293T cells (ATCC No. CRL1573), and 3T3 cells (ATCC No. CCL92). Other suitable mammalian cell lines are the monkey COS-1 (ATCC No. CRL1650) and COS-7 cell lines (ATCC No. CRL1651), as well as the CV-1 cell line (ATCC No. CCL70). Further exemplary mammalian host cells include primate, rodent, and human cell lines, including transformed cell lines. Normal diploid cells, cell strains derived from in vitro culture of primary tissue, as well as primary explants, are also suitable. Other suitable mammalian cell lines include, but are not limited to, mouse neuroblastoma N2A cells, HeLa, HEK, A549, HepG2, mouse L-929 cells, and BHK or HaK hamster cell lines.

[0111] Methods for selecting suitable mammalian cells and methods for transformation, culture, amplification, screening, and purification of cells are known in the art.

[0112] The present invention is also directed to compositions or systems comprising a synthetic transcription factor, a nucleic acid, a vector, or a cell, as described herein. In some embodiments, the compositions or system comprises two or more synthetic transcription factors, nucleic acids, vectors, or cells.

[0113] In some embodiments, the composition or system further comprises a gRNA. The gRNA may be encoded on the same nucleic acid as a synthetic transcription factor or a different nucleic acid. In some embodiments, the vector encoding a synthetic transcription factor may further encode a gRNA, under the same or different promoter. In some embodiments, the gRNA is encoded on its own vector, separated from that of the transcription factor.

### 3. METHODS OF MODULATING GENE EXPRESSION

[0114] The present disclosure also provides methods of modulating the expression of at least one target gene in a cell, the method comprising introducing into the cell one or more of the effector domains, at least one synthetic transcription factor, nucleic acid, vector, or composition or system as described herein. In some embodiments, the gene expression of at least two genes is modulated.

[0115] In some embodiments, the gene is an endogenous gene. In some embodiments, the gene is an exogenous gene. In some embodiments, the gene is on an exogenous vector. In some embodiments, the exogenous gene was introduced into the cell as part of a gene therapy regime. For example, a controllable and activatable vector expressing secreted hepatocyte growth factor has broad therapeutic potential due to its capacity to induce regeneration of health tissues when transduced into the tissue or interest or neighboring tissues (e.g., liver to regenerate damaged liver or kidney, heart for prevention of/and regeneration after heart attack, brain for neurogenesis in Alzheimer's and Parkinson's diseases).

[0116] Modulation of expression comprises increasing or decreasing gene expression compared to normal gene expression for the target gene. When the gene expression of at least two genes is modulation, both genes may have increased gene expression, both gene may have decreased gene expression, or one gene may have increased gene expression and the other may have decreased gene expression. To determine the level of gene expression modulation by a transcriptional effector or transcription factor, cells contacted with a transcriptional effector or transcription factor are compared to control cells, e.g., without the transcriptional effector or transcription factor, to examine the extent of inhibition or activation based on a measured value for gene expression (e.g., transcript levels or gene product (e.g., protein levels)).

[0117] In some embodiments, expression of the gene is reduced by about 10% (e.g., 90% of control expression), about 50% (e.g., 50% of control expression), about 20% (e.g., 80% of control expression), about 50% (e.g., 50% of control expression), or about 75-100% (e.g., 25% to 0% of control expression). In some embodiments, expression is increased by about 10% (e.g., 110% of control expression), about 20% (e.g., 120% of control expression), about 50% (e.g., 150% of control expression), about 100% (e.g., 200% of control expression), about 5-10 fold (e.g., 500-1000% of control expression), up to at least 100 fold or more.

[0118] The cell may be a prokaryotic or eukaryotic cell. In select embodiments, the cell is a eukaryotic cell. In certain embodiments, the cell is a human cell. In some embodiments, the cell is in vitro. In some embodiments, the cell is ex vivo.

[0119] In some embodiments, the cell is in an organism or host, such that introducing the disclosed systems, compositions, vectors into the cell comprises administration to a subject. The method may comprise providing or administering to the subject, in vivo, or by transplantation of ex vivo treated cells, at least one synthetic transcription factor, nucleic acid, vector, or composition or system as described herein.

[0120] A “subject” may be human or non-human and may include, for example, animal strains or species used as “model systems” for research purposes, such a mouse model, prokaryotic models (e.g., bacteria), archea, and single-celled eukaryotes (e.g., yeast). Likewise, subject may include either adults or juveniles (e.g., children). Moreover, subject may mean any living organism, preferably a mammal (e.g., human or non-human) that may benefit from the administration of compositions contemplated herein. Examples of mammals include, but are not limited to, any member of the Mammalian class: humans, non-human primates such as chimpanzees, and other apes and monkey species; farm animals such as cattle, horses, sheep, goats, swine; domestic animals such as rabbits, dogs, and cats; laboratory animals including rodents, such as rats, mice and guinea pigs, and the like. Examples of non-mammals include, but are not limited to, birds, fish, and the like. In one embodiment of the methods and compositions provided herein, the mammal is a human.

[0121] As used herein, the terms “providing”, “administering,” “introducing,” are used interchangeably herein and refer to the placement of the transcription factors of the disclosure, or nucleic acids encoding the transcription factors, into a subject by a method or route which results in at least partial localization to a desired site. The transcription factors of the disclosure, or nucleic acids encoding the transcription factors, can be administered by any appropriate route which results in delivery to a desired location in the subject.

[0122] The transcription factors, or nucleic acids encoding the transcription factors, may be administered to a cell or subject with a pharmaceutically acceptable carrier or excipient as a pharmaceutical composition. In some embodiments, the c transcription factors of the disclosure, or nucleic acids encoding the transcription factors, may be mixed, individually or in any combination, with a pharmaceutically acceptable carrier to form pharmaceutical compositions, which are also within the scope of the present disclosure.

[0123] The phrase “pharmaceutically acceptable,” refers to molecular entities and other ingredients of such compositions that are physiologically tolerable and do not typically produce untoward reactions when administered to a subject (e.g., a mammal, a human). Preferably, as used herein, the term “pharmaceutically acceptable” means approved by a regulatory agency of the Federal or a state government or listed in the U.S. Pharmacopeia or other generally recognized pharmacopeia for use in mammals, and more particularly in humans. “Acceptable” means that the carrier is compatible with the transcription factors of the disclosure, or nucleic acids encoding the transcription factors, and does not negatively affect the subject to which the composition(s) are administered. Any of the pharmaceutical compositions used in the present methods can comprise pharmaceutically acceptable carriers, excipients, or stabilizers in the form of lyophilized formations or aqueous solutions.

[0124] Pharmaceutically acceptable carriers, including buffers, are well known in the art, and may comprise phosphate, citrate, and other organic acids; antioxidants including ascorbic acid and methionine; preservatives; low molecular weight polypeptides; proteins, such as serum albumin, gelatin, or immunoglobulins; amino acids; hydrophobic polymers; monosaccharides; disaccharides; and other carbohydrates; metal complexes; and/or non-ionic surfactants. See, e.g., Remington: The Science and Practice of Pharmacy 20th Ed. (2000) Lippincott Williams and Wilkins, Ed. K. E. Hoover.

[0125] The route by which the transcription factors of the disclosure, or nucleic acids encoding the transcription factors, are administered and the form of the composition will dictate the type of carrier to be used. The transcription factors of the disclosure, or nucleic acids encoding the transcription factors, may be administered systemically or topically, and therefore, the composition may be in a variety of forms, suitable, for example, for systemic administration (e.g., oral, rectal, nasal, sublingual, buccal, implants, or parenteral injections) or topical administration (e.g., dermal, pulmonary, nasal, aural, ocular, liposome delivery systems, or iontophoresis).

[0126] The methods described herein for modulating gene expression allow for therapeutic applications, e.g., treatment of genetic diseases; cancer; fungal, protozoal, bacterial, and viral infections; ischemia; vascular disease; arthritis; immunological disorders; etc., as well as providing components for functional genomics assays, and methods for developing plants with altered phenotypes, including disease resistance, fruit ripening, sugar and oil composition, yield, and color.

[0127] In some embodiments, the gene is known to be associated with a disease or disorder. In some embodiments, the methods disclosed herein alleviate a symptom associated with the disease or disorder. Thus, the methods, transcription factors, and/or nucleic acids encoding the transcription factors disclosed herein may be used for therapeutic or prophylactic purposes.

[0128] The transcription factors, by nature of their DNA binding domains, can be designed to recognize any suitable target site, for regulation of expression of any endogenous gene of choice. Suitable genes to be regulated include, but are not limited to: cytokines, lymphokines, growth factors, mitogenic factors, chemotactic factors, onco-active factors, receptors, potassium channels, G-proteins, signal transduction molecules, and other disease-related genes. Examples of endogenous genes suitable for regulation include, but are not limited to: VEGF, CCR5, ERa, Her2/Neu, Tat, Rev, HBV C, S, X, and P, LDL-R, PEPCK, CYP7, Fibrinogen, ApoB, Apo E, Apo(a), renin, NF-κB, I-κB, TNF-α, FAS ligand, amyloid precursor protein, atrial naturetic factor, ob-leptin, ucp-1, IL-I, IL-2, IL-3, IL-4, IL-5, IL-6, IL-12, G-CSF, GM-CSF, Epo, PDGF, PAF, p53, Rb, fetal hemoglobin, dystrophin, eutrophin, GDNF, NGF, IGF-I, VEGF receptors fit and flk, topoisomerase, telomerase, bcl-2, cyclins, angiostatin, IGF, ICAM-I, STATS, c-myc, c-myb, TH, PTI-I, polygalacturonase, EPSP synthase, FAD2-1, delta-12 desaturase, delta-9 desaturase, delta-15 desaturase, acetyl-CoA carboxylase, acyl-ACP-thioesterase, ADP-glucose pyrophosphorylase, starch synthase, cellulose synthase, sucrose synthase, senescence-associated genes, heavy metal chelators, fatty acid hydroperoxide lyase, viral genes, protozoal genes, fungal genes, and bacterial genes.

[0129] In some embodiments, the transcription factors and resulting methods target a “disease-associated” gene. The term “disease-associated gene,” refers to any gene or polynucleotide whose gene products are expressed at an abnormal level or in an abnormal form in cells obtained from a disease-affected individual as compared with tissues or cells obtained from an individual not affected by the disease. A disease-associated gene may be expressed at an abnormally high level or at an abnormally low level, where the altered expression correlates with the occurrence and/or progression of the disease. A disease-associated gene also refers to a gene, the mutation or genetic variation of which is directly responsible or is in linkage disequilibrium with a gene(s) that is responsible for the etiology of a disease. Examples of genes responsible for such “single gene” or “monogenic” diseases include, but are not limited to, adenosine deaminase, α-1 antitrypsin, cystic fibrosis transmembrane conductance regulator (CFTR), β-hemoglobin (HBB), oculocutaneous albinism II (OCA2), Huntingtin (HTT), dystrophia myotonica-protein kinase (DMPK), low-density lipoprotein receptor (LDLR), apolipoprotein B (APOB), neurofibromin 1 (NF1), polycystic kidney disease 1 (PKD1), polycystic kidney disease 2 (PKD2), coagulation factor VIII (F8), dystrophin (DMD), phosphate-regulating endopeptidase homologue, X-linked (PHEX), methyl-CpG-binding protein 2 (MECP2), and ubiquitin-specific peptidase 9Y, Y-linked (USP9Y). Other single gene or monogenic diseases are known in the art and described in, e.g., Chial, H. Rare Genetic Disorders: Learning About Genetic Disease Through Gene Mapping, SNPs, and Microarray Data, Nature Education 1(1):192 (2008); Online Mendelian Inheritance in Man (OMIM); and the Human Gene Mutation Database (HGMD). Diseases caused by the contribution of multiple genes which lack simple (e.g., Mendelian) inheritance patterns are referred to in the art as a “multifactorial” or “polygenic” disease. Examples of multifactorial or polygenic diseases include, but are not limited to, asthma, diabetes, epilepsy, hypertension, bipolar disorder, and schizophrenia. Certain developmental abnormalities also can be inherited in a multifactorial or polygenic pattern and include, for example, cleft lip/palate, congenital heart defects, and neural tube defects. In another embodiment, the transcription factors and resulting methods target a cancer oncogene.

[0130] The amount of the transcription factors required for use in the disclosed methods will vary not only with the effector domains selected but also with the route of administration, the nature and/or symptoms of the disease and the age and condition of the patient and will be ultimately at the discretion of the attendant physician or clinician. The determination of effective dosage levels, that is the dosage levels necessary to achieve the desired result, can be accomplished by one skilled in the art using routine methods, for example, human clinical trials, in vivo studies, and in vitro studies. For example, useful dosages can be determined by comparing their in vitro activity, and in vivo activity in animal models.

[0131] It should be noted that the attending physician would know how to and when to terminate, interrupt, or adjust administration due to toxicity or organ dysfunctions. Conversely, the attending physician would also know to adjust treatment to higher levels if the clinical response were not adequate (precluding toxicity). The magnitude of an administrated dose in the management of the disorder of interest will vary with the severity of the symptoms to be treated and the route of administration. Further, the dose, and perhaps dose frequency, will also vary according to the age, body weight, and response of the individual patient. A program comparable to that discussed above may be used in veterinary medicine.

[0132] Regulation of gene expression in plants with transcriptional effectors can be used to engineer plants for traits such as increased disease resistance, modification of structural and storage polysaccharides, flavors, proteins, and fatty acids, fruit ripening, yield, color, nutritional characteristics, improved storage capability, and the like. In particular, the engineering of crop species for enhanced oil production, e.g., the modification of the fatty acids produced in oilseeds, is of interest. Thus, the methods, transcription factors, and/or nucleic acids encoding the transcription factors disclosed herein may be used for overall gene regulation in plants and for genetic engineering in plants.

### 4. KITS

[0133] Also within the scope of the present disclosure are kits including at least one or all of at least one nucleic acid encoding an effector domain, or a DNA binding domain, or a combination thereof, at least one synthetic transcription factor, or nucleic acid encoding thereof, vectors encoding at least one effector domain or at least one synthetic transcription factor, a composition or system as described herein, a cell comprising an effector domain, a DNA binding domain, a synthetic transcription factor, or a nucleic acid encoding any of thereof, a reporter cell as described herein and a two-part reporter gene as described herein or a nucleic acid encoding thereof.

[0134] The kits can also comprise instructions for using the components of the kit. The instructions are relevant materials or methodologies pertaining to the kit. The materials may include any combination of the following: background information, list of components, brief or detailed protocols for using the compositions, trouble-shooting, references, technical support, and any other related documents. Instructions can be supplied with the kit or as a separate member component, either as a paper form or an electronic form which may be supplied on computer readable memory device or downloaded from an internet website, or as recorded presentation.

[0135] It is understood that the disclosed kits can be employed in connection with the disclosed methods. The kit may include instructions for use in any of the methods described herein. The instructions can comprise a description of use of the components for the methods of identifying repressor domains or methods of modulating gene expression.

[0136] The kits provided herein are in suitable packaging. Suitable packaging includes, but is not limited to, vials, bottles, jars, flexible packaging, and the like.

[0137] Kits optionally may provide additional components such as buffers and interpretive information. Normally, the kit comprises a container and a label or package insert(s) on or associated with the container. In some embodiment, the disclosure provides articles of manufacture comprising contents of the kits described above.

[0138] The kit may further comprise a device for holding or administering the present system or composition. The device may include an infusion device, an intravenous solution bag, a hypodermic needle, a vial, and/or a syringe.

### 5. EXAMPLES

### Methods

[0139] Cell culture All experiments presented here were carried out in K562 cells (ATCC, CCL-243, female). Cells were cultured in a controlled humidified incubator at 37 C and 5% CO₂, in RPMI 1640 (Gibco, 11-875-119) media supplemented with 10% FBS (Takara, 632180), and 1% Penicillin Streptomycin (Gibco, 15-140-122). HEK293T-LentiX (Takara Bio, 632180, female) cells, used to produce lentivirus, as described below, were grown in DMEM (Gibco, 10569069) media supplemented with 10% FBS (Takara, 632180) and 1% Penicillin Streptomycin Glutamine (Gibco, 10378016). pEF and minCMV promoter reporter cell lines were generated by TALEN-mediated homology-directed repair to integrate donor constructs (pEF promoter: Addgene #161927, minCMV promoter: Addgene #161928) into the AAVS1 locus by electroporation of K562 cells with 1000 ng of reporter donor plasmid and 500 ng of each TALEN-L (Addgene #35431) and TALEN-R (Addgene #35432) plasmid (targeting upstream and downstream the intended DNA cleavage site, respectively). After 7 days, the cells were treated with 1000 ng/mL puromycin antibiotic for 5 days to select for a population where the donor was stably integrated in the intended locus. Fluorescent reporter expression was measured by microscopy and by flow cytometry. The PGK reporter cell line was generated by electroporation of K562 cells with 0.5 ug each of plasmids encoding the AAVS1 TALENs and 1 ug of donor reporter plasmid using program T-016 on the Nucleofector 2b (Lonza, AAB-1001). Cells were treated with 0.5 ug/mL puromycin for one week to enrich for successful integrants. The PGK reporter donor plasmid generated in this study is available from Addgene (Addgene #196545). These cell lines were not authenticated. All cell lines tested negative for mycoplasma.

[0140] TF tiling library design 1,294 human transcription factors (TFs) were selected from Lambert, S. A. et al. Cell 175, 598-599 (2018). To make this library's size feasible for high throughput measurements, 476 proteins previously characterized with HT-recruit (See, Tycko, J. et al. Cell 183, 2020-2035.e16 (2020), incorporated herein by reference in its entirety) were excluded: a set of 132 CRs and 344 KRAB-containing TFs. The canonical transcript of each gene was retrieved from Ensembl and chosen using the APPRIS principle transcript. If no APPRIS tag was found, the transcript was chosen using the TSL principle transcript. If no TSL tag was found, the longest transcript with a protein coding CDS was retrieved. The coding sequences were divided into 80 aa tiles with a 10 aa sliding window. For each gene, a final tile was included spanning from 80 aa upstream of the last residue to that last residue, such that the C-terminal region would be included in the library. Duplicate sequences were removed, sequences were codon matched for human codon usage, 7xC homopolymers were removed, BsmBI restriction sites were removed, rare codons (less than 10% frequency) were avoided, and the GC content was constrained to be between 20% and 75% in every 50 nucleotide window (performed with DNA chisel). To improve the coverage of this large library, it was subdivided into 3 smaller sub-libraries based on the three major classes of TFs: a 25,032 C2H2 ZF sub-library including all 406 C2H2 ZF TFs, a 9,757 Homeodomain and bHLH sub-library including all 304 Homeodomain and bHLH TFs, and a 31,664 member sub-library containing the rest of the 583 TFs.

[0141] One thousand random controls of 80 aa lacking stop codons were computationally generated as controls using the DNA chisel package's random_dna_sequence function and included in each sub-library. Four hundred seventy-three sequences that were found to be non-activators and forty-two sequences that were found to be activators in a previous minCMV Nuclear Pfam screen were included as negative and positive controls. Alternative codon usage (match_codon_usage, and use_best_codon functions) was used to re-code the controls in each sub-library to give the option of pooling the 3 sub-libraries and running the library as one 73,288 element screen.

[0142] One hundred additional controls were added to each sub-library to serve as fiduciary markers to aid comparing separately run screens. These controls were not recoded in each sub-library, and thus were repeated when pooling sub-libraries.

[0143] Fifty activation domains from forty-five proteins involved in transcriptional activation were curated from UniProt3. The UniProt database was queried for human proteins whose regions, motifs or annotations included the term “transcriptional activation” and then filtered for ADs that ranged in length from 30 to 95 aa. For ADs shorter than 95 aa, the protein sequence was extended equally on either side until it reached 95 aa. The protein sequences were reverse translated and further divided into 95 aa sequences with 15 aa deletions positioned with a 2 aa sliding window. Duplicate sequences were removed, sequences were codon matched for human codon usage, 7xC homopolymers were removed, BsmBI restriction sites were removed, rare codons (less than 10% frequency) were avoided, and the GC content was constrained to be between 20% and 75% in every 50 nucleotide window, performed with DNA chisel. Fifty yeast Gen4 controls were added, which included previously studied deletions. Two-thousand twenty-four library elements in total were added to the 31,664 element TF tiling sub-library.

[0144] CR tiling library design Candidate genes were initially chosen by including all members of the EpiFactors database, genes with gene name prefixes that matched any genes in the EpiFactors database, and genes with any of the following GO terms: GO:000785 (chromatin), GO:0035561 (regulation of chromatin binding), GO:0016569 (covalent chromatin modification), GO:1902275 (regulation of chromatin organization), GO:0003682 (chromatin binding), GO:0042393 (histone binding), GO:0016570 (histone modification), and GO:0006304 (DNA modification). Genes present in prior silencer tiling screens and genes present in the TF tiling screen were then filtered out. Biomart was used to identify and retrieve the canonical transcript, and chosen by (in order of priority) the APPRIS principal transcript, the TSL principal transcript, or the longest transcript with a protein coding CDS. Tiles for each of these DNA sequences were generated using the same 80 aa tile/10 aa sliding window approach as the TF tiling library. Duplicate sequences were removed, DNA hairpins and 7xC homopolymers were removed, and sequences were codon matched for human codon usage with GC content being constrained to be between 20% and 75% globally and between 25% and 65% in any 50-bp window. In order to improve the coverage while performing the screen, this 51,297 element library was split into two sub-libraries: a 38,241 element CR Tiling Main sub-library and an 13,056 element CR Tiling Extended sub-library. Computationally generated random negative controls, negative control tiles from the DMD protein screened in prior Nuclear Pfam screens, and fiduciary marker controls were added to each sub-library: 1,700 elements to the Main sub-library and 3,700 elements to the Extended sub-library. These controls were not re-coded, and thus were repeated when pooling sub-libraries.

[0145] Library filtering Since the sub-libraries were pooled and screened as one large pool, several of the control sub-libraries, that were not re-coded, wound up being repeated in the pool several times. Sequences that were repeated upwards of five times had systematically lower enrichment scores than what was expected from previous screens, likely due to PCR bias. Therefore, all repeated control elements were removed and individual validations were instead relied on to confirm screens. Additionally, there was a computational error in removing BsmBI sites from the CR tiling library, resulting in some sequences having accidental restriction cut sites in the middle of the ORF. These sequences were removed from further analysis and supplementary tables.

[0146] Activating hits validation library design One thousand fifty-five putative hit tiles were chosen by selecting all tiles where both biological replicates were recovered and had activation enrichment scores above 5.365 (determined by 2 standard deviations above the mean of poorly expressed random controls). Two hundred randomly selected random negative controls that were poorly expressed (expression threshold=−1.427) and one hundred randomly selected non-hit tiles that had no activity in both the minCMV and the pEF CRTF tiling screens were included. There were 1,355 total library elements.

[0147] Repressing hits validation library design Nine-thousand, four hundred and thirty-eight putative hit tiles were chosen by selecting all tiles where both biological replicates were recovered and had pEF repression enrichment scores above 1.433 or had a PGK repression enrichment score above 0.880 (determined from 3 standard deviations above the mean of poorly expressed random controls). Five hundred randomly selected random negative controls that were poorly expressed (expression threshold=−1.427) and one hundred randomly selected non-hit tiles that had no activity in the minCMV, pEF nor PGK CRTF tiling screens were included. There were 10,038 total library elements.

[0148] AD mutants library design A compositional bias was defined as any residue that represented more than 15% of the sequence (more than 12 residues). Four hundred twenty-four compositionally biased tiles were replaced with alanine. One thousand fifty-five aromatic or leucine-containing tiles replaced all Ws, Fs, Ys, and Ls with alanine. One thousand fifty-two acidic residue-containing tiles replaced all Ds and Es with alanine. Fifty-one tiles that contained the “LxxLL” motif (ELM accession: ELME000045, regex pattern=[\hat{ }P]L[\hat{ }P][\hat{ }P]LL[\hat{ }P]) were replaced with alanine. Twenty-two tiles that contained the “WW” motif (ELM accession: ELME000003, regex pattern=PP.Y) were replaced with alanine. 8,205 deletions were designed by systematically removing 10 aa chunks, with a sliding window of 5 aa from 547 max activating tiles. All mutated sequences were reverse translated into DNA sequences using a probabilistic codon optimization algorithm, such that each DNA sequence contains some variation beyond the substituted residues, which improves the ability to unambiguously align sequencing reads to unique library members. The 1,055 putative hit tiles were included as positive controls. Five hundred randomly selected random negative controls that were poorly expressed (expression threshold=−1.427) were included. There were 12,364 total library elements.

[0149] RD mutants library design Twelve thousand deletions were designed by systematically removing 10 aa chunks, with a sliding window of 5 aa of the maximum tile from 800 putative RDs that were hits in both PGK and pEF CRTF tiling screens. All mutated sequences were reverse translated into DNA using the method described above. The 1,593 putative hit tiles were included as positive controls. Six hundred forty-four compositionally biased tiles replaced all residues with alanine. All the following motifs were replaced with alanines: 104 CtBP interaction motif containing tiles (ELM accession: ELME0000098); 18 HP1 interaction motif containing tiles (ELM accession: ELME000141); 9 “ARKS” motif containing tiles (ELM accession: DRAFT-LIG_CHROMO); 180 SUMO interaction motif containing tiles (ELM accession: ELME000335); and 7 WRPW motif containing tiles (ELM accession: ELME000104). Five hundred randomly selected random negative controls that were poorly expressed (expression threshold=−1.427) were included. There were 15,055 total library elements.

[0150] Bifunctional deletion scan library design Three thousand three hundred thirty-one deletions were created by systematically removing 10 aa chunks, with a sliding window of 2 aa from 96 bifunctional activating and repressing tiles. All mutated sequences were reverse translated into DNA sequences using the method described above. The WT bifunctional tiles and 250 randomly selected random negative controls that were poorly expressed (expression threshold=−1.427) were included. There were 3,674 total library elements.

[0151] Library cloning Oligonucleotides with lengths up to 300 nucleotides were synthesized as pooled libraries (Twist Biosciences) and then PCR amplified. Reactions (6×50 ul) were set up in a clean PCR hood to avoid amplifying contaminating DNA. Each reaction used either 5 or 10 ng of template, 1 ul of each 10 mM primer, 1 ul of Herculase II polymerase (Agilent), 1 ul of DMSO, 1 ul of 10 mM dNTPs, and 10 ul of 5×Herculase buffer. The thermocycling protocol was 3 minutes at 98 C, then cycles of 98 C for 20 s, 61 C for 20 s, 72 C for 30 s, and then a final step of 72 C for 3 minutes. The default cycle number was 20×, and this was optimized for each library to find the lowest cycle that resulted in a clean visible product for gel extraction (in practice, 23 cycles was the maximum when small libraries were represented in large pools). After PCR, the resulting dsDNA libraries were gel extracted by loading a 2% TAE gel, excising the band at the expected length (around 300 bp), and using a QIAgen gel extraction kit. The libraries were cloned into a lentiviral recruitment vector pJT126 (Addgene #161926) with 4-16×10 ul Golden-Gate reactions (75 ng of pre-digested and gel-extracted backbone plasmid, 5 ng of library (2:1 molar ratio of insert:backbone), 2 uL of 10×T4 Ligase Buffer, and 1 uL of NEB Golden Gate Assembly Kit (BsmBI-V2)) with 65 cycles of digestion at 42 C and ligation at 16 C for 5 minutes each, followed by a final 5 minute digestion at 42 C and then 20 minutes of heat inactivation at 70 C. The reactions were then pooled and purified with MinElute columns (QIAgen), eluting in 6 ul of ddH₂O; 2 ul per tube was transformed into two tubes of 50 ml of Endura electrocompetent cells (Lucigen, Cat #60242-2) following the manufacturer's instructions. After recovery, the cells were plated on 1-8 large 10″×10″ LB plates with carbenicillin. After overnight growth in a warm room, the bacterial colonies were scraped into a collection bottle and plasmid pools were extracted with a Hi-Speed Plasmid Maxiprep kit (QIAgen). 2-3 small plates were prepared in parallel with diluted transformed cells in order to count colonies and confirm the transformation efficiency was sufficient to maintain at least 20×library coverage. To determine the quality of the libraries, the putative EDs were amplified from the plasmid pool by PCR with primers with extensions that include Illumina adapters and sequenced. The PCR and sequencing protocols were the same as described below for sequencing from genomic DNA, except these PCRs use 10 ng of input DNA and 17 cycles. These sequencing datasets were analyzed as described below to determine the uniformity of coverage and synthesis quality of the libraries. In addition, 20-30 colonies from the transformations were Sanger sequenced (Quintara) to estimate the cloning efficiency and the proportion of empty backbone plasmids in the pools.

[0152] Pooled delivery of library in human cells using lentivirus Large scale lentivirus production and spinfection of K562 cells were performed as follows: To generate sufficient lentivirus to infect the libraries into K562 cells, HEK293T cells were plated on 1-12 15-cm tissue culture plates. On each plate, 8.8×10⁶ HEK293T cells were plated in 30 mL of DMEM, grown overnight, and then transfected with 8 ug of an equimolar mixture of the three third-generation packaging plasmids (pMD2.G, psPAX2, pMDLg/pRRE) and 8 ug of rTetR-domain library vectors using 50 mL of polyethylenimine (PEI, Polysciences #23966). pMD2.G (Addgene plasmid #12259; addgene.org/12259), psPAX2 (Addgene plasmid #12260; addgene.org/12260), and pMDLg/pRRE (Addgene plasmid #12251; addgene.org/12251) were gifts from Didier Trono. After 48 hours and 72 hours of incubation, lentivirus was harvested. The pooled lentivirus was filtered through a 0.45-mm PVDF filter (Millipore) to remove any cellular debris. K562 reporter cells were infected with the lentiviral library by spinfection for 2 hours, with two separate biological replicates infected. Infected cells grew for 2 days and then the cells were selected with blasticidin (10 mg/mL, Gibco). Infection and selection efficiency were monitored each day using flow cytometry to measure mCherry (Biorad ZE5). Cells were maintained in spinner flasks in log growth conditions each day by diluting cell concentrations back to a 5×10⁵ cells/mL. Because lentiviral particles integrate randomly across accessible regions of the genome, the aim was for 600×infection coverage, and the lowest infection coverage was 130× (e.g., 130 cells per library element during infection). The aim was to have 2-10,000×maintenance coverage (e.g., 2-10,000 cells per library element post-infection). On day 8 post-infection, recruitment was induced by treating the cells with 1000 ng/ml doxycycline (Fisher Scientific) for either 2 days for activation or 5 days for repression.

[0153] Magnetic separation At each time point, cells were spun down at 300×g for 5 minutes and media was aspirated. Cells were then resuspended in the same volume of PBS (GIBCO) and the spin down and aspiration was repeated, to wash the cells and remove any IgG from serum. Dynabeads M-280 Protein G (ThermoFisher, 10003D) were resuspended by vortexing for 30 s. 50 mL of blocking buffer was prepared per 2×10⁸ cells by adding 1 g of biotin-free BSA (Sigma Aldrich) and 200 mL of 0.5 M pH 8.0 EDTA into DPBS (GIBCO), vacuum filtering with a 0.22-mm filter (Millipore), and then kept on ice. For all activation screens, 30 uL of beads was prepared for every 1×10⁷ cells, 60 uL of beads/10 million cells for the pEF CRTF tiling, PGK CRTF tiling, and minCMV bifunctional deletion scan screens, 120 uL of beads/10 million cells for the pEF validation, 90 uL of beads/10 million cells for the RD Mutants and pEF bifunctional deletion scan screens. Magnetic separation was performed as previously described (See, Tycko, J. et al. Cell 183, 2020-2035.e16 (2020), incorporated herein by reference in its entirety).

[0154] FLAG staining for protein expression The expression level measurements for the CRTF tiling library were made in K562 minCMV cells (with citrine OFF). 4×10⁸ cells per biological replicate were used after 7 days of blasticidin selection (10 mg/mL, Gibco), which was 9 days post-infection. 4×10⁷ control K562-JT039 cells (citrine ON, no lentiviral infection) were spiked into each replicate. Fix Buffer I (BD Biosciences, BDB557870) was preheated to 37 C for 15 minutes and Permeabilization Buffer III (BD Biosciences, BDB558050) and PBS (GIBCO) with 10% FBS (Omega) were chilled on ice. The library of cells expressing domains was collected and cell density was counted by flow cytometry (Biorad ZE5). To fix, cells were resuspended in a volume of Fix Buffer I (BD Biosciences, BDB557870) corresponding to pellet volume, with 20 mL per 1 million cells, at 37C for 10-15 minutes. Cells were washed with 1 mL of cold PBS containing 10% FBS, spun down at 500 3 g for 5 minutes and then supernatant was aspirated. Cells were permeabilized for 30 minutes on ice using cold BD Permeabilization Buffer III (BD Biosciences, BDB558050), with 20 mL per 1 million cells, which was added slowly and mixed by vortexing. Cells were then washed twice in 1 mL PBS+10% FBS, as before, and then supernatant was aspirated. Antibody staining was performed for 1 hour at room temperature, protected from light, using 5 uL/1×10⁶ cells of a-FLAG-Alexa647 (RNDsystems, IC8529R). The cells were washed and resuspended at a concentration of 3×10⁷ cells/ml in PBS+10% FBS. Cells were sorted into two bins based on the level of APC-A and mCherry fluorescence (Sony SH800S) after gating for viable cells. A small number of unstained control cells was also analyzed on the sorter to confirm staining was above background. The spike-in citrine positive cells were used to measure the background level of staining in cells known to lack the 3XFLAG tag, and the gate for sorting was drawn above that level. After sorting, the cellular coverage was ˜2000×. The sorted cells were spun down at 500×g for 5 minutes and then resuspended in PBS. Genomic DNA extraction was performed following the manufacturer's instructions (QIAgen Blood Midi kit was used for samples with >1×10⁷ cells) with one modification: the Proteinase K+AL buffer incubation was performed overnight at 56 C.

[0155] Library preparation and sequencing Genomic DNA was extracted with the QIAgen Blood Maxi Kit following the manufacturer's instructions with up to 1×10⁸ cells per column. DNA was eluted in EB and not AE to avoid subsequent PCR inhibition. The domain sequences were amplified by PCR with primers containing Illumina adapters as extensions. A test PCR was performed using 5 ug of genomic DNA in a 50 mL (half-size) reaction to verify if the PCR conditions would result in a visible band at the expected size for each sample. Then, 3-48×100 uL reactions were set up on ice (in a clean PCR hood to avoid amplifying contaminating DNA), with the number of reactions depending on the amount of genomic DNA available in each experiment. 10 ug of genomic DNA, 0.5 mL of each 100 mM primer, and 50 mL of NEBnext Ultra 2×Master Mix (NEB) was used in each reaction. The thermocycling protocol was to preheat the thermocycler to 98 C, then add samples for 3 minutes at 98 C, then an optimized number of cycles of 98 C for 10 s, 63 C for 30 s, 72 C for 30 s, and then a final step of 72 C for 2 minutes. All subsequent steps were performed outside the PCR hood. The PCR reactions were pooled and 145 uL were run on a 2% TAE gel, the library band around 395 bp was cut out, and DNA was purified using the QIAquick Gel Extraction kit (QIAgen) with a 30 ul elution into non-stick tubes (Ambion). A confirmatory gel was run to verify that small products were removed. These libraries were then quantified with a Qubit HS kit (Thermo Fisher) and sequenced on an Illumina HiSeq (2×150).

[0156] Computing enrichments and hits thresholds Sequencing reads were demultiplexed using bcl2fastq (Illumina). A Bowtie reference (version 1.2.3) was generated using the designed library sequences with the script ‘makeIndices.py’ (HT-Recruit Analyze package) and reads were aligned with 0 mismatch allowance using the script ‘makeCounts.py’. The enrichments for each domain between OFF and ON (or FLAGhigh and FLAGlow) samples were computed using the script ‘makeRhos.py’. Domains with <5 reads in both samples for a given replicate were dropped from that replicate (assigned 0 counts), whereas domains with <5 reads in one sample would have those reads adjusted to 5 in order to avoid the inflation of enrichment values from low depth.

[0157] For all of the screens, domains with <20 counts in both conditions of a given replicate were filtered out of downstream analyses. Hit thresholds varied across screens, depending on coverage, separation purity, and bio-replicate reproducibility, and were set based on: 1) the scores of negative controls, and 2) the validation curves relating screen scores to fractions of cells with the reporter ON or OFF as measured by flow cytometry for individual points. These validation curves are plotted for each screen (FIGS. 1G and 1I for the CRTF tiling screens, FIGS. 7E-7F for the hit validations screens, and FIGS. 9E and 11D for the mutant screens). The threshold was chosen to be 1-3 standard deviations away from the mean of poorly expressed random controls, with the exact number of standard deviations chosen to maximize the number of true positives and minimize the number of false positives across the validations. Noisier screens, with lower reproducibility, had higher hit thresholds in order to avoid false positives. For the expression screens, well-expressed tiles were those with a log2(FLAGhigh:FLAGlow) 1 standard deviation above the median of the random controls. For the CRTF tiling repressor screens, hits were tiles with enrichment scores 3 standard deviations above the mean of the poorly expressed random controls. For the minCMV CRTF tiling, pEF bifunctional deletion scan, and minCMV bifunctional deletion scan screens, hits were proteins with enrichment scores 2 standard deviations above the mean of the poorly expressed random controls. For the validation and mutant screens, hits were proteins with enrichment scores 1 standard deviation above the mean of the poorly expressed random controls.

[0158] Annotation of domains from tiles Tiles must have been hits in both the CRTF tiling and validation screens in order to have been considered potential EDs. A domain started anywhere the previous tile was not a hit. If the previous tile was not a hit because it was not expressed, and if the antepenultimate (previous, previous) tile was a hit, then that tile was not considered the start, and instead it was recovered into the middle of the domain. A domain ended anywhere the next successive tile was not a hit. If the next tile was not a hit because it was not expressed, and the following tile was a hit, then the tile that was not expressed was not considered the end. Domains started at the first residue of the first tile and extended until the last residue of the last tile within the domain. Single tiles that were hits in both the CRTF tiling and validation screens were considered EDs. For example, AKAP8's single activation tile, had activity when recruited individually, and its corresponding tile in the Mutant AD screen contains deletions of unnecessary regions that maintained activation.

[0159] Individual recruitment assays and flow cytometry measurements Protein fragments were cloned as a fusion with rTetR upstream of a T2A-mCherry-BSD marker, using GoldenGate cloning in the backbone pJT126 (Addgene #161926). K562 citrine reporter cells were then transduced with each lentiviral vector and, 3 days later, selected with blasticidin (10 mg/mL) until >80% of the cells were mCherry positive (6-9 days). Cells were split into separate wells of a 24-well plate and either treated with doxycycline (Fisher Scientific) or left untreated. Time points were measured by flow cytometry analysis of >10,000 cells (Biorad ZE5, Everest version 2.3-3.0). Doxycycline was assumed to be degraded each day, so fresh doxycycline media was added each day of the timecourse.

[0160] Flow cytometry analysis Data were analyzed using Cytoflow (version 1.1, github.com/bpteague/cytoflow) and custom Python scripts. Events were gated for viability and mCherry as a delivery marker. To compute a fraction of ON cells during doxycycline treatment, a Gaussian model was fit to the untreated rTetR-only negative control cells which fits the OFF peak, and then set a threshold that was 2 standard deviations above the mean of the OFF peak in order to label cells that have activated as ON. The same was done for computing the fraction of OFF cells in repressor validations but a two component Gaussian was fit and a threshold that was 2 standard deviations below the mean of the ON peak was set. A logistic model, including a scale parameter, was fit to the validation and screen data using SciPy's curve fit function.

[0161] CRISPR HT-recruit to measure transcriptional effectors at endogenous genes HT-recruit screens were performed with dCas9 as the DBD and an sgRNA targeting either a lowly-expressed or highly-expressed endogenous surface marker (CD2 or CD43). First, the sgRNA was stably delivered to K562 cells by lentivirus and selected with puromycin for 3-4 days. The cells were confirmed to be >95% mCherry+ by flow cytometry (Accuri).

[0162] For the dCas9-CRTF screens, lentivirus for the library was generated using 16×15 cm dishes of HEK293T cells and then concentrated 4× using LentiX. Then 1.15×10⁸ K562-sgRNA cells per replicate were infected with 72 mL of the lentiviral library by spinfection for 2 hours, with two separate biological replicates of the infection, resulting in 18-23% BFP+ cells in unselected cells after 4 days. 2 days after infection, the cells were selected with 10 ug/mL blasticidin (InvivoGen). Cells were >95% BFP+ by the final timepoint. On day 11 post-infection, 5×10⁸ cells (>3,000×coverage) were taken for magnetic separation and measurement.

[0163] For dCas9 HT-recruit screens, cells were stained with antibodies against the target surface marker before magnetic separation. Cells were first washed with 1% BSA (Sigma) in 1×DPBS (Life Technologies) and spun down and supernatant was aspirated without disturbing the pellet. 5 mL of cells were then incubated on ice for 1 h with fluorophore conjugated primary antibody. The following primary antibodies were used: 100 ul of allophycocyanin (APC)-labeled anti-CD2 antibody (130-116-253, Miltenyi-Biotec) or 10 ul of APC-labeled anti-CD43 antibody (clone 4-29-5-10-21, eBioscience, Catalog #17-0438-42). Afterwards, cells were washed with 45 mL of 1% BSA/DPBS. They were then magnetically separated with Protein G Dynabeads as described for the rTetR screens.

[0164] Western blots Twenty million cells were pelleted and washed 1× with 5 mL of PBS. Pelleted cells were resuspended in 500 uL of ice cold lysis buffer (1×RIPA (EMD Millipore 20-188), 1% Triton X-100, 0.1% SDS, Roche complete protease inhibitor cocktail mini tablet) and were put on a rotator at 4 C for 30 minutes. Next, the lysates were sonicated with a COVARIS ultra-sonicator for 15 minutes (Peak power: 140-175, Duty factor: 10, Cycles/burst: 200). Lysates were spun down at 20,000 g for 5 minutes. Protein amounts were quantified using the Qubit protein broad range assay kit (Thermo Scientific, #A50668). 30 ug were denatured in 1×laemmli sample buffer (Bio-rad #1610747) +10% 2-mercaptoethanol for 10 minutes at 70 C and subsequently loaded onto a gel and transferred to a PVDF membrane. Membrane was first blocked with 7% nonfat dry milk (Bio-rad #1706404) for 1 hour at room temperature, then probed using FLAG M2 monoclonal antibody (1:1000, mouse, Sigma-Aldrich, F1804) and Histone 3 antibody (1:2000, rabbit, Abcam, AB1791) as primary antibodies overnight. Next, the membrane was washed with TBS-T 3×, 5 minutes each before being blotted again with goat anti-mouse IRDye 680 RD (1:20,000) and goat anti-rabbit IRDye 800CW (1:40,000, LICOR Biosciences, cat nos. 926-68070 and 926-32211, respectively) secondary antibodies for one hour at room temperature. Blots were imaged on a Licor Odyssey CLx imager. Band intensities were quantified using ImageJ's gel analysis routine.

[0165] Data analysis and statistics All statistical analyses and graphical displays were performed in Python58 (v. 3.8.5). Enrichment scores shown in all figures (aside from replicate plots) are the average across two separately transduced biological replicates. The p-values, statistical tests used, and n are indicated in the figure legends.

[0166] Protein sequence analysis Compositional bias was defined as an aa that appeared at least 12 times in 80 aa (e.g., 15% of the sequence). In FIG. 2B, for each aa, a ratio was computed by counting the abundance of each aa in the tile and normalizing by the length and total number of sequences. Randomly sampled 10,000 non-hit 80 aa sequences were similarly calculated and the enrichment ratio was calculated by dividing the hits by non-hits. For the few activation tiles that contained glycine-rich and glutamine-rich sequences, there were fewer than 5 mutants that expressed well as measured by FLAG and these were excluded from further statistical analyses.

[0167] Code availability The HT-recruit Analyze software for processing high-throughput recruitment assay and high-throughput protein expression assays are available on GitHub (github.com/bintulab/HT-recruit-Analyze).

### Example 1

### High-Throughput Mapping of Effector Domains (EDs)

[0168] To map the human EDs at unprecedented scale and resolution, DNA sequences encoding 80 amino acid (aa) segments that tile across 1,292 human transcription factors (TFs) and 755 chromatin regulators (CRs) (hereafter CRTF tiling library) with a 10 aa step size between segments were synthesized (FIGS. 1A and 5A). This library, consisting of 128,565 sequences, was cloned into a lentiviral vector, where each protein tile was expressed as a fusion protein with rTetR (a doxycycline inducible DNA binding domain), and delivered as a pool at a low lentiviral infection rate, such that each cell contained a single rTetR-tile, to K562 cells containing a reporter with binding sites for rTetR. The reporter consisted of a synthetic surface marker that allows facile magnetic separation of cells for high-throughput measurements, and the fluorescent protein citrine for flow cytometry quantification during individual validations. The reporter gene was driven by either a minimally active minCMV promoter for identifying activators, or constitutively active pEF promoter for finding repressors. To simultaneously measure the effector function of these sequences, a recently developed high-throughput recruitment assay, HT-recruit, was used (See, Tycko, J. et al. Cell 183, 2020-2035.e16 (2020), incorporated herein by reference in its entirety). After treating the cells with doxycycline, which recruits each CRTF tiling library member to the reporter, the cells were magnetically separated into ON and OFF populations and the tiles were sequenced to identify sequences enriched in each cell population (FIGS. 5B-5C). Each screen was reproducible across two biological replicates (FIGS. 5D-5E). Thresholds for calling hits were based on the scores of random negative controls (FIGS. 5D-5E). 90% and 92% of the positive control domains for activation and repression, respectively, were hits above this threshold. Among the tiles shared with the previous screen, an additional subset of tiles that were only hits in this repression screen and whose activity validated in individual flow cytometry experiments were identified (FIGS. 5F-5G). Overall, these results demonstrated HT-recruit reliably identified EDs while using an order-of-magnitude larger library than the previous screen.

[0169] Measured transcriptional strength depends not only on the intrinsic potential of the sequence but also on the levels at which individual tiles are expressed. All library members contain a 3xFLAG tag, allowing measurement of each fusion protein's expression levels by staining with an anti-FLAG antibody, FACS sorting the cells into FLAG HIGH and LOW populations (FIG. 6A), and measuring the abundance of each member in the two populations by sequencing the domains (FIG. 6B). These FLAG scores from the high-throughput measurements can identify proteins that are not expressed, as determined from individual validations using Western blotting (FIG. 6C), and were used when annotating EDs, allowing filtering out of false negative library members that have lower activation or repression scores due to low expression (FIG. 6D).

[0170] To further confirm all the hits and help remove false positives, a smaller library containing only the activating and repressive hit tiles was screened (hereafter validation screen). Because of their small size, these screens had better separation purity (FIGS. 7A-7B) and could be screened at 10-fold higher coverage, which resulted in higher reproducibility than the original, larger screens (FIGS. 7C-7D), and even better correlation between screen scores and individual validations (FIGS. 7E-7F). About 80% of the hits were confirmed as hits in these validation screens (FIGS. 7C-7D). These confirmed sequences were those considered in subsequent analyses.

[0171] Using these filtered tiling data, EDs from contiguous hit tiles were annotated (FIGS. 1B, SEQ ID NOs: 31, 36, 111, 113, 153, 158, 165, 182, 184, 189, 224, 291, 311, 313, 352, 362, 367, 369, 375, 381, 407, 410, 415, 426, 430, 436, 472, 476, 478, 480, 483, 487-489, 494, 496, 498, 509, 512-517, 524, 526, 527, 530, 532, 533, 537, 541, 542, 545-547, 549, 552, 554, 557, 560-562, 565-568, 570-576, 578, 579, 580, 581, 582, 585, 587, 589, 590, 592, 595-598, 601, 603, 605, 607, 613, 617, 620, 622-624, 626, 627, 629, 630, 634-636, 639, 643, 646, 648, 651, 654, 658, 659, 662, 664, 666, 673, 675, 677, 678, 681, 684, 685, 686, 687, 689, 695, 696, 697, 699, 704, 705, 707-711, 713, 715, 716, 721, 723-725, 728, 729, 731-733, 735, 744, 746, 747, 753, 755, 760, 761, 764, 766-769, 773, 775-984, 1036, 1054, 1055, 1069, 1120, 1144, 1182, 1183, 1200, 1208, 1314, 1318, 1366, 1402, 1417, 1442, 1516, 1518, 1543, 1598, 1627, 1655, 1665, 1667, 1670, 1706, 1710, 1711, 1735, 1738, 1742, 1747, 1748, 1752, 1756, 1763, 1777, 1783, 1786, 1789, 1793, 1794, 1808, 1811, 1822, 1831, 1838, 1839, 1854, 1859, 1862, 1865, 1866, 1869, 1870, 1872, 1875, 1883, 1889, 1891, 1893, 1901, 1902, 1905, 1907, 1910, 1912, 1913, 1914, 1915, 1916, 1922, 1923, 1927, 1930, 1934, 1940, 1944, 1946, 1948, 1951, 1952, 1956, 1957, 1968, 1969, 1972, 1987, 1992, 1994, 1996, 2004, 2007, 2010, 2017, 2022, 2029, 2033, 2041, 2042, 2043, 2048, 2050, 2051, 2053, 2057, 2064, 2095, 2107, 2112, 2119, 2123, 2128, 2131, 2139, 2150, 2157, 2160, 2163, 2176, 2182, 2188, 2190, 2192, 2193, 2194, 2205, 2206, 2207, 2208, 2211, 2212, 2213, 2216, 2218, 2221, 2224, 2227, 2231, 2232, 2239, 2245, 2246, 2254, 2262, 2263, 2265, 2271, 2274, 2275, 2277, 2278, 2282, 2283, 2288, 2292, 2295, 2296, 2298, 2302, 2312, 2313, 2316, 2320, 2321, 2323, 2324, 2325, 2334, 2338, 2341, 2348, 2361, 2364, 2365, and 2370-6094), resulting in accurately identifying EDs previously annotated in UniProt, for example MYB's EDs (FIG. 1B). Some of the strongest EDs come from gene families with some family members already annotated as activators (e.g., ATF and NCOA) and repressors (e.g., KLF and ZNF), increasing confidence in the screen (FIGS. 1C and 1D). TFs from certain gene families (e.g., KLF and KMT) contain both strong activation domains (ADs) and repression domains (RDs), which highlights the results can identify bifunctional transcriptional regulators. In total, 12% of the proteins screened were bifunctional and 77% of proteins had at least one ED.

[0172] In addition, this method facilitated discovery of previously unannotated EDs (FIG. 1E). For example, a new AD and four new RDs were found within the DNA demethylating protein, TET2. Tens of these new EDs were validated by individually cloning them, creating stable cell lines, and measuring their effect using flow cytometry after dox-induced recruitment (FIGS. IF and 1H). In these experiments, fluorescence distributions are often not unimodal, most likely due to stochastic gene expression: bursting in the case of activation and stochastic silencing in the case of repression. These results were used to validate screen thresholds: all tiles above the thresholds had activity and no tiles below did (FIGS. 1G and 1I).

[0173] Forty-five of the proteins tiled here were recently screened for activation in HEK293T cells, but tiled with smaller fragments. The two studies showed good agreement: 19 proteins did not activate in both screens, and 15 proteins did (FIG. 8A). The proteins that only activated in one of the studies could represent activators that are unique to the specific context (cell type for example) but could also reflect the difference in length. For example, KLF6 tiles that only activated with smaller fragments overlapped a RD in the measurements with longer tiles. While longer tiles can possibly capture large ADs, shorter peptides are more likely to find small ADs that are near RDs.

[0174] Prior screens in yeast have led to the development of a machine learning model (PADDLE12) capable of predicting activation levels from sequence alone with an area under the precision-recall curve of 81%. If the sequence properties that drive activation in humans are like those in yeast, PADDLE would be expected to predict human ADs with similar accuracy. While PADDLE was able to predict 70% of the ADs, the domains that PADDLE predicted to be activating were more negatively charged than the ADs it missed (FIG. 8B), suggesting that in human cells there are additional non-acidic activator classes compared to yeast.

[0175] Because there are no other comprehensive studies in human cells or predictive models with which the RDs can be compared, the repressive measurements were repeated with the entire CRTF library at a second promoter: PGK. While this promoter is weaker (FIG. 8C), silent and active cells were able to be magnetically separated (FIG. 8D) and good reproducibility was observed (FIG. 8E). Ninety-two percent of the hit tiles that showed up in the pEF and PGK screens also showed up as hits in the pEF validation screen (FIG. 8F), suggesting higher confidence results when both screens were combined. Taking the maximum tile's enrichment scores within each RD revealed 715 RDs were shared across both screens (FIGS. 8G-8H). Together, these results suggested that at the 80 aa scale there are more sequences across the CRs and TFs that can work as repressors versus activators. In total, 291/374 ADs and 592/715 RDs are new compared to previous annotations (FIG. 1J).

### Example 2

### Activation Domain (AD) Characterization

[0176] The large set of new ADs provides a great opportunity to systematically quantify the prevalence of sequence properties e.g., abundance of particular amino acids such as acidic, glutamine-rich, and proline-rich sequences, homotypic repeats, and enrichment of particular hydrophobic residues—aromatics (W, F, Y) and leucines (L). Forty-five percent of activating tiles contained a compositional bias (FIG. 2A), where serine and proline are the most abundant. Consistent with these observations, when the aa frequencies in the AD sequences were further normalized by the non-hit sequences, there was an enrichment in certain hydrophobic, acidic, serine, and proline residues (FIG. 2B).

[0177] Despite being well-documented, very few Q-rich ADs were identified (FIG. 2A, n=10). Annotated Q-rich ADs are longer than 80 aa, thus the tiling approach might have missed them. Alternatively, Q-rich ADs could be relatively weak, and utilize other TFs to activate. Recruitment of SP1's two annotated Q-rich ADs25 (longer than 80 aa) did not activate minCMV (FIG. 9A). However, including a short, acidic AD upstream of the Q-rich domains was sufficient for SP1's “tAD A” to activate (FIG. 9A). This result supp.orts the previous observations that acidic and Q-rich domains work synergistically in human cells.

[0178] To determine which amino acids facilitated activation, a deletion scanning approach was used: the activity of mutant ADs containing consecutive small deletions was measured (FIG. 9B, top). Although most (61%) deletions do not affect activation, at least one deletion was found that was well-expressed and could abolish activator function in most of the pilot ADs (20/24 with activity at minCMV). To confirm whether this approach could resolve residues facilitating activity, the deletion scan data from P53 was compared to UniProt and residues 20-22 (DLW) found within one region and residue W52 found within another facilitated activity, corresponding to UniProt-annotated TAD I and TAD II (FIG. 9B, top). Furthermore, individual validations of deletions including these residues confirmed complete loss of activity (FIG. 9B, bottom).

[0179] Confident in the deletion scan approach, a second library of 10 aa deletions across the maximum activating tile from each AD was designed, resulting in 304 total deletion scans. Activation was measured using the minCMV reporter and HT-recruit workflow described in FIG. 1A (FIGS. 9C-9E) and mutants that were poorly expressed were filtered out based on FLAG-staining (FIGS. 9F-9G). Across each of these expression-filtered deletion scans, deletions were classified according to their effect on activation (FIG. 2C). Using these data, it can be determined which compositionally biased residues are important for function and which are not: for example, while NFAT5's AD has a patch of 4 serines near the C-terminus, deleting those residues had no effect on activation (FIGS. 2C and 10A). Applying this analysis to all ADs containing a homotypic repeat, serine, proline, acidic, glutamine, and glycine homotypic repeats were more often found in deletions that had no effect on activation than in deletions that decreased activation (FIG. 2D). Therefore, homotypic repeats of these amino acids are generally not necessary for activation.

[0180] The deletion scans also identified the sequence for activation of each tile: sequences that, once removed, completely abolished activation (FIG. 2C). At least one sequence (median length=10 aa) was able to annotated in the majority (69%) of the screened ADs, and most (61%) ADs had multiple sequences (FIG. 2C, see, for example SEQ ID NOs: 17424-17841). Nearly every sequence (96%) contained a W, F, Y or L.

[0181] To validate this enrichment of specific hydrophobic residues, mutant libraries were rationally designed where every aa of a particular type within the sequence was systematically replaced with alanines (See, for example, SEQ ID NOs: 13274-17423). Replacement of all W, F, Y or Ls with alanine (range: 3-24 aa replaced/80 aa tile, median=10 aa) in all the activating tiles resulted in a total loss of activation (FIG. 2E). The one exception that remained active was within DUX4, and the mutation did make it weaker (FIG. 10B). This systematic loss of activation was not due to a decrease in protein expression, as measured by FLAG staining (FIG. 10C). There is no correlation between the overall count of these residues within tiles and a tile's activation strength (FIG. 10D), likely suggesting these residues mediate interactions for activity, and the placement of these residues is more important than the overall count. This means ADs from 258 different proteins utilize at least some aromatic or leucine residues to activate.

[0182] All acidic residues were replaced with alanine in all activating tiles. Surprisingly, more than half of the acidic mutants had reduced expression (FIG. 10C). These results suggested that the acidic residues increased protein levels, at least in the context of ADs. Of the remaining 247 well-expressed activating tile mutants, most mutants lost the ability to activate (FIG. 2F, n=196). The mutants with no change in activity had significantly fewer acidic residues than the tiles whose mutants had a decreasing effect (FIG. 10E), supporting the idea that acidic ADs are not the only class of human ADs.

[0183] Intrigued by what other compositional biases could be functional in human ADs, other frequently-appearing residues were replaced with alanine. Consistent with the results above, all tiles with leucine and acidic compositional biases lost activity once mutated (FIG. 2G). Removal of serine and proline compositional biases had more mild effects: most mutants still had activity (FIG. 2G, top), even though the strength of activation decreased for a subset of them (FIG. 2G, bottom).

[0184] Wanting to follow up more on the compositionally biased tiles that decreased activity upon compositional bias removal (FIG. 2G), the set of sequences (as determined from the deletion scans) from the compositionally biased activating tiles that lost activity upon bias removal were analyzed (FIG. 2G, bottom). For each bias type, most sequences also contain a W, F, Y, or L (FIG. 2H), suggesting their placement next to hydrophobic residues is important for their function.

[0185] In summary, sequences that facilitated activation consisted of certain hydrophobic residues (W, F, Y, and/or L) that are interspersed with either acidic, proline, serine, and/or glutamine residues (FIGS. 2I and 10F). Although prior work has shown that homopolymer stretches of glutamine and proline are sufficient to activate a weak synthetic reporter, it was found that the majority of glutamine and proline repeats within ADs of the human CRs and TFs are not part of the sequence for activation.

### Example 3

### Repression Domain Characterization

[0186] Repressing tile sequences have significantly more predicted secondary structure than activating tile sequences (FIG. 11A). Instead of looking at RD sequence compositions, RDs were first classified by their potential mechanism. The ELM database was used to search for co-repressor interaction motifs, and UniProt to search for domain annotations. Seventy-two percent of the RDs overlapped diverse annotations, such as sites for SUMOylation, zinc fingers, SUMO-interacting motifs, co-repressor binding motifs, DNA binding domains (including Homeodomains, consistent with previous results), and dimerization domains (FIG. 3A). To address whether these annotations facilitate repression, mutant libraries that replaced sections of 1,313 repressing tiles were rationally designed and this RD mutant library was screened using the pEF reporter and workflow described FIG. 1A (FIGS. 11B-11D). Additionally, protein expression was monitored (FIGS. 11E-11F) and mutants that had low FLAG enrichment scores were filtered out.

[0187] Co-repressor interaction motifs were systematically replaced with alanine to test their contribution to activity (FIG. 3B). The TLE-binding motif, WRPW (SEQ ID NO: 28212), appears exclusively in the C-terminal RDs of the HES family and all tiles containing this motif were repressive (FIG. 11G). All tested TLE-binding motifs facilitated repression (FIG. 3B, left). The HP1-binding motif, PxVxL, facilitated or contributed to repression in many of the tiles containing it (8/13 tiles with decreasing effects FIG. 3B, middle). A more refined CtBP motif explained most tiles that lost activity upon mutation (14/17 tiles FIGS. 3B, right, and 12A). Altogether, 78% of the 36 repressing tiles with a co-repressor binding motif (TLE, HP1, or CtBP) decreased in repression strength when the motif was mutated, and 78% of 113 SUMO interaction motif-(SIM, binding site to SUMOylated proteins) containing repressing tiles were similarly sensitive to mutation (FIG. 12B).

[0188] Many RDs contained a SUMOylation site (site for covalent conjugation of a SUMO domain) (FIG. 3A). The ELM database classifies SUMOylation sites with the search pattern φKxE. Because this motif is short and flexible, some non-hit sequences (12.3%) also contain SUMOylation motifs. To investigate whether SUMOylation sites within non-hit sequences are functional, the AD deletion scan data was used. Deleting a SUMOylation motif within ADs rarely decreased activation (FIG. 12C). The same deletion scanning approach was used to query if these motifs are functional in RDs (Supplementary Table 5, FIG. 3C). For example, residue K550 in the SP3 protein is a SUMOylation site and has been shown before to be important for repression; indeed this site was also found to overlap with the region for repression (FIG. 3C). In a similar manner, SUMOylation motifs were found to be important for the repression of at least 147 out of the 166 RDs where they are found (FIG. 3D). This result is concordant with a previous finding that a short 10 aa tile from the TF MGA, which contains this SUMOylation motif, IKEE (SEQ ID NO: 28213), is itself sufficient to be a repressor. SUMOylation of FOXP1 (which also shows up as a region in the results herein), has been shown to promote repression via CtBP recruitment. SUMOylation motif-containing TFs are enriched for binding co-repressor KMT2D, as reported in a bioID interaction resource (p-value=0.028, one-sided proportions z-test, compared to TFs with no EDs). A previously undescribed RD was also identified in KMT2D containing a SIM, suggesting SUMOylation for these TFs drives repression via SIM-containing co-repressor recruitment.

[0189] The deletion scan data was used to gain better resolution of the region within RDs overlapping dimerization domains, such as basic helix-loop-helix domains (bHLHs). Within bHLHs, the basic region binds DNA, and mutations in the HLH region are known to impact dimerization. Deletion scans across tiles that overlap HLH domains reveal part of helix 1, the loop, and helix 2 facilitate repression (FIG. 12D). HLHs lacking a basic region have previously been shown to negatively regulate transcription by forming complexes with other bHLHs and inhibiting their binding. Alternatively, as shown herein, bHLHs containing basic regions can negatively regulate transcription when recruited at a promoter, likely by forming functional dimer complexes with another bHLH from a TF that contains RDs elsewhere in the protein. The majority of RDs that overlap bHLHs belong to Class II tissue specific bHLH TFs (FIG. 12E) that can either activate or repress depending on the context. Indeed, bHLH TFs can act as activators in other contexts: for example, NEUROG3, a Type II bHLH TF, acts as an activator when recruited full length to the minCMV promoter and an activator tile was found that partially overlaps the bHLH RD. This context specificity to activation and repression of bHLH TFs might be expected given they can dimerize with different activating or repressing bHLH TFs.

[0190] Many RDs overlap annotated zinc fingers (ZFs, n=124), and some specifically overlap C2H2 ZFs (n=50, compared to only 3 ADs that overlap C2H2 ZFs p-value=5.9e-24, one-sided proportions z-test) (FIG. 3A). REST's 9th C2H2 ZF is repressive and directly recruits the co-repressor coREST. In agreement with these reports, the deletions in this RD of REST revealed the 9th ZF facilitates repression (FIG. 12F).

[0191] In addition to binding DNA and directly binding co-repressors, ZFs dimerize with other ZFs. ZFs could cause repression by binding to other ZF domains within endogenous repressive proteins, such as with the IKZF family where the N-terminus of some members, such as IKZF1, directly recruits CtBP, while the C-terminal zinc fingers bind other IKZF family members. Indeed, the N-terminal repressive domains in IKZF1 were recovered, and the associated sequence contained a CtBP binding motif (FIG. 12G). In addition, all IKZF family members showed C-terminal RDs that overlap the last two ZFs (FIG. 12G). These two ZFs both facilitated repression in IKZF5 (FIG. 3E) and in all tested family members (FIG. 12H), and therefore likely dimerize with the IKZFs that recruit CtBP. While in general ZFs are well-known DNA binding domains, the data show herein expands the list of ZF sequences that are likely protein binding domains to other repressive TFs.

[0192] In summary, RDs can be categorized in the following way: (1) domains that contain short, linear motifs that directly recruit co-repressors, (2) domains that contain SUMO interaction motifs or can be SUMOylated, or (3) structured binding domains that likely recruit co-repressors or other repressive TFs (FIGS. 3F and 12I).

### Example 4

### Bifunctional Activating and Repressing Domains

[0193] Transcriptional proteins are categorized as activating, repressing, or bifunctional, where 115 proteins have previously been found to activate some promoters but repress others. Here, 248 proteins are classified as bifunctional, CRs & TFs that have both an AD and RD (such as in FIG. 1B, SEQ ID NOs: 38, 40, 42, 55, 56, 57, 70, 75, 104, 105, 106, 109, 127, 129, 133, 134, 141, 142, 144, 145, 166, 167, 168, 180, 217, 227, 234, 235, 237, 238, 239, 240, 241, 250, 269, 271, 272, 273, 280, 281, 282, 283, 289, 299, 302, 303, 322, 323, 324, 325, 326, 327, 342, 343, 371, 377, 378, 400, 401, 403, 405, 411, 423, 431, 441, 453, 457, 475, 477, 483, 485, 496, 498, 528, 541, 562, 589, 610, 638, 646, 678, 694, 698, 704, 706, 711, 716, 738, 756, 757, 764, and 766). While most of these proteins contain both ADs and RDs at independent locations, a surprising fraction (92/248) possess single domains apparently capable of both activation and repression (FIGS. 4A-4C) with many found within homeodomain TFs (FIG. 13A).

[0194] To further investigate their behavior, candidate bifunctional domains were individually recruited and doxycycline-dependent minCMV activation and pEF repression were quantified (FIG. 4B). These validation measurements recapitulated initial screen observations, highlighting some domains with similar strengths of both repression and activation (e.g., ARGFX-161:240 and NANOG-191:270), and others with preferential activities (e.g., ARGFX-191:270, SREBF2-1:80; FIGS. 4B and 13B). Entire bifunctional domains could drive activation or repression, or specific regions within domains could mediate distinct activities. Systematic deletions of 10 aa segments within bifunctional domains further refined the regions responsible for each activity (SEQ ID NOs: 25652-28198, FIGS. 13C-13F). While some bifunctional domains (23/92) possess independent activating and repressing regions (e.g., NANOG; FIG. 13G), others have fragments as small as 14 aa that can mediate both strong activation and repression (69/92 domains, e.g., ARGFX and the structurally related LEUTX) (FIGS. 4D, 14A-14C).

[0195] Bifunctional domains could stably drive both activation and repression or could fluctuate between these activities over time. To distinguish between these possibilities, transcription driven by the bifunctional ARGFX tile 16 was quantified (FIG. 4B) at the minCMV promoter over 4 days and activation peaked at day 1 and then decreased over time (FIG. 14D). Intrigued by these dynamics, activation dynamics for ARGFX tile 16 and several other bifunctional domains (FOXO1, NANOG, and KLF7) recruited to a promoter of moderate strength (PGK) were profiled (FIGS. 4E-4F, 14E). Surprisingly, ARGFX tile 16 initially activated transcription at the PGK promoter from a low to a high state but then the cell population split into two subpopulations: activated (high) or repressed (off). Other domains (e.g., ARGFX tile 19 and FOXO1 tile 56) showed similar behavior at the minCMV and PGK promoters, initially activating and then decreasing transcription over time. They also contained overlapping regions for both activities. Several domains with bifunctional activities at the minCMV and pEF promoters did not significantly alter transcription when recruited to the PGK promoter, establishing that observed activities are promoter-dependent. For these domains, deletion scan measurements revealed independent regions for activation and repression (FIG. 13G, SEQ ID NOs: 25652-28198). In summary, some bifunctional tiles that independently activated and repressed different promoters are bifunctional even at a single promoter and can dynamically split a cell population into high- and low-expressing cells.

### Example 5

### Bifunctional Activating and Repressing Domains

[0196] In order to extend the approach to endogenous loci, dCas9 was used to target the promoters of endogenous cell surface proteins (FIG. 15). Targeting surface proteins allowed use of fluorescent antibodies to immunostain cells, thus providing a way to monitor single-cell gene expression variability during individual recruitment assays by flow cytometry and to magnetically separate a large number of ON and OFF cells during HT-recruit (FIGS. 15 and 16). To study repressors, the highly expressed surface marker CD43 in K562 cells was targeted. First, either dCas9 alone or dCas9-KRAB were individually recruited from ZNF10 with sgRNAs targeting the CD43 transcriptional start site (TSS) and two sgRNAs, sg10 and sg15, were found for which repression depended on the KRAB repressor (FIG. 17). Similarly, sgRNAs were identified with which dCas9-VP64 could activate the lowly-expressed CD2 gene.

[0197] dCas9 recruitment to CD2 identified greater than 50 activator tiles that were not hits with rTetR at minCMV, including more HLH activators and SWI/SNF components (as with the Pfam library) and an unannotated region of the PHD proteins JADE1/2/3 (FIGS. 18A-C and 19A). A notably strong shared activator hit was the DUX4 C-terminus, which interacts with histone acetyltransferase P300. dCas9 recruitment to CD43 identified greater than 1000 repressor tiles that were not hits at pEF1a, including from more methyl-binding domain proteins (FIGS. 18D and 18E). The strongest shared repressors were KRAB domains (FIG. 19B). Meanwhile, 74% of proteins with a dual-function tile that activates CD2 (but not minCMV) and represses pEF1a were HLH proteins, and the higher resolution tiling data was used to map their dual-functioning region to the heterodimerizing HLH portion (and not the DNA binding basic portion) of their basic-HLH domains (FIGS. 19C-19E). Altogether, this represents a resource of transcriptional effectors, including from unannotated protein regions, that function on dCas9 and can enable campaigns to engineer transcription perturbations tools.

[0198] All references, including publications, patent applications, and patents, cited herein are hereby incorporated by reference to the same extent as if each reference were individually and specifically indicated to be incorporated by reference and were set forth in its entirety herein.

[0199] Preferred embodiments of this invention are described herein, including the best mode known to the inventors for carrying out the invention. Variations of those preferred embodiments may become apparent to those of ordinary skill in the art upon reading the foregoing description. The inventors expect skilled artisans to employ such variations as appropriate, and the inventors intend for the invention to be practiced otherwise than as specifically described herein. Accordingly, this invention includes all modifications and equivalents of the subject matter recited in the claims appended hereto as permitted by applicable law. Moreover, any combination of the above-described elements in all possible variations thereof is encompassed by the invention unless otherwise indicated herein or otherwise clearly contradicted by context.

1. A synthetic transcription factor comprising one or more activator domains, one or more repressor domains, or a combination thereof fused to a heterologous DNA binding domain,
wherein at least one of the one or more activator domains or at least one of the one or more repressor domains comprises an amino acid sequence having at least 70% identity to any of SEQ ID NOS: 1-12567 and 28214-28404.

2. (canceled)

3. The synthetic transcription factor of claim 1, wherein at least one of the one or more activator domains or at least one of the one or more repressor domains comprises an amino acid sequence of any of SEQ ID NOS: 1-12567 and 28214-28404.

4. A synthetic transcription factor comprising one or more activator domains, one or more repressor domains, or a combination thereof fused to a heterologous DNA binding domain,
wherein at least one of the one or more activator domains or the one or more repressor domains comprises at least 10 contiguous amino acids of any of SEQ ID NOS: 1-12567 and 28214-28404.

5. The synthetic transcription factor of claim 1, wherein at least one of the one or more activator domains comprises an amino acid sequence having at least 70% identity to any of SEQ ID NOs: 31, 36, 111, 113, 153, 158, 165, 182, 184, 189, 224, 291, 311, 313, 352, 362, 367, 369, 375, 381, 407, 410, 415, 426, 430, 436, 472, 476, 478, 480, 483, 487-489, 494, 496, 498, 509, 512-517, 524, 526, 527, 530, 532, 533, 537, 541, 542, 545-547, 549, 552, 554, 557, 560-562, 565-568, 570-576, 578, 579, 580, 581, 582, 585, 587, 589, 590, 592, 595-598, 601, 603, 605, 607, 613, 617, 620, 622-624, 626, 627, 629, 630, 634-636, 639, 643, 646, 648, 651, 654, 658, 659, 662, 664, 666, 673, 675, 677, 678, 681, 684, 685, 686, 687, 689, 695, 696, 697, 699, 704, 705, 707-711, 713, 715, 716, 721, 723-725, 728, 729, 731-733, 735, 744, 746, 747, 753, 755, 760, 761, 764, 766-769, 773, and 775-984.

6. The synthetic transcription factor of claim 1, wherein at least one of the one or more activator domains comprises an amino acid sequence having at least 70% identity to any of SEQ ID NOs: 12568-17423.

7. (canceled)

8. The synthetic transcription factor of claim 1, wherein at least one of the one or more activator domains comprises one or more of SEQ ID NOs: 17424-17841.

9. The synthetic transcription factor of claim 1, wherein at least one of the one or more repressor domains comprises an amino acid sequence having at least 70% identity to any of SEQ ID NOs: 1036, 1054, 1055, 1069, 1120, 1144, 1182, 1183, 1200, 1208, 1314, 1318, 1366, 1402, 1417, 1442, 1516, 1518, 1543, 1598, 1627, 1655, 1665, 1667, 1670, 1706, 1710, 1711, 1735, 1738, 1742, 1747, 1748, 1752, 1756, 1763, 1777, 1783, 1786, 1789, 1793, 1794, 1808, 1811, 1822, 1831, 1838, 1839, 1854, 1859, 1862, 1865, 1866, 1869, 1870, 1872, 1875, 1883, 1889, 1891, 1893, 1901, 1902, 1905, 1907, 1910, 1912, 1913, 1914, 1915, 1916, 1922, 1923, 1927, 1930, 1934, 1940, 1944, 1946, 1948, 1951, 1952, 1956, 1957, 1968, 1969, 1972, 1987, 1992, 1994, 1996, 2004, 2007, 2010, 2017, 2022, 2029, 2033, 2041, 2042, 2043, 2048, 2050, 2051, 2053, 2057, 2064, 2095, 2107, 2112, 2119, 2123, 2128, 2131, 2139, 2150, 2157, 2160, 2163, 2176, 2182, 2188, 2190, 2192, 2193, 2194, 2205, 2206, 2207, 2208, 2211, 2212, 2213, 2216, 2218, 2221, 2224, 2227, 2231, 2232, 2239, 2245, 2246, 2254, 2262, 2263, 2265, 2271, 2274, 2275, 2277, 2278, 2282, 2283, 2288, 2292, 2295, 2296, 2298, 2302, 2312, 2313, 2316, 2320, 2321, 2323, 2324, 2325, 2334, 2338, 2341, 2348, 2361, 2364, 2365, and 2370-6094.

10. The synthetic transcription factor of claim 1, wherein at least one of the one or more repressor domains comprises an amino acid sequence having at least 70% identity to any of SEQ ID NOs: 17842-25651.

11. (canceled)

12. The synthetic transcription factor of claim 1, wherein the heterologous DNA binding domain is a programmable DNA binding domain or is part of an inducible DNA binding system.

13. The synthetic transcription factor of claim 1, wherein the heterologous DNA binding domain is derived from a Clustered Regularly Interspaced Short Palindromic Repeats associated (Cas) protein or a Transcription activator-like effectors (TALEs) domain.

14-15. (canceled)

16. A nucleic acid encoding a synthetic transcription factor of claim 1.

17-18. (canceled)

19. A cell comprising a synthetic transcription factor of claim 1 or one or more nucleic acids encoding thereof.

20-23. (canceled)

24. A composition comprising one or more synthetic transcription factors of claim 1 or one or more nucleic acids encoding thereof, or a cell comprising one or more synthetic transcription factors or one or more nucleic acids encoding thereof.

25. (canceled)

26. The system of claim 24, further comprising a guide RNA or a nucleic acid encoding a guide RNA.

27. (canceled)

28. A method of modulating the expression of at least one target gene in a cell, the method comprising introducing into the cell at least one synthetic transcription factor of claim 1 or a nucleic acid encoding thereof.

29. The method of claim 28, wherein the at least one target gene is an endogenous gene, an exogenous gene, or a combination thereof.

30. The method of claim 28, wherein the cell is in a subject and the method comprises administering the at least one synthetic transcription factor, nucleic acid, or composition or system comprising thereof to the subject.

31. (canceled)

32. The method of any of claim 28, wherein the gene expression of at least two genes is modulated.

33. A method for treating a disease or condition in a subject in need thereof, the method comprising: administering to the subject at least one synthetic transcription factor of claim 1 or a nucleic acid encoding thereof, or composition or system comprising thereof to the subject.

34. (canceled)

35. The method of claim 33, wherein the synthetic transcription factor alters the expression of a disease-related gene.

36-38. (canceled)

The application's sequence listing, which the Patent Office published only in electronic form, follows.

SEQUENCE LISTING (28404 sequences)

SEQ ID NO: 1 - protein, 80 aa, Synthetic construct
HLNGTDTSFSLEDLFQLLSSQPENSLEGISLGDIPLPGSISDGMNSSAHYHVNFSQAISQDVNLHEAILLCPNNTFRRDP

SEQ ID NO: 2 - protein, 80 aa, Synthetic construct
DVNLHEAILLCPNNTFRRDPTARTSQSQEPFLQLNSHTTNPEQTLPGTNLTGFLSPVDNHMRNLTSQDLLYDLDINIFDE

SEQ ID NO: 3 - protein, 80 aa, Synthetic construct
CPNNTFRRDPTARTSQSQEPFLQLNSHTTNPEQTLPGTNLTGFLSPVDNHMRNLTSQDLLYDLDINIFDEINLMSLATED

SEQ ID NO: 4 - protein, 80 aa, Synthetic construct
TARTSQSQEPFLQLNSHTTNPEQTLPGTNLTGFLSPVDNHMRNLTSQDLLYDLDINIFDEINLMSLATEDNFDPIDVSQL

SEQ ID NO: 5 - protein, 80 aa, Synthetic construct
PEQTLPGTNLTGFLSPVDNHMRNLTSQDLLYDLDINIFDEINLMSLATEDNFDPIDVSQLFDEPDSDSGLSLDSSHNNTS

SEQ ID NO: 6 - protein, 80 aa, Synthetic construct
TGFLSPVDNHMRNLTSQDLLYDLDINIFDEINLMSLATEDNFDPIDVSQLFDEPDSDSGLSLDSSHNNTSVIKSNSSHSV

SEQ ID NO: 7 - protein, 80 aa, Synthetic construct
MRNLTSQDLLYDLDINIFDEINLMSLATEDNFDPIDVSQLFDEPDSDSGLSLDSSHNNTSVIKSNSSHSVCDEGAIGYCT

SEQ ID NO: 8 - protein, 80 aa, Synthetic construct
SAACSMDPIDSFELLDLLFDRQDGILRHVELGEGWGHVKDQQVLPNPDSDDFLSSILGSGDSLPSSPLWSPEGSDSGISE

SEQ ID NO: 9 - protein, 80 aa, Synthetic construct
SFELLDLLFDRQDGILRHVELGEGWGHVKDQQVLPNPDSDDFLSSILGSGDSLPSSPLWSPEGSDSGISEDLPSDPQDTP

SEQ ID NO: 10 - protein, 80 aa, Synthetic construct
FNAAAAANAQVYGQTGLPYGPGSEAAAFGSNGLGGFPPLNSVSPSPLMLLHPPPQLSPFLQPHGQQVPYYLENEPSGYTV

SEQ ID NO: 11 - protein, 80 aa, Synthetic construct
VYGQTGLPYGPGSEAAAFGSNGLGGFPPLNSVSPSPLMLLHPPPQLSPFLQPHGQQVPYYLENEPSGYTVREAGPPAFYR

SEQ ID NO: 12 - protein, 80 aa, Synthetic construct
AESAAGAGPVVTPPEHLPMDSGGIDSSDSESDILLGILDNLDPVMFFKCPSPEPASLEELPEVYPEGPSSLPASLSLSVG

SEQ ID NO: 13 - protein, 80 aa, Synthetic construct
VTPPEHLPMDSGGIDSSDSESDILLGILDNLDPVMFFKCPSPEPASLEELPEVYPEGPSSLPASLSLSVGTSSAKLEAIN

SEQ ID NO: 14 - protein, 80 aa, Synthetic construct
SGGIDSSDSESDILLGILDNLDPVMFFKCPSPEPASLEELPEVYPEGPSSLPASLSLSVGTSSAKLEAINELIRFDHIYT

SEQ ID NO: 15 - protein, 80 aa, Synthetic construct
PVTENSTSLSFLDSCNSLTPKSTPVKTLPFSPSQFLNFWNKQDTLELESPSLTSTPVCSQKVVVTTPLHRDKTPLHQKHA

SEQ ID NO: 16 - protein, 80 aa, Synthetic construct
LGALGSPDLSSLSLAVSRSTDELEIIDEYIKENGFGLDGGQPGPGEGLPRLVSRGAASLSTVTLGPVAPPATPPPWGCPL

SEQ ID NO: 17 - protein, 80 aa, Synthetic construct
LDHFLPNHGSGPFLPPSALLPDPDFFSGTVSLPGLEPPGGPDLLDDGFAYDPTAPTLFTMLDLLPPAPPHASAVVCSGGA

SEQ ID NO: 18 - protein, 80 aa, Synthetic construct
GPFLPPSALLPDPDFFSGTVSLPGLEPPGGPDLLDDGFAYDPTAPTLFTMLDLLPPAPPHASAVVCSGGAGAVVGETPGP

SEQ ID NO: 19 - protein, 80 aa, Synthetic construct
PDPDFFSGTVSLPGLEPPGGPDLLDDGFAYDPTAPTLFTMLDLLPPAPPHASAVVCSGGAGAVVGETPGPEPLTLDSYQA

SEQ ID NO: 20 - protein, 80 aa, Synthetic construct
EHMELDDLPELQAVQSDPTQSGMYQLSSDVSHQEYPRSSWNQNTSDIPETTYRENEVDWLTELANIATSPQSPLMQCSFY

SEQ ID NO: 21 - protein, 80 aa, Synthetic construct
PTFIPPPYGVLRSLLENPLKLPLHHEDAFSKDKDKEKKLDDESNSPTVPQSAFLGPTLWDKTLPYDGDTFQLEYMDLEEF

SEQ ID NO: 22 - protein, 80 aa, Synthetic construct
LPLHHEDAFSKDKDKEKKLDDESNSPTVPQSAFLGPTLWDKTLPYDGDTFQLEYMDLEEFLSENGIPPSPSQHDHSPHPP

SEQ ID NO: 23 - protein, 80 aa, Synthetic construct
KDKDKEKKLDDESNSPTVPQSAFLGPTLWDKTLPYDGDTFQLEYMDLEEFLSENGIPPSPSQHDHSPHPPGLQPASSAAP

SEQ ID NO: 24 - protein, 80 aa, Synthetic construct
DESNSPTVPQSAFLGPTLWDKTLPYDGDTFQLEYMDLEEFLSENGIPPSPSQHDHSPHPPGLQPASSAAPSVMDLSSRAS

SEQ ID NO: 25 - protein, 80 aa, Synthetic construct
SAFLGPTLWDKTLPYDGDTFQLEYMDLEEFLSENGIPPSPSQHDHSPHPPGLQPASSAAPSVMDLSSRASAPLHPGIPSP

SEQ ID NO: 26 - protein, 80 aa, Synthetic construct
KTLPYDGDTFQLEYMDLEEFLSENGIPPSPSQHDHSPHPPGLQPASSAAPSVMDLSSRASAPLHPGIPSPNCMQSPIRPG

SEQ ID NO: 27 - protein, 80 aa, Synthetic construct
RAQPGTPQDSPLPAHTPPSHSAKLLAEPSPARTMHDTLLPDGDLGTDLDAINPSLTDFDFQGNLWEQLKDDSLALDPLVL

SEQ ID NO: 28 - protein, 80 aa, Synthetic construct
PLPAHTPPSHSAKLLAEPSPARTMHDTLLPDGDLGTDLDAINPSLTDFDFQGNLWEQLKDDSLALDPLVLVTSSPTSSSM

SEQ ID NO: 29 - protein, 80 aa, Synthetic construct
SAKLLAEPSPARTMHDTLLPDGDLGTDLDAINPSLTDFDFQGNLWEQLKDDSLALDPLVLVTSSPTSSSMPPPQPPPHCF

SEQ ID NO: 30 - protein, 80 aa, Synthetic construct
DGDLGTDLDAINPSLTDFDFQGNLWEQLKDDSLALDPLVLVTSSPTSSSMPPPQPPPHCFPPGPCLTETGSGAGDLAAPG

SEQ ID NO: 31 - protein, 80 aa, Synthetic construct
HVDSTTYDGTTPLHIAAGRGSTRLAALLKAAGADPLVENFEPLYDLDDSWENAGEDEGVVPGTTPLDMATSWQVFDILNG

SEQ ID NO: 32 - protein, 80 aa, Synthetic construct
AGADPLVENFEPLYDLDDSWENAGEDEGVVPGTTPLDMATSWQVFDILNGKPYEPEFTSDDLLAQGDMKQLAEDVKLQLY

SEQ ID NO: 33 - protein, 80 aa, Synthetic construct
EPLYDLDDSWENAGEDEGVVPGTTPLDMATSWQVFDILNGKPYEPEFTSDDLLAQGDMKQLAEDVKLQLYKLLEIPDPDK

SEQ ID NO: 34 - protein, 80 aa, Synthetic construct
KPTMDLASPEAAPAAPTALPSFSTFMDGYTGEFDTFLYQLPGTVQPCSSASSSASSTSSSSATSPASASFKFEDFQVYGC

SEQ ID NO: 35 - protein, 80 aa, Synthetic construct
SSSDDEFEDDLLDLNPSSNFESMSLGSFSSSSALDRDLDFNFEPGSGSHFEFPDYCTPEVSEMISGDWLESSISNLVFTY

SEQ ID NO: 36 - protein, 80 aa, Synthetic construct
ASAPWPERVPRLLAPRLPSYPPPPPTVGLRSMEQEETYLELYLDQCAAQDGLAPPRSPLFSPVVPYDMYILNASNPDTAF

SEQ ID NO: 37 - protein, 80 aa, Synthetic construct
ALGRNHLADNCYSNYPFPLTSWPCSFSPSQNSSEPFYQQLPLEPPAAKTGCPPLWPNPAGNLYEEKVHVDFNSYVQSPAY

SEQ ID NO: 38 - protein, 80 aa, Synthetic construct
CYSNYPFPLTSWPCSFSPSQNSSEPFYQQLPLEPPAAKTGCPPLWPNPAGNLYEEKVHVDFNSYVQSPAYHSPQEDPFLF

SEQ ID NO: 39 - protein, 80 aa, Synthetic construct
KESYYRSTMSQSTQTNEFLSPEVFQHIWDFLEQPICSVQPIDLNFVDEPSEDGATNKIEISMDCIRMQDSDLSDPMWPQY

SEQ ID NO: 40 - protein, 80 aa, Synthetic construct
QSTQTNEFLSPEVFQHIWDFLEQPICSVQPIDLNFVDEPSEDGATNKIEISMDCIRMQDSDLSDPMWPQYTNLGLLNSMD

SEQ ID NO: 41 - protein, 80 aa, Synthetic construct
LMENPPREARLDKEKGKEKLEEDEAAAASTMAVSASLMPPIWDKTIPYDGESFHLEYMDLDEFLLENGIPASPTHLAHNL

SEQ ID NO: 42 - protein, 80 aa, Synthetic construct
IWDKTIPYDGESFHLEYMDLDEFLLENGIPASPTHLAHNLLLPVAELEGKESASSSTASPPSSSTAIFQPSETVSSTESS

SEQ ID NO: 43 - protein, 80 aa, Synthetic construct
ESFHLEYMDLDEFLLENGIPASPTHLAHNLLLPVAELEGKESASSSTASPPSSSTAIFQPSETVSSTESSLEKERETPSP

SEQ ID NO: 44 - protein, 80 aa, Synthetic construct
WLEPPEDIFSTGSVLELGLHCPPPEVPVTRLQEQGLQGWKSGGDRGCGLQESEPEDFLKLFIDPNEVYCSEASPGSDSGI

SEQ ID NO: 45 - protein, 80 aa, Synthetic construct
SVPPSMDAGRSSSVDLSLSSCDSFELLQALPDYSLGPHYTSQKVSDSLDNIEAPHFPLPGLSPPGDASSCFLESLMGFSE

SEQ ID NO: 46 - protein, 80 aa, Synthetic construct
SSSVDLSLSSCDSFELLQALPDYSLGPHYTSQKVSDSLDNIEAPHFPLPGLSPPGDASSCFLESLMGFSEPAAEALDPFI

SEQ ID NO: 47 - protein, 80 aa, Synthetic construct
ALPDYSLGPHYTSQKVSDSLDNIEAPHFPLPGLSPPGDASSCFLESLMGFSEPAAEALDPFIDSQFEDTVPASLMEPVPV

SEQ ID NO: 48 - protein, 80 aa, Synthetic construct
WLEWAVKEYGLPDVNILLFQNIDGKELCKMTKDDFQRLTPSYNADILLSHLHYLRETPLPHLTSDDVDKALQNSPRLMHA

SEQ ID NO: 49 - protein, 80 aa, Synthetic construct
NIDGKELCKMTKDDFQRLTPSYNADILLSHLHYLRETPLPHLTSDDVDKALQNSPRLMHARNTGGAAFIFPNTSVYPEAT

SEQ ID NO: 50 - protein, 80 aa, Synthetic construct
TKDDFQRLTPSYNADILLSHLHYLRETPLPHLTSDDVDKALQNSPRLMHARNTGGAAFIFPNTSVYPEATQRITTRPDLP

SEQ ID NO: 51 - protein, 80 aa, Synthetic construct
SYNADILLSHLHYLRETPLPHLTSDDVDKALQNSPRLMHARNTGGAAFIFPNTSVYPEATQRITTRPDLPYEPPRRSAWT

SEQ ID NO: 52 - protein, 80 aa, Synthetic construct
KTELQQAGAKPELKLEGRRPVDSGRQNIDFSNVDISELSSEVMGTMDAFDVHEFDQYLPLGGPAPPEPGQAYGGAYFHAG

SEQ ID NO: 53 - protein, 80 aa, Synthetic construct
VDSGRQNIDFSNVDISELSSEVMGTMDAFDVHEFDQYLPLGGPAPPEPGQAYGGAYFHAGASPVWAHKSAPSASASPTET

SEQ ID NO: 54 - protein, 80 aa, Synthetic construct
APDSPAPAQTPPLHALPDLSPSPLPHPAMGRAPVDFINISTDMNTEVDALDPSIMDFALQGNLWEEMKDEGFSLDTLGAF

SEQ ID NO: 55 - protein, 80 aa, Synthetic construct
PPLHALPDLSPSPLPHPAMGRAPVDFINISTDMNTEVDALDPSIMDFALQGNLWEEMKDEGFSLDTLGAFADSPLGCDLG

SEQ ID NO: 56 - protein, 80 aa, Synthetic construct
PSPLPHPAMGRAPVDFINISTDMNTEVDALDPSIMDFALQGNLWEEMKDEGFSLDTLGAFADSPLGCDLGASGLTPASGG

SEQ ID NO: 57 - protein, 80 aa, Synthetic construct
TDMNTEVDALDPSIMDFALQGNLWEEMKDEGFSLDTLGAFADSPLGCDLGASGLTPASGGSDQSFPDLQVTGLYTAYSTP

SEQ ID NO: 58 - protein, 80 aa, Synthetic construct
DPSIMDFALQGNLWEEMKDEGFSLDTLGAFADSPLGCDLGASGLTPASGGSDQSFPDLQVTGLYTAYSTPDSVAASGTSS

SEQ ID NO: 59 - protein, 80 aa, Synthetic construct
VEDSCLSQPVTAFPQGTWIGEDIFPPLLPPTEQDLTKLLLEGQGESGGGSLGAQPLLQPSHYGQSGISMSHMDLRANPSW

SEQ ID NO: 60 - protein, 80 aa, Synthetic construct
GSETARSVPDMDLSGSFYAADWEPLHSGSLGMGPMATELEPLCTPVVTCTPSCTAYTSSFVFTYPEADSFPSCAAAHRKG

SEQ ID NO: 61 - protein, 80 aa, Synthetic construct
MDLSGSFYAADWEPLHSGSLGMGPMATELEPLCTPVVTCTPSCTAYTSSFVFTYPEADSFPSCAAAHRKGSSSNEPSSDS

SEQ ID NO: 62 - protein, 80 aa, Synthetic construct
EVLLKSGELQACSSEHYLQPETNGVIRSAGGVPILPGNVVQGLYPVAQPSLGNASNMELSLDHFDISFSNQFSDLINDFI

SEQ ID NO: 63 - protein, 80 aa, Synthetic construct
ACSSEHYLQPETNGVIRSAGGVPILPGNVVQGLYPVAQPSLGNASNMELSLDHFDISFSNQFSDLINDFISVEGGSSTIY

SEQ ID NO: 64 - protein, 80 aa, Synthetic construct
ETNGVIRSAGGVPILPGNVVQGLYPVAQPSLGNASNMELSLDHFDISFSNQFSDLINDFISVEGGSSTIYGHQLVSGDST

SEQ ID NO: 65 - protein, 80 aa, Synthetic construct
GVPILPGNVVQGLYPVAQPSLGNASNMELSLDHFDISFSNQFSDLINDFISVEGGSSTIYGHQLVSGDSTALSQSEDGAR

SEQ ID NO: 66 - protein, 80 aa, Synthetic construct
LGNASNMELSLDHFDISFSNQFSDLINDFISVEGGSSTIYGHQLVSGDSTALSQSEDGARAPFTQAEMCLPCCSPQQGSL

SEQ ID NO: 67 - protein, 80 aa, Synthetic construct
LDHFDISFSNQFSDLINDFISVEGGSSTIYGHQLVSGDSTALSQSEDGARAPFTQAEMCLPCCSPQQGSLQLSSSEGGAS

SEQ ID NO: 68 - protein, 80 aa, Synthetic construct
SPVPGCPPSPAYYSPATYHPLHSNLQAHLGQLSPPPEHPGFDALDQLSQVELLGDMDRNEFDQYLNTPGHPDSATGAMAL

SEQ ID NO: 69 - protein, 80 aa, Synthetic construct
AYYSPATYHPLHSNLQAHLGQLSPPPEHPGFDALDQLSQVELLGDMDRNEFDQYLNTPGHPDSATGAMALSGHVPVSQVT

SEQ ID NO: 70 - protein, 80 aa, Synthetic construct
PRCSPQFPSIGQEPPEMNLYYENFFHPQGVPSPQRPSFEGGGEYGATPNPYLWFNGPTMTPPPYLPGPNASPFLPQAYGV

SEQ ID NO: 71 - protein, 80 aa, Synthetic construct
GQEPPEMNLYYENFFHPQGVPSPQRPSFEGGGEYGATPNPYLWFNGPTMTPPPYLPGPNASPFLPQAYGVQRPLLPSVSG

SEQ ID NO: 72 - protein, 80 aa, Synthetic construct
YENFFHPQGVPSPQRPSFEGGGEYGATPNPYLWFNGPTMTPPPYLPGPNASPFLPQAYGVQRPLLPSVSGLGGSDLGWLP

SEQ ID NO: 73 - protein, 80 aa, Synthetic construct
PDKDGPDYEPNLWMWVNPNIVYPPGKLEVSGRRKREDLTSTLPSSQPPQKEEDASCSEAAGVESLSQSSSKRSPPRKRFA

SEQ ID NO: 74 - protein, 80 aa, Synthetic construct
ERRMKAGYLDQQVPYTFSSKSPGNGSLREALIGPLGKLMDPGSLPPLDSEDLFQDLSHFQETWLAEAQVPDSDEQFVPDF

SEQ ID NO: 75 - protein, 80 aa, Synthetic construct
MFDLSLNFSQSAHSASEQQLGGGAAAGNLSLSLVDKDLDSFSEGSLGSHFEFPDYCTPELSEMIAGDWLEANFSDLVFTY

SEQ ID NO: 76 - protein, 80 aa, Synthetic construct
EAIFDAGTLGGELGALEALELSPPLSPASHVDVDLTIHGRHIDCPATWGPSVEQAADSLDFDETFLATSFLQHPWDESGS

SEQ ID NO: 77 - protein, 80 aa, Synthetic construct
GELGALEALELSPPLSPASHVDVDLTIHGRHIDCPATWGPSVEQAADSLDFDETFLATSFLQHPWDESGSGCLPPEPLFE

SEQ ID NO: 78 - protein, 80 aa, Synthetic construct
LVLQNEALYPQRRSYTSEDEAWKSFLENPLTAATKAMMSINGDEDSAAALGLLYDYYKVPRERRSSTAKPEVEHPEPDHS

SEQ ID NO: 79 - protein, 80 aa, Synthetic construct
QRRSYTSEDEAWKSFLENPLTAATKAMMSINGDEDSAAALGLLYDYYKVPRERRSSTAKPEVEHPEPDHSKRNSIPIVTE

SEQ ID NO: 80 - protein, 80 aa, Synthetic construct
EVLESGEQGVLQWDRKLSELSEPGDGEALMYHTHFSELLDEFSQNVLGQLLNDPFLSEKSVSMEVEPSPTSPAPLIQAEH

SEQ ID NO: 81 - protein, 80 aa, Synthetic construct
SEPGDGEALMYHTHFSELLDEFSQNVLGQLLNDPFLSEKSVSMEVEPSPTSPAPLIQAEHSYSLCEEPRAQSPFTHITTS

SEQ ID NO: 82 - protein, 80 aa, Synthetic construct
YHTHFSELLDEFSQNVLGQLLNDPFLSEKSVSMEVEPSPTSPAPLIQAEHSYSLCEEPRAQSPFTHITTSDSFNDDEVES

SEQ ID NO: 83 - protein, 80 aa, Synthetic construct
TEMSFLSSEVLVGDLMSPFDQSGLGAEESLGLLDDYLEVAKHFKPHGFSSDKAKAGSSEWLAVDGLVSPSNNSKEDAFSG

SEQ ID NO: 84 - protein, 80 aa, Synthetic construct
LVGDLMSPFDQSGLGAEESLGLLDDYLEVAKHFKPHGFSSDKAKAGSSEWLAVDGLVSPSNNSKEDAFSGTDWMLEKMDL

SEQ ID NO: 85 - protein, 80 aa, Synthetic construct
QSGLGAEESLGLLDDYLEVAKHFKPHGFSSDKAKAGSSEWLAVDGLVSPSNNSKEDAFSGTDWMLEKMDLKEFDLDALLG

SEQ ID NO: 86 - protein, 80 aa, Synthetic construct
GLLDDYLEVAKHFKPHGFSSDKAKAGSSEWLAVDGLVSPSNNSKEDAFSGTDWMLEKMDLKEFDLDALLGIDDLETMPDD

SEQ ID NO: 87 - protein, 80 aa, Synthetic construct
KHFKPHGFSSDKAKAGSSEWLAVDGLVSPSNNSKEDAFSGTDWMLEKMDLKEFDLDALLGIDDLETMPDDLLTTLDDTCD

SEQ ID NO: 88 - protein, 80 aa, Synthetic construct
DKAKAGSSEWLAVDGLVSPSNNSKEDAFSGTDWMLEKMDLKEFDLDALLGIDDLETMPDDLLTTLDDTCDLFAPLVQETN

SEQ ID NO: 89 - protein, 80 aa, Synthetic construct
LAVDGLVSPSNNSKEDAFSGTDWMLEKMDLKEFDLDALLGIDDLETMPDDLLTTLDDTCDLFAPLVQETNKQPPQTVNPI

SEQ ID NO: 90 - protein, 80 aa, Synthetic construct
NNSKEDAFSGTDWMLEKMDLKEFDLDALLGIDDLETMPDDLLTTLDDTCDLFAPLVQETNKQPPQTVNPIGHLPESLTKP

SEQ ID NO: 91 - protein, 80 aa, Synthetic construct
TDWMLEKMDLKEFDLDALLGIDDLETMPDDLLTTLDDTCDLFAPLVQETNKQPPQTVNPIGHLPESLTKPDQVAPFTFLQ

SEQ ID NO: 92 - protein, 80 aa, Synthetic construct
IDDLETMPDDLLTTLDDTCDLFAPLVQETNKQPPQTVNPIGHLPESLTKPDQVAPFTFLQPLPLSPGVLSSTPDHSFSLE

SEQ ID NO: 93 - protein, 80 aa, Synthetic construct
LLTTLDDTCDLFAPLVQETNKQPPQTVNPIGHLPESLTKPDQVAPFTFLQPLPLSPGVLSSTPDHSFSLELGSEVDITEG

SEQ ID NO: 94 - protein, 80 aa, Synthetic construct
PCVQAQYGSSPQGASPASQSYSYHSSGEYSSDFLTPEFVKFSMDLTNTEITATTSLPSFSTFMDNYSTGYDVKPPCLYQM

SEQ ID NO: 95 - protein, 80 aa, Synthetic construct
LPATGQPTVNNDYSYYHISEAQNVSSHVPYPVALHVNIVNVPQPAAAAIQRHYNDEDPEKEKRIKELELLLMSTENELKG

SEQ ID NO: 96 - protein, 80 aa, Synthetic construct
NDYSYYHISEAQNVSSHVPYPVALHVNIVNVPQPAAAAIQRHYNDEDPEKEKRIKELELLLMSTENELKGQQVLPTQNHT

SEQ ID NO: 97 - protein, 80 aa, Synthetic construct
PVALHVNIVNVPQPAAAAIQRHYNDEDPEKEKRIKELELLLMSTENELKGQQVLPTQNHTCSYPGWHSTTIADHTRPHGD

SEQ ID NO: 98 - protein, 80 aa, Synthetic construct
VPQPAAAAIQRHYNDEDPEKEKRIKELELLLMSTENELKGQQVLPTQNHTCSYPGWHSTTIADHTRPHGDSAPVSCLGEH

SEQ ID NO: 99 - protein, 80 aa, Synthetic construct
RHYNDEDPEKEKRIKELELLLMSTENELKGQQVLPTQNHTCSYPGWHSTTIADHTRPHGDSAPVSCLGEHHSTPSLPADP

SEQ ID NO: 100 - protein, 80 aa, Synthetic construct
EEAAAAEEGEEETVASGEESLGFLSRLPPGPAGLDCSALDRDPDLQPPSGTSHFEFPDYCTPEVTEMIAGDWRPSSIADL

SEQ ID NO: 101 - protein, 80 aa, Synthetic construct
LTTDPSQSLLSLEQEPLLSRMGSLRAPVDEDRLSPLVAADSLLEHVREDFSGLLPEEFISLSPPHEALDYHFGLEEGEGI

SEQ ID NO: 102 - protein, 80 aa, Synthetic construct
SLEQEPLLSRMGSLRAPVDEDRLSPLVAADSLLEHVREDFSGLLPEEFISLSPPHEALDYHFGLEEGEGIRDLFDCDFGD

SEQ ID NO: 103 - protein, 80 aa, Synthetic construct
SSSLGSAKHQQQSPVSQSMQTLSDSLSGSSLYSTSANLPVMGHEKFPSDLDLDMFNGSLECDMESIIRSELMDADGLDFN

SEQ ID NO: 104 - protein, 80 aa, Synthetic construct
TLSDSLSGSSLYSTSANLPVMGHEKFPSDLDLDMFNGSLECDMESIIRSELMDADGLDFNFDSLISTQNVVGLNVGNFTG

SEQ ID NO: 105 - protein, 80 aa, Synthetic construct
LYSTSANLPVMGHEKFPSDLDLDMFNGSLECDMESIIRSELMDADGLDFNFDSLISTQNVVGLNVGNFTGAKQASSQSWV

SEQ ID NO: 106 - protein, 80 aa, Synthetic construct
STSANLPVMGHEKFPSDLDLDMFNGSLECDMESIIRSELMDADGLDFNFDSLISTQNVVGLNVGNFTGAKQASSQSWVPG

SEQ ID NO: 107 - protein, 80 aa, Synthetic construct
IPKPASKDLASTNSGHSDCSVSMGNLSPLASPANLLQQTEDQIPSNLEGPFVNLLPPLLQEDYLLSLGEEEGISDLFDAY

SEQ ID NO: 108 - protein, 80 aa, Synthetic construct
STNSGHSDCSVSMGNLSPLASPANLLQQTEDQIPSNLEGPFVNLLPPLLQEDYLLSLGEEEGISDLFDAYDLEKLPLVED

SEQ ID NO: 109 - protein, 80 aa, Synthetic construct
LLAFLLEESGDLGTAPDEAVRAPLDWALPLSEVPSDWEVDDLLCSLLSPPASLNILSSSNPCLVHHDHTYSLPRETVSMD

SEQ ID NO: 110 - protein, 80 aa, Synthetic construct
EDPYQLELPALQSEVPKDSTHQWLDGSDCVLQAPGNTSCLLHYMPQAPSAEPPLEWPFPDLFSEPLCRGPILPLQANLTR

SEQ ID NO: 111 - protein, 80 aa, Synthetic construct
SSDELSWIIELLEKDGMAFQEALDPGPFDQGSPFAQELLDDGQQASPYHPGSCGAGAPSPGSSDVSTAGTGASRSSHSSD

SEQ ID NO: 112 - protein, 80 aa, Synthetic construct
LGKERFLELAPDFVGDILWEHLEQMIKENQEKTEDQYEENSHLTSVPHWINSNTLGFGTEQAPYGMQTQNYPKGGLLDSM

SEQ ID NO: 113 - protein, 80 aa, Synthetic construct
KFSYTSEDEAWKTYLENPLTAATKAMMRVNGDDDSVAALSFLYDYYMGPKEKRILSSSTGGRNDQGKRYYHGMEYETDLT

SEQ ID NO: 114 - protein, 80 aa, Synthetic construct
SPAPLEPSSRVGRGEALFGGPVGASELEPFSLSSFPDLMGELISDEAPSIPAPTPQLSPALSTITDFSPEWSYPEGGVKV

SEQ ID NO: 115 - protein, 80 aa, Synthetic construct
PVGASELEPFSLSSFPDLMGELISDEAPSIPAPTPQLSPALSTITDFSPEWSYPEGGVKVLITGPWTEAAEHYSCVFDHI

SEQ ID NO: 116 - protein, 80 aa, Synthetic construct
SLSSFPDLMGELISDEAPSIPAPTPQLSPALSTITDFSPEWSYPEGGVKVLITGPWTEAAEHYSCVFDHIAVPASLVQPG

SEQ ID NO: 117 - protein, 80 aa, Synthetic construct
MEPTASSVPAPAPTPQQAPPPPSLVPLEATDSLLELPHPLLQQTEDQFLSPTLACSSPLISFSPSLDQDDYLWGLEAGEG

SEQ ID NO: 118 - protein, 80 aa, Synthetic construct
SLEECLRLLEATCPFGENAEFPADISSITEAVPSESEPPALQNNLLSPLLTGTESPFDLEQQWQDLMSIMEMQAMEVNTS

SEQ ID NO: 119 - protein, 80 aa, Synthetic construct
ATCPFGENAEFPADISSITEAVPSESEPPALQNNLLSPLLTGTESPFDLEQQWQDLMSIMEMQAMEVNTSASEILYSAPP

SEQ ID NO: 120 - protein, 80 aa, Synthetic construct
FPADISSITEAVPSESEPPALQNNLLSPLLTGTESPFDLEQQWQDLMSIMEMQAMEVNTSASEILYSAPPGDPLSTNYSL

SEQ ID NO: 121 - protein, 80 aa, Synthetic construct
LQNNLLSPLLTGTESPFDLEQQWQDLMSIMEMQAMEVNTSASEILYSAPPGDPLSTNYSLAPNTPINQNVSLHQASLGGC

SEQ ID NO: 122 - protein, 80 aa, Synthetic construct
TGTESPFDLEQQWQDLMSIMEMQAMEVNTSASEILYSAPPGDPLSTNYSLAPNTPINQNVSLHQASLGGCSQDFLLFSPE

SEQ ID NO: 123 - protein, 80 aa, Synthetic construct
QQWQDLMSIMEMQAMEVNTSASEILYSAPPGDPLSTNYSLAPNTPINQNVSLHQASLGGCSQDFLLFSPEVESLPVASSS

SEQ ID NO: 124 - protein, 80 aa, Synthetic construct
SQDFLLFSPEVESLPVASSSTLLPLAPSNSTSLNSTFGSTNLTGLFFPPQLNGTANDTAGPELPDPLGGLLDEAMLDEIS

SEQ ID NO: 125 - protein, 80 aa, Synthetic construct
TLLPLAPSNSTSLNSTFGSTNLTGLFFPPQLNGTANDTAGPELPDPLGGLLDEAMLDEISLMDLAIEEGFNPVQASQLEE

SEQ ID NO: 126 - protein, 80 aa, Synthetic construct
TSLNSTFGSTNLTGLFFPPQLNGTANDTAGPELPDPLGGLLDEAMLDEISLMDLAIEEGFNPVQASQLEEEFDSDSGLSL

SEQ ID NO: 127 - protein, 80 aa, Synthetic construct
ESPFSPGLFHRLDEDWDSALFAELGYFTDTDELQLEAANETYENNFDNLDFDLDLMPWESDIWDINNQICTVKDIKAEPQ

SEQ ID NO: 128 - protein, 80 aa, Synthetic construct
PLFARPGMYPDPHSPFAVSPIPGRGGVLNVPISPALSLTPTIFSYSPSPGLSPFTSSSCFSFNPEEMKHYLHSQACSVFN

SEQ ID NO: 129 - protein, 80 aa, Synthetic construct
LSGARVSLSSPTSAEYIPLTPAAADVNGSPATITIETCEDPGDWTAAIGDDTFTFWRGLKDAGLLDEVIQEFHQELVETM

SEQ ID NO: 130 - protein, 80 aa, Synthetic construct
NAPERQPQPDGGDAPGHEPGGSPQDELDFSILFDYEYLNPNEEEPNAHKVASPPSGPAYPDDVLDYGLKPYSPLASLSGE

SEQ ID NO: 131 - protein, 80 aa, Synthetic construct
GGDAPGHEPGGSPQDELDFSILFDYEYLNPNEEEPNAHKVASPPSGPAYPDDVLDYGLKPYSPLASLSGEPPGRFGEPDR

SEQ ID NO: 132 - protein, 80 aa, Synthetic construct
VGLCPKPLEAPGPSSLVPTLSMIAPPPVMASAPIPKALGTPVLTPPTEAASQDRMPQDLDLDMYMENLECDMDNIISDLM

SEQ ID NO: 133 - protein, 80 aa, Synthetic construct
PGPSSLVPTLSMIAPPPVMASAPIPKALGTPVLTPPTEAASQDRMPQDLDLDMYMENLECDMDNIISDLMDEGEGLDFNF

SEQ ID NO: 134 - protein, 80 aa, Synthetic construct
DPTRFFTDNLLSPEDWGLQNSTLYSGLDEVAEEQTQLFRCPEQDVPFDGSSLDVGMDVSPSEPPWELLPIFPDLQVKSEP

SEQ ID NO: 135 - protein, 80 aa, Synthetic construct
PLSPSLLGGPGPERTPGSGSGSGLQAPGPALTPSLLPTHTLTPVLLTPSSLPPSIHFWSTLSPIAPRSPAKLSFQFPSSG

SEQ ID NO: 136 - protein, 80 aa, Synthetic construct
LVPPPSEDLVPYDTDLYQRQTHEYYPYLSSDGESHSDHYWDFHPHHVHSEFESFAENNFTELQSVQPPQLQQLYRHMELE

SEQ ID NO: 137 - protein, 80 aa, Synthetic construct
PYDTDLYQRQTHEYYPYLSSDGESHSDHYWDFHPHHVHSEFESFAENNFTELQSVQPPQLQQLYRHMELEQMHVLDTPMV

SEQ ID NO: 138 - protein, 80 aa, Synthetic construct
DGESHSDHYWDFHPHHVHSEFESFAENNFTELQSVQPPQLQQLYRHMELEQMHVLDTPMVPPHPSLGHQVSYLPRMCLQY

SEQ ID NO: 139 - protein, 80 aa, Synthetic construct
SALLDSSSSSSSSSSSSSNSNSSSSSGPNPSTSFEPIKADPTGVLELPKELSEIFDPTRECMSSELLEELMSSEVFAPLL

SEQ ID NO: 140 - protein, 80 aa, Synthetic construct
SSSSSSSSNSNSSSSSGPNPSTSFEPIKADPTGVLELPKELSEIFDPTRECMSSELLEELMSSEVFAPLLRLSPPPGDHD

SEQ ID NO: 141 - protein, 80 aa, Synthetic construct
STSFEPIKADPTGVLELPKELSEIFDPTRECMSSELLEELMSSEVFAPLLRLSPPPGDHDYIYNLDESEGVCDLFDVPVL

SEQ ID NO: 142 - protein, 80 aa, Synthetic construct
SFEPIKADPTGVLELPKELSEIFDPTRECMSSELLEELMSSEVFAPLLRLSPPPGDHDYIYNLDESEGVCDLFDVPVLNL

SEQ ID NO: 143 - protein, 80 aa, Synthetic construct
MNRLTQVKTPVQVPLPHPMQMSALGGYSSVSSCNGYGRMGLLHQEKLPSDLDGMFIERLDCDMESIIRNDLMDGDTLDFN

SEQ ID NO: 144 - protein, 80 aa, Synthetic construct
VQVPLPHPMQMSALGGYSSVSSCNGYGRMGLLHQEKLPSDLDGMFIERLDCDMESIIRNDLMDGDTLDFNFDNVLPNQSF

SEQ ID NO: 145 - protein, 80 aa, Synthetic construct
MSALGGYSSVSSCNGYGRMGLLHQEKLPSDLDGMFIERLDCDMESIIRNDLMDGDTLDFNFDNVLPNQSFPHSVKTTTHS

SEQ ID NO: 146 - protein, 80 aa, Synthetic construct
ESSLGLSNGVSDLSPEYAVLTSTIKNEVDSTVNIIVVGQSHLDSNIENQEIVTNPPDICQVVEVTTESDEQPVSMSELYP

SEQ ID NO: 147 - protein, 80 aa, Synthetic construct
SDLSPEYAVLTSTIKNEVDSTVNIIVVGQSHLDSNIENQEIVTNPPDICQVVEVTTESDEQPVSMSELYPLQISPVSSYA

SEQ ID NO: 148 - protein, 80 aa, Synthetic construct
TVNIIVVGQSHLDSNIENQEIVTNPPDICQVVEVTTESDEQPVSMSELYPLQISPVSSYAESETTDSVPSDEESAEGRPH

SEQ ID NO: 149 - protein, 80 aa, Synthetic construct
HLDSNIENQEIVTNPPDICQVVEVTTESDEQPVSMSELYPLQISPVSSYAESETTDSVPSDEESAEGRPHWRKRNIEGKQ

SEQ ID NO: 150 - protein, 80 aa, Synthetic construct
DVSSEQQHLKGQTGTNGGNVKLYTTDQSTFDILQDLEFSSGSPGKETNESPWRSDLLIDENCLLSPLAGEDDSFLLEGNS

SEQ ID NO: 151 - protein, 80 aa, Synthetic construct
VALVPMPSDPPFNTRRAYTSEDEAWKSYLENPLTAATKAMMSINGDEDSAAALGLLYDYYKVPRDKRLLSVSKASDSQED

SEQ ID NO: 152 - protein, 80 aa, Synthetic construct
PFNTRRAYTSEDEAWKSYLENPLTAATKAMMSINGDEDSAAALGLLYDYYKVPRDKRLLSVSKASDSQEDQEKRNCLGTS

SEQ ID NO: 153 - protein, 80 aa, Synthetic construct
EFLPIQPAQHIQSETSGSANYSQVAHIPKSDALYFDDCMQLLAQTFPFVDDNEVSSATFQSLVPDIPGHIESPVFIATNQ

SEQ ID NO: 154 - protein, 80 aa, Synthetic construct
YSQVAHIPKSDALYFDDCMQLLAQTFPFVDDNEVSSATFQSLVPDIPGHIESPVFIATNQAQSPETSVAQVAPVDLDGMQ

SEQ ID NO: 155 - protein, 80 aa, Synthetic construct
DALYFDDCMQLLAQTFPFVDDNEVSSATFQSLVPDIPGHIESPVFIATNQAQSPETSVAQVAPVDLDGMQQDIEQVWEEL

SEQ ID NO: 156 - protein, 80 aa, Synthetic construct
LLAQTFPFVDDNEVSSATFQSLVPDIPGHIESPVFIATNQAQSPETSVAQVAPVDLDGMQQDIEQVWEELLSIPELQCLN

SEQ ID NO: 157 - protein, 80 aa, Synthetic construct
DNEVSSATFQSLVPDIPGHIESPVFIATNQAQSPETSVAQVAPVDLDGMQQDIEQVWEELLSIPELQCLNIENDKLVETT

SEQ ID NO: 158 - protein, 80 aa, Synthetic construct
ESPVFIATNQAQSPETSVAQVAPVDLDGMQQDIEQVWEELLSIPELQCLNIENDKLVETTMVPSPEAKLTEVDNYHFYSS

SEQ ID NO: 159 - protein, 80 aa, Synthetic construct
EVDNYHFYSSIPSMEKEVGNCSPHFLNAFEDSFSSILSTEDPNQLTVNSLNSDATVNTDFGDEFYSAFIAEPSISNSMPS

SEQ ID NO: 160 - protein, 80 aa, Synthetic construct
IPSMEKEVGNCSPHFLNAFEDSFSSILSTEDPNQLTVNSLNSDATVNTDFGDEFYSAFIAEPSISNSMPSPATLSHSLSE

SEQ ID NO: 161 - protein, 80 aa, Synthetic construct
CSPHFLNAFEDSFSSILSTEDPNQLTVNSLNSDATVNTDFGDEFYSAFIAEPSISNSMPSPATLSHSLSELLNGPIDVSD

SEQ ID NO: 162 - protein, 80 aa, Synthetic construct
DSFSSILSTEDPNQLTVNSLNSDATVNTDFGDEFYSAFIAEPSISNSMPSPATLSHSLSELLNGPIDVSDLSLCKAFNQN

SEQ ID NO: 163 - protein, 80 aa, Synthetic construct
DPNQLTVNSLNSDATVNTDFGDEFYSAFIAEPSISNSMPSPATLSHSLSELLNGPIDVSDLSLCKAFNQNHPESTAEFND

SEQ ID NO: 164 - protein, 80 aa, Synthetic construct
NSDATVNTDFGDEFYSAFIAEPSISNSMPSPATLSHSLSELLNGPIDVSDLSLCKAFNQNHPESTAEFNDSDSGISLNTS

SEQ ID NO: 165 - protein, 80 aa, Synthetic construct
DLWNWDEASPQEVPPGNKLAGLEGAKLGFCFPDLALQGDTPTATAETCWKGTSSSLASFPQLDWGSALLHPEVPWGAEPD

SEQ ID NO: 166 - protein, 80 aa, Synthetic construct
GLEGAKLGFCFPDLALQGDTPTATAETCWKGTSSSLASFPQLDWGSALLHPEVPWGAEPDSQALPWSGDWTDMACTAWDS

SEQ ID NO: 167 - protein, 80 aa, Synthetic construct
FPDLALQGDTPTATAETCWKGTSSSLASFPQLDWGSALLHPEVPWGAEPDSQALPWSGDWTDMACTAWDSWSGASQTLGP

SEQ ID NO: 168 - protein, 80 aa, Synthetic construct
PTATAETCWKGTSSSLASFPQLDWGSALLHPEVPWGAEPDSQALPWSGDWTDMACTAWDSWSGASQTLGPAPLGPGPIPA

SEQ ID NO: 169 - protein, 80 aa, Synthetic construct
QLDWGSALLHPEVPWGAEPDSQALPWSGDWTDMACTAWDSWSGASQTLGPAPLGPGPIPAAGSEGAAGQNCVPVAGEATS

SEQ ID NO: 170 - protein, 80 aa, Synthetic construct
EEVSADVVEIAKELELEVEPEDVTELLQSHDKTLTDEELFLMDAQRKWFLEMESTPGEDAVNIVEMTTKDLEYYINLVDK

SEQ ID NO: 171 - protein, 80 aa, Synthetic construct
EDVTELLQSHDKTLTDEELFLMDAQRKWFLEMESTPGEDAVNIVEMTTKDLEYYINLVDKAAAGFERIDSNFERSSTVGK

SEQ ID NO: 172 - protein, 80 aa, Synthetic construct
APFYEPGRAGKPGRGAEPGALGEPGAAAPAMYDDESAIDFSAYIDSMAAVPTLELCHDELFADLFNSNHKAGGAGPLELL

SEQ ID NO: 173 - protein, 80 aa, Synthetic construct
KPGRGAEPGALGEPGAAAPAMYDDESAIDFSAYIDSMAAVPTLELCHDELFADLFNSNHKAGGAGPLELLPGGPARPLGP

SEQ ID NO: 174 - protein, 80 aa, Synthetic construct
LGEPGAAAPAMYDDESAIDFSAYIDSMAAVPTLELCHDELFADLFNSNHKAGGAGPLELLPGGPARPLGPGPAAPRLLKR

SEQ ID NO: 175 - protein, 80 aa, Synthetic construct
PQKSSMATQNLPEQHVSERSQALQQTSATDISSAGSISGDIIDELMSSDVFPLLRLSPTPADDYNFNLDDNEGVCDLFDV

SEQ ID NO: 176 - protein, 80 aa, Synthetic construct
SLLATLGLELDRALLPASGLGWLVDYGKLPPAPAPLAPYEVLGGALEGGLPVGGEPLAGDGFSDWMTERVDFTALLPLEP

SEQ ID NO: 177 - protein, 80 aa, Synthetic construct
DRALLPASGLGWLVDYGKLPPAPAPLAPYEVLGGALEGGLPVGGEPLAGDGFSDWMTERVDFTALLPLEPPLPPGTLPQP

SEQ ID NO: 178 - protein, 80 aa, Synthetic construct
GWLVDYGKLPPAPAPLAPYEVLGGALEGGLPVGGEPLAGDGFSDWMTERVDFTALLPLEPPLPPGTLPQPSPTPPDLEAM

SEQ ID NO: 179 - protein, 80 aa, Synthetic construct
PVGGEPLAGDGFSDWMTERVDFTALLPLEPPLPPGTLPQPSPTPPDLEAMASLLKKELEQMEDFFLDAPPLPPPSPPPLP

SEQ ID NO: 180 - protein, 80 aa, Synthetic construct
AGHLASDFAFSPPPGGGGDGPWGAEPGWVDPLTWLSFQGPPGGPGIGPGVGPGSEVWGIPPCPPPYELCGGMAYCGPQVG

SEQ ID NO: 181 - protein, 80 aa, Synthetic construct
SPPPGGGGDGPWGAEPGWVDPLTWLSFQGPPGGPGIGPGVGPGSEVWGIPPCPPPYELCGGMAYCGPQVGVGLVPQGGLE

SEQ ID NO: 182 - protein, 80 aa, Synthetic construct
GFPRGAGPAQPPAPPAAPEPLGGICEHETSIDISAYIDPAAFNDEFLADLFQHSRQQEKAKAAVGPTGGGGGGDFDYPGA

SEQ ID NO: 183 - protein, 80 aa, Synthetic construct
IDISAYIDPAAFNDEFLADLFQHSRQQEKAKAAVGPTGGGGGGDFDYPGAPAGPGGAVMPGGAHGPPPGYGCAAAGYLDG

SEQ ID NO: 184 - protein, 80 aa, Synthetic construct
SSHTSDIYGSTSPMNFYSTSSQAAGSYLNSSNPMNPYPGLLNQNTQYPSYQCNGNLSVDNCSPYLGSYSPQSQPMDLYRY

SEQ ID NO: 185 - protein, 80 aa, Synthetic construct
SNPMNPYPGLLNQNTQYPSYQCNGNLSVDNCSPYLGSYSPQSQPMDLYRYPSQDPLSKLSLPPIHTLYQPRFGNSQSFTS

SEQ ID NO: 186 - protein, 80 aa, Synthetic construct
LNQNTQYPSYQCNGNLSVDNCSPYLGSYSPQSQPMDLYRYPSQDPLSKLSLPPIHTLYQPRFGNSQSFTSKYLGYGNQNM

SEQ ID NO: 187 - protein, 80 aa, Synthetic construct
QCNGNLSVDNCSPYLGSYSPQSQPMDLYRYPSQDPLSKLSLPPIHTLYQPRFGNSQSFTSKYLGYGNQNMQGDGFSSCTI

SEQ ID NO: 188 - protein, 80 aa, Synthetic construct
QSQPMDLYRYPSQDPLSKLSLPPIHTLYQPRFGNSQSFTSKYLGYGNQNMQGDGFSSCTIRPNVHHVGKLPPYPTHEMDG

SEQ ID NO: 189 - protein, 80 aa, Synthetic construct
LPPIHTLYQPRFGNSQSFTSKYLGYGNQNMQGDGFSSCTIRPNVHHVGKLPPYPTHEMDGHFMGATSRLPPNLSNPNMDY

SEQ ID NO: 190 - protein, 80 aa, Synthetic construct
SPPPGGGGDGPGGPEPGWVDPRTWLSFQGPPGGPGIGPGVGPGSEVWGIPPCPPPYEFCGGMAYCGPQVGVGLVPQGGLE

SEQ ID NO: 191 - protein, 80 aa, Synthetic construct
RSSSKLQHKPCAAMDHMQTQNQFYIPVQIPGYQYVSPEGNCIEHVQPTSAFIQQPFIDEDPDKEKKIKELEMLLMSAENE

SEQ ID NO: 192 - protein, 80 aa, Synthetic construct
CAAMDHMQTQNQFYIPVQIPGYQYVSPEGNCIEHVQPTSAFIQQPFIDEDPDKEKKIKELEMLLMSAENEVRRKRIPSQP

SEQ ID NO: 193 - protein, 80 aa, Synthetic construct
NQFYIPVQIPGYQYVSPEGNCIEHVQPTSAFIQQPFIDEDPDKEKKIKELEMLLMSAENEVRRKRIPSQPGSFSSWSGSF

SEQ ID NO: 194 - protein, 80 aa, Synthetic construct
CIEHVQPTSAFIQQPFIDEDPDKEKKIKELEMLLMSAENEVRRKRIPSQPGSFSSWSGSFLMDDNMSNTLNSLDEHTSEF

SEQ ID NO: 195 - protein, 80 aa, Synthetic construct
FIQQPFIDEDPDKEKKIKELEMLLMSAENEVRRKRIPSQPGSFSSWSGSFLMDDNMSNTLNSLDEHTSEFYSMDENQPVS

SEQ ID NO: 196 - protein, 80 aa, Synthetic construct
PDKEKKIKELEMLLMSAENEVRRKRIPSQPGSFSSWSGSFLMDDNMSNTLNSLDEHTSEFYSMDENQPVSAQQNSPTKFL

SEQ ID NO: 197 - protein, 80 aa, Synthetic construct
GSFSSWSGSFLMDDNMSNTLNSLDEHTSEFYSMDENQPVSAQQNSPTKFLAVEANAVLSSLQTIPEFAETLELIESDPVA

SEQ ID NO: 198 - protein, 80 aa, Synthetic construct
NSLDEHTSEFYSMDENQPVSAQQNSPTKFLAVEANAVLSSLQTIPEFAETLELIESDPVAWSDVTSFDISDAAASPIKST

SEQ ID NO: 199 - protein, 80 aa, Synthetic construct
YSMDENQPVSAQQNSPTKFLAVEANAVLSSLQTIPEFAETLELIESDPVAWSDVTSFDISDAAASPIKSTPVKLMRIQHN

SEQ ID NO: 200 - protein, 80 aa, Synthetic construct
AQQNSPTKFLAVEANAVLSSLQTIPEFAETLELIESDPVAWSDVTSFDISDAAASPIKSTPVKLMRIQHNEGAMECQFNV

SEQ ID NO: 201 - protein, 80 aa, Synthetic construct
PSPPPTSTPEKCLSVACLDKNELSDHLDAMDSNLDNLQTMLSSHGFSVDTSALLDLFSPSVTVPDMSLPDLDSSLASIQE

SEQ ID NO: 202 - protein, 80 aa, Synthetic construct
KCLSVACLDKNELSDHLDAMDSNLDNLQTMLSSHGFSVDTSALLDLFSPSVTVPDMSLPDLDSSLASIQELLSPQEPPRP

SEQ ID NO: 203 - protein, 80 aa, Synthetic construct
DSNLDNLQTMLSSHGFSVDTSALLDLFSPSVTVPDMSLPDLDSSLASIQELLSPQEPPRPPEAENSSPDSGKQLVHYTAQ

SEQ ID NO: 204 - protein, 80 aa, Synthetic construct
LSSHGFSVDTSALLDLFSPSVTVPDMSLPDLDSSLASIQELLSPQEPPRPPEAENSSPDSGKQLVHYTAQPLFLLDPGSV

SEQ ID NO: 205 - protein, 80 aa, Synthetic construct
GRKQQFGDEGELEAGRGSRGGVAVRAPSPEEMEEEAIASLPGEETEDMDFLSGLELADLLDPRQPDWHLDPGLSSPGPLS

SEQ ID NO: 206 - protein, 80 aa, Synthetic construct
ELEAGRGSRGGVAVRAPSPEEMEEEAIASLPGEETEDMDFLSGLELADLLDPRQPDWHLDPGLSSPGPLSSSGGGSDSGG

SEQ ID NO: 207 - protein, 80 aa, Synthetic construct
EMEEEAIASLPGEETEDMDFLSGLELADLLDPRQPDWHLDPGLSSPGPLSSSGGGSDSGGLWRGDDDDEAAAAEMQRFSD

SEQ ID NO: 208 - protein, 80 aa, Synthetic construct
NCHSVSRVKTQGQDSLEAQLSSLESSRRVHTSTPSDKNLLDTYNTELLKSDSDNNNSDDCGNILPSDIMDFVLKNTPSMQ

SEQ ID NO: 209 - protein, 80 aa, Synthetic construct
QGQDSLEAQLSSLESSRRVHTSTPSDKNLLDTYNTELLKSDSDNNNSDDCGNILPSDIMDFVLKNTPSMQALGESPESSS

SEQ ID NO: 210 - protein, 80 aa, Synthetic construct
SSLESSRRVHTSTPSDKNLLDTYNTELLKSDSDNNNSDDCGNILPSDIMDFVLKNTPSMQALGESPESSSSELLNLGEGL

SEQ ID NO: 211 - protein, 80 aa, Synthetic construct
TSTPSDKNLLDTYNTELLKSDSDNNNSDDCGNILPSDIMDFVLKNTPSMQALGESPESSSSELLNLGEGLGLDSNREKDM

SEQ ID NO: 212 - protein, 80 aa, Synthetic construct
DTYNTELLKSDSDNNNSDDCGNILPSDIMDFVLKNTPSMQALGESPESSSSELLNLGEGLGLDSNREKDMGLFEVFSQQL

SEQ ID NO: 213 - protein, 80 aa, Synthetic construct
DSDNNNSDDCGNILPSDIMDFVLKNTPSMQALGESPESSSSELLNLGEGLGLDSNREKDMGLFEVFSQQLPTTEPVDSSV

SEQ ID NO: 214 - protein, 80 aa, Synthetic construct
SPCPPQQSRNRVIQLSTSELGEMELTWQEIMSITELQGLNAPSEPSFEPQAPAPYLGPPPPTTYCPCSIHPDSGFPLPPP

SEQ ID NO: 215 - protein, 80 aa, Synthetic construct
GEMELTWQEIMSITELQGLNAPSEPSFEPQAPAPYLGPPPPTTYCPCSIHPDSGFPLPPPPYELPASTSHVPDPPYSYGN

SEQ ID NO: 216 - protein, 80 aa, Synthetic construct
LQLQQRQGSMQIPQYYQPQPMMQHLQEQQQQQMHLQPPSYHRDPHQYTPEQAHTVQLIPLGSMSQYYYQEPQQPYSHPLY

SEQ ID NO: 217 - protein, 80 aa, Synthetic construct
HLPTTDEFSFSENLFGVLTEQVAGPLGQNLEVEPYSQYSNVQFPQVQPQISSSSYYSNLGFYPQQPEEWYSPGIYELRRM

SEQ ID NO: 218 - protein, 80 aa, Synthetic construct
SENLFGVLTEQVAGPLGQNLEVEPYSQYSNVQFPQVQPQISSSSYYSNLGFYPQQPEEWYSPGIYELRRMPAETLYQGET

SEQ ID NO: 219 - protein, 80 aa, Synthetic construct
QVAGPLGQNLEVEPYSQYSNVQFPQVQPQISSSSYYSNLGFYPQQPEEWYSPGIYELRRMPAETLYQGETEVAEMPVTKK

SEQ ID NO: 220 - protein, 80 aa, Synthetic construct
KEFEPSVSQTNESYFPFDDELTQDSIVEELVLMEQQMSMNNSHSYGNCLGMTLQSQSVTPGAPMSSHTSSTHFYHPIHSN

SEQ ID NO: 221 - protein, 80 aa, Synthetic construct
SSDIRLSSELSGSINDLNTLDPNLLFDPGRQQGQDDEATLEELKNDPLFQQICSESMNSMTSSGFEWIESKDHPTVEMLG

SEQ ID NO: 222 - protein, 80 aa, Synthetic construct
DLKDSSIEMELRKVTSAIEEAALDSSELLTNMEDEDDTDETLTSLLNEIAFLNQQLNDDSVGLAELPSSMDTEFPGDARR

SEQ ID NO: 223 - protein, 80 aa, Synthetic construct
AALDSSELLTNMEDEDDTDETLTSLLNEIAFLNQQLNDDSVGLAELPSSMDTEFPGDARRAFISKVPPGSRATFQVEHLG

SEQ ID NO: 224 - protein, 80 aa, Synthetic construct
TLTSLLNEIAFLNQQLNDDSVGLAELPSSMDTEFPGDARRAFISKVPPGSRATFQVEHLGTGLKELPDVQGESDSISPLL

SEQ ID NO: 225 - protein, 80 aa, Synthetic construct
EEPQSDPSVEPPLSQETFSDLWKLLPENNVLSPLPSQAMDDLMLSPDDIEQWFTEDPGPDEAPRMPEAAPPVAPAPAAPT

SEQ ID NO: 226 - protein, 80 aa, Synthetic construct
LWKLLPENNVLSPLPSQAMDDLMLSPDDIEQWFTEDPGPDEAPRMPEAAPPVAPAPAAPTPAAPAPAPSWPLSSSVPSQK

SEQ ID NO: 227 - protein, 80 aa, Synthetic construct
RLFPGSSFLDLGDLNESDFLNNAHFPEHLDHFTENMEDFSNDLFSSFFDDPVLDEKSPLLDMELDSPTPGIQAEHSYSLS

SEQ ID NO: 228 - protein, 80 aa, Synthetic construct
LGDLNESDFLNNAHFPEHLDHFTENMEDFSNDLFSSFFDDPVLDEKSPLLDMELDSPTPGIQAEHSYSLSGDSAPQSPLV

SEQ ID NO: 229 - protein, 80 aa, Synthetic construct
MTLPGEAGAAGLAPPGHAAAFGGPPGGLLLDALPGPYAAAAAGPLGAAPDRFPADLDLDMFSGSLECDVESIILNDFMDS

SEQ ID NO: 230 - protein, 80 aa, Synthetic construct
GLAPPGHAAAFGGPPGGLLLDALPGPYAAAAAGPLGAAPDRFPADLDLDMFSGSLECDVESIILNDFMDSDEMDFNFDSA

SEQ ID NO: 231 - protein, 80 aa, Synthetic construct
DALPGPYAAAAAGPLGAAPDRFPADLDLDMFSGSLECDVESIILNDFMDSDEMDFNFDSALPPPPPGLAGAPPPNQSWVP

SEQ ID NO: 232 - protein, 80 aa, Synthetic construct
AMTYAPASAFCSSPSAYGSPSSYFSGLDPYLSPMVPQLGGPALSPLSGPSVGPSLAQSPTSLSGQSYGAYSPVDSLEFKD

SEQ ID NO: 233 - protein, 80 aa, Synthetic construct
PTVPNCLSTMGQNCGAGLNNDSPEALEVPSLQDFSVFSTDSCLQLSDAVSPSLPGSLDSPVDISADSLDFFTDTLTTIDL

SEQ ID NO: 234 - protein, 80 aa, Synthetic construct
PTYPSLYSSYHQGCLVNPTGNLPMWSNQTWNNSTWSNQTQNIQSWSNHSWNTQTWCTQSWNNQAWNSPFYNCGEESLQSC

SEQ ID NO: 235 - protein, 80 aa, Synthetic construct
HQGCLVNPTGNLPMWSNQTWNNSTWSNQTQNIQSWSNHSWNTQTWCTQSWNNQAWNSPFYNCGEESLQSCMQFQPNSPAS

SEQ ID NO: 236 - protein, 80 aa, Synthetic construct
NNSTWSNQTQNIQSWSNHSWNTQTWCTQSWNNQAWNSPFYNCGEESLQSCMQFQPNSPASDLEAALEAAGEGLNVIQQTT

SEQ ID NO: 237 - protein, 80 aa, Synthetic construct
NIQSWSNHSWNTQTWCTQSWNNQAWNSPFYNCGEESLQSCMQFQPNSPASDLEAALEAAGEGLNVIQQTTRYFSTPQTMD

SEQ ID NO: 238 - protein, 80 aa, Synthetic construct
NTQTWCTQSWNNQAWNSPFYNCGEESLQSCMQFQPNSPASDLEAALEAAGEGLNVIQQTTRYFSTPQTMDLFLNYSMNMQ

SEQ ID NO: 239 - protein, 80 aa, Synthetic construct
WCTQSWNNQAWNSPFYNCGEESLQSCMQFQPNSPASDLEAALEAAGEGLNVIQQTTRYFSTPQTMDLFLNYSMNMQPEDV

SEQ ID NO: 240 - protein, 80 aa, Synthetic construct
QDSKNSDLYSIMKNLGIDFEDIRHMQNEKFFRNDFSGEVDFRDIDLTDEILTYVQDSLSKSPFIPSDYQQQQSLALNSSC

SEQ ID NO: 241 - protein, 80 aa, Synthetic construct
IMKNLGIDFEDIRHMQNEKFFRNDFSGEVDFRDIDLTDEILTYVQDSLSKSPFIPSDYQQQQSLALNSSCMVQEHLHLEQ

SEQ ID NO: 242 - protein, 80 aa, Synthetic construct
DIRHMQNEKFFRNDFSGEVDFRDIDLTDEILTYVQDSLSKSPFIPSDYQQQQSLALNSSCMVQEHLHLEQQQQHHQKQVV

SEQ ID NO: 243 - protein, 80 aa, Synthetic construct
DEPPFSEAALEQALGEPCDLDAALLTDIEDMLQLINNQDSDFPGLFDPPYAGSGAGGTDPASPDTSSPGSLSPPPATLSS

SEQ ID NO: 244 - protein, 80 aa, Synthetic construct
DAALLTDIEDMLQLINNQDSDFPGLFDPPYAGSGAGGTDPASPDTSSPGSLSPPPATLSSSLEAFLSGPQAAPSPLSPPQ

SEQ ID NO: 245 - protein, 80 aa, Synthetic construct
DLGAHVTKQQSHPEQNSVDYCQQLTVSQGPSPELCDQAIAFSDPLSYFTDLSFSAALKEEQRLDGMLLDDTISPFGTDPL

SEQ ID NO: 246 - protein, 80 aa, Synthetic construct
SHPEQNSVDYCQQLTVSQGPSPELCDQAIAFSDPLSYFTDLSFSAALKEEQRLDGMLLDDTISPFGTDPLLSATSPAVSK

SEQ ID NO: 247 - protein, 80 aa, Synthetic construct
CQQLTVSQGPSPELCDQAIAFSDPLSYFTDLSFSAALKEEQRLDGMLLDDTISPFGTDPLLSATSPAVSKESSRRSSFSS

SEQ ID NO: 248 - protein, 80 aa, Synthetic construct
TGLMKDTHTVNCRSMSNKELFPPSPSEMGELEATRQNQSTVAVHSHEPLLSDGAQLDFDALCDNDDTAMAAFMNYLEAEG

SEQ ID NO: 249 - protein, 80 aa, Synthetic construct
SNKELFPPSPSEMGELEATRQNQSTVAVHSHEPLLSDGAQLDFDALCDNDDTAMAAFMNYLEAEGGLGDPGDFSDIQWTL

SEQ ID NO: 250 - protein, 80 aa, Synthetic construct
LLEQLVSFLSGKDETELAELDRALGIDKLVQGGGLDVLSERFPPQQATPPLIMEERPNLYSQPYSSPSPTANLPSPFQGM

SEQ ID NO: 251 - protein, 80 aa, Synthetic construct
QAATLAAYPAETPTAGEEYPSRPTEFAFYPGYPGTYQPMASYLDVSVVQTLGAPGEPRHDSLLPVDSYQSWALAGGWNSQ

SEQ ID NO: 252 - protein, 80 aa, Synthetic construct
GYPGTYQPMASYLDVSVVQTLGAPGEPRHDSLLPVDSYQSWALAGGWNSQMCCQGEQNPPGPFWKAAFADSSGQHPPDAC

SEQ ID NO: 253 - protein, 80 aa, Synthetic construct
LAQGMDRPFSAEAGTGGLEPLGGLEPLDSNLSLSGAGPPVLSLDLKPWKCQELDFLADPDNMFLEETPVEDIFMDLSTPD

SEQ ID NO: 254 - protein, 80 aa, Synthetic construct
AEAGTGGLEPLGGLEPLDSNLSLSGAGPPVLSLDLKPWKCQELDFLADPDNMFLEETPVEDIFMDLSTPDPSEEWGSGDP

SEQ ID NO: 255 - protein, 80 aa, Synthetic construct
LGGLEPLDSNLSLSGAGPPVLSLDLKPWKCQELDFLADPDNMFLEETPVEDIFMDLSTPDPSEEWGSGDPEAEGPGGAPS

SEQ ID NO: 256 - protein, 80 aa, Synthetic construct
LSLSGAGPPVLSLDLKPWKCQELDFLADPDNMFLEETPVEDIFMDLSTPDPSEEWGSGDPEAEGPGGAPSPCNNLSPEDH

SEQ ID NO: 257 - protein, 80 aa, Synthetic construct
LSLDLKPWKCQELDFLADPDNMFLEETPVEDIFMDLSTPDPSEEWGSGDPEAEGPGGAPSPCNNLSPEDHSFLEDLATYE

SEQ ID NO: 258 - protein, 80 aa, Synthetic construct
QELDFLADPDNMFLEETPVEDIFMDLSTPDPSEEWGSGDPEAEGPGGAPSPCNNLSPEDHSFLEDLATYETAFETGVSAF

SEQ ID NO: 259 - protein, 80 aa, Synthetic construct
DIFMDLSTPDPSEEWGSGDPEAEGPGGAPSPCNNLSPEDHSFLEDLATYETAFETGVSAFPYDGFTDELHQLQSQVQDSF

SEQ ID NO: 260 - protein, 80 aa, Synthetic construct
LAPKQAEGRWPPPEQWCKQLFSSVVPVLLGDPEEEPGGRQLLDLNCFLSDISDTLFTMTQSGPSPLQLPPEDAYVGNADM

SEQ ID NO: 261 - protein, 80 aa, Synthetic construct
PPPEQWCKQLFSSVVPVLLGDPEEEPGGRQLLDLNCFLSDISDTLFTMTQSGPSPLQLPPEDAYVGNADMIQPDLTPLQP

SEQ ID NO: 262 - protein, 80 aa, Synthetic construct
FSSVVPVLLGDPEEEPGGRQLLDLNCFLSDISDTLFTMTQSGPSPLQLPPEDAYVGNADMIQPDLTPLQPSLDDFMDISD

SEQ ID NO: 263 - protein, 80 aa, Synthetic construct
DPEEEPGGRQLLDLNCFLSDISDTLFTMTQSGPSPLQLPPEDAYVGNADMIQPDLTPLQPSLDDFMDISDFFTNSRLPQP

SEQ ID NO: 264 - protein, 80 aa, Synthetic construct
LLDLNCFLSDISDTLFTMTQSGPSPLQLPPEDAYVGNADMIQPDLTPLQPSLDDFMDISDFFTNSRLPQPPMPSNFPEPP

SEQ ID NO: 265 - protein, 80 aa, Synthetic construct
SGPSPLQLPPEDAYVGNADMIQPDLTPLQPSLDDFMDISDFFTNSRLPQPPMPSNFPEPPSFSPVVDSLFSSGTLGPEVP

SEQ ID NO: 266 - protein, 80 aa, Synthetic construct
EDAYVGNADMIQPDLTPLQPSLDDFMDISDFFTNSRLPQPPMPSNFPEPPSFSPVVDSLFSSGTLGPEVPPASSAMTHLS

SEQ ID NO: 267 - protein, 80 aa, Synthetic construct
IQPDLTPLQPSLDDFMDISDFFTNSRLPQPPMPSNFPEPPSFSPVVDSLFSSGTLGPEVPPASSAMTHLSGHSRLQARNS

SEQ ID NO: 268 - protein, 80 aa, Synthetic construct
SLDDFMDISDFFTNSRLPQPPMPSNFPEPPSFSPVVDSLFSSGTLGPEVPPASSAMTHLSGHSRLQARNSCPGPLDSSAF

SEQ ID NO: 269 - protein, 80 aa, Synthetic construct
RLQQHKDEDLSSLVQDDDMLYWHKHGDGWKTPVPMEEDPLLDTDMLMSEFSDTLFSTLSSHQPVAWPNPREIAHLGNADM

SEQ ID NO: 270 - protein, 80 aa, Synthetic construct
SSLVQDDDMLYWHKHGDGWKTPVPMEEDPLLDTDMLMSEFSDTLFSTLSSHQPVAWPNPREIAHLGNADMIQPGLIPLQP

SEQ ID NO: 271 - protein, 80 aa, Synthetic construct
YWHKHGDGWKTPVPMEEDPLLDTDMLMSEFSDTLFSTLSSHQPVAWPNPREIAHLGNADMIQPGLIPLQPNLDFMDTFEP

SEQ ID NO: 272 - protein, 80 aa, Synthetic construct
TPVPMEEDPLLDTDMLMSEFSDTLFSTLSSHQPVAWPNPREIAHLGNADMIQPGLIPLQPNLDFMDTFEPFQDLFSSSRS

SEQ ID NO: 273 - protein, 80 aa, Synthetic construct
LDTDMLMSEFSDTLFSTLSSHQPVAWPNPREIAHLGNADMIQPGLIPLQPNLDFMDTFEPFQDLFSSSRSIFGSMLPASA

SEQ ID NO: 274 - protein, 80 aa, Synthetic construct
HQPVAWPNPREIAHLGNADMIQPGLIPLQPNLDFMDTFEPFQDLFSSSRSIFGSMLPASASAPVPDPNNPPAQESILPTT

SEQ ID NO: 275 - protein, 80 aa, Synthetic construct
EIAHLGNADMIQPGLIPLQPNLDFMDTFEPFQDLFSSSRSIFGSMLPASASAPVPDPNNPPAQESILPTTALPTVSLPDS

SEQ ID NO: 276 - protein, 80 aa, Synthetic construct
IQPGLIPLQPNLDFMDTFEPFQDLFSSSRSIFGSMLPASASAPVPDPNNPPAQESILPTTALPTVSLPDSLIAPPTAPSL

SEQ ID NO: 277 - protein, 80 aa, Synthetic construct
PLAVRLEGAGASSPGCALRGAGGLEPGPLPEDVFSGRQDSPFLPDLNFFAADSCLQLSGGLSPSLQGSLDSPVPFSEEEL

SEQ ID NO: 278 - protein, 80 aa, Synthetic construct
ASSPGCALRGAGGLEPGPLPEDVFSGRQDSPFLPDLNFFAADSCLQLSGGLSPSLQGSLDSPVPFSEEELDFFTSTLCAI

SEQ ID NO: 279 - protein, 80 aa, Synthetic construct
AKQRNQILPSKKNVPTSPRTSPSPYAFSPVISDFYSSLPSQPLDPSNWAWNSTFTESSTSDFQMQDTQWERLVASVPALY

SEQ ID NO: 280 - protein, 80 aa, Synthetic construct
SPSPYAFSPVISDFYSSLPSQPLDPSNWAWNSTFTESSTSDFQMQDTQWERLVASVPALYSDAYDIFQIIELYNLPDENE

SEQ ID NO: 281 - protein, 80 aa, Synthetic construct
ISDFYSSLPSQPLDPSNWAWNSTFTESSTSDFQMQDTQWERLVASVPALYSDAYDIFQIIELYNLPDENEISSSSFHCLY

SEQ ID NO: 282 - protein, 80 aa, Synthetic construct
NSTFTESSTSDFQMQDTQWERLVASVPALYSDAYDIFQIIELYNLPDENEISSSSFHCLYQYLSPTKYQVGGQGSSLSIF

SEQ ID NO: 283 - protein, 80 aa, Synthetic construct
DFQMQDTQWERLVASVPALYSDAYDIFQIIELYNLPDENEISSSSFHCLYQYLSPTKYQVGGQGSSLSIFAGPAVGLSPA

SEQ ID NO: 284 - protein, 80 aa, Synthetic construct
ELYNLPDENEISSSSFHCLYQYLSPTKYQVGGQGSSLSIFAGPAVGLSPAQTWPNMTSQAFEAYSLTDSLEFQKTSNMVD

SEQ ID NO: 285 - protein, 80 aa, Synthetic construct
LPDENEISSSSFHCLYQYLSPTKYQVGGQGSSLSIFAGPAVGLSPAQTWPNMTSQAFEAYSLTDSLEFQKTSNMVDLGFL

SEQ ID NO: 286 - protein, 80 aa, Synthetic construct
MAMLTLNSNCEKEGFYKFEEQNRAESECPGMNTHSRASCMQMDDVIDDIISLESSYNEEILGLMDPALQMANTLPVSGNL

SEQ ID NO: 287 - protein, 80 aa, Synthetic construct
MNTHSRASCMQMDDVIDDIISLESSYNEEILGLMDPALQMANTLPVSGNLIDLYGNQGLPPPGLTISNSCPANLPNIKRE

SEQ ID NO: 288 - protein, 80 aa, Synthetic construct
QMDDVIDDIISLESSYNEEILGLMDPALQMANTLPVSGNLIDLYGNQGLPPPGLTISNSCPANLPNIKRELTESEARALA

SEQ ID NO: 289 - protein, 80 aa, Synthetic construct
DDSGELGGLETMETLTELGDELTLGDIDEMLQFVSNQVGEFPDLFSEQLCSSFPGSGGSGSSSGSSGSSSSSSNGRGSSS

SEQ ID NO: 290 - protein, 80 aa, Synthetic construct
TMETLTELGDELTLGDIDEMLQFVSNQVGEFPDLFSEQLCSSFPGSGGSGSSSGSSGSSSSSSNGRGSSSGAVDPSVQRS

SEQ ID NO: 291 - protein, 80 aa, Synthetic construct
GMEGIMNPYTALPTPQQLLAIEQSVYSSDPFRQGLTPPQMPGDHMHPYGAEPLFHDLDSDDTSLSNLGDCFLATSEAGPL

SEQ ID NO: 292 - protein, 80 aa, Synthetic construct
IEQSVYSSDPFRQGLTPPQMPGDHMHPYGAEPLFHDLDSDDTSLSNLGDCFLATSEAGPLQSRVGNPIDHLYSMQNSYFT

SEQ ID NO: 293 - protein, 80 aa, Synthetic construct
AASNQLGSWPDGMLSMEQVSHGTQNRPLLRNSLDDLVGPPSNLEGQSDERALLDQLHTLLSNTDATGLEEIDRALGIPEL

SEQ ID NO: 294 - protein, 80 aa, Synthetic construct
DGMLSMEQVSHGTQNRPLLRNSLDDLVGPPSNLEGQSDERALLDQLHTLLSNTDATGLEEIDRALGIPELVNQGQALEPK

SEQ ID NO: 295 - protein, 80 aa, Synthetic construct
HGTQNRPLLRNSLDDLVGPPSNLEGQSDERALLDQLHTLLSNTDATGLEEIDRALGIPELVNQGQALEPKQDAFQGQEAA

SEQ ID NO: 296 - protein, 80 aa, Synthetic construct
NSLDDLVGPPSNLEGQSDERALLDQLHTLLSNTDATGLEEIDRALGIPELVNQGQALEPKQDAFQGQEAAVMMDQKAGLY

SEQ ID NO: 297 - protein, 80 aa, Synthetic construct
SNLEGQSDERALLDQLHTLLSNTDATGLEEIDRALGIPELVNQGQALEPKQDAFQGQEAAVMMDQKAGLYGQTYPAQGPP

SEQ ID NO: 298 - protein, 80 aa, Synthetic construct
TGGGGSPMPASNFAAAPAFSHYMGYPHMPSMDPHWPSLGVWGSPYSPPREDWSVYPGPSSTMGTVPVNDVTSSPAAFCST

SEQ ID NO: 299 - protein, 80 aa, Synthetic construct
SNFAAAPAFSHYMGYPHMPSMDPHWPSLGVWGSPYSPPREDWSVYPGPSSTMGTVPVNDVTSSPAAFCSTDYSNLGPVGG

SEQ ID NO: 300 - protein, 80 aa, Synthetic construct
FPVEKYMDVSGLASSSVPANEVPARAKEVSFYQGYTSPYQHVPGYIDMVSTFGSGEPRHEAYISMEGYQSWTLANGWNSQ

SEQ ID NO: 301 - protein, 80 aa, Synthetic construct
GLASSSVPANEVPARAKEVSFYQGYTSPYQHVPGYIDMVSTFGSGEPRHEAYISMEGYQSWTLANGWNSQVYCTKDQPQG

SEQ ID NO: 302 - protein, 80 aa, Synthetic construct
PVSPGISDANDHDLREPSGIKNPGGASASARVSSWDSQSYDIEQICLGASNPPWASTLFEIDEFVKIYDLPGEDDTSSLN

SEQ ID NO: 303 - protein, 80 aa, Synthetic construct
DIPSSGLLSGQAQENPGYPYSDSSSILGENPHIGIDMIDNDQGSSSPSNDEAAMAVIMSLLEADAGLGGPVDFSDLPWPL

SEQ ID NO: 304 - protein, 80 aa, Synthetic construct
SELEMNMGGPQYSQQQAPPNQTAPWPESILPIDQASFASQNRQPFGSSPDDLLCPHPAAESPSDEGALLDQLYLALRNFD

SEQ ID NO: 305 - protein, 80 aa, Synthetic construct
QYSQQQAPPNQTAPWPESILPIDQASFASQNRQPFGSSPDDLLCPHPAAESPSDEGALLDQLYLALRNFDGLEEIDRALG

SEQ ID NO: 306 - protein, 80 aa, Synthetic construct
QTAPWPESILPIDQASFASQNRQPFGSSPDDLLCPHPAAESPSDEGALLDQLYLALRNFDGLEEIDRALGIPELVSQSQA

SEQ ID NO: 307 - protein, 80 aa, Synthetic construct
PIDQASFASQNRQPFGSSPDDLLCPHPAAESPSDEGALLDQLYLALRNFDGLEEIDRALGIPELVSQSQAVDPEQFSSQD

SEQ ID NO: 308 - protein, 80 aa, Synthetic construct
NRQPFGSSPDDLLCPHPAAESPSDEGALLDQLYLALRNFDGLEEIDRALGIPELVSQSQAVDPEQFSSQDSNIMLEQKAP

SEQ ID NO: 309 - protein, 80 aa, Synthetic construct
DLLCPHPAAESPSDEGALLDQLYLALRNFDGLEEIDRALGIPELVSQSQAVDPEQFSSQDSNIMLEQKAPVFPQQYASQA

SEQ ID NO: 310 - protein, 80 aa, Synthetic construct
QLYLALRNFDGLEEIDRALGIPELVSQSQAVDPEQFSSQDSNIMLEQKAPVFPQQYASQAQMAQGSYSPMQDPNFHTMGQ

SEQ ID NO: 311 - protein, 80 aa, Synthetic construct
QLMPLLMDVAGSDSSHKDGPCGSWGTSITLPPPCSYLEELEPQDYQQSNQPGPFQFSQAPQPPLFQSPQPKLPYLPTFPF

SEQ ID NO: 312 - protein, 80 aa, Synthetic construct
PPPCSYLEELEPQDYQQSNQPGPFQFSQAPQPPLFQSPQPKLPYLPTFPFSMPSSLTLPPPEDSLFMFPCGPSGGTSQGY

SEQ ID NO: 313 - protein, 80 aa, Synthetic construct
PEDSLFMFPCGPSGGTSQGYCPGASSGQILMQPPAGNIGTASWSDPCLPELPFPGPFCPQALGHPPGGDGYFPDLFPTPC

SEQ ID NO: 314 - protein, 80 aa, Synthetic construct
GPILSPGRMRSPGSLPGLAPILGPGSGPGSGSVPAPIPGPGSLPAPAPLWPQSPDASDFLPDTQLFPHFTELLLPLDPLE

SEQ ID NO: 315 - protein, 80 aa, Synthetic construct
SPGSLPGLAPILGPGSGPGSGSVPAPIPGPGSLPAPAPLWPQSPDASDFLPDTQLFPHFTELLLPLDPLEGSSVSTMTSQ

SEQ ID NO: 316 - protein, 80 aa, Synthetic construct
ILGPGSGPGSGSVPAPIPGPGSLPAPAPLWPQSPDASDFLPDTQLFPHFTELLLPLDPLEGSSVSTMTSQYQEGDDSMGK

SEQ ID NO: 317 - protein, 80 aa, Synthetic construct
GSLPAPAPLWPQSPDASDFLPDTQLFPHFTELLLPLDPLEGSSVSTMTSQYQEGDDSMGKKHSGSQPQEEGGSVNENHSG

SEQ ID NO: 318 - protein, 80 aa, Synthetic construct
AWEPQAGAAPPPQPAPPDASASARQGQMQGIPAPSQALQEPAPWSALPCGLLLDELLASPEFLQQAQPLLETEAPGELEA

SEQ ID NO: 319 - protein, 80 aa, Synthetic construct
PPQPAPPDASASARQGQMQGIPAPSQALQEPAPWSALPCGLLLDELLASPEFLQQAQPLLETEAPGELEASEEAASLEAP

SEQ ID NO: 320 - protein, 80 aa, Synthetic construct
ASARQGQMQGIPAPSQALQEPAPWSALPCGLLLDELLASPEFLQQAQPLLETEAPGELEASEEAASLEAPLSEEEYRALL

SEQ ID NO: 321 - protein, 80 aa, Synthetic construct
VDRLEPGELIPNGPFSFYGDYQSEYYGPGGNYDFFPQGPPSSQAQTPVDLPFVPSSGPSGTPLGGLEHPLPGHHPSSEAQ

SEQ ID NO: 322 - protein, 80 aa, Synthetic construct; identical to SEQ ID NO: 234

SEQ ID NO: 323 - protein, 80 aa, Synthetic construct
HQGCLVNPTGNLPMWSNQTWNNSTWSNQTQNIQSWSNHSWNTQTWCTQSWNNQAWNSPFYNCGEESLQSCMHFQPNSPAS

SEQ ID NO: 324 - protein, 80 aa, Synthetic construct
NLPMWSNQTWNNSTWSNQTQNIQSWSNHSWNTQTWCTQSWNNQAWNSPFYNCGEESLQSCMHFQPNSPASDLEAALEAAG

SEQ ID NO: 325 - protein, 80 aa, Synthetic construct
NIQSWSNHSWNTQTWCTQSWNNQAWNSPFYNCGEESLQSCMHFQPNSPASDLEAALEAAGEGLNVIQQTTRYFSTPQTMD

SEQ ID NO: 326 - protein, 80 aa, Synthetic construct
NTQTWCTQSWNNQAWNSPFYNCGEESLQSCMHFQPNSPASDLEAALEAAGEGLNVIQQTTRYFSTPQTMDLFLNYSMNMQ

SEQ ID NO: 327 - protein, 80 aa, Synthetic construct
WCTQSWNNQAWNSPFYNCGEESLQSCMHFQPNSPASDLEAALEAAGEGLNVIQQTTRYFSTPQTMDLFLNYSMNMQPEDV

SEQ ID NO: 328 - protein, 80 aa, Synthetic construct
DSLQPCFYPDEDDFYFGGPDSTPPGEDIWKKFELLPTPPLSPSRGFAEHSSEPPSWVTEMLLENELWGSPAEEDAFGLGG

SEQ ID NO: 329 - protein, 80 aa, Synthetic construct
EDDFYFGGPDSTPPGEDIWKKFELLPTPPLSPSRGFAEHSSEPPSWVTEMLLENELWGSPAEEDAFGLGGLGGLTPNPVI

SEQ ID NO: 330 - protein, 80 aa, Synthetic construct
STPPGEDIWKKFELLPTPPLSPSRGFAEHSSEPPSWVTEMLLENELWGSPAEEDAFGLGGLGGLTPNPVILQDCMWSGFS

SEQ ID NO: 331 - protein, 80 aa, Synthetic construct
KFELLPTPPLSPSRGFAEHSSEPPSWVTEMLLENELWGSPAEEDAFGLGGLGGLTPNPVILQDCMWSGFSAREKLERAVS

SEQ ID NO: 332 - protein, 80 aa, Synthetic construct
SPSRGFAEHSSEPPSWVTEMLLENELWGSPAEEDAFGLGGLGGLTPNPVILQDCMWSGFSAREKLERAVSEKLQHGRGPP

SEQ ID NO: 333 - protein, 80 aa, Synthetic construct
SEPPSWVTEMLLENELWGSPAEEDAFGLGGLGGLTPNPVILQDCMWSGFSAREKLERAVSEKLQHGRGPPTAGSTAQSPG

SEQ ID NO: 334 - protein, 80 aa, Synthetic construct
SSRAKEFAFYHQGYAAGPYHHHQPMPGYLDMPVVPGLGGPGESRHEPLGLPMESYQPWALPNGWNGQMYCPKEQAQPPHL

SEQ ID NO: 335 - protein, 80 aa, Synthetic construct
NLSEALCAANVDFSHLLGFLPLNLPPCNPPGATGGLVMGYSQAEAQPLLTTLQAQPQDSPGAGGPLNFGPLHSLPPVFTS

SEQ ID NO: 336 - protein, 80 aa, Synthetic construct
VDFSHLLGFLPLNLPPCNPPGATGGLVMGYSQAEAQPLLTTLQAQPQDSPGAGGPLNFGPLHSLPPVFTSGLSSTTLPRF

SEQ ID NO: 337 - protein, 80 aa, Synthetic construct
SQDSILDFLLSQATLGSGGGSGSSIGASSGPVAWGPWRRAAAPVKGEHFCLPEFPLGDPDDVPRPFQPTLEEIEEFLEEN

SEQ ID NO: 338 - protein, 80 aa, Synthetic construct
SQATLGSGGGSGSSIGASSGPVAWGPWRRAAAPVKGEHFCLPEFPLGDPDDVPRPFQPTLEEIEEFLEENMEPGVKEVPE

SEQ ID NO: 339 - protein, 80 aa, Synthetic construct
SGSSIGASSGPVAWGPWRRAAAPVKGEHFCLPEFPLGDPDDVPRPFQPTLEEIEEFLEENMEPGVKEVPEGNSKDLDACS

SEQ ID NO: 340 - protein, 80 aa, Synthetic construct
PVAWGPWRRAAAPVKGEHFCLPEFPLGDPDDVPRPFQPTLEEIEEFLEENMEPGVKEVPEGNSKDLDACSQLSAGPHKSH

SEQ ID NO: 341 - protein, 80 aa, Synthetic construct
LPEFPLGDPDDVPRPFQPTLEEIEEFLEENMEPGVKEVPEGNSKDLDACSQLSAGPHKSHLHPGSSGRERCSPPPGGASA

SEQ ID NO: 342 - protein, 80 aa, Synthetic construct
ELQLVHDTGYFSALPSLEETWQQTCLELERYLQTEPRRISETFGEDLDCFLHASPPPCIEESFRRLDPLLLPVEAAICEK

SEQ ID NO: 343 - protein, 80 aa, Synthetic construct
FSALPSLEETWQQTCLELERYLQTEPRRISETFGEDLDCFLHASPPPCIEESFRRLDPLLLPVEAAICEKSSAVDILLSR

SEQ ID NO: 344 - protein, 80 aa, Synthetic construct
LGLDPQIGSLDDGAGDLSLSKSSISISDPLNTPALDFSQLFNFIPLNGPPYNPLSVGSLGMSYSQEEAHSSVSQLPPQTQ

SEQ ID NO: 345 - protein, 80 aa, Synthetic construct
KSSISISDPLNTPALDFSQLFNFIPLNGPPYNPLSVGSLGMSYSQEEAHSSVSQLPPQTQDLQDPANTIGLGSLHSLSAA

SEQ ID NO: 346 - protein, 80 aa, Synthetic construct
NTPALDFSQLFNFIPLNGPPYNPLSVGSLGMSYSQEEAHSSVSQLPPQTQDLQDPANTIGLGSLHSLSAAFTSSLSTSTT

SEQ ID NO: 347 - protein, 80 aa, Synthetic construct
LFNFIPLNGPPYNPLSVGSLGMSYSQEEAHSSVSQLPPQTQDLQDPANTIGLGSLHSLSAAFTSSLSTSTTLPRFHQAFQ

SEQ ID NO: 348 - protein, 80 aa, Synthetic construct
LQSLPLGPEVDFSQGYELPGASSRVTCEDLESDSPLAPGPFSKLLQPDMSHHYESWFRPTHPGAEDGSWWDLHPGTSWMD

SEQ ID NO: 349 - protein, 80 aa, Synthetic construct
ADGLYPRVGMAHPYESWYKSGFHSTLAAGEVTNGAASSWWDVHSSPGSWLEVQNPAGGLQSSLHSGAPQASLHSQLGTYN

SEQ ID NO: 350 - protein, 80 aa, Synthetic construct
EEEEEEEEEEEEEEEENEDHQMNCHNTRIMQDTEKDDNNNDEYDNYDELVAKSLLNLGKIAEDAAYRARTESEMNSNTSN

SEQ ID NO: 351 - protein, 80 aa, Synthetic construct
EEEEEENEDHQMNCHNTRIMQDTEKDDNNNDEYDNYDELVAKSLLNLGKIAEDAAYRARTESEMNSNTSNSLEDDSDKNE

SEQ ID NO: 352 - protein, 80 aa, Synthetic construct
DEYDNYDELVAKSLLNLGKIAEDAAYRARTESEMNSNTSNSLEDDSDKNENLGRKSELSLDLDSDVVRETVDSLKLLAQG

SEQ ID NO: 353 - protein, 80 aa, Synthetic construct
DLEIPADIVELHDINVEPLPMEDIPTESVQYEDVDGNWIYGGHNHPPLMVLQPLFTNTGYGDHDQEMLMLQTQEEVVGYC

SEQ ID NO: 354 - protein, 80 aa, Synthetic construct
LHDINVEPLPMEDIPTESVQYEDVDGNWIYGGHNHPPLMVLQPLFTNTGYGDHDQEMLMLQTQEEVVGYCDSDNQLGNDL

SEQ ID NO: 355 - protein, 80 aa, Synthetic construct
PSQKVKETLVIMKDVSSSLQNRVHPRPLVKLLPKGVQKEQETVSLYLKANPEELVVFEDLNVFHCQEECVSLDPTQQLTS

SEQ ID NO: 356 - protein, 80 aa, Synthetic construct
IMKDVSSSLQNRVHPRPLVKLLPKGVQKEQETVSLYLKANPEELVVFEDLNVFHCQEECVSLDPTQQLTSEKEDDSSVGE

SEQ ID NO: 357 - protein, 80 aa, Synthetic construct
SHAKTFLLAGDAQAEGKDDPLRTGFLPSLAATPFPLPASDLDMEDDAKLDSLITEALNGMEYQSDNPEIDSSFIDVFADE

SEQ ID NO: 358 - protein, 80 aa, Synthetic construct
DAQAEGKDDPLRTGFLPSLAATPFPLPASDLDMEDDAKLDSLITEALNGMEYQSDNPEIDSSFIDVFADEEPSGPRGPSS

SEQ ID NO: 359 - protein, 80 aa, Synthetic construct
LRTGFLPSLAATPFPLPASDLDMEDDAKLDSLITEALNGMEYQSDNPEIDSSFIDVFADEEPSGPRGPSSGHPLKSKAGV

SEQ ID NO: 360 - protein, 80 aa, Synthetic construct
QAVPEHPHDPEALFNLMSGILGLAPFPGPEAAASRSPLDAPFPAGSDALLPGPPDLYSPDLGAAPFPEAFWEASPCAGAP

SEQ ID NO: 361 - protein, 80 aa, Synthetic construct
SEARFSSKNIKDLRLASDNVSIDQFLRKRHEPESVSSDVSEQGSIHLEPLTPSEVLEYEATEILQKGSGDPSAKTDEVVS

SEQ ID NO: 362 - protein, 80 aa, Synthetic construct
LLSDTNPGPDTQLPSGPAQNPGIDFDIEEFFSASNIQTQTEESELSTMTTEPVLESLDIETQTDFLLADTSAQSYGCRGN

SEQ ID NO: 363 - protein, 80 aa, Synthetic construct
PGIDFDIEEFFSASNIQTQTEESELSTMTTEPVLESLDIETQTDFLLADTSAQSYGCRGNSNFLGLEMFDTQTQTDLNFF

SEQ ID NO: 364 - protein, 80 aa, Synthetic construct
DSSWATLSQGSPSYGSPEDTDSFWNPNAFETDSDLPAGWMRVQDTSGTYYWHIPTGTTQWEPPGRASPSQGSSPQEESQL

SEQ ID NO: 365 - protein, 80 aa, Synthetic construct
SPSYGSPEDTDSFWNPNAFETDSDLPAGWMRVQDTSGTYYWHIPTGTTQWEPPGRASPSQGSSPQEESQLTWTGFAHGEG

SEQ ID NO: 366 - protein, 80 aa, Synthetic construct
TDSDLPAGWMRVQDTSGTYYWHIPTGTTQWEPPGRASPSQGSSPQEESQLTWTGFAHGEGFEDGEFWKDEPSDEAPMELG

SEQ ID NO: 367 - protein, 80 aa, Synthetic construct
LPPGWRKIHDAAGTYYWHVPSGSTQWQRPTWELGDAEDPGTGTEGIWGLRPPKGRSFSSLESSLDRSNSLSWYGGESYIQ

SEQ ID NO: 368 - protein, 80 aa, Synthetic construct
FHPSQVSPRARFPVSITSPNRTGARTLADIKAKAQLVKAQRAAAAAAAAAAAAASVGGTIPGPGPGGGQGPGEGGEGQTA

SEQ ID NO: 369 - protein, 80 aa, Synthetic construct
SKPESRASTSTSVSGGRNTGARTLADIKARAQQARAQREAAAAAAVAAAASIVSGAMGSPGEGGKTRTLAHIKEQTKAKL

SEQ ID NO: 370 - protein, 80 aa, Synthetic construct
EMRFAKMPDEPEEPVVAVSSPAVPPPTKVVAPPSSSDSSSDSSSDSDSSTDDSEEERAQRLAELQEQLKAVHEQLAALSQ

SEQ ID NO: 371 - protein, 80 aa, Synthetic construct
YLNYGPYSSYAPHYDSTFANISKDDSDLIYSTYGEDSDLPSDFSIHEFLATCQDYPYVMADSLLDVLTKGGHSRTLQEME

SEQ ID NO: 372 - protein, 80 aa, Synthetic construct
APHYDSTFANISKDDSDLIYSTYGEDSDLPSDFSIHEFLATCQDYPYVMADSLLDVLTKGGHSRTLQEMEMSLPEDEGHT

SEQ ID NO: 373 - protein, 80 aa, Synthetic construct
STYGEDSDLPSDFSIHEFLATCQDYPYVMADSLLDVLTKGGHSRTLQEMEMSLPEDEGHTRTLDTAKEMEITEVEPPGRL

SEQ ID NO: 374 - protein, 80 aa, Synthetic construct
SDFSIHEFLATCQDYPYVMADSLLDVLTKGGHSRTLQEMEMSLPEDEGHTRTLDTAKEMEITEVEPPGRLDSSTQDRLIA

SEQ ID NO: 375 - protein, 80 aa, Synthetic construct
CFRSGVAEAPVGSKAPSIDGKEELDLAEKMDIAVSYTGEELDFETVGDIIAIIEDKVDDHPEVLDVAAVEAALSFCEEND

SEQ ID NO: 376 - protein, 80 aa, Synthetic construct
DIAVSYTGEELDFETVGDIIAIIEDKVDDHPEVLDVAAVEAALSFCEENDDPQSLPGPWEHPIQQERDKPVPLPAPEMTV

SEQ ID NO: 377 - protein, 80 aa, Synthetic construct
NEAKERNWQIGDRFRSIIDDAWWFGTVESQQPFQPEYPDSSFQCYSVHWDNNEREKMSPWDMEPIPEGTAFPDEVGAGVP

SEQ ID NO: 378 - protein, 80 aa, Synthetic construct
AWWFGTVESQQPFQPEYPDSSFQCYSVHWDNNEREKMSPWDMEPIPEGTAFPDEVGAGVPVSQEELTALLYKPQEGEWGA

SEQ ID NO: 379 - protein, 80 aa, Synthetic construct
PVTSAQAPRHLQSSAWEMDGPRENRGSFHKSLDQIFETLETKNPSCMEELFSDVDSPYYDLDTVLTGMMGGARPGPCEGL

SEQ ID NO: 380 - protein, 80 aa, Synthetic construct
PRENRGSFHKSLDQIFETLETKNPSCMEELFSDVDSPYYDLDTVLTGMMGGARPGPCEGLEGLAPATPGPSSSCKSDLGE

SEQ ID NO: 381 - protein, 80 aa, Synthetic construct
LDQIFETLETKNPSCMEELFSDVDSPYYDLDTVLTGMMGGARPGPCEGLEGLAPATPGPSSSCKSDLGELDHVVEILVET

SEQ ID NO: 382 - protein, 80 aa, Synthetic construct
NMIIEGGHFTLGAQKPAADADLQLSEILKFGLDKLLASEGSTMDEIDLESILGETKDGQWVSDALPAAEGGSRDQEEGKN

SEQ ID NO: 383 - protein, 80 aa, Synthetic construct
LGAQKPAADADLQLSEILKFGLDKLLASEGSTMDEIDLESILGETKDGQWVSDALPAAEGGSRDQEEGKNHMYLFEGKDY

SEQ ID NO: 384 - protein, 80 aa, Synthetic construct
IHQQRTQQVEQDMFAHPYQYELNHFTPADAVLQKPQPQLYRPIEETPCHFISSLDELVELNEKLLNCQEFAVDLEHHSYR

SEQ ID NO: 385 - protein, 80 aa, Synthetic construct
GLSQSQSPGQTGFLSYGTSFSTPQPGQAPYSYQMQGSSFTTSSGIYTGNNSLTNSSGFNSSQQDYPSYPSFGQGQYAQYY

SEQ ID NO: 386 - protein, 80 aa, Synthetic construct
PGQSGFLSYGSSFSTSPTGQSPYTYQMHGTTGFYQGGNGLGNAAGFGSVHQDYPSYPGFPQSQYPQYYGSSYNPPYVPAS

SEQ ID NO: 387 - protein, 80 aa, Synthetic construct
TGFYQGGNGLGNAAGFGSVHQDYPSYPGFPQSQYPQYYGSSYNPPYVPASSICPSPLSTSTYVLQEASHNVPNQSSESLA

SEQ ID NO: 388 - protein, 80 aa, Synthetic construct
SSLASNLPMSEEIMTCTDYIPRSSNDYTSQMYSAKPYAHILSVPVSETAYPGQTQYQTLQQTQPYAVYPQATQTYGLPPF

SEQ ID NO: 389 - protein, 80 aa, Synthetic construct
PRSSNDYTSQMYSAKPYAHILSVPVSETAYPGQTQYQTLQQTQPYAVYPQATQTYGLPPFGALWPGMKPESGLIQTPSPS

SEQ ID NO: 390 - protein, 80 aa, Synthetic construct
MYSAKPYAHILSVPVSETAYPGQTQYQTLQQTQPYAVYPQATQTYGLPPFGALWPGMKPESGLIQTPSPSQHSVLTCTTG

SEQ ID NO: 391 - protein, 80 aa, Synthetic construct
TQSPLQSGCLSYSPGFSTPQPGQTPYSYQMPGSSFAPSSTIYANNSVSNSTNFSGSQQDYPSYTAFGQNQYAQYYSASTY

SEQ ID NO: 392 - protein, 80 aa, Synthetic construct
PGQTPYSYQMPGSSFAPSSTIYANNSVSNSTNFSGSQQDYPSYTAFGQNQYAQYYSASTYGAYMTSNNTADGTPSSTSTY

SEQ ID NO: 393 - protein, 80 aa, Synthetic construct
LSMPASVSLPVEASHIRSPSTPELSADELPDDIANEITDIPHDLELNQEDFSDVLPRLPDDLQDFDFFEGKNGDLLPTTE

SEQ ID NO: 394 - protein, 80 aa, Synthetic construct
VEASHIRSPSTPELSADELPDDIANEITDIPHDLELNQEDFSDVLPRLPDDLQDFDFFEGKNGDLLPTTEEAEELERALQ

SEQ ID NO: 395 - protein, 80 aa, Synthetic construct
TPELSADELPDDIANEITDIPHDLELNQEDFSDVLPRLPDDLQDFDFFEGKNGDLLPTTEEAEELERALQAVTSLECLST

SEQ ID NO: 396 - protein, 80 aa, Synthetic construct
DDIANEITDIPHDLELNQEDFSDVLPRLPDDLQDFDFFEGKNGDLLPTTEEAEELERALQAVTSLECLSTIGVLAQSDGV

SEQ ID NO: 397 - protein, 80 aa, Synthetic construct
PHDLELNQEDFSDVLPRLPDDLQDFDFFEGKNGDLLPTTEEAEELERALQAVTSLECLSTIGVLAQSDGVPVQELSDRGI

SEQ ID NO: 398 - protein, 80 aa, Synthetic construct
FSDVLPRLPDDLQDFDFFEGKNGDLLPTTEEAEELERALQAVTSLECLSTIGVLAQSDGVPVQELSDRGIGVFSTGTGAS

SEQ ID NO: 399 - protein, 80 aa, Synthetic construct
DLQDFDFFEGKNGDLLPTTEEAEELERALQAVTSLECLSTIGVLAQSDGVPVQELSDRGIGVFSTGTGASGIQSLSREVN

SEQ ID NO: 400 - protein, 80 aa, Synthetic construct
VSEEKSLMFIRPKKYIVSSGSEPPELGYVDIRTLADSVCRYDLNDMDAAWLELTNEEFKEMGMPELDEYTMERVLEEFEQ

SEQ ID NO: 401 - protein, 80 aa, Synthetic construct
RPKKYIVSSGSEPPELGYVDIRTLADSVCRYDLNDMDAAWLELTNEEFKEMGMPELDEYTMERVLEEFEQRCYDNMNHAI

SEQ ID NO: 402 - protein, 80 aa, Synthetic construct
IRTLADSVCRYDLNDMDAAWLELTNEEFKEMGMPELDEYTMERVLEEFEQRCYDNMNHAIETEEGLGIEYDEDVVCDVCQ

SEQ ID NO: 403 - protein, 80 aa, Synthetic construct
YDLNDMDAAWLELTNEEFKEMGMPELDEYTMERVLEEFEQRCYDNMNHAIETEEGLGIEYDEDVVCDVCQSPDGEDGNEM

SEQ ID NO: 404 - protein, 80 aa, Synthetic construct
LELTNEEFKEMGMPELDEYTMERVLEEFEQRCYDNMNHAIETEEGLGIEYDEDVVCDVCQSPDGEDGNEMVFCDKCNICV

SEQ ID NO: 405 - protein, 80 aa, Synthetic construct
PDDYYILADPWRQEWEKGVQVPAGAEAIPEPVVRILPPLEGPPAQASPSSTMLGEGSQPDWPGGSRYDLDEIDAYWLELI

SEQ ID NO: 406 - protein, 80 aa, Synthetic construct
VPAGAEAIPEPVVRILPPLEGPPAQASPSSTMLGEGSQPDWPGGSRYDLDEIDAYWLELINSELKEMERPELDELTLERV

SEQ ID NO: 407 - protein, 80 aa, Synthetic construct
GPPAQASPSSTMLGEGSQPDWPGGSRYDLDEIDAYWLELINSELKEMERPELDELTLERVLEELETLCHQNMARAIETQE

SEQ ID NO: 408 - protein, 80 aa, Synthetic construct
MQRGMNMSVNLMPAPAYNVNSVNMNMNTLNAMNGYSMSQPMMNSGYHSNHGYMNQTPQYPMQMQMGMMGTQPYAQQPMQT

SEQ ID NO: 409 - protein, 80 aa, Synthetic construct
LMPAPAYNVNSVNMNMNTLNAMNGYSMSQPMMNSGYHSNHGYMNQTPQYPMQMQMGMMGTQPYAQQPMQTPPHGNMMYTA

SEQ ID NO: 410 - protein, 80 aa, Synthetic construct
WSLEYIQEIAGCRTVPVEVGSRYTDEEWSQTLMTVNEFISKYIVNEPRDVGYLAQHQLFDQIPELKQDISIPDYCSLGDG

SEQ ID NO: 411 - protein, 80 aa, Synthetic construct
VKDLEGVEVKDLDDEDLENLNLDTEDGKVVELDTLDNLETNDPNLDDLLRSGEFDIIAYTDPELDMGDKKSMFNEELDLP

SEQ ID NO: 412 - protein, 80 aa, Synthetic construct
DLDDEDLENLNLDTEDGKVVELDTLDNLETNDPNLDDLLRSGEFDIIAYTDPELDMGDKKSMFNEELDLPIDDKLDNQCV

SEQ ID NO: 413 - protein, 80 aa, Synthetic construct
NLDTEDGKVVELDTLDNLETNDPNLDDLLRSGEFDIIAYTDPELDMGDKKSMFNEELDLPIDDKLDNQCVSVEPKKKEQE

SEQ ID NO: 414 - protein, 80 aa, Synthetic construct
LEAGKLPCEDPELDDDFDAHKALEDDEELAHLGLGVDVAKGDDELGTLENLETNDPHLDDLLNGDEFDLLAYTDPELDTG

SEQ ID NO: 415 - protein, 80 aa, Synthetic construct
LETNDPHLDDLLNGDEFDLLAYTDPELDTGDKKDIFNEHLRLVESANEKAEREALLRGVEPGPLGPEERPPPAADASEPR

SEQ ID NO: 416 - protein, 80 aa, Synthetic construct
RKAYEPKLTPEEMMDSSTFKRFTASIENILDNLEDMDFTAFGDDDEIPQELLLGKHQLNELGSESAKIKAMGIMDKLSTD

SEQ ID NO: 417 - protein, 80 aa, Synthetic construct
KGPTDGGQSLEELSSHFYTVIPHNFGHSQPPPINSPELLQAKKDMLLVLADIELAQALQAVSEQEKTVEEVPHPLDRDYQ

SEQ ID NO: 418 - protein, 80 aa, Synthetic construct
EELSSHFYTVIPHNFGHSQPPPINSPELLQAKKDMLLVLADIELAQALQAVSEQEKTVEEVPHPLDRDYQLLKCQLQLLD

SEQ ID NO: 419 - protein, 80 aa, Synthetic construct
IPHNFGHSQPPPINSPELLQAKKDMLLVLADIELAQALQAVSEQEKTVEEVPHPLDRDYQLLKCQLQLLDSGAPEYKVIQ

SEQ ID NO: 420 - protein, 80 aa, Synthetic construct
PPINSPELLQAKKDMLLVLADIELAQALQAVSEQEKTVEEVPHPLDRDYQLLKCQLQLLDSGAPEYKVIQTYLEQTGSNH

SEQ ID NO: 421 - protein, 80 aa, Synthetic construct
ESVWSDIECAALVGEDQPLCPDLPELDLSELDVNDLDTDSFLGGLKWCSDQSEIISNQYNNEPSNIFEKIDEENEANLLA

SEQ ID NO: 422 - protein, 80 aa, Synthetic construct
ALVGEDQPLCPDLPELDLSELDVNDLDTDSFLGGLKWCSDQSEIISNQYNNEPSNIFEKIDEENEANLLAVLTETLDSLP

SEQ ID NO: 423 - protein, 80 aa, Synthetic construct
PDLPELDLSELDVNDLDTDSFLGGLKWCSDQSEIISNQYNNEPSNIFEKIDEENEANLLAVLTETLDSLPVDEDGLPSFD

SEQ ID NO: 424 - protein, 80 aa, Synthetic construct
LDVNDLDTDSFLGGLKWCSDQSEIISNQYNNEPSNIFEKIDEENEANLLAVLTETLDSLPVDEDGLPSFDALTDGDVTTD

SEQ ID NO: 425 - protein, 80 aa, Synthetic construct
FLGGLKWCSDQSEIISNQYNNEPSNIFEKIDEENEANLLAVLTETLDSLPVDEDGLPSFDALTDGDVTTDNEASPSSMPD

SEQ ID NO: 426 - protein, 80 aa, Synthetic construct
ELNKHFGHPSQAVFDDEADKTGELRDSDFSNEQFSKLPMFINSGLAMDGLFDDSEDESDKLSYPWDGTQSYSLFNVSPSC

SEQ ID NO: 427 - protein, 80 aa, Synthetic construct
MAGNDCGALLDEELSSFFLNYLADTQGGGSGEEQLYADFPELDLSQLDASDFDSATCFGELQWCPENSETEPNQYSPDDS

SEQ ID NO: 428 - protein, 80 aa, Synthetic construct
YLADTQGGGSGEEQLYADFPELDLSQLDASDFDSATCFGELQWCPENSETEPNQYSPDDSELFQIDSENEALLAELTKTL

SEQ ID NO: 429 - protein, 80 aa, Synthetic construct
GEEQLYADFPELDLSQLDASDFDSATCFGELQWCPENSETEPNQYSPDDSELFQIDSENEALLAELTKTLDDIPEDDVGL

SEQ ID NO: 430 - protein, 80 aa, Synthetic construct
DFDSATCFGELQWCPENSETEPNQYSPDDSELFQIDSENEALLAELTKTLDDIPEDDVGLAAFPALDGGDALSCTSASPA

SEQ ID NO: 431 - protein, 80 aa, Synthetic construct
DYLPLTALVDGQIFCLHGGLSPSIDTLDHIRALDRLQEVPHEGPMCDLLWSDPDDRGGWGISPRGAGYTFGQDISETFNH

SEQ ID NO: 432 - protein, 80 aa, Synthetic construct
GQIFCLHGGLSPSIDTLDHIRALDRLQEVPHEGPMCDLLWSDPDDRGGWGISPRGAGYTFGQDISETFNHANGLTLVSRA

SEQ ID NO: 433 - protein, 80 aa, Synthetic construct
RSIGEYDVLRGIFTSEIGTKQITQSALLAEARSDYSEAAKQYDEALNKQDWVDGEPTEAEKDFWELASLDCYNHLAEWKS

SEQ ID NO: 434 - protein, 80 aa, Synthetic construct
GIFTSEIGTKQITQSALLAEARSDYSEAAKQYDEALNKQDWVDGEPTEAEKDFWELASLDCYNHLAEWKSLEYCSTASID

SEQ ID NO: 435 - protein, 80 aa, Synthetic construct
QITQSALLAEARSDYSEAAKQYDEALNKQDWVDGEPTEAEKDFWELASLDCYNHLAEWKSLEYCSTASIDSENPPDLNKI

SEQ ID NO: 436 - protein, 80 aa, Synthetic construct
ESQGEEPAECSEAGLLQEGVQPEEFVAIADYAATDETQLSFLRGEKILILRQTTADWWWGERAGCCGYIPANHVGKHVDE

SEQ ID NO: 437 - protein, 80 aa, Synthetic construct
QADRRIKLYAVEKNPNAVVTLENWQFEEWGSQVTVVSSDMREWVAPEKADIIVSELLGSFADNELSPECLDGAQHFLKDD

SEQ ID NO: 438 - protein, 80 aa, Synthetic construct
VQPYEHGYPVSGGFAMPPVSLNHNLTTPFTSQAGENSLFMGSTPSYYQLSNLLADARLVFPVTTDPLVPAGPVSSSSTAT

SEQ ID NO: 439 - protein, 80 aa, Synthetic construct
AQELFQGSDLGMAEEAERPGEKAGQHSPLREEHVTCVQSILDEFLQTYGSLIPLSTDEVVEKLEDIFQQEFSTPSRKGLV

SEQ ID NO: 440 - protein, 80 aa, Synthetic construct
PEHVSSPMSGGGPTPPQMPPSQPGALIPGDPQAMSQPNRGPSPFSPVQLHQLRAQILAYKMLARGQPLPETLQLAVQGKR

SEQ ID NO: 441 - protein, 80 aa, Synthetic construct
GGPTPPQMPPSQPGALIPGDPQAMSQPNRGPSPFSPVQLHQLRAQILAYKMLARGQPLPETLQLAVQGKRTLPGLQQQQQ

SEQ ID NO: 442 - protein, 80 aa, Synthetic construct
PQAMSQPNRGPSPFSPVQLHQLRAQILAYKMLARGQPLPETLQLAVQGKRTLPGLQQQQQQQQQQQQQQQQQQQQQQQPQ

SEQ ID NO: 443 - protein, 80 aa, Synthetic construct
PSPFSPVQLHQLRAQILAYKMLARGQPLPETLQLAVQGKRTLPGLQQQQQQQQQQQQQQQQQQQQQQQPQQQPPQPQTQQ

SEQ ID NO: 444 - protein, 80 aa, Synthetic construct
SSPVPASGPSSGPQMSSGPGGAPLDGADPQALGQQNRGPTPFNQNQLHQLRAQIMAYKMLARGQPLPDHLQMAVQGKRPM

SEQ ID NO: 445 - protein, 80 aa, Synthetic construct
SGPQMSSGPGGAPLDGADPQALGQQNRGPTPFNQNQLHQLRAQIMAYKMLARGQPLPDHLQMAVQGKRPMPGMQQQMPTL

SEQ ID NO: 446 - protein, 80 aa, Synthetic construct
LAKSKGASAGREWTEQETLLLLEALEMYKDDWNKVSEHVGSRTQDECILHFLRLPIEDPYLENSDASLGPLAYQPVPFSQ

SEQ ID NO: 447 - protein, 80 aa, Synthetic construct
MYTKKNVPSKSKAAASATREWTEQETLLLLEALEMYKDDWNKVSEHVGSRTQDECILHFLRLPIEDPYLEDSEASLGPLA

SEQ ID NO: 448 - protein, 80 aa, Synthetic construct
SKAAASATREWTEQETLLLLEALEMYKDDWNKVSEHVGSRTQDECILHFLRLPIEDPYLEDSEASLGPLAYQPIPFSQSG

SEQ ID NO: 449 - protein, 80 aa, Synthetic construct
WTEQETLLLLEALEMYKDDWNKVSEHVGSRTQDECILHFLRLPIEDPYLEDSEASLGPLAYQPIPFSQSGNPVMSTVAFL

SEQ ID NO: 450 - protein, 80 aa, Synthetic construct
NPLFASTLLNLKQAEEAKTADTAIPFHSTDDPPRPTFDSLLSRDMAGYMPARADFIEEFDNYAEWDLRDIDFVEDDSDIL

SEQ ID NO: 451 - protein, 80 aa, Synthetic construct
LKQAEEAKTADTAIPFHSTDDPPRPTFDSLLSRDMAGYMPARADFIEEFDNYAEWDLRDIDFVEDDSDILHALKMAVVDI

SEQ ID NO: 452 - protein, 80 aa, Synthetic construct
DSIIWDGEDIKHKGTKPQGASLAGWLPSIKTRNVMAYNVQQGFAPTLDDDKPWYSIFPIDNEDLVYGRWEDNIIWDAQAM

SEQ ID NO: 453 - protein, 80 aa, Synthetic construct
SLAGWLPSIKTRNVMAYNVQQGFAPTLDDDKPWYSIFPIDNEDLVYGRWEDNIIWDAQAMPRLLEPPVLALDPNDENLIL

SEQ ID NO: 454 - protein, 80 aa, Synthetic construct
TRNVMAYNVQQGFAPTLDDDKPWYSIFPIDNEDLVYGRWEDNIIWDAQAMPRLLEPPVLALDPNDENLILEIPDEKEEAT

SEQ ID NO: 455 - protein, 80 aa, Synthetic construct
KPWYSIFPIDNEDLVYGRWEDNIIWDAQAMPRLLEPPVLALDPNDENLILEIPDEKEEATSNSPSKESKKESSLKKSRIL

SEQ ID NO: 456 - protein, 80 aa, Synthetic construct
KMKAQAAEPNRGGPGGRGCRRLDDLPWDSLLFQESSSGGGAEPSFGSGLPLPPGGAGPEDPSLSVTLADIYRELYAFFGD

SEQ ID NO: 457 - protein, 80 aa, Synthetic construct
RLDDLPWDSLLFQESSSGGGAEPSFGSGLPLPPGGAGPEDPSLSVTLADIYRELYAFFGDSLATRFGTGQPAPTAPRPPG

SEQ ID NO: 458 - protein, 80 aa, Synthetic construct
AVWDLHNQTLVRQFQGHTDGASCIDISHDGTKLWTGGLDNTVRSWDLREGRQLQQHDFTSQIFSLGYCPTGEWLAVGMES

SEQ ID NO: 459 - protein, 80 aa, Synthetic construct
GALSVKEMLKKFQKEKEAQKKREEEHKPVAVPSAEAQGLRELEGASDPLLSLFGSTSDNDLLQAATAMDSLTDLDLEHLL

SEQ ID NO: 460 - protein, 80 aa, Synthetic construct
KREEEHKPVAVPSAEAQGLRELEGASDPLLSLFGSTSDNDLLQAATAMDSLTDLDLEHLLSESPEGSPFRDMDDGSDSLG

SEQ ID NO: 461 - protein, 80 aa, Synthetic construct
VPSAEAQGLRELEGASDPLLSLFGSTSDNDLLQAATAMDSLTDLDLEHLLSESPEGSPFRDMDDGSDSLGVGLDQEFRQP

SEQ ID NO: 462 - protein, 80 aa, Synthetic construct
ELEGASDPLLSLFGSTSDNDLLQAATAMDSLTDLDLEHLLSESPEGSPFRDMDDGSDSLGVGLDQEFRQPSSLPEGLPAP

SEQ ID NO: 463 - protein, 80 aa, Synthetic construct
SLFGSTSDNDLLQAATAMDSLTDLDLEHLLSESPEGSPFRDMDDGSDSLGVGLDQEFRQPSSLPEGLPAPLEKRVKELAQ

SEQ ID NO: 464 - protein, 80 aa, Synthetic construct
LDVLHRHCKGDDNGKKANNPNHCNCIIDQIFTGGLQSDVTCQVCHGVSTTIDPFWDISLDLPGSSTPFWPLSPGSEGNVV

SEQ ID NO: 465 - protein, 80 aa, Synthetic construct
NHCNCIIDQIFTGGLQSDVTCQVCHGVSTTIDPFWDISLDLPGSSTPFWPLSPGSEGNVVNGESHVSGTTTLTDCLRRFT

SEQ ID NO: 466 - protein, 80 aa, Synthetic construct
FTGGLQSDVTCQVCHGVSTTIDPFWDISLDLPGSSTPFWPLSPGSEGNVVNGESHVSGTTTLTDCLRRFTRPEHLGSSAK

SEQ ID NO: 467 - protein, 80 aa, Synthetic construct
KIVETIEELKVKIPSNPLEADILAMAEMIAEAEELDKASSDLCDLVSNQSAEGLLEDCDLFGPARDDVLAMAVKMANVLD

SEQ ID NO: 468 - protein, 80 aa, Synthetic construct
VKIPSNPLEADILAMAEMIAEAEELDKASSDLCDLVSNQSAEGLLEDCDLFGPARDDVLAMAVKMANVLDEPGQDLEADF

SEQ ID NO: 469 - protein, 80 aa, Synthetic construct
EAEELDKASSDLCDLVSNQSAEGLLEDCDLFGPARDDVLAMAVKMANVLDEPGQDLEADFPKNPLDINPSVDFLFDCGLV

SEQ ID NO: 470 - protein, 80 aa, Synthetic construct
AEGLLEDCDLFGPARDDVLAMAVKMANVLDEPGQDLEADFPKNPLDINPSVDFLFDCGLVGPEDVSTEQDLPRTMRKGQK

SEQ ID NO: 471 - protein, 80 aa, Synthetic construct
PAPTPQQAPPPPSLVPLEATDSLLELPHPLLQQTEDQFLSPTLACSSPLISFSPSLDQDDYLWGLEAGEGISDLFDSYDL

SEQ ID NO: 472 - protein, 80 aa, Synthetic construct
PPPPPTVGLRSMEQEETYLELYLDQCAAQDGLAPPRSPLFSPVVPYDMYILNASNPDTAFNSNPEVKETSGDFSSVDLSF

SEQ ID NO: 473 - protein, 80 aa, Synthetic construct
ASNEDFSITQDLEIPADIVELHDINVEPLPMEDIPTESVQYEDVDGNWIYGGHNHPPLMVLQPLFTNTGYGDHDQEMLML

SEQ ID NO: 474 - protein, 80 aa, Synthetic construct
EQSVYSSDPFRQGLTPPQMPGDHMHPYGAEPLFHDLDSDDTSLSNLGDCFLATSEAGPLQSRVGNPIDHLYSMQNSYFTS

SEQ ID NO: 475 - protein, 80 aa, Synthetic construct
DVLASYSIFQELQLVHDTGYFSALPSLEETWQQTCLELERYLQTEPRRISETFGEDLDCFLHASPPPCIEESFRRLDPLL

SEQ ID NO: 476 - protein, 80 aa, Synthetic construct
EDIDLDNLFREYSVEQAQQVLHQSVSMSTVSAHPFRDLPLGREQHCKLLPGVADIRASQVARWTVDEVAEFVQSLLGCEE

SEQ ID NO: 477 - protein, 80 aa, Synthetic construct
SLVPTLSMIAPPPVMASAPIPKALGTPVLTPPTEAASQDRMPQDLDLDMYMENLECDMDNIISDLMDEGEGLDFNFEPDP

SEQ ID NO: 478 - protein, 80 aa, Synthetic construct
SPAFDPDRFLNSPQRGQTYGGGQGVSPDFPEAEAAHTPCSALEPAAALEPQAAARGPPPQSVAGGRRGNCFFIQDDDSGE

SEQ ID NO: 479 - protein, 80 aa, Synthetic construct
VGRGEALFGGPVGASELEPFSLSSFPDLMGELISDEAPSIPAPTPQLSPALSTITDFSPEWSYPEGGVKVLITGPWTEAA

SEQ ID NO: 480 - protein, 80 aa, Synthetic construct
LKGEIESYLMELQGGVPSSSQDSQASSSSKLGLDPQIGSLDDGAGDLSLSKSSISISDPLNTPALDFSQLFNFIPLNGPP

SEQ ID NO: 481 - protein, 80 aa, Synthetic construct
CLSTMGQNCGAGLNNDSPEALEVPSLQDFSVFSTDSCLQLSDAVSPSLPGSLDSPVDISADSLDFFTDTLTTIDLQHLNY

SEQ ID NO: 482 - protein, 80 aa, Synthetic construct
DYPSPLQPGELQSLPLGPEVDFSQGYELPGASSRVTCEDLESDSPLAPGPFSKLLQPDMSHHYESWFRPTHPGAEDGSWW

SEQ ID NO: 483 - protein, 80 aa, Synthetic construct
FSKLLQPDMSHHYESWFRPTHPGAEDGSWWDLHPGTSWMDLPHTQGALTSPGHPGALQAGLGGYVGDHQLCAPPPHPHAH

SEQ ID NO: 484 - protein, 80 aa, Synthetic construct
SDTLFSTLSSHQPVAWPNPREIAHLGNADMIQPGLIPLQPNLDFMDTFEPFQDLFSSSRSIFGSMLPASASAPVPDPNNP

SEQ ID NO: 485 - protein, 80 aa, Synthetic construct
LQLEYPDSLFQCYNVCWDNGDTEKMSPWDMELIPNNAVFPEELGTSVPLTDGECRSLIYKPLDGEWGTNPRDEECERIVA

SEQ ID NO: 486 - protein, 80 aa, Synthetic construct
ELTLGDIDEMLQFVSNQVGEFPDLFSEQLCSSFPGSGGSGSSSGSSGSSSSSSNGRGSSSGAVDPSVQRSFTQVTLPSFS

SEQ ID NO: 487 - protein, 80 aa, Synthetic construct
DGFYDQQVPYMVTNSQRGRNCNEKPTNVRKRKFINRDLAHDSEELFQDLSQLQETWLAEAQVPDNDEQFVPDYQAESLAF

SEQ ID NO: 488 - protein, 80 aa, Synthetic construct
GSGGEEAQGEVPSAGGEEPAEEDSEDWCVPCSDEEVELPADGQPWMPPPSEIQRLYELLAAHGTLELQAEILPRRPPTPE

SEQ ID NO: 489 - protein, 80 aa, Synthetic construct
YVSYLLDKDVSMYPSSVRHSGGLNLAPQNFVSPPQYPDYGGYHVAAAAAAAANLDSAQSPGPSWPAAYGAPLREDWNGYA

SEQ ID NO: 490 - protein, 80 aa, Synthetic construct
SPSIDTLDHIRALDRLQEVPHEGPMCDLLWSDPDDRGGWGISPRGAGYTFGQDISETFNHANGLTLVSRAHQLVMEGYNW

SEQ ID NO: 491 - protein, 80 aa, Synthetic construct
SLSLAVSRSTDELEIIDEYIKENGFGLDGGQPGPGEGLPRLVSRGAASLSTVTLGPVAPPATPPPWGCPLGRLVSPAPGP

SEQ ID NO: 492 - protein, 80 aa, Synthetic construct
SKRRKKKPAILDHFLPNHGSGPFLPPSALLPDPDFFSGTVSLPGLEPPGGPDLLDDGFAYDPTAPTLFTMLDLLPPAPPH

SEQ ID NO: 493 - protein, 80 aa, Synthetic construct
PEEPVVAVSSPAVPPPTKVVAPPSSSDSSSDSSSDSDSSTDDSEEERAQRLAELQEQLKAVHEQLAALSQPQQNKPKKKE

SEQ ID NO: 494 - protein, 80 aa, Synthetic construct
LDWDMRNELFLPCTTDQCSLAEQILAKYRVGVMKPPEMPQKRRPSPDGDGPPCEPNLWMWVDPNILCPLGSQEAPKPSGK

SEQ ID NO: 495 - protein, 80 aa, Synthetic construct
ALLDQLHTLLSNTDATGLEEIDRALGIPELVNQGQALEPKQDAFQGQEAAVMMDQKAGLYGQTYPAQGPPMQGGFHLQGQ

SEQ ID NO: 496 - protein, 80 aa, Synthetic construct
VAPVDLDGMQQDIEQVWEELLSIPELQCLNIENDKLVETTMVPSPEAKLTEVDNYHFYSSIPSMEKEVGNCSPHFLNAFE

SEQ ID NO: 497 - protein, 80 aa, Synthetic construct
MVPSPEAKLTEVDNYHFYSSIPSMEKEVGNCSPHFLNAFEDSFSSILSTEDPNQLTVNSLNSDATVNTDFGDEFYSAFIA

SEQ ID NO: 498 - protein, 80 aa, Synthetic construct
WADTATVIQDYNYCREDEEIYKEFFEVANDVIPNLLKEAASLLEAGEERPGEQSQGTQSQGSALQDPECFAHLLRFYDGI

SEQ ID NO: 499 - protein, 80 aa, Synthetic construct
SYSPGFSTPQPGQTPYSYQMPGSSFAPSSTIYANNSVSNSTNFSGSQQDYPSYTAFGQNQYAQYYSASTYGAYMTSNNTA

SEQ ID NO: 500 - protein, 80 aa, Synthetic construct
DDNGKKANNPNHCNCIIDQIFTGGLQSDVTCQVCHGVSTTIDPFWDISLDLPGSSTPFWPLSPGSEGNVVNGESHVSGTT

SEQ ID NO: 501 - protein, 80 aa, Synthetic construct
REWTEQETLLLLEALEMYKDDWNKVSEHVGSRTQDECILHFLRLPIEDPYLENSDASLGPLAYQPVPFSQSGNPVMSTVA

SEQ ID NO: 502 - protein, 80 aa, Synthetic construct
GGYSSVSSCNGYGRMGLLHQEKLPSDLDGMFIERLDCDMESIIRNDLMDGDTLDFNFDNVLPNQSFPHSVKTTTHSWVSG

SEQ ID NO: 503 - protein, 80 aa, Synthetic construct
NSMLPSQNMTDNQTQTIDLLSDLENILSSNLPAQTLDHRSLLSDTNPGPDTQLPSGPAQNPGIDFDIEEFFSASNIQTQT

SEQ ID NO: 504 - protein, 80 aa, Synthetic construct
TQLPSGPAQNPGIDFDIEEFFSASNIQTQTEESELSTMTTEPVLESLDIETQTDFLLADTSAQSYGCRGNSNFLGLEMFD

SEQ ID NO: 505 - protein, 80 aa, Synthetic construct
EKEGFYKFEEQNRAESECPGMNTHSRASCMQMDDVIDDIISLESSYNEEILGLMDPALQMANTLPVSGNLIDLYGNQGLP

SEQ ID NO: 506 - protein, 80 aa, Synthetic construct
EKHYMKHFINNPLFASTLLNLKQAEEAKTADTAIPFHSTDDPPRPTFDSLLSRDMAGYMPARADFIEEFDNYAEWDLRDI

SEQ ID NO: 507 - protein, 80 aa, Synthetic construct
GVAVRAPSPEEMEEEAIASLPGEETEDMDFLSGLELADLLDPRQPDWHLDPGLSSPGPLSSSGGGSDSGGLWRGDDDDEA

SEQ ID NO: 508 - protein, 80 aa, Synthetic construct
RSRKGHLPAPVQPYEHGYPVSGGFAMPPVSLNHNLTTPFTSQAGENSLFMGSTPSYYQLSNLLADARLVFPVTTDPLVPA

SEQ ID NO: 509 - protein, 80 aa, Synthetic construct
SQAGENSLFMGSTPSYYQLSNLLADARLVFPVTTDPLVPAGPVSSSSTATSVTASNPSFMLNPSVPGILPSYSLPFSQPL

SEQ ID NO: 510 - protein, 80 aa, Synthetic construct
PPLSQETFSDLWKLLPENNVLSPLPSQAMDDLMLSPDDIEQWFTEDPGPDEAPRMPEAAPPVAPAPAAPTPAAPAPAPSW

SEQ ID NO: 511 - protein, 80 aa, Synthetic construct
SSFDLPAPSPPRCSPQFPSIGQEPPEMNLYYENFFHPQGVPSPQRPSFEGGGEYGATPNPYLWFNGPTMTPPPYLPGPNA

SEQ ID NO: 512 - protein, 80 aa, Synthetic construct
TELSRDPGGCYGAPLAEALRTAPPAAPLAGLYYGTLGTPGPYPGPLSPPPEAPPLESAEPLGPAADLWADVDLTEFDQYL

SEQ ID NO: 513 - protein, 80 aa, Synthetic construct
PLESAEPLGPAADLWADVDLTEFDQYLNCSRTRPDAPGLPYHVALAKLGPRAMSCPEESSLISALSDASSAVYYSACISG

SEQ ID NO: 514 - protein, 80 aa, Synthetic construct
AEILGEAAEKAFEGSPARELDVPLPDIDYMEIPVDWWDAEADKSLLIGVFKHGYERYNAMRADPALCFLEKVGMPDEKSL

SEQ ID NO: 515 - protein, 80 aa, Synthetic construct
SRYTDEEWSQTLMTVNEFISKYIVNEPRDVGYLAQHQLFDQIPELKQDISIPDYCSLGDGEEEEITINAWFGPQGTISPL

SEQ ID NO: 516 - protein, 80 aa, Synthetic construct
VEIQRDMDQTLTLEDLVGPQMFMDCSPQALPIASEDTTGQHDHHFLDPNCHICKDWEPSNELLGSFEAAKSCGDNIFQKA

SEQ ID NO: 517 - protein, 80 aa, Synthetic construct
QEEALRDRHGNLPYDVTSPALCDTHLHPRNQLAGPPLEITQEAGEMVFVPSGWHHQVHNLDDTISINHNWVNGFNLANMW

SEQ ID NO: 518 - protein, 80 aa, Synthetic construct
MSPHPSPLGAPEHVSSPMSGGGPTPPQMPPSQPGALIPGDPQAMSQPNRGPSPFSPVQLHQLRAQILAYKMLARGQPLPE

SEQ ID NO: 519 - protein, 80 aa, Synthetic construct
GYQYVSPEGNCIEHVQPTSAFIQQPFIDEDPDKEKKIKELEMLLMSAENEVRRKRIPSQPGSFSSWSGSFLMDDNMSNTL

SEQ ID NO: 520 - protein, 80 aa, Synthetic construct
LMDDNMSNTLNSLDEHTSEFYSMDENQPVSAQQNSPTKFLAVEANAVLSSLQTIPEFAETLELIESDPVAWSDVTSFDIS

SEQ ID NO: 521 - protein, 80 aa, Synthetic construct
MICKNPDLEFDSLQPCFYPDEDDFYFGGPDSTPPGEDIWKKFELLPTPPLSPSRGFAEHSSEPPSWVTEMLLENELWGSP

SEQ ID NO: 522 - protein, 80 aa, Synthetic construct
TLSSWELEAWYEDLQEVLSSDENGGTYVSPPGNEEEESKIFTTLDPASLAWLTEEEPEPAEVTSTSQSPHSPDSSQSSLA

SEQ ID NO: 523 - protein, 80 aa, Synthetic construct
LRSLLENPLKLPLHHEDAFSKDKDKEKKLDDESNSPTVPQSAFLGPTLWDKTLPYDGDTFQLEYMDLEEFLSENGIPPSP

SEQ ID NO: 524 - protein, 80 aa, Synthetic construct
DYSYLNSYDSCVAAMEASAYGDFGACSQPGGFQYSPLRPAFPAAGPPCPALGSSNCALGALRDHQPAPYSAVPYKFFPEP

SEQ ID NO: 525 - protein, 80 aa, Synthetic construct
SNVCSIGDHVAQELFQGSDLGMAEEAERPGEKAGQHSPLREEHVTCVQSILDEFLQTYGSLIPLSTDEVVEKLEDIFQQE

SEQ ID NO: 526 - protein, 80 aa, Synthetic construct
MTDPMMDFFDDANLFGETLEGLSDDAFVQPGPVSLVDELNLGAEFEPLHIDSLNHVQGTPTHQKMTDFEQLNQFDSIKFH

SEQ ID NO: 527 - protein, 80 aa, Synthetic construct
TMGDMKTPDFDDLLAAFDIPDMVDPKAAIESGHDDHESHMKQNAHGEDDSHAPSSSDVGVSVIVKNVRNIDSSEGGEKDG

SEQ ID NO: 528 - protein, 80 aa, Synthetic construct
NLPMWSNQTWNNSTWSNQTQNIQSWSNHSWNTQTWCTQSWNNQAWNSPFYNCGEESLQSCMQFQPNSPASDLEAALEAAG

SEQ ID NO: 529 - protein, 80 aa, Synthetic construct
NMFLEETPVEDIFMDLSTPDPSEEWGSGDPEAEGPGGAPSPCNNLSPEDHSFLEDLATYETAFETGVSAFPYDGFTDELH

SEQ ID NO: 530 - protein, 80 aa, Synthetic construct
MDSLDHMLTDPLELGPCGDGHGTRIMEDCLLGGTRVSLPEDLLEDPEIFFDVVSLSTWQEVLSDSQREHLQQFLPQFPED

SEQ ID NO: 531 - protein, 80 aa, Synthetic construct
PSPLGGSEHASSPVPASGPSSGPQMSSGPGGAPLDGADPQALGQQNRGPTPFNQNQLHQLRAQIMAYKMLARGQPLPDHL

SEQ ID NO: 532 - protein, 80 aa, Synthetic construct
PFNQNQLHQLRAQIMAYKMLARGQPLPDHLQMAVQGKRPMPGMQQQMPTLPPPSVSATGPGPGPGPGPGPGPGPAPPNYS

SEQ ID NO: 533 - protein, 80 aa, Synthetic construct
MPCVQAQYSPSPPGSSYAAQTYSSEYTTEIMNPDYTKLTMDLGSTEITATATTSLPSISTFVEGYSSNYELKPSCVYQMQ

SEQ ID NO: 534 - protein, 80 aa, Synthetic construct
SPYTYQMHGTTGFYQGGNGLGNAAGFGSVHQDYPSYPGFPQSQYPQYYGSSYNPPYVPASSICPSPLSTSTYVLQEASHN

SEQ ID NO: 535 - protein, 80 aa, Synthetic construct
LQWDRKLSELSEPGDGEALMYHTHFSELLDEFSQNVLGQLLNDPFLSEKSVSMEVEPSPTSPAPLIQAEHSYSLCEEPRA

SEQ ID NO: 536 - protein, 80 aa, Synthetic construct
AELMLLSEIADPTRFFTDNLLSPEDWGLQNSTLYSGLDEVAEEQTQLFRCPEQDVPFDGSSLDVGMDVSPSEPPWELLPI

SEQ ID NO: 537 - protein, 80 aa, Synthetic construct
LLSPDASQGLVLAVSSDGHKFAFPTTGSSESLSMLPTNVSEELVLSTTLDGGRKIPETTMNFDPDCFLNNPKQGQTYGGG

SEQ ID NO: 538 - protein, 80 aa, Synthetic construct
QGLYPVAQPSLGNASNMELSLDHFDISFSNQFSDLINDFISVEGGSSTIYGHQLVSGDSTALSQSEDGARAPFTQAEMCL

SEQ ID NO: 539 - protein, 80 aa, Synthetic construct
EEMMDSSTFKRFTASIENILDNLEDMDFTAFGDDDEIPQELLLGKHQLNELGSESAKIKAMGIMDKLSTDKTVKVLNILE

SEQ ID NO: 540 - protein, 80 aa, Synthetic construct
KFQKEKEAQKKREEEHKPVAVPSAEAQGLRELEGASDPLLSLFGSTSDNDLLQAATAMDSLTDLDLEHLLSESPEGSPFR

SEQ ID NO: 541 - protein, 80 aa, Synthetic construct
TYQYPRAILSVDLSGENLSDVDFLDDSSTESLLLSGDEYNQDFDSTNFEESQDEDDALNEIVRCICEMDEENGFMIQCEE

SEQ ID NO: 542 - protein, 80 aa, Synthetic construct
HGMPEKNPAEGNTVFVYNDKKGTEDPGDSHLQWQLNLLTHIENVQNEVTSRMDLIEKEVDVLESWLDFTGELEPPDPLAR

SEQ ID NO: 543 - protein, 80 aa, Synthetic construct
PIPPAVPQGNLSMPASVSLPVEASHIRSPSTPELSADELPDDIANEITDIPHDLELNQEDFSDVLPRLPDDLQDFDFFEG

SEQ ID NO: 544 - protein, 80 aa, Synthetic construct
VLGGALEGGLPVGGEPLAGDGFSDWMTERVDFTALLPLEPPLPPGTLPQPSPTPPDLEAMASLLKKELEQMEDFFLDAPP

SEQ ID NO: 545 - protein, 80 aa, Synthetic construct
SPTPPDLEAMASLLKKELEQMEDFFLDAPPLPPPSPPPLPPPPLPPAPSLPLSLPSFDLPQPPVLDTLDLLAIYCRNEAG

SEQ ID NO: 546 - protein, 80 aa, Synthetic construct
PTPPLSPSRRSGLCSPSYVAVTPFSLRGDNDGGGGSFSTADQLEMVTELLGGDMVNQSFICDPDDETFIKNIIIQDCMWS

SEQ ID NO: 547 - protein, 80 aa, Synthetic construct
RFAKMPDEPVEAPALPAPAAPMVSKGAESSRSSEESSSDSGSSDSEEERATRLAELQEQLKAVHEQLAALSQAPVNKPKK

SEQ ID NO: 548 - protein, 80 aa, Synthetic construct
RQGQMQGIPAPSQALQEPAPWSALPCGLLLDELLASPEFLQQAQPLLETEAPGELEASEEAASLEAPLSEEEYRALLEEL

SEQ ID NO: 549 - protein, 80 aa, Synthetic construct
GGRQPPIDFRDVDIGELSSDVISNIETFDVNEFDQYLPPNGHPGVPATHGQVTYTGSYGISSTAATPASAGHVWMSKQQA

SEQ ID NO: 550 - protein, 80 aa, Synthetic construct
CALRGAGGLEPGPLPEDVFSGRQDSPFLPDLNFFAADSCLQLSGGLSPSLQGSLDSPVPFSEEELDFFTSTLCAIDLQFP

SEQ ID NO: 551 - protein, 80 aa, Synthetic construct
LLGFLPLNLPPCNPPGATGGLVMGYSQAEAQPLLTTLQAQPQDSPGAGGPLNFGPLHSLPPVFTSGLSSTTLPRFHQAFQ

SEQ ID NO: 552 - protein, 80 aa, Synthetic construct
WDLHNQTLVRQFQGHTDGASCIDISNDGTKLWTGGLDNTVRSWDLREGRQLQQHDFTSQIFSLGYCPTGEWLAVGMESSN

SEQ ID NO: 553 - protein, 80 aa, Synthetic construct
NCRSMSNKELFPPSPSEMGELEATRQNQSTVAVHSHEPLLSDGAQLDFDALCDNDDTAMAAFMNYLEAEGGLGDPGDFSD

SEQ ID NO: 554 - protein, 80 aa, Synthetic construct
TQSSSDSSPPEVSGPSSSQMSMKTRRLSSASTGKPPLSVEDDFEKLIWEISGGKLEAEIDLDPGKDEDDLLLELSEMIDS

SEQ ID NO: 555 - protein, 80 aa, Synthetic construct
YNYPEGAAYEFNAAAAANAQVYGQTGLPYGPGSEAAAFGSNGLGGFPPLNSVSPSPLMLLHPPPQLSPFLQPHGQQVPYY

SEQ ID NO: 556 - protein, 80 aa, Synthetic construct
NTDLAAGKMASAACSMDPIDSFELLDLLFDRQDGILRHVELGEGWGHVKDQQVLPNPDSDDFLSSILGSGDSLPSSPLWS

SEQ ID NO: 557 - protein, 80 aa, Synthetic construct
YCSEVTPREACMYSGSGPEIAGVSGVDDLPPPPLSCNMWTSVSPYTSYSVQTMETVPYQPFPTHFTATTMMPRLPTLSAQ

SEQ ID NO: 558 - protein, 80 aa, Synthetic construct
LQAVQSDPTQSGMYQLSSDVSHQEYPRSSWNQNTSDIPETTYRENEVDWLTELANIATSPQSPLMQCSFYNRSSPVHIIA

SEQ ID NO: 559 - protein, 80 aa, Synthetic construct
SNTCRSTKIDLSGARVSLSSPTSAEYIPLTPAAADVNGSPATITIETCEDPGDWTAAIGDDTFTFWRGLKDAGLLDEVIQ

SEQ ID NO: 560 - protein, 80 aa, Synthetic construct
PGENATLSYDQNDGFYFEYYEDTGSNNFLHEIHDPQHLETADASLSKHSSVFHWTDLSLEKKSCPYCPATFETGVGLSNH

SEQ ID NO: 561 - protein, 80 aa, Synthetic construct
LDTLVEFPIRDLDFSEFVIQPQNESNPELYKYDLIAVSNHYGGMRDGHYTTFACNKDSGQWHYFDDNSVSPVNENQIESK

SEQ ID NO: 562 - protein, 80 aa, Synthetic construct
AELYSLLQEEDMWAGLWQKRCKYSETATAIAYEQHGFFEQAQESYEKAMDKAKKEHERSNASPAIFPEYQLWEDHWIRCS

SEQ ID NO: 563 - protein, 80 aa, Synthetic construct
GSSGEDADDLMFDLSLNFSQSAHSASEQQLGGGAAAGNLSLSLVDKDLDSFSEGSLGSHFEFPDYCTPELSEMIAGDWLE

SEQ ID NO: 564 - protein, 80 aa, Synthetic construct
TQEYDNKRPVLVLQNEALYPQRRSYTSEDEAWKSFLENPLTAATKAMMSINGDEDSAAALGLLYDYYKVPRERRSSTAKP

SEQ ID NO: 565 - protein, 80 aa, Synthetic construct
DGFYDQQVPFMVPGKSRSEECRGRPVIDRKRKFLDTDLAHDSEELFQDLSQLQEAWLAEAQVPDDEQFVPDFQSDNLVLH

SEQ ID NO: 566 - protein, 80 aa, Synthetic construct
PKIARPFIEALKSIEYLEEDAQKSAQEGVLGPHTDALSSDSENMPCDEEPSQLEELADFMEQLTPIEKYALNYLELFHTS

SEQ ID NO: 567 - protein, 80 aa, Synthetic construct
LTQTLRIADHSLYALEPPAPHCGELGSPGGSPGDWGSLYSPVSQAGSLSPAASLEERPGLLGATFSACLSPGSLAFSDFL

SEQ ID NO: 568 - protein, 80 aa, Synthetic construct
GVNQRMDSYAHMNGWSNGSYSMMQDQLGYPQHPGLNAHGAAQMQPMHRYDVSALQYNSMTSSQTYMNGSPTYSMSYSQQG

SEQ ID NO: 569 - protein, 80 aa, Synthetic construct
GNILPSDIMDFVLKNTPSMQALGESPESSSSELLNLGEGLGLDSNREKDMGLFEVFSQQLPTTEPVDSSVSSSISAEEQF

SEQ ID NO: 570 - protein, 80 aa, Synthetic construct
LIVHLRSLNHEASELANYFQSSDFLVPDYLNQEQEETLVQYDLGEHGFESNSSVQMPVISQVSSTQNCESTFPLGSLGGL

SEQ ID NO: 571 - protein, 80 aa, Synthetic construct
HQQPPPQPGPSGERRNHHWRSYKLMIDPALKKGHHKLYRYDGQHFSLAMSSNRPVEIVEDPRVVGIWTKNKELELSVPKF

SEQ ID NO: 572 - protein, 80 aa, Synthetic construct
QSSHSSSGTLSSLETVSTQELYSIPEDQEPEDQEPEEPTPAPWARLWALQDGFANLECVNDNYWFGRDKSCEYCFDEPLL

SEQ ID NO: 573 - protein, 80 aa, Synthetic construct
TIGSSSEKEIDDVIDEIISLESSYNDEMLSYLPGGTTGLQLPSTLPVSGNLLDVYSSQGVATPAITVSNSCPAELPNIKR

SEQ ID NO: 574 - protein, 80 aa, Synthetic construct
PSDALLDLHFPSDHLGDLGDPFHLGLEDILMEEEEGVVGGLSGGALSPLRAASDPLLSSVSPAVSKASSRRSSFSMEEES

SEQ ID NO: 575 - protein, 80 aa, Synthetic construct
EFMDNMSFLDALLTDVREQNKYGRNDFSWTNGKVTSGLCDEFSLESNDGWTSQSSGELKAAAEALSFTKCSSAISKALET

SEQ ID NO: 576 - protein, 80 aa, Synthetic construct
SGSFDRKLSSILTDISSSLSCHAGSKDSPTLPESSVTDLGYYSAPQHDYYSGQPYGQTVNPYTYHHQFNLNGLAGTGAYS

SEQ ID NO: 577 - protein, 80 aa, Synthetic construct
KGRKPRDLELPLSPSLLGGPGPERTPGSGSGSGLQAPGPALTPSLLPTHTLTPVLLTPSSLPPSIHFWSTLSPIAPRSPA

SEQ ID NO: 578 - protein, 80 aa, Synthetic construct
GPALTPSLLPTHTLTPVLLTPSSLPPSIHFWSTLSPIAPRSPAKLSFQFPSSGSAQVHIPSISVDGLSTPVVLSPGPQKP

SEQ ID NO: 579 - protein, 80 aa, Synthetic construct
WFVGVDSLDLCDGDRWREQAALDLYPYDAGTDSGFTFSSPNFATIPQDTVTEITSSSPSHPANSFYYPRLKALPPIARVT

SEQ ID NO: 580 - protein, 80 aa, Synthetic construct
TVTYLGKFAFDSPSNWCQDNIISLMSAGILGVPPASGALSTQTSTASMVQPPQGDVEAMYPALPPYSNCGDLYSEPVSFH

SEQ ID NO: 581 - protein, 80 aa, Synthetic construct
PGGNLSSWEDLLLFTDLDQAATASKLLWSSRGAKLSPFAPEQPEEMYQTLAALSSQGPAAYDGAPGGFVHSAAAAAAAAA

SEQ ID NO: 582 - protein, 80 aa, Synthetic construct
QPPATGPRLPPEDLVQTRCEMEKYLTPQLPPVPIIPEHKKYRRDSASVVDQFFTDTEGLPYSINMNVFLPDITHLRTGLY

SEQ ID NO: 583 - protein, 80 aa, Synthetic construct
AAEEGEEETVASGEESLGFLSRLPPGPAGLDCSALDRDPDLQPPSGTSHFEFPDYCTPEVTEMIAGDWRPSSIADLVFTY

SEQ ID NO: 584 - protein, 80 aa, Synthetic construct
ELELDAGDQDLLAFLLEESGDLGTAPDEAVRAPLDWALPLSEVPSDWEVDDLLCSLLSPPASLNILSSSNPCLVHHDHTY

SEQ ID NO: 585 - protein, 80 aa, Synthetic construct
VLKYTAQNMELQNKVQLLEEQNLSLLDQLRKLQAMVIEISNKTSSSSTCILVLLVSFCLLLVPAMYSSDTRGSLPAEHGV

SEQ ID NO: 586 - protein, 80 aa, Synthetic construct
LSRQLRALPSEDPYQLELPALQSEVPKDSTHQWLDGSDCVLQAPGNTSCLLHYMPQAPSAEPPLEWPFPDLFSEPLCRGP

SEQ ID NO: 587 - protein, 80 aa, Synthetic construct
QPEEFVAIADYAATDETQLSFLRGEKILILRQTTADWWWGERAGCCGYIPANHVGKHVDEYDPEDTWQDEEYFGSYGTLK

SEQ ID NO: 588 - protein, 80 aa, Synthetic construct
ISKDDSDLIYSTYGEDSDLPSDFSIHEFLATCQDYPYVMADSLLDVLTKGGHSRTLQEMEMSLPEDEGHTRTLDTAKEME

SEQ ID NO: 589 - protein, 80 aa, Synthetic construct
HPAAGSNCYMQSTDYYAYFEDSPGYSGCDAQAVPSNNIYMEQAWAVNQPYTCSYPGNMFKSKDSDLDMALNQYSQPEYFT

SEQ ID NO: 590 - protein, 80 aa, Synthetic construct
GCVPFFGDTPEELFGQVISDEIVWPEGDEALPPDAQDLTSKLLHQNPLERLGTGSAYEVKQHPFFTGLDWTGLLRQKAEF

SEQ ID NO: 591 - protein, 80 aa, Synthetic construct
GSPQDELDFSILFDYEYLNPNEEEPNAHKVASPPSGPAYPDDVLDYGLKPYSPLASLSGEPPGRFGEPDRVGPQKFLSAA

SEQ ID NO: 592 - protein, 80 aa, Synthetic construct
EGGEESANLDFMLALSLQNEGQASSVAEQDFWRAVCEADQSHGGPRSLSDIKGAADEIMLPCEFCEELYPEELLIDHQTS

SEQ ID NO: 593 - protein, 80 aa, Synthetic construct
DMQNFGLRTDMYTKKNVPSKSKAAASATREWTEQETLLLLEALEMYKDDWNKVSEHVGSRTQDECILHFLRLPIEDPYLE

SEQ ID NO: 594 - protein, 80 aa, Synthetic construct
GHSDCSVSMGNLSPLASPANLLQQTEDQIPSNLEGPFVNLLPPLLQEDYLLSLGEEEGISDLFDAYDLEKLPLVEDFMCS

SEQ ID NO: 595 - protein, 80 aa, Synthetic construct
IIRDLNSLFTPDYELLTENDMLPNMRIGALGFSGAFEDRDPTQFEERHLKFLQQLGKGNFGSVEMCRYDPLQDNTGEVVA

SEQ ID NO: 596 - protein, 80 aa, Synthetic construct
FQQPQFLFPFYIPGTEFSLGPDLGLPGSATFGMPGMTGMAGSLLEDLKQQIQTQHHVGQTQLQILQQQAQQYQATQPQLQ

SEQ ID NO: 597 - protein, 80 aa, Synthetic construct
PPSASQTPVPSSPLQISMTSLQNSLPPQLLQYQCDQCTVAFPTLELWQEHQHMHFLAAQNQFLHSPFLERPMDMPYMIFD

SEQ ID NO: 598 - protein, 80 aa, Synthetic construct
DVVGENEALQQFFEAQGANGTLENPALDTSLLEEFLGNDFDLGALQRQLPDTPPYSASDSCSPPQVKGACYPTLRPTAGR

SEQ ID NO: 599 - protein, 80 aa, Synthetic construct
TVEGRNDEKALLEQLVSFLSGKDETELAELDRALGIDKLVQGGGLDVLSERFPPQQATPPLIMEERPNLYSQPYSSPSPT

SEQ ID NO: 600 - protein, 80 aa, Synthetic construct
DLGIPDLLDAWLEPPEDIFSTGSVLELGLHCPPPEVPVTRLQEQGLQGWKSGGDRGCGLQESEPEDFLKLFIDPNEVYCS

SEQ ID NO: 601 - protein, 80 aa, Synthetic construct
PGPLEAFEEIPVDVAEAEAFLPGFSAEAWCNGLPYPSQEHGPQVLGSEVKVKPPVLESGAGMFCYQPPLQHMYCSSQPPF

SEQ ID NO: 602 - protein, 80 aa, Synthetic construct
ARTMHDTLLPDGDLGTDLDAINPSLTDFDFQGNLWEQLKDDSLALDPLVLVTSSPTSSSMPPPQPPPHCFPPGPCLTETG

SEQ ID NO: 603 - protein, 80 aa, Synthetic construct
KDIDDNSNGTYEKMQNSAPRKQRGQRKERSPQQNIVSCVSVSTQTASDDQAGKLWDELSLVGLPDAIDIQALFDSTGTCW

SEQ ID NO: 604 - protein, 80 aa, Synthetic construct
ELDTLDNLETNDPNLDDLLRSGEFDIIAYTDPELDMGDKKSMFNEELDLPIDDKLDNQCVSVEPKKKEQENKTLVLSDKH

SEQ ID NO: 605 - protein, 80 aa, Synthetic construct
ILVNCDDDLWGDHSLEVEAGLPPGWRKIHDAAGTYYWHVPSGSTQWQRPTWELGDAEDPGTGTEGIWGLRPPKGRSFSSL

SEQ ID NO: 606 - protein, 80 aa, Synthetic construct
DEELSSFFLNYLADTQGGGSGEEQLYADFPELDLSQLDASDFDSATCFGELQWCPENSETEPNQYSPDDSELFQIDSENE

SEQ ID NO: 607 - protein, 80 aa, Synthetic construct
ELFQIDSENEALLAELTKTLDDIPEDDVGLAAFPALDGGDALSCTSASPAPSSAPPSPAPEKPSAPAPEVDELSLLQKLL

SEQ ID NO: 608 - protein, 80 aa, Synthetic construct
TGFLSYGTSFSTPQPGQAPYSYQMQGSSFTTSSGIYTGNNSLTNSSGFNSSQQDYPSYPSFGQGQYAQYYNSSPYPAHYM

SEQ ID NO: 609 - protein, 80 aa, Synthetic construct
DLCDLVSNQSAEGLLEDCDLFGPARDDVLAMAVKMANVLDEPGQDLEADFPKNPLDINPSVDFLFDCGLVGPEDVSTEQD

SEQ ID NO: 610 - protein, 80 aa, Synthetic construct
RLVASVPALYSDAYDIFQIIELYNLPDENEISSSSFHCLYQYLSPTKYQVGGQGSSLSIFAGPAVGLSPAQTWPNMTSQA

SEQ ID NO: 611 - protein, 80 aa, Synthetic construct
GGTPDIPSSGLLSGQAQENPGYPYSDSSSILGENPHIGIDMIDNDQGSSSPSNDEAAMAVIMSLLEADAGLGGPVDFSDL

SEQ ID NO: 612 - protein, 80 aa, Synthetic construct
TFLPKPSLVQPSQKVKETLVIMKDVSSSLQNRVHPRPLVKLLPKGVQKEQETVSLYLKANPEELVVFEDLNVFHCQEECV

SEQ ID NO: 613 - protein, 80 aa, Synthetic construct
DYDSYQHYFYDYDCGEDFYRSTAPSEDIWKKFELVPSPPTSPPWGLGPGAGDPAPGIGPPEPWPGGCTGDEAESRGHSKG

SEQ ID NO: 614 - protein, 80 aa, Synthetic construct
NSSSSSGPNPSTSFEPIKADPTGVLELPKELSEIFDPTRECMSSELLEELMSSEVFAPLLRLSPPPGDHDYIYNLDESEG

SEQ ID NO: 615 - protein, 80 aa, Synthetic construct
LQSSAWEMDGPRENRGSFHKSLDQIFETLETKNPSCMEELFSDVDSPYYDLDTVLTGMMGGARPGPCEGLEGLAPATPGP

SEQ ID NO: 616 - protein, 80 aa, Synthetic construct
DTAGPAAEEFSSRAKEFAFYHQGYAAGPYHHHQPMPGYLDMPVVPGLGGPGESRHEPLGLPMESYQPWALPNGWNGQMYC

SEQ ID NO: 617 - protein, 80 aa, Synthetic construct
QADLKNWSLDQVQFADLCSSLNQFFTQTGLIHSQSNVQQNVCHGAMHPTKPSQHIGTGNLYIDSRQNLPPSVMPPPGYPH

SEQ ID NO: 618 - protein, 80 aa, Synthetic construct
PKLPLEKKPNPDKDGPDYEPNLWMWVNPNIVYPPGKLEVSGRRKREDLTSTLPSSQPPQKEEDASCSEAAGVESLSQSSS

SEQ ID NO: 619 - protein, 80 aa, Synthetic construct
PMASGAEETPGFLDTLLQDFPALLNPEDPLPWKAPGTVLSQEEVEGELAELAMGFLGSRKAPPPLAAALAHEAVSQLLQT

SEQ ID NO: 620 - protein, 80 aa, Synthetic construct
GSVSAVTEEAALCAGWLSQPTPATLQPLAPWTPYTEYVPHEAVSCPYSADMYVQPVCPSYTVVGPSSVLTYASPPLITNV

SEQ ID NO: 621 - protein, 80 aa, Synthetic construct
GNEVRPVAGSAESAAGAGPVVTPPEHLPMDSGGIDSSDSESDILLGILDNLDPVMFFKCPSPEPASLEELPEVYPEGPSS

SEQ ID NO: 622 - protein, 80 aa, Synthetic construct
SNELDFRSVRLLKNDPVNLQKFSYTSEDEAWKTYLENPLTAATKAMMRVNGDDDSVAALSFLYDYYMGPKEKRILSSSTG

SEQ ID NO: 623 - protein, 80 aa, Synthetic construct
EKDGSSCISRRPLELAGCASCLTVQDNWTLELESSQDIQDVLDANKSLPESSLTDLLSDNFTDSLVSFSAEILSRTLCEP

SEQ ID NO: 624 - protein, 80 aa, Synthetic construct
KMAEELKPMDTDKESIAESKSPEMSMQEDCISDIAPMQTDEQTNKEQFVPGPNEKPLYTAEPVTLEDLQLLADLFYLPYE

SEQ ID NO: 625 - protein, 80 aa, Synthetic construct
TVEYMNSIYNPVPWEKEEYLKPVLEDDLLLQFDVEDLYEPVSVPFSYPNGLSENTSVVEKLKHMEARALSAEAALARARE

SEQ ID NO: 626 - protein, 80 aa, Synthetic construct
TGIAAASFFSNTCRFGGCGLHFPTLADLIEHIEDNHIDTDPRVLEKQELQQPTYVALSYINRFMTDAARREQESLKKKIQ

SEQ ID NO: 627 - protein, 80 aa, Synthetic construct
SSYFVNPTFPGSLPSGQDSFLGQLPLYQAGYDALRPFPASYGASSLPDKTYTSPCFYQQSNSVLACNRASYEYGASCFYS

SEQ ID NO: 628 - protein, 80 aa, Synthetic construct
FRNDFSGEVDFRDIDLTDEILTYVQDSLSKSPFIPSDYQQQQSLALNSSCMVQEHLHLEQQQQHHQKQVVVEPQQQLCQK

SEQ ID NO: 629 - protein, 80 aa, Synthetic construct
MKHMQVNGMFENWNSNQFVPFNCPQQDPQQYNVFTDLHGISQEFPYKSEMDSMPYTQNFISCNQPVLPQHSKCTELDYPM

SEQ ID NO: 630 - protein, 80 aa, Synthetic construct
GTTFEHLWSSLEPDSTYFDLPQSSRGNNEVVGGTDSSMDVFHLEGMTTSVMAQFNLLSSTMDQMSSRAASASPYTPEHAA

SEQ ID NO: 631 - protein, 80 aa, Synthetic construct
THEYYPYLSSDGESHSDHYWDFHPHHVHSEFESFAENNFTELQSVQPPQLQQLYRHMELEQMHVLDTPMVPPHPSLGHQV

SEQ ID NO: 632 - protein, 80 aa, Synthetic construct
SPSDEGALLDQLYLALRNFDGLEEIDRALGIPELVSQSQAVDPEQFSSQDSNIMLEQKAPVFPQQYASQAQMAQGSYSPM

SEQ ID NO: 633 - protein, 80 aa, Synthetic construct
AGHLASDFAFSPPPGGGGDGPGGPEPGWVDPRTWLSFQGPPGGPGIGPGVGPGSEVWGIPPCPPPYEFCGGMAYCGPQVG

SEQ ID NO: 634 - protein, 80 aa, Synthetic construct
VNGVNPAYPESRYTSDYFISYGIEHAQCVPPSEFSEPSFITESYQTLHPISSEELLSLKYENDYPSVILRDPLQTDTLQN

SEQ ID NO: 635 - protein, 80 aa, Synthetic construct
SNLGIEIKALDENGHDLAVTFPGPGEDGLNPFLEVKVTDTPKRSRRDFGLDCDEHSTESRCCRYPLTVDFEAFGWDWIIA

SEQ ID NO: 636 - protein, 80 aa, Synthetic construct
LISVPFGNSSPSDIDVPKPGSPEPQVSGLAANRSLTEGLVLDTMNDSLSKILLDISFPGLDEDPLGPDNINWSQFIPELQ

SEQ ID NO: 637 - protein, 80 aa, Synthetic construct
LEDLFQLLSSQPENSLEGISLGDIPLPGSISDGMNSSAHYHVNFSQAISQDVNLHEAILLCPNNTFRRDPTARTSQSQEP

SEQ ID NO: 638 - protein, 80 aa, Synthetic construct
FLQLNSHTTNPEQTLPGTNLTGFLSPVDNHMRNLTSQDLLYDLDINIFDEINLMSLATEDNFDPIDVSQLFDEPDSDSGL

SEQ ID NO: 639 - protein, 80 aa, Synthetic construct
PCIQAQYGTPAPSPGPRDHLASDPLTPEFIKPTMDLASPEAAPAAPTALPSFSTFMDGYTGEFDTFLYQLPGTVQPCSSA

SEQ ID NO: 640 - protein, 80 aa, Synthetic construct
AAPAAPTALPSFSTFMDGYTGEFDTFLYQLPGTVQPCSSASSSASSTSSSSATSPASASFKFEDFQVYGCYPGPLSGPVD

SEQ ID NO: 641 - protein, 80 aa, Synthetic construct
LGGICEHETSIDISAYIDPAAFNDEFLADLFQHSRQQEKAKAAVGPTGGGGGGDFDYPGAPAGPGGAVMPGGAHGPPPGY

SEQ ID NO: 642 - protein, 80 aa, Synthetic construct
PELKLEGRRPVDSGRQNIDFSNVDISELSSEVMGTMDAFDVHEFDQYLPLGGPAPPEPGQAYGGAYFHAGASPVWAHKSA

SEQ ID NO: 643 - protein, 80 aa, Synthetic construct
PQPFLNRGDRIQVRKVPPLKIPVSRISPMPFHPSQVSPRARFPVSITSPNRTGARTLADIKAKAQLVKAQRAAAAAAAAA

SEQ ID NO: 644 - protein, 80 aa, Synthetic construct
RFPVSITSPNRTGARTLADIKAKAQLVKAQRAAAAAAAAAAAAASVGGTIPGPGPGGGQGPGEGGEGQTARGGSPGSDRV

SEQ ID NO: 645 - protein, 80 aa, Synthetic construct
CSDVTMVEDSCLSQPVTAFPQGTWIGEDIFPPLLPPTEQDLTKLLLEGQGESGGGSLGAQPLLQPSHYGQSGISMSHMDL

SEQ ID NO: 646 - protein, 80 aa, Synthetic construct
TCVEQDKLGQAFEDAFEVLRQHSTGDLQYSPDYRNYLALINHRPHVKGNSSCYGVLPTEEPVYNWRTVINSAADFYFEGN

SEQ ID NO: 647 - protein, 80 aa, Synthetic construct
VEKNPNAVVTLENWQFEEWGSQVTVVSSDMREWVAPEKADIIVSELLGSFADNELSPECLDGAQHFLKDDGVSIPGEYTS

SEQ ID NO: 648 - protein, 80 aa, Synthetic construct
IDCSISNDKFEYLFNFDNTFEIHDDIEVLKRMGMACGLESGSCSAEDLKMARSLVPKALEPYVTEMAQGTVGGVFITTAG

SEQ ID NO: 649 - protein, 80 aa, Synthetic construct
LRKVTSAIEEAALDSSELLTNMEDEDDTDETLTSLLNEIAFLNQQLNDDSVGLAELPSSMDTEFPGDARRAFISKVPPGS

SEQ ID NO: 650 - protein, 80 aa, Synthetic construct
KEELDLAEKMDIAVSYTGEELDFETVGDIIAIIEDKVDDHPEVLDVAAVEAALSFCEENDDPQSLPGPWEHPIQQERDKP

SEQ ID NO: 651 - protein, 80 aa, Synthetic construct
IDSECRPRFRELVSEFSRMARDPQRFVVIQNEDLGPASPLDSTFYRSLLEDDDMGDLVDAEEYLVPQQGFFCPDPAPGAG

SEQ ID NO: 652 - protein, 80 aa, Synthetic construct
HQKRKPDIMLPLFARPGMYPDPHSPFAVSPIPGRGGVLNVPISPALSLTPTIFSYSPSPGLSPFTSSSCFSFNPEEMKHY

SEQ ID NO: 653 - protein, 80 aa, Synthetic construct
DSFWNPNAFETDSDLPAGWMRVQDTSGTYYWHIPTGTTQWEPPGRASPSQGSSPQEESQLTWTGFAHGEGFEDGEFWKDE

SEQ ID NO: 654 - protein, 80 aa, Synthetic construct
NRWREELSHMKRLPPVLPGRPYDLAAATVATDLESGGAGAACGGSNLAPLPRRETEEFNDLLDLDFILSNSLTHPPESVA

SEQ ID NO: 655 - protein, 80 aa, Synthetic construct
LSDQIKDHNSSEARFSSKNIKDLRLASDNVSIDQFLRKRHEPESVSSDVSEQGSIHLEPLTPSEVLEYEATEILQKGSGD

SEQ ID NO: 656 - protein, 80 aa, Synthetic construct
PQGASPASQSYSYHSSGEYSSDFLTPEFVKFSMDLTNTEITATTSLPSFSTFMDNYSTGYDVKPPCLYQMPLSGQQSSIK

SEQ ID NO: 657 - protein, 80 aa, Synthetic construct
FGGPPGGLLLDALPGPYAAAAAGPLGAAPDRFPADLDLDMFSGSLECDVESIILNDFMDSDEMDFNFDSALPPPPPGLAG

SEQ ID NO: 658 - protein, 80 aa, Synthetic construct
YRLMQLGCLESVANSTVAYSSSSPLTYSTTGTEFASPYFSTNHQYTPLHHQSFHYEFQHSHPAVTPDAYSLNSLHHSQQY

SEQ ID NO: 659 - protein, 80 aa, Synthetic construct
DLEDLGAVAPPVSGDLTKEDIDLIDILWRQDIDLGAGREVFDYSHRQKEQDVEKELRDGGEQDTWAGEGAEALARNLLVD

SEQ ID NO: 660 - protein, 80 aa, Synthetic construct
AVPSESEPPALQNNLLSPLLTGTESPFDLEQQWQDLMSIMEMQAMEVNTSASEILYSAPPGDPLSTNYSLAPNTPINQNV

SEQ ID NO: 661 - protein, 80 aa, Synthetic construct
VESLPVASSSTLLPLAPSNSTSLNSTFGSTNLTGLFFPPQLNGTANDTAGPELPDPLGGLLDEAMLDEISLMDLAIEEGF

SEQ ID NO: 662 - protein, 80 aa, Synthetic construct
LAKNYILMQAQALDEMRRLVAFLNQGQGLAAPVNAAPLTPFGQATVCPFSAGAALGPCPDKCAAFSGTPSALCKHCHEKP

SEQ ID NO: 663 - protein, 80 aa, Synthetic construct
LLSRMGSLRAPVDEDRLSPLVAADSLLEHVREDFSGLLPEEFISLSPPHEALDYHFGLEEGEGIRDLFDCDFGDLTPLDF

SEQ ID NO: 664 - protein, 80 aa, Synthetic construct
PLKIQLSKIGPPFIIKSQPVSKPESRASTSTSVSGGRNTGARTLADIKARAQQARAQREAAAAAAVAAAASIVSGAMGSP

SEQ ID NO: 665 - protein, 80 aa, Synthetic construct
QMNCHNTRIMQDTEKDDNNNDEYDNYDELVAKSLLNLGKIAEDAAYRARTESEMNSNTSNSLEDDSDKNENLGRKSELSL

SEQ ID NO: 666 - protein, 80 aa, Synthetic construct
EKMVEESDEEVCLSSLECLRNQCFDLARKLSETNPQERNPQQNMNIRQHVRPEEDFPGRTPDRNYSDMLNLMRLEEQLSP

SEQ ID NO: 667 - protein, 80 aa, Synthetic construct
EALEALEEALKGPTDGGQSLEELSSHFYTVIPHNFGHSQPPPINSPELLQAKKDMLLVLADIELAQALQAVSEQEKTVEE

SEQ ID NO: 668 - protein, 80 aa, Synthetic construct
SGSSSSDDEFEDDLLDLNPSSNFESMSLGSFSSSSALDRDLDFNFEPGSGSHFEFPDYCTPEVSEMISGDWLESSISNLV

SEQ ID NO: 669 - protein, 80 aa, Synthetic construct
ISDTLFTMTQSGPSPLQLPPEDAYVGNADMIQPDLTPLQPSLDDFMDISDFFTNSRLPQPPMPSNFPEPPSFSPVVDSLF

SEQ ID NO: 670 - protein, 80 aa, Synthetic construct
AQNVSSHVPYPVALHVNIVNVPQPAAAAIQRHYNDEDPEKEKRIKELELLLMSTENELKGQQVLPTQNHTCSYPGWHSTT

SEQ ID NO: 671 - protein, 80 aa, Synthetic construct [sequence omitted]

SEQ ID NO: 672 - protein, 80 aa, Synthetic construct
LGQSPGVSMMSPVPGCPPSPAYYSPATYHPLHSNLQAHLGQLSPPPEHPGFDALDQLSQVELLGDMDRNEFDQYLNTPGH

SEQ ID NO: 673 - protein, 80 aa, Synthetic construct
VKFISRGRRPDVILEKGEVIDFSSLSSSDRTPLTSPSPSPSLDFSAPGTPASHSATPSLLSEADLIPDVMPPQALFHDDD

SEQ ID NO: 674 - protein, 80 aa, Synthetic construct
AHPYESWYKSGFHSTLAAGEVTNGAASSWWDVHSSPGSWLEVQNPAGGLQSSLHSGAPQASLHSQLGTYNPDFSSLTHSA

SEQ ID NO: 675 - protein, 80 aa, Synthetic construct
GPPGYSGYPGPQVSYPPPPAGHSGPGPAGFPVPNQPVYNQPVYNQPVGAAGVPWMPAPQPPLNCPPGLEYLSQIDQILIH

SEQ ID NO: 676 - protein, 80 aa, Synthetic construct
TSTIKNEVDSTVNIIVVGQSHLDSNIENQEIVTNPPDICQVVEVTTESDEQPVSMSELYPLQISPVSSYAESETTDSVPS

SEQ ID NO: 677 - protein, 80 aa, Synthetic construct
ELLSPPLRDVDLTAPDGSLCSFATTDDFYDDPCFDSPDLRFFEDLDPRLMHVGALLKPEEHSHFPAAVHPAPGAREDEHV

SEQ ID NO: 678 - protein, 80 aa, Synthetic construct
NFETSRCATLQYCPDPYIQRFVETPAHFSWKESYYRSTMSQSTQTNEFLSPEVFQHIWDFLEQPICSVQPIDLNFVDEPS

SEQ ID NO: 679 - protein, 80 aa, Synthetic construct
PEVFQHIWDFLEQPICSVQPIDLNFVDEPSEDGATNKIEISMDCIRMQDSDLSDPMWPQYTNLGLLNSMDQQIQNGSSST

SEQ ID NO: 680 - protein, 80 aa, Synthetic construct
STRLAALLKAAGADPLVENFEPLYDLDDSWENAGEDEGVVPGTTPLDMATSWQVFDILNGKPYEPEFTSDDLLAQGDMKQ

SEQ ID NO: 681 - protein, 80 aa, Synthetic construct
APGPVQGQNYSVWDSNQQSVSVQQQYSPAQSQATIYYQGQTCPTVYGVTSPYSQTTPPIVQSYAQPSLQYIQGQQIFTAH

SEQ ID NO: 682 - protein, 80 aa, Synthetic construct
NELSDHLDAMDSNLDNLQTMLSSHGFSVDTSALLDLFSPSVTVPDMSLPDLDSSLASIQELLSPQEPPRPPEAENSSPDS

SEQ ID NO: 683 - protein, 80 aa, Synthetic construct
FRSPRRMRPLVDRLEPGELIPNGPFSFYGDYQSEYYGPGGNYDFFPQGPPSSQAQTPVDLPFVPSSGPSGTPLGGLEHPL

SEQ ID NO: 684 - protein, 80 aa, Synthetic construct
PSDFISLLSADLDLESPKSLYSRESVYDLLPKELQLPPSRETSVASMSQTSGGEAGSPPPAVVAADASSAPSSSSMGGAC

SEQ ID NO: 685 - protein, 80 aa, Synthetic construct
LQPLAHLSPAAFSSFLPESTACPYSYAAPPPPVTCFPHPYSHALPSQPSTGGAFALSHQSEDWYPTLHPAPAGHLPCPPP

SEQ ID NO: 686 - protein, 80 aa, Synthetic construct
YLNRGDRWIQDEIEFGYIEAPHKGFPVVLDSPRDGNLKDFPVKELLGPDFGYVTREPLFESVTSLDSFGNLEVSPPVTVN

SEQ ID NO: 687 - protein, 80 aa, Synthetic construct
ELNPLALYTTSSGGPEDIVLTELGYPSQQHYFNEDRKISPQSKESELRILDEIPTGMPCLESVTIGDDIWDENWLPLQAK

SEQ ID NO: 688 - protein, 80 aa, Synthetic construct
WRQEWEKGVQVPAGAEAIPEPVVRILPPLEGPPAQASPSSTMLGEGSQPDWPGGSRYDLDEIDAYWLELINSELKEMERP

SEQ ID NO: 689 - protein, 80 aa, Synthetic construct
IEQDLCRGLSTSFPIDGTFFNSWLAQSVQITAENMAMSEWPLNNGHREDPAPGLLSEELLQDEETLLSFMRDPSLRPGDP

SEQ ID NO: 690 - protein, 80 aa, Synthetic construct
PLWPQSPDASDFLPDTQLFPHFTELLLPLDPLEGSSVSTMTSQYQEGDDSMGKKHSGSQPQEEGGSVNENHSGPRLLLDL

SEQ ID NO: 691 - protein, 80 aa, Synthetic construct
HYMGYPHMPSMDPHWPSLGVWGSPYSPPREDWSVYPGPSSTMGTVPVNDVTSSPAAFCSTDYSNLGPVGGGTSGSSLPGQ

SEQ ID NO: 692 - protein, 80 aa, Synthetic construct
FLFPASSRPSGSETARSVPDMDLSGSFYAADWEPLHSGSLGMGPMATELEPLCTPVVTCTPSCTAYTSSFVFTYPEADSF

SEQ ID NO: 693 - protein, 80 aa, Synthetic construct
SQAAGSYLNSSNPMNPYPGLLNQNTQYPSYQCNGNLSVDNCSPYLGSYSPQSQPMDLYRYPSQDPLSKLSLPPIHTLYQP

SEQ ID NO: 694 - protein, 80 aa, Synthetic construct
RAPVDFINISTDMNTEVDALDPSIMDFALQGNLWEEMKDEGFSLDTLGAFADSPLGCDLGASGLTPASGGSDQSFPDLQV

SEQ ID NO: 695 - protein, 80 aa, Synthetic construct
LENNSGRSNSNPFNKEELTAILKFGAEDLFKELEGEESEPQEMDIDEILRLAETRENEVSTSATDELLSQFKVANFATME

SEQ ID NO: 696 - protein, 80 aa, Synthetic construct
PGLAKSSSESSSEESSSESSSEEEEEEDEEDEEEEESESSDSEEERAHRLAELQEQLRAVHEQLAALSQGPISKPKRKRE

SEQ ID NO: 697 - protein, 80 aa, Synthetic construct
LGFWQLPPPATQNTFGNSTLALGPGESLPHRLSCLGQQQQEPPLAMGTVSLGQLPLPPIPHVFSAGTGSAILPHFHHAFR

SEQ ID NO: 698 - protein, 80 aa, Synthetic construct
GDRFRSIIDDAWWFGTVESQQPFQPEYPDSSFQCYSVHWDNNEREKMSPWDMEPIPEGTAFPDEVGAGVPVSQEELTALL

SEQ ID NO: 699 - protein, 80 aa, Synthetic construct
GFSANDSTDFGSLFDLENDLPDELIPNGGELGLLNSGNLVPDAASKHKQLSELLRGGSGSSINPGIGNVSASSPVQQGLG

SEQ ID NO: 700 - protein, 80 aa, Synthetic construct
KEFDLDALLGIDDLETMPDDLLTTLDDTCDLFAPLVQETNKQPPQTVNPIGHLPESLTKPDQVAPFTFLQPLPLSPGVLS

SEQ ID NO: 701 - protein, 80 aa, Synthetic construct
QQSPVSQSMQTLSDSLSGSSLYSTSANLPVMGHEKFPSDLDLDMFNGSLECDMESIIRSELMDADGLDFNFDSLISTQNV

SEQ ID NO: 702 - protein, 80 aa, Synthetic construct
KAPSFQWRNYKLIVDPALDPALRRPSQKVYRYDGVHFSVNDSKYIPVEDLQDPRCHVRSKNRDFSLPVPKFKLDEFYIGQ

SEQ ID NO: 703 - protein, 80 aa, Synthetic construct
LPDVNILLFQNIDGKELCKMTKDDFQRLTPSYNADILLSHLHYLRETPLPHLTSDDVDKALQNSPRLMHARNTGGAAFIF

SEQ ID NO: 704 - protein, 80 aa, Synthetic construct
HELNSAAALGVYGGPYGGSQGYGNYVTYGSEASAFYSLNSFDSKDGSGSAHGGLAPAAAAYYPYEPALGQYPYDRYGTMD

SEQ ID NO: 705 - protein, 80 aa, Synthetic construct
AGLSQIYKMGSLPEAVDAARPKATLVDSESADDELTNLNWLHESTNLLTNFSLGSEGLPIVSPLYDIEGDDVPSFGPACY

SEQ ID NO: 706 - protein, 80 aa, Synthetic construct
PWGAEPGWVDPLTWLSFQGPPGGPGIGPGVGPGSEVWGIPPCPPPYELCGGMAYCGPQVGVGLVPQGGLETSQPESEAGV

SEQ ID NO: 707 - protein, 80 aa, Synthetic construct
DQGYGGYGAWSAGPANTQGAYGTGVASWQGYENYNYYGAQNTSVTTGATYSYGPASWEAAKANDGGLAAGAPAMHMASYG

SEQ ID NO: 708 - protein, 80 aa, Synthetic construct
GDMKTPDFDDLLAAFDIPDIDANEAIHSGPEENEGPGGPGKPEPGVGSESEDTAAASAGDGPGVPAQASDHGLPPPDISV

SEQ ID NO: 709 - protein, 80 aa, Synthetic construct
QLQFDDEDLGALLGNSTDPAVFTDLASVDNSEFQQLLNQGIPVAPHTTEPMLMEYPEAITRLVTGAQRPPDPAPAPLGAP

SEQ ID NO: 710 - protein, 80 aa, Synthetic construct
SEFQQLLNQGIPVAPHTTEPMLMEYPEAITRLVTGAQRPPDPAPAPLGAPGLPNGLLSGDEDFSSIADMDFSALLSQISS

SEQ ID NO: 711 - protein, 80 aa, Synthetic construct
KLPEDIMKLLEQSEWQPTNVDGKGYLLNEPGVQPTSVYGDFSCKEEPEIDSPGGDIGLSLQRVFTDLKNMDATWLDSLLT

SEQ ID NO: 712 - protein, 80 aa, Synthetic construct
MAWDMCNQDSESVWSDIECAALVGEDQPLCPDLPELDLSELDVNDLDTDSFLGGLKWCSDQSEIISNQYNNEPSNIFEKI

SEQ ID NO: 713 - protein, 80 aa, Synthetic construct
TGELRDSDFSNEQFSKLPMFINSGLAMDGLFDDSEDESDKLSYPWDGTQSYSLFNVSPSCSSFNSPCRDSVSPPKSLFSQ

SEQ ID NO: 714 - protein, 80 aa, Synthetic construct
EALFNLMSGILGLAPFPGPEAAASRSPLDAPFPAGSDALLPGPPDLYSPDLGAAPFPEAFWEASPCAGAPSQCLYEPQLS

SEQ ID NO: 715 - protein, 80 aa, Synthetic construct
LDMEDDAKLDSLITEALNGMEYQSDNPEIDSSFIDVFADEEPSGPRGPSSGHPLKSKAGVTPESKAPPPLPAATPDPQTP

SEQ ID NO: 716 - protein, 80 aa, Synthetic construct
QPSFEEGGDPTLGPARLPTDLSDSSSLCLCHEDPWEDEDPAGLPESFLLDGFLNSRVPGIDPWAPGLSLWALEPSREAGA

SEQ ID NO: 717 - protein, 80 aa, Synthetic construct
MPAPADDSSSSLGDVSPEPPSLERERCDGGLPGNTHLLPLRATDFEVLSTKFEMQDLCFLGPFEDPVGLPGPSFLDFEGT

SEQ ID NO: 718 - protein, 80 aa, Synthetic construct
DLQLSEILKFGLDKLLASEGSTMDEIDLESILGETKDGQWVSDALPAAEGGSRDQEEGKNHMYLFEGKDYSKEPSKEDRK

SEQ ID NO: 719 - protein, 80 aa, Synthetic construct
PELDDDFDAHKALEDDEELAHLGLGVDVAKGDDELGTLENLETNDPHLDDLLNGDEFDLLAYTDPELDTGDKKDIFNEHL

SEQ ID NO: 720 - protein, 80 aa, Synthetic construct
SQESDNNKRLVALVPMPSDPPFNTRRAYTSEDEAWKSYLENPLTAATKAMMSINGDEDSAAALGLLYDYYKVPRDKRLLS

SEQ ID NO: 721 - protein, 80 aa, Synthetic construct
NVTTENLEKWLEVDSTEPGYEVLTDSEIIRRAQGQADESSENEEEEIELIPEKHINHAAALQWTENLLDYLEQQGDMILP

SEQ ID NO: 722 - protein, 80 aa, Synthetic construct
PESDSFTDTLSANISQEMTMVDTEMPFWPTNFGISSVDLSVMEDHSHSFDIKPFTTVDFSSISTPHYEDIPFTRTDPVVA

SEQ ID NO: 723 - protein, 80 aa, Synthetic construct
AATSESSQSEASVRREESPMDVDQPSPSAQDTQSIASDGTPQGEKEKEERPPELPLLSEQLSLDELWDMLGECLKELEES

SEQ ID NO: 724 - protein, 80 aa, Synthetic construct
FLLEMTSMSPDYPNPMFEHPLSECEFQEYTIDSDWRFRSTVLTPMFVETQASQGTLQTRTQEGSLSARWPVAGQIRATQQ

SEQ ID NO: 725 - protein, 80 aa, Synthetic construct
SAQSSLLPSMNEQSQKTQNISSFDSELFLEELDELPPLSPMQPISEEEAIQIIADPPLPPASFTLRDYVDHSETLQKLVL

SEQ ID NO: 726 - protein, 80 aa, Synthetic construct
NNSTWSNQTQNIQSWSNHSWNTQTWCTQSWNNQAWNSPFYNCGEESLQSCMHFQPNSPASDLEAALEAAGEGLNVIQQTT

SEQ ID NO: 727 - protein, 80 aa, Synthetic construct
QGFAPTLDDDKPWYSIFPIDNEDLVYGRWEDNIIWDAQAMPRLLEPPVLALDPNDENLILEIPDEKEEATSNSPSKESKK

SEQ ID NO: 728 - protein, 80 aa, Synthetic construct
WVVEAANLLIPAVGSSLSEALDLIESDPDAWCDLSKFDLPEEPSAEDSINNSLVQLQASHQQQVLPPRQPSALVPSVTEY

SEQ ID NO: 729 - protein, 80 aa, Synthetic construct
ISPSTEVGGSGIGTPPSVLKRQRKRRVALSPVTENSTSLSFLDSCNSLTPKSTPVKTLPFSPSQFLNFWNKQDTLELESP

SEQ ID NO: 730 - protein, 80 aa, Synthetic construct
LDVPPALADFIHQQRTQQVEQDMFAHPYQYELNHFTPADAVLQKPQPQLYRPIEETPCHFISSLDELVELNEKLLNCQEF

SEQ ID NO: 731 - protein, 80 aa, Synthetic construct
GDMKTPDFDDLLAAFDIPDPTSLDAKEAIQTPSEENESPLKPPGICMDESVSLSHSGSAPDVPAVSVIVKNTSRQESFEA

SEQ ID NO: 732 - protein, 80 aa, Synthetic construct
SSYFVNSTFPVTLASGQESFLGQLPLYSSGYADPLRHYPAPYGPGPGQDKGFATSSYYPPAGGGYGRAAPCDYGPAPAFY

SEQ ID NO: 733 - protein, 80 aa, Synthetic construct
PTHPGLPGPGFQPGVDDDSLARILSFSDSDFGGEEEEEEEGSVGNLDNLSCFHPADIFGTSDPGGLASWTHSYSGCSFTS

SEQ ID NO: 734 - protein, 80 aa, Synthetic construct
CDSFELLQALPDYSLGPHYTSQKVSDSLDNIEAPHFPLPGLSPPGDASSCFLESLMGFSEPAAEALDPFIDSQFEDTVPA

SEQ ID NO: 735 - protein, 80 aa, Synthetic construct
SLAPLMMEVPMLSSLGVTNSKSGSSEDSSDQYLQAPNSTNQMLYGLQSPGNIFLPNSITPEALSCSFHPSYDFYRYNFSM

SEQ ID NO: 736 - protein, 80 aa, Synthetic construct
NESYFPFDDELTQDSIVEELVLMEQQMSMNNSHSYGNCLGMTLQSQSVTPGAPMSSHTSSTHFYHPIHSNGTPIHTPTPT

SEQ ID NO: 737 - protein, 80 aa, Synthetic construct
DLTNTASDFSSDIRLSSELSGSINDLNTLDPNLLFDPGRQQGQDDEATLEELKNDPLFQQICSESMNSMTSSGFEWIESK

SEQ ID NO: 738 - protein, 80 aa, Synthetic construct
GEPAGVAGTMESPFSPGLFHRLDEDWDSALFAELGYFTDTDELQLEAANETYENNFDNLDFDLDLMPWESDIWDINNQIC

SEQ ID NO: 739 - protein, 80 aa, Synthetic construct
DELQLEAANETYENNFDNLDFDLDLMPWESDIWDINNQICTVKDIKAEPQPLSPASSSYSVSSPRSVDSYSSTQHVPEEL

SEQ ID NO: 740 - protein, 80 aa, Synthetic construct
PDFVGDILWEHLEQMIKENQEKTEDQYEENSHLTSVPHWINSNTLGFGTEQAPYGMQTQNYPKGGLLDSMCPASTPSVLS

SEQ ID NO: 741 - protein, 80 aa, Synthetic construct
SQGPSPELCDQAIAFSDPLSYFTDLSFSAALKEEQRLDGMLLDDTISPFGTDPLLSATSPAVSKESSRRSSFSSDDGDEL

SEQ ID NO: 742 - protein, 80 aa, Synthetic construct
CSSPSAYGSPSSYFSGLDPYLSPMVPQLGGPALSPLSGPSVGPSLAQSPTSLSGQSYGAYSPVDSLEFKDPTGTWKFTYN

SEQ ID NO: 743 - protein, 80 aa, Synthetic construct
LFQESSSGGGAEPSFGSGLPLPPGGAGPEDPSLSVTLADIYRELYAFFGDSLATRFGTGQPAPTAPRPPGDKKEPAAAPD

SEQ ID NO: 744 - protein, 80 aa, Synthetic construct
YSNYTPSAQYSQAYYPTAVLQCCSPTHMDALSSCVTPTASSYAHCNYFQNPSMQSSYPVEFLPSNWPCSTTDENTKTEVN

SEQ ID NO: 745 - protein, 80 aa, Synthetic construct
ETPTAGEEYPSRPTEFAFYPGYPGTYQPMASYLDVSVVQTLGAPGEPRHDSLLPVDSYQSWALAGGWNSQMCCQGEQNPP

SEQ ID NO: 746 - protein, 80 aa, Synthetic construct
FCVHGGLSPSIQTLDQIRTIDRKQEVPHDGPMCDLLWSDPEDTTGWGVSPRGAGYLFGSDVVAQFNAANDIDMICRAHQL

SEQ ID NO: 747 - protein, 80 aa, Synthetic construct
INLEELETLESNLLAQQNSLKAQKQQQERIAATVTGQMFLESQELLRLFGIPYIQAPMEAEAQCAILDLTDQTSGTITDD

SEQ ID NO: 748 - protein, 80 aa, Synthetic construct
QQVPYTFSSKSPGNGSLREALIGPLGKLMDPGSLPPLDSEDLFQDLSHFQETWLAEAQVPDSDEQFVPDFHSENLAFHSP

SEQ ID NO: 749 - protein, 80 aa, Synthetic construct
SVNMNMNTLNAMNGYSMSQPMMNSGYHSNHGYMNQTPQYPMQMQMGMMGTQPYAQQPMQTPPHGNMMYTAPGHHGYMNTG

SEQ ID NO: 750 - protein, 80 aa, Synthetic construct
QIPQYYQPQPMMQHLQEQQQQQMHLQPPSYHRDPHQYTPEQAHTVQLIPLGSMSQYYYQEPQQPYSHPLYQQSHLSQHQQ

SEQ ID NO: 751 - protein, 80 aa, Synthetic construct
EEIMTCTDYIPRSSNDYTSQMYSAKPYAHILSVPVSETAYPGQTQYQTLQQTQPYAVYPQATQTYGLPPFGALWPGMKPE

SEQ ID NO: 752 - protein, 80 aa, Synthetic construct
AKELELEVEPEDVTELLQSHDKTLTDEELFLMDAQRKWFLEMESTPGEDAVNIVEMTTKDLEYYINLVDKAAAGFERIDS

SEQ ID NO: 753 - protein, 80 aa, Synthetic construct
DIKSHAFFRSIDWDLLEKKQALPPFQPQITDDYGLDNFDTQFTSEPVQLTPDDEDAIKRIDQSEFEGFEYINPLLLSTEE

SEQ ID NO: 754 - protein, 80 aa, Synthetic construct
CGSWGTSITLPPPCSYLEELEPQDYQQSNQPGPFQFSQAPQPPLFQSPQPKLPYLPTFPFSMPSSLTLPPPEDSLFMFPC

SEQ ID NO: 755 - protein, 80 aa, Synthetic construct
KLPYLPTFPFSMPSSLTLPPPEDSLFMFPCGPSGGTSQGYCPGASSGQILMQPPAGNIGTASWSDPCLPELPFPGPFCPQ

SEQ ID NO: 756 - protein, 80 aa, Synthetic construct
DAVLEPFPADRLFPGSSFLDLGDLNESDFLNNAHFPEHLDHFTENMEDFSNDLFSSFFDDPVLDEKSPLLDMELDSPTPG

SEQ ID NO: 757 - protein, 80 aa, Synthetic construct
PSAITTANIRPVSPGISDANDHDLREPSGIKNPGGASASARVSSWDSQSYDIEQICLGASNPPWASTLFEIDEFVKIYDL

SEQ ID NO: 758 - protein, 80 aa, Synthetic construct
AAPVKGEHFCLPEFPLGDPDDVPRPFQPTLEEIEEFLEENMEPGVKEVPEGNSKDLDACSQLSAGPHKSHLHPGSSGRER

SEQ ID NO: 759 - protein, 80 aa, Synthetic construct
LEPLKGNFDWEAIFDAGTLGGELGALEALELSPPLSPASHVDVDLTIHGRHIDCPATWGPSVEQAADSLDFDETFLATSF

SEQ ID NO: 760 - protein, 80 aa, Synthetic construct
SSEDVRWDTFPLGRMPGQTEDPAELMLENYDTMYLLDQPVLEQRLEPSTCKTDTLGLSCGVGSGNCSNSSSSNFEGLLWS

SEQ ID NO: 761 - protein, 80 aa, Synthetic construct
SVPTTAASEGRMVIQDIPAVTSRGHVENTPDLVSDSTYYSSFYQPSLFPYYNNLYNCPQYSMALAADSASGEVGNPLGGS

SEQ ID NO: 762 - protein, 80 aa, Synthetic construct
EQALGEPCDLDAALLTDIEDMLQLINNQDSDFPGLFDPPYAGSGAGGTDPASPDTSSPGSLSPPPATLSSSLEAFLSGPQ

SEQ ID NO: 763 - protein, 80 aa, Synthetic construct
ARGAPWPAEPAPFYEPGRAGKPGRGAEPGALGEPGAAAPAMYDDESAIDFSAYIDSMAAVPTLELCHDELFADLFNSNHK

SEQ ID NO: 764 - protein, 80 aa, Synthetic construct
PSNTSEKEQGPEFWGLSLINSGKRSTADYSLDNEPAQALTWRDSRAWEEQYQWDVEDMKVSGVHWGYEETKTFLAILSES

SEQ ID NO: 765 - protein, 80 aa, Synthetic construct
GTSSSLASFPQLDWGSALLHPEVPWGAEPDSQALPWSGDWTDMACTAWDSWSGASQTLGPAPLGPGPIPAAGSEGAAGQN

SEQ ID NO: 766 - protein, 80 aa, Synthetic construct
FKDPCAAPNEGFCSAGVQTEAGVADLTWVGERGILVASDSGAVELWELDENETLIVSKFCKYEHDDIVSTVSVLSSGTQA

SEQ ID NO: 767 - protein, 80 aa, Synthetic construct
FSPHSVPFLASLSEDCSLAVLDSSLSELFRSQAHRDFVRDATWSPLNHSLLTTVGWDHQVVHHVVPTEPLPAPGPASVTE

SEQ ID NO: 768 - protein, 80 aa, Synthetic construct
QQQPQPSQKLGRIREDEGAVASSTVKEPPEATATPEPLSDEDLPLDPDLYQDFCAGAFDDHGLPWMSDTEESPFLDPALR

SEQ ID NO: 769 - protein, 80 aa, Synthetic construct
SYTGFVQGSETTLQSTYSDTSAQPTCDYGYGTWNSGTNRGYEGYGYGYGYGQDNTTNYGYGMATSHSWEMPSSDTNANTS

SEQ ID NO: 770 - protein, 80 aa, Synthetic construct
SWPCSFSPSQNSSEPFYQQLPLEPPAAKTGCPPLWPNPAGNLYEEKVHVDFNSYVQSPAYHSPQEDPFLFTYASHPHQQY

SEQ ID NO: 771 - protein, 80 aa, Synthetic construct
RVIQLSTSELGEMELTWQEIMSITELQGLNAPSEPSFEPQAPAPYLGPPPPTTYCPCSIHPDSGFPLPPPPYELPASTSH

SEQ ID NO: 772 - protein, 80 aa, Synthetic construct
AATCEISNIFSNYFSAMYSSEDSTLASVPPAATFGADDLVLTLSNPQMSLEGTEKASWLGEQPQFWSKTQVLDWISYQVE

SEQ ID NO: 773 - protein, 80 aa, Synthetic construct
LVFGPLGDQLHAQLRDLTSSSSDELSWIIELLEKDGMAFQEALDPGPFDQGSPFAQELLDDGQQASPYHPGSCGAGAPSP

SEQ ID NO: 774 - protein, 80 aa, Synthetic construct
GQTGTNGGNVKLYTTDQSTFDILQDLEFSSGSPGKETNESPWRSDLLIDENCLLSPLAGEDDSFLLEGNSNEDCKPLILP

SEQ ID NO: 775 - protein, 80 aa, Synthetic construct
LQEHFSNQDLVFLLLTPSIITESCSTHRLEHSLYKPQKGLFHRVPLVVANLGMSEQLGYKTVSGSCMSTGFSRAVQTHSS

SEQ ID NO: 776 - protein, 110 aa, Synthetic construct
QDSKNSDLYSIMKNLGIDFEDIRHMQNEKFFRNDFSGEVDFRDIDLTDEILTYVQDSLSKSPFIPSDYQQQQSLALNSSCMVQEHLHLEQQQQHHQKQVVVEPQQQLCQK

SEQ ID NO: 777 - protein, 110 aa, Synthetic construct
DSSWATLSQGSPSYGSPEDTDSFWNPNAFETDSDLPAGWMRVQDTSGTYYWHIPTGTTQWEPPGRASPSQGSSPQEESQLTWTGFAHGEGFEDGEFWKDEPSDEAPMELG

SEQ ID NO: 778 - protein, 80 aa, Synthetic construct
WLSFSLDCSNCPYHIRTGEEARVSLTEFCQIFGFPYGTTFPQTKHLTFYELKTSSGSLVQKGHASSCTGNYIHPESMLFE

SEQ ID NO: 779 - protein, 110 aa, Synthetic construct
AKQRNQILPSKKNVPTSPRTSPSPYAFSPVISDFYSSLPSQPLDPSNWAWNSTFTESSTSDFQMQDTQWERLVASVPALYSDAYDIFQIIELYNLPDENEISSSSFHCLY

SEQ ID NO: 780 - protein, 130 aa, Synthetic construct
NSTFTESSTSDFQMQDTQWERLVASVPALYSDAYDIFQIIELYNLPDENEISSSSFHCLYQYLSPTKYQVGGQGSSLSIFAGPAVGLSPAQTWPNMTSQAFEAYSLTDSLEFQKTSNMVDTSNMVDLGFL

SEQ ID NO: 781 - protein, 90 aa, Synthetic construct
GGTPDIPSSGLLSGQAQENPGYPYSDSSSILGENPHIGIDMIDNDQGSSSPSNDEAAMAVIMSLLEADAGLGGPVDFSDLVDFSDLPWPL

SEQ ID NO: 782 - protein, 100 aa, Synthetic construct
TGLMKDTHTVNCRSMSNKELFPPSPSEMGELEATRQNQSTVAVHSHEPLLSDGAQLDFDALCDNDDTAMAAFMNYLEAEGGLGDPGDFSDGDFSDIQWTL

SEQ ID NO: 783 - protein, 90 aa, Synthetic construct
FHPSQVSPRARFPVSITSPNRTGARTLADIKAKAQLVKAQRAAAAAAAAAAAAASVGGTIPGPGPGGGQGPGEGGEGQTARGGSPGSDRV

SEQ ID NO: 784 - protein, 190 aa, Synthetic construct
TEMSFLSSEVLVGDLMSPFDQSGLGAEESLGLLDDYLEVAKHFKPHGFSSDKAKAGSSEWLAVDGLVSPSNNSKEDAFSGTDWMLEKMDLKEFDLDALLGIDDLETMPDDLLTTLDDTCDLFAPLVQETNKQPPQTVNPIGHLPESLTKPDQVAPFTFLQPLPLSPGVLSSTPDHSFSLELGSEVDITEG

SEQ ID NO: 785 - protein, 100 aa, Synthetic construct
SLLATLGLELDRALLPASGLGWLVDYGKLPPAPAPLAPYEVLGGALEGGLPVGGEPLAGDGFSDWMTERVDFTALLPLEPPLPPGTLPQPSPTPPDLEAM

SEQ ID NO: 786 - protein, 90 aa, Synthetic construct
VLGGALEGGLPVGGEPLAGDGFSDWMTERVDFTALLPLEPPLPPGTLPQPSPTPPDLEAMASLLKKELEQMEDFFLDAPPLPPPSPPPLP

SEQ ID NO: 787 - protein, 90 aa, Synthetic construct
GEPAGVAGTMESPFSPGLFHRLDEDWDSALFAELGYFTDTDELQLEAANETYENNFDNLDFDLDLMPWESDIWDINNQICTVKDIKAEPQ

SEQ ID NO: 788 - protein, 90 aa, Synthetic construct
DELQLEAANETYENNFDNLDFDLDLMPWESDIWDINNQICTVKDIKAEPQPLSPASSSYSVSSPRSVDSYSSTQHVPEELDLSSSSQMSP

SEQ ID NO: 789 - protein, 90 aa, Synthetic construct
AELMLLSEIADPTRFFTDNLLSPEDWGLQNSTLYSGLDEVAEEQTQLFRCPEQDVPFDGSSLDVGMDVSPSEPPWELLPIFPDLQVKSEP

SEQ ID NO: 790 - protein, 100 aa, Synthetic construct
LLSDTNPGPDTQLPSGPAQNPGIDFDIEEFFSASNIQTQTEESELSTMTTEPVLESLDIETQTDFLLADTSAQSYGCRGNSNFLGLEMFDTQTQTDLNFF

SEQ ID NO: 791 - protein, 90 aa, Synthetic construct
EMRFAKMPDEPEEPVVAVSSPAVPPPTKVVAPPSSSDSSSDSSSDSDSSTDDSEEERAQRLAELQEQLKAVHEQLAALSQPQQNKPKKKE

SEQ ID NO: 792 - protein, 120 aa, Synthetic construct
YLNYGPYSSYAPHYDSTFANISKDDSDLIYSTYGEDSDLPSDFSIHEFLATCQDYPYVMADSLLDVLTKGGHSRTLQEMEMSLPEDEGHTRTLDTAKEMEITEVEPPGRLDSSTQDRLIA

SEQ ID NO: 793 - protein, 90 aa, Synthetic construct
KEELDLAEKMDIAVSYTGEELDFETVGDIIAIIEDKVDDHPEVLDVAAVEAALSFCEENDDPQSLPGPWEHPIQQERDKPVPLPAPEMTV

SEQ ID NO: 794 - protein, 100 aa, Synthetic construct
NEAKERNWQIGDRFRSIIDDAWWFGTVESQQPFQPEYPDSSFQCYSVHWDNNEREKMSPWDMEPIPEGTAFPDEVGAGVPVSQEELTALLYKPQEGEWGA

SEQ ID NO: 795 - protein, 140 aa, Synthetic construct
EVLLKSGELQACSSEHYLQPETNGVIRSAGGVPILPGNVVQGLYPVAQPSLGNASNMELSLDHFDISFSNQFSDLINDFISVEGGSSTIYGHQLVSGDSTALSQSEDGARAPFTQAEMCLPCCSPQQGSLQLSSSEGGAS

SEQ ID NO: 796 - protein, 110 aa, Synthetic construct
SPAPLEPSSRVGRGEALFGGPVGASELEPFSLSSFPDLMGELISDEAPSIPAPTPQLSPALSTITDFSPEWSYPEGGVKVLITGPWTEAAEHYSCVFDHIAVPASLVQPG

SEQ ID NO: 797 - protein, 80 aa, Synthetic construct
RLPAREREMDVIRNFLREHICGKKAGSLYLSGAPGTGKTACLSRILQDLKKELKGFKTIMLNCMSLRTAQAVFPAIAQEI

SEQ ID NO: 798 - protein, 100 aa, Synthetic construct
PVTSAQAPRHLQSSAWEMDGPRENRGSFHKSLDQIFETLETKNPSCMEELFSDVDSPYYDLDTVLTGMMGGARPGPCEGLEGLAPATPGPSSSCKSDLGE

SEQ ID NO: 799 - protein, 80 aa, Synthetic construct
IKLADFGLARAFGVPLRTYTHEVVTLWYRAPEILLGSKFYTTAVDIWSIGCIFAEMVTRKALFPGDSEIDQLFRIFRMLG

SEQ ID NO: 800 - protein, 100 aa, Synthetic construct
TGGGGSPMPASNFAAAPAFSHYMGYPHMPSMDPHWPSLGVWGSPYSPPREDWSVYPGPSSTMGTVPVNDVTSSPAAFCSTDYSNLGPVGGGTSGSSLPGQ

SEQ ID NO: 801 - protein, 90 aa, Synthetic construct
LGGICEHETSIDISAYIDPAAFNDEFLADLFQHSRQQEKAKAAVGPTGGGGGGDFDYPGAPAGPGGAVMPGGAHGPPPGYGCAAAGYLDG

SEQ ID NO: 802 - protein, 110 aa, Synthetic construct
ARGAPWPAEPAPFYEPGRAGKPGRGAEPGALGEPGAAAPAMYDDESAIDFSAYIDSMAAVPTLELCHDELFADLFNSNHKAGGAGPLELLPGGPARPLGPGPAAPRLLKR

SEQ ID NO: 803 - protein, 100 aa, Synthetic construct
NMIIEGGHFTLGAQKPAADADLQLSEILKFGLDKLLASEGSTMDEIDLESILGETKDGQWVSDALPAAEGGSRDQEEGKNHMYLFEGKDYSKEPSKEDRK

SEQ ID NO: 804 - protein, 90 aa, Synthetic construct
ELELDAGDQDLLAFLLEESGDLGTAPDEAVRAPLDWALPLSEVPSDWEVDDLLCSLLSPPASLNILSSSNPCLVHHDHTYSLPRETVSMD

SEQ ID NO: 805 - protein, 90 aa, Synthetic construct
LSRQLRALPSEDPYQLELPALQSEVPKDSTHQWLDGSDCVLQAPGNTSCLLHYMPQAPSAEPPLEWPFPDLFSEPLCRGPILPLQANLTR

SEQ ID NO: 806 - protein, 100 aa, Synthetic construct
DAVLEPFPADRLFPGSSFLDLGDLNESDFLNNAHFPEHLDHFTENMEDFSNDLFSSFFDDPVLDEKSPLLDMELDSPTPGIQAEHSYSLSGDSAPQSPLV

SEQ ID NO: 807 - protein, 110 aa, Synthetic construct
EVLESGEQGVLQWDRKLSELSEPGDGEALMYHTHFSELLDEFSQNVLGQLLNDPFLSEKSVSMEVEPSPTSPAPLIQAEHSYSLCEEPRAQSPFTHITTSDSFNDDEVES

SEQ ID NO: 808 - protein, 100 aa, Synthetic construct
NTDLAAGKMASAACSMDPIDSFELLDLLFDRQDGILRHVELGEGWGHVKDQQVLPNPDSDDFLSSILGSGDSLPSSPLWSPEGSDSGISEDLPSDPQDTP

SEQ ID NO: 809 - protein, 90 aa, Synthetic construct
DLGIPDLLDAWLEPPEDIFSTGSVLELGLHCPPPEVPVTRLQEQGLQGWKSGGDRGCGLQESEPEDFLKLFIDPNEVYCSEASPGSDSGI

SEQ ID NO: 810 - protein, 110 aa, Synthetic construct
GRKQQFGDEGELEAGRGSRGGVAVRAPSPEEMEEEAIASLPGEETEDMDFLSGLELADLLDPRQPDWHLDPGLSSPGPLSSSGGGSDSGGLWRGDDDDEAAAAEMQRFSD

SEQ ID NO: 811 - protein, 100 aa, Synthetic construct
AMTYAPASAFCSSPSAYGSPSSYFSGLDPYLSPMVPQLGGPALSPLSGPSVGPSLAQSPTSLSGQSYGAYSPVDSLEFKDPTGTWKFTYNPMDPLDYKDQ

SEQ ID NO: 812 - protein, 110 aa, Synthetic construct
SVPPSMDAGRSSSVDLSLSSCDSFELLQALPDYSLGPHYTSQKVSDSLDNIEAPHFPLPGLSPPGDASSCFLESLMGFSEPAAEALDPFIDSQFEDTVPAPASLMEPVPV

SEQ ID NO: 813 - protein, 90 aa, Synthetic construct
AAESLPFSFGTLSSWELEAWYEDLQEVLSSDENGGTYVSPPGNEEEESKIFTTLDPASLAWLTEEEPEPAEVTSTSQSPHSPDSSQSSLA

SEQ ID NO: 814 - protein, 110 aa, Synthetic construct
AWEPQAGAAPPPQPAPPDASASARQGQMQGIPAPSQALQEPAPWSALPCGLLLDELLASPEFLQQAQPLLETEAPGELEASEEAASLEAPLSEEEYRALLEEYRALLEEL

SEQ ID NO: 815 - protein, 100 aa, Synthetic construct
LTTDPSQSLLSLEQEPLLSRMGSLRAPVDEDRLSPLVAADSLLEHVREDFSGLLPEEFISLSPPHEALDYHFGLEEGEGIRDLFDCDFGDDFGDLTPLDF

SEQ ID NO: 816 - protein, 90 aa, Synthetic construct
MEPTASSVPAPAPTPQQAPPPPSLVPLEATDSLLELPHPLLQQTEDQFLSPTLACSSPLISFSPSLDQDDYLWGLEAGEGISDLFDSYDL

SEQ ID NO: 817 - protein, 100 aa, Synthetic construct
IPKPASKDLASTNSGHSDCSVSMGNLSPLASPANLLQQTEDQIPSNLEGPFVNLLPPLLQEDYLLSLGEEEGISDLFDAYDLEKLPLVEDLPLVEDFMCS

SEQ ID NO: 818 - protein, 120 aa, Synthetic construct
SALLDSSSSSSSSSSSSSNSNSSSSSGPNPSTSFEPIKADPTGVLELPKELSEIFDPTRECMSSELLEELMSSEVFAPLLRLSPPPGDHDYIYNLDESEGVCDLFDVPVLDLFDVPVLNL

SEQ ID NO: 819 - protein, 90 aa, Synthetic construct
PQKSSMATQNLPEQHVSERSQALQQTSATDISSAGSISGDIIDELMSSDVFPLLRLSPTPADDYNFNLDDNEGVCDLFDVDLFDVQILNY

SEQ ID NO: 820 - protein, 80 aa, Synthetic construct
VIIIGDNFFDGLQVVFGTMLVWSELITPHAIRVQTPPRHIPGVVEVTLSYKSKQFCKGAPGRFVYTALNEPTIDYGFQRL

SEQ ID NO: 821 - protein, 90 aa, Synthetic construct
QAVPEHPHDPEALFNLMSGILGLAPFPGPEAAASRSPLDAPFPAGSDALLPGPPDLYSPDLGAAPFPEAFWEASPCAGAPSQCLYEPQLS

SEQ ID NO: 822 - protein, 90 aa, Synthetic construct
AATCEISNIFSNYFSAMYSSEDSTLASVPPAATFGADDLVLTLSNPQMSLEGTEKASWLGEQPQFWSKTQVLDWISYQVEKNKYDASAID

SEQ ID NO: 823 - protein, 90 aa, Synthetic construct
KGRKPRDLELPLSPSLLGGPGPERTPGSGSGSGLQAPGPALTPSLLPTHTLTPVLLTPSSLPPSIHFWSTLSPIAPRSPAKLSFQFPSSG

SEQ ID NO: 824 - protein, 80 aa, Synthetic construct
TKDQLVGLGRTLAGKLVEQRKHIDAAMVLEECAQDYEEAVLLLLEGAAWEEALRLVYKYNRLDIIETNVKPSILEAQKNY

SEQ ID NO: 825 - protein, 80 aa, Synthetic construct
PSAKRPKLSSPALSASASDGTDFGSLFDLEHDLPDELINSTELGLTNGGDINQLQTSLGMVQDAASKHKQLSELLRSGSS

SEQ ID NO: 826 - protein, 120 aa, Synthetic construct
WLEWAVKEYGLPDVNILLFQNIDGKELCKMTKDDFQRLTPSYNADILLSHLHYLRETPLPHLTSDDVDKALQNSPRLMHARNTGGAAFIFPNTSVYPEATQRITTRPDLPYEPPRRSAWT

SEQ ID NO: 827 - protein, 110 aa, Synthetic construct
VYLDSSKPAVYNYPEGAAYEFNAAAAANAQVYGQTGLPYGPGSEAAAFGSNGLGGFPPLNSVSPSPLMLLHPPPQLSPFLQPHGQQVPYYLENEPSGYTVREAGPPAFYR

SEQ ID NO: 828 - protein, 90 aa, Synthetic construct
LGKERFLELAPDFVGDILWEHLEQMIKENQEKTEDQYEENSHLTSVPHWINSNTLGFGTEQAPYGMQTQNYPKGGLLDSMCPASTPSVLS

SEQ ID NO: 829 - protein, 120 aa, Synthetic construct
GLEGAKLGFCFPDLALQGDTPTATAETCWKGTSSSLASFPQLDWGSALLHPEVPWGAEPDSQALPWSGDWTDMACTAWDSWSGASQTLGPAPLGPGPIPAAGSEGAAGQNCVPVAGEATS

SEQ ID NO: 830 - protein, 90 aa, Synthetic construct
HQKRKPDIMLPLFARPGMYPDPHSPFAVSPIPGRGGVLNVPISPALSLTPTIFSYSPSPGLSPFTSSSCFSFNPEEMKHYLHSQACSVFN

SEQ ID NO: 831 - protein, 100 aa, Synthetic construct
ERRMKAGYLDQQVPYTFSSKSPGNGSLREALIGPLGKLMDPGSLPPLDSEDLFQDLSHFQETWLAEAQVPDSDEQFVPDFHSENLAFHSPTTRIKKEPQS

SEQ ID NO: 832 - protein, 100 aa, Synthetic construct
LDVPPALADFIHQQRTQQVEQDMFAHPYQYELNHFTPADAVLQKPQPQLYRPIEETPCHFISSLDELVELNEKLLNCQEFAVDLEHHSYRSFLGLTCLMQ

SEQ ID NO: 833 - protein, 90 aa, Synthetic construct
GLSQSQSPGQTGFLSYGTSFSTPQPGQAPYSYQMQGSSFTTSSGIYTGNNSLTNSSGFNSSQQDYPSYPSFGQGQYAQYYNSSPYPAHYM

SEQ ID NO: 834 - protein, 110 aa, Synthetic construct
PGQSGFLSYGSSFSTSPTGQSPYTYQMHGTTGFYQGGNGLGNAAGFGSVHQDYPSYPGFPQSQYPQYYGSSYNPPYVPASSICPSPLSTSTYVLQEASHNVPNQSSESLA

SEQ ID NO: 835 - protein, 110 aa, Synthetic construct
SSLASNLPMSEEIMTCTDYIPRSSNDYTSQMYSAKPYAHILSVPVSETAYPGQTQYQTLQQTQPYAVYPQATQTYGLPPFGALWPGMKPESGLIQTPSPSQHSVLTCTTG

SEQ ID NO: 836 - protein, 100 aa, Synthetic construct
TQSPLQSGCLSYSPGFSTPQPGQTPYSYQMPGSSFAPSSTIYANNSVSNSTNFSGSQQDYPSYTAFGQNQYAQYYSASTYGAYMTSNNTADGTPSSTSTY

SEQ ID NO: 837 - protein, 100 aa, Synthetic construct
FLFPASSRPSGSETARSVPDMDLSGSFYAADWEPLHSGSLGMGPMATELEPLCTPVVTCTPSCTAYTSSFVFTYPEADSFPSCAAAHRKGSSSNEPSSDS

SEQ ID NO: 838 - protein, 110 aa, Synthetic construct
SSFDLPAPSPPRCSPQFPSIGQEPPEMNLYYENFFHPQGVPSPQRPSFEGGGEYGATPNPYLWFNGPTMTPPPYLPGPNASPFLPQAYGVQRPLLPSVSGLGGSDLGWLP

SEQ ID NO: 839 - protein, 100 aa, Synthetic construct
LEPLKGNFDWEAIFDAGTLGGELGALEALELSPPLSPASHVDVDLTIHGRHIDCPATWGPSVEQAADSLDFDETFLATSFLQHPWDESGSGCLPPEPLFE

SEQ ID NO: 840 - protein, 120 aa, Synthetic construct
RAQPGTPQDSPLPAHTPPSHSAKLLAEPSPARTMHDTLLPDGDLGTDLDAINPSLTDFDFQGNLWEQLKDDSLALDPLVLVTSSPTSSSMPPPQPPPHCFPPGPCLTETGSGAGDLAAPG

SEQ ID NO: 841 - protein, 130 aa, Synthetic construct
APDSPAPAQTPPLHALPDLSPSPLPHPAMGRAPVDFINISTDMNTEVDALDPSIMDFALQGNLWEEMKDEGFSLDTLGAFADSPLGCDLGASGLTPASGGSDQSFPDLQVTGLYTAYSTPDSVAASGTSS

SEQ ID NO: 842 - protein, 110 aa, Synthetic construct
MNRLTQVKTPVQVPLPHPMQMSALGGYSSVSSCNGYGRMGLLHQEKLPSDLDGMFIERLDCDMESIIRNDLMDGDTLDFNFDNVLPNQSFPHSVKTTTHSKTTTHSWVSG

SEQ ID NO: 843 - protein, 120 aa, Synthetic construct
SSSLGSAKHQQQSPVSQSMQTLSDSLSGSSLYSTSANLPVMGHEKFPSDLDLDMFNGSLECDMESIIRSELMDADGLDFNFDSLISTQNVVGLNVGNFTGAKQASSQSWVQASSQSWVPG

SEQ ID NO: 844 - protein, 100 aa, Synthetic construct
VGLCPKPLEAPGPSSLVPTLSMIAPPPVMASAPIPKALGTPVLTPPTEAASQDRMPQDLDLDMYMENLECDMDNIISDLMDEGEGLDFNFGLDFNFEPDP

SEQ ID NO: 845 - protein, 110 aa, Synthetic construct
MTLPGEAGAAGLAPPGHAAAFGGPPGGLLLDALPGPYAAAAAGPLGAAPDRFPADLDLDMFSGSLECDVESIILNDFMDSDEMDFNFDSALPPPPPGLAGAPPPNQSWVP

SEQ ID NO: 846 - protein, 90 aa, Synthetic construct
PKLPLEKKPNPDKDGPDYEPNLWMWVNPNIVYPPGKLEVSGRRKREDLTSTLPSSQPPQKEEDASCSEAAGVESLSQSSSKRSPPRKRFA

SEQ ID NO: 847 - protein, 100 aa, Synthetic construct
ALGRNHLADNCYSNYPFPLTSWPCSFSPSQNSSEPFYQQLPLEPPAAKTGCPPLWPNPAGNLYEEKVHVDFNSYVQSPAYHSPQEDPFLFTYASHPHQQY

SEQ ID NO: 848 - protein, 80 aa, Synthetic construct
PNPAGNLYEEKVHVDFNSYVQSPAYHSPQEDPFLFTYASHPHQQYSLPSKSSKWDFEEEMTYLGLDHCNNDMLLNLCPLR

SEQ ID NO: 849 - protein, 90 aa, Synthetic construct
SNTCRSTKIDLSGARVSLSSPTSAEYIPLTPAAADVNGSPATITIETCEDPGDWTAAIGDDTFTFWRGLKDAGLLDEVIQEFHQELVETM

SEQ ID NO: 850 - protein, 100 aa, Synthetic construct
TQEYDNKRPVLVLQNEALYPQRRSYTSEDEAWKSFLENPLTAATKAMMSINGDEDSAAALGLLYDYYKVPRERRSSTAKPEVEHPEPDHSKRNSIPIVTE

SEQ ID NO: 851 - protein, 100 aa, Synthetic construct
SQESDNNKRLVALVPMPSDPPFNTRRAYTSEDEAWKSYLENPLTAATKAMMSINGDEDSAAALGLLYDYYKVPRDKRLLSVSKASDSQEDQEKRNCLGTS

SEQ ID NO: 852 - protein, 90 aa, Synthetic construct
EHMELDDLPELQAVQSDPTQSGMYQLSSDVSHQEYPRSSWNQNTSDIPETTYRENEVDWLTELANIATSPQSPLMQCSFYNRSSPVHIIA

SEQ ID NO: 853 - protein, 80 aa, Synthetic construct
IAVNWAGGLHHAKKSEASGFCYVNDIVLAILELLKYHQRVLYIDIDIHHGDGVEEAFYTTDRVMTVSFHKYGEYFPGTGD

SEQ ID NO: 854 - protein, 80 aa, Synthetic construct
ICINDLITEYNKQHKAELKPLRADYLIARVVTVLEKLIKEFQDKGPNSVLPLYYRYWVHSGQQVHLGSAEGPKVSIVGLD

SEQ ID NO: 855 - protein, 140 aa, Synthetic construct
PTFIPPPYGVLRSLLENPLKLPLHHEDAFSKDKDKEKKLDDESNSPTVPQSAFLGPTLWDKTLPYDGDTFQLEYMDLEEFLSENGIPPSPSQHDHSPHPPGLQPASSAAPSVMDLSSRASAPLHPGIPSPNCMQSPIRPG

SEQ ID NO: 856 - protein, 90 aa, Synthetic construct
DTAGPAAEEFSSRAKEFAFYHQGYAAGPYHHHQPMPGYLDMPVVPGLGGPGESRHEPLGLPMESYQPWALPNGWNGQMYCPKEQAQPPHL

SEQ ID NO: 857 - protein, 90 aa, Synthetic construct
PTVPNCLSTMGQNCGAGLNNDSPEALEVPSLQDFSVFSTDSCLQLSDAVSPSLPGSLDSPVDISADSLDFFTDTLTTIDLTTIDLQHLNY

SEQ ID NO: 858 - protein, 110 aa, Synthetic construct
QAATLAAYPAETPTAGEEYPSRPTEFAFYPGYPGTYQPMASYLDVSVVQTLGAPGEPRHDSLLPVDSYQSWALAGGWNSQMCCQGEQNPPGPFWKAAFADSSGQHPPDAC

SEQ ID NO: 859 - protein, 100 aa, Synthetic construct
PLAVRLEGAGASSPGCALRGAGGLEPGPLPEDVFSGRQDSPFLPDLNFFAADSCLQLSGGLSPSLQGSLDSPVPFSEEELDFFTSTLCAITLCAIDLQFP

SEQ ID NO: 860 - protein, 110 aa, Synthetic construct
FPVEKYMDVSGLASSSVPANEVPARAKEVSFYQGYTSPYQHVPGYIDMVSTFGSGEPRHEAYISMEGYQSWTLANGWNSQVYCTKDQPQGSHFWKSSFPGDVALNQPDMC

SEQ ID NO: 861 - protein, 120 aa, Synthetic construct
PSPPPTSTPEKCLSVACLDKNELSDHLDAMDSNLDNLQTMLSSHGFSVDTSALLDLFSPSVTVPDMSLPDLDSSLASIQELLSPQEPPRPPEAENSSPDSGKQLVHYTAQPLFLLDPGSV

SEQ ID NO: 862 - protein, 150 aa, Synthetic construct
PIPPAVPQGNLSMPASVSLPVEASHIRSPSTPELSADELPDDIANEITDIPHDLELNQEDFSDVLPRLPDDLQDFDFFEGKNGDLLPTTEEAEELERALQAVTSLECLSTIGVLAQSDGVPVQELSDRGIGVFSTGTGASGIQSLSREVN

SEQ ID NO: 863 - protein, 120 aa, Synthetic construct
ESSLGLSNGVSDLSPEYAVLTSTIKNEVDSTVNIIVVGQSHLDSNIENQEIVTNPPDICQVVEVTTESDEQPVSMSELYPLQISPVSSYAESETTDSVPSDEESAEGRPHWRKRNIEGKQ

SEQ ID NO: 864 - protein, 130 aa, Synthetic construct
VSEEKSLMFIRPKKYIVSSGSEPPELGYVDIRTLADSVCRYDLNDMDAAWLELTNEEFKEMGMPELDEYTMERVLEEFEQRCYDNMNHAIETEEGLGIEYDEDVVCDVCQSPDGEDGNEMVFCDKCNICV

SEQ ID NO: 865 - protein, 100 aa, Synthetic construct
PDDYYILADPWRQEWEKGVQVPAGAEAIPEPVVRILPPLEGPPAQASPSSTMLGEGSQPDWPGGSRYDLDEIDAYWLELINSELKEMERPELDELTLERV

SEQ ID NO: 866 - protein, 100 aa, Synthetic construct
MQRGMNMSVNLMPAPAYNVNSVNMNMNTLNAMNGYSMSQPMMNSGYHSNHGYMNQTPQYPMQMQMGMMGTQPYAQQPMQTPPHGNMMYTAPGHHGYMNTG

SEQ ID NO: 867 - protein, 80 aa, Synthetic construct
LLKTFSNVFGRHSGGFLSSPADFSQENKAPFEAVKRFSLDERSLACRQDSDSSTNSDLSDLSDSEEQLQAKTGLKGIPEH

SEQ ID NO: 868 - protein, 90 aa, Synthetic construct
NKVSQPPGTTSFSLPDDWDNRTSYLHSPFSTGRSCIPLHGVSPEVNELLMEAQLLQVSLPEIQELYQTLLAKPSPAQQTDRSSPVRPSSE

SEQ ID NO: 869 - protein, 130 aa, Synthetic construct
SQDSILDFLLSQATLGSGGGSGSSIGASSGPVAWGPWRRAAAPVKGEHFCLPEFPLGDPDDVPRPFQPTLEEIEEFLEENMEPGVKEVPEGNSKDLDACSQLSAGPHKSHLHPGSSGRERCSPPPGGASA

SEQ ID NO: 870 - protein, 100 aa, Synthetic construct
DVLASYSIFQELQLVHDTGYFSALPSLEETWQQTCLELERYLQTEPRRISETFGEDLDCFLHASPPPCIEESFRRLDPLLLPVEAAICEKSSAVDILLSR

SEQ ID NO: 871 - protein, 140 aa, Synthetic construct
NCHSVSRVKTQGQDSLEAQLSSLESSRRVHTSTPSDKNLLDTYNTELLKSDSDNNNSDDCGNILPSDIMDFVLKNTPSMQALGESPESSSSELLNLGEGLGLDSNREKDMGLFEVFSQQLPTTEPVDSSVSSSISAEEQF

SEQ ID NO: 872 - protein, 110 aa, Synthetic construct
VKDLEGVEVKDLDDEDLENLNLDTEDGKVVELDTLDNLETNDPNLDDLLRSGEFDIIAYTDPELDMGDKKSMFNEELDLPIDDKLDNQCVSVEPKKKEQENKTLVLSDKH

SEQ ID NO: 873 - protein, 90 aa, Synthetic construct
LEAGKLPCEDPELDDDFDAHKALEDDEELAHLGLGVDVAKGDDELGTLENLETNDPHLDDLLNGDEFDLLAYTDPELDTGDKKDIFNEHL

SEQ ID NO: 874 - protein, 90 aa, Synthetic construct
PSAITTANIRPVSPGISDANDHDLREPSGIKNPGGASASARVSSWDSQSYDIEQICLGASNPPWASTLFEIDEFVKIYDLPGEDDTSSLN

SEQ ID NO: 875 - protein, 100 aa, Synthetic construct
FRSPRRMRPLVDRLEPGELIPNGPFSFYGDYQSEYYGPGGNYDFFPQGPPSSQAQTPVDLPFVPSSGPSGTPLGGLEHPLPGHHPSSEAQRFTDILAHPP

SEQ ID NO: 876 - protein, 90 aa, Synthetic construct
IEQSVYSSDPFRQGLTPPQMPGDHMHPYGAEPLFHDLDSDDTSLSNLGDCFLATSEAGPLQSRVGNPIDHLYSMQNSYFTYSMQNSYFTS

SEQ ID NO: 877 - protein, 100 aa, Synthetic construct
DLKDSSIEMELRKVTSAIEEAALDSSELLTNMEDEDDTDETLTSLLNEIAFLNQQLNDDSVGLAELPSSMDTEFPGDARRAFISKVPPGSRATFQVEHLG

SEQ ID NO: 878 - protein, 90 aa, Synthetic construct
MAMLTLNSNCEKEGFYKFEEQNRAESECPGMNTHSRASCMQMDDVIDDIISLESSYNEEILGLMDPALQMANTLPVSGNLIDLYGNQGLP

SEQ ID NO: 879 - protein, 90 aa, Synthetic construct
MNTHSRASCMQMDDVIDDIISLESSYNEEILGLMDPALQMANTLPVSGNLIDLYGNQGLPPPGLTISNSCPANLPNIKRELTESEARALA

SEQ ID NO: 880 - protein, 160 aa, Synthetic construct
RLQQHKDEDLSSLVQDDDMLYWHKHGDGWKTPVPMEEDPLLDTDMLMSEFSDTLFSTLSSHQPVAWPNPREIAHLGNADMIQPGLIPLQPNLDFMDTFEPFQDLFSSSRSIFGSMLPASASAPVPDPNNPPAQESILPTTALPTVSLPDSLIAPPTAPSL

SEQ ID NO: 881 - protein, 170 aa, Synthetic construct
LAPKQAEGRWPPPEQWCKQLFSSVVPVLLGDPEEEPGGRQLLDLNCFLSDISDTLFTMTQSGPSPLQLPPEDAYVGNADMIQPDLTPLQPSLDDFMDISDFFTNSRLPQPPMPSNFPEPPSFSPVVDSLFSSGTLGPEVPPASSAMTHLSGHSRLQARNSCPGPLDSSAF

SEQ ID NO: 882 - protein, 80 aa, Synthetic construct
GRGTSTYDGFGLAWAISEYIATKIGAFCMFATHFHELTALANQIPTVNNLHVTALTTEETLTMLYQVKKGVCDQSFGIHV

SEQ ID NO: 883 - protein, 80 aa, Synthetic construct
NCYKKLCEYITQTTLARDIIEAVDCSSDILALLNDGSLFCEETEKPSDSSFTLCLTHSPLPSTSEPTTDPQASLSPMSES

SEQ ID NO: 884 - protein, 130 aa, Synthetic construct
LPATGQPTVNNDYSYYHISEAQNVSSHVPYPVALHVNIVNVPQPAAAAIQRHYNDEDPEKEKRIKELELLLMSTENELKGQQVLPTQNHTCSYPGWHSTTIADHTRPHGDSAPVSCLGEHHSTPSLPADP

SEQ ID NO: 885 - protein, 140 aa, Synthetic construct
RSSSKLQHKPCAAMDHMQTQNQFYIPVQIPGYQYVSPEGNCIEHVQPTSAFIQQPFIDEDPDKEKKIKELEMLLMSAENEVRRKRIPSQPGSFSSWSGSFLMDDNMSNTLNSLDEHTSEFYSMDENQPVSAQQNSPTKFL

SEQ ID NO: 886 - protein, 120 aa, Synthetic construct
GSFSSWSGSFLMDDNMSNTLNSLDEHTSEFYSMDENQPVSAQQNSPTKFLAVEANAVLSSLQTIPEFAETLELIESDPVAWSDVTSFDISDAAASPIKSTPVKLMRIQHNEGAMECQFNV

SEQ ID NO: 887 - protein, 90 aa, Synthetic construct
RQRKRRVALSPVTENSTSLSFLDSCNSLTPKSTPVKTLPFSPSQFLNFWNKQDTLELESPSLTSTPVCSQKVVVTTPLHRDKTPLHQKHA

SEQ ID NO: 888 - protein, 140 aa, Synthetic construct
MICKNPDLEFDSLQPCFYPDEDDFYFGGPDSTPPGEDIWKKFELLPTPPLSPSRGFAEHSSEPPSWVTEMLLENELWGSPAEEDAFGLGGLGGLTPNPVILQDCMWSGFSAREKLERAVSEKLQHGRGPPTAGSTAQSPG

SEQ ID NO: 889 - protein, 100 aa, Synthetic construct
EEEEEEEEEEEEEEEENEDHQMNCHNTRIMQDTEKDDNNNDEYDNYDELVAKSLLNLGKIAEDAAYRARTESEMNSNTSNSLEDDSDKNENLGRKSELSL

SEQ ID NO: 890 - protein, 140 aa, Synthetic construct
PTYPSLYSSYHQGCLVNPTGNLPMWSNQTWNNSTWSNQTQNIQSWSNHSWNTQTWCTQSWNNQAWNSPFYNCGEESLQSCMQFQPNSPASDLEAALEAAGEGLNVIQQTTRYFSTPQTMDLFLNYSMNMQYSMNMQPEDV

SEQ ID NO: 891 - protein, 140 aa, Synthetic construct
PTYPSLYSSYHQGCLVNPTGNLPMWSNQTWNNSTWSNQTQNIQSWSNHSWNTQTWCTQSWNNQAWNSPFYNCGEESLQSCMHFQPNSPASDLEAALEAAGEGLNVIQQTTRYFSTPQTMDLFLNYSMNMQYSMNMQPEDV

SEQ ID NO: 892 - protein, 80 aa, Synthetic construct
YAAQAHLKLGEVSVESENYVQAVEEFQSCLNLQEQYLEAHDRLLAETHYQLGLAYGYNSQYDEAVAQFSKSIEVIENRMA

SEQ ID NO: 893 - protein, 90 aa, Synthetic construct
TVEGRNDEKALLEQLVSFLSGKDETELAELDRALGIDKLVQGGGLDVLSERFPPQQATPPLIMEERPNLYSQPYSSPSPTANLPSPFQGM

SEQ ID NO: 894 - protein, 150 aa, Synthetic construct
SELEMNMGGPQYSQQQAPPNQTAPWPESILPIDQASFASQNRQPFGSSPDDLLCPHPAAESPSDEGALLDQLYLALRNFDGLEEIDRALGIPELVSQSQAVDPEQFSSQDSNIMLEQKAPVFPQQYASQAQMAQGSYSPMQDPNFHTMGQ

SEQ ID NO: 895 - protein, 130 aa, Synthetic construct
AASNQLGSWPDGMLSMEQVSHGTQNRPLLRNSLDDLVGPPSNLEGQSDERALLDQLHTLLSNTDATGLEEIDRALGIPELVNQGQALEPKQDAFQGQEAAVMMDQKAGLYGQTYPAQGPPMQGGFHLQGQ

SEQ ID NO: 896 - protein, 80 aa, Synthetic construct
VTDEGQLYAFGSDYYGCMGVDKVAGPEVLEPMQLNFFLSNPVEQVSCGDNHVVVLTRNKEVYSWGCGEYGRLGLDSEEDY

SEQ ID NO: 897 - protein, 100 aa, Synthetic construct
NAPERQPQPDGGDAPGHEPGGSPQDELDFSILFDYEYLNPNEEEPNAHKVASPPSGPAYPDDVLDYGLKPYSPLASLSGEPPGRFGEPDRVGPQKFLSAA

SEQ ID NO: 898 - protein, 100 aa, Synthetic construct
SPCPPQQSRNRVIQLSTSELGEMELTWQEIMSITELQGLNAPSEPSFEPQAPAPYLGPPPPTTYCPCSIHPDSGFPLPPPPYELPASTSHVPDPPYSYGN

SEQ ID NO: 899 - protein, 140 aa, Synthetic construct
SLEECLRLLEATCPFGENAEFPADISSITEAVPSESEPPALQNNLLSPLLTGTESPFDLEQQWQDLMSIMEMQAMEVNTSASEILYSAPPGDPLSTNYSLAPNTPINQNVSLHQASLGGCSQDFLLFSPEVESLPVASSS

SEQ ID NO: 900 - protein, 110 aa, Synthetic construct
SQDFLLFSPEVESLPVASSSTLLPLAPSNSTSLNSTFGSTNLTGLFFPPQLNGTANDTAGPELPDPLGGLLDEAMLDEISLMDLAIEEGFNPVQASQLEEEFDSDSGLSL

SEQ ID NO: 901 - protein, 110 aa, Synthetic construct
YSQVAHIPKSDALYFDDCMQLLAQTFPFVDDNEVSSATFQSLVPDIPGHIESPVFIATNQAQSPETSVAQVAPVDLDGMQQDIEQVWEELLSIPELQCLNIENDKLVETT

SEQ ID NO: 902 - protein, 140 aa, Synthetic construct
MVPSPEAKLTEVDNYHFYSSIPSMEKEVGNCSPHFLNAFEDSFSSILSTEDPNQLTVNSLNSDATVNTDFGDEFYSAFIAEPSISNSMPSPATLSHSLSELLNGPIDVSDLSLCKAFNQNHPESTAEFNDSDSGISLNTS

SEQ ID NO: 903 - protein, 90 aa, Synthetic construct
HLNGTDTSFSLEDLFQLLSSQPENSLEGISLGDIPLPGSISDGMNSSAHYHVNFSQAISQDVNLHEAILLCPNNTFRRDPTARTSQSQEP

SEQ ID NO: 904 - protein, 140 aa, Synthetic construct
DVNLHEAILLCPNNTFRRDPTARTSQSQEPFLQLNSHTTNPEQTLPGTNLTGFLSPVDNHMRNLTSQDLLYDLDINIFDEINLMSLATEDNFDPIDVSQLFDEPDSDSGLSLDSSHNNTSVIKSNSSHSVCDEGAIGYCT

SEQ ID NO: 905 - protein, 100 aa, Synthetic construct
STRLAALLKAAGADPLVENFEPLYDLDDSWENAGEDEGVVPGTTPLDMATSWQVFDILNGKPYEPEFTSDDLLAQGDMKQLAEDVKLQLYKLLEIPDPDK

SEQ ID NO: 906 - protein, 90 aa, Synthetic construct
RKAYEPKLTPEEMMDSSTFKRFTASIENILDNLEDMDFTAFGDDDEIPQELLLGKHQLNELGSESAKIKAMGIMDKLSTDKTVKVLNILE

SEQ ID NO: 907 - protein, 90 aa, Synthetic construct
CGSWGTSITLPPPCSYLEELEPQDYQQSNQPGPFQFSQAPQPPLFQSPQPKLPYLPTFPFSMPSSLTLPPPEDSLFMFPCGPSGGTSQGY

SEQ ID NO: 908 - protein, 150 aa, Synthetic construct
LAQGMDRPFSAEAGTGGLEPLGGLEPLDSNLSLSGAGPPVLSLDLKPWKCQELDFLADPDNMFLEETPVEDIFMDLSTPDPSEEWGSGDPEAEGPGGAPSPCNNLSPEDHSFLEDLATYETAFETGVSAFPYDGFTDELHQLQSQVQDSF

SEQ ID NO: 909 - protein, 100 aa, Synthetic construct
HLPTTDEFSFSENLFGVLTEQVAGPLGQNLEVEPYSQYSNVQFPQVQPQISSSSYYSNLGFYPQQPEEWYSPGIYELRRMPAETLYQGETEVAEMPVTKK

SEQ ID NO: 910 - protein, 90 aa, Synthetic construct
DVSSEQQHLKGQTGTNGGNVKLYTTDQSTFDILQDLEFSSGSPGKETNESPWRSDLLIDENCLLSPLAGEDDSFLLEGNSNEDCKPLILP

SEQ ID NO: 911 - protein, 100 aa, Synthetic construct
KPTMDLASPEAAPAAPTALPSFSTFMDGYTGEFDTFLYQLPGTVQPCSSASSSASSTSSSSATSPASASFKFEDFQVYGCYPGPLSGPVDEALSSSGSDY

SEQ ID NO: 912 - protein, 80 aa, Synthetic construct
KFEDFQVYGCYPGPLSGPVDEALSSSGSDYYGSPCSAPSPSTPSFQPPQLSPWDGSFGHFSPSQTYEGLRAWTEQLPKAS

SEQ ID NO: 913 - protein, 90 aa, Synthetic construct
PCVQAQYGSSPQGASPASQSYSYHSSGEYSSDFLTPEFVKFSMDLTNTEITATTSLPSFSTFMDNYSTGYDVKPPCLYQMPLSGQQSSIK

SEQ ID NO: 914 - protein, 80 aa, Synthetic construct
LTASIDVSRSWAEKIPGFTDLPKEDQTLLIESAFLELFVLRLSIRSNTAEDKFVFCNGLVLHRLQCLRGFGEWLDSIKDF

SEQ ID NO: 915 - protein, 120 aa, Synthetic construct
EALEALEEALKGPTDGGQSLEELSSHFYTVIPHNFGHSQPPPINSPELLQAKKDMLLVLADIELAQALQAVSEQEKTVEEVPHPLDRDYQLLKCQLQLLDSGAPEYKVIQTYLEQTGSNH

SEQ ID NO: 916 - protein, 80 aa, Synthetic construct
YGQFTGQALLSGREMVGPTLPGYPPHIPTSGQGSYASSAIAGMVAGSEYSGNAYGHTPYSSYSEAWRFPNSSLLSSPYYY

SEQ ID NO: 917 - protein, 80 aa, Synthetic construct
PLLYGDRFYEFECCVCRGGPEKVRRLQLRWVDVAHLVLYHLSVCCKKKYFDFDREILPFTSENWDSLLLGELSDTPKGER

SEQ ID NO: 918 - protein, 80 aa, Synthetic construct
RRKRSKFLLEDAIPSSDFTSAWSTNHHLASIFDFTLDEIQSLKSASSGQTFFSDVDSTDAASTSGSASTSLSYDSRWTVG

SEQ ID NO: 919 - protein, 90 aa, Synthetic construct
WFGTIESQEPLQLEYPDSLFQCYNVCWDNGDTEKMSPWDMELIPNNAVFPEELGTSVPLTDGECRSLIYKPLDGEWGTNPRDEECERIVA

SEQ ID NO: 920 - protein, 130 aa, Synthetic construct
QDSQASSSSKLGLDPQIGSLDDGAGDLSLSKSSISISDPLNTPALDFSQLFNFIPLNGPPYNPLSVGSLGMSYSQEEAHSSVSQLPPQTQDLQDPANTIGLGSLHSLSAAFTSSLSTSTTTLPRFHQAFQ

SEQ ID NO: 921 - protein, 100 aa, Synthetic construct
NLSEALCAANVDFSHLLGFLPLNLPPCNPPGATGGLVMGYSQAEAQPLLTTLQAQPQDSPGAGGPLNFGPLHSLPPVFTSGLSSTTLPRFTLPRFHQAFQ

SEQ ID NO: 922 - protein, 90 aa, Synthetic construct
AGHLASDFAFSPPPGGGGDGPGGPEPGWVDPRTWLSFQGPPGGPGIGPGVGPGSEVWGIPPCPPPYEFCGGMAYCGPQVGVGLVPQGGLE

SEQ ID NO: 923 - protein, 100 aa, Synthetic construct
AGHLASDFAFSPPPGGGGDGPWGAEPGWVDPLTWLSFQGPPGGPGIGPGVGPGSEVWGIPPCPPPYELCGGMAYCGPQVGVGLVPQGGLETSQPESEAGV

SEQ ID NO: 924 - protein, 90 aa, Synthetic construct
PESDSFTDTLSANISQEMTMVDTEMPFWPTNFGISSVDLSVMEDHSHSFDIKPFTTVDFSSISTPHYEDIPFTRTDPVVADYKYDLKLQE

SEQ ID NO: 925 - protein, 130 aa, Synthetic construct
MAWDMCNQDSESVWSDIECAALVGEDQPLCPDLPELDLSELDVNDLDTDSFLGGLKWCSDQSEIISNQYNNEPSNIFEKIDEENEANLLAVLTETLDSLPVDEDGLPSFDALTDGDVTTDNEASPSSMPD

SEQ ID NO: 926 - protein, 110 aa, Synthetic construct
MAGNDCGALLDEELSSFFLNYLADTQGGGSGEEQLYADFPELDLSQLDASDFDSATCFGELQWCPENSETEPNQYSPDDSELFQIDSENEALLAELTKTLDDIPEDDVGL

SEQ ID NO: 927 - protein, 90 aa, Synthetic construct
PMASGAEETPGFLDTLLQDFPALLNPEDPLPWKAPGTVLSQEEVEGELAELAMGFLGSRKAPPPLAAALAHEAVSQLLQTDLSEFRKLPR

SEQ ID NO: 928 - protein, 100 aa, Synthetic construct
DYLPLTALVDGQIFCLHGGLSPSIDTLDHIRALDRLQEVPHEGPMCDLLWSDPDDRGGWGISPRGAGYTFGQDISETFNHANGLTLVSRAHQLVMEGYNW

SEQ ID NO: 929 - protein, 80 aa, Synthetic construct
TGFADIQGHPFFRNVDWDMMEQKQVVPPFKPNISGEFGLDNFDSQFTNEPVQLTPDDDDIVRKIDQSEFEGFEYINPLLM

SEQ ID NO: 930 - protein, 110 aa, Synthetic construct
RSIGEYDVLRGIFTSEIGTKQITQSALLAEARSDYSEAAKQYDEALNKQDWVDGEPTEAEKDFWELASLDCYNHLAEWKSLEYCSTASIDSENPPDLNKIWSEPFYQETY

SEQ ID NO: 931 - protein, 90 aa, Synthetic construct
LINFIRLKNPTVEYMNSIYNPVPWEKEEYLKPVLEDDLLLQFDVEDLYEPVSVPFSYPNGLSENTSVVEKLKHMEARALSAEAALARARE

SEQ ID NO: 932 - protein, 90 aa, Synthetic construct
QADRRIKLYAVEKNPNAVVTLENWQFEEWGSQVTVVSSDMREWVAPEKADIIVSELLGSFADNELSPECLDGAQHFLKDDGVSIPGEYTS

SEQ ID NO: 933 - protein, 80 aa, Synthetic construct
IKYAKYMENHSIEGVRHVFSRACTIHLPKKPMVHMLWAAFEEQQGNINEARNILKTFEECVLGLAMVRLRRVSLERRHGN

SEQ ID NO: 934 - protein, 90 aa, Synthetic construct
RSRKGHLPAPVQPYEHGYPVSGGFAMPPVSLNHNLTTPFTSQAGENSLFMGSTPSYYQLSNLLADARLVFPVTTDPLVPAGPVSSSSTAT

SEQ ID NO: 935 - protein, 80 aa, Synthetic construct
SSMSSVSSVLDEKDDDRIRCCTHCKDTLLKREQQIDEKEHTPDIVKLYEKLRLCMEKVDQKAPEYIRMAASLNAGETTYS

SEQ ID NO: 936 - protein, 90 aa, Synthetic construct
LGALGSPDLSSLSLAVSRSTDELEIIDEYIKENGFGLDGGQPGPGEGLPRLVSRGAASLSTVTLGPVAPPATPPPWGCPLGRLVSPAPGP

SEQ ID NO: 937 - protein, 110 aa, Synthetic construct
SKRRKKKPAILDHFLPNHGSGPFLPPSALLPDPDFFSGTVSLPGLEPPGGPDLLDDGFAYDPTAPTLFTMLDLLPPAPPHASAVVCSGGAGAVVGETPGPEPLTLDSYQA

SEQ ID NO: 938 - protein, 90 aa, Synthetic construct
KEFEPSVSQTNESYFPFDDELTQDSIVEELVLMEQQMSMNNSHSYGNCLGMTLQSQSVTPGAPMSSHTSSTHFYHPIHSNGTPIHTPTPT

SEQ ID NO: 939 - protein, 90 aa, Synthetic construct
DLTNTASDFSSDIRLSSELSGSINDLNTLDPNLLFDPGRQQGQDDEATLEELKNDPLFQQICSESMNSMTSSGFEWIESKKDHPTVEMLG

SEQ ID NO: 940 - protein, 90 aa, Synthetic construct
SNVCSIGDHVAQELFQGSDLGMAEEAERPGEKAGQHSPLREEHVTCVQSILDEFLQTYGSLIPLSTDEVVEKLEDIFQQEFSTPSRKGLV

SEQ ID NO: 941 - protein, 90 aa, Synthetic construct
MDQEGGGDGQKAPSFQWRNYKLIVDPALDPALRRPSQKVYRYDGVHFSVNDSKYIPVEDLQDPRCHVRSKNRDFSLPVPKFKLDEFYIGQ

SEQ ID NO: 942 - protein, 80 aa, Synthetic construct
FHHGFHPTTVCKIPSSCSLKIFNNQEFAQLLAQSVNHGFEAVYELTKMCTIRMSFVKGWGAEYHRQDVTSTPCWIEIHLH

SEQ ID NO: 943 - protein, 100 aa, Synthetic construct
MSPHPSPLGAPEHVSSPMSGGGPTPPQMPPSQPGALIPGDPQAMSQPNRGPSPFSPVQLHQLRAQILAYKMLARGQPLPETLQLAVQGKRTLPGLQQQQQ

SEQ ID NO: 944 - protein, 90 aa, Synthetic construct
PQAMSQPNRGPSPFSPVQLHQLRAQILAYKMLARGQPLPETLQLAVQGKRTLPGLQQQQQQQQQQQQQQQQQQQQQQQPQQQPPQPQTQQ

SEQ ID NO: 945 - protein, 100 aa, Synthetic construct
PSPLGGSEHASSPVPASGPSSGPQMSSGPGGAPLDGADPQALGQQNRGPTPFNQNQLHQLRAQIMAYKMLARGQPLPDHLQMAVQGKRPMPGMQQQMPTL

SEQ ID NO: 946 - protein, 90 aa, Synthetic construct
LAKSKGASAGREWTEQETLLLLEALEMYKDDWNKVSEHVGSRTQDECILHFLRLPIEDPYLENSDASLGPLAYQPVPFSQSGNPVMSTVA

SEQ ID NO: 947 - protein, 110 aa, Synthetic construct
DMQNFGLRTDMYTKKNVPSKSKAAASATREWTEQETLLLLEALEMYKDDWNKVSEHVGSRTQDECILHFLRLPIEDPYLEDSEASLGPLAYQPIPFSQSGNPVMSTVAFL

SEQ ID NO: 948 - protein, 90 aa, Synthetic construct
GSSGEDADDLMFDLSLNFSQSAHSASEQQLGGGAAAGNLSLSLVDKDLDSFSEGSLGSHFEFPDYCTPELSEMIAGDWLEANFSDLVFTY

SEQ ID NO: 949 - protein, 90 aa, Synthetic construct
EEAAAAEEGEEETVASGEESLGFLSRLPPGPAGLDCSALDRDPDLQPPSGTSHFEFPDYCTPEVTEMIAGDWRPSSIADLSSIADLVFTY

SEQ ID NO: 950 - protein, 90 aa, Synthetic construct
SGSSSSDDEFEDDLLDLNPSSNFESMSLGSFSSSSALDRDLDFNFEPGSGSHFEFPDYCTPEVSEMISGDWLESSISNLVSSISNLVFTY

SEQ ID NO: 951 - protein, 100 aa, Synthetic construct
LGQSPGVSMMSPVPGCPPSPAYYSPATYHPLHSNLQAHLGQLSPPPEHPGFDALDQLSQVELLGDMDRNEFDQYLNTPGHPDSATGAMALSGHVPVSQVT

SEQ ID NO: 952 - protein, 100 aa, Synthetic construct
KTELQQAGAKPELKLEGRRPVDSGRQNIDFSNVDISELSSEVMGTMDAFDVHEFDQYLPLGGPAPPEPGQAYGGAYFHAGASPVWAHKSAPSASASPTET

SEQ ID NO: 953 - protein, 90 aa, Synthetic construct
DYPSPLQPGELQSLPLGPEVDFSQGYELPGASSRVTCEDLESDSPLAPGPFSKLLQPDMSHHYESWFRPTHPGAEDGSWWDLHPGTSWMD

SEQ ID NO: 954 - protein, 90 aa, Synthetic construct
ADGLYPRVGMAHPYESWYKSGFHSTLAAGEVTNGAASSWWDVHSSPGSWLEVQNPAGGLQSSLHSGAPQASLHSQLGTYNPDFSSLTHSA

SEQ ID NO: 955 - protein, 120 aa, Synthetic construct
LQACKMEGFPLVPPPSEDLVPYDTDLYQRQTHEYYPYLSSDGESHSDHYWDFHPHHVHSEFESFAENNFTELQSVQPPQLQQLYRHMELEQMHVLDTPMVPPHPSLGHQVSYLPRMCLQY

SEQ ID NO: 956 - protein, 100 aa, Synthetic construct
DEPPFSEAALEQALGEPCDLDAALLTDIEDMLQLINNQDSDFPGLFDPPYAGSGAGGTDPASPDTSSPGSLSPPPATLSSSLEAFLSGPQAAPSPLSPPQ

SEQ ID NO: 957 - protein, 100 aa, Synthetic construct
DDSGELGGLETMETLTELGDELTLGDIDEMLQFVSNQVGEFPDLFSEQLCSSFPGSGGSGSSSGSSGSSSSSSNGRGSSSGAVDPSVQRSFTQVTLPSFS

SEQ ID NO: 958 - protein, 80 aa, Synthetic construct
AGNGGPPEGSLDVLQSWCEKLAEIIWQNRQQIRRAEHLCQQLPIPGPVEEMLAEVNATITDIISALVTSTFIIEKQPPQV

SEQ ID NO: 959 - protein, 90 aa, Synthetic construct
CSDVTMVEDSCLSQPVTAFPQGTWIGEDIFPPLLPPTEQDLTKLLLEGQGESGGGSLGAQPLLQPSHYGQSGISMSHMDLHMDLRANPSW

SEQ ID NO: 960 - protein, 100 aa, Synthetic construct
EKHYMKHFINNPLFASTLLNLKQAEEAKTADTAIPFHSTDDPPRPTFDSLLSRDMAGYMPARADFIEEFDNYAEWDLRDIDFVEDDSDILHALKMAVVDI

SEQ ID NO: 961 - protein, 130 aa, Synthetic construct
DSIIWDGEDIKHKGTKPQGASLAGWLPSIKTRNVMAYNVQQGFAPTLDDDKPWYSIFPIDNEDLVYGRWEDNIIWDAQAMPRLLEPPVLALDPNDENLILEIPDEKEEATSNSPSKESKKESSLKKSRIL

SEQ ID NO: 962 - protein, 110 aa, Synthetic construct
KMKAQAAEPNRGGPGGRGCRRLDDLPWDSLLFQESSSGGGAEPSFGSGLPLPPGGAGPEDPSLSVTLADIYRELYAFFGDSLATRFGTGQPAPTAPRPPGDKKEPAAAPD

SEQ ID NO: 963 - protein, 130 aa, Synthetic construct
LMENPPREARLDKEKGKEKLEEDEAAAASTMAVSASLMPPIWDKTIPYDGESFHLEYMDLDEFLLENGIPASPTHLAHNLLLPVAELEGKESASSSTASPPSSSTAIFQPSETVSSTESSLEKERETPSP

SEQ ID NO: 964 - protein, 130 aa, Synthetic construct
SQAAGSYLNSSNPMNPYPGLLNQNTQYPSYQCNGNLSVDNCSPYLGSYSPQSQPMDLYRYPSQDPLSKLSLPPIHTLYQPRFGNSQSFTSKYLGYGNQNMQGDGFSSCTIRPNVHHVGKLPPYPTHEMDG

SEQ ID NO: 965 - protein, 110 aa, Synthetic construct
DLGAHVTKQQSHPEQNSVDYCQQLTVSQGPSPELCDQAIAFSDPLSYFTDLSFSAALKEEQRLDGMLLDDTISPFGTDPLLSATSPAVSKESSRRSSFSSSFSSDDGDEL

SEQ ID NO: 966 - protein, 80 aa, Synthetic construct
VWKKLIPTLIDDYEGFKTSVEEVSADVVEIAKELELEVEPEDVTELLQSHDKTLTDEELFLMDAQRKWFLEMESTPGEDA

SEQ ID NO: 967 - protein, 100 aa, Synthetic construct
EEVSADVVEIAKELELEVEPEDVTELLQSHDKTLTDEELFLMDAQRKWFLEMESTPGEDAVNIVEMTTKDLEYYINLVDKAAAGFERIDSNFERSSTVGK

SEQ ID NO: 968 - protein, 90 aa, Synthetic construct
CFSCCSDGNIAVWDLHNQTLVRQFQGHTDGASCIDISHDGTKLWTGGLDNTVRSWDLREGRQLQQHDFTSQIFSLGYCPTGEWLAVGMES

SEQ ID NO: 969 - protein, 100 aa, Synthetic construct
EEPQSDPSVEPPLSQETFSDLWKLLPENNVLSPLPSQAMDDLMLSPDDIEQWFTEDPGPDEAPRMPEAAPPVAPAPAAPTPAAPAPAPSWPLSSSVPSQK

SEQ ID NO: 970 - protein, 100 aa, Synthetic construct
KESYYRSTMSQSTQTNEFLSPEVFQHIWDFLEQPICSVQPIDLNFVDEPSEDGATNKIEISMDCIRMQDSDLSDPMWPQYTNLGLLNSMDQQIQNGSSST

SEQ ID NO: 971 - protein, 100 aa, Synthetic construct
GPILSPGRMRSPGSLPGLAPILGPGSGPGSGSVPAPIPGPGSLPAPAPLWPQSPDASDFLPDTQLFPHFTELLLPLDPLEGSSVSTMTSQYQEGDDSMGK

SEQ ID NO: 972 - protein, 90 aa, Synthetic construct
GSLPAPAPLWPQSPDASDFLPDTQLFPHFTELLLPLDPLEGSSVSTMTSQYQEGDDSMGKKHSGSQPQEEGGSVNENHSGHSGPRLLLDL

SEQ ID NO: 973 - protein, 90 aa, Synthetic construct
LQLQQRQGSMQIPQYYQPQPMMQHLQEQQQQQMHLQPPSYHRDPHQYTPEQAHTVQLIPLGSMSQYYYQEPQQPYSHPLYQQSHLSQHQQ

SEQ ID NO: 974 - protein, 80 aa, Synthetic construct
RENSESKEEDVEIDIELAPGDQTSTPKTKELSEKDIGNQLHMLTNRHDKFLDTLREVKTGALLSAFVQLCHISTTLAEKT

SEQ ID NO: 975 - protein, 130 aa, Synthetic construct
GALSVKEMLKKFQKEKEAQKKREEEHKPVAVPSAEAQGLRELEGASDPLLSLFGSTSDNDLLQAATAMDSLTDLDLEHLLSESPEGSPFRDMDDGSDSLGVGLDQEFRQPSSLPEGLPAPLEKRVKELAQ

SEQ ID NO: 976 - protein, 110 aa, Synthetic construct
LDVLHRHCKGDDNGKKANNPNHCNCIIDQIFTGGLQSDVTCQVCHGVSTTIDPFWDISLDLPGSSTPFWPLSPGSEGNVVNGESHVSGTTTLTDCLRRFTRPEHLGSSAK

SEQ ID NO: 977 - protein, 110 aa, Synthetic construct
GNEVRPVAGSAESAAGAGPVVTPPEHLPMDSGGIDSSDSESDILLGILDNLDPVMFFKCPSPEPASLEELPEVYPEGPSSLPASLSLSVGTSSAKLEAINELIRFDHIYT

SEQ ID NO: 978 - protein, 100 aa, Synthetic construct
ASNEDFSITQDLEIPADIVELHDINVEPLPMEDIPTESVQYEDVDGNWIYGGHNHPPLMVLQPLFTNTGYGDHDQEMLMLQTQEEVVGYCDSDNQLGNDL

SEQ ID NO: 979 - protein, 90 aa, Synthetic construct
KIVETIEELKVKIPSNPLEADILAMAEMIAEAEELDKASSDLCDLVSNQSAEGLLEDCDLFGPARDDVLAMAVKMANVLDEPGQDLEADF

SEQ ID NO: 980 - protein, 100 aa, Synthetic construct
EAEELDKASSDLCDLVSNQSAEGLLEDCDLFGPARDDVLAMAVKMANVLDEPGQDLEADFPKNPLDINPSVDFLFDCGLVGPEDVSTEQDLPRTMRKGQK

SEQ ID NO: 981 - protein, 100 aa, Synthetic construct
TFLPKPSLVQPSQKVKETLVIMKDVSSSLQNRVHPRPLVKLLPKGVQKEQETVSLYLKANPEELVVFEDLNVFHCQEECVSLDPTQQLTSEKEDDSSVGE

SEQ ID NO: 982 - protein, 90 aa, Synthetic construct
LSDQIKDHNSSEARFSSKNIKDLRLASDNVSIDQFLRKRHEPESVSSDVSEQGSIHLEPLTPSEVLEYEATEILQKGSGDPSAKTDEVVS

SEQ ID NO: 983 - protein, 100 aa, Synthetic construct
SHAKTFLLAGDAQAEGKDDPLRTGFLPSLAATPFPLPASDLDMEDDAKLDSLITEALNGMEYQSDNPEIDSSFIDVFADEEPSGPRGPSSGHPLKSKAGV

SEQ ID NO: 984 - protein, 90 aa, Synthetic construct
MPAPADDSSSSLGDVSPEPPSLERERCDGGLPGNTHLLPLRATDFEVLSTKFEMQDLCFLGPFEDPVGLPGPSFLDFEGTASSQGPQSRR

SEQ ID NO: 985 - protein, 80 aa, Synthetic construct
PPQIKVEPISEGESEEVEVTDISDEDEEDGEVFKTPRAPPAPPKPEPGEAPGASQCMPLKLRFKRRWSEDCRLEGGGGPA

SEQ ID NO: 986 - protein, 80 aa, Synthetic construct
APPKPEPGEAPGASQCMPLKLRFKRRWSEDCRLEGGGGPAGGFEDEGEDKKVRGEGPGEAGGPLTPRRVSSDLQHATAQL

SEQ ID NO: 987 - protein, 80 aa, Synthetic construct
GEAPGASQCMPLKLRFKRRWSEDCRLEGGGGPAGGFEDEGEDKKVRGEGPGEAGGPLTPRRVSSDLQHATAQLSLEHRDS

SEQ ID NO: 988 - protein, 80 aa, Synthetic construct
HKHGLAALRSTSRNEYIHSGLYSSFTINSLQNPPDAFKAIKTEKLEEPPEDSPPVEEVRTVIRFVTNKTDKHVTRPVVSL

SEQ ID NO: 989 - protein, 80 aa, Synthetic construct
LYSSFTINSLQNPPDAFKAIKTEKLEEPPEDSPPVEEVRTVIRFVTNKTDKHVTRPVVSLPSTSEAAAASAFLASSVSAK

SEQ ID NO: 990 - protein, 80 aa, Synthetic construct
QNPPDAFKAIKTEKLEEPPEDSPPVEEVRTVIRFVTNKTDKHVTRPVVSLPSTSEAAAASAFLASSVSAKISSLMLPNAA

SEQ ID NO: 991 - protein, 80 aa, Synthetic construct
KTEKLEEPPEDSPPVEEVRTVIRFVTNKTDKHVTRPVVSLPSTSEAAAASAFLASSVSAKISSLMLPNAASISSASPFSS

SEQ ID NO: 992 - protein, 80 aa, Synthetic construct
DSPPVEEVRTVIRFVTNKTDKHVTRPVVSLPSTSEAAAASAFLASSVSAKISSLMLPNAASISSASPFSSRSPSLSPNSP

SEQ ID NO: 993 - protein, 80 aa, Synthetic construct
LALPEGLGEPQGPEGPGGRVEEPLEGVGPWQCPEEPEPTPGLVLSKPALEEEEAPRALSLLSLPPKKRSILGLGQARPLE

SEQ ID NO: 994 - protein, 80 aa, Synthetic construct
QGPEGPGGRVEEPLEGVGPWQCPEEPEPTPGLVLSKPALEEEEAPRALSLLSLPPKKRSILGLGQARPLEFLRTCYGGSF

SEQ ID NO: 995 - protein, 80 aa, Synthetic construct
EEPLEGVGPWQCPEEPEPTPGLVLSKPALEEEEAPRALSLLSLPPKKRSILGLGQARPLEFLRTCYGGSFLVHESFLYKR

SEQ ID NO: 996 - protein, 80 aa, Synthetic construct
GLVLSKPALEEEEAPRALSLLSLPPKKRSILGLGQARPLEFLRTCYGGSFLVHESFLYKREKAVGDKVYWTCRDHALHGC

SEQ ID NO: 997 - protein, 80 aa, Synthetic construct
EEEAPRALSLLSLPPKKRSILGLGQARPLEFLRTCYGGSFLVHESFLYKREKAVGDKVYWTCRDHALHGCRSRAITQGQR

SEQ ID NO: 998 - protein, 80 aa, Synthetic construct
LSLPPKKRSILGLGQARPLEFLRTCYGGSFLVHESFLYKREKAVGDKVYWTCRDHALHGCRSRAITQGQRVTVMRGHCHQ

SEQ ID NO: 999 - protein, 80 aa, Synthetic construct
DSPDRRSGSPDVKGPPPVKVARLEQNGSPMGARGRPNGAVAKAVGGLMIPVFCVVEQLDGSLEYDNREEHAEFVLVRKDV

SEQ ID NO: 1000 - protein, 80 aa, Synthetic construct
IDSNRREGRRQSFGGSLFAYSPGGAHGMLSSPKLPVSSLGLAASTNGSSITPAPKIKKEEDSAIPITVPGRLPVSLAGHP

SEQ ID NO: 1001 - protein, 80 aa, Synthetic construct
QSFGGSLFAYSPGGAHGMLSSPKLPVSSLGLAASTNGSSITPAPKIKKEEDSAIPITVPGRLPVSLAGHPVVAAQAAAVQ

SEQ ID NO: 1002 - protein, 80 aa, Synthetic construct
SPGGAHGMLSSPKLPVSSLGLAASTNGSSITPAPKIKKEEDSAIPITVPGRLPVSLAGHPVVAAQAAAVQAAAAQAAVAA

SEQ ID NO: 1003 - protein, 80 aa, Synthetic construct
SPKLPVSSLGLAASTNGSSITPAPKIKKEEDSAIPITVPGRLPVSLAGHPVVAAQAAAVQAAAAQAAVAAQAAALEQLRE

SEQ ID NO: 1004 - protein, 80 aa, Synthetic construct
LAASTNGSSITPAPKIKKEEDSAIPITVPGRLPVSLAGHPVVAAQAAAVQAAAAQAAVAAQAAALEQLREKLESAEPPEK

SEQ ID NO: 1005 - protein, 80 aa, Synthetic construct
TPAPKIKKEEDSAIPITVPGRLPVSLAGHPVVAAQAAAVQAAAAQAAVAAQAAALEQLREKLESAEPPEKKMALVADEQQ

SEQ ID NO: 1006 - protein, 80 aa, Synthetic construct
GQQKFRVDMPGSGSAFIPTINAITTSQDLQWMVQPTVITSMSNPYPRSHPYSPLPGLASVPGHMALPRPGVIKTIGTTVG

SEQ ID NO: 1007 - protein, 80 aa, Synthetic construct
GSGSAFIPTINAITTSQDLQWMVQPTVITSMSNPYPRSHPYSPLPGLASVPGHMALPRPGVIKTIGTTVGRRRRDEQLSP

SEQ ID NO: 1008 - protein, 80 aa, Synthetic construct
NAITTSQDLQWMVQPTVITSMSNPYPRSHPYSPLPGLASVPGHMALPRPGVIKTIGTTVGRRRRDEQLSPEEEEKRRIRR

SEQ ID NO: 1009 - protein, 80 aa, Synthetic construct
YSPLPGLASVPGHMALPRPGVIKTIGTTVGRRRRDEQLSPEEEEKRRIRRERNKLAAAKCRNRRRELTEKLQAETEELEE

SEQ ID NO: 1010 - protein, 80 aa, Synthetic construct
TAHARFATSTIQPPREYSSVSPCPRSAPIPQASPIPHPHVYQPPPLGHPATLFGTPPRFSFHHPYFLPGPHYFPSSTCPY

SEQ ID NO: 1011 - protein, 80 aa, Synthetic construct
SPCPRSAPIPQASPIPHPHVYQPPPLGHPATLFGTPPRFSFHHPYFLPGPHYFPSSTCPYSRPPFGYGNFPSSMPECLSY

SEQ ID NO: 1012 - protein, 80 aa, Synthetic construct
QASPIPHPHVYQPPPLGHPATLFGTPPRFSFHHPYFLPGPHYFPSSTCPYSRPPFGYGNFPSSMPECLSYYEDRYPKHEG

SEQ ID NO: 1013 - protein, 80 aa, Synthetic construct
YQPPPLGHPATLFGTPPRFSFHHPYFLPGPHYFPSSTCPYSRPPFGYGNFPSSMPECLSYYEDRYPKHEGIFSTLNRDYS

SEQ ID NO: 1014 - protein, 80 aa, Synthetic construct
TLFGTPPRFSFHHPYFLPGPHYFPSSTCPYSRPPFGYGNFPSSMPECLSYYEDRYPKHEGIFSTLNRDYSFRDYSSECTH

SEQ ID NO: 1015 - protein, 80 aa, Synthetic construct
QPQTPHGAVLLAPTPPGKNSCGPLLLSHPPEASPLSWTPVPPGPWVPGHWLPPGFSMPPPVVCRLLYQEPAVSLPPFPGF

SEQ ID NO: 1016 - protein, 80 aa, Synthetic construct
CGPLLLSHPPEASPLSWTPVPPGPWVPGHWLPPGFSMPPPVVCRLLYQEPAVSLPPFPGFDPGTSLQLPTHGPFTTCPGS

SEQ ID NO: 1017 - protein, 80 aa, Synthetic construct
KKKLLSQVSGASLSSSYPYGSPPPLISKKKLIARDDLCSSLSQTHHGQSTDHMAVSRPSVIQHVQSFRSKPSEERKTIND

SEQ ID NO: 1018 - protein, 80 aa, Synthetic construct
ASLSSSYPYGSPPPLISKKKLIARDDLCSSLSQTHHGQSTDHMAVSRPSVIQHVQSFRSKPSEERKTINDIFKHEKLSRS

SEQ ID NO: 1019 - protein, 80 aa, Synthetic construct
SPPPLISKKKLIARDDLCSSLSQTHHGQSTDHMAVSRPSVIQHVQSFRSKPSEERKTINDIFKHEKLSRSDPHRCSFSKH

SEQ ID NO: 1020 - protein, 80 aa, Synthetic construct
LSQTHHGQSTDHMAVSRPSVIQHVQSFRSKPSEERKTINDIFKHEKLSRSDPHRCSFSKHHLNPLADSYVLKQEIQEGKD

SEQ ID NO: 1021 - protein, 80 aa, Synthetic construct
DHMAVSRPSVIQHVQSFRSKPSEERKTINDIFKHEKLSRSDPHRCSFSKHHLNPLADSYVLKQEIQEGKDKLLEKRALPH

SEQ ID NO: 1022 - protein, 80 aa, Synthetic construct
TSRTSPTVFSEDQLSKEKVKEEIGSSWIETPPSIKSLDSNDSGVYTSACKRRRLSPSNSSNENSPSIKCEDINAEEYSKD

SEQ ID NO: 1023 - protein, 80 aa, Synthetic construct
EDQLSKEKVKEEIGSSWIETPPSIKSLDSNDSGVYTSACKRRRLSPSNSSNENSPSIKCEDINAEEYSKDTSKGMGGYYA

SEQ ID NO: 1024 - protein, 80 aa, Synthetic construct
YTFADGVFRRRRKRLSHRAPVPAPGLRPEEAPGLPAAPPPAPAAPASPRMRSPARQEERASPAGKFSSSFAIDSILRKPF

SEQ ID NO: 1025 - protein, 80 aa, Synthetic construct
RRKRLSHRAPVPAPGLRPEEAPGLPAAPPPAPAAPASPRMRSPARQEERASPAGKFSSSFAIDSILRKPFRSRRLRDTAP

SEQ ID NO: 1026 - protein, 80 aa, Synthetic construct
VPAPGLRPEEAPGLPAAPPPAPAAPASPRMRSPARQEERASPAGKFSSSFAIDSILRKPFRSRRLRDTAPGTTLQWGAAP

SEQ ID NO: 1027 - protein, 80 aa, Synthetic construct
APGLPAAPPPAPAAPASPRMRSPARQEERASPAGKFSSSFAIDSILRKPFRSRRLRDTAPGTTLQWGAAPCPPLPAFPAL

SEQ ID NO: 1028 - protein, 80 aa, Synthetic construct
APAAPASPRMRSPARQEERASPAGKFSSSFAIDSILRKPFRSRRLRDTAPGTTLQWGAAPCPPLPAFPALLPAAPCRALL

SEQ ID NO: 1029 - protein, 80 aa, Synthetic construct
SPAGKFSSSFAIDSILRKPFRSRRLRDTAPGTTLQWGAAPCPPLPAFPALLPAAPCRALLPLCAYGAGEPARLGAREAEV

SEQ ID NO: 1030 - protein, 80 aa, Synthetic construct
PRTSETDDGVVGKSSDGEDEQQVPKGPIHSPVELKHVHATVVKVPEVNSSALPHKLRIKAKAMQIKVEAFDNEFEATQKL

SEQ ID NO: 1031 - protein, 80 aa, Synthetic construct
VGKSSDGEDEQQVPKGPIHSPVELKHVHATVVKVPEVNSSALPHKLRIKAKAMQIKVEAFDNEFEATQKLSSPIDMTSKR

SEQ ID NO: 1032 - protein, 80 aa, Synthetic construct
QQVPKGPIHSPVELKHVHATVVKVPEVNSSALPHKLRIKAKAMQIKVEAFDNEFEATQKLSSPIDMTSKRHFELEKHSAP

SEQ ID NO: 1033 - protein, 80 aa, Synthetic construct
PVELKHVHATVVKVPEVNSSALPHKLRIKAKAMQIKVEAFDNEFEATQKLSSPIDMTSKRHFELEKHSAPSMVHSSLTPF

SEQ ID NO: 1034 - protein, 80 aa, Synthetic construct
VVKVPEVNSSALPHKLRIKAKAMQIKVEAFDNEFEATQKLSSPIDMTSKRHFELEKHSAPSMVHSSLTPFSVQVTNIQDW

SEQ ID NO: 1035 - protein, 80 aa, Synthetic construct
ALPHKLRIKAKAMQIKVEAFDNEFEATQKLSSPIDMTSKRHFELEKHSAPSMVHSSLTPFSVQVTNIQDWSLKSEHWHQK

SEQ ID NO: 1036 - protein, 80 aa, Synthetic construct
HIKFSEWKFKLFRVRSFEKTPEEAQKEKKDSFEGKPSLEQSPAVLDKADGQKPVPTQPLLKAHPKFSKKFHDNEKARGKA

SEQ ID NO: 1037 - protein, 80 aa, Synthetic construct
IMTPAGVFLAESALHMAGLAEYPMQGELASAISSGKKKRKRCGMCAPCRRRINCEQCSSCRNRKTGHQICKFRKCEELKK

SEQ ID NO: 1038 - protein, 80 aa, Synthetic construct
ESALHMAGLAEYPMQGELASAISSGKKKRKRCGMCAPCRRRINCEQCSSCRNRKTGHQICKFRKCEELKKKPSAALEKVM

SEQ ID NO: 1039 - protein, 80 aa, Synthetic construct
EYPMQGELASAISSGKKKRKRCGMCAPCRRRINCEQCSSCRNRKTGHQICKFRKCEELKKKPSAALEKVMLPTGAAFRWF

SEQ ID NO: 1040 - protein, 80 aa, Synthetic construct
PGSVVAAAAAEAKKKAVKESSIRSVQETVLPIKKRKTRETVSIEVKEVVKPLLVSTLGEKSGKGLKTCKSPGRKSKESSP

SEQ ID NO: 1041 - protein, 80 aa, Synthetic construct
YKARALPTLPSSQHDWLSLDDNQFRMSILERLEQMERRMAEMTGSQQHKQASGGGSSGGGSGSGNGGSQAQCASGTGALG

SEQ ID NO: 1042 - protein, 80 aa, Synthetic construct
LSEPCHPFPPQPGVPGDNRPSYHRQMSEPIVPAAPPPPQGFKQEYHDPLYEHGVPGMPGPPAHGFQSPMGIKQEPRDYCV

SEQ ID NO: 1043 - protein, 80 aa, Synthetic construct
SYHRQMSEPIVPAAPPPPQGFKQEYHDPLYEHGVPGMPGPPAHGFQSPMGIKQEPRDYCVDSEVPNCQSSYMRGGYFSSS

SEQ ID NO: 1044 - protein, 80 aa, Synthetic construct
FKQEYHDPLYEHGVPGMPGPPAHGFQSPMGIKQEPRDYCVDSEVPNCQSSYMRGGYFSSSHEGFSYEKDPRLYFDDTCVV

SEQ ID NO: 1045 - protein, 80 aa, Synthetic construct
SRSPKKIKIEPDSEKDEVKGSDAAKGADQNEMDISKITEKKDQDVKELLDSDSDKPCKEEPMEVDDDMKTESHVNCQESS

SEQ ID NO: 1046 - protein, 80 aa, Synthetic construct
FYIGCDLCTNWYHGECVGITEKEAKKMDVYICNDCKRAQEGSSEELYCICRTPYDESQFYIGCDRCQNWYHGRCVGILQS

SEQ ID NO: 1047 - protein, 80 aa, Synthetic construct
AATLPEMSAGEESSSSDSDPDSASPPSTGQNPSVSVQTSQDWKPTRSLIEHVFVTDVTANLITVTVKESPTSVGFFNLRH

SEQ ID NO: 1048 - protein, 80 aa, Synthetic construct
TVPATNYNHHLVGASSCIEEFQSQFIFEHSYSVMDSPKKLKHKLDHVIGELEDTKESLRNVLDREKRFQKSLRKTIRELK

SEQ ID NO: 1049 - protein, 80 aa, Synthetic construct
CHSFTSQGGGREPLPAPYQHQLSEPCPPYPQQSFKQEYHDPLYEQAGQPAVDQGGVNGHRYPGAGVVIKQEQTDFAYDSD

SEQ ID NO: 1050 - protein, 80 aa, Synthetic construct
QLSEPCPPYPQQSFKQEYHDPLYEQAGQPAVDQGGVNGHRYPGAGVVIKQEQTDFAYDSDVTGCASMYLHTEGFSGPSPG

SEQ ID NO: 1051 - protein, 80 aa, Synthetic construct
QQSFKQEYHDPLYEQAGQPAVDQGGVNGHRYPGAGVVIKQEQTDFAYDSDVTGCASMYLHTEGFSGPSPGDGAMGYGYEK

SEQ ID NO: 1052 - protein, 80 aa, Synthetic construct
VQLSKPSLEKQTVKSHTETDEKQTESRTITPPAAPKPKREENPQKLAFMVSLGLVTHDHLEEIQSKRQERKRRTTANPVY

SEQ ID NO: 1053 - protein, 80 aa, Synthetic construct
QTVKSHTETDEKQTESRTITPPAAPKPKREENPQKLAFMVSLGLVTHDHLEEIQSKRQERKRRTTANPVYSGAVFEPERK

SEQ ID NO: 1054 - protein, 80 aa, Synthetic construct
PPAAPKPKREENPQKLAFMVSLGLVTHDHLEEIQSKRQERKRRTTANPVYSGAVFEPERKKSAVTYLNSTMHPGTRKRAN

SEQ ID NO: 1055 - protein, 80 aa, Synthetic construct
KKDLPQNCDPNIPLVAQELMKKMIRQFAIEYISKSGKTQENRNGSIGPSIVCKSIQMNQAENSLQEEQEGPLDLTVNRMQ

SEQ ID NO: 1056 - protein, 80 aa, Synthetic construct
ENSLQEEQEGPLDLTVNRMQEQNTQQGDGVLDLSTKKTSIKSEESSICDPSSENSVAGSTVDAKSEEATKMEKRKSALNK

SEQ ID NO: 1057 - protein, 80 aa, Synthetic construct
YGSNINYPESHRLGSMVNQHVSVISSIRSLPPYSDIHDPLNILDDSGRKQTSSFYTDTSSPVACRTPVLASSLQTPIPSS

SEQ ID NO: 1058 - protein, 80 aa, Synthetic construct
RGYAASCRVKRVCQKEELQKQKSELEREVDKLARENAAMRLELDALRGKCEALQGFARSVAAARGPATLVAPASVITIVK

SEQ ID NO: 1059 - protein, 80 aa, Synthetic construct
QKSELEREVDKLARENAAMRLELDALRGKCEALQGFARSVAAARGPATLVAPASVITIVKSTPGSGSGPAHGPDPAHGPA

SEQ ID NO: 1060 - protein, 80 aa, Synthetic construct
APEEDERKKRRRERNKIAAAKCRNKKKEKTECLQKESEKLESVNAELKAQIEELKNEKQHLIYMLNLHRPTCIVRAQNGR

SEQ ID NO: 1061 - protein, 80 aa, Synthetic construct
KCRNKKKEKTECLQKESEKLESVNAELKAQIEELKNEKQHLIYMLNLHRPTCIVRAQNGRTPEDERNLFIQQIKEGTLQS

SEQ ID NO: 1062 - protein, 80 aa, Synthetic construct
SSPRTPTPFKHALAAQEIKYGPLKMLPQTPSHLVEDLQDVIKQESDESGIVAEFQENGPPLLKKIKQEVESPTDKSGNFF

SEQ ID NO: 1063 - protein, 80 aa, Synthetic construct
GPLKMLPQTPSHLVEDLQDVIKQESDESGIVAEFQENGPPLLKKIKQEVESPTDKSGNFFCSHHWEGDSLNTQLFTQTSP

SEQ ID NO: 1064 - protein, 80 aa, Synthetic construct
SHLVEDLQDVIKQESDESGIVAEFQENGPPLLKKIKQEVESPTDKSGNFFCSHHWEGDSLNTQLFTQTSPVADAPNILTS

SEQ ID NO: 1065 - protein, 80 aa, Synthetic construct
IKQESDESGIVAEFQENGPPLLKKIKQEVESPTDKSGNFFCSHHWEGDSLNTQLFTQTSPVADAPNILTSSVLMAPASED

SEQ ID NO: 1066 - protein, 80 aa, Synthetic construct
EPKDSLGDSGYASQHKKRQHFAKARKVPSDTLPLKKRRTEKPPESDDEEMKEAAGSLLHLAGIRSCLNNITNRTAKGQKE

SEQ ID NO: 1067 - protein, 80 aa, Synthetic construct
DSGYASQHKKRQHFAKARKVPSDTLPLKKRRTEKPPESDDEEMKEAAGSLLHLAGIRSCLNNITNRTAKGQKEQKETTKN

SEQ ID NO: 1068 - protein, 80 aa, Synthetic construct
APTAALPQGVVMAASPGSLHSPQQLAEEATRKRELRLMKNREAAKECRRRKKEYVKCLESRVAVLEVQNKKLIEELETLK

SEQ ID NO: 1069 - protein, 80 aa, Synthetic construct
PPAEFIYYCVDEDELQPYTNRRQNRKCGACAACLRRMDCGRCDFCCDKPKFGGSNQKRQKCRWRQCLQFAMKRLLPSVWS

SEQ ID NO: 1070 - protein, 80 aa, Synthetic construct
VVALPQVKQEKADTQDEWTPGTAVLTSPVLVPGCPSKAVDPGLPSVKQEPPDPEEDKEENKDDSASKLAPEEEAGGAGTP

SEQ ID NO: 1071 - protein, 80 aa, Synthetic construct
KADTQDEWTPGTAVLTSPVLVPGCPSKAVDPGLPSVKQEPPDPEEDKEENKDDSASKLAPEEEAGGAGTPVITEIFSLGG

SEQ ID NO: 1072 - protein, 80 aa, Synthetic construct
VPGCPSKAVDPGLPSVKQEPPDPEEDKEENKDDSASKLAPEEEAGGAGTPVITEIFSLGGTRFRDTAVWLPRSKDLKKPG

SEQ ID NO: 1073 - protein, 80 aa, Synthetic construct
PSKAVDPGLPSVKQEPPDPEEDKEENKDDSASKLAPEEEAGGAGTPVITEIFSLGGTRFRDTAVWLPRSKDLKKPGARKQ

SEQ ID NO: 1074 - protein, 80 aa, Synthetic construct
QKAELQQEVEKLASENASMKLELDALRSKYEALQTFARTVARSPVAPARGPLAAGLGPLVPGKVAATSVITIVKSKTDAR

SEQ ID NO: 1075 - protein, 80 aa, Synthetic construct
LNIVQYIKPEPDGAFSSSCLGGNSKINSDSSFSVPIKQESTKHSCSGTSFKGNPTVNPFPFMDGSYFSFMDDKDYYSLSG

SEQ ID NO: 1076 - protein, 80 aa, Synthetic construct
PKDGLKSQAAFEEMRTNYIKELRKMVTKCPNNSGQSWQRFYQLTKLLDSMHDLVSDLLEFCFYTFRESHALKVEFPAMLV

SEQ ID NO: 1077 - protein, 80 aa, Synthetic construct
ELRKMVTKCPNNSGQSWQRFYQLTKLLDSMHDLVSDLLEFCFYTFRESHALKVEFPAMLVEIISDQLPKVESGNAKPLYF

SEQ ID NO: 1078 - protein, 80 aa, Synthetic construct
LLFGEGFSPLLPVQTIKEEEIQPGEEMPHLARPIKVESPPLEEWPSPAPSFKEESSHSWEDSSQSPTPRPKKSYSGLRSP

SEQ ID NO: 1079 - protein, 80 aa, Synthetic construct
LPVQTIKEEEIQPGEEMPHLARPIKVESPPLEEWPSPAPSFKEESSHSWEDSSQSPTPRPKKSYSGLRSPTRCVSEMLVI

SEQ ID NO: 1080 - protein, 80 aa, Synthetic construct
GPVRKLYDDCSSTIVEDPQTKCEYMLNSMPKRLCLVCGDIASGYHYGVASCEACKAFFKRTIQGNIEYSCPATNECEITK

SEQ ID NO: 1081 - protein, 80 aa, Synthetic construct
GGATSQIQGVQTNDDLNNDSDDSSDNCVIVGFVKPLAERTPELVELSSDSEDLGSYEKMETVKTQEQEQSYSSGDSDVSR

SEQ ID NO: 1082 - protein, 80 aa, Synthetic construct
SVNQIKTEPVDYEFKPIVVASGINCSTPLQNGVFTGGGPLQATSSPQGMVQAVVLPTVGLVSPISINLSDIQNVLKVAVD

SEQ ID NO: 1083 - protein, 80 aa, Synthetic construct
EYKALMRTRRQDARQSYVIPPQAGQVQMSSSDVLYPRAAGMPLAQPLVEHYVPRSLDPNMPVIVNTCSLREEGEGTDDRH

SEQ ID NO: 1084 - protein, 80 aa, Synthetic construct
QDARQSYVIPPQAGQVQMSSSDVLYPRAAGMPLAQPLVEHYVPRSLDPNMPVIVNTCSLREEGEGTDDRHSVADGEMYRY

SEQ ID NO: 1085 - protein, 80 aa, Synthetic construct
KIEPEETTEARTHNLRRRMGCPTPKCENEKEMKSSIKQEPIERKDYIVENEKEKPKSRSKKATNAVDLYVCLLCGSGNDE

SEQ ID NO: 1086 - protein, 80 aa, Synthetic construct
ESTAYPLNLSLKEEEEEEEIQSRELEDGPADMQKVRICSEGGWVPALFDEVAIYFSDEEWEVLTEQQKALYREVMRMNYE

SEQ ID NO: 1087 - protein, 80 aa, Synthetic construct
LKEEEEEEEIQSRELEDGPADMQKVRICSEGGWVPALFDEVAIYFSDEEWEVLTEQQKALYREVMRMNYETVLSLEFPFP

SEQ ID NO: 1088 - protein, 80 aa, Synthetic construct
GGWVPALFDEVAIYFSDEEWEVLTEQQKALYREVMRMNYETVLSLEFPFPKPDMITRLEGEEESQNSDEWQLQGGTSAEN

SEQ ID NO: 1089 - protein, 80 aa, Synthetic construct
RPPKMREAMAEMPFMHSLSFPLSSTGFYPSYGMPYSPSPLTAAPIGLGYYGRYPPTLYPPPPSPSFTTPLPPPSYMHAGH

SEQ ID NO: 1090 - protein, 80 aa, Synthetic construct
EGATANVSEGEKKTEESSQEPQSTCTPEERRHNQRERLNQILLNLLEKIPGKNAIDVTYLLEEGSGRKLRRRTLFIPENS

SEQ ID NO: 1091 - protein, 80 aa, Synthetic construct
ARRPRSRNPSAWTVEDVVWFVKDADPQALGPHVELFRKHEIDGNALLLLKSDMVMKYLGLKLGPALKLCYHIDKLKQAKF

SEQ ID NO: 1092 - protein, 80 aa, Synthetic construct
TKMISTSIKTARKSKRASGLRINDYDNQCDVVYISQPITECHFENQKSILSSRKTARKSTRGYFFNGDCCELPTVRTLAR

SEQ ID NO: 1093 - protein, 80 aa, Synthetic construct
ARKSKRASGLRINDYDNQCDVVYISQPITECHFENQKSILSSRKTARKSTRGYFFNGDCCELPTVRTLARNLHSQEKASC

SEQ ID NO: 1094 - protein, 80 aa, Synthetic construct
VVYISQPITECHFENQKSILSSRKTARKSTRGYFFNGDCCELPTVRTLARNLHSQEKASCSALASEAVFTPKQTLTIPAP

SEQ ID NO: 1095 - protein, 80 aa, Synthetic construct
CHFENQKSILSSRKTARKSTRGYFFNGDCCELPTVRTLARNLHSQEKASCSALASEAVFTPKQTLTIPAPRHTVDVQLPR

SEQ ID NO: 1096 - protein, 80 aa, Synthetic construct
EIAQHLEQQNDLLQMIRRSQEVQACAQERQAQAMEGTQAALSVLIQVLRPMIKDFRRYLQSNTANPAPASDPGQVAQNGQ

SEQ ID NO: 1097 - protein, 80 aa, Synthetic construct
VLVFQQPGFNCSSIPHSSHSIINHHASIHNEGDQPKTPENIPSKEPKDGSPVQPSLLSLMKDRRLTLEQVVAIEALTQLS

SEQ ID NO: 1098 - protein, 80 aa, Synthetic construct
CSSIPHSSHSIINHHASIHNEGDQPKTPENIPSKEPKDGSPVQPSLLSLMKDRRLTLEQVVAIEALTQLSEAPSENSSPS

SEQ ID NO: 1099 - protein, 80 aa, Synthetic construct
IINHHASIHNEGDQPKTPENIPSKEPKDGSPVQPSLLSLMKDRRLTLEQVVAIEALTQLSEAPSENSSPSKSEKDEESEQ

SEQ ID NO: 1100 - protein, 80 aa, Synthetic construct
IPSKEPKDGSPVQPSLLSLMKDRRLTLEQVVAIEALTQLSEAPSENSSPSKSEKDEESEQRTASLLNSCKAILYTVRKDL

SEQ ID NO: 1101 - protein, 80 aa, Synthetic construct
RPPPRRDPSTRRPPVLAKGDDPLPPRAARPVSQARCPTPVGDGSSSRRCWDNGRVNLRPVVQLIDIMKDLTRLSQDLQHS

SEQ ID NO: 1102 - protein, 80 aa, Synthetic construct
RRPPVLAKGDDPLPPRAARPVSQARCPTPVGDGSSSRRCWDNGRVNLRPVVQLIDIMKDLTRLSQDLQHSGVHLDCGGLR

SEQ ID NO: 1103 - protein, 80 aa, Synthetic construct
DPLPPRAARPVSQARCPTPVGDGSSSRRCWDNGRVNLRPVVQLIDIMKDLTRLSQDLQHSGVHLDCGGLRLSRPPAPPPG

SEQ ID NO: 1104 - protein, 80 aa, Synthetic construct
VSQARCPTPVGDGSSSRRCWDNGRVNLRPVVQLIDIMKDLTRLSQDLQHSGVHLDCGGLRLSRPPAPPPGDLQYSFFSSP

SEQ ID NO: 1105 - protein, 80 aa, Synthetic construct
GDGSSSRRCWDNGRVNLRPVVQLIDIMKDLTRLSQDLQHSGVHLDCGGLRLSRPPAPPPGDLQYSFFSSPSLANSIRSPE

SEQ ID NO: 1106 - protein, 80 aa, Synthetic construct
ASAVKLAANRTTAGARRRRTRCRKCEACLRTECGECHFCKDMKKFGGPGRMKQSCIMRQCIAPVLPHTAVCLVCGEAGKE

SEQ ID NO: 1107 - protein, 80 aa, Synthetic construct
PRHLKSPVRGQDSEQPQAQLQPEAQLHAPAQPQPQLQLQLQSHKGFLEQEGSPLSLGQSQHDLSQSAFLSWLSQTQSHSS

SEQ ID NO: 1108 - protein, 80 aa, Synthetic construct
QDSEQPQAQLQPEAQLHAPAQPQPQLQLQLQSHKGFLEQEGSPLSLGQSQHDLSQSAFLSWLSQTQSHSSLLSSSVLTPD

SEQ ID NO: 1109 - protein, 80 aa, Synthetic construct
QPEAQLHAPAQPQPQLQLQLQSHKGFLEQEGSPLSLGQSQHDLSQSAFLSWLSQTQSHSSLLSSSVLTPDSSPGKLDPAP

SEQ ID NO: 1110 - protein, 80 aa, Synthetic construct
QPQPQLQLQLQSHKGFLEQEGSPLSLGQSQHDLSQSAFLSWLSQTQSHSSLLSSSVLTPDSSPGKLDPAPSQPPEEPEPD

SEQ ID NO: 1111 - protein, 80 aa, Synthetic construct
GSPLSLGQSQHDLSQSAFLSWLSQTQSHSSLLSSSVLTPDSSPGKLDPAPSQPPEEPEPDEAESSPDPQALWFNISAQMP

SEQ ID NO: 1112 - protein, 80 aa, Synthetic construct
HDLSQSAFLSWLSQTQSHSSLLSSSVLTPDSSPGKLDPAPSQPPEEPEPDEAESSPDPQALWFNISAQMPCNAAPTPPPA

SEQ ID NO: 1113 - protein, 80 aa, Synthetic construct
HFLEGGEDSDSDSEEEDDEEEDDEDEDDDDDEEDGDEVPVPSFGEAMAYFAMVKRYLTSFPIDDRVQSHILHLEHDLVHV

SEQ ID NO: 1114 - protein, 80 aa, Synthetic construct
SDSEEEDDEEEDDEDEDDDDDEEDGDEVPVPSFGEAMAYFAMVKRYLTSFPIDDRVQSHILHLEHDLVHVTRKNHARQAG

SEQ ID NO: 1115 - protein, 80 aa, Synthetic construct
RCAMNSLPDIEEVKDKSIKKGNNAFRVYRMLPLSERPSKKGKKPKTEKEDKVKHIKQEPVESSLGLSNGVSDLSPEYAVL

SEQ ID NO: 1116 - protein, 80 aa, Synthetic construct
ESETTDSVPSDEESAEGRPHWRKRNIEGKQYLSNMGTRGSYLLPGMASFVTSNKPDLQVTIKEESNPVPYNSSWPPFQDL

SEQ ID NO: 1117 - protein, 80 aa, Synthetic construct
WRKRNIEGKQYLSNMGTRGSYLLPGMASFVTSNKPDLQVTIKEESNPVPYNSSWPPFQDLPLSSSMTPASSSSRPDRETR

SEQ ID NO: 1118 - protein, 80 aa, Synthetic construct
NEDCKPLILPDTKPKIKDNGDLVLSSPSNVTLPQVKTEKEDFIELCTPGVIKQEKLGTVYCQASFPGANIIGNKMSAISV

SEQ ID NO: 1119 - protein, 80 aa, Synthetic construct
QNHSSSSSSSSGGAGGANPAKKKRKRCGVCVPCKRLINCGVCSSCRNRKTGHQICKFRKCEELKKKPGTSLERTPVPSAE

SEQ ID NO: 1120 - protein, 80 aa, Synthetic construct
SSSSSGGAGGANPAKKKRKRCGVCVPCKRLINCGVCSSCRNRKTGHQICKFRKCEELKKKPGTSLERTPVPSAEAFRWFF

SEQ ID NO: 1121 - protein, 80 aa, Synthetic construct
ASGTHLPQMPAAAYNLGGVAQPSGFKHPFAIENIIAREYKMPGGLAFSAMQPVPAAYPLPNQLTTMGSSLGTGWPHVYGS

SEQ ID NO: 1122 - protein, 80 aa, Synthetic construct
AAAYNLGGVAQPSGFKHPFAIENIIAREYKMPGGLAFSAMQPVPAAYPLPNQLTTMGSSLGTGWPHVYGSAGMIDSATPI

SEQ ID NO: 1123 - protein, 80 aa, Synthetic construct
HLQLEIGNLEKTRSIMAEELVKLTNQNDELEEKVKEIPKLRTQLRDLDQRYNTILQMYGEKAEEAEELRLDLEDVKNMYK

SEQ ID NO: 1124 - protein, 80 aa, Synthetic construct
TQTRISQKGRRLQPPGTPSAPPQRRPRKQLNPCRGTERVDPGFEGVTLKFQIKPDSSLQIIPTYSLPCSSRSQESPADAV

SEQ ID NO: 1125 - protein, 80 aa, Synthetic construct
SSQVVGIEPLYIKAEPASPDSPKGSSETETEPPVALAPGPAPTRCLPGHKEEEDGEGAGPGEQGGGKLVLSSLPKRLCLV

SEQ ID NO: 1126 - protein, 80 aa, Synthetic construct
SVVMEGGEERPRLPGPLPPGEAGLPAPSTRPLLSSEVPQISPQEGLPLSQSALSIAKEKNISLQTAIAIEALTQLSSALP

SEQ ID NO: 1127 - protein, 80 aa, Synthetic construct
PRLPGPLPPGEAGLPAPSTRPLLSSEVPQISPQEGLPLSQSALSIAKEKNISLQTAIAIEALTQLSSALPQPSHSTPQAS

SEQ ID NO: 1128 - protein, 80 aa, Synthetic construct
EAGLPAPSTRPLLSSEVPQISPQEGLPLSQSALSIAKEKNISLQTAIAIEALTQLSSALPQPSHSTPQASCPLPEALSPP

SEQ ID NO: 1129 - protein, 80 aa, Synthetic construct
PLLSSEVPQISPQEGLPLSQSALSIAKEKNISLQTAIAIEALTQLSSALPQPSHSTPQASCPLPEALSPPAPFRSPQSYL

SEQ ID NO: 1130 - protein, 80 aa, Synthetic construct
SALSIAKEKNISLQTAIAIEALTQLSSALPQPSHSTPQASCPLPEALSPPAPFRSPQSYLRAPSWPVVPPEEHSSFAPDS

SEQ ID NO: 1131 - protein, 80 aa, Synthetic construct
PQNHFSSFKYSGNAVVESYSVLGNCRPSDPYSMNSVYSYHSYYAQPSLTSVNGFHSKYALPSFSYYGFPSSNPVFPSQFL

SEQ ID NO: 1132 - protein, 80 aa, Synthetic construct
VAAAAAAAASLPVSVAGGLLRGPPLLLRAAEKYPRTPKCARCRNHGVVSALKGHKRYCRWKDCLCAKCTLIAERQRVMAA

SEQ ID NO: 1133 - protein, 80 aa, Synthetic construct
LKPLKIKLSVPKAGEGLGTSSGDAISGTDHNSLDSSLTREKIEAKIKEVEEKQPEMKSGFMASFLDFLKSGKRHPPLYQA

SEQ ID NO: 1134 - protein, 80 aa, Synthetic construct
PKAGEGLGTSSGDAISGTDHNSLDSSLTREKIEAKIKEVEEKQPEMKSGFMASFLDFLKSGKRHPPLYQAGLTPPLSPPK

SEQ ID NO: 1135 - protein, 80 aa, Synthetic construct
NSLDSSLTREKIEAKIKEVEEKQPEMKSGFMASFLDFLKSGKRHPPLYQAGLTPPLSPPKSVPPSVPARGLQPQPPATPA

SEQ ID NO: 1136 - protein, 80 aa, Synthetic construct
GGTLAHTPRRSLPSHHGKKMRMARCGHCRGCLRVQDCGSCVNCLDKPKFGGPNTKKQCCVYRKCDKIEARKMERLAKKGR

SEQ ID NO: 1137 - protein, 80 aa, Synthetic construct
YSLCPRCTQLYEKGNYCPICTRCYEDNDYESKMMQCAQCDHWVHAKCEGLSDEDYEILSGLPDSVLYTCGPCAGAAQPRW

SEQ ID NO: 1138 - protein, 80 aa, Synthetic construct
RVLNPSQAFSSCHPGLPPENWEKPKPPLASAEGPAVPSPSPQREKLERFKRMCQLLERVPDTSSSSSDSDSDSDSSGTSL

SEQ ID NO: 1139 - protein, 80 aa, Synthetic construct
SCHPGLPPENWEKPKPPLASAEGPAVPSPSPQREKLERFKRMCQLLERVPDTSSSSSDSDSDSDSSGTSLSEDEAPGEAR

SEQ ID NO: 1140 - protein, 80 aa, Synthetic construct
MDHRFRRQLSEPCNSFPPLPTMPREGRPMYQRQMSEPNIPFPPQGFKQEYHDPVYEHNTMVGSAASQSFPPPLMIKQEPR

SEQ ID NO: 1141 - protein, 80 aa, Synthetic construct
TMPREGRPMYQRQMSEPNIPFPPQGFKQEYHDPVYEHNTMVGSAASQSFPPPLMIKQEPRDFAYDSEVPSCHSIYMRQEG

SEQ ID NO: 1142 - protein, 80 aa, Synthetic construct
QRQMSEPNIPFPPQGFKQEYHDPVYEHNTMVGSAASQSFPPPLMIKQEPRDFAYDSEVPSCHSIYMRQEGFLAHPSRTEG

SEQ ID NO: 1143 - protein, 80 aa, Synthetic construct
VGSAASQSFPPPLMIKQEPRDFAYDSEVPSCHSIYMRQEGFLAHPSRTEGCMFEKGPRQFYDDTCVVPEKFDGDIKQEPG

SEQ ID NO: 1144 - protein, 80 aa, Synthetic construct
FLEVKLGKRPQPVKSELDEEEERRKRRREKNKVAAARCRNKKKERTEFLQRESERLELMNAELKTQIEELKQERQQLILM

SEQ ID NO: 1145 - protein, 80 aa, Synthetic construct
EERRKRRREKNKVAAARCRNKKKERTEFLQRESERLELMNAELKTQIEELKQERQQLILMLNRHRPTCIVRTDSVKTPES

SEQ ID NO: 1146 - protein, 80 aa, Synthetic construct
VAAARCRNKKKERTEFLQRESERLELMNAELKTQIEELKQERQQLILMLNRHRPTCIVRTDSVKTPESEGNPLLEQLEKK

SEQ ID NO: 1147 - protein, 80 aa, Synthetic construct
ENKAGISFIINRPFLGPESQLGGPGMVTDAERSIVSPSESCGPINVKTEPMEDSGISLKAEAVSVKKESEDPNYYQYNMQ

SEQ ID NO: 1148 - protein, 80 aa, Synthetic construct
NRPFLGPESQLGGPGMVTDAERSIVSPSESCGPINVKTEPMEDSGISLKAEAVSVKKESEDPNYYQYNMQGSHPSSTSNE

SEQ ID NO: 1149 - protein, 80 aa, Synthetic construct
LGGPGMVTDAERSIVSPSESCGPINVKTEPMEDSGISLKAEAVSVKKESEDPNYYQYNMQGSHPSSTSNEVIEMELPMED

SEQ ID NO: 1150 - protein, 80 aa, Synthetic construct
CGPINVKTEPMEDSGISLKAEAVSVKKESEDPNYYQYNMQGSHPSSTSNEVIEMELPMEDSTPLVPSEEPNEDPEAEVKI

SEQ ID NO: 1151 - protein, 80 aa, Synthetic construct
RQEDLTKIISSAQKVQIKQETIESRLSELKSENESLWKEVSELRAKHAQQQQVIRKIVQFIVTLVQNNQLVSLKRKRPLL

SEQ ID NO: 1152 - protein, 80 aa, Synthetic construct
SAQKVQIKQETIESRLSELKSENESLWKEVSELRAKHAQQQQVIRKIVQFIVTLVQNNQLVSLKRKRPLLLNTNGAQKKN

SEQ ID NO: 1153 - protein, 80 aa, Synthetic construct
SENESLWKEVSELRAKHAQQQQVIRKIVQFIVTLVQNNQLVSLKRKRPLLLNTNGAQKKNLFQHIVKEPTDNHHHKVPHS

SEQ ID NO: 1154 - protein, 80 aa, Synthetic construct
TNGCGPDRWNSAFTRKDEIITSLVSALDSMCSALSKLNAEVACVAVHDESAFVVGTEKGRMFLNARKELQSDFLRFCRGP

SEQ ID NO: 1155 - protein, 80 aa, Synthetic construct
QQHLHNMPPSALSQLGACTSTHLSQSSNLSLPSTQSLNIKSEPVSPPRDRTTTPSRYPQHTRHEAGRSPVDSLSSCSSSY

SEQ ID NO: 1156 - protein, 80 aa, Synthetic construct
PCRKSYEDCASGIMEDSAIKCEYMLNAIPKRLCLVCGDIASGYHYGVASCEACKAFFKRTIQGNIEYSCPATNECEITKR

SEQ ID NO: 1157 - protein, 80 aa, Synthetic construct
SGIMEDSAIKCEYMLNAIPKRLCLVCGDIASGYHYGVASCEACKAFFKRTIQGNIEYSCPATNECEITKRRRKSCQACRF

SEQ ID NO: 1158 - protein, 80 aa, Synthetic construct
EKAREKEEECEKYGPDYVPQKSHGKKVKREPAEPHETSEPTYLRFIKSLAERTMSVTTDSTVTTSPYAFTRVTGPYNRYI

SEQ ID NO: 1159 - protein, 80 aa, Synthetic construct
KKQTPDLISAQPAHHPPQSPAQIQMQLQHELQQQAAFFQPQFLNPAFLPHFPMTPEALLQFQQPQFLFPFYIPGTEFSLG

SEQ ID NO: 1160 - protein, 80 aa, Synthetic construct
LENIKRKVTSVSTLKSEDIKIRQDSVTKLLTDVQLMKGKQECMDSKLLAMKHENEALWREVASLRQKHAQQQKVVNKLIQ

SEQ ID NO: 1161 - protein, 80 aa, Synthetic construct
VRPAAASPIVSGARRRRVRCRKCKACVQGECGVCHYCRDMKKFGGPGRMKQSCVLRQCLAPRLPHSVTCSLCGEVDQNEE

SEQ ID NO: 1162 - protein, 80 aa, Synthetic construct
IKPVTRNKAPQEPPVKKGRRSRRCGQCPGCQVPEDCGVCTNCLDKPKFGGRNIKKQCCKMRKCQNLQWMPSKAYLQKQAK

SEQ ID NO: 1163 - protein, 80 aa, Synthetic construct
KKVWICTKCVRCKSCGSTTPGKGWDAQWSHDFSLCHDCAKLFAKGNFCPLCDKCYDDDDYESKMMQCGKCDRWVHSKCEN

SEQ ID NO: 1164 - protein, 80 aa, Synthetic construct
GKGWDAQWSHDFSLCHDCAKLFAKGNFCPLCDKCYDDDDYESKMMQCGKCDRWVHSKCENLSDEMYEILSNLPESVAYTC

SEQ ID NO: 1165 - protein, 80 aa, Synthetic construct
ENTSPLNTPHTSANLVMTPQGQLLTLKGPLFSGPVVAVSPDLLESDLKPQVAGSAVALPENDDLFMMPRIVNVTSLATEG

SEQ ID NO: 1166 - protein, 80 aa, Synthetic construct
TSANLVMTPQGQLLTLKGPLFSGPVVAVSPDLLESDLKPQVAGSAVALPENDDLFMMPRIVNVTSLATEGGLVDMGGSKY

SEQ ID NO: 1167 - protein, 80 aa, Synthetic construct
GQLLTLKGPLFSGPVVAVSPDLLESDLKPQVAGSAVALPENDDLFMMPRIVNVTSLATEGGLVDMGGSKYPHEVPDSKPS

SEQ ID NO: 1168 - protein, 80 aa, Synthetic construct
FSGPVVAVSPDLLESDLKPQVAGSAVALPENDDLFMMPRIVNVTSLATEGGLVDMGGSKYPHEVPDSKPSDHLKDTVRNE

SEQ ID NO: 1169 - protein, 80 aa, Synthetic construct
DLLESDLKPQVAGSAVALPENDDLFMMPRIVNVTSLATEGGLVDMGGSKYPHEVPDSKPSDHLKDTVRNEDNSLEDKGRI

SEQ ID NO: 1170 - protein, 80 aa, Synthetic construct
VAGSAVALPENDDLFMMPRIVNVTSLATEGGLVDMGGSKYPHEVPDSKPSDHLKDTVRNEDNSLEDKGRISSRGNRDGRV

SEQ ID NO: 1171 - protein, 80 aa, Synthetic construct
DETSRDSEASSVAARGDSRPRLVAPADLSRFEFDECEAAVMLVSLGSSRSGTPSFSPVSTQSPFSPAPSPSPSPLFGFRP

SEQ ID NO: 1172 - protein, 80 aa, Synthetic construct
SVAARGDSRPRLVAPADLSRFEFDECEAAVMLVSLGSSRSGTPSFSPVSTQSPFSPAPSPSPSPLFGFRPANFSPINASP

SEQ ID NO: 1173 - protein, 80 aa, Synthetic construct
VSHTPTPSTPAGFRAVSPAVPFSRSRQPSPLLLLPPPAGLTSDPGPSVRRVPAVQRDSPVIVRNPDVPLPSKFPGEVGTA

SEQ ID NO: 1174 - protein, 80 aa, Synthetic construct
AGFRAVSPAVPFSRSRQPSPLLLLPPPAGLTSDPGPSVRRVPAVQRDSPVIVRNPDVPLPSKFPGEVGTAGEVRAGGPGR

SEQ ID NO: 1175 - protein, 80 aa, Synthetic construct
TSDPGPSVRRVPAVQRDSPVIVRNPDVPLPSKFPGEVGTAGEVRAGGPGRGCRETPVPPGVASGKPGLPPPLPAPVPITV

SEQ ID NO: 1176 - protein, 80 aa, Synthetic construct
GAGGDGGPDAEGVWSPDIEQSFQEALAIYPPCGRRKIILSDEGKMYGRNELIARYIKLRTGKTRTRKQVSSHIQVLARRK

SEQ ID NO: 1177 - protein, 80 aa, Synthetic construct
LNPHLMCALCGGYFIDATTIVECLHSFCKTCIVRYLETNKYCPMCDVQVHKTRPLLSIRSDKTLQDIVYKLVPGLFKDEM

SEQ ID NO: 1178 - protein, 80 aa, Synthetic construct
PVLDEKSPLLDMELDSPTPGIQAEHSYSLSGDSAPQSPLVPIKMEDTTQDAEHGAWALGHKLCSIMVKQEQSPELPVDPL

SEQ ID NO: 1179 - protein, 80 aa, Synthetic construct
DVSKEKEERAHLKEPPPAASKGAPATPHLADAPKEAEKKVVIKSEAASPALPVITKVETLSPESALQGSPRSAASTPAGS

SEQ ID NO: 1180 - protein, 80 aa, Synthetic construct
KGAPATPHLADAPKEAEKKVVIKSEAASPALPVITKVETLSPESALQGSPRSAASTPAGSPDGSLPEHHAAAPNGLPGFS

SEQ ID NO: 1181 - protein, 80 aa, Synthetic construct
VIKSEAASPALPVITKVETLSPESALQGSPRSAASTPAGSPDGSLPEHHAAAPNGLPGFSVENIMTLRTSPPGGELSPGA

SEQ ID NO: 1182 - protein, 80 aa, Synthetic construct
HMYPEKLKVIAQQVQLQQQQEQVRLLHQEKLEREQQQLRTQLLPPPAPTHHPTVIVPAPPPPPSHHINVVTMGPSSVINS

SEQ ID NO: 1183 - protein, 80 aa, Synthetic construct
EQVRLLHQEKLEREQQQLRTQLLPPPAPTHHPTVIVPAPPPPPSHHINVVTMGPSSVINSVSTSRQNLDTIVQAIQHIEG

SEQ ID NO: 1184 - protein, 80 aa, Synthetic construct
AMEGPQPENMQPRTRRTKFTLLQVEELESVFRHTQYPDVPTRRELAENLGVTEDKVRVWFKNKRARCRRHQRELMLANEL

SEQ ID NO: 1185 - protein, 80 aa, Synthetic construct
TRRTKFTLLQVEELESVFRHTQYPDVPTRRELAENLGVTEDKVRVWFKNKRARCRRHQRELMLANELRADPDDCVYIVVD

SEQ ID NO: 1186 - protein, 80 aa, Synthetic construct
YGPDARPGQSPGRLEALGGRLGRRKGSGPKKERRRTESINSAFAELRECIPNVPADTKLSKIKTLRLATSYIAYLMDVLA

SEQ ID NO: 1187 - protein, 80 aa, Synthetic construct
PGRLEALGGRLGRRKGSGPKKERRRTESINSAFAELRECIPNVPADTKLSKIKTLRLATSYIAYLMDVLAKDAQSGDPEA

SEQ ID NO: 1188 - protein, 80 aa, Synthetic construct
KERRRTESINSAFAELRECIPNVPADTKLSKIKTLRLATSYIAYLMDVLAKDAQSGDPEAFKAELKKADGGRESKRKREL

SEQ ID NO: 1189 - protein, 80 aa, Synthetic construct
APTKKSPLSGVSQEGKQVQRNAANARERARMRVLSKAFSRLKTTLPWVPPDTKLSKLDTLRLASSYIAHLRQILANDKYE

SEQ ID NO: 1190 - protein, 80 aa, Synthetic construct
NAANARERARMRVLSKAFSRLKTTLPWVPPDTKLSKLDTLRLASSYIAHLRQILANDKYENGYIHPVNLTWPFMVAGKPE

SEQ ID NO: 1191 - protein, 80 aa, Synthetic construct
MRVLSKAFSRLKTTLPWVPPDTKLSKLDTLRLASSYIAHLRQILANDKYENGYIHPVNLTWPFMVAGKPESDLKEVVTAS

SEQ ID NO: 1192 - protein, 80 aa, Synthetic construct
SYEELQTQRVMANVRERQRTQSLNEAFAALRKIIPTLPSDKLSKIQTLKLAARYIDFLYQVLQSDELDSKMASCSYVAHE

SEQ ID NO: 1193 - protein, 80 aa, Synthetic construct
MANVRERQRTQSLNEAFAALRKIIPTLPSDKLSKIQTLKLAARYIDFLYQVLQSDELDSKMASCSYVAHERLSYAFSVWR

SEQ ID NO: 1194 - protein, 80 aa, Synthetic construct
SLNEAFAALRKIIPTLPSDKLSKIQTLKLAARYIDFLYQVLQSDELDSKMASCSYVAHERLSYAFSVWRMEGAWSMSASH

SEQ ID NO: 1195 - protein, 80 aa, Synthetic construct
LINHLHAVATQFLPTPQLLTQQVPLSKGTGAPSAAGSAAAPCLERAGQKLEPLAYCVPVIQRTQPSAELAAENDTDTDSG

SEQ ID NO: 1196 - protein, 80 aa, Synthetic construct
GGGAGPVVVVRQRQAANARERDRTQSVNTAFTALRTLIPTEPVDRKLSKIETVRLASSYIAHLANVLLLGDSADDGQPCF

SEQ ID NO: 1197 - protein, 80 aa, Synthetic construct
RDRTQSVNTAFTALRTLIPTEPVDRKLSKIETVRLASSYIAHLANVLLLGDSADDGQPCFRAAGSAKGAVPAAADGGRQP

SEQ ID NO: 1198 - protein, 80 aa, Synthetic construct
QRPGEPGAARFGPPEGCADHRPHRYRSFMIEEILTEPPGPKGAAPAAAAAAAGELLKFGVQALLAARPFHSHLAVLKAEQ

SEQ ID NO: 1199 - protein, 80 aa, Synthetic construct
RPHRYRSFMIEEILTEPPGPKGAAPAAAAAAAGELLKFGVQALLAARPFHSHLAVLKAEQAAVFKFPLAPLGCSGLSSAL

SEQ ID NO: 1200 - protein, 80 aa, Synthetic construct
GTPRPGGASGPGLDSHLQPGQLSAPAQSRTVTSSFLIRDILADCKPLAACAPYSSSGQPAAPEPGGRLAAKAAEDFRDKL

SEQ ID NO: 1201 - protein, 80 aa, Synthetic construct
RLNFSGFGYSLPQQQPAAVARRNERERNRVKLVNLGFATLREHVPNGAANKKMSKVETLRSAVEYIRALQQLLDEHDAVS

SEQ ID NO: 1202 - protein, 80 aa, Synthetic construct
LPQQQPAAVARRNERERNRVKLVNLGFATLREHVPNGAANKKMSKVETLRSAVEYIRALQQLLDEHDAVSAAFQAGVLSP

SEQ ID NO: 1203 - protein, 80 aa, Synthetic construct
RRNERERNRVKLVNLGFATLREHVPNGAANKKMSKVETLRSAVEYIRALQQLLDEHDAVSAAFQAGVLSPTISPNYSNDL

SEQ ID NO: 1204 - protein, 80 aa, Synthetic construct
RGRGVSLLGRPKRKRVITYAQRQAANIRERKRMFNLNEAFDQLRRKVPTFAYEKRLSRIETLRLAIVYISFMTELLESCE

SEQ ID NO: 1205 - protein, 80 aa, Synthetic construct
QYPHPGPAAGAVGVPLYAPTPLLQPAHPTPFYIEDILGRGPAAPTPAPTLPSPNSSFTSLVSPYRTPVYEPTPIHPAFSH

SEQ ID NO: 1206 - protein, 80 aa, Synthetic construct
AVGVPLYAPTPLLQPAHPTPFYIEDILGRGPAAPTPAPTLPSPNSSFTSLVSPYRTPVYEPTPIHPAFSHHSAAALAAAY

SEQ ID NO: 1207 - protein, 80 aa, Synthetic construct
FYIEDILGRGPAAPTPAPTLPSPNSSFTSLVSPYRTPVYEPTPIHPAFSHHSAAALAAAYGPGGFGGPLYPFPRTVNDYT

SEQ ID NO: 1208 - protein, 80 aa, Synthetic construct
PSPNSSFTSLVSPYRTPVYEPTPIHPAFSHHSAAALAAAYGPGGFGGPLYPFPRTVNDYTHALLRHDPLGKPLLWSPFLQ

SEQ ID NO: 1209 - protein, 80 aa, Synthetic construct
LPKGQMSREKQPDPESAPSQKLTGIAQPKKKVKVSVTSPSSPELVSPEEHADFSSFLLLVDAAVQRAAELELEKKQEPNP

SEQ ID NO: 1210 - protein, 80 aa, Synthetic construct
SKSEDQCISSQLDELLCPPTTVEGRNDEKALLEQLVSFLSGKDETELAELDRALGIDKLVQGGGLDVLSERFPPQQATPP

SEQ ID NO: 1211 - protein, 80 aa, Synthetic construct
PHTKVVRRIFTNSRERWRQQNVNGAFAELRKLIPTHPPDKKLSKNEILRLAMKYINFLAKLLNDQEEEGTQRAKTGKDPV

SEQ ID NO: 1212 - protein, 80 aa, Synthetic construct
TNSRERWRQQNVNGAFAELRKLIPTHPPDKKLSKNEILRLAMKYINFLAKLLNDQEEEGTQRAKTGKDPVVGAGGGGGGG

SEQ ID NO: 1213 - protein, 80 aa, Synthetic construct
NVNGAFAELRKLIPTHPPDKKLSKNEILRLAMKYINFLAKLLNDQEEEGTQRAKTGKDPVVGAGGGGGGGGGGAPPDDLL

SEQ ID NO: 1214 - protein, 80 aa, Synthetic construct
PQPAPPSPPAAPCLPPLAHHPHLPPHPPPPPPQHLAAPAHQPQPAAQLHRTTNFFIDNILRPDFGCKKEQPPPQLLVAAA

SEQ ID NO: 1215 - protein, 80 aa, Synthetic construct
APCLPPLAHHPHLPPHPPPPPPQHLAAPAHQPQPAAQLHRTTNFFIDNILRPDFGCKKEQPPPQLLVAAAARGGAGGGGR

SEQ ID NO: 1216 - protein, 80 aa, Synthetic construct
PPQHLAAPAHQPQPAAQLHRTTNFFIDNILRPDFGCKKEQPPPQLLVAAAARGGAGGGGRVERDRGQTAAGRDPVHPLGT

SEQ ID NO: 1217 - protein, 80 aa, Synthetic construct
QPQPAAQLHRTTNFFIDNILRPDFGCKKEQPPPQLLVAAAARGGAGGGGRVERDRGQTAAGRDPVHPLGTRAPGAASLLC

SEQ ID NO: 1218 - protein, 80 aa, Synthetic construct
TTNFFIDNILRPDFGCKKEQPPPQLLVAAAARGGAGGGGRVERDRGQTAAGRDPVHPLGTRAPGAASLLCAPDANCGPPD

SEQ ID NO: 1219 - protein, 80 aa, Synthetic construct
PRGTRAGGLALGRSEASPENAARERSRVRTLRQAFLALQAALPAVPPDTKLSKLDVLVLAASYIAHLTRTLGHELPGPAW

SEQ ID NO: 1220 - protein, 80 aa, Synthetic construct
LGRSEASPENAARERSRVRTLRQAFLALQAALPAVPPDTKLSKLDVLVLAASYIAHLTRTLGHELPGPAWPPFLRGLRYL

SEQ ID NO: 1221 - protein, 80 aa, Synthetic construct
EENDPKPGEAAAAVEGQRQPESSPGGGSGGGGGSSPGEADTGRRRALMLPAVLQAPGNHQHPHRITNFFIDNILRPEFGR

SEQ ID NO: 1222 - protein, 80 aa, Synthetic construct
ESSPGGGSGGGGGSSPGEADTGRRRALMLPAVLQAPGNHQHPHRITNFFIDNILRPEFGRRKDAGTCCAGAGGGRGGGAG

SEQ ID NO: 1223 - protein, 80 aa, Synthetic construct
GGGSSPGEADTGRRRALMLPAVLQAPGNHQHPHRITNFFIDNILRPEFGRRKDAGTCCAGAGGGRGGGAGGEGGASGAEG

SEQ ID NO: 1224 - protein, 80 aa, Synthetic construct
TGRRRALMLPAVLQAPGNHQHPHRITNFFIDNILRPEFGRRKDAGTCCAGAGGGRGGGAGGEGGASGAEGGGGAGGSEQL

SEQ ID NO: 1225 - protein, 80 aa, Synthetic construct
AVLQAPGNHQHPHRITNFFIDNILRPEFGRRKDAGTCCAGAGGGRGGGAGGEGGASGAEGGGGAGGSEQLLGSGSREPRQ

SEQ ID NO: 1226 - protein, 80 aa, Synthetic construct
HPHRITNFFIDNILRPEFGRRKDAGTCCAGAGGGRGGGAGGEGGASGAEGGGGAGGSEQLLGSGSREPRQNPPCAPGAGG

SEQ ID NO: 1227 - protein, 80 aa, Synthetic construct
GRKDLQHLSREERRRRRRATAKYRTAHATRERIRVEAFNLAFAELRKLLPTLPPDKKLSKIEILRLAICYISYLNHVLDV

SEQ ID NO: 1228 - protein, 80 aa, Synthetic construct
TKARLERSKLRRQKANARERNRMHDLNAALDNLRKVVPCYSKTQKLSKIETLRLAKNYIWALSEILRSGKRPDLVSYVQT

SEQ ID NO: 1229 - protein, 80 aa, Synthetic construct
CSRQRAPSSKQVNGVQKQRRLAANARERRRMHGLNHAFDQLRNVIPSFNNDKKLSKYETLQMAQIYINALSELLQTPSGG

SEQ ID NO: 1230 - protein, 80 aa, Synthetic construct
QVNGVQKQRRLAANARERRRMHGLNHAFDQLRNVIPSFNNDKKLSKYETLQMAQIYINALSELLQTPSGGEQPPPPPASC

SEQ ID NO: 1231 - protein, 80 aa, Synthetic construct
MHGLNHAFDQLRNVIPSFNNDKKLSKYETLQMAQIYINALSELLQTPSGGEQPPPPPASCKSDHHHLRTAASYEGGAGNA

SEQ ID NO: 1232 - protein, 80 aa, Synthetic construct
SAAFPPSLMMMQRPLGSSTAFSIDSLIGSPPQPSPGHFVYTGYPMFMPYRPVVLPPPPPPPPALPQAALQPALPPAHPHH

SEQ ID NO: 1233 - protein, 80 aa, Synthetic construct
FSIDSLIGSPPQPSPGHFVYTGYPMFMPYRPVVLPPPPPPPPALPQAALQPALPPAHPHHQIPSLPTGFCSSLAQGMALT

SEQ ID NO: 1234 - protein, 80 aa, Synthetic construct
PSQAGQQQGQQKQKRHRTRFTPAQLNELERSFAKTHYPDIFMREELALRIGLTESRVQVWFQNRRAKWKKRKKTTNVFRA

SEQ ID NO: 1235 - protein, 80 aa, Synthetic construct
GRSRFSPQGGQRGRPHSRRRHRTTFSPVQLEQLESAFGRNQYPDIWARESLARDTGLSEARIQVWFQNRRAKQRKQERSL

SEQ ID NO: 1236 - protein, 80 aa, Synthetic construct
CAEVGPALCRGMERNSLGCCEAPKKLSLSFSIEAILKRPARRSDMDRPEGPGEEGPGEAAASGSGLEKPPKDQPQEGRKS

SEQ ID NO: 1237 - protein, 80 aa, Synthetic construct
EAPKKLSLSFSIEAILKRPARRSDMDRPEGPGEEGPGEAAASGSGLEKPPKDQPQEGRKSKRRVRTTFTTEQLHELEKIF

SEQ ID NO: 1238 - protein, 80 aa, Synthetic construct
RARAVSRGAKTAETVQRIKKTRRLKANNRERNRMHNLNAALDALREVLPTFPEDAKLTKIETLRFAHNYIWALTETLRLA

SEQ ID NO: 1239 - protein, 80 aa, Synthetic construct
GAAGLPKASPFSVESLLSDSPPRRKAASNAAAAAAAGLDFAPGLPCAPRTLIGKGHFLLYPITQPLGFLVPQAALKGGAG

SEQ ID NO: 1240 - protein, 80 aa, Synthetic construct
LRCSRRRRPATAETGGGAAAVARRNERERNRVKLVNLGFQALRQHVPHGGASKKLSKVETLRSAVEYIRALQRLLAEHDA

SEQ ID NO: 1241 - protein, 80 aa, Synthetic construct
TAETGGGAAAVARRNERERNRVKLVNLGFQALRQHVPHGGASKKLSKVETLRSAVEYIRALQRLLAEHDAVRNALAGGLR

SEQ ID NO: 1242 - protein, 80 aa, Synthetic construct
VARRNERERNRVKLVNLGFQALRQHVPHGGASKKLSKVETLRSAVEYIRALQRLLAEHDAVRNALAGGLRPQAVRPSAPR

SEQ ID NO: 1243 - protein, 80 aa, Synthetic construct
GGYSSTENLQLVLERRRVANAKERERIKNLNRGFARLKALVPFLPQSRKPSKVDILKGATEYIQVLSDLLEGAKDSKKQD

SEQ ID NO: 1244 - protein, 80 aa, Synthetic construct
LVLERRRVANAKERERIKNLNRGFARLKALVPFLPQSRKPSKVDILKGATEYIQVLSDLLEGAKDSKKQDPDEQSYSNNS

SEQ ID NO: 1245 - protein, 80 aa, Synthetic construct
AKERERIKNLNRGFARLKALVPFLPQSRKPSKVDILKGATEYIQVLSDLLEGAKDSKKQDPDEQSYSNNSSESHTSSARQ

SEQ ID NO: 1246 - protein, 80 aa, Synthetic construct
LPSAVAAHAGAYWDVVASSALLNLPAAPGFGNLGKSFLIENLLRVGGAPTPRLQPPAPHDPATALATAGAQLRPLPASPV

SEQ ID NO: 1247 - protein, 80 aa, Synthetic construct
AYWDVVASSALLNLPAAPGFGNLGKSFLIENLLRVGGAPTPRLQPPAPHDPATALATAGAQLRPLPASPVPLKLCPAAEQ

SEQ ID NO: 1248 - protein, 80 aa, Synthetic construct
GNLGKSFLIENLLRVGGAPTPRLQPPAPHDPATALATAGAQLRPLPASPVPLKLCPAAEQVSPAGAPYGTRWAFQVLSPS

SEQ ID NO: 1249 - protein, 80 aa, Synthetic construct; identical to SEQ ID NO: 282

SEQ ID NO: 1250 - protein, 80 aa, Synthetic construct
TTSSQILARKRRRGIIEKRRRDRINNSLSELRRLVPSAFEKQGSAKLEKAEILQMTVDHLKMLHTAGGKGYFDAHALAMD

SEQ ID NO: 1251 - protein, 80 aa, Synthetic construct
RSGCARGWQYLPVPLDSAFEPAFLRKRNERERQRVRCVNEGYARLRDHLPRELADKRLSKVETLRAAIDYIKHLQELLER

SEQ ID NO: 1252 - protein, 80 aa, Synthetic construct
LPVPLDSAFEPAFLRKRNERERQRVRCVNEGYARLRDHLPRELADKRLSKVETLRAAIDYIKHLQELLERQAWGLEGAAG

SEQ ID NO: 1253 - protein, 80 aa, Synthetic construct
PAFLRKRNERERQRVRCVNEGYARLRDHLPRELADKRLSKVETLRAAIDYIKHLQELLERQAWGLEGAAGAVPQRRAECN

SEQ ID NO: 1254 - protein, 80 aa, Synthetic construct
GYARLRDHLPRELADKRLSKVETLRAAIDYIKHLQELLERQAWGLEGAAGAVPQRRAECNSDGESKASSAPSPSSEPEEG

SEQ ID NO: 1255 - protein, 80 aa, Synthetic construct
ASSQRPTSFFIEDILLHKPKPLREVAPDHFASSLASRVPLLDYGYPLMPTPTLLAPHAHHPLHKGDHHHPYFLTTSGMPV

SEQ ID NO: 1256 - protein, 80 aa, Synthetic construct
GKDPNQFTISRRGAKISETSSVESVMGIKNFMPALEETPFHSCTAGPNPTLGRPLSPKPSSPGSVLARPSVICHTTVTAL

SEQ ID NO: 1257 - protein, 80 aa, Synthetic construct
RRGAKISETSSVESVMGIKNFMPALEETPFHSCTAGPNPTLGRPLSPKPSSPGSVLARPSVICHTTVTALKDVPFSLCQS

SEQ ID NO: 1258 - protein, 80 aa, Synthetic construct
SVESVMGIKNFMPALEETPFHSCTAGPNPTLGRPLSPKPSSPGSVLARPSVICHTTVTALKDVPFSLCQSVGVGQNTDIQ

SEQ ID NO: 1259 - protein, 80 aa, Synthetic construct
FMPALEETPFHSCTAGPNPTLGRPLSPKPSSPGSVLARPSVICHTTVTALKDVPFSLCQSVGVGQNTDIQQIAAKNFTDT

SEQ ID NO: 1260 - protein, 80 aa, Synthetic construct
HSCTAGPNPTLGRPLSPKPSSPGSVLARPSVICHTTVTALKDVPFSLCQSVGVGQNTDIQQIAAKNFTDTSLMYPEDTCK

SEQ ID NO: 1261 - protein, 80 aa, Synthetic construct
LGRPLSPKPSSPGSVLARPSVICHTTVTALKDVPFSLCQSVGVGQNTDIQQIAAKNFTDTSLMYPEDTCKSGPSTNTQSG

SEQ ID NO: 1262 - protein, 80 aa, Synthetic construct
SPGSVLARPSVICHTTVTALKDVPFSLCQSVGVGQNTDIQQIAAKNFTDTSLMYPEDTCKSGPSTNTQSGLFNTPPPTPP

SEQ ID NO: 1263 - protein, 80 aa, Synthetic construct
KDVPFSLCQSVGVGQNTDIQQIAAKNFTDTSLMYPEDTCKSGPSTNTQSGLFNTPPPTPPDLNQDFSGFQLLVDVALKRA

SEQ ID NO: 1264 - protein, 80 aa, Synthetic construct
GVGQNTDIQQIAAKNFTDTSLMYPEDTCKSGPSTNTQSGLFNTPPPTPPDLNQDFSGFQLLVDVALKRAAEMELQAKLTA

SEQ ID NO: 1265 - protein, 80 aa, Synthetic construct
LSPLSAAYHHHHPQQQQQQQQPQQQQPPPPPRAGALQPPASGTRVVPNPHHSGSAPAPSSKDLKFGIDRILSAEFDPKVK

SEQ ID NO: 1266 - protein, 80 aa, Synthetic construct
QPQQQQPPPPPRAGALQPPASGTRVVPNPHHSGSAPAPSSKDLKFGIDRILSAEFDPKVKEGNTLRDLTSLLTGGRPAGV

SEQ ID NO: 1267 - protein, 80 aa, Synthetic construct
PRAGALQPPASGTRVVPNPHHSGSAPAPSSKDLKFGIDRILSAEFDPKVKEGNTLRDLTSLLTGGRPAGVHLSGLQPSAG

SEQ ID NO: 1268 - protein, 80 aa, Synthetic construct
SGTRVVPNPHHSGSAPAPSSKDLKFGIDRILSAEFDPKVKEGNTLRDLTSLLTGGRPAGVHLSGLQPSAGQFFASLDPIN

SEQ ID NO: 1269 - protein, 80 aa, Synthetic construct
HSGSAPAPSSKDLKFGIDRILSAEFDPKVKEGNTLRDLTSLLTGGRPAGVHLSGLQPSAGQFFASLDPINEASAILSPLN

SEQ ID NO: 1270 - protein, 80 aa, Synthetic construct
KDLKFGIDRILSAEFDPKVKEGNTLRDLTSLLTGGRPAGVHLSGLQPSAGQFFASLDPINEASAILSPLNSNPRNSVQHQ

SEQ ID NO: 1271 - protein, 80 aa, Synthetic construct
TSKEDGKAAPGEERRRSPLDHLPPPANSNKPLTPFSIEDILNKPSVRRSYSLCGAAHLLAAADKHAQGGLPLAGRALLSQ

SEQ ID NO: 1272 - protein, 80 aa, Synthetic construct
GEERRRSPLDHLPPPANSNKPLTPFSIEDILNKPSVRRSYSLCGAAHLLAAADKHAQGGLPLAGRALLSQTSPLCALEEL

SEQ ID NO: 1273 - protein, 80 aa, Synthetic construct
TQHHHHLHHSQQPPPPAAAPTQSLQPLPQQQQPLPPQQPPPPPPQQLGSAASAPRTSTSSFLIKDILGDSKPLAACAPYS

SEQ ID NO: 1274 - protein, 80 aa, Synthetic construct
QQPPPPAAAPTQSLQPLPQQQQPLPPQQPPPPPPQQLGSAASAPRTSTSSFLIKDILGDSKPLAACAPYSTSVSSPHHTP

SEQ ID NO: 1275 - protein, 80 aa, Synthetic construct
MPLHSGQGEKPAAPFPRGELESPKPLVTPGSTLTLLTRAEAGSPTGGLFNTPPPTPPEQDKEDFSSFQLLVEVALQRAAE

SEQ ID NO: 1276 - protein, 80 aa, Synthetic construct
PAAPFPRGELESPKPLVTPGSTLTLLTRAEAGSPTGGLFNTPPPTPPEQDKEDFSSFQLLVEVALQRAAEMELQKQQDPS

SEQ ID NO: 1277 - protein, 80 aa, Synthetic construct
VTPGSTLTLLTRAEAGSPTGGLFNTPPPTPPEQDKEDFSSFQLLVEVALQRAAEMELQKQQDPSLPLLHTPIPLVSENPQ

SEQ ID NO: 1278 - protein, 80 aa, Synthetic construct
GDFDDGFLRRKQRRNRTTFTLQQLEALEAVFAQTHYPDVFTREELAMKINLTEARVQVWFQNRRAKWRKTERGASDQEPG

SEQ ID NO: 1279 - protein, 80 aa, Synthetic construct
KQRRNRTTFTLQQLEALEAVFAQTHYPDVFTREELAMKINLTEARVQVWFQNRRAKWRKTERGASDQEPGAKEPMAEVTP

SEQ ID NO: 1280 - protein, 80 aa, Synthetic construct
GNAERLSVSSDDSCSEDGENPPRTHMNEGGYNTPVHHPVIKSENSVIKAGVRPESRASEDYVAPPKYKSSLLNRYLNDSL

SEQ ID NO: 1281 - protein, 80 aa, Synthetic construct
DDSCSEDGENPPRTHMNEGGYNTPVHHPVIKSENSVIKAGVRPESRASEDYVAPPKYKSSLLNRYLNDSLRHVMATNTTM

SEQ ID NO: 1282 - protein, 80 aa, Synthetic construct
YNTPVHHPVIKSENSVIKAGVRPESRASEDYVAPPKYKSSLLNRYLNDSLRHVMATNTTMMGKTRQRNHSGSFSSNEFEE

SEQ ID NO: 1283 - protein, 80 aa, Synthetic construct
KSENSVIKAGVRPESRASEDYVAPPKYKSSLLNRYLNDSLRHVMATNTTMMGKTRQRNHSGSFSSNEFEEELVSPSSSET

SEQ ID NO: 1284 - protein, 80 aa, Synthetic construct
VRPESRASEDYVAPPKYKSSLLNRYLNDSLRHVMATNTTMMGKTRQRNHSGSFSSNEFEEELVSPSSSETEGNFVYRTDT

SEQ ID NO: 1285 - protein, 80 aa, Synthetic construct
YVAPPKYKSSLLNRYLNDSLRHVMATNTTMMGKTRQRNHSGSFSSNEFEEELVSPSSSETEGNFVYRTDTLENGSNKGES

SEQ ID NO: 1286 - protein, 80 aa, Synthetic construct
GNFVYRTDTLENGSNKGESAANRKGPSKDDTYWKEINAAMALTNLAQGKDKLQGTTSCIIQKSSHIAEVKTVKVPLVQQF

SEQ ID NO: 1287 - protein, 80 aa, Synthetic construct
SGAAAAAARRRRRVRSEAELQQLRQAANVRERRRMQSINDAFEGLRSHIPTLPYEKRLSKVDTLRLAIGYINFLSELVQA

SEQ ID NO: 1288 - protein, 80 aa, Synthetic construct
QQLRQAANVRERRRMQSINDAFEGLRSHIPTLPYEKRLSKVDTLRLAIGYINFLSELVQADLPLRGGGAGGCGGPGGGGR

SEQ ID NO: 1289 - protein, 80 aa, Synthetic construct
ERRRMQSINDAFEGLRSHIPTLPYEKRLSKVDTLRLAIGYINFLSELVQADLPLRGGGAGGCGGPGGGGRLGGDSPGSQA

SEQ ID NO: 1290 - protein, 80 aa, Synthetic construct
AGLGQEAPALFRPCTPAVWAPAPAAGGPRSPPPLLLLPESLPGSSASVPPPQPASSRCAESPGLGLRVWRPWGSPGDDLN

SEQ ID NO: 1291 - protein, 80 aa, Synthetic construct
SLKLTETQVKIWFQNRRYKTKRRQMAADLLASAPAAKKVAVKVLVRDDQRQYLPGEVLRPPSLLPLQPSYYYPYYCLPGW

SEQ ID NO: 1292 - protein, 80 aa, Synthetic construct
IWFQNRRYKTKRRQMAADLLASAPAAKKVAVKVLVRDDQRQYLPGEVLRPPSLLPLQPSYYYPYYCLPGWALSTCAAAAG

SEQ ID NO: 1293 - protein, 80 aa, Synthetic construct
ASCSRGEAEEPAGRRRARPVRSKARRMAANVRERKRILDYNEAFNALRRALRHDLGGKRLSKIATLRRAIHRIAALSLVL

SEQ ID NO: 1294 - protein, 80 aa, Synthetic construct
PAGRRRARPVRSKARRMAANVRERKRILDYNEAFNALRRALRHDLGGKRLSKIATLRRAIHRIAALSLVLRASPAPRGPC

SEQ ID NO: 1295 - protein, 80 aa, Synthetic construct
RSKARRMAANVRERKRILDYNEAFNALRRALRHDLGGKRLSKIATLRRAIHRIAALSLVLRASPAPRGPCGHLECHGPAA

SEQ ID NO: 1296 - protein, 80 aa, Synthetic construct
FLNEQDLDELVNKSHMGYEQVREWFAERQRRSELGIELFEENEEEDEVIDDQEEDEEETDDSDTWEPPRHVKRKLSKSDD

SEQ ID NO: 1297 - protein, 80 aa, Synthetic construct
SGIKNPGGASASARVSSWDSQSYDIEQICLGASNPPWASTLFEIDEFVKIYDLPGEDDTSSLNQYLFPVCLEYDQLQSSV

SEQ ID NO: 1298 - protein, 80 aa, Synthetic construct
LSSFPVVLLETMSHYTDEPRFTIEQIDLLQRLRRTGMTKHEILHALETLDRLDQEHSDKFGRRSSYGGSSYGNSTNNVPA

SEQ ID NO: 1299 - protein, 80 aa, Synthetic construct
PSPRPRGSPPPAPSGSRVRPPRSGRSPAPRSPTGPNTPRAPGRFESPFSVEAILARPDPCAPAASQPSGSACVHPAFWTA

SEQ ID NO: 1300 - protein, 80 aa, Synthetic construct
PAPSGSRVRPPRSGRSPAPRSPTGPNTPRAPGRFESPFSVEAILARPDPCAPAASQPSGSACVHPAFWTAASLCATGGLP

SEQ ID NO: 1301 - protein, 80 aa, Synthetic construct
PRSGRSPAPRSPTGPNTPRAPGRFESPFSVEAILARPDPCAPAASQPSGSACVHPAFWTAASLCATGGLPWACPTSWLPA

SEQ ID NO: 1302 - protein, 80 aa, Synthetic construct
PGRFESPFSVEAILARPDPCAPAASQPSGSACVHPAFWTAASLCATGGLPWACPTSWLPAYLSVGFYPVPGPRVAPVCGL

SEQ ID NO: 1303 - protein, 80 aa, Synthetic construct
RAGAPPLAASDTVPAAPEGAGAARPAAPLRPTSFSVLDILDPNKFNSRRRRCVLLGPVAPAACAPCASAPCAPAPAASGR

SEQ ID NO: 1304 - protein, 80 aa, Synthetic construct
DTVPAAPEGAGAARPAAPLRPTSFSVLDILDPNKFNSRRRRCVLLGPVAPAACAPCASAPCAPAPAASGRPPRAEELERR

SEQ ID NO: 1305 - protein, 80 aa, Synthetic construct
GAARPAAPLRPTSFSVLDILDPNKFNSRRRRCVLLGPVAPAACAPCASAPCAPAPAASGRPPRAEELERRALAGAGGVGA

SEQ ID NO: 1306 - protein, 80 aa, Synthetic construct
PTSFSVLDILDPNKFNSRRRRCVLLGPVAPAACAPCASAPCAPAPAASGRPPRAEELERRALAGAGGVGAAGAEPPNAGD

SEQ ID NO: 1307 - protein, 80 aa, Synthetic construct
RRPLGPPSCMQLGVMPPPRQAPLPPAEPLGNVPFLLYPGPAEPPYYDAYAGVFPYVPFPGAFGVYEYPFEPAFIQKRNER

SEQ ID NO: 1308 - protein, 80 aa, Synthetic construct
QLGVMPPPRQAPLPPAEPLGNVPFLLYPGPAEPPYYDAYAGVFPYVPFPGAFGVYEYPFEPAFIQKRNERERQRVKCVNE

SEQ ID NO: 1309 - protein, 80 aa, Synthetic construct
GVFPYVPFPGAFGVYEYPFEPAFIQKRNERERQRVKCVNEGYARLRGHLPGALAEKRLSKVETLRAAIRYIKYLQELLSS

SEQ ID NO: 1310 - protein, 80 aa, Synthetic construct
AFGVYEYPFEPAFIQKRNERERQRVKCVNEGYARLRGHLPGALAEKRLSKVETLRAAIRYIKYLQELLSSAPDGSTPPAS

SEQ ID NO: 1311 - protein, 80 aa, Synthetic construct
PAFIQKRNERERQRVKCVNEGYARLRGHLPGALAEKRLSKVETLRAAIRYIKYLQELLSSAPDGSTPPASRGLPGTGPCP

SEQ ID NO: 1312 - protein, 80 aa, Synthetic construct
ERQRVKCVNEGYARLRGHLPGALAEKRLSKVETLRAAIRYIKYLQELLSSAPDGSTPPASRGLPGTGPCPAPPATPRPDR

SEQ ID NO: 1313 - protein, 80 aa, Synthetic construct
RRNSHTFNCRMLVKPLPDSEEEGHDNQEAHQKYETMQCFAVSQPKSIKEEGEDLQSCLICVARRVPMKERPVLPSSESFT

SEQ ID NO: 1314 - protein, 80 aa, Synthetic construct
RKRRVLFSQAQVYELERRFKQQKYLSAPEREHLASMIHLTPTQVKIWFQNHRYKMKRQAKDKAAQQQLQQDSGGGGGGGG

SEQ ID NO: 1315 - protein, 80 aa, Synthetic construct
LGSPGPGSRRGGSPPTAFSPASETTFLKFGVNAILSSGPRTETSPALLQSVPPKTFAFPYFEGSFQPFIRSSYFPASSSV

SEQ ID NO: 1316 - protein, 80 aa, Synthetic construct
ASETTFLKFGVNAILSSGPRTETSPALLQSVPPKTFAFPYFEGSFQPFIRSSYFPASSSVVPIPGTFSWPLAARGKPRRG

SEQ ID NO: 1317 - protein, 80 aa, Synthetic construct
NYRGCEYSYGPAFTRKRNERERQRVKCVNEGYAQLRHHLPEEYLEKRLSKVETLRAAIKYINYLQSLLYPDKAETKNNPG

SEQ ID NO: 1318 - protein, 80 aa, Synthetic construct
AAPNAPRTRKKRCPYSKFQIRELEREFFFNVYINKEKRLQLSRMLNLTDRQVKIWFQNRRMKEKKLSRDRLQYFSGNPLL

SEQ ID NO: 1319 - protein, 80 aa, Synthetic construct
TGPGPAGPGGGSRSGSGRPAAANAARERSRVQTLRHAFLELQRTLPSVPPDTKLSKLDVLLLATTYIAHLTRSLQDDAEA

SEQ ID NO: 1320 - protein, 80 aa, Synthetic construct
AANAARERSRVQTLRHAFLELQRTLPSVPPDTKLSKLDVLLLATTYIAHLTRSLQDDAEAPADAGLGALRGDGYLHPVKK

SEQ ID NO: 1321 - protein, 80 aa, Synthetic construct
VQTLRHAFLELQRTLPSVPPDTKLSKLDVLLLATTYIAHLTRSLQDDAEAPADAGLGALRGDGYLHPVKKWPMRSRLYIG

SEQ ID NO: 1322 - protein, 80 aa, Synthetic construct
ARRRAGGRRAGGGGPGGRPGREPRQRHTANARERDRTNSVNTAFTALRTLIPTEPADRKLSKIETLRLASSYISHLGNVL

SEQ ID NO: 1323 - protein, 80 aa, Synthetic construct
GGGGPGGRPGREPRQRHTANARERDRTNSVNTAFTALRTLIPTEPADRKLSKIETLRLASSYISHLGNVLLAGEACGDGQ

SEQ ID NO: 1324 - protein, 80 aa, Synthetic construct
ARERDRTNSVNTAFTALRTLIPTEPADRKLSKIETLRLASSYISHLGNVLLAGEACGDGQPCHSGPAFFHAARAGSPPPP

SEQ ID NO: 1325 - protein, 80 aa, Synthetic construct
DGSPTPGKRGKKGSPSAQSFEELQSQRILANVRERQRTQSLNEAFAALRKIIPTLPSDKLSKIQTLKLAARYIDFLYQVL

SEQ ID NO: 1326 - protein, 80 aa, Synthetic construct
KKGSPSAQSFEELQSQRILANVRERQRTQSLNEAFAALRKIIPTLPSDKLSKIQTLKLAARYIDFLYQVLQSDEMDNKMT

SEQ ID NO: 1327 - protein, 80 aa, Synthetic construct
EELQSQRILANVRERQRTQSLNEAFAALRKIIPTLPSDKLSKIQTLKLAARYIDFLYQVLQSDEMDNKMTSCSYVAHERL

SEQ ID NO: 1328 - protein, 80 aa, Synthetic construct
NVRERQRTQSLNEAFAALRKIIPTLPSDKLSKIQTLKLAARYIDFLYQVLQSDEMDNKMTSCSYVAHERLSYAFSVWRME

SEQ ID NO: 1329 - protein, 80 aa, Synthetic construct
DSMELAKNKSKKRRNRTTFSTFQLEELEKVFQKTHYPDVYAREQLALRTDLTEARVQVWFQNRRAKWRKRERYGKIQEGR

SEQ ID NO: 1330 - protein, 80 aa, Synthetic construct
SQQEDEDLNVAEIADEVYMEVIVGEEDAAVAAAAAAVHEQQIDEDEMKTFVPIAWAAAYGNNSDGIENRNGTASALLHID

SEQ ID NO: 1331 - protein, 80 aa, Synthetic construct
AEIADEVYMEVIVGEEDAAVAAAAAAVHEQQIDEDEMKTFVPIAWAAAYGNNSDGIENRNGTASALLHIDESAGLGRLAK

SEQ ID NO: 1332 - protein, 80 aa, Synthetic construct
GLCKFPEVEGKMTTFKEAVTFKDVAVVFTEEELGLLDPAQRKLYRDVMLENFRNLLSVGNQPFHQDTFHFLGKEKFWKMK

SEQ ID NO: 1333 - protein, 80 aa, Synthetic construct
KMTTFKEAVTFKDVAVVFTEEELGLLDPAQRKLYRDVMLENFRNLLSVGNQPFHQDTFHFLGKEKFWKMKTTSQREGNSG

SEQ ID NO: 1334 - protein, 80 aa, Synthetic construct
VPVIESYEKPISQKKIKIEPGIEPQRTDYYPEEMSPPLMNSVSPPQALLQENHPSVIVQPGKRPLPVESPDTQRKRRIHR

SEQ ID NO: 1335 - protein, 80 aa, Synthetic construct
ISQKKIKIEPGIEPQRTDYYPEEMSPPLMNSVSPPQALLQENHPSVIVQPGKRPLPVESPDTQRKRRIHRCDYDGCNKVY

SEQ ID NO: 1336 - protein, 80 aa, Synthetic construct
LDVNGLPYGLCAGCMARSANGQVGGLAPPEPADRPCAGLRCPECSVKFESAEDLESHMQVDHRDLTPETSGPRKGTQTSP

SEQ ID NO: 1337 - protein, 80 aa, Synthetic construct
GQVGGLAPPEPADRPCAGLRCPECSVKFESAEDLESHMQVDHRDLTPETSGPRKGTQTSPVPRKKTYQCIKCQMTFENER

SEQ ID NO: 1338 - protein, 80 aa, Synthetic construct
NMEEQPINIGELQLVQVPVPVTVPVATTSVEELQGAYENEVSKEGLAESEPMICHTLPLPEGFQVVKVGANGEVETLEQG

SEQ ID NO: 1339 - protein, 80 aa, Synthetic construct
ELQLVQVPVPVTVPVATTSVEELQGAYENEVSKEGLAESEPMICHTLPLPEGFQVVKVGANGEVETLEQGELPPQEDPSW

SEQ ID NO: 1340 - protein, 80 aa, Synthetic construct
VTVPVATTSVEELQGAYENEVSKEGLAESEPMICHTLPLPEGFQVVKVGANGEVETLEQGELPPQEDPSWQKDPDYQPPA

SEQ ID NO: 1341 - protein, 80 aa, Synthetic construct
GSKGEVLYILDATNPRHSNWLRFVHEAPSQEQKNLAAIQEGENIFYLAVEDIETDTELLIGYLDSDMEAEEEEQQIMTVI

SEQ ID NO: 1342 - protein, 80 aa, Synthetic construct
FLFGEPTLRKRKSPAQVMFQCLWKSCGKVLSTASAMQRHIRLVHLGRQAEPEQSDGEEDFYYTELDVGVDTLTDGLSSLT

SEQ ID NO: 1343 - protein, 80 aa, Synthetic construct
SPYMHPTIPEYPPHFYTEHGLATIYSPYLLAGSSPECDAPLLSVYGTQDPRHFLPHPGPIPKHLAPSPATYDHYRFFQQY

SEQ ID NO: 1344 - protein, 80 aa, Synthetic construct
LATIYSPYLLAGSSPECDAPLLSVYGTQDPRHFLPHPGPIPKHLAPSPATYDHYRFFQQYPSNLPIPYGFYRPESAFSSY

SEQ ID NO: 1345 - protein, 80 aa, Synthetic construct
MHLPRSSFSKVPGTVSSLVDARFQLPAFPWFPHVIQPKPEITAGGSVPALKTKPRFDFANLALAATQEDPAKLGRGEGPG

SEQ ID NO: 1346 - protein, 80 aa, Synthetic construct
SDEEIRHLDEEIKELNESNLKIEADMMKLQTQITSMESNLKTIEEENKLIEQNNESLLKELAGLSQALISSLADIQLPQM

SEQ ID NO: 1347 - protein, 80 aa, Synthetic construct
KIEADMMKLQTQITSMESNLKTIEEENKLIEQNNESLLKELAGLSQALISSLADIQLPQMGPISEQNFEAYVNTLTDMYS

SEQ ID NO: 1348 - protein, 80 aa, Synthetic construct
SLATVEEDFQPFRQLEAAASAAPAMPPFPFRMAPPLLSPGLGLQREPLYDLPWYSKLPPWYPIPHVPREVPPFLSSSHEY

SEQ ID NO: 1349 - protein, 80 aa, Synthetic construct
ASSASLETMVPPACPRAGASPATSKTLAFSIERIMAKTSEPRAPFEPRPGALEADGSQGKKLLNLCSPLPCMIPLQPLGY

SEQ ID NO: 1350 - protein, 80 aa, Synthetic construct
PPACPRAGASPATSKTLAFSIERIMAKTSEPRAPFEPRPGALEADGSQGKKLLNLCSPLPCMIPLQPLGYEVPSKTLLSY

SEQ ID NO: 1351 - protein, 80 aa, Synthetic construct
CSPPPGGASAGGAQGPGGGPTPDGPIPVLLQIQPVPVKQESGTGPASPGQAPENVKVAQLLVNIQGQTFALVPQVVPSSN

SEQ ID NO: 1352 - protein, 80 aa, Synthetic construct
GGAQGPGGGPTPDGPIPVLLQIQPVPVKQESGTGPASPGQAPENVKVAQLLVNIQGQTFALVPQVVPSSNLNLPSKFVRI

SEQ ID NO: 1353 - protein, 80 aa, Synthetic construct
QIQPVPVKQESGTGPASPGQAPENVKVAQLLVNIQGQTFALVPQVVPSSNLNLPSKFVRIAPVPIAAKPVGSGPLGPGPA

SEQ ID NO: 1354 - protein, 80 aa, Synthetic construct
HEITRSTITEMAAAQGLVDARFPFPALPFTTHLFHPKQGAIAHVLPALHKDRPRFDFANLAVAATQEDPPKMGDLSKLSP

SEQ ID NO: 1355 - protein, 80 aa, Synthetic construct
MAAAQGLVDARFPFPALPFTTHLFHPKQGAIAHVLPALHKDRPRFDFANLAVAATQEDPPKMGDLSKLSPGLGSPISGLS

SEQ ID NO: 1356 - protein, 80 aa, Synthetic construct
RFPFPALPFTTHLFHPKQGAIAHVLPALHKDRPRFDFANLAVAATQEDPPKMGDLSKLSPGLGSPISGLSKLTPDRKPSR

SEQ ID NO: 1357 - protein, 80 aa, Synthetic construct
REKPLKCPDCEKRFKYASDLQRHRRVHTGEKPYKCPNCDKAFKQREHLNKHQGVHAREQQFKCVWCGERFLDVALLQEHS

SEQ ID NO: 1358 - protein, 80 aa, Synthetic construct
GVLQFAVCDTAAAGQLVKDGVTQVVVSEEGAVHMVAGEGAQIIMQEAQGEHMDLVESDGEISQIIVTEELVQAMVQESSG

SEQ ID NO: 1359 - protein, 80 aa, Synthetic construct
AAAGQLVKDGVTQVVVSEEGAVHMVAGEGAQIIMQEAQGEHMDLVESDGEISQIIVTEELVQAMVQESSGGFSEGTTHYI

SEQ ID NO: 1360 - protein, 80 aa, Synthetic construct
AVHMVAGEGAQIIMQEAQGEHMDLVESDGEISQIIVTEELVQAMVQESSGGFSEGTTHYILTELPPGVQDEPGLYSHTVL

SEQ ID NO: 1361 - protein, 80 aa, Synthetic construct
QIIMQEAQGEHMDLVESDGEISQIIVTEELVQAMVQESSGGFSEGTTHYILTELPPGVQDEPGLYSHTVLETADSQELLQ

SEQ ID NO: 1362 - protein, 80 aa, Synthetic construct
HMDLVESDGEISQIIVTEELVQAMVQESSGGFSEGTTHYILTELPPGVQDEPGLYSHTVLETADSQELLQAGATLGTEAG

SEQ ID NO: 1363 - protein, 80 aa, Synthetic construct
ISQIIVTEELVQAMVQESSGGFSEGTTHYILTELPPGVQDEPGLYSHTVLETADSQELLQAGATLGTEAGAPSRAEQLAS

SEQ ID NO: 1364 - protein, 80 aa, Synthetic construct
GDIFLCKKVESPKKNLRESKQREEDDEDPDLIYVGVEHVHRDAEVLFVGMISNSKPVVSNILNRVTPGSNSRRKKGHFRQ

SEQ ID NO: 1365 - protein, 80 aa, Synthetic construct
QREEDDEDPDLIYVGVEHVHRDAEVLFVGMISNSKPVVSNILNRVTPGSNSRRKKGHFRQYPAHVSQPANHVTSMAKAIM

SEQ ID NO: 1366 - protein, 80 aa, Synthetic construct
RDAEVLFVGMISNSKPVVSNILNRVTPGSNSRRKKGHFRQYPAHVSQPANHVTSMAKAIMPVSLSEGRSTDSPVTMKSSS

SEQ ID NO: 1367 - protein, 80 aa, Synthetic construct
CHEKPLNLSVGALHNCPAISLSKSLIPSITCPFCTFKTFYPEVLMMHQRLEHKYNPDVHKNCRNKSLLRSRRTGCPPALL

SEQ ID NO: 1368 - protein, 80 aa, Synthetic construct
LSKSLIPSITCPFCTFKTFYPEVLMMHQRLEHKYNPDVHKNCRNKSLLRSRRTGCPPALLGKDVPPLSSFCKPKPKSAFP

SEQ ID NO: 1369 - protein, 80 aa, Synthetic construct
PDLVEPSTRTPVSPQVTDSKACTATDVLQSSAVVARALSGGAERGLLGLEPVPSSPCRAKGTSVIRHTGESPAACFPTIQ

SEQ ID NO: 1370 - protein, 80 aa, Synthetic construct
ACTATDVLQSSAVVARALSGGAERGLLGLEPVPSSPCRAKGTSVIRHTGESPAACFPTIQTPDCRLSDSREGEEQLLGHF

SEQ ID NO: 1371 - protein, 80 aa, Synthetic construct
SAVVARALSGGAERGLLGLEPVPSSPCRAKGTSVIRHTGESPAACFPTIQTPDCRLSDSREGEEQLLGHFETLQDTHLTD

SEQ ID NO: 1372 - protein, 80 aa, Synthetic construct
GAERGLLGLEPVPSSPCRAKGTSVIRHTGESPAACFPTIQTPDCRLSDSREGEEQLLGHFETLQDTHLTDSLLSTNLVSC

SEQ ID NO: 1373 - protein, 80 aa, Synthetic construct
AAGEVSKSAPDSGLMGNSMLVKKEEEEEESHRRIKKLKTEKVDPLFTVPAPPPPISSSLTPQILPSYFSPSSSNIAAPVE

SEQ ID NO: 1374 - protein, 80 aa, Synthetic construct
DSGLMGNSMLVKKEEEEEESHRRIKKLKTEKVDPLFTVPAPPPPISSSLTPQILPSYFSPSSSNIAAPVEQLLVRTRSVG

SEQ ID NO: 1375 - protein, 80 aa, Synthetic construct
HSHEGSDLSDNMSEGSDDSGLHGARPVPQESSRKNAKEALAVKAAKGDFVCIFCDRSFRKGKDYSKHLNRHLVNVYYLEE

SEQ ID NO: 1376 - protein, 80 aa, Synthetic construct
ICHIPGCGKVYGKTSHLRAHLRWHSGERPFVCNWMYCGKRFTRSDELQRHRRTHTGEKKFVCPECSKRFMRSDHLAKHIK

SEQ ID NO: 1377 - protein, 80 aa, Synthetic construct
EQVNFDSEDSSCLPEDLSLSKQLKIQVKEEPVEEAEEEAPEASTAPKEAGPSKEASLWPCEKCGKMFTVHKQLERHQELL

SEQ ID NO: 1378 - protein, 80 aa, Synthetic construct
LKLYRLLPMRAAKRPYKTYSQGAPEAPLSPTLNTPAPVAMPASPPPGPPPAPEPGPPPSVITFAHPAPSVIVHGGSSSGG

SEQ ID NO: 1379 - protein, 80 aa, Synthetic construct
QGAPEAPLSPTLNTPAPVAMPASPPPGPPPAPEPGPPPSVITFAHPAPSVIVHGGSSSGGGGSGTASTGGSQAASVITYT

SEQ ID NO: 1380 - protein, 80 aa, Synthetic construct
TLNTPAPVAMPASPPPGPPPAPEPGPPPSVITFAHPAPSVIVHGGSSSGGGGSGTASTGGSQAASVITYTAPPRPPKKRE

SEQ ID NO: 1381 - protein, 80 aa, Synthetic construct
ITFAHPAPSVIVHGGSSSGGGGSGTASTGGSQAASVITYTAPPRPPKKREYPPPPPEPAATPTSPATAVSPATAAGPAMA

SEQ ID NO: 1382 - protein, 80 aa, Synthetic construct
RNLLFQEPVTFEDVAVYFTQNEWASLHPTQRALYREVMLENYANVTSLYPTAGGFPLDTERTEKVPGALSSFLPSSSSLE

SEQ ID NO: 1383 - protein, 80 aa, Synthetic construct
FEDVAVYFTQNEWASLHPTQRALYREVMLENYANVTSLYPTAGGFPLDTERTEKVPGALSSFLPSSSSLELILALLPMSA

SEQ ID NO: 1384 - protein, 80 aa, Synthetic construct
AGCISQPEQSSPESALTHQSNEGNSTCEVHQKGSHGVQKSYKCEECPKVFKYLCHLLAHQRRHRNERPFVCPECQKGFFQ

SEQ ID NO: 1385 - protein, 80 aa, Synthetic construct
PQRVSVFKCPSCPLLFAQKRTMLEHLKNTHQSGRLEETAGKGAGGALLTPKTEPEELAVSQGGAAPATEESSSSSEEEEV

SEQ ID NO: 1386 - protein, 80 aa, Synthetic construct
EPLDLVLVPDDCRPGTPPSDLIEIQVVKVTDTTLVPEPPEPGSFHCALCPAAFRLVSELLFHEHGHLAGAEGGGQGGDPS

SEQ ID NO: 1387 - protein, 80 aa, Synthetic construct
PNKMTLSEPNEVNLFENKNVEVEVLSPAKEPVQPGMPLTVVAPAELVVPANCLAQLIDVKVVNGTQQLVLKLFPLEENNC

SEQ ID NO: 1388 - protein, 80 aa, Synthetic construct
EVEVLSPAKEPVQPGMPLTVVAPAELVVPANCLAQLIDVKVVNGTQQLVLKLFPLEENNCLEAGRDNGGNSERMVKEKGS

SEQ ID NO: 1389 - protein, 80 aa, Synthetic construct
PVQPGMPLTVVAPAELVVPANCLAQLIDVKVVNGTQQLVLKLFPLEENNCLEAGRDNGGNSERMVKEKGSNEQEKVLSAE

SEQ ID NO: 1390 - protein, 80 aa, Synthetic construct
QEDNQTEEHKAVSTVGQISSQHKSEYLHINITGEDRSQQPGDKPLELKNSERTNNTNDGPVISSVFSLSSGSENVPEGIK

SEQ ID NO: 1391 - protein, 80 aa, Synthetic construct
QHKSEYLHINITGEDRSQQPGDKPLELKNSERTNNTNDGPVISSVFSLSSGSENVPEGIKWNSSTSKIKSIELLRRKIAQ

SEQ ID NO: 1392 - protein, 80 aa, Synthetic construct
ITGEDRSQQPGDKPLELKNSERTNNTNDGPVISSVFSLSSGSENVPEGIKWNSSTSKIKSIELLRRKIAQLIESCGKPSS

SEQ ID NO: 1393 - protein, 80 aa, Synthetic construct
GDKPLELKNSERTNNTNDGPVISSVFSLSSGSENVPEGIKWNSSTSKIKSIELLRRKIAQLIESCGKPSSLASNSAHRRS

SEQ ID NO: 1394 - protein, 80 aa, Synthetic construct
ERTNNTNDGPVISSVFSLSSGSENVPEGIKWNSSTSKIKSIELLRRKIAQLIESCGKPSSLASNSAHRRSVGQASKGTSK

SEQ ID NO: 1395 - protein, 80 aa, Synthetic construct
KIQAEPSRCLKDPSIFQVARQLRLIAAKPDQLIKCPRRNQPVIVLNHPDVDSPEVTNVMKVINKYKGNVLKVVLSERTRC

SEQ ID NO: 1396 - protein, 80 aa, Synthetic construct
KDPSIFQVARQLRLIAAKPDQLIKCPRRNQPVIVLNHPDVDSPEVTNVMKVINKYKGNVLKVVLSERTRCQLGIRRHHVR

SEQ ID NO: 1397 - protein, 80 aa, Synthetic construct
QNAEEASQIKRQMMLKMKLKKVHKNNYQVVDSLPDDSSQCVFKCWFCGRLYEDQEEWMSHGQRHLIEATRDWDVLSSKGK

SEQ ID NO: 1398 - protein, 80 aa, Synthetic construct
AAQLLTDEALESVTFRDVTVDFTQEEWQQLEPAQKDLYRDVMLENYRNLVSLDWETRPEMKELDPKNDISEDKLSVVGEA

SEQ ID NO: 1399 - protein, 80 aa, Synthetic construct
PKIQTSETSPKAFQCFDYSQDAEAAHMAATAILNLSTRCWEMPENLSTKPQDLPSKSVDIEVDENGTLDLSMHKHRKREN

SEQ ID NO: 1400 - protein, 80 aa, Synthetic construct
AGPEEPTLAGGGRHPGVAEVKTEMMQVDEVPSQDSPGAAESSISGGMGDKVEERGKEGPGTPTRSSVITSARELHYGREE

SEQ ID NO: 1401 - protein, 80 aa, Synthetic construct
ELPDNEAVEQHRKLHSGMKTYGCELCGKRFLDSLRLRMHLLAHSAGAKAFVCDQCGAQFSKEDALETHRQTHTGTDMAVF

SEQ ID NO: 1402 - protein, 80 aa, Synthetic construct
NPVPVYIPNLSPPANAGITLPTRGYKCLECGDSFALEKSLTQHYDRRSVRIEVTCNHCTKNLVFYNKCSLLSHARGHKEK

SEQ ID NO: 1403 - protein, 80 aa, Synthetic construct
SETTSEHTCQLCGGWFDTKIGLSNHVRGHLKRLGKTKWDAHKSPICVLNEMMQNEEKYEKILKALNSRRIIPRPFVAQKL

SEQ ID NO: 1404 - protein, 80 aa, Synthetic construct
GLSNHVRGHLKRLGKTKWDAHKSPICVLNEMMQNEEKYEKILKALNSRRIIPRPFVAQKLASSDDFISQNVIPLEAYRNG

SEQ ID NO: 1405 - protein, 80 aa, Synthetic construct
KRLGKTKWDAHKSPICVLNEMMQNEEKYEKILKALNSRRIIPRPFVAQKLASSDDFISQNVIPLEAYRNGLKTEALSVSA

SEQ ID NO: 1406 - protein, 80 aa, Synthetic construct
EDSPLMYQPQKMDLTMHSALDCKQKKSRSRSGSKKKMLTLPHGADEVYILRCRFCGLVFRGPLSVQEDWIKHLQRHIVNA

SEQ ID NO: 1407 - protein, 80 aa, Synthetic construct
DCKQKKSRSRSGSKKKMLTLPHGADEVYILRCRFCGLVFRGPLSVQEDWIKHLQRHIVNANLPRTGAGMVEVTSLLKKPA

SEQ ID NO: 1408 - protein, 80 aa, Synthetic construct
SGSKKKMLTLPHGADEVYILRCRFCGLVFRGPLSVQEDWIKHLQRHIVNANLPRTGAGMVEVTSLLKKPASITETSFSLL

SEQ ID NO: 1409 - protein, 80 aa, Synthetic construct
MLTLPHGADEVYILRCRFCGLVFRGPLSVQEDWIKHLQRHIVNANLPRTGAGMVEVTSLLKKPASITETSFSLLMAEAAS

SEQ ID NO: 1410 - protein, 80 aa, Synthetic construct
LCEEAAQKRKGKEPGMALPQGRLTFRDVAIEFSLAEWKCLNPSQRALYREVMLENYRNLEAVDISSKRMMKEVLSTGQGN

SEQ ID NO: 1411 - protein, 80 aa, Synthetic construct
EPAPTPSMTGLPLSALPPPLHKAQSSGPEHPGPESSLPSGALSKSAPGSFWHIQADHAYQALPSFQIPVSPHIYTSVSWA

SEQ ID NO: 1412 - protein, 80 aa, Synthetic construct
LPLSALPPPLHKAQSSGPEHPGPESSLPSGALSKSAPGSFWHIQADHAYQALPSFQIPVSPHIYTSVSWAAAPSAACSLS

SEQ ID NO: 1413 - protein, 80 aa, Synthetic construct
HKAQSSGPEHPGPESSLPSGALSKSAPGSFWHIQADHAYQALPSFQIPVSPHIYTSVSWAAAPSAACSLSPVRSRSLSFS

SEQ ID NO: 1414 - protein, 80 aa, Synthetic construct
PGPESSLPSGALSKSAPGSFWHIQADHAYQALPSFQIPVSPHIYTSVSWAAAPSAACSLSPVRSRSLSFSEPQQPAPAMK

SEQ ID NO: 1415 - protein, 80 aa, Synthetic construct
ALSKSAPGSFWHIQADHAYQALPSFQIPVSPHIYTSVSWAAAPSAACSLSPVRSRSLSFSEPQQPAPAMKSHLIVTSPPR

SEQ ID NO: 1416 - protein, 80 aa, Synthetic construct
ALPSFQIPVSPHIYTSVSWAAAPSAACSLSPVRSRSLSFSEPQQPAPAMKSHLIVTSPPRAQSGARKARGEAKKCRKVYG

SEQ ID NO: 1417 - protein, 80 aa, Synthetic construct
ARLECDHCSFRGTDYENVQIHMGTIHPEFCDEMDAGGLGKMIFYQKSAKLFHCHKCFFTSKMYSNVYYHITSKHASPDKW

SEQ ID NO: 1418 - protein, 80 aa, Synthetic construct
HMGTIHPEFCDEMDAGGLGKMIFYQKSAKLFHCHKCFFTSKMYSNVYYHITSKHASPDKWNDKPKNQLNKETDPVKSPPL

SEQ ID NO: 1419 - protein, 80 aa, Synthetic construct
MIFYQKSAKLFHCHKCFFTSKMYSNVYYHITSKHASPDKWNDKPKNQLNKETDPVKSPPLPEHQKIPCNSAEPKSIPALS

SEQ ID NO: 1420 - protein, 80 aa, Synthetic construct
LQMQEGVRSGFAMAGHENLSHGHTERFDPCRPQLQPGSPSLVSEESPSAIDSDKMSDLGGRKPPGNVISVIQHTNSLSRP

SEQ ID NO: 1421 - protein, 80 aa, Synthetic construct
FAMAGHENLSHGHTERFDPCRPQLQPGSPSLVSEESPSAIDSDKMSDLGGRKPPGNVISVIQHTNSLSRPNSFERSESAE

SEQ ID NO: 1422 - protein, 80 aa, Synthetic construct
RPQLQPGSPSLVSEESPSAIDSDKMSDLGGRKPPGNVISVIQHTNSLSRPNSFERSESAELVACTQDKAPSPSETCDSEI

SEQ ID NO: 1423 - protein, 80 aa, Synthetic construct
LVSEESPSAIDSDKMSDLGGRKPPGNVISVIQHTNSLSRPNSFERSESAELVACTQDKAPSPSETCDSEISEAPVSPEWA

SEQ ID NO: 1424 - protein, 80 aa, Synthetic construct
DSDKMSDLGGRKPPGNVISVIQHTNSLSRPNSFERSESAELVACTQDKAPSPSETCDSEISEAPVSPEWAPPGDGAESGG

SEQ ID NO: 1425 - protein, 80 aa, Synthetic construct
RKPPGNVISVIQHTNSLSRPNSFERSESAELVACTQDKAPSPSETCDSEISEAPVSPEWAPPGDGAESGGKPSPSQQVQQ

SEQ ID NO: 1426 - protein, 80 aa, Synthetic construct
HPNTLLTNQNRTSNSKTSSIEECSSLPVFPTNDLLLKTVENGLCSSSFPNSGGPSQNFTSNSSRVSVISGPQNTRSSHLN

SEQ ID NO: 1427 - protein, 80 aa, Synthetic construct
KGEDAQPQEMASTSFPRASGPSPEFRQHGDSDGKRGSPQNLPIEHHFACKECGDTFRLKVLLVQHQRVHSEEKGWECGDC

SEQ ID NO: 1428 - protein, 80 aa, Synthetic construct
ASTSFPRASGPSPEFRQHGDSDGKRGSPQNLPIEHHFACKECGDTFRLKVLLVQHQRVHSEEKGWECGDCGKVFRGVAEF

SEQ ID NO: 1429 - protein, 80 aa, Synthetic construct
SDGKRGSPQNLPIEHHFACKECGDTFRLKVLLVQHQRVHSEEKGWECGDCGKVFRGVAEFNEHRKSHVAAEPQPGPSRAL

SEQ ID NO: 1430 - protein, 80 aa, Synthetic construct
LPIEHHFACKECGDTFRLKVLLVQHQRVHSEEKGWECGDCGKVFRGVAEFNEHRKSHVAAEPQPGPSRALENAAEKREQM

SEQ ID NO: 1431 - protein, 80 aa, Synthetic construct
VPPAGPEASESTTDENEDDIQFVSEGPLRPVLEYIDLVSSDDEEPSTSYTDRMPESKVPSSENHRPEMCSSCNVPLPIGD

SEQ ID NO: 1432 - protein, 80 aa, Synthetic construct
STTDENEDDIQFVSEGPLRPVLEYIDLVSSDDEEPSTSYTDRMPESKVPSSENHRPEMCSSCNVPLPIGDSSSFSGSCSS

SEQ ID NO: 1433 - protein, 80 aa, Synthetic construct
STKSQFGSPGPSDAARNLPLESTKSPAEPSKSVPSLEGPTGFQPRTPKPGSGSESGKERRTTSKEISVIQHTSSFEKSDS

SEQ ID NO: 1434 - protein, 80 aa, Synthetic construct
PSDAARNLPLESTKSPAEPSKSVPSLEGPTGFQPRTPKPGSGSESGKERRTTSKEISVIQHTSSFEKSDSLEQPSGLEGE

SEQ ID NO: 1435 - protein, 80 aa, Synthetic construct
ESTKSPAEPSKSVPSLEGPTGFQPRTPKPGSGSESGKERRTTSKEISVIQHTSSFEKSDSLEQPSGLEGEDKPLAQFPSP

SEQ ID NO: 1436 - protein, 80 aa, Synthetic construct
GFQPRTPKPGSGSESGKERRTTSKEISVIQHTSSFEKSDSLEQPSGLEGEDKPLAQFPSPPPAPHGRSAHSLQPKLVRQP

SEQ ID NO: 1437 - protein, 80 aa, Synthetic construct
SGSESGKERRTTSKEISVIQHTSSFEKSDSLEQPSGLEGEDKPLAQFPSPPPAPHGRSAHSLQPKLVRQPNIQVPEILVT

SEQ ID NO: 1438 - protein, 80 aa, Synthetic construct
TTSKEISVIQHTSSFEKSDSLEQPSGLEGEDKPLAQFPSPPPAPHGRSAHSLQPKLVRQPNIQVPEILVTEEPDRPDTEP

SEQ ID NO: 1439 - protein, 80 aa, Synthetic construct
LSSPYSMPPLPPSLFQAPPLPLQPTVLHPGQLHLPQLMPHPANIPFRQPPSFLPMPYPTSSALSSGFFLPLQSQFALQLP

SEQ ID NO: 1440 - protein, 80 aa, Synthetic construct
VVANNMVNDSEPEVDIPHSSSDSTIHENLTAIPPLIVAETTTVPSLENLRVVLDKALTDCGELALKQLHYLRPVVVLERS

SEQ ID NO: 1441 - protein, 80 aa, Synthetic construct
EPEVDIPHSSSDSTIHENLTAIPPLIVAETTTVPSLENLRVVLDKALTDCGELALKQLHYLRPVVVLERSKFSTPILDLF

SEQ ID NO: 1442 - protein, 80 aa, Synthetic construct
AAEWLARYWEMREQRTPTLKGKLVQKADQEQQDPLEYLQSDEEDDEKRGAQRRLQEQRERLHGALALIELANLTGAPLRQ

SEQ ID NO: 1443 - protein, 80 aa, Synthetic construct
AQCLVSISNRAAVPEHGVAPDAERLRLPEREVTKEHGDPGDTWKDYCTLVTIAKSLLDLNKYRPIQTPSVCSDSLESPDE

SEQ ID NO: 1444 - protein, 80 aa, Synthetic construct
AAVPEHGVAPDAERLRLPEREVTKEHGDPGDTWKDYCTLVTIAKSLLDLNKYRPIQTPSVCSDSLESPDEDMGSDSDVTT

SEQ ID NO: 1445 - protein, 80 aa, Synthetic construct
EVTKEHGDPGDTWKDYCTLVTIAKSLLDLNKYRPIQTPSVCSDSLESPDEDMGSDSDVTTESGSSPSHSPEERQDPGSAP

SEQ ID NO: 1446 - protein, 80 aa, Synthetic construct
NIHMKRKTIKNINTFENRMLMLDGMPAVRVKTELLESEQGSPNVHNYPDMEAVPLLLNNVKGEPPEDSLSVDHFQTQTEP

SEQ ID NO: 1447 - protein, 80 aa, Synthetic construct
NINTFENRMLMLDGMPAVRVKTELLESEQGSPNVHNYPDMEAVPLLLNNVKGEPPEDSLSVDHFQTQTEPVDLSINKART

SEQ ID NO: 1448 - protein, 80 aa, Synthetic construct
KTELLESEQGSPNVHNYPDMEAVPLLLNNVKGEPPEDSLSVDHFQTQTEPVDLSINKARTSPTAVSSSPVSMTASASSPS

SEQ ID NO: 1449 - protein, 80 aa, Synthetic construct
SPNVHNYPDMEAVPLLLNNVKGEPPEDSLSVDHFQTQTEPVDLSINKARTSPTAVSSSPVSMTASASSPSSTSTSSSSSS

SEQ ID NO: 1450 - protein, 80 aa, Synthetic construct
EAVPLLLNNVKGEPPEDSLSVDHFQTQTEPVDLSINKARTSPTAVSSSPVSMTASASSPSSTSTSSSSSSRLASSPTVIT

SEQ ID NO: 1451 - protein, 80 aa, Synthetic construct
VELLDQNSSIRVPREKMVYMTVNDSQPEDEDLNVAEIADEVYMEVIVGEEDAAAAAAAAAVHEQQMDDNEIKTFMPIAWA

SEQ ID NO: 1452 - protein, 80 aa, Synthetic construct
QHKNIQLQNSHIHLVARGPEQTMDPKLSTIMEQQISSAAQDKIELQRHGTGISVIQHTNSLSRPNSFDKPEPFERASPVS

SEQ ID NO: 1453 - protein, 80 aa, Synthetic construct
HIHLVARGPEQTMDPKLSTIMEQQISSAAQDKIELQRHGTGISVIQHTNSLSRPNSFDKPEPFERASPVSFQELNRTGKS

SEQ ID NO: 1454 - protein, 80 aa, Synthetic construct
QTMDPKLSTIMEQQISSAAQDKIELQRHGTGISVIQHTNSLSRPNSFDKPEPFERASPVSFQELNRTGKSGSLKVIGISQ

SEQ ID NO: 1455 - protein, 80 aa, Synthetic construct
MEQQISSAAQDKIELQRHGTGISVIQHTNSLSRPNSFDKPEPFERASPVSFQELNRTGKSGSLKVIGISQEESHPSRDGS

SEQ ID NO: 1456 - protein, 80 aa, Synthetic construct
DKIELQRHGTGISVIQHTNSLSRPNSFDKPEPFERASPVSFQELNRTGKSGSLKVIGISQEESHPSRDGSHPHQLALSDA

SEQ ID NO: 1457 - protein, 80 aa, Synthetic construct
SGRGEDSGCAALGDCKPLTAFLEPQNGFLHRGPTQPPPPHVSIKLEPASSFAVDFNEPLDFSQKGLALVQVKQENISFLS

SEQ ID NO: 1458 - protein, 80 aa, Synthetic construct
FLEPQNGFLHRGPTQPPPPHVSIKLEPASSFAVDFNEPLDFSQKGLALVQVKQENISFLSPSSLVPYDCSMEPIDLSIPK

SEQ ID NO: 1459 - protein, 80 aa, Synthetic construct
RGPTQPPPPHVSIKLEPASSFAVDFNEPLDFSQKGLALVQVKQENISFLSPSSLVPYDCSMEPIDLSIPKNFRKGDKDLA

SEQ ID NO: 1460 - protein, 80 aa, Synthetic construct
VSIKLEPASSFAVDFNEPLDFSQKGLALVQVKQENISFLSPSSLVPYDCSMEPIDLSIPKNFRKGDKDLATPSEAKKPEE

SEQ ID NO: 1461 - protein, 80 aa, Synthetic construct
FAVDFNEPLDFSQKGLALVQVKQENISFLSPSSLVPYDCSMEPIDLSIPKNFRKGDKDLATPSEAKKPEEEAGSSEQPSP

SEQ ID NO: 1462 - protein, 80 aa, Synthetic construct
LPRSMASSETQLGNHDVDPEISHVNFRMFSCPKESDPIQALRKLTELCHLWLRPDLHTKEQILDMLVMEQFMISMPQELQ

SEQ ID NO: 1463 - protein, 80 aa, Synthetic construct
QLGNHDVDPEISHVNFRMFSCPKESDPIQALRKLTELCHLWLRPDLHTKEQILDMLVMEQFMISMPQELQVLVMMNGVQS

SEQ ID NO: 1464 - protein, 80 aa, Synthetic construct
PLTFRDVAIEFSLEEWQCLDTAQQDLYRKVMLENYRNLVFLGIAVSKPDLVTCLEQGKDPWNMKGHSTVVKPPVICSHFA

SEQ ID NO: 1465 - protein, 80 aa, Synthetic construct
REKFNRMVEAVDRTIEKRIDKLTKELAQKTAELLEVRAAFVQLTQKKQEVQRRERALNRQVDVAVEMIAVLRQRLTESEE

SEQ ID NO: 1466 - protein, 80 aa, Synthetic construct
KLTKELAQKTAELLEVRAAFVQLTQKKQEVQRRERALNRQVDVAVEMIAVLRQRLTESEEELLRKEEEVVTFNHFLEAAA

SEQ ID NO: 1467 - protein, 80 aa, Synthetic construct
LTPPYSPSDFEPSQVSNLMAPAPSTVHFKSLSDTAKPHIAAPFKEEEKSPVSAPKLPKAQATSVIRHTADAQLCNHQTCP

SEQ ID NO: 1468 - protein, 80 aa, Synthetic construct
EPSQVSNLMAPAPSTVHFKSLSDTAKPHIAAPFKEEEKSPVSAPKLPKAQATSVIRHTADAQLCNHQTCPMKAASILNYQ

SEQ ID NO: 1469 - protein, 80 aa, Synthetic construct
PAPSTVHFKSLSDTAKPHIAAPFKEEEKSPVSAPKLPKAQATSVIRHTADAQLCNHQTCPMKAASILNYQNNSFRRRTHL

SEQ ID NO: 1470 - protein, 80 aa, Synthetic construct
APFKEEEKSPVSAPKLPKAQATSVIRHTADAQLCNHQTCPMKAASILNYQNNSFRRRTHLNVEAARKNIPCAAVSPNRSK

SEQ ID NO: 1471 - protein, 80 aa, Synthetic construct
VSAPKLPKAQATSVIRHTADAQLCNHQTCPMKAASILNYQNNSFRRRTHLNVEAARKNIPCAAVSPNRSKCERNTVADVD

SEQ ID NO: 1472 - protein, 80 aa, Synthetic construct
SLPGTLAKSEILETHGTMNFLGAETKNLQLLVPKTEICEEAEKPLIISERIQKADPQGPELGEACEKGNMLKRQRIKREK

SEQ ID NO: 1473 - protein, 80 aa, Synthetic construct
ILETHGTMNFLGAETKNLQLLVPKTEICEEAEKPLIISERIQKADPQGPELGEACEKGNMLKRQRIKREKKDFRQVIVND

SEQ ID NO: 1474 - protein, 80 aa, Synthetic construct
ARWTVDEVAEFVQSLLGCEEHAKCFKKEQIDGKAFLLLTQTDIVKVMKIKLGPALKIYNSILMFRHSQELPEEDIASGQE

SEQ ID NO: 1475 - protein, 80 aa, Synthetic construct
YNQLSRSTSGPRPGCQPSSPCVPKLSNSDSQDIQGRNRDSQNGAIAPGHVSVIRPPQNLYPENIVPSFSPGPSGRYGASG

SEQ ID NO: 1476 - protein, 80 aa, Synthetic construct
PRPGCQPSSPCVPKLSNSDSQDIQGRNRDSQNGAIAPGHVSVIRPPQNLYPENIVPSFSPGPSGRYGASGRSEGGRNSRV

SEQ ID NO: 1477 - protein, 80 aa, Synthetic construct
QDIQGRNRDSQNGAIAPGHVSVIRPPQNLYPENIVPSFSPGPSGRYGASGRSEGGRNSRVTPAAANYRSRTAKAKPSKQQ

SEQ ID NO: 1478 - protein, 80 aa, Synthetic construct
MMLLAVNGSNPEGEDPEREPVENEDYREKSSDDDEMDSSLVSQQPPDNQEKERLNTSIPQKRKMRNLLVTIENDTPLEEL

SEQ ID NO: 1479 - protein, 80 aa, Synthetic construct
PEGEDPEREPVENEDYREKSSDDDEMDSSLVSQQPPDNQEKERLNTSIPQKRKMRNLLVTIENDTPLEELSKYVDISIIA

SEQ ID NO: 1480 - protein, 80 aa, Synthetic construct
SDDDEMDSSLVSQQPPDNQEKERLNTSIPQKRKMRNLLVTIENDTPLEELSKYVDISIIALTRNRRTRRWYTCPLCGKQF

SEQ ID NO: 1481 - protein, 80 aa, Synthetic construct
VSQQPPDNQEKERLNTSIPQKRKMRNLLVTIENDTPLEELSKYVDISIIALTRNRRTRRWYTCPLCGKQFNESSYLISHQ

SEQ ID NO: 1482 - protein, 80 aa, Synthetic construct
KRKMRNLLVTIENDTPLEELSKYVDISIIALTRNRRTRRWYTCPLCGKQFNESSYLISHQRTHTGEKPYDCNHCGKSFNH

SEQ ID NO: 1483 - protein, 80 aa, Synthetic construct
MLATAPARGNMMSTSKPLAFSIERIMARTPEPKALPVPHFLQGALPKGEPKHSLHLNSSIPCMIPFVPVAYDTSPKAGVT

SEQ ID NO: 1484 - protein, 80 aa, Synthetic construct
MMSTSKPLAFSIERIMARTPEPKALPVPHFLQGALPKGEPKHSLHLNSSIPCMIPFVPVAYDTSPKAGVTGSEPRKASLE

SEQ ID NO: 1485 - protein, 80 aa, Synthetic construct
QTGHPAEKLSDLHNKEHSGGGKRALAPDLMPLDLSARSTRDDPSNKETASSLQAALVVHPCPYCSHKTYYPEVLWMHKRI

SEQ ID NO: 1486 - protein, 80 aa, Synthetic construct
PPWIQPNGYKSIRSNLVFLSRSGRTGPPPALGGKECQPLLLARFTRTQVPGGMPGSKSGSSPLGVVTKAASMPKNKESHS

SEQ ID NO: 1487 - protein, 80 aa, Synthetic construct
SIRSNLVFLSRSGRTGPPPALGGKECQPLLLARFTRTQVPGGMPGSKSGSSPLGVVTKAASMPKNKESHSGGPCALWAPG

SEQ ID NO: 1488 - protein, 80 aa, Synthetic construct
RYSKDTGLMSCGWCQKTPADGGSVDLPPVGHDELSRGTRNYKKTLLLRHHVSTEHKLHEANAQESEIPSEEGYCDFNSRP

SEQ ID NO: 1489 - protein, 80 aa, Synthetic construct
QLELVPAAGGGGAAVPGAPAAVVVAPPGYVVVQELMVLPAVAAPAVVAIPGPAGSAALTPARQRRRRRARDRPTICGECG

SEQ ID NO: 1490 - protein, 80 aa, Synthetic construct
MEPQSPGEVKKLQKGSSESPFDLTTKRKDEKPLTPVPSKPPVTPATSQDQPLDLSMGSRSRASGTKLTEPRKNHVFGGKK

SEQ ID NO: 1491 - protein, 80 aa, Synthetic construct
KLQKGSSESPFDLTTKRKDEKPLTPVPSKPPVTPATSQDQPLDLSMGSRSRASGTKLTEPRKNHVFGGKKGSNVESRPAS

SEQ ID NO: 1492 - protein, 80 aa, Synthetic construct
VRNRDPPEIEYRSNMTSPTLLDANPMENPALFNDIKIEPPEELLASDFSLPQVEPVDLSFHKPKAPLQPASMLQAPIRPP

SEQ ID NO: 1493 - protein, 80 aa, Synthetic construct
YRSNMTSPTLLDANPMENPALFNDIKIEPPEELLASDFSLPQVEPVDLSFHKPKAPLQPASMLQAPIRPPKPQSSPQTLV

SEQ ID NO: 1494 - protein, 80 aa, Synthetic construct
YPTIGQNGGSFTGPEPLLSENRIGEFSSTGSTLPDTDHMVKFVNGQMLYSCVVCKRSYVTLSSLRRHANVHSWRRTYPCH

SEQ ID NO: 1495 - protein, 80 aa, Synthetic construct
GTKWGEEALKMDLDNNFYSTEVSVSSTENAVSSDLRAGDVPVLSLSNSSENAASVISYSGSAPSVIVHSSQFSSVIMHSN

SEQ ID NO: 1496 - protein, 80 aa, Synthetic construct
MDLDNNFYSTEVSVSSTENAVSSDLRAGDVPVLSLSNSSENAASVISYSGSAPSVIVHSSQFSSVIMHSNAIAAMTSSNH

SEQ ID NO: 1497 - protein, 80 aa, Synthetic construct
EVSVSSTENAVSSDLRAGDVPVLSLSNSSENAASVISYSGSAPSVIVHSSQFSSVIMHSNAIAAMTSSNHRAFSDPAVSQ

SEQ ID NO: 1498 - protein, 80 aa, Synthetic construct
VSSDLRAGDVPVLSLSNSSENAASVISYSGSAPSVIVHSSQFSSVIMHSNAIAAMTSSNHRAFSDPAVSQSLKDDSKPEP

SEQ ID NO: 1499 - protein, 80 aa, Synthetic construct
PVLSLSNSSENAASVISYSGSAPSVIVHSSQFSSVIMHSNAIAAMTSSNHRAFSDPAVSQSLKDDSKPEPDKVGRFASRP

SEQ ID NO: 1500 - protein, 80 aa, Synthetic construct
NAASVISYSGSAPSVIVHSSQFSSVIMHSNAIAAMTSSNHRAFSDPAVSQSLKDDSKPEPDKVGRFASRPKSIKEKKKTT

SEQ ID NO: 1501 - protein, 80 aa, Synthetic construct
TACQTGVGAKKGRKKLYECQVCNSVFNSWDQFKDHLVIHTGDKPNHCTLCDLWFMQGNELRRHLSDAHNISERLVTEEVL

SEQ ID NO: 1502 - protein, 80 aa, Synthetic construct
KGRKKLYECQVCNSVFNSWDQFKDHLVIHTGDKPNHCTLCDLWFMQGNELRRHLSDAHNISERLVTEEVLSVETRVQTEP

SEQ ID NO: 1503 - protein, 80 aa, Synthetic construct
GDKPNHCTLCDLWFMQGNELRRHLSDAHNISERLVTEEVLSVETRVQTEPVTSMTIIEQVGKVHVLPLLQVQVDSAQVTV

SEQ ID NO: 1504 - protein, 80 aa, Synthetic construct
PASKVSKWSTDEVSEFIQSLPGCEEHGKVFKDEQIDGEAFLLMTQTDIVKIMSIKLGPALKIFNSILMFKAAEKNSHNEL

SEQ ID NO: 1505 - protein, 80 aa, Synthetic construct
PPQSMPSPATQLGNHDSDPETCHVNFRMFSCPKESDPIQALRKLTELCHLWLRPDLHTKEQILDMLVMEQFMISMPQELQ

SEQ ID NO: 1506 - protein, 80 aa, Synthetic construct
QLGNHDSDPETCHVNFRMFSCPKESDPIQALRKLTELCHLWLRPDLHTKEQILDMLVMEQFMISMPQELQVLVMMNGVQS

SEQ ID NO: 1507 - protein, 80 aa, Synthetic construct
PWSEEEEEEEEEEDVVLTSEMDFSPENGVFSPLATPSLIPQAALELKQAFREALQAVEATQGQQQQLRGMVPIVLVAKLG

SEQ ID NO: 1508 - protein, 80 aa, Synthetic construct
EEEDVVLTSEMDFSPENGVFSPLATPSLIPQAALELKQAFREALQAVEATQGQQQQLRGMVPIVLVAKLGPQVMAAARVP

SEQ ID NO: 1509 - protein, 80 aa, Synthetic construct
SPLATPSLIPQAALELKQAFREALQAVEATQGQQQQLRGMVPIVLVAKLGPQVMAAARVPPRLQPEELGLAGAHPLDFLL

SEQ ID NO: 1510 - protein, 80 aa, Synthetic construct
QAALELKQAFREALQAVEATQGQQQQLRGMVPIVLVAKLGPQVMAAARVPPRLQPEELGLAGAHPLDFLLLDAPLGGPLG

SEQ ID NO: 1511 - protein, 80 aa, Synthetic construct
DASAARGGEDTNDLQQKLEEVRQPPPRVRPVPSLVPRPPQTSLVKFVGNIYTLKCRFCEVEFQGPLSIQEEWVRHLQRHI

SEQ ID NO: 1512 - protein, 80 aa, Synthetic construct
TNDLQQKLEEVRQPPPRVRPVPSLVPRPPQTSLVKFVGNIYTLKCRFCEVEFQGPLSIQEEWVRHLQRHILEMNFSKADP

SEQ ID NO: 1513 - protein, 80 aa, Synthetic construct
RPVPSLVPRPPQTSLVKFVGNIYTLKCRFCEVEFQGPLSIQEEWVRHLQRHILEMNFSKADPPPEESQAPQAQTAAAEAP

SEQ ID NO: 1514 - protein, 80 aa, Synthetic construct
DGNTEPLPPDSGDKNLVIQKSKDEAQDNGATIMPIITESFSLSAEDYEMKKIIVTDSDDDDDDVIFCSEILPTKETLPSN

SEQ ID NO: 1515 - protein, 80 aa, Synthetic construct
SGDKNLVIQKSKDEAQDNGATIMPIITESFSLSAEDYEMKKIIVTDSDDDDDDVIFCSEILPTKETLPSNNTVAQVQSNP

SEQ ID NO: 1516 - protein, 80 aa, Synthetic construct
TIMPIITESFSLSAEDYEMKKIIVTDSDDDDDDVIFCSEILPTKETLPSNNTVAQVQSNPGPVAISDVAPSASNNSPPLT

SEQ ID NO: 1517 - protein, 80 aa, Synthetic construct
SKMAELFMECEEEELEPWQKKVKEVEDDDDDEPIFVGEISSSKPAISNILNRVNPSSYSRGLKNGALSRGITAAFKPTSQ

SEQ ID NO: 1518 - protein, 80 aa, Synthetic construct
LPPESTPAPPPPPPPPPPPGVGSGHLNIPLILEELRVLQQRQIHQMQMTEQICRQVLLLGSLGQTVGAPASPSELPGTGT

SEQ ID NO: 1519 - protein, 80 aa, Synthetic construct
SEPSAHTSTPSIGNSQPSTPAPALPVQDPQLLHHCQHCDMYFADNILYTIHMGCHGYENPFQCNICGCKCKNKYDFACHF

SEQ ID NO: 1520 - protein, 80 aa, Synthetic construct
PSEQKQLFCDEKQTTLKKDYDVKNEIVDRSAPKPKISGSIHYALKNVKIDLPKINIPNEVLLKHEVDKYRKLFQSKQQTA

SEQ ID NO: 1521 - protein, 80 aa, Synthetic construct
DVKNEIVDRSAPKPKISGSIHYALKNVKIDLPKINIPNEVLLKHEVDKYRKLFQSKQQTARKSISIKTVSCVEECTLLHK

SEQ ID NO: 1522 - protein, 80 aa, Synthetic construct
HYALKNVKIDLPKINIPNEVLLKHEVDKYRKLFQSKQQTARKSISIKTVSCVEECTLLHKSERAEEEGVKMSAKILNFSC

SEQ ID NO: 1523 - protein, 80 aa, Synthetic construct
KPDSLLASISLLNDKDGTLKAKSEIEEQYVLEKGQNIDGQNLYSNENQNLECATEKSKWEDFSNVDSPMMPRITSVFSLQ

SEQ ID NO: 1524 - protein, 80 aa, Synthetic construct
LLNDKDGTLKAKSEIEEQYVLEKGQNIDGQNLYSNENQNLECATEKSKWEDFSNVDSPMMPRITSVFSLQSQQASEFLPP

SEQ ID NO: 1525 - protein, 80 aa, Synthetic construct
AKSEIEEQYVLEKGQNIDGQNLYSNENQNLECATEKSKWEDFSNVDSPMMPRITSVFSLQSQQASEFLPPEVNQLLQDVL

SEQ ID NO: 1526 - protein, 80 aa, Synthetic construct
LEKGQNIDGQNLYSNENQNLECATEKSKWEDFSNVDSPMMPRITSVFSLQSQQASEFLPPEVNQLLQDVLKIKPDVKQDS

SEQ ID NO: 1527 - protein, 80 aa, Synthetic construct
NLYSNENQNLECATEKSKWEDFSNVDSPMMPRITSVFSLQSQQASEFLPPEVNQLLQDVLKIKPDVKQDSSNTPNKGLPL

SEQ ID NO: 1528 - protein, 80 aa, Synthetic construct
ECATEKSKWEDFSNVDSPMMPRITSVFSLQSQQASEFLPPEVNQLLQDVLKIKPDVKQDSSNTPNKGLPLHCDQSFQKHE

SEQ ID NO: 1529 - protein, 80 aa, Synthetic construct
DFSNVDSPMMPRITSVFSLQSQQASEFLPPEVNQLLQDVLKIKPDVKQDSSNTPNKGLPLHCDQSFQKHEREGKIVESSK

SEQ ID NO: 1530 - protein, 80 aa, Synthetic construct
KATLHRKCKEKAKPEDVRETFGFSRPRLSKDSIRTLRLFPFSSKQLVKCPRRNQPVVVLNHPDADAPEVVSVMKTIAKFN

SEQ ID NO: 1531 - protein, 80 aa, Synthetic construct
KAKPEDVRETFGFSRPRLSKDSIRTLRLFPFSSKQLVKCPRRNQPVVVLNHPDADAPEVVSVMKTIAKFNGHVLKVSLSK

SEQ ID NO: 1532 - protein, 80 aa, Synthetic construct
FGFSRPRLSKDSIRTLRLFPFSSKQLVKCPRRNQPVVVLNHPDADAPEVVSVMKTIAKFNGHVLKVSLSKRTINALLKPV

SEQ ID NO: 1533 - protein, 80 aa, Synthetic construct
EPQKNIQETKQVDDEDAELIFVGVEHVNEDAELIFVGVTSNSKPVVSNILNRVTPGSWSRRKKYDHLRKDTARKLQPKSH

SEQ ID NO: 1534 - protein, 80 aa, Synthetic construct
QVDDEDAELIFVGVEHVNEDAELIFVGVTSNSKPVVSNILNRVTPGSWSRRKKYDHLRKDTARKLQPKSHETVTSEAVTV

SEQ ID NO: 1535 - protein, 80 aa, Synthetic construct
GLELEGDKEKKGKIFHIDTNALHVPRDGAEVMSPLKNGMIEDWECFRAILDHTYSKHVKSEPNLHPVLMSEAPWNTRAKR

SEQ ID NO: 1536 - protein, 80 aa, Synthetic construct
KGKIFHIDTNALHVPRDGAEVMSPLKNGMIEDWECFRAILDHTYSKHVKSEPNLHPVLMSEAPWNTRAKREKLTELMFEQ

SEQ ID NO: 1537 - protein, 80 aa, Synthetic construct
EEESSSSSSDEDEDDRKQIDELLGKVVCVDYISLDKKKALWFPALVVCPDCSDEIAVKKDNILVRSFKDGKFTSVPRKDV

SEQ ID NO: 1538 - protein, 80 aa, Synthetic construct
LSSVISKIDLHKYLTVKDYLRDIDLICSNALEYNPDRDPGDRLIRHRACALRDTAYAIIKEELDEDFEQLCEEIQESRKK

SEQ ID NO: 1539 - protein, 80 aa, Synthetic construct
ENMVLCDGCDRGHHTYCVRPKLKTVPEGDWFCPECRPKQRSRRLSSRQRPSLESDEDVEDSMGGEDDEVDGDEEEGQSEE

SEQ ID NO: 1540 - protein, 80 aa, Synthetic construct
RGHHTYCVRPKLKTVPEGDWFCPECRPKQRSRRLSSRQRPSLESDEDVEDSMGGEDDEVDGDEEEGQSEEEEYEVEQDED

SEQ ID NO: 1541 - protein, 80 aa, Synthetic construct
AAEESSSQETSKGLGPNMSSTPAHEVGRRTSVLFSKKNPKTAGPPKRPGRPPKNRESQMTPSHGGSPVGPPQLPIMSSLR

SEQ ID NO: 1542 - protein, 80 aa, Synthetic construct
FLKPRKVEEDELLEKSPLQLGNEPLQRLLSDNGINRLSLMAPDTPAGTPLSGVGRRTSVLFKKAKNGVKLQRSPDRVLEN

SEQ ID NO: 1543 - protein, 80 aa, Synthetic construct
TDMHTSVPRVKGGQRNITDDSRDQPFIKKMHFTIRLTESASTYRDIVVKKEDGFTQIVLSTRSTEKNALNTEVIKEIVNA

SEQ ID NO: 1544 - protein, 80 aa, Synthetic construct
LPRLLDAKGIILEEMKVKSENLKEEPQSSEEESMSSVETRTLIKSEPVSPKNGVLPQATGDQKSGGKCETDRRMVAARTE

SEQ ID NO: 1545 - protein, 80 aa, Synthetic construct
GQQGWDRKYIVLEGSKVLIYDNEAREAGQRPVEEFELCLPDGDVSIHGAVGASELANTAKADVPYILKMESHPHTTCWPG

SEQ ID NO: 1546 - protein, 80 aa, Synthetic construct
MMEEDLQGASQVKEETDIAEQKSEPMEVDEKKPEVKVEVKEEEESSSNGTASQSTSPSQPRKKIFKPEELRQALMPTLEA

SEQ ID NO: 1547 - protein, 80 aa, Synthetic construct
QVKEETDIAEQKSEPMEVDEKKPEVKVEVKEEEESSSNGTASQSTSPSQPRKKIFKPEELRQALMPTLEALYRQDPESLP

SEQ ID NO: 1548 - protein, 80 aa, Synthetic construct
KKPEVKVEVKEEEESSSNGTASQSTSPSQPRKKIFKPEELRQALMPTLEALYRQDPESLPFRQPVDPQLLGIPDYFDIVK

SEQ ID NO: 1549 - protein, 80 aa, Synthetic construct
HHEIIWPAGFVCDGCLKKSARTRKENKFSAKRLPSTRLGTFLENRVNDFLRRQNHPESGEVTVRVVHASDKTVEVKPGMK

SEQ ID NO: 1550 - protein, 80 aa, Synthetic construct
DPYRAVVKVSTCWEGPWQGRTLVPPGRPRGARDSRSLQKTWVGVAPAPLSASILSQKPGRWCAVHVQIAWQIYRHQQKIK

SEQ ID NO: 1551 - protein, 80 aa, Synthetic construct
TLVPPGRPRGARDSRSLQKTWVGVAPAPLSASILSQKPGRWCAVHVQIAWQIYRHQQKIKEMQLDPHKLEVGAKLDLFGR

SEQ ID NO: 1552 - protein, 80 aa, Synthetic construct
ARDSRSLQKTWVGVAPAPLSASILSQKPGRWCAVHVQIAWQIYRHQQKIKEMQLDPHKLEVGAKLDLFGRPPAPGVFAGF

SEQ ID NO: 1553 - protein, 80 aa, Synthetic construct
WVGVAPAPLSASILSQKPGRWCAVHVQIAWQIYRHQQKIKEMQLDPHKLEVGAKLDLFGRPPAPGVFAGFHYPQDLARPL

SEQ ID NO: 1554 - protein, 80 aa, Synthetic construct
LQRPVHHVVPPSTVTEDYLRSFRPYHTTDDLRMSSLPPLGLDPATAAAYYHPSYLAPHPFPHPAFRMDDSYCLSALRSPF

SEQ ID NO: 1555 - protein, 80 aa, Synthetic construct
SFRPYHTTDDLRMSSLPPLGLDPATAAAYYHPSYLAPHPFPHPAFRMDDSYCLSALRSPFYPIPTPGSLPPLHPSAMHLH

SEQ ID NO: 1556 - protein, 80 aa, Synthetic construct
LRMSSLPPLGLDPATAAAYYHPSYLAPHPFPHPAFRMDDSYCLSALRSPFYPIPTPGSLPPLHPSAMHLHLSGVRYPPEL

SEQ ID NO: 1557 - protein, 80 aa, Synthetic construct
LDPATAAAYYHPSYLAPHPFPHPAFRMDDSYCLSALRSPFYPIPTPGSLPPLHPSAMHLHLSGVRYPPELSHSSLAALHS

SEQ ID NO: 1558 - protein, 80 aa, Synthetic construct
TPRCPSPEPPVTQRGCCSSYPPTKGGGLGPCGKCQEGLEGGASGASEPSEEVNKASGPRACPPSHHTKLKKTWLTRHSEQ

SEQ ID NO: 1559 - protein, 80 aa, Synthetic construct
PPTKGGGLGPCGKCQEGLEGGASGASEPSEEVNKASGPRACPPSHHTKLKKTWLTRHSEQFECPRGCPEVEERPVARLRA

SEQ ID NO: 1560 - protein, 80 aa, Synthetic construct
CGKCQEGLEGGASGASEPSEEVNKASGPRACPPSHHTKLKKTWLTRHSEQFECPRGCPEVEERPVARLRALKRAGSPEVQ

SEQ ID NO: 1561 - protein, 80 aa, Synthetic construct
DIDSLNPVLRDNPQLHEEVKVWVKEQKVQEIFMQGPYSLNGYRVRVYRQDSATQWFTGIITHHDLFTRTMIVMNDQVLEP

SEQ ID NO: 1562 - protein, 80 aa, Synthetic construct
AAQYKSSNASETEPNAIKNQTLSASLPLDSTVICSTINKANSVGNGQASQTSQPNYHTKLKKAWLTRHSEEDKNTNKMEN

SEQ ID NO: 1563 - protein, 80 aa, Synthetic construct
ETEPNAIKNQTLSASLPLDSTVICSTINKANSVGNGQASQTSQPNYHTKLKKAWLTRHSEEDKNTNKMENSGNSVSEIIK

SEQ ID NO: 1564 - protein, 80 aa, Synthetic construct
TLSASLPLDSTVICSTINKANSVGNGQASQTSQPNYHTKLKKAWLTRHSEEDKNTNKMENSGNSVSEIIKPCSVNLIAST

SEQ ID NO: 1565 - protein, 80 aa, Synthetic construct
TVICSTINKANSVGNGQASQTSQPNYHTKLKKAWLTRHSEEDKNTNKMENSGNSVSEIIKPCSVNLIASTSSDIQNSVDS

SEQ ID NO: 1566 - protein, 80 aa, Synthetic construct
NSVGNGQASQTSQPNYHTKLKKAWLTRHSEEDKNTNKMENSGNSVSEIIKPCSVNLIASTSSDIQNSVDSKIIVDKYVKD

SEQ ID NO: 1567 - protein, 80 aa, Synthetic construct
MPDWHHHCQVIMRSCSGINFEEFYHFLKVIAEKRLLVLREAAAEDGAGLGFEQAAFDVGRITEVLASLVAHPDFQRVDTS

SEQ ID NO: 1568 - protein, 80 aa, Synthetic construct
PHVYSTPKHYIRFTSPFLSEKRRRKEPTENISGSCKKRWLKQALEEENSAILHRFNSPCQERSRSPAVNGENKSPLLLND

SEQ ID NO: 1569 - protein, 80 aa, Synthetic construct
ISGSCKKRWLKQALEEENSAILHRFNSPCQERSRSPAVNGENKSPLLLNDSCSLPDLTTPLKKRRFYQLLDSVYSETSTP

SEQ ID NO: 1570 - protein, 80 aa, Synthetic construct
ARPDTSPLWLQWLPQPQPRVRPRKRRRPRPRRAPVLSTHHAARVSLHRWGGCGPHCRLRGEALVALGQPPHARWAPQQDW

SEQ ID NO: 1571 - protein, 80 aa, Synthetic construct
RPRKRRRPRPRRAPVLSTHHAARVSLHRWGGCGPHCRLRGEALVALGQPPHARWAPQQDWHWARRYGLPYVVRVDLRRLA

SEQ ID NO: 1572 - protein, 80 aa, Synthetic construct
AARVSLHRWGGCGPHCRLRGEALVALGQPPHARWAPQQDWHWARRYGLPYVVRVDLRRLAPAPPATPAPAGTPGPILIPK

SEQ ID NO: 1573 - protein, 80 aa, Synthetic construct
GCGPHCRLRGEALVALGQPPHARWAPQQDWHWARRYGLPYVVRVDLRRLAPAPPATPAPAGTPGPILIPKQALAFAPFSP

SEQ ID NO: 1574 - protein, 80 aa, Synthetic construct
EALVALGQPPHARWAPQQDWHWARRYGLPYVVRVDLRRLAPAPPATPAPAGTPGPILIPKQALAFAPFSPPKRLRLVVSH

SEQ ID NO: 1575 - protein, 80 aa, Synthetic construct
HARWAPQQDWHWARRYGLPYVVRVDLRRLAPAPPATPAPAGTPGPILIPKQALAFAPFSPPKRLRLVVSHGSIDLDVGGE

SEQ ID NO: 1576 - protein, 80 aa, Synthetic construct
RWAPQQDWHWARRYGLPYVVRVDLRRLAPAPPATPAPAGTPGPILIPKQALAFAPFSPPKRLRLVVSHGSIDLDVGGEEL

SEQ ID NO: 1577 - protein, 80 aa, Synthetic construct
TEELAEVEEGVGVVGEDNDAAARGAEAFGDSEEDGEDVFEVEKILDMKTEGGKVLYKVRWKGYTSDDDTWEPEIHLEDCK

SEQ ID NO: 1578 - protein, 80 aa, Synthetic construct
AARGAEAFGDSEEDGEDVFEVEKILDMKTEGGKVLYKVRWKGYTSDDDTWEPEIHLEDCKEVLLEFRKKIAENKAKAVRK

SEQ ID NO: 1579 - protein, 80 aa, Synthetic construct
SEEDGEDVFEVEKILDMKTEGGKVLYKVRWKGYTSDDDTWEPEIHLEDCKEVLLEFRKKIAENKAKAVRKDIQRLSLNND

SEQ ID NO: 1580 - protein, 80 aa, Synthetic construct
LESAAEVGFVRFFQGMPEKPTTTVRLFDRGDFYTAHGEDALLAAREVFKTQGVIKYMGPAGAKNLQSVVLSKMNFESFVK

SEQ ID NO: 1581 - protein, 80 aa, Synthetic construct
PGQRGHEGIMYFVEKCEAGTENWQRVNTELPVKSPRFALFDLAEGKSYCFRVRCSNSAGVGEPSEATEVTVVGDKLDIPK

SEQ ID NO: 1582 - protein, 80 aa, Synthetic construct
FPSYLLGGRSGALKNFVIPKIKRDKDGNVTQETKKMEMKGEPKDKVEKIGLVEDLNKGAKPVVVLQKLSLDDVQKLIKDR

SEQ ID NO: 1583 - protein, 80 aa, Synthetic construct
IKRDKDGNVTQETKKMEMKGEPKDKVEKIGLVEDLNKGAKPVVVLQKLSLDDVQKLIKDREDKSRSSLKPIKNKPSKSNK

SEQ ID NO: 1584 - protein, 80 aa, Synthetic construct
QETKKMEMKGEPKDKVEKIGLVEDLNKGAKPVVVLQKLSLDDVQKLIKDREDKSRSSLKPIKNKPSKSNKGSIDQSVLKE

SEQ ID NO: 1585 - protein, 80 aa, Synthetic construct
RTCSRLFGALLERGELFVGQLPSEEMVMTGSQGATRKYKVWMRHRYHSCCNRLGELLGHPSFQVKELALSALLKFVQLEG

SEQ ID NO: 1586 - protein, 80 aa, Synthetic construct
LERGELFVGQLPSEEMVMTGSQGATRKYKVWMRHRYHSCCNRLGELLGHPSFQVKELALSALLKFVQLEGAHPLEKSKWE

SEQ ID NO: 1587 - protein, 80 aa, Synthetic construct
LKENVCQNCEKLGELLLCEAQCCGAFHLECLGLTEMPRGKFICNECRTGIHTCFVCKQSGEDVKRCLLPLCGKFYHEECV

SEQ ID NO: 1588 - protein, 80 aa, Synthetic construct
TDKHSLRKRDTITDKTARTSSYKAMEAASSLKSQAATKNLSDACKPLKKRNRASTAASSALGFSKSSSPSASLTENEVSD

SEQ ID NO: 1589 - protein, 80 aa, Synthetic construct
SYKAMEAASSLKSQAATKNLSDACKPLKKRNRASTAASSALGFSKSSSPSASLTENEVSDSPGDEPSESPYESADETQTE

SEQ ID NO: 1590 - protein, 80 aa, Synthetic construct
SPEATSGSTGSVEKKQQRRSIRTRSESEKSTEVVPKKKIKKEQVETVPQATVKTGLQKGASEISDSCKPLKKRSRASTDV

SEQ ID NO: 1591 - protein, 80 aa, Synthetic construct
SVEKKQQRRSIRTRSESEKSTEVVPKKKIKKEQVETVPQATVKTGLQKGASEISDSCKPLKKRSRASTDVEMTSSAYRDT

SEQ ID NO: 1592 - protein, 80 aa, Synthetic construct
IRTRSESEKSTEVVPKKKIKKEQVETVPQATVKTGLQKGASEISDSCKPLKKRSRASTDVEMTSSAYRDTSDSDSRGLSD

SEQ ID NO: 1593 - protein, 80 aa, Synthetic construct
LGTLTQLDICSSAPEDCTSFSINASPGVVVDIAHGPPAKKKSTGSSTWPLDPGVEVTLTMKVASGSTGDQKVQISYYGPK

SEQ ID NO: 1594 - protein, 80 aa, Synthetic construct
PITGYMFGKGIYFADMSSKSANYCFASRLKNTGLLLLSEVALGQCNELLEANPKAEGLLQGKHSTKGLGKMAPSSAHFVT

SEQ ID NO: 1595 - protein, 80 aa, Synthetic construct
IYFADMSSKSANYCFASRLKNTGLLLLSEVALGQCNELLEANPKAEGLLQGKHSTKGLGKMAPSSAHFVTLNGSTVPLGP

SEQ ID NO: 1596 - protein, 80 aa, Synthetic construct
ANYCFASRLKNTGLLLLSEVALGQCNELLEANPKAEGLLQGKHSTKGLGKMAPSSAHFVTLNGSTVPLGPASDTGILNPD

SEQ ID NO: 1597 - protein, 80 aa, Synthetic construct
NTGLLLLSEVALGQCNELLEANPKAEGLLQGKHSTKGLGKMAPSSAHFVTLNGSTVPLGPASDTGILNPDGYTLNYNEYI

SEQ ID NO: 1598 - protein, 80 aa, Synthetic construct
EEEEEEEEEEEEEEEEEEDFEEEEEDEEEYFEEEEEEEEEFEEEFEEEEGELEEEEEEEDEEEEEELEEVEDLEFGTAGG

SEQ ID NO: 1599 - protein, 80 aa, Synthetic construct
EESQMHLLNSEHLATQAEQQEWLCSVVALQCSILKHLSAKQMPSHWDSEQTEKADIKPVIVTDSSVTTSLQTADKTPTPS

SEQ ID NO: 1600 - protein, 80 aa, Synthetic construct
ICCVCLGDNSEDADEIIQCDNCGITVHEGCYGVDGESDSIMSSASENSTEPWFCDACKCGVSPSCELCPNQDGIFKETDA

SEQ ID NO: 1601 - protein, 80 aa, Synthetic construct
PLPKACSNPSQQVRSRPWSRHHSKASWAEFSILRELLAQDVLCDVSKPYRLATPVYASLTPRSRPRPPKDSQASPGRPSS

SEQ ID NO: 1602 - protein, 80 aa, Synthetic construct
QQVRSRPWSRHHSKASWAEFSILRELLAQDVLCDVSKPYRLATPVYASLTPRSRPRPPKDSQASPGRPSSVEEVRIAASP

SEQ ID NO: 1603 - protein, 80 aa, Synthetic construct
LAMGFLGSRKAPPPLAAALAHEAVSQLLQTDLSEFRKLPREEEEEEEDDDEEEKAPVTLLDAQSLAQSFFNRLWEVAGQW

SEQ ID NO: 1604 - protein, 80 aa, Synthetic construct
APPPLAAALAHEAVSQLLQTDLSEFRKLPREEEEEEEDDDEEEKAPVTLLDAQSLAQSFFNRLWEVAGQWQKQVPLAARA

SEQ ID NO: 1605 - protein, 80 aa, Synthetic construct
GDRPKILMDSPEDADLFHSEEIKAPEKEEFLAWQHDLEVNDKAPAQARPTVFRWTGGGKEVYLSGSFNNWSKLPLTRSHN

SEQ ID NO: 1606 - protein, 80 aa, Synthetic construct
PEDADLFHSEEIKAPEKEEFLAWQHDLEVNDKAPAQARPTVFRWTGGGKEVYLSGSFNNWSKLPLTRSHNNFVAILDLPE

SEQ ID NO: 1607 - protein, 80 aa, Synthetic construct
LAWQHDLEVNDKAPAQARPTVFRWTGGGKEVYLSGSFNNWSKLPLTRSHNNFVAILDLPEGEHQYKFFVDGQWTHDPSEP

SEQ ID NO: 1608 - protein, 80 aa, Synthetic construct
SEGAGGHAPGKEHKIMVGSTDDPSVFSLPDSKLPGDKEFVSWQQDLEDSVKPTQQARPTVIRWSEGGKEVFISGSFNNWS

SEQ ID NO: 1609 - protein, 80 aa, Synthetic construct
KEHKIMVGSTDDPSVFSLPDSKLPGDKEFVSWQQDLEDSVKPTQQARPTVIRWSEGGKEVFISGSFNNWSTKIPLIKSHN

SEQ ID NO: 1610 - protein, 80 aa, Synthetic construct
DDPSVFSLPDSKLPGDKEFVSWQQDLEDSVKPTQQARPTVIRWSEGGKEVFISGSFNNWSTKIPLIKSHNDFVAILDLPE

SEQ ID NO: 1611 - protein, 80 aa, Synthetic construct
SKLPGDKEFVSWQQDLEDSVKPTQQARPTVIRWSEGGKEVFISGSFNNWSTKIPLIKSHNDFVAILDLPEGEHQYKFFVD

SEQ ID NO: 1612 - protein, 80 aa, Synthetic construct
SWQQDLEDSVKPTQQARPTVIRWSEGGKEVFISGSFNNWSTKIPLIKSHNDFVAILDLPEGEHQYKFFVDGQWVHDPSEP

SEQ ID NO: 1613 - protein, 80 aa, Synthetic construct
KPTQQARPTVIRWSEGGKEVFISGSFNNWSTKIPLIKSHNDFVAILDLPEGEHQYKFFVDGQWVHDPSEPVVTSQLGTIN

SEQ ID NO: 1614 - protein, 80 aa, Synthetic construct
FNEDEDINDQIQNAAFMYPASPWSHISAGAIDLINNLLQVKMRKRYSVDKSLSHPWLQEYQTWLDLRELEGKMGERYITH

SEQ ID NO: 1615 - protein, 80 aa, Synthetic construct
IQNAAFMYPASPWSHISAGAIDLINNLLQVKMRKRYSVDKSLSHPWLQEYQTWLDLRELEGKMGERYITHESDDARWEQF

SEQ ID NO: 1616 - protein, 80 aa, Synthetic construct
IDLINNLLQVKMRKRYSVDKSLSHPWLQEYQTWLDLRELEGKMGERYITHESDDARWEQFAAEHPLPGSGLPTDRDLGGA

SEQ ID NO: 1617 - protein, 80 aa, Synthetic construct
KMRKRYSVDKSLSHPWLQEYQTWLDLRELEGKMGERYITHESDDARWEQFAAEHPLPGSGLPTDRDLGGACPPQDHDMQG

SEQ ID NO: 1618 - protein, 80 aa, Synthetic construct
DKSLSHPWLQEYQTWLDLRELEGKMGERYITHESDDARWEQFAAEHPLPGSGLPTDRDLGGACPPQDHDMQGLAERISVL

SEQ ID NO: 1619 - protein, 80 aa, Synthetic construct
TRALWGARSPKRPRLQLPGAPSPLEKASRRVLAVVLEDVMAVHMVPVVPSKQTSIPQHHSYHQDPVHRQPPASPPRQAGW

SEQ ID NO: 1620 - protein, 80 aa, Synthetic construct
KRPRLQLPGAPSPLEKASRRVLAVVLEDVMAVHMVPVVPSKQTSIPQHHSYHQDPVHRQPPASPPRQAGWSSQARPPDPL

SEQ ID NO: 1621 - protein, 80 aa, Synthetic construct
FRKPLSQLTNQPPCLDSSQHEAFIRSILSKPFKVPIPNYQGPLGSRALGLKRAGVRRALHDPLEKDALVLYEPPPLSAHD

SEQ ID NO: 1622 - protein, 80 aa, Synthetic construct
MLTNTGKYAIPTIDAEAYAIGKKEKPPFLPEEPSSSSEEDDPIPDELLCLICKDIMTDAVVIPCCGNSYCDECIRTALLE

SEQ ID NO: 1623 - protein, 80 aa, Synthetic construct
GKKEKPPFLPEEPSSSSEEDDPIPDELLCLICKDIMTDAVVIPCCGNSYCDECIRTALLESDEHTCPTCHQNDVSPDALI

SEQ ID NO: 1624 - protein, 80 aa, Synthetic construct
AVVSPLVLSEVKTLSVKGITPAVLPETVYPVIKEGSVCSLQNQLAENAKATAALKVDVSGPVASTATSTKIFPLTQKEKQ

SEQ ID NO: 1625 - protein, 80 aa, Synthetic construct
VKTLSVKGITPAVLPETVYPVIKEGSVCSLQNQLAENAKATAALKVDVSGPVASTATSTKIFPLTQKEKQNESTNGNSEV

SEQ ID NO: 1626 - protein, 80 aa, Synthetic construct
TPNVNQGKHNKLESAIHSPMNDQQISQESRNSTVVSSDTLQIDNICSLVEGDTSYNSQIAKIFSSLPLKMVEPQKPSLPN

SEQ ID NO: 1627 - protein, 80 aa, Synthetic construct
NDQQISQESRNSTVVSSDTLQIDNICSLVEGDTSYNSQIAKIFSSLPLKMVEPQKPSLPNQQGIGSREPEKQLDNTTENK

SEQ ID NO: 1628 - protein, 80 aa, Synthetic construct
NSTVVSSDTLQIDNICSLVEGDTSYNSQIAKIFSSLPLKMVEPQKPSLPNQQGIGSREPEKQLDNTTENKDFGFQKDKPV

SEQ ID NO: 1629 - protein, 80 aa, Synthetic construct
VILEKSSLEHATEKSTANDTCSSAAIQEDIYPQEIDASSNYTPQDPARNEIHSDKAPVLYLHDQLSELLKEFPYGIEAVN

SEQ ID NO: 1630 - protein, 80 aa, Synthetic construct
ATEKSTANDTCSSAAIQEDIYPQEIDASSNYTPQDPARNEIHSDKAPVLYLHDQLSELLKEFPYGIEAVNTREGSVGQQT

SEQ ID NO: 1631 - protein, 80 aa, Synthetic construct
CSSAAIQEDIYPQEIDASSNYTPQDPARNEIHSDKAPVLYLHDQLSELLKEFPYGIEAVNTREGSVGQQTTYQTSEDQTA

SEQ ID NO: 1632 - protein, 80 aa, Synthetic construct
YPQEIDASSNYTPQDPARNEIHSDKAPVLYLHDQLSELLKEFPYGIEAVNTREGSVGQQTTYQTSEDQTADKTSSDSKDP

SEQ ID NO: 1633 - protein, 80 aa, Synthetic construct
IHSDKAPVLYLHDQLSELLKEFPYGIEAVNTREGSVGQQTTYQTSEDQTADKTSSDSKDPADQIQITILSSEQMKEIFPE

SEQ ID NO: 1634 - protein, 80 aa, Synthetic construct
LHDQLSELLKEFPYGIEAVNTREGSVGQQTTYQTSEDQTADKTSSDSKDPADQIQITILSSEQMKEIFPEQDDQPYVVDK

SEQ ID NO: 1635 - protein, 80 aa, Synthetic construct
EFPYGIEAVNTREGSVGQQTTYQTSEDQTADKTSSDSKDPADQIQITILSSEQMKEIFPEQDDQPYVVDKLAEPQKEEPI

SEQ ID NO: 1636 - protein, 80 aa, Synthetic construct
TREGSVGQQTTYQTSEDQTADKTSSDSKDPADQIQITILSSEQMKEIFPEQDDQPYVVDKLAEPQKEEPITEVVSQCDLQ

SEQ ID NO: 1637 - protein, 80 aa, Synthetic construct
TYQTSEDQTADKTSSDSKDPADQIQITILSSEQMKEIFPEQDDQPYVVDKLAEPQKEEPITEVVSQCDLQAPAAGQSRDS

SEQ ID NO: 1638 - protein, 80 aa, Synthetic construct
DKTSSDSKDPADQIQITILSSEQMKEIFPEQDDQPYVVDKLAEPQKEEPITEVVSQCDLQAPAAGQSRDSVILDSEKDDI

SEQ ID NO: 1639 - protein, 80 aa, Synthetic construct
ADQIQITILSSEQMKEIFPEQDDQPYVVDKLAEPQKEEPITEVVSQCDLQAPAAGQSRDSVILDSEKDDIHCCALGWLSM

SEQ ID NO: 1640 - protein, 80 aa, Synthetic construct
PPNSQGFAPHYDDIEAFVLQLEGRKLWRVYRPRVPTEELALTSSPNFSQDDLGEPVLQTVLEPGDLLYFPRGFIHQAECQ

SEQ ID NO: 1641 - protein, 80 aa, Synthetic construct
YDDIEAFVLQLEGRKLWRVYRPRVPTEELALTSSPNFSQDDLGEPVLQTVLEPGDLLYFPRGFIHQAECQDGVHSLHLTL

SEQ ID NO: 1642 - protein, 80 aa, Synthetic construct
MSQAVQTNGTQPLSKTWELSLYELQRTPQEAITDGLEIVVSPRSLHSELMCPICLDMLKNTMTTKECLHRFCADCIITAL

SEQ ID NO: 1643 - protein, 80 aa, Synthetic construct
LYELQRTPQEAITDGLEIVVSPRSLHSELMCPICLDMLKNTMTTKECLHRFCADCIITALRSGNKECPTCRKKLVSKRSL

SEQ ID NO: 1644 - protein, 80 aa, Synthetic construct
PIKVEVKECRADPKDTKSSMEKPVAQEPERIEFGGNIKSSHEITEKSTEETEKLKNDQQAKIPLKKREIKLSDDFDSPVK

SEQ ID NO: 1645 - protein, 80 aa, Synthetic construct
EKPVAQEPERIEFGGNIKSSHEITEKSTEETEKLKNDQQAKIPLKKREIKLSDDFDSPVKGPLCKSVTPTKEFLKDEIKQ

SEQ ID NO: 1646 - protein, 80 aa, Synthetic construct
TEKLKNDQQAKIPLKKREIKLSDDFDSPVKGPLCKSVTPTKEFLKDEIKQEEETCKRISTITALGHEGKQLVNGEVSDER

SEQ ID NO: 1647 - protein, 80 aa, Synthetic construct
ESEGSGSEKSSAASEEEEEKESEEAILADDDEPCKKCGLPNHPELILLCDSCDSGYHTACLRPPLMIIPDGEWFCPPCQH

SEQ ID NO: 1648 - protein, 80 aa, Synthetic construct
ESEEAILADDDEPCKKCGLPNHPELILLCDSCDSGYHTACLRPPLMIIPDGEWFCPPCQHKLLCEKLEEQLQDLDVALKK

SEQ ID NO: 1649 - protein, 80 aa, Synthetic construct
GCPPGRKEKPSDPVEWTVMDVVEYFTEAGFPEQATAFQEQEIDGKSLLLMQRTDVLTGLSIRLGPALKIYEHHIKVLQQG

SEQ ID NO: 1650 - protein, 80 aa, Synthetic construct
RGQRVPLYLSKAPQQMMGSLKLLPPPPIMSARVLPRPSPSRGPSTAWLSGPELIALTGLLQMSQGEPRPSSSAVGPPDHT

SEQ ID NO: 1651 - protein, 80 aa, Synthetic construct
KAPQQMMGSLKLLPPPPIMSARVLPRPSPSRGPSTAWLSGPELIALTGLLQMSQGEPRPSSSAVGPPDHTSDPPSPCGSP

SEQ ID NO: 1652 - protein, 80 aa, Synthetic construct
KLLPPPPIMSARVLPRPSPSRGPSTAWLSGPELIALTGLLQMSQGEPRPSSSAVGPPDHTSDPPSPCGSPSSSQGADLSL

SEQ ID NO: 1653 - protein, 80 aa, Synthetic construct
SARVLPRPSPSRGPSTAWLSGPELIALTGLLQMSQGEPRPSSSAVGPPDHTSDPPSPCGSPSSSQGADLSLPQTPDTHCP

SEQ ID NO: 1654 - protein, 80 aa, Synthetic construct
SDDDGGDSPVQDIDTPEVDLYQLQVNTLRRYKRHFKLPTRPGLNKAQLVEIVGCHFRSIPVNEKDTLTYFIYSVKNDKNK

SEQ ID NO: 1655 - protein, 80 aa, Synthetic construct
PNPPAVPLQVDSTPKMKMEIGDTLSTAEESSPPKSRVELGKIHFKKHLLHVTSRPLLATTTAVASPPTHAAPLPAVIAES

SEQ ID NO: 1656 - protein, 80 aa, Synthetic construct
PFIPERRRRPLLPDGTFSSCKKRWIKQALEEGMTQTSSVPQETRTQHLYQSNENSSSSSICKDNADLLSPLKKWKSRYLM

SEQ ID NO: 1657 - protein, 80 aa, Synthetic construct
KKRWIKQALEEGMTQTSSVPQETRTQHLYQSNENSSSSSICKDNADLLSPLKKWKSRYLMEQNVTKLLRPLSPVTPPPPN

SEQ ID NO: 1658 - protein, 80 aa, Synthetic construct
LHLDSNPLKWSVADVVRFIRSTDCAPLARIFLDQEIDGQALLLLTLPTVQECMDLKLGPAIKLCHHIERIKFAFYEQFAN

SEQ ID NO: 1659 - protein, 80 aa, Synthetic construct
DAHSTTSSASPAQSPCYSNQSDDGSDTEMASGSNRTPVFSFLDLTYWKRQKICCGIIYKGRFGEVLIDTHLFKPCCSNKK

SEQ ID NO: 1660 - protein, 80 aa, Synthetic construct
PAQSPCYSNQSDDGSDTEMASGSNRTPVFSFLDLTYWKRQKICCGIIYKGRFGEVLIDTHLFKPCCSNKKAAAEKPEEQG

SEQ ID NO: 1661 - protein, 80 aa, Synthetic construct
SDDGSDTEMASGSNRTPVFSFLDLTYWKRQKICCGIIYKGRFGEVLIDTHLFKPCCSNKKAAAEKPEEQGPEPLPISTQE

SEQ ID NO: 1662 - protein, 80 aa, Synthetic construct
ESQGLPTMARRNDDISELEDLSELEDLKDAKLQTLKELFPQRSDNDLLKLIESTSTMDGAIAAALLMFGDAGGGPRKRKL

SEQ ID NO: 1663 - protein, 80 aa, Synthetic construct
LSELEDLKDAKLQTLKELFPQRSDNDLLKLIESTSTMDGAIAAALLMFGDAGGGPRKRKLSSSSEPYEEDEFNDDQSIKK

SEQ ID NO: 1664 - protein, 80 aa, Synthetic construct
QKRKERKAQRQAAKNQMYDDYYYYGPPHMPPPTRGRGRGGRGGYGYPPDYYGYEDYYDYYGYDYHNYRGGYEDPYYGYED

SEQ ID NO: 1665 - protein, 80 aa, Synthetic construct
RPKTPPPAPAPAPGPMLVSPAPVPLPLLAQAAAGPALLPSPGPAASGASAKAPVRSVVTETVSTYVIRDEWGNQIWICPG

SEQ ID NO: 1666 - protein, 80 aa, Synthetic construct
APVPLPLLAQAAAGPALLPSPGPAASGASAKAPVRSVVTETVSTYVIRDEWGNQIWICPGCNKPDDGSPMIGCDDCDDWY

SEQ ID NO: 1667 - protein, 80 aa, Synthetic construct
AVPCDDKIFYNSGPKRRSGPIKPEKILESSIPMEYAKMWKPGDECFALYWEDNKFYRAEVEALHSSGMTAVVKFIDYGNY

SEQ ID NO: 1668 - protein, 80 aa, Synthetic construct
HKEKEKTKHKDGSSEKHKDKHKDRDKEKRKEEKVRASGDAKIKKEKENGFSSPPQIKDEPEDDGYFVPPKEDIKPLKRPR

SEQ ID NO: 1669 - protein, 80 aa, Synthetic construct
HKDRDKEKRKEEKVRASGDAKIKKEKENGFSSPPQIKDEPEDDGYFVPPKEDIKPLKRPRDEDDADYKPKKIKTEDTKKE

SEQ ID NO: 1670 - protein, 80 aa, Synthetic construct
EEKVRASGDAKIKKEKENGFSSPPQIKDEPEDDGYFVPPKEDIKPLKRPRDEDDADYKPKKIKTEDTKKEKKRKLEEEED

SEQ ID NO: 1671 - protein, 80 aa, Synthetic construct
DPGYVEKSPSFCCNEQETFRPVSSEVRGRKITKNFSEVGFPDILKAYEDDVLLIDVIQDDPDLFGVSNEGELSFTSEVPK

SEQ ID NO: 1672 - protein, 80 aa, Synthetic construct
FCCNEQETFRPVSSEVRGRKITKNFSEVGFPDILKAYEDDVLLIDVIQDDPDLFGVSNEGELSFTSEVPKISQEPNVAGE

SEQ ID NO: 1673 - protein, 80 aa, Synthetic construct
ITKNFSEVGFPDILKAYEDDVLLIDVIQDDPDLFGVSNEGELSFTSEVPKISQEPNVAGEHQSTDSKYMETPVKKEPSDD

SEQ ID NO: 1674 - protein, 80 aa, Synthetic construct
PDILKAYEDDVLLIDVIQDDPDLFGVSNEGELSFTSEVPKISQEPNVAGEHQSTDSKYMETPVKKEPSDDLRELPVLDCG

SEQ ID NO: 1675 - protein, 80 aa, Synthetic construct
DPAFGFPKLEQANKPSHLCGRVFKVGEPTYSCRDCAVDPTCVLCMECFLGSIHRDHRYRMTTSGGGGFCDCGDTEAWKEG

SEQ ID NO: 1676 - protein, 80 aa, Synthetic construct
RVFKVGEPTYSCRDCAVDPTCVLCMECFLGSIHRDHRYRMTTSGGGGFCDCGDTEAWKEGPYCQKHELNTSEIEEEEDPL

SEQ ID NO: 1677 - protein, 80 aa, Synthetic construct
LCDECNVAYHIYCLNPPLDKVPEEEYWYCPSCKTDSSEVVKAGERLKMSKKKAKMPSASTESRRDWGRGMACVGRTRECT

SEQ ID NO: 1678 - protein, 80 aa, Synthetic construct
RKPRPVSQLVAQQVTQQFVPPTQSKKEKKDKVEKEKSEKETTSKKNSHKKTRPRLKNVDRSSAQHLEVTVGDLTVIITDF

SEQ ID NO: 1679 - protein, 80 aa, Synthetic construct
AQQVTQQFVPPTQSKKEKKDKVEKEKSEKETTSKKNSHKKTRPRLKNVDRSSAQHLEVTVGDLTVIITDFKEKTKSPPAS

SEQ ID NO: 1680 - protein, 80 aa, Synthetic construct
KVEKEKSEKETTSKKNSHKKTRPRLKNVDRSSAQHLEVTVGDLTVIITDFKEKTKSPPASSAASADQHSQSGSSSDNTER

SEQ ID NO: 1681 - protein, 80 aa, Synthetic construct
TTSKKNSHKKTRPRLKNVDRSSAQHLEVTVGDLTVIITDFKEKTKSPPASSAASADQHSQSGSSSDNTERGMSRSSSPRG

SEQ ID NO: 1682 - protein, 80 aa, Synthetic construct
TRPRLKNVDRSSAQHLEVTVGDLTVIITDFKEKTKSPPASSAASADQHSQSGSSSDNTERGMSRSSSPRGEASSLNGESH

SEQ ID NO: 1683 - protein, 80 aa, Synthetic construct
SQGTGSPVPKIHGSSFVTSTVKQEDSLFASMPPLCPIGSHPKVQSPKPITGGLGAFTKVIIKQEPGEAPHVPATGAASQS

SEQ ID NO: 1684 - protein, 80 aa, Synthetic construct
IHGSSFVTSTVKQEDSLFASMPPLCPIGSHPKVQSPKPITGGLGAFTKVIIKQEPGEAPHVPATGAASQSPLPQYVTVKG

SEQ ID NO: 1685 - protein, 80 aa, Synthetic construct
QQFQKREPENEEEVDILSLSEPVKINIKKEQEEKQEEVKFYLPPTPGSEFIGDVTQKIGITLQPVALHRNVYASVVEDMI

SEQ ID NO: 1686 - protein, 80 aa, Synthetic construct
SKRTCSNCSKDILNPKDVISVQLEDTTSCKTFCSLSCLSSYEEKRKPFVTICTNSILTKCSMCQKTAIIQYEVKYQNVKH

SEQ ID NO: 1687 - protein, 80 aa, Synthetic construct
TEQLDGSTWDFCSEDCKSKYLLWYCKAARCHACKRQGKLLETIHWRGQIRHFCNQQCLLRFYSQQNQPNLDTQSGPESLL

SEQ ID NO: 1688 - protein, 80 aa, Synthetic construct
ETIHWRGQIRHFCNQQCLLRFYSQQNQPNLDTQSGPESLLNSQSPESKPQTPSQTKVENSNTVRTPEENGNLGKIPVKTR

SEQ ID NO: 1689 - protein, 80 aa, Synthetic construct
NSFASNIRIKEEPLDDEYDKAMAPQQGLLDKIKDEPDNAQEYSHGQQQKTQEGELKISAVFSVSGSPLAPQLTTGFQPSL

SEQ ID NO: 1690 - protein, 80 aa, Synthetic construct
EEPLDDEYDKAMAPQQGLLDKIKDEPDNAQEYSHGQQQKTQEGELKISAVFSVSGSPLAPQLTTGFQPSLASSGMNKMLP

SEQ ID NO: 1691 - protein, 80 aa, Synthetic construct
AMAPQQGLLDKIKDEPDNAQEYSHGQQQKTQEGELKISAVFSVSGSPLAPQLTTGFQPSLASSGMNKMLPSVPATAVRVS

SEQ ID NO: 1692 - protein, 80 aa, Synthetic construct
KIKDEPDNAQEYSHGQQQKTQEGELKISAVFSVSGSPLAPQLTTGFQPSLASSGMNKMLPSVPATAVRVSCSGCKKILQK

SEQ ID NO: 1693 - protein, 80 aa, Synthetic construct
TVNSNSVLQGAVPTVTAKIIGDASTQTDALKLPPSQPPRLLKNKALLCKPITQTKATSCKPHTQNKECQTEDTPSQPQII

SEQ ID NO: 1694 - protein, 80 aa, Synthetic construct
KLSFAHVMRRTRTLKYSTKMTYLRFFPPLQKQESEPDKLTVGKRKRNEDDEVPVGVEMAENTDNPLRCPVRLYEFYLSKC

SEQ ID NO: 1695 - protein, 80 aa, Synthetic construct
TRTLKYSTKMTYLRFFPPLQKQESEPDKLTVGKRKRNEDDEVPVGVEMAENTDNPLRCPVRLYEFYLSKCSESVKQRNDV

SEQ ID NO: 1696 - protein, 80 aa, Synthetic construct
TYLRFFPPLQKQESEPDKLTVGKRKRNEDDEVPVGVEMAENTDNPLRCPVRLYEFYLSKCSESVKQRNDVFYLQPERSCV

SEQ ID NO: 1697 - protein, 80 aa, Synthetic construct
EEGSGQRPEEIPMDLTVVKQEIIDWPGTEGRLAGQWVEQEVEDRPEVKDENAGVLEVKQETDSSLVVKEAKVGEPEVKEE

SEQ ID NO: 1698 - protein, 80 aa, Synthetic construct
IPMDLTVVKQEIIDWPGTEGRLAGQWVEQEVEDRPEVKDENAGVLEVKQETDSSLVVKEAKVGEPEVKEEKVKEEVMDWS

SEQ ID NO: 1699 - protein, 80 aa, Synthetic construct
EIIDWPGTEGRLAGQWVEQEVEDRPEVKDENAGVLEVKQETDSSLVVKEAKVGEPEVKEEKVKEEVMDWSEVKEEKDNLE

SEQ ID NO: 1700 - protein, 80 aa, Synthetic construct
VEDRPEVKDENAGVLEVKQETDSSLVVKEAKVGEPEVKEEKVKEEVMDWSEVKEEKDNLEIKQEEKFVGQCIKEELMHGE

SEQ ID NO: 1701 - protein, 80 aa, Synthetic construct
NAGVLEVKQETDSSLVVKEAKVGEPEVKEEKVKEEVMDWSEVKEEKDNLEIKQEEKFVGQCIKEELMHGECVKEEKDFLK

SEQ ID NO: 1702 - protein, 80 aa, Synthetic construct
EVKEEKDNLEIKQEEKFVGQCIKEELMHGECVKEEKDFLKKEIVDDTKVKEEPPINHPVGCKRKLAMSRCETCGTEEAKY

SEQ ID NO: 1703 - protein, 80 aa, Synthetic construct
IKQEEKFVGQCIKEELMHGECVKEEKDFLKKEIVDDTKVKEEPPINHPVGCKRKLAMSRCETCGTEEAKYRCPRCMRYSC

SEQ ID NO: 1704 - protein, 80 aa, Synthetic construct
DGSSEKHKDKHKDRDKEKRKEEKVRASGDAKIKKEKENGFSSPPQIKDEPEDDGYFVPPKEDIKPLKRPRDEDDADYKPK

SEQ ID NO: 1705 - protein, 80 aa, Synthetic construct
GGRHPGVAEVKTEMMQVDEVPSQDSPGAAESSISGGMGDKVEERGKEGPGTPTRSSVITSARELHYGREESAEQVPPPAE

SEQ ID NO: 1706 - protein, 80 aa, Synthetic construct
RELFSKLGELAVGMKSESRTIGEQCSVCGVELPDNEAVEQHRKLHSGMKTYGCELCGKRFLDSLRLRMHLLAHSAGAKAF

SEQ ID NO: 1707 - protein, 80 aa, Synthetic construct
LSSALGSMSPTTSSQILARKRRRGIIEKRRRDRINNSLSELRRLVPSAFEKQGSAKLEKAEILQMTVDHLKMLHTAGGKG

SEQ ID NO: 1708 - protein, 80 aa, Synthetic construct
HGHTERFDPCRPQLQPGSPSLVSEESPSAIDSDKMSDLGGRKPPGNVISVIQHTNSLSRPNSFERSESAELVACTQDKAP

SEQ ID NO: 1709 - protein, 80 aa, Synthetic construct
TTAGARRRRTRCRKCEACLRTECGECHFCKDMKKFGGPGRMKQSCIMRQCIAPVLPHTAVCLVCGEAGKEDTVEEEEGKF

SEQ ID NO: 1710 - protein, 80 aa, Synthetic construct
MKQSCIMRQCIAPVLPHTAVCLVCGEAGKEDTVEEEEGKFNLMLMECSICNEIIHPGCLKIKESEGVVNDELPNCWECPK

SEQ ID NO: 1711 - protein, 80 aa, Synthetic construct
DKLFRKKRRSWKNAEDRMALANKPLRRFKQEPEDELPEAPPKTRESDHSRSSSPTAGPSTEGAEGPEEKKKVKMRRKRRL

SEQ ID NO: 1712 - protein, 80 aa, Synthetic construct
EGVWSPDIEQSFQEALAIYPPCGRRKIILSDEGKMYGRNELIARYIKLRTGKTRTRKQVSSHIQVLARRKSREIQSKLKD

SEQ ID NO: 1713 - protein, 80 aa, Synthetic construct
QIISNSVVFEYKARALPTLPSSQHDWLSLDDNQFRMSILERLEQMERRMAEMTGSQQHKQASGGGSSGGGSGSGNGGSQA

SEQ ID NO: 1714 - protein, 80 aa, Synthetic construct
NPSQQTALSMVMHNYESSGINITKGTELQIAVVSPLVLSEVKTLSVKGITPAVLPETVYPVIKEGSVCSLQNQLAENAKA

SEQ ID NO: 1715 - protein, 80 aa, Synthetic construct
PAVLPETVYPVIKEGSVCSLQNQLAENAKATAALKVDVSGPVASTATSTKIFPLTQKEKQNESTNGNSEVTPNVNQGKHN

SEQ ID NO: 1716 - protein, 80 aa, Synthetic construct
NESTNGNSEVTPNVNQGKHNKLESAIHSPMNDQQISQESRNSTVVSSDTLQIDNICSLVEGDTSYNSQIAKIFSSLPLKM

SEQ ID NO: 1717 - protein, 80 aa, Synthetic construct
YTPQDPARNEIHSDKAPVLYLHDQLSELLKEFPYGIEAVNTREGSVGQQTTYQTSEDQTADKTSSDSKDPADQIQITILS

SEQ ID NO: 1718 - protein, 80 aa, Synthetic construct
QPRTRRTKFTLLQVEELESVFRHTQYPDVPTRRELAENLGVTEDKVRVWFKNKRARCRRHQRELMLANELRADPDDCVYI

SEQ ID NO: 1719 - protein, 80 aa, Synthetic construct
KEKVKEEIGSSWIETPPSIKSLDSNDSGVYTSACKRRRLSPSNSSNENSPSIKCEDINAEEYSKDTSKGMGGYYAFYTTP

SEQ ID NO: 1720 - protein, 80 aa, Synthetic construct
KPRRARTAFTYEQLVALENKFRATRYLSVCERLNLALSLSLTETQVKIWFQNRRTKWKKQNPGADGAAQVGGGAPQPGAA

SEQ ID NO: 1721 - protein, 80 aa, Synthetic construct
RRQEQHRFSMDLKMPAFHPKQEVPVPGDGVEFPSSTGAEGQTGHPAEKLSDLHNKEHSGGGKRALAPDLMPLDLSARSTR

SEQ ID NO: 1722 - protein, 80 aa, Synthetic construct
DLHNKEHSGGGKRALAPDLMPLDLSARSTRDDPSNKETASSLQAALVVHPCPYCSHKTYYPEVLWMHKRIWHRVSCNSVA

SEQ ID NO: 1723 - protein, 80 aa, Synthetic construct
WHRVSCNSVAPPWIQPNGYKSIRSNLVFLSRSGRTGPPPALGGKECQPLLLARFTRTQVPGGMPGSKSGSSPLGVVTKAA

SEQ ID NO: 1724 - protein, 80 aa, Synthetic construct
TCWEGPWQGRTLVPPGRPRGARDSRSLQKTWVGVAPAPLSASILSQKPGRWCAVHVQIAWQIYRHQQKIKEMQLDPHKLE

SEQ ID NO: 1725 - protein, 80 aa, Synthetic construct
AQDARRPRSRNPSAWTVEDVVWFVKDADPQALGPHVELFRKHEIDGNALLLLKSDMVMKYLGLKLGPALKLCYHIDKLKQ

SEQ ID NO: 1726 - protein, 80 aa, Synthetic construct
PEIKLKITKTIQNGRELFESSLCGDLLNEVQASEHTKSKHESRKEKRKKSNKHDSSRSEERKSHKIPKLEPEEQNRPNER

SEQ ID NO: 1727 - protein, 80 aa, Synthetic construct
TEVVPKKKIKKEQVETVPQATVKTGLQKGASEISDSCKPLKKRSRASTDVEMTSSAYRDTSDSDSRGLSDLQVGFGKQVD

SEQ ID NO: 1728 - protein, 80 aa, Synthetic construct
IRRRGKNKVAAQNCRKRKLDIILNLEDDVCNLQAKKETLKREQAQCNKAINIMKQKLHDLYHDIFSRLRDDQGRPVNPNH

SEQ ID NO: 1729 - protein, 80 aa, Synthetic construct
QPLDPSNWAWNSTFTESSTSDFQMQDTQWERLVASVPALYSDAYDIFQIIELYNLPDENEISSSSFHCLYQYLSPTKYQV

SEQ ID NO: 1730 - protein, 80 aa, Synthetic construct
LFNDIKIEPPEELLASDFSLPQVEPVDLSFHKPKAPLQPASMLQAPIRPPKPQSSPQTLVVSTSTSDMSTSANIPTVLTP

SEQ ID NO: 1731 - protein, 80 aa, Synthetic construct
IAPGVVMASSPALPTQPAEEAARKREVRLMKNREAARECRRKKKEYVKCLENRVAVLENQNKTLIEELKALKDLYCHKSD

SEQ ID NO: 1732 - protein, 80 aa, Synthetic construct
AAAPEGDWARLLEQMGALAVRGSRRERELERRELAVEQGERALERRRRALQEEERAAAQARRELQAEREALQARLRDVSR

SEQ ID NO: 1733 - protein, 80 aa, Synthetic construct
HALAAQEIKYGPLKMLPQTPSHLVEDLQDVIKQESDESGIVAEFQENGPPLLKKIKQEVESPTDKSGNFFCSHHWEGDSL

SEQ ID NO: 1734 - protein, 80 aa, Synthetic construct
ATLPEMSAGEESSSSDSDPDSASPPSTGQNPSVSVQTSQDWKPTRSLIEHVFVTDVTANLITVTVKESPTSVGFFNLRHY

SEQ ID NO: 1735 - protein, 80 aa, Synthetic construct
RVPTPSSVASAETNSQQPGPDVPVLEMKTETQAEDTEPDPGESKGEPRSEMMEEDLQGASQVKEETDIAEQKSEPMEVDE

SEQ ID NO: 1736 - protein, 80 aa, Synthetic construct
QKSEPMEVDEKKPEVKVEVKEEEESSSNGTASQSTSPSQPRKKIFKPEELRQALMPTLEALYRQDPESLPFRQPVDPQLL

SEQ ID NO: 1737 - protein, 80 aa, Synthetic construct
IWPSGFVCDNCLKKTGRPRKENKFSAKRLQTTRLGNHLEDRVNKFLRRQNHPEAGEVFVRVVASSDKTVEVKPGMKSRFV

SEQ ID NO: 1738 - protein, 80 aa, Synthetic construct
KHHVETRWHCTVCEDYDLCINCYNTKSHAHKMVKWGLGLDDEGSSQGEPQSKSPQESRRLSIQRCIQSLVHACQCRNANC

SEQ ID NO: 1739 - protein, 80 aa, Synthetic construct
GAGALAPPPPPPQIKVEPISEGESEEVEVTDISDEDEEDGEVFKTPRAPPAPPKPEPGEAPGASQCMPLKLRFKRRWSED

SEQ ID NO: 1740 - protein, 80 aa, Synthetic construct
EVFKTPRAPPAPPKPEPGEAPGASQCMPLKLRFKRRWSEDCRLEGGGGPAGGFEDEGEDKKVRGEGPGEAGGPLTPRRVS

SEQ ID NO: 1741 - protein, 80 aa, Synthetic construct
LQTVWFQGLGRNLLFQEPVTFEDVAVYFTQNEWASLHPTQRALYREVMLENYANVTSLYPTAGGFPLDTERTEKVPGALS

SEQ ID NO: 1742 - protein, 80 aa, Synthetic construct
QGGEIILCDTCPRAYHLVCLDPELEKAPEGKWSCPHCEKEGIQWEPKDDDDEEEEGGCEEEEDDHMEFCRVCKDGGELLC

SEQ ID NO: 1743 - protein, 80 aa, Synthetic construct
RRRVRSEAELQQLRQAANVRERRRMQSINDAFEGLRSHIPTLPYEKRLSKVDTLRLAIGYINFLSELVQADLPLRGGGAG

SEQ ID NO: 1744 - protein, 80 aa, Synthetic construct
EEDDRKHSQKEPKDSLGDSGYASQHKKRQHFAKARKVPSDTLPLKKRRTEKPPESDDEEMKEAAGSLLHLAGIRSCLNNI

SEQ ID NO: 1745 - protein, 80 aa, Synthetic construct
TITDKTARTSSYKAMEAASSLKSQAATKNLSDACKPLKKRNRASTAASSALGFSKSSSPSASLTENEVSDSPGDEPSESP

SEQ ID NO: 1746 - protein, 80 aa, Synthetic construct
AAVDGVIISLCCNSKTKSVVLQLADGQIFKYLWESPSLAIKPWKNSGGFPVRFPYPCTQTELAMIGEEECVLGLTDRCRF

SEQ ID NO: 1747 - protein, 80 aa, Synthetic construct
GKPKIWSLAETATSPDGAPKASPPPPAGHPGAHGPSAGAPLQHPAFLPSHGLYTCHIGKFSNWTNSAFLAQGSLLNMRSF

SEQ ID NO: 1748 - protein, 80 aa, Synthetic construct
NSGREPRTPRTLLSIADILAPRMVPRAPSAPQLPESGPGPTSPLCALEELTSKTFRGLDARALQPSEGRAGPDALGPGPF

SEQ ID NO: 1749 - protein, 80 aa, Synthetic construct
KERLNTSIPQKRKMRNLLVTIENDTPLEELSKYVDISIIALTRNRRTRRWYTCPLCGKQFNESSYLISHQRTHTGEKPYD

SEQ ID NO: 1750 - protein, 80 aa, Synthetic construct
QPAHHPPQSPAQIQMQLQHELQQQAAFFQPQFLNPAFLPHFPMTPEALLQFQQPQFLFPFYIPGTEFSLGPDLGLPGSAT

SEQ ID NO: 1751 - protein, 80 aa, Synthetic construct
LQNSLPPQLLQYQCDQCTVAFPTLELWQEHQHMHFLAAQNQFLHSPFLERPMDMPYMIFDPNNPLMTGQLLGSSLTQMPP

SEQ ID NO: 1752 - protein, 80 aa, Synthetic construct
RKKGEDDKLILCDECNKAFHLFCLRPALYEVPDGEWQCPACQPATARRNSRGRNYTEESASEDSEDDESDEEEEEEEEEE

SEQ ID NO: 1753 - protein, 80 aa, Synthetic construct
QAAKNQMYDDYYYYGPPHMPPPTRGRGRGGRGGYGYPPDYYGYEDYYDYYGYDYHNYRGGYEDPYYGYEDFQVGARGRGG

SEQ ID NO: 1754 - protein, 80 aa, Synthetic construct
DNPQLHEEVKVWVKEQKVQEIFMQGPYSLNGYRVRVYRQDSATQWFTGIITHHDLFTRTMIVMNDQVLEPQNVDPSMVQM

SEQ ID NO: 1755 - protein, 80 aa, Synthetic construct
HLKKHKAALAAAQYKSSNASETEPNAIKNQTLSASLPLDSTVICSTINKANSVGNGQASQTSQPNYHTKLKKAWLTRHSE

SEQ ID NO: 1756 - protein, 80 aa, Synthetic construct
PESQQQNTPPKSEKNGGSSPESDVGTDNKLTPPESQSPLHWLADLAEQKAREEKKENKELTLENQIKEEREQDNSESPNG

SEQ ID NO: 1757 - protein, 80 aa, Synthetic construct
VYSMGAPSSKSGRTMPNILDDIIASVVENKIPPSKTSKINVKPELKEEPEESIISAVDENNKLYSDIPHSWICEKHILWL

SEQ ID NO: 1758 - protein, 80 aa, Synthetic construct
TGPPVASVASVAAAAAAAASLPVSVAGGLLRGPPLLLRAAEKYPRTPKCARCRNHGVVSALKGHKRYCRWKDCLCAKCTL

SEQ ID NO: 1759 - protein, 80 aa, Synthetic construct
LHQWTLGYPAMHLPRSSFSKVPGTVSSLVDARFQLPAFPWFPHVIQPKPEITAGGSVPALKTKPRFDFANLALAATQEDP

SEQ ID NO: 1760 - protein, 80 aa, Synthetic construct
DLGIPILNSAASYNVKTAYRKYLYGFEEYCRSANIQFRTVHHHEPKVKEEKKDLEESMEEALKLDQEMPLTEVKSEPEEN

SEQ ID NO: 1761 - protein, 80 aa, Synthetic construct
DKIKEEPDNAQEYGCVQQPKTQESKLKIGGVSSVNERPIAQQLNPGFQLSFASSGPSVLLPSVPAVAIKVFCSGCKKMLY

SEQ ID NO: 1762 - protein, 80 aa, Synthetic construct
CHQQIMNDCLPQNKVNISKAKTAVTELPSARTDTTPVITSVMSLAKIPATLSTGNTNSVLKGAVTKEAAKIIQDESTQED

SEQ ID NO: 1763 - protein, 80 aa, Synthetic construct
RTDTTPVITSVMSLAKIPATLSTGNTNSVLKGAVTKEAAKIIQDESTQEDAMKFPSSQSSQPSRLLKNKGISCKPVTQTK

SEQ ID NO: 1764 - protein, 80 aa, Synthetic construct
DQDGRGDPGEGEEVAWEQAAVAFDAVLRFAERQPCFSAQEVGQLRALRAVFRSQQQVRRRRGALGAVVKVEALQEGPGGC

SEQ ID NO: 1765 - protein, 80 aa, Synthetic construct
QLSAPAQSRTVTSSFLIRDILADCKPLAACAPYSSSGQPAAPEPGGRLAAKAAEDFRDKLDKSGSNASSDSEYKVKEEGD

SEQ ID NO: 1766 - protein, 80 aa, Synthetic construct
SEYKVKEEGDREISSSRDSPPVRLKKPRKARTAFTDHQLAQLERSFERQKYLSVQDRMELAASLNLTDTQVKTWYQNRRT

SEQ ID NO: 1767 - protein, 80 aa, Synthetic construct
PVSSEVRGRKITKNFSEVGFPDILKAYEDDVLLIDVIQDDPDLFGVSNEGELSFTSEVPKISQEPNVAGEHQSTDSKYME

SEQ ID NO: 1768 - protein, 80 aa, Synthetic construct
EIKELNESNLKIEADMMKLQTQITSMESNLKTIEEENKLIEQNNESLLKELAGLSQALISSLADIQLPQMGPISEQNFEA

SEQ ID NO: 1769 - protein, 80 aa, Synthetic construct
DEMDAGGLGKMIFYQKSAKLFHCHKCFFTSKMYSNVYYHITSKHASPDKWNDKPKNQLNKETDPVKSPPLPEHQKIPCNS

SEQ ID NO: 1770 - protein, 80 aa, Synthetic construct
SPWSHISAGAIDLINNLLQVKMRKRYSVDKSLSHPWLQEYQTWLDLRELEGKMGERYITHESDDARWEQFAAEHPLPGSG

SEQ ID NO: 1771 - protein, 80 aa, Synthetic construct
APSQPQASQTLTPLAVQAAPQVLTQENLATVLTGVMVPAGAVTQPLLIPISIAGQVAGQQGLAVWTIPTATVAALPGLTA

SEQ ID NO: 1772 - protein, 80 aa, Synthetic construct
SAFAELRECIPNVPADTKLSKIKTLRLATSYIAYLMDVLAKDAQSGDPEAFKAELKKADGGRESKRKRELQQHEGFPPAL

SEQ ID NO: 1773 - protein, 80 aa, Synthetic construct
WMKVPRNNKRGQQGWDRKYIVLEGSKVLIYDNEAREAGQRPVEEFELCLPDGDVSIHGAVGASELANTAKADVPYILKME

SEQ ID NO: 1774 - protein, 80 aa, Synthetic construct
EQRVTNLHVKEIAQHLEQQNDLLQMIRRSQEVQACAQERQAQAMEGTQAALSVLIQVLRPMIKDFRRYLQSNTANPAPAS

SEQ ID NO: 1775 - protein, 80 aa, Synthetic construct
PETDNLMVKAIQVLRIHLLELEKVNELCKDFCSRYIACLKTKMNSETLLSGEPGSPYSPVQSQQIQSAITGTISPQGIVV

SEQ ID NO: 1776 - protein, 80 aa, Synthetic construct
TCHVNFRMFSCPKESDPIQALRKLTELCHLWLRPDLHTKEQILDMLVMEQFMISMPQELQVLVMMNGVQSCKDLEDLLRN

SEQ ID NO: 1777 - protein, 80 aa, Synthetic construct
HLAACLRQLGPSRRPASLSPAAPAEAPAPEVYAGRPLLPSLGGPFPLLAPPLLPGLTRALPAAPRAGPQGPGGPWRPWLR

SEQ ID NO: 1778 - protein, 80 aa, Synthetic construct
NYRSKTSQEGALKKMHEEEHHQQMSILQLQLIQMNEVHVAKIQQIERECEMAEEEHRIKMEVLNKKKMYWERKLQTFTKE

SEQ ID NO: 1779 - protein, 80 aa, Synthetic construct
EQSCEEEKEPEPQKNIQETKQVDDEDAELIFVGVEHVNEDAELIFVGVTSNSKPVVSNILNRVTPGSWSRRKKYDHLRKD

SEQ ID NO: 1780 - protein, 80 aa, Synthetic construct
KVKGEKLDKKLKKMEQNKTAATRYRQKKRAEQEALTGECKELEKKNEALKERADSLAKEIQYLKDLIEEVRKARGKKRVP

SEQ ID NO: 1781 - protein, 80 aa, Synthetic construct
IVEGKRLRVGEYKALMRTRRQDARQSYVIPPQAGQVQMSSSDVLYPRAAGMPLAQPLVEHYVPRSLDPNMPVIVNTCSLR

SEQ ID NO: 1782 - protein, 80 aa, Synthetic construct
DVLYPRAAGMPLAQPLVEHYVPRSLDPNMPVIVNTCSLREEGEGTDDRHSVADGEMYRYSEDEDSEGEEKSDGELVVLTD

SEQ ID NO: 1783 - protein, 80 aa, Synthetic construct
MKSERRPPSPDVIVLSDNEQPSSPRVNGLTTVALKETSTEALMKSSPEERERMIKQLKEELRLEEAKLVLLKKLRQSQIQ

SEQ ID NO: 1784 - protein, 80 aa, Synthetic construct
VRERKRILDYNEAFNALRRALRHDLGGKRLSKIATLRRAIHRIAALSLVLRASPAPRGPCGHLECHGPAARGDTGDTGAS

SEQ ID NO: 1785 - protein, 80 aa, Synthetic construct
GGGKRPAVPAAVSLLPPADPLRQANRLPIRVLKMLSAHTGHLLHPEYLQPLSSTPVSPIELDAKKSPLALLAQTCSQIGK

SEQ ID NO: 1786 - protein, 80 aa, Synthetic construct
EPLKVEKFATAKRGNGLRAVTPLRPGELLFRSDPLAYTVCKGSRGVVCDRCLLGKEKLMRCSQCRVAKYCSAKCQKKAWP

SEQ ID NO: 1787 - protein, 80 aa, Synthetic construct
NHWTLGYPNVHEITRSTITEMAAAQGLVDARFPFPALPFTTHLFHPKQGAIAHVLPALHKDRPRFDFANLAVAATQEDPP

SEQ ID NO: 1788 - protein, 80 aa, Synthetic construct
NKSVLMERLKKAVKEEGQDPDEIGIELEATSKKSAKRCVKGLKMEEEGTEDNGLEDDSRDGQEDMEASLENLQNMGMMDM

SEQ ID NO: 1789 - protein, 80 aa, Synthetic construct
ELHGRMISVEKAKNEPAGKKLSDRKECEVKKEKLSSVDRHHSVEIKIEKTVIKKEEKIEKKEEKKPEDIKKEEKDQDELK

SEQ ID NO: 1790 - protein, 80 aa, Synthetic construct
PAKTNDTMTKVPFLQGFSYPIPSGSYYAPYGMPYTSMPMMNLGYYGQYPAPLYLSHTLGAASPFMRPTVPPPQFHTNSHV

SEQ ID NO: 1791 - protein, 80 aa, Synthetic construct
AGAEKSSSAVAPQRSRKKRCPYTKYQIRELEREFFFNVYINKEKRLQLSRMLNLTDRQVKIWFQNRRMKEKKLNRDRLQY

SEQ ID NO: 1792 - protein, 80 aa, Synthetic construct
DISSPCEQIMVRTRSVGVNTCDVALATEPECLGPCEPGTSVNLEGIVWQETEDGMLVVNVTWRNKTYVGTLLDCTRHDWA

SEQ ID NO: 1793 - protein, 80 aa, Synthetic construct
TEDGMLVVNVTWRNKTYVGTLLDCTRHDWAPPRFCDSPTSDLEMRNGRGRGKRMRPNSNTPVNETATASDSKGTSNSSKT

SEQ ID NO: 1794 - protein, 80 aa, Synthetic construct
VLATTLNMLPGLIHSPLICTTPKHYIRFGSPFIPERRRRPLLPDGTFSSCKKRWIKQALEEGMTQTSSVPQETRTQHLYQ

SEQ ID NO: 1795 - protein, 80 aa, Synthetic construct
LLPDGTFSSCKKRWIKQALEEGMTQTSSVPQETRTQHLYQSNENSSSSSICKDNADLLSPLKKWKSRYLMEQNVTKLLRP

SEQ ID NO: 1796 - protein, 80 aa, Synthetic construct
MLVKPLPDSEEEGHDNQEAHQKYETMQCFAVSQPKSIKEEGEDLQSCLICVARRVPMKERPVLPSSESFTTRQDLQGKIT

SEQ ID NO: 1797 - protein, 80 aa, Synthetic construct
RLLQDSSSPVDLAKLTAEATGKDLSQESSSTAPGSEVTIKQEPVSPKKKENALLRYLLDKDDTKDIGLPEITPKLERLDS

SEQ ID NO: 1798 - protein, 80 aa, Synthetic construct
MQRPLGSSTAFSIDSLIGSPPQPSPGHFVYTGYPMFMPYRPVVLPPPPPPPPALPQAALQPALPPAHPHHQIPSLPTGFC

SEQ ID NO: 1799 - protein, 80 aa, Synthetic construct
GAASPGFHCEWQNSYTHCGPCASLVTCPICHAPYVEEDLLIQCRHCERWMHAGCESLFTEDDVEQAADEGFDCVSCQPYV

SEQ ID NO: 1800 - protein, 80 aa, Synthetic construct
GPRPWVVDGDHQQGTSKDLSGAEKHQESEKPSFLPSGAPASLEILRKELTRAVSQAVDSVLQKVLLDPPGHLTQLGRSFQ

SEQ ID NO: 1801 - protein, 80 aa, Synthetic construct
TRRLKANNRERNRMHNLNAALDALREVLPTFPEDAKLTKIETLRFAHNYIWALTETLRLADHCGGGGGGLPGALFSEAVL

SEQ ID NO: 1802 - protein, 80 aa, Synthetic construct
LHLGSVTGWQQQHLHNMPPSALSQLGACTSTHLSQSSNLSLPSTQSLNIKSEPVSPPRDRTTTPSRYPQHTRHEAGRSPV

SEQ ID NO: 1803 - protein, 80 aa, Synthetic construct
ISHVNFRMFSCPKESDPIQALRKLTELCHLWLRPDLHTKEQILDMLVMEQFMISMPQELQVLVMMNGVQSCKDLEDLLRN

SEQ ID NO: 1804 - protein, 80 aa, Synthetic construct
VLVMMNGVQSCKDLEDLLRNNRRPKKWSVVTFHGKEYIVQDSDIEMAEAPSSVRDDLKDVSSQRASSVNQMRPGEGQAHR

SEQ ID NO: 1805 - protein, 80 aa, Synthetic construct
KRKTTNADRRKAATMRERRRLSKVNEAFETLKRCTSSNPNQRLPKVEILRNAIRYIEGLQALLRDQDAAPPGAAAAFYAP

SEQ ID NO: 1806 - protein, 80 aa, Synthetic construct
NRIGEFSSTGSTLPDTDHMVKFVNGQMLYSCVVCKRSYVTLSSLRRHANVHSWRRTYPCHYCNKVFALAEYRTRHEIWHT

SEQ ID NO: 1807 - protein, 80 aa, Synthetic construct
SAPSVIVHSSQFSSVIMHSNAIAAMTSSNHRAFSDPAVSQSLKDDSKPEPDKVGRFASRPKSIKEKKKTTSHTRGEIPEE

SEQ ID NO: 1808 - protein, 80 aa, Synthetic construct
IAHPRHEADEKPFICAQCGKTFNNTSNLRTHQRIHTGEKPYKCSECGKSFSRSSNRIRHERIHLEEKHYKCPKCQESFRR

SEQ ID NO: 1809 - protein, 80 aa, Synthetic construct
PATSKTLAFSIERIMAKTSEPRAPFEPRPGALEADGSQGKKLLNLCSPLPCMIPLQPLGYEVPSKTLLSYSELWKSSLRA

SEQ ID NO: 1810 - protein, 80 aa, Synthetic construct
YYSAPQHDYYSGQPYGQTVNPYTYHHQFNLNGLAGTGAYSPKSEYTYGASYRQYGAYREQPLPAQDPVSVKEEPEAEVRM

SEQ ID NO: 1811 - protein, 80 aa, Synthetic construct
LKCNQNCLKNAGNPRDMRRFQVVVSTTVNVDGHVLAVSDNMFVHNNSKHGRRARRLDPSEATPCIKAISPSEGWTTGGAT

SEQ ID NO: 1812 - protein, 80 aa, Synthetic construct
GERHGAKAARSEGAGGHAPGKEHKIMVGSTDDPSVFSLPDSKLPGDKEFVSWQQDLEDSVKPTQQARPTVIRWSEGGKEV

SEQ ID NO: 1813 - protein, 80 aa, Synthetic construct
VPFPKTEEVESAISNGVTGQLNIVQYIKPEPDGAFSSSCLGGNSKINSDSSFSVPIKQESTKHSCSGTSFKGNPTVNPFP

SEQ ID NO: 1814 - protein, 80 aa, Synthetic construct
FEEMRTNYIKELRKMVTKCPNNSGQSWQRFYQLTKLLDSMHDLVSDLLEFCFYTFRESHALKVEFPAMLVEIISDQLPKV

SEQ ID NO: 1815 - protein, 80 aa, Synthetic construct
NLSESSSESFLWSDDEYGQDVDVTTNPDEELDGDDRYDFEVVRCICEVQEENDFMIQCEECQCWQHGVCMGLLEENVPEK

SEQ ID NO: 1816 - protein, 80 aa, Synthetic construct
DLSDNMSEGSDDSGLHGARPVPQESSRKNAKEALAVKAAKGDFVCIFCDRSFRKGKDYSKHLNRHLVNVYYLEEAAQGQE

SEQ ID NO: 1817 - protein, 80 aa, Synthetic construct
AEPLAPPIKPIKPVTRNKAPQEPPVKKGRRSRRCGQCPGCQVPEDCGVCTNCLDKPKFGGRNIKKQCCKMRKCQNLQWMP

SEQ ID NO: 1818 - protein, 80 aa, Synthetic construct
DFSLCHDCAKLFAKGNFCPLCDKCYDDDDYESKMMQCGKCDRWVHSKCENLSDEMYEILSNLPESVAYTCVNCTERHPAE

SEQ ID NO: 1819 - protein, 80 aa, Synthetic construct
VALRGNENEREMAPQSVSPRESYRENKRKQKLPQQQQQSFQQLVSARKEQKREERRQLKQQLEDMQKQLRQLQEKFYQIY

SEQ ID NO: 1820 - protein, 80 aa, Synthetic construct
VKQEDSLFASMPPLCPIGSHPKVQSPKPITGGLGAFTKVIIKQEPGEAPHVPATGAASQSPLPQYVTVKGGHMIAVSPQK

SEQ ID NO: 1821 - protein, 80 aa, Synthetic construct
DNLCRKLEDLQQFQKREPENEEEVDILSLSEPVKINIKKEQEEKQEEVKFYLPPTPGSEFIGDVTQKIGITLQPVALHRN

SEQ ID NO: 1822 - protein, 80 aa, Synthetic construct
DPVACEDVAVNFTQEEWALLDISQRKLYREVMLETFRNLTSIGKKWKDQNIEYEYQNPRRNFRSLIEGNVNEIKEDSHCG

SEQ ID NO: 1823 - protein, 80 aa, Synthetic construct
TAAGGGGGLILASPKLGATPLPPESTPAPPPPPPPPPPPGVGSGHLNIPLILEELRVLQQRQIHQMQMTEQICRQVLLLG

SEQ ID NO: 1824 - protein, 80 aa, Synthetic construct
DGHAISTIKEEPKIDFRVYNLLTPDSKMGEPVSESVVKREKLEEKDGLKEKVWTESSSDDLRNVTWRGADILRGSPSYTQ

SEQ ID NO: 1825 - protein, 80 aa, Synthetic construct
LPPHFSAVGSDNDIPLDLAIKHSRPGPTANGASKEKTKAPPNVKNEGPLNVVKTEKVDRSTQDELSTKCVHCGIVFLDEV

SEQ ID NO: 1826 - protein, 80 aa, Synthetic construct
DSSCHNATTKMLATAPARGNMMSTSKPLAFSIERIMARTPEPKALPVPHFLQGALPKGEPKHSLHLNSSIPCMIPFVPVA

SEQ ID NO: 1827 - protein, 80 aa, Synthetic construct
SPQNLAAYYTPFPSYGHYRNSLATVEEDFQPFRQLEAAASAAPAMPPFPFRMAPPLLSPGLGLQREPLYDLPWYSKLPPW

SEQ ID NO: 1828 - protein, 80 aa, Synthetic construct
QDPRPHGPQLPTGIEGNWGRLLEQVGTMALWASQREKEVLRRERAVEWRERAVEKRERALEEVERAILEMKWKVRAEKEA

SEQ ID NO: 1829 - protein, 80 aa, Synthetic construct
SGLSNSHTPVRPPSTSSTGSRGSCGSSGRTAEKTSLSFKSDQVKVKQEPGTEDEICSFSGGVKQEKTEDGRRSACMLSSP

SEQ ID NO: 1830 - protein, 80 aa, Synthetic construct
DQVKVKQEPGTEDEICSFSGGVKQEKTEDGRRSACMLSSPESSLTPPLSTNLHLESELDALASLENHVKIEPADMNESCK

SEQ ID NO: 1831 - protein, 80 aa, Synthetic construct
ERRVIVPADPTLWSTDHVRQWLEWAVKEYGLPDVNILLFQNIDGKELCKMTKDDFQRLTPSYNADILLSHLHYLRETPLP

SEQ ID NO: 1832 - protein, 80 aa, Synthetic construct
RSPARQEERASPAGKFSSSFAIDSILRKPFRSRRLRDTAPGTTLQWGAAPCPPLPAFPALLPAAPCRALLPLCAYGAGEP

SEQ ID NO: 1833 - protein, 80 aa, Synthetic construct
IKPEKILESSIPMEYAKMWKPGDECFALYWEDNKFYRAEVEALHSSGMTAVVKFIDYGNYEEVLLSNIKPIQTEAWEEEG

SEQ ID NO: 1834 - protein, 80 aa, Synthetic construct
LAANARERRRMHGLNHAFDQLRNVIPSFNNDKKLSKYETLQMAQIYINALSELLQTPSGGEQPPPPPASCKSDHHHLRTA

SEQ ID NO: 1835 - protein, 80 aa, Synthetic construct
HHPQQQQQQQQPQQQQPPPPPRAGALQPPASGTRVVPNPHHSGSAPAPSSKDLKFGIDRILSAEFDPKVKEGNTLRDLTS

SEQ ID NO: 1836 - protein, 80 aa, Synthetic construct
ISCDQWEVMQSVCRALKPFEAASREMSTQMSTLSQVIPMVHILNRKVEMLFEETMGIDTMLRSLKEAMVSRLSATLHDPR

SEQ ID NO: 1837 - protein, 80 aa, Synthetic construct
KRRGPKKKKMTKARLERFKLRRMKANARERNRMHGLNAALDNLRKVVPCYSKTQKLSKIETLRLAKNYIWALSEILRSGK

SEQ ID NO: 1838 - protein, 80 aa, Synthetic construct
NRMHGLNAALDNLRKVVPCYSKTQKLSKIETLRLAKNYIWALSEILRSGKSPDLVSFVQTLCKGLSQPTTNLVAGCLQLN

SEQ ID NO: 1839 - protein, 80 aa, Synthetic construct
RSHGPAAKPTLPVATTTAQPTFPCPDCGKTFGQAVSLRRHRQMHEVRAPPGTFACTECGQDFAQEAGLHQHYIRHARGEL

SEQ ID NO: 1840 - protein, 80 aa, Synthetic construct
QVKSISGTAQDGNTEPLPPDSGDKNLVIQKSKDEAQDNGATIMPIITESFSLSAEDYEMKKIIVTDSDDDDDDVIFCSEI

SEQ ID NO: 1841 - protein, 80 aa, Synthetic construct
YDIVIPVKDDPDEGEARLENEIPKTSGSEMANKRMKVKHDDHYELIVDGRVYYICIVCKRSYVCLTSLRRHFNIHSWEKK

SEQ ID NO: 1842 - protein, 80 aa, Synthetic construct
LGAETKNLQLLVPKTEICEEAEKPLIISERIQKADPQGPELGEACEKGNMLKRQRIKREKKDFRQVIVNDCHLPESFKEE

SEQ ID NO: 1843 - protein, 80 aa, Synthetic construct
TMKPAPRLTPVRPAAASPIVSGARRRRVRCRKCKACVQGECGVCHYCRDMKKFGGPGRMKQSCVLRQCLAPRLPHSVTCS

SEQ ID NO: 1844 - protein, 80 aa, Synthetic construct
KLPGRLRIQPALWSREDVLHWLRWAEQEYSLPCTAEHGFEMNGRALCILTKDDFRHRAPSSGDVLYELLQYIKTQRRALV

SEQ ID NO: 1845 - protein, 80 aa, Synthetic construct
HGLPLKIKKEPHSPCSEISSACSQEQPFKFSYGEKCLYNVSAYDQKPQVGMRPSNPPTPSSTPVSPLHHASPNSTHTPKP

SEQ ID NO: 1846 - protein, 80 aa, Synthetic construct
FPPQGFKQEYHDPVYEHNTMVGSAASQSFPPPLMIKQEPRDFAYDSEVPSCHSIYMRQEGFLAHPSRTEGCMFEKGPRQF

SEQ ID NO: 1847 - protein, 80 aa, Synthetic construct
TEVLLDHLKAHAEEKPPSGTKEKKHQCDHCERCFYTRKDVRRHLVVHTGCKDFLCQFCAQRFGRKDHLTRHTKKTHSQEL

SEQ ID NO: 1848 - protein, 80 aa, Synthetic construct
LPASLSLSVGTSSAKLEAINELIRFDHIYTKPLVLEIPSETESQANVVVKIEEAPLSPSENDHPEFIVSVKEEPVEDDLV

SEQ ID NO: 1849 - protein, 80 aa, Synthetic construct
TESQANVVVKIEEAPLSPSENDHPEFIVSVKEEPVEDDLVPELGISNLLSSSHCPKPSSCLLDAYSDCGYGGSLSPFSDM

SEQ ID NO: 1850 - protein, 80 aa, Synthetic construct
VAGGAKEKKHPCDHCDRRFYTRKDVRRHLVVHTGRKDFLCQYCAQRFGRKDHLTRHVKKSHSQELLKIKTEPVDMLGLLS

SEQ ID NO: 1851 - protein, 80 aa, Synthetic construct
REPRQRHTANARERDRTNSVNTAFTALRTLIPTEPADRKLSKIETLRLASSYISHLGNVLLAGEACGDGQPCHSGPAFFH

SEQ ID NO: 1852 - protein, 80 aa, Synthetic construct
QEVIKPENGEHQDSTLKEDVPEQGKDDVREVKVEQNSEPCAGSSSESDLQTVFKNESLNAESKSGCKLQELKAKQLIKKD

SEQ ID NO: 1853 - protein, 80 aa, Synthetic construct
HHQQRMAALGTDKELSDLLDFSAMFSPPVSSGKNGPTSLASGHFTGSNVEDRSSSGSWGNGGHPSPSRNYGDGTPYDHMT

SEQ ID NO: 1854 - protein, 80 aa, Synthetic construct
AASENSQDALRVVSTSGEQMKVYKCEHCRVLFLDHVMYTIHMGCHGFRDPFECNMCGYHSQDRYEFSSHITRGEHRFHMS

SEQ ID NO: 1855 - protein, 80 aa, Synthetic construct
LSDTAKPHIAAPFKEEEKSPVSAPKLPKAQATSVIRHTADAQLCNHQTCPMKAASILNYQNNSFRRRTHLNVEAARKNIP

SEQ ID NO: 1856 - protein, 80 aa, Synthetic construct
LHCRKNFTLKTVPATNYNHHLVGASSCIEEFQSQFIFEHSYSVMDSPKKLKHKLDHVIGELEDTKESLRNVLDREKRFQK

SEQ ID NO: 1857 - protein, 80 aa, Synthetic construct
SPSHLLLPPDTVSRTGLEKAAAGAVGLERRDWSPSPPATPEQGLSAFYLSYFDMLYPEDSSWAAKAPGASSREEPPEEPE

SEQ ID NO: 1858 - protein, 80 aa, Synthetic construct
QRAGGGSAPGGNGGGGGGGPGTAFSIDSLIGPPPPRSGHLLYTGYPMFMPYRPLVLPQALAPAPLPAGLPPLAPLASFAG

SEQ ID NO: 1859 - protein, 80 aa, Synthetic construct
HSLKKVTFEDVAIDFTQEEWAMMDTSKRKLYRDVMLENISHLVSLGYQISKSYIILQLEQGKELWQEGREFLQDQNPDRE

SEQ ID NO: 1860 - protein, 80 aa, Synthetic construct
GMKVPGKGESGPSALLTPPMSSSSRGPGAGARRRRTRCRRCRACVRTECGDCHFCRDMKKFGGPGRMKQSCLLRQCTAPV

SEQ ID NO: 1861 - protein, 80 aa, Synthetic construct
WEKPKPPLASAEGPAVPSPSPQREKLERFKRMCQLLERVPDTSSSSSDSDSDSDSSGTSLSEDEAPGEARNGRRPARGSS

SEQ ID NO: 1862 - protein, 80 aa, Synthetic construct
RPLIKPQRRLSASRRVGLSCANCQTTTTTLWRRNAEGEPVCNACGLYMKLHGVPRPLAMRKEGIQTRKRKPKNLNKSKTP

SEQ ID NO: 1863 - protein, 80 aa, Synthetic construct
MRCHQHFLRTEAKVKEEIPDPDVKGSPHLSDSACLGQQREGGGTELVGTMMTSNTPERTSQGGAGVSPLLVKEEPKEDNG

SEQ ID NO: 1864 - protein, 80 aa, Synthetic construct
EVSAPGVSEDALKPQEGKGSVLRRDVSVKAASELLMKLSAESYKETQMVKIKEEPMEVDIQDSHVSISPSRNVGYSTLIG

SEQ ID NO: 1865 - protein, 80 aa, Synthetic construct
SSSEPNLALKALAFNGSPLRFDKYRNSDFAHLIPLTMLYPKNHLDLTFHPPRPQTAPPSIPSPKHSFLAYLGLRERAETV

SEQ ID NO: 1866 - protein, 80 aa, Synthetic construct
GLNDALDNLRRVMPCYSKTQKLSKIETLRLARNYIWALSEVLETGQTPEGKGFVEMLCKGLSQPTSNLVAGCLQLGPQSV

SEQ ID NO: 1867 - protein, 80 aa, Synthetic construct
TSRNEYIHSGLYSSFTINSLQNPPDAFKAIKTEKLEEPPEDSPPVEEVRTVIRFVTNKTDKHVTRPVVSLPSTSEAAAAS

SEQ ID NO: 1868 - protein, 80 aa, Synthetic construct
RERNRMHGLNDALDNLRKVVPCYSKTQKLSKIETLRLAKNYIWALSEILRIGKRPDLLTFVQNLCKGLSQPTTNLVAGCL

SEQ ID NO: 1869 - protein, 80 aa, Synthetic construct
GPLSPPPINYNGIFSLKQEETLDYGKNYNYGMHYCAVPPRGPLGQGAMFRLPTDSHFPYDLHLRSQSLTMQDELNAVFHN

SEQ ID NO: 1870 - protein, 80 aa, Synthetic construct
LMFDPVPVKQEAMDPVSVSYPSNYMESMKPNKYGVIYSTPLPEKFFQTPEGLSHGIQMEPVDLTVNKRSSPPSAGNSPSS

SEQ ID NO: 1871 - protein, 80 aa, Synthetic construct
EMENSSSSMQVPVIESYEKPISQKKIKIEPGIEPQRTDYYPEEMSPPLMNSVSPPQALLQENHPSVIVQPGKRPLPVESP

SEQ ID NO: 1872 - protein, 80 aa, Synthetic construct
AVPYKFFPEPSGLHEKRKQRRIRTTFTSAQLKELERVFAETHYPDIYTREELALKIDLTEARVQVWFQNRRAKFRKQERA

SEQ ID NO: 1873 - protein, 80 aa, Synthetic construct
EESDQALDLSLKSGPRQERVHPPCVLQTPLCSQRQPGAQPLVKDERDSLSEQEESSSSRSPHSPPKPPPVPAAKGLVVGL

SEQ ID NO: 1874 - protein, 80 aa, Synthetic construct
RPSHCELDLAEGHQPQKVARRVFTNSRERWRQQNVNGAFAELRKLLPTHPPDRKLSKNEVLRLAMKYIGFLVRLLRDQAA

SEQ ID NO: 1875 - protein, 80 aa, Synthetic construct
LRLAMKYIGFLVRLLRDQAAALAAGPTPPGPRKRPVHRVPDDGARRGSGRRAEAAARSQPAPPADPDGSPGGAARPIKME

SEQ ID NO: 1876 - protein, 80 aa, Synthetic construct
LRASPGPGELGKVKKEQQDGEADDDKFPVCIREAVSQVLSGYDWTLVPMPVRVNGASKSKPHVKRPMNAFMVWAQAARRK

SEQ ID NO: 1877 - protein, 80 aa, Synthetic construct
NLNFTSPLHPASSQRPTSFFIEDILLHKPKPLREVAPDHFASSLASRVPLLDYGYPLMPTPTLLAPHAHHPLHKGDHHHP

SEQ ID NO: 1878 - protein, 80 aa, Synthetic construct
WMVQPTVITSMSNPYPRSHPYSPLPGLASVPGHMALPRPGVIKTIGTTVGRRRRDEQLSPEEEEKRRIRRERNKLAAAKC

SEQ ID NO: 1879 - protein, 80 aa, Synthetic construct
PAPGLQPMRSGGGSVGAVVVKQEPLEEDSPSSSSAGLDKAQRSVIKPISIAGGFYGEEPLHTPIVVTSTPAVTPGTSNLV

SEQ ID NO: 1880 - protein, 80 aa, Synthetic construct
AEDDTNEEQTTFTNSQTSTEDPGDSTPFEDSEEFCFSAEANSFDGDDEFDTYNEDDEEDESETGYWITCCPTCDVDINTW

SEQ ID NO: 1881 - protein, 80 aa, Synthetic construct
SEEFCFSAEANSFDGDDEFDTYNEDDEEDESETGYWITCCPTCDVDINTWVPFYSTELNKPAMIYCSHGDGHWVHAQCMD

SEQ ID NO: 1882 - protein, 80 aa, Synthetic construct
FGPPEGCADHRPHRYRSFMIEEILTEPPGPKGAAPAAAAAAAGELLKFGVQALLAARPFHSHLAVLKAEQAAVFKFPLAP

SEQ ID NO: 1883 - protein, 80 aa, Synthetic construct
GTANRKERRRTQSINSAFAELRECIPNVPADTKLSKIKTLRLATSYIAYLMDLLAKDDQNGEAEAFKAEIKKTDVKEEKR

SEQ ID NO: 1884 - protein, 80 aa, Synthetic construct
RRERNKIAAAKCRNKKKEKTECLQKESEKLESVNAELKAQIEELKNEKQHLIYMLNLHRPTCIVRAQNGRTPEDERNLFI

SEQ ID NO: 1885 - protein, 80 aa, Synthetic construct
TIESRLSELKSENESLWKEVSELRAKHAQQQQVIRKIVQFIVTLVQNNQLVSLKRKRPLLLNTNGAQKKNLFQHIVKEPT

SEQ ID NO: 1886 - protein, 80 aa, Synthetic construct
LNTAHPQLLVSEDRKAVRYERKKRNICYDPRRFYVCPAVLGSQRFSSGRHYWEVEVGNKPKWILGVCQDCLLRNWQDQPS

SEQ ID NO: 1887 - protein, 80 aa, Synthetic construct
GDPGSEIIESVPPAGPEASESTTDENEDDIQFVSEGPLRPVLEYIDLVSSDDEEPSTSYTDRMPESKVPSSENHRPEMCS

SEQ ID NO: 1888 - protein, 80 aa, Synthetic construct
GALHNCPAISLSKSLIPSITCPFCTFKTFYPEVLMMHQRLEHKYNPDVHKNCRNKSLLRSRRTGCPPALLGKDVPPLSSF

SEQ ID NO: 1889 - protein, 80 aa, Synthetic construct
DSVVFEDVDVNFTQEEWALLDPSQKNLYRDVMQETFRNLASVGKKWKDQKIEDEYKNPRRNLRGLMGERLLESKKDHQHG

SEQ ID NO: 1890 - protein, 80 aa, Synthetic construct
CIKEELMHGECVKEEKDFLKKEIVDDTKVKEEPPINHPVGCKRKLAMSRCETCGTEEAKYRCPRCMRYSCSLPCVKKHKA

SEQ ID NO: 1891 - protein, 80 aa, Synthetic construct
LYPHPQQLSREEKRRRRRATAKYRSAHATRERIRVEAFNLAFAELRKLLPTLPPDKKLSKIEILRLAICYISYLNHVLDV

SEQ ID NO: 1892 - protein, 80 aa, Synthetic construct
GMERNSLGCCEAPKKLSLSFSIEAILKRPARRSDMDRPEGPGEEGPGEAAASGSGLEKPPKDQPQEGRKSKRRVRTTFTT

SEQ ID NO: 1893 - protein, 80 aa, Synthetic construct
QAPPPPSLVPLEATDSLLELPHPLLQQTEDQFLSPTLACSSPLISFSPSLDQDDYLWGLEAGEGISDLFDSYDLGDLLIN

SEQ ID NO: 1894 - protein, 80 aa, Synthetic construct
IRQDSVTKLLTDVQLMKGKQECMDSKLLAMKHENEALWREVASLRQKHAQQQKVVNKLIQFLISLVQSNRILGVKRKIPL

SEQ ID NO: 1895 - protein, 80 aa, Synthetic construct
LTTLGNFSVINSNVIIENLQSTKVAVAQFSQEARCGGASGGKLAVPALMEQLLALQQQQIHQLQLIEQIRHQILLLASQN

SEQ ID NO: 1896 - protein, 80 aa, Synthetic construct
LDTKPVLPTLTTSVGLPLPPTLPSLIPFIKTEEPAPIPISHSATSPPGSVKSDSGGPESATRNLGGLPEEAEGSTLPPSG

SEQ ID NO: 1897 - protein, 80 aa, Synthetic construct
LDLQVRRVRPGEYRQRDSIASRTRSRSQTPNNTVTYESERGGFRRTFSRSERAGVRTYVSTIRIPIRRILNTGLSETTSV

SEQ ID NO: 1898 - protein, 80 aa, Synthetic construct
SVCSENESEAEADQQMDNLYLKALEGFIAVVTQDGDMIFLSENISKFMGLTQVELTGHSIFDFTHPCDHEEIRENLSLKN

SEQ ID NO: 1899 - protein, 80 aa, Synthetic construct
VGLLAAEEGGGLELEGDKEKKGKIFHIDTNALHVPRDGAEVMSPLKNGMIEDWECFRAILDHTYSKHVKSEPNLHPVLMS

SEQ ID NO: 1900 - protein, 80 aa, Synthetic construct
LHPGCFAPLHPPPPPPPPPAELKAEPGFEPADCKRKEEAGAPGGGAGMAAGFPYALRAYLGYQAVPSGSSGSLSTSSSSS

SEQ ID NO: 1901 - protein, 80 aa, Synthetic construct
KAKKTVDKHSDEYKIRRERNNIAVRKSRDKAKMRNLETQHKVLELTAENERLQKKVEQLSRELSTLRNLFKQLPEPLLAS

SEQ ID NO: 1902 - protein, 80 aa, Synthetic construct
CEADILKNTSYKGFFQLMCSKSCCVYFHKICWKKFKNLKYPGENDQSFSGKKCLKEGCTGDMVRMLQCDVPGIVKILFEV

SEQ ID NO: 1903 - protein, 80 aa, Synthetic construct
CKSCGIWYRSERNLQAHLMYYCSGRQREAAPVSEENEDSAHQISSLCPFPQCTKSFSNARALEMHLNSHSGVKMEEFLPP

SEQ ID NO: 1904 - protein, 80 aa, Synthetic construct
QPLSKTWELSLYELQRTPQEAITDGLEIVVSPRSLHSELMCPICLDMLKNTMTTKECLHRFCADCIITALRSGNKECPTC

SEQ ID NO: 1905 - protein, 80 aa, Synthetic construct
IMRSCSGINFEEFYHFLKVIAEKRLLVLREAAAEDGAGLGFEQAAFDVGRITEVLASLVAHPDFQRVDTSAFSPQPKELL

SEQ ID NO: 1906 - protein, 80 aa, Synthetic construct
GGAAVPGAPAAVVVAPPGYVVVQELMVLPAVAAPAVVAIPGPAGSAALTPARQRRRRRARDRPTICGECGKGFSRSTDLV

SEQ ID NO: 1907 - protein, 80 aa, Synthetic construct
ELVTFRDVAIEFSPEEWKCLDPAQQNLYRDVMLENYRNLVSLGFVISNPDLVTCLEQIKEPCNLKIHETAAKPPAICSPF

SEQ ID NO: 1908 - protein, 80 aa, Synthetic construct
HKYLTVKDYLRDIDLICSNALEYNPDRDPGDRLIRHRACALRDTAYAIIKEELDEDFEQLCEEIQESRKKRGCSSSKYAP

SEQ ID NO: 1909 - protein, 80 aa, Synthetic construct
IAELQQAVVEELGISMEELRHFIDEELEKMDCVQQRKKQLAELETWVIQKESEVAHVDQLFDDASRAVTNCESLVKDFYS

SEQ ID NO: 1910 - protein, 80 aa, Synthetic construct
YTSKNSSTQDPSQPNSTKNQSLPKASPVTTSPTAATTQNPVLSKLLMADQDSPLDLTVRKSQSEPSEQDGVLDLSTKKSP

SEQ ID NO: 1911 - protein, 80 aa, Synthetic construct
VHKAANGHSRTKMISTSIKTARKSKRASGLRINDYDNQCDVVYISQPITECHFENQKSILSSRKTARKSTRGYFFNGDCC

SEQ ID NO: 1912 - protein, 80 aa, Synthetic construct
GGSGAGKPKTGHLCLYCGKLYSRKYGLKIHMRTHTGYKPLKCKVCLRPFGDPSNLNKHIRLHAEGNTPYRCEFCGKVLVR

SEQ ID NO: 1913 - protein, 80 aa, Synthetic construct
PGPATLAPSRPLLVPKAERLSPPAPSGSERRLSGDLSSMPGPGTLSVRVSPPQPILSRGRPDSNKTENRRITHISAEQKR

SEQ ID NO: 1914 - protein, 80 aa, Synthetic construct
AFSQGLLTFRDVAIEFSQEEWKCLDPAQRTLYRDVMLENYRNLVSLDISSKCTMKEFLSTAQGNREVFHAGTLQIHESHH

SEQ ID NO: 1915 - protein, 80 aa, Synthetic construct
MSISSDEVNFLVYRYLQESGFSHSAFTFGIESHISQSNINGALVPPAALISIIQKGLQYVEAEVSINEDGTLFDGRPIES

SEQ ID NO: 1916 - protein, 80 aa, Synthetic construct
DSVSFEDVAVAFTQEEWALLDPSQKNLYRDVMQEIFRNLASVGNKSEDQNIQDDFKNPGRNLSSHVVERLFEIKEGSQYG

SEQ ID NO: 1917 - protein, 80 aa, Synthetic construct
LLLANAGVFDDTLGSFSTVFGEEWKEKTDRDFVKFWKDIVDDNEVRDLISDRNKSHEGTSGEWIWESLFHPPRKLGINDI

SEQ ID NO: 1918 - protein, 80 aa, Synthetic construct
KPACRKKKTRTVFSRSQVFQLESTFDMKRYLSSSERAGLAASLHLTETQVKIWFQNRRNKWKRQLAAELEAANLSHAAAQ

SEQ ID NO: 1919 - protein, 80 aa, Synthetic construct
WYHGECVGITEKEAKKMDVYICNDCKRAQEGSSEELYCICRTPYDESQFYIGCDRCQNWYHGRCVGILQSEAELIDEYVC

SEQ ID NO: 1920 - protein, 80 aa, Synthetic construct
EAELIDEYVCPQCQSTEDAMTVLTPLTEKDYEGLKRVLRSLQAHKMAWPFLEPVDPNDAPDYYGVIKEPMDLATMEERVQ

SEQ ID NO: 1921 - protein, 80 aa, Synthetic construct
STMDSAGLGQEAPALFRPCTPAVWAPAPAAGGPRSPPPLLLLPESLPGSSASVPPPQPASSRCAESPGLGLRVWRPWGSP

SEQ ID NO: 1922 - protein, 80 aa, Synthetic construct
QLLPPPAPTHHPTVIVPAPPPPPSHHINVVTMGPSSVINSVSTSRQNLDTIVQAIQHIEGTQEKQELEEEQRRAVIVKPV

SEQ ID NO: 1923 - protein, 80 aa, Synthetic construct
TPRKRKSSSETQIQECFLSPFRKPLSQLTNQPPCLDSSQHEAFIRSILSKPFKVPIPNYQGPLGSRALGLKRAGVRRALH

SEQ ID NO: 1924 - protein, 80 aa, Synthetic construct
TSWLKDFPWLRYSKDTGLMSCGWCQKTPADGGSVDLPPVGHDELSRGTRNYKKTLLLRHHVSTEHKLHEANAQESEIPSE

SEQ ID NO: 1925 - protein, 80 aa, Synthetic construct
MQPPVAYPEENTLLIKEEPDLDGALLSGPDGDRNVNANLLAEAGTSQDGGDAGTSHDFKYGLMPGPSNDFKYGLIPGTSN

SEQ ID NO: 1926 - protein, 80 aa, Synthetic construct
PELGAALGIYGAPYAAAAAAQSYPGYLPYSPEPPSLYGALNPQYEFKEAAGSFTSSLAQPGAYYPYERTLGQYQYERYGA

SEQ ID NO: 1927 - protein, 80 aa, Synthetic construct
VELSGAGRRKNATRETTSTLKAWLNEHRKNPYPTKGEKIMLAIITKMTLTQVSTWFANARRRLKKENKMTWAPKNKGGEE

SEQ ID NO: 1928 - protein, 80 aa, Synthetic construct
SPYEMEITDGPHTKVVRRIFTNSRERWRQQNVNGAFAELRKLIPTHPPDKKLSKNEILRLAMKYINFLAKLLNDQEEEGT

SEQ ID NO: 1929 - protein, 80 aa, Synthetic construct
DTQIITLQVVNMEEQPINIGELQLVQVPVPVTVPVATTSVEELQGAYENEVSKEGLAESEPMICHTLPLPEGFQVVKVGA

SEQ ID NO: 1930 - protein, 80 aa, Synthetic construct
PMICHTLPLPEGFQVVKVGANGEVETLEQGELPPQEDPSWQKDPDYQPPAKKTKKTKKSKLRYTEEGKDVDVSVYDFEEE

SEQ ID NO: 1931 - protein, 80 aa, Synthetic construct
LPLPKQLVCRWAKCNQLFELLQDLVDHVNDYHVKPEKDAGYCCHWEGCARHGRGFNARYKMLIHIRTHTNEKPHRCPTCS

SEQ ID NO: 1932 - protein, 80 aa, Synthetic construct
NPQQQRMAAIGTDKELSDLLDFSAMFSPPVNSGKTRPTTLGSSQFSGSGIDERGGTTSWGTSGQPSPSYDSSRGFTDSPH

SEQ ID NO: 1933 - protein, 80 aa, Synthetic construct
LASAIREELNGAMEHTNSNESDSSPGRSPMQAVHPVHVKEEPLDPEEAEGPLSLVTTANHSPDFDHDRDYEDEPVNEDME

SEQ ID NO: 1934 - protein, 80 aa, Synthetic construct
LNTSNREVKVYVCKSGRLTAIPFWYHMYLDEEIRLDTSSEASHWKQAAVVLDNPIQVEMGEELVLSIQHHKSNVSITVKQ

SEQ ID NO: 1935 - protein, 80 aa, Synthetic construct
KCVCNSCGLEIVDKYLLKVNDLCWHVRCLSCSVCRTSLGRHTSCYIKDKDIFCKLDYFRRYGTRCSRCGRHIHSTDWVRR

SEQ ID NO: 1936 - protein, 80 aa, Synthetic construct
AKGNVYHLACFACFSCKRQLSTGEEFALVEEKVLCRVHYDCMLDNLKREVENGNGISVEGALLTEQDVNHPKPAKRARTS

SEQ ID NO: 1937 - protein, 80 aa, Synthetic construct
SLKFRSEERPVKKRKVQSCHLQKKQLRLLEAMVEEQRRLSRAVEETCREVRRVLDQQHILQVQSLQLQERMMSLLERIIT

SEQ ID NO: 1938 - protein, 80 aa, Synthetic construct
VAIGKGDETPLTNVKTEASPESMLSPSHGSNPIEDPLEAETQHKFEMSDSLKEESGTIFGSQIKDAPGEDEEEDGVSEAA

SEQ ID NO: 1939 - protein, 80 aa, Synthetic construct
IQPPREYSSVSPCPRSAPIPQASPIPHPHVYQPPPLGHPATLFGTPPRFSFHHPYFLPGPHYFPSSTCPYSRPPFGYGNF

SEQ ID NO: 1940 - protein, 80 aa, Synthetic construct
GPQPPERKRRRRTAFTQFQLQELENFFDESQYPDVVARERLAARLNLTEDRVQVWFQNRRAKWKRNQRVLMLRNTATADL

SEQ ID NO: 1941 - protein, 80 aa, Synthetic construct
IRKMPENSDLLPVAQTEPSIWTVDDVWAFIHSLPGCQDIADEFRAQEIDGQALLLLKEDHLMSAMNIKLGPALKICARIN

SEQ ID NO: 1942 - protein, 80 aa, Synthetic construct
PTQSKKEKKDKVEKEKSEKETTSKKNSHKKTRPRLKNVDRSSAQHLEVTVGDLTVIITDFKEKTKSPPASSAASADQHSQ

SEQ ID NO: 1943 - protein, 80 aa, Synthetic construct
KLVNLGFATLREHVPNGAANKKMSKVETLRSAVEYIRALQQLLDEHDAVSAAFQAGVLSPTISPNYSNDLNSMAGSPVSS

SEQ ID NO: 1944 - protein, 80 aa, Synthetic construct
NPVANWIHARSTRKKRCPYTKYQTLELEKEFLFNMYLTRDRRYEVARVLNLTERQVKIWFQNRRMKMKKMNKEKTDKEQS

SEQ ID NO: 1945 - protein, 80 aa, Synthetic construct
DQQKGEISGFGQCLVWVQCSFPNCGKWRRLCGNIDPSVLPDNWSCDQNTDVQYNRCDIPEETWTGLESDVAYASYIPGSI

SEQ ID NO: 1946 - protein, 80 aa, Synthetic construct
GLLKRKQRRYRTTFTSYQLEELERAFQKTHYPDVFTREELAMRLDLTEARVQVWFQNRRAKWRKREKAGAQTHPPGLPFP

SEQ ID NO: 1947 - protein, 80 aa, Synthetic construct
RQRQAANARERDRTQSVNTAFTALRTLIPTEPVDRKLSKIETVRLASSYIAHLANVLLLGDSADDGQPCFRAAGSAKGAV

SEQ ID NO: 1948 - protein, 80 aa, Synthetic construct
GVLGPAGLGPAQTPPYRPGPPDPPPPPRHLPTQFNLLASSSAAAAAAEQSSPQLYNFSGAAPGPPPPERALPRQDTVIKH

SEQ ID NO: 1949 - protein, 80 aa, Synthetic construct
SGDAISGTDHNSLDSSLTREKIEAKIKEVEEKQPEMKSGFMASFLDFLKSGKRHPPLYQAGLTPPLSPPKSVPPSVPARG

SEQ ID NO: 1950 - protein, 80 aa, Synthetic construct
HLLVNIEKQKLELEKRRLDIEAERLQVEKERLQIEKERLRHLDMEHERLQLEKERLQIEREKLRLQIVNSEKPSLENELG

SEQ ID NO: 1951 - protein, 80 aa, Synthetic construct
KVKEEKEKKEIKVEVEVEVKEEENEIREDEEPPRKRGRRRKDDKSPRLPKRRKKPPIQYVRCEMEGCGTVLAHPRYLQHH

SEQ ID NO: 1952 - protein, 80 aa, Synthetic construct
RRKKPPIQYVRCEMEGCGTVLAHPRYLQHHIKYQHLLKKKYVCPHPSCGRLFRLQKQLLRHAKHHTDQRDYICEYCARAF

SEQ ID NO: 1953 - protein, 80 aa, Synthetic construct
DNVQSLPLWPLPKGQMSREKQPDPESAPSQKLTGIAQPKKKVKVSVTSPSSPELVSPEEHADFSSFLLLVDAAVQRAAEL

SEQ ID NO: 1954 - protein, 80 aa, Synthetic construct
QAPLGQHQLPIKTVTQNGTHVASVPTAVHGQVNNAAASPLHMLATHASASASLPTKRHNGDQPEQPELKRIKTEDGEGIV

SEQ ID NO: 1955 - protein, 80 aa, Synthetic construct
RTSNSKTSSIEECSSLPVFPTNDLLLKTVENGLCSSSFPNSGGPSQNFTSNSSRVSVISGPQNTRSSHLNKKGNSASKRR

SEQ ID NO: 1956 - protein, 80 aa, Synthetic construct
PASAAELSSVRKEEETAVAIQTIEEHPASFDWSSFKPMGFEVSFLKFLEESAVKQKKNTDKDHPNTGNKKGSHSNSRKNI

SEQ ID NO: 1957 - protein, 80 aa, Synthetic construct
GSHSNSRKNIDKTAVTSGNHVCPCKESETFVQFANPSQLQCSDNVKIVLDKNLKDCTELVLKQLQEMKPTVSLKKLEVHS

SEQ ID NO: 1958 - protein, 80 aa, Synthetic construct
PCKESETFVQFANPSQLQCSDNVKIVLDKNLKDCTELVLKQLQEMKPTVSLKKLEVHSNDPDMSVMKDISIGKATGRGQY

SEQ ID NO: 1959 - protein, 80 aa, Synthetic construct
ITKNVHTVSVEKCSENGTVDVADKLVTFGLAKNITPQRQSALNTEKMYRMNCCCTELQKQVEKHEHILLFLLNNSTNQNK

SEQ ID NO: 1960 - protein, 80 aa, Synthetic construct
HLDSGPSTAKLDYSKFQELVLPHFGKEDAGDVQQFYDLLSGSLEVIRKWAEKIPGFAELSPADQDLLLESAFLELFILRL

SEQ ID NO: 1961 - protein, 80 aa, Synthetic construct
SLPSHHGKKMRMARCGHCRGCLRVQDCGSCVNCLDKPKFGGPNTKKQCCVYRKCDKIEARKMERLAKKGRTIVKTLLPWD

SEQ ID NO: 1962 - protein, 80 aa, Synthetic construct
RHAYHPACLGPSYPTRATRKRRHWICSACVRCKSCGATPGKNWDVEWSGDYSLCPRCTQLYEKGNYCPICTRCYEDNDYE

SEQ ID NO: 1963 - protein, 80 aa, Synthetic construct
KNWDVEWSGDYSLCPRCTQLYEKGNYCPICTRCYEDNDYESKMMQCAQCDHWVHAKCEGLSDEDYEILSGLPDSVLYTCG

SEQ ID NO: 1964 - protein, 80 aa, Synthetic construct
EFVQHRCDPAREKPLKCPDCEKRFKYASDLQRHRRVHTGEKPYKCPNCDKAFKQREHLNKHQGVHAREQQFKCVWCGERF

SEQ ID NO: 1965 - protein, 80 aa, Synthetic construct
FVDEHEPSMVSSSCISVIKHSPQSSLSDVSEVSSVEHTQESSVQGSCRSPENKFQIIKQEPMELESYTREPRDDRGSYTA

SEQ ID NO: 1966 - protein, 80 aa, Synthetic construct
LQVNRSSSNSPRTSETDDGVVGKSSDGEDEQQVPKGPIHSPVELKHVHATVVKVPEVNSSALPHKLRIKAKAMQIKVEAF

SEQ ID NO: 1967 - protein, 80 aa, Synthetic construct
SASPGINVPPGTNRPGLGQNENLSAIEGKGKVGGLKTRCSSCNVKFESESELQNHIQTIHRELVPDSNSTQLKTPQVSPM

SEQ ID NO: 1968 - protein, 80 aa, Synthetic construct
IALHFEPPNAPLNRKGLVSPQSPQKSDCQPNSPTESCSSKNACILQASGSPPAKSPTDPKACNWKKYKFIVLNSLNQNAK

SEQ ID NO: 1969 - protein, 80 aa, Synthetic construct
IHWVCRKCGFGVCLDCYRLRKSRPRSETEEMGDEEVFSWLKCAKGQSHEPENLMPTQIIPGTALYNIGDMVHAARGKWGI

SEQ ID NO: 1970 - protein, 80 aa, Synthetic construct
WSSQKMDHILICCVCLGDNSEDADEIIQCDNCGITVHEGCYGVDGESDSIMSSASENSTEPWFCDACKCGVSPSCELCPN

SEQ ID NO: 1971 - protein, 80 aa, Synthetic construct
EPAEKKASRLSEEEQRLVQQAFQRNFFSMARQLPMKIRINGREDRAEASAAALNLTTSSIGSINMSVDIDGTTYAGVLFA

SEQ ID NO: 1972 - protein, 80 aa, Synthetic construct
AFTQLTFRDVAIEFSQDEWKCLNSTQRTLYRDVMLENYRNLVSLDLSRNCVIKELAPQQEGNPGEVFHTVTLEQHEKHDI

SEQ ID NO: 1973 - protein, 80 aa, Synthetic construct
SWFLVEKHWYKQWEAYVQGGDQDSSTFPGCINNATLFQDEINWRLKEGLVEGEDYVLLPAAAWHYLVSWYGLEHGQPPIE

SEQ ID NO: 1974 - protein, 80 aa, Synthetic construct
QAQDSHNMQFLNTGSFNFLSNTGAASCQGATLPPNSPNGYYGSNINYPESHRLGSMVNQHVSVISSIRSLPPYSDIHDPL

SEQ ID NO: 1975 - protein, 80 aa, Synthetic construct
TLPPNSPNGYYGSNINYPESHRLGSMVNQHVSVISSIRSLPPYSDIHDPLNILDDSGRKQTSSFYTDTSSPVACRTPVLA

SEQ ID NO: 1976 - protein, 80 aa, Synthetic construct
LKKSRKEEAGAGEQHQDCEPAAAAVRITLTLFEPDHKRCPEFFYPELVKNIRGKVKGLQPGDKKKDLSDPFNDEEKERHK

SEQ ID NO: 1977 - protein, 80 aa, Synthetic construct
WTPREPRCVQLINHLHAVATQFLPTPQLLTQQVPLSKGTGAPSAAGSAAAPCLERAGQKLEPLAYCVPVIQRTQPSAELA

SEQ ID NO: 1978 - protein, 80 aa, Synthetic construct
PCLERAGQKLEPLAYCVPVIQRTQPSAELAAENDTDTDSGYGGEAEARPDREKGKGAGASRVTIKQEPPGEDSPAPKRMK

SEQ ID NO: 1979 - protein, 80 aa, Synthetic construct
QQQQQQQQQQAQTLAQAQAQVQAHLQQELQQQAALIQSQLFNPTLLPHFPMTTETLLQLQQQQHLLFPFYIPSAEFQLNP

SEQ ID NO: 1980 - protein, 80 aa, Synthetic construct
GEAPTATAATISAPLPTMEYAVDPAQLQALQAALTSDPTALLTSQFLPYFVPGFSPYYAPQIPGALQSGYLQPMYGMEGL

SEQ ID NO: 1981 - protein, 80 aa, Synthetic construct
APEPGPPPSVITFAHPAPSVIVHGGSSSGGGGSGTASTGGSQAASVITYTAPPRPPKKREYPPPPPEPAATPTSPATAVS

SEQ ID NO: 1982 - protein, 80 aa, Synthetic construct
PAALAPVRPTHSSVRQVEDGLTFPDYSDSTEVKFEELKNVKLEEEDEEEEQAAAALDLSVNPASVGGRLVFSGSKKKSSS

SEQ ID NO: 1983 - protein, 80 aa, Synthetic construct
AGQKVISKHKNGRFYQCEVVRLTTETFYEVNFDDGSFSDNLYPEDIVSQDCLQFGPPAEGEVVQVRWTDGQVYGAKFVAS

SEQ ID NO: 1984 - protein, 80 aa, Synthetic construct
VSLSHSGSAPDVPAVSVIVKNTSRQESFEAEKDHITPSLLHNGFRGSDLPPDPHNCGKFDSTFMNGDSARSFPGKLEPPK

SEQ ID NO: 1985 - protein, 80 aa, Synthetic construct
VLEALAKFPVPELHMFDHFCKKEPKPEPLPLGSQQEHEQSGQNTVEPHKDPDATRFFGEALEFNSHPSNSIGESKGLARE

SEQ ID NO: 1986 - protein, 80 aa, Synthetic construct
VPASGYCCLECGDAFALEKSLSQHYGRRSVHIEVLCTLCSKTLLFFNKCSLLRHARDHKSKGLVMQCSQLLVKPISADQM

SEQ ID NO: 1987 - protein, 80 aa, Synthetic construct
VGDAPGTSNGATVSSTKRHKSLFQCAKCSFATDSGLEFQSHIPQHQVDSSTAQCLLCGLCYTSASSLSRHLFIVHKVRDQ

SEQ ID NO: 1988 - protein, 80 aa, Synthetic construct
MDFSPENGVFSPLATPSLIPQAALELKQAFREALQAVEATQGQQQQLRGMVPIVLVAKLGPQVMAAARVPPRLQPEELGL

SEQ ID NO: 1989 - protein, 80 aa, Synthetic construct
VRQPPPRVRPVPSLVPRPPQTSLVKFVGNIYTLKCRFCEVEFQGPLSIQEEWVRHLQRHILEMNFSKADPPPEESQAPQA

SEQ ID NO: 1990 - protein, 80 aa, Synthetic construct
LPSEEMVMTGSQGATRKYKVWMRHRYHSCCNRLGELLGHPSFQVKELALSALLKFVQLEGAHPLEKSKWEGNYLFPRELF

SEQ ID NO: 1991 - protein, 80 aa, Synthetic construct
GVADIRASQVARWTVDEVAEFVQSLLGCEEHAKCFKKEQIDGKAFLLLTQTDIVKVMKIKLGPALKIYNSILMFRHSQEL

SEQ ID NO: 1992 - protein, 80 aa, Synthetic construct
ERVKMINVQRLLEAAEFLERRERECEHGYASSFPSMPSPRLQHSKPPRRLSRAQKHSSGSSNTSTANRSTHNELEKNRRA

SEQ ID NO: 1993 - protein, 80 aa, Synthetic construct
KRRSPDDELLYLPVRGRETYEMLLKIKESLELMQYLPQHTIETYRQQQQQQHQHLLQKQTSIQSPSSYGNSSPPLNKMNS

SEQ ID NO: 1994 - protein, 80 aa, Synthetic construct
RTKDKYRVVYTDHQRLELEKEFHYSRYITIRRKSELAANLGLTERQVKIWFQNRRAKERKVNKKKQQQQQPPQPPMAHDI

SEQ ID NO: 1995 - protein, 80 aa, Synthetic construct
NCLLSPLAGEDDSFLLEGNSNEDCKPLILPDTKPKIKDNGDLVLSSPSNVTLPQVKTEKEDFIELCTPGVIKQEKLGTVY

SEQ ID NO: 1996 - protein, 80 aa, Synthetic construct
TQSCQELFRQQFRKFCYQETPGPREALSRLQELCYQWLMPELHTKEQILELLVLEQFLSILPEELQIWVQQHNPESGEEA

SEQ ID NO: 1997 - protein, 80 aa, Synthetic construct
NGKRKRSQPQHFTYHPVPAIKTEPTDEYDPTLICSPTHGGLGSQPYYPQHPMVAESPSCLVATMAPCQQFRTGLSSPDAR

SEQ ID NO: 1998 - protein, 80 aa, Synthetic construct
SPQEGLPLSQSALSIAKEKNISLQTAIAIEALTQLSSALPQPSHSTPQASCPLPEALSPPAPFRSPQSYLRAPSWPVVPP

SEQ ID NO: 1999 - protein, 80 aa, Synthetic construct
SGNAVVESYSVLGNCRPSDPYSMNSVYSYHSYYAQPSLTSVNGFHSKYALPSFSYYGFPSSNPVFPSQFLGPGAWGHSGS

SEQ ID NO: 2000 - protein, 80 aa, Synthetic construct
NKVAAARCRNKKKERTEFLQRESERLELMNAELKTQIEELKQERQQLILMLNRHRPTCIVRTDSVKTPESEGNPLLEQLE

SEQ ID NO: 2001 - protein, 80 aa, Synthetic construct
HEAVSQLLQTDLSEFRKLPREEEEEEEDDDEEEKAPVTLLDAQSLAQSFFNRLWEVAGQWQKQVPLAARASQRQWLVSIH

SEQ ID NO: 2002 - protein, 80 aa, Synthetic construct
ADAASRALTGSEDYLLLACDGFFDVVPHQEVVGLVQSHLTRQQGSGLRVAEELVAAARERGSHDNITVMVVFLRDPQELL

SEQ ID NO: 2003 - protein, 80 aa, Synthetic construct
RWMSDHLSIKPVKQEETPVLTRIEKQKRKEEEEERQILLAVQKKEQEQMLKEERKRELEEKVKAVEDRAKRRKLREERAW

SEQ ID NO: 2004 - protein, 80 aa, Synthetic construct
ITHLVRTADGRVSPAGGTLDDKPKEQLQRSLPKATETDCNDKCSHNTEVGETRSSTPEMPAVSAFFSLAALAEVAAMENV

SEQ ID NO: 2005 - protein, 80 aa, Synthetic construct
VVRRCPHHERCSDSDGLAPPQHLIRVEGNLRVEYLDDRNTFRHSVVVPYEPPEVGSDCTTIHYNYMCNSSCMGGMNRRPI

SEQ ID NO: 2006 - protein, 80 aa, Synthetic construct
SSPQPKKKPLDGEYFTLQIRGRERFEMFRELNEALELKDAQAGKEPGGSRAHSSHLKSKKGQSTSRHKKLMFKTEGPDSD

SEQ ID NO: 2007 - protein, 80 aa, Synthetic construct
ALPQGLLTFRDVAIEFSQEEWKCLDPAQRTLYRDVMLENYRNLVSLDISSKCMMEFSSIGKGNTEVIHTGTLQRLASHHI

SEQ ID NO: 2008 - protein, 80 aa, Synthetic construct
SEGYYNVDSGQPSPDQSGLDMTGIKQIKQEPIYDLTSVPNLFTYSSFNNGQLAPGITMTEIDRIAQNIIKSHLETCQYTM

SEQ ID NO: 2009 - protein, 80 aa, Synthetic construct
VCKSIQMNQAENSLQEEQEGPLDLTVNRMQEQNTQQGDGVLDLSTKKTSIKSEESSICDPSSENSVAGSTVDAKSEEATK

SEQ ID NO: 2010 - protein, 80 aa, Synthetic construct
MASQEFEVEAIVDKRQDKNGNTQYLVRWKGYDKQDDTWEPEQHLMNCEKCVHDFNRRQTEKQKKLTWTTTSRIFSNNARR

SEQ ID NO: 2011 - protein, 80 aa, Synthetic construct
GSATRKGIVVLIDPLAANGTTDMHTSVPRVKGGQRNITDDSRDQPFIKKMHFTIRLTESASTYRDIVVKKEDGFTQIVLS

SEQ ID NO: 2012 - protein, 80 aa, Synthetic construct
ELWKHRQDLAIVEHTEPRVAESQELSNWRDDIVLRRAALGLRLLPNLTAQCPTQPVSSGHCYNPKGCGTDAVPGSAFQSS

SEQ ID NO: 2013 - protein, 80 aa, Synthetic construct
RSIMAEELVKLTNQNDELEEKVKEIPKLRTQLRDLDQRYNTILQMYGEKAEEAEELRLDLEDVKNMYKTQIDELLRQSLS

SEQ ID NO: 2014 - protein, 80 aa, Synthetic construct
KSQRPCVTHIKTEPVAIFSHQSETTAPPPAPTQALPEFTSIFSSHQTAAPEVNNIFIKQELPTPDLHLSVPTQQGHLYQL

SEQ ID NO: 2015 - protein, 80 aa, Synthetic construct
DQNSSIRVPREKMVYMTVNDSQQEDEDLNVAEIADEVYMEVIVGEEDAAVAAAAAAVHEQQIDEDEMKTFVPIAWAAAYG

SEQ ID NO: 2016 - protein, 80 aa, Synthetic construct
YPMQGELASAISSGKKKRKRCGMCAPCRRRINCEQCSSCRNRKTGHQICKFRKCEELKKKPSAALEKVMLPTGAAFRWFQ

SEQ ID NO: 2017 - protein, 80 aa, Synthetic construct
DGLSERPLRITTDPEVLATQLNSLPGLTYSPHVYSTPKHYIRFTSPFLSEKRRRKEPTENISGSCKKRWLKQALEEENSA

SEQ ID NO: 2018 - protein, 80 aa, Synthetic construct
KRRRKEPTENISGSCKKRWLKQALEEENSAILHRFNSPCQERSRSPAVNGENKSPLLLNDSCSLPDLTTPLKKRRFYQLL

SEQ ID NO: 2019 - protein, 80 aa, Synthetic construct
ISPSLELLHSGLCKFPEVEGKMTTFKEAVTFKDVAVVFTEEELGLLDPAQRKLYRDVMLENFRNLLSVGNQPFHQDTFHF

SEQ ID NO: 2020 - protein, 80 aa, Synthetic construct
VGVGQNTDIQQIAAKNFTDTSLMYPEDTCKSGPSTNTQSGLFNTPPPTPPDLNQDFSGFQLLVDVALKRAAEMELQAKLT

SEQ ID NO: 2021 - protein, 80 aa, Synthetic construct
TSTSEGLEEGEVEGETLLIVESEDQASVDLSHDQSGDSLNSDEGDVSWMEEQLSYFCDKCQKWIPASQLREQLSYLKGDN

SEQ ID NO: 2022 - protein, 80 aa, Synthetic construct
DKPIDNDAEGVWSPDIEQSFQEALAIYPPCGRRKIILSDEGKMYGRNELIARYIKLRTGKTRTRKQVSSHIQVLARRKAR

SEQ ID NO: 2023 - protein, 80 aa, Synthetic construct
AAAGPALLPSPGPAASGASAKAPVRSVVTETVSTYVIRDEWGNQIWICPGCNKPDDGSPMIGCDDCDDWYHWPCVGIMTA

SEQ ID NO: 2024 - protein, 80 aa, Synthetic construct
PKETVEEGVEHDPGMPASKKMQGERGGGAALKENVCQNCEKLGELLLCEAQCCGAFHLECLGLTEMPRGKFICNECRTGI

SEQ ID NO: 2025 - protein, 80 aa, Synthetic construct
QCCGAFHLECLGLTEMPRGKFICNECRTGIHTCFVCKQSGEDVKRCLLPLCGKFYHEECVQKYPPTVMQNKGFRCSLHIC

SEQ ID NO: 2026 - protein, 80 aa, Synthetic construct
QDIDTPEVDLYQLQVNTLRRYKRHFKLPTRPGLNKAQLVEIVGCHFRSIPVNEKDTLTYFIYSVKNDKNKSDLKVDSGVH

SEQ ID NO: 2027 - protein, 80 aa, Synthetic construct
YPPHFYTEHGLATIYSPYLLAGSSPECDAPLLSVYGTQDPRHFLPHPGPIPKHLAPSPATYDHYRFFQQYPSNLPIPYGF

SEQ ID NO: 2028 - protein, 80 aa, Synthetic construct
VKKEEEEEESHRRIKKLKTEKVDPLFTVPAPPPPISSSLTPQILPSYFSPSSSNIAAPVEQLLVRTRSVGVNTCEVGVVT

SEQ ID NO: 2029 - protein, 80 aa, Synthetic construct
WHETEEGVLVVNVTWRNKTYVGTLLDCTKHDWAPPRFCESPTSDLEMRGGRGRGKRARSAAAAPGSEASFTESRGLQNKN

SEQ ID NO: 2030 - protein, 80 aa, Synthetic construct
SGSTQGMKIKKESEEDAEKKDKAEQLDSKKVDHNSASLQPQHQSVITQRHPALAQSLYYGQYAYGLYMDQKSLMATSPAY

SEQ ID NO: 2031 - protein, 80 aa, Synthetic construct
KNDDRKTPVNWKDSRGTRVAVSSPMSQHQSYIQYLHAYPYPQMYDPSHPAYRAVSPVLMHSYPGAYLSPGFHYPVYGKMS

SEQ ID NO: 2032 - protein, 80 aa, Synthetic construct
MLDGMPAVRVKTELLESEQGSPNVHNYPDMEAVPLLLNNVKGEPPEDSLSVDHFQTQTEPVDLSINKARTSPTAVSSSPV

SEQ ID NO: 2033 - protein, 80 aa, Synthetic construct
VQLEDTTSCKTFCSLSCLSSYEEKRKPFVTICTNSILTKCSMCQKTAIIQYEVKYQNVKHNLCSNACLSKFHSANNFIMN

SEQ ID NO: 2034 - protein, 80 aa, Synthetic construct
MEGQSHYFNSSKSITAYKQKPAKPLISVPCKPLKPSDEMIETTSDLGKTELFCSINCFSAYSKAKMESSSVSVVSVVHDT

SEQ ID NO: 2035 - protein, 80 aa, Synthetic construct
ETTSDLGKTELFCSINCFSAYSKAKMESSSVSVVSVVHDTSTELLSPKKDTTPVISNIVSLADTDVALPIMNTDVLQDTV

SEQ ID NO: 2036 - protein, 80 aa, Synthetic construct
LHLPLSPGLPDSMELAKNKSKKRRNRTTFSTFQLEELEKVFQKTHYPDVYAREQLALRTDLTEARVQVWFQNRRAKWRKR

SEQ ID NO: 2037 - protein, 80 aa, Synthetic construct
QGEMDRKCKQVKEKCKEEFVEEIKKLATQHKQLISQTKKKQWCYNCEEEAMYHCCWNTSYCSIKCQQEHWHAEHKRTCRR

SEQ ID NO: 2038 - protein, 80 aa, Synthetic construct
GKEPGMALPQGRLTFRDVAIEFSLAEWKCLNPSQRALYREVMLENYRNLEAVDISSKRMMKEVLSTGQGNTEVIHTGTLQ

SEQ ID NO: 2039 - protein, 80 aa, Synthetic construct
STPNGQHASPSHMTSTNSVKLEMQSDEECDRKPLSREDEIRGHDEGSSLEEPLIESSEVADNRKVQELQGEGGIRLPNGK

SEQ ID NO: 2040 - protein, 80 aa, Synthetic construct
TKAPKGSLKDIYKVFNGEGEQIRAFKCEHCRVLFLDHVMYTIHMGCHGYRDPLECNICGYRSQDRYEFSSHIVRGEHTFH

SEQ ID NO: 2041 - protein, 80 aa, Synthetic construct
MASGDLYEVERIVDKRKNKKGKWEYLIRWKGYGSTEDTWEPEHHLLHCEEFIDEFNGLHMSKDKRIKSGKQSSTSKLLRD

SEQ ID NO: 2042 - protein, 80 aa, Synthetic construct
LKSTTKMSLNERFTNMLKNKQPTPVNIRASMQQQQQLASARNRRLAQQMENRPSVQAALKLKQSLKQRLGKSNIQARLGR

SEQ ID NO: 2043 - protein, 80 aa, Synthetic construct
PTRGYKCLECGDSFALEKSLTQHYDRRSVRIEVTCNHCTKNLVFYNKCSLLSHARGHKEKGVVMQCSHLILKPVPADQMI

SEQ ID NO: 2044 - protein, 80 aa, Synthetic construct
ESPKPLVTPGSTLTLLTRAEAGSPTGGLFNTPPPTPPEQDKEDFSSFQLLVEVALQRAAEMELQKQQDPSLPLLHTPIPL

SEQ ID NO: 2045 - protein, 80 aa, Synthetic construct
KRMPEDLDENMDYRLMWEVRGSKGEVLYILDATNPRHSNWLRFVHEAPSQEQKNLAAIQEGENIFYLAVEDIETDTELLI

SEQ ID NO: 2046 - protein, 80 aa, Synthetic construct
SDSTIHENLTAIPPLIVAETTTVPSLENLRVVLDKALTDCGELALKQLHYLRPVVVLERSKFSTPILDLFPTKKTDELCV

SEQ ID NO: 2047 - protein, 80 aa, Synthetic construct
VIKICEHEMNEIEVCPECYLAACQKRDNWFCEPCSNPHPLVWAKLKGFPFWPAKALRDKDGQVDARFFGQHDRAWVPINN

SEQ ID NO: 2048 - protein, 80 aa, Synthetic construct
PVEIKEELKSTSPASEKADPGAVKDKASPEPEKDFSEKAKPSPHPIKDKLKGKDETDSPTVHLGLDSDSESELVIDLGED

SEQ ID NO: 2049 - protein, 80 aa, Synthetic construct
SSVNADLPIATASADVAADIAKYTSKMMDAIKGTMTEIYNDLSKNTTGSTIAEIRRLRIEIEKLQWLHQQELSEMKHNLE

SEQ ID NO: 2050 - protein, 80 aa, Synthetic construct
IAEIRRLRIEIEKLQWLHQQELSEMKHNLELTMAEMRQSLEQERDRLIAEVKKQLELEKQQAVDETKKKQWCANCKKEAI

SEQ ID NO: 2051 - protein, 80 aa, Synthetic construct
SRIPVSKSQPVTPEKHRARKRQAWLWEEDKNLRSGVRKYGEGNWSKILLHYKFNNRTSVMLKDRWRTMKKLKLISSDSED

SEQ ID NO: 2052 - protein, 80 aa, Synthetic construct
LEEKIRRLEEDRHSIDITSELWNDELQSRKKRKDPFSPDKKKPVVVSGPYIVYMLQDLDILEDWTTIRKAMATLGPHRVK

SEQ ID NO: 2053 - protein, 80 aa, Synthetic construct
MATLGPHRVKTEPPVKLEKHLHSARSEEGRLYYDGEWYIRGQTICIDKKDECPTSAVITTINHDEVWFKRPDGSKSKLYI

SEQ ID NO: 2054 - protein, 80 aa, Synthetic construct
EEMRSSYIRELIKAIGLRQKGVVSSSQRFYQLTKLLDNLHDLVKQLHLYCLNTFIQSRALSVEFPEMMSEVIAAQLPKIL

SEQ ID NO: 2055 - protein, 80 aa, Synthetic construct
SLLGRPKRKRVITYAQRQAANIRERKRMFNLNEAFDQLRRKVPTFAYEKRLSRIETLRLAIVYISFMTELLESCEKKESG

SEQ ID NO: 2056 - protein, 80 aa, Synthetic construct
PPQQEWINQPVRVNVKREYDHMNGSRESPVDCSVSKCSKLVGGGESNPMNYNSYMDEKNGPPPPNMTTNERRVIVPADPT

SEQ ID NO: 2057 - protein, 80 aa, Synthetic construct
RRVIVPADPTLWTQEHVRQWLEWAIKEYSLMEIDTSFFQNMDGKELCKMNKEDFLRATTLYNTEVLLSHLSYLRESSLLA

SEQ ID NO: 2058 - protein, 80 aa, Synthetic construct
KTVQVTGKTRTKEKYRVVYTDHQRLELEKEFHCNRYITIQRKSELAVNLGLSERQVKIWFQNRRAKERKMIKKKISQFEN

SEQ ID NO: 2059 - protein, 80 aa, Synthetic construct
SAYMLRLPPPAGAYIQNEHSYQVGSALLWKRRAEAALDALDKAQRQLQACKRREQRLRLRLTKLQQERAREKRAQADARQ

SEQ ID NO: 2060 - protein, 80 aa, Synthetic construct
RARRGGRSRPKSELALSKQRRSRRKKANDRERNRMHNLNSALDALRGVLPTFPDDAKLTKIETLRFAHNYIWALTQTLRI

SEQ ID NO: 2061 - protein, 80 aa, Synthetic construct
GTATFGNHSSGDFDDGFLRRKQRRNRTTFTLQQLEALEAVFAQTHYPDVFTREELAMKINLTEARVQVWFQNRRAKWRKT

SEQ ID NO: 2062 - protein, 80 aa, Synthetic construct
SSPTPESRSQEPLDLVLVPDDCRPGTPPSDLIEIQVVKVTDTTLVPEPPEPGSFHCALCPAAFRLVSELLFHEHGHLAGA

SEQ ID NO: 2063 - protein, 80 aa, Synthetic construct
TPSIGNSQPSTPAPALPVQDPQLLHHCQHCDMYFADNILYTIHMGCHGYENPFQCNICGCKCKNKYDFACHFARGQHNQH

SEQ ID NO: 2064 - protein, 80 aa, Synthetic construct
LIKPKRRLSAARRAGTCCANCQTTTTTLWRRNANGDPVCNACGLYYKLHNVNRPLTMKKEGIQTRNRKMSNKSKKSKKGA

SEQ ID NO: 2065 - protein, 80 aa, Synthetic construct
CDTVFTHKPLLSSHFDQHLLPQRVSVFKCPSCPLLFAQKRTMLEHLKNTHQSGRLEETAGKGAGGALLTPKTEPEELAVS

SEQ ID NO: 2066 - protein, 80 aa, Synthetic construct
PVADSSPAGAKWTETEIEMLRAAVKRFGDDLNHISCVIKERTVAQIKATVKRKVYEDSGIPLPAESPKKGPKKVASGVLS

SEQ ID NO: 2067 - protein, 80 aa, Synthetic construct
EPVCRHIRKGLEQGNLKKALVNVEWNICQDCKTDNKVKDKAEEETEEKPSVWLCLKCGHQGCGRNSQEQHALKHYLTPRS

SEQ ID NO: 2068 - protein, 80 aa, Synthetic construct
DDSKVVGGKVKKPGKRGRKPAKIDLKAKLERSRQSARECRARKKLRYQYLEELVSSRERAICALREELEMYKQWCMAMDQ

SEQ ID NO: 2069 - protein, 80 aa, Synthetic construct
HAQKVQPPVELFVDWLAVGHVDEFLSFVPAPDGKGFRMLLASPGACFKLFQEKQKCGHGRALLFQGVVDDEQVKTISINQ

SEQ ID NO: 2070 - protein, 80 aa, Synthetic construct
EKMKSEEQPMDLENRSTANVLEETTVKKEKEDEKELVKLPVIVKLEKPLPENEEKKIIKEESDSFKENVKPIKVEVKECR

SEQ ID NO: 2071 - protein, 80 aa, Synthetic construct
HEITEKSTEETEKLKNDQQAKIPLKKREIKLSDDFDSPVKGPLCKSVTPTKEFLKDEIKQEEETCKRISTITALGHEGKQ

SEQ ID NO: 2072 - protein, 80 aa, Synthetic construct
SAASEEEEEKESEEAILADDDEPCKKCGLPNHPELILLCDSCDSGYHTACLRPPLMIIPDGEWFCPPCQHKLLCEKLEEQ

SEQ ID NO: 2073 - protein, 80 aa, Synthetic construct
QQKFHLVPSINTMSGSQELQWMVQPHFLGPSSYPRPLTYPQYSPPQPRPGVIRALGPPPGVRRRPCEQISPEEEERRRVR

SEQ ID NO: 2074 - protein, 80 aa, Synthetic construct
SLNEAFAALRKIIPTLPSDKLSKIQTLKLAARYIDFLYQVLQSDEMDNKMTSCSYVAHERLSYAFSVWRMEGAWSMSASH

SEQ ID NO: 2075 - protein, 80 aa, Synthetic construct
FGKNTVKSDADGTEGSEIEDTDDSPKPAGVAVKTPTEKVEKMFPHRKNVNKPVGGTNVPEMFIKKEELQELKCADVEDED

SEQ ID NO: 2076 - protein, 80 aa, Synthetic construct
HLRAKNSDLLTSPDVGLLKLASPELERLIIQSSNGHITTTPTPTQFLCPKNVTDEQEGFAEGFVRALAELHSQNTLPSVT

SEQ ID NO: 2077 - protein, 80 aa, Synthetic construct
KPVKIKEEPVSDITFPVSEELEADLASGDQSLPMGVLGAQSERFPSNLEVEASPQASSAEVNASPLWNLAHVKMEPQESE

SEQ ID NO: 2078 - protein, 80 aa, Synthetic construct
ERQRVRCVNEGYARLRDHLPRELADKRLSKVETLRAAIDYIKHLQELLERQAWGLEGAAGAVPQRRAECNSDGESKASSA

SEQ ID NO: 2079 - protein, 80 aa, Synthetic construct
YCSQTCQRGVTEQLDGSTWDFCSEDCKSKYLLWYCKAARCHACKRQGKLLETIHWRGQIRHFCNQQCLLRFYSQQNQPNL

SEQ ID NO: 2080 - protein, 80 aa, Synthetic construct
HACKRQGKLLETIHWRGQIRHFCNQQCLLRFYSQQNQPNLDTQSGPESLLNSQSPESKPQTPSQTKVENSNTVRTPEENG

SEQ ID NO: 2081 - protein, 80 aa, Synthetic construct
CVPKLSNSDSQDIQGRNRDSQNGAIAPGHVSVIRPPQNLYPENIVPSFSPGPSGRYGASGRSEGGRNSRVTPAAANYRSR

SEQ ID NO: 2082 - protein, 80 aa, Synthetic construct
RLEPLYERVGAPALRPLVIKQEPREEDEAKQLALAGLFPYQPPPPPPPSHPHPHPPPAHLAAPHLQFQIAHCGQTTMHLQ

SEQ ID NO: 2083 - protein, 80 aa, Synthetic construct
QSRELEDGPADMQKVRICSEGGWVPALFDEVAIYFSDEEWEVLTEQQKALYREVMRMNYETVLSLEFPFPKPDMITRLEG

SEQ ID NO: 2084 - protein, 80 aa, Synthetic construct
QLDELLCPPTTVEGRNDEKALLEQLVSFLSGKDETELAELDRALGIDKLVQGGGLDVLSERFPPQQATPPLIMEERPNLY

SEQ ID NO: 2085 - protein, 80 aa, Synthetic construct
HGLRIAPPEAPITGYMFGKGIYFADMSSKSANYCFASRLKNTGLLLLSEVALGQCNELLEANPKAEGLLQGKHSTKGLGK

SEQ ID NO: 2086 - protein, 80 aa, Synthetic construct
PGAAVAAVERGAAGLPKASPFSVESLLSDSPPRRKAASNAAAAAAAGLDFAPGLPCAPRTLIGKGHFLLYPITQPLGFLV

SEQ ID NO: 2087 - protein, 80 aa, Synthetic construct
PLLKAPSPAGPLHKGKKAVNKDSLEYRLRRERNNIAVRKSRDKAKRRILETQQKVLEYMAENERLRSRVEQLTQELDTLR

SEQ ID NO: 2088 - protein, 80 aa, Synthetic construct
MAVQPKETLQLESAAEVGFVRFFQGMPEKPTTTVRLFDRGDFYTAHGEDALLAAREVFKTQGVIKYMGPAGAKNLQSVVL

SEQ ID NO: 2089 - protein, 80 aa, Synthetic construct
PTIDAEAYAIGKKEKPPFLPEEPSSSSEEDDPIPDELLCLICKDIMTDAVVIPCCGNSYCDECIRTALLESDEHTCPTCH

SEQ ID NO: 2090 - protein, 80 aa, Synthetic construct
ICKDIMTDAVVIPCCGNSYCDECIRTALLESDEHTCPTCHQNDVSPDALIANKFLRQAVNNFKNETGYTKRLRKQLPPPP

SEQ ID NO: 2091 - protein, 80 aa, Synthetic construct
RKVDTGGFLSESKDCKPPVYLLLELEDKDGLQSAQPTEGQGSLLTNWPSVPPTIKEEENSEEELAAATTSKEQEPIGTDL

SEQ ID NO: 2092 - protein, 80 aa, Synthetic construct
PPTIKEEENSEEELAAATTSKEQEPIGTDLDAVRTPEPLEEFPKREDQEGSPPETSLPYKWVVEAANLLIPAVGSSLSEA

SEQ ID NO: 2093 - protein, 80 aa, Synthetic construct
SPPETSLPYKWVVEAANLLIPAVGSSLSEALDLIESDPDAWCDLSKFDLPEEPSAEDSINNSLVQLQASHQQQVLPPRQP

SEQ ID NO: 2094 - protein, 80 aa, Synthetic construct
IQAEHSYSLSGDSAPQSPLVPIKMEDTTQDAEHGAWALGHKLCSIMVKQEQSPELPVDPLAAPSAMAAAAAMATTPLLGL

SEQ ID NO: 2095 - protein, 80 aa, Synthetic construct
SRGSLTPHPAACDKDGQTDSAAEESSSQETSKGLGPNMSSTPAHEVGRRTSVLFSKKNPKTAGPPKRPGRPPKNRESQMT

SEQ ID NO: 2096 - protein, 80 aa, Synthetic construct
EASGTVCLDVINQTWTALYDLTNIFESFLPQLLAYPNPIDPLNGDAAAMYLHRPEEYKQKIKEYIQKYATEEALKEQEEG

SEQ ID NO: 2097 - protein, 80 aa, Synthetic construct
EKWYLSTDFPSTSIKTEPVTDEPPPGLVPSVTLTITAISTPLEKEEPPLEMNTGVDSSCQTIIPKIKLEPHEVDQFLNFS

SEQ ID NO: 2098 - protein, 80 aa, Synthetic construct
SPKKNLRESKQREEDDEDPDLIYVGVEHVHRDAEVLFVGMISNSKPVVSNILNRVTPGSNSRRKKGHFRQYPAHVSQPAN

SEQ ID NO: 2099 - protein, 80 aa, Synthetic construct
SPTRPQIRQKIENKPLQEQLSVNQIKTEPVDYEFKPIVVASGINCSTPLQNGVFTGGGPLQATSSPQGMVQAVVLPTVGL

SEQ ID NO: 2100 - protein, 80 aa, Synthetic construct
SPPLPPEAAHFLFGEPTLRKRKSPAQVMFQCLWKSCGKVLSTASAMQRHIRLVHLGRQAEPEQSDGEEDFYYTELDVGVD

SEQ ID NO: 2101 - protein, 80 aa, Synthetic construct
PHYSFNHPFSINNLMSSSEQQHKLDFKAYEQALQYSPYGSTLPASLPLGSASVTTRSPIEPSALEPAYYQGVYSRPVLNT

SEQ ID NO: 2102 - protein, 80 aa, Synthetic construct
NFPHSLYPFTDRALAHNLLVKAEPKSPRDALKVGGPSAECPFDLTTKPKDVKPILPMPKGPSAPASGEEQPLDLSIGSRA

SEQ ID NO: 2103 - protein, 80 aa, Synthetic construct
PFDLTTKPKDVKPILPMPKGPSAPASGEEQPLDLSIGSRARASQNGGGREPRKNHVYGERKLGAGEGLPQVCPARMPQQP

SEQ ID NO: 2104 - protein, 80 aa, Synthetic construct
ESVTFRDVTVDFTQEEWQQLEPAQKDLYRDVMLENYRNLVSLDWETRPEMKELDPKNDISEDKLSVVGEATGGPTRNGAR

SEQ ID NO: 2105 - protein, 80 aa, Synthetic construct
GQVVQEGTRRYRLCNECLAEFGIDSLPIDLEAEQHLMSPSDGDKDSRWHLSEDENRSYVEIVEDGSADLVIQQVDDSEEE

SEQ ID NO: 2106 - protein, 80 aa, Synthetic construct
KSVPSLEGPTGFQPRTPKPGSGSESGKERRTTSKEISVIQHTSSFEKSDSLEQPSGLEGEDKPLAQFPSPPPAPHGRSAH

SEQ ID NO: 2107 - protein, 80 aa, Synthetic construct
NIQVPEILVTEEPDRPDTEPEPPPKEPEKTEEFQWPQRSQTLAQLPAEKLPPKKKRLRLAEMAQSSGESSFESSVPLSRS

SEQ ID NO: 2108 - protein, 80 aa, Synthetic construct
FFSTQAMSSLLSSPYSMPPLPPSLFQAPPLPLQPTVLHPGQLHLPQLMPHPANIPFRQPPSFLPMPYPTSSALSSGFFLP

SEQ ID NO: 2109 - protein, 80 aa, Synthetic construct
VLQFPSLHTTTNVSWCYLNYIKPNHIQHADRRSSVYAGWCISLYNPNLPGVSTKAALSLLRSKQKVSKETYTMATAPHPE

SEQ ID NO: 2110 - protein, 80 aa, Synthetic construct
EGDQPKTPENIPSKEPKDGSPVQPSLLSLMKDRRLTLEQVVAIEALTQLSEAPSENSSPSKSEKDEESEQRTASLLNSCK

SEQ ID NO: 2111 - protein, 80 aa, Synthetic construct
DVKGPPPVKVARLEQNGSPMGARGRPNGAVAKAVGGLMIPVFCVVEQLDGSLEYDNREEHAEFVLVRKDVLFSQLVETAL

SEQ ID NO: 2112 - protein, 80 aa, Synthetic construct
LGKHQHMHDRDDLYAEQMEREMRHKLKTAFKNFIEKVEALTKEELEFEVPFRDLGFNGAPYRSTCLLQPTSSALVNATEW

SEQ ID NO: 2113 - protein, 80 aa, Synthetic construct
TGSATRKGIVVLIDPLAANGTTDMHTSVPRVKGGQRNITDDSRGQPFIKKMHFTIRLTESAITYRDIVVKKEDGFTQIVL

SEQ ID NO: 2114 - protein, 80 aa, Synthetic construct
MFAGAGLGGTPCRKSYEDCASGIMEDSAIKCEYMLNAIPKRLCLVCGDIASGYHYGVASCEACKAFFKRTIQGNIEYSCP

SEQ ID NO: 2115 - protein, 80 aa, Synthetic construct
GDCKAAEESERPKPRSRRKPRVLFSQAQVFELERRFKQQRYLSAPEREHLASSLKLTSTQVKIWFQNRRYKCKRQRQDKS

SEQ ID NO: 2116 - protein, 80 aa, Synthetic construct
VTQVVVSEEGAVHMVAGEGAQIIMQEAQGEHMDLVESDGEISQIIVTEELVQAMVQESSGGFSEGTTHYILTELPPGVQD

SEQ ID NO: 2117 - protein, 80 aa, Synthetic construct
SRLPGIPGKALLTETLLQRNEAEKQKGLQEVQITLAARLGEAEEKIKVLHSALKATQAELLELRRKYDEEAASKADEVGL

SEQ ID NO: 2118 - protein, 80 aa, Synthetic construct
GGPGILPPGHSHPDPTPQSPDSETEDQKPTVKELELQEGPEENSTPLTTQDKAQVRIKQEQMEEDAEEEAGSQPQDSGEL

SEQ ID NO: 2119 - protein, 80 aa, Synthetic construct
NEPIIISDDDEQPCPGSDTSSAHYIILSDSLKEEVAHRDKKRCSKVVSFSKPIEKEETVGIFSPLSVKLNIVISPYHFDN

SEQ ID NO: 2120 - protein, 80 aa, Synthetic construct
SAAAYMDFVAAQCLVSISNRAAVPEHGVAPDAERLRLPEREVTKEHGDPGDTWKDYCTLVTIAKSLLDLNKYRPIQTPSV

SEQ ID NO: 2121 - protein, 80 aa, Synthetic construct
EKKHQCEHCDRRFYTRKDVRRHMVVHTGRKDFLCQYCAQRFGRKDHLTRHMKKSHNQELLKVKTEPVDFLDPFTCNVSVP

SEQ ID NO: 2122 - protein, 80 aa, Synthetic construct
FGRKDHLTRHMKKSHNQELLKVKTEPVDFLDPFTCNVSVPIKDELLPVMSLPSSELLSKPFTNTLQLNLYNTPFQSMQSS

SEQ ID NO: 2123 - protein, 80 aa, Synthetic construct
DASRLSGRDPSSWTVEDVMQFVREADPQLGPHADLFRKHEIDGKALLLLRSDMMMKYMGLKLGPALKLSYHIDRLKQGKF

SEQ ID NO: 2124 - protein, 80 aa, Synthetic construct
TIWDGEQKTHCFKERTRSLLREWYLQDPYPNPSKKRELAQATGLTPTQVGNWFKNRRQRDRAAAAKNRLQHQAIGPSGMR

SEQ ID NO: 2125 - protein, 80 aa, Synthetic construct
SPSPGGDAAWSEAGPGPRPLARSASPPKAKNLNGGLRRSVAPAAPTSCDFSPGDLVWAKMEGYPWWPCLVYNHPFDGTFI

SEQ ID NO: 2126 - protein, 80 aa, Synthetic construct
PLLQPAHPTPFYIEDILGRGPAAPTPAPTLPSPNSSFTSLVSPYRTPVYEPTPIHPAFSHHSAAALAAAYGPGGFGGPLY

SEQ ID NO: 2127 - protein, 80 aa, Synthetic construct
RPLHKRKGGQVRFSNDQTIELEKKFETQKYLSPPERKRLAKMLQLSERQVKTWFQNRRAKWRRLKQENPQSNKKEELESL

SEQ ID NO: 2128 - protein, 80 aa, Synthetic construct
GPLTFMDVAIEFSLEEWQCLDTAQRNVYRHVMLENYRNLVFLALCSRFAQDLWLEQNIKDSFQKVTLSRYGKYGHKNLQL

SEQ ID NO: 2129 - protein, 80 aa, Synthetic construct
KRMRAEAMNIKIEPEETTEARTHNLRRRMGCPTPKCENEKEMKSSIKQEPIERKDYIVENEKEKPKSRSKKATNAVDLYV

SEQ ID NO: 2130 - protein, 80 aa, Synthetic construct
KAFQCFDYSQDAEAAHMAATAILNLSTRCWEMPENLSTKPQDLPSKSVDIEVDENGTLDLSMHKHRKRENAFPSSSSCSS

SEQ ID NO: 2131 - protein, 80 aa, Synthetic construct
VLSKAFSRLKTSLPWVPPDTKLSKLDTLRLASSYIAHLRQLLQEDRYENGYVHPVNLTWPFVVSGRPDSDTKEVSAANRL

SEQ ID NO: 2132 - protein, 80 aa, Synthetic construct
EASPLSWTPVPPGPWVPGHWLPPGFSMPPPVVCRLLYQEPAVSLPPFPGFDPGTSLQLPTHGPFTTCPGSHPVLTAPLSG

SEQ ID NO: 2133 - protein, 80 aa, Synthetic construct
QTSARRMGTSLLFQLSVHERELDLVFLDHSYAKPWSAHPDASSARPTRMLFVTPRRQHESTIESDVPIDVETVTSTPMPL

SEQ ID NO: 2134 - protein, 80 aa, Synthetic construct
LKLNSVDPTMSIDLKYLGVQLPLAPATSFPFWNLTGTNPASPDAGFPFVSRTGKTNDFTKIKGWRGKFHSASASRNEGGN

SEQ ID NO: 2135 - protein, 80 aa, Synthetic construct
FWNLTGTNPASPDAGFPFVSRTGKTNDFTKIKGWRGKFHSASASRNEGGNSESSLKNRSAFCSDKLDEYLENEGKLMETS

SEQ ID NO: 2136 - protein, 80 aa, Synthetic construct
NDDLFMMPRIVNVTSLATEGGLVDMGGSKYPHEVPDSKPSDHLKDTVRNEDNSLEDKGRISSRGNRDGRVTLGPTQVFLA

SEQ ID NO: 2137 - protein, 80 aa, Synthetic construct
RTPPKRKKPRTSFSRSQVLELERRFLRQKYLASAERAALAKALRMTDAQVKTWFQNRRTKWRRQTAEEREAERHRAGRLL

SEQ ID NO: 2138 - protein, 80 aa, Synthetic construct
DGRAELPAFPRAGAPPLAASDTVPAAPEGAGAARPAAPLRPTSFSVLDILDPNKFNSRRRRCVLLGPVAPAACAPCASAP

SEQ ID NO: 2139 - protein, 80 aa, Synthetic construct
GQEPAFSFLATLASSSSEEMESQLQERVESSRRAVSQIVTVYDKLQEKVELLSRKLNSGDNLIVEEAVQELNSFLAQENM

SEQ ID NO: 2140 - protein, 80 aa, Synthetic construct
PPRTHMNEGGYNTPVHHPVIKSENSVIKAGVRPESRASEDYVAPPKYKSSLLNRYLNDSLRHVMATNTTMMGKTRQRNHS

SEQ ID NO: 2141 - protein, 80 aa, Synthetic construct
EGNFVYRTDTLENGSNKGESAANRKGPSKDDTYWKEINAAMALTNLAQGKDKLQGTTSCIIQKSSHIAEVKTVKVPLVQQ

SEQ ID NO: 2142 - protein, 80 aa, Synthetic construct
DRDLRSLPLKMEPQSPGEVKKLQKGSSESPFDLTTKRKDEKPLTPVPSKPPVTPATSQDQPLDLSMGSRSRASGTKLTEP

SEQ ID NO: 2143 - protein, 80 aa, Synthetic construct
THSFLHPSYYLYMCDKVVAPNVSLTSAVSQSKELTKTEASKSISRQSEKAHSSGKLQKTVSYPDVSLEEQEKMDLKTSRE

SEQ ID NO: 2144 - protein, 80 aa, Synthetic construct
SYPDVSLEEQEKMDLKTSRELCSRLDASISNNSTSKRKSESATCNLVRDINKVGIGLVAAASSPLLVKDVICEDDKGKIM

SEQ ID NO: 2145 - protein, 80 aa, Synthetic construct
GSRSGSGRPAAANAARERSRVQTLRHAFLELQRTLPSVPPDTKLSKLDVLLLATTYIAHLTRSLQDDAEAPADAGLGALR

SEQ ID NO: 2146 - protein, 80 aa, Synthetic construct
TPAAPPYYCDIKQEADTPGLPKIYAREGPDPYSVRVEDGAGTAGGTVPATIGPAQPFFKEEKEGGVEEAGGPPASLCKLE

SEQ ID NO: 2147 - protein, 80 aa, Synthetic construct
PSPEFRQHGDSDGKRGSPQNLPIEHHFACKECGDTFRLKVLLVQHQRVHSEEKGWECGDCGKVFRGVAEFNEHRKSHVAA

SEQ ID NO: 2148 - protein, 80 aa, Synthetic construct
ENWQRVNTELPVKSPRFALFDLAEGKSYCFRVRCSNSAGVGEPSEATEVTVVGDKLDIPKAPGKIIPSRNTDTSVVVSWE

SEQ ID NO: 2149 - protein, 80 aa, Synthetic construct
IKTEDSLNHSPGQSGFLSYGSSFSTSPTGQSPYTYQMHGTTGFYQGGNGLGNAAGFGSVHQDYPSYPGFPQSQYPQYYGS

SEQ ID NO: 2150 - protein, 80 aa, Synthetic construct
QHIECVVCGDKSSGKHYGQFTCEGCKSFFKRSVRRNLTYTCRANRNCPIDQHHRNQCQYCRLKKCLKVGMRREAVQRGRM

SEQ ID NO: 2151 - protein, 80 aa, Synthetic construct
KAELQQEVEKLASENASMKLELDALRSKYEALQTFARTVARSPVAPARGPLAAGLGPLVPGKVAATSVITIVKSKTDARS

SEQ ID NO: 2152 - protein, 80 aa, Synthetic construct
AAAVEGQRQPESSPGGGSGGGGGSSPGEADTGRRRALMLPAVLQAPGNHQHPHRITNFFIDNILRPEFGRRKDAGTCCAG

SEQ ID NO: 2153 - protein, 80 aa, Synthetic construct
WPHPADPSFYTYMMTHAAATGSLPYPFHSHVPLHYYPHVGVTAAAAAAAASGAAAAASSPFATSIRPLDTFRALSHPYSR

SEQ ID NO: 2154 - protein, 80 aa, Synthetic construct
GEAKLSEEEQPKKKHRRNRTTFTTYQLHELERAFEKSHYPDVYSREELAGKVNLPEVRVQVWFQNRRAKWRRQEKLEVSS

SEQ ID NO: 2155 - protein, 80 aa, Synthetic construct
PSVTVGGSLSSVLGPPVPEIKVKEEVEPMDIMRPVSAVPPLATNTVSPSLALLANNLSMPTSDLPPGASPRKKPRKQQHV

SEQ ID NO: 2156 - protein, 80 aa, Synthetic construct
HDVYERLTNLQEGIIPKKKAATDDDLHRINELIQGNMQRCKLVMDQISEARDSMLKVLDHKDRVLKLLNKNGTVKKVSKL

SEQ ID NO: 2157 - protein, 80 aa, Synthetic construct
GPLTFMDVAIEFSLEEWQCLDTAQQNLYRNVMLENYRNLVFLGIAVSNLDLITCLEQGKEPWNMKRHEMAAKPPAMCSHF

SEQ ID NO: 2158 - protein, 80 aa, Synthetic construct
QEDMQAMVQLIRYMHTYCLPQRKLPPQTPEPLPKACSNPSQQVRSRPWSRHHSKASWAEFSILRELLAQDVLCDVSKPYR

SEQ ID NO: 2159 - protein, 80 aa, Synthetic construct
SILRELLAQDVLCDVSKPYRLATPVYASLTPRSRPRPPKDSQASPGRPSSVEEVRIAASPKSTGPRPSLRPLRLEVKREV

SEQ ID NO: 2160 - protein, 80 aa, Synthetic construct
SERSTCSILEQTDMEAVEALVCMSSWGQRSQKGDLLRIRPLTPVSDSGDVTTTVHMDAATPELPKDFHSLSTLCITPPQS

SEQ ID NO: 2161 - protein, 80 aa, Synthetic construct
PVSPQVTDSKACTATDVLQSSAVVARALSGGAERGLLGLEPVPSSPCRAKGTSVIRHTGESPAACFPTIQTPDCRLSDSR

SEQ ID NO: 2162 - protein, 80 aa, Synthetic construct
EKGELDELGDKCDSNVSSSKKRRHRTTFTSLQLEELEKVFQKTHYPDVYVREQLALRTELTEARVQVWFQNRRAKWRKRE

SEQ ID NO: 2163 - protein, 80 aa, Synthetic construct
EPLTFKDVAIEFSLEEWQCLDTAQRDLYRNVLLENYRNLVFLGIAVSKPYLITCLEQKKEPWNIKRHEMVAKPPVMSFHF

SEQ ID NO: 2164 - protein, 80 aa, Synthetic construct
FQNRRYKTKRRQMAADLLASAPAAKKVAVKVLVRDDQRQYLPGEVLRPPSLLPLQPSYYYPYYCLPGWALSTCAAAAGTQ

SEQ ID NO: 2165 - protein, 80 aa, Synthetic construct
VEPAGRSRFTPELQPKASQSRKRSLATMDSPPHQKQPQRGEVSQKTVIIKEEEEDTAEKPGKEEDVVTPKPGKRKRDQAE

SEQ ID NO: 2166 - protein, 80 aa, Synthetic construct
GGSPPTAFSPASETTFLKFGVNAILSSGPRTETSPALLQSVPPKTFAFPYFEGSFQPFIRSSYFPASSSVVPIPGTFSWP

SEQ ID NO: 2167 - protein, 80 aa, Synthetic construct
SCRDCAVDPTCVLCMECFLGSIHRDHRYRMTTSGGGGFCDCGDTEAWKEGPYCQKHELNTSEIEEEEDPLVHLSEDVIAR

SEQ ID NO: 2168 - protein, 80 aa, Synthetic construct
PHLPPHPPPPPPQHLAAPAHQPQPAAQLHRTTNFFIDNILRPDFGCKKEQPPPQLLVAAAARGGAGGGGRVERDRGQTAA

SEQ ID NO: 2169 - protein, 80 aa, Synthetic construct
GALKNFVIPKIKRDKDGNVTQETKKMEMKGEPKDKVEKIGLVEDLNKGAKPVVVLQKLSLDDVQKLIKDREDKSRSSLKP

SEQ ID NO: 2170 - protein, 80 aa, Synthetic construct
KRKRSQYQRFTYLPANVPIIKTEPTDDYEPAPTCGPVSQGLSPLPRPYYSQQLAMPPDPSSCLVAGFPPCPQRSTLMPAA

SEQ ID NO: 2171 - protein, 80 aa, Synthetic construct
KLLPTVAGIPASKVSKWSTDEVSEFIQSLPGCEEHGKVFKDEQIDGEAFLLMTQTDIVKIMSIKLGPALKIFNSILMFKA

SEQ ID NO: 2172 - protein, 80 aa, Synthetic construct
AETSEGSGSAPAVPEASASPKQRRSIIRDRGPMYDDPTLPEGWTRKLKQRKSGRSAGKYDVYLINPQGKAFRSKVELIAY

SEQ ID NO: 2173 - protein, 80 aa, Synthetic construct
QAIPKKRGRKPGSVVAAAAAEAKKKAVKESSIRSVQETVLPIKKRKTRETVSIEVKEVVKPLLVSTLGEKSGKGLKTCKS

SEQ ID NO: 2174 - protein, 80 aa, Synthetic construct
VSQEGKQVQRNAANARERARMRVLSKAFSRLKTTLPWVPPDTKLSKLDTLRLASSYIAHLRQILANDKYENGYIHPVNLT

SEQ ID NO: 2175 - protein, 80 aa, Synthetic construct
NQLPSSKRMRTAFTSTQLLELEREFASNMYLSRLRRIEIATYLNLSEKQVKIWFQNRRVKHKKEGKGSNHRGGGGGGAGG

SEQ ID NO: 2176 - protein, 80 aa, Synthetic construct
LVGMGHHFLPSEPTKWNVEDVYEFIRSLPGCQEIAEEFRAQEIDGQALLLLKEDHLMSAMNIKLGPALKIYARISMLKDS

SEQ ID NO: 2177 - protein, 80 aa, Synthetic construct
QFKDHLVIHTGDKPNHCTLCDLWFMQGNELRRHLSDAHNISERLVTEEVLSVETRVQTEPVTSMTIIEQVGKVHVLPLLQ

SEQ ID NO: 2178 - protein, 80 aa, Synthetic construct
NRGRRSNHIPEEESSSSSSDEDEDDRKQIDELLGKVVCVDYISLDKKKALWFPALVVCPDCSDEIAVKKDNILVRSFKDG

SEQ ID NO: 2179 - protein, 80 aa, Synthetic construct
AGIQLHPGENADSPADIRIKEEEPDPEEWQLSGDSTLNTNDLTHLRVQVVDEEGDQQHQEGKRLRRVACTCPNCKEGGGR

SEQ ID NO: 2180 - protein, 80 aa, Synthetic construct
GTNLGKKKQHICHIPGCGKVYGKTSHLRAHLRWHSGERPFVCNWMYCGKRFTRSDELQRHRRTHTGEKKFVCPECSKRFM

SEQ ID NO: 2181 - protein, 80 aa, Synthetic construct
VITLERPLRCSSCCCPCCLQEIEIQAPPGVPIGYVIQTWHPCLPKFTIQNEKREDVLKISGPCVVCSCCGDVDFEIKSLD

SEQ ID NO: 2182 - protein, 80 aa, Synthetic construct
APCKLGSQAGEAAKVFGGFQVVPAPDGQFAFLIPNGAFAHSGPVIPVYTSNSGTSVGPNAVSPSSGPSLTADSMWRPWRN

SEQ ID NO: 2183 - protein, 80 aa, Synthetic construct
QSHKGFLEQEGSPLSLGQSQHDLSQSAFLSWLSQTQSHSSLLSSSVLTPDSSPGKLDPAPSQPPEEPEPDEAESSPDPQA

SEQ ID NO: 2184 - protein, 80 aa, Synthetic construct
LKSPPQLEREMASPPECSEMPLDLSSKSNRQKLPLPNQRKTPPMPVLTPVHTSSKALLSTVLSRSQRTTQAAGGNVTSCL

SEQ ID NO: 2185 - protein, 80 aa, Synthetic construct
GISDSPNGFLPNNLEEPACLENSEKPSGKRKCKTKHMATVSEEAKDVVLYCLQKDSEDVNHRDNAGYTALHEACSRGWTD

SEQ ID NO: 2186 - protein, 80 aa, Synthetic construct
TPDGPIPVLLQIQPVPVKQESGTGPASPGQAPENVKVAQLLVNIQGQTFALVPQVVPSSNLNLPSKFVRIAPVPIAAKPV

SEQ ID NO: 2187 - protein, 80 aa, Synthetic construct
EEEELEPWQKKVKEVEDDDDDEPIFVGEISSSKPAISNILNRVNPSSYSRGLKNGALSRGITAAFKPTSQHYTNPTSNPV

SEQ ID NO: 2188 - protein, 80 aa, Synthetic construct
RKPDINCFMIGCDNCNEWFHGDCIRITEKMAKAIREWYCRECREKDPKLEIRYRHKKSRERDGNERDSSEPRDEGGGRKR

SEQ ID NO: 2189 - protein, 80 aa, Synthetic construct
GNNAFRVYRMLPLSERPSKKGKKPKTEKEDKVKHIKQEPVESSLGLSNGVSDLSPEYAVLTSTIKNEVDSTVNIIVVGQS

SEQ ID NO: 2190 - protein, 80 aa, Synthetic construct
GSYLLPGMASFVTSNKPDLQVTIKEESNPVPYNSSWPPFQDLPLSSSMTPASSSSRPDRETRASVIKKTSDITQARVKSC

SEQ ID NO: 2191 - protein, 80 aa, Synthetic construct
EELERQRVELQQEVEKLARENSSMRLELDALRSKYEALQTFARTVARGPVAPSKVATTSVITIVKSTELSSTSVPFSAAS

SEQ ID NO: 2192 - protein, 80 aa, Synthetic construct
AEDWLDCPALGPGWKRREVFRKSGATCGRSDTYYQSPTGDRIRSKVELTRYLGPACDLTLFDFKQGILCYPAPKAHPVAV

SEQ ID NO: 2193 - protein, 80 aa, Synthetic construct
GDGTQRQRLKTLCKDCRAQRIAFNREQRMFKRVGCGECAACQVTEDCGACSTCLLQLPHDVASGLFCKCERRRCLRIVER

SEQ ID NO: 2194 - protein, 80 aa, Synthetic construct
RRQNRKCGACAACLRRMDCGRCDFCCDKPKFGGSNQKRQKCRWRQCLQFAMKRLLPSVWSESEDGAGSPPPYRRRKRPSS

SEQ ID NO: 2195 - protein, 80 aa, Synthetic construct
GTAVLTSPVLVPGCPSKAVDPGLPSVKQEPPDPEEDKEENKDDSASKLAPEEEAGGAGTPVITEIFSLGGTRFRDTAVWL

SEQ ID NO: 2196 - protein, 80 aa, Synthetic construct
EEEDDEDEDDDDDEEDGDEVPVPSFGEAMAYFAMVKRYLTSFPIDDRVQSHILHLEHDLVHVTRKNHARQAGVRGLGHQS

SEQ ID NO: 2197 - protein, 80 aa, Synthetic construct
YPSAPILGGSGPVRKLYDDCSSTIVEDPQTKCEYMLNSMPKRLCLVCGDIASGYHYGVASCEACKAFFKRTIQGNIEYSC

SEQ ID NO: 2198 - protein, 80 aa, Synthetic construct
TFMDNYSTGYDVKPPCLYQMPLSGQQSSIKVEDIQMHNYQQHSHLPPQSEEMMPHSGSVYYKPSSPPTPTTPGFQVQHSP

SEQ ID NO: 2199 - protein, 80 aa, Synthetic construct
TRSGPGLPTSDTKASFEAHVREKFNRMVEAVDRTIEKRIDKLTKELAQKTAELLEVRAAFVQLTQKKQEVQRRERALNRQ

SEQ ID NO: 2200 - protein, 80 aa, Synthetic construct
QDFIENLLQRVELAEKQLEYYQSQQASGFVRDLSGHVLTDISSNRKPKCLSRGHPHSVCNHPDLKAHFHPKGRNHLKKAK

SEQ ID NO: 2201 - protein, 80 aa, Synthetic construct
EVNLFENKNVEVEVLSPAKEPVQPGMPLTVVAPAELVVPANCLAQLIDVKVVNGTQQLVLKLFPLEENNCLEAGRDNGGN

SEQ ID NO: 2202 - protein, 80 aa, Synthetic construct
PVKVVSSNRKQEDNQTEEHKAVSTVGQISSQHKSEYLHINITGEDRSQQPGDKPLELKNSERTNNTNDGPVISSVFSLSS

SEQ ID NO: 2203 - protein, 80 aa, Synthetic construct
QLRLIAAKPDQLIKCPRRNQPVIVLNHPDVDSPEVTNVMKVINKYKGNVLKVVLSERTRCQLGIRRHHVRLTYQNAEEAS

SEQ ID NO: 2204 - protein, 80 aa, Synthetic construct
LTYQNAEEASQIKRQMMLKMKLKKVHKNNYQVVDSLPDDSSQCVFKCWFCGRLYEDQEEWMSHGQRHLIEATRDWDVLSS

SEQ ID NO: 2205 - protein, 80 aa, Synthetic construct
LGDALAGPPRAPGRSGWPAGGAPGSPIPSPPGPGDDLCSDLEEAPEAELSQAPAEGPDLVPAALGSLTTAQIARSVWRPW

SEQ ID NO: 2206 - protein, 80 aa, Synthetic construct
TVSGSCMSTGFSRAVQTHSSKFFEEDGSLKEVHKINEMYASLQEELKSICKKVEDSEQAVDKLVKDVNRLKREIEKRRGA

SEQ ID NO: 2207 - protein, 80 aa, Synthetic construct
KKTLQNRFLTALGNEKQSDTPNPPAVPLQVDSTPKMKMEIGDTLSTAEESSPPKSRVELGKIHFKKHLLHVTSRPLLATT

SEQ ID NO: 2208 - protein, 80 aa, Synthetic construct
DPNNPAANWLHARSTRKKRCPYTKHQTLELEKEFLFNMYLTRDRRYEVARLLNLTERQVKIWFQNRRMKMKKINKDRAKD

SEQ ID NO: 2209 - protein, 80 aa, Synthetic construct
QCPEEPEPTPGLVLSKPALEEEEAPRALSLLSLPPKKRSILGLGQARPLEFLRTCYGGSFLVHESFLYKREKAVGDKVYW

SEQ ID NO: 2210 - protein, 80 aa, Synthetic construct
QRGRPHSRRRHRTTFSPVQLEQLESAFGRNQYPDIWARESLARDTGLSEARIQVWFQNRRAKQRKQERSLLQPLAHLSPA

SEQ ID NO: 2211 - protein, 80 aa, Synthetic construct
DYSEGYSWCLQEAVQFLTLHAASDTQMKLLYHFQRPPAAPAAPAKEPKAPGAAPPPALSAKATAAAAAAHQPACGLWRPW

SEQ ID NO: 2212 - protein, 80 aa, Synthetic construct
QQPLPPQQPPPPPPQQLGSAASAPRTSTSSFLIKDILGDSKPLAACAPYSTSVSSPHHTPKQESNAVHESFRPKLEQEDS

SEQ ID NO: 2213 - protein, 80 aa, Synthetic construct
LTDDSINPPALVHVHMQGQEALFSEDMPLRDVIVHLTKQVNAQTTREANMGTPSQTSQDTSLETGQGYEDEQDGWNSSSK

SEQ ID NO: 2214 - protein, 80 aa, Synthetic construct
SPESALTHQSNEGNSTCEVHQKGSHGVQKSYKCEECPKVFKYLCHLLAHQRRHRNERPFVCPECQKGFFQISDLRVHQII

SEQ ID NO: 2215 - protein, 80 aa, Synthetic construct
RAAEAAATTPRRARTGPAGGQRQSASEREKLRMRTLARALHELRRFLPPSLAPAGQSLTKIETLRLAIRYIGHLSAVLGL

SEQ ID NO: 2216 - protein, 80 aa, Synthetic construct
VRTKTLVKNCIVLIDSTPYRQWYESHYALPLGRKKGAKLTPEEEEILNKKRSKKIQKKYDERKKNAKISSLLEEQFQQGK

SEQ ID NO: 2217 - protein, 80 aa, Synthetic construct
DQLNSEEKKKRKQRRNRTTFNSSQLQALERVFERTHYPDAFVREDLARRVNLTEARVQVWFQNRRAKFRRNERAMLANKN

SEQ ID NO: 2218 - protein, 80 aa, Synthetic construct
ASSPAVDVSCRRREKRRQLDARRSKCRIRLGGHMEQWCLLKERLGFSLHSQLAKFLLDRYTSSGCVLCAGPEPLPPKGLQ

SEQ ID NO: 2219 - protein, 80 aa, Synthetic construct
EVNSQAIAEKQPSQEVKMEAKMEVDQPEPADTQPEDISESKVEDCKMESTETEERSTELKTEIKEEEDQPSTSATQSSPA

SEQ ID NO: 2220 - protein, 80 aa, Synthetic construct
GRKMHQICVLHHEIIWPAGFVCDGCLKKSARTRKENKFSAKRLPSTRLGTFLENRVNDFLRRQNHPESGEVTVRVVHASD

SEQ ID NO: 2221 - protein, 80 aa, Synthetic construct
QHPPDACAFRRGRKKRIPYSKGQLRELEREYAANKFITKDKRRKISAATSLSERQITIWFQNRRVKEKKVLAKVKNSATP

SEQ ID NO: 2222 - protein, 80 aa, Synthetic construct
NRMHDLNAALDNLRKVVPCYSKTQKLSKIETLRLAKNYIWALSEILRSGKRPDLVSYVQTLCKGLSQPTTNLVAGCLQLN

SEQ ID NO: 2223 - protein, 80 aa, Synthetic construct
NRGFARLKALVPFLPQSRKPSKVDILKGATEYIQVLSDLLEGAKDSKKQDPDEQSYSNNSSESHTSSARQLSRNITQHIS

SEQ ID NO: 2224 - protein, 80 aa, Synthetic construct
MADTDLFMECEEEELEPWQKISDVIEDSVVEDYNSVDKTTTVSVSQQPVSAPVPIAAHASVAGHLSTSTTVSSSGAQNSD

SEQ ID NO: 2225 - protein, 80 aa, Synthetic construct
CCSRAYANHMINNHVPRKSPKYLALFKNSVSGIKLACTSCTFVTSVGDAMAKHLVFNPSHRSSSILPRGLTWIAHSRHGQ

SEQ ID NO: 2226 - protein, 80 aa, Synthetic construct
QSLNEAFAALRKIIPTLPSDKLSKIQTLKLAARYIDFLYQVLQSDELDSKMASCSYVAHERLSYAFSVWRMEGAWSMSAS

SEQ ID NO: 2227 - protein, 80 aa, Synthetic construct
TTSQIMARKKRRGIIEKRRRDRINNSLSELRRLVPTAFEKQGSAKLEKAEILQMTVDHLKMLQATGGKGYFDAHALAMDF

SEQ ID NO: 2228 - protein, 80 aa, Synthetic construct
GPPRPHIKTEQPSPGHYGDQPRGSPDYGSCSGQSSATPAAPAGPFAGSQGDYGDLQASSYYGAYPGYAPGLYQYPCFHSP

SEQ ID NO: 2229 - protein, 80 aa, Synthetic construct
HSSPQNPLLDCSLCGKVFSSASSLSKHYLTHSQERKHVCKICSKAFKRQDHLTGHMLTHQKTKPFVCIEQGCSKSYCDYR

SEQ ID NO: 2230 - protein, 80 aa, Synthetic construct
KRVKREPEEVERTEEKVPCSPRERPSHHPTPKLKTKSYRRESILSSSPNAGSKRTPELLGSAESQGIFPCRECERVFDKI

SEQ ID NO: 2231 - protein, 80 aa, Synthetic construct
GLEDDDTKSDSILEDSTIFVAFKGNIDDKDFKWKLDAILKNVPNLLHMESSKLKVQKVEPWNSVRVTFNIPREAAERLRI

SEQ ID NO: 2232 - protein, 80 aa, Synthetic construct
SQLALVRDIRRRGKNKVAAQNCRKRKLETIVQLERELERLTNERERLLRARGEADRTLEVMRQQLTELYRDIFQHLRDES

SEQ ID NO: 2233 - protein, 80 aa, Synthetic construct
HRTTRIKITELNPHLMCALCGGYFIDATTIVECLHSFCKTCIVRYLETNKYCPMCDVQVHKTRPLLSIRSDKTLQDIVYK

SEQ ID NO: 2234 - protein, 80 aa, Synthetic construct
RRRRGRTRVRSEALLHSLRRSRRVKANDRERNRMHNLNAALDALRSVLPSFPDDTKLTKIETLRFAYNYIWALAETLRLA

SEQ ID NO: 2235 - protein, 80 aa, Synthetic construct
DDGSDTEMASGSNRTPVFSFLDLTYWKRQKICCGIIYKGRFGEVLIDTHLFKPCCSNKKAAAEKPEEQGPEPLPISTQEW

SEQ ID NO: 2236 - protein, 80 aa, Synthetic construct
HAYHQDCHVPRAPAPGEGEGTSWVCRQCVFAIATKRGGALKKGPYARAMLGMKLSLPYGLKGLDWDAGHLSNRQQSYCYC

SEQ ID NO: 2237 - protein, 80 aa, Synthetic construct
QPSGFKHPFAIENIIAREYKMPGGLAFSAMQPVPAAYPLPNQLTTMGSSLGTGWPHVYGSAGMIDSATPISMASGDYSAY

SEQ ID NO: 2238 - protein, 80 aa, Synthetic construct
RVPREKMVYMTVNDSQPEDEDLNVAEIADEVYMEVIVGEEDAAAAAAAAAVHEQQMDDNEIKTFMPIAWAAAYGNNSDGI

SEQ ID NO: 2239 - protein, 80 aa, Synthetic construct
TRKSRLELQKDVRKAEEELGELEAKLNENLRRNIERINNEIDQLMNQMQQIETQQRKFKASRDSILSEMKMLKEKRQQSE

SEQ ID NO: 2240 - protein, 80 aa, Synthetic construct
KLKTVPEGDWFCPECRPKQRSRRLSSRQRPSLESDEDVEDSMGGEDDEVDGDEEEGQSEEEEYEVEQDEDDSQEEEEVSL

SEQ ID NO: 2241 - protein, 80 aa, Synthetic construct
RVCQKEELQKQKSELEREVDKLARENAAMRLELDALRGKCEALQGFARSVAAARGPATLVAPASVITIVKSTPGSGSGPA

SEQ ID NO: 2242 - protein, 80 aa, Synthetic construct
YIKAEPASPDSPKGSSETETEPPVALAPGPAPTRCLPGHKEEEDGEGAGPGEQGGGKLVLSSLPKRLCLVCGDVASGYHY

SEQ ID NO: 2243 - protein, 80 aa, Synthetic construct
APTRCLPGHKEEEDGEGAGPGEQGGGKLVLSSLPKRLCLVCGDVASGYHYGVASCEACKAFFKRTIQGSIEYSCPASNEC

SEQ ID NO: 2244 - protein, 80 aa, Synthetic construct
LIARDDLCSSLSQTHHGQSTDHMAVSRPSVIQHVQSFRSKPSEERKTINDIFKHEKLSRSDPHRCSFSKHHLNPLADSYV

SEQ ID NO: 2245 - protein, 80 aa, Synthetic construct
PPCRLCCPATAPQEAPAPEGRALGEEEEEPPRAGEGRPAGREEEEEEEEEGTYHCTECEDSFDNLGELHGHFMLHARGEV

SEQ ID NO: 2246 - protein, 80 aa, Synthetic construct
DDMSDDQGTSVQSKSPDLEASLDTLENNCHVGSDIDFRPKLVNGKGPLDNFLRNRIETSIGQSTVIIDLTEDSNEQPDSL

SEQ ID NO: 2247 - protein, 80 aa, Synthetic construct
EMPFMHSLSFPLSSTGFYPSYGMPYSPSPLTAAPIGLGYYGRYPPTLYPPPPSPSFTTPLPPPSYMHAGHLLLNPAKYHK

SEQ ID NO: 2248 - protein, 80 aa, Synthetic construct
CRLRKAYYNARHEASAQIDEIVGETASEADSSETSVSEKENGHEKDDDVIRCICGLYKDEGLMIQCDKCMVWQHCDCMGV

SEQ ID NO: 2249 - protein, 80 aa, Synthetic construct
EIPSLEEPEREGATANVSEGEKKTEESSQEPQSTCTPEERRHNQRERLNQILLNLLEKIPGKNAIDVTYLLEEGSGRKLR

SEQ ID NO: 2250 - protein, 80 aa, Synthetic construct
LSNPNELQAAIDSNRREGRRQSFGGSLFAYSPGGAHGMLSSPKLPVSSLGLAASTNGSSITPAPKIKKEEDSAIPITVPG

SEQ ID NO: 2251 - protein, 80 aa, Synthetic construct
RLMQRALQQNFLAMAAQLPMSIRINSQASESRQDSAVNLTGTNGSNSISMSVEINGIMYTGVLFAQPPAPTPTSAPNKGG

SEQ ID NO: 2252 - protein, 80 aa, Synthetic construct
CAGCMARSANGQVGGLAPPEPADRPCAGLRCPECSVKFESAEDLESHMQVDHRDLTPETSGPRKGTQTSPVPRKKTYQCI

SEQ ID NO: 2253 - protein, 80 aa, Synthetic construct
AAHQQLRETDIPQLSQASRLSTQQVLDWFDSRLPQPAEVVVCLDEEEEEEEEELPEDDEEEEEEEEEDDDDDDDDVIIQD

SEQ ID NO: 2254 - protein, 80 aa, Synthetic construct
MSGPVPSRARVYTDVNTHRPREYWDYESHVVEWGNQDDYQLVRKLGRGKYSEVFEAINITNNEKVVVKILKPVKKKKIKR

SEQ ID NO: 2255 - protein, 80 aa, Synthetic construct
MDLPGDSSPPGQPRLCRQPLTRALWGARSPKRPRLQLPGAPSPLEKASRRVLAVVLEDVMAVHMVPVVPSKQTSIPQHHS

SEQ ID NO: 2256 - protein, 80 aa, Synthetic construct
SPTGPNTPRAPGRFESPFSVEAILARPDPCAPAASQPSGSACVHPAFWTAASLCATGGLPWACPTSWLPAYLSVGFYPVP

SEQ ID NO: 2257 - protein, 80 aa, Synthetic construct
SCHSQMHRPIKVEPGCKPHACMHTAPPENKTWKKVTKQENPPASCDNVQQKSIIETMEQHLKQFHAKSLFDHKALTLKSQ

SEQ ID NO: 2258 - protein, 80 aa, Synthetic construct
AEKAREKEEECEKYGPDYVPQKSHGKKVKREPAEPHETSEPTYLRFIKSLAERTMSVTTDSTVTTSPYAFTRVTGPYNRY

SEQ ID NO: 2259 - protein, 80 aa, Synthetic construct
PSTVTEDYLRSFRPYHTTDDLRMSSLPPLGLDPATAAAYYHPSYLAPHPFPHPAFRMDDSYCLSALRSPFYPIPTPGSLP

SEQ ID NO: 2260 - protein, 80 aa, Synthetic construct
PRLALSTRYSPDEMNNSPNFEEKKKFLTIFNLTHISAEKRKDKERLVEMLRAMKQKALSAAVADSLTNSPRDSPAVSLSE

SEQ ID NO: 2261 - protein, 80 aa, Synthetic construct
EPGRKDLQHLSREERRRRRRATAKYRTAHATRERIRVEAFNLAFAELRKLLPTLPPDKKLSKIEILRLAICYISYLNHVL

SEQ ID NO: 2262 - protein, 80 aa, Synthetic construct
GKPQQPPGGFAPAAINRSIPCKVIVDHSTTLTSSLSLTVSVESSEASLDLQGRPVRTEASVQPVACPQVSVISRPEPVAN

SEQ ID NO: 2263 - protein, 80 aa, Synthetic construct
VVMAASPGSLHSPQQLAEEATRKRELRLMKNREAAKECRRRKKEYVKCLESRVAVLEVQNKKLIEELETLKDICSPKTDY

SEQ ID NO: 2264 - protein, 80 aa, Synthetic construct
RLQPPGTPSAPPQRRPRKQLNPCRGTERVDPGFEGVTLKFQIKPDSSLQIIPTYSLPCSSRSQESPADAVGGPAAHPGGT

SEQ ID NO: 2265 - protein, 80 aa, Synthetic construct
YQDSFEQRFLEETNRLYAAEGQKLMQEREVPEYLHHVNKRLEEEADRLITYLDQTTQKSLIATVEKQLLGEHLTAILQKG

SEQ ID NO: 2266 - protein, 80 aa, Synthetic construct
RLAMTWPHPADPAFYTYMMSHAAAAGGLPYPFPSHLPLPYYSPVGLGAASAASAAASPFSGSLRPLDTFRVLSQPYPRPE

SEQ ID NO: 2267 - protein, 80 aa, Synthetic construct
FIIKRPFLEPKKHVGGRVMVTDADRSILSPGGSCGPIKVKTEPTEDSGISLEMAAVTVKEESEDPDYYQYNIQAGPSETD

SEQ ID NO: 2268 - protein, 80 aa, Synthetic construct
REPLPAPYQHQLSEPCPPYPQQSFKQEYHDPLYEQAGQPAVDQGGVNGHRYPGAGVVIKQEQTDFAYDSDVTGCASMYLH

SEQ ID NO: 2269 - protein, 80 aa, Synthetic construct
YPGAGVVIKQEQTDFAYDSDVTGCASMYLHTEGFSGPSPGDGAMGYGYEKPLRPFPDDVCVVPEKFEGDIKQEGVGAFRE

SEQ ID NO: 2270 - protein, 80 aa, Synthetic construct
RVKLVNLGFQALRQHVPHGGASKKLSKVETLRSAVEYIRALQRLLAEHDAVRNALAGGLRPQAVRPSAPRGPPGTTPVAA

SEQ ID NO: 2271 - protein, 80 aa, Synthetic construct
LCSKHFEASCFDLTGQTRRLKMDAVPTIFDFCTHIKSMKLKSRNLLKKNNSCSPAGPSNLKSNISSQQVLLEHSYAFRNP

SEQ ID NO: 2272 - protein, 80 aa, Synthetic construct
LRQAFLALQAALPAVPPDTKLSKLDVLVLAASYIAHLTRTLGHELPGPAWPPFLRGLRYLHPLKKWPMRSRLYAGGLGYS

SEQ ID NO: 2273 - protein, 80 aa, Synthetic construct
DLKASPTLGKRKKRRHRTVFTAHQLEELEKAFSEAHYPDVYAREMLAVKTELPEDRIQVWFQNRRAKWRKREKRWGGSSV

SEQ ID NO: 2274 - protein, 80 aa, Synthetic construct
GSAHSVAKEPAKGAAPNAPRTRKKRCPYSKFQIRELEREFFFNVYINKEKRLQLSRMLNLTDRQVKIWFQNRRMKEKKLS

SEQ ID NO: 2275 - protein, 80 aa, Synthetic construct
ELLTFKDVAIEFSPEEWKCLDTSQQNLYRDVMLENYRNLVSLGVSISNPDLVTSLEQRKEPYNLKIHETAARPPAVCSHF

SEQ ID NO: 2276 - protein, 80 aa, Synthetic construct
SDPVEWTVMDVVEYFTEAGFPEQATAFQEQEIDGKSLLLMQRTDVLTGLSIRLGPALKIYEHHIKVLQQGHFEDDDPDGF

SEQ ID NO: 2277 - protein, 80 aa, Synthetic construct
RMEEDSIRLPAHLRLQPIYWSRDDVAQWLKWAENEFSLRPIDSNTFEMNGKALLLLTKEDFRYRSPHSGDVLYELLQHIL

SEQ ID NO: 2278 - protein, 80 aa, Synthetic construct
SIETLLEAARFLEWQAQQQQRAREEQERLRLEQEREQEQKKANSLARLAHTLPVEEPRMEAPPLPLSPPAPPPAPPPPLA

SEQ ID NO: 2279 - protein, 80 aa, Synthetic construct
TLKRNIPNVDDKKTSNLSVLRTALRYIQSLKRKEKEYEHEMERLAREKIATQQRLAELKHELSQWMDVLEIDRVLRQTGQ

SEQ ID NO: 2280 - protein, 80 aa, Synthetic construct
DDSSDNCVIVGFVKPLAERTPELVELSSDSEDLGSYEKMETVKTQEQEQSYSSGDSDVSRCSSPHSVLGKDEQINKGHCD

SEQ ID NO: 2281 - protein, 80 aa, Synthetic construct
STNFPVVWHKTVRGRPKLSRKWYRILKQEHPELAVLADSVDLQESTGIASDSSSDSSSSSSSSSSDSDSECESGSEGDGT

SEQ ID NO: 2282 - protein, 80 aa, Synthetic construct
PAQQSLGSQVKTRTKDKYRVVYTDHQRLELEKEFHYSRYITIRRKAELAATLGLSERQVKIWFQNRRAKERKINKKKLQQ

SEQ ID NO: 2283 - protein, 80 aa, Synthetic construct
RRRTVEDFNKFCTFVLAYAGYIPYPKEELPLRSSPSPANSTAGTIDSDGWDAGFSDIASSVPLPVSDRCFSHLQPTLLQR

SEQ ID NO: 2284 - protein, 80 aa, Synthetic construct
VVEEDYNENAKNGEAKITEAPASEKEIVEVKEENIEDATEKGGEKKEAVAAEVKNEEEDQKEDEEDQNEEKGEAGKEDKD

SEQ ID NO: 2285 - protein, 80 aa, Synthetic construct
MDRRKAATMRERRRLKKVNQAFETLKRCTTTNPNQRLPKVEILRNAIRYIESLQELLREQVENYYSLPGQSCSEPTSPTS

SEQ ID NO: 2286 - protein, 80 aa, Synthetic construct
KAANQVEETLHTHLPQTPETNFRDSSYPFANKESIGSELGNSFASNIRIKEEPLDDEYDKAMAPQQGLLDKIKDEPDNAQ

SEQ ID NO: 2287 - protein, 80 aa, Synthetic construct
NKESIGSELGNSFASNIRIKEEPLDDEYDKAMAPQQGLLDKIKDEPDNAQEYSHGQQQKTQEGELKISAVFSVSGSPLAP

SEQ ID NO: 2288 - protein, 80 aa, Synthetic construct
SCKTSAIPQYHLAMSDGSIRNFCSYSCVVAFQNLFNKPTGMNSSVVPLSQGQVIVSIPTGSTVSAGGGSTSAVSPTSISS

SEQ ID NO: 2289 - protein, 80 aa, Synthetic construct
AVPTVTAKIIGDASTQTDALKLPPSQPPRLLKNKALLCKPITQTKATSCKPHTQNKECQTEDTPSQPQIIVVPVPVPVFV

SEQ ID NO: 2290 - protein, 80 aa, Synthetic construct
NTLLFFNTKYFQLKNVTEHLKLSFAHVMRRTRTLKYSTKMTYLRFFPPLQKQESEPDKLTVGKRKRNEDDEVPVGVEMAE

SEQ ID NO: 2291 - protein, 80 aa, Synthetic construct
KHNVTIRSDQQHKNIQLQNSHIHLVARGPEQTMDPKLSTIMEQQISSAAQDKIELQRHGTGISVIQHTNSLSRPNSFDKP

SEQ ID NO: 2292 - protein, 80 aa, Synthetic construct
EGVWSPDIEQSFQEALAIYPPCGRRKIILSDEGKMYGRNELIARYIKLRTGKTRTRKQVSSHIQVLARKKVREYQVGIKA

SEQ ID NO: 2293 - protein, 80 aa, Synthetic construct
LLNLPAAPGFGNLGKSFLIENLLRVGGAPTPRLQPPAPHDPATALATAGAQLRPLPASPVPLKLCPAAEQVSPAGAPYGT

SEQ ID NO: 2294 - protein, 80 aa, Synthetic construct
MAELGKKYCVYCLAEVSPLRFRCTECQDIELCPECFSAGAEIGHHRRYHGYQLVDGGRFTLWGPEAEGGWTSREEQLLLD

SEQ ID NO: 2295 - protein, 80 aa, Synthetic construct
SPSLQEGAQLGENKPSTCSFSIERILGLDQKKDCVPLMKPHRPWADTCSSSGKDGNLCLHVPNPPSGISFPSVVDHPMPE

SEQ ID NO: 2296 - protein, 80 aa, Synthetic construct
TDHLTEKAYSDTPRDFPDSFQAGSPGHLGVIRDFSIESLLRENLYPKANIPDRRPSLSPFAPDFFPHLWPGDFGAFAQLP

SEQ ID NO: 2297 - protein, 80 aa, Synthetic construct
SAFTRKDEIITSLVSALDSMCSALSKLNAEVACVAVHDESAFVVGTEKGRMFLNARKELQSDFLRFCRGPPWKDPEAEHP

SEQ ID NO: 2298 - protein, 80 aa, Synthetic construct
PRDAMGRPFIQNNPSIPAGFHDLGFTDFSCRKFPRISQAWCETNLRRCISEQHRFVCDTCDKAFPMLCSLALHKQTHVAA

SEQ ID NO: 2299 - protein, 80 aa, Synthetic construct
FSQKGLALVQVKQENISFLSPSSLVPYDCSMEPIDLSIPKNFRKGDKDLATPSEAKKPEEEAGSSEQPSPCPAPGPSLPV

SEQ ID NO: 2300 - protein, 80 aa, Synthetic construct
DHDLREPSGIKNPGGASASARVSSWDSQSYDIEQICLGASNPPWASTLFEIDEFVKIYDLPGEDDTSSLNQYLFPVCLEY

SEQ ID NO: 2301 - protein, 80 aa, Synthetic construct
AGKRGPDRGSPEYRQRRERNNIAVRKSRDKAKRRNQEMQQKLVELSAENEKLHQRVEQLTRDLAGLRQFFKQLPSPPFLP

SEQ ID NO: 2302 - protein, 80 aa, Synthetic construct
DTDVDYEDDPLGDSGYASQPCAKISEKGQSGKKMRKQTCQEIDEELKEAAGSLLHLAGIRTCLGSLISTAKTQNQKQRKK

SEQ ID NO: 2303 - protein, 80 aa, Synthetic construct
DAPKEAEKKVVIKSEAASPALPVITKVETLSPESALQGSPRSAASTPAGSPDGSLPEHHAAAPNGLPGFSVENIMTLRTS

SEQ ID NO: 2304 - protein, 80 aa, Synthetic construct
KPKRRLSAARRAGTSCANCQTTTTTLWRRNANGDPVCNACGLYYKLHNINRPLTMKKEGIQTRNRKMSSKSKKCKKVHDS

SEQ ID NO: 2305 - protein, 80 aa, Synthetic construct
SNIQWLRKMSSDGLGSRSIKQEMEEKENCHLEQRQVKVEEPSRPSASWQNSVSERPPYSYMAMIQFAINSTERKRMTLKD

SEQ ID NO: 2306 - protein, 80 aa, Synthetic construct
LLAEEGIAPLSSAGPGKEEKLLFGEGFSPLLPVQTIKEEEIQPGEEMPHLARPIKVESPPLEEWPSPAPSFKEESSHSWE

SEQ ID NO: 2307 - protein, 80 aa, Synthetic construct
TMSHYTDEPRFTIEQIDLLQRLRRTGMTKHEILHALETLDRLDQEHSDKFGRRSSYGGSSYGNSTNNVPASSSTATASTQ

SEQ ID NO: 2308 - protein, 80 aa, Synthetic construct
SITKHPSTWSVEAVVLFLKQTDPLALCPLVDLFRSHEIDGKALLLLTSDVLLKHLGVKLGTAVKLCYYIDRLKQGKCFEN

SEQ ID NO: 2309 - protein, 80 aa, Synthetic construct
EKQTTLKKDYDVKNEIVDRSAPKPKISGSIHYALKNVKIDLPKINIPNEVLLKHEVDKYRKLFQSKQQTARKSISIKTVS

SEQ ID NO: 2310 - protein, 80 aa, Synthetic construct
PRITSVFSLQSQQASEFLPPEVNQLLQDVLKIKPDVKQDSSNTPNKGLPLHCDQSFQKHEREGKIVESSKDFKVQGIFPV

SEQ ID NO: 2311 - protein, 80 aa, Synthetic construct
DSIRTLRLFPFSSKQLVKCPRRNQPVVVLNHPDADAPEVVSVMKTIAKFNGHVLKVSLSKRTINALLKPVCYNPPKTTYD

SEQ ID NO: 2312 - protein, 80 aa, Synthetic construct
FGKKRKRIPPTKTRPLRQGSKKPLLEDDPQGARKISSEPVPGEIIAVRVKEEHLDVASPDKASSPELPVSVENIKQETDD

SEQ ID NO: 2313 - protein, 80 aa, Synthetic construct
KAGGSSGQRTRKKRCPYTKYQIRELEREFFFSVYINKEKRLQLSRMLNLTDRQVKIWFQNRRMKEKKINRDRLQYYSANP

SEQ ID NO: 2314 - protein, 80 aa, Synthetic construct
VGVVGEDNDAAARGAEAFGDSEEDGEDVFEVEKILDMKTEGGKVLYKVRWKGYTSDDDTWEPEIHLEDCKEVLLEFRKKI

SEQ ID NO: 2315 - protein, 80 aa, Synthetic construct
FGGEPHHSPGPMPAGAALLALGPRNPWTLWTPLTPNYPDRQPWTDKHPDLLTCGRCLQTFPLEAITAFMDHKKLGCQLFR

SEQ ID NO: 2316 - protein, 80 aa, Synthetic construct
ALPQGSLTFRDVAVEFSQEEWKCLDPVQKALYRDVMLENYRNLGFLGLCLPDLNIISMLEQGKEPWTVVSQVKIARNPNC

SEQ ID NO: 2317 - protein, 80 aa, Synthetic construct
SSAPEDCTSFSINASPGVVVDIAHGPPAKKKSTGSSTWPLDPGVEVTLTMKVASGSTGDQKVQISYYGPKTPPVKALLYL

SEQ ID NO: 2318 - protein, 80 aa, Synthetic construct
RRDSSGGTKDGDRPKILMDSPEDADLFHSEEIKAPEKEEFLAWQHDLEVNDKAPAQARPTVFRWTGGGKEVYLSGSFNNW

SEQ ID NO: 2319 - protein, 80 aa, Synthetic construct
LLLNPAVLSTASLGSSQGSVIHFSHGEYFYSLFSETINTELLKNLDLAVLELMQSSVDNTKMVSAVLNGMLDQSFRERAN

SEQ ID NO: 2320 - protein, 80 aa, Synthetic construct
EPLASNIQVLLQAAEFLERREREAEHGYASLCPHRSPGPIHRRKKRPPQAPGAQDSGRSVHNELEKRRRAQLKRCLERLK

SEQ ID NO: 2321 - protein, 80 aa, Synthetic construct
DRASSDLPSPLEKADSESNKGKKRRNRTTFTSYQLEELEKVFQKTHYPDVYAREQLAMRTDLTEARVQVWFQNRRAKWRK

SEQ ID NO: 2322 - protein, 80 aa, Synthetic construct
VTQRGCCSSYPPTKGGGLGPCGKCQEGLEGGASGASEPSEEVNKASGPRACPPSHHTKLKKTWLTRHSEQFECPRGCPEV

SEQ ID NO: 2323 - protein, 80 aa, Synthetic construct
MSITSDEVNFLVYRYLQESGFSHSAFTFGIESHISQSNINGTLVPPAALISILQKGLQYVEAEISINEDGTVFDGRPIES

SEQ ID NO: 2324 - protein, 80 aa, Synthetic construct
SLDPAAPALGPALHQRPPVHQGHPSPRCAWSPSLCSPRAGDSGAPAPLTGLLPPPPPPHRQDGAPKAPLPPPPAFWRPWP

SEQ ID NO: 2325 - protein, 80 aa, Synthetic construct
VDFLDDSSTESLLLSGDEYNQDFDSTNFEESQDEDDALNEIVRCICEMDEENGFMIQCEECLCWQHSVCMGLLEESIPEQ

SEQ ID NO: 2326 - protein, 80 aa, Synthetic construct
WHIQADHAYQALPSFQIPVSPHIYTSVSWAAAPSAACSLSPVRSRSLSFSEPQQPAPAMKSHLIVTSPPRAQSGARKARG

SEQ ID NO: 2327 - protein, 80 aa, Synthetic construct
RLVAPADLSRFEFDECEAAVMLVSLGSSRSGTPSFSPVSTQSPFSPAPSPSPSPLFGFRPANFSPINASPVIQRTAVRSR

SEQ ID NO: 2328 - protein, 80 aa, Synthetic construct
LLLLPPPAGLTSDPGPSVRRVPAVQRDSPVIVRNPDVPLPSKFPGEVGTAGEVRAGGPGRGCRETPVPPGVASGKPGLPP

SEQ ID NO: 2329 - protein, 80 aa, Synthetic construct
PVGPGSQEHRDSYAYLNASYGTEGLGSYPGYAPLPHLPPAFIPSYNAHYPKFLLPPYGMNCNGLSAVSSMNGINNFGLFP

SEQ ID NO: 2330 - protein, 80 aa, Synthetic construct
RNSVRLVIRKVQYAPERPGPQPTAETTRQFLMSDKPLHLEASLDKEIYYHGEPISVNVHVTNNTNKTVKKIKISVRQYAD

SEQ ID NO: 2331 - protein, 80 aa, Synthetic construct
DVFLSDPLLPRGQRVPLYLSKAPQQMMGSLKLLPPPPIMSARVLPRPSPSRGPSTAWLSGPELIALTGLLQMSQGEPRPS

SEQ ID NO: 2332 - protein, 80 aa, Synthetic construct
RNDDISELEDLSELEDLKDAKLQTLKELFPQRSDNDLLKLIESTSTMDGAIAAALLMFGDAGGGPRKRKLSSSSEPYEED

SEQ ID NO: 2333 - protein, 80 aa, Synthetic construct
QSLPKKVSLSSDTTRKPLEIRSPSAESKKPKWVPPAASGGSRSSSSPLVVVSVKSPNQSLRLGLSRLARVKPLHPNATST

SEQ ID NO: 2334 - protein, 80 aa, Synthetic construct
AASFPPTLGLSSAPDEIQHPHIKFSEWKFKLFRVRSFEKTPEEAQKEKKDSFEGKPSLEQSPAVLDKADGQKPVPTQPLL

SEQ ID NO: 2335 - protein, 80 aa, Synthetic construct
VLLPGYHHFEWQPPLKNVSSSTDVGIIDGLSGLSSSVDDYPVDTIAKRFRYDSALVSALMDMEEDILEGMRSQDLDDYLN

SEQ ID NO: 2336 - protein, 80 aa, Synthetic construct
EGGGLGPGEEAPKKKHRRNRTTFTTYQLHQLERAFEASHYPDVYSREELAAKVHLPEVRVQVWFQNRRAKWRRQERLESG

SEQ ID NO: 2337 - protein, 80 aa, Synthetic construct
TDDKENERLAYVTYQDIHSIQAFHEQIVIAVKAPAETRLDVPAPREDSITVHIRSTNGPIDVYLCEVEQGQTSNKRSEGV

SEQ ID NO: 2338 - protein, 80 aa, Synthetic construct
TLAIVHSYIAYKAAKEEEKQKLLKWSSDLKQEREQLEQKVKQLSNSISKCMEMKNTILARQKEMHSSLEKVKQLIRLIHG

SEQ ID NO: 2339 - protein, 80 aa, Synthetic construct
LRGTPGPSKEVLRVVGESGEPVKAFKCEHCRILFLDHVMFTIHMGCHGFRDPFECNICGYHSQDRYEFSSHIVRGEHKVG

SEQ ID NO: 2340 - protein, 80 aa, Synthetic construct
FKLSFSTAELLCMHYTDHHSRDLKRDFIILGNGPRLQNSTYQCKHCDSKLQSTAELTSHLNIHNEEFQKRAKRQERRKQL

SEQ ID NO: 2341 - protein, 80 aa, Synthetic construct
EVLQIEHSYCRQDINKEHLWQKVSKLHSKITLLELKEQQTLGRLKSLEALIRQLKQENWLSEENVKIIENHFTTYEVTMI

SEQ ID NO: 2342 - protein, 80 aa, Synthetic construct
HKSPICVLNEMMQNEEKYEKILKALNSRRIIPRPFVAQKLASSDDFISQNVIPLEAYRNGLKTEALSVSASEEEGLNFLN

SEQ ID NO: 2343 - protein, 80 aa, Synthetic construct
KMDLTMHSALDCKQKKSRSRSGSKKKMLTLPHGADEVYILRCRFCGLVFRGPLSVQEDWIKHLQRHIVNANLPRTGAGMV

SEQ ID NO: 2344 - protein, 80 aa, Synthetic construct
FMIECDICKDWFHGSCVGVEEHHAVDIDLYHCPNCAVLHGSSLMKKRRNWHRHDYTEIDDGSKPVQAGTRTFIKELRSRV

SEQ ID NO: 2345 - protein, 80 aa, Synthetic construct
GTECAGTCAGAGRLESAARRRLAANARERRRMQGLNTAFDRLRRVVPQWGQDKKLSKYETLQMALSYIMALTRILAEAER

SEQ ID NO: 2346 - protein, 80 aa, Synthetic construct
HLPPPANSNKPLTPFSIEDILNKPSVRRSYSLCGAAHLLAAADKHAQGGLPLAGRALLSQTSPLCALEELASKTFKGLEV

SEQ ID NO: 2347 - protein, 80 aa, Synthetic construct
ERSIVSPSESCGPINVKTEPMEDSGISLKAEAVSVKKESEDPNYYQYNMQGSHPSSTSNEVIEMELPMEDSTPLVPSEEP

SEQ ID NO: 2348 - protein, 80 aa, Synthetic construct
MASEELYEVERIVDKRKNKKGKTEYLVRWKGYDSEDDTWEPEQHLVNCEEYIHDFNRRHTEKQKESTLTRTNRTSPNNAR

SEQ ID NO: 2349 - protein, 80 aa, Synthetic construct
EHLATQAEQQEWLCSVVALQCSILKHLSAKQMPSHWDSEQTEKADIKPVIVTDSSVTTSLQTADKTPTPSHYPLSCPSGI

SEQ ID NO: 2350 - protein, 80 aa, Synthetic construct
GGKHEPNMQLLCDECNVAYHIYCLNPPLDKVPEEEYWYCPSCKTDSSEVVKAGERLKMSKKKAKMPSASTESRRDWGRGM

SEQ ID NO: 2351 - protein, 80 aa, Synthetic construct
NNNFCRALVDRRPLGPPSCMQLGVMPPPRQAPLPPAEPLGNVPFLLYPGPAEPPYYDAYAGVFPYVPFPGAFGVYEYPFE

SEQ ID NO: 2352 - protein, 80 aa, Synthetic construct
GYARLRGHLPGALAEKRLSKVETLRAAIRYIKYLQELLSSAPDGSTPPASRGLPGTGPCPAPPATPRPDRPGDGEARAPS

SEQ ID NO: 2353 - protein, 80 aa, Synthetic construct
ADTFELLVDRLEKESYLESRSSGAQQSLIDEDAFCCVCLDDECHNSNVILFCDICNLAVHQECYGVPYIPEGQWLCRCCL

SEQ ID NO: 2354 - protein, 80 aa, Synthetic construct
PINDSKPPSRFLKPRKVEEDELLEKSPLQLGNEPLQRLLSDNGINRLSLMAPDTPAGTPLSGVGRRTSVLFKKAKNGVKL

SEQ ID NO: 2355 - protein, 80 aa, Synthetic construct
SQGNPGLGSLLNIKAEAEGSPAAEPSPFLGKAVKALVQEKLAEPWKVYLRRFGTKDFCDGQCDFLHKAHFHCVVEECGAL

SEQ ID NO: 2356 - protein, 80 aa, Synthetic construct
PGPPESLDMGPLTFRDVAIEFSLEEWQCLDTAQQDLYRKVMLENYRNLVFLGIAVSKPDLVTCLEQGKDPWNMKGHSTVV

SEQ ID NO: 2357 - protein, 80 aa, Synthetic construct
SMAGSNVYLTPPNSQGFAPHYDDIEAFVLQLEGRKLWRVYRPRVPTEELALTSSPNFSQDDLGEPVLQTVLEPGDLLYFP

SEQ ID NO: 2358 - protein, 80 aa, Synthetic construct
KDDNVFSDSSEQVNFDSEDSSCLPEDLSLSKQLKIQVKEEPVEEAEEEAPEASTAPKEAGPSKEASLWPCEKCGKMFTVH

SEQ ID NO: 2359 - protein, 80 aa, Synthetic construct
DNGRVNLRPVVQLIDIMKDLTRLSQDLQHSGVHLDCGGLRLSRPPAPPPGDLQYSFFSSPSLANSIRSPEERATPHAKSE

SEQ ID NO: 2360 - protein, 80 aa, Synthetic construct
PAFTRKRNERERQRVKCVNEGYAQLRHHLPEEYLEKRLSKVETLRAAIKYINYLQSLLYPDKAETKNNPGKVSSMIATTS

SEQ ID NO: 2361 - protein, 80 aa, Synthetic construct
HKKFRRQAYLRKHLSTHEAGSARALAPGFGSERGAPLAFACPLCGAHFPTADIREKHRLWHAVREELLLPALAGAPPETS

SEQ ID NO: 2362 - protein, 80 aa, Synthetic construct
RKIYLRPAICDKARQKQQRKRCPNCDGPLKLIPCRGHGGFPVTNFWRHDGRFIFFQSKGEHDHPKPETKLEAEARRAMKK

SEQ ID NO: 2363 - protein, 80 aa, Synthetic construct
HKFLNEQDLDELVNKSHMGYEQVREWFAERQRRSELGIELFEENEEEDEVIDDQEEDEEETDDSDTWEPPRHVKRKLSKS

SEQ ID NO: 2364 - protein, 80 aa, Synthetic construct
ALPQGQLTFKDVAIEFSQEEWTCLDPAQKTLYRDVMLENYRNLVSLDISCKCVNTDLPPKGKNNMGEAFYTVKLERLESC

SEQ ID NO: 2365 - protein, 80 aa, Synthetic construct
PYKLFTDHGGLNEKRKQRRIRTTFTSAQLKELERVFAETHYPDIYTREELALKIDLTEARVQVWFQNRRAKFRKQERAAA

SEQ ID NO: 2366 - protein, 80 aa, Synthetic construct
QPGVPGDNRPSYHRQMSEPIVPAAPPPPQGFKQEYHDPLYEHGVPGMPGPPAHGFQSPMGIKQEPRDYCVDSEVPNCQSS

SEQ ID NO: 2367 - protein, 80 aa, Synthetic construct
MSITSDEVNFLVYRYLQESGFSHSAFTFGIESHISQSNINGTLVPPSALISILQKGLQYVEAEISINKDGTVFDSRPIES

SEQ ID NO: 2368 - protein, 80 aa, Synthetic construct
ILEEMKVKSENLKEEPQSSEEESMSSVETRTLIKSEPVSPKNGVLPQATGDQKSGGKCETDRRMVAARTEPLTPNPASKK

SEQ ID NO: 2369 - protein, 80 aa, Synthetic construct
IEVAERLHLDSNPLKWSVADVVRFIRSTDCAPLARIFLDQEIDGQALLLLTLPTVQECMDLKLGPAIKLCHHIERIKFAF

SEQ ID NO: 2370 - protein, 80 aa, Synthetic construct
PPALEEDLTVININSSDEEEEEEEEEEEEEEEEEEEEEDFEEEEEDEEEYFEEEEEEEEEFEEEFEEEEGELEEEEEEED

SEQ ID NO: 2371 - protein, 100 aa, Synthetic construct
RYTRGTGGRGTMLQGEYTYSLGQVYDPTTTYLGAPVFYAPQTYAAIPSLHFPATKGHLSNRAIIRAPSVREIYMNVPVGAAGVRGLGGRGYLAYTGLGRG

SEQ ID NO: 2372 - protein, 80 aa, Synthetic construct
SGFVLGALAFQHLNTDSDTEGFLLGEVKGEAKNSITDSQMDDVEVVYTIDIQKYIPCYQLFSFYNSSGEVNEQALKKILS

SEQ ID NO: 2373 - protein, 80 aa, Synthetic construct
GVMKDIRAIYQVYNALQEKVQAVCADVEKSERVVESCQAEVNKLRRQITQRKNEKEQERRLQQAVLSRQMPSESLDPAFS

SEQ ID NO: 2374 - protein, 80 aa, Synthetic construct
KPYKCQQPKKAFRYHPSFRTQERNHTGEKPYACKECGKTFISHSGIRRRMVMHSGDGPYKCKFCGKAVHCLRLYLIHERT

SEQ ID NO: 2375 - protein, 80 aa, Synthetic construct
NFRSLIEGNVNEIKEDSHCGETFTQVPDDRLNFQEKKASPEAKSCDNFVCGEVGIGNSSFNMNIRGDIGHKAYEYQDYAP

SEQ ID NO: 2376 - protein, 80 aa, Synthetic construct
EKPYECNECGKAFNQSSYLTQHQRIHTGEKPYECNECGKAFSQSTFLTQHQVIHTGEKPYKCNECGKAFSDRSGLIQHQR

SEQ ID NO: 2377 - protein, 80 aa, Synthetic construct
SCGIHETTFNSIMKCDVDIRKDLYANTVLSGGTTMYPGIADRMQKEITALAPSTMKIKIIAPPERKYSVWIGGSILASLS

SEQ ID NO: 2378 - protein, 80 aa, Synthetic construct
STLMEIDGDKGKQGGPTYYIDTNALRVPRENMEAISPLKNGMVEDWDSFQAILDHTYKMHVKSEASLHPVLMSEAPWNTR

SEQ ID NO: 2379 - protein, 140 aa, Synthetic construct
VGLLAAEEGGGLELEGDKEKKGKIFHIDTNALHVPRDGAEVMSPLKNGMIEDWECFRAILDHTYSKHVKSEPNLHPVLMSEAPWNTRAKREKLTELMFEQYNIPAFFLCKTAVLTAFANGRSTGLVLDSGATHTTAIPVH

SEQ ID NO: 2380 - protein, 80 aa, Synthetic construct
NGKEKGGEKEKEQRGVKRPIVPALVPESLQEQIQSNFIIVIHPGSTTLRIGRATDTLPASIPHVIARRHKQQGQPLYKDS

SEQ ID NO: 2381 - protein, 80 aa, Synthetic construct
MTQAEKGDTENGKEKGGEKEKEQRGVKRPIVPALVPESLQEQIQSNFIIVIHPGSTTLRIGRATDTLPASIPHVIARRHK

SEQ ID NO: 2382 - protein, 80 aa, Synthetic construct
KEHIEDFKQFEPNDFYLKNTTWEDVGLWDPSLTKNQDYRTKPFCCSACPFSSKFFSAYKSHFRNVHSEDFENRILLNCPY

SEQ ID NO: 2383 - protein, 80 aa, Synthetic construct
CNELFPENVYSVHFEKEHKAEKVPAVANYIMKIHNFTSKCLYCNRYLPTDTLLNHMLIHGLSCPYCRSTFNDVEKMAAHM

SEQ ID NO: 2384 - protein, 80 aa, Synthetic construct
LSCPYCRSTFNDVEKMAAHMRMVHIDEEMGPKTDSTLSFDLTLQQGSHTNIHLLVTTYNLRDAPAESVAYHAQNNPPVPP

SEQ ID NO: 2385 - protein, 90 aa, Synthetic construct
RMVHIDEEMGPKTDSTLSFDLTLQQGSHTNIHLLVTTYNLRDAPAESVAYHAQNNPPVPPKPQPKVQEKADIPVKSSPQAAVPYKKDVGK

SEQ ID NO: 2386 - protein, 80 aa, Synthetic construct
TVHPVEKKLTYKCIHCLGVYTSNMTASTITLHLVHCRGVGKTQNGQDKTNAPSRLNQSPSLAPVKRTYEQMEFPLLKKRK

SEQ ID NO: 2387 - protein, 80 aa, Synthetic construct
DSYEARKSFLTKYFNKQPYPTRREIEKLAASLWLWKSDIASHFSNKRKKCVRDCEKYKPGVLLGFNMKELNKVKHEMDFD

SEQ ID NO: 2388 - protein, 100 aa, Synthetic construct
SLWLWKSDIASHFSNKRKKCVRDCEKYKPGVLLGFNMKELNKVKHEMDFDAEWLFENHDEKDSRVNASKTADKKLNLGKEDDSSSDSFENLEEESNESGS

SEQ ID NO: 2389 - protein, 80 aa, Synthetic construct
NASAPSSSLSTFKDKNKNDGLKPKQADSVEQAVYYCKKCTYRDPLYEIVRKHIYREHFQHVAAPYIAKAGEKSLNGAVPL

SEQ ID NO: 2390 - protein, 80 aa, Synthetic construct
EKVPAVANYIMKIHNFTSKCLYCNRYLPTDTLLNHMLIHGLSCPYCRSTFNDVEKMAAHMRMVHIDEEMGPKTDSTLSFD

SEQ ID NO: 2391 - protein, 100 aa, Synthetic construct
TLCPLCFSILKGPISDALAHHLRERHQVIQTVHPVEKKLTYKCIHCLGVYTSNMTASTITLHLVHCRGVGKTQNGQDKTNAPSRLNQSPSLAPVKRTYEQ

SEQ ID NO: 2392 - protein, 80 aa, Synthetic construct
LHLVHCRGVGKTQNGQDKTNAPSRLNQSPSLAPVKRTYEQMEFPLLKKRKLDDDSDSPSFFEEKPEEPVVLALDPKGHED

SEQ ID NO: 2393 - protein, 80 aa, Synthetic construct
SESGPGSQQVSDFEDNTCEMKPGTWSDESSQSEDARSSKPAAKKKATMQGDREQLKWKNSSYGKVEGFWSKDQSQWKNAS

SEQ ID NO: 2394 - protein, 120 aa, Synthetic construct
QLLPSGAAAPMAGSMPGMPSPPVLVNAAQSVFVQASSSAADTNQVLKQAKQWKTCPVCNELFPSNVYQVHMEVAHKHSESKSGEKLEPEKLAACAPFLKWMREKTVRCLSCKCLVSEEEL

SEQ ID NO: 2395 - protein, 90 aa, Synthetic construct
MEVAHKHSESKSGEKLEPEKLAACAPFLKWMREKTVRCLSCKCLVSEEELIHHLLMHGLGCLFCPCTFHDIKGLSEHSRNRHLGKKKLPM

SEQ ID NO: 2396 - protein, 80 aa, Synthetic construct
RHLGKKKLPMDYSNRGFQLDVDANGNLLFPHLDFITILPKEKLGEREVYLAILAGIHSKSLVPVYVKVRPQAEGTPGSTG

SEQ ID NO: 2397 - protein, 80 aa, Synthetic construct
LHLKERHHIMPTVHTVLKSPAFKCIHCCGVYTGNMTLAAIAVHLVRCRSAPKDSSSDLQAQPGFIHNSELLLVSGEVMHD

SEQ ID NO: 2398 - protein, 90 aa, Synthetic construct
RVRSLVQDTRIHLVPSLNPDGYEVAAQMGSEFGNWALGLWTEEGFDIFEDFPDLNSVLWGAEERKWVPYRVPNNNLPIPERYLSPDATVS

SEQ ID NO: 2399 - protein, 80 aa, Synthetic construct
ARGEDEDEVSEAQETPDHAIFRWLAISFASAHLTLTEPYRGGCQAQDYTGGMGIVNGAKWNPRTGTINDFSYLHTNCLEL

SEQ ID NO: 2400 - protein, 80 aa, Synthetic construct
SSQPKAKEESPSKAGMNKRRKLKNKRRRSLPRPHDFFDAQTLDAIRHRAICFNLSAHIESLGKGHSVVFHSTVIAKRKED

SEQ ID NO: 2401 - protein, 80 aa, Synthetic construct
CFNLSAHIESLGKGHSVVFHSTVIAKRKEDSGKIKLLLHWMPEDILPDVWVNESERHQLKTKVVHLSKLPKDTALLLDPN

SEQ ID NO: 2402 - protein, 80 aa, Synthetic construct
HFSQQNSSKVSSQPKAKEESPSKAGMNKRRKLKNKRRRSLPRPHDFFDAQTLDAIRHRAICFNLSAHIESLGKGHSVVFH

SEQ ID NO: 2403 - protein, 80 aa, Synthetic construct
QGFWLIDHNDYESGLDLLFHPATAKPLSWQHSKIIQAFMSQGEHRQALRYIQTMKPTVSSGNDVILHLTVLLFNRCMVEA

SEQ ID NO: 2404 - protein, 80 aa, Synthetic construct
KSLAMSVTTSGFSEFTPQSILRSTLRSTPLASPSPSPGRSPQRLKETRISFVEEDVHPKWIPGAADDSKLEVFTTPKKCA

SEQ ID NO: 2405 - protein, 80 aa, Synthetic construct
VSKGNSSVSITSDETTLEYQDAPSPEDLEETVFTASKPKSSSTALTTNVTEQTEKDGDKDVFASEVTPSDLQKQMGNLED

SEQ ID NO: 2406 - protein, 80 aa, Synthetic construct
NELYPSGTLKLQYNFDTIDQQFCDLADNKDTAECDIAEVDGELFVAQSNFTLILEGEEGEVEPGDFASSDVLPKAANTAT

SEQ ID NO: 2407 - protein, 140 aa, Synthetic construct
FSTHAFSENPRPPPRRDPSTRRPPVLAKGDDPLPPRAARPVSQARCPTPVGDGSSSRRCWDNGRVNLRPVVQLIDIMKDLTRLSQDLQHSGVHLDCGGLRLSRPPAPPPGDLQYSFFSSPSLANSIRSPEERATPHAKSE

SEQ ID NO: 2408 - protein, 80 aa, Synthetic construct
LSRPPAPPPGDLQYSFFSSPSLANSIRSPEERATPHAKSERPSHPLYEPEPEPRDSPQPGQGHSPGATAAATGLPPEPEP

SEQ ID NO: 2409 - protein, 80 aa, Synthetic construct
CSPPRCWTPSEPESVHQAPDTQSISHFLHRVQGFRRRGGKAGGFGGRGGGHAAKSARCSFSDFFEGIGKKKKVVAVAAAG

SEQ ID NO: 2410 - protein, 90 aa, Synthetic construct
DVIHQSVYELIHTEDRAEFQRQLHWALNPSQCTESGQGIEEATGLPQTVVCYNPDQIPPENSPLMERCFICRLRCLLDNSSGFLAMNFQG

SEQ ID NO: 2411 - protein, 80 aa, Synthetic construct
PMGNDTILKHEQIDQPQDVNSFAGGHPGLFQDSKNSDLYSIMKNLGIDFEDIRHMQNEKFFRNDFSGEVDFRDIDLTDEI

SEQ ID NO: 2412 - protein, 90 aa, Synthetic construct
QDSKNSDLYSIMKNLGIDFEDIRHMQNEKFFRNDFSGEVDFRDIDLTDEILTYVQDSLSKSPFIPSDYQQQQSLALNSSCMVQEHLHLEQ

SEQ ID NO: 2413 - protein, 80 aa, Synthetic construct
ENWNSNQFVPFNCPQQDPQQYNVFTDLHGISQEFPYKSEMDSMPYTQNFISCNQPVLPQHSKCTELDYPMGSFEPSPYPT

SEQ ID NO: 2414 - protein, 80 aa, Synthetic construct
FRDIDLTDEILTYVQDSLSKSPFIPSDYQQQQSLALNSSCMVQEHLHLEQQQQHHQKQVVVEPQQQLCQKMKHMQVNGMF

SEQ ID NO: 2415 - protein, 80 aa, Synthetic construct
ATEGLEGTEAVEKGSRVDGEDEEGKEDGREEGKEDPEKGALTTQDENGQTKRKLQAGKKSQDKQKKRQRDRMVERIQFVC

SEQ ID NO: 2416 - protein, 120 aa, Synthetic construct
EADGPGSATSGAEKATTRRKASSTPSPKQRSKQAGSSPRPPPGLWYLATAPPAPAPPAFAYISSVPIMPYPPAAVYYAPAGPTSAQPAAKWPPTASPPPARRHRHSIQLDLGDLEELNKA

SEQ ID NO: 2417 - protein, 80 aa, Synthetic construct
PRPTRQGRPLPRQGATLAGRSSSNAPKYGRGQLNYPLPDFSKVGPRVRFPKDESYRPPKSRSHNRKPQAPARPLIFKSPA

SEQ ID NO: 2418 - protein, 80 aa, Synthetic construct
VTVGYHYNWDSKKYSADHYTPFPSDLGFLSEQVAAACGFEDFRAEAGILNYYRLDSTLGIHVDRSELDHSKPLLSFSFGQ

SEQ ID NO: 2419 - protein, 80 aa, Synthetic construct
LYPGLEGFRPVEQCNLDYCPERGSAIDPHLDDAWLWGERLVSLNLLSPTVLSMCREAPGSLLLCSAPSAAPEALVDSVIA

SEQ ID NO: 2420 - protein, 100 aa, Synthetic construct
EKGELDELGDKCDSNVSSSKKRRHRTTFTSLQLEELEKVFQKTHYPDVYVREQLALRTELTEARVQVWFQNRRAKWRKRERYGQIQQAKSHFAATYDISV

SEQ ID NO: 2421 - protein, 90 aa, Synthetic construct
LHLPLSPGLPDSMELAKNKSKKRRNRTTFSTFQLEELEKVFQKTHYPDVYAREQLALRTDLTEARVQVWFQNRRAKWRKRERYGKIQEGR

SEQ ID NO: 2422 - protein, 80 aa, Synthetic construct
GKKRRNRTTFTSYQLEELEKVFQKTHYPDVYAREQLAMRTDLTEARVQVWFQNRRAKWRKRERFGQMQQVRTHFSTAYEL

SEQ ID NO: 2423 - protein, 80 aa, Synthetic construct
ELRVGSFLVTQPPLQAPEFILTQSPPELAPAPSAFPGPVSAMELSQALPSSQVQCSDSQASGDAFWGARMLLEFSGSSLG

SEQ ID NO: 2424 - protein, 80 aa, Synthetic construct
DDKEAPDSDAEGYVEGLDDEEEDEDEEEYDEDAQVVEDEEDEDEEEEGEEEDVSGEEEEDEEGYNDGEVDDEEDEEELGE

SEQ ID NO: 2425 - protein, 90 aa, Synthetic construct
LSDNIISGGLEVLAEKCPNLTYLNLSGNKIKDLSTVEALQNLKNLKSLDLFNCEITNLEDYRESIFELLQQITYLDGFDQEDNEAPDSEE

SEQ ID NO: 2426 - protein, 80 aa, Synthetic construct
PEGYEEEEEEEEEEDEDEDEDEDEAGSELGEGEEEVGLSYLMKEEIQDEEDDDDYVEEGEEEEEEEEGGLRGEKRKRDAE

SEQ ID NO: 2427 - protein, 80 aa, Synthetic construct
TSLHEICSKIMAERRNARCLVNGLSLDHSKLVDVPFQVEFPAPKNELVQKFQVYYLGNVPVAKPVGVDVINGALESVLSS

SEQ ID NO: 2428 - protein, 80 aa, Synthetic construct
ADATVTVISEKNEEEVLVECRVRFLSFMGVGKDVHTFAFIMDTGNQRFECHVFWCEPNAGNVSEAVQAACMLRYQKCLVA

SEQ ID NO: 2429 - protein, 80 aa, Synthetic construct
AAGTYYWHVPSGSTQWQRPTWELGDAEDPGTGTEGIWGLRPPKGRSFSSLESSLDRSNSLSWYGGESYIQSMEPGAKCFA

SEQ ID NO: 2430 - protein, 80 aa, Synthetic construct
HCQPLVHIRVWGVGSSKGRDRDFAFVASDKDSCMLKCHVFCCDVPAKAIASALHGLCAQILSERVEVSGDASCCSPDPIS

SEQ ID NO: 2431 - protein, 80 aa, Synthetic construct
VTKAMGMDVLNEAIGTLTARGDRNAWVPTMLSVSDSLMTAHPIQAEASTEEEPLWQCPVRLVTFIGVGRDPHTFGLIADL

SEQ ID NO: 2432 - protein, 120 aa, Synthetic construct
KKNDKEAAGEGPALYEDPPDQKTSPSGKPATLKICSWNVDGLRAWIKKKGLDWVKEEAPDILCLQETKCSENKLPAELQELPGLSHQYWSAPSDKEGYSGVGLLSRQCPLKVSYGIGDEE

SEQ ID NO: 2433 - protein, 80 aa, Synthetic construct
MAQKEEAAVATEAASQNGEDLENLDDPEKLKELIELPPFEIVTGERLPANFFKFQFRNVEYSSGRNKTFLCYVVEAQGKG

SEQ ID NO: 2434 - protein, 80 aa, Synthetic construct
YGRNESWLCFTMEVVKHHSPVSWKRGVFRNQVDPETHCHAERCFLSWFCDDILSPNTNYEVTWYTSWSPCPECAGEVAEF

SEQ ID NO: 2435 - protein, 80 aa, Synthetic construct
IFGFPYGTTFPQTKHLTFYELKTSSGSLVQKGHASSCTGNYIHPESMLFEMNGYLDSAIYNNDSIRHIILYSNNSPCNEA

SEQ ID NO: 2436 - protein, 80 aa, Synthetic construct
MNGYLDSAIYNNDSIRHIILYSNNSPCNEANHCCISKMYNFLITYPGITLSIYFSQLYHTEMDFPASAWNREALRSLASL

SEQ ID NO: 2437 - protein, 140 aa, Synthetic construct
GESLGCSGSAAAGSSGTLELPSTLSLYKSGALDEAAAYQSRDYYNFPLALAGPPPPPPPPHPHARIKLENPLDYGSAWAAAAAQCRYGDLASLHGAGAAGPGSGSPSAAASSSWHTLFTAEEGQLYGPCGGGGGGGGGGG

SEQ ID NO: 2438 - protein, 110 aa, Synthetic construct
GYTRPPQGLAGQESDFTAPDVWYPGGMVSRVPYPSPTCVKSEMGPWMDSYSGPYGDMRLETARDHVLPIDYYFPPQKTCLICGDEASGCHYGALTCGSCKVFFKRAAEGK

SEQ ID NO: 2439 - protein, 140 aa, Synthetic construct
KKNVPTSPRTSPSPYAFSPVISDFYSSLPSQPLDPSNWAWNSTFTESSTSDFQMQDTQWERLVASVPALYSDAYDIFQIIELYNLPDENEISSSSFHCLYQYLSPTKYQVGGQGSSLSIFAGPAVGLSPAQTWPNMTSQA

SEQ ID NO: 2440 - protein, 80 aa, Synthetic construct; identical to SEQ ID NO: 285

SEQ ID NO: 2441 - protein, 110 aa, Synthetic construct
AALPLAFEALIPNLDEIDHLSCIKAKKLLETKPEFLKWFVVLEETPWDATSHIDNMENERIPFDLMDTVPAEQLYEAHLEKLRNERKRVEMRRAFKENLETSPFITPGKP

SEQ ID NO: 2442 - protein, 80 aa, Synthetic construct
IPFDLMDTVPAEQLYEAHLEKLRNERKRVEMRRAFKENLETSPFITPGKPWEEARSFIMNEDFYQWLEESVYMDIYGKHQ

SEQ ID NO: 2443 - protein, 80 aa, Synthetic construct
SDRNQKNSLSDPNIDRINLVILGKDGLARELANEIRALCTNDDKYVIDGKMYELSLRPIEGNVRLPVNSFQTPTFQPHGC

SEQ ID NO: 2444 - protein, 80 aa, Synthetic construct
KRKASLAMLRAFLCEVQDIIPIQLVALTDGAVDVLDNDLSREQLTEGEEIAQEIDGRFTSIPCSQPQHKLEIFHPFFKDV

SEQ ID NO: 2445 - protein, 80 aa, Synthetic construct
KPKPPVHFEITKGDLSYLDQGHRDGQRKSVSSSPWLPQDGFDPSDYAEPMDAVVKPRNEEENIYSVPHDSTQGKIITIRN

SEQ ID NO: 2446 - protein, 80 aa, Synthetic construct
SSSPWLPQDGFDPSDYAEPMDAVVKPRNEEENIYSVPHDSTQGKIITIRNINKAQSNGSGNGSDSEMDTSSLERGRKVSI

SEQ ID NO: 2447 - protein, 80 aa, Synthetic construct
IEATGLSTEGIYRVSGNKSEMESLQRQFDQDHNLDLAEKDFTVNTVAGAMKSFFSELPDPLVPYNMQIDLVEAHKINDRE

SEQ ID NO: 2448 - protein, 90 aa, Synthetic construct
SLKKQYIQCLYAFECKIERGEDPPPDIFAAADSKKSQPKIQPPSPAGSGSMQGPQTPQSTSSSMAEGGDLKPPTPASTPHSQIPPLPGMS

SEQ ID NO: 2449 - protein, 80 aa, Synthetic construct
TQFQQSQASLLHMQNPPFEPTSVDMMRRAARALLALAKVDENHSEFTLYESRLLDISVSPLMNSLVSQVICDVLFLIGQS

SEQ ID NO: 2450 - protein, 80 aa, Synthetic construct
PNSQCNHYPGYSRPGAGGGGGGGGGGGGGSGGGGGGGGAGAGGAGAGAVAAAAAAAAAAAGGGGGGGYGGSSAGYGVLSS

SEQ ID NO: 2451 - protein, 80 aa, Synthetic construct
YYLRYLEKYEKVHHFGEDDDEVPPGNPKPQLPIGAIPSSYNYQQHSVSDYLRQSYGLSMDFNSPNDYNKLVLSLLSGLPN

SEQ ID NO: 2452 - protein, 80 aa, Synthetic construct
QLEKDPKIITLLLANAGVFDDTLGSFSTVFGEEWKEKTDRDFVKFWKDIVDDNEVRDLISDRNKSHEGTSGEWIWESLFH

SEQ ID NO: 2453 - protein, 80 aa, Synthetic construct
DTLGSFSTVFGEEWKEKTDRDFVKFWKDIVDDNEVRDLISDRNKSHEGTSGEWIWESLFHPPRKLGINDIEGQRVLQIAV

SEQ ID NO: 2454 - protein, 80 aa, Synthetic construct
TLGGSSVSSIQEASNAATQQFSGTDLLNGPLASSLNSDVPQQRPSVVVSPHSTTSVIQGHQIIAVPDSGSKVSHSPALSS

SEQ ID NO: 2455 - protein, 80 aa, Synthetic construct
IVEEFNFPRSCSNAAFALKQYYLRYLEKYEKVHHFGEDDDEVPPGNPKPQLPIGAIPSSYNYQQHSVSDYLRQSYGLSMD

SEQ ID NO: 2456 - protein, 80 aa, Synthetic construct
ISNGPSLELGENGASGKQNSEQIDMQDIKSDLRKPLVNGICDFDKGDGSHLSKNIPNHKTSNHVGNGEISPMEPQGTLDI

SEQ ID NO: 2457 - protein, 80 aa, Synthetic construct
TQQDTAKGDQLERISNGPVLTLGGSSVSSIQEASNAATQQFSGTDLLNGPLASSLNSDVPQQRPSVVVSPHSTTSVIQGH

SEQ ID NO: 2458 - protein, 80 aa, Synthetic construct
FSGTDLLNGPLASSLNSDVPQQRPSVVVSPHSTTSVIQGHQIIAVPDSGSKVSHSPALSSDVRSTNGTAECKTVKRPAED

SEQ ID NO: 2459 - protein, 150 aa, Synthetic construct
LYPYECEKRGLSNPNELQAAIDSNRREGRRQSFGGSLFAYSPGGAHGMLSSPKLPVSSLGLAASTNGSSITPAPKIKKEEDSAIPITVPGRLPVSLAGHPVVAAQAAAVQAAAAQAAVAAQAAALEQLREKLESAEPPEKKMALVADEQQ

SEQ ID NO: 2460 - protein, 140 aa, Synthetic construct
KMALVADEQQRLMQRALQQNFLAMAAQLPMSIRINSQASESRQDSAVNLTGTNGSNSISMSVEINGIMYTGVLFAQPPAPTPTSAPNKGGGGGGGSSSNAGGRGGNTGTSGGQAGPAGLSTPSTSTSNNSSTSTSNNSLP

SEQ ID NO: 2461 - protein, 80 aa, Synthetic construct
KGGLVEVINKKLWREITKGLNLPTSITSAAFTLRTQYMKYLYPYECEKRGLSNPNELQAAIDSNRREGRRQSFGGSLFAY

SEQ ID NO: 2462 - protein, 130 aa, Synthetic construct
EPAEKKASRLSEEEQRLVQQAFQRNFFSMARQLPMKIRINGREDRAEASAAALNLTTSSIGSINMSVDIDGTTYAGVLFAQKPVVHLITGSAPQSLGSSASSSSSSHCSPSPTSSRGTPSSAEPSTSWSL

SEQ ID NO: 2463 - protein, 80 aa, Synthetic construct
PAPGLPPHGQQAKEDHTKDASKASPSVSTAGQPNWNLDEQLKQNGGLAWSDDADGGRGREISRDFAKLYELDGDPERKEF

SEQ ID NO: 2464 - protein, 110 aa, Synthetic construct
KLAPEEPPEKRAVLMGPMDPPRPCMPPSFLPRGKVPLREERLDGPLNLAGSGISSINMALEINGVVYTGVLFARRQPVPASQGPTNPAPPPSTGPPSSILSTGPPSSILP

SEQ ID NO: 2465 - protein, 130 aa, Synthetic construct
YHQGGCDNIDSGAVWKQIYMDLGIPILNSAASYNVKTAYRKYLYGFEEYCRSANIQFRTVHHHEPKVKEEKKDLEESMEEALKLDQEMPLTEVKSEPEENIDSNSESEREEIELKSPRGRRRIARDVNSI

SEQ ID NO: 2466 - protein, 90 aa, Synthetic construct
KKDLEESMEEALKLDQEMPLTEVKSEPEENIDSNSESEREEIELKSPRGRRRIARDVNSIKKEIEEEKTEDKLKDNDTENKDVDDDYETA

SEQ ID NO: 2467 - protein, 80 aa, Synthetic construct
RRIARDVNSIKKEIEEEKTEDKLKDNDTENKDVDDDYETAEKKENELLLGRKNTPKQKEKKIKKQEDSDKDSDEEEEKSQ

SEQ ID NO: 2468 - protein, 80 aa, Synthetic construct
QMQPLETLKLEVGENEQIVQIFGNKMEKTEEVKKEAEKSPKGKGRRSKTKDLSLEIIKISSFGQNEAGSEPHIEAHSLEL

SEQ ID NO: 2469 - protein, 80 aa, Synthetic construct
MKAADEPAYLTVGTDVSAKYRGAFCEAKIKTVKRLVKVKVLLKQDNTTQLVQDDQVKGPLRVGAIVETRTSDGSFQEAII

SEQ ID NO: 2470 - protein, 100 aa, Synthetic construct
PARISPHIKDGEKDKHREKHPNSSPRTYKWSFQLNELDNMNSTERISFLQEKLQEIRKYYMSLKSEVATIDRRRKRLKKKDREVSHAGASMSSASSDTGM

SEQ ID NO: 2471 - protein, 80 aa, Synthetic construct
DNMNSTERISFLQEKLQEIRKYYMSLKSEVATIDRRRKRLKKKDREVSHAGASMSSASSDTGMSPSSSSPPQNVLAVECR

SEQ ID NO: 2472 - protein, 80 aa, Synthetic construct
RGAFCEAKIKTAKRLVKVKVTFRHDSSTVEVQDDHIKGPLKVGAIVEVKNLDGAYQEAVINKLTDASWYTVVFDDGDEKT

SEQ ID NO: 2473 - protein, 140 aa, Synthetic construct
FGTPVIGKKTNRGRRSNHIPEEESSSSSSDEDEDDRKQIDELLGKVVCVDYISLDKKKALWFPALVVCPDCSDEIAVKKDNILVRSFKDGKFTSVPRKDVHEITSDTAPKPDAVLKQAFEQALEFHKSRTIPANWKTELK

SEQ ID NO: 2474 - protein, 80 aa, Synthetic construct
THSDQEKEVNIKKPEDNENLDDKDDDTTRVDESLNIKVEAEEEKAKSGDETNKEEDEDDEEAEEEEEEEEEEEDEDDDDN

SEQ ID NO: 2475 - protein, 80 aa, Synthetic construct
TNKEEDEDDEEAEEEEEEEEEEEDEDDDDNNEEEEFECYPPGMKVQVRYGRGKNQKMYEASIKDSDVEGGEVLYLVHYCG

SEQ ID NO: 2476 - protein, 100 aa, Synthetic construct
SSVTVTEGSRQQSSVTVSEPLAPNQEEVRSIKSETDSTIEVDSVAGELQDLQSEGNSSPAGFDASVSSSSSNQPEPEHPEKACTGQKRVKDAQGGGSSSK

SEQ ID NO: 2477 - protein, 80 aa, Synthetic construct
IPVLNSAAGYNVKCAYKKYLYGFEEYCRSANIEFQMALPEKVVNKQCKECENVKEIKVKEENETEIKEIKMEEERNIIPR

SEQ ID NO: 2478 - protein, 80 aa, Synthetic construct
IKKPEDNENLDDKDDDTTRVDESLNIKVEAEEEKAKSGDETNKEEDEDDEEAEEEEEEEEEEEDEDDDDNNEEEEFECYP

SEQ ID NO: 2479 - protein, 80 aa, Synthetic construct
STKSPARTQSPGKCGKNGDKDPDLKEPSNRLPKVYKWSFQMSDLENMTSAERITILQEKLQEIRKHYLSLKSEVASIDRR

SEQ ID NO: 2480 - protein, 100 aa, Synthetic construct
DPDLKEPSNRLPKVYKWSFQMSDLENMTSAERITILQEKLQEIRKHYLSLKSEVASIDRRRKRLKKKERESAATSSSSSSPSSSSITAAVMLTLAEPSMS

SEQ ID NO: 2481 - protein, 80 aa, Synthetic construct
ITILQEKLQEIRKHYLSLKSEVASIDRRRKRLKKKERESAATSSSSSSPSSSSITAAVMLTLAEPSMSSASQNGMSVECR

SEQ ID NO: 2482 - protein, 90 aa, Synthetic construct
GLVSCLLGPALGPVPPEAYRGTMLHCPLNFTGTPGPLKGQAALPFSPLVIPAFPAHFLATAGPSPMAAGLMHFPPTSFDSALRHRLCPAS

SEQ ID NO: 2483 - protein, 90 aa, Synthetic construct
TGTPGPLKGQAALPFSPLVIPAFPAHFLATAGPSPMAAGLMHFPPTSFDSALRHRLCPASSAWHAPPVTTYAAPHFFHLNPHFFHLNTKL

SEQ ID NO: 2484 - protein, 100 aa, Synthetic construct
MPGKTKADAADPAPLPSQEPPRNSTEQQGLASGSSVSFVGASGCPEAYKRLLSSFYCKGTHGIMSPLAKKKLLAQVSKVEALQCQEEGCRHGAEPQASPA

SEQ ID NO: 2485 - protein, 80 aa, Synthetic construct
ASGCPEAYKRLLSSFYCKGTHGIMSPLAKKKLLAQVSKVEALQCQEEGCRHGAEPQASPAVHLPESPQSPKGLTENSRHR

SEQ ID NO: 2486 - protein, 130 aa, Synthetic construct
KKKLLSQVSGASLSSSYPYGSPPPLISKKKLIARDDLCSSLSQTHHGQSTDHMAVSRPSVIQHVQSFRSKPSEERKTINDIFKHEKLSRSDPHRCSFSKHHLNPLADSYVLKQEIQEGKDKLLEKRALPH

SEQ ID NO: 2487 - protein, 80 aa, Synthetic construct
QLGSDDIHNALKQTPKVLVVQSFDMFKDKDLTGPMNENHGLNYTPLLYSRGNPGIMSPLAKKKLLSQVSGASLSSSYPYG

SEQ ID NO: 2488 - protein, 80 aa, Synthetic construct
RNKMTAYITELSDMVPTCSALARKPDKLTILRMAVSHMKSLRGTGNTSTDGSYKPSFLTDQELKHLILEAADGFLFIVSC

SEQ ID NO: 2489 - protein, 90 aa, Synthetic construct
LRMAVSHMKSLRGTGNTSTDGSYKPSFLTDQELKHLILEAADGFLFIVSCETGRVVYVSDSVTPVLNQPQSEWFGSTLYDQVHPDDVDKL

SEQ ID NO: 2490 - protein, 80 aa, Synthetic construct
EFISRHNIEGIFTFVDHRCVATVGYQPQELLGKNIVEFCHPEDQQLLRDSFQQVVKLKGQVLSVMFRFRSKNQEWLWMRT

SEQ ID NO: 2491 - protein, 80 aa, Synthetic construct
RLQVTSSPNCTDMSNVCQPTEFISRHNIEGIFTFVDHRCVATVGYQPQELLGKNIVEFCHPEDQQLLRDSFQQVVKLKGQ

SEQ ID NO: 2492 - protein, 80 aa, Synthetic construct
ILEAADGFLFVVAAETGRVIYVSDSVTPVLNQPQSEWFGSTLYEQVHPDDVEKLREQLCTSENSMTGRILDLKTGTVKKE

SEQ ID NO: 2493 - protein, 80 aa, Synthetic construct; identical to SEQ ID NO: 303

SEQ ID NO: 2494 - protein, 80 aa, Synthetic construct
GVDCNRKRKGSSTDYQESMDTDKDDPHGRLEYTEHQGRIKNAREAHSQIEKRRRDKMNSFIDELASLVPTCNAMSRKLDK

SEQ ID NO: 2495 - protein, 80 aa, Synthetic construct
HSTGYLKSWPPTKMGLDEDNEPDNEGCNLSCLVAIGRLHSHVVPQPVNGEIRVKSMEYVSRHAIDGKFVFVDQRATAILA

SEQ ID NO: 2496 - protein, 80 aa, Synthetic construct
QVHSNLHAGRTRVYSGSRRSFFCRIKSCKISVKEEHGCLPNSKKKEHRKFYTIHCTGYLRSWPPNIVGMEEERNSKKDNS

SEQ ID NO: 2497 - protein, 80 aa, Synthetic construct
GKILFVSKSVSKILNYDQASLTGQSLFDFLHPKDVAKVKEQLSSFDISPREKLIDAKTGLQVHSNLHAGRTRVYSGSRRS

SEQ ID NO: 2498 - protein, 80 aa, Synthetic construct
PEDKKPLTRLQERLIKKLGEHAYPFTFEIPPNLPCSVTLQPGPEDTGKACGVDYEVKAFCAENLEEKIHKRNSVRLVIRK

SEQ ID NO: 2499 - protein, 90 aa, Synthetic construct
RNSVRLVIRKVQYAPERPGPQPTAETTRQFLMSDKPLHLEASLDKEIYYHGEPISVNVHVTNNTNKTVKKIKISVRQYADICLFNTAQYK

SEQ ID NO: 2500 - protein, 80 aa, Synthetic construct
LMSDKPLHLEASLDKEIYYHGEPISVNVHVTNNTNKTVKKIKISVRQYADICLFNTAQYKCPVAMEEADDTVAPSSTFCK

SEQ ID NO: 2501 - protein, 80 aa, Synthetic construct
VPNPPRPPTRLQDRLLRKLGQHAHPFFFTIPQNLPCSVTLQPGPEDTGKACGVDFEIRAFCAKSLEEKSHKRNSVRLVIR

SEQ ID NO: 2502 - protein, 80 aa, Synthetic construct
KVQFAPEKPGPQPSAETTRHFLMSDRSLHLEASLDKELYYHGEPLNVNVHVTNNSTKTVKKIKVSVRQYADICLFSTAQY

SEQ ID NO: 2503 - protein, 80 aa, Synthetic construct
VTNNSTKTVKKIKVSVRQYADICLFSTAQYKCPVAQLEQDDQVSPSSTFCKVYTITPLLSDNREKRGLALDGKLKHEDTN

SEQ ID NO: 2504 - protein, 80 aa, Synthetic construct
QHAHPFFFTIPQNLPCSVTLQPGPEDTGKACGVDFEIRAFCAKSLEEKSHKRNSVRLVIRKVQFAPEKPGPQPSAETTRH

SEQ ID NO: 2505 - protein, 110 aa, Synthetic construct
RLNFSGFGYSLPQQQPAAVARRNERERNRVKLVNLGFATLREHVPNGAANKKMSKVETLRSAVEYIRALQQLLDEHDAVSAAFQAGVLSPTISPNYSNDLNSMAGSPVSS

SEQ ID NO: 2506 - protein, 80 aa, Synthetic construct
VETLRSAVEYIRALQQLLDEHDAVSAAFQAGVLSPTISPNYSNDLNSMAGSPVSSYSSDEGSYDPLSPEEQELLDFTNWF

SEQ ID NO: 2507 - protein, 110 aa, Synthetic construct
LRCSRRRRPATAETGGGAAAVARRNERERNRVKLVNLGFQALRQHVPHGGASKKLSKVETLRSAVEYIRALQRLLAEHDAVRNALAGGLRPQAVRPSAPRGPPGTTPVAA

SEQ ID NO: 2508 - protein, 90 aa, Synthetic construct
DKLPIFPDSARLPLTRSFYLEPMVTFHVHPEAPVSSPYSEELPRLPFPSDSLILGNYSEPCPFSFPMPYPNYRGCEYSYGPAFTRKRNER

SEQ ID NO: 2509 - protein, 90 aa, Synthetic construct
NYRGCEYSYGPAFTRKRNERERQRVKCVNEGYAQLRHHLPEEYLEKRLSKVETLRAAIKYINYLQSLLYPDKAETKNNPGKVSSMIATTS

SEQ ID NO: 2510 - protein, 120 aa, Synthetic construct
RSGCARGWQYLPVPLDSAFEPAFLRKRNERERQRVRCVNEGYARLRDHLPRELADKRLSKVETLRAAIDYIKHLQELLERQAWGLEGAAGAVPQRRAECNSDGESKASSAPSPSSEPEEG

SEQ ID NO: 2511 - protein, 110 aa, Synthetic construct
NNNFCRALVDRRPLGPPSCMQLGVMPPPRQAPLPPAEPLGNVPFLLYPGPAEPPYYDAYAGVFPYVPFPGAFGVYEYPFEPAFIQKRNERERQRVKCVNEGYARLRGHLP

SEQ ID NO: 2512 - protein, 120 aa, Synthetic construct
GVFPYVPFPGAFGVYEYPFEPAFIQKRNERERQRVKCVNEGYARLRGHLPGALAEKRLSKVETLRAAIRYIKYLQELLSSAPDGSTPPASRGLPGTGPCPAPPATPRPDRPGDGEARAPS

SEQ ID NO: 2513 - protein, 110 aa, Synthetic construct
MAKVSVLNVAVLENPSPFHSPFRFEISFECSEALADDLEWKIIYVGSAESEEFDQILDSVLVGPVPAGRHMFVFQADAPNPSLIPETDAVGVTVVLITCTYHGQEFIRVG

SEQ ID NO: 2514 - protein, 90 aa, Synthetic construct
RPPKMREAMAEMPFMHSLSFPLSSTGFYPSYGMPYSPSPLTAAPIGLGYYGRYPPTLYPPPPSPSFTTPLPPPSYMHAGHLLLNPAKYHK

SEQ ID NO: 2515 - protein, 90 aa, Synthetic construct
CRLRKAYYNARHEASAQIDEIVGETASEADSSETSVSEKENGHEKDDDVIRCICGLYKDEGLMIQCDKCMVWQHCDCMGVNSDVEHYLCE

SEQ ID NO: 2516 - protein, 90 aa, Synthetic construct
EIPSLEEPEREGATANVSEGEKKTEESSQEPQSTCTPEERRHNQRERLNQILLNLLEKIPGKNAIDVTYLLEEGSGRKLRRRTLFIPENS

SEQ ID NO: 2517 - protein, 80 aa, Synthetic construct
KNEHCPSKRDPSKLYKKADDVAAIECQSEEVIRLHSQGENNPLSKKLSPVHSEMADYINATPSTLLGSRDPDLKDRALLN

SEQ ID NO: 2518 - protein, 80 aa, Synthetic construct
TSLQSKPLKKRKGRKPRWTKVVARSTCRSPKGLELERSELFKNVSCSSLSNSNSEPAKFMKNIGPPSFVDHDFLKRRLPK

SEQ ID NO: 2519 - protein, 80 aa, Synthetic construct
PDSLLVPAVTSDSCNNSISLLSEKLTSSCSPHHIKRSVVEAMQRQARKMCNYDKILATKKNLDHVNKILKAKKLQRQART

SEQ ID NO: 2520 - protein, 80 aa, Synthetic construct
NGVYRIGLYALKDMPAGTELTYDYNFHSFNVEKQQLCKCGFEKCRGIIGGKSQRVNGLTSSKNSQPMATHKKSGRSKEKR

SEQ ID NO: 2521 - protein, 80 aa, Synthetic construct
QPGCVYFICLLRDDLLLRQGDCVYLMRDSRRTPDGHPVRQSYRLLSHINRDKLDIFRIEKLWKNEKEERFAFGHHYFRPH

SEQ ID NO: 2522 - protein, 80 aa, Synthetic construct
RIVPVVSQSECKEEALQMSSPGRKEECESQGEVQPNFSTSSEPLLSSALNTHELSSILPIKCPKDEDLLEQKPVTSAEQE

SEQ ID NO: 2523 - protein, 80 aa, Synthetic construct
AGHYLLNISTYGRGSESFRRTHSVNPEDRFCLSSPTEALKMGYTDCKNATGESSSSKEDDTDEESTGDEQESVTVKEEPQ

SEQ ID NO: 2524 - protein, 80 aa, Synthetic construct
ESVTVKEEPQVSQSAGKGDTSSGPHSRETLSTSDCLASKNVKAEIPLNEQTTLSKENYLFTRGQTFDEKTLARDLIQAAQ

SEQ ID NO: 2525 - protein, 80 aa, Synthetic construct
TLPHIEVKIEGKSESPQEEMTVVIDQLEVCDSLIPSTSSMTHVSDTEHKESETAVETSTPKIKTGSSSLEGQFPNEGIAI

SEQ ID NO: 2526 - protein, 90 aa, Synthetic construct
HIKEQTKAKLFAKHQARAHLFQTSKETRLPPPLSSKEGPPNLEVSSTPETKMEGSTGVIIVNPNCRSPSNKSAHLRETTTVLQQSLNPSK

SEQ ID NO: 2527 - protein, 80 aa, Synthetic construct
PTVAMFTGNMLTINSYDSPPKLSAESLDKNSGPRNRADNSGKPQQPPGGFAPAAINRSIPCKVIVDHSTTLTSSLSLTVS

SEQ ID NO: 2528 - protein, 90 aa, Synthetic construct
EPTAPSHNFAEQARGPAPFKSEADTTCSNQYNPSNRICWNDDGMRSTGQPLVTHSGSSKQKEYLEQSCPKAIKTEHANYLNVSELHPRNL

SEQ ID NO: 2529 - protein, 100 aa, Synthetic construct
DDGMRSTGQPLVTHSGSSKQKEYLEQSCPKAIKTEHANYLNVSELHPRNLVTNVALPVKSELHEADKGFRMDTEDFPGPELPPPAAEGASSVQQTQNMKA

SEQ ID NO: 2530 - protein, 80 aa, Synthetic construct
VARTVGEHTQVKCEPGKLLVEPDVKGVPCVISSGISQLGHSQPFKQEWLNKHSMQNRIVHSPEVKQQKRLLPSCSFQQNL

SEQ ID NO: 2531 - protein, 110 aa, Synthetic construct
LPPPLPNAEVPSDQKQPPVTMETTKRLSWPQSTGICSNIKSEPLSFEEGLSSSCELGMKQVSYDQNEMKEQLKAFALKSADFSSYLLSEPQKPFTQLAAQKMQVQQQQQL

SEQ ID NO: 2532 - protein, 80 aa, Synthetic construct
TSEKLQLDLSSINISAKDFEVAMQKMIPASQRAVTSPGQALSTVVKPLLQNTVDKILEALQRVFPHAEFRTNKTLDSDIS

SEQ ID NO: 2533 - protein, 140 aa, Synthetic construct
YVTVIKQPMDLSSVISKIDLHKYLTVKDYLRDIDLICSNALEYNPDRDPGDRLIRHRACALRDTAYAIIKEELDEDFEQLCEEIQESRKKRGCSSSKYAPSYYHVMPKQNSTLVGDKRSDPEQNEKLKTPSTPVACSTPA

SEQ ID NO: 2534 - protein, 80 aa, Synthetic construct
STEHLHEDNGDVEVRRSCRIRSRYSGVNQSMLFDKLITNTAEAVLQKMDDMKKMRRQRMRELEDLGVFNETEESNLNMYT

SEQ ID NO: 2535 - protein, 80 aa, Synthetic construct
DDDDDDDEDDEDEEDGEEENQKRYYLRQRKATVYYQAPLEKPRHQRKPNIFYSGPASPARPRYRLSSAGPRSPYCKRMNR

SEQ ID NO: 2536 - protein, 80 aa, Synthetic construct
NGLSQKSSHKAKDNFNFLHLNRNACYQPMSFRPRILIVGEPGFGQGSHLAPAVIHALEKFTVYTLDIPVLFGVSTTSPEE

SEQ ID NO: 2537 - protein, 80 aa, Synthetic construct
DTEETQDTSVDHNETGNTGESSVEENEKQQNASESKLELRNNSNTCNIENELEDSRKTTACTELRDKIACNGDASSSQII

SEQ ID NO: 2538 - protein, 80 aa, Synthetic construct
GDMEVRKSCRSRKNRFESVNQSLLFDQLVNSTAEAVLQEMDNINIRRNRRSGEVERLRMWTDTEFENMDMYSRVKRRRKS

SEQ ID NO: 2539 - protein, 90 aa, Synthetic construct
PVDSNKDCTTPLEMFSNVEFKKKRKRVNLSHQLNNIKTENEAPIEISSDDSKEDYSLNNDFVESSTSVLRYKKQVEVLAENIQDTKSQPN

SEQ ID NO: 2540 - protein, 80 aa, Synthetic construct
HQLNNIKTENEAPIEISSDDSKEDYSLNNDFVESSTSVLRYKKQVEVLAENIQDTKSQPNTMTSLQNSKKVNPKQGTTKN

SEQ ID NO: 2541 - protein, 80 aa, Synthetic construct
PKSTRRSGRISSTPTTETIRGIDSDDVQDNSQLKASTQKAANLSEKHSLYTAELITVPFDSESPIRMKFTRISTPKKSKK

SEQ ID NO: 2542 - protein, 80 aa, Synthetic construct
PKNTKKKRVDLPKCDSGCAETLFGLKNIFSPSEDLFSFLKHKITMKEEWHKFIQLLTEFQMRNVDFLYSNLEFILPLPVD

SEQ ID NO: 2543 - protein, 100 aa, Synthetic construct
APEEDERKKRRRERNKIAAAKCRNKKKEKTECLQKESEKLESVNAELKAQIEELKNEKQHLIYMLNLHRPTCIVRAQNGRTPEDERNLFIQQIKEGTLQS

SEQ ID NO: 2544 - protein, 90 aa, Synthetic construct
LGSEVDITEGDRKPDYTAYVAMIPQCIKEEDTPSDNDSGICMSPESYLGSPQHSPSTRGSPNRSLPSPGVLCGSARPKPYDPPGEKMVAA

SEQ ID NO: 2545 - protein, 80 aa, Synthetic construct
PQHSPSTRGSPNRSLPSPGVLCGSARPKPYDPPGEKMVAAKVKGEKLDKKLKKMEQNKTAATRYRQKKRAEQEALTGECK

SEQ ID NO: 2546 - protein, 80 aa, Synthetic construct
DPPGEKMVAAKVKGEKLDKKLKKMEQNKTAATRYRQKKRAEQEALTGECKELEKKNEALKERADSLAKEIQYLKDLIEEV

SEQ ID NO: 2547 - protein, 80 aa, Synthetic construct
HPATTRGDRKQKKRDQNKSAALRYRQRKRAEGEALEGECQGLEARNRELKERAESVEREIQYVKDLLIEVYKARSQRTRS

SEQ ID NO: 2548 - protein, 120 aa, Synthetic construct
GEPAGVAGTMESPFSPGLFHRLDEDWDSALFAELGYFTDTDELQLEAANETYENNFDNLDFDLDLMPWESDIWDINNQICTVKDIKAEPQPLSPASSSYSVSSPRSVDSYSSTQHVPEEL

SEQ ID NO: 2549 - protein, 90 aa, Synthetic construct
THNKTTRPKMSIVLPAININENVINGQDYEVMMQIDCQVMDTRILHIKSSSVPPYLRDQQRNQTNTFFGSPPAATEATHVVVSTIPESLQ

SEQ ID NO: 2550 - protein, 80 aa, Synthetic construct
VVPAPSANSPVNGKLSVTKPVLQSTMRNVGSDIAVLRRQQRMIKNRESACQSRKKKKEYMLGLEARLKAALSENEQLKKE

SEQ ID NO: 2551 - protein, 90 aa, Synthetic construct
DPTRFFTDNLLSPEDWGLQNSTLYSGLDEVAEEQTQLFRCPEQDVPFDGSSLDVGMDVSPSEPPWELLPIFPDLQVKSEPSSPCSSSSLS

SEQ ID NO: 2552 - protein, 80 aa, Synthetic construct
SLDVGMDVSPSEPPWELLPIFPDLQVKSEPSSPCSSSSLSSESSRLSTEPSSEALGVGEVLHVKTESLAPPLCLLGDDPT

SEQ ID NO: 2553 - protein, 80 aa, Synthetic construct
FPDLQVKSEPSSPCSSSSLSSESSRLSTEPSSEALGVGEVLHVKTESLAPPLCLLGDDPTSSFETVQINVIPTSDDSSDV

SEQ ID NO: 2554 - protein, 140 aa, Synthetic construct
SESSRLSTEPSSEALGVGEVLHVKTESLAPPLCLLGDDPTSSFETVQINVIPTSDDSSDVQTKIEPVSPCSSVNSEASLLSADSSSQAFIGEEVLEVKTESLSPSGCLLWDVPAPSLGAVQISMGPSLDGSSGKALPTRK

SEQ ID NO: 2555 - protein, 80 aa, Synthetic construct
GEEVLEVKTESLSPSGCLLWDVPAPSLGAVQISMGPSLDGSSGKALPTRKPPLQPKPVVLTTVPMPSRAVPPSTTVLLQS

SEQ ID NO: 2556 - protein, 150 aa, Synthetic construct
EMTLKFGPARTDSVIIADQTPTPTRFLKNCEEVGLFNELASSFEHEFKKAADEDEKKAAAGPLDMSLPSTPDIKIKEEEPVEVDSSPPDSPASSPCSPPLKEKEVTPKPVLISTPTPTIVRPGSLPLHLGYDPLHPTLPSPTSVITQAPP

SEQ ID NO: 2557 - protein, 80 aa, Synthetic construct
SGSISPSGHPIPSEAKMRLKATLTHQVSSINGGCGMVVGTASTMVTARPEQSQILIQHPDAPSPAQPQVSPAQPTPSTGG

SEQ ID NO: 2558 - protein, 80 aa, Synthetic construct
VFQMCNTLLQRNTETRKRKLTICTYKVVPLSQRSGVLEWCTGTVPIGEFLVNNEDGAHKRYRPNDFSAFQCQKKMMEVQK

SEQ ID NO: 2559 - protein, 80 aa, Synthetic construct
QIDHLFISNLPEIVVELLMTLHEPANSSASQSTDLCDFSGDLDPAPNPPHFPSHVIKATFAYISNCHKTKLKSILEILSK

SEQ ID NO: 2560 - protein, 150 aa, Synthetic construct
RTALQSHIYRTGHEIPAEHRDPPSKKRKMENCAQNQKLSNKTIESLNNQPIPRPDTQELEASEIKLEPSFEDSCGSNTDKQTLTTPPRYPQKLLLPKPKVALVKLPVMQFSVMPVFVPTADSSAQPVVLGVDQGSATGAVHLMPLSVGTL

SEQ ID NO: 2561 - protein, 80 aa, Synthetic construct
ALVKLPVMQFSVMPVFVPTADSSAQPVVLGVDQGSATGAVHLMPLSVGTLILGLDSEACSLKESLPLFKIANPIAGEPIS

SEQ ID NO: 2562 - protein, 150 aa, Synthetic construct
TATPPGYKPGSPPSFRTGTPPGYRGTSPPAGPGTFKPGSPTVGPGPLPPAGPSGLPSLPPPPAAPASGPPLSATQIKQEPAEEYETPESPVPPARSPSPPPKVVDVPSHASQSARFNKHLDRGFNSCARSDLYFVPLEGSKLAKKRADLV

SEQ ID NO: 2563 - protein, 110 aa, Synthetic construct
CSRQRAPSSKQVNGVQKQRRLAANARERRRMHGLNHAFDQLRNVIPSFNNDKKLSKYETLQMAQIYINALSELLQTPSGGEQPPPPPASCKSDHHHLRTAASYEGGAGNA

SEQ ID NO: 2564 - protein, 90 aa, Synthetic construct
GTECAGTCAGAGRLESAARRRLAANARERRRMQGLNTAFDRLRRVVPQWGQDKKLSKYETLQMALSYIMALTRILAEAERFGSERDWVGL

SEQ ID NO: 2565 - protein, 80 aa, Synthetic construct
YSSISHVIYNNHQDSSASPRKRPGEATAASSEIKALQQTRRLLANARERTRVHTISAAFEALRKQVPCYSYGQKLSKLAI

SEQ ID NO: 2566 - protein, 80 aa, Synthetic construct
EEATFSEILIPLQSVMIPTLPSILGTHANHASHEPFPGHWAYIAGFDDMVEILASLQKPKKISLKGSDGKFYIMMCKPKD

SEQ ID NO: 2567 - protein, 80 aa, Synthetic construct
PPYFMKGSIIQLANGELKKVEDLKTEDFIQSAEISNDLKIDSSTVERIEDSHSPGVAVIQFAVGEHRAQVSVEVLVEYPF

SEQ ID NO: 2568 - protein, 100 aa, Synthetic construct
PPVHESPHPPLPATEPASRLSSEEGEGDDKEESVEKLDCHYSGHHPQPASFCTFGSRQIGRGYYVFDSRWNRLRCALNLMVEKHLNAQLWKKIPPVPSTT

SEQ ID NO: 2569 - protein, 80 aa, Synthetic construct
RAVKCGYFFLDDTDPDSMKDFEIVDQPGLDIFGQVFNQWKSKECVCPNCSRSIAASRFAPHLEKCLGMGRNSSRIANRRI

SEQ ID NO: 2570 - protein, 80 aa, Synthetic construct
HDARRVYLILEYAPRGELYKELQKSEKLDEQRTATIIEELADALTYCHDKKVIHRDIKPENLLLGFRGEVKIADFGWSVH

SEQ ID NO: 2571 - protein, 80 aa, Synthetic construct
SGTDVQEKTFGESQDLPLKSDLGTREDSSVASSDRSSVEREVAEHLAKGFWSDICSTDTPCQMQLSPAVAKDGSEQISQK

SEQ ID NO: 2572 - protein, 80 aa, Synthetic construct
DLGTREDSSVASSDRSSVEREVAEHLAKGFWSDICSTDTPCQMQLSPAVAKDGSEQISQKRSECPWLGIRISESPEPGQR

SEQ ID NO: 2573 - protein, 140 aa, Synthetic construct
VPTDTKESSEKDALTQYPRYKKYQLACTKNVYNASSHSTSGFASTFREDNSSNSLKPGLARGQIKSEPPSEENEEESITLCLSGDEPDAKDRAGDVEMDRKQPSPAPTPTAPAGAACLERSRSVASPSCLRSLFSITKSV

SEQ ID NO: 2574 - protein, 90 aa, Synthetic construct
QGARFLATEHQEPGLMGDGMYNQVRPQIKCEQSYGTNSSDESGSFSEADSESCPVQDRGQEVKLPFPVDQITDLPRNDFQMMIKMHKLTS

SEQ ID NO: 2575 - protein, 80 aa, Synthetic construct
VCRKDAACQRPHEDCENSAGEEEDEEEETMDSETAKMACPRDQMLPEPISFEAAAIPVAEKEEALLPEPDVPTDTKESSE

SEQ ID NO: 2576 - protein, 100 aa, Synthetic construct
EEEDEEEETMDSETAKMACPRDQMLPEPISFEAAAIPVAEKEEALLPEPDVPTDTKESSEKDALTQYPRYKKYQLACTKNVYNASSHSTSGFASTFREDN

SEQ ID NO: 2577 - protein, 90 aa, Synthetic construct
EQLEFIHDVRRRSKNRIAAQRCRKRKLDCIQNLECEIRKLVCEKEKLLSERNQLKACMGELLDNFSCLSQEVCRDIQSPEQIQALHRYCP

SEQ ID NO: 2578 - protein, 90 aa, Synthetic construct
RPHLPLLMGGQAALKPEPGRPGEESPAPKQELHQPSFPTPQLSPLPMPGNPADYNGLCVGPELTALGSFYLYCGQEGLQCGGYSPCPMLP

SEQ ID NO: 2579 - protein, 90 aa, Synthetic construct
GEIFIILRDEVIGDTVEVEFTSSNKRIRTRPALWNKKVWCMKALEFPAGSVHVNVYCDGIVKATTKIKYYPTAKAKECLFRMADSGESLC

SEQ ID NO: 2580 - protein, 80 aa, Synthetic construct
MKALEFPAGSVHVNVYCDGIVKATTKIKYYPTAKAKECLFRMADSGESLCQNSIEELDGVLTSIFKHEIPYYEFQSLQTE

SEQ ID NO: 2581 - protein, 80 aa, Synthetic construct
VKATTKIKYYPTAKAKECLFRMADSGESLCQNSIEELDGVLTSIFKHEIPYYEFQSLQTEICSQNKYTHFKELPTLLHCA

SEQ ID NO: 2582 - protein, 120 aa, Synthetic construct
DHPVVLENHVVTDEDEPALKRQRLEINCQDPSIKSFLYSINQTICLRLDSIEAKLQALEATCKSLEEKLDLVTNKQHSPIQVPMVAGSPLGATQTCNKVRCAVPGRRQNTIVVKVPGQED

SEQ ID NO: 2583 - protein, 80 aa, Synthetic construct
QAGSQSIGSNVTLITLNSEEDYPNGTWLGDENNPEMRVRCAIIPSDMLHISTNCRTAEKMALTLLDYLFHREVQAVSNLS

SEQ ID NO: 2584 - protein, 100 aa, Synthetic construct
QLSAPAQSRTVTSSFLIRDILADCKPLAACAPYSSSGQPAAPEPGGRLAAKAAEDFRDKLDKSGSNASSDSEYKVKEEGDREISSSRDSPPVRLKKPRKA

SEQ ID NO: 2585 - protein, 90 aa, Synthetic construct
TQHHHHLHHSQQPPPPAAAPTQSLQPLPQQQQPLPPQQPPPPPPQQLGSAASAPRTSTSSFLIKDILGDSKPLAACAPYSTSVSSPHHTP

SEQ ID NO: 2586 - protein, 80 aa, Synthetic construct
FRPKLEQEDSKTKLDKREDSQSDIKCHGTKEEGDREITSSRESPPVRAKKPRKARTAFSDHQLNQLERSFERQKYLSVQD

SEQ ID NO: 2587 - protein, 80 aa, Synthetic construct
ASAPRTSTSSFLIKDILGDSKPLAACAPYSTSVSSPHHTPKQESNAVHESFRPKLEQEDSKTKLDKREDSQSDIKCHGTK

SEQ ID NO: 2588 - protein, 100 aa, Synthetic construct
QRPGEPGAARFGPPEGCADHRPHRYRSFMIEEILTEPPGPKGAAPAAAAAAAGELLKFGVQALLAARPFHSHLAVLKAEQAAVFKFPLAPLGCSGLSSAL

SEQ ID NO: 2589 - protein, 80 aa, Synthetic construct
LKKQKNRAAAQRSRQKHTDKADALHQQHESLEKDNLALRKEIQSLQAELAWWSRTLHVHERLCPMDCASCSAPGLLGCWD

SEQ ID NO: 2590 - protein, 80 aa, Synthetic construct
EKKARQNLQSFPEPLIIPVLYLTSLTHRSRLHEICDDIFAYVKDRYFVEETVEVIRNNGARLQCRILEVLPPSHQNGFAN

SEQ ID NO: 2591 - protein, 100 aa, Synthetic construct
YLTSLTHRSRLHEICDDIFAYVKDRYFVEETVEVIRNNGARLQCRILEVLPPSHQNGFANGHVNSVDGETIIISDSDDSETQSCSFQNGKKKDAIDPLLF

SEQ ID NO: 2592 - protein, 80 aa, Synthetic construct
YQGTLGAIKVTDRHIWRSALESGRYELLSEENKENGIIKTVNEDVEEMEIDEQTKVIVKDRLLGIKTETPSTVSTNASTP

SEQ ID NO: 2593 - protein, 80 aa, Synthetic construct
ESGRYELLSEENKENGIIKTVNEDVEEMEIDEQTKVIVKDRLLGIKTETPSTVSTNASTPQSVSSVVHYLAMALFQIEQG

SEQ ID NO: 2594 - protein, 100 aa, Synthetic construct
ENMVLCDGCDRGHHTYCVRPKLKTVPEGDWFCPECRPKQRSRRLSSRQRPSLESDEDVEDSMGGEDDEVDGDEEEGQSEEEEYEVEQDEDDSQEEEEVSL

SEQ ID NO: 2595 - protein, 80 aa, Synthetic construct
PLFTIPHTQEAFRTREEYEARLERYSERIWTCKSTGSSQLTHKEAWEEEQEVAELLKEEFPAWYEKLVLEMVHHNTASLE

SEQ ID NO: 2596 - protein, 80 aa, Synthetic construct
KKEIVKFEPQVDTEAEDMISAVKSRRLLAIQAKKEREIQEREMKVKLERQAEEERIRKHKAAAEKAFQEGIAKAKLVMRR

SEQ ID NO: 2597 - protein, 100 aa, Synthetic construct
EVATRLQKGGLGYVEETSEFEARVISLEKLKDFGECVIALQASVIKKFLQGFMAPKQKRRKLQSEDSAKTEEVDEEKKMVEEAKVASALEKWKTAIREAQ

SEQ ID NO: 2598 - protein, 80 aa, Synthetic construct
GFMAPKQKRRKLQSEDSAKTEEVDEEKKMVEEAKVASALEKWKTAIREAQTFSRMHVLLGMLDACIKWDMSAENARCKVC

SEQ ID NO: 2599 - protein, 80 aa, Synthetic construct
AKKPGKHSDKPLKAKGRSKGILNGQKSTGNSKSPKKGLKTPKTKMKQMTLLDMAKGTQKMTRAPRNSGGTPRTSSKPHKH

SEQ ID NO: 2600 - protein, 100 aa, Synthetic construct
KKLLHSSQMLRAVSLGQDRYRRRYWVLPYLAGIFVEGTEGNLVPEEVIKKETDSLKVAAHASLNPALFSMKMELAGSNTTASSPARARGRPRKTKPGSMQ

SEQ ID NO: 2601 - protein, 140 aa, Synthetic construct
PRHLKSPVRGQDSEQPQAQLQPEAQLHAPAQPQPQLQLQLQSHKGFLEQEGSPLSLGQSQHDLSQSAFLSWLSQTQSHSSLLSSSVLTPDSSPGKLDPAPSQPPEEPEPDEAESSPDPQALWFNISAQMPCNAAPTPPPA

SEQ ID NO: 2602 - protein, 80 aa, Synthetic construct
HRDFLQEVCLRPSADPIFEPRQLPAFQEGIMSWSPKEKTYETDLAVLQWVEELEQRVIMSDLQIRGWTCPSPDSTREDLA

SEQ ID NO: 2603 - protein, 110 aa, Synthetic construct
RSAAQVCLCLGQLERSIAWEKSVNKVTCLVCRKGDNDEFLLLCDGCDRGCHIYCHRPKMEAVPEGDWFCTVCLAQQVEGEFTQKPGFPKRGQKRKSGYSLNFSEGDGRRR

SEQ ID NO: 2604 - protein, 80 aa, Synthetic construct
EKRIHQPLPLASESQTHSFQSQQKQPQVLSQQLPFIFQSSQAKEESVNKHTSVIQSTGLVSNVKPLSLVNQAKKETYMKL

SEQ ID NO: 2605 - protein, 80 aa, Synthetic construct
QQLPFIFQSSQAKEESVNKHTSVIQSTGLVSNVKPLSLVNQAKKETYMKLIVPSPDVLKAGNKNTSEESSLLTSELRSKR

SEQ ID NO: 2606 - protein, 80 aa, Synthetic construct
KKAEEKERLKQEKRDEKRLNKERKLEQRRLELEMAKELKKPNEDMCLADQKPLPELPRIPGLVLSGSTFSDCLMVVQFLR

SEQ ID NO: 2607 - protein, 120 aa, Synthetic construct
EKLSKQQSQYRRKLFDASHSLRSVMFGQDRYRRRYWILPQCGGIFVEGMESGEGLEEIAKEREKLKKAESVQIKEEMFETSGDSLNCSNTDHCEQKEDLKEKDNTNLFLQKPGSFSKLSK

SEQ ID NO: 2608 - protein, 90 aa, Synthetic construct
EREKLKKAESVQIKEEMFETSGDSLNCSNTDHCEQKEDLKEKDNTNLFLQKPGSFSKLSKLLEVAKMPPESEVMTPKPNAGANGCTLSYQ

SEQ ID NO: 2609 - protein, 90 aa, Synthetic construct
NEELLLLCDGCDKGCHTYCHRPKITTIPDGDWFCPACIAKASGQTLKIKKLHVKGKKTNESKKGKKVTLTGDTEDEDSASTSSSLKRGNK

SEQ ID NO: 2610 - protein, 80 aa, Synthetic construct
QGMQWCLLKEEDVIPRIRAMEGRRGRPPNPDRQRAREESRMRRRKGRPPNVGNAEFLDNADAKLLRKLQAQEIARQAAQI

SEQ ID NO: 2611 - protein, 80 aa, Synthetic construct
QQILEAKKKKKEEAANAKLLEAEKRIKEKEMRRQQAVLLKHQERERRRQHMMLMKAMEARKKAEEKERLKQEKRDEKRLN

SEQ ID NO: 2612 - protein, 80 aa, Synthetic construct
CGKSALFQLAEMCLASEGMKMEESKLIKAKESDGGRIKELEKGKEEKEIKMEKTDETRLQKEAEFEKSAKENLRDSKELR

SEQ ID NO: 2613 - protein, 80 aa, Synthetic construct
EKGKEEKEIKMEKTDETRLQKEAEFEKSAKENLRDSKELRNFEALQIDDIMAIKMEDPKEIRKEELEEDHKCSHFPDFSY

SEQ ID NO: 2614 - protein, 80 aa, Synthetic construct
LDAKPPKKKVKSREKKMSKEKSSDTTKESRPPDFISISASKNISGETPEGIKAEPLTPMEDALPPSLSGQAKPEDSDCHR

SEQ ID NO: 2615 - protein, 80 aa, Synthetic construct
KSSDTTKESRPPDFISISASKNISGETPEGIKAEPLTPMEDALPPSLSGQAKPEDSDCHRKIETCGSRKSERSCKGALYK

SEQ ID NO: 2616 - protein, 90 aa, Synthetic construct
KNISGETPEGIKAEPLTPMEDALPPSLSGQAKPEDSDCHRKIETCGSRKSERSCKGALYKTLVSEGMLTSLRANVDRGKRSSGKGNSSDH

SEQ ID NO: 2617 - protein, 80 aa, Synthetic construct
NIPSIFNTPEPTTTQEPLVGSQKRKARKTKITHLVRTADGRVSPAGGTLDDKPKEQLQRSLPKATETDCNDKCSHNTEVG

SEQ ID NO: 2618 - protein, 80 aa, Synthetic construct
LPKATETDCNDKCSHNTEVGETRSSTPEMPAVSAFFSLAALAEVAAMENVHRGQRSTPLTHDGQPKEMPQAPVLISCADQ

SEQ ID NO: 2619 - protein, 100 aa, Synthetic construct
LSKREFSPEPLEAILTDDEPDHGPLGAPEGDHDLLTCGQCQMNFPLGDILIFIEHKRKQCNGSLCLEKAVDKPPSPSPIEMKKASNPVEVGIQVTPEDDD

SEQ ID NO: 2620 - protein, 80 aa, Synthetic construct
RHMKTHMHKSSPMTVKSDDGLSTASSPEPGTSDLVGSASSALKSVVAKFKSENDPNLIPENGDEEEEEDDEEEEEEEEEE

SEQ ID NO: 2621 - protein, 140 aa, Synthetic construct
RGHLAEAEGHRDTCDEDSVAGESDRIDDGTVNGRGCSPGESASGGLSKKLLLGSPSSLSPFSKRIKLEKEFDLPPAAMPNTENVYSQWLAGYAASRQLKDPFLSFGDSRQSPFASSSEHSSENGSLRFSTPPGELDGGIS

SEQ ID NO: 2622 - protein, 80 aa, Synthetic construct
LSTASSPEPGTSDLVGSASSALKSVVAKFKSENDPNLIPENGDEEEEEDDEEEEEEEEEEEEELTESERVDYGFGLSLEA

SEQ ID NO: 2623 - protein, 110 aa, Synthetic construct
ADHVEAAILEEDEGLEIEEPSGLGLMVGGPDPDLLTCGQCQMNFPLGDILVFIEHKRKQCGGSLGACYDKALDKDSPPPSSRSELRKVSEPVEIGIQVTPDEDDHLLSPT

SEQ ID NO: 2624 - protein, 120 aa, Synthetic construct
CGDAGAGGAVNGRGGGFAPGTEPFPGLFPRKPAPLPSPGLNSAAKRIKVEKDLELPPAALIPSENVYSQWLVGYAASRHFMKDPFLGFTDARQSPFATSSEHSSENGSLRFSTPPGDLLD

SEQ ID NO: 2625 - protein, 80 aa, Synthetic construct
LNRLRSRDILTDVVIVVSREQFRAHKTVLMACSGLFYSIFTDQLKCNLSVINLDPEINPEGFCILLDFMYTSRLNLREGN

SEQ ID NO: 2626 - protein, 110 aa, Synthetic construct
QASYEPLGISLRPLEAEPPTPPTAPPPGSPRRSEGHPDPPTESRSCSQGPPSPASPDPKACNWKKYKYIVLNSQASQAGSLVGERSSGQPCPQARLPSGDEASSSSSSSS

SEQ ID NO: 2627 - protein, 80 aa, Synthetic construct
PSGSSAPPHPAKMPSGTEQQTEGTSVTFSPLKSPPQLEREMASPPECSEMPLDLSSKSNRQKLPLPNQRKTPPMPVLTPV

SEQ ID NO: 2628 - protein, 90 aa, Synthetic construct
LKSPPQLEREMASPPECSEMPLDLSSKSNRQKLPLPNQRKTPPMPVLTPVHTSSKALLSTVLSRSQRTTQAAGGNVTSCLGSTSSPFVIF

SEQ ID NO: 2629 - protein, 130 aa, Synthetic construct
KPKNQVLATYMSHELVLATPQNLPKMPELPLLPHDSHPKELILDVVPSSRRGSSTERPQLGSQVDLGRVKMEKVDGDVVFNLATCFRADGLPVAPQRGQAEVRAKAGQARVKQESVGVFACKNKWQPDDV

SEQ ID NO: 2630 - protein, 80 aa, Synthetic construct
LKARKQKTSSSQSLEHRLRNRNLLLPNKVQGISDSPNGFLPNNLEEPACLENSEKPSGKRKCKTKHMATVSEEAKDVVLY

SEQ ID NO: 2631 - protein, 100 aa, Synthetic construct
RNLLLPNKVQGISDSPNGFLPNNLEEPACLENSEKPSGKRKCKTKHMATVSEEAKDVVLYCLQKDSEDVNHRDNAGYTALHEACSRGWTDILNILLEHGA

SEQ ID NO: 2632 - protein, 90 aa, Synthetic construct
TSLVTASAKVLPTPQPLLPAPSGSSAPPHPAKMPSGTEQQTEGTSVTFSPLKSPPQLEREMASPPECSEMPLDLSSKSNRQKLPLPNQRK

SEQ ID NO: 2633 - protein, 110 aa, Synthetic construct
ASCSRGEAEEPAGRRRARPVRSKARRMAANVRERKRILDYNEAFNALRRALRHDLGGKRLSKIATLRRAIHRIAALSLVLRASPAPRGPCGHLECHGPAARGDTGDTGAS

SEQ ID NO: 2634 - protein, 90 aa, Synthetic construct
EVLQYLAKHENTRDLKSSQLVTHLHRVVSELLQGGTSRKPSDPAPKVMDFKEKPSSPAKGSEGPGKNCVPVIQRTFAHSSGEQSGSDTDT

SEQ ID NO: 2635 - protein, 160 aa, Synthetic construct
KEKPSSPAKGSEGPGKNCVPVIQRTFAHSSGEQSGSDTDTDSGYGGESEKGDLRSEQPCFKSDHGRRFTMGERIGAIKQESEEPPTKKNRMQLSDDEGHFTSSDLISSPFLGPHPHQPPFCLPFYLIPPSATAYLPMLEKCWYPTSVPVLYPGLNASAAA

SEQ ID NO: 2636 - protein, 80 aa, Synthetic construct
LGPHPHQPPFCLPFYLIPPSATAYLPMLEKCWYPTSVPVLYPGLNASAAALSSFMNPDKISAPLLMPQRLPSPLPAHPSV

SEQ ID NO: 2637 - protein, 80 aa, Synthetic construct
ERIPSAQPPPACLPKAPGLEHGDLPGMYPAHMYQVYKSRRGIKRSEDSKETYKLPHRLIEKKRRDRINECIAQLKDLLPE

SEQ ID NO: 2638 - protein, 80 aa, Synthetic construct
HMYQVYKSRRGIKRSEDSKETYKLPHRLIEKKRRDRINECIAQLKDLLPEHLKLTTLGHLEKAVVLELTLKHVKALTNLI

SEQ ID NO: 2639 - protein, 190 aa, Synthetic construct
WTPREPRCVQLINHLHAVATQFLPTPQLLTQQVPLSKGTGAPSAAGSAAAPCLERAGQKLEPLAYCVPVIQRTQPSAELAAENDTDTDSGYGGEAEARPDREKGKGAGASRVTIKQEPPGEDSPAPKRMKLDSRGGGSGGGPGGGAAAAAAALLGPDPAAAAALLRPDAALLSSLVAFGGGGGAPFPQPA

SEQ ID NO: 2640 - protein, 80 aa, Synthetic construct
DWTLQDYIRGYVLQDASGKVLDHWSIMTSEEEVATLQQFLRFGETKSIVELMAIQEKEEQSIIIPPSTANVDIRAFIESC

SEQ ID NO: 2641 - protein, 80 aa, Synthetic construct
MPIKIEKEAVEIANEKRHNLSSDEDMPLQVVSEDEQEACSPQSHRVSEEQHVQSGGLGKPFPEGERPCHRESVIESSGAI

SEQ ID NO: 2642 - protein, 80 aa, Synthetic construct
SPTPYKNDQTPNRNALTSITNVEPKTEPACVSPIQNSAPVSDLTKTEHPKSSFRIHRMRRMGSASRKGRVFCNACGKTFY

SEQ ID NO: 2643 - protein, 140 aa, Synthetic construct
TSEDQEPERDYENESESSEPKLGEESMEGDEHIHSEVSEKVLMNSERPDENHSEPSHQDVIKVKEEFTDPTYDMFYMSQYGLYNGGGASMAALHESFTSSLNYGSPQKFSPEGDLCSSPDPKICYVCKKSFKSSYSVKLH

SEQ ID NO: 2644 - protein, 80 aa, Synthetic construct
SDLTKTEHPKSSFRIHRMRRMGSASRKGRVFCNACGKTFYDKGTLKIHYNAVHLKIKHRCTIEGCNMVFSSLRSRNRHSA

SEQ ID NO: 2645 - protein, 80 aa, Synthetic construct
EKDIPPLEFPKSSEDLMVPNEHIMNVIAIYEVLRNFGTVLRLSPFRFEDFCAALVSQEQCTLMAEMHVVLLKAVLREEDT

SEQ ID NO: 2646 - protein, 80 aa, Synthetic construct
LKAVLREEDTSNTTFGPADLKDSVNSTLYFIDGMTWPEVLRVYCESDKEYHHVLPYQEAEDYPYGPVENKIKVLQFLVDQ

SEQ ID NO: 2647 - protein, 80 aa, Synthetic construct
DLLCCETCSAVYHLECVKPPLEEVPEDEWQCEVCVAHKVPGVTDCVAEIQKNKPYIRHEPIGYDRSRRKYWFLNRRLIIE

SEQ ID NO: 2648 - protein, 100 aa, Synthetic construct
TFPVKHQVWKQKGEEYRVTGYGGWSWISKTHVYRFVPKLPGNTNVNYRKSLEGTKNNMDENMDESDKRKCSRSPKKIKIEPDSEKDEVKGSDAAKGADQN

SEQ ID NO: 2649 - protein, 80 aa, Synthetic construct
LEGTKNNMDENMDESDKRKCSRSPKKIKIEPDSEKDEVKGSDAAKGADQNEMDISKITEKKDQDVKELLDSDSDKPCKEE

SEQ ID NO: 2650 - protein, 110 aa, Synthetic construct
SRSPKKIKIEPDSEKDEVKGSDAAKGADQNEMDISKITEKKDQDVKELLDSDSDKPCKEEPMEVDDDMKTESHVNCQESSQVDVVNVSEGFHLRTSYKKKTKSSKLDGLL

SEQ ID NO: 2651 - protein, 110 aa, Synthetic construct
SNLSNDFIDENGLPINKNENVNGESKRKTVITEVTTMTSTVATESKTVIKVEKGDKQTVVSSTENCAKSTVTTTTTTVTKLSTPSTGGSVDIISVKEQSKTVVTTTVTDS

SEQ ID NO: 2652 - protein, 100 aa, Synthetic construct
EILKKRALLDKDLQIEVQEELKRDLKIKKEKDLMQLAQATAVAAPCPPVTPAPPAPPAPPPSPPPPPAVQHTGLLSTPTLPAASQKRKREEEKDSSSKSK

SEQ ID NO: 2653 - protein, 100 aa, Synthetic construct
FYIGCDLCTNWYHGECVGITEKEAKKMDVYICNDCKRAQEGSSEELYCICRTPYDESQFYIGCDRCQNWYHGRCVGILQSEAELIDEYVCPQCQSTEDAM

SEQ ID NO: 2654 - protein, 110 aa, Synthetic construct
RTPYDESQFYIGCDRCQNWYHGRCVGILQSEAELIDEYVCPQCQSTEDAMTVLTPLTEKDYEGLKRVLRSLQAHKMAWPFLEPVDPNDAPDYYGVIKEPMDLATMEERVQ

SEQ ID NO: 2655 - protein, 80 aa, Synthetic construct
IGYDRSRRKYWFLNRRLIIEEDTENENEKKIWYYSTKVQLAELIDCLDKDYWEAELCKILEEMREEIHRHMDITEDLTNK

SEQ ID NO: 2656 - protein, 80 aa, Synthetic construct
SSFGTILRKCSRNETCSNNTVISQDLDYKEAKCNKEKLQLFITPEADSLSCLQEGQCENDPKSKKVSDIKEEVLAAACHP

SEQ ID NO: 2657 - protein, 80 aa, Synthetic construct
LALGNTKELHETDLTCVNEPIFKNSTMVLYGDTGDKQATQVSIKKDLVYVLAEENKNSVKQHIKMTLGQDLKSDISLNID

SEQ ID NO: 2658 - protein, 80 aa, Synthetic construct
SGLNGAQMEKIPLLHISSCDQNISEKDLLDTENKRKKDFLTSENSLPRISSLPKSEKPLNEETVVNKRDEEQHLESHTDC

SEQ ID NO: 2659 - protein, 80 aa, Synthetic construct
DTEIDRSRRSAIKKIMERDDTAAKTLVLCVSDIISLSANISETSSNKTSSADTQKVAIIELTDGWYAVKAQLDPPLLAVL

SEQ ID NO: 2660 - protein, 90 aa, Synthetic construct
KNTKTGRVLYTCFQSIQAQKSSESLHGPRDFWSSSQHISIEGQKEEERYERIEIPIHIVPHVTIGKVCLESAVELPKILCQEEQDAYRRI

SEQ ID NO: 2661 - protein, 80 aa, Synthetic construct
FWSSSQHISIEGQKEEERYERIEIPIHIVPHVTIGKVCLESAVELPKILCQEEQDAYRRIHSLTHLDSVTKIHNGSVFTK

SEQ ID NO: 2662 - protein, 80 aa, Synthetic construct
PASASALPEPKVRIVEYSPPSAPRRPPVYYKFIEKSAEELDNEVEYDMDEEDYAWLEIVNEKRKGDCVPAVSQSMFEFLM

SEQ ID NO: 2663 - protein, 90 aa, Synthetic construct
EKRKGDCVPAVSQSMFEFLMDRFEKESHCENQKQGEQQSLIDEDAVCCICMDGECQNSNVILFCDMCNLAVHQECYGVPYIPEGQWLCRH

SEQ ID NO: 2664 - protein, 100 aa, Synthetic construct
MDGECQNSNVILFCDMCNLAVHQECYGVPYIPEGQWLCRHCLQSRARPADCVLCPNKGGAFKKTDDDRWGHVVCALWIPEVGFANTVFIEPIDGVRNIPP

SEQ ID NO: 2665 - protein, 80 aa, Synthetic construct
VLKIGEHMQTKSDEKLFLVLFFDNKRSWQWLPKSKMVPLGIDETIDKLKMMEGRNSSIRKAVRIAFDRAMNHLSRVHGEP

SEQ ID NO: 2666 - protein, 80 aa, Synthetic construct
KLQDVFEFRYAKMPDEPLEPGPLPVSTAMPPGLAKSSSESSSEESSSESSSEEEEEEDEEDEEEEESESSDSEEERAHRL

SEQ ID NO: 2667 - protein, 80 aa, Synthetic construct
PPATPIVPVVPPTPPVVKKKGVKRKADTTTPTTSAITASRSESPPPLSDPKQAKVVARRESGGRPIKPPKKDLEDGEVPQ

SEQ ID NO: 2668 - protein, 90 aa, Synthetic construct
QHHHSPRHHKSDPYSTGHLREAPSPLMIHSPQMSQFQSLTHQSPPQQNVQPKKQELRAASVVQPQPLVVVKEEKIHSPIIRSEPFSPSLR

SEQ ID NO: 2669 - protein, 110 aa, Synthetic construct
PQMSQFQSLTHQSPPQQNVQPKKQELRAASVVQPQPLVVVKEEKIHSPIIRSEPFSPSLRPEPPKHPESIKAPVHLPQRPEMKPVDVGRPVIRPPEQNAPPPGAPDKDKQ

SEQ ID NO: 2670 - protein, 100 aa, Synthetic construct
GVNTLQGFKEDKRNKVTPVLYLNYGPYSSYAPHYDSTFANISKDDSDLIYSTYGEDSDLPSDFSIHEFLATCQDYPYVMADSLLDVLTKGGHSRTLQEME

SEQ ID NO: 2671 - protein, 120 aa, Synthetic construct
AALSFCEENDDPQSLPGPWEHPIQQERDKPVPLPAPEMTVKQERLDFEETENKGIHELVDIREPSAEIKVEPAEPEPVISGAEIVAGVVPATSMEPPELRSQDLDEELGSTAAGEIVEAD

SEQ ID NO: 2672 - protein, 110 aa, Synthetic construct
TAAGEIVEADVAIGKGDETPLTNVKTEASPESMLSPSHGSNPIEDPLEAETQHKFEMSDSLKEESGTIFGSQIKDAPGEDEEEDGVSEAASLEEPKEEDQGEGYLSEMDN

SEQ ID NO: 2673 - protein, 80 aa, Synthetic construct
MMPALPAPSSAPAVSTTESVAPVSQPDNCVPMEAVGDPHTVTVSMDSSEISMIINSIKEECFRSGVAEAPVGSKAPSIDG

SEQ ID NO: 2674 - protein, 80 aa, Synthetic construct
DHSRTLFQLKQRRNVPMKPPDEAKVGDTLGDSSSSVLEFMSMKSYPDVSVDISMLSSLGKVKKELDPDDSHLNLDETTKL

SEQ ID NO: 2675 - protein, 80 aa, Synthetic construct
DEAKVGDTLGDSSSSVLEFMSMKSYPDVSVDISMLSSLGKVKKELDPDDSHLNLDETTKLLQDLHEAQAERGGSRPSSNL

SEQ ID NO: 2676 - protein, 90 aa, Synthetic construct
SMKSYPDVSVDISMLSSLGKVKKELDPDDSHLNLDETTKLLQDLHEAQAERGGSRPSSNLSSLSNASERDQHHLGSPSRLSVGEQPDVTH

SEQ ID NO: 2677 - protein, 80 aa, Synthetic construct
THFSKIPIEPVESMPLCYIKTDITETTGRENTNEASSEGNSSDDSEDERVKRLAKLQEQLKAVHQQLQVLSQVPFRKLNK

SEQ ID NO: 2678 - protein, 80 aa, Synthetic construct
GNGLTVESFSNKIQNKCSGEEQKEHQQSSEAQDKSKLWLLKDRDLARQKEQERRRREAMVGTIDMTLQSDIMTMFENNFD

SEQ ID NO: 2679 - protein, 120 aa, Synthetic construct
LLLYDTVQSELEEKIRRLEEDRHSIDITSELWNDELQSRKKRKDPFSPDKKKPVVVSGPYIVYMLQDLDILEDWTTIRKAMATLGPHRVKTEPPVKLEKHLHSARSEEGRLYYDGEWYIR

SEQ ID NO: 2680 - protein, 90 aa, Synthetic construct
LQEVIAGKAPEYLEPLATLQENMQIRTKVAGIYRELCLESVKNKYECEIQASRQHCESEKLLLYDTVQSELEEKIRRLEEDRHSIDITSE

SEQ ID NO: 2681 - protein, 80 aa, Synthetic construct
STTPKLPEVVYRELEQDTPDAPPRPTSYYRYIEKSAEELDEEVEYDMDEEDYIWLDIMNERRKTEGVSPIPQEIFEYLMD

SEQ ID NO: 2682 - protein, 80 aa, Synthetic construct
RRKTEGVSPIPQEIFEYLMDRLEKESYFESHNKGDPNALVDEDAVCCICNDGECQNSNVILFCDMCNLAVHQECYGVPYI

SEQ ID NO: 2683 - protein, 80 aa, Synthetic construct
DGECQNSNVILFCDMCNLAVHQECYGVPYIPEGQWLCRRCLQSPSRAVDCALCPNKGGAFKQTDDGRWAHVVCALWIPEV

SEQ ID NO: 2684 - protein, 90 aa, Synthetic construct
AAEESSSQETSKGLGPNMSSTPAHEVGRRTSVLFSKKNPKTAGPPKRPGRPPKNRESQMTPSHGGSPVGPPQLPIMSSLRQRKRGRSPRP

SEQ ID NO: 2685 - protein, 80 aa, Synthetic construct
SIFDNLDVVSEDEEAPEEAPENGSNKENTETPAATPKSGKHKNKEKRKDSNHHHHHNVSASTTPKLPEVVYRELEQDTPD

SEQ ID NO: 2686 - protein, 80 aa, Synthetic construct
GEQMTQEAREHLYLVLFFDNKRTWQWLPRTKLVPLGVNQDLDKEKMLEGRKSNIRKSVQIAYHRALQHRSKVQGEQSSET

SEQ ID NO: 2687 - protein, 110 aa, Synthetic construct
RRVDGHSLVSADTFELLVDRLEKESYLESRSSGAQQSLIDEDAFCCVCLDDECHNSNVILFCDICNLAVHQECYGVPYIPEGQWLCRCCLQSPSRPVDCILCPNKGGAFK

SEQ ID NO: 2688 - protein, 120 aa, Synthetic construct
EGLKEGDGEEEEEEEVEEEEQEAQGGVSGSLKGVPKKSKMSLKQKIKKEPEEAGQDTPSTLPMLAVPQIPSYRLNKICSGLSFQRKNQFMQRLHNYWLLKRQARNGVPLIRRLHSHLQSQ

SEQ ID NO: 2689 - protein, 100 aa, Synthetic construct
PINDSKPPSRFLKPRKVEEDELLEKSPLQLGNEPLQRLLSDNGINRLSLMAPDTPAGTPLSGVGRRTSVLFKKAKNGVKLQRSPDRVLENGEDHGVAGSP

SEQ ID NO: 2690 - protein, 80 aa, Synthetic construct
GRSLLLPFEDRGDLEPLELVWAKCRGYPSYPALIIDPKMPREGLLHNGVPIPVPPLDVLKLGEQKQAEAGEKLFLVLFFD

SEQ ID NO: 2691 - protein, 90 aa, Synthetic construct
CVAFDRTGHRIFTGSDDCLVKIWSTHNGRLLSTLRGHSAEISDMAVNYENTMIAAGSCDKIIRVWCLRTCAPVAVLQGHTGSITSLQFSP

SEQ ID NO: 2692 - protein, 80 aa, Synthetic construct
MGDEVIYFRQGHEAYIEAVRRNNIYELNPNKEPWRKMDLRDQELVKIVGIRYEVGPPTLCCLKLAFIDPATGKLMDKSFS

SEQ ID NO: 2693 - protein, 90 aa, Synthetic construct
YIEHNARTFNEPESVIARSAKKITDQLLKFIKNQHCTNISELSNTSENDEQNAEDLDDSDLPKTSSGRRRVHDGKKSIRATNYVESNWKK

SEQ ID NO: 2694 - protein, 90 aa, Synthetic construct
KNWHANGYKSHTPAPSKTKFLKIESSEEDSKSHDSDHACNRTAGPSTSVQKLKAESISEEADSEPGRSGGRKYNTFHKNASFFKKTKILS

SEQ ID NO: 2695 - protein, 80 aa, Synthetic construct
SLETGEILKARAGNNRKVLRKCAAVAANKIKLMSDVEENSSSESVCSGRKLPHRNASAVARKKLLHNSEDEQSLKSEIEE

SEQ ID NO: 2696 - protein, 90 aa, Synthetic construct
TMKFRDRPVKFTERSRPGVQISCSSFSSGGMFITTGSTDHVIRIYYLGSEVPEKIAELESHTDKVVAVQFCNNGDSLRFVSGSRDGTARI

SEQ ID NO: 2697 - protein, 80 aa, Synthetic construct
EWFAPQWILDTIPRRSPFVPQMGDELIYFRQGHEAYVRAVRKSKIYSVNLQKQPWNKMDLREQEFVKIVGIKYEVGPPTL

SEQ ID NO: 2698 - protein, 100 aa, Synthetic construct; identical to SEQ ID NO: 794

SEQ ID NO: 2699 - protein, 80 aa, Synthetic construct
FIGDQSCTDILDTYNKIKAEERNSTDAEEDTEIVDLDSDGPGTSSGRKVKCRGRRQSLKCNPDAWKKQCKELLSLIYERE

SEQ ID NO: 2700 - protein, 80 aa, Synthetic construct
KEHRRSFEDLVAANAHIPPDYLLKICERIGPLLDKEIPQSVPGVQTLLGVGRQSLLRDAKDCKSTLWNGSAFAALHRGRP

SEQ ID NO: 2701 - protein, 80 aa, Synthetic construct
QPFQPEYPDSSFQCYSVHWDNNEREKMSPWDMEPIPEGTAFPDEVGAGVPVSQEELTALLYKPQEGEWGAHSRDEECERV

SEQ ID NO: 2702 - protein, 80 aa, Synthetic construct
EDENMGGEDKEKKETKEKSHLSTSESGELGSSLSSESTCGSDSDSESTSRTDQDYVDGDHDYSKFIQTRPKRKLRKQHGN

SEQ ID NO: 2703 - protein, 80 aa, Synthetic construct
GRGRGSRGRGGGGTRGRGRGRGGRGASRGATRAKRARIADDEFDTMFSGRFSRLPRIKTRNQGRRTVLYNDDSDNDNFVS

SEQ ID NO: 2704 - protein, 90 aa, Synthetic construct
NLNFTSPLHPASSQRPTSFFIEDILLHKPKPLREVAPDHFASSLASRVPLLDYGYPLMPTPTLLAPHAHHPLHKGDHHHPYFLTTSGMPV

SEQ ID NO: 2705 - protein, 100 aa, Synthetic construct
PPPPPPPPPPPRSREQRRNYQPRWRGEYLMDYDGSRRGLVCMVCGGALATLKVSTIKRHILQVHPFSMDFTPEERQTILEAYEEAALRCYGHEGFGPPAP

SEQ ID NO: 2706 - protein, 110 aa, Synthetic construct
IFSAAGAAFTKLGELTMQLHPVADSSPAGAKWTETEIEMLRAAVKRFGDDLNHISCVIKERTVAQIKATVKRKVYEDSGIPLPAESPKKGPKKVASGVLSPPPAAPPPSS

SEQ ID NO: 2707 - protein, 80 aa, Synthetic construct
KHRIISPKVEPRTGGYGSHSEVQHNDVSEGKHEHSHSKGSSREKRNGKVAKPVLLHQSSTEVSSTNQVEVPDTTQSSPVS

SEQ ID NO: 2708 - protein, 140 aa, Synthetic construct
GGRKIPETTMNFDPDCFLNNPKQGQTYGGGGLKAEMVSSNIRHSPPGERSFSFTTVLTKEIKTEDTSFEQQMAKEAYSSSAAAVAASSLTLTAGSSLLPSGGGLSPSTTLEQMDFSAIDSNKDYTSSFSQTGHSPHIHQT

SEQ ID NO: 2709 - protein, 100 aa, Synthetic construct
TGHSPHIHQTPSPSFFLQDASKPLPVEQNTHSSLSDSGGTFVMPTVKTEASSQTSSCSGHVETRIESTSSLHLMQFQANFQAMTAEGEVTMETSQAAEGS

SEQ ID NO: 2710 - protein, 80 aa, Synthetic construct
FVMPTVKTEASSQTSSCSGHVETRIESTSSLHLMQFQANFQAMTAEGEVTMETSQAAEGSEVLLKSGELQACSSEHYLQP

SEQ ID NO: 2711 - protein, 90 aa, Synthetic construct
PCCSPQQGSLQLSSSEGGASTMAYMHVAEVVSAASAQGTLGMLQQSGRVFMVTDYSPEWSYPEGGVKVLITGPWQEASNNYSCLFDQISV

SEQ ID NO: 2712 - protein, 140 aa, Synthetic construct
PASLIQPGVLRCYCPAHDTGLVTLQVAFNNQIISNSVVFEYKARALPTLPSSQHDWLSLDDNQFRMSILERLEQMERRMAEMTGSQQHKQASGGGSSGGGSGSGNGGSQAQCASGTGALGSCFESRVVVVCEKMMSRACW

SEQ ID NO: 2713 - protein, 80 aa, Synthetic construct
HSSLSDSGGTFVMPTVKTEASSQTSSCSGHVETRIESTSSLHLMQFQANFQAMTAEGEVTMETSQAAEGSEVLLKSGELQ

SEQ ID NO: 2714 - protein, 100 aa, Synthetic construct
ELISDEAPSIPAPTPQLSPALSTITDFSPEWSYPEGGVKVLITGPWTEAAEHYSCVFDHIAVPASLVQPGVLRCYCPAHEVGLVSLQVAGREGPLSASVL

SEQ ID NO: 2715 - protein, 120 aa, Synthetic construct
VGLVSLQVAGREGPLSASVLFEYRARRFLSLPSTQLDWLSLDDNQFRMSILERLEQMEKRMAEIAAAGQVPCQGPDAPPVQDEGQGPGFEARVVVLVESMIPRSTWKGPERLAHGSPFRG

SEQ ID NO: 2716 - protein, 80 aa, Synthetic construct
LGQLKPMFHGIKWSCGNGTEEFSVEHLVQQILDTHPTKPAPRTHACLCSGGLGSGSLTHKCSSTKHRIISPKVEPRALTL

SEQ ID NO: 2717 - protein, 80 aa, Synthetic construct
FLRHYSRLEICNLTPDTLTSDTYKKWKLTKMDGNWRRGSTAGGCRNYPNTFWMNPQYLIKLEEEDEDEEDGESGCTFLVG

SEQ ID NO: 2718 - protein, 90 aa, Synthetic construct
DTYKKWKLTKMDGNWRRGSTAGGCRNYPNTFWMNPQYLIKLEEEDEDEEDGESGCTFLVGLIQKHRRRQRKMGEDMHTIGFGIYEVPEEL

SEQ ID NO: 2719 - protein, 100 aa, Synthetic construct
LIQKHRRRQRKMGEDMHTIGFGIYEVPEELSGQTNIHLSKNFFLTNRARERSDTFINLREVLNRFKLPPGEYILVPSTFEPNKDGDFCIRVFSEKKADYQ

SEQ ID NO: 2720 - protein, 80 aa, Synthetic construct
RSDTFINLREVLNRFKLPPGEYILVPSTFEPNKDGDFCIRVFSEKKADYQAVDDEIEANLEEFDISEDDIDDGFRRLFAQ

SEQ ID NO: 2721 - protein, 80 aa, Synthetic construct
EYILVPSTFEPNKDGDFCIRVFSEKKADYQAVDDEIEANLEEFDISEDDIDDGFRRLFAQLAGEDAEISAFELQTILRRV

SEQ ID NO: 2722 - protein, 80 aa, Synthetic construct
GAGGAGSAVPGGAGPCATVSVFPGARLLTIGDANGEIQRHAEQQALRLEVRAGPDSAGIALYSHEDVCVFKCSVSRETEC

SEQ ID NO: 2723 - protein, 80 aa, Synthetic construct
FAAQAGARKIYAVEASTMAQHAEVLVKSNNLTDRIVVIPGKVEEVSLPEQVDIIISEPMGYMLFNERMLESYLHAKKYLK

SEQ ID NO: 2724 - protein, 80 aa, Synthetic construct
YMLFNERMLESYLHAKKYLKPSGNMFPTIGDVHLAPFTDEQLYMEQFTKANFWYQPSFHGVDLSALRGAAVDEYFRQPVV

SEQ ID NO: 2725 - protein, 80 aa, Synthetic construct
YAVEASTMAQHAEVLVKSNNLTDRIVVIPGKVEEVSLPEQVDIIISEPMGYMLFNERMLESYLHAKKYLKPSGNMFPTIG

SEQ ID NO: 2726 - protein, 80 aa, Synthetic construct
SYHIKDDAYAKDGFKKFYKYEECKYEGCVYSKATNHFHCIRAGCGFTFTSTSQMTSHKRKHERRHIRSSGALGLPPSLLG

SEQ ID NO: 2727 - protein, 100 aa, Synthetic construct
AASVPAPPASIMERISASKGLISPMMARLAAAALKPSATFDPGSGQQVTPARFPPAQVKPEPGESTGAPGPHEASQDRSLDLTVKEPSNESNGHAVPANS

SEQ ID NO: 2728 - protein, 90 aa, Synthetic construct
DPGSGQQVTPARFPPAQVKPEPGESTGAPGPHEASQDRSLDLTVKEPSNESNGHAVPANSSLLSSLMNKMSQGNPGLGSLLNIKAEAEGS

SEQ ID NO: 2729 - protein, 110 aa, Synthetic construct
SNGHAVPANSSLLSSLMNKMSQGNPGLGSLLNIKAEAEGSPAAEPSPFLGKAVKALVQEKLAEPWKVYLRRFGTKDFCDGQCDFLHKAHFHCVVEECGALFSTLDGAIKH

SEQ ID NO: 2730 - protein, 80 aa, Synthetic construct
DCKDAACQFSLKVTHYHCTRENCGYKFCGRTHMYKHAQHHDRVDNLVLDDFKRFKASLSCHFADCPFSGTSTHFHCLRCR

SEQ ID NO: 2731 - protein, 80 aa, Synthetic construct
TDPPAGKPAMAPKRKGGLKLNAICAKLSRQVVVEKRADAGSHTEGSPSQPRDQERSGPESGAARAPRSEEDKRRAVIEKW

SEQ ID NO: 2732 - protein, 80 aa, Synthetic construct
QHCEFRMRGHYHCLRTGCYFVTNITTKLPWHIKKHEKAERRAANGFKYFTKREECGRLGCKYNQVNSHFHCIREGCQFSF

SEQ ID NO: 2733 - protein, 90 aa, Synthetic construct
AATLPEMSAGEESSSSDSDPDSASPPSTGQNPSVSVQTSQDWKPTRSLIEHVFVTDVTANLITVTVKESPTSVGFFNLRHSVGFFNLRHY

SEQ ID NO: 2734 - protein, 80 aa, Synthetic construct
GLSPGDLDVFVRFDFPYPNVEEAQKDKTSVIKNTDSPEFKEQFKLCINRSHRGFRRAIQTKGIKFEVVHKGGLFKTDRVL

SEQ ID NO: 2735 - protein, 90 aa, Synthetic construct
KGIKFEVVHKGGLFKTDRVLGTAQLKLDALEIACEVREILEVLDGRRPTGGRLEVMVRIREPLTAQQLETTTERWLVIDPVPAAVPTQVA

SEQ ID NO: 2736 - protein, 80 aa, Synthetic construct
ILKQAFVRGLPTPTARFEQRTFSVIKIFPDLSSNDMLLFIVKGINLPTPPGLSPGDLDVFVRFDFPYPNVEEAQKDKTSV

SEQ ID NO: 2737 - protein, 90 aa, Synthetic construct
ENFKGCISGHGMDIALTEPLTMEKMSNVVKYWTTCPSNTVKTENATGPEELGLPLQRSYSEHLGYFPTDLFACSESLRNGNGLELNASLS

SEQ ID NO: 2738 - protein, 80 aa, Synthetic construct
YWTTCPSNTVKTENATGPEELGLPLQRSYSEHLGYFPTDLFACSESLRNGNGLELNASLSEFEKNKKISLLHSSKEKLRR

SEQ ID NO: 2739 - protein, 80 aa, Synthetic construct
EAAALLDDCIFNMVLLKVPSSLSAEELEAIKLIRFGKKKNTHSLFVFIIPENFKGCISGHGMDIALTEPLTMEKMSNVVK

SEQ ID NO: 2740 - protein, 80 aa, Synthetic construct
EWLDPSIKKTEWSREEEEKLLHLAKLMPTQWRTIAPIIGRTAAQCLEHYEFLLDKAAQRDNEEETTDDPRKLKPGEIDPN

SEQ ID NO: 2741 - protein, 80 aa, Synthetic construct
KELKGFKTIMLNCMSLRTAQAVFPAIAQEICQEEVSRPAGKDMMRKLEKHMTAEKGPMIVLVLDEMDQLDSKGQDVLYTL

SEQ ID NO: 2742 - protein, 80 aa, Synthetic construct
KIAAIKAKIMAKKRSTIKTDLDDDITALKQRSFVDAEVDVTRDIVSRERVWRTRTTILQSTGKNFSKNIFAILQSVKARE

SEQ ID NO: 2743 - protein, 80 aa, Synthetic construct
LGEGTYATVYKGKSKLTDNLVALKEIRLEHEEGAPCTAIREVSLLKDLKHANIVTLHDIIHTEKSLTLVFEYLDKDLKQY

SEQ ID NO: 2744 - protein, 80 aa, Synthetic construct
GSTVEDELHLIFRLLGTPSQETWPGISSNEEFKNYNFPKYKPQPLINHAPRLDSEGIELITKFLQYESKKRVSAEEAMKH

SEQ ID NO: 2745 - protein, 80 aa, Synthetic construct
GEGTYGVVYKAKNRETGQLVALKKIRLDLEMEGVPSTAIREISLLKELKHPNIVRLLDVVHNERKLYLVFEFLSQDLKKY

SEQ ID NO: 2746 - protein, 80 aa, Synthetic construct
ELQAVLLTCLYLSYSYMGNEISYPLKPFLVESCKEAFWDRCLSVINLMSSKMLQINADPHYFTQVFSDLKNESGQEDKKR

SEQ ID NO: 2747 - protein, 80 aa, Synthetic construct; identical to SEQ ID NO: 299

SEQ ID NO: 2748 - protein, 90 aa, Synthetic construct
SRHSPYAWMRKTVQVTGKTRTKEKYRVVYTDHQRLELEKEFHCNRYITIQRKSELAVNLGLSERQVKIWFQNRRAKERKMIKKKISQFEN

SEQ ID NO: 2749 - protein, 100 aa, Synthetic construct
TQIHPLMSQMSGSVTASMATGSATRKGIVVLIDPLAANGTTDMHTSVPRVKGGQRNITDDSRDQPFIKKMHFTIRLTESASTYRDIVVKKEDGFTQIVLS

SEQ ID NO: 2750 - protein, 90 aa, Synthetic construct
HFTIRLTESASTYRDIVVKKEDGFTQIVLSTRSTEKNALNTEVIKEIVNALNSAAADDSKLVLFSAAGSVFCCGLDFGYFVKHLRNNRNT

SEQ ID NO: 2751 - protein, 110 aa, Synthetic construct
KTQMHPLMSQMSGSVTASMATGSATRKGIVVLIDPLAANGTTDMHTSVPRVKGGQRNITDDSRGQPFIKKMHFTIRLTESAITYRDIVVKKEDGFTQIVLSTRSTEKNAL

SEQ ID NO: 2752 - protein, 80 aa, Synthetic construct
TESAYRYRDIVVRKQDGFTHILLSTKSSENNSLNPEVMREVQSALSTAAADDSKLVLLSAVGSVFCCGLDFIYFIRRLTD

SEQ ID NO: 2753 - protein, 140 aa, Synthetic construct
KAAVGPTGGGGGGDFDYPGAPAGPGGAVMPGGAHGPPPGYGCAAAGYLDGRLEPLYERVGAPALRPLVIKQEPREEDEAKQLALAGLFPYQPPPPPPPSHPHPHPPPAHLAAPHLQFQIAHCGQTTMHLQPGHPTPPPTP

SEQ ID NO: 2754 - protein, 90 aa, Synthetic construct
DLRASGGSGAGKAKKSVDKNSNEYRVRRERNNIAVRKSRDKAKQRNVETQQKVLELTSDNDRLRKRVEQLSRELDTLRGIFRQLPESSLV

SEQ ID NO: 2755 - protein, 110 aa, Synthetic construct
FSDDYGGKNCKKPAEYGYVSLGRLGAAKGALHPGCFAPLHPPPPPPPPPAELKAEPGFEPADCKRKEEAGAPGGGAGMAAGFPYALRAYLGYQAVPSGSSGSLSTSSSSS

SEQ ID NO: 2756 - protein, 80 aa, Synthetic construct
ELKAEPGFEPADCKRKEEAGAPGGGAGMAAGFPYALRAYLGYQAVPSGSSGSLSTSSSSSPPGTPSPADAKAPPTACYAG

SEQ ID NO: 2757 - protein, 80 aa, Synthetic construct
KAPPTACYAGAAPAPSQVKSKAKKTVDKHSDEYKIRRERNNIAVRKSRDKAKMRNLETQHKVLELTAENERLQKKVEQLS

SEQ ID NO: 2758 - protein, 90 aa, Synthetic construct
MYDDESAIDFSAYIDSMAAVPTLELCHDELFADLFNSNHKAGGAGPLELLPGGPARPLGPGPAAPRLLKREPDWGDGDAPGSLLPAQVAA

SEQ ID NO: 2759 - protein, 80 aa, Synthetic construct
FADLFNSNHKAGGAGPLELLPGGPARPLGPGPAAPRLLKREPDWGDGDAPGSLLPAQVAACAQTVVSLAAAGQPTPPTSP

SEQ ID NO: 2760 - protein, 90 aa, Synthetic construct
PGGPARPLGPGPAAPRLLKREPDWGDGDAPGSLLPAQVAACAQTVVSLAAAGQPTPPTSPEPPRSSPRQTPAPGPAREKSAGKRGPDRGS

SEQ ID NO: 2761 - protein, 90 aa, Synthetic construct
PAPGPAREKSAGKRGPDRGSPEYRQRRERNNIAVRKSRDKAKRRNQEMQQKLVELSAENEKLHQRVEQLTRDLAGLRQFFKQLPSPPFLP

SEQ ID NO: 2762 - protein, 100 aa, Synthetic construct
QLLSDLFAVKPAPEARGLKGPGTPAFPHYLPPDPRPFAYPPHTFGPDRKALGPGIYSSPGSYDPRAVAVKEEPRGPEGSRAASRGSYNPLQYQVAHCGQT

SEQ ID NO: 2763 - protein, 100 aa, Synthetic construct
PHTFGPDRKALGPGIYSSPGSYDPRAVAVKEEPRGPEGSRAASRGSYNPLQYQVAHCGQTAMHLPPTLAAPGQPLRVLKAPLATAAPPCSPLLKAPSPAG

SEQ ID NO: 2764 - protein, 90 aa, Synthetic construct
PLLKAPSPAGPLHKGKKAVNKDSLEYRLRRERNNIAVRKSRDKAKRRILETQQKVLEYMAENERLRSRVEQLTQELDTLRNLFRQIPEAA

SEQ ID NO: 2765 - protein, 80 aa, Synthetic construct
NLAKYTKASLVEEDEPAEKENSSKKEVKIPKINNKNTAESQRTSVNKVKNKNRPEPHSDENGSTTPKVKKDKQNIFEFFE

SEQ ID NO: 2766 - protein, 80 aa, Synthetic construct
NGSTTPKVKKDKQNIFEFFERQTLLLRPGGKWYDLEYSNEYSLKPQPQDVVSKYKTLAQKLYQHEINLFKSKTNSQKGAS

SEQ ID NO: 2767 - protein, 80 aa, Synthetic construct
ICFLNQMALSHEESELANKLITVYFCFFRTCVKKKDVESKMLSALLTGVNRAYPYSQTGDDKVREQIDTLFKVLHIVNFN

SEQ ID NO: 2768 - protein, 80 aa, Synthetic construct
QVTCQQMPPFICGALYLVSEILKAKPGLRSQLDDHPESDDEENFIDANDDEDMEKFTDADKETEIVKKLETEETVPETDV

SEQ ID NO: 2769 - protein, 100 aa, Synthetic construct
CNMIAQKGKRPQRTKAELHPRWMSDHLSIKPVKQEETPVLTRIEKQKRKEEEEERQILLAVQKKEQEQMLKEERKRELEEKVKAVEDRAKRRKLREERAW

SEQ ID NO: 2770 - protein, 80 aa, Synthetic construct
MREEKKTKDLFELDDDFTAMYKVLDVVKAHKDSWPFLEPVDESYAPNYYQIIKAPMDISSMEKKLNGGLYCTKEEFVNDM

SEQ ID NO: 2771 - protein, 80 aa, Synthetic construct
PPASQPPPPRSLFSDKNAMASLQGCETLNAALTSPTRMDAVAAKVPNDGQNPGPEEEKLDESMERPESPKEFLDLDNHNA

SEQ ID NO: 2772 - protein, 100 aa, Synthetic construct
HFLEGGEDSDSDSEEEDDEEEDDEDEDDDDDEEDGDEVPVPSFGEAMAYFAMVKRYLTSFPIDDRVQSHILHLEHDLVHVTRKNHARQAGAGVRGLGHQS

SEQ ID NO: 2773 - protein, 80 aa, Synthetic construct
EEVTSTVTKSRRISRRPSDWWVVKSEESPVYSNSSVRNELPMHHNSSRKSTKKTNQSSKNIRKKTIPLKRQKTATKGNQR

SEQ ID NO: 2774 - protein, 80 aa, Synthetic construct
RHHQFLEPAPAPGAAVLSSEPAEPLLVRHPPRPRTTGPRPRQDPHKAGLSHYVKLFSFYAKMPMERKALEMVEKCLDKYF

SEQ ID NO: 2775 - protein, 80 aa, Synthetic construct
PRPRTTGPRPRQDPHKAGLSHYVKLFSFYAKMPMERKALEMVEKCLDKYFQHLCDDLEVFAAHAGRKTVKPEDLELLMRR

SEQ ID NO: 2776 - protein, 80 aa, Synthetic construct
SSTPESLQARRHHQFLEPAPAPGAAVLSSEPAEPLLVRHPPRPRTTGPRPRQDPHKAGLSHYVKLFSFYAKMPMERKALE

SEQ ID NO: 2777 - protein, 80 aa, Synthetic construct
TPLDRVTEFGGELHEDGGKLFCTSCNVVLNHVRKSAISDHLKSKTHTKRKAEFEEQNVRKKQRPLTASLQCNSTAQTEKV

SEQ ID NO: 2778 - protein, 100 aa, Synthetic construct
FPGETLSDIPCKTEEEGVGCGGAGRRGDSQECSPRSCPELTSGPRMCPRKEQDSWSEAGGILFKGKVPMVVLQDILAVRPPQIKSLPATPQGKNMTPESE

SEQ ID NO: 2779 - protein, 90 aa, Synthetic construct
TSGPRMCPRKEQDSWSEAGGILFKGKVPMVVLQDILAVRPPQIKSLPATPQGKNMTPESEVLESFPEEDSVLSHSSLSSPSSTSSPEGPP

SEQ ID NO: 2780 - protein, 90 aa, Synthetic construct
MLEELECGAPGARGAATAMDCKDRPAFPVKKLIQARLPFKRLNLVPKGKADDMSDDQGTSVQSKSPDLEASLDTLENNCHVGSDIDFRPK

SEQ ID NO: 2781 - protein, 80 aa, Synthetic construct
VVKTLRGHLEDVYDICWATDGNLMASASVDNTAIIWDVSKGQKISIFNEHKSYVQGVTWDPLGQYVATLSCDRVLRVYSI

SEQ ID NO: 2782 - protein, 80 aa, Synthetic construct
SFTPDGSLLLTPAGCVESGENVMNTTYVFSRKNLKRPIAHLPCPGKATLAVRCCPVYFELRPVVETGVELMSLPYRLVFA

SEQ ID NO: 2783 - protein, 100 aa, Synthetic construct
HMGTIHPEFCDEMDAGGLGKMIFYQKSAKLFHCHKCFFTSKMYSNVYYHITSKHASPDKWNDKPKNQLNKETDPVKSPPLPEHQKIPCNSAEPKSIPALS

SEQ ID NO: 2784 - protein, 80 aa, Synthetic construct
EAFQELRKPSARLECDHCSFRGTDYENVQIHMGTIHPEFCDEMDAGGLGKMIFYQKSAKLFHCHKCFFTSKMYSNVYYHI

SEQ ID NO: 2785 - protein, 80 aa, Synthetic construct
DNQESSDAELSSSEYIKTDLDAMDIKGQESSSDQEQVDVESIDFSKENKMDMTSPEQSRNVLQFTEEKEAFISEEEIAKY

SEQ ID NO: 2786 - protein, 90 aa, Synthetic construct
ELRKQALDHFNAEGSEDFCFLLSTRAGGLGINLASADTVVIFDSDWNPQNDLQAQARAHRIGQKKQVNIYRLVTKGSVEEDILERAKKKM

SEQ ID NO: 2787 - protein, 80 aa, Synthetic construct
LIPLHKSIPSDPEERKQYTIPCHTKAAHFDIDWGKEDDSNLLIGIYEYGYGSWEMIKMDPDLSLTHKILPDDPDKKPQAK

SEQ ID NO: 2788 - protein, 130 aa, Synthetic construct
DDPDKKPQAKQLQTRADYLIKLLSRDLAKKEALSGAGSSKRRKARAKKNKAMKSIKVKEEIKSDSSPLPSEKSDEDDDKLSESKSDGRERSKKSSVSDAPVHITASGEPVPISEESEELDQKTFSICKER

SEQ ID NO: 2789 - protein, 80 aa, Synthetic construct
DSDDSSSEVKRKKHKDEDWQMSGSGSPSQSGSDSESEEEREKSSCDETESDYEPKNKVKSRKPQNRSKSKNGKKILGQKK

SEQ ID NO: 2790 - protein, 80 aa, Synthetic construct
EKSSCDETESDYEPKNKVKSRKPQNRSKSKNGKKILGQKKRQIDSSEEDDDEEDYDNDKRSSRRQATVNVSYKEDEEMKT

SEQ ID NO: 2791 - protein, 80 aa, Synthetic construct
FEEEHGKGREYGYASLHKELEPFLLRRVKKDVEKSLPAKVEQILRMEMSALQKQYYKWILTRNYKALSKGSKGSTSGFLN

SEQ ID NO: 2792 - protein, 80 aa, Synthetic construct
SETDLRRLGELVHNGCIKALKDSSSGTERTGGRLGKVKGPTFRISGVQVNAKLVISHEEELIPLHKSIPSDPEERKQYTI

SEQ ID NO: 2793 - protein, 80 aa, Synthetic construct
EPDLFSKEEVGDFIQRYQDIEKESESASELHKLLQPFLLRRVKAEVATELPKKTEVVIYHGMSALQKKYYKAILMKDLDA

SEQ ID NO: 2794 - protein, 80 aa, Synthetic construct
RVKAEVATELPKKTEVVIYHGMSALQKKYYKAILMKDLDAFENETAKKVKLQNILSQLRKCVDHPYLFDGVEPEPFEVGD

SEQ ID NO: 2795 - protein, 80 aa, Synthetic construct
ERIADVKKMWEEYPDVYGVRRSNRSRQEPSRFNIKEEASSGSESGSPKRRGQRQLKKQEKWKQEPSEDEQEQGTSAESEP

SEQ ID NO: 2796 - protein, 90 aa, Synthetic construct
RSNRSRQEPSRFNIKEEASSGSESGSPKRRGQRQLKKQEKWKQEPSEDEQEQGTSAESEPEQKKVKARRPVPRRTVPKPRVKKQPKTQRG

SEQ ID NO: 2797 - protein, 90 aa, Synthetic construct
IKGEIRKQALDHFNADGSEDFCFLLSTRAGGLGINLASADTVVIFDSDWNPQNDLQAQARAHRIGQKKQVNIYRLVTKGTVEEEIIERAK

SEQ ID NO: 2798 - protein, 80 aa, Synthetic construct
EYFNCQQELASELNKQYQIVERVIAVKTSKSTLGQTDFPAHSRKPAPSNEPEYLCKWMGLPYSECSWEDEALIGKKFQNC

SEQ ID NO: 2799 - protein, 80 aa, Synthetic construct
GLNWLAHSWCKNNSVILADEMGLGKTIQTISFLSYLFHQHQLYGPFLIVVPLSTLTSWQREFEIWAPEINVVVYIGDLMS

SEQ ID NO: 2800 - protein, 80 aa, Synthetic construct
MSKMMTILGAKWREFSANNPFKGSAAAVAAAAAAAAAAVAEQVSAAVSSATPIAPSGPPALPPPPAADIQPPPIRRAKTK

SEQ ID NO: 2801 - protein, 80 aa, Synthetic construct
ILCDTCPRAYHLVCLDPELDRAPEGKWSCPHCEKEGVQWEAKEEEEEYEEEGEEEGEKEEEDDHMEYCRVCKDGGELLCC

SEQ ID NO: 2802 - protein, 80 aa, Synthetic construct
RAPEGKWSCPHCEKEGVQWEAKEEEEEYEEEGEEEGEKEEEDDHMEYCRVCKDGGELLCCDACISSYHIHCLNPPLPDIP

SEQ ID NO: 2803 - protein, 80 aa, Synthetic construct
PHYAEMEEKYYRFGIKPEWMTVHRIINHSVDKKGNYHYLVKWRDLPYDQSTWEEDEMNIPEYEEHKQSYWRHRELIMGED

SEQ ID NO: 2804 - protein, 80 aa, Synthetic construct
RHRELIMGEDPAQPRKYKKKKKELQGDGPPSSPTNDPTVKYETQPRFITATGGTLHMYQLEGLNWLRFSWAQGTDTILAD

SEQ ID NO: 2805 - protein, 80 aa, Synthetic construct
VIHYDNEAIARLLDRNQDATEDTDVQNMNEYLSSFKVAQYVVREEDKIEEIEREIIKQEENVDPDYWEKLLRHHYEQQQE

SEQ ID NO: 2806 - protein, 110 aa, Synthetic construct
EDTDVQNMNEYLSSFKVAQYVVREEDKIEEIEREIIKQEENVDPDYWEKLLRHHYEQQQEDLARNLGKGKRVRKQVNYNDAAQEDQDNQSEYSVGSEEEDEDFDERPEGR

SEQ ID NO: 2807 - protein, 80 aa, Synthetic construct
SILSRLASKGTEPHPTPAYPPGPYATPPGYGAAFSAAPVGALAAAGANYSQMPAGSFITAATNGPPVLVKKEKEMVGALV

SEQ ID NO: 2808 - protein, 80 aa, Synthetic construct
KMETEADAPSPAPSLGERLEPRKIPLEDEVPGVPGEMEPEPGYRGDREKSATESTPGERGEEKPLDGQEHRERPEGETGD

SEQ ID NO: 2809 - protein, 80 aa, Synthetic construct
MNEYLSSFKVAQYVVREEDGVEEVEREIIKQEENVDPDYWEKLLRHHYEQQQEDLARNLGKGKRIRKQVNYNDASQEDQE

SEQ ID NO: 2810 - protein, 80 aa, Synthetic construct
MSKMMTVLGAKWREFSANNPFKGSSAAAAAAAVAAAVETVTISPPLAVSPPQVPQPVPIRKAKTKEGKGPGVRKKIKGSK

SEQ ID NO: 2811 - protein, 80 aa, Synthetic construct
PYLVSAPLSTIINWEREFEMWAPDFYVVTYTGDKESRSVIRENEFSFEDNAIRSGKKVFRMKKEVQIKFHVLLTSYELIT

SEQ ID NO: 2812 - protein, 90 aa, Synthetic construct
ENDEFEIEKPKAYIPDLFKSKTNTIAMEGEPTAIPSQPFKVKHELLKEPWKESAEGQNVFPTYPLEGSELKSEDMDFENKDDYDRDGNCH

SEQ ID NO: 2813 - protein, 80 aa, Synthetic construct
PTAIPSQPFKVKHELLKEPWKESAEGQNVFPTYPLEGSELKSEDMDFENKDDYDRDGNCHSQDYPGKYSEEESKSSTSGI

SEQ ID NO: 2814 - protein, 80 aa, Synthetic construct
GNPLSGVFKFHVVITTFEMILADCPELKKIHWSCVIIDEAHRLKNRNCKLLEGLKLMALEHKVLLTGTPLQNSVEELFSL

SEQ ID NO: 2815 - protein, 80 aa, Synthetic construct
RIELLRKVREQVLKCPQLHERLQLCRPSLYLPVWWECGKHDRDLLIGTAKHGLNRTDCYIMNDPQLSFLDAYRNYAQHKR

SEQ ID NO: 2816 - protein, 90 aa, Synthetic construct
EDEDPEYKPTRTPFKDEIDEFANSPSEDKEESMEIHATGKHSESNAELGQLYWPNTSTLTTRLRRLITAYQRSYKRQQMRQEALMKTDRR

SEQ ID NO: 2817 - protein, 80 aa, Synthetic construct
WEREFRTWTELNVVVYHGSQASRRTIQLYEMYFKDPQGRVIKGSYKFHAIITTFEMILTDCPELRNIPWRCVVIDEAHRL

SEQ ID NO: 2818 - protein, 80 aa, Synthetic construct
LSSKFILPNVSTPVSDAFKTQMELLQAGLSRTPTRHLLNGSLVDGEPPMKRRRGRRKNVEGLDLLFMSHKRTSLSAEDAE

SEQ ID NO: 2819 - protein, 80 aa, Synthetic construct
NPDYVEVDRILDESHSIDKDNGEPVIYYLVKWCSLPYEDSTWELKEDVDEGKIREFKRIQSRHPELKRVNRPQASAWKKL

SEQ ID NO: 2820 - protein, 80 aa, Synthetic construct
KANRIVAEAIARARARGEQNIPRVLNEDELPSVRPEEEGEKKRRKKSAGERLKEEKPKKSKTSGASKTKGKSKLNTITPV

SEQ ID NO: 2821 - protein, 80 aa, Synthetic construct
MRIVKKELPSGQYTEAEEFFVKYKNYSYLHCEWATISQLEKDKRIHQKLKRFKTKMAQMRHFFHEDEEPFNPDYVEVDRI

SEQ ID NO: 2822 - protein, 80 aa, Synthetic construct
NGEPVIYYLVKWCSLPYEDSTWELKEDVDEGKIREFKRIQSRHPELKRVNRPQASAWKKLELSHEYKNRNQLREYQLEGV

SEQ ID NO: 2823 - protein, 80 aa, Synthetic construct
KAVKVYRLITRNSYEREMFDKASLKLGLDKAVLQSMSGRDGNITGIQQFSKKEIEDLLRKGAYAAIMEEDDEGSKFCEED

SEQ ID NO: 2824 - protein, 80 aa, Synthetic construct
SAASMAEEEASAVSTAAAQFTKLRRGMDEKEFTVQIKDEEGLKLTFQKHKLMANGVMGDGHPLFHKKKGNRKKLVELEVE

SEQ ID NO: 2825 - protein, 80 aa, Synthetic construct
FHKCSSHQEGNFNGPSPNMTSCSVSNSQQFSSHYSFSSNHISPNSLLQSSAVLASNHTNQTLSDFTGSNSFSPHRGIKQE

SEQ ID NO: 2826 - protein, 80 aa, Synthetic construct
TLSDFTGSNSFSPHRGIKQESTQHILNPNTSLNSNNFQILHSSHPQGNYSNSKLSPVHMNFPDPVDSGTQMGHFNDHVET

SEQ ID NO: 2827 - protein, 80 aa, Synthetic construct
ADMEEEPFNPDYVEVDRVLEVSFCEDKDTGEPVIYYLVKWCSLPYEDSTWELKEDVDLAKIEEFEQLQASRPDTRRLDRP

SEQ ID NO: 2828 - protein, 80 aa, Synthetic construct
KVLLTGTPLQNTVEELFSLLHFLEPLRFPSESTFMQEFGDLKTEEQVQKLQAILKPMMLRRLKEDVEKKLAPKEETIIEV

SEQ ID NO: 2829 - protein, 80 aa, Synthetic construct
ELSFMAAQRNYSQSKMAHSRTSTPLLQQYQVALSASPLTSLPRLLDAKGIILEEMKVKSENLKEEPQSSEEESMSSVETR

SEQ ID NO: 2830 - protein, 110 aa, Synthetic construct
TSTPLLQQYQVALSASPLTSLPRLLDAKGIILEEMKVKSENLKEEPQSSEEESMSSVETRTLIKSEPVSPKNGVLPQATGDQKSGGKCETDRRMVAARTEPLTPNPASKK

SEQ ID NO: 2831 - protein, 80 aa, Synthetic construct
EESMSSVETRTLIKSEPVSPKNGVLPQATGDQKSGGKCETDRRMVAARTEPLTPNPASKKPRVHKRGSESSSDSDSDSER

SEQ ID NO: 2832 - protein, 80 aa, Synthetic construct
SQKRRSNRQIKRKKYAEDIEGKQSEEEVKGSMKIKKNSAPLPGEQPLQLFVENPSEEDAAIVDKILSSRTVKKEISPGVM

SEQ ID NO: 2833 - protein, 80 aa, Synthetic construct
LVQTLGEGAYGEVQLAVNRVTEEAVAVKIVDMKRAVDCPENIKKEICINKMLNHENVVKFYGHRREGNIQYLFLEYCSGG

SEQ ID NO: 2834 - protein, 80 aa, Synthetic construct
CGEVKLAFERKTCKKVAIKIISKRKFAIGSAREADPALNVETEIEILKKLNHPCIIKIKNFFDAEDYYIVLELMEGGELF

SEQ ID NO: 2835 - protein, 80 aa, Synthetic construct
ISKRKFAIGSAREADPALNVETEIEILKKLNHPCIIKIKNFFDAEDYYIVLELMEGGELFDKVVGNKRLKEATCKLYFYQ

SEQ ID NO: 2836 - protein, 110 aa, Synthetic construct
RRQGDLMESLEQRAIDLYKQLKHRPSDHSYSDSTEMVKIIVHTVQSQDRVLKELFGHLSKLLGCKQKIIDLLPKVEVALSNIKEADNTVMFMQGKRQKEIWHLLKIACTQ

SEQ ID NO: 2837 - protein, 110 aa, Synthetic construct
MRQPYLSSREVSSSRKRWRTFPVDCVAMCGDCVEKEYPNRGNTCLENGSFLLNFTGCAVCSKRDFMLITNKSLKEEDGEEIVTYDHLCKNCHHVIARHEYTFSIMDEFQE

SEQ ID NO: 2838 - protein, 80 aa, Synthetic construct
CSKRDFMLITNKSLKEEDGEEIVTYDHLCKNCHHVIARHEYTFSIMDEFQEYTMLCLLCGKAEDTISILPDDPRQMTLLF

SEQ ID NO: 2839 - protein, 90 aa, Synthetic construct
AVCSKRDFMLITNKSLKEEDGEEIVTYDHLCKNCHHVIARHEYTFSIMDEFQAKVEEKIQEVFSSYKFNHLVPRLVLQREKHFHYLKRGL

SEQ ID NO: 2840 - protein, 80 aa, Synthetic construct
MEGLADSGPGGAGRPAAVAAREGSTEFDWGDETSRDSEASSVAARGDSRPRLVAPADLSRFEFDECEAAVMLVSLGSSRS

SEQ ID NO: 2841 - protein, 110 aa, Synthetic construct
DETSRDSEASSVAARGDSRPRLVAPADLSRFEFDECEAAVMLVSLGSSRSGTPSFSPVSTQSPFSPAPSPSPSPLFGFRPANFSPINASPVIQRTAVRSRHLSASTPKAG

SEQ ID NO: 2842 - protein, 130 aa, Synthetic construct
SDSLDSGVDSVSHTPTPSTPAGFRAVSPAVPFSRSRQPSPLLLLPPPAGLTSDPGPSVRRVPAVQRDSPVIVRNPDVPLPSKFPGEVGTAGEVRAGGPGRGCRETPVPPGVASGKPGLPPPLPAPVPITV

SEQ ID NO: 2843 - protein, 80 aa, Synthetic construct
PMPAFGLASSPFQPVAFHPSPAALLPVLVPSSYTSHPAPKKEVIMGRPGTVWTNVEPRSVAVFPWHSLVPFLAPSQPDPS

SEQ ID NO: 2844 - protein, 80 aa, Synthetic construct
SLVGCGHFAEVQVVREKATGDIYAMKVMKKKALLAQEQVSFFEEERNILSRSTSPWIPQLQYAFQDKNHLYLVMEYQPGG

SEQ ID NO: 2845 - protein, 80 aa, Synthetic construct
DIYAMKVMKKKALLAQEQVSFFEEERNILSRSTSPWIPQLQYAFQDKNHLYLVMEYQPGGDLLSLLNRYEDQLDENLIQF

SEQ ID NO: 2846 - protein, 80 aa, Synthetic construct
SVHLMGYVHRDIKPENILVDRTGHIKLVDFGSAAKMNSNKMVNAKLPIGTPDYMAPEVLTVMNGDGKGTYGLDCDWWSVG

SEQ ID NO: 2847 - protein, 90 aa, Synthetic construct
CRVRELQRMLDTEKQSRARADQRITESRQVVELAVKEHKAEILALQQALKEQKLKAESLSDKLNDLEKKHAMLEMNARSLQQKLETEREL

SEQ ID NO: 2848 - protein, 80 aa, Synthetic construct
QQKLETERELKQRLLEEQAKLQQQMDLQKNHIFRLTQGLQEALDRADLLKTERSDLEYQLENIQVLYSHEKVKMEGTISQ

SEQ ID NO: 2849 - protein, 100 aa, Synthetic construct
LQQQMDLQKNHIFRLTQGLQEALDRADLLKTERSDLEYQLENIQVLYSHEKVKMEGTISQQTKLIDFLQAKMDQPAKKKKGLFSRRKEDPALPTQVPLQY

SEQ ID NO: 2850 - protein, 90 aa, Synthetic construct
WMKVPRNNKRGQQGWDRKYIVLEGSKVLIYDNEAREAGQRPVEEFELCLPDGDVSIHGAVGASELANTAKADVPYILKMESHPHTTCWPG

SEQ ID NO: 2851 - protein, 90 aa, Synthetic construct
PFSDQVVLVGTEEGLYALNVLKNSLTHVPGIGAVFQIYIIKDLEKLLMIAGEERALCLVDVKKVKQSLAQSHLPAQPDISPNIFEAVKGC

SEQ ID NO: 2852 - protein, 80 aa, Synthetic construct
VKKVKQSLAQSHLPAQPDISPNIFEAVKGCHLFGAGKIENGLCICAAMPSKVVILRYNENLSKYCIRKEIETSEPCSCIH

SEQ ID NO: 2853 - protein, 80 aa, Synthetic construct
ASSNSFPVSIVQVNSAGQREEYLLCFHEFGVFVDSYGRRSRTDDLKWSRLPLAFAYREPYLFVTHFNSLEVIEIQARSSA

SEQ ID NO: 2854 - protein, 80 aa, Synthetic construct
QPSAKDFEVRSLVGCGHFAEVQVVREKATGDIYAMKVMKKKALLAQEQVSFFEEERNILSRSTSPWIPQLQYAFQDKNHL

SEQ ID NO: 2855 - protein, 80 aa, Synthetic construct
YLAELILAVHSVHLMGYVHRDIKPENILVDRTGHIKLVDFGSAAKMNSNKMVNAKLPIGTPDYMAPEVLTVMNGDGKGTY

SEQ ID NO: 2856 - protein, 80 aa, Synthetic construct
ERRENRLKDDIQTKSQQIQQMADKILELEEKHREAQVSAQHLEVHLKQKEQHYEEKIKVLDNQIKKDLADKETLENMMQR

SEQ ID NO: 2857 - protein, 80 aa, Synthetic construct
QRNMKAQEEMISELRQQKFYLETQAGKLEAQNRKLEEQLEKISHQDHSDKNRLLELETRLREVSLEHEEQKLELKRQLTE

SEQ ID NO: 2858 - protein, 80 aa, Synthetic construct
LRNSCTVITDLEEQLNQLTEDNAELNNQNFYLSKQLDEASGANDEIVQLRSEVDHLRREITEREMQLTSQKQTMEALKTT

SEQ ID NO: 2859 - protein, 80 aa, Synthetic construct
RKHKEITAQSDASEIRQDWKPTFLSNEEFTQLMLEALDGFFLAIMTDGSIIYVSESVTSLLEHLPSDLVDQSIFNFIPEG

SEQ ID NO: 2860 - protein, 80 aa, Synthetic construct
IYVSESVTSLLEHLPSDLVDQSIFNFIPEGEHSEVYKILSTHLLESDSLTPEYLKSKNQLEFCCHMLRGTIDPKEPSTYE

SEQ ID NO: 2861 - protein, 80 aa, Synthetic construct
SAGLLLQFANDSAAGLTVFLSEGRIRAEVPGSPAVVLPGRWDDGLRHLVMLSFGPDQLQDLGQHVHVGGRLLAADSQPWG

SEQ ID NO: 2862 - protein, 100 aa, Synthetic construct
LLAADSQPWGGPFRGCLQDLRLDGCHLPFFPLPLDNSSQPSELGGRQSWNLTAGCVSEDMCSPDPCFNGGTCLVTWNDFHCTCPANFTGPTCAQQLWCPG

SEQ ID NO: 2863 - protein, 90 aa, Synthetic construct
YQIRTAPTSTIAPGVVMASSPALPTQPAEEAARKREVRLMKNREAARECRRKKKEYVKCLENRVAVLENQNKTLIEELKALKDLYCHKSD

SEQ ID NO: 2864 - protein, 80 aa, Synthetic construct; identical to SEQ ID NO: 109

SEQ ID NO: 2865 - protein, 80 aa, Synthetic construct
RAPLDWALPLSEVPSDWEVDDLLCSLLSPPASLNILSSSNPCLVHHDHTYSLPRETVSMDLESESCRKEGTQMTPQHMEE

SEQ ID NO: 2866 - protein, 100 aa, Synthetic construct
DLLCSLLSPPASLNILSSSNPCLVHHDHTYSLPRETVSMDLESESCRKEGTQMTPQHMEELAEQEIARLVLTDEEKSLLEKEGLILPETLPLTKTEEQIL

SEQ ID NO: 2867 - protein, 90 aa, Synthetic construct
DAVLEPFPADRLFPGSSFLDLGDLNESDFLNNAHFPEHLDHFTENMEDFSNDLFSSFFDDPVLDEKSPLLDMELDSPTPGIQAEHSYSLS

SEQ ID NO: 2868 - protein, 110 aa, Synthetic construct
NNAHFPEHLDHFTENMEDFSNDLFSSFFDDPVLDEKSPLLDMELDSPTPGIQAEHSYSLSGDSAPQSPLVPIKMEDTTQDAEHGAWALGHKLCSIMVKQEQSPELPVDPL

SEQ ID NO: 2869 - protein, 140 aa, Synthetic construct
IQAEHSYSLSGDSAPQSPLVPIKMEDTTQDAEHGAWALGHKLCSIMVKQEQSPELPVDPLAAPSAMAAAAAMATTPLLGLSPLSRLPIPHQAPGEMTQLPVIKAEPLEVNQFLKVTPEDLVQMPPTPPSSHGSDSDGSQS

SEQ ID NO: 2870 - protein, 90 aa, Synthetic construct
SPLSRLPIPHQAPGEMTQLPVIKAEPLEVNQFLKVTPEDLVQMPPTPPSSHGSDSDGSQSPRSLPPSSPVRPMARSSTAISTSPLLTAPH

SEQ ID NO: 2871 - protein, 80 aa, Synthetic construct
PRSLPPSSPVRPMARSSTAISTSPLLTAPHKLQGTSGPLLLTEEEKRTLIAEGYPIPTKLPLTKAEEKALKRVRRKIKNK

SEQ ID NO: 2872 - protein, 190 aa, Synthetic construct
VSMEVEPSPTSPAPLIQAEHSYSLCEEPRAQSPFTHITTSDSFNDDEVESEKWYLSTDFPSTSIKTEPVTDEPPPGLVPSVTLTITAISTPLEKEEPPLEMNTGVDSSCQTIIPKIKLEPHEVDQFLNFSPKEAPVDHLHLPPTPPSSHGSDSEGSLSPNPRLHPFSLPQTHSPSRAAPRAPSALSSSPL

SEQ ID NO: 2873 - protein, 80 aa, Synthetic construct
RRKIRNKQSAQDSRRRKKEYIDGLESRVAACSAQNQELQKKVQELERHNISLVAQLRQLQTLIAQTSNKAAQTSTCVLIL

SEQ ID NO: 2874 - protein, 80 aa, Synthetic construct
MSVNSSIMGMQGPNLSNPCASPQVQPMHSEAKMRLKAALTHHPAAMSNGNMNTMGHMMEMMGSRQDQTPHHHMHSHPHQH

SEQ ID NO: 2875 - protein, 140 aa, Synthetic construct
DVPVLEMKTETQAEDTEPDPGESKGEPRSEMMEEDLQGASQVKEETDIAEQKSEPMEVDEKKPEVKVEVKEEEESSSNGTASQSTSPSQPRKKIFKPEELRQALMPTLEALYRQDPESLPFRQPVDPQLLGIPDYFDIVK

SEQ ID NO: 2876 - protein, 90 aa, Synthetic construct
TSRVYKFCSKLAEVFEQEIDPVMQSLGYCCGRKYEFSPQTLCCYGKQLCTIPRDAAYYSYQNRYHFCEKCFTEIQGENVTLGDDPSQPQT

SEQ ID NO: 2877 - protein, 80 aa, Synthetic construct
QNRYHFCEKCFTEIQGENVTLGDDPSQPQTTISKDQFEKKKNDTLDPEPFVDCKECGRKMHQICVLHYDIIWPSGFVCDN

SEQ ID NO: 2878 - protein, 100 aa, Synthetic construct
VDCKECGRKMHQICVLHYDIIWPSGFVCDNCLKKTGRPRKENKFSAKRLQTTRLGNHLEDRVNKFLRRQNHPEAGEVFVRVVASSDKTVEVKPGMKSRFV

SEQ ID NO: 2879 - protein, 80 aa, Synthetic construct
DEGSSQGEPQSKSPQESRRLSIQRCIQSLVHACQCRNANCSLPSCQKMKRVVQHTKGCKRKTNGGCPVCKQLIALCCYHA

SEQ ID NO: 2880 - protein, 120 aa, Synthetic construct
DDSKVVGGKVKKPGKRGRKPAKIDLKAKLERSRQSARECRARKKLRYQYLEELVSSRERAICALREELEMYKQWCMAMDQGKIPSEIKALLTGEEQNKSQQNSSRHTKAGGKTDANSNSW

SEQ ID NO: 2881 - protein, 80 aa, Synthetic construct
PGEETEDMDFLSGLELADLLDPRQPDWHLDPGLSSPGPLSSSGGGSDSGGLWRGDDDDEAAAAEMQRFSDLLQRLLNGIG

SEQ ID NO: 2882 - protein, 80 aa, Synthetic construct
LESRVRGLAAENQELRAENRELGKRVQALQEESRYLRAVLANETGLARLLSRLSGVGLRLTTSLFRDSPAGDHDYALPVG

SEQ ID NO: 2883 - protein, 80 aa, Synthetic construct
PYLSPMVPQLGGPALSPLSGPSVGPSLAQSPTSLSGQSYGAYSPVDSLEFKDPTGTWKFTYNPMDPLDYKDQSAWKFQIL

SEQ ID NO: 2884 - protein, 80 aa, Synthetic construct
QYPDVYAREEVALKINLPESRVQVWFKNRRAKCRQQRQQQKQQQQPPGGQAKARPAKRKAGTSPRPSTDVCPDPLGISDS

SEQ ID NO: 2885 - protein, 80 aa, Synthetic construct
VEWGNQDDYQLVRKLGRGKYSEVFEAINITNNEKVVVKILKPVKKKKIKREIKILENLRGGPNIITLADIVKDPVSRTPA

SEQ ID NO: 2886 - protein, 80 aa, Synthetic construct
SGILKRKFEEVDGSSPCSSVRESDDEVSSSESADSGDSVNPSTSSHFTPSSILKREKRLRTKNVHFSCVTVYYFTRRQGF

SEQ ID NO: 2887 - protein, 80 aa, Synthetic construct
GACEKTVYHAEEIQCNGRSFHKTCFHCMACRKALDSTTVAAHESEIYCKVCYGRRYGPKGIGYGQGAGCLSTDTGEHLGL

SEQ ID NO: 2888 - protein, 80 aa, Synthetic construct
LKDLATVAFCDAQSTQEIHEKVLNEAVGAMMYHTITLTREDLEKFKALRVIVRIGSGYDNVDIKAAGELGIAVCNIPSAA

SEQ ID NO: 2889 - protein, 110 aa, Synthetic construct
DTQIITLQVVNMEEQPINIGELQLVQVPVPVTVPVATTSVEELQGAYENEVSKEGLAESEPMICHTLPLPEGFQVVKVGANGEVETLEQGELPPQEDPSWQKDPDYQPPA

SEQ ID NO: 2890 - protein, 110 aa, Synthetic construct
NEDEEEPAVEIEPEPEPQPVTPAPPPAKKRRGRPPGRTNQPKQNQPTAIIQVEDQNTGAIENIIVEVKKEPDAEPAEGEEEEAQPAATDAPNGDLTPEMIPEMILSMMDR

SEQ ID NO: 2891 - protein, 80 aa, Synthetic construct
CHARFTQSGTMKMHILQKHTENVAKFHCPHCDTVIARKSDLGVHLRKQHSYIEQGKKCRYCDAVFHERYALIQHQKSHKN

SEQ ID NO: 2892 - protein, 80 aa, Synthetic construct
SEESEKYILTLQTVHFTSEAVELQDMSLLSIQQQEGVQVVVQQPGPGLLWLEEGPRQSLQQCVAISIQQELYSPQEMEVL

SEQ ID NO: 2893 - protein, 80 aa, Synthetic construct
TRKRKQTILKEATKGQKEAAKGWKEAANGDEAAAEEASTTKGEQFPGEMFPVACRETTARVKEEVDEGVTCEMLLNTMDK

SEQ ID NO: 2894 - protein, 80 aa, Synthetic construct
VASEDSKLAVSLAETTGLIKLEEEQEKNQLLAERTKEQLFFVETMSGDERSDEIVLTVSNSNVEEQEDQPTAGQADAEKA

SEQ ID NO: 2895 - protein, 80 aa, Synthetic construct
QATQFASSSFVLPFFGLGQMYIYRGDKENASQCFEKVLKAYPNNYETMKILGSLYAASEDQEKRDIAKGHLKKVTEQYPD

SEQ ID NO: 2896 - protein, 100 aa, Synthetic construct
LSAYGTATRILQEKVQADVPPEILNNVGALHFRLGNLGEAKKYFLASLDRAKAEAEHDEHYYNAISVTTSYNLARLYEAMCEFHEAEKLYKNILREHPNY

SEQ ID NO: 2897 - protein, 80 aa, Synthetic construct
NAVKELELAHRYFSYLSKVGDKMRFDLALAATEARQCSDLLSQAQYHVARARKQDEEERELRAKQEQEKELLRQKLLKEQ

SEQ ID NO: 2898 - protein, 80 aa, Synthetic construct
KKRGGGGGRRSKKGGEFDEFVNDDTDDDLPISKKKKRRKGSGSEQEGEDEEGGERKKKKRRRHPKGEEGSDDDETENGPK

SEQ ID NO: 2899 - protein, 100 aa, Synthetic construct
EIFHTEFQNLLDADKNEDLGRMYNLVSRIQDGLGELKKLLETHIHNQGLAAIEKCGEAALNDPKMYVQTVLDVHKKYNALVMSAFNNDAGFVAALDKACG

SEQ ID NO: 2900 - protein, 80 aa, Synthetic construct
TVQQLTDSTQIKMDILAQVLQILLKSKLLVLEDENANVDEVELKPDTLIKLYLGYKNKKLRVNINVPMKTEQKQEQETTH

SEQ ID NO: 2901 - protein, 80 aa, Synthetic construct
QILLKSKLLVLEDENANVDEVELKPDTLIKLYLGYKNKKLRVNINVPMKTEQKQEQETTHKNIEEDRKLLIQAAIVRIMK

SEQ ID NO: 2902 - protein, 80 aa, Synthetic construct
EGRKGIYEIYSLALVTWRDCLFRPLNKQVTNAVLKLIEKERNGETINTRLISGVVQSYVELGLNEDDAFAKGPTLTVYKE

SEQ ID NO: 2903 - protein, 80 aa, Synthetic construct
RVNINVPMKTEQKQEQETTHKNIEEDRKLLIQAAIVRIMKMRKVLKHQQLLGEVLTQLSSRFKPRVPVIKKCIDILIEKE

SEQ ID NO: 2904 - protein, 80 aa, Synthetic construct
TQENMPTLFVESVLEVHGKFVQLINTVLNGDQHFMSALDKALTSVVNYREPKSVCKAPELLAKYCDNLLKKSAKGMTENE

SEQ ID NO: 2905 - protein, 80 aa, Synthetic construct
FIDDKLKKGVKGLTEQEVETILDKAMVLFRFMQEKDVFERYYKQHLARRLLTNKSVSDDSEKNMISKLKTECGCQFTSKL

SEQ ID NO: 2906 - protein, 90 aa, Synthetic construct
GYWPTQSATPKCNIPPAPRHAFEIFRRFYLAKHSGRQLTLQHHMGSADLNATFYGPVKKEDGSEVGVGGAQVTGSNTRKHILQVSTFQMT

SEQ ID NO: 2907 - protein, 80 aa, Synthetic construct
IATVEKQLLGEHLTAILQKGLNNLLDENRIQDLSLLYQLFSRVRGGVQVLLQQWIEYIKAFGSTIVINPEKDKTMVQELL

SEQ ID NO: 2908 - protein, 80 aa, Synthetic construct
FGSTIVINPEKDKTMVQELLDFKDKVDHIIDICFLKNEKFINAMKEAFETFINKRPNKPAELIAKYVDSKLRAGNKEATD

SEQ ID NO: 2909 - protein, 80 aa, Synthetic construct
ELIAKYVDSKLRAGNKEATDEELEKMLDKIMIIFRFIYGKDVFEAFYKKDLAKRLLVGKSASVDAEKSMLSKLKHECGAA

SEQ ID NO: 2910 - protein, 80 aa, Synthetic construct
LPADSVNIKILNAGAWSRSSEKVFVSLPTELEDLIPEVEEFYKKNHSGRKLHWHHLMSNGIITFKNEVGQYDLEVTTFQL

SEQ ID NO: 2911 - protein, 100 aa, Synthetic construct
ISLKKPSAAPEAGASALPNPPALKKEAQDAPGLDPQGAADCAQGVLRQVKNEVGRSGAWKDHWWSAVQPERRNAASSEEAKAEETGGGKEKGSGGSGGGS

SEQ ID NO: 2912 - protein, 80 aa, Synthetic construct
TSAAAAPGEGPAAPSSAPPPSNSSSSSAPRRPSSLQSLFGLPEAAGARDSRDNPLRKKKAANLNSIIHRLEKAASREEPI

SEQ ID NO: 2913 - protein, 90 aa, Synthetic construct
KELNSVASELSARQEESEHSHKHLIELRREFKKNVPEEIREMVAPVLKSFQAEVVALSKRSQEAEAAFLSVYKQLIEAPDPVPVFEAARS

SEQ ID NO: 2914 - protein, 100 aa, Synthetic construct
SPAGPTLTEGSRLPGIPGKALLTETLLQRNEAEKQKGLQEVQITLAARLGEAEEKIKVLHSALKATQAELLELRRKYDEEAASKADEVGLIMTNLEKANQ

SEQ ID NO: 2915 - protein, 120 aa, Synthetic construct
LEMEVAPRGRSVPPSPPERPSLATASQNGAPALVKQEEGSGGPAQAPLPVLSPAAFVQSIIRKVKSEIGDAGYFDHHWASDRGLLSRPYASVSPSLSSSSSSGYSGQPNGRAWPRGDEAP

SEQ ID NO: 2916 - protein, 80 aa, Synthetic construct
IRKVKSEIGDAGYFDHHWASDRGLLSRPYASVSPSLSSSSSSGYSGQPNGRAWPRGDEAPVPPEDEAAAGAEDEPPRTGE

SEQ ID NO: 2917 - protein, 80 aa, Synthetic construct
VINWFHNYRSRMRREMLVEGTQDEPDLDPSGGPGILPPGHSHPDPTPQSPDSETEDQKPTVKELELQEGPEENSTPLTTQ

SEQ ID NO: 2918 - protein, 140 aa, Synthetic construct
TQDEPDLDPSGGPGILPPGHSHPDPTPQSPDSETEDQKPTVKELELQEGPEENSTPLTTQDKAQVRIKQEQMEEDAEEEAGSQPQDSGELDKGQGPPKEEHPDPPGNDGLPKVAPGPLLPGGSTPDCPSLHPQQESEAGE

SEQ ID NO: 2919 - protein, 80 aa, Synthetic construct
LSPKEQREGTSPAGPTLTEGSRLPGIPGKALLTETLLQRNEAEKQKGLQEVQITLAARLGEAEEKIKVLHSALKATQAEL

SEQ ID NO: 2920 - protein, 80 aa, Synthetic construct
SSLQELEEASANQIADLERQLTAKSEAIEKLEEKLQAQSDYEEIKTELSILKAMKLASSTCSLPQGMAKPEDSLLIAKEA

SEQ ID NO: 2921 - protein, 80 aa, Synthetic construct
EGDGSDPEPPDAGEDSKSENGENAPIYCICRKPDINCFMIGCDNCNEWFHGDCIRITEKMAKAIREWYCRECREKDPKLE

SEQ ID NO: 2922 - protein, 80 aa, Synthetic construct
RPAQPSSKYCSDDCGMKLAANRIYEILPQRIQQWQQSPCIAEEHGKKLLERIRREQQSARTRLQEMERRFHELEAIILRA

SEQ ID NO: 2923 - protein, 80 aa, Synthetic construct
AEEHGKKLLERIRREQQSARTRLQEMERRFHELEAIILRAKQQAVREDEESNEGDSDDTDLQIFCVSCGHPINPRVALRH

SEQ ID NO: 2924 - protein, 80 aa, Synthetic construct
RREKKSEKKKEERYKRHRQKQKHKDKWKHPERADAKDPASLPQCLGPGCVRPAQPSSKYCSDDCGMKLAANRIYEILPQR

SEQ ID NO: 2925 - protein, 80 aa, Synthetic construct
FQIANLADCPQNHSSSSSSSSGGAGGANPAKKKRKRCGVCVPCKRLINCGVCSSCRNRKTGHQICKFRKCEELKKKPGTS

SEQ ID NO: 2926 - protein, 180 aa, Synthetic construct
TELAAEGQLTLQQFAQSTEMLKRVVQEHLPLMSEAGAGLPDMEAVAGAEALNGQSDFPYLGAFPINPGLFIMTPAGVFLAESALHMAGLAEYPMQGELASAISSGKKKRKRCGMCAPCRRRINCEQCSSCRNRKTGHQICKFRKCEELKKKPSAALEKVMLPTGAAFRWFPTGAAFRWFQ

SEQ ID NO: 2927 - protein, 80 aa, Synthetic construct
MKVKKIKLEAMSNYHASNNQHGADSENGDMNSSVGLELPFMMMPHPLIPVSLPPASVTMAMSQMNHLSTIANMAAAAQVQ

SEQ ID NO: 2928 - protein, 80 aa, Synthetic construct
MGHESKRMHIEKDETPLSTPTARDSLDKLSLTGHGQPLPPGFPSPFLFPDGLSSIETLLTNIQGLLKVAIDNARAQEKQV

SEQ ID NO: 2929 - protein, 100 aa, Synthetic construct
TARDSLDKLSLTGHGQPLPPGFPSPFLFPDGLSSIETLLTNIQGLLKVAIDNARAQEKQVQLEKTELKMDFLRERELRETLEKQLAMEQKNRAIVQKRLK

SEQ ID NO: 2930 - protein, 80 aa, Synthetic construct
LMSPGIIPPTGLTAAAAAAAAATNAAIAEAMKVKKIKLEAMSNYHASNNQHGADSENGDMNSSVGLELPFMMMPHPLIPV

SEQ ID NO: 2931 - protein, 80 aa, Synthetic construct
LTPGQALPAGFPGPFIFADSLSSVETLLTNIQGLLKVALDNARIQEKQIQQEKKELRLELYREREIRENLERQLAVELQS

SEQ ID NO: 2932 - protein, 80 aa, Synthetic construct
LSSVETLLTNIQGLLKVALDNARIQEKQIQQEKKELRLELYREREIRENLERQLAVELQSRTTMQKRLKKEKKTKRKLQE

SEQ ID NO: 2933 - protein, 80 aa, Synthetic construct
FPGPFIFADSLSSVETLLTNIQGLLKVALDNARIQEKQIQQEKKELRLELYREREIRENLERQLAVELQSRTTMQKRLKK

SEQ ID NO: 2934 - protein, 90 aa, Synthetic construct
IEREVSILKEIQHPNVITLHEVYENKTDVILILELVAGGELFDFLAEKESLTEEEATEFLKQILNGVYYLHSLQIAHFDLKPENIMLLDR

SEQ ID NO: 2935 - protein, 80 aa, Synthetic construct
IMNVPRPAGGEFGYDKDTSLLKEIRNRFGNDLHISNKLFVLDAGASGSKDMKVLRNHLQEIRSQIVSVCPPMTHLCEKII

SEQ ID NO: 2936 - protein, 80 aa, Synthetic construct
SSRRGVSREEIEREVNILREIRHPNIITLHDIFENKTDVVLILELVSGGELFDFLAEKESLTEDEATQFLKQILDGVHYL

SEQ ID NO: 2937 - protein, 80 aa, Synthetic construct
IRHPNIITLHDIFENKTDVVLILELVSGGELFDFLAEKESLTEDEATQFLKQILDGVHYLHSKRIAHFDLKPENIMLLDK

SEQ ID NO: 2938 - protein, 80 aa, Synthetic construct
SDSLGQDLRRLRQELLKTEALKRQAQEEAKGALLGTSGLKRRFSRLENRYEALAKQVASEMRFVQDLVRALEQEKLQGVE

SEQ ID NO: 2939 - protein, 100 aa, Synthetic construct
LGSPGPGSRRGGSPPTAFSPASETTFLKFGVNAILSSGPRTETSPALLQSVPPKTFAFPYFEGSFQPFIRSSYFPASSSVVPIPGTFSWPLAARGKPRRG

SEQ ID NO: 2940 - protein, 110 aa, Synthetic construct
LPSAVAAHAGAYWDVVASSALLNLPAAPGFGNLGKSFLIENLLRVGGAPTPRLQPPAPHDPATALATAGAQLRPLPASPVPLKLCPAAEQVSPAGAPYGTRWAFQVLSPS

SEQ ID NO: 2941 - protein, 80 aa, Synthetic construct
KVIPLDRDNKELKAFNIRLEELHVIDVKFLYGCQAPTICFVYQDPQGRHVKTYEVSLREKEFNKGPWKQENVEAEASMVI

SEQ ID NO: 2942 - protein, 80 aa, Synthetic construct
YGCQAPTICFVYQDPQGRHVKTYEVSLREKEFNKGPWKQENVEAEASMVIAVPEPFGGAIIIGQESITYHNGDKYLAIAP

SEQ ID NO: 2943 - protein, 90 aa, Synthetic construct
NVEAEASMVIAVPEPFGGAIIIGQESITYHNGDKYLAIAPPIIKQSTIVCHNRVDPNGSRYLLGDMEGRLFMLLLEKEEQMDGTVTLKDL

SEQ ID NO: 2944 - protein, 80 aa, Synthetic construct
HNRVDPNGSRYLLGDMEGRLFMLLLEKEEQMDGTVTLKDLRVELLGETSIAECLTYLDNGVVFVGSRLGDSQLVKLNVDS

SEQ ID NO: 2945 - protein, 80 aa, Synthetic construct
GLLSDRKKVTLGTQPTVLRTFRSLSTTNVFACSDRPTVIYSSNHKLVFSNVNLKEVNYMCPLNSDGYPDSLALANNSTLT

SEQ ID NO: 2946 - protein, 110 aa, Synthetic construct
LLLAYKPMEGNFEEIARDFNPNWMSAVEILDDDNFLGAENAFNLFVCQKDSAATTDEERQHLQEVGLFHLGEFVNVFCHGSLVMQNLGETSTPTQGSVLFGTVNGMIGLV

SEQ ID NO: 2947 - protein, 80 aa, Synthetic construct
TAKYNACILEYKQSGESIDIITRAHGNVQDRIGRPSETGIIGIIDPECRMIGLRLYDGLFKVIPLDRDNKELKAFNIRLE

SEQ ID NO: 2948 - protein, 80 aa, Synthetic construct
GQGQLVTCSGAFKEGSLRIIRNGIGIHEHASIDLPGIKGLWPLRSDPNRETDDTLVLSFVGQTRVLMLNGEEVEETELMG

SEQ ID NO: 2949 - protein, 80 aa, Synthetic construct
AAESLPFSFGTLSSWELEAWYEDLQEVLSSDENGGTYVSPPGNEEEESKIFTTLDPASLAWLTEEEPEPAEVTSTSQSPH

SEQ ID NO: 2950 - protein, 80 aa, Synthetic construct
FTTLDPASLAWLTEEEPEPAEVTSTSQSPHSPDSSQSSLAQEEEEEDQGRTRKRKQSGHSPARAGKQRMKEKEQENERKV

SEQ ID NO: 2951 - protein, 80 aa, Synthetic construct
LAQEEEEEDQGRTRKRKQSGHSPARAGKQRMKEKEQENERKVAQLAEENERLKQEIERLTREVEATRRALIDRMVNLHQA

SEQ ID NO: 2952 - protein, 80 aa, Synthetic construct
TAIGIKMEGLECHVFIGGTPLSQDKTRLKKCHIAVGSPGRIKQLIELDYLNPGSIRLFILDEADKLLEEGSFQEQINWIY

SEQ ID NO: 2953 - protein, 120 aa, Synthetic construct
YQESPGIQMKTRLKEGASQRAKQSRRNLPRRSSFRLQTEAQEDDWYDCHREIRLSFSDTYQDYEEYWRAYYRAWQEYYAAASHSYYWNAQRHPSWMAAYHMNTIYLQEMMYLQEMMHSNQ

SEQ ID NO: 2954 - protein, 80 aa, Synthetic construct
AIPLIEKLHGELQDRKRGRAPQVLVLAPTRELANQVSKDFSDITKKLSVACFYGGTPYGGQFERMRNGIDILVGTPGRIK

SEQ ID NO: 2955 - protein, 80 aa, Synthetic construct
LRVSGAAPPRPGSSFAHFGFDEQLMHQIRKSEYTQPTPIQCQGVPVALSGRDMIGIAKTGSGKTAAFIWPMLIHIMDQKE

SEQ ID NO: 2956 - protein, 80 aa, Synthetic construct
RQNFTEPTAIQAQGWPVALSGLDMVGVAQTGSGKTLSYLLPAIVHINHQPFLERGDGPICLVLAPTRELAQQVQQVAAEY

SEQ ID NO: 2957 - protein, 80 aa, Synthetic construct
KAPILIATDVASRGLDVEDVKFVINYDYPNSSEDYIHRIGRTARSTKTGTAYTFFTPNNIKQVSDLISVLREANQAINPK

SEQ ID NO: 2958 - protein, 80 aa, Synthetic construct
TREQKEGAFSNFPISEETIKLLKGRGVTYLFPIQVKTFGPVYEGKDLIAQARTGTGKTFSFAIPLIERLQRNQETIKKSR

SEQ ID NO: 2959 - protein, 80 aa, Synthetic construct
VQGTDLPDPIATFQQLDQEYKINSRLLQNILDAGFQMPTPIQMQAIPVMLHGRELLASAPTGSGKTLAFSIPILMQLKQP

SEQ ID NO: 2960 - protein, 80 aa, Synthetic construct
SIERAKELFHELIYEGINVDVIHAERTQQQRDNTVHSFRAGKIWVLICTALLARGIDFKGVNLVINYDFPTSSVEYIHRI

SEQ ID NO: 2961 - protein, 130 aa, Synthetic construct
QIAPFPEAALPTSHPKIVLTSLPALAVPPPTPTKAAPPALVNGLELSEPRSWLYLEEMVNSLLNTAQQLKTLFEQAKHASTYREAATNQAKIHADAERKEQSCVNCGREAMSECTGCHKVNYCSTFCQRK

SEQ ID NO: 2962 - protein, 90 aa, Synthetic construct
TVVEGGEVRFNGKGKKIRKPRTIYSSLQLQALNRRFQQTQYLALPERAELAASLGLTQTQVKIWFQNKRSKFKKLMKQGGAALEGSALAN

SEQ ID NO: 2963 - protein, 80 aa, Synthetic construct
EPEKEDLEPEIRIVNGKPKKVRKPRTIYSSFQLAALQRRFQKTQYLALPERAELAASLGLTQTQVKIWFQNRRSKFKKMW

SEQ ID NO: 2964 - protein, 80 aa, Synthetic construct
VRKPRTIYSSFQLAALQRRFQKTQYLALPERAELAASLGLTQTQVKIWFQNRRSKFKKMWKSGEIPSEQHPGASASPPCA

SEQ ID NO: 2965 - protein, 160 aa, Synthetic construct
YYSAPQHDYYSGQPYGQTVNPYTYHHQFNLNGLAGTGAYSPKSEYTYGASYRQYGAYREQPLPAQDPVSVKEEPEAEVRMVNGKPKKVRKPRTIYSSYQLAALQRRFQKAQYLALPERAELAAQLGLTQTQVKIWFQNRRSKFKKLYKNGEVPLEHSPNN

SEQ ID NO: 2966 - protein, 80 aa, Synthetic construct
APAKKLRKPRTIYSSLQLQHLNQRFQHTQYLALPERAQLAAQLGLTQTQVKIWFQNKRSKYKKLLKQNSGGQEGDFPGRT

SEQ ID NO: 2967 - protein, 90 aa, Synthetic construct
VIENGEIRFNGKGKKIRKPRTIYSSLQLQALNHRFQQTQYLALPERAELAASLGLTQTQVKIWFQNKRSKFKKLLKQGSNPHESDPLQGS

SEQ ID NO: 2968 - protein, 80 aa, Synthetic construct
QHHHHGSPYASGGGNSYNHRSLAAYPYMSHSQHSPYLQSYHNSSAAAQTRGDDTDQQKTTVIENGEIRFNGKGKKIRKPR

SEQ ID NO: 2969 - protein, 80 aa, Synthetic construct
SLAAYPYMSHSQHSPYLQSYHNSSAAAQTRGDDTDQQKTTVIENGEIRFNGKGKKIRKPRTIYSSLQLQALNHRFQQTQY

SEQ ID NO: 2970 - protein, 80 aa, Synthetic construct
QHRKQRRSRTAFTAQQLEALEKTFQKTHYPDVVMRERLAMCTNLPEARVQVWFKNRRAKFRKKQRSLQKEQLQKQKEAEG

SEQ ID NO: 2971 - protein, 80 aa, Synthetic construct
RMVIQDIPAVTSRGHVENTPDLVSDSTYYSSFYQPSLFPYYNNLYNCPQYSMALAADSASGEVGNPLGGSPVKNSLRGLP

SEQ ID NO: 2972 - protein, 100 aa, Synthetic construct
GGPQPRPPLAPQASPAGTGPRERCTPAGGGAEPRKLSRTPKCARCRNHGVVSCLKGHKRFCRWRDCQCANCLLVVERQRVMAAQVALRRQQATEDKKGLS

SEQ ID NO: 2973 - protein, 80 aa, Synthetic construct
KSGPELKTPFVKEAFEETPKKHRECLVKDNQKYTFTIDRCAKDLFVAKQVGTKLSVNEPLSFSVESILKRPSSAITRVSQ

SEQ ID NO: 2974 - protein, 90 aa, Synthetic construct
NGYGSPYLYMGGPVSQPPRAPLQRTPKCARCRNHGVLSWLKGHKRYCRFKDCTCEKCILIIERQRVMAAQVALRRQQANESLESLIPDSL

SEQ ID NO: 2975 - protein, 80 aa, Synthetic construct
PFSLKANRPPLEVLKKIFPNQKPTVLELILKGCGGDLVSAVEVLLSSRSSVTGAERTSAEPESLALPSNGHIFEHTLSSY

SEQ ID NO: 2976 - protein, 80 aa, Synthetic construct
FPQPPRYPLMLRNTLARSQSSPFLPNDVTLWNTMTLQQQYQLRSQYVSPFPSNSTSVFRSSPVLPARATEDPRISIPDDG

SEQ ID NO: 2977 - protein, 80 aa, Synthetic construct
LRRQQAQEESEARGLQRLLCSGLSWPPGGRASGGGGRAENPQSTGGPAAGAALGLGALRQASGSATPAFEVFQQDYPEEK

SEQ ID NO: 2978 - protein, 110 aa, Synthetic construct
TGPPVASVASVAAAAAAAASLPVSVAGGLLRGPPLLLRAAEKYPRTPKCARCRNHGVVSALKGHKRYCRWKDCLCAKCTLIAERQRVMAAQVALRRQQAQEENEARELQL

SEQ ID NO: 2979 - protein, 110 aa, Synthetic construct
QPQTPHGAVLLAPTPPGKNSCGPLLLSHPPEASPLSWTPVPPGPWVPGHWLPPGFSMPPPVVCRLLYQEPAVSLPPFPGFDPGTSLQLPTHGPFTTCPGSHPVLTAPLSG

SEQ ID NO: 2980 - protein, 80 aa, Synthetic construct
TSGPSEWQLQQEAAEALVGLKDSSQAPRVTPSVPPNPAWISLLHPCGPPAPAGGRGFQPVGPCLRPSPAPSVALHIGRLG

SEQ ID NO: 2981 - protein, 80 aa, Synthetic construct
KTWNHFSDNEAERVKMMEEVEKLCDRLELASLQCLNETLTSCTKEVGKAALEKQIEEINEQIRKEKEEAEARMRQASKNT

SEQ ID NO: 2982 - protein, 120 aa, Synthetic construct
QARSEARRVGMADANSPPKPLSKPRTPRRSKSDGEAKPEPSPSPRITRKSTRQTTITSHFAKGPAKRKPQEESERAKSDESIKEEDKDQDEKRRRVTSRERVARPLPAEEPERAKSGTRT

SEQ ID NO: 2983 - protein, 80 aa, Synthetic construct
SIKEEDKDQDEKRRRVTSRERVARPLPAEEPERAKSGTRTEKEEERDEKEEKRLRSQTKEPTPKQKLKEEPDREARAGVQ

SEQ ID NO: 2984 - protein, 80 aa, Synthetic construct
IDAETLEVGDCVSVIPDDSSKPLYLARVTALWEDSSNGQMFHAHWFCAGTDTVLGATSDPLELFLVDECEDMQLSYIHSK

SEQ ID NO: 2985 - protein, 110 aa, Synthetic construct
DMQLSYIHSKVKVIYKAPSENWAMEGGMDPESLLEGDDGKTYFYQLWYDQDYARFESPPKTQPTEDNKFKFCVSCARLAEMRQKEIPRVLEQLEDLDSRVLYYSATKNGI

SEQ ID NO: 2986 - protein, 80 aa, Synthetic construct
TQPTEDNKFKFCVSCARLAEMRQKEIPRVLEQLEDLDSRVLYYSATKNGILYRVGDGVYLPPEAFTFNIKLSSPVKRPRK

SEQ ID NO: 2987 - protein, 90 aa, Synthetic construct
EQLEDLDSRVLYYSATKNGILYRVGDGVYLPPEAFTFNIKLSSPVKRPRKEPVDEDLYPEHYRKYSDYIKGSNLDAPEPYRIGRIKEIFC

SEQ ID NO: 2988 - protein, 80 aa, Synthetic construct
RRSQMTTSFTDPAISMDLLRAVLQPSINEEIQTVFNKYMKFFQKAALNVRDNVGEEVDAEQLIQEACRSCLEQAKLLFSD

SEQ ID NO: 2989 - protein, 80 aa, Synthetic construct
DPAISMDLLRAVLQPSINEEIQTVFNKYMKFFQKAALNVRDNVGEEVDAEQLIQEACRSCLEQAKLLFSDGEKVIPRLTH

SEQ ID NO: 2990 - protein, 80 aa, Synthetic construct
SLSCDNALFVIDTTPGMSADKNFYLEEEDKASEVAIEEEKEEEEDEKSEEDSSDHDENEDEFSDEEDFLNSTKAKLLKLT

SEQ ID NO: 2991 - protein, 80 aa, Synthetic construct
HYGVEKADIPAKYAETMDREFRKWMKWYGKKHAEYTLERGDFLSEEWRERIANTSVIFVNNFAFGPEVDHQLKERFANMK

SEQ ID NO: 2992 - protein, 80 aa, Synthetic construct
LRGQSLQLLKARCEELQLDWATLSLEKLLKEKQALKSQISEKQRHCLELQISIVELEKSQRQQELLQLKSCVPPDDALSL

SEQ ID NO: 2993 - protein, 90 aa, Synthetic construct
LAPGQIYTYPARCWRKKRRLNILEDPRLRPCEYKIDCEAPLKKEGGLPEGPVLEALLCAETGEKKIELKEEETIMDCQKQQLLEFPHDLE

SEQ ID NO: 2994 - protein, 90 aa, Synthetic construct
CEYKIDCEAPLKKEGGLPEGPVLEALLCAETGEKKIELKEEETIMDCQKQQLLEFPHDLEVEDLEDDIPRRKNRAKGKAYGIGGLRKRQD

SEQ ID NO: 2995 - protein, 80 aa, Synthetic construct
GCPEDLISCADCGRSGHPSCLQFTVNMTAAVRTYRWQCIECKSCSLCGTSENDDQLLFCDDCDRGYHMYCLSPPMAEPPE

SEQ ID NO: 2996 - protein, 80 aa, Synthetic construct
RKNRAKGKAYGIGGLRKRQDTASLEDRDKPYVCDICGKRYKNRPGLSYHYTHTHLAEEEGEENAERHALPFHRKNNHKQF

SEQ ID NO: 2997 - protein, 90 aa, Synthetic construct
KINKKTGQPEELVSCSDCGRSGHPSCLQFTPVMMAAVKTYRWQCIECKCCNICGTSENDDQLLFCDDCDRGYHMYCLTPSMSEPPEGSWS

SEQ ID NO: 2998 - protein, 90 aa, Synthetic construct
NKKSGRPEELVSCADCGRSGHPTCLQFTLNMTEAVKTYKWQCIECKSCILCGTSENDDQLLFCDDCDRGYHMYCLNPPVAEPPEGSWSCH

SEQ ID NO: 2999 - protein, 80 aa, Synthetic construct
DAREEESIQEIQRVLENDENVEEGNEEEDLEEDIPKRKNRTRGRARGSAGGRRRHDAASQEDHDKPYVCDICGKRYKNRP

SEQ ID NO: 3000 - protein, 80 aa, Synthetic construct
VWFKNHRAKLKKAKCKHIHQKQETPQPPIPEGGVSTSVGLRNADTLPRLPNAAHPIGLVYTGHRVPSFQLILYPNLKVPA

SEQ ID NO: 3001 - protein, 100 aa, Synthetic construct
EGGVSTSVGLRNADTLPRLPNAAHPIGLVYTGHRVPSFQLILYPNLKVPANDFIGHRIVHFGCCRDPNIYCLYPILESQVCAPSFHSGSPACSSNQSRER

SEQ ID NO: 3002 - protein, 100 aa, Synthetic construct
GTATFGNHSSGDFDDGFLRRKQRRNRTTFTLQQLEALEAVFAQTHYPDVFTREELAMKINLTEARVQVWFQNRRAKWRKTERGASDQEPGAKEPMAEVTP

SEQ ID NO: 3003 - protein, 90 aa, Synthetic construct
PVNGLGFPPQNVARVVVWEWLNEHSRWRPYTATVCHHIENVLKEDARGSVVLGQVDAQLVPYIIDLQSMHQFRQDTGTMRPVRRNFYDPS

SEQ ID NO: 3004 - protein, 80 aa, Synthetic construct
LQKIFLTVTADLNCNLFSKEQRAYITTLCPSIRKMEGHDGIEKVCGDFQDIERIHQFLSEQFLESEQKQQFSPSMTERKP

SEQ ID NO: 3005 - protein, 80 aa, Synthetic construct
QFLESEQKQQFSPSMTERKPLSQQERDSCISPSEPETKAEQKSNYFEVPLPYFEYFKYICPDKINSIEKRFGVNIEIQES

SEQ ID NO: 3006 - protein, 80 aa, Synthetic construct
FSYVIDFNTMGQINRQTQRQRRVRRRLDLIYPMVTGTLPKAQSWPVSPGPATSPPMSPCSCPQCVLVMSVKAAVVNGSTG

SEQ ID NO: 3007 - protein, 80 aa, Synthetic construct
HPWIDLTSIGFSYVIDFNTMGQINRQTQRQRRVRRRLDLIYPMVTGTLPKAQSWPVSPGPATSPPMSPCSCPQCVLVMSV

SEQ ID NO: 3008 - protein, 80 aa, Synthetic construct
KSFSARGFPRHCYLPDSEKGRKVLKLLLVAWDRRLIFAIGTSSTTGESDTVIWNEVHHKTEFGSNLTGHGYPDANYLDNV

SEQ ID NO: 3009 - protein, 100 aa, Synthetic construct
KTNHRRCRTKFTEEQLKILINTFNQKPYPGYATKQKLALEINTEESRIQIWFQNRRARHGFQKRPEAETLESSQSQGQDQPGVEFQSREARRCRTTYSAS

SEQ ID NO: 3010 - protein, 90 aa, Synthetic construct
GVDPVLLKLIRLAQFTIEYLLHSQEFLTSQLHTLEERLRLSHCDGEQSKKLLTKQAGEIKTLKEECKRRKKMISTQQLMIEAKANYYQCH

SEQ ID NO: 3011 - protein, 90 aa, Synthetic construct
PVPPPQNKGSFGKNTVKSDADGTEGSEIEDTDDSPKPAGVAVKTPTEKVEKMFPHRKNVNKPVGGTNVPEMFIKKEELQELKCADVEDED

SEQ ID NO: 3012 - protein, 80 aa, Synthetic construct
TDDSPKPAGVAVKTPTEKVEKMFPHRKNVNKPVGGTNVPEMFIKKEELQELKCADVEDEDWDISSLEEEISLGKKSGKEQ

SEQ ID NO: 3013 - protein, 90 aa, Synthetic construct
KMFPHRKNVNKPVGGTNVPEMFIKKEELQELKCADVEDEDWDISSLEEEISLGKKSGKEQKEPPPAKNEPHFAHVLNAWGAFNPKGPKGE

SEQ ID NO: 3014 - protein, 80 aa, Synthetic construct
AVAAAAAGAASMACAPPSAASGPLPFFQFRPRLESVDWRRLSAIDVDKVAGAVDVLTLQENIMNITFCKLEDEKCPHCQS

SEQ ID NO: 3015 - protein, 80 aa, Synthetic construct
LEYQLSEIQKSNMQIKSNIGTLKDAHEFKEDRSPYPQDFHNVMQLLDSQESKWTARVQAIHQEHKKEKGRLLSHIEKLRT

SEQ ID NO: 3016 - protein, 80 aa, Synthetic construct
VYFGRGLLRCAQKRYNGGLLEFHKSLQEIGDKNDHWFDIDPTEDEDLPTTFKDLLNNFIKTTESNIMKQTICSYLDCERS

SEQ ID NO: 3017 - protein, 80 aa, Synthetic construct
VDGLPSPKTPKSPGEKTRYDTSLGLLTKKFIYLLSESEDGVLDLNWAAEVLDVQKRRIYDITNVLEGIQLIRKKAKNNIQ

SEQ ID NO: 3018 - protein, 100 aa, Synthetic construct
KLDELIQSCTLDLKLLTEDSENQRLAYVTYQDIRKISGLKDQTVIVVKAPPETRLEVPDSIESLQIHLASTQGPIEVYLCPEETETHSPMKTNNQDHNGN

SEQ ID NO: 3019 - protein, 80 aa, Synthetic construct
LDLNKAAEVLKVQKRRIYDITNVLEGIHLIKKKSKNNVQWMGCSLSEDGGMLAQCQGLSKEVTELSQEEKKLDELIQSCT

SEQ ID NO: 3020 - protein, 80 aa, Synthetic construct
EVTELSQEEKKLDELIQSCTLDLKLLTEDSENQRLAYVTYQDIRKISGLKDQTVIVVKAPPETRLEVPDSIESLQIHLAS

SEQ ID NO: 3021 - protein, 80 aa, Synthetic construct
KGVGPGCNTREIADKLIELKAEIEELQQREQELDQHKVWVQQSIRNVTEDVQNSCLAYVTHEDICRCFAGDTLLAIRAPS

SEQ ID NO: 3022 - protein, 110 aa, Synthetic construct
QQSIRNVTEDVQNSCLAYVTHEDICRCFAGDTLLAIRAPSGTSLEVPIPEGLNGQKKYQIHLKSVSGPIEVLLVNKEAWSSPPVAVPVPPPEDLLQSPSAVSTPPPLPKP

SEQ ID NO: 3023 - protein, 90 aa, Synthetic construct
STSFEPIKADPTGVLELPKELSEIFDPTRECMSSELLEELMSSEVFAPLLRLSPPPGDHDYIYNLDESEGVCDLFDVPVLDLFDVPVLNL

SEQ ID NO: 3024 - protein, 90 aa, Synthetic construct
GVLDLKAAADTLAVRQKRRIYDITNVLEGIDLIEKKSKNSIQWKGVGAGCNTKEVIDRLRYLKAEIEDLELKERELDQQKLWLQQSIKNV

SEQ ID NO: 3025 - protein, 100 aa, Synthetic construct
DLIEKKSKNSIQWKGVGAGCNTKEVIDRLRYLKAEIEDLELKERELDQQKLWLQQSIKNVMDDSINNRFSYVTHEDICNCFNGDTLLAIQAPSGTQLEVP

SEQ ID NO: 3026 - protein, 90 aa, Synthetic construct
MDDSINNRFSYVTHEDICNCFNGDTLLAIQAPSGTQLEVPIPEMGQNGQKKYQINLKSHSGPIHVLLINKESSSSKPVVFPVPPPDDLTQ

SEQ ID NO: 3027 - protein, 80 aa, Synthetic construct
AAAEPASSGQQAPAGQGQGQRPPPQPPQAQAPQPPPPPQLGGAGGGSSRHEKSLGLLTTKFVSLLQEAKDGVLDLKAAAD

SEQ ID NO: 3028 - protein, 110 aa, Synthetic construct
KDCAQQLFELTDDKENERLAYVTYQDIHSIQAFHEQIVIAVKAPAETRLDVPAPREDSITVHIRSTNGPIDVYLCEVEQGQTSNKRSEGVGTSSSESTHPEGPEEEENPQ

SEQ ID NO: 3029 - protein, 90 aa, Synthetic construct
PFPVLSVDPEYCVNPLAHPVFSVAQTDLQAFSMQNGLNGQVDVSLASAASAVESLKPALLAGQPLVYVPSASLFMLYGSLQEGPASGSGS

SEQ ID NO: 3030 - protein, 80 aa, Synthetic construct
SLLQYLCVQSPAGLNGFNVLLSGSQTPPTVGPSSGQLPSFSVPCMVLPSPPLGPFPVLYSPAMPGPVSSTLGALPNTGPV

SEQ ID NO: 3031 - protein, 90 aa, Synthetic construct
APKTPIKNEPIDLSKQKKFTPERNPITPVKFVDRQQAEPWTPTANLKMLISAASPDIRDREKKKGLFRPIENKDDAFTDSLQLDVVGDSA

SEQ ID NO: 3032 - protein, 80 aa, Synthetic construct
QSVTPPQGLSPTVCTTHSSKATGSKDSTDATTEKAANDTSKASASTRPGSLLPAPERQGAKSRTREPAGERGSKRASMLE

SEQ ID NO: 3033 - protein, 80 aa, Synthetic construct
LEVEELLVSEDSPAAATTVLTEDPHTVLVEFSSVVADTQEYIIEATADDAETSEATEIIEGTQTEVDSHIMKVVQQIVHQ

SEQ ID NO: 3034 - protein, 130 aa, Synthetic construct
GSSMKEEPLGSGMNAVRTWMQGAGVLDANTAAQSGVGLARAHFEKQPPSNLRKSNFFHFVLALYDRQGQPVEIERTAFVGFVEKEKEANSEKTNNGIHYRLQLLYSNGIRTEQDFYVRLIDSMTKQAIVY

SEQ ID NO: 3035 - protein, 80 aa, Synthetic construct
VEIERTAFVGFVEKEKEANSEKTNNGIHYRLQLLYSNGIRTEQDFYVRLIDSMTKQAIVYEGQDKNPEMCRVLLTHEIMC

SEQ ID NO: 3036 - protein, 80 aa, Synthetic construct
DSMTKQAIVYEGQDKNPEMCRVLLTHEIMCSRCCDKKSCGNRNETPSDPVIIDRFFLKFFLKCNQNCLKNAGNPRDMRRF

SEQ ID NO: 3037 - protein, 90 aa, Synthetic construct
LKCNQNCLKNAGNPRDMRRFQVVVSTTVNVDGHVLAVSDNMFVHNNSKHGRRARRLDPSEGTPSYLEHATPCIKAISPSEGWTTGGATVI

SEQ ID NO: 3038 - protein, 140 aa, Synthetic construct
FGIQDTLGRGPTLKEKSLGAEMDSVRSWVRNVGVVDANVAAQSGVALSRAHFEKQPPSNLRKSNFFHFVLALYDRQGQPVEIERTAFVDFVENDKEQGNEKTNNGTHYKLQLLYSNGVRTEQDLYVRLIDSVTKQPIAYE

SEQ ID NO: 3039 - protein, 100 aa, Synthetic construct
EIERTAFVDFVENDKEQGNEKTNNGTHYKLQLLYSNGVRTEQDLYVRLIDSVTKQPIAYEGQNKNPEMCRVLLTHEVMCSRCCEKKSCGNRNETPSDPVI

SEQ ID NO: 3040 - protein, 80 aa, Synthetic construct
KCNQNCLKTAGNPRDMRRFQVVLSTTVNVDGHVLAVSDNMFVHNNSKHGRRARRLDPSEATPCIKAISPSEGWTTGGAMV

SEQ ID NO: 3041 - protein, 90 aa, Synthetic construct
GTTMKEEPLGSGMNPVRSWMHTAGVVDANTAAQSGVGLARAHFEKQPPSNLRKSNFFHFVLALYDRQGQPVEIERTAFVDFVEKEKEPNN

SEQ ID NO: 3042 - protein, 90 aa, Synthetic construct
AHFEKQPPSNLRKSNFFHFVLALYDRQGQPVEIERTAFVDFVEKEKEPNNEKTNNGIHYKLQLLYSNGVRTEQDLYVRLIDSMTKQAIVY

SEQ ID NO: 3043 - protein, 90 aa, Synthetic construct
RAHFEKQPPSNLRKSNFFHFVLAMYDRQGQPVEVERTAFIDFVEKDREPGAEKTNNGIHYRLRLVYNNGLRTEQDLYVRLIDSMSKQAII

SEQ ID NO: 3044 - protein, 80 aa, Synthetic construct
FLKCNQNCLKNAGNPRDMRRFQVVVSTTVSVDGHVLAVSDNMFVHNNSKHGRRARRLDPSEAATPCIKAISPGEGWTTGG

SEQ ID NO: 3045 - protein, 80 aa, Synthetic construct
KDAKQLLIQQKLELQGKADSLKAAVEQEKRNQQILKDQVKKEEEELKKEFIEKEAKLHSEIKEKEVGMKKHEENEAKLTM

SEQ ID NO: 3046 - protein, 80 aa, Synthetic construct
NQQILKDQVKKEEEELKKEFIEKEAKLHSEIKEKEVGMKKHEENEAKLTMQITALNENLGTVKKEWQSSQRRVSELEKQT

SEQ ID NO: 3047 - protein, 80 aa, Synthetic construct
VLNQLQEKNHTLQEQVTQLTEKLKNQSESHKQAQENLHDQVQEQKAHLRAAQDRVLSLETSVNELNSQLNESKEKVSQLD

SEQ ID NO: 3048 - protein, 100 aa, Synthetic construct
ILEGGGVMNLNPGNNLLHQPPAWTDSYSTCNVSSGFFGGQWHEIHPQYWTKYQVWEWLQHLLDTNQLDANCIPFQEFDINGEHLCSMSLQEFTRAAGTAG

SEQ ID NO: 3049 - protein, 150 aa, Synthetic construct
LLDTNQLDANCIPFQEFDINGEHLCSMSLQEFTRAAGTAGQLLYSNLQHLKWNGQCSSDLFQSTHNVIVKTEQTEPSIMNTWKDENYLYDTNYGSTVDLLDSKTFCRAQISMTTTSHLPVAESPDMKKEQDPPAKCHTKKHNPRGTHLWE

SEQ ID NO: 3050 - protein, 80 aa, Synthetic construct
TLTVEASCHDGDETIETIEAAEALLNMDSPGPMLDEKRINNNIFSSPEDDMVVAPVTHVSVTLDGIPEVMETQQVQEKYA

SEQ ID NO: 3051 - protein, 80 aa, Synthetic construct
ASSVRSGKNSSPINCSRAEKGVARVVNITSPGHDASSRSPTTTASVSATAAPRTVRVAMQVPVVMTSLGQKISTVAVQSV

SEQ ID NO: 3052 - protein, 80 aa, Synthetic construct
CDSYWTSVHPEYWTKRHVWEWLQFCCDQYKLDTNCISFCNFNISGLQLCSMTQEEFVEAAGLCGEYLYFILQNIRTQGYS

SEQ ID NO: 3053 - protein, 90 aa, Synthetic construct
EAGLPLQVILTPPEAPNLKSEELNVEPGLGRALPPEVKVEGPKEELEVAGERGFVPETTKAEPEVPPQEGVPARLPAVVMDTAGQAGGHA

SEQ ID NO: 3054 - protein, 80 aa, Synthetic construct
LQLLREQGNGHIISWTSRDGGEFKLVDAEEVARLWGLRKNKTNMNYDKLSRALRYYYDKNIIRKVSGQKFVYKFVSYPEV

SEQ ID NO: 3055 - protein, 150 aa, Synthetic construct
RESLLLQDSDCKASPEGREAHKHGLAALRSTSRNEYIHSGLYSSFTINSLQNPPDAFKAIKTEKLEEPPEDSPPVEEVRTVIRFVTNKTDKHVTRPVVSLPSTSEAAAASAFLASSVSAKISSLMLPNAASISSASPFSSRSPSLSPNSP

SEQ ID NO: 3056 - protein, 100 aa, Synthetic construct
GAKTSSRNDYIHSGLYSSFTLNSLNSSNVKLFKLIKTENPAEKLAEKKSPQEPTPSVIKFVTTPSKKPPVEPVAATISIGPSISPSSEETIQALETLVSP

SEQ ID NO: 3057 - protein, 80 aa, Synthetic construct
AEKLAEKKSPQEPTPSVIKFVTTPSKKPPVEPVAATISIGPSISPSSEETIQALETLVSPKLPSLEAPTSASNVMTAFAT

SEQ ID NO: 3058 - protein, 80 aa, Synthetic construct
VKNEVSLVAEGFLPEDGSGRIVGVQDLLDQESVCVATASGDVILCSLSTQQLECVGSVASGISVMSWSPDQELVLLATGQ

SEQ ID NO: 3059 - protein, 80 aa, Synthetic construct
QSTSEPVAGLGPALAWKPSGSLIASTQDKPNQQDIVFFEKNGLLHGHFTLPFLKDEVKVNDLLWNADSSVLAVWLEDLQR

SEQ ID NO: 3060 - protein, 90 aa, Synthetic construct
VTVFRQTVVPPPMCTYQLLFPHPVNQVTFLAHPQKSNDLAVLDASNQISVYKCGDCPSADPTVKLGAVGGSGFKVCLRTPHLEKRYKIQF

SEQ ID NO: 3061 - protein, 80 aa, Synthetic construct
HLEKRYKIQFENNEDQDVNPLKLGLLTWIEEDVFLAVSHSEFSPRSVIHHLTAASSEMDEEHGQLNVSSSAAVDGVIISL

SEQ ID NO: 3062 - protein, 80 aa, Synthetic construct
EFSPRSVIHHLTAASSEMDEEHGQLNVSSSAAVDGVIISLCCNSKTKSVVLQLADGQIFKYLWESPSLAIKPWKNSGGFP

SEQ ID NO: 3063 - protein, 90 aa, Synthetic construct
EHGQLNVSSSAAVDGVIISLCCNSKTKSVVLQLADGQIFKYLWESPSLAIKPWKNSGGFPVRFPYPCTQTELAMIGEEECVLGLTDRCRF

SEQ ID NO: 3064 - protein, 80 aa, Synthetic construct
LLLTTHSHTCQCFCLRDASFKTLQAGLSSNHVSHGEVLRKVERGSRIVTVVPQDTKLVLQMPRGNLEVVHHRALVLAQIR

SEQ ID NO: 3065 - protein, 80 aa, Synthetic construct
EFRDIQGPGNPQCFSLRTEQGTVLIGSEHGLIEVDPVSREVKNEVSLVAEGFLPEDGSGRIVGVQDLLDQESVCVATASG

SEQ ID NO: 3066 - protein, 80 aa, Synthetic construct
EESSIPKTCVQLWTVGNYHWYLKQSLSFSTCGKSKIVSLMWDPVTPYRLHVLCQGWHYLAYDWHWTTDRSVGDNSSDLSN

SEQ ID NO: 3067 - protein, 80 aa, Synthetic construct
YDHSLGTYDFDLVLMVAEKSQKDPKEYLPFLNTLKKMETNYQRFTIDKYLKRYEKAIGHLSKCGPEYFPECLNLIKDKNL

SEQ ID NO: 3068 - protein, 80 aa, Synthetic construct
GHENWVNAVHWQPVFYKDGVLQQPVRLLSASMDKTMILWAPDEESGVWLEQVRVGEVGGNTLGFYDCQFNEDGSMIIAHA

SEQ ID NO: 3069 - protein, 90 aa, Synthetic construct
ALGLSNKAVFQGDIASQPSDEEELLTSTGFEYQQVAFQPSILTEPPTEDHLLQNTLWPEVQKLYGHGYEIFCVTCNSSKTLLASACKAAK

SEQ ID NO: 3070 - protein, 80 aa, Synthetic construct
PAELMMLTIGDVIKQLIEAHEQGKDIDLNKVKTKTAAKYGLSAQPRLVDIIAAVPPQYRKVLMPKLKAKPIRTASGIAVV

SEQ ID NO: 3071 - protein, 100 aa, Synthetic construct
YFLAEGIVNGHTLLVASAKEDPANILQELPAPLLDDKCKKEFDEDVYNHKTPESNIKMKIAWRYQLLPKMEIGPVSSSRFGHYYDASKRMPQELIEASNW

SEQ ID NO: 3072 - protein, 90 aa, Synthetic construct
HQQQPQQSPLPPGIKPTIQIKQESGVKIITQQVQPSKILPKPVTATLPTSSNSPIMVVSSNGAIMTTKLVTTPTGTQATYTRPTVSPSIG

SEQ ID NO: 3073 - protein, 80 aa, Synthetic construct
TRLPSPKSLVSAPTQILAQFPKQHQQSPKQQLYQVQQQTQQQVAQPSPVSHQQQPQQSPLPPGIKPTIQIKQESGVKIIT

SEQ ID NO: 3074 - protein, 80 aa, Synthetic construct
EAAFVSGFPAAAAAGAGRSLYGGPELVFPEAMNHPALTVHPAHQLGASPLQPPHSFFGAQHRDPLHFYPWVLRNRFFGHR

SEQ ID NO: 3075 - protein, 90 aa, Synthetic construct
FQASDVPQDGLLLHGPFARKPKRIRTAFSPSQLLRLERAFEKNHYVVGAERKQLAGSLSLSETQVKVWFQNRRTKYKRQKLEEEGPESEQ

SEQ ID NO: 3076 - protein, 80 aa, Synthetic construct
HRFQGNDTSPESFLLHNALARKPKRIRTAFSPSQLLRLEHAFEKNHYVVGAERKQLAHSLSLTETQVKVWFQNRRTKFKR

SEQ ID NO: 3077 - protein, 130 aa, Synthetic construct
PQPAPPSPPAAPCLPPLAHHPHLPPHPPPPPPQHLAAPAHQPQPAAQLHRTTNFFIDNILRPDFGCKKEQPPPQLLVAAAARGGAGGGGRVERDRGQTAAGRDPVHPLGTRAPGAASLLCAPDANCGPPD

SEQ ID NO: 3078 - protein, 80 aa, Synthetic construct
SPGASGSSGSGSDGDSVPVSPQPAPPSPPAAPCLPPLAHHPHLPPHPPPPPPQHLAAPAHQPQPAAQLHRTTNFFIDNIL

SEQ ID NO: 3079 - protein, 140 aa, Synthetic construct
EENDPKPGEAAAAVEGQRQPESSPGGGSGGGGGSSPGEADTGRRRALMLPAVLQAPGNHQHPHRITNFFIDNILRPEFGRRKDAGTCCAGAGGGRGGGAGGEGGASGAEGGGGAGGSEQLLGSGSREPRQNPPCAPGAGG

SEQ ID NO: 3080 - protein, 80 aa, Synthetic construct
SSTLLPYGIKSLPLQTSHALGYYPDPTFPAMAGWGGRGSYQRKMAAGLPWTSRTSPTVFSEDQLSKEKVKEEIGSSWIET

SEQ ID NO: 3081 - protein, 80 aa, Synthetic construct
GYYPDPTFPAMAGWGGRGSYQRKMAAGLPWTSRTSPTVFSEDQLSKEKVKEEIGSSWIETPPSIKSLDSNDSGVYTSACK

SEQ ID NO: 3082 - protein, 110 aa, Synthetic construct
QRKMAAGLPWTSRTSPTVFSEDQLSKEKVKEEIGSSWIETPPSIKSLDSNDSGVYTSACKRRRLSPSNSSNENSPSIKCEDINAEEYSKDTSKGMGGYYAGGYYAFYTTP

SEQ ID NO: 3083 - protein, 80 aa, Synthetic construct
SQPAVSIEGQVSNPPSTSSTEVNSQAIAEKQPSQEVKMEAKMEVDQPEPADTQPEDISESKVEDCKMESTETEERSTELK

SEQ ID NO: 3084 - protein, 110 aa, Synthetic construct
EVNSQAIAEKQPSQEVKMEAKMEVDQPEPADTQPEDISESKVEDCKMESTETEERSTELKTEIKEEEDQPSTSATQSSPAPGQSKKKIFKPEELRQALMPTLEALYRQDP

SEQ ID NO: 3085 - protein, 90 aa, Synthetic construct
ETEERSTELKTEIKEEEDQPSTSATQSSPAPGQSKKKIFKPEELRQALMPTLEALYRQDPESLPFRQPVDPQLLGIPDYFDIVKSPMDLS

SEQ ID NO: 3086 - protein, 80 aa, Synthetic construct
YNRKTSRVYKYCSKLSEVFEQEIDPVMQSLGYCCGRKLEFSPQTLCCYGKQLCTIPRDATYYSYQNRYHFCEKCFNEIQG

SEQ ID NO: 3087 - protein, 90 aa, Synthetic construct
GRKMHQICVLHHEIIWPAGFVCDGCLKKSARTRKENKFSAKRLPSTRLGTFLENRVNDFLRRQNHPESGEVTVRVVHASDKTVEVKPGMK

SEQ ID NO: 3088 - protein, 80 aa, Synthetic construct
NECKHHVETRWHCTVCEDYDLCITCYNTKNHDHKMEKLGLGLDDESNNQQAAATQSPGDSRRLSIQRCIQSLVHACQCRN

SEQ ID NO: 3089 - protein, 80 aa, Synthetic construct
LNYLELFHTSIEQEKERNSEDAVMTAVRAWEFWNLKTLQEREARLRLEQEEAELLTYTREDAYSMEYVYEDVDGQTEVMP

SEQ ID NO: 3090 - protein, 80 aa, Synthetic construct
KIRREGKEQKKNILLKQQVPFAKPLPTFAKPTAEPGQDNPEWLISEDWALLQAVKQLLELPLNLTIVSPAHTPNWDLVSD

SEQ ID NO: 3091 - protein, 80 aa, Synthetic construct
LPIPPSQPAQLALHVPTPGKVQVQASQLSSLPQMVASTRLPVDPAPPCPRPLPTSSTSSLAPVSGSGPGPSPARSSPVNR

SEQ ID NO: 3092 - protein, 80 aa, Synthetic construct
RRLPKLQEAPRPKSHWDYLLEEMQWMATDFAQERRWKVAAAKKLVRTVVRHHEEKQLREERGKKEEQSRLRRIAASTARE

SEQ ID NO: 3093 - protein, 80 aa, Synthetic construct
EGNWGPHLVVVRSCNILKWELELKRWCPGLKILSYIGSHRELKAKRQEWAEPNSFHVCITSYTQFFRGLTAFTRVRWKCL

SEQ ID NO: 3094 - protein, 140 aa, Synthetic construct
EVFYELAHELPLPHSVSSHLDKASIMRLAISFLRTHKLLSSVCSENESEAEADQQMDNLYLKALEGFIAVVTQDGDMIFLSENISKFMGLTQVELTGHSIFDFTHPCDHEEIRENLSLKNGSGFGKKSKDMSTERDFFMR

SEQ ID NO: 3095 - protein, 80 aa, Synthetic construct
LLGRSAYEFYHALDSENMTKSHQNLCTKGQVVSGQYRMLAKHGGYVWLETQGTVIYNPRNLQPQCIMCVNYVLSEIEKND

SEQ ID NO: 3096 - protein, 90 aa, Synthetic construct
QGTVIYNPRNLQPQCIMCVNYVLSEIEKNDVVFSMDQTESLFKPHLMAMNSIFDSSGKGAVSEKSNFLFTKLKEEPEELAQLAPTPGDAI

SEQ ID NO: 3097 - protein, 80 aa, Synthetic construct
LFKPHLMAMNSIFDSSGKGAVSEKSNFLFTKLKEEPEELAQLAPTPGDAIISLDFGNQNFEESSAYGKAILPPSQPWATE

SEQ ID NO: 3098 - protein, 90 aa, Synthetic construct
VSEKSNFLFTKLKEEPEELAQLAPTPGDAIISLDFGNQNFEESSAYGKAILPPSQPWATELRSHSTQSEAGSLPAFTVPQAAAPGSTTPS

SEQ ID NO: 3099 - protein, 80 aa, Synthetic construct
EAEEDNDPDGPFAFRRKAGCQYYAPHLDQTGNWPWTSPKDGGLGDVRYRYCLTTLTVPQRCIGFARRRVGRGGRVLLDRA

SEQ ID NO: 3100 - protein, 80 aa, Synthetic construct
QPMKPTYAIPIIPITNSSQFKHQEAMDVKEFKVNKQDKADLIRPKRKYEKKPKVLPSSAAATPQQTSPAALPVFNAKDLN

SEQ ID NO: 3101 - protein, 80 aa, Synthetic construct
IHIQPFNLDNEQPDYDMDSEDETLLNRLNRKMEIKPLQFEIMIDRLEKASSNQLVTLQEAKLLLNEDDYLIKAVYDYWVR

SEQ ID NO: 3102 - protein, 90 aa, Synthetic construct
KMEIKPLQFEIMIDRLEKASSNQLVTLQEAKLLLNEDDYLIKAVYDYWVRKRKNCRGPSLIPQIKQEKRDGSTNNDPYVAFRRRTEKMQT

SEQ ID NO: 3103 - protein, 80 aa, Synthetic construct
IPQIKQEKRDGSTNNDPYVAFRRRTEKMQTRKNRKNDEASYEKMLKLRREFSRAITILEMIKRREKTKRELLHLTLEVVE

SEQ ID NO: 3104 - protein, 80 aa, Synthetic construct
LLLALLPPGAASTQVCTGTDMKLRLPASPETHLDMLRHLYQGCQVVQGNLELTYLPTNASLSFLQDIQEVQGYVLIAHNQ

SEQ ID NO: 3105 - protein, 80 aa, Synthetic construct
QGCQVVQGNLELTYLPTNASLSFLQDIQEVQGYVLIAHNQVRQVPLQRLRIVRGTQLFEDNYALAVLDNGDPLNNTTPVT

SEQ ID NO: 3106 - protein, 100 aa, Synthetic construct
LPTDCCHEQCAAGCTGPKHSDCLACLHFNHSGICELHCPALVTYNTDTFESMPNPEGRYTFGASCVTACPYNYLSTDVGSCTLVCPLHNQEVTAEDGTQR

SEQ ID NO: 3107 - protein, 80 aa, Synthetic construct
LGSGLALIHHNTHLCFVHTVPWDQLFRNPHQALLHTANRPEDECVGEGLACHQLCARGHCWGPGPTQCVNCSQFLRGQEC

SEQ ID NO: 3108 - protein, 80 aa, Synthetic construct
LVHRDLAARNVLVKSPNHVKITDFGLARLLDIDETEYHADGGKVPIKWMALESILRRRFTHQSDVWSYGVTVWELMTFGA

SEQ ID NO: 3109 - protein, 80 aa, Synthetic construct
TVCAEQCDGRCYGPYVSDCCHRECAGGCSGPKDTDCFACMNFNDSGACVTQCPQTFVYNPTTFQLEHNFNAKYTYGAFCV

SEQ ID NO: 3110 - protein, 80 aa, Synthetic construct
MVMVKCWMIDADSRPKFKELAAEFSRMARDPQRYLVIQGDDRMKLPSPNDSKFFQNLLDEEDLEDMMDAEEYLVPQAFNI

SEQ ID NO: 3111 - protein, 80 aa, Synthetic construct
EDSSTQRYSADPTVFAPERSPRGELDEEGYMTPMRDKPKQEYLNPVEENPFVSRRKNGDLQALDNPEYHNASNGPPKAED

SEQ ID NO: 3112 - protein, 120 aa, Synthetic construct
KSDIPMDLFDFYEQMDKDEEEEEETQTVSFEVKQEMIEELQKRCIHLEYPLLAEYDFRNDSVNPDINIDLKPTAVLRPYQEKSLRKMFGNGRARSGVIVLPCGAGKSLVGVTAACTVRKR

SEQ ID NO: 3113 - protein, 80 aa, Synthetic construct
YAIRLNKPYIYGPTSQGERMQILQNFKHNPKINTIFISKVGDTSFDLPEANVLIQISSHGGSRRQEAQRLGRVLRAKKGM

SEQ ID NO: 3114 - protein, 90 aa, Synthetic construct
EEGYRREISSSPESCPEEIKHEEFDVNLSSDAAFGILKEPLTIIHPLLGCSDPYALTRVLHEVEPRYVVLYDAELTFVRQLEIYRASRPG

SEQ ID NO: 3115 - protein, 80 aa, Synthetic construct
AEDSLHEWQDINLEELETLESNLLAQQNSLKAQKQQQERIAATVTGQMFLESQELLRLFGIPYIQAPMEAEAQCAILDLT

SEQ ID NO: 3116 - protein, 110 aa, Synthetic construct
MPNEGIPHSSQTQEQDCLQSQPVSNNEEMAIKQESGGDGEVEEYLSFRSVGDGLSTSAVGCASAAPRRGPALLHIDRHQIQAVEPSAQALELQGLGVDVYDQDVLEQGVL

SEQ ID NO: 3117 - protein, 90 aa, Synthetic construct
TSCTTSLRQINKIIEQLSPQAATSRDINRKLDSVKRQKYNKEQQLKKITAKQKHLQAILGGAEVKIELDHASLEEDAEPGPSSLGSMLMP

SEQ ID NO: 3118 - protein, 110 aa, Synthetic construct
LDSVKRQKYNKEQQLKKITAKQKHLQAILGGAEVKIELDHASLEEDAEPGPSSLGSMLMPVQETAWEELIRTGQMTPFGTQIPQKQEKKPRKIMLNEASGFEKYLADQAK

SEQ ID NO: 3119 - protein, 80 aa, Synthetic construct
GLPDDELEEDQFGYWKRSGKMIVVESLLKIWHKQGQRVLLFSQSRQMLDILEVFLRAQKYTYLKMDGTTTIASRQPLITR

SEQ ID NO: 3120 - protein, 80 aa, Synthetic construct
EASALLPTTEHDDLLVEMRNFIAFQAHTDGQASTREILQEFESKLSASQSCVFRELLRNLCTFHRTSGGEGIWKLKPEYC

SEQ ID NO: 3121 - protein, 140 aa, Synthetic construct
SSASSSSSSSSSPFKFKLQPPPLGRRQRAAGEKAVAGADKSGGSAGGLAEGAGALAPPPPPPQIKVEPISEGESEEVEVTDISDEDEEDGEVFKTPRAPPAPPKPEPGEAPGASQCMPLKLRFKRRWSEDCRLEGGGGPA

SEQ ID NO: 3122 - protein, 100 aa, Synthetic construct
EVFKTPRAPPAPPKPEPGEAPGASQCMPLKLRFKRRWSEDCRLEGGGGPAGGFEDEGEDKKVRGEGPGEAGGPLTPRRVSSDLQHATAQLAQLSLEHRDS

SEQ ID NO: 3123 - protein, 100 aa, Synthetic construct
EMTASSSSDYGQTSKMSPRVPQQDWLSQPPARVTIKMECNPSQVNGSRNSPDECSVAKGGKMVGSPDTVGMNYGSYMEEKHMPPPNMTTNERRVIVPADP

SEQ ID NO: 3124 - protein, 80 aa, Synthetic construct
HGKRYAYKFDFHGIAQALQPHPPESSLYKYPSDLPYMGSYHAHPQKMNFVAPHPPALPVTSSSFFAAPNPYWNSPTGGIY

SEQ ID NO: 3125 - protein, 80 aa, Synthetic construct
LHYLRETPLPHLTSDDVDKALQNSPRLMHARNTGGAAFIFPNTSVYPEATQRITTRPDLPYEPPRRSAWTGHGHPTPQSK

SEQ ID NO: 3126 - protein, 80 aa, Synthetic construct
ILPLEHGSIYIPSSYVDSHHEYPAMTFYSPAVMNYSIPSNVTNLEGGPGRQTTSPNVLWPTPGHLSPLVVHRQLSHLYAE

SEQ ID NO: 3127 - protein, 80 aa, Synthetic construct
ISRPSAPFTEASMMMSLTKLADKELVHMISWAKKIPGFVELSLFDQVRLLESCWMEVLMMGLMWRSIDHPGKLIFAPDLV

SEQ ID NO: 3128 - protein, 90 aa, Synthetic construct
SSQVVGIEPLYIKAEPASPDSPKGSSETETEPPVALAPGPAPTRCLPGHKEEEDGEGAGPGEQGGGKLVLSSLPKRLCLVCGDVASGYHY

SEQ ID NO: 3129 - protein, 110 aa, Synthetic construct
EPPVALAPGPAPTRCLPGHKEEEDGEGAGPGEQGGGKLVLSSLPKRLCLVCGDVASGYHYGVASCEACKAFFKRTIQGSIEYSCPASNECEITKRRRKACQACRFTKCLR

SEQ ID NO: 3130 - protein, 110 aa, Synthetic construct
DVSELCIPDPLGYHNQLLNRMSSDDRHLGSSCGSFIKTEPSSPSSGIDALSHHSPSGSSDASGGFGLALGTHANGLDSPPMFAGAGLGGTPCRKSYEDCASGIMEDSAIK

SEQ ID NO: 3131 - protein, 100 aa, Synthetic construct
MFAGAGLGGTPCRKSYEDCASGIMEDSAIKCEYMLNAIPKRLCLVCGDIASGYHYGVASCEACKAFFKRTIQGNIEYSCPATNECEITKRRRKSCQACRF

SEQ ID NO: 3132 - protein, 80 aa, Synthetic construct
YRAILQLVRRYKKLKVEKEEFVTLKALALANSDSMYIEDLEAVQKLQDLLHEALQDYELSQRHEEPWRTGKLLLTLPLLR

SEQ ID NO: 3133 - protein, 90 aa, Synthetic construct
SNKDRHIDSSCSSFIKTEPSSPASLTDSVNHHSPGGSSDASGSYSSTMNGHQNGLDSPPLYPSAPILGGSGPVRKLYDDCSSTIVEDPQT

SEQ ID NO: 3134 - protein, 100 aa, Synthetic construct
YPSAPILGGSGPVRKLYDDCSSTIVEDPQTKCEYMLNSMPKRLCLVCGDIASGYHYGVASCEACKAFFKRTIQGNIEYSCPATNECEITKRRRKSCQACR

SEQ ID NO: 3135 - protein, 110 aa, Synthetic construct
QDREGGGGHEPEQQQEEPPLTKPEQQQEEPPLLELKQEQEEPPQTTVEGPQPAEGPQTAEGPQPPERKRRRRTAFTQFQLQELENFFDESQYPDVVARERLAARLNLTED

SEQ ID NO: 3136 - protein, 90 aa, Synthetic construct
KAAVDLKPTLTIIKTEKVDLELFPSPDMECADVPLLTPSSKEMMSQALKATFSGFTKEQQRLGIPKDPRQWTETHVRDWVMWAVNEFSLK

SEQ ID NO: 3137 - protein, 90 aa, Synthetic construct
CFLELAPDFVGDILWEHLEILQKEDVKPYQVNGVNPAYPESRYTSDYFISYGIEHAQCVPPSEFSEPSFITESYQTLHPISSEELLSLKY

SEQ ID NO: 3138 - protein, 80 aa, Synthetic construct
YGIEHAQCVPPSEFSEPSFITESYQTLHPISSEELLSLKYENDYPSVILRDPLQTDTLQNDYFAIKQEVVTPDNMCMGRT

SEQ ID NO: 3139 - protein, 90 aa, Synthetic construct
TESYQTLHPISSEELLSLKYENDYPSVILRDPLQTDTLQNDYFAIKQEVVTPDNMCMGRTSRGKLGGQDSFESIESYDSCDRLTQSWSSQ

SEQ ID NO: 3140 - protein, 90 aa, Synthetic construct
DPLQTDTLQNDYFAIKQEVVTPDNMCMGRTSRGKLGGQDSFESIESYDSCDRLTQSWSSQSSFNSLQRVPSYDSFDSEDYPAALPNHKPK

SEQ ID NO: 3141 - protein, 140 aa, Synthetic construct
CNEKPTNVRKRKFINRDLAHDSEELFQDLSQLQETWLAEAQVPDNDEQFVPDYQAESLAFHGLPLKIKKEPHSPCSEISSACSQEQPFKFSYGEKCLYNVSAYDQKPQVGMRPSNPPTPSSTPVSPLHHASPNSTHTPKP

SEQ ID NO: 3142 - protein, 80 aa, Synthetic construct
DRAFPAHLPPSQSIPDSSYPMDHRFRRQLSEPCNSFPPLPTMPREGRPMYQRQMSEPNIPFPPQGFKQEYHDPVYEHNTM

SEQ ID NO: 3143 - protein, 160 aa, Synthetic construct
MDHRFRRQLSEPCNSFPPLPTMPREGRPMYQRQMSEPNIPFPPQGFKQEYHDPVYEHNTMVGSAASQSFPPPLMIKQEPRDFAYDSEVPSCHSIYMRQEGFLAHPSRTEGCMFEKGPRQFYDDTCVVPEKFDGDIKQEPGMYREGPTYQRRGSLQLWQFL

SEQ ID NO: 3144 - protein, 90 aa, Synthetic construct
YDDTCVVPEKFDGDIKQEPGMYREGPTYQRRGSLQLWQFLVALLDDPSNSHFIAWTGRGMEFKLIEPEEVARRWGIQKNRPAMNYDKLSR

SEQ ID NO: 3145 - protein, 80 aa, Synthetic construct
EKGIMQKVAGERYVYKFVCDPEALFSMAFPDNQRPLLKTDMERHINEEDTVPLSHFDESMAYMPEGGCCNPHPYNEGYVY

SEQ ID NO: 3146 - protein, 100 aa, Synthetic construct
GLEGAKLGFCFPDLALQGDTPTATAETCWKGTSSSLASFPQLDWGSALLHPEVPWGAEPDSQALPWSGDWTDMACTAWDSWSGASQTLGPAPLGPGPIPA

SEQ ID NO: 3147 - protein, 80 aa, Synthetic construct
DPHSPFAVSPIPGRGGVLNVPISPALSLTPTIFSYSPSPGLSPFTSSSCFSFNPEEMKHYLHSQACSVFNYHLSPRTFPR

SEQ ID NO: 3148 - protein, 90 aa, Synthetic construct
YHLSPRTFPRYPGLMVPPLQCQMHPEESTQFSIKLQPPPVGRKNRERVESSEESAPVTTPTMASIPPRIKVEPASEKDPESLRQSAREKE

SEQ ID NO: 3149 - protein, 110 aa, Synthetic construct
FSIKLQPPPVGRKNRERVESSEESAPVTTPTMASIPPRIKVEPASEKDPESLRQSAREKEEHTQEEGTVPSRTIEEEKGTIFARPAAPPIWPSVPISTPSGEPLEVTEDS

SEQ ID NO: 3150 - protein, 80 aa, Synthetic construct
WPSVPISTPSGEPLEVTEDSEDRPGKEPSAPEKKEDALMPPKLRLKRRWNDDPEARELSKSGKFLWNGSGPQGLATAAAD

SEQ ID NO: 3151 - protein, 80 aa, Synthetic construct
LIGPLGKLMDPGSLPPLDSEDLFQDLSHFQETWLAEAQVPDSDEQFVPDFHSENLAFHSPTTRIKKEPQSPRTDPALSCS

SEQ ID NO: 3152 - protein, 120 aa, Synthetic construct
DLFQDLSHFQETWLAEAQVPDSDEQFVPDFHSENLAFHSPTTRIKKEPQSPRTDPALSCSRKPPLPYHHGEQCLYSSAYDPPRQIAIKSPAPGALGQSPLQPFPRAEQRNFLRSSGTSQP

SEQ ID NO: 3153 - protein, 170 aa, Synthetic construct
FLRSSGTSQPHPGHGYLGEHSSVFQQPLDICHSFTSQGGGREPLPAPYQHQLSEPCPPYPQQSFKQEYHDPLYEQAGQPAVDQGGVNGHRYPGAGVVIKQEQTDFAYDSDVTGCASMYLHTEGFSGPSPGDGAMGYGYEKPLRPFPDDVCVVPEKFEGDIKQEGVGAFRE

SEQ ID NO: 3154 - protein, 80 aa, Synthetic construct
CRGRPVIDRKRKFLDTDLAHDSEELFQDLSQLQEAWLAEAQVPDDEQFVPDFQSDNLVLHAPPPTKIKRELHSPSSELSS

SEQ ID NO: 3155 - protein, 110 aa, Synthetic construct
QLQEAWLAEAQVPDDEQFVPDFQSDNLVLHAPPPTKIKRELHSPSSELSSCSHEQALGANYGEKCLYNYCAYDRKPPSGFKPLTPPTTPLSPTHQNPLFPPPQATLPTSG

SEQ ID NO: 3156 - protein, 170 aa, Synthetic construct
QMPKMMPENQYPSEQRFQRQLSEPCHPFPPQPGVPGDNRPSYHRQMSEPIVPAAPPPPQGFKQEYHDPLYEHGVPGMPGPPAHGFQSPMGIKQEPRDYCVDSEVPNCQSSYMRGGYFSSSHEGFSYEKDPRLYFDDTCVVPERLEGKVKQEPTMYREGPPYQRRGSLQLW

SEQ ID NO: 3157 - protein, 80 aa, Synthetic construct
PERLEGKVKQEPTMYREGPPYQRRGSLQLWQFLVTLLDDPANAHFIAWTGRGMEFKLIEPEEVARRWGIQKNRPAMNYDK

SEQ ID NO: 3158 - protein, 80 aa, Synthetic construct
EKGIMQKVAGERYVYKFVCDPDALFSMAFPDNQRPFLKAESECHLSEEDTLPLTHFEDSPAYLLDMDRCSSLPYAEGFAY

SEQ ID NO: 3159 - protein, 80 aa, Synthetic construct
SETPAQCSIKQERISYTPPESPVPSYASSTPLHVPVPRALRMEEDSIRLPAHLRLQPIYWSRDDVAQWLKWAENEFSLRP

SEQ ID NO: 3160 - protein, 90 aa, Synthetic construct
INLLGEGGICKLPGRLRIQPALWSREDVLHWLRWAEQEYSLPCTAEHGFEMNGRALCILTKDDFRHRAPSSGDVLYELLQYIKTQRRALV

SEQ ID NO: 3161 - protein, 90 aa, Synthetic construct
MDTRRGHLLQPPDPGLTSNFGHLDDPGLARWTPGKEESLNLCHCAELGCRTQGVCSFPAMPQAPIDGRIADCRLLWDYVYQLLLDTRYEP

SEQ ID NO: 3162 - protein, 90 aa, Synthetic construct
QGTLACSASDQMRRYRTAFTREQIARLEKEFYRENYVSRPRRCELAAALNLPETTIKVWFQNRRMKDKRQRLAMTWPHPADPAFYTYMMS

SEQ ID NO: 3163 - protein, 100 aa, Synthetic construct
QNRRMKDKRQRLAMTWPHPADPAFYTYMMSHAAAAGGLPYPFPSHLPLPYYSPVGLGAASAASAAASPFSGSLRPLDTFRVLSQPYPRPELLCAFRHPPL

SEQ ID NO: 3164 - protein, 80 aa, Synthetic construct
SGGSAALGGSGSGADQVRRYRTAFTREQIARLEKEFYRENYVSRPRRCELAAALNLPETTIKVWFQNRRMKDKRQRLAMS

SEQ ID NO: 3165 - protein, 100 aa, Synthetic construct
IKVWFQNRRMKDKRQRLAMSWPHPADPSFYTYMMTHAAATGSLPYPFHSHVPLHYYPHVGVTAAAAAAAASGAAAAASSPFATSIRPLDTFRALSHPYSR

SEQ ID NO: 3166 - protein, 110 aa, Synthetic construct
GSMPLKNSFRGTIRKEDVRATEKDKVEIYKSFRPGDIVLAKVISLGDAQSNYLLTTAENELGVVVAHSESGIQMVPISWCEMQCPKTHTKEFRKVARVQPARVQPEFLQT

SEQ ID NO: 3167 - protein, 80 aa, Synthetic construct
DFYRSFPGFQAFCETQGDRLLQCMSRVMQYHGCRSNIKDRSKVTELEDKFDLLVDANDVILERVGILLDEASGVNKNQQP

SEQ ID NO: 3168 - protein, 80 aa, Synthetic construct
QDMFAHPYQYELNHFTPADAVLQKPQPQLYRPIEETPCHFISSLDELVELNEKLLNCQEFAVDLEHHSYRSFLGLTCLMQ

SEQ ID NO: 3169 - protein, 80 aa, Synthetic construct
DAEGPGGAVERPLSLNARACSRVRVVCGPGLRRCGDRLLVTKCGRLRHKEPGSGSGGGVYWVDSQQKRYVPVKGDHVIGI

SEQ ID NO: 3170 - protein, 80 aa, Synthetic construct
SAGFVDGTALADLSHVEEAAGGPQLALALLPASGQIALLEMDARLHEDHLERVLEAAAQAARDVHTLLDRVVRQHVREAS

SEQ ID NO: 3171 - protein, 80 aa, Synthetic construct
PDGSASFLQGDTSVLAGVYGPAEVKVSKEIFNKATLEVILRPKIGLPGVAEKSRERLIRNTCEAVVLGTLHPRTSITVVL

SEQ ID NO: 3172 - protein, 80 aa, Synthetic construct
GVKAEMGTPKLEKPNEGYLEFFVDCSASATPEFEGRGGDDLGTEIANTLYRIFNNKSSVDLKTLCISPREHCWVLYVDVL

SEQ ID NO: 3173 - protein, 80 aa, Synthetic construct
VDATLQEEACSLASLLVSVTSKGVVTCMRKVGKGSLDPESIFEMMETGKRVGKVLHASLQSVVHKEESLGPKRQKVGFLG

SEQ ID NO: 3174 - protein, 80 aa, Synthetic construct
GVKAEFAAPSTDAPDKGYVVPNVDLPPLCSSRFRSGPPGEEAQVASQFIADVIENSQIIQKEDLCISPGKLVWVLYCDLI

SEQ ID NO: 3175 - protein, 120 aa, Synthetic construct
MEMQDLTSPHSRLSGSSESPSGPKLGNSHINSNSMTPNGTEVKTEPMSSSETASTTADGSLNNFSGSAIGSSSFSPRPTHQFSPPQIYPSNRPYPHILPTPSSQTMAAYGQTQFTTGMQQ

SEQ ID NO: 3176 - protein, 150 aa, Synthetic construct
SSSFSPRPTHQFSPPQIYPSNRPYPHILPTPSSQTMAAYGQTQFTTGMQQATAYATYPQPGQPYGISSYGALWAGIKTEGGLSQSQSPGQTGFLSYGTSFSTPQPGQAPYSYQMQGSSFTTSSGIYTGNNSLTNSSGFNSSQQDYPSYPS

SEQ ID NO: 3177 - protein, 80 aa, Synthetic construct
AAATSANLCLATGVRGGVDWMRKLAFRYRRVKEIYNTYKNNVGGLLGPAKREAWLQLRAEIEALTDSWLTLALKALSLIH

SEQ ID NO: 3178 - protein, 140 aa, Synthetic construct
SAPLRVSQLFSRSCPRVLPRQPSTAMAAYGQTQYSAGIQQATPYTAYPPPAQAYGIPSYSIKTEDSLNHSPGQSGFLSYGSSFSTSPTGQSPYTYQMHGTTGFYQGGNGLGNAAGFGSVHQDYPSYPGFPQSQYPQYYGS

SEQ ID NO: 3179 - protein, 80 aa, Synthetic construct
PHRASDGKLRGRSKRSSDPSPAGDNEIERVFVWDLDETIIIFHSLLTGTFASRYGKDTTTSVRIGLMMEEMIFNLADTHL

SEQ ID NO: 3180 - protein, 80 aa, Synthetic construct
HGGVDWMRKLAFRYRRVKEMYNTYKNNVGGLIGTPKRETWLQLRAELEALTDLWLTHSLKALNLINSRPNCVNVLVTTTQ

SEQ ID NO: 3181 - protein, 80 aa, Synthetic construct
KPSVMAPAPAAQRLSSGDPSTSPSLSQTTPSKDTDDQSRKNMTSKNRGKRKADATSSQDSELERVFLWDLDETIIIFHSL

SEQ ID NO: 3182 - protein, 80 aa, Synthetic construct
QSRKNCVNVLITTTQLVPALAKVLLYGLGEIFPIENIYSATKIGKESCFERIVSRFGKKVTYVVIGDGRDEEIAAKQHNM

SEQ ID NO: 3183 - protein, 100 aa, Synthetic construct
ENMTVLNTADWLLSCNTPSSATMSLLAVKTEPLNSSETTATTGDGALDTFTGSVITSSGYSPRSAHQYSPQLYPSKPYPHILSTPAAQTMSAYAGQTQYS

SEQ ID NO: 3184 - protein, 140 aa, Synthetic construct
SPRSAHQYSPQLYPSKPYPHILSTPAAQTMSAYAGQTQYSGMQQPAVYTAYSQTGQPYSLPTYDLGVMLPAIKTESGLSQTQSPLQSGCLSYSPGFSTPQPGQTPYSYQMPGSSFAPSSTIYANNSVSNSTNFSGSQQDY

SEQ ID NO: 3185 - protein, 80 aa, Synthetic construct
PQSPLAQVQERGETPPRSQHVSLSSYSSYKTCVSSLCVNKEERGMKIYYMQVQMNKGVAVSWETEETLESLEKQPRMEEV

SEQ ID NO: 3186 - protein, 80 aa, Synthetic construct
SDNIEKNTDSNLQTSTSFEPHFKKKKVSARRYNEDYLKYGFIKCEKPFENDRPQCVICNNILANESLKPSKLKRHLETQH

SEQ ID NO: 3187 - protein, 80 aa, Synthetic construct
FIKCEKPFENDRPQCVICNNILANESLKPSKLKRHLETQHAELIDKPLEYFQRKKKDIKLSTQFLSCSTAVSEKALLSSY

SEQ ID NO: 3188 - protein, 80 aa, Synthetic construct
MTGKHSRVIKKLLEVTNNGAVWNHCFIHREGLASREIPQNLMEVLKNAVKVVNFIKGSSLNSRLLETFCSEIGTNHTHLL

SEQ ID NO: 3189 - protein, 80 aa, Synthetic construct
RGGRGGRGGFGGGRGRGGGFRGRGRGGGGGGGGGGGGGRGGGGFHSGGNRGRGRGGKRGNQSGKNVMVEPHRHEGVFICR

SEQ ID NO: 3190 - protein, 80 aa, Synthetic construct
EFSHRSGRDLINLAKKRTNIIPVIEDARHPHKYRMLIAMVDVIFADVAQPDQTRIVALNAHTFLRNGGHFVISIKANCID

SEQ ID NO: 3191 - protein, 140 aa, Synthetic construct
DPYRAVVKVSTCWEGPWQGRTLVPPGRPRGARDSRSLQKTWVGVAPAPLSASILSQKPGRWCAVHVQIAWQIYRHQQKIKEMQLDPHKLEVGAKLDLFGRPPAPGVFAGFHYPQDLARPLFPSTGAAHPASNPFGPSAHP

SEQ ID NO: 3192 - protein, 80 aa, Synthetic construct
PATPAGHPVSGLLLRAQSELGRSGAPAEREAEPRVKESRSPAKEEAAKMPARASPPHSKAAPGDVKVKEERGEDEASEPP

SEQ ID NO: 3193 - protein, 110 aa, Synthetic construct
GRSGAPAEREAEPRVKESRSPAKEEAAKMPARASPPHSKAAPGDVKVKEERGEDEASEPPAGGLHPAPLQLGLGRERLGAPGFAWEPFRGLELPRRAFPAAAPAPGSAAL

SEQ ID NO: 3194 - protein, 90 aa, Synthetic construct
REAARDARAQSPSSGDEPEPSPGKENAGLRGAPPRGAAPAPRTARPPRRRRRESSSQEEEVIDGFAIASFSTLEALEKDMALKPHERKEK

SEQ ID NO: 3195 - protein, 90 aa, Synthetic construct
PRTARPPRRRRRESSSQEEEVIDGFAIASFSTLEALEKDMALKPHERKEKWERRLIKKPRESETCPPAEPSENRRPLEAGSPGQDLEPAC

SEQ ID NO: 3196 - protein, 80 aa, Synthetic construct
PPAPHRHTPQPPPPQPRGLLPTHVPASLGAFAGHSQAAANGLHGLSRSSSAPLGLGKHVSLSPHGPGPHLSTSHLALRSQ

SEQ ID NO: 3197 - protein, 90 aa, Synthetic construct
GMKVPGKGESGPSALLTPPMSSSSRGPGAGARRRRTRCRRCRACVRTECGDCHFCRDMKKFGGPGRMKQSCLLRQCTAPVLPHTAVCLLC

SEQ ID NO: 3198 - protein, 110 aa, Synthetic construct
RVLNPSQAFSSCHPGLPPENWEKPKPPLASAEGPAVPSPSPQREKLERFKRMCQLLERVPDTSSSSSDSDSDSDSSGTSLSEDEAPGEARNGRRPARGSSGEKENRGGRR

SEQ ID NO: 3199 - protein, 80 aa, Synthetic construct
GEAGKEDTVEGEEEKFGLSLMECTICNEIVHPGCLKMGKAEGVINAEIPNCWECPRCTQEGRTSKDSGEGPGRRRADNGE

SEQ ID NO: 3200 - protein, 80 aa, Synthetic construct
GRTSKDSGEGPGRRRADNGEEGASLGSGWKLTEEPPLPPPPPRRKGPLPAGPPPEDVPGPPKRKEREAGNEPPTPRKKVK

SEQ ID NO: 3201 - protein, 90 aa, Synthetic construct
RGRGVSLLGRPKRKRVITYAQRQAANIRERKRMFNLNEAFDQLRRKVPTFAYEKRLSRIETLRLAIVYISFMTELLESCELESCEKKESG

SEQ ID NO: 3202 - protein, 100 aa, Synthetic construct
DSSCHNATTKMLATAPARGNMMSTSKPLAFSIERIMARTPEPKALPVPHFLQGALPKGEPKHSLHLNSSIPCMIPFVPVAYDTSPKAGVTGSEPRKASLE

SEQ ID NO: 3203 - protein, 80 aa, Synthetic construct
QEKPHKCNQCGKAFNRSSTLNTHTRIHAGYKPFVCEFCGKGFHQKGNYKNHKLTHSGEKQFKCNICNKAFHQVYNLTFHM

SEQ ID NO: 3204 - protein, 100 aa, Synthetic construct
ASSASLETMVPPACPRAGASPATSKTLAFSIERIMAKTSEPRAPFEPRPGALEADGSQGKKLLNLCSPLPCMIPLQPLGYEVPSKTLLSYSELWKSSLRA

SEQ ID NO: 3205 - protein, 80 aa, Synthetic construct
GVCCKAELGLAPSALPAGRVIKPQVINQAVGLPASGSLYYFNYLDSTAYPPSELLSGHLFPSGLLNAQAPAALAAHPKLF

SEQ ID NO: 3206 - protein, 120 aa, Synthetic construct
AVCRLKRLPSGGYSSTENLQLVLERRRVANAKERERIKNLNRGFARLKALVPFLPQSRKPSKVDILKGATEYIQVLSDLLEGAKDSKKQDPDEQSYSNNSSESHTSSARQLSRNITQHIS

SEQ ID NO: 3207 - protein, 100 aa, Synthetic construct
YGQPHKINPLPPQQEWINQPVRVNVKREYDHMNGSRESPVDCSVSKCSKLVGGGESNPMNYNSYMDEKNGPPPPNMTTNERRVIVPADPTLWTQEHVRQW

SEQ ID NO: 3208 - protein, 140 aa, Synthetic construct
LALPEGLGEPQGPEGPGGRVEEPLEGVGPWQCPEEPEPTPGLVLSKPALEEEEAPRALSLLSLPPKKRSILGLGQARPLEFLRTCYGGSFLVHESFLYKREKAVGDKVYWTCRDHALHGCRSRAITQGQRVTVMRGHCHQ

SEQ ID NO: 3209 - protein, 120 aa, Synthetic construct
DLTGGLPEVATPESEEAFTLPLLNDPEPKPSVEPVKSISSMELKTEPFDDFLFPASSRPSGSETARSVPDMDLSGSFYAADWEPLHSGSLGMGPMATELEPLCTPVVTCTPSCTAYTSSF

SEQ ID NO: 3210 - protein, 110 aa, Synthetic construct
SGNGGGYGGPAQPPAAAQAAQQKFHLVPSINTMSGSQELQWMVQPHFLGPSSYPRPLTYPQYSPPQPRPGVIRALGPPPGVRRRPCEQISPEEEERRRVRRERNKLAAAK

SEQ ID NO: 3211 - protein, 130 aa, Synthetic construct
GQQKFRVDMPGSGSAFIPTINAITTSQDLQWMVQPTVITSMSNPYPRSHPYSPLPGLASVPGHMALPRPGVIKTIGTTVGRRRRDEQLSPEEEEKRRIRRERNKLAAAKCRNRRRELTEKLQAETEELEE

SEQ ID NO: 3212 - protein, 100 aa, Synthetic construct
LQAETEELEEEKSGLQKEIAELQKEKEKLEFMLVAHGPVCKISPEERRSPPAPGLQPMRSGGGSVGAVVVKQEPLEEDSPSSSSAGLDKAQRSVIKPISI

SEQ ID NO: 3213 - protein, 100 aa, Synthetic construct
KISPEERRSPPAPGLQPMRSGGGSVGAVVVKQEPLEEDSPSSSSAGLDKAQRSVIKPISIAGGFYGEEPLHTPIVVTSTPAVTPGTSNLVFTYPSVLEQE

SEQ ID NO: 3214 - protein, 80 aa, Synthetic construct
LGTVKMEGHETSDWNSYYADTQEAYSSVPVSNMNSGLGSMNSMNTYMTMNTMTTSGNMTPASFNMSYANPGLGAGLSPGA

SEQ ID NO: 3215 - protein, 90 aa, Synthetic construct
PHYSFNHPFSINNLMSSSEQQHKLDFKAYEQALQYSPYGSTLPASLPLGSASVTTRSPIEPSALEPAYYQGVYSRPVLNTVYSRPVLNTS

SEQ ID NO: 3216 - protein, 80 aa, Synthetic construct
AMNSMTAAGVTAMGTALSPSGMGAMGAQQAASMNGLGPYAAAMNPCMSPMAYAPSNLGRSRAGGGGDAKTFKRSYPHAKP

SEQ ID NO: 3217 - protein, 80 aa, Synthetic construct
LGAVKMEGHEPSDWSSYYAEPEGYSSVSNMNAGLGMNGMNTYMSMSAAAMGSGSGNMSAGSMNMSSYVGAGMSPSLAGMS

SEQ ID NO: 3218 - protein, 80 aa, Synthetic construct
FNHPFSINNLMSSEQQHHHSHHHHQPHKMDLKAYEQVMHYPGYGSPMPGSLAMGPVTNKTGLDASPLAADTSYYQGVYSR

SEQ ID NO: 3219 - protein, 80 aa, Synthetic construct
LGSVKMEAHDLAEWSYYPEAGEVYSPVTPVPTMAPLNSYMTLNPLSSPYPPGGLPASPLPSGPLAPPAPAAPLGPTFPGL

SEQ ID NO: 3220 - protein, 100 aa, Synthetic construct
ASGTHLPQMPAAAYNLGGVAQPSGFKHPFAIENIIAREYKMPGGLAFSAMQPVPAAYPLPNQLTTMGSSLGTGWPHVYGSAGMIDSATPISMASGDYSAY

SEQ ID NO: 3221 - protein, 80 aa, Synthetic construct
SQFPPYGLGSAAAAAAAAAASTSGFKHPFAIENIIGRDYKGVLQAGGLPLASVMHHLGYPVPGQLGNVVSSVWPHVGVMD

SEQ ID NO: 3222 - protein, 80 aa, Synthetic construct
WTLDPDSYNMFENGSFLRRRRRFKKKDAVKDKEEKDRLHLKEPPPPGRQPPPAPPEQADGNAPGPQPPPVRIQDIKTENG

SEQ ID NO: 3223 - protein, 80 aa, Synthetic construct
RRFKKKDAVKDKEEKDRLHLKEPPPPGRQPPPAPPEQADGNAPGPQPPPVRIQDIKTENGTCPSPPQPLSPAAALGSGSA

SEQ ID NO: 3224 - protein, 100 aa, Synthetic construct
PPAPPEQADGNAPGPQPPPVRIQDIKTENGTCPSPPQPLSPAAALGSGSAAAVPKIESPDSSSSSLSSGSSPPGSLPSARPLSLDGADSAPPPPAPSAPP

SEQ ID NO: 3225 - protein, 80 aa, Synthetic construct
QPKDMVKPPYSYIALITMAIQNAPDKKITLNGIYQFIMDRFPFYRDNKQGWQNSIRHNLSLNECFVKVPRDDKKPGKGSY

SEQ ID NO: 3226 - protein, 150 aa, Synthetic construct
SYNMFENGSFLRRRRRFKKKDVSKEKEERAHLKEPPPAASKGAPATPHLADAPKEAEKKVVIKSEAASPALPVITKVETLSPESALQGSPRSAASTPAGSPDGSLPEHHAAAPNGLPGFSVENIMTLRTSPPGGELSPGAGRAGLVVPPL

SEQ ID NO: 3227 - protein, 120 aa, Synthetic construct
KKAEGADLATPGTLPVLQPSLGPQPWEEGKGLASPPGGGCISFSIESIMQGVRGAGTGAAQSLSPTAWSYCPLLQRPSSLSDNFAATAAASGGGLRQRLRSHQGRGAGRAPVGRVGAAAV

SEQ ID NO: 3228 - protein, 80 aa, Synthetic construct
KRFKRHQLTPGAHLPHPFPLPAAHAALHNPHPGPLLGAPAPPQPVPGAYPNTAPGRCPYALLHPHPLRYLLLSAPVYAGA

SEQ ID NO: 3229 - protein, 80 aa, Synthetic construct
KRFKRHQLTPGAHLPHPFPLPAAHAALHNPHPGPLLGAPAPPQPVPGAYPNTAPGRRPYALLHPHPLRYLLLSAPVYAGA

SEQ ID NO: 3230 - protein, 90 aa, Synthetic construct
TAESGPPPPQPEVLATVKEERGETAAGAGVPGEATGRGAGGRRRKRPLQRGKPPYSYIALIAMAIAHAPERRLTLGGIYKFITERFPFYR

SEQ ID NO: 3231 - protein, 80 aa, Synthetic construct
LSGSLSTHSLEQPYLHQNSHNAPAELQGIPRYHSQSPSMCDRKEFVFSFNAMASSSMHSAGGGSYYHQQVTYQDIKPCVM

SEQ ID NO: 3232 - protein, 100 aa, Synthetic construct
SLWGQLPTSYLPIYTPNVVMPLAPPPTSCPQCPSTSPAYWGVAPETRGPPGLLCDLDALFQGVPPNKSIYDVWVSHPRDLAAPGPGWLLSPGWLLSWCSL

SEQ ID NO: 3233 - protein, 80 aa, Synthetic construct
GPCSGSRLGPPEAESPSQPPKRRKKRYLRHDKPPYTYLAMIALVIQAAPSRRLKLAQIIRQVQAVFPFFREDYEGWKDSI

SEQ ID NO: 3234 - protein, 80 aa, Synthetic construct; identical to SEQ ID NO: 70

SEQ ID NO: 3235 - protein, 80 aa, Synthetic construct
GGEYGATPNPYLWFNGPTMTPPPYLPGPNASPFLPQAYGVQRPLLPSVSGLGGSDLGWLPIPSQEELMKLVRPPYSYSAL

SEQ ID NO: 3236 - protein, 80 aa, Synthetic construct
FRRKRKRKSDVSSSTASLALEKTESSLPVDSPKTTEPQDILDGASPGGTTSSPEKRPSPPPSGAPCLNSFLSSMTAYVSG

SEQ ID NO: 3237 - protein, 80 aa, Synthetic construct
VDVDLTIHGRHIDCPATWGPSVEQAADSLDFDETFLATSFLQHPWDESGSGCLPPEPLFEAGDATLASDLQDWASVGAFL

SEQ ID NO: 3238 - protein, 80 aa, Synthetic construct
IFTPPGGGGHGGAAPELPPAQPRPDAGGDFYLRCLGKNGVFVDGVFQRRGAPPLQLPRVCTFRFPSTNIKITFTALSSEK

SEQ ID NO: 3239 - protein, 80 aa, Synthetic construct
YTVATPVTTSTSQPPVVQTVHVVHQIPAVSVTSVAGLAPANTYTVSGQAVVTPAAVLAPPKAEAQENGDHREVKVKVEPI

SEQ ID NO: 3240 - protein, 100 aa, Synthetic construct
NTYTVSGQAVVTPAAVLAPPKAEAQENGDHREVKVKVEPIPAIGHATLGTASRIIQTAQTTPVQTVTIVQQAPLGQHQLPIKTVTQNGTHVASVPTAVHG

SEQ ID NO: 3241 - protein, 100 aa, Synthetic construct
QAPLGQHQLPIKTVTQNGTHVASVPTAVHGQVNNAAASPLHMLATHASASASLPTKRHNGDQPEQPELKRIKTEDGEGIVIALSVDTPPAAAVREKGVQN

SEQ ID NO: 3242 - protein, 80 aa, Synthetic construct
VTSVAGLAPANTYTVSGQAVVTPAAVLAPPKAEAQENGDHREVKVKVEPIPAIGHATLGTASRIIQTAQTTPVQTVTIVQ

SEQ ID NO: 3243 - protein, 80 aa, Synthetic construct
REVKVKVEPIPAIGHATLGTASRIIQTAQTTPVQTVTIVQQAPLGQHQLPIKTVTQNGTHVASVPTAVHGQVNNAAASPL

SEQ ID NO: 3244 - protein, 80 aa, Synthetic construct
PKSSDKSKSFSIDSILAGKQGQKPPSGDELLGGAKPGPGGRLGASLLAASSSLRPPFNASLMLDPHVQGGFYQLGIPFLS

SEQ ID NO: 3245 - protein, 140 aa, Synthetic construct
KRTEVTLETLGPKPAARDVNLPRPPGALCEQKRETCADGEAAGCTINNSLSNIQWLRKMSSDGLGSRSIKQEMEEKENCHLEQRQVKVEEPSRPSASWQNSVSERPPYSYMAMIQFAINSTERKRMTLKDIYTWIEDHFP

SEQ ID NO: 3246 - protein, 80 aa, Synthetic construct
YMSKFFSGDLRDFGTPITSLFNFIFLCLSVLLAEEGIAPLSSAGPGKEEKLLFGEGFSPLLPVQTIKEEEIQPGEEMPHL

SEQ ID NO: 3247 - protein, 130 aa, Synthetic construct
LLAEEGIAPLSSAGPGKEEKLLFGEGFSPLLPVQTIKEEEIQPGEEMPHLARPIKVESPPLEEWPSPAPSFKEESSHSWEDSSQSPTPRPKKSYSGLRSPTRCVSEMLVIQHRERRERSRSRRKQHLLPP

SEQ ID NO: 3248 - protein, 80 aa, Synthetic construct
LPGFSAEAWCNGLPYPSQEHGPQVLGSEVKVKPPVLESGAGMFCYQPPLQHMYCSSQPPFHQYSPGGGSYPIPYLGSSHY

SEQ ID NO: 3249 - protein, 80 aa, Synthetic construct
QNGSLSPHYLSSVIKQNQVRNLKESDIDAAAAMMLLNTSIEQGILECEKPLPLKTALQKKRSYGNAFHHPSAVRLQESDS

SEQ ID NO: 3250 - protein, 100 aa, Synthetic construct
EEDDRKHSQKEPKDSLGDSGYASQHKKRQHFAKARKVPSDTLPLKKRRTEKPPESDDEEMKEAAGSLLHLAGIRSCLNNITNRTAKGQKEQKEQKETTKN

SEQ ID NO: 3251 - protein, 80 aa, Synthetic construct
QEGSEGSEGSFRSHESPSDTEEDDRKHSQKEPKDSLGDSGYASQHKKRQHFAKARKVPSDTLPLKKRRTEKPPESDDEEM

SEQ ID NO: 3252 - protein, 110 aa, Synthetic construct
PPLHALPDLSPSPLPHPAMGRAPVDFINISTDMNTEVDALDPSIMDFALQGNLWEEMKDEGFSLDTLGAFADSPLGCDLGASGLTPASGGSDQSFPDLQVTGLYTAYSTP

SEQ ID NO: 3253 - protein, 90 aa, Synthetic construct
VQVPLPHPMQMSALGGYSSVSSCNGYGRMGLLHQEKLPSDLDGMFIERLDCDMESIIRNDLMDGDTLDFNFDNVLPNQSFPHSVKTTTHS

SEQ ID NO: 3254 - protein, 100 aa, Synthetic construct
TLSDSLSGSSLYSTSANLPVMGHEKFPSDLDLDMFNGSLECDMESIIRSELMDADGLDFNFDSLISTQNVVGLNVGNFTGAKQASSQSWVQASSQSWVPG

SEQ ID NO: 3255 - protein, 80 aa, Synthetic construct
SSPDKRLTLSQIYEWMVRCVPYFKDKGDSNSSAGWKNSIRHNLSLHSRFMRVQNEGTGKSSWWIINPDGGKSGKAPRRRA

SEQ ID NO: 3256 - protein, 90 aa, Synthetic construct
PGPSSLVPTLSMIAPPPVMASAPIPKALGTPVLTPPTEAASQDRMPQDLDLDMYMENLECDMDNIISDLMDEGEGLDFNFGLDFNFEPDP

SEQ ID NO: 3257 - protein, 80 aa, Synthetic construct
PDLGEKVHTEGRSEPILLPSRLPEPAGGPQPGILGAVTGPRKGGSRRNAWGNQSYAELISQAIESAPEKRLTLAQIYEWM

SEQ ID NO: 3258 - protein, 120 aa, Synthetic construct
SHAYCTPLNAALQASMAENSIPLYTTASMGNPTLGNLASAIREELNGAMEHTNSNESDSSPGRSPMQAVHPVHVKEEPLDPEEAEGPLSLVTTANHSPDFDHDRDYEDEPEDEPVNEDME

SEQ ID NO: 3259 - protein, 120 aa, Synthetic construct
LGYGAALNASLQAALAESSLPLLSNPGLINNASSGLLQAVHEDLNGSLDHIDSNGNSSPGCSPQPHIHSIHVKEEPVIAEDEDCPMSLVTTANHSPELEDDREIEEEPLSEEEPLSEDLE

SEQ ID NO: 3260 - protein, 80 aa, Synthetic construct
QQMQQILQQQVLSPQQLQALLQQQQAVMLQQQQLQEFYKKQQEQLHLQLLQQQQQQQQQQQQQQQQQQQQQQQQQQQQQQ

SEQ ID NO: 3261 - protein, 80 aa, Synthetic construct
QFLKHLNNEHALDDRSTAQCRVQMQVVQQLEIQLSKERERLQAMMTHLHMRPSEPKPSPKPLNLVSSVTMSKNMLETSPQ

SEQ ID NO: 3262 - protein, 80 aa, Synthetic construct
SVITPASVPNVGAIRRRHSDKYNIPMSSEIAPNYEFYKNADVRPPFTYATLIRQAIMESSDRQLTLNEIYSWFTRTFAYF

SEQ ID NO: 3263 - protein, 80 aa, Synthetic construct
LGNKQLAFQQQLLQMQQLQQQHLLNLQRQGLVSLQPNQASGPLQTLPQAVCPTDLPQLWKGEGAPGQPAEDSVKQEGLDL

SEQ ID NO: 3264 - protein, 120 aa, Synthetic construct
LSYGALNASYQAALAESSFPLLNSPGMLNPGSASSLLPLSHDDVGAPVEPLPSNGSSSPPRLSPPQYSHQVQVKEEPAEAEEDRQPGPPLGAPNPSASGPPEDRDLEEELEEELPGEELS

SEQ ID NO: 3265 - protein, 80 aa, Synthetic construct
AQNHEFYKNADVRPPFTYASLIRQAILETPDRQLTLNEIYNWFTRMFAYFRRNTATWKNAVRHNLSLHKCFVRVENVKGA

SEQ ID NO: 3266 - protein, 140 aa, Synthetic construct
YTFADGVFRRRRKRLSHRAPVPAPGLRPEEAPGLPAAPPPAPAAPASPRMRSPARQEERASPAGKFSSSFAIDSILRKPFRSRRLRDTAPGTTLQWGAAPCPPLPAFPALLPAAPCRALLPLCAYGAGEPARLGAREAEV

SEQ ID NO: 3267 - protein, 80 aa, Synthetic construct
GNELFLAFTTSHLPLAEQKLARYKLRIVKPPKLPLEKKPNPDKDGPDYEPNLWMWVNPNIVYPPGKLEVSGRRKREDLTS

SEQ ID NO: 3268 - protein, 80 aa, Synthetic construct
YSLHGQVPGLLDWDMRNELFLPCTTDQCSLAEQILAKYRVGVMKPPEMPQKRRPSPDGDGPPCEPNLWMWVDPNILCPLG

SEQ ID NO: 3269 - protein, 80 aa, Synthetic construct
VVIDPDAHHAESEAHLVEEAQVITLDGTKHITTISDETSEQVTRWAAALEGYRKEQERLGIPYDPIQWSTDQVLHWVVWV

SEQ ID NO: 3270 - protein, 80 aa, Synthetic construct
SRALRYYYDGDMICKVQGKRFVYKFVCDLKTLIGYSAAELNRLVTECEQKKLAKMQLHGIAQPVTAVALATASLQTEKDN

SEQ ID NO: 3271 - protein, 80 aa, Synthetic construct
DALEEVLSKALSQRTITVGVYEAAKLLNVDPDNVVLCLLAADEDDDRDVALQIHFTLIQAFCCENDINILRVSNPGRLAE

SEQ ID NO: 3272 - protein, 80 aa, Synthetic construct
GAGKALHELLLSAQRQGCLTAGVYESAKVLNVDPDNVTFCVLAAGEEDEGDIALQIHFTLIQAFCCENDIDIVRVGDVQR

SEQ ID NO: 3273 - protein, 80 aa, Synthetic construct
VFFPSGPEGLDAAASSTAPSTATAAAAALAYYRDAEAYRHSPVFQVYPLLNCMEGIPGGSPYAGWAYGKTGLYPASTVCP

SEQ ID NO: 3274 - protein, 80 aa, Synthetic construct
SPVFQVYPLLNCMEGIPGGSPYAGWAYGKTGLYPASTVCPTREDSPPQAVEDLDGKGSTSFLETLKTERLSPDLLTLGPA

SEQ ID NO: 3275 - protein, 80 aa, Synthetic construct
PYAGWAYGKTGLYPASTVCPTREDSPPQAVEDLDGKGSTSFLETLKTERLSPDLLTLGPALPSSLPVPNSAYGGPDFSST

SEQ ID NO: 3276 - protein, 90 aa, Synthetic construct
EDLDGKGSTSFLETLKTERLSPDLLTLGPALPSSLPVPNSAYGGPDFSSTFFSPTGSPLNSAAYSSPKLRGTLPLPPCEARECVNCGATA

SEQ ID NO: 3277 - protein, 90 aa, Synthetic construct
IRPKKRLIVSKRAGTQCTNCQTTTTTLWRRNASGDPVCNACGLYYKLHQVNRPLTMRKDGIQTRNRKASGKGKKKRGSSLGGTGAAEGPA

SEQ ID NO: 3278 - protein, 90 aa, Synthetic construct
KMNGQNRPLIKPKRRLSAARRAGTSCANCQTTTTTLWRRNANGDPVCNACGLYYKLHNINRPLTMKKEGIQTRNRKMSSKSKKCKKVHDS

SEQ ID NO: 3279 - protein, 90 aa, Synthetic construct
KEGIQTRKRKPKNLNKSKTPAAPSGSESLPPASGASSNSSNATTSSSEEMRPIKTEPGLSSHYGHSSSVSQTFSVSAMSGHGPSIHPVLS

SEQ ID NO: 3280 - protein, 110 aa, Synthetic construct
PASGASSNSSNATTSSSEEMRPIKTEPGLSSHYGHSSSVSQTFSVSAMSGHGPSIHPVLSALKLSPQGYASPVSQSPQTSSKQDSWNSLVLADSHGDIITADSHGDIITA

SEQ ID NO: 3281 - protein, 80 aa, Synthetic construct
YPAYVSPDVAQSWTAGPFDGSVLHGLPGRRPTFVSDFLEEFPGEGRECVNCGALSTPLWRRDGTGHYLCNACGLYHKMNG

SEQ ID NO: 3282 - protein, 80 aa, Synthetic construct
VNRPLVRPQKRLSSSRRAGLCCTNCHTTNTTLWRRNSEGEPVCNACGLYMKLHGVPRPLAMKKESIQTRKRKPKTIAKAR

SEQ ID NO: 3283 - protein, 80 aa, Synthetic construct
ACGLYHKMNGVNRPLVRPQKRLSSSRRAGLCCTNCHTTNTTLWRRNSEGEPVCNACGLYMKLHGVPRPLAMKKESIQTRK

SEQ ID NO: 3284 - protein, 80 aa, Synthetic construct
KRVPSSRRLGLSCANCHTTTTTLWRRNAEGEPVCNACGLYMKLHGVPRPLAMKKEGIQTRKRKPKNINKSKTCSGNSNNS

SEQ ID NO: 3285 - protein, 80 aa, Synthetic construct
FKLKNPIKAPESVSTIITAESIFYKGVYYQIGDVVSVIDEQDGKPYYAQIRGFIQDQYCEKSAALTWLIPTLSSPRDQFD

SEQ ID NO: 3286 - protein, 80 aa, Synthetic construct
SIFYKGVYYQIGDVVSVIDEQDGKPYYAQIRGFIQDQYCEKSAALTWLIPTLSSPRDQFDPASYIIGPEEDLPRKMEYLE

SEQ ID NO: 3287 - protein, 80 aa, Synthetic construct
SGGAGSGAAGGTGGSGGGGFGAATFASTSATPPQSNGGGGGKQSKQEIHRRSARLRNTKYKSAPAAEKKVSTKGKGRRHI

SEQ ID NO: 3288 - protein, 80 aa, Synthetic construct
GAATFASTSATPPQSNGGGGGKQSKQEIHRRSARLRNTKYKSAPAAEKKVSTKGKGRRHIFKLKNPIKAPESVSTIITAE

SEQ ID NO: 3289 - protein, 80 aa, Synthetic construct
ARMPGSVIPPPLVRGGQQASSKLGPQASSQVVMPPLVRGAQQIHSIRQHSSTGPPPLLLAPRASVPSVQIQGQRIIQQGL

SEQ ID NO: 3290 - protein, 80 aa, Synthetic construct
SEPERGRLTPSPDIIVLSDNEASSPRSSSRMEERLKAANLEMFKGKGIEERQQLIKQLRDELRLEEARLVLLKKLRQSQL

SEQ ID NO: 3291 - protein, 120 aa, Synthetic construct
QRAGGGSAPGGNGGGGGGGPGTAFSIDSLIGPPPPRSGHLLYTGYPMFMPYRPLVLPQALAPAPLPAGLPPLAPLASFAGRLTNTFCAGLGQAVPSMVALTTALPSFAEPPDAFYGPQEL

SEQ ID NO: 3292 - protein, 80 aa, Synthetic construct
TGAEEGAPVTAGVTAPGGKSRRRRTAFTSEQLLELEKEFHCKKYLSLTERSQIAHALKLSEVQVKIWFQNRRAKWKRIKA

SEQ ID NO: 3293 - protein, 100 aa, Synthetic construct
SAAFPPSLMMMQRPLGSSTAFSIDSLIGSPPQPSPGHFVYTGYPMFMPYRPVVLPPPPPPPPALPQAALQPALPPAHPHHQIPSLPTGFCSSLAQGMALT

SEQ ID NO: 3294 - protein, 110 aa, Synthetic construct
CGRDCLAEEGRKIYLRPAICDKARQKQQRKRCPNCDGPLKLIPCRGHGGFPVTNFWRHDGRFIFFQSKGEHDHPKPETKLEAEARRAMKKVNTAPSSVSLSLKGSTETRS

SEQ ID NO: 3295 - protein, 80 aa, Synthetic construct; identical to SEQ ID NO: 38

SEQ ID NO: 3296 - protein, 100 aa, Synthetic construct
PLEPPAAKTGCPPLWPNPAGNLYEEKVHVDFNSYVQSPAYHSPQEDPFLFTYASHPHQQYSLPSKSSKWDFEEEMTYLGLDHCNNDMLLNDMLLNLCPLR

SEQ ID NO: 3297 - protein, 80 aa, Synthetic construct
TLPDGSRLQLRPAICDKARLKQQKKACPNCHSALELIPCRGHSGYPVTNFWRLDGNAIFFQAKGVHDHPRPESKSETEAR

SEQ ID NO: 3298 - protein, 90 aa, Synthetic construct
NSPVLSTLFPNQCLDWTNLKREPELEQDQNLARMAPAPEGPIVLSRPQDGDSPLSDSPPFYKPSFSWDTLATTYGHSYRQAPSTMQSAFL

SEQ ID NO: 3299 - protein, 80 aa, Synthetic construct
YKPSFSWDTLATTYGHSYRQAPSTMQSAFLEHSVSLYGSPLVPSTEPALDFSLRYSPGMDAYHCVKCNKVFSTPHGLEVH

SEQ ID NO: 3300 - protein, 100 aa, Synthetic construct
NQNKQSSESAVSSTVNPVAIHKRSKVKTEPEGLRPASPLALTQGQVSGHGSCGCALPLSQEQLADLKEDLDRDDCKQEAEVVIYETNCHWEDCTKEYDTQ

SEQ ID NO: 3301 - protein, 80 aa, Synthetic construct
EQLADLKEDLDRDDCKQEAEVVIYETNCHWEDCTKEYDTQEQLVHHINNEHIHGEKKEFVCRWQACTREQKPFKAQYMLV

SEQ ID NO: 3302 - protein, 90 aa, Synthetic construct
AHASGALDEGTGQVYPTESTGFSDNPRLPSPGLHGQRRMVAADSNVGPSAPMLGGCQLGFGAPSSLNKNNMPVQWNEVSSGTVDALASQV

SEQ ID NO: 3303 - protein, 110 aa, Synthetic construct
AADSNVGPSAPMLGGCQLGFGAPSSLNKNNMPVQWNEVSSGTVDALASQVKPPPFPQGNLAVVQQKPAFGQYPGYSPQGLQASPGGLDSTQPHLQPRSGAPSQGIPRVNY

SEQ ID NO: 3304 - protein, 80 aa, Synthetic construct
SCGCALPLSQEQLADLKEDLDRDDCKQEAEVVIYETNCHWEDCTKEYDTQEQLVHHINNEHIHGEKKEFVCRWQACTREQ

SEQ ID NO: 3305 - protein, 120 aa, Synthetic construct
SSQNKPTSESAVSSTGDPMHNKRSKIKPDEDLPSPGARGQQEQPEGTTLVKEEGDKDESKQEPEVIYETNCHWEGCAREFDTQEQLVHHINNDHIHGEKKEFVCRWLDCSREQKPFKAQY

SEQ ID NO: 3306 - protein, 80 aa, Synthetic construct
SQNQAGYEQHFPSALPDDSKVPHGPGDFDAPGLPDSHAGQQFHALEQPCPEGSKTDLPIQWNEVSSGSADLSSSKLKCGP

SEQ ID NO: 3307 - protein, 90 aa, Synthetic construct
QFHALEQPCPEGSKTDLPIQWNEVSSGSADLSSSKLKCGPRPAVPQTRAFGFCNGMVVHPQNPLRSGPAGGYQTLGENSNPYGGPEHLML

SEQ ID NO: 3308 - protein, 80 aa, Synthetic construct
DTQEQLVHHINNDHIHGEKKEFVCRWLDCSREQKPFKAQYMLVVHMRRHTGEKPHKCTFEGCTKAYSRLENLKTHLRSHT

SEQ ID NO: 3309 - protein, 80 aa, Synthetic construct
QRIHTGEKPYACHECGKRFRGWSGFIQHHRIHTGEKPYECGQCGRAFSHSSHFTQHLRIHNGEKPYKCGECGQAFSQSSN

SEQ ID NO: 3310 - protein, 130 aa, Synthetic construct
SSQTSLVTCVNGLRSPPLTGDLGGPSKRARPGPASTDSHEGSLQLEACRKASFLKQEPADEFSELFGPHQQGLPPPYPLSQLPPGPSLGGLGLGLAGRVVAGRQACRWVDCCAAYEQQEELVRHIEKSHI

SEQ ID NO: 3311 - protein, 80 aa, Synthetic construct
CCAAYEQQEELVRHIEKSHIDQRKGEDFTCFWAGCVRRYKPFNARYKLLIHMRVHSGEKPNKCMFEGCSKAFSRLENLKI

SEQ ID NO: 3312 - protein, 100 aa, Synthetic construct
YLDGVPSSFQFFLPLGSGGALHLPASSFLTPPKDKCLSPDLPLPKQLVCRWAKCNQLFELLQDLVDHVNDYHVKPEKDAGYCCHWEGCARHGRGFNARYK

SEQ ID NO: 3313 - protein, 100 aa, Synthetic construct
LPLPKQLVCRWAKCNQLFELLQDLVDHVNDYHVKPEKDAGYCCHWEGCARHGRGFNARYKMLIHIRTHTNEKPHRCPTCSKSFSRLENLKIHNRSHTGEK

SEQ ID NO: 3314 - protein, 90 aa, Synthetic construct
VWGKLGRYPPWPGKIVNPPKDLKKPRGKKCFFVKFFGTEDHAWIKVEQLKPYHAHKEEMIKINKGKRFQQAVDAVEEFLRRAKGKDQTSS

SEQ ID NO: 3315 - protein, 80 aa, Synthetic construct
HAWIKVEQLKPYHAHKEEMIKINKGKRFQQAVDAVEEFLRRAKGKDQTSSHNSSDDKNRRNSSEERSRPNSGDEKRKLSL

SEQ ID NO: 3316 - protein, 90 aa, Synthetic construct
NTAVVAVETHTIHKIEEGIDTGTIEANEDMEIAYPITCGESKAILLWKKFVCPGINVKCVKFNDQLISPKHFVHLAGKSTLKDWKRAIRL

SEQ ID NO: 3317 - protein, 90 aa, Synthetic construct
ITQIAISEESMEEAGLEWNSALTAAVTMATEEGVKKDSEEISEDTLMFWKGIADVGLMEEVVCNIQKEIEELLRGVQQRLIQAPFQVTDA

SEQ ID NO: 3318 - protein, 90 aa, Synthetic construct
LSGARVSLSSPTSAEYIPLTPAAADVNGSPATITIETCEDPGDWTAAIGDDTFTFWRGLKDAGLLDEVIQEFHQELVETMRGLQQRVQDP

SEQ ID NO: 3319 - protein, 80 aa, Synthetic construct
ATITIETCEDPGDWTAAIGDDTFTFWRGLKDAGLLDEVIQEFHQELVETMRGLQQRVQDPPLQLRDAVLLNNIVQNFGML

SEQ ID NO: 3320 - protein, 80 aa, Synthetic construct
GWRTHGRNGTENINHRGGYHGGSSRSRSSIFHAGKSQGLHENNIPDNETGRKEDKRERKQFEAEDFPSLNPEYEREPNHN

SEQ ID NO: 3321 - protein, 90 aa, Synthetic construct
QPLISAGENRVQVLKNVPFNIVLPHGNQLGIDKRGHLTAPDTTVTVSIATMPTHSIKTETQPHGFAVGIPPAVYHPEPTERVVVFDRNLN

SEQ ID NO: 3322 - protein, 90 aa, Synthetic construct
IDKRGHLTAPDTTVTVSIATMPTHSIKTETQPHGFAVGIPPAVYHPEPTERVVVFDRNLNTDQFSSGAQAPNAQRRTPDSTFSETFKEGV

SEQ ID NO: 3323 - protein, 80 aa, Synthetic construct
FSSQKGVKGLPLNIQVDTYSYNNRSNKPVHRAYCQIKVFCDKGAERKIRDEERKQSKRKVSDVKVPLLPSHKRMDITVFK

SEQ ID NO: 3324 - protein, 80 aa, Synthetic construct
QEVFFPSDLSLRMPGMNSEDYVFDSVSGNNFEYTLEASKSLRQKPGDSTMTYLNKGQFYPITLKEVSSSEGIHHPISKVR

SEQ ID NO: 3325 - protein, 80 aa, Synthetic construct
NRVQVLKTVPVNLSLNQDHLENSKREQYSISFPESSAIIPVSGITVVKAEDFTPVFMAPPVHYPRGDGEEQRVVIFEQTQ

SEQ ID NO: 3326 - protein, 90 aa, Synthetic construct
ENSKREQYSISFPESSAIIPVSGITVVKAEDFTPVFMAPPVHYPRGDGEEQRVVIFEQTQYDVPSLATHSAYLKDDQRSTPDSTYSESFK

SEQ ID NO: 3327 - protein, 80 aa, Synthetic construct
LDIADYKESFNTIGNIEEIAYNAVSFTWDVNEEAKIFITVNCLSTDFSSQKGVKGLPLMIQIDTYSYNNRSNKPIHRAYC

SEQ ID NO: 3328 - protein, 80 aa, Synthetic construct
NPLTAATKAMMSINGDEDSAAALGLLYDYYKVPRDKRLLSVSKASDSQEDQEKRNCLGTSEAQSNLSGGENRVQVLKTVP

SEQ ID NO: 3329 - protein, 80 aa, Synthetic construct
SSNRLPLKRTCSPFTEEFEPLPSKQAKEGDLQRVLLYVRRETEEVFDALMLKTPDLKGLRNAISEKYGFPEENIYKVYKK

SEQ ID NO: 3330 - protein, 80 aa, Synthetic construct
WNVNEEAKVFIGVNCLSTDFSSQKGVKGVPLNLQIDTYDCGLGTERLVHRAVCQIKIFCDKGAERKMRDDERKQFRRKVK

SEQ ID NO: 3331 - protein, 80 aa, Synthetic construct
YPFGLSPSSVVQDSRFPPLNLQRPVHHVVPPSTVTEDYLRSFRPYHTTDDLRMSSLPPLGLDPATAAAYYHPSYLAPHPF

SEQ ID NO: 3332 - protein, 130 aa, Synthetic construct
LQRPVHHVVPPSTVTEDYLRSFRPYHTTDDLRMSSLPPLGLDPATAAAYYHPSYLAPHPFPHPAFRMDDSYCLSALRSPFYPIPTPGSLPPLHPSAMHLHLSGVRYPPELSHSSLAALHSERMSGLSAER

SEQ ID NO: 3333 - protein, 90 aa, Synthetic construct
TIQSKRQTPSPRLALSTRYSPDEMNNSPNFEEKKKFLTIFNLTHISAEKRKDKERLVEMLRAMKQKALSAAVADSLTNSPRDSPAVSLSE

SEQ ID NO: 3334 - protein, 80 aa, Synthetic construct
SHSSLAALHSERMSGLSAERLQMDEELRREREREREREREREADREREKEREREREKEREQEKEREREKERERELERQRE

SEQ ID NO: 3335 - protein, 80 aa, Synthetic construct
DLEERRRREAQEKGYYYDLDDSYDESDEEEVRAHLRCVAEQPPLKLDTSSEKLEFLQLFGLTTQQQKEELVAQKRRKRRR

SEQ ID NO: 3336 - protein, 80 aa, Synthetic construct
VRAHLRCVAEQPPLKLDTSSEKLEFLQLFGLTTQQQKEELVAQKRRKRRRMLRERSPSPPTIQSKRQTPSPRLALSTRYS

SEQ ID NO: 3337 - protein, 90 aa, Synthetic construct
LTTQQQKEELVAQKRRKRRRMLRERSPSPPTIQSKRQTPSPRLALSTRYSPDEMNNSPNFEEKKKFLTIFNLTHISAEKRKDKERLVEML

SEQ ID NO: 3338 - protein, 90 aa, Synthetic construct
FHCISVDSSSNQLPSSKRMRTAFTSTQLLELEREFASNMYLSRLRRIEIATYLNLSEKQVKIWFQNRRVKHKKEGKGSNHRGGGGGGAGG

SEQ ID NO: 3339 - protein, 80 aa, Synthetic construct
DPRRFHCLTMGGSDASQVPNGKRMRTAFTSTQLLELEREFSSNMYLSRLRRIEIATYLNLSEKQVKIWFQNRRVKHKKEG

SEQ ID NO: 3340 - protein, 80 aa, Synthetic construct
VILDESHYKELLTHHVSPPPASSSSECSLIRMGFPQHTIASLSDQDAKPSFSMAHLDGNTEPGLTLGGYFCPQCRAKYCE

SEQ ID NO: 3341 - protein, 110 aa, Synthetic construct
FSMAHLDGNTEPGLTLGGYFCPQCRAKYCELPVECKICGLTLVSAPHLARSYHHLFPLDAFQEIPLEEYNGERFCYGCQGELKDQHVYVCAVCQNVFCVDCDVFVHDSLH

SEQ ID NO: 3342 - protein, 80 aa, Synthetic construct
MDEEPERTKRWEGGYERTWEILKEDESGSLKATIEDILFKAKRKRVFEHHGQVRLGMMRHLYVVVDGSRTMEDQDLKPNR

SEQ ID NO: 3343 - protein, 80 aa, Synthetic construct
VILDESHYKELLTHHLSPPPASSSSECSLIRMGFPQHTIASLSDQDAKPSFSMAHLDGNTEPGLTLGGYFCPQCRAKYCE

SEQ ID NO: 3344 - protein, 110 aa, Synthetic construct
AQVAMSTLPVEDEESSESRMVVTFLMSALESMCKELAKSKAEVACIAVYETDVFVVGTERGRAFVNTRKDFQKDFVKYCVEEEEKAAEMHKMKSTTQANRMSVDAVEIET

SEQ ID NO: 3345 - protein, 160 aa, Synthetic construct
GLPEGVAFKHPENYDLATLKWILENKAGISFIIKRPFLEPKKHVGGRVMVTDADRSILSPGGSCGPIKVKTEPTEDSGISLEMAAVTVKEESEDPDYYQYNIQAGPSETDDVDEKQPLSKPLQGSHHSSEGNEGTEMEVPAEDSTQHVPSETSEDPEVEV

SEQ ID NO: 3346 - protein, 80 aa, Synthetic construct
EGLPEGVPFRRPSTFGIPRLEKILRNKAKIKFIIKKPEMFETAIKESTSSKSPPRKINSSPNVNTTASGVEDLNIIQVTI

SEQ ID NO: 3347 - protein, 80 aa, Synthetic construct
PNVNTTASGVEDLNIIQVTIPDDDNERLSKVEKARQLREQVNDLFSRKFGEAIGMGFPVKVPYRKITINPGCVVVDGMPP

SEQ ID NO: 3348 - protein, 90 aa, Synthetic construct
KFIIKKPEMFETAIKESTSSKSPPRKINSSPNVNTTASGVEDLNIIQVTIPDDDNERLSKVEKARQLREQVNDLFSRKFGEAIGMGFPVK

SEQ ID NO: 3349 - protein, 90 aa, Synthetic construct
TNGCGPDRWNSAFTRKDEIITSLVSALDSMCSALSKLNAEVACVAVHDESAFVVGTEKGRMFLNARKELQSDFLRFCRGPPWKDPEAEHP

SEQ ID NO: 3350 - protein, 150 aa, Synthetic construct
IIKRMFDERIFTGNKFTKDTTKLEPASPPEDTSAEVSRATVLDLAGNARSDKGSMSEDCGPGTSGELGGLRPIKIEPEDLDIIQVTVPDPSPTSEEMTDSMPGHLPSEDSGYGMEMLTDKGLSEDARPEERPVEDSHGDVIRPLRKQVEL

SEQ ID NO: 3351 - protein, 80 aa, Synthetic construct
KRIKSNPGSVIIEGLPPGIPFRKPCTFGSQNLERILAVADKIKFTVTRPFQGLIPKPDEDDANRLGEKVILREQVKELFN

SEQ ID NO: 3352 - protein, 80 aa, Synthetic construct
NESSIREIVKKEKEIRASFAVSPPTAKVTATVRDKCLVKMEQALHLWVEEMNRKRVPIDSNMLRQKALSLYQDFCKGCSE

SEQ ID NO: 3353 - protein, 90 aa, Synthetic construct
PVEEESSSETRMVVTFLVSALESMCKELAKSKAEVACIAVYETDVFVVGTERGCAFVNARTDFQKDFAKYCVAEGLCEVKPPCPVNGMQV

SEQ ID NO: 3354 - protein, 90 aa, Synthetic construct
QSAVVVQGLPEGVAFQHPENYDLATLKWILENKAGISFIINRPFLGPESQLGGPGMVTDAERSIVSPSESCGPINVKTEPMEDSGISLKA

SEQ ID NO: 3355 - protein, 140 aa, Synthetic construct
ENKAGISFIINRPFLGPESQLGGPGMVTDAERSIVSPSESCGPINVKTEPMEDSGISLKAEAVSVKKESEDPNYYQYNMQGSHPSSTSNEVIEMELPMEDSTPLVPSEEPNEDPEAEVKIEGNTNSSSVTNSAAGVEDLN

SEQ ID NO: 3356 - protein, 80 aa, Synthetic construct
QVFANPSPTQKSPVQPVEDLAGNLWEKLREKIRSFVAYSIAIDEITDINNTTQLAIFIRGVDENFDVSEELLDTVPMTGT

SEQ ID NO: 3357 - protein, 80 aa, Synthetic construct
YNLRRHYQTNHSKHYDQYMERMRDEKLHELKKGLRKYLLGSSDTECPEQKQVFANPSPTQKSPVQPVEDLAGNLWEKLRE

SEQ ID NO: 3358 - protein, 80 aa, Synthetic construct
ERGCAFVNARTDFQKDFAKYCVAEGLCEVKPPCPVNGMQVHSGETEILRKAVEDYFCFCYGKALGTTVMVPVPYEKMLRD

SEQ ID NO: 3359 - protein, 80 aa, Synthetic construct
GLELSNGEYSTVGKRKIDQEGRVFQEKWERAYFFVEVQNIPTCLICKQSMSVSKEYNLRRHYQTNHSKHYDQYTERMRDE

SEQ ID NO: 3360 - protein, 80 aa, Synthetic construct
PSPTQKSPVQPVEDLAGNLWEKLREKIRSFVAYSIAIDEITDINNTTQLAIFIRGVDENFDVSEELLDTVPMTGTKSGNE

SEQ ID NO: 3361 - protein, 80 aa, Synthetic construct
LESMCKELAKSKAEVACIAVYETDVFVVGTERGCAFVNARTDFQKDFAKYCVAEGLCEVKPPCPVNGMQVHSGETEILRK

SEQ ID NO: 3362 - protein, 80 aa, Synthetic construct
TDINNTTQLAIFIRGVDENFDVSEELLDTVPMTGTKSGNEIFLRVEKSLKKFCINWSRLVSVASTGTPAMVDANNGLVTK

SEQ ID NO: 3363 - protein, 80 aa, Synthetic construct
DLVRWKILKDKHIPQFLQEALEKKIESSGVTYFWRFKLFLLRILYQSMQKTPSEALWKPTHEDSKILLVDSPGMGNADDE

SEQ ID NO: 3364 - protein, 90 aa, Synthetic construct
MAAAADERSPEDGEDEEEEEQLVLVELSGIIDSDFLSKCENKCKVLGIDTERPILQVDSCVFAGEYEDTLGTCVIFEENVEHADTEGNNK

SEQ ID NO: 3365 - protein, 80 aa, Synthetic construct
DVTVSVEYQGVRKDFMAHKAVLAATSKFFKEVFLNEKSVDGTRTNVYLNEVQVADFASFLEFVYTAKVQVEEDRVQRMLE

SEQ ID NO: 3366 - protein, 110 aa, Synthetic construct
KDKLDKKKEVVKPPYPKIRRASGRLAGRKVFVEIPKKKYTRRLREQQKTAEGDVGDYRCPQDQSPDRVGTEMEQVSKNEGCQAGAELEELSKKAGPEEEEEEEEEDEEGE

SEQ ID NO: 3367 - protein, 90 aa, Synthetic construct
YGPDARPGQSPGRLEALGGRLGRRKGSGPKKERRRTESINSAFAELRECIPNVPADTKLSKIKTLRLATSYIAYLMDVLAKDAQSGDPEA

SEQ ID NO: 3368 - protein, 90 aa, Synthetic construct
KERRRTESINSAFAELRECIPNVPADTKLSKIKTLRLATSYIAYLMDVLAKDAQSGDPEAFKAELKKADGGRESKRKRELQQHEGFPPAL

SEQ ID NO: 3369 - protein, 80 aa, Synthetic construct
LTVECKLDHPFYVKNKGWSSFYPSLTVVQHGIPCCEVHIGDVCLPPGHPDAINFDDSGVFDTFKSYDFTPMDSSAVYVLS

SEQ ID NO: 3370 - protein, 90 aa, Synthetic construct
NQNTSDIPETTYRENEVDWLTELANIATSPQSPLMQCSFYNRSSPVHIIATSKSLHSYARPPPVSSSSKSEPAFPHHHWKEETPVRHERA

SEQ ID NO: 3371 - protein, 80 aa, Synthetic construct
LVCSNPPCETHETGTTNTATTTVVANLGGHPQPTQVQFVCDRQEAAASLVTSTVGQQNGSVVRVCSNPPCETHETGTTNT

SEQ ID NO: 3372 - protein, 90 aa, Synthetic construct
QTMVTQQTIKTESSSTNGAVVKDETSLTTFSTKSEVDETYALPATKISRVETHATATPFSKETPSNPVATVKAGERQWCDVGIFKNNTAL

SEQ ID NO: 3373 - protein, 80 aa, Synthetic construct
KPHRIRMTHNLLLNYGLYRKMEIYRPHKANAEEMTKYHSDDYIKFLRSIRPDNMSEYSKQMQRFNVGEDCPVFDGLFEFC

SEQ ID NO: 3374 - protein, 80 aa, Synthetic construct
PDKRISICSSDKRIACEEEFSDSEEEGEGGRKNSSNFKKAKRVKTEDEKEKDPEEKKEVTEEEKTKEEKPEAKGVKEEVK

SEQ ID NO: 3375 - protein, 90 aa, Synthetic construct
QLSTGGSVASAVKLNKQQTDIAVNWAGGLHHAKKSEASGFCYVNDIVLAILELLKYHQRVLYIDIDIHHGDGVEEAFYTTDRVMTVSFHK

SEQ ID NO: 3376 - protein, 80 aa, Synthetic construct
GFSEGLWEIENNPTVKASGYQSSQKKSCVEEPEPEPEAAEGDGDKKGNAEGSSDEEGKLVIDEPAKEKNEKGALKRRAGD

SEQ ID NO: 3377 - protein, 100 aa, Synthetic construct
HAKKNYGNSSVQASEMTVPQKPSVCHRPCKIEPVGIQRSYKPEHTGPALHNLCGQKPTIRDPYCRTQNLEIREVFSLAVSDYPQRILGGNAPQKPSSAEG

SEQ ID NO: 3378 - protein, 80 aa, Synthetic construct
SQEEPNEVVPNDARAHKEEDHHAVTTDNVKIEIIDDEESDMISNSEVEQVNSFLDYKNEEVKFIENELEIQKQKYFKLQT

SEQ ID NO: 3379 - protein, 80 aa, Synthetic construct
HHAVTTDNVKIEIIDDEESDMISNSEVEQVNSFLDYKNEEVKFIENELEIQKQKYFKLQTFVRSLILAMKADDKEQQQAL

SEQ ID NO: 3380 - protein, 90 aa, Synthetic construct
NLCGQKPTIRDPYCRTQNLEIREVFSLAVSDYPQRILGGNAPQKPSSAEGNCLSIAMETGDAEDEYAREEELASMRAQIPSYSRFYESGS

SEQ ID NO: 3381 - protein, 80 aa, Synthetic construct
LIVDEGHRIKNMKCRLIRELKRFNADNKLLLTGTPLQNNLSELWSLLNFLLPDVFDDLKSFESWFDITSLSETAEDIIAK

SEQ ID NO: 3382 - protein, 80 aa, Synthetic construct
ELSPTGRPKRRTRKSINYSKIDDFPNELEKLISQIQPEVDRERAVVEVNIPVESEVNLKLQNIMMLLRKCCNHPYLIEYP

SEQ ID NO: 3383 - protein, 80 aa, Synthetic construct
VARLARVLPACRVLEPAVSARLLEHLWRRAASATLDGGRAGDSSGPSAPAPAPASAPEPASAPVPSPPSPPCGPGLWRPW

SEQ ID NO: 3384 - protein, 90 aa, Synthetic construct
STMDSAGLGQEAPALFRPCTPAVWAPAPAAGGPRSPPPLLLLPESLPGSSASVPPPQPASSRCAESPGLGLRVWRPWGSPPWGSPGDDLN

SEQ ID NO: 3385 - protein, 90 aa, Synthetic construct
RRVQGVLRGRAREREQLQAEASERFAAGYIQCMHEVHTFVSTCQAIDATVAAELLNHLLESMPLREGSSFQDLLGDALAGPPRAPGRSGW

SEQ ID NO: 3386 - protein, 80 aa, Synthetic construct
RTRDQNLRNPKLEKAEILEFAVGYLRERSRVEPPGVPRSPVQDAEALASCYLSGFRECLLRLAAFAHDASPAARAQLFSA

SEQ ID NO: 3387 - protein, 80 aa, Synthetic construct
GENKPSTCSFSIERILGLDQKKDCVPLMKPHRPWADTCSSSGKDGNLCLHVPNPPSGISFPSVVDHPMPEERASKYENYF

SEQ ID NO: 3388 - protein, 80 aa, Synthetic construct
PSVVDHPMPEERASKYENYFSASERLSLKRELSWYRGRRPRTAFTQNQIEVLENVFRVNCYPGIDIREDLAQKLNLEEDR

SEQ ID NO: 3389 - protein, 90 aa, Synthetic construct
LSSALGSMSPTTSSQILARKRRRGIIEKRRRDRINNSLSELRRLVPSAFEKQGSAKLEKAEILQMTVDHLKMLHTAGGKGYFDAHALAMD

SEQ ID NO: 3390 - protein, 80 aa, Synthetic construct
QEGQLSQMARPLSTPSSSQMQARKKHRGIIEKRRRDRINSSLSELRRLVPTAFEKQGSSKLEKAEVLQMTVDHLKMLHAT

SEQ ID NO: 3391 - protein, 110 aa, Synthetic construct
QYPHPGPAAGAVGVPLYAPTPLLQPAHPTPFYIEDILGRGPAAPTPAPTLPSPNSSFTSLVSPYRTPVYEPTPIHPAFSHHSAAALAAAYGPGGFGGPLYPFPRTVNDYT

SEQ ID NO: 3392 - protein, 90 aa, Synthetic construct
KPLLWSPFLQRPLHKRKGGQVRFSNDQTIELEKKFETQKYLSPPERKRLAKMLQLSERQVKTWFQNRRAKWRRLKQENPQSNKKEELESL

SEQ ID NO: 3393 - protein, 80 aa, Synthetic construct
RVPNGILASGAGPSGPYGEPPYPCKEEEENGKDASEDSAQSGSEGGSGHASAHYMYRQEGYETVSYGDNLYVCIPCAKGF

SEQ ID NO: 3394 - protein, 80 aa, Synthetic construct
ETHTEEELFIKEEGAYETGSGGAEEEAEDLSAPSAAYTAEPRPFKCSVCEKTYKDPATLRQHEKTHWLTRPFPCNICGKM

SEQ ID NO: 3395 - protein, 80 aa, Synthetic construct
LICEPIPHPSNIEIPLDSKTFLSRHSLDMKFSYCDERITELMGYEPEELLGRSIYEYYHALDSDHLTKTHHDMFTKGQVT

SEQ ID NO: 3396 - protein, 80 aa, Synthetic construct
ISDNVNKYMGLTQFELTGHSVFDFTHPCDHEEMREMLTHRNGLVKKGKEQNTQRSFFLRMKCTLTSRGRTMNIKSATWKV

SEQ ID NO: 3397 - protein, 80 aa, Synthetic construct
AGKGVIEQTEKSHPRSPNVLSVALSQRTTVPEEELNPKILALQNAQRKRKMEHDGSLFQAVGIGTLLQQPDDHAATTSLS

SEQ ID NO: 3398 - protein, 80 aa, Synthetic construct
YPALKWDLEYLQENIGNGDFSVYSASTHKFLYYDEKKMANFQNFKPRSNREEMKFHEFVEKLQDIQQRGGEERLYLQQTL

SEQ ID NO: 3399 - protein, 80 aa, Synthetic construct
QLTSNLLLIGMEGNVTPAHYDEQQNFFAQIKGYKRCILFPPDQFECLYPYPVHHPCDRQSQVDFDNPDYERFPNFQNVVG

SEQ ID NO: 3400 - protein, 80 aa, Synthetic construct
HTKLKQWGLQALQSQADLGPCILDFQSRNVIPDIPDHFLCLWEHCENSFDNPEWFYRHVEAHSLCCEYEAVGKDNPVVLC

SEQ ID NO: 3401 - protein, 80 aa, Synthetic construct
IHPDGTKFATGGQGQDSGKVVIWNMSPVLQEDDEKDENIPKMLCQMDNHLACVNCVRWSNSGMYLASGGDDKLIMVWKRA

SEQ ID NO: 3402 - protein, 80 aa, Synthetic construct
GTTHVLRLSWSPDGHYLVSAHAMNNSGPTAQIIEREGWKTNMDFVGHRKAVTVVKFNPKIFKKKQKNGSSAKPSCPYCCC

SEQ ID NO: 3403 - protein, 90 aa, Synthetic construct
TAAATLSVWDVHRQVVVVKEESLHSILAGSDMTVSQILLTQHGIPVMNLSDGKAYCFNPSLSTWNLVSDKQDSLAQCADFRSSLPSQDAM

SEQ ID NO: 3404 - protein, 80 aa, Synthetic construct
SPDGHYLVSAHAMNNSGPTAQIIEREGWKTNMDFVGHRKAVTVVKFNPKIFKKKQKNGSSAKPSCPYCCCAVGSKDRSLS

SEQ ID NO: 3405 - protein, 80 aa, Synthetic construct
ERKNRSSKKSSRKGRTRSSSSSSDGSPEAKGGKAGSGRRGEDHPAVMRLKRYIRACGAHRNYKKLLGSCCSHKERLSILR

SEQ ID NO: 3406 - protein, 90 aa, Synthetic construct
NLLLKDQKPKKQGKYICEYCNRACAKPSVLLKHIRSHTGERPYPCVTCGFSFKTKSNLYKHKKSHAHTIKLGLVLQPDAGGLFLSHESPK

SEQ ID NO: 3407 - protein, 150 aa, Synthetic construct
NALGCNPSLPKHNVTIRSDQQHKNIQLQNSHIHLVARGPEQTMDPKLSTIMEQQISSAAQDKIELQRHGTGISVIQHTNSLSRPNSFDKPEPFERASPVSFQELNRTGKSGSLKVIGISQEESHPSRDGSHPHQLALSDALRGELQESSR

SEQ ID NO: 3408 - protein, 80 aa, Synthetic construct
LLVYSSKWKSSLSKRALGNQKSTVVEFSNKDASEINSEQDKENSLIKSEPRRIKIFDGGYKSNEEYVYVRGRGRGKYICE

SEQ ID NO: 3409 - protein, 80 aa, Synthetic construct
KSNEEYVYVRGRGRGKYICEECGIRCKKPSMLKKHIRTHTDVRPYHCTYCNFSFKTKGNLTKHMKSKAHSKKCVDLGVSV

SEQ ID NO: 3410 - protein, 90 aa, Synthetic construct
KQQITLQPTPGLPSPHTHLFSHLPLHSQQQSRTPYNMVPVGGIHVVPAGLTYSTFVPLQAGPVQLTIPAVSVVHRTLGTHRNTVTEVSGT

SEQ ID NO: 3411 - protein, 140 aa, Synthetic construct
KKPLFLQQPSELRRWRSEGADPAKFSDLDEQCDSSSLSSKTRTDNSECISSHCGTTSPSYTNTAFDVLLKAMEPELSTLSQKGSPCAIKTEKLRPNKTARSPPKLKNSSMDAPNQTSQELVAESQSSCTSYTVHMSAAQK

SEQ ID NO: 3412 - protein, 90 aa, Synthetic construct
QAEEAHKKEHKPKKPGKYICPYCSRACAKPSVLKKHIRSHTGERPYPCIPCGFSFKTKSNLYKHRKSHAHAIKAGLVPFTESAVSKLDLE

SEQ ID NO: 3413 - protein, 140 aa, Synthetic construct
LQMQEGVRSGFAMAGHENLSHGHTERFDPCRPQLQPGSPSLVSEESPSAIDSDKMSDLGGRKPPGNVISVIQHTNSLSRPNSFERSESAELVACTQDKAPSPSETCDSEISEAPVSPEWAPPGDGAESGGKPSPSQQVQQ

SEQ ID NO: 3414 - protein, 80 aa, Synthetic construct
KPSPSQQVQQQSYHTQPRLVRQHNIQVPEIRVTEEPDKPEKEKEAQSKEPEKPVEEFQWPQRSETLSQLPAEKLPPKKKR

SEQ ID NO: 3415 - protein, 90 aa, Synthetic construct
HLAQPQIMHMDSQESLRNPLIQPTSYMTSKHLPEQPHLFPHQETIPFSPIQNALFQFQYPTVCMVHLPAQQPPWWQAHFPHPFAQHPQKS

SEQ ID NO: 3416 - protein, 80 aa, Synthetic construct
YKSNEDYVYVRGRGRGKYICEECGIRCKKPSMLKKHIRTHTDVRPYVCKLCNFAFKTKGNLTKHMKSKAHMKKCLELGVS

SEQ ID NO: 3417 - protein, 80 aa, Synthetic construct
VGIPPQRMLRRQAAFELPSVQEGHVEVEHHGRMLKGISSSSLKEKKLSPGDRVGYDYDVCRKPYKKWEDSETPKQNYRDI

SEQ ID NO: 3418 - protein, 120 aa, Synthetic construct
RQHNIQVPEIRVTEEPDKPEKEKEAQSKEPEKPVEEFQWPQRSETLSQLPAEKLPPKKKRLRLADMEHSSGESSFESTGTGLSRSPSQESNLSHSSSFSMSFEREETSKLSALPKQDEFG

SEQ ID NO: 3419 - protein, 90 aa, Synthetic construct
SLKPTEEAHKKERKPQKPGKYICQYCSRPCAKPSVLQKHIRSHTGERPYPCGPCGFSFKTKSNLYKHRKSHAHRIKAGLASGMGGEMYPH

SEQ ID NO: 3420 - protein, 140 aa, Synthetic construct
STKSQFGSPGPSDAARNLPLESTKSPAEPSKSVPSLEGPTGFQPRTPKPGSGSESGKERRTTSKEISVIQHTSSFEKSDSLEQPSGLEGEDKPLAQFPSPPPAPHGRSAHSLQPKLVRQPNIQVPEILVTEEPDRPDTEP

SEQ ID NO: 3421 - protein, 90 aa, Synthetic construct
FFSTQAMSSLLSSPYSMPPLPPSLFQAPPLPLQPTVLHPGQLHLPQLMPHPANIPFRQPPSFLPMPYPTSSALSSGFFLPLQSQFALQLP

SEQ ID NO: 3422 - protein, 140 aa, Synthetic construct
KEYPQPSGKPHRRGLTPLSVKKEDSKEQPDLPSLAPPSSLPLSETSSRPAKSQEGTDSKKVLQFPSLHTTTNVSWCYLNYIKPNHIQHADRRSSVYAGWCISLYNPNLPGVSTKAALSLLRSKQKVSKETYTMATAPHPE

SEQ ID NO: 3423 - protein, 100 aa, Synthetic construct
EPPPKEPEKTEEFQWPQRSQTLAQLPAEKLPPKKKRLRLAEMAQSSGESSFESSVPLSRSPSQESNVSLSGSSRSASFERDDHGKAEAPSPSSDMRPKPL

SEQ ID NO: 3424 - protein, 80 aa, Synthetic construct
PASPGGLQGLETRRLSLPSSKAKAKSLSEAFENLGKRSLEAGRCLPKSDSSSSLPKTNPTHSATRPQQTSDLHVQGNSSG

SEQ ID NO: 3425 - protein, 80 aa, Synthetic construct
EGFLGKLNPDPHFQGFQKLPSSPLGCRKSLLGSTAIEAPSSTCVARAITRDGTRDHQFPAKRPRLSEPQGSGRQGNSLGA

SEQ ID NO: 3426 - protein, 80 aa, Synthetic construct
DQVSNKQAQILEPKPEPSLEIKPEQDGMEHVGRDDPKALGEEPKQRRGSASGSEPAGDSDRGGGPVEHYHLHLSSCHECL

SEQ ID NO: 3427 - protein, 80 aa, Synthetic construct
KFASAENIPDLPYDYSSSLESVADETSPEREGRRVNLTGKAPNILLYVGSDSQEALGRFHEVRSVLADCVDIDSYILYHL

SEQ ID NO: 3428 - protein, 80 aa, Synthetic construct
EGRRVNLTGKAPNILLYVGSDSQEALGRFHEVRSVLADCVDIDSYILYHLLEDSALRDPWTDNCLLLVIATRESIPEDLY

SEQ ID NO: 3429 - protein, 80 aa, Synthetic construct
LLTNAVSSNGPSGNDTPEELRKKLIRKMKLILSSGSDEECAICLDSLTVPVITHCAHVFCKPCICQVIQNEQPHAKCPLC

SEQ ID NO: 3430 - protein, 80 aa, Synthetic construct
SFLKLKPFIDREWWHRTIQRPVTMGDEGGLRRLQSLIKNITLRRTKTSKIKGKPVLELPERKVFIQHITLSDEERKIYQS

SEQ ID NO: 3431 - protein, 140 aa, Synthetic construct
LSPLSAAYHHHHPQQQQQQQQPQQQQPPPPPRAGALQPPASGTRVVPNPHHSGSAPAPSSKDLKFGIDRILSAEFDPKVKEGNTLRDLTSLLTGGRPAGVHLSGLQPSAGQFFASLDPINEASAILSPLNSNPRNSVQHQ

SEQ ID NO: 3432 - protein, 100 aa, Synthetic construct
LSSFPVVLLETMSHYTDEPRFTIEQIDLLQRLRRTGMTKHEILHALETLDRLDQEHSDKFGRRSSYGGSSYGNSTNNVPASSSTATASTQTQHSGMSPSP

SEQ ID NO: 3433 - protein, 80 aa, Synthetic construct
KMLGAEWSKLQPTEKQRYLDEAEREKQQYMKELRAYQQSEAYKMCTEKIQEKKIKKEDSSSGLMNTLLNGHKGGDCDGFS

SEQ ID NO: 3434 - protein, 80 aa, Synthetic construct
KELRAYQQSEAYKMCTEKIQEKKIKKEDSSSGLMNTLLNGHKGGDCDGFSTFDVPIFTEEFLDQNKAREAELRRLRKMNV

SEQ ID NO: 3435 - protein, 80 aa, Synthetic construct
NERREQIRTRHPDLPFPEITKMLGAEWSKLQPTEKQRYLDEAEREKQQYMKELRAYQQSEAYKMCTEKIQEKKIKKEDSS

SEQ ID NO: 3436 - protein, 80 aa, Synthetic construct
GKDGSKVTKQEPTRRSARLSAKPAPPKPEPKPRKTSAKKEPGAKISRGAKGKKEEKQEAGKEGTAPSENGETKAEEAQKT

SEQ ID NO: 3437 - protein, 130 aa, Synthetic construct
SSRKMKTKSDMMEENIDTSAQAVAETKQEAVVEEDYNENAKNGEAKITEAPASEKEIVEVKEENIEDATEKGGEKKEAVAAEVKNEEEDQKEDEEDQNEEKGEAGKEDKDEKGEEDGKEDKNGNEKGEDA

SEQ ID NO: 3438 - protein, 80 aa, Synthetic construct
MAYDDSVKKEDCFDGDHTFEDIGLAAGRSQREKKRSYKDFLREEEEIAAQVRNSSKKKLKDSELYFLGTDTHKKKRKHSS

SEQ ID NO: 3439 - protein, 80 aa, Synthetic construct
SSVGVLSPQKKSPPTTMLLPASPAKAPETEPIDVAAHLQLLGESLSLIGHRLQETEGMVAVSGSLSVLLDSIICALGPLA

SEQ ID NO: 3440 - protein, 90 aa, Synthetic construct
TRGGVGVGGGRKKKTRTVFSRSQVFQLESTFDLKRYLSSAERAGLAASLQLTETQVKIWFQNRRNKWKRQLAAELEAASLSPPGAQRLVR

SEQ ID NO: 3441 - protein, 80 aa, Synthetic construct
ERQAGAAKKKTRTVFSRSQVYQLESTFDMKRYLSSSERACLASSLQLTETQVKTWFQNRRNKWKRQLSAELEAANMAHAS

SEQ ID NO: 3442 - protein, 90 aa, Synthetic construct
WKKGAESPEKKPACRKKKTRTVFSRSQVFQLESTFDMKRYLSSSERAGLAASLHLTETQVKIWFQNRRNKWKRQLAAELEAANLSHAAAQ

SEQ ID NO: 3443 - protein, 80 aa, Synthetic construct
VSKLTSLQQELLSALLSSGVTKEVLVQALEELLPSPNFGVKLETLPLSPGSGAEPDTKPVFHTLTNGHAKGRLSGDEGSE

SEQ ID NO: 3444 - protein, 80 aa, Synthetic construct
IEQIQFIKLFGMAKIDNLLQEMLLGGSPSDAPHAHHPLHPHLMQEHMGTNVIVANTMPTHLSNGQMCEWPRPRGQAATPE

SEQ ID NO: 3445 - protein, 80 aa, Synthetic construct
ELPLDDQVALLRAHAGEHLLLGATKRSMMYKDILLLGNNYVIHRNSCEVEISRVANRVLDELVRPFQEIQIDDNEYACLK

SEQ ID NO: 3446 - protein, 100 aa, Synthetic construct
GYSLKGIKTCNCETEDYGEKFDENDVITCFANFESDEVELSYAKNGQDLGVAFKISKEVLAGRPLFPHVLCHNCAVEFNFGQKEKPYFPIPEEYTFIQNV

SEQ ID NO: 3447 - protein, 80 aa, Synthetic construct
KAELMERLQAALDDEEAGGRPAMEPGNGSLDLGGDSAGRSGAGLEQEAAAGGDEEEEEEEEEEEGISALDGDQMELGEEN

SEQ ID NO: 3448 - protein, 80 aa, Synthetic construct
GGDEEEEEEEEEEEGISALDGDQMELGEENGAAGAADSGPMEEEEAASEDENGDDQGFQEGEDELGDEEEGAGDENGHGE

SEQ ID NO: 3449 - protein, 90 aa, Synthetic construct
QLVWTQAAQTSELDSNEHLLKTFSYFPYPSLADIALLCLRYGLQMEKVKTWFMAQRLRCGISWSSEEIEETRARVVYRRDQLHFKSLLSF

SEQ ID NO: 3450 - protein, 80 aa, Synthetic construct
VPPPPVPAPEQVGIGIGPPTLSKPTQTKGLKVEPEEPSQMPPLPQSHQKLKESLMTPGSGAFPYQSDFWQHLQSSGLSKE

SEQ ID NO: 3451 - protein, 80 aa, Synthetic construct
LSKPTQTKGLKVEPEEPSQMPPLPQSHQKLKESLMTPGSGAFPYQSDFWQHLQSSGLSKEQAGRGPNQSHGIGTASWNHS

SEQ ID NO: 3452 - protein, 90 aa, Synthetic construct
DIQPLERYWAAHQQLRETDIPQLSQASRLSTQQVLDWFDSRLPQPAEVVVCLDEEEEEEEEELPEDDEEEEEEEEEDDDDDDDDDVIIQD

SEQ ID NO: 3453 - protein, 80 aa, Synthetic construct
ALPPHLEPAWPQGLRHNSVPGRVGPTEYLSPDMQRQRKTKRKTKEQLAILKSFFLQCQWARREDYQKLEQITGLPRPEII

SEQ ID NO: 3454 - protein, 80 aa, Synthetic construct
KYLTRARRVEIAASLQLNETQVKIWFQNRRMKQKKREKEGLLPISPATPPGNDEKAEESSEKSSSSPCVPSPGSSTSDTL

SEQ ID NO: 3455 - protein, 100 aa, Synthetic construct
PPPPQPPQPAPQATSCSFAQNIKEESSYCLYDSADKCPKVSATAAELAPFPRGPPPDGCALGTSSGVPVPGYFRLSQAYGTAKGYGSGGGGAQQLGAGPF

SEQ ID NO: 3456 - protein, 80 aa, Synthetic construct
VEMANLLNLTERQIKIWFQNRRMKYKKDQKGKGMLTSSGGQSPSRSPVPPGAGGYLNSMHSLVNSVPYEPQSPPPFSKPP

SEQ ID NO: 3457 - protein, 90 aa, Synthetic construct
HVSAVNPSYNGGEPKRSRTAYTRQQVLELEKEFHFNRYLTRRRRIEIAHTLCLSERQVKIWFQNRRMKWKKDHKLPNTKMRSSNSASASA

SEQ ID NO: 3458 - protein, 80 aa, Synthetic construct
RMNSCAGAVYGSHGRRGRQTYTRYQTLELEKEFHFNRYLTRRRRIEIANALCLTERQIKIWFQNRRMKWKKENKLINSTQ

SEQ ID NO: 3459 - protein, 80 aa, Synthetic construct
SRPTEFAFYPGYPGTYQPMASYLDVSVVQTLGAPGEPRHDSLLPVDSYQSWALAGGWNSQMCCQGEQNPPGPFWKAAFAD

SEQ ID NO: 3460 - protein, 80 aa, Synthetic construct
PPGSAASKRARTAYTSAQLVELEKEFHFNRYLCRPRRVEMANLLNLSERQIKIWFQNRRMKYKKDQKAKGLASSSGGPSP

SEQ ID NO: 3461 - protein, 80 aa, Synthetic construct
AEHLEFPSCSFQPKAPVFGASWAPLSPHASGSLPSVYHPYIQPQGVPPAESRYLRTWLEPAPRGEAAPGQGQAAVKAEPL

SEQ ID NO: 3462 - protein, 80 aa, Synthetic construct
APRGEAAPGQGQAAVKAEPLLGAPGELLKQGTPEYSLETSAGREAVLSNQRPGYGDNKICEGSEDKERPDQTNPSANWLH

SEQ ID NO: 3463 - protein, 80 aa, Synthetic construct
DQTNPSANWLHARSSRKKRCPYTKYQTLELEKEFLFNMYLTRDRRHEVARLLNLSERQVKIWFQNRRMKMKKMNKEQGKE

SEQ ID NO: 3464 - protein, 80 aa, Synthetic construct
YMQSGSDFNCGVMRGCGLAPSLSKRDEGSSPSLALNTYPSYLSQLDSWGDPKAAYRLEQPVGRPLSSCSYPPSVKEENVC

SEQ ID NO: 3465 - protein, 90 aa, Synthetic construct
YLSQLDSWGDPKAAYRLEQPVGRPLSSCSYPPSVKEENVCCMYSAEKRAKSGPEAALYSHPLPESCLGEHEVPVPSYYRASPSYSALDKT

SEQ ID NO: 3466 - protein, 80 aa, Synthetic construct
FAFYPSFASSYQAMPGYLDVSVVPGISGHPEPRHDALIPVEGYQHWALSNGWDSQVYCSKEQSQSAHLWKSPFPDVVPLQ

SEQ ID NO: 3467 - protein, 80 aa, Synthetic construct
HSGVGYGADRRRGRQIYSRYQTLELEKEFHFNRYLTRRRRIEIANALCLTERQIKIWFQNRRMKWKKESNLTSTLSGGGG

SEQ ID NO: 3468 - protein, 130 aa, Synthetic construct
GLLPSLAKREVNHQNMGMNVHPYIPQVDSWTDPNRSCRIEQPVTQQVPTCSFTTNIKEESNCCMYSDKRNKLISAEVPSYQRLVPESCPVENPEVPVPGYFRLSQTYATGKTQEYNNSPEGSSTVMLQLN

SEQ ID NO: 3469 - protein, 80 aa, Synthetic construct
KSDTPTSNWLTAKSGRKKRCPYTKHQTLELEKEFLFNMYLTRERRLEISKSVNLTDRQVKIWFQNRRMKLKKMSRENRIR

SEQ ID NO: 3470 - protein, 90 aa, Synthetic construct
AGAEKSSSAVAPQRSRKKRCPYTKYQIRELEREFFFNVYINKEKRLQLSRMLNLTDRQVKIWFQNRRMKEKKLNRDRLQYLQYFTGNPLF

SEQ ID NO: 3471 - protein, 80 aa, Synthetic construct
ASCLRPSLPDGLPWGAAPGRARKKRKPYTKQQIAELENEFLVNEFINRQKRKELSNRLNLSDQQVKIWFQNRRMKKKRVV

SEQ ID NO: 3472 - protein, 90 aa, Synthetic construct
EVPARAKEVSFYQGYTSPYQHVPGYIDMVSTFGSGEPRHEAYISMEGYQSWTLANGWNSQVYCTKDQPQGSHFWKSSFPGDVALNQPDMC

SEQ ID NO: 3473 - protein, 80 aa, Synthetic construct
ALNQPDMCVYRRGRKKRVPYTKLQLKELENEYAINKFINKDKRRRISAATNLSERQVTIWFQNRRVKDKKIVSKLKDTVS

SEQ ID NO: 3474 - protein, 80 aa, Synthetic construct
PGEPCPAPPAPPPAPLPGARAYSQSDPKQPPSGTALKQPAVVYPWMKKVHVNSVNPNYTGGEPKRSRTAYTRQQVLELEK

SEQ ID NO: 3475 - protein, 80 aa, Synthetic construct
QAAPGRRRGRQTYSRFQTLELEKEFLFNPYLTRKRRIEVSHALALTERQVKIWFQNRRMKWKKENNKDKFPVSRQEVKDG

SEQ ID NO: 3476 - protein, 80 aa, Synthetic construct
PSQMFPWMRPQAAPGRRRGRQTYSRFQTLELEKEFLFNPYLTRKRRIEVSHALALTERQVKIWFQNRRMKWKKENNKDKF

SEQ ID NO: 3477 - protein, 80 aa, Synthetic construct
PNNPAANWIHARSTRKKRCPYTKYQTLELEKEFLFNMYLTRDRRYEVARILNLTERQVKIWFQNRRMKMKKMSKEKCPKG

SEQ ID NO: 3478 - protein, 80 aa, Synthetic construct
MHLLKKTLQKCEKNGWMEQISGKGFSGTFQLCFPYYPSPGVLFPKKEPDDSRDEDEDEDESSEEDSEDEEPPPKRRLQKK

SEQ ID NO: 3479 - protein, 100 aa, Synthetic construct
EAMLTHPLAFCGPACPPRCGPLMPEHSGGHLKSDPVAFRPWHCPFLLETKILERAPFWVPTCLPPYLVSGLPPEHPCDWPLTPHPWVYSGGQPKVPSAFS

SEQ ID NO: 3480 - protein, 120 aa, Synthetic construct
TPRCPSPEPPVTQRGCCSSYPPTKGGGLGPCGKCQEGLEGGASGASEPSEEVNKASGPRACPPSHHTKLKKTWLTRHSEQFECPRGCPEVEERPVARLRALKRAGSPEVQGAMGSPAPKR

SEQ ID NO: 3481 - protein, 80 aa, Synthetic construct
CPPSHHTKLKKTWLTRHSEQFECPRGCPEVEERPVARLRALKRAGSPEVQGAMGSPAPKRPPDPFPGTAEQGAGGWQEVR

SEQ ID NO: 3482 - protein, 100 aa, Synthetic construct
AELSTAMHQVWVKFDIRGHCPCQADARVWAPGDAGQQKESTQKTPPTPQPSCNGDTHRTKSIKEETPDSAETPAEDRAGRGPLPCPSLCELLASTAVKLC

SEQ ID NO: 3483 - protein, 80 aa, Synthetic construct
SIKEETPDSAETPAEDRAGRGPLPCPSLCELLASTAVKLCLGHERIHMAFAPVTPALPSDDRITNILDSIIAQVVERKIQ

SEQ ID NO: 3484 - protein, 80 aa, Synthetic construct
GPGSGPDSRLSTGLAKHLLSGLGDRLCRLLRREREALAWAQREGQGPAVTEDSPGIPRCCSRCHHGLFNTHWRCPRCSHR

SEQ ID NO: 3485 - protein, 110 aa, Synthetic construct
DALICWSPSGNSFHVFDQGQFAKEVLPKYFKHNNMASFVRQLNMYGFRKVVHIEQGGLVKPERDDTEFQHPCFLRGQEQLLENIKRKVTSVSTLKSEDIKIRQDSVTKLL

SEQ ID NO: 3486 - protein, 80 aa, Synthetic construct
VHIEQGGLVKPERDDTEFQHPCFLRGQEQLLENIKRKVTSVSTLKSEDIKIRQDSVTKLLTDVQLMKGKQECMDSKLLAM

SEQ ID NO: 3487 - protein, 140 aa, Synthetic construct
PCFLRGQEQLLENIKRKVTSVSTLKSEDIKIRQDSVTKLLTDVQLMKGKQECMDSKLLAMKHENEALWREVASLRQKHAQQQKVVNKLIQFLISLVQSNRILGVKRKIPLMLNDSGSAHSMPKYSRQFSLEHVHGSGPYS

SEQ ID NO: 3488 - protein, 90 aa, Synthetic construct
MPKYSRQFSLEHVHGSGPYSAPSPAYSSSSLYAPDAVASSGPIISDITELAPASPMASPGGSIDERPLSSSPLVRVKEEPPSPPQSPRVE

SEQ ID NO: 3489 - protein, 120 aa, Synthetic construct
LYAPDAVASSGPIISDITELAPASPMASPGGSIDERPLSSSPLVRVKEEPPSPPQSPRVEEASPGRPSSVDTLLSPTALIDSILRESEPAPASVTALTDARGHTDTEGRPPSPPPTSTPE

SEQ ID NO: 3490 - protein, 90 aa, Synthetic construct
HTNEFITWSQNGQSFLVLDEQRFAKEILPKYFKHNNMASFVRQLNMYGFRKVVHIDSGIVKQERDGPVEFQHPYFKQGQDDLLENIKRKV

SEQ ID NO: 3491 - protein, 130 aa, Synthetic construct
YFKHNNMASFVRQLNMYGFRKVVHIDSGIVKQERDGPVEFQHPYFKQGQDDLLENIKRKVSSSKPEENKIRQEDLTKIISSAQKVQIKQETIESRLSELKSENESLWKEVSELRAKHAQQQQVIRKIVQF

SEQ ID NO: 3492 - protein, 110 aa, Synthetic construct
RQEDLTKIISSAQKVQIKQETIESRLSELKSENESLWKEVSELRAKHAQQQQVIRKIVQFIVTLVQNNQLVSLKRKRPLLLNTNGAQKKNLFQHIVKEPTDNHHHKVPHS

SEQ ID NO: 3493 - protein, 80 aa, Synthetic construct
LNTNGAQKKNLFQHIVKEPTDNHHHKVPHSRTEGLKPRERISDDIIIYDVTDDNADEENIPVIPETNEDVISDPSNCSQY

SEQ ID NO: 3494 - protein, 80 aa, Synthetic construct
PALRGDDGRWRPEDLGRLLGEVQALRGVQESTEARLRELRQQNEILWREVVTLRQSHGQQHRVIGKLIQCLFGPLQAGPS

SEQ ID NO: 3495 - protein, 80 aa, Synthetic construct
STEARLRELRQQNEILWREVVTLRQSHGQQHRVIGKLIQCLFGPLQAGPSNAGGKRKLSLMLDEGSSCPTPAKFNTCPLP

SEQ ID NO: 3496 - protein, 100 aa, Synthetic construct
PEGTRLSPSSDGRREKGLALLKEEPASPGGDGEAGLALAPNECDFCVTAPPPLPVAVVQAILEGKGSFSPEGPRNAQQPEPGDPREIPDRGPLGLESGDR

SEQ ID NO: 3497 - protein, 140 aa, Synthetic construct
LSSCVTPTASSYAHCNYFQNPSMQSSYPVEFLPSNWPCSTTDENTKTEVNLEAVFQIVDELHSSPKLEMVKVEPVENQCPTSPSYRGQHILANSNNSNPCSASQASQLEPLTPVGSDIMSFVVGTEQAVACSLPQSPEYI

SEQ ID NO: 3498 - protein, 90 aa, Synthetic construct
TQPAGEWSEGSQAHVTPVAAVPGPAALPFLYVPGSPTQMNSYGPVVALPTASRSTLAMDTTGLPAPGMLPFCHLWVPVTLVAAGAAQPAA

SEQ ID NO: 3499 - protein, 90 aa, Synthetic construct
ASRSTLAMDTTGLPAPGMLPFCHLWVPVTLVAAGAAQPAASMVMFPHLPALHHHCPHSHRTSQYMPASDGPQAYPDYADQAYPDYADQST

SEQ ID NO: 3500 - protein, 80 aa, Synthetic construct
TSQYHIISPLQNGYFGLTVEPSAVPTRYPLVSVNEAPYRNMLPAGNPWLQMPTIADRSAAPHSRLALQPSPLDKYHPNYN

SEQ ID NO: 3501 - protein, 80 aa, Synthetic construct
TALIKRNSTIPTKQTQIFTTYSDNQPGVLIQVYEGERAMTKDNNLLGRFELSGIPPAPRGVPQIEVTFDIDANGILNVTA

SEQ ID NO: 3502 - protein, 80 aa, Synthetic construct
LSGIPPAPRGVPQIEVTFDIDANGILNVTATDKSTGKANKITITNDKGRLSKEEIERMVQEAEKYKAEDEVQRERVSAKN

SEQ ID NO: 3503 - protein, 110 aa, Synthetic construct
YGAAVQAAILSGDKSENVQDLLLLDVTPLSLGIETAGGVMTVLIKRNTTIPTKQTQTFTTYSDNQPGVLIQVYEGERAMTKDNNLLGKFELTGIPPAPRGVPQIEVTFDI

SEQ ID NO: 3504 - protein, 90 aa, Synthetic construct
DVDQPSPSAQDTQSIASDGTPQGEKEKEERPPELPLLSEQLSLDELWDMLGECLKELEESHDQHAVLVLQPAVEAFFLVHATERESKPPV

SEQ ID NO: 3505 - protein, 120 aa, Synthetic construct
HDQHAVLVLQPAVEAFFLVHATERESKPPVRDTRESQLAHIKDEPPPLSPAPLTPATPSSLDPFFSREPSSMHISSSLPPDTQKFLRFAETHRTVLNQILRQSTTHLADGPFAVLVDYIR

SEQ ID NO: 3506 - protein, 80 aa, Synthetic construct
PNQQVVGTEERIPIPLMDYILNVMKFVESILSNNTTDDHCQEFVNQKGLLPLVTILGLPNLPIDFPTSAACQAVAGVCKS

SEQ ID NO: 3507 - protein, 80 aa, Synthetic construct
DGEQDGAAGSMDASTQGLLEGIGLDGDTLAPMETDEPTASDSKGKSKITPAMAARIKQIKPLLSASSRLGRALAELFGLL

SEQ ID NO: 3508 - protein, 80 aa, Synthetic construct
TAKTQHNGMNNIIRLFLKKGLVNDLARVPHSLDLSSPNMANTVNAALKPLETLSRIVNQPSSLFGSKSASSKNKSEQDAQ

SEQ ID NO: 3509 - protein, 80 aa, Synthetic construct
DEEEHTQEEDSSGSNEDEDDSQDEEEEEEEDEEDDQEDDEGEEGDEDDDDDGSEMELDEDYPDMNASPLVRFERFDREDD

SEQ ID NO: 3510 - protein, 90 aa, Synthetic construct
STTVTTPTTATTTVSISPTTKGSKSPAKVSDGGSSSTDFKMVSSGLTENQLQLSVEVLTSHSCSEEGLEDAANVLLQLSRGDSGTRDTVL

SEQ ID NO: 3511 - protein, 80 aa, Synthetic construct
GDSGTRDTVLKLLLNGARHLGYTLCKQIGTLLAELREYNLEQQRRAQCETLSPDGLPEEQPQTTKLKGKMQSRFDMAENV

SEQ ID NO: 3512 - protein, 100 aa, Synthetic construct
PIPEDLSTTSGGQQSSKSDRVVASNVKVETQSDEENGRACEMNGEECAEDLRMLDASGEKMNGSHRDQGSSALSGVGGIRLPNGKLKCDICGIICIGPNV

SEQ ID NO: 3513 - protein, 80 aa, Synthetic construct
LMVHKRSHTGERPFQCNQCGASFTQKGNLLRHIKLHSGEKPFKCHLCNYACRRRDALTGHLRTHSVGKPHKCGYCGRSYK

SEQ ID NO: 3514 - protein, 110 aa, Synthetic construct
PFKCHLCNYACRRRDALTGHLRTHSVGKPHKCGYCGRSYKQRSSLEEHKERCHNYLESMGLPGTLYPVIKEETNHSEMAEDLCKIGSERSLVLDRLASNVAKRKSSMPQK

SEQ ID NO: 3515 - protein, 100 aa, Synthetic construct
HSNMAIDLTSSTPNGQHASPSHMTSTNSVKLEMQSDEECDRKPLSREDEIRGHDEGSSLEEPLIESSEVADNRKVQELQGEGGIRLPNGKLKCDVCGMVC

SEQ ID NO: 3516 - protein, 90 aa, Synthetic construct
KALDTTKAPKGSLKDIYKVFNGEGEQIRAFKCEHCRVLFLDHVMYTIHMGCHGYRDPLECNICGYRSQDRYEFSSHIVRGHIVRGEHTFH

SEQ ID NO: 3517 - protein, 80 aa, Synthetic construct
NLTYEKEAELMQSHMMDQAINNAITYLGAEALHPLMQHPPSTIAEVAPVISSAYSQVYHPNRIERPISRETADSHENNMD

SEQ ID NO: 3518 - protein, 80 aa, Synthetic construct
SGEGPANEDEDIGDDSMKVKDEYSERDENVLKSEPMGNAEEPEIPYSYSREYNEYENIKLERHVVSFDSSRPTSGKMNCD

SEQ ID NO: 3519 - protein, 80 aa, Synthetic construct
LKSEPMGNAEEPEIPYSYSREYNEYENIKLERHVVSFDSSRPTSGKMNCDVCGLSCISFNVLMVHKRSHTGERPFQCNQC

SEQ ID NO: 3520 - protein, 80 aa, Synthetic construct
PPPICPRDSVKVINKEGEVMDVYRCDHCRVLFLDYVMFTIHMGCHGFRDPFECNMCGYRSHDRYEFSSHIARGEHRALLK

SEQ ID NO: 3521 - protein, 80 aa, Synthetic construct
RSLSANSIKVEMYSDEESSRLLGPDERLLEKDDSVIVEDSLSEPLGYCDGSGPEPHSPGGIRLPNGKLKCDVCGMVCIGP

SEQ ID NO: 3522 - protein, 90 aa, Synthetic construct
QEGLLRGTPGPSKEVLRVVGESGEPVKAFKCEHCRILFLDHVMFTIHMGCHGFRDPFECNICGYHSQDRYEFSSHIVRGEHIVRGEHKVG

SEQ ID NO: 3523 - protein, 80 aa, Synthetic construct
EKPFKCPFCNYACRRRDALTGHLRTHSVSSPTVGKPYKCNYCGRSYKQQSTLEEHKERCHNYLQSLSTEAQALAGQPGDE

SEQ ID NO: 3524 - protein, 90 aa, Synthetic construct
SEPSAHTSTPSIGNSQPSTPAPALPVQDPQLLHHCQHCDMYFADNILYTIHMGCHGYENPFQCNICGCKCKNKYDFACHFHFARGQHNQH

SEQ ID NO: 3525 - protein, 80 aa, Synthetic construct
KEIDDVYEKYKKEDDLNQKKRLQQLLQRALINSQELGDEKIQIVTQMLELVENRARQMELHSQCFQDPAESERASDKAKM

SEQ ID NO: 3526 - protein, 80 aa, Synthetic construct
DMQRNVSVLRELDNKYQETLKEIDDVYEKYKKEDDLNQKKRLQQLLQRALINSQELGDEKIQIVTQMLELVENRARQMEL

SEQ ID NO: 3527 - protein, 80 aa, Synthetic construct
QRVSEFFMNAKKNKPEWREEQMASIKKDYYKALEDADEKVQLANQIYDLVDRHLRKLDQELAKFKMELEADNAGITEILE

SEQ ID NO: 3528 - protein, 80 aa, Synthetic construct
QMASIKKDYYKALEDADEKVQLANQIYDLVDRHLRKLDQELAKFKMELEADNAGITEILERRSLELDTPSQPVNNHHAHS

SEQ ID NO: 3529 - protein, 80 aa, Synthetic construct
QLANQIYDLVDRHLRKLDQELAKFKMELEADNAGITEILERRSLELDTPSQPVNNHHAHSHTPVEKRKYNPTSHHTTTDH

SEQ ID NO: 3530 - protein, 80 aa, Synthetic construct
EEAPKTAQKKLKLVRTSPEYGMPSVTFGSVHPSDVLDMPVDPNEPTYCLCHQVSYGEMIGCDNPDCSIEWFHFACVGLTT

SEQ ID NO: 3531 - protein, 90 aa, Synthetic construct
RGRGRRTSEEDTPKKKKHKGGSEFTDTILSVHPSDVLDMPVDPNEPTYCLCHQVSYGEMIGCDNPDCPIEWFHFACVDLTTKPKGKWFCP

SEQ ID NO: 3532 - protein, 80 aa, Synthetic construct
AYSKCKEYSDDKVQLAMQTYEMVDKHIRRLDADLARFEADLKDKMEGSDFESSGGRGLKKGRGQKEKRGSRGRGRRTSEE

SEQ ID NO: 3533 - protein, 110 aa, Synthetic construct
MASELGARDDGGCTELAKPLYLQYLERALRLDHFLRQTSAIFNRNISSDDSEDGLDDSNPLLPQSGDPLIQVKEEPPNSLLGETSGAGSSGMLNTYSLNGVLQSESKCDK

SEQ ID NO: 3534 - protein, 80 aa, Synthetic construct
LLPQSGDPLIQVKEEPPNSLLGETSGAGSSGMLNTYSLNGVLQSESKCDKGNLYNFSKLKKSRKWLKSILLSDESSEADS

SEQ ID NO: 3535 - protein, 90 aa, Synthetic construct
VFLLSTRAGGLGINLTAADTVIFYDSDWNPTVDQQAMDRAHRLGQTKQVTVYRLICKGTIEERILQRAKEKSEIQRMVISGGNFKPDTLK

SEQ ID NO: 3536 - protein, 80 aa, Synthetic construct
QRHLLGPKKKKFKEEKKLKAKLKKVKKKRRRDEELSSEESPRRHHHQTKVFAKFSHDAPPPGTKKKHLSIEQLNARRRKV

SEQ ID NO: 3537 - protein, 80 aa, Synthetic construct
SGAMEAPEPGEALELSLAGAHGHGVHKKKHKKHKKKHKKKHHQEEDAGPTQPSPAKPQLKLKIKLGGQVLGTKSVPTFTV

SEQ ID NO: 3538 - protein, 80 aa, Synthetic construct
HGHGVHKKKHKKHKKKHKKKHHQEEDAGPTQPSPAKPQLKLKIKLGGQVLGTKSVPTFTVIPEGPRSPSPLMVVDNEEEP

SEQ ID NO: 3539 - protein, 80 aa, Synthetic construct
QEHFSPPPAPSQQQPPQQHSHLSPLSTSLKPPAPPQGSVCKSPQPQNTSLPMQGVAPTTHTIAQARQLSHKRPLPLLPSS

SEQ ID NO: 3540 - protein, 80 aa, Synthetic construct
MNGPADGEVDYKKKYRNLKRKLKFLIYEHECFQEELRKAQRKLLKVSRDKSFLLDRLLQYENVDEDSSDSDATASSDNSE

SEQ ID NO: 3541 - protein, 120 aa, Synthetic construct
KRAAGGERRGKAPTDCASGPAAAGIKKPKAMRKLSFADEVTTSPVLGLKIKEEEPGAPSRGLGGSRTPLGEFICQLCKEQYADPFALAQHRCSRIVRVEYRCPECDKVFSCPANLASHRR

SEQ ID NO: 3542 - protein, 80 aa, Synthetic construct
VPDSTSDLYNFQVSPMPSTSEATTDEDEEGKLPEDIMKLLEQSEWQPTNVDGKGYLLNEPGVQPTSVYGDFSCKEEPEID

SEQ ID NO: 3543 - protein, 100 aa, Synthetic construct
KLPEDIMKLLEQSEWQPTNVDGKGYLLNEPGVQPTSVYGDFSCKEEPEIDSPGGDIGLSLQRVFTDLKNMDATWLDSLLTPVRLPSIQAIPSIQAIPCAP

SEQ ID NO: 3544 - protein, 90 aa, Synthetic construct
PDPKTWKANFRCAMNSLPDIEEVKDKSIKKGNNAFRVYRMLPLSERPSKKGKKPKTEKEDKVKHIKQEPVESSLGLSNGVSDLSPEYAVL

SEQ ID NO: 3545 - protein, 110 aa, Synthetic construct
GNNAFRVYRMLPLSERPSKKGKKPKTEKEDKVKHIKQEPVESSLGLSNGVSDLSPEYAVLTSTIKNEVDSTVNIIVVGQSHLDSNIENQEIVTNPPDICQVVEVTTESDE

SEQ ID NO: 3546 - protein, 100 aa, Synthetic construct
ESETTDSVPSDEESAEGRPHWRKRNIEGKQYLSNMGTRGSYLLPGMASFVTSNKPDLQVTIKEESNPVPYNSSWPPFQDLPLSSSMTPASSSSRPDRETR

SEQ ID NO: 3547 - protein, 80 aa, Synthetic construct
FPNLGPSENPLKRLLVPGEEWEFEVTAFYRGRQVFQQTISCPEGLRLVGSEVGDRTLPGWPVTLPDPGMSLTDRGVMSYV

SEQ ID NO: 3548 - protein, 80 aa, Synthetic construct
EVGDRTLPGWPVTLPDPGMSLTDRGVMSYVRHVLSCLGGGLALWRAGQWLWAQRLGHCHTYWAVSEELLPNSGHGPDGEV

SEQ ID NO: 3549 - protein, 80 aa, Synthetic construct
GVPTEPSIRSAEALAFSDCRLHICLYYREILVKELTTSSPEGCRISHGHTYDASNLDQVLFPYPEDNGQRKNIEKLLSHL

SEQ ID NO: 3550 - protein, 110 aa, Synthetic construct
LFCIPWRHATRHGPSQDGDNTIFKAWAKETGKYTEGVDEADPAKWKANLRCALNKSRDFRLIYDGPRDMPPQPYKIYEVCSNGPAPTDSQPPEDYSFGAGEEEEEEEELQ

SEQ ID NO: 3551 - protein, 80 aa, Synthetic construct
SAHDSCPNPIQREVKTKLFSLEHFLNELILFQKGQTNTPPPFEIFFCFGEEWPDRKPREKKLITVQVVPVAARLLLEMFS

SEQ ID NO: 3552 - protein, 120 aa, Synthetic construct
QSQHHVPIQDTFPFLNINGSPMAPASVGNCSVGNCSPEAVWPKTEPLEMEVPQAPIQPFYSSPELWISSLPMTDLDIKFQYRGKEYGQTMTVSNPQGCRLFYGDLGPMPDQEELFGPVSL

SEQ ID NO: 3553 - protein, 80 aa, Synthetic construct
QIEKQPPFEIYLCFGEEWPDGKPLERKLILVQVIPVVARMIYEMFSGDFTRSFDSGSVRLQISTPDIKDNIVAQLKQLYR

SEQ ID NO: 3554 - protein, 90 aa, Synthetic construct
PSTGVPLVTGYTTYDAHHSAFSQMVISFYYGGKLVGQATTTCPEGCRLSLSQPGLPGTKLYGPEGLELVRFPPADAIPSERQRQVTRKLF

SEQ ID NO: 3555 - protein, 80 aa, Synthetic construct
QFQYGDPGRPKNATRESTSTLKAWLNEHRKNPYPTKGEKIMLAIITKMTLTQVSTWFANARRRLKKENKVTWGARSKDQE

SEQ ID NO: 3556 - protein, 80 aa, Synthetic construct
KNATRESTSTLKAWLNEHRKNPYPTKGEKIMLAIITKMTLTQVSTWFANARRRLKKENKVTWGARSKDQEDGALFGSDTE

SEQ ID NO: 3557 - protein, 80 aa, Synthetic construct
PPASKPKLWSLAEIATSDLKQPSLGPGCGPPGLPAAAAPASTGAPPGGSPYPASPLLGRPLYYTSPFYGNYTNYGNLNAA

SEQ ID NO: 3558 - protein, 80 aa, Synthetic construct
VLSSVYGAPYAAAAAAAAAQGYGAFLPYAAELPIFPQLGAQYELKDSPGVQHPAAAAAFPHPHPAFYPYGQYQFGDPSRP

SEQ ID NO: 3559 - protein, 90 aa, Synthetic construct
HPHPAFYPYGQYQFGDPSRPKNATRESTSTLKAWLNEHRKNPYPTKGEKIMLAIITKMTLTQVSTWFANARRRLKKENKMTWAPRSRTDE

SEQ ID NO: 3560 - protein, 80 aa, Synthetic construct
SALQKPKIWSLAETATSPDNPRRSPPGAGGSPPGAAVAPSALQLSPAAAAAAAHRLVSAPLGKFPAWTNRPFPGPPPGPR

SEQ ID NO: 3561 - protein, 80 aa, Synthetic construct; identical to SEQ ID NO: 704

SEQ ID NO: 3562 - protein, 90 aa, Synthetic construct
YPYDRYGTMDSGTRRKNATRETTSTLKAWLQEHRKNPYPTKGEKIMLAIITKMTLTQVSTWFANARRRLKKENKMTWPPRNKCADEKRPY

SEQ ID NO: 3563 - protein, 90 aa, Synthetic construct
YDSRLLGSARPELGAALGIYGAPYAAAAAAQSYPGYLPYSPEPPSLYGALNPQYEFKEAAGSFTSSLAQPGAYYPYERTLGQYQYERYGA

SEQ ID NO: 3564 - protein, 80 aa, Synthetic construct
RRLKKENKMTWAPKNKGGEERKAEGGEEDSLGCLTADTKEVTASQEARGLRLSDLEDLEEEEEEEEEAEDEEVVATAGDR

SEQ ID NO: 3565 - protein, 90 aa, Synthetic construct
DGKTYCKRDYIRLYGIKCAKCSIGFSKNDFVMRARSKVYHIECFRCVACSRQLIPGDEFALREDGLFCRADHDVVERASLGAGDPLSPLH

SEQ ID NO: 3566 - protein, 80 aa, Synthetic construct
RQLIPGDEFALREDGLFCRADHDVVERASLGAGDPLSPLHPARPLQMAAEPISARQPALRPHVHKQPEKTTRVRTVLNEK

SEQ ID NO: 3567 - protein, 80 aa, Synthetic construct
VDIIFHYPFLGAMGDHSKKKPGTAMCVGCGSQIHDQFILRVSPDLEWHAACLKCAECSQYLDETCTCFVRDGKTYCKRDY

SEQ ID NO: 3568 - protein, 100 aa, Synthetic construct
CAEVGPALCRGMERNSLGCCEAPKKLSLSFSIEAILKRPARRSDMDRPEGPGEEGPGEAAASGSGLEKPPKDQPQEGRKSKRRVRTTFTTEQLHELEKIF

SEQ ID NO: 3569 - protein, 90 aa, Synthetic construct
NQRAKWRKQEKIGNLGAPQQLSEASVALPTNLDVAGPTWTSTALRRLAPPTSCCPSAQDQLASAWFPAWITLLPAHPWETQPVPGLPIHQ

SEQ ID NO: 3570 - protein, 80 aa, Synthetic construct
KDQPQEGRKSKRRVRTTFTTEQLHELEKIFHFTHYPDVHIRSQLAARINLPEARVQIWFQNQRAKWRKQEKIGNLGAPQQ

SEQ ID NO: 3571 - protein, 140 aa, Synthetic construct
VSEEKSLMFIRPKKYIVSSGSEPPELGYVDIRTLADSVCRYDLNDMDAAWLELTNEEFKEMGMPELDEYTMERVLEEFEQRCYDNMNHAIETEEGLGIEYDEDVVCDVCQSPDGEDGNEMVFCDKCNICVHQACYGILKV

SEQ ID NO: 3572 - protein, 80 aa, Synthetic construct
SPDGEDGNEMVFCDKCNICVHQACYGILKVPEGSWLCRTCALGVQPKCLLCPKKGGAMKPTRSGTKWVHVSCALWIPEVS

SEQ ID NO: 3573 - protein, 80 aa, Synthetic construct
LFTHLRQDLERVRNLTYMVTRREKIKRSVCKVQEQIFNLYTKLLEQERVSGVPSSCSSSSLENMLLFNSPSVGPDAPKIE

SEQ ID NO: 3574 - protein, 80 aa, Synthetic construct
TKLLEQERVSGVPSSCSSSSLENMLLFNSPSVGPDAPKIEDLKWHSAFFRKQMGTSLVHSLKKPHKRDPLQNSPGSEGKT

SEQ ID NO: 3575 - protein, 80 aa, Synthetic construct
LGLEKTFAEARLISAQQKNGVVMPDHGKRRDNRFHCDLIKGDLKDKSFKQSHKPLRSTDVSQRHLDNTRAATSPGVGQSA

SEQ ID NO: 3576 - protein, 80 aa, Synthetic construct; identical to SEQ ID NO: 405

SEQ ID NO: 3577 - protein, 80 aa, Synthetic construct
KYIHCSSPDTTEPGYINIMELAASVCRYDLDDMDIFWLQELNEDLAEMGCGPVDENLMEKTVEVLERHCHENMNHAIETE

SEQ ID NO: 3578 - protein, 80 aa, Synthetic construct
ENMNHAIETEEGLGIEYDEDVICDVCRSPDSEEGNDMVFCDKCNVCVHQACYGILKVPEGSWLCRSCVLGIYPQCVLCPK

SEQ ID NO: 3579 - protein, 100 aa, Synthetic construct
NFNKPLFPPKEDEENGLVQPKEESIHTRMRMFMHLRQDLERVRNLCYMISRREKLKLSHNKIQEQIFGLQVQLLNQEIDAGLPLTNALENSLFYPPPRIT

SEQ ID NO: 3580 - protein, 80 aa, Synthetic construct
LQDNTGEVVAVKKLQHSTEEHLRDFEREIEILKSLQHDNIVKYKGVCYSAGRRNLKLIMEYLPYGSLRDYLQKHKERIDH

SEQ ID NO: 3581 - protein, 90 aa, Synthetic construct
LRVAGDGGIAWTQGEQEVLQPFCDFPEIVDISIKQAPRVGPAGEHRLVTVTRTDNQILEAEFPGLPEALSFVALVDGYFRLTTDSQHFFC

SEQ ID NO: 3582 - protein, 80 aa, Synthetic construct
FTYCDKSCSPSAEFLRMMGCERDVPALCRLLELLEEGQRLPAPPACPAEVHELMKLCWAPSPQDRPSFSALGPQLDMLWS

SEQ ID NO: 3583 - protein, 100 aa, Synthetic construct
EERRKRRREKNKVAAARCRNKKKERTEFLQRESERLELMNAELKTQIEELKQERQQLILMLNRHRPTCIVRTDSVKTPESEGNPLLEQLENPLLEQLEKK

SEQ ID NO: 3584 - protein, 90 aa, Synthetic construct
DIDSLNPVLRDNPQLHEEVKVWVKEQKVQEIFMQGPYSLNGYRVRVYRQDSATQWFTGIITHHDLFTRTMIVMNDQVLEPQNVDPSMVQM

SEQ ID NO: 3585 - protein, 130 aa, Synthetic construct
HLKKHKAALAAAQYKSSNASETEPNAIKNQTLSASLPLDSTVICSTINKANSVGNGQASQTSQPNYHTKLKKAWLTRHSEEDKNTNKMENSGNSVSEIIKPCSVNLIASTSSDIQNSVDSKIIVDKYVKD

SEQ ID NO: 3586 - protein, 90 aa, Synthetic construct
DKFCQLVTSEKTALSWVKKDAKIAWKRAVRGVREMCDACEATLFNIHWVCQKCGFVVCLDCYKAKERKSSRDKELYAWMKCVKGQPHDHK

SEQ ID NO: 3587 - protein, 100 aa, Synthetic construct
GVREMCDACEATLFNIHWVCQKCGFVVCLDCYKAKERKSSRDKELYAWMKCVKGQPHDHKHLMPTQIIPGSVLTDLLDAMHTLREKYGIKSHCHCTNKQN

SEQ ID NO: 3588 - protein, 120 aa, Synthetic construct
ESDVGTDNKLTPPESQSPLHWLADLAEQKAREEKKENKELTLENQIKEEREQDNSESPNGRTSPLVSQNNEQGSTLRDLLTTTAGKLRVGSTDAGIAFAPVYSMGAPSSKSGRTMPNILD

SEQ ID NO: 3589 - protein, 110 aa, Synthetic construct
TTTAGKLRVGSTDAGIAFAPVYSMGAPSSKSGRTMPNILDDIIASVVENKIPPSKTSKINVKPELKEEPEESIISAVDENNKLYSDIPHSWICEKHILWLKDYKNSSNWK

SEQ ID NO: 3590 - protein, 80 aa, Synthetic construct
IPPSKTSKINVKPELKEEPEESIISAVDENNKLYSDIPHSWICEKHILWLKDYKNSSNWKLFKECWKQGQPAVVSGVHKK

SEQ ID NO: 3591 - protein, 80 aa, Synthetic construct
TLTPVMPVNAGGKVQESQKPPTLIPEPKDSQANFKSSSEQSLTEMWRPNNNLSKEKTEWHVEKSSGKLQAAMASVIVRPS

SEQ ID NO: 3592 - protein, 80 aa, Synthetic construct
GVSQVLQNVLNHSNKISLCMPESQQQNTPPKSEKNGGSSPESDVGTDNKLTPPESQSPLHWLADLAEQKAREEKKENKEL

SEQ ID NO: 3593 - protein, 80 aa, Synthetic construct
IQFLGDAIVLPAGALHQVQNFHSCIQVTEDFVSPEHLVESFHLTQELRLLKEEINYDDKLQVKNILYHAVKEMVRALKIH

SEQ ID NO: 3594 - protein, 100 aa, Synthetic construct
NLPYDVTSPALCDTHLHPRNQLAGPPLEITQEAGEMVFVPSGWHHQVHNLDDTISINHNWVNGFNLANMWRFLQQELCAVQEEVSEWRDSMPDWHHHCQV

SEQ ID NO: 3595 - protein, 80 aa, Synthetic construct
QEEVSEWRDSMPDWHHHCQVIMRSCSGINFEEFYHFLKVIAEKRLLVLREAAAEDGAGLGFEQAAFDVGRITEVLASLVA

SEQ ID NO: 3596 - protein, 90 aa, Synthetic construct
TIAITQNFASSTNFPVVWHKTVRGRPKLSRKWYRILKQEHPELAVLADSVDLQESTGIASDSSSDSSSSSSSSSSDSDSECESGSEGDGT

SEQ ID NO: 3597 - protein, 120 aa, Synthetic construct
QHPGVLYVQKQCSNLPSELPQLLPDLESHVPWASEALGKMPDAVNFWLGEAAAVTSLHKDHYENLYCVVSGEKHFLFHPPSDRPFIPYELYTPATYQLTEEGTFKVVDEEAMEKVPWIPL

SEQ ID NO: 3598 - protein, 110 aa, Synthetic construct
HYENLYCVVSGEKHFLFHPPSDRPFIPYELYTPATYQLTEEGTFKVVDEEAMEKVPWIPLDPLAPDLARYPSYSQAQALRCTVRAGEMLYLPALWFHHVQQSQGCIAVNF

SEQ ID NO: 3599 - protein, 80 aa, Synthetic construct
FYRDWVCPNRPCIIRNALQHWPALQKWSLPYFRATVGSTEVSVAVTPDGYADAVRGDRFMMPAERRLPLSFVLDVLEGRA

SEQ ID NO: 3600 - protein, 110 aa, Synthetic construct
AEQFCAFFRSLAAEHGLSAEQVYNADETGLFWRCLPNPTPEGGAVPGPKQGKDRLTVLMCANATGSHRLKPLAIGKCSGPRAFKGIQHLPVAYKAQGNAWVDKEIFSDWF

SEQ ID NO: 3601 - protein, 80 aa, Synthetic construct
ANATGSHRLKPLAIGKCSGPRAFKGIQHLPVAYKAQGNAWVDKEIFSDWFHHIFVPSVREHFRTIGLPEDSKAVLLLDSS

SEQ ID NO: 3602 - protein, 110 aa, Synthetic construct
PPAATSPAEVVWSSEKTPKADQDGRGDPGEGEEVAWEQAAVAFDAVLRFAERQPCFSAQEVGQLRALRAVFRSQQQVRRRRGALGAVVKVEALQEGPGGCGATAQSPLPC

SEQ ID NO: 3603 - protein, 80 aa, Synthetic construct
NERLNGDETAVEDFCNNFRDFIERENLQPEQIYNADETGLFWKCLPSRISVIKGKCTVPGHKSIEERVTIMCCANATGLH

SEQ ID NO: 3604 - protein, 100 aa, Synthetic construct
LADPVGSLKPHLRAKNSDLLTSPDVGLLKLASPELERLIIQSSNGHITTTPTPTQFLCPKNVTDEQEGFAEGFVRALAELHSQNTLPSVTSAAQPVNGAG

SEQ ID NO: 3605 - protein, 90 aa, Synthetic construct
PTPTQFLCPKNVTDEQEGFAEGFVRALAELHSQNTLPSVTSAAQPVNGAGMVAPAVASVAGGSGSGGFSASLHSEPPVYANLSNFNPGAL

SEQ ID NO: 3606 - protein, 80 aa, Synthetic construct
DMDTQERIKAERKRLRNRIAASKCRKRKLERISRLEEKVKTLKSQNTELASTASLLREQVAQLKQKVLSHVNSGCQLLPQ

SEQ ID NO: 3607 - protein, 80 aa, Synthetic construct
MAAMAPALTDAAAEAHHIRFKLAPPSSTLSPGSAENNGNANILIAANGTKRKAIAAEDPSLDFRNNPTKEDLGKLQPLVA

SEQ ID NO: 3608 - protein, 110 aa, Synthetic construct
LGEPSCNKLKNILYNGSNIQLSKICLSHSEEFIKKEPLSDTTSQCMKDVQIILDSNITKDTNVDKVQLQNCKWYQENALLDKVTDAEIKKGLLHCTQKKIVPGHSNVPVS

SEQ ID NO: 3609 - protein, 90 aa, Synthetic construct
DKVTDAEIKKGLLHCTQKKIVPGHSNVPVSSSAAEKEEEVHARLLHCVSKQKILLSQARRTQKHLQMLLAKHVVKHYGQQMKLSMKHQLP

SEQ ID NO: 3610 - protein, 90 aa, Synthetic construct
QTSARRMGTSLLFQLSVHERELDLVFLDHSYAKPWSAHPDASSARPTRMLFVTPRRQHESTIESDVPIDVETVTSTPMPLYDNQKARSVM

SEQ ID NO: 3611 - protein, 90 aa, Synthetic construct
ISRHDDEATRTSTSEGLEEGEVEGETLLIVESEDQASVDLSHDQSGDSLNSDEGDVSWMEEQLSYFCDKCQKWIPASQLREQLSYLKGDN

SEQ ID NO: 3612 - protein, 90 aa, Synthetic construct
EMEGDGVIDPGMEYVPPPAGSVASGPVVGVRKKVRGPEQIKQEVESEEEKPDRMDIDSEDTDSNTSLQTRAREKRKPQLEKDTKPKEPRY

SEQ ID NO: 3613 - protein, 80 aa, Synthetic construct
RKKVRGPEQIKQEVESEEEKPDRMDIDSEDTDSNTSLQTRAREKRKPQLEKDTKPKEPRYTPVSIYEEKLLLKRLEACPG

SEQ ID NO: 3614 - protein, 80 aa, Synthetic construct
EQLSYFCDKCQKWIPASQLREQLSYLKGDNFFRFTCSDCSADGKEQYERLKLTWQQVVMLAMYNLSLEGSGRQGYFRWKE

SEQ ID NO: 3615 - protein, 80 aa, Synthetic construct
TKFLYRLVGSEDMAVDQSIVSPYTSRILKPYIRRDYETKPPKLQLLSQIRSHLHRSDPHWTPEPDAPLDYCYVRPNHIPT

SEQ ID NO: 3616 - protein, 80 aa, Synthetic construct
NGWKNPKPPTAPRMDLQQPAANLSELCRSCEHPLADHVSHLENVSEDEINRLLGMVVDVENLFMSVHKEEDTDTKQVYFY

SEQ ID NO: 3617 - protein, 80 aa, Synthetic construct
SSLEQPNAGSSSPACKASSGLEANPGEKRKMTDSHVLEEAKKPRVMGDIPMELINEVMSTITDPAAMLGPETNFLSAHSA

SEQ ID NO: 3618 - protein, 80 aa, Synthetic construct
RKSNCLGTDEDSQDSSDGIPSAPRMTGSLVSDRSHDDIVTRMKNIECIELGRHRLKPWYFSPYPQELTTLPVLYLCEFCL

SEQ ID NO: 3619 - protein, 80 aa, Synthetic construct
KNKSYSQNLCLLAKCFLDHKTLYYDTDPFLFYVMTEYDCKGFHIVGYFSKEKESTEDYNVACILTLPPYQRRGYGKLLIE

SEQ ID NO: 3620 - protein, 90 aa, Synthetic construct
VSALFGGSAASGFHQQLRLAIKRAIGHGRLLKDGPLYRLNTKATNVDGKESCESLSCLPPVSLLPHEKDKPVAEPIPICSFCLGTKEQNR

SEQ ID NO: 3621 - protein, 80 aa, Synthetic construct
QGKNADNMLFCDSCDRGFHMECCDPPLTRMPKGMWICQICRPRKKGRKLLQKKAAQIKRRYTNPIGRPKNRLKKQNTVSK

SEQ ID NO: 3622 - protein, 80 aa, Synthetic construct
DWPTDNQDGWDGKQENEERLFGSQEIMTEKDMELFRDIQEQALQKVGVTGPPDPQVRCPSVIEFGKYEIHTWYSSPYPQE

SEQ ID NO: 3623 - protein, 80 aa, Synthetic construct
VKEEPGVQESFLDANMQKSREKIKDKEETELDSEEEQPSHDTSVVSEQMAGSEDDHEEDSHTKEELIELKEEEEIPHSEL

SEQ ID NO: 3624 - protein, 80 aa, Synthetic construct
MVKLANPLYTEWILEAIKKVKKQKQRPSEERICNAVSSSHGLDRKTVLEQLELSVKDGTILKVSNKGLNSYKDPDNPGRI

SEQ ID NO: 3625 - protein, 80 aa, Synthetic construct
CDRGFHMECCDPPLSRMPKGMWICQVCRPKKKGRKLLHEKAAQIKRRYAKPIGRPKNKLKQRLLSVTSDEGSMNAFTGRG

SEQ ID NO: 3626 - protein, 180 aa, Synthetic construct
GSIFKAIAHFKRTTFLKKHRMLGRLKYKVTPQMGTPSPGKGSLTDGRIKPDQDDDTEIKINIKQESADVNVIGNKDVVTEEDLDVFKQAQELSWEKIECESGVEDCGRYPSVIEFGKYEIQTWYSSPYPQEYARLPKLYLCEFCLKYMKSKNILLRHSKKCGWFHPPANEIYRRKDLSVF

SEQ ID NO: 3627 - protein, 80 aa, Synthetic construct
QTWYSSPYPQEYARLPKLYLCEFCLKYMKSKNILLRHSKKCGWFHPPANEIYRRKDLSVFEVDGNMSKIYCQNLCLLAKL

SEQ ID NO: 3628 - protein, 80 aa, Synthetic construct
NSRQSPAKVQSKNKYLHSPESRPVTGERGQLLELSKESSEEEEEEEDEEEEEEEEEEEEDEEEEEEEEEEEEEENIQSSP

SEQ ID NO: 3629 - protein, 80 aa, Synthetic construct
SRPVTGERGQLLELSKESSEEEEEEEDEEEEEEEEEEEEDEEEEEEEEEEEEEENIQSSPPRLTKPQSVAIKRKRPFVLK

SEQ ID NO: 3630 - protein, 90 aa, Synthetic construct
EKPEDDLIKPEEEEEEEEEEEEEEEEEEGEEEEGGGNVEKDPDGAKSQEKEEPEISTEKEDSARLDDHEEEEEEDEEPSHNEDHDADDED

SEQ ID NO: 3631 - protein, 80 aa, Synthetic construct
CLLAKLFLDHKTLYYDVEPFLFYVMTEADNTGCHLIGYFSKEKNSFLNYNVSCILTMPQYMRQGYGKMLIDFSYLLSKVE

SEQ ID NO: 3632 - protein, 80 aa, Synthetic construct
NQKRKHDEINHVQKTYAEMDPTTAALEKEHEAITKVKYVDKIHIGNYEIDAWYFSPFPEDYGKQPKLWLCEYCLKYMKYE

SEQ ID NO: 3633 - protein, 80 aa, Synthetic construct
CLKGNFRGRRYKCLICYDYDLCASCYESGATTTRHTTDHPMQCILTRVDFDLYYGGEAFSVEQPQSFTCPYCGKMGYTET

SEQ ID NO: 3634 - protein, 80 aa, Synthetic construct
VRHQPEGLDQLQAQTKFTKKELQSLYRGFKNECPTGLVDEDTFKLIYAQFFPQGDATTYAHFLFNAFDADGNGAIHFEDF

SEQ ID NO: 3635 - protein, 90 aa, Synthetic construct
RKCEKAGCTATCPVCFASASERCAKNGYTSRWYHLSCGEHFCNECFDHYYRSHKDGYDKYTTWKKIWTSNGKTEPSPKAFMADQQLPYWV

SEQ ID NO: 3636 - protein, 80 aa, Synthetic construct
DIQLKSPQVQCIDYSGDEVQVTTTDGTGYSAQKVLVTVPLALLQKGAIQFNPPLSEKKMKAINSLGAGIIEKIALQFPYR

SEQ ID NO: 3637 - protein, 100 aa, Synthetic construct
VPTIPITKPHTMKPAPRLTPVRPAAASPIVSGARRRRVRCRKCKACVQGECGVCHYCRDMKKFGGPGRMKQSCVLRQCLAPRLPHSVTCSLCGEVDQNEE

SEQ ID NO: 3638 - protein, 80 aa, Synthetic construct
LTPPPHSPTSMLQLIHDPVSPRGMVTRSSPGAGPSDHHSASRDERFKRRQLLRLQATERTMVREKENNPSGKKELSEVEK

SEQ ID NO: 3639 - protein, 100 aa, Synthetic construct
TTAGARRRRTRCRKCEACLRTECGECHFCKDMKKFGGPGRMKQSCIMRQCIAPVLPHTAVCLVCGEAGKEDTVEEEEGKFNLMLMECSICNEIIHPGCLK

SEQ ID NO: 3640 - protein, 110 aa, Synthetic construct
QTSPGSSSHLSPRPPLGSSLSPWWRSSLTYFQQQLKPGKEDKLFRKKRRSWKNAEDRMALANKPLRRFKQEPEDELPEAPPKTRESDHSRSSSPTAGPSTEGAEGPEEKK

SEQ ID NO: 3641 - protein, 90 aa, Synthetic construct
WKNAEDRMALANKPLRRFKQEPEDELPEAPPKTRESDHSRSSSPTAGPSTEGAEGPEEKKKVKMRRKRRLPNKELSRELSKELNHEIQRT

SEQ ID NO: 3642 - protein, 120 aa, Synthetic construct
KVKMRRKRRLPNKELSRELSKELNHEIQRTENSLANENQQPIKSEPESEGEEPKRPPGICERPHRFSKGLNGTPRELRHQLGPSLRSPPRVISRPPPSVSPPKCIQMERHVIRPPPISPP

SEQ ID NO: 3643 - protein, 80 aa, Synthetic construct
VGSRRLVDVMDVNTQKGTEMSMSQFVRYYETPEAQRDKLYNVISLEFSHTKLEHLVKRPTVVDLVDWVDNMWPQHLKEKQ

SEQ ID NO: 3644 - protein, 80 aa, Synthetic construct
NLPGSLLKEQKMNRDNKEGQEPAKRRSECEEAPRRRSDEHSKKVPPDGLLRRKSDDVHLRKKRKYEKPQELSGRKRASSL

SEQ ID NO: 3645 - protein, 80 aa, Synthetic construct
KRLLLLFADTAASASASAPAAAAASGDPGPALRTRAWRAGTVRAMSGAVPQDLAIFVEFDGCNWKQHSWVKVHAEEVIVL

SEQ ID NO: 3646 - protein, 100 aa, Synthetic construct
GIDLETSKYILANVGDQFCQLVMSEKEAMMMVEPHQKVAWKRAVRGVREMCDVCETTLFNIHWVCRKCGFGVCLDCYRLRKSRPRSETEEMGDEEVFSWL

SEQ ID NO: 3647 - protein, 80 aa, Synthetic construct
SNSELKAIRPPCPDTAPPSSALHWLADLATQKAKEETKEAGSLRSVLNKESHSPFGLDSFNSTAKVSPLTPKLFNSLLLG

SEQ ID NO: 3648 - protein, 100 aa, Synthetic construct
MGLNVLDPHTSHSWLCDGRLLCLHDPSNKNNWKIFRECWKQGQPVLVSGVHKKLKSELWKPEAFSQEFGDQDVDLVNCRNCAIISDVKVRDFWDGFEIIC

SEQ ID NO: 3649 - protein, 100 aa, Synthetic construct
QGQPVLVSGVHKKLKSELWKPEAFSQEFGDQDVDLVNCRNCAIISDVKVRDFWDGFEIICKRLRSEDGQPMVLKLKDWPPGEDFRDMMPTRFEDLMENLP

SEQ ID NO: 3650 - protein, 90 aa, Synthetic construct
LPEYTKRDGRLNLASRLPSYFVRPDLGPKMYNAYGLITAEDRRVGTTNLHLDVSDAVNVMVYVGIPIGEGAHDEEVLKTIDEGDADEVTK

SEQ ID NO: 3651 - protein, 90 aa, Synthetic construct
YNAYGLITAEDRRVGTTNLHLDVSDAVNVMVYVGIPIGEGAHDEEVLKTIDEGDADEVTKQRIHDGKEKPGALWHIYAAKDAEKIRELLR

SEQ ID NO: 3652 - protein, 80 aa, Synthetic construct
LMGKLGPNGERSAELLLGKSKGKQAPKGRPRTAPLKVGQSVLKDVSKVKKLKQSGEPFLQDGSCINVAPHLHKCRECRLE

SEQ ID NO: 3653 - protein, 100 aa, Synthetic construct
FSGGGGPAPVTTPEPDHVPKADSTDIRSEEPLKTDSSASNSNSELKAIRPPCPDTAPPSSALHWLADLATQKAKEETKEAGSLRSVLNKESHSPFGLDSF

SEQ ID NO: 3654 - protein, 80 aa, Synthetic construct
VFIPAGAPHQVHNLYSCIKVAEDFVSPEHVKHCFRLTQEFRHLSNTHTNHEDKLQVKNIIYHAVKDAVGTLKAHESKLAR

SEQ ID NO: 3655 - protein, 130 aa, Synthetic construct
QSELFPKEDLSSEQYEMTECPAALAPVRPTHSSVRQVEDGLTFPDYSDSTEVKFEELKNVKLEEEDEEEEQAAAALDLSVNPASVGGRLVFSGSKKKSSSSLGSGSSRDSISSDSETSEPLSCRAQGQTG

SEQ ID NO: 3656 - protein, 90 aa, Synthetic construct
RAKGALQSITAGQKVISKHKNGRFYQCEVVRLTTETFYEVNFDDGSFSDNLYPEDIVSQDCLQFGPPAEGEVVQVRWTDGQVYGAKFVAS

SEQ ID NO: 3657 - protein, 120 aa, Synthetic construct
GAGRMETKARAGEGQAPSTFSKLKMEIKKSRRHPLGRPPTRSPLSVVKQEASSDEEASPFSGEEDVSDPDALRPLLSLQWKNRAASFQAERKFNAAAARTEPYCAICTLFYPYCQALQTE

SEQ ID NO: 3658 - protein, 80 aa, Synthetic construct
NVIERHPVDISAIPEQRWKLKCVYCRKRMKKVSGACIQCSYEHCSTSFHVTCAHAAGVLMEPDDWPYVVSITCLKHKSGG

SEQ ID NO: 3659 - protein, 80 aa, Synthetic construct
NGLYYRCRVIGAASQTCYEVNFDDGSYSDNLYPESITSRDCVQLGPPSEGELVELRWTDGNLYKAKFISSVTSHIYQVEF

SEQ ID NO: 3660 - protein, 100 aa, Synthetic construct
NFDDGSYSDNLYPESITSRDCVQLGPPSEGELVELRWTDGNLYKAKFISSVTSHIYQVEFEDGSQLTVKRGDIFTLEEELPKRVRSRLSLSTGAPQEPAF

SEQ ID NO: 3661 - protein, 80 aa, Synthetic construct
EQNLSDHIKLSGNSCLSTSVTEDIKTEDDKAYAYRSVPSISSEADDSIPLSSGYEKPEKSDPSELSWPKSPESCSSVAES

SEQ ID NO: 3662 - protein, 80 aa, Synthetic construct
CCVRVHASCYGIPSHEICDGWLCARCKRNAWTAECCLCNLRGGALKQTKNNKWAHVMCAVAVPEVRFTNVPERTQIDVGR

SEQ ID NO: 3663 - protein, 110 aa, Synthetic construct
CLKLGPPAEGEVVQVKWPDGKLYGAKYFGSNIAHMYQVEFEDGSQIAMKREDIYTLDEELPKRVKARFSTASDMRFEDTFYGADIIQGERKRQRVLSSRFKNEYVADPVY

SEQ ID NO: 3664 - protein, 80 aa, Synthetic construct
SIYDEGVDEWNIARLNTVLDVVEEECGISIEGVNTPYLYFGMWKTTFAWHTEDMDLYSINYLHFGEPKSWYAIPPEHGKR

SEQ ID NO: 3665 - protein, 80 aa, Synthetic construct
EQEYNATVARMKPHCAICTLLMPYHKPDSSNEENDARWETKLDEVVTSEGKTKPLIPEMCFIYSEENIEYSPPNAFLEED

SEQ ID NO: 3666 - protein, 80 aa, Synthetic construct
AMKREDIYTLDEELPKRVKARFSTASDMRFEDTFYGADIIQGERKRQRVLSSRFKNEYVADPVYRTFLKSSFQKKCQKRQ

SEQ ID NO: 3667 - protein, 80 aa, Synthetic construct
AQNPNCNIMIFHPTKEEFNDFDKYIAYMESQGAHRAGLAKIIPPKEWKARETYDNISEILIATPLQQVASGRAGVFTQYH

SEQ ID NO: 3668 - protein, 80 aa, Synthetic construct
FLRHKVALISPTVLKENGIPFNRITQEAGEFMVTFPYGYHAGFNHGFNCAEAINFATPRWIDYGKMASQCSCGEARVTFS

SEQ ID NO: 3669 - protein, 90 aa, Synthetic construct
MKSVHSSPQNTSHTIMTFYPTMEEFADFNTYVAYMESQGAHQAGLAKVIPPKEWKARQMYDDIEDILIATPLQQVTSGQGGVFTQYHKKK

SEQ ID NO: 3670 - protein, 100 aa, Synthetic construct
LKENGIPFNCMTQEAGEFMVTFPYGYHAGFNHGFNCAEAINFATPRWIDYGKMASQCSCGESTVTFSMDPFVRIVQPESYELWKHRQDLAIVEHTEPRVA

SEQ ID NO: 3671 - protein, 110 aa, Synthetic construct
GKMASQCSCGESTVTFSMDPFVRIVQPESYELWKHRQDLAIVEHTEPRVAESQELSNWRDDIVLRRAALGLRLLPNLTAQCPTQPVSSGHCYNPKGCGTDAVPGSAFQSS

SEQ ID NO: 3672 - protein, 80 aa, Synthetic construct
ESQELSNWRDDIVLRRAALGLRLLPNLTAQCPTQPVSSGHCYNPKGCGTDAVPGSAFQSSAYHTQTQSLTLGMSARVLLP

SEQ ID NO: 3673 - protein, 100 aa, Synthetic construct
RGHYERILNPYNLFLSGDSLRCLQKPNLTTDTKDKEYKPHDIPQRQSVQPSETCPPARRAKRMRAEAMNIKIEPEETTEARTHNLRRRMGCPTPKCENEK

SEQ ID NO: 3674 - protein, 120 aa, Synthetic construct
SETCPPARRAKRMRAEAMNIKIEPEETTEARTHNLRRRMGCPTPKCENEKEMKSSIKQEPIERKDYIVENEKEKPKSRSKKATNAVDLYVCLLCGSGNDEDRLLLCDGCDDSYHTFCLIP

SEQ ID NO: 3675 - protein, 110 aa, Synthetic construct
DRLLLCDGCDDSYHTFCLIPPLHDVPKGDWRCPKCLAQECSKPQEAFGFEQAARDYTLRTFGEMADAFKSDYFNMPVHMVPTELVEKEFWRLVSTIEEDVTVEYGADIAS

SEQ ID NO: 3676 - protein, 80 aa, Synthetic construct
FGEMADAFKSDYFNMPVHMVPTELVEKEFWRLVSTIEEDVTVEYGADIASKEFGSGFPVRDGKIKLSPEEEEYLDSGWNL

SEQ ID NO: 3677 - protein, 80 aa, Synthetic construct
QASAGQVSDTNKVSQPPGTTSFSLPDDWDNRTSYLHSPFSTGRSCIPLHGVSPEVNELLMEAQLLQVSLPEIQELYQTLL

SEQ ID NO: 3678 - protein, 110 aa, Synthetic construct
KQCQTLREALIAAGKEIIWHGRTKEEPAHYCSICEVEVFDLLFVTNESNSRKTYIVHCQDCARKTSGNLENFVVLEQYKMEDLMQVYDQFTLAPPLPSASLAPPLPSASS

SEQ ID NO: 3679 - protein, 80 aa, Synthetic construct
QPSDENWDLTGTRQIWPCESSRSHTTIAKYAQYQASSFQESLQEEKESEDEESEEPDSTTGTPPSSAPDPKNHHIIKFGT

SEQ ID NO: 3680 - protein, 80 aa, Synthetic construct
SRSHTTIAKYAQYQASSFQESLQEEKESEDEESEEPDSTTGTPPSSAPDPKNHHIIKFGTNIDLSDAKRWKPQLQELLKL

SEQ ID NO: 3681 - protein, 80 aa, Synthetic construct
SLQEEKESEDEESEEPDSTTGTPPSSAPDPKNHHIIKFGTNIDLSDAKRWKPQLQELLKLPAFMRVTSTGNMLSHVGHTI

SEQ ID NO: 3682 - protein, 80 aa, Synthetic construct
RESLVRAGKKIAYQGRVKDEPAYYCNECDVEVFNILFVTSENGSRNTYLVHCEGCARRRSAGLQGVVVLEQYRTEELAQA

SEQ ID NO: 3683 - protein, 80 aa, Synthetic construct
SEVLEEISRACETLVERVGRSATDPADPVDTAEPADSGTERLLPPAQAKEEAGGVAAVSGSCKRRQKEHQKEHRRHRRAC

SEQ ID NO: 3684 - protein, 80 aa, Synthetic construct
WVQATGWCNNIAWNVGPLTAYQYQLALERYEWNEVKNVKSIVPMIHVSWNVARTVKISDPDLFKMIKFCLLQSMKHCQVQ

SEQ ID NO: 3685 - protein, 90 aa, Synthetic construct
VCRQPYDVNRFMIECDICKDWFHGSCVGVEEHHAVDIDLYHCPNCAVLHGSSLMKKRRNWHRHDYTEIDDGSKPVQAGTRTFIKELRSRV

SEQ ID NO: 3686 - protein, 120 aa, Synthetic construct
SKLNGKFNKHLQPSSTVPEWRAKDNDLRLLLTNGRIIKDERQPFADQSLYTADSENEEDKRRTKKAKMKIEESSGVEGVEHEESQKPLNGFFTRVKSELRSRSSGYSDISESEDSGPECT

SEQ ID NO: 3687 - protein, 80 aa, Synthetic construct
QKPSRSEIPIKRECPTSTSTEEEAIQGMLSMAGLHYSTCLQRQIQSTDCSGERNSLQDPSSCHGSNHEVRQLYRYDKPVE

SEQ ID NO: 3688 - protein, 90 aa, Synthetic construct
SCHGSNHEVRQLYRYDKPVECGYHVKTEDPDLRTSSWIKQFDTSRFHPQDLSRSQKCIRKEGSSEISQRVQSRNYVDSSGSSLQNGKYMQ

SEQ ID NO: 3689 - protein, 80 aa, Synthetic construct
QRQIQSTDCSGERNSLQDPSSCHGSNHEVRQLYRYDKPVECGYHVKTEDPDLRTSSWIKQFDTSRFHPQDLSRSQKCIRK

SEQ ID NO: 3690 - protein, 80 aa, Synthetic construct
AAILGDILLKVAAILQTHLPGKRPARGSLPEQPCTKKARADHGLIPDVKLEKTVPRLHRPSLQHFREQFLVPGRPVILKG

SEQ ID NO: 3691 - protein, 90 aa, Synthetic construct
EQPCTKKARADHGLIPDVKLEKTVPRLHRPSLQHFREQFLVPGRPVILKGVADHWPCMQKWSLEYIQEIAGCRTVPVEVGSRYTDEEWSQ

SEQ ID NO: 3692 - protein, 80 aa, Synthetic construct; identical to SEQ ID NO: 410

SEQ ID NO: 3693 - protein, 80 aa, Synthetic construct
QKQCRDENGFKCHCMSESHQRQLLLASENPQQFMDYFSEEFRNDFLELLRRRFGTKRVHNNIVYNEYISHREHIHMNATQ

SEQ ID NO: 3694 - protein, 80 aa, Synthetic construct
KRTARTDYWLQPEIIVKIITKKLGEKYHKKKAIVKEVIDKYTAVVKMIDSGDKLKLDQTHLETVIPAPGKRILVLNGGYR

SEQ ID NO: 3695 - protein, 80 aa, Synthetic construct
STLTALGPFPDTQDDFLKWWRSEEAQDMGPGPPDPTEPPLHVKSEDQPGEEEDDERGADATWDLDLLLTNFSGPEPGGAP

SEQ ID NO: 3696 - protein, 150 aa, Synthetic construct
PDFHTIPAFCLTPPYSPSDFEPSQVSNLMAPAPSTVHFKSLSDTAKPHIAAPFKEEEKSPVSAPKLPKAQATSVIRHTADAQLCNHQTCPMKAASILNYQNNSFRRRTHLNVEAARKNIPCAAVSPNRSKCERNTVADVDEKASAALYDF

SEQ ID NO: 3697 - protein, 90 aa, Synthetic construct
LNFGASLQQTAEERMEMISERPKESMYSWNKTAEKSDFEAVEALMSMSCSWKSDFKKYVENRPVTPVSDLSEEENLLPGTPDFHTIPAFC

SEQ ID NO: 3698 - protein, 80 aa, Synthetic construct
HTPDFAGPDDARAVDIMDICESILERKRHDSERSTCSILEQTDMEAVEALVCMSSWGQRSQKGDLLRIRPLTPVSDSGDV

SEQ ID NO: 3699 - protein, 140 aa, Synthetic construct
STLCITPPQSPDLVEPSTRTPVSPQVTDSKACTATDVLQSSAVVARALSGGAERGLLGLEPVPSSPCRAKGTSVIRHTGESPAACFPTIQTPDCRLSDSREGEEQLLGHFETLQDTHLTDSLLSTNLVSCQPCLHKSGGL

SEQ ID NO: 3700 - protein, 130 aa, Synthetic construct
NIHMKRKTIKNINTFENRMLMLDGMPAVRVKTELLESEQGSPNVHNYPDMEAVPLLLNNVKGEPPEDSLSVDHFQTQTEPVDLSINKARTSPTAVSSSPVSMTASASSPSSTSTSSSSSSRLASSPTVIT

SEQ ID NO: 3701 - protein, 80 aa, Synthetic construct
RLASSPTVITSVSSASSSSTVLTPGPLVASASGVGGQQFLHIIHPVPPSSPMNLQSNKLSHVHRIPVVVQSVPVVYTAVR

SEQ ID NO: 3702 - protein, 80 aa, Synthetic construct
VLTPGPLVASASGVGGQQFLHIIHPVPPSSPMNLQSNKLSHVHRIPVVVQSVPVVYTAVRSPGNVNNTIVVPLLEDGRGH

SEQ ID NO: 3703 - protein, 80 aa, Synthetic construct
GCNKVYTKSSHLKAHRRTHTGEKPYKCTWEGCTWKFARSDELTRHYRKHTGVKPFKCADCDRSFSRSDHLALHRRRHMLV

SEQ ID NO: 3704 - protein, 80 aa, Synthetic construct
AAAAYVDHFAAECLVSMSSRAVVHGPREGPESRPEGAAVAATPTLPRVEERRDGKDSASLFVVARILADLNQQAPAPAPA

SEQ ID NO: 3705 - protein, 80 aa, Synthetic construct
SAAVACLDYFAAECLVSMSAGAVVHRRPPDPEGAGGAAGSEVGAAPPESALPGPGPPGPASVPQLPQVPAPSPGAGGAAP

SEQ ID NO: 3706 - protein, 110 aa, Synthetic construct
CSPPPGGASAGGAQGPGGGPTPDGPIPVLLQIQPVPVKQESGTGPASPGQAPENVKVAQLLVNIQGQTFALVPQVVPSSNLNLPSKFVRIAPVPIAAKPVGSGPLGPGPA

SEQ ID NO: 3707 - protein, 80 aa, Synthetic construct
SAAVACVDYFAADVLMAISSGAVVHRGRPGPEGAGPAAGLDVRAARREAASPGTPGPPPPPPAASGPGPGAAAAPHLLAA

SEQ ID NO: 3708 - protein, 130 aa, Synthetic construct
PEPPPPPPPPAFYYPEPGAPPPYSAPAGGLVSELLRPELDAPLGPALHGRFLLAPPGRLVKAEPPEADGGGGYGCAPGLTRGPRGLKREGAPGPAASCMRGPGGRPPPPPDTPPLSPDGPARLPAPGPRA

SEQ ID NO: 3709 - protein, 90 aa, Synthetic construct
LKFPSSHRRASPGLSMPSSSPPIKKYSPPSPGVQPFGVPLSMPPVMAAALSRHGIRSPGILPVIQPVVVQPVPFMYTSHLQQPLMVSLSE

SEQ ID NO: 3710 - protein, 140 aa, Synthetic construct
SRHGIRSPGILPVIQPVVVQPVPFMYTSHLQQPLMVSLSEEMENSSSSMQVPVIESYEKPISQKKIKIEPGIEPQRTDYYPEEMSPPLMNSVSPPQALLQENHPSVIVQPGKRPLPVESPDTQRKRRIHRCDYDGCNKVY

SEQ ID NO: 3711 - protein, 80 aa, Synthetic construct
YIPPQQPQPPGGGLMGKFVLKASLSAPGSEYGSPSVISVSKGSPDGSHPVVVAPYNGGPPRTCPKIKQEAVSSCTHLGAG

SEQ ID NO: 3712 - protein, 110 aa, Synthetic construct
YGSPSVISVSKGSPDGSHPVVVAPYNGGPPRTCPKIKQEAVSSCTHLGAGPPLSNGHRPAAHDFPLGRQLPSRTTPTLGLEEVLSSRDCHPALPLPPGFHPHPGPNYPSF

SEQ ID NO: 3713 - protein, 120 aa, Synthetic construct
MEKYLTPQLPPVPIIPEHKKYRRDSASVVDQFFTDTEGLPYSINMNVFLPDITHLRTGLYKSQRPCVTHIKTEPVAIFSHQSETTAPPPAPTQALPEFTSIFSSHQTAAPEVNNIFIKQE

SEQ ID NO: 3714 - protein, 90 aa, Synthetic construct
KSQRPCVTHIKTEPVAIFSHQSETTAPPPAPTQALPEFTSIFSSHQTAAPEVNNIFIKQELPTPDLHLSVPTQQGHLYQLLNTPDLDMPS

SEQ ID NO: 3715 - protein, 100 aa, Synthetic construct
PTQALPEFTSIFSSHQTAAPEVNNIFIKQELPTPDLHLSVPTQQGHLYQLLNTPDLDMPSSTNQTAAMDTLNVSMSAAMAGLNTHTSAVPQTAVKQFQGM

SEQ ID NO: 3716 - protein, 100 aa, Synthetic construct
ELQIVHETGYFSALPSLEEYWQQTCLELERYLQSEPCYVSASEIKFDSQEDLWTKIILAREKKEESELKISSSPPEDTLISPSFCYNLETNSLNSDVSSE

SEQ ID NO: 3717 - protein, 110 aa, Synthetic construct
DVLASYSIFQELQLVHDTGYFSALPSLEETWQQTCLELERYLQTEPRRISETFGEDLDCFLHASPPPCIEESFRRLDPLLLPVEAAICEKSSAVDILLSRDKLLSETCLS

SEQ ID NO: 3718 - protein, 130 aa, Synthetic construct
EVQLNSEGGSMQVFKQVTASVRNRDPPEIEYRSNMTSPTLLDANPMENPALFNDIKIEPPEELLASDFSLPQVEPVDLSFHKPKAPLQPASMLQAPIRPPKPQSSPQTLVVSTSTSDMSTSANIPTVLTP

SEQ ID NO: 3719 - protein, 80 aa, Synthetic construct
SANIPTVLTPGSVLTSSQSTGSQQILHVIHTIPSVSLPNKMGGLKTIPVVVQSLPMVYTTLPADGGPAAITVPLIGGDGK

SEQ ID NO: 3720 - protein, 120 aa, Synthetic construct
SAAAYMDFVAAQCLVSISNRAAVPEHGVAPDAERLRLPEREVTKEHGDPGDTWKDYCTLVTIAKSLLDLNKYRPIQTPSVCSDSLESPDEDMGSDSDVTTESGSSPSHSPEERQDPGSAP

SEQ ID NO: 3721 - protein, 90 aa, Synthetic construct
AEPLAPPIKPIKPVTRNKAPQEPPVKKGRRSRRCGQCPGCQVPEDCGVCTNCLDKPKFGGRNIKKQCCKMRKCQNLQWMPSKAYLQKQAK

SEQ ID NO: 3722 - protein, 80 aa, Synthetic construct
KEKPPPVNKQENAGTLNILSTLSNGNSSKQKIPADGVHRIRVDFKEDCEAENVWEMGGLGILTSVPITPRVVCFLCASSG

SEQ ID NO: 3723 - protein, 90 aa, Synthetic construct
RVDFKEDCEAENVWEMGGLGILTSVPITPRVVCFLCASSGHVEFVYCQVCCEPFHKFCLEENERPLEDQLENWCCRRCKFCHVCGRQHQA

SEQ ID NO: 3724 - protein, 130 aa, Synthetic construct
RNSYHPECLGPNYPTKPTKKKKVWICTKCVRCKSCGSTTPGKGWDAQWSHDFSLCHDCAKLFAKGNFCPLCDKCYDDDDYESKMMQCGKCDRWVHSKCENLSDEMYEILSNLPESVAYTCVNCTERHPAE

SEQ ID NO: 3725 - protein, 80 aa, Synthetic construct
QEQKRKESITEKKPKKGLVFEISSDDGFQICAESIEDAWKSLTDKVQEARSNARLKQLSFAGVNGLRMLGILHDAVVFLI

SEQ ID NO: 3726 - protein, 80 aa, Synthetic construct
GTPGAEAEQQDTASVEQSSQKECGQPAGQVAVLPEVQVTQNPANEQESAEPKTVEEEESNFSSPLMLWLQQEQKRKESIT

SEQ ID NO: 3727 - protein, 90 aa, Synthetic construct
GGTLAHTPRRSLPSHHGKKMRMARCGHCRGCLRVQDCGSCVNCLDKPKFGGPNTKKQCCVYRKCDKIEARKMERLAKKGRTIVKTLLPWD

SEQ ID NO: 3728 - protein, 80 aa, Synthetic construct
VLQLKARRRLDKDALAPGPFASFPNGWTGKQKSPDGVHRVRVDFKEDCDLENVWLMGGLSVLTSVPGGPPMVCLLCASKG

SEQ ID NO: 3729 - protein, 120 aa, Synthetic construct
RVDFKEDCDLENVWLMGGLSVLTSVPGGPPMVCLLCASKGLHELVFCQVCCDPFHPFCLEEAERPLPQHHDTWCCRRCKFCHVCGRKGRGSKHLLECERCRHAYHPACLGPSYPTRATRK

SEQ ID NO: 3730 - protein, 140 aa, Synthetic construct
SKHLLECERCRHAYHPACLGPSYPTRATRKRRHWICSACVRCKSCGATPGKNWDVEWSGDYSLCPRCTQLYEKGNYCPICTRCYEDNDYESKMMQCAQCDHWVHAKCEGLSDEDYEILSGLPDSVLYTCGPCAGAAQPRW

SEQ ID NO: 3731 - protein, 120 aa, Synthetic construct
VSTQTASDDQAGKLWDELSLVGLPDAIDIQALFDSTGTCWAHHRCVEWSLGVCQMEEPLLVNVDKAVVSGSTERCAFCKHLGATIKCCEEKCTQMYHYPCAAGAGTFQDFSHIFLLCPEH

SEQ ID NO: 3732 - protein, 90 aa, Synthetic construct
LGATIKCCEEKCTQMYHYPCAAGAGTFQDFSHIFLLCPEHIDQAPERSKEDANCAVCDSPGDLLDQFFCTTCGQHYHGMCLDIAVTPLKR

SEQ ID NO: 3733 - protein, 80 aa, Synthetic construct
CQNCKQSGEDSKMLVCDTCDKGYHTFCLQPVMKSVPTNGWKCKNCRICIECGTRSSSQWHHNCLICDNCYQQQDNLCPFC

SEQ ID NO: 3734 - protein, 80 aa, Synthetic construct
DKFTLNQDMCVVCGSFGQGAEGRLLACSQCGQCYHPYCVSIKITKVVLSKGWRCLECTVCEACGKATDPGRLLLCDDCDI

SEQ ID NO: 3735 - protein, 150 aa, Synthetic construct
GWRCLECTVCEACGKATDPGRLLLCDDCDISYHTYCLDPPLQTVPKGGWKCKWCVWCRHCGATSAGLRCEWQNNYTQCAPCASLSSCPVCYRNYREEDLILQCRQCDRWMHAVCQNLNTEEEVENVADIGFDCSMCRPYMPASNVPSSDC

SEQ ID NO: 3736 - protein, 90 aa, Synthetic construct
NSAFNPMASDPNNSWTSSAPTVEGENDTMSNAQRSTLKWEKEEALGEMATVAPVLYTNINFPNLKEEFPDWTTRVKQIAKLWRKASSQER

SEQ ID NO: 3737 - protein, 80 aa, Synthetic construct; identical to SEQ ID NO: 411

SEQ ID NO: 3738 - protein, 80 aa, Synthetic construct
MAAGQLCTELENKLPNSDFSQATPNQQTYANSEVDKLSMETPAKTEEIKLEKAETESCPGQEEPKLEEQNGSKVEGNAVA

SEQ ID NO: 3739 - protein, 80 aa, Synthetic construct
TPAKTEEIKLEKAETESCPGQEEPKLEEQNGSKVEGNAVACPVSSAQSPPHSAGAPAAKGDSGNELLKHLLKNKKSSSLL

SEQ ID NO: 3740 - protein, 140 aa, Synthetic construct
ALAQGPKTVDVPASLPTPPHNNQEELRIQDHCGDRDTPDSFVPSSSPESVVGVEVSRYPDLSLVKEEPPEPVPSPIIPILPSTAGKSSESRRNDIKTEPGTLYFASPFGPSPNGPRSGLISVAITLHPTAAENISSVVAA

SEQ ID NO: 3741 - protein, 80 aa, Synthetic construct
FKPPCEDEIDEFLKKLGTSLKPDPVPKDYRKCCFCHEEGDGLTDGPARLLNLDLDLWVHLNCALWSTEVYETQAGALINV

SEQ ID NO: 3742 - protein, 80 aa, Synthetic construct
QQQDNLCPFCGKCYHPELQKDMLHCNMCKRWVHLECDKPTDHELDTQLKEEYICMYCKHLGAEMDRLQPGEEVEIAELTT

SEQ ID NO: 3743 - protein, 80 aa, Synthetic construct
LPGVSTADISSNKDDEENSMHNTVVLFSSSDKFTLNQDMCVVCGSFGQGAEGRLLACSQCGQCYHPYCVSIKITKVVLSK

SEQ ID NO: 3744 - protein, 80 aa, Synthetic construct
KCCFCHEEGDGLTDGPARLLNLDLDLWVHLNCALWSTEVYETQAGALINVELALRRGLQMKCVFCHKTGATSGCHRFRCT

SEQ ID NO: 3745 - protein, 90 aa, Synthetic construct
ELRRFELPFDWPRCPVVSPGGSPGPNEAVLPSEDLSQIGFPEGLTPAHLGEPGGSCWAHHWCAAWSAGVWGQEGPELCGVDKAIFSGISQ

SEQ ID NO: 3746 - protein, 80 aa, Synthetic construct
VCEGPGELCDLFFCTSCGHHYHGACLDTALTARKRAGWQCPECKVCQACRKPGNDSKMLVCETCDKGYHTFCLKPPMEEL

SEQ ID NO: 3747 - protein, 80 aa, Synthetic construct
STASSIETLVVADIDSSPSKEEEEEDDDTMQNTVVLFSNTDKFVLMQDMCVVCGSFGRGAEGHLLACSQCSQCYHPYCVN

SEQ ID NO: 3748 - protein, 240 aa, Synthetic construct
EEEEEDDDTMQNTVVLFSNTDKFVLMQDMCVVCGSFGRGAEGHLLACSQCSQCYHPYCVNSKITKVMLLKGWRCVECIVCEVCGQASDPSRLLLCDDCDISYHTYCLDPPLLTVPKGGWKCKWCVSCMQCGAASPGFHCEWQNSYTHCGPCASLVTCPICHAPYVEEDLLIQCRHCERWMHAGCESLFTEDDVEQAADEGFDCVSCQPYVVKPVAPVAPPELVPMKVKEPEPQYFRFEGV

SEQ ID NO: 3749 - protein, 90 aa, Synthetic construct
RRQRRGRLGLPGEAGLEGSEPSDALGPDDKKDGDLDTDELLKGEGGVEHMECEIKLEGPVSPDVEPGKEETEESKKRKRKPYRPGIGGFM

SEQ ID NO: 3750 - protein, 80 aa, Synthetic construct
HLGLGVDVAKGDDELGTLENLETNDPHLDDLLNGDEFDLLAYTDPELDTGDKKDIFNEHLRLVESANEKAEREALLRGVE

SEQ ID NO: 3751 - protein, 80 aa, Synthetic construct
LASVLPEVKPKVEEGGRHPSPCQFTIATPKVEPAPAANSLGLGLKPGQSMMGSRDTRMGTGPFSSSGHTAEKASFGATGG

SEQ ID NO: 3752 - protein, 80 aa, Synthetic construct
QNHVAAGSGQERSAGDPSQPRPNPPTFAQGVINEADQRQYEEWLFHTQQLLQMQLKVLEEQIGVHRKSRKALCAKQRTAK

SEQ ID NO: 3753 - protein, 90 aa, Synthetic construct
RPNPPTFAQGVINEADQRQYEEWLFHTQQLLQMQLKVLEEQIGVHRKSRKALCAKQRTAKKAGREFPEADAEKLKLVTEQQSKIQKQLDQ

SEQ ID NO: 3754 - protein, 140 aa, Synthetic construct
LEPPPGRVSPAAAQLADTLFSKGLGPWDPPDNLAETQKPEQSSLVPGHLDQVNGQVVPEASQLSIKQEPREEPCALGAQSVKREANGEPIGAPGTSNHLLLAGPRSEAGHLLLQKLLRAKNVQLSTGRGSEGLRAEINGH

SEQ ID NO: 3755 - protein, 100 aa, Synthetic construct
RLLLTIQKGSGRQEDEREVAEFMEQLGTALRPDKVPRDMRRCCFCHEEGDGATDGPARLLNLDLDLWVHLNCALWSTEVYETQGGALMNVEVALHRGLLT

SEQ ID NO: 3756 - protein, 80 aa, Synthetic construct
PSDALGPDDKKDGDLDTDELLKGEGGVEHMECEIKLEGPVSPDVEPGKEETEESKKRKRKPYRPGIGGFMVRQRKSHTRT

SEQ ID NO: 3757 - protein, 80 aa, Synthetic construct
PFLDSRERGGFFSPEPGEPDSPWTGSGGTTPSTPTTPTTEGEGDGLSYNQRSLQRWEKDEELGQLSTISPVLYANINFPN

SEQ ID NO: 3758 - protein, 80 aa, Synthetic construct
GPFSSSGHTAEKASFGATGGPPAHLLTPSPLSGPGGSSLLEKFELESGALTLPGGPAASGDELDKMESSLVASELPLLIE

SEQ ID NO: 3759 - protein, 80 aa, Synthetic construct
EDLVFTDASPQAVWNRIIEPVAAMRKEADMLRLFPEYLKGEELFGLTVHAVLRIAESLPGVESCQNYLFRYGRHPLMELP

SEQ ID NO: 3760 - protein, 80 aa, Synthetic construct
SVLISKNEVGIFTTPNFDETSSATTISTSEDGSYGTDVTRCICGFTHDDGYMICCDKCSVWQHIDCMGIDRQHIPDTYLC

SEQ ID NO: 3761 - protein, 90 aa, Synthetic construct
CTPNAEVRHEIQDGTIHLYIYSIHSIPKGTEITIAFDFDYGNCKYKVDCACLKENPECPVLKRSSESMENINSGYETRRKKGKKDKDISK

SEQ ID NO: 3762 - protein, 110 aa, Synthetic construct
PHVYSTPKHYIRFTSPFLSEKRRRKEPTENISGSCKKRWLKQALEEENSAILHRFNSPCQERSRSPAVNGENKSPLLLNDSCSLPDLTTPLKKRRFYQLLDSVYSETSTP

SEQ ID NO: 3763 - protein, 80 aa, Synthetic construct
KSPETKQRKLSPLRLSVSNNQEPDFIDDIEEKTPISNEVEMESEEQIAERKRKMTREERKMEAILQAFARLEKREKRREQ

SEQ ID NO: 3764 - protein, 90 aa, Synthetic construct
EITDAKKREALYAQDPSTGCYMYYFQYLSKTYCVDATRETNRLGRLINHSKCGNCQTKLHDIDGVPHLILIASRDIAAGEELLYDYGDRS

SEQ ID NO: 3765 - protein, 80 aa, Synthetic construct
KSEAAEPPKTPPSSCDSTNAAIAKQALKKPIKGKQAPRKKAQGKTQQNRKLTDFYPVRRSSRKSKAELQSEERKRIDELI

SEQ ID NO: 3766 - protein, 80 aa, Synthetic construct
KVVLYKNLPIKKDKEPEGPAQAAVASGCLTRHAAREHRQNPVRGAHSQGESSPCTYITRRSVRTRTNLKEASDIKLEPNT

SEQ ID NO: 3767 - protein, 90 aa, Synthetic construct
SSPCTYITRRSVRTRTNLKEASDIKLEPNTLNGYKSSVTEPCPDSGEQLQPAPVLQEEELAHETAQKGEAKCHKSDTGMSKKKSRQGKLV

SEQ ID NO: 3768 - protein, 80 aa, Synthetic construct
SPVGCSVVTSDSFKTKDSFRTAKSKKKRRITRYDAQLILENNSGIPKLTLRRRHDSSSKTNDQENDGMNSSKISIKLSKD

SEQ ID NO: 3769 - protein, 80 aa, Synthetic construct
PVRGAHSQGESSPCTYITRRSVRTRTNLKEASDIKLEPNTLNGYKSSVTEPCPDSGEQLQPAPVLQEEELAHETAQKGEA

SEQ ID NO: 3770 - protein, 160 aa, Synthetic construct
ARPDTSPLWLQWLPQPQPRVRPRKRRRPRPRRAPVLSTHHAARVSLHRWGGCGPHCRLRGEALVALGQPPHARWAPQQDWHWARRYGLPYVVRVDLRRLAPAPPATPAPAGTPGPILIPKQALAFAPFSPPKRLRLVVSHGSIDLDVGGEIDLDVGGEEL

SEQ ID NO: 3771 - protein, 80 aa, Synthetic construct
WVNANSPDIHPAGWFEKTGHKLQPPKGYKEEEFSWSQYLRSTRAQAAPKHLFVSQSHSPPPLGFQVGMKLEAVDRMNPSL

SEQ ID NO: 3772 - protein, 80 aa, Synthetic construct
KLQPPKGYKEEEFSWSQYLRSTRAQAAPKHLFVSQSHSPPPLGFQVGMKLEAVDRMNPSLVCVASVTDVVDSRFLVHFDN

SEQ ID NO: 3773 - protein, 120 aa, Synthetic construct
EAVDRMNPSLVCVASVTDVVDSRFLVHFDNWDDTYDYWCDPSSPYIHPVGWCQKQGKPLTPPQDYPDPDNFCWEKYLEETGASAVPTWAFKVRPPHSFLVNMKLEAVDRRNPALIRVASV

SEQ ID NO: 3774 - protein, 80 aa, Synthetic construct
PPQDYPDPDNFCWEKYLEETGASAVPTWAFKVRPPHSFLVNMKLEAVDRRNPALIRVASVEDVEDHRIKIHFDGWSHGYD

SEQ ID NO: 3775 - protein, 80 aa, Synthetic construct
SHAIFPATFCQKNDIELTPPKGYEAQTFNWENYLEKTKSKAAPSRLFNMDCPNHGFKVGMKLEAVDLMEPRLICVATVKR

SEQ ID NO: 3776 - protein, 80 aa, Synthetic construct
YRVLLRYEGFENDASHDFWCNLGTVDVHPIGWCAINSKILVPPRTIHAKFTDWKGYLMKRLVGSRTLPVDFHIKMVESMK

SEQ ID NO: 3777 - protein, 80 aa, Synthetic construct
TTWMVPTAQEAPTSPPSSRPVFPPAYWTSPPGCPTVFSEKTGMPFRLKDPVKVEGLQFCENCCQYGNVDECLSGGNYCSQ

SEQ ID NO: 3778 - protein, 100 aa, Synthetic construct
VFPPAYWTSPPGCPTVFSEKTGMPFRLKDPVKVEGLQFCENCCQYGNVDECLSGGNYCSQNCARHIKDKDQKEERDVEEDNEEEDPKCSRKKKPKLSLKA

SEQ ID NO: 3779 - protein, 100 aa, Synthetic construct
KAVAVPAKLFKEHQSFPYNKNGFKVGMKLEGVDPEHQSVYCVLTVAEVCGYRIKLHFDGYSDCYDFWVNADALDIHPVGWCEKTGHKLHPPKGYKEEEFN

SEQ ID NO: 3780 - protein, 80 aa, Synthetic construct
SDCYDFWVNADALDIHPVGWCEKTGHKLHPPKGYKEEEFNWQTYLKTCKAQAAPKSLFENQNITVIPSGFRVGMKLEAVD

SEQ ID NO: 3781 - protein, 100 aa, Synthetic construct
PKGYKEEEFNWQTYLKTCKAQAAPKSLFENQNITVIPSGFRVGMKLEAVDKKNPSFICVATVTDMVDNRFLVHFDNWDESYDYWCEASSPHIHPVGWCKE

SEQ ID NO: 3782 - protein, 110 aa, Synthetic construct
VFLSFKSPIPCLPLRWEQQSKLLPTVAGIPASKVSKWSTDEVSEFIQSLPGCEEHGKVFKDEQIDGEAFLLMTQTDIVKIMSIKLGPALKIFNSILMFKAAAEKNSHNEL

SEQ ID NO: 3783 - protein, 80 aa, Synthetic construct
QNAPKKLFRNRSPNGPMSKEFQVGMKLEAVDRKNPSLVCVATIADIVEDRLLVHFDNWDDSYDYWCDVNSPYVQPVGWCQ

SEQ ID NO: 3784 - protein, 90 aa, Synthetic construct
ATIADIVEDRLLVHFDNWDDSYDYWCDVNSPYVQPVGWCQENGRTLIAPQGYPNPENFSWTEYLEATQTNAVPAKVFKMRLPHGFLPNMK

SEQ ID NO: 3785 - protein, 80 aa, Synthetic construct
GWDHKYDYWVEADSPDIHPIGWCDVTGHPLEVPQRTNDLKILPGQAVCPTPGCRGIGHIRGPRYSGHHSAFGCPYSDMNL

SEQ ID NO: 3786 - protein, 90 aa, Synthetic construct
GVADIRASQVARWTVDEVAEFVQSLLGCEEHAKCFKKEQIDGKAFLLLTQTDIVKVMKIKLGPALKIYNSILMFRHSQELPEEDIASGQE

SEQ ID NO: 3787 - protein, 100 aa, Synthetic construct
TSKEDGKAAPGEERRRSPLDHLPPPANSNKPLTPFSIEDILNKPSVRRSYSLCGAAHLLAAADKHAQGGLPLAGRALLSQTSPLCALEELASKTFKGLEV

SEQ ID NO: 3788 - protein, 80 aa, Synthetic construct
VLSKLLMADQDSPLDLTVRKSQSEPSEQDGVLDLSTKKSPCAGSTSLSHSPGCSSTQGNGENSTEAKAVDSNNQSKSPLE

SEQ ID NO: 3789 - protein, 80 aa, Synthetic construct
VLDLSTKKSPCAGSTSLSHSPGCSSTQGNGENSTEAKAVDSNNQSKSPLEKFMVKLCTHHQKQFIRVLNDLYTESQPGTE

SEQ ID NO: 3790 - protein, 100 aa, Synthetic construct
VHKAANGHSRTKMISTSIKTARKSKRASGLRINDYDNQCDVVYISQPITECHFENQKSILSSRKTARKSTRGYFFNGDCCELPTVRTLARNLHSQEKASC

SEQ ID NO: 3791 - protein, 100 aa, Synthetic construct
VVYISQPITECHFENQKSILSSRKTARKSTRGYFFNGDCCELPTVRTLARNLHSQEKASCSALASEAVFTPKQTLTIPAPRHTVDVQLPREDNPEEPSKE

SEQ ID NO: 3792 - protein, 80 aa, Synthetic construct
ITSHEEGGGDVSPRKEPQEPEVCPTKIKPNLSSSPRSEETTASSLVWPLPAHLPEEDLPEGGSTVSAPTASGMSSPEHNQ

SEQ ID NO: 3793 - protein, 90 aa, Synthetic construct
KKMIRQFAIEYISKSGKTQENRNGSIGPSIVCKSIQMNQAENSLQEEQEGPLDLTVNRMQEQNTQQGDGVLDLSTKKTSIKSEESSICDP

SEQ ID NO: 3794 - protein, 90 aa, Synthetic construct
VCKSIQMNQAENSLQEEQEGPLDLTVNRMQEQNTQQGDGVLDLSTKKTSIKSEESSICDPSSENSVAGSTVDAKSEEATKMEKRKSALNK

SEQ ID NO: 3795 - protein, 100 aa, Synthetic construct
EQNTQQGDGVLDLSTKKTSIKSEESSICDPSSENSVAGSTVDAKSEEATKMEKRKSALNKVLESLCIHHQQQVLAMLKFLVQEQNAASLCCCNTSCVVSS

SEQ ID NO: 3796 - protein, 100 aa, Synthetic construct
VDAKSEEATKMEKRKSALNKVLESLCIHHQQQVLAMLKFLVQEQNAASLCCCNTSCVVSSESQKPLIEDDLCGLFCSCEYRLAERGCLQNEKQSPGLEPL

SEQ ID NO: 3797 - protein, 80 aa, Synthetic construct
NDLKLGDFITSLLHNAKASDYSFMELLSQHDKKVENKIIQTRFRKRQETLFAMRNSSDSPMFRRQSLQIKRELASLDENF

SEQ ID NO: 3798 - protein, 100 aa, Synthetic construct
GNIINSHCMPTVDLNNKRLENLKKSSILDMGRLISSVENVPAKYEGTESSSVSNYSSPIKLMFLSEVKSSEGVKYTLTSVGTSHSNVVLPSEKPTTHHVT

SEQ ID NO: 3799 - protein, 80 aa, Synthetic construct
PSFKRKPGRPKKIGPQVVKQIKRPIGRPPKPKIDQTNITVCQNEPFSAGRKSPECLISEVKEGIYKKSITVTVIYGRSRR

SEQ ID NO: 3800 - protein, 130 aa, Synthetic construct
DIPTFYPLSPGGVGQITPPLGWQGQPVYPITGGFRQPYPSSLSVDTSMSRFSHHMIPGPPGPHTTGIPHPAIVTPQVKQEHPHTDSDLMHVKPQHEQRKEQEPKRPHIKKPLNAFMLYMKEMRANVVAEC

SEQ ID NO: 3801 - protein, 140 aa, Synthetic construct
KWKRQQRQQMQTRPSLGPANQTTSVKKEETPSAITTANIRPVSPGISDANDHDLREPSGIKNPGGASASARVSSWDSQSYDIEQICLGASNPPWASTLFEIDEFVKIYDLPGEDDTSSLNQYLFPVCLEYLEYDQLQSSV

SEQ ID NO: 3802 - protein, 80 aa, Synthetic construct
ALRELLEKTMHPSLATMGKLASKLQLDLSVVKIWFKNQRAKWKRQQRQQMQTRPSLGPANQTTSVKKEETPSAITTANIR

SEQ ID NO: 3803 - protein, 80 aa, Synthetic construct
EHLDRDQPYPSSQKTKRMRTSFKHHQLRTMKSYFAINHNPDAKDLKQLAQKTGLTKRVLQVWFQNARAKFRRNLLRQENT

SEQ ID NO: 3804 - protein, 90 aa, Synthetic construct
SRLVCKADYETAKQREAEATAKRPRTTITAKQLETLKSAYNTSPKPARHVREQLSSETGLDMRVVQVWFQNRRAKEKRLKKDAGRQRWGQ

SEQ ID NO: 3805 - protein, 80 aa, Synthetic construct
CCECKTNLSEKCFSREGKLYCKNDFFRRFGTKCAGCAQGISPSDLVRKARSKVFHLNCFTCMVCNKQLSTGEELYVIDEN

SEQ ID NO: 3806 - protein, 80 aa, Synthetic construct
SLRQQNSCYIKNKEIFCKMDYFSRFGTKCARCGRQIYASDWVRRARGNAYHLACFACFSCKRQLSTGEEFGLVEEKVLCR

SEQ ID NO: 3807 - protein, 80 aa, Synthetic construct
YFSRFGTKCARCGRQIYASDWVRRARGNAYHLACFACFSCKRQLSTGEEFGLVEEKVLCRIHYDTMIENLKRAAENGNGL

SEQ ID NO: 3808 - protein, 90 aa, Synthetic construct
MASGSGCPPGKCVCNSCGLEIVDKYLLKVNDLCWHVRCLSCSVCRTSLGRHTSCYIKDKDIFCKLDYFRRYGTRCSRCGRHIHSTDWVRR

SEQ ID NO: 3809 - protein, 80 aa, Synthetic construct
IFCKLDYFRRYGTRCSRCGRHIHSTDWVRRAKGNVYHLACFACFSCKRQLSTGEEFALVEEKVLCRVHYDCMLDNLKREV

SEQ ID NO: 3810 - protein, 100 aa, Synthetic construct
AKGNVYHLACFACFSCKRQLSTGEEFALVEEKVLCRVHYDCMLDNLKREVENGNGISVEGALLTEQDVNHPKPAKRARTSFTADQLQVMQAQFAQDNNPD

SEQ ID NO: 3811 - protein, 90 aa, Synthetic construct
LSSQISDLLTRPTPALNSGGGKLPFTFVTKEVAEATCNCLLAQAEQADKKGKSKAAAERMILEEFGRCLMSVINSAGKAKAKSDPCAMNC

SEQ ID NO: 3812 - protein, 90 aa, Synthetic construct
GKGTAEEGKDHKRPKRPRTILTTQQRRAFKASFEVSSKPCRKVRETLAAETGLSVRVVQVWFQNQRAKMKKLARRQQQQQQDQQNTQRLS

SEQ ID NO: 3813 - protein, 80 aa, Synthetic construct
LGVLLGSDCPHPAVCEGCQRPISDRFLMRVNESSWHEECLQCAACQQALTTSCYFRDRKLYCKQDYQQLFAAKCSGCMEK

SEQ ID NO: 3814 - protein, 90 aa, Synthetic construct
NESSWHEECLQCAACQQALTTSCYFRDRKLYCKQDYQQLFAAKCSGCMEKIAPTEFVMRALECVYHLGCFCCCVCERQLRKGDEFVLKEG

SEQ ID NO: 3815 - protein, 90 aa, Synthetic construct
QGSQSKGSGDDGKDPRRPKRPRTILTTQQRRAFKASFEVSSKPCRKVRETLAAETGLSVRVVQVWFQNQRAKMKKLARRHQQQQEQQNSQ

SEQ ID NO: 3816 - protein, 80 aa, Synthetic construct
EHALRPGPATLGVLLGSDCPHPAVCEGCQRPISDRFLMRVNESSWHEECLQCAACQQALTTSCYFRDRKLYCKQDYQQLF

SEQ ID NO: 3817 - protein, 80 aa, Synthetic construct
EDGDMKPAKGQGSQSKGSGDDGKDPRRPKRPRTILTTQQRRAFKASFEVSSKPCRKVRETLAAETGLSVRVVQVWFQNQR

SEQ ID NO: 3818 - protein, 80 aa, Synthetic construct
VAGSDGSQPAVKLEPLHFLQCHSKNNSPQDLETQLWACAFEPAWEEGATSQTVATCGGEAVCVIDCQTGIVLHKYKAPGE

SEQ ID NO: 3819 - protein, 80 aa, Synthetic construct
SASTTEDCIALVLKGEADAMSLDGGYVYTAGKCGLVPVLAENYKSQQSSDPDPNCVDRPVEGYLAVAVVRRSDTSLTWNS

SEQ ID NO: 3820 - protein, 100 aa, Synthetic construct
RPSHCELDLAEGHQPQKVARRVFTNSRERWRQQNVNGAFAELRKLLPTHPPDRKLSKNEVLRLAMKYIGFLVRLLRDQAAALAAGPTPPGPRKRPVHRVP

SEQ ID NO: 3821 - protein, 80 aa, Synthetic construct
ASELAMSNSDLPTSPLAMEYVNDFDLMKFEVKKEPVETDRIISQCGRLIAGGSLSSTPMSTPCSSVPPSPSFSAPSPGSG

SEQ ID NO: 3822 - protein, 80 aa, Synthetic construct
VNDFDLMKFEVKKEPVETDRIISQCGRLIAGGSLSSTPMSTPCSSVPPSPSFSAPSPGSGSEQKAHLEDYYWMTGYPQQL

SEQ ID NO: 3823 - protein, 80 aa, Synthetic construct
NDFDLMKFEVKKEPPEAERFCHRLPPGSLSSTPLSTPCSSVPSSPSFCAPSPGTGGGGGAGGGGGSSQAGGAPGPPSGGP

SEQ ID NO: 3824 - protein, 110 aa, Synthetic construct
RGYAASCRVKRVCQKEELQKQKSELEREVDKLARENAAMRLELDALRGKCEALQGFARSVAAARGPATLVAPASVITIVKSTPGSGSGPAHGPDPAHGPADPAHGPASCS

SEQ ID NO: 3825 - protein, 90 aa, Synthetic construct
TTPNKGNKALKVKREPGENGTSLTDEELVTMSVRELNQHLRGLSKEEIVQLKQRRRTLKNRGYAASCRVKRVTQKEELEKQKAELQQEVE

SEQ ID NO: 3826 - protein, 90 aa, Synthetic construct
QKAELQQEVEKLASENASMKLELDALRSKYEALQTFARTVARSPVAPARGPLAAGLGPLVPGKVAATSVITIVKSKTDARIVKSKTDARS

SEQ ID NO: 3827 - protein, 80 aa, Synthetic construct
RGYAASCRVKRVTQKEELEKQKAELQQEVEKLASENASMKLELDALRSKYEALQTFARTVARSPVAPARGPLAAGLGPLV

SEQ ID NO: 3828 - protein, 100 aa, Synthetic construct
RGYAASCRIKRVTQKEELERQRVELQQEVEKLARENSSMRLELDALRSKYEALQTFARTVARGPVAPSKVATTSVITIVKSTELSSTSVPSTSVPFSAAS

SEQ ID NO: 3829 - protein, 80 aa, Synthetic construct
AKETTSHNSLTTPCYTPYYVAPEVLGPEKYDKSCDMWSLGVIMYILLCGYPPFYSNHGLAISPGMKTRIRMGQYEFPNPE

SEQ ID NO: 3830 - protein, 80 aa, Synthetic construct
LDVYENMHHGKRCLLIIMECMEGGELFSRIQERGDQAFTEREAAEIMRDIGTAIQFLHSHNIAHRDVKPENLLYTSKEKD

SEQ ID NO: 3831 - protein, 80 aa, Synthetic construct
ASATALSLLIPSEHHTCSPLASPMSPHSQSSNPSSRDSSPSRDFLPALGSMRPPIIIHRAGKKYGFTLRAIRVYMGDSDV

SEQ ID NO: 3832 - protein, 80 aa, Synthetic construct
PAGPEGKEQDVVTGVSPLLFRKLSNPDIFSSTGKVKLQRQLSQDDCKLWRGNLASSLSGKQLLPLSSSVHSSVGQVTWQS

SEQ ID NO: 3833 - protein, 80 aa, Synthetic construct
HHMDSEDEEEVSEDGCLEIRQFSSCSPRFNKVYSSMERLSLLEERRTPPPTKRSLSEEKEDHSDGLAGLKGRDRSWVIGS

SEQ ID NO: 3834 - protein, 80 aa, Synthetic construct
RPKLDEEAVGRSSGSSPAMETRGRGTSQLAEGATAKAISDLAVRRARHRLLSGDSTEKRTARPVNKVIKSASATALSLLI

SEQ ID NO: 3835 - protein, 80 aa, Synthetic construct
DEEQPRFQSAADKRAHHNALERKRRDHIKDSFHSLRDSVPSLQGEKASRAQILDKATEYIQYMRRKNHTHQQDIDDLKRQ

SEQ ID NO: 3836 - protein, 90 aa, Synthetic construct
PDHTQAPTKQEAGGGFVLPPPGTDLVFLREGASSPVQVPGPVAASTEALLQEAQCSGLSWVVALPQVKQEKADTQDEWTPGTAVLTSPVL

SEQ ID NO: 3837 - protein, 150 aa, Synthetic construct
GASSPVQVPGPVAASTEALLQEAQCSGLSWVVALPQVKQEKADTQDEWTPGTAVLTSPVLVPGCPSKAVDPGLPSVKQEPPDPEEDKEENKDDSASKLAPEEEAGGAGTPVITEIFSLGGTRFRDTAVWLPRSKDLKKPGDLKKPGARKQ

SEQ ID NO: 3838 - protein, 80 aa, Synthetic construct
QNKGKPDLNTTLPIRQTASIFKQPVTKVTNHPSNKVKSDPQRMNEQPRQLFWEKRLQGLSASDVTEQIIKTMELPKGLQG

SEQ ID NO: 3839 - protein, 80 aa, Synthetic construct
KQRLRNDPLNQNKGKPDLNTTLPIRQTASIFKQPVTKVTNHPSNKVKSDPQRMNEQPRQLFWEKRLQGLSASDVTEQIIK

SEQ ID NO: 3840 - protein, 80 aa, Synthetic construct
NPLLQEPIASAQFGATAGTECRKSVPCGWERVVKQRLFGKTAGRFDVYFISPQGLKFRSKSSLANYLHKNGETSLKPEDF

SEQ ID NO: 3841 - protein, 80 aa, Synthetic construct
YLQPFLAKLQSPIKEENTTAVEEIGRTEMGNKNEVNDKFSIGDLQEEEKHKESDLRDVKKTQIHFDPEVVQIKAGKAEID

SEQ ID NO: 3842 - protein, 80 aa, Synthetic construct
GPVPRDIYQRIKKLEDKILELEGISPEYFQSVSFSGKRRKVQPPQQNYSLAELDEKISALKQALLRKSREAESMATHHLP

SEQ ID NO: 3843 - protein, 80 aa, Synthetic construct
FAKVKEVDQSGEWFKEGMKLEAIDPLNLSTICVATIRKVLADGFLMIGIDGSEAADGSDWFCYHATSPSIFPVGFCEINM

SEQ ID NO: 3844 - protein, 80 aa, Synthetic construct
WCQLTGYQLQPPASQSSRENQSASSKQKKKAKSQQYKGHKKMTTLQLKEELLDGEDYNFLQGASDQESNGSANFYIKQEP

SEQ ID NO: 3845 - protein, 130 aa, Synthetic construct
TPIHASQIQKVEPAGRSRFTPELQPKASQSRKRSLATMDSPPHQKQPQRGEVSQKTVIIKEEEEDTAEKPGKEEDVVTPKPGKRKRDQAEEEPNRIPSRSLRRTKLNQESTAPKVLFTGVVDARGERAVL

SEQ ID NO: 3846 - protein, 90 aa, Synthetic construct
DWLHQSRKAGFFLPPDEYVVTDPEQEKNFGFSLQDALSRARERRLLEGYEIYVTPGVQPPPPQMGEIISCCGGTYLPSMPRSYKPQRVVI

SEQ ID NO: 3847 - protein, 90 aa, Synthetic construct
IYVTPGVQPPPPQMGEIISCCGGTYLPSMPRSYKPQRVVITCPQDFPHCSIPLRVGLPLLSPEFLLTGVLKQEAKPEAFVVLSPLEMSST

SEQ ID NO: 3848 - protein, 80 aa, Synthetic construct
ESQAGSDTDVEEGKAPQAVPLEKSQASMVINSDTDDEEEVSAALTLAHLKESQPAIWNRDAEEDMPQRVVLLQRSQTTTE

SEQ ID NO: 3849 - protein, 80 aa, Synthetic construct
ADKSSPGIHLERSQASTTVDINTQVEKEVPPGSAIIHIKKHQVSVEGTNQTDVKAVGGPAKLLVVSLEEAWPLHGDCETD

SEQ ID NO: 3850 - protein, 80 aa, Synthetic construct
KLLVVSLEEAWPLHGDCETDAEEGTSLTASVVADVRKSQLPAEGDAGAEWAAAVLKQERAHEVGAQGGPPVAQVEQDLPI

SEQ ID NO: 3851 - protein, 120 aa, Synthetic construct
NVKFCIDASQPDVGSWLKYIRFAGCYDQHNLVACQINDQIFYRVVADIAPGEELLLFMKSEDYPHETMAPDIHEERQYRCEDCDQLFESKAELADHQKFPCSTPHSAFSMVEEDFQQKLE

SEQ ID NO: 3852 - protein, 150 aa, Synthetic construct
QDKKVGALPYPSMFPLPFFPAFSQSMYPFPDRDLRSLPLKMEPQSPGEVKKLQKGSSESPFDLTTKRKDEKPLTPVPSKPPVTPATSQDQPLDLSMGSRSRASGTKLTEPRKNHVFGGKKGSNVESRPASDGSLQHARPTPFFMDPIYRV

SEQ ID NO: 3853 - protein, 80 aa, Synthetic construct
PLDLSMGSRSRASGTKLTEPRKNHVFGGKKGSNVESRPASDGSLQHARPTPFFMDPIYRVEKRKLTDPLEALKEKYLRPS

SEQ ID NO: 3854 - protein, 90 aa, Synthetic construct
AETSEGSGSAPAVPEASASPKQRRSIIRDRGPMYDDPTLPEGWTRKLKQRKSGRSAGKYDVYLINPQGKAFRSKVELIAYFEKVGDTSLD

SEQ ID NO: 3855 - protein, 80 aa, Synthetic construct
KSGRSAGKYDVYLINPQGKAFRSKVELIAYFEKVGDTSLDPNDFDFTVTGRGSPSRREQKPPKKPKSPKAPGTGRGRGRP

SEQ ID NO: 3856 - protein, 110 aa, Synthetic construct
STQVMVIKRPGRKRKAEADPQAIPKKRGRKPGSVVAAAAAEAKKKAVKESSIRSVQETVLPIKKRKTRETVSIEVKEVVKPLLVSTLGEKSGKGLKTCKSPGRKSKESSP

SEQ ID NO: 3857 - protein, 80 aa, Synthetic construct
KDKPLKFKKVKKDKKEEKEGKHEPVQPSAHHSAEPAEAGKAETSEGSGSAPAVPEASASPKQRRSIIRDRGPMYDDPTLP

SEQ ID NO: 3858 - protein, 150 aa, Synthetic construct
SAMPTAYNTDYSLTSADLSALQGFNSPGMLSLGQVSAWQQHHLGQAALSSLVAGGQLSQGSNLSINTNQNISIKSEPISPPRDRMTPSGFQQQQQQQQQQQPPPPPQPQPQPPQPQPRQEMGRSPVDSLSSSSSSYDGSDREDPRGDFHS

SEQ ID NO: 3859 - protein, 110 aa, Synthetic construct
DPPPPPGLLQPPTLAPWQPSRGDGPPAVSSQPSGGRSLGEEGPPTRGASPPTPPVSIKSERLSPAPGGPGDFPKTFPYPLLLARSLAEPLRPGPALRRLPRLPLADGWPR

SEQ ID NO: 3860 - protein, 140 aa, Synthetic construct
EYSLSSADLSSLSGFNTASALHLGSVTGWQQQHLHNMPPSALSQLGACTSTHLSQSSNLSLPSTQSLNIKSEPVSPPRDRTTTPSRYPQHTRHEAGRSPVDSLSSCSSSYDGSDREDHRNEFHSPIGLTRPSPDERESPS

SEQ ID NO: 3861 - protein, 130 aa, Synthetic construct
QQQPPQPQQPQPQQPQQPQQPPQQQSHLVPVSLSNLIPGSPLPHVGAALTVTTHPHISIKSEPVSPSRERSPAPPPPAVFPAARPEPGDGLSSPAGGSYETGDRDDGRGDFGPTLGLLRPAPEPEAEGSA

SEQ ID NO: 3862 - protein, 80 aa, Synthetic construct
KRDKDAIYGHPLFPLLALIFEKCELATCTPREPGVAGGDVCSSESFNEDIAVFAKQIRAEKPLFSSNPELDNLMIQAIQV

SEQ ID NO: 3863 - protein, 80 aa, Synthetic construct
KQLAQDTGLTILQVNNWFINARRRIVQPMIDQSNRTGQGAAFSPEGQPIGGYTETQPHVAVRPPGSVGMSLNLEGEWHYL

SEQ ID NO: 3864 - protein, 100 aa, Synthetic construct
WADTATVIQDYNYCREDEEIYKEFFEVANDVIPNLLKEAASLLEAGEERPGEQSQGTQSQGSALQDPECFAHLLRFYDGICKWEEGSPTPVLHVGWATFL

SEQ ID NO: 3865 - protein, 80 aa, Synthetic construct
CKWEEGSPTPVLHVGWATFLVQSLGRFEGQVRQKVRIVSREAEAAEAEEPWGEEAREGRRRGPRRESKPEEPPPPKKPAL

SEQ ID NO: 3866 - protein, 100 aa, Synthetic construct
RDPRAPSVGRRGARSSRLGSGQRQSASEREKLRMRTLARALHELRRFLPPSVAPAGQSLTKIETLRLAIRYIGHLSAVLGLSEESLQRRCRQRGDAGSPR

SEQ ID NO: 3867 - protein, 80 aa, Synthetic construct
LGLVSAVRAGASWGSPPACPGARAAPEPRDPPALFAEAACPEGQAMEPSPPSPLLPGDVLALLETWMPLSPLEWLPEEPK

SEQ ID NO: 3868 - protein, 100 aa, Synthetic construct
RAAEAAATTPRRARTGPAGGQRQSASEREKLRMRTLARALHELRRFLPPSLAPAGQSLTKIETLRLAIRYIGHLSAVLGLSEESLQCRRRQRGDAGSPWG

SEQ ID NO: 3869 - protein, 80 aa, Synthetic construct
TPAVHKECQQSNEKEDLMNGVKKEISISIIGKKRKRCVVFNQGELDAMEYHTKIRELILDGSLQLIQEGLKSGFLYPLFE

SEQ ID NO: 3870 - protein, 90 aa, Synthetic construct
LCEMAKHLPSLNEMEHQTLQLVEEDTSVTEQDLFLRVVENNSSFTKVITLMGQKYLLPPKSSFLLSDISCMQPLLNYRKTFDVIVIDPPW

SEQ ID NO: 3871 - protein, 180 aa, Synthetic construct
IQPGDLDPLSRGHETSGKGLEKTSLNIKRDFLGFMDTDSALSEVPQLKQEISECLIASSFEDDSRVASPLDQNGSFNVVIKEEPLDDYDYELGECPEGVTVKQEETDEETDVYSNSDDDPILEKQLKRHNKVDNPEADHLSSKWLPSSPSGVAKAKMFKLDTGKMPVVYLEPCAVTRSTV

SEQ ID NO: 3872 - protein, 130 aa, Synthetic construct
VIHPGLQEVGLKLNSVDPTMSIDLKYLGVQLPLAPATSFPFWNLTGTNPASPDAGFPFVSRTGKTNDFTKIKGWRGKFHSASASRNEGGNSESSLKNRSAFCSDKLDEYLENEGKLMETSMGFSSNAPTS

SEQ ID NO: 3873 - protein, 90 aa, Synthetic construct
KAAHRDPVFYDTLGEEAREEEEGIREEEEQLKEKKKRKKLEYTICETEPEQPVRHYPLWVKVEGEVDPEPVYIPTPSVIEPMKPLLLPQP

SEQ ID NO: 3874 - protein, 100 aa, Synthetic construct
LKEKKKRKKLEYTICETEPEQPVRHYPLWVKVEGEVDPEPVYIPTPSVIEPMKPLLLPQPEVLSPTVKGKLLTGIKSPRSYTPKPNPVIREEDKDPVYLY

SEQ ID NO: 3875 - protein, 80 aa, Synthetic construct
YKDVNEEYGARNRKSSKEKVAVLEVRTISEKASNKTVQNLSKVQHQKLGDVKVEQQKGFDNPEENSSEFPVTFKEESKFE

SEQ ID NO: 3876 - protein, 100 aa, Synthetic construct
VKVEQQKGFDNPEENSSEFPVTFKEESKFELSGSKVMEQQSNLQPEAKEKECGDSLEKDRERWRKHLKGPLTRKCVGASQECKKEADEQLIKETKTCQEN

SEQ ID NO: 3877 - protein, 100 aa, Synthetic construct
ERWRKHLKGPLTRKCVGASQECKKEADEQLIKETKTCQENSDVFQQEQGISDLLGKSGITEDARVLKTECDSWSRISNPSAFSIVPRRAAKSSRGNGHFQ

SEQ ID NO: 3878 - protein, 80 aa, Synthetic construct
SDLLGKSGITEDARVLKTECDSWSRISNPSAFSIVPRRAAKSSRGNGHFQGHLLLPGEQIQPKQEKKGGRSSADFTVLDL

SEQ ID NO: 3879 - protein, 140 aa, Synthetic construct
ENTSPLNTPHTSANLVMTPQGQLLTLKGPLFSGPVVAVSPDLLESDLKPQVAGSAVALPENDDLFMMPRIVNVTSLATEGGLVDMGGSKYPHEVPDSKPSDHLKDTVRNEDNSLEDKGRISSRGNRDGRVTLGPTQVFLA

SEQ ID NO: 3880 - protein, 80 aa, Synthetic construct
ITGLDSNLKYILVMDISPVDNHRYKWNGRWWEPSGKAEPHVLGRVFIHPESPSTGHYWMHQPVSFYKLKLTNNTLDQEGH

SEQ ID NO: 3881 - protein, 80 aa, Synthetic construct
SDVFQQEQGISDLLGKSGITEDARVLKTECDSWSRISNPSAFSIVPRRAAKSSRGNGHFQGHLLLPGEQIQPKQEKKGGR

SEQ ID NO: 3882 - protein, 80 aa, Synthetic construct
DSWSRISNPSAFSIVPRRAAKSSRGNGHFQGHLLLPGEQIQPKQEKKGGRSSADFTVLDLEEDDEDDNEKTDDSIDEIVD

SEQ ID NO: 3883 - protein, 80 aa, Synthetic construct
PLKLKPDYWSDKLQKEAEAFAYYRRTHTANERRRRGEMRDLFEKLKITLGLLHSSKVSKSLILTRAFSEIQGLTDQADKL

SEQ ID NO: 3884 - protein, 80 aa, Synthetic construct
FLPKKISGDMRGIQYKWKESESRGERVKSKDSSFHKLKMKDLKDSSIEMELRKVTSAIEEAALDSSELLTNMEDEDDTDE

SEQ ID NO: 3885 - protein, 80 aa, Synthetic construct
GESDSISPLLLHLEDDDFSENEKQLAEPASEPDVLKIVIDSEIKDSLLSNKKAIDGGKNTSGLPAEPESVSSPPTLHMKT

SEQ ID NO: 3886 - protein, 80 aa, Synthetic construct; identical to SEQ ID NO: 287

SEQ ID NO: 3887 - protein, 80 aa, Synthetic construct
LTESEARALAKERQKKDNHNLIERRRRFNINDRIKELGTLIPKSNDPDMRWNKGTILKASVDYIRKLQREQQRAKELENR

SEQ ID NO: 3888 - protein, 120 aa, Synthetic construct
VDYIRKLQREQQRAKELENRQKKLEHANRHLLLRIQELEMQARAHGLSLIPSTGLCSPDLVNRIIKQEPVLENCSQDLLQHHADLTCTTTLDLTDGTITFNNNLGTGTEANQAYSVPTKM

SEQ ID NO: 3889 - protein, 80 aa, Synthetic construct
SPAPPKGAAAPSASQRRKRTSFSAEQLQLLELVFRRTRYPDIHLRERLAALTLLPESRIQVWFQNRRAKSRRQSGKSFQP

SEQ ID NO: 3890 - protein, 80 aa, Synthetic construct
SKDSVAQGTTNVHSSEHAGRNGRNAADPISGDFKEISSVKLVSRYGELKSVPTTQCLDNSKKNESPFWKLYESVKKELDV

SEQ ID NO: 3891 - protein, 100 aa, Synthetic construct
LEVVDTTASTKRHLRTRVQKVQVKEEPSAVKFTQTSGETTDADKEPAGEDKGIKALKESAKQTPAPAASVTGSRRRPRAPRESAQAIEDLAGFKDPAAGH

SEQ ID NO: 3892 - protein, 80 aa, Synthetic construct
PAPSPRKTPVASDQRRRSCKTAPASSSKSQTEVPKRGGRKSGNLPSKRVSISRSQHDILQMICSKRRSGASEANLIVAKS

SEQ ID NO: 3893 - protein, 80 aa, Synthetic construct
TETEPSKTVSTANRSGRSTEFRNIQKLPVESKSEETNTEIVECILKRGQKATLLQQRREGEMKEIERPFETYKENIELKE

SEQ ID NO: 3894 - protein, 80 aa, Synthetic construct
RVLRAPKVEPVGDVVSTRDPVKSQSKSNTSLPPLPFKRGGGKDGSVTGTKRLRCMPAPEEIVEELPASKKQRVAPRARGK

SEQ ID NO: 3895 - protein, 80 aa, Synthetic construct
KDNLGLRHRRTGARQNGGKVRHKRQALQDMARPLKQWLYKHRDNPYPTKTEKILLALGSQMTLVQVSNWFANARRRLKNT

SEQ ID NO: 3896 - protein, 80 aa, Synthetic construct
RHKRQALQDMARPLKQWLYKHRDNPYPTKTEKILLALGSQMTLVQVSNWFANARRRLKNTVRQPDLSWALRIKLYNKYVQ

SEQ ID NO: 3897 - protein, 140 aa, Synthetic construct
GNAERLSVSSDDSCSEDGENPPRTHMNEGGYNTPVHHPVIKSENSVIKAGVRPESRASEDYVAPPKYKSSLLNRYLNDSLRHVMATNTTMMGKTRQRNHSGSFSSNEFEEELVSPSSSETEGNFVYRTDTLENGSNKGES

SEQ ID NO: 3898 - protein, 90 aa, Synthetic construct
EGNFVYRTDTLENGSNKGESAANRKGPSKDDTYWKEINAAMALTNLAQGKDKLQGTTSCIIQKSSHIAEVKTVKVPLVQQTVKVPLVQQF

SEQ ID NO: 3899 - protein, 80 aa, Synthetic construct
TGARQNGGKVRHKRQALQDMARPLKQWLYKHRDNPYPTKTEKILLALGSQMTLVQVSNWFANARRRLKNTVRQPDLSWAL

SEQ ID NO: 3900 - protein, 80 aa, Synthetic construct
AHVVCALYIPEVQFANVSTMEPIVLQSVPHDRYNKTCYICDEQGRESKAATGACMTCNKHGCRQAFHVTCAQFAGLLCEE

SEQ ID NO: 3901 - protein, 90 aa, Synthetic construct
MASSCAVQVKLELGHRAQVRKKPTVEGFTHDWMVFVRGPEHSNIQHFVEKVVFHLHESFPRPKRVCKDPPYKVEESGYAGFILPIEVYFK

SEQ ID NO: 3902 - protein, 100 aa, Synthetic construct
HSNIQHFVEKVVFHLHESFPRPKRVCKDPPYKVEESGYAGFILPIEVYFKNKEEPRKVRFDYDLFLHLEGHPPVNHLRCEKLTFNNPTEDFRRKLLKAGG

SEQ ID NO: 3903 - protein, 80 aa, Synthetic construct
PLHHEPPPPLLKTNNNQILEVKSPIKQSKSDKQIKNGECDKAYLDELVELHRRLMTLRERHILQQIVNLIEETGHFHITN

SEQ ID NO: 3904 - protein, 130 aa, Synthetic construct
YHKWRTYFKKRLQQHKDEDLSSLVQDDDMLYWHKHGDGWKTPVPMEEDPLLDTDMLMSEFSDTLFSTLSSHQPVAWPNPREIAHLGNADMIQPGLIPLQPNLDFMDTFEPFQDLFSSSRSIFGSMLPASA

SEQ ID NO: 3905 - protein, 90 aa, Synthetic construct
TLKRNIPNVDDKKTSNLSVLRTALRYIQSLKRKEKEYEHEMERLAREKIATQQRLAELKHELSQWMDVLEIDRVLRQTGQPEDDQASTST

SEQ ID NO: 3906 - protein, 80 aa, Synthetic construct
PPAHLPVQQQQPQQKTPLPAPPPPPAAPAQTLVPAPAHLVATAGGGSTVIAHTATTHASVIQTVNHVLQGPGGKHIAHIA

SEQ ID NO: 3907 - protein, 80 aa, Synthetic construct
TLVPAPAHLVATAGGGSTVIAHTATTHASVIQTVNHVLQGPGGKHIAHIAPSAPSPAVQLAPATPPIGHITVHPATLNHV

SEQ ID NO: 3908 - protein, 80 aa, Synthetic construct
QAQSNLLGKCRRPRTAFTSQQLLELEHQFKLNKYLSRPKRFEVATSLMLTETQVKIWFQNRRMKWKRSKKAKEQAAQEAE

SEQ ID NO: 3909 - protein, 80 aa, Synthetic construct
MAPKQDPKPKFQEGERVLCFHGPLLYEAKCVKVAIKDKQVKYFIHYSGWNKKSAVRPRRSEKSLKTHEDIVALFPVPEGA

SEQ ID NO: 3910 - protein, 80 aa, Synthetic construct
DGGSTSETPQPPRKKRARVDPTVENEETFMNRVEVKVKIPEELKPWLVDDWDLITRQKQLFYLPAKKNVDSILEDYANYK

SEQ ID NO: 3911 - protein, 80 aa, Synthetic construct
MKIANLAYVTKTRVRFFRLDRWADVRFPEKRRMKLGSDISKHHKSLLAKIFYDRAEYLHGKHGVDVEVQGPHEARDGQLL

SEQ ID NO: 3912 - protein, 80 aa, Synthetic construct
RRMKLGSDISKHHKSLLAKIFYDRAEYLHGKHGVDVEVQGPHEARDGQLLIRLDLNRKEVLTLRLRNGGTQSVTLTHLFP

SEQ ID NO: 3913 - protein, 80 aa, Synthetic construct
KHGVDVEVQGPHEARDGQLLIRLDLNRKEVLTLRLRNGGTQSVTLTHLFPLCRTPQFAFYNEDQELPCPLGPGECYELHV

SEQ ID NO: 3914 - protein, 80 aa, Synthetic construct
EQAYNFEPMDVEFTYNRTTSRRCHFALEHVIHLGVKVLFPEEIILQSPQVTGNWNHAQDTKSSGQSTSKKNRKTMTDQAE

SEQ ID NO: 3915 - protein, 80 aa, Synthetic construct
LRLHESKVLQPATMVRVNATCRFEEIVIDAVKPYCRDGEDIWKASRFRIIITTCSSSGLFYQIGVRVGHFTHVFVDEAGQ

SEQ ID NO: 3916 - protein, 100 aa, Synthetic construct
RGLDSETKKQLEEEEKKIISEEHWYLDLPELKEKESFIIEEQSFLLCEDLLYGRMSFRGFNPEVEKLMLQMNAKHKAEEVEDETVELDVSDEEMARRYET

SEQ ID NO: 3917 - protein, 110 aa, Synthetic construct
TEELAEVEEGVGVVGEDNDAAARGAEAFGDSEEDGEDVFEVEKILDMKTEGGKVLYKVRWKGYTSDDDTWEPEIHLEDCKEVLLEFRKKIAENKAKAVRKDIQRLSLNND

SEQ ID NO: 3918 - protein, 90 aa, Synthetic construct
HKTKENKQSLKERRNTRDETDTWAYIAAEGDQEVLDSVCQADENSDGRQQILSLGMDLQLEWMKLEDFQKHLDGKDENFAATDAIPSNVL

SEQ ID NO: 3919 - protein, 80 aa, Synthetic construct
NSALHFAKQSNNVLVYDLLKNHLETLSRVAEETIKDYFEARLALLEPVFPIACHRLCEGPDFSTDFNYKPPQNIPEGSGI

SEQ ID NO: 3920 - protein, 80 aa, Synthetic construct
VSAQTPKGRRLSGEERGLWSTDSAEEDKETKRNESKEKYQKRHDSDKEEKGRKEPKGLKTLKEIRNAFDLFKLTPEEKND

SEQ ID NO: 3921 - protein, 80 aa, Synthetic construct
KRHDSDKEEKGRKEPKGLKTLKEIRNAFDLFKLTPEEKNDVSENNRKREEIPLDFKTIDDHKTKENKQSLKERRNTRDET

SEQ ID NO: 3922 - protein, 110 aa, Synthetic construct
QCSYEGRFEDDRSDSSSSLLSLKFRSEERPVKKRKVQSCHLQKKQLRLLEAMVEEQRRLSRAVEETCREVRRVLDQQHILQVQSLQLQERMMSLLERIITLERIITKSSV

SEQ ID NO: 3923 - protein, 80 aa, Synthetic construct
YEKMASKLFEMTGERRLGEEIKIKITNMTFQYRKLKCMTDSESAPPDWPYYLAIDGILAKVPESCDGKLPDSQPPGPSTS

SEQ ID NO: 3924 - protein, 100 aa, Synthetic construct
NYRSKTSQEGALKKMHEEEHHQQMSILQLQLIQMNEVHVAKIQQIERECEMAEEEHRIKMEVLNKKKMYWERKLQTFTKEWPVSSFNRPFSFNRPFPNSP

SEQ ID NO: 3925 - protein, 140 aa, Synthetic construct
RYLDWRALMKRKRMKANIKLVGSGFPLPSSDLDDSLTEEIDEKIGFRNDANFDWQNVADFRDAGGSLTEVKVEEEERDPQSPEFEIEEEEEMLSSVIPDSRRENELPDFPHIDEFFTLNSTPSRSAYDEPHLLVNIEKQK

SEQ ID NO: 3926 - protein, 100 aa, Synthetic construct
EMLSSVIPDSRRENELPDFPHIDEFFTLNSTPSRSAYDEPHLLVNIEKQKLELEKRRLDIEAERLQVEKERLQIEKERLRHLDMEHERLQLEKERLQIER

SEQ ID NO: 3927 - protein, 90 aa, Synthetic construct
HLLVNIEKQKLELEKRRLDIEAERLQVEKERLQIEKERLRHLDMEHERLQLEKERLQIEREKLRLQIVNSEKPSLENELGQGEKSMLQPQ

SEQ ID NO: 3928 - protein, 80 aa, Synthetic construct
EKLRLQIVNSEKPSLENELGQGEKSMLQPQDIETEKLKLERERLQLEKDRLQFLKFESEKLQIEKERLQVEKDRLRIQKE

SEQ ID NO: 3929 - protein, 90 aa, Synthetic construct
KKPLPAKGSAAECKQSQRNAANARERARMRVLSKAFSRLKTSLPWVPPDTKLSKLDTLRLASSYIAHLRQLLQEDRYENGYVHPVNLTWP

SEQ ID NO: 3930 - protein, 80 aa, Synthetic construct
PTHLQGGGGPKAQKGTKVRMSVQRRRKASEREKLRMRTLADALHTLRNYLPPVYSQRGQPLTKIQTLKYTIKYIGELTDL

SEQ ID NO: 3931 - protein, 90 aa, Synthetic construct
MAVQPKETLQLESAAEVGFVRFFQGMPEKPTTTVRLFDRGDFYTAHGEDALLAAREVFKTQGVIKYMGPAGAKNLQSVVLSKMNFESFVK

SEQ ID NO: 3932 - protein, 80 aa, Synthetic construct
MIDSSSAQNLELLINNQDYRNNHTLFGVLNYTKTPGGSRRLRSNILEPLVDIETINMRLDCVQELLQDEELFFGLQSVIS

SEQ ID NO: 3933 - protein, 80 aa, Synthetic construct
GSLEDKRFGIILEKIKTVINDDARYMKGCLNMRTQKCYAVRSNINEFLDIARRTYTEIVDDIAGMISQLGEKYSLPLRTS

SEQ ID NO: 3934 - protein, 100 aa, Synthetic construct
MASLGANPRRTPQGPRPGAASSGFPSPAPVPGPREAEEEEVEEEEELAEIHLCVLWNSGYLGIAYYDTSDSTIHFMPDAPDHESLKLLQRVLDEINPQSV

SEQ ID NO: 3935 - protein, 100 aa, Synthetic construct
GHIKNVPLILKRMKLSHTKVSDWQVLYKTVYSALGLRDACRSLPQSIQLFRDIAQEFSDDLHHIASLIGKVVDFEGSLAENRFTVLPNIDPEIDEKKRRL

SEQ ID NO: 3936 - protein, 80 aa, Synthetic construct
DGLALLAAVLRHWLARGPTCPHIFVATNFLSLVQLQLLPQGPLVQYLTMETCEDGNDLVFFYQVCEGVAKASHASHTAAQ

SEQ ID NO: 3937 - protein, 90 aa, Synthetic construct
SPSPGGDAAWSEAGPGPRPLARSASPPKAKNLNGGLRRSVAPAAPTSCDFSPGDLVWAKMEGYPWWPCLVYNHPFDGTFIREKGKSVRVH

SEQ ID NO: 3938 - protein, 80 aa, Synthetic construct
APAAPTSCDFSPGDLVWAKMEGYPWWPCLVYNHPFDGTFIREKGKSVRVHVQFFDDSPTRGWVSKRLLKPYTGSKSKEAQ

SEQ ID NO: 3939 - protein, 80 aa, Synthetic construct
VPDKISEVVELLKKLPDLERLLSKIHNVGSPLKSQNHPDSRAIMYEETTYSKKKIIDFLSALEGFKVMCKIIGIMEEVAD

SEQ ID NO: 3940 - protein, 80 aa, Synthetic construct
RAIMYEETTYSKKKIIDFLSALEGFKVMCKIIGIMEEVADGFKSKILKQVISLQTKNPEGRFPDLTVELNRWDTAFDHEK

SEQ ID NO: 3941 - protein, 80 aa, Synthetic construct
KSERDTLLARIERMERRMQLVKKDNEKERHKLFQGYETEEREETELSEKIKLECQPELSETSQTLPPKPFSCGRSGKGHK

SEQ ID NO: 3942 - protein, 80 aa, Synthetic construct
HSPIKEEPCGSLSETVCKRELRSQETPEKPRSSVDTPPRLSTPQKGPSTHPKEKAFSSEIEDLPYLSTTEMYLCRWHQPP

SEQ ID NO: 3943 - protein, 90 aa, Synthetic construct
SLSCCVCGHLLQDPIAPTNSTCQHYVCKTCKGKKMMMKPSCSWCKDYEQFEENKQLSILVNCYKKLCEYITQTTLARDIIEAVDCSSDIL

SEQ ID NO: 3944 - protein, 120 aa, Synthetic construct
QASLSPMSESTLSIAIGSSVINGLPTYNGLSIDRFGINIPSPEHSNTIDVCNTVDIKTEDLSDSLPPVCDTVATDLCSTGIDICSFSEDIKPGDSLLLSVEEVLRSLETVSNTEVCCPNL

SEQ ID NO: 3945 - protein, 80 aa, Synthetic construct
EKTEVKEEPELQTRREMEERTITIEIPEVLKKQLEDDCYYINRRKRLVKLPCQTNIITILESYVKHFAINAAFSANERPR

SEQ ID NO: 3946 - protein, 80 aa, Synthetic construct
SVTLNQRVALICLPPEWYVVPPGTKCEIAGWGETKGTGNDTVLNVALLNVISNQECNIKHRGRVRESEMCTEGLLAPVGA

SEQ ID NO: 3947 - protein, 80 aa, Synthetic construct
QVLRGTELQHLLHAVVPGPWQEDVADAEECAGRCGPLMDCRAFHYNVSSHGCQLLPWTQHSPHTRLRRSGRCDLFQKKDY

SEQ ID NO: 3948 - protein, 80 aa, Synthetic construct
PKRSRRDFGLDCDEHSTESRCCRYPLTVDFEAFGWDWIIAPKRYKANYCSGECEFVFLQKYPHTHLVHQANPRGSAGPCC

SEQ ID NO: 3949 - protein, 80 aa, Synthetic construct
DWIIAPKRYKANYCSGECEFVFLQKYPHTHLVHQANPRGSAGPCCTPTKMSPINMLYFNGKEQIIYGKIPAMVVDRCGCS

SEQ ID NO: 3950 - protein, 80 aa, Synthetic construct
LMSDKKPPKEASPLPAESASAGATLRPLLLSGHGAREAHSPGPLVKPFETASVKSENSEDGAAWMQEPGRYSPPPRHMSP

SEQ ID NO: 3951 - protein, 100 aa, Synthetic construct
AGATLRPLLLSGHGAREAHSPGPLVKPFETASVKSENSEDGAAWMQEPGRYSPPPRHMSPTTCTLRKHKTNRKPRTPFTTSQLLALERKFRQKQYLSIAE

SEQ ID NO: 3952 - protein, 80 aa, Synthetic construct
MLTANKMKLTETFDFVHNVMSIPHHIIVKFPQVFNTRLFKVKERHLFLTYLGRAQYDPAKPNYISLDKLVSIPDEIFCEE

SEQ ID NO: 3953 - protein, 140 aa, Synthetic construct
ITPTPNTAILQSSLVMGEQNLQWILNGATSSPQNQEQIQQASKVEKVFFTTAVPVASSPGSSVQQIGLSVPVIIIKQEEACQCQCACRDSAKERASSRRKGCSSPPPPEPSPQAPDGPSLQLPAQTFSSAPVPGSSSSTL

SEQ ID NO: 3954 - protein, 80 aa, Synthetic construct
RDSTGAGNSLVHKRSPLRRNQKTPTSLTKLSLQDGHKAKKPACKFEEGQDVLARWSDGLFYLGTIKKINILKQSCFIIFE

SEQ ID NO: 3955 - protein, 130 aa, Synthetic construct
VIDSDEKWLCRQCVFATTTKRGGALKKGPNAKALQVMKQTLPYSVADLEWDAGHKTNVQQCYCYCGGPGDWYLKMLQCCKCKQWFHEACVQCLQKPMLFGDRFYTFICSVCSSGPEYLKRLPLQWVDIAH

SEQ ID NO: 3956 - protein, 80 aa, Synthetic construct
RLHPGELADTPKSERYEHVLEALNDYKTMFMSGKEIKKKKHLFGLRIRVPPVPPNVAFKAEKEPEGTSHEFKIKGRKASK

SEQ ID NO: 3957 - protein, 80 aa, Synthetic construct
RTRTGRSWPAAIPHLRRRRGRLPRRALQTQNSEIVKDDEGKEDYQFDELNTEILNNLADQELQLNHLKNSITSYFGAAGR

SEQ ID NO: 3958 - protein, 80 aa, Synthetic construct
RFDVGPILKQETVPVPPKSTAKELEAVLSRLGANMLISVLKNLPESLSNGRQQPMEGATYAPKISAGTSCIKWEEQTSEQ

SEQ ID NO: 3959 - protein, 80 aa, Synthetic construct
WRLEQLQGPQEMERIRMDSIGSTISSDRSDSEREEIEVDVESTEFSHGEVDNISTTSISDIDDHSSLPSIGSDEGYSSAS

SEQ ID NO: 3960 - protein, 170 aa, Synthetic construct
TTPFHRDQTVKTQKENTVFRTPAIKRSILESSPRTPTPFKHALAAQEIKYGPLKMLPQTPSHLVEDLQDVIKQESDESGIVAEFQENGPPLLKKIKQEVESPTDKSGNFFCSHHWEGDSLNTQLFTQTSPVADAPNILTSSVLMAPASEDEDNVLKAFTVPKNRSLASPL

SEQ ID NO: 3961 - protein, 110 aa, Synthetic construct
DQKENVGFRTPTIRRSILGTTPRTPTPFKNALAAQEKKYGPLKIVSQPLAFLEEDIREVLKEETGTDLFLKEEDEPAYKSCKQENTASGKKVRKSLVLDNWEKEESGTQL

SEQ ID NO: 3962 - protein, 80 aa, Synthetic construct
IPLLEIHDNRCNLIPEKQDINSTNKTYTLTKKKPNPNTSKVVKLEKNLQSNCEWETVVYGKTEDQLIMTEQARRYLSTYT

SEQ ID NO: 3963 - protein, 80 aa, Synthetic construct
NLIPEKQDINSTNKTYTLTKKKPNPNTSKVVKLEKNLQSNCEWETVVYGKTEDQLIMTEQARRYLSTYTATSSTSRALIL

SEQ ID NO: 3964 - protein, 200 aa, Synthetic construct
KMLPGRTDNAVKNHWNSTIKRKVDTGGFLSESKDCKPPVYLLLELEDKDGLQSAQPTEGQGSLLTNWPSVPPTIKEEENSEEELAAATTSKEQEPIGTDLDAVRTPEPLEEFPKREDQEGSPPETSLPYKWVVEAANLLIPAVGSSLSEALDLIESDPDAWCDLSKFDLPEEPSAEDSINNSLVQLQASHQQQVLPPRQP

SEQ ID NO: 3965 - protein, 80 aa, Synthetic construct
LSGIKEDNSLLNQGFLQAKPEKAAVAQKPRSHFTTPAPMSSAWKTVACGGTRDQLFMQEKARQLLGRLKPSHTSRTLILS

SEQ ID NO: 3966 - protein, 80 aa, Synthetic construct
DKTPLHQKHAAFVTPDQKYSMDNTPHTPTPFKNALEKYGPLKPLPQTPHLEEDLKEVLRSEAGIELIIEDDIRPEKQKRK

SEQ ID NO: 3967 - protein, 80 aa, Synthetic construct
VTPFSLRGDNDGGGGSFSTADQLEMVTELLGGDMVNQSFICDPDDETFIKNIIIQDCMWSGFSAAAKLVSEKLASYQAAR

SEQ ID NO: 3968 - protein, 80 aa, Synthetic construct
DQLEMVTELLGGDMVNQSFICDPDDETFIKNIIIQDCMWSGFSAAAKLVSEKLASYQAARKDSGSPNPARGHSVCSTSSL

SEQ ID NO: 3969 - protein, 80 aa, Synthetic construct
TPSLEAGNPAPAAPCPLGEPKTQACSGSESPSDSENEEIDVVTVEKRQSLGIRKPVTITVRADPLDPCMKHFHISIHQQQ

SEQ ID NO: 3970 - protein, 90 aa, Synthetic construct
RCLPIHQQHNYAAPSPYVESEDAPPQKKIKSEASPRPLKSVIPPKAKSLSPRNSDSEDSERRRNHNILERQRRNDLRSSFLTLRDHVPEL

SEQ ID NO: 3971 - protein, 90 aa, Synthetic construct
MDRRKAATMRERRRLKKVNQAFETLKRCTTTNPNQRLPKVEILRNAIRYIESLQELLREQVENYYSLPGQSCSEPTSPTSNCSDGMPECN

SEQ ID NO: 3972 - protein, 80 aa, Synthetic construct
CKTCKRKSAPTDRRKAATLRERRRLKKINEAFEALKRRTVANPNQRLPKVEILRSAISYIERLQDLLHRLDQQEKMQELG

SEQ ID NO: 3973 - protein, 80 aa, Synthetic construct
ERRRLKKINEAFEALKRRTVANPNQRLPKVEILRSAISYIERLQDLLHRLDQQEKMQELGVDPFSYRPKQENLEGADFLR

SEQ ID NO: 3974 - protein, 90 aa, Synthetic construct
ANPNQRLPKVEILRSAISYIERLQDLLHRLDQQEKMQELGVDPFSYRPKQENLEGADFLRTCSSQWPSVSDHSRGLVITAKEGGASIDSS

SEQ ID NO: 3975 - protein, 80 aa, Synthetic construct
TGTLNLDSWNVKEIHQAADYLKVEEVVTKCKIKMEDFAFIANPSSTEISSITGNIELNQQTCLLTLRDYNNREKSEVSTD

SEQ ID NO: 3976 - protein, 80 aa, Synthetic construct
SEQEEYEAEGIAWEPVQYFNNKIICDLVEEKFKGIISILDEECLRPGEATDLTFLEKLEDTVKHHPHFLTHKLADQRTRK

SEQ ID NO: 3977 - protein, 80 aa, Synthetic construct
SFATTDDFYDDPCFDSPDLRFFEDLDPRLMHVGALLKPEEHSHFPAAVHPAPGAREDEHVRAPSGHHQAGRCLLWACKAC

SEQ ID NO: 3978 - protein, 90 aa, Synthetic construct
RCLLWACKACKRKTTNADRRKAATMRERRRLSKVNEAFETLKRCTSSNPNQRLPKVEILRNAIRYIEGLQALLRDQDAAPPGAAAAFYAP

SEQ ID NO: 3979 - protein, 80 aa, Synthetic construct
VCKRKSVSVDRRRAATLREKRRLKKVNEAFEALKRSTLLNPNQRLPKVEILRSAIQYIERLQALLSSLNQEERDLRYRGG

SEQ ID NO: 3980 - protein, 80 aa, Synthetic construct
EALKRSTLLNPNQRLPKVEILRSAIQYIERLQALLSSLNQEERDLRYRGGGGPQPGVPSECSSHSASCSPEWGSALEFSA

SEQ ID NO: 3981 - protein, 80 aa, Synthetic construct
HLNKEDEGLYTIRVRMGEYYEQYSAYVFVRDADAEIEGAPAAPLDVKCLEANKDYIIISWKQPAVDGGSPILGYFIDKCE

SEQ ID NO: 3982 - protein, 80 aa, Synthetic construct
EQYSAYVFVRDADAEIEGAPAAPLDVKCLEANKDYIIISWKQPAVDGGSPILGYFIDKCEVGTDSWSQCNDTPVKFARFP

SEQ ID NO: 3983 - protein, 80 aa, Synthetic construct
EPSEGIVPGPPTDLSVTEATRSYVVLSWKPPGQRGHEGIMYFVEKCEAGTENWQRVNTELPVKSPRFALFDLAEGKSYCF

SEQ ID NO: 3984 - protein, 100 aa, Synthetic construct
PGQRGHEGIMYFVEKCEAGTENWQRVNTELPVKSPRFALFDLAEGKSYCFRVRCSNSAGVGEPSEATEVTVVGDKLDIPKAPGKIIPSRNTDTSVVVSWE

SEQ ID NO: 3985 - protein, 80 aa, Synthetic construct
ESKDAKELVGYYIEASVAGSGKWEPCNNNPVKGSRFTCHGLVTGQSYIFRVRAVNAAGLSEYSQDSEAIEVKAAIGGGVS

SEQ ID NO: 3986 - protein, 80 aa, Synthetic construct
SGERATLTFSHLNKEDEGLYTIRVRMGEYYEQYSAYVFVRDADAEIEGAPAAPLDVKCLEANKDYIIISWKQPAVDGGSP

SEQ ID NO: 3987 - protein, 80 aa, Synthetic construct
RVRCSNSAGVGEPSEATEVTVVGDKLDIPKAPGKIIPSRNTDTSVVVSWEESKDAKELVGYYIEASVAGSGKWEPCNNNP

SEQ ID NO: 3988 - protein, 80 aa, Synthetic construct
KDAGIYEVILKDDRGKDKSRLKLVDEAFKELMMEVCKKIALSATDLKIQSTAEGIQLYSFVTYYVEDLKVNWSHNGSAIR

SEQ ID NO: 3989 - protein, 120 aa, Synthetic construct
PLAQVAPSPPSPPPPPRPPPTLSASDPSLDFLRAQQETANAIRELAGTLRQGLAKLSEALSALLPLLPGTPVDSLPPPLPPPPPPPPPPRPVLPPPAPKVEITPEPVSVVAAVVDGAVVA

SEQ ID NO: 3990 - protein, 80 aa, Synthetic construct
QLPRLALSPPPPAPPLPPPPPLAQVAPSPPSPPPPPRPPPTLSASDPSLDFLRAQQETANAIRELAGTLRQGLAKLSEAL

SEQ ID NO: 3991 - protein, 150 aa, Synthetic construct
LQRDLYMKAEPPIPHYAAMGQGLVPTDLHHTQQSQMLHQLLQQHGAELPTHPSKKRKHSESPPSTLNAQMLNGMIKQEPGTVTALPLHPTRAPSPPWPPQGPLSPGPGSLPLSIARVQTPPWHPPGAPSPGLLQDSDSLSGSYLDPNYQS

SEQ ID NO: 3992 - protein, 80 aa, Synthetic construct
GALQSSVGPAEPTWAQGQSEPVPSLTSIQVLENSMSITSQYCAPGDACRPGNFTYHIPVSSGTPLHLSLTLQMNSSSPVS

SEQ ID NO: 3993 - protein, 90 aa, Synthetic construct
LENSMSITSQYCAPGDACRPGNFTYHIPVSSGTPLHLSLTLQMNSSSPVSVVLCSLRSKEEPCEEGSLPQSLHTHQDTQGTSHRWPITIL

SEQ ID NO: 3994 - protein, 90 aa, Synthetic construct
KISKLIGSRTVLQVKSYARQYFKNKVKCGLDKETPNQKTGHNLQVKNEDKGTKAWTPSCLRGRADPNLNAVKIEKLSDDEEVDITDEVDE

SEQ ID NO: 3995 - protein, 120 aa, Synthetic construct
DKETPNQKTGHNLQVKNEDKGTKAWTPSCLRGRADPNLNAVKIEKLSDDEEVDITDEVDELSSQTPQKNSSSDLLLDFPNSKMHETNQGEFITSDSQEALFSKSSRGCLQNEKQDETLSS

SEQ ID NO: 3996 - protein, 80 aa, Synthetic construct
SVRPGLKNCGDVNCIGRIHTYLELIGAINFGCEQAVYNRPQTVDKVRIRDRKDAVEAYQLAQRLQSMRTRRRRVRDPWGN

SEQ ID NO: 3997 - protein, 100 aa, Synthetic construct
PKIQTSETSPKAFQCFDYSQDAEAAHMAATAILNLSTRCWEMPENLSTKPQDLPSKSVDIEVDENGTLDLSMHKHRKRENAFPSSSSCSSSPGVKSPDAS

SEQ ID NO: 3998 - protein, 100 aa, Synthetic construct
DQEVSEENFEERKYPGEVTLTNFKLKFLSKDIKKELLTCPTPGCDGSGHITGNYASHRSLSGCPLADKSLRNLMAAHSADLKCPTPGCDGSGHITGNYAS

SEQ ID NO: 3999 - protein, 90 aa, Synthetic construct
EEIKQLNQEIRDLNESNSEMEAAMVQLQSQISSMEKNLKNIEEENKLIEEQNEALFLELSGLSQALIQSLANIRLPHMEPICEQNFDAYV

SEQ ID NO: 4000 - protein, 80 aa, Synthetic construct
PGIVHLLQEAAEGAASEEGEKGLFIQPEDAEEVVEVTTERSQDLCPQSLEDAASEESSKQKGILSHEEEDEEEEEEEEEE

SEQ ID NO: 4001 - protein, 90 aa, Synthetic construct
PNVAPATPRANLAKELEKFSKVTFDYASFDAQVFGKRMLAPKIQTSETSPKAFQCFDYSQDAEAAHMAATAILNLSTRCWEMPENLSTKP

SEQ ID NO: 4002 - protein, 80 aa, Synthetic construct
AEDAAYRARTESEMNSNTSNSLEDDSDKNENLGRKSELSLDLDSDVVRETVDSLKLLAQGHGVVLSENMNDRNYADSMSQ

SEQ ID NO: 4003 - protein, 80 aa, Synthetic construct
EDGCHERDDDTTSVNSDRSEEVFDMTKGNLTLLEKAIALETERAKAMREKMAMEAGRRDNMRSYEDQSPRQLPGEDRKPK

SEQ ID NO: 4004 - protein, 80 aa, Synthetic construct
CPIAAAEKLAKAQEKHQSCDVSKSSQASDRVLRPMCFVKQLEIPQYGYRNNVPTTTPRSNLAKELEKYSKTSFEYNSYDN

SEQ ID NO: 4005 - protein, 150 aa, Synthetic construct
KVQTRDISPKGYDDAKRYCKDPSPSSSSTSSYAPSSSSNLSCGGGSSASSTCSKSSFDYTHDMEAAHMAATAILNLSTRCREMPQNLSTKPQDLCATRNPDMEVDENGTLDLSMNKQRPRDSCCPILTPLEPMSPQQQAVMNNRCFQLGE

SEQ ID NO: 4006 - protein, 80 aa, Synthetic construct
RASNGIENDEEIKQLDEEIKELNESNSQMEADMIKLRTQITTMESNLKTIEEENKVIEQQNESLLHELANLSQSLIHSLA

SEQ ID NO: 4007 - protein, 100 aa, Synthetic construct
RPAVLGSPDRAPPEDEGPVMVKLEDSEEEGEAALWDPGPEAARLRFRCFRYEEATGPQEALAQLRELCRQWLRPEVRSKEQMLELLVLEQFLGALPPEIQ

SEQ ID NO: 4008 - protein, 80 aa, Synthetic construct
PEEAAALVDGLRREPGGPRRWVTVQVQGQEVLSEKMEPSSFQPLPETEPPTPEPGPKTPPRTMQESPLGLQVKEESEVTE

SEQ ID NO: 4009 - protein, 80 aa, Synthetic construct
WVTVQVQGQEVLSEKMEPSSFQPLPETEPPTPEPGPKTPPRTMQESPLGLQVKEESEVTEDSDFLESGPLAATQESVPTL

SEQ ID NO: 4010 - protein, 100 aa, Synthetic construct
FQPLPETEPPTPEPGPKTPPRTMQESPLGLQVKEESEVTEDSDFLESGPLAATQESVPTLLPEEAQRCGTVLDQIFPHSKTGPEGPSWREHPRALWHEEA

SEQ ID NO: 4011 - protein, 80 aa, Synthetic construct
MNIRNARPEDLMNMQHCNLLCLPENYQMKYYFYHGLSWPQLSYIAEDENGKIVGYVLAKMEEDPDDVPHGHITSLAVKRS

SEQ ID NO: 4012 - protein, 80 aa, Synthetic construct
CLPENYQMKYYFYHGLSWPQLSYIAEDENGKIVGYVLAKMEEDPDDVPHGHITSLAVKRSHRRLGLAQKLMDQASRAMIE

SEQ ID NO: 4013 - protein, 80 aa, Synthetic construct
MDEAQSLDTADRFINSKCAKYMLRANMIKEAEEMCSKFTREGTSAMENLNEMQCMWFQTECISAYQRLGRYGDALKKCHE

SEQ ID NO: 4014 - protein, 80 aa, Synthetic construct
TKKETSAVAEAQKLMVQAADLLSAIHNSLHHGIQAQNDTTKGDHPIMMGFEPLVNQRLLPPTFPRYAKIIKREEMVNYFA

SEQ ID NO: 4015 - protein, 80 aa, Synthetic construct
EGHSLAQTVFTCLYIHNPDFIEDPAMKAFALGILKICDIAREKVNKAAVFEEEDFQSMTYGFKMANSVTDLRVTGMLKDV

SEQ ID NO: 4016 - protein, 80 aa, Synthetic construct
SPSVPIPLLTRVKHEAMELPPAGPGLAPKRPLETGPRDGVAVAAGAAVAAGTAPLKLPRVSYYGVPSLATLIPGIQQMPY

SEQ ID NO: 4017 - protein, 80 aa, Synthetic construct
RVKHEAMELPPAGPGLAPKRPLETGPRDGVAVAAGAAVAAGTAPLKLPRVSYYGVPSLATLIPGIQQMPYPQGERTSPGA

SEQ ID NO: 4018 - protein, 120 aa, Synthetic construct
SVKPQALKSRIALNSAKLIQEQRVTNLHVKEIAQHLEQQNDLLQMIRRSQEVQACAQERQAQAMEGTQAALSVLIQVLRPMIKDFRRYLQSNTANPAPASDPGQVAQNGQQNGQPDSIIQ

SEQ ID NO: 4019 - protein, 80 aa, Synthetic construct
PVKKQKTRTVFSSTQLCVLNDRFQRQKYLSLQQMQELSNILNLSYKQVKTWFQNQRMKSKRWQKNNWPKNSNGVTQKASA

SEQ ID NO: 4020 - protein, 110 aa, Synthetic construct
SNGVTQKASAPTYPSLYSSYHQGCLVNPTGNLPMWSNQTWNNSTWSNQTQNIQSWSNHSWNTQTWCTQSWNNQAWNSPFYNCGEESLQSCMQFQPNSPASDLEAALEAAG

SEQ ID NO: 4021 - protein, 100 aa, Synthetic construct
NIQSWSNHSWNTQTWCTQSWNNQAWNSPFYNCGEESLQSCMQFQPNSPASDLEAALEAAGEGLNVIQQTTRYFSTPQTMDLFLNYSMNMQYSMNMQPEDV

SEQ ID NO: 4022 - protein, 120 aa, Synthetic construct
RWQKNNWPKNSNGVTQKASAPTYPSLYSSYHQGCLVNPTGNLPMWSNQTWNNSTWSNQTQNIQSWSNHSWNTQTWCTQSWNNQAWNSPFYNCGEESLQSCMHFQPNSPASDLEAALEAAG

SEQ ID NO: 4023 - protein, 100 aa, Synthetic construct
NIQSWSNHSWNTQTWCTQSWNNQAWNSPFYNCGEESLQSCMHFQPNSPASDLEAALEAAGEGLNVIQQTTRYFSTPQTMDLFLNYSMNMQYSMNMQPEDV

SEQ ID NO: 4024 - protein, 80 aa, Synthetic construct
ETPTGYIESLPRVVKRRVNALKNLQVKCAQIEAKFYEEVHDLERKYAVLYQPLFDKRFEIINAIYEPTEEECEWKPDEED

SEQ ID NO: 4025 - protein, 80 aa, Synthetic construct
CHEEMYGNEEGMVHEYVDEDDGYEDYYYDYAVEEEEEEEEEDDIEATGEENKEEEDPKGIPDFWLTVLKNVDTLTPLIKK

SEQ ID NO: 4026 - protein, 100 aa, Synthetic construct
ASNTEKLTDQVMQNPRVLAALQERLDNVPHTPSSYIETLPKAVKRRINALKQLQVRCAHIEAKFYEEVHDLERKYAALYQPLFDKRREFITGDVEPTDAE

SEQ ID NO: 4027 - protein, 80 aa, Synthetic construct; identical to SEQ ID NO: 892

SEQ ID NO: 4028 - protein, 80 aa, Synthetic construct
CVLQDFEALTPNLLARTVETVEGGGLVVILLRTMNSLKQLYTVTMDVHSRYRTEAHQDVVGRFNERFILSLASCKKCLVI

SEQ ID NO: 4029 - protein, 80 aa, Synthetic construct
YLSERGSCFWVAESEEKVVGMVGALPVDDPTLREKRLQLFHLFVDSEHRRQGIAKALVRTVLQFARDQGYSEVILDTGTI

SEQ ID NO: 4030 - protein, 80 aa, Synthetic construct
ISRNHAVLTANFSVTNLSQTDEIPVLTLKDNSKYGTFVNEEKMQNGFSRTLKSGDGITFGVFGSKFRIEYEPLVACSSCL

SEQ ID NO: 4031 - protein, 80 aa, Synthetic construct
AVVFGGGEARLITEENEEEHNFFLAPGTCVVDTGITNSQTLIPDCQKKWIQSIMDMLQRQGLRPIPEAEIGLAVIFMTTK

SEQ ID NO: 4032 - protein, 80 aa, Synthetic construct
NFFLAPGTCVVDTGITNSQTLIPDCQKKWIQSIMDMLQRQGLRPIPEAEIGLAVIFMTTKNYCDPQGHPSTGLKTTTPGP

SEQ ID NO: 4033 - protein, 80 aa, Synthetic construct
VGNLNFNKSAPELKTGISDVFAKNDLAVVDVRIGMTRKFGYVDFESAEDLEKALELTGLKVFGNEIKLEKPKGKDSKKER

SEQ ID NO: 4034 - protein, 110 aa, Synthetic construct
VKPDKCKILKKTVDQIQLMKRMEQEKSTTDDDVQKSDISSSSQGVIEKESLGPLLLEALDGFFFVVNCEGRIVFVSENVTSYLGYNQEELMNTSVYSILHVGDHAEFVKN

SEQ ID NO: 4035 - protein, 100 aa, Synthetic construct
ITTLSVEPDKKDSASTSVSVTGQVQGNSSIKLELDASKKKESKDHQLLRYLLDKDEKDLRSTPNLSLDDVKVKVEKKEQMDPCNTNPTPMTKPTPEEIKL

SEQ ID NO: 4036 - protein, 130 aa, Synthetic construct
ESKDHQLLRYLLDKDEKDLRSTPNLSLDDVKVKVEKKEQMDPCNTNPTPMTKPTPEEIKLEAQSQFTADLDQFDQLLPTLEKAAQLPGLCETDRMDGAVTSVTIKSEILPASLQSATARPTSRLNRLPEL

SEQ ID NO: 4037 - protein, 130 aa, Synthetic construct
TSRLNRLPELELEAIDNQFGQPGTGDQIPWTNNTVTAINQSKSEDQCISSQLDELLCPPTTVEGRNDEKALLEQLVSFLSGKDETELAELDRALGIDKLVQGGGLDVLSERFPPQQATPPLIMEERPNLY

SEQ ID NO: 4038 - protein, 80 aa, Synthetic construct; identical to SEQ ID NO: 250

SEQ ID NO: 4039 - protein, 80 aa, Synthetic construct
QLFQEVMTRGTASSPSYRFILNDGTMLSAHTKCKLCYPQSPDMQPFIMGIHIIDREHSGLSPQDDTNSGMSIPRVNPSVN

SEQ ID NO: 4040 - protein, 80 aa, Synthetic construct
TSCKDVLSCTGTSNSASANSSGGSCPSSHSSLTERHKILHRLLQEGSPSDITTLSVEPDKKDSASTSVSVTGQVQGNSSI

SEQ ID NO: 4041 - protein, 80 aa, Synthetic construct
ASLQSATARPTSRLNRLPELELEAIDNQFGQPGTGDQIPWTNNTVTAINQSKSEDQCISSQLDELLCPPTTVEGRNDEKA

SEQ ID NO: 4042 - protein, 80 aa, Synthetic construct
RQRELYSQQHRQRQLIQQQRAMLMRQQSFGNNLPPSSGLPVQMGNPRLPQGAPQQFPYPPNYGTNPGTPPASTSPFSQLA

SEQ ID NO: 4043 - protein, 90 aa, Synthetic construct
RNTEKRNREQENKYIEELAELIFANFNDIDNFNFKPDKCAILKETVKQIRQIKEQEKAAAANIDEVQKSDVSSTGQGVIDKDALGPMMLE

SEQ ID NO: 4044 - protein, 100 aa, Synthetic construct
NFNFKPDKCAILKETVKQIRQIKEQEKAAAANIDEVQKSDVSSTGQGVIDKDALGPMMLEALDGFFFVVNLEGNVVFVSENVTQYLRYNQEELMNKSVYS

SEQ ID NO: 4045 - protein, 130 aa, Synthetic construct
VKNLLPKSIVNGGSWSGEPPRRNSHTFNCRMLVKPLPDSEEEGHDNQEAHQKYETMQCFAVSQPKSIKEEGEDLQSCLICVARRVPMKERPVLPSSESFTTRQDLQGKITSLDTSTMRAAMKPGWEDLVR

SEQ ID NO: 4046 - protein, 90 aa, Synthetic construct
SDTNKDSTGSLPGSGSTHGTSLKEKHKILHRLLQDSSSPVDLAKLTAEATGKDLSQESSSTAPGSEVTIKQEPVSPKKKENALLRYLLDK

SEQ ID NO: 4047 - protein, 90 aa, Synthetic construct
RLLQDSSSPVDLAKLTAEATGKDLSQESSSTAPGSEVTIKQEPVSPKKKENALLRYLLDKDDTKDIGLPEITPKLERLDSKTDPASNTKL

SEQ ID NO: 4048 - protein, 110 aa, Synthetic construct
TAPGSEVTIKQEPVSPKKKENALLRYLLDKDDTKDIGLPEITPKLERLDSKTDPASNTKLIAMKTEKEEMSFEPGDQPGSELDNLEEILDDLQNSQLPQLFPDTRPGAPA

SEQ ID NO: 4049 - protein, 80 aa, Synthetic construct
KTDPASNTKLIAMKTEKEEMSFEPGDQPGSELDNLEEILDDLQNSQLPQLFPDTRPGAPAGSVDKQAIINDLMQLTAENS

SEQ ID NO: 4050 - protein, 80 aa, Synthetic construct
MEPSPLASSLSDTNKDSTGSLPGSGSTHGTSLKEKHKILHRLLQDSSSPVDLAKLTAEATGKDLSQESSSTAPGSEVTIK

SEQ ID NO: 4051 - protein, 80 aa, Synthetic construct
HTQSPMMQQSQANPAYQAPSDINGWAQGNMGGNSMFSQQSPPHFGQQANTSMYSNNMNINVSMATNTGGMSSMNQMTGQI

SEQ ID NO: 4052 - protein, 80 aa, Synthetic construct
ISANLSDIDNFNVKPDKCAILKETVRQIRQIKEQGKTISNDDDVQKADVSSTGQGVIDKDSLGPLLLQALDGFLFVVNRD

SEQ ID NO: 4053 - protein, 80 aa, Synthetic construct
LKETVRQIRQIKEQGKTISNDDDVQKADVSSTGQGVIDKDSLGPLLLQALDGFLFVVNRDGNIVFVSENVTQYLQYKQED

SEQ ID NO: 4054 - protein, 80 aa, Synthetic construct
STGQGVIDKDSLGPLLLQALDGFLFVVNRDGNIVFVSENVTQYLQYKQEDLVNTSVYNILHEEDRKDFLKNLPKSTVNGV

SEQ ID NO: 4055 - protein, 80 aa, Synthetic construct
GFEDIIRRCIQRFFSLNDGQSWSQKRHYQEAYLNGHAETPVYRFSLADGTIVTAQTKSKLFRNPVTNDRHGFVSTHFLQR

SEQ ID NO: 4056 - protein, 80 aa, Synthetic construct
SVTSPSGVSSSTSGGVSSTSNMHGSLLQEKHRILHKLLQNGNSPAEVAKITAEATGKDTSSITSCGDGNVVKQEQLSPKK

SEQ ID NO: 4057 - protein, 80 aa, Synthetic construct
HRILHKLLQNGNSPAEVAKITAEATGKDTSSITSCGDGNVVKQEQLSPKKKENNALLRYLLDRDDPSDALSKELQPQVEG

SEQ ID NO: 4058 - protein, 80 aa, Synthetic construct
TAEATGKDTSSITSCGDGNVVKQEQLSPKKKENNALLRYLLDRDDPSDALSKELQPQVEGVDNKMSQCTSSTIPSSSQEK

SEQ ID NO: 4059 - protein, 80 aa, Synthetic construct
VKQEQLSPKKKENNALLRYLLDRDDPSDALSKELQPQVEGVDNKMSQCTSSTIPSSSQEKDPKIKTETSEEGSGDLDNLD

SEQ ID NO: 4060 - protein, 110 aa, Synthetic construct
SKELQPQVEGVDNKMSQCTSSTIPSSSQEKDPKIKTETSEEGSGDLDNLDAILGDLTSSDFYNNSISSNGSHLGTKQQVFQGTNSLGLKSSQSVQSIRPPYNRAVSLDSP

SEQ ID NO: 4061 - protein, 80 aa, Synthetic construct
ASDSRKRKLPCDTPGQGLTCSGEKRRREQESKYIEELAELISANLSDIDNFNVKPDKCAILKETVRQIRQIKEQGKTISN

SEQ ID NO: 4062 - protein, 80 aa, Synthetic construct
AFKGNIDDKDFKWKLDAILKNVPNLLHMESSKLKVQKVEPWNSVRVTFNIPREAAERLRILAQSNNQQLRDLGILSVQIE

SEQ ID NO: 4063 - protein, 80 aa, Synthetic construct
WNSVRVTFNIPREAAERLRILAQSNNQQLRDLGILSVQIEGEGAINLALAQNRSQDVRMNGPMGAGNSVRMEAGFPMASG

SEQ ID NO: 4064 - protein, 80 aa, Synthetic construct
SVAGPGKPQEEDQPLPARRLSSDCSVTQERKQIHCLSEDELSSSTSSTDKSDGDYGEGKGQTNEINALVQLMTQTLKLDS

SEQ ID NO: 4065 - protein, 80 aa, Synthetic construct
GPSASQGPRAGGGAAEQEELHYIPIRVLGRGAFGEATLYRRTEDDSLVVWKEVDLTRLSEKERRDALNEIVILALLQHDN

SEQ ID NO: 4066 - protein, 80 aa, Synthetic construct; identical to SEQ ID NO: 896

SEQ ID NO: 4067 - protein, 90 aa, Synthetic construct
LKVASEAPLEHKPQVEASSPRLNPAVTCAGKGTPLTPPACACSSLQVEVERLQGLVLKCLAEQQKLQQENLQIFTQLQKLNKKLEGGQQV

SEQ ID NO: 4068 - protein, 100 aa, Synthetic construct
KGTPLTPPACACSSLQVEVERLQGLVLKCLAEQQKLQQENLQIFTQLQKLNKKLEGGQQVGMHSKGTQTAKEEMEMDPKPDLDSDSWCLLLGTDSCRPSL

SEQ ID NO: 4069 - protein, 80 aa, Synthetic construct
RTEDDSLVVWKEVDLTRLSEKERRDALNEIVILALLQHDNIIAYYNHFMDNTTLLIELEYCNGGNLYDKILRQKDKLFEE

SEQ ID NO: 4070 - protein, 90 aa, Synthetic construct
KRRGPKKKKMTKARLERFKLRRMKANARERNRMHGLNAALDNLRKVVPCYSKTQKLSKIETLRLAKNYIWALSEILRSGKSPDLVSFVQT

SEQ ID NO: 4071 - protein, 80 aa, Synthetic construct
LSINGNFSFKHEPSAEFEKNYAFTMHYPAATLAGAQSHGSIFSGTAAPRCEIPIDNIMSFDSHSHHERVMSAQLNAIFHD

SEQ ID NO: 4072 - protein, 80 aa, Synthetic construct
TKSYSESGLMGEPQPQGPPSWTDECLSSQDEEHEADKKEDDLETMNAEEDSLRNGGEEEDEDEDLEEEEEEEEEDDDQKP

SEQ ID NO: 4073 - protein, 80 aa, Synthetic construct
SLRNGGEEEDEDEDLEEEEEEEEEDDDQKPKRRGPKKKKMTKARLERFKLRRMKANARERNRMHGLNAALDNLRKVVPCY

SEQ ID NO: 4074 - protein, 100 aa, Synthetic construct
TKARLERSKLRRQKANARERNRMHDLNAALDNLRKVVPCYSKTQKLSKIETLRLAKNYIWALSEILRSGKRPDLVSYVQTLCKGLSQPTTNLVAGCLQLN

SEQ ID NO: 4075 - protein, 80 aa, Synthetic construct
LCLNGNFSLKQDSSPDHEKSYHYSMHYSALPGSRPTGHGLVFGSSAVRGGVHSENLLSYDMHLHHDRGPMYEELNAFFHN

SEQ ID NO: 4076 - protein, 80 aa, Synthetic construct
PKKKKMTKARLERFRARRVKANARERTRMHGLNDALDNLRRVMPCYSKTQKLSKIETLRLARNYIWALSEVLETGQTPEG

SEQ ID NO: 4077 - protein, 120 aa, Synthetic construct
GLPRRRGLRKKKTTKLRLERVKFRRQEANARERNRMHGLNDALDNLRKVVPCYSKTQKLSKIETLRLAKNYIWALSEILRIGKRPDLLTFVQNLCKGLSQPTTNLVAGCLQLNARSFLMG

SEQ ID NO: 4078 - protein, 90 aa, Synthetic construct
KPYNYCSAYESFYESTSPECASPQFEGPLSPPPINYNGIFSLKQEETLDYGKNYNYGMHYCAVPPRGPLGQGAMFRLPTDSHFPYDLHLR

SEQ ID NO: 4079 - protein, 110 aa, Synthetic construct
RRRRGRTRVRSEALLHSLRRSRRVKANDRERNRMHNLNAALDALRSVLPSFPDDTKLTKIETLRFAYNYIWALAETLRLADQGLPGGGARERLLPPQCVPCLPGPPSPAS

SEQ ID NO: 4080 - protein, 110 aa, Synthetic construct
RARAVSRGAKTAETVQRIKKTRRLKANNRERNRMHNLNAALDALREVLPTFPEDAKLTKIETLRFAHNYIWALTETLRLADHCGGGGGGLPGALFSEAVLLSPGGASAAL

SEQ ID NO: 4081 - protein, 110 aa, Synthetic construct
RARRGGRSRPKSELALSKQRRSRRKKANDRERNRMHNLNSALDALRGVLPTFPDDAKLTKIETLRFAHNYIWALTQTLRIADHSLYALEPPAPHCGELGSPGGSPGDWGS

SEQ ID NO: 4082 - protein, 110 aa, Synthetic construct
NGTLENQKGTGVKKSPMLCGQYPVKSEGKELKIVVQPETQHRARYLTEGSRGSVKDRTQQGFPTVKLEGHNEPVVLQVFVGNDSGRVKPHGFYQACRVTGRNTTPCKEVD

SEQ ID NO: 4083 - protein, 90 aa, Synthetic construct
GFPTVKLEGHNEPVVLQVFVGNDSGRVKPHGFYQACRVTGRNTTPCKEVDIEGTTVIEVGLDPSNNMTLAVDCVGILKLRNADVEARIGI

SEQ ID NO: 4084 - protein, 100 aa, Synthetic construct
LHSCSVKGEEEVFLIGKNFLKGTKVIFQENVSDENSWKSEAEIDMELFHQNHLIVKVPPYHDQHITLPVSVGIYVVTNAGRSHDVQPFTYTPDPAAAGAL

SEQ ID NO: 4085 - protein, 130 aa, Synthetic construct
AEIDMELFHQNHLIVKVPPYHDQHITLPVSVGIYVVTNAGRSHDVQPFTYTPDPAAAGALNVNVKKEISSPARPCSFEEAMKAMKTTGCNLDKVNIIPNALMTPLIPSSMIKSEDVTPMEVTAEKRSSTI

SEQ ID NO: 4086 - protein, 110 aa, Synthetic construct
PARPCSFEEAMKAMKTTGCNLDKVNIIPNALMTPLIPSSMIKSEDVTPMEVTAEKRSSTIFKTTKSVGSTQQTLENISNIAGNGSFSSPSSSHLPSENEKQQQIQPKAYN

SEQ ID NO: 4087 - protein, 80 aa, Synthetic construct
FQSQHSIVAMQSNSPSQEQQQQQQQQQQQQQQQQQSILFSNQNTMATMASPKQPPPNMIFNPNQNPMANQEQQNQSIFHQ

SEQ ID NO: 4088 - protein, 80 aa, Synthetic construct
IVAAINALTTDSSLDLGDGVPVKSRKTTLEQPPSVALKVEPVGEDLGSPPPPADFAPEDYSSFQHIRKGGFCDQYLAVPQ

SEQ ID NO: 4089 - protein, 90 aa, Synthetic construct
PVKSRKTTLEQPPSVALKVEPVGEDLGSPPPPADFAPEDYSSFQHIRKGGFCDQYLAVPQHPYQWAKPKPLSPTSYMSPTLPALDWQLPS

SEQ ID NO: 4090 - protein, 100 aa, Synthetic construct
LSPTSYMSPTLPALDWQLPSHSGPYELRIEVQPKSHHRAHYETEGSRGAVKASAGGHPIVQLHGYLENEPLMLQLFIGTADDRLLRPHAFYQVHRITGKT

SEQ ID NO: 4091 - protein, 140 aa, Synthetic construct
KAPDGHHVWEMEAKTDRDLCKPNSLVVEIPPFRNQRITSPVHVSFYVCNGKRKRSQYQRFTYLPANVPIIKTEPTDDYEPAPTCGPVSQGLSPLPRPYYSQQLAMPPDPSSCLVAGFPPCPQRSTLMPAAPGVSPKLHDL

SEQ ID NO: 4092 - protein, 110 aa, Synthetic construct
AIPICSIPVTASLPPLEWPLSSQSGSYELRIEVQPKPHHRAHYETEGSRGAVKAPTGGHPVVQLHGYMENKPLGLQIFIGTADERILKPHAFYQVHRITGKTVTTTSYEK

SEQ ID NO: 4093 - protein, 130 aa, Synthetic construct
WEMEATVDKDKSQPNMLFVEIPEYRNKHIRTPVKVNFYVINGKRKRSQPQHFTYHPVPAIKTEPTDEYDPTLICSPTHGGLGSQPYYPQHPMVAESPSCLVATMAPCQQFRTGLSSPDARYQQQNPAAVL

SEQ ID NO: 4094 - protein, 90 aa, Synthetic construct
CGSHQEFQHIMYCENFAPGTTRPGPPPVSQGQRLSPGSYPTVIQQQNATSQRAAKNGPPVSDQKEVLPAGVTIKQEQNLDQTYLDDVNEI

SEQ ID NO: 4095 - protein, 80 aa, Synthetic construct
PPPVSQGQRLSPGSYPTVIQQQNATSQRAAKNGPPVSDQKEVLPAGVTIKQEQNLDQTYLDDVNEIIRKEFSGPPARNQT

SEQ ID NO: 4096 - protein, 90 aa, Synthetic construct
IEKYSINSCSVNGGHEMVVTGSNFLPESKIIFLEKGQDGRPQWEVEGKIIREKCQGAHIVLEVPPYHNPAVTAAVQVHFYLCNGKRKKSQ

SEQ ID NO: 4097 - protein, 110 aa, Synthetic construct
PQWEVEGKIIREKCQGAHIVLEVPPYHNPAVTAAVQVHFYLCNGKRKKSQSQRFTYTPVLMKQEHREEIDLSSVPSLPVPHPAQTQRPSSDSGCSHDSVLSGQRSLICSI

SEQ ID NO: 4098 - protein, 90 aa, Synthetic construct
PPSPQLQPMPYQSPSSGTASSPSPATRMHSGQHSTQAQSTGQGGLSAPSSLICHSLCDPASFPPDGATVSIKPEPEDREPNFATIGLQDI

SEQ ID NO: 4099 - protein, 80 aa, Synthetic construct
NEKPINLQMFIGTADDRYLRPHAFYQVHRITGKTVATASQEIIIASTKVLEIPLLPENNMSASIDCAGILKLRNSDIELR

SEQ ID NO: 4100 - protein, 80 aa, Synthetic construct
KLRNSDIELRKGETDIGRKNTRVRLVFRVHIPQPSGKVLSLQIASIPVECSQRSAQELPHIEKYSINSCSVNGGHEMVVT

SEQ ID NO: 4101 - protein, 100 aa, Synthetic construct
GGHSPIFRTSALPPLDWPLPSQYEQLELRIEVQPRAHHRAHYETEGSRGAVKAAPGGHPVVKLLGYSEKPLTLQMFIGTADERNLRPHAFYQVHRITGKM

SEQ ID NO: 4102 - protein, 100 aa, Synthetic construct
SPSACSVRGGEELVLTGSNFLPDSKVVFIERGPDGKLQWEEEATVNRLQSNEVTLTLTVPEYSNKRVSRPVQVYFYVSNGRRKRSPTQSFRFLPVICKEE

SEQ ID NO: 4103 - protein, 100 aa, Synthetic construct
VQVYFYVSNGRRKRSPTQSFRFLPVICKEEPLPDSSLRGFPSASATPFGTDMDFSPPRPPYPSYPHEDPACETPYLSEGFGYGMPPLYPQTGPPPSYRPG

SEQ ID NO: 4104 - protein, 80 aa, Synthetic construct
NCRKRKLETIVQLERELERLTNERERLLRARGEADRTLEVMRQQLTELYRDIFQHLRDESGNSYSPEEYALQQAADGTIF

SEQ ID NO: 4105 - protein, 80 aa, Synthetic construct
LERDVEDLQRDKARLLREKVEFLRSLRQMKQKVQSLYQEVFGRLRDENGRPYSPSQYALQYAGDGSVLLIPRTMADQQAR

SEQ ID NO: 4106 - protein, 80 aa, Synthetic construct
NLPVEEFNELLSKYQLSEAQLSLIRDIRRRGKNKMAAQNCRKRKLDTILNLERDVEDLQRDKARLLREKVEFLRSLRQMK

SEQ ID NO: 4107 - protein, 80 aa, Synthetic construct; identical to SEQ ID NO: 496

SEQ ID NO: 4108 - protein, 80 aa, Synthetic construct
EAQLALIRDIRRRGKNKVAAQNCRKRKLENIVELEQDLDHLKDEKEKLLKEKGENDKSLHLLKKQLSTLYLEVFSMLRDE

SEQ ID NO: 4109 - protein, 80 aa, Synthetic construct
IVELEQDLDHLKDEKEKLLKEKGENDKSLHLLKKQLSTLYLEVFSMLRDEDGKPYSPSEYSLQQTRDGNVFLVPKSKKPD

SEQ ID NO: 4110 - protein, 80 aa, Synthetic construct; identical to SEQ ID NO: 638

SEQ ID NO: 4111 - protein, 90 aa, Synthetic construct
IRRRGKNKVAAQNCRKRKLDIILNLEDDVCNLQAKKETLKREQAQCNKAINIMKQKLHDLYHDIFSRLRDDQGRPVNPNHYALQCTHDGS

SEQ ID NO: 4112 - protein, 90 aa, Synthetic construct
KSPQCSNPGLCVQPHHIGVSVKELDLYLAYFVHAADSSQSESPSQPSDADIKDQPENGHLGFQDSFVTSGVFSVTELVRVSQTPIAAGTG

SEQ ID NO: 4113 - protein, 80 aa, Synthetic construct
EDEMDSPGEEPFYTGQGRSPGSGSQSSGWHEVEPGMPSPTTLKKSEKSGFSSPSPSQTSSLGTAFTQHHRPVITGPRASP

SEQ ID NO: 4114 - protein, 90 aa, Synthetic construct
PLESTDGERLVKAAQCGHPVLCVQPHHIGVAVKELDLYLAYFVRERDAEQSGSPRTGMGSDQEDSKPITLDTTDFQESFVTSGVFSVTEL

SEQ ID NO: 4115 - protein, 80 aa, Synthetic construct
AVKELDLYLAYFVRERDAEQSGSPRTGMGSDQEDSKPITLDTTDFQESFVTSGVFSVTELIQVSRTPVVTGTGPNFSLGE

SEQ ID NO: 4116 - protein, 80 aa, Synthetic construct
VGKNKSSACRRKREFIPDEKKDAMYWEKRRKNNEAAKRSREKRRLNDLVLENKLIALGEENATLKAELLSLKLKFGLISS

SEQ ID NO: 4117 - protein, 80 aa, Synthetic construct
ENKLIALGEENATLKAELLSLKLKFGLISSTAYAQEIQKLSNSTAVYFQDYQTSKSNVSSFVDEHEPSMVSSSCISVIKH

SEQ ID NO: 4118 - protein, 100 aa, Synthetic construct
YQTSKSNVSSFVDEHEPSMVSSSCISVIKHSPQSSLSDVSEVSSVEHTQESSVQGSCRSPENKFQIIKQEPMELESYTREPRDDRGSYTASIYQNYMGNS

SEQ ID NO: 4119 - protein, 100 aa, Synthetic construct
EVSSVEHTQESSVQGSCRSPENKFQIIKQEPMELESYTREPRDDRGSYTASIYQNYMGNSFSGYSHSPPLLQVNRSSSNSPRTSETDDGVVGKSSDGEDE

SEQ ID NO: 4120 - protein, 150 aa, Synthetic construct
LQVNRSSSNSPRTSETDDGVVGKSSDGEDEQQVPKGPIHSPVELKHVHATVVKVPEVNSSALPHKLRIKAKAMQIKVEAFDNEFEATQKLSSPIDMTSKRHFELEKHSAPSMVHSSLTPFSVQVTNIQDWSLKSEHWHQKELSGKTQNSF

SEQ ID NO: 4121 - protein, 80 aa, Synthetic construct
LESTDGERLYKSPQCSNPGLCVQPHHIGVTIKELDLYLAYFVHTPESGQSDSSNQQGDADIKPLPNGHLSFQDCFVTSGV

SEQ ID NO: 4122 - protein, 80 aa, Synthetic construct
IKELDLYLAYFVHTPESGQSDSSNQQGDADIKPLPNGHLSFQDCFVTSGVWNVTELVRVSQTPVATASGPNFSLADLESP

SEQ ID NO: 4123 - protein, 80 aa, Synthetic construct
CEGPSHGGLPGASSEKNKKSYPQVKICNYVGPAKVIVQLVTNGKNIHLHAHSLVGKHCEDGICTVTAGPKDMVVGFANLG

SEQ ID NO: 4124 - protein, 80 aa, Synthetic construct
RELEQEAKELKKVMDLSIVRLRFSAFLRASDGSFSLPLKPVISQPIHDSKSPGASNLKISRMDKTAGSVRGGDEVYLLCD

SEQ ID NO: 4125 - protein, 80 aa, Synthetic construct; identical to SEQ ID NO: 530

SEQ ID NO: 4126 - protein, 80 aa, Synthetic construct
RYLKVLREVKEECGDTALSSDEEDLSSWLPSSPARSPSPAVPLRVVPTLSTTDMKTADKVELGDSDLKIMLKKHHEKRKH

SEQ ID NO: 4127 - protein, 80 aa, Synthetic construct
VNAGRKGSLAALYDLAVLKKKVKEKEEKKKKKIKTIKSEAEDLAEPLSSTEGVAPLSQAPSPLAIPAIKEEPLEDLKPCL

SEQ ID NO: 4128 - protein, 80 aa, Synthetic construct
TKDQAFCKQENEDSSDATTPVPRVRTDYVVRPSTGEEKRVFQEQERYRYSQPHKAFTFRMHGFESVVGPVKGVFDKETSL

SEQ ID NO: 4129 - protein, 80 aa, Synthetic construct
DLTLNDIMTRVNAGRKGSLAALYDLAVLKKKVKEKEEKKKKKIKTIKSEAEDLAEPLSSTEGVAPLSQAPSPLAIPAIKE

SEQ ID NO: 4130 - protein, 90 aa, Synthetic construct
QEKCTVRRQDPQVVSPFSRGKQNHVLKNVETHTGSLIEQLTTEKYECMVCCELVRVTAPVWSCQSCYHVFHLNCIKKWARSPASQADGQS

SEQ ID NO: 4131 - protein, 80 aa, Synthetic construct
CELVRVTAPVWSCQSCYHVFHLNCIKKWARSPASQADGQSGWRCPACQNVSAHVPNTYTCFCGKVKNPEWSRNEIPHSCG

SEQ ID NO: 4132 - protein, 80 aa, Synthetic construct
CPWPCPKCRFEYKRSETPSRYYCYCGKVEDPPLDPWLVPHSCGQVCEREFKPPCGHKCLLLCHPGPCPPCPKMVTTTCYC

SEQ ID NO: 4133 - protein, 110 aa, Synthetic construct
NHTCMKECHKVTKTDGCTGKNKAGPECLHCEEGCSKSRPLGCLHPCILRCHPGECPPCVQMLRIKCHCKITSLYVECRKITTADVNEKNLLSCCKNQCPKELPCGHRCKE

SEQ ID NO: 4134 - protein, 80 aa, Synthetic construct
MLRIKCHCKITSLYVECRKITTADVNEKNLLSCCKNQCPKELPCGHRCKEMCHPGECPFNCNQKVKLRCPCKRIKKELQC

SEQ ID NO: 4135 - protein, 80 aa, Synthetic construct
IGGSHYVIQPHDDTEDSMNDHEDTNGSKESFREQDIYLPIANVARIMKNAIPQTGKIAKDAKECVQECVSEFISFITSEA

SEQ ID NO: 4136 - protein, 80 aa, Synthetic construct
AQQAQSGTGQTMQVMQQIITNTGEIQQIPVQLNAGQLQYIRLAQPVSGTQVVQGQIQTLATNAQQITQTEVQQGQQQFSQ

SEQ ID NO: 4137 - protein, 90 aa, Synthetic construct
EPGRKDLQHLSREERRRRRRATAKYRTAHATRERIRVEAFNLAFAELRKLLPTLPPDKKLSKIEILRLAICYISYLNHVLISYLNHVLDV

SEQ ID NO: 4138 - protein, 110 aa, Synthetic construct
FPSYLLGGRSGALKNFVIPKIKRDKDGNVTQETKKMEMKGEPKDKVEKIGLVEDLNKGAKPVVVLQKLSLDDVQKLIKDREDKSRSSLKPIKNKPSKSNKGSIDQSVLKE

SEQ ID NO: 4139 - protein, 90 aa, Synthetic construct
LVEDLNKGAKPVVVLQKLSLDDVQKLIKDREDKSRSSLKPIKNKPSKSNKGSIDQSVLKELPPELLAEIESTMPLCERVKMNKRKRSTVN

SEQ ID NO: 4140 - protein, 80 aa, Synthetic construct
QTQEEPLFIMHHIDITLSVSGSNLLQSFKESMVKDKRKERKSSPSKENESSDSEEEVSRPRKSRKRVDSDSDSDSEDDIN

SEQ ID NO: 4141 - protein, 120 aa, Synthetic construct
TSVAAKQPQTSVVQNQQQISQQGPIYDEVELDALAEIERIERESAIERERFSKEVQDKDKPLKKRKQDSYPQEAGGATGGNRPASQETGSTGNGSRPALMVSIDLHQAGRVDSQASITQD

SEQ ID NO: 4142 - protein, 80 aa, Synthetic construct
DDKAWEYEERDRRSSGDHRRSGHSHEGRRSSGGGRYRNRSPSDSDMEDYSPPPSLSEVARKMKKKEKQKKRKAYEPKLTP

SEQ ID NO: 4143 - protein, 80 aa, Synthetic construct
KNIQDGSKLSTLLNHNNDTEEEERLWRDLIMERVTKSADACLTTINIMTSPNMPKAVYIEDVIERVIQYTKFHLQNTLYP

SEQ ID NO: 4144 - protein, 80 aa, Synthetic construct
ARLPTSKRSLRNFRLNSSDMDGEPMYIQMVTALVLQLIQCVVHLPSSEKDSNAEEDSNKKIDQDVVITNSYETAMRTAQN

SEQ ID NO: 4145 - protein, 80 aa, Synthetic construct
AVDPSILARLDMQRGVHGRLMDNSTSVREAAVELLGRFVLCRPQLAEQYYDMLIERILDTGISVRKRVIKILRDICIEQP

SEQ ID NO: 4146 - protein, 80 aa, Synthetic construct
DSDNKGVNSGRLVACITTLFLFSKIRPQLMVKHAMTMQPYLTTKCSTQNDFMVICNVAKILELVVPLMEHPSETFLATIE

SEQ ID NO: 4147 - protein, 80 aa, Synthetic construct
EDLMKLIIKYGMTVVQHCVSCLGAVVNKVTQNFKFVWACFNRYYGAISKLKSQHQEDPNNTSLLTNKPALLRSLFTVGAL

SEQ ID NO: 4148 - protein, 80 aa, Synthetic construct
TKHSDEEVQTKAIIGLGFAFIQHPSLMFEQEVKNLYNNILSDKNSSVNLKIQVLKNLQTYLQEEDTRMQQADRDWKKVAK

SEQ ID NO: 4149 - protein, 80 aa, Synthetic construct
RPQIARVVQKTSSGFSVQWMAGSYSGSWTEAKRRDGRKLVPWVDTIKESDIIYKKIALTSANKLTNKVVQTLRSLYAAKD

SEQ ID NO: 4150 - protein, 80 aa, Synthetic construct
GTKKTSKHAAADEALKILQKTQPTYPSVKSSQCHTGSSPRGSGKKKDIKDLVVYENSSNPVCTLNDTAQFNRMTVEYVYE

SEQ ID NO: 4151 - protein, 80 aa, Synthetic construct
VKEQHKREGLGLDVERVNKIAKRDIEQIIRNYARSESHTDLTFSRELTNDERKQIHQIAQKYGLKSKSHGVGHDRYLVVG

SEQ ID NO: 4152 - protein, 120 aa, Synthetic construct
DGRAELPAFPRAGAPPLAASDTVPAAPEGAGAARPAAPLRPTSFSVLDILDPNKFNSRRRRCVLLGPVAPAACAPCASAPCAPAPAASGRPPRAEELERRALAGAGGVGAAGAEPPNAGD

SEQ ID NO: 4153 - protein, 90 aa, Synthetic construct
AAKPKRKRTGSDSKSGKPRRARTAFTYEQLVALENKFKATRYLSVCERLNLALSLSLTETQVKIWFQNRRTKWKKQNPGADTSAPTGGGG

SEQ ID NO: 4154 - protein, 100 aa, Synthetic construct
PPGSPGSPRPRRRRLEPNCAKPRRARTAFTYEQLVALENKFRATRYLSVCERLNLALSLSLTETQVKIWFQNRRTKWKKQNPGADGAAQVGGGAPQPGAA

SEQ ID NO: 4155 - protein, 80 aa, Synthetic construct
LAWQDGGAKAAPSHHKISFSVLDILDPQKFTRAALPAVRPAPREARKSLAEVEAGKDASSRDPVRQLETPDAAGPGAGQA

SEQ ID NO: 4156 - protein, 80 aa, Synthetic construct
RLRERAARLLPGLARSPDAPAGALASGEPCEDGGGGPVRSPPGSPGSPRPRRRRLEPNCAKPRRARTAFTYEQLVALENK

SEQ ID NO: 4157 - protein, 80 aa, Synthetic construct
GLGSLGDVSKNMAPLPSAPRRKRRVLFSQAQVYELERRFKQQKYLSAPEREHLASMIHLTPTQVKIWFQNHRYKMKRQAK

SEQ ID NO: 4158 - protein, 90 aa, Synthetic construct
PDNDKETPGGGGDAGKKRKRRVLFSKAQTYELERRFRQQRYLSAPEREHLASLIRLTPTQVKIWFQNHRYKMKRARAEKGMEVTPLPSPR

SEQ ID NO: 4159 - protein, 80 aa, Synthetic construct
RPKPRSRRKPRVLFSQAQVFELERRFKQQRYLSAPEREHLASSLKLTSTQVKIWFQNRRYKCKRQRQDKSLELGAHAPPP

SEQ ID NO: 4160 - protein, 80 aa, Synthetic construct
LELGAHAPPPPPRRVAVPVLVRDGKPCVTPSAQAYGAPYSVGASAYSYNSFPAYGYGNSAAAAAAAAAAAAAAAAYSSSY

SEQ ID NO: 4161 - protein, 80 aa, Synthetic construct
GTQFSDGGEEDEEDEGEKLSYLNSLAAADGHGDSGLCPQGYVHTVLRDSCSEPKEHEEEPEVVRDRSQKSCQLKKSLETA

SEQ ID NO: 4162 - protein, 100 aa, Synthetic construct
AAKSLGPLHAAAAAAAPRRKRRVLFSQAQVYELERRFKQQKYLSAPEREHLASMIHLTPTQVKIWFQNHRYKMKRQAKDKAAQQLQQEGGLGPPPPPPPS

SEQ ID NO: 4163 - protein, 80 aa, Synthetic construct
LEKTEADNAERPRARRRRKPRVLFSQAQVYELERRFKQQRYLSAPERDQLASVLKLTSTQVKIWFQNRRYKCKRQRQDQT

SEQ ID NO: 4164 - protein, 100 aa, Synthetic construct
VGNSGDSVRGGRSEQPKARQRRKPRVLFSQAQVLALERRFKQQRYLSAPEREHLASALQLTSTQVKIWFQNRRYKCKRQRQDKSLELAGHPLTPRRVAVP

SEQ ID NO: 4165 - protein, 80 aa, Synthetic construct
NRRYKCKRQRQDKSLELAGHPLTPRRVAVPVLVRDGKPCLGPGPGAPAFPSPYSAAVSPYSCYGGYSGAPYGAGYGTCYA

SEQ ID NO: 4166 - protein, 80 aa, Synthetic construct
EKRKKRRVLFSKAQTLELERRFRQQRYLSAPEREQLASLLRLTPTQVKIWFQNHRYKLKRARAPGAAESPDLAASAELHA

SEQ ID NO: 4167 - protein, 90 aa, Synthetic construct
LRVPEPRPGEAKAEGAAPPTPSKPLTSFLIQDILRDGAQRQGGRTSSQRQRDPEPEPEPEPEGGRSRAGAQNDQLSTGPRAAPEEAETLA

SEQ ID NO: 4168 - protein, 80 aa, Synthetic construct
PKPRKKRSRAAFSHAQVFELERRFNHQRYLSGPERADLAASLKLTETQVKIWFQNRRYKTKRRQMAADLLASAPAAKKVA

SEQ ID NO: 4169 - protein, 100 aa, Synthetic construct
SLKLTETQVKIWFQNRRYKTKRRQMAADLLASAPAAKKVAVKVLVRDDQRQYLPGEVLRPPSLLPLQPSYYYPYYCLPGWALSTCAAAAGSTCAAAAGTQ

SEQ ID NO: 4170 - protein, 80 aa, Synthetic construct
LAASKDLEEEAAGRSDSEMSASVSGDRSPRTEDDGVGPRGAHVSALCSGAGGGGGSGPAGVAEEEEEPAAPKPRKKRSRA

SEQ ID NO: 4171 - protein, 80 aa, Synthetic construct
KDGKRKHTRPTFSGQQIFALEKTFEQTKYLAGPERARLAYSLGMTESQVKVWFQNRRTKWRKKHAAEMATAKKKQDSETE

SEQ ID NO: 4172 - protein, 90 aa, Synthetic construct
LAGPAPAGGVLDKDGKKKHSRPTFSGQQIFALEKTFEQTKYLAGPERARLAYSLGMTESQVKVWFQNRRTKWRKRHAVEMASAKKKQDSD

SEQ ID NO: 4173 - protein, 80 aa, Synthetic construct
GRQCSNTPDPLSDSIHKKKHTRPTFTGHQIFALEKTFEQTKYLAGPERARLAYSLGMTESQVKVWFQNRRTKWRKKSALE

SEQ ID NO: 4174 - protein, 80 aa, Synthetic construct
QGPPEVTCQIRKKTRTLYRSDQLEELEKIFQEDHYPDSDKRREIAQTVGVTPQRIMVWFQNRRAKWRKMEKLNGKESKDN

SEQ ID NO: 4175 - protein, 120 aa, Synthetic construct
RTCSRLFGALLERGELFVGQLPSEEMVMTGSQGATRKYKVWMRHRYHSCCNRLGELLGHPSFQVKELALSALLKFVQLEGAHPLEKSKWEGNYLFPRELFKLVVGGLLSPEEDQSLLLSQ

SEQ ID NO: 4176 - protein, 120 aa, Synthetic construct
PSPRPRGSPPPAPSGSRVRPPRSGRSPAPRSPTGPNTPRAPGRFESPFSVEAILARPDPCAPAASQPSGSACVHPAFWTAASLCATGGLPWACPTSWLPAYLSVGFYPVPGPRVAPVCGL

SEQ ID NO: 4177 - protein, 100 aa, Synthetic construct
PTEGKQAAPAENEAPQTQGKRIKVEPGPRETKGSEDSGDEDPSSHPATPRPEFTSVIRAGVLKQDPVRPWGLAPPGDPPPTLLHAGFLPPVVRGLCTPGT

SEQ ID NO: 4178 - protein, 110 aa, Synthetic construct
DPSSHPATPRPEFTSVIRAGVLKQDPVRPWGLAPPGDPPPTLLHAGFLPPVVRGLCTPGTIRYGPAELGLVYPHLQRLGPGPALPEAFYPPLGLPYPGPAAGTRLPRKGD

SEQ ID NO: 4179 - protein, 80 aa, Synthetic construct
LSSMLPGNTRKMDKTTVLEKVIGFLQKHNEVSAQTEICDIQQDWKPSFLSNEEFTQLMLEALDGFIIAVTTDGSIIYVSD

SEQ ID NO: 4180 - protein, 90 aa, Synthetic construct
TDGSIIYVSDSITPLLGHLPSDVMDQNLLNFLPEQEHSEVYKILSSHMLVTDSPSPEYLKSDSDLEFYCHLLRGSLNPKEFPTYEYIKFV

SEQ ID NO: 4181 - protein, 100 aa, Synthetic construct
SCDLTQQLLPQTVLQSTPAPMAQFSAQFSMFQTIKDQLEQRTRILQANIRWQQEELHKIQEQLCLVQDSNVQMFLQQPAVSLSFSSTQRPEAQQQLQQRS

SEQ ID NO: 4182 - protein, 80 aa, Synthetic construct
GTAEDGASSASSSSQSETPEPVESTSPSLLTTDNTLERSFFIRMKSTLTKRGVHIKSSGYKVIHITGRLRLRVSLSHGRT

SEQ ID NO: 4183 - protein, 80 aa, Synthetic construct
HSDFENPKAGEDGFGALGAMQIKVERYVESESDLRLQNCESLTSDSAKDSDSAGEAGAQASSKHQKRKKRRKRQKGGSAS

SEQ ID NO: 4184 - protein, 120 aa, Synthetic construct
RKRQKGGSASRRRLSSASSPGGLDAGLVEPPRLLSSPNSASVLKIKTEISEPINFDNDSSIWNYPPNREISRNESPYSMTKPPSSEHFPSPQGGGGGGGGGGGLHVAIPDSVLTPPGADG

SEQ ID NO: 4185 - protein, 80 aa, Synthetic construct
SPRDKHPGNGGGGGGGGGGAGGGGPSASNSLLYTGDLEALQRLQAGNVVLPLVHRVTGTLAATSTAAQRVYTTGTIRYAP

SEQ ID NO: 4186 - protein, 80 aa, Synthetic construct
AWIYCLLYSEGPEGPITANNYPISDMEAWSLRQQLNSEDTQAAYVLGTPTMLPSFPENILSQEECSSTNPLFTAALGAPR

SEQ ID NO: 4187 - protein, 80 aa, Synthetic construct
PIKVTLATLKMSVQPTVSLGGFEITPPVVLRLKCGSGPVHISGQHLVAVEEDAESEDEEEEDVKLLSISGKRSAPGGGSK

SEQ ID NO: 4188 - protein, 80 aa, Synthetic construct
PVTFQLRAGSGPVFLSGQERYEASDLTWEEEEEEEGEEEEEEEEDDEDEDADISLEEQSPVKQVKRLVPQKQASVAKKKK

SEQ ID NO: 4189 - protein, 80 aa, Synthetic construct
ILYNMLMSAKQTRAAPEAPETRLVDQCWGCSCGDEPGVGREGLLGGRNVALLYRCCFCGKDHPRQGSILYSMLTSAKQTY

SEQ ID NO: 4190 - protein, 80 aa, Synthetic construct
TRLVDQCWGCSCGDEPGVGREGLLGGRNVALLYRCCFCGKDHPRQGSILYSMLTSAKQTYAAPKAPEATLGPCWGCSCGS

SEQ ID NO: 4191 - protein, 90 aa, Synthetic construct
DHPRQGSILYSMLTSAKQTYAAPKAPEATLGPCWGCSCGSDPGVGRAGLPGGRPVALLYRCCFCGEDHPRQGSILYSLLTSSKQTHVAPA

SEQ ID NO: 4192 - protein, 80 aa, Synthetic construct
CCFCGEDHPRQGSILYSLLTSSKQTHVAPAAPEARPGGAWWDRSYFAQRPGGKEALPGGRATALLYRCCFCGEDHPQQGS

SEQ ID NO: 4193 - protein, 80 aa, Synthetic construct
CGEDHPQQGSTLYCVPTSTNQAQAAPEERPRAPWWDTSSGALRPVALKSPQVVCEAASAGLLKTLRFVKYLPCFQVLPLD

SEQ ID NO: 4194 - protein, 80 aa, Synthetic construct
DPGVGRAGLPGGRPVALLYRCCFCGEDHPRQGSILYSLLTSSKQTHVAPAAPEARPGGAWWDRSYFAQRPGGKEALPGGR

SEQ ID NO: 4195 - protein, 80 aa, Synthetic construct
RVSPSKSTSNITKLNGMVLLCKVCGDVASGFHYGVHACEGCKGFFRRSIQQNIQYKRCLKNENCSIVRINRNRCQQCRFK

SEQ ID NO: 4196 - protein, 90 aa, Synthetic construct
PLPGNGPPQPGAPSSSPTVKEEGPEPWPGGPDPDVPGTDEASSACSTDWVIPDPEEEPERKRKKGPAPKMLGHELCRVCGDKASGFHYNV

SEQ ID NO: 4197 - protein, 80 aa, Synthetic construct
SSPTTSSLDTPLPGNGPPQPGAPSSSPTVKEEGPEPWPGGPDPDVPGTDEASSACSTDWVIPDPEEEPERKRKKGPAPKM

SEQ ID NO: 4198 - protein, 80 aa, Synthetic construct
RRSVVRGGARRYACRGGGTCQMDAFMRRKCQQCRLRKCKEAGMREQCVLSEEQIRKKKIRKQQQESQSQSQSPVGPQGSS

SEQ ID NO: 4199 - protein, 80 aa, Synthetic construct
QKRKKGPAPKMLGNELCSVCGDKASGFHYNVLSCEGCKGFFRRSVIKGAHYICHSGGHCPMDTYMRRKCQECRLRKCRQA

SEQ ID NO: 4200 - protein, 90 aa, Synthetic construct
GSKMNLIEHSHLPTTDEFSFSENLFGVLTEQVAGPLGQNLEVEPYSQYSNVQFPQVQPQISSSSYYSNLGFYPQQPEEWYSPGIYELRRM

SEQ ID NO: 4201 - protein, 80 aa, Synthetic construct
DRASGYHYNALTCEGCKGFFRRSITKNAVYKCKNGGNCVMDMYMRRKCQECRLRKCKEMGMLAECLLTEIQCKSKRLRKN

SEQ ID NO: 4202 - protein, 80 aa, Synthetic construct
VCGDKATGYHFNVMTCEGCKGFFRRAMKRNARLRCPFRKGACEITRKTRRQCQACRLRKCLESGMKKEMIMSDEAVEERR

SEQ ID NO: 4203 - protein, 80 aa, Synthetic construct
LCIDGYEYAYLKAIVLFSPDHPSLENMEQIEKFQEKAYVEFQDYITKTYPDDTYRLSRLLLRLPALRLMNATITEELFFK

SEQ ID NO: 4204 - protein, 80 aa, Synthetic construct
RLLFLSMHWARSIPAFQALGQDCNTSLVRACWNELFTLGLAQCAQVMSLSTILAAIVNHLQNSIQEDKLSGDRIKQVMEH

SEQ ID NO: 4205 - protein, 80 aa, Synthetic construct
QQQQHIECVVCGDKSSGKHYGQFTCEGCKSFFKRSVRRNLSYTCRANRNCPIDQHHRNQCQYCRLKKCLKVGMRREAVQR

SEQ ID NO: 4206 - protein, 100 aa, Synthetic construct
GSPGKETNESPWRSDLLIDENCLLSPLAGEDDSFLLEGNSNEDCKPLILPDTKPKIKDNGDLVLSSPSNVTLPQVKTEKEDFIELCTPGVIKQEKLGTVY

SEQ ID NO: 4207 - protein, 130 aa, Synthetic construct
NEDCKPLILPDTKPKIKDNGDLVLSSPSNVTLPQVKTEKEDFIELCTPGVIKQEKLGTVYCQASFPGANIIGNKMSAISVHGVSTSGGQMYHYDMNTASLSQQQDQKPIFNVIPPIPVGSENWNRCQGSG

SEQ ID NO: 4208 - protein, 80 aa, Synthetic construct
IAAVKWAKAIPGFRNLHLDDQMTLLQYSWMFLMAFALGWRSYRQSSANLLCFAPDLIINEQRMTLPCMYDQCKHMLYVSS

SEQ ID NO: 4209 - protein, 80 aa, Synthetic construct
EYLCMKTLLLLSSVPKDGLKSQELFDEIRMTYIKELGKAIVKREGNSSQNWQRFYQLTKLLDSMHEVVENLLNYCFQTFL

SEQ ID NO: 4210 - protein, 80 aa, Synthetic construct
YMEIVNVSCVSGAIPNNSTQGSSKEKQELLPCLQQDNNRPGILTSDIKTELESKELSATVAESMGLYMDSVRDADYSYEQ

SEQ ID NO: 4211 - protein, 100 aa, Synthetic construct
GSSKEKQELLPCLQQDNNRPGILTSDIKTELESKELSATVAESMGLYMDSVRDADYSYEQQNQQGSMSPAKIYQNVEQLVKFYKGNGHRPSTLSCVNTPL

SEQ ID NO: 4212 - protein, 100 aa, Synthetic construct
LSSPAASTVGSICSPVNNAFSYTASGTSAGSSTLRDVVPSPDTQEKGAQEVPFPKTEEVESAISNGVTGQLNIVQYIKPEPDGAFSSSCLGGNSKINSDS

SEQ ID NO: 4213 - protein, 170 aa, Synthetic construct
PDTQEKGAQEVPFPKTEEVESAISNGVTGQLNIVQYIKPEPDGAFSSSCLGGNSKINSDSSFSVPIKQESTKHSCSGTSFKGNPTVNPFPFMDGSYFSFMDDKDYYSLSGILGPPVPGFDGNCEGSGFPVGIKQEPDDGSYYPEASIPSSAIVGVNSGGQSFHYRIGAQG

SEQ ID NO: 4214 - protein, 100 aa, Synthetic construct
ILGPPVPGFDGNCEGSGFPVGIKQEPDDGSYYPEASIPSSAIVGVNSGGQSFHYRIGAQGTISLSRSARDQSFQHLSSFPPVNTLVESWKSHGDLSSRRS

SEQ ID NO: 4215 - protein, 110 aa, Synthetic construct
PKDGLKSQAAFEEMRTNYIKELRKMVTKCPNNSGQSWQRFYQLTKLLDSMHDLVSDLLEFCFYTFRESHALKVEFPAMLVEIISDQLPKVESGNAKPLYFNAKPLYFHRK

SEQ ID NO: 4216 - protein, 100 aa, Synthetic construct
ANLLTSLVRAHLDSGPSTAKLDYSKFQELVLPHFGKEDAGDVQQFYDLLSGSLEVIRKWAEKIPGFAELSPADQDLLLESAFLELFILRLAYRSKPGEGK

SEQ ID NO: 4217 - protein, 80 aa, Synthetic construct
STKARSGAPGGSEGRCAVCGDNASCQHYGVRTCEGCKGFFKRTVQKNAKYICLANKDCPVDKRRRNRCQFCRFQKCLAVG

SEQ ID NO: 4218 - protein, 120 aa, Synthetic construct
FSMDLTNTEITATTSLPSFSTFMDNYSTGYDVKPPCLYQMPLSGQQSSIKVEDIQMHNYQQHSHLPPQSEEMMPHSGSVYYKPSSPPTPTTPGFQVQHSPMWDDPGSLHNFHQNYVATTH

SEQ ID NO: 4219 - protein, 80 aa, Synthetic construct
RLSLFSFKQSPPGTPVSSCQMRFDGPLHVPMNPEPAGSHHVVDGQTFAVPNPIRKPASMGFPGLQIGHASQLLDTQVPSP

SEQ ID NO: 4220 - protein, 80 aa, Synthetic construct
VSLISALVRAHVDSNPAMTSLDYSRFQANPDYQMSGDDTQHIQQFYDLLTGSMEIIRGWAEKIPGFADLPKADQDLLFES

SEQ ID NO: 4221 - protein, 80 aa, Synthetic construct
RLQCVRGFGEWIDSIVEFSSNLQNMNIDISAFSCIAALAMVTERHGLKEPKRVEELQNKIVNCLKDHVTFNNGGLNRPNY

SEQ ID NO: 4222 - protein, 80 aa, Synthetic construct
MNPDYTKLTMDLGSTEITATATTSLPSISTFVEGYSSNYELKPSCVYQMQRPLIKVEEGRAPSYHHHHHHHHHHHHHHQQ

SEQ ID NO: 4223 - protein, 150 aa, Synthetic construct
FVEGYSSNYELKPSCVYQMQRPLIKVEEGRAPSYHHHHHHHHHHHHHHQQQHQQPSIPPASSPEDEVLPSTSMYFKQSPPSTPTTPAFPPQAGALWDEALPSAPGCIAPGPLLDPPMKAVPTVAGARFPLFHFKPSPPHPPAPSPAGGHH

SEQ ID NO: 4224 - protein, 90 aa, Synthetic construct
PPPAPDYVLPPSLHGPEPKGLAAGPPAGPLGDFGAPALPMAVPGAHGPLAGYLYPAFPGRAIKSEYPEPYASPPQPGLPYGYPEPFSGGP

SEQ ID NO: 4225 - protein, 80 aa, Synthetic construct
GDFGAPALPMAVPGAHGPLAGYLYPAFPGRAIKSEYPEPYASPPQPGLPYGYPEPFSGGPNVPELILQLLQLEPDEDQVR

SEQ ID NO: 4226 - protein, 80 aa, Synthetic construct
AIKSEYPEPYASPPQPGLPYGYPEPFSGGPNVPELILQLLQLEPDEDQVRARILGCLQEPTKSRPDQPAAFGLLCRMADQ

SEQ ID NO: 4227 - protein, 100 aa, Synthetic construct
GAGLPDRHGSPIPARGRLVMLPKVETEALGLARSHGEQGQMPENMQVSQFKMVNYSYDEDLEELCPVCGDKVSGYHYGLLTCESCKGFFKRTVQNNKRYT

SEQ ID NO: 4228 - protein, 80 aa, Synthetic construct
MPENMQVSQFKMVNYSYDEDLEELCPVCGDKVSGYHYGLLTCESCKGFFKRTVQNNKRYTCIENQNCQIDKTQRKRCPYC

SEQ ID NO: 4229 - protein, 140 aa, Synthetic construct
AMPSDLTISSAIQNIHSASKGLPLNHAALPPTDYDRSPFVTSPISMTMPPHGSLQGYQTYGHFPSRAIKSEYPDPYTSSPESIMGYSYMDSYQTSSPASIPHLILELLKCEPDEPQVQAKIMAYLQQEQANRSKHEKLST

SEQ ID NO: 4230 - protein, 90 aa, Synthetic construct
PGSTLSSSRSVELNGFMAFREQYMGMSVPPHYQYIPHLFSYSGHSPLLPQQARSLDPQSYSLIHQLLSAEDLEPLGTPMLIEDGYAVTQA

SEQ ID NO: 4231 - protein, 80 aa, Synthetic construct
YTTRVGQQAIVLCISPSKPNPVFKVFGAAPLENVVRKYKSMILEDLESALAEHAPAPQEVNSELPPLTIDGIPVSVDKMT

SEQ ID NO: 4232 - protein, 90 aa, Synthetic construct
YVNDFDLMKFEVKREPSEGRPGPPTASLGSTPYSSVPPSPTFSEPGMVGATEGTRPGLEELYWLATLQQQLGAGEALGLSPEEAMELLQG

SEQ ID NO: 4233 - protein, 80 aa, Synthetic construct
TFSEPGMVGATEGTRPGLEELYWLATLQQQLGAGEALGLSPEEAMELLQGQGPVPVDGPHGYYPGSPEETGAQHVQLAER

SEQ ID NO: 4234 - protein, 80 aa, Synthetic construct
TSKPSKPLLFSSASSQNHIPIEPDYKFSTLLMMLKDMHDSKTKEQRLMTAQNLVSYRSPGRGDCSTNSPVGVSKVLVSGG

SEQ ID NO: 4235 - protein, 150 aa, Synthetic construct
PKETVEEGVEHDPGMPASKKMQGERGGGAALKENVCQNCEKLGELLLCEAQCCGAFHLECLGLTEMPRGKFICNECRTGIHTCFVCKQSGEDVKRCLLPLCGKFYHEECVQKYPPTVMQNKGFRCSLHICITCHAANPANVSASKGRLMR

SEQ ID NO: 4236 - protein, 140 aa, Synthetic construct
VSASKGRLMRCVRCPVAYHANDFCLAAGSKILASNSIICPNHFTPRRGCRNHEHVNVSWCFVCSEGGSLLCCDSCPAAFHRECLNIDIPEGNWYCNDCKAGKKPHYREIVWVKVGRYRWWPAEICHPRAVPSNIDKMRHD

SEQ ID NO: 4237 - protein, 80 aa, Synthetic construct
VYHADCLNLTKRPAGKWECPWHQCDICGKEAASFCEMCPSSFCKQHREGMLFISKLDGRLSCTEHDPCGPNPLEPGEIRE

SEQ ID NO: 4238 - protein, 80 aa, Synthetic construct
TSDDGSSDLDPIEHSSESDNSVLEIPDAFDRTENMLSMQKNEKIKYSRFAATNTRVKAKQKPLISNSHTDHLMGCTKSAE

SEQ ID NO: 4239 - protein, 80 aa, Synthetic construct
LQIMGHLTSEDGDHFSDVHFDSKVKQSDPGKISEKGLSFENGKGPELDSVMNSENDELNGVNQVVPKKRWQRLNQRRTKP

SEQ ID NO: 4240 - protein, 80 aa, Synthetic construct
PGIPSLTPQAELPEPAVRSEKKRLRKPSKWLLEYTEEYDQIFAPKKKQKKVQEQVHKVSSRCEEESLLARGRSSAQNKQV

SEQ ID NO: 4241 - protein, 80 aa, Synthetic construct
KGFRCSLHICITCHAANPANVSASKGRLMRCVRCPVAYHANDFCLAAGSKILASNSIICPNHFTPRRGCRNHEHVNVSWC

SEQ ID NO: 4242 - protein, 100 aa, Synthetic construct
TDKHSLRKRDTITDKTARTSSYKAMEAASSLKSQAATKNLSDACKPLKKRNRASTAASSALGFSKSSSPSASLTENEVSDSPGDEPSESPYESADETQTE

SEQ ID NO: 4243 - protein, 80 aa, Synthetic construct
LCEGPCCGAFHLACLGLSRRPEGRFTCSECASGIHSCFVCKESKTDVKRCVVTQCGKFYHEACVKKYPLTVFESRGFRCP

SEQ ID NO: 4244 - protein, 80 aa, Synthetic construct
GSLLCCESCPAAFHPDCLNIEMPDGSWFCNDCRAGKKLHFQDIIWVKLGNYRWWPAEVCHPKNVPPNIQKMKHEIGEFPV

SEQ ID NO: 4245 - protein, 80 aa, Synthetic construct
LKWTVNGDTRVGLFAVCDIPAGTELTFNYNLDCLGNEKTVCRCGASNCSGFLGDRPKTSTTLSSEEKGKKTKKKTRRRRA

SEQ ID NO: 4246 - protein, 100 aa, Synthetic construct
PQPPPPPSVPQTVIPKKTGSPEIKLKITKTIQNGRELFESSLCGDLLNEVQASEHTKSKHESRKEKRKKSNKHDSSRSEERKSHKIPKLEPEEQNRPNER

SEQ ID NO: 4247 - protein, 110 aa, Synthetic construct
QASEHTKSKHESRKEKRKKSNKHDSSRSEERKSHKIPKLEPEEQNRPNERVDTVSEKPREEPVLKEEAPVQPILSSVPTTEVSTGVKFQVGDLVWSKVGTYPWWPCMVSS

SEQ ID NO: 4248 - protein, 80 aa, Synthetic construct
ASITMHKGSLDLQKCNMSPVVKIEQVFALQNATGDGKFIDQFVYSTKGIGNKTEISVRGQDRLIISTPNQRNEKPTQSVS

SEQ ID NO: 4249 - protein, 120 aa, Synthetic construct
RNEKPTQSVSSPEATSGSTGSVEKKQQRRSIRTRSESEKSTEVVPKKKIKKEQVETVPQATVKTGLQKGASEISDSCKPLKKRSRASTDVEMTSSAYRDTSDSDSRGLSDLQVGFGKQVD

SEQ ID NO: 4250 - protein, 80 aa, Synthetic construct
YLLNESNRAELMKLPMIPSSSASKKKCEKGGRLLCCESCPASFHPECLSIEMPEGCWNCNDCKAGKKLHYKQIVWVKLGN

SEQ ID NO: 4251 - protein, 90 aa, Synthetic construct
ETQKWTVNGDVRVGLFALCDIPAGMELTFNYNLDCLGNGRTECHCGADNCSGFLGVRPKSACASTNEEKAKNAKLKQKRRKIKTEPKQMH

SEQ ID NO: 4252 - protein, 80 aa, Synthetic construct
KIKTEPKQMHEDYCFQCGDGGELVMCDKKDCPKAYHLLCLNLTQPPYGKWECPWHQCDECSSAAVSFCEFCPHSFCKDHE

SEQ ID NO: 4253 - protein, 100 aa, Synthetic construct
GELVMCDKKDCPKAYHLLCLNLTQPPYGKWECPWHQCDECSSAAVSFCEFCPHSFCKDHEKGALVPSALEGRLCCSEHDPMAPVSPEYWSKIKCKWESQD

SEQ ID NO: 4254 - protein, 80 aa, Synthetic construct
PQRERAQWDIGIAHAEKALKMTREERIEQYTFIYIDKQPEEALSQAKKSVASKTEVKKTRRPRSVLNTQPEQTNAGEVAS

SEQ ID NO: 4255 - protein, 80 aa, Synthetic construct
SEISDSCKPLKKRSRASTDVEMTSSAYRDTSDSDSRGLSDLQVGFGKQVDSPSATADADVSDVQSMDSSLSRRGTGMSKK

SEQ ID NO: 4256 - protein, 80 aa, Synthetic construct
LDITFSNPKEVSTLKRKLDQVSQFGCRSFALLFDDIDHNMCAADKEVFSSFAHAQVSITNEIYQYLGEPETFLFCPTEYC

SEQ ID NO: 4257 - protein, 80 aa, Synthetic construct
WYKSNMNGVRKDVVMTDSEDSTVSIQIKLENEGSDEDIETDVLYSPQMALKLALTEWLQEFGVPHQYSSRQVAHSGAKAS

SEQ ID NO: 4258 - protein, 100 aa, Synthetic construct
SPEMSMQEDCISDIAPMQTDEQTNKEQFVPGPNEKPLYTAEPVTLEDLQLLADLFYLPYEHGPKGAQMLREFQWLRANSSVVSVNCKGKDSEKIEEWRSR

SEQ ID NO: 4259 - protein, 80 aa, Synthetic construct
FLIGDQEPWAFRGGLAGEFQRLLPIDGANDLFFQPPPLTPTSKVYTIRPYFPKDEASVYKICREMYDDGVGLPFQSQPDL

SEQ ID NO: 4260 - protein, 80 aa, Synthetic construct
TELIPRLKGVLTNPNCEFEANYVAIHTLATWYKSNMNGVRKDVVMTDSEDSTVSIQIKLENEGSDEDIETDVLYSPQMAL

SEQ ID NO: 4261 - protein, 80 aa, Synthetic construct
VSSDFGNHPTSHLMQSIPGMHNPDKFEVFCYALSPDDGTNFRVKVMAEANHFIDLSQIPCNGKAADRIHQDGIHILVNMN

SEQ ID NO: 4262 - protein, 80 aa, Synthetic construct
QSHGPVLAPSRERPPSSSSGSQVATSGQLEEINTKEVAQRITAELKRYSIPQAIFAQRVLCRSQGTLSDLLRNPKPWSKL

SEQ ID NO: 4263 - protein, 100 aa, Synthetic construct
LHQWTLGYPAMHLPRSSFSKVPGTVSSLVDARFQLPAFPWFPHVIQPKPEITAGGSVPALKTKPRFDFANLALAATQEDPAKLGRGEGPGSPAGGLGALL

SEQ ID NO: 4264 - protein, 110 aa, Synthetic construct
NHWTLGYPNVHEITRSTITEMAAAQGLVDARFPFPALPFTTHLFHPKQGAIAHVLPALHKDRPRFDFANLAVAATQEDPPKMGDLSKLSPGLGSPISGLSKLTPDRKPSR

SEQ ID NO: 4265 - protein, 80 aa, Synthetic construct
IAHVLPALHKDRPRFDFANLAVAATQEDPPKMGDLSKLSPGLGSPISGLSKLTPDRKPSRGRLPSKTKKEFICKFCGRHF

SEQ ID NO: 4266 - protein, 90 aa, Synthetic construct
PSQAGQQQGQQKQKRHRTRFTPAQLNELERSFAKTHYPDIFMREELALRIGLTESRVQVWFQNRRAKWKKRKKTTNVFRAPGTLLPTPGL

SEQ ID NO: 4267 - protein, 80 aa, Synthetic construct
GDAMIMEETGKIFKKEKEMKKGIAFPTSISVNNCVCHFSPLKSDQDYILKEGDLVKIDLGVHVDGFIANVAHTFVVDVAQ

SEQ ID NO: 4268 - protein, 80 aa, Synthetic construct
VGVEAHVDIHSDVPKGANSFRVSGSSGVEVFMVYNRTRVKEPIGKARWPLDTDADMVVSVGTASKELKDFKVRVSYFGEQ

SEQ ID NO: 4269 - protein, 80 aa, Synthetic construct
FMVYNRTRVKEPIGKARWPLDTDADMVVSVGTASKELKDFKVRVSYFGEQEDQALGRSVLYLTGVDISLEVDTGRTGKVK

SEQ ID NO: 4270 - protein, 130 aa, Synthetic construct
YLTGVDISLEVDTGRTGKVKRSQGDKKTWRWGPEGYGAILLVNCDRDNHRSAEPDLTHSWLMSLADLQDMSPMLLSCNGPDKLFDSHKLVLNVPFSDSKRVRVFCARGGNSLSDYKQVLGPQCLSYEVER

SEQ ID NO: 4271 - protein, 80 aa, Synthetic construct
SLKHSEHVWVEVVRDGEAEEVATNGKQRWLLSPSTTLRVTMSQASTEASSDKVTVNYYDEEGSIPIDQAGLFLTAIEISL

SEQ ID NO: 4272 - protein, 100 aa, Synthetic construct
GGNLPGSSGRRVTQVVRDFLHAQKVQPPVELFVDWLAVGHVDEFLSFVPAPDGKGFRMLLASPGACFKLFQEKQKCGHGRALLFQGVVDDEQVKTISINQ

SEQ ID NO: 4273 - protein, 80 aa, Synthetic construct
CDLNCEGRQDRNFVDKRQWVWGPSGYGGILLVNCDRDDPSCDVQDNCDQHVHCLQDLEDMSVMVLRTQGPAALFDDHKLV

SEQ ID NO: 4274 - protein, 80 aa, Synthetic construct
DAVAELARKAGCKLTICPQAENRNDRWIQDEMELGYVQAPHKTLPVVFDSPRNGELQDFPYKRILGPDFGYVTREPRDRS

SEQ ID NO: 4275 - protein, 110 aa, Synthetic construct
LGTLTQLDICSSAPEDCTSFSINASPGVVVDIAHGPPAKKKSTGSSTWPLDPGVEVTLTMKVASGSTGDQKVQISYYGPKTPPVKALLYLTGVEISLCADITRTGKVKPT

SEQ ID NO: 4276 - protein, 90 aa, Synthetic construct
SQHYSKPRVTPVEVMPVFPDFKMWINPCAQVIFDSDPAPKDTSGAAALEMMSQAMIRGMMDEEGNQFVAYFLPVEETLKKRKRDQEEEMD

SEQ ID NO: 4277 - protein, 80 aa, Synthetic construct
MSQAMIRGMMDEEGNQFVAYFLPVEETLKKRKRDQEEEMDYAPDDVYDYKIAREYNWNVKNKASKGYEENYFFIFREGDG

SEQ ID NO: 4278 - protein, 100 aa, Synthetic construct
RTLPERSGVVCRVKYCNSLPDIPFDPKFITYPFDQNRFVQYKATSLEKQHKHDLLTEPDLGVTIDLINPDTYRIDPNVLLDPADEKLLEEEIQAPTSSKR

SEQ ID NO: 4279 - protein, 80 aa, Synthetic construct
YAPDDVYDYKIAREYNWNVKNKASKGYEENYFFIFREGDGVYYNELETRVRLSKRRAKAGVQSGTNALLVVKHRDMNEKE

SEQ ID NO: 4280 - protein, 80 aa, Synthetic construct
VYYNELETRVRLSKRRAKAGVQSGTNALLVVKHRDMNEKELEAQEARKAQLENHEPEEEEEEEMETEEKEAGGSDEEQEK

SEQ ID NO: 4281 - protein, 90 aa, Synthetic construct
VVMEYLAGGSLTDVVTETCMDEAQIAAVCRECLQALEFLHANQVIHRDIKSDNVLLGMEGSVKLTDFGFCAQITPEQSKRSTMVGTPYWM

SEQ ID NO: 4282 - protein, 80 aa, Synthetic construct
EHTIHVGFDAVTGEFTGMPEQWARLLQTSNITKLEQKKNPQAVLDVLKFYDSNTVKQKYLSFTPPEKDGFPSGTPALNAK

SEQ ID NO: 4283 - protein, 80 aa, Synthetic construct
EGGESRTGMNDLNAKLPGNISSLNVECRNSKQHGKKDSKITDHFMRLPKAEDRRKEQWETKHQRTERKIPKYVPPHLSPD

SEQ ID NO: 4284 - protein, 100 aa, Synthetic construct
DVSASTKSLQELFLAHILSPWGAEVKAEPVEVVAPRGKSGAALSKKSKGQVKEEGINKSEKRMKLTLKGGAAVDPDSGLEHSAHVLEKGGKVFSATLGLV

SEQ ID NO: 4285 - protein, 80 aa, Synthetic construct
LSRNKDEVKAMIEKLGGKLTGTANKASLCISTKKEVEKMNKKMEEVKEANIRVVSEDFLQDVSASTKSLQELFLAHILSP

SEQ ID NO: 4286 - protein, 90 aa, Synthetic construct
FGKGIYFADMVSKSANYCHTSQGDPIGLILLGEVALGNMYELKHASHISKLPKGKHSVKGLGKTTPDPSANISLDGVDVPLGTGISSGVN

SEQ ID NO: 4287 - protein, 80 aa, Synthetic construct
FQSPKRSGGGECEVRQDPRSPSRFLVFFYPEDVRQKVLERKNHELVWQGKGTFKLTVQLPATPDEIDHVFEEELLTKESK

SEQ ID NO: 4288 - protein, 80 aa, Synthetic construct
PSRFLVFFYPEDVRQKVLERKNHELVWQGKGTFKLTVQLPATPDEIDHVFEEELLTKESKTKEDVKEPDVSEELDTKLPL

SEQ ID NO: 4289 - protein, 150 aa, Synthetic construct
NPIKVDPTMWDTIKNDVKDDRILIEFDTLKEMVILAGKSEDVQSIEVQVRELIESTTQKIKREEQSLKEKMIISPGRYFLLCHSSLLDHLLTECPEIEICYDRVTQHLCLKGPSADVYKAKCEIQEKVYTMAQKNIQVSPEIFQFLQQVN

SEQ ID NO: 4290 - protein, 80 aa, Synthetic construct
ATPDEIDHVFEEELLTKESKTKEDVKEPDVSEELDTKLPLDGGLDKMEDIPEECENISSLVAFENLKANVTDIMLILLVE

SEQ ID NO: 4291 - protein, 80 aa, Synthetic construct
TVASKFNQTCSHFRIEKIERIQNPDLWNSYQAKKKTMDAKNGQTMNEKQLFHGTDAGSVPHVNRNGFNRSYAGKNAVAYG

SEQ ID NO: 4292 - protein, 80 aa, Synthetic construct
QHGFNRSCAGKNAVSYGKGTYFAVDASYSAKDTYSKPDSNGRKHMYVVRVLTGVFTKGRAGLVTPPPKNPHNPTDLFDSV

SEQ ID NO: 4293 - protein, 80 aa, Synthetic construct
EIAIKLVKTELQSPEHPLDQHYRNLHCALRPLDHESYEFKVISQYLQSTHAPTHSDYTMTLLDLFEVEKDGEKEAFREDL

SEQ ID NO: 4294 - protein, 120 aa, Synthetic construct
HGLRIAPPEAPITGYMFGKGIYFADMSSKSANYCFASRLKNTGLLLLSEVALGQCNELLEANPKAEGLLQGKHSTKGLGKMAPSSAHFVTLNGSTVPLGPASDTGILNPDGYTLNYNEYI

SEQ ID NO: 4295 - protein, 80 aa, Synthetic construct
PVAGGKANKDRTEDKQDGMPGRSWASKRVSESVKALLLKGKAPVDPECTAKVGKAHVYCEGNDVYDVMLNQTNLQFNNNK

SEQ ID NO: 4296 - protein, 80 aa, Synthetic construct
TFTQQQLEALDRVFERPSYPDVFQASEHIKSEQGNEYSLPALTPGLDEVKSSLSASTNPELGSNVSGTQTYPVVTGRDMA

SEQ ID NO: 4297 - protein, 80 aa, Synthetic construct
VPNGDSQSGVDSLRKHLRADTFTQQQLEALDRVFERPSYPDVFQASEHIKSEQGNEYSLPALTPGLDEVKSSLSASTNPE

SEQ ID NO: 4298 - protein, 80 aa, Synthetic construct
MAHHGIRPCVISRQLRVSHGCVSKILCRYQETGSIRPGAIGGSKPKQVTTPDVEKKIEEYKRENPGMFSWEIRDKLLKDA

SEQ ID NO: 4299 - protein, 80 aa, Synthetic construct
EPLGPSCYQLCWATAPERCLSDTPPKACLKPCWGHLPPQPNSLDSGLLCLPCPSSHCHLASLSGSQALLWPGCPLLYGLE

SEQ ID NO: 4300 - protein, 80 aa, Synthetic construct
AEALEKEFQRGQYPDSVARGKLATATSLPEDTVRVWFSNRRAKWRRQEKLKWEMQLPGASQGLTVPRVAPGIISAQQSPG

SEQ ID NO: 4301 - protein, 80 aa, Synthetic construct
PLKRKQRRSRTTFTAEQLEELEKAFERTHYPDIYTREELAQRTKLTEARVQVWFSNRRARWRKQAGANQLAAFNHLLPGG

SEQ ID NO: 4302 - protein, 140 aa, Synthetic construct
RQHYPEAYASPSHTKGEQGLYPLPLLNSTLDDGKATLTPSNTPLGRNLSTHQTYPVVADPHSPFAIKQETPEVSSSSSTPSSLSSSAFLDLQQVGSGVPPFNAFPHAASVYGQFTGQALLSGREMVGPTLPGYPPHIPTS

SEQ ID NO: 4303 - protein, 80 aa, Synthetic construct
PPKLKQNEVANVQPSSKRARIEDVPPPTKKLTPELTPFVLFTGFEPVQVQQYIKKLYILGGEVAESAQKCTHLIASKVTR

SEQ ID NO: 4304 - protein, 80 aa, Synthetic construct
LPLDENMTVTDPEACYIGTEPWKPKEAVEENGVITDKADIFAFGLTLWEMMTLSIPHINLSNDDDDEDKTFDESDFDDEA

SEQ ID NO: 4305 - protein, 80 aa, Synthetic construct
PSRKRRRLSNLPTVDPIAVCHELYNTIRDYKDEQGRLLCELFIRAPKRRNQPDYYEVVSQPIDLMKIQQKLKMEEYDDVN

SEQ ID NO: 4306 - protein, 80 aa, Synthetic construct
KRVLKLQQVMQAKKKELARRDDIEDGDSMISSATSDTGSAKRKSKKNIRKQRMKILFNVVLEAREPGSGRRLCDLFMVKP

SEQ ID NO: 4307 - protein, 80 aa, Synthetic construct
KEDVPVEMSNGEPGCHYFEQLHYNDMWLKVGDCVFIKSHGLVRPRVGRIEKVWVRDGAAYFYGPIFIHPEETEHEPTKMF

SEQ ID NO: 4308 - protein, 80 aa, Synthetic construct
EYETLDHLECDLNLMFENAKRYNVPNSAIYKRVLKLQQVMQAKKKELARRDDIEDGDSMISSATSDTGSAKRKSKKNIRK

SEQ ID NO: 4309 - protein, 80 aa, Synthetic construct
QRMKILFNVVLEAREPGSGRRLCDLFMVKPSKKDYPDYYKIILEPMDLKIIEHNIRNDKYAGEEGMIEDMKLMFRNARHY

SEQ ID NO: 4310 - protein, 80 aa, Synthetic construct
VLHKVLLETRRDLEGDEDSHVPNVTLLIQELIHNLFVSVMSHQDDEGRCYSDSLAEIPAVDPNFPNKPPLTFDIIRKNVE

SEQ ID NO: 4311 - protein, 80 aa, Synthetic construct
LSQHLQDGAGGTEGEGGRKQDIGDILQQIMTITDQSLDEAQARKHALNCHRMKPALFNVLCEIKEKTVLSIRGAQEEEPT

SEQ ID NO: 4312 - protein, 80 aa, Synthetic construct
EQSRMRPVSPKEIERMVGAIHGKFSAIQMQLKQSTCEAVMTLRSRLLDARRKRRNFSKQATEVLNEYFYSHLNNPYPSEE

SEQ ID NO: 4313 - protein, 90 aa, Synthetic construct
HRTTRIKITELNPHLMCALCGGYFIDATTIVECLHSFCKTCIVRYLETNKYCPMCDVQVHKTRPLLSIRSDKTLQDIVYKLVPGLFKDEM

SEQ ID NO: 4314 - protein, 80 aa, Synthetic construct
PALTPAPAAGEEGPAPLSETGAPGCSGSRPPELEPERSLGRFRGRFEDEDEELEEEEELEEEEEEEEEDMSHFSLRLEGG

SEQ ID NO: 4315 - protein, 100 aa, Synthetic construct
RFRGRFEDEDEELEEEEELEEEEEEEEEDMSHFSLRLEGGRQDSEDEEERLINLSELTPYILCSICKGYLIDATTITECLHTFCKSCIVRHFYYSNRCPK

SEQ ID NO: 4316 - protein, 80 aa, Synthetic construct
QDIVYKLVINLEEREKKQMHDFYKERGLEVPKPAVPQPVPSSKGRSKKVLESVFRIPPELDMSLLLEFIGANEGTGHFKP

SEQ ID NO: 4317 - protein, 80 aa, Synthetic construct
SIDLQKRVIESGPDQLNDNEYTKFIPPNYHTPPYLTAEPEVTYHRLRPQDKFLVLATDGLWETMHRQDVVRIVGEYLTGM

SEQ ID NO: 4318 - protein, 80 aa, Synthetic construct
EPEENKRTRTAYTRAQLLELEKEFLFNKYISRPRRVELAVMLNLTERHIKIWFQNRRMKWKKEEDKKRGGGTAVGGGGVA

SEQ ID NO: 4319 - protein, 80 aa, Synthetic construct
YQKARAKKKYIEHRSNETSVIHSLPFGEQTFRPRGMLYECQECGECFAHSSDLTEHQKIHDREKPSGSRNYEWSVIRSLA

SEQ ID NO: 4320 - protein, 80 aa, Synthetic construct
EPYYDCHECTETFTSSTAFSEHLKTHASMIIFEPANAFGECSGYIERASTSTGGANQADEKYFKCDVCGQLFNDRLSLAR

SEQ ID NO: 4321 - protein, 80 aa, Synthetic construct
EKLCDFTDGRDAFMQSSELSEHQKIHSRKNLFEGRGYEKSVIHSGPFTESQKSHTITRPLESDEDEKAFTISSNPYENQK

SEQ ID NO: 4322 - protein, 140 aa, Synthetic construct
QLLEDESYDGGAGAASAFAPPRSSPCASSTPVAVGDFPDCAYPPDAEPKDDAYPLYSDFQPPALKIKEEEEGAEASARSPRSYLVAGANPAAFPDFPLGPPPPLPPRATPSRPGEAAVTAAPASASVSSASSSGSTLECI

SEQ ID NO: 4323 - protein, 80 aa, Synthetic construct
YPALGLNGLPQLGYQAAVLKEGLPQVYPPYLNYLRPDSEASQSPQYSFESLPQKICLICGDEASGCHYGVLTCGSCKVFF

SEQ ID NO: 4324 - protein, 90 aa, Synthetic construct
LEGLRSQTQFEEMRSSYIRELIKAIGLRQKGVVSSSQRFYQLTKLLDNLHDLVKQLHLYCLNTFIQSRALSVEFPEMMSEVIAAQLPKIL

SEQ ID NO: 4325 - protein, 80 aa, Synthetic construct
QQCHPPTPDTGPQNGHPEGVPHTPQRRFQHTSAVILQLQPASPPQQCVPDDWKEVAPGEKSVPETRSGPSPHQQAIVTAM

SEQ ID NO: 4326 - protein, 90 aa, Synthetic construct
IRKMPENSDLLPVAQTEPSIWTVDDVWAFIHSLPGCQDIADEFRAQEIDGQALLLLKEDHLMSAMNIKLGPALKICARINCARINSLKES

SEQ ID NO: 4327 - protein, 120 aa, Synthetic construct
ASSLWDPASPAPTSGPRPRLWEGQDVLARWTDGLLYLGTIKKVDSAREVCLVQFEDDSQFLVLWKDISPAALPGEELLCCVCRSETVVPGNRLVSCEKCRHAYHQDCHVPRAPAPGEGEG

SEQ ID NO: 4328 - protein, 90 aa, Synthetic construct
HAYHQDCHVPRAPAPGEGEGTSWVCRQCVFAIATKRGGALKKGPYARAMLGMKLSLPYGLKGLDWDAGHLSNRQQSYCYCGGPGEWNLKM

SEQ ID NO: 4329 - protein, 80 aa, Synthetic construct
KGLDWDAGHLSNRQQSYCYCGGPGEWNLKMLQCRSCLQWFHEACTQCLSKPLLYGDRFYEFECCVCRGGPEKVRRLQLRW

SEQ ID NO: 4330 - protein, 80 aa, Synthetic construct
PTDIPKSAPHSMTASSSSVSSPSPGLPRRSAPPSPLCRSLSPGTGGGVRGGVGYLSRGDPVRVLARRVRPDGSVQYLVEW

SEQ ID NO: 4331 - protein, 90 aa, Synthetic construct
GICLKGKESNKKGKAESLIHCSQCENSGHPSCLDMTMELVSMIKTYPWQCMECKTCIICGQPHHEEEMMFCDMCDRGYHTFCVGLGAIPS

SEQ ID NO: 4332 - protein, 90 aa, Synthetic construct
NPTQFQLPNELTCTTALPGSSKRRRKEETTGKNVKKTQHELDHNGLVPLPVKVCFTCNRSCRVAPLIQCDYCPLLFHMDCLEPPLTAMPL

SEQ ID NO: 4333 - protein, 90 aa, Synthetic construct
EESQMHLLNSEHLATQAEQQEWLCSVVALQCSILKHLSAKQMPSHWDSEQTEKADIKPVIVTDSSVTTSLQTADKTPTPSHYPLSCPSGI

SEQ ID NO: 4334 - protein, 80 aa, Synthetic construct
QMPSHWDSEQTEKADIKPVIVTDSSVTTSLQTADKTPTPSHYPLSCPSGISTQNSLSCSPPHQSPALEDIGCSSCAEKSK

SEQ ID NO: 4335 - protein, 80 aa, Synthetic construct
SVKRRSLKVPDAIKSQYQFPPPLIAPAAIRDGELICNGIPEESQMHLLNSEHLATQAEQQEWLCSVVALQCSILKHLSAK

SEQ ID NO: 4336 - protein, 80 aa, Synthetic construct
PPLIAPAAIRDGELICNGIPEESQMHLLNSEHLATQAEQQEWLCSVVALQCSILKHLSAKQMPSHWDSEQTEKADIKPVI

SEQ ID NO: 4337 - protein, 90 aa, Synthetic construct
KRKRRDSDAPGKEGYRGGLLKLEAADPYVETPTSPTLQDIPQAPSDPCSGWDSDTPSSGSCATVSPDQVKEIKTEGKRTIVRQGKQVVFR

SEQ ID NO: 4338 - protein, 80 aa, Synthetic construct
CATVSPDQVKEIKTEGKRTIVRQGKQVVFRDEDSTGNDEDIMVDSDDDSWDLVTCFCMKPFAGRPMIECNECHTWIHLSC

SEQ ID NO: 4339 - protein, 90 aa, Synthetic construct
NEDIKVKEEQLKNSAEEEVLSSEKQLIKMEKKEEEENGERPRKKKEKEKEKEKEKEKEKEREKEKEKATVSENVAASAAATTPATSPPAV

SEQ ID NO: 4340 - protein, 130 aa, Synthetic construct
KKSKVLSRNSADDEELTNDSLTLSQSKSNEDSLILEKSQNWSSQKMDHILICCVCLGDNSEDADEIIQCDNCGITVHEGCYGVDGESDSIMSSASENSTEPWFCDACKCGVSPSCELCPNQDGIFKETDA

SEQ ID NO: 4341 - protein, 80 aa, Synthetic construct
GQKLNIPAILRAPKERKPSKKEGGTQKTSTLPAVLYSCGICKKNHDQHLLLLCDTCKLHYHLGCLDPPLTRMPRKTKNSY

SEQ ID NO: 4342 - protein, 80 aa, Synthetic construct
CKKNHDQHLLLLCDTCKLHYHLGCLDPPLTRMPRKTKNSYWQCSECDQAGSSDMEADMAMETLPDGTKRSRRQIKEPVKF

SEQ ID NO: 4343 - protein, 80 aa, Synthetic construct
NDMDDYDSEDDNDWRPTVVKRKGRSASQKEGSDGDNEDDEDEGSGSDEDENDEGNDEDHSSPASEGGCKKKKSKVLSRNS

SEQ ID NO: 4344 - protein, 80 aa, Synthetic construct
QDGIFKETDAGRWVHIVCALYVPGVAFGDIDKLRPVTLTEMNYSKYGAKECSFCEDPRFARTGVCISCDAGMCRAYFHVT

SEQ ID NO: 4345 - protein, 130 aa, Synthetic construct
ENRALDPGTRDSYGATSHLPNKGALAKVKNNFKDLMSKLTEGQYVLCRWTDGLYYLGKIKRVSSSKQSCLVTFEDNSKYWVLWKDIQHAGVPGEEPKCNICLGKTSGPLNEILICGKCGLGYHQQCHIPI

SEQ ID NO: 4346 - protein, 80 aa, Synthetic construct
VKMVLSYQPEELEWDSPHRTNQQQCYCYCGGPGEWYLRMLQCYRCRQWFHEACTQCLNEPMMFGDRFYLFFCSVCNQGPE

SEQ ID NO: 4347 - protein, 80 aa, Synthetic construct
RLPYDVTRFMIECDACKDWFHGSCVGVEEEEAPDIDIYHCPNCEKTHGKSTLKKKRTWHKHGPGQAPDVKPVQNGSQLFI

SEQ ID NO: 4348 - protein, 110 aa, Synthetic construct
DDSSDEGSLHIDTDTKPGRNARVKKESGSSAAGILDLLQASEEVGALEYNPSSQPPASPSTQEAIQGMLSMANLQASDSCLQTTWGAGQAKGSSLAAHGARKNGGGSGKS

SEQ ID NO: 4349 - protein, 80 aa, Synthetic construct
DAPYSPTARVGPSVPRQDRPVREGTRVASIETGLAAAAAKLSQQEEQKSKKKKSAKRKLTPNTTSPSTSTSISAGTTSTS

SEQ ID NO: 4350 - protein, 90 aa, Synthetic construct
KVLIHFKRWNHRYDEWFCWDSPYLRPLEKIQLRKEGLHEEDGSSEFQINEQVLACWSDCRFYPAKVTAVNKDGTYTVKFYDGVVQTVKHI

SEQ ID NO: 4351 - protein, 80 aa, Synthetic construct
SALEAGQVSSALTCHSFGDGSGAAGLELNCPSMGENTMKTEPTSPLVELQEISTVEVTNTFKKTDDFGSSNAPAVDLDHK

SEQ ID NO: 4352 - protein, 90 aa, Synthetic construct
KGKVKALEEDNLSESSSESFLWSDDEYGQDVDVTTNPDEELDGDDRYDFEVVRCICEVQEENDFMIQCEECQCWQHGVCMGLLEENVPEK

SEQ ID NO: 4353 - protein, 90 aa, Synthetic construct
ENDFMIQCEECQCWQHGVCMGLLEENVPEKYTCYVCQDPPGQRPGFKYWYDKEWLSRGHMHGLAFLEENYSHQNAKKIVATHQLLGDVQR

SEQ ID NO: 4354 - protein, 80 aa, Synthetic construct
NLREPKRKRGRPPSIAPTAVDSNSQTLQPITLELRRRKISKGCEVPLKRPRLDKNSSQEKSKNYSENTDKDLSRRRSSRL

SEQ ID NO: 4355 - protein, 80 aa, Synthetic construct
SHRYDEWIYWDSNRLRPLERPALRKEGLKDEEDFFDFKAGEEVLARWTDCRYYPAKIEAINKEGTFTVQFYDGVIRCLKR

SEQ ID NO: 4356 - protein, 90 aa, Synthetic construct
SRSMFTEKTTTYQYPRAILSVDLSGENLSDVDFLDDSSTESLLLSGDEYNQDFDSTNFEESQDEDDALNEIVRCICEMDEENGFMIQCEE

SEQ ID NO: 4357 - protein, 90 aa, Synthetic construct
VPSKKEETSTCIATPDVEKKEDLPTSSETFGLHVENVPKMVFPQPESTLSNKRKNNQGNSFQAKRARLNKITGLLASKAVGVDGAEKKED

SEQ ID NO: 4358 - protein, 100 aa, Synthetic construct
GLHVENVPKMVFPQPESTLSNKRKNNQGNSFQAKRARLNKITGLLASKAVGVDGAEKKEDYNETAPMLEQAISPKPQSQKKNEADISSSANTQKPALLSS

SEQ ID NO: 4359 - protein, 90 aa, Synthetic construct
VAHLPLEKLGPCLPLDLSRGSEVTAPVASDSSYRNECPRAEKEDTQMLPNPSSKAIADGRGAPAAAGISKTEKKVKLEDKSSTAFGKRKE

SEQ ID NO: 4360 - protein, 90 aa, Synthetic construct
ELQTLQEALKVEIQVHQKLVAQMKQDPQNADLKKQLHELQAKITALSEKQKRVVEQLRKNLIVKQEQPDKFQIQPLPQSENKLQTAQQQP

SEQ ID NO: 4361 - protein, 90 aa, Synthetic construct
DLKKQLHELQAKITALSEKQKRVVEQLRKNLIVKQEQPDKFQIQPLPQSENKLQTAQQQPLQQLQQQQQYHHHHAQQSAAASPNLTASQK

SEQ ID NO: 4362 - protein, 80 aa, Synthetic construct
LIVKQEQPDKFQIQPLPQSENKLQTAQQQPLQQLQQQQQYHHHHAQQSAAASPNLTASQKTVTTASMITTKTLPLVLKAA

SEQ ID NO: 4363 - protein, 90 aa, Synthetic construct
VQLSKPSLEKQTVKSHTETDEKQTESRTITPPAAPKPKREENPQKLAFMVSLGLVTHDHLEEIQSKRQERKRRTTANPVYSGAVFEPERK

SEQ ID NO: 4364 - protein, 100 aa, Synthetic construct
GQLLMCDTCSRVYHLDCLDPPLKTIPKGMWICPRCQDQMLKKEEAIPWPGTLAIVHSYIAYKAAKEEEKQKLLKWSSDLKQEREQLEQKVKQLSNSISKC

SEQ ID NO: 4365 - protein, 80 aa, Synthetic construct
RLPYDVTRFMIECDMCQDWFHGSCVGVEEEKAADIDLYHCPNCEVLHGPSIMKKRRGSSKGHDTHKGKPVKTGSPTFVRE

SEQ ID NO: 4366 - protein, 80 aa, Synthetic construct
PNRVREPGEVEFDIEEDYTTDEDMVEGVEGKLGNGSGAGGILDLLKASRQVGGPDYAALTEAPASPSTQEAIQGMLCMAN

SEQ ID NO: 4367 - protein, 100 aa, Synthetic construct
DEDMVEGVEGKLGNGSGAGGILDLLKASRQVGGPDYAALTEAPASPSTQEAIQGMLCMANLQSSSSSPATSSLQAWWTGGQDRSSGSSSSGLGTVSNSPA

SEQ ID NO: 4368 - protein, 80 aa, Synthetic construct
REGTRVASIETGLAAAAAKLAQQELQKAQKKKYIKKKPLLKEVEQPRPQDSNLSLTVPAPTVAATPQLVTSSSPLPPPEP

SEQ ID NO: 4369 - protein, 100 aa, Synthetic construct
RFRSVIDDAWWFGTIESQEPLQLEYPDSLFQCYNVCWDNGDTEKMSPWDMELIPNNAVFPEELGTSVPLTDGECRSLIYKPLDGEWGTNPRDEECERIVA

SEQ ID NO: 4370 - protein, 80 aa, Synthetic construct
AGQNLQGIEDKITKMKVTMVAWDRHDNTVITAVNNMTLKVWNSYTGQLIHVLMGHEDEVFVLEPHPFDPRVLFSAGHDGN

SEQ ID NO: 4371 - protein, 80 aa, Synthetic construct
SQWERPSGNSSSGGKNGQGEPARVRCSHLLVKHSQSRRPSSWRQEKITRTKEEALELINGYIQKIKSGEEDFESLASQFS

SEQ ID NO: 4372 - protein, 80 aa, Synthetic construct
QRRQRTHFTSQQLQELEATFQRNRYPDMSTREEIAVWTNLTEARVRVWFKNRRAKWRKRERNQQAELCKNGFGPQFNGLM

SEQ ID NO: 4373 - protein, 80 aa, Synthetic construct
TSSPEAAEKDKSQQGKNEDVGAEDPSKKKRQRRQRTHFTSQQLQELEATFQRNRYPDMSTREEIAVWTNLTEARVRVWFK

SEQ ID NO: 4374 - protein, 80 aa, Synthetic construct
NRRAKWRKRERNQQAELCKNGFGPQFNGLMQPYDDMYPGYSYNNWAAKGLTSASLSTKSFPFFNSMNVNPLSSQSMFSPP

SEQ ID NO: 4375 - protein, 80 aa, Synthetic construct
QRRQRTHFTSQQLQELEATFQRNRYPDMSTREEIAVWTNLTEARVRVWFKNRRAKWRKRERSQQAELCKGSFAAPLGGLV

SEQ ID NO: 4376 - protein, 80 aa, Synthetic construct
VNTRQNLDHVKESKTGSSGIIVRLSTNHFRLTSRPQWALYQYHIDYNPLMEARRLRSALLFQHEDLIGKCHAFDGTILFL

SEQ ID NO: 4377 - protein, 80 aa, Synthetic construct
NKEHFQDECTKLLVGNIVITRYNNRTYRIDDVDWNKTPKDSFTMSDGKEITFLEYYSKNYGITVKEEDQPLLIHRPSERQ

SEQ ID NO: 4378 - protein, 120 aa, Synthetic construct
RYNNRTYRIDDVDWNKTPKDSFTMSDGKEITFLEYYSKNYGITVKEEDQPLLIHRPSERQDNHGMLLKGEILLLPELSFMTGIPEKMKKDFRAMKDLAQQINLSPKQHHSALECLLQRIA

SEQ ID NO: 4379 - protein, 80 aa, Synthetic construct
IPMHFWALFYPKRAMDQARELVNMLEKIAGPIGMRMSPPAWVELKDDRIETYVRTIQSTLGAEGKIQMVVCIIMGPRDDL

SEQ ID NO: 4380 - protein, 80 aa, Synthetic construct
DLVVNTRQDMKHVKDSKTGSEGTVVQLLANHFRVISRPQWVAYKYNVDYKPDIEDGNLRTILLDQHRRKFGERHIFDGNS

SEQ ID NO: 4381 - protein, 80 aa, Synthetic construct
VGIDCFHDIVNRQKSIAGFVASTNAELTKWYSQCVIQKTGEELVKELEICLKAALDVWCKNESSMPHSVIVYRDGVGDGQ

SEQ ID NO: 4382 - protein, 80 aa, Synthetic construct
CSDRTEYVAESFLNCLRRVAGSMGFNVDYPKIIKVQENPAAFVRAIQQYVDPDVQLVMCILPSNQKTYYDSIKKYLSSDC

SEQ ID NO: 4383 - protein, 80 aa, Synthetic construct
GSMGFNVDYPKIIKVQENPAAFVRAIQQYVDPDVQLVMCILPSNQKTYYDSIKKYLSSDCPVPSQCVLARTLNKQGMMMS

SEQ ID NO: 4384 - protein, 80 aa, Synthetic construct
YRAGVGDGQLKTLIEYEVPQLLSSVAESSSNTSSRLSVIVVRKKCMPRFFTEMNRTVQNPPLGTVVDSEATRNEWYDFYL

SEQ ID NO: 4385 - protein, 80 aa, Synthetic construct
ISQVACRGTVSPTYYNVIYDDNGLKPDHMQRLTFKLCHLYYNWPGIVSVPAPCQYAHKLTFLVAQSIHKEPSLELANHLF

SEQ ID NO: 4386 - protein, 90 aa, Synthetic construct
MATQTLSIDSYQDGQQMQVVTELKTEQDPNCSEPDAEGVSPPPVESQTPMDVDKQAIYRHPLFPLLALLFEKCEQSTQGSEGTTSASFDV

SEQ ID NO: 4387 - protein, 90 aa, Synthetic construct
EKCEQSTQGSEGTTSASFDVDIENFVRKQEKEGKPFFCEDPETDNLMVKAIQVLRIHLLELEKVNELCKDFCSRYIACLKTKMNSETLLS

SEQ ID NO: 4388 - protein, 100 aa, Synthetic construct
KEGKPFFCEDPETDNLMVKAIQVLRIHLLELEKVNELCKDFCSRYIACLKTKMNSETLLSGEPGSPYSPVQSQQIQSAITGTISPQGIVVPASALQQGNV

SEQ ID NO: 4389 - protein, 120 aa, Synthetic construct
QATQGSECITSASFDVDIENFVHQQEQEHKPFFSDDPELDNLMVKAIQVLRIHLLELEKVNELCKDFCNRYITCLKTKMHSDNLLRNDLGGPYSPNQPSINLHSQDLLQNSPNSMSGVSN

SEQ ID NO: 4390 - protein, 80 aa, Synthetic construct
RGVLPKHATNIMRSWLFQHLMHPYPTEDEKRQIAAQTNLTLLQVNNWFINARRRILQPMLDASNPDPAPKAKKIKSQHRP

SEQ ID NO: 4391 - protein, 80 aa, Synthetic construct
AGVLQQQGGAPGTNPDGSINLDNLQSLSSDSATMAMQQAMMAAHDDSLDGTEEEDEDEMEEEEEEELEEEVDELQTTNVS

SEQ ID NO: 4392 - protein, 140 aa, Synthetic construct
EKKHQCEHCDRRFYTRKDVRRHMVVHTGRKDFLCQYCAQRFGRKDHLTRHMKKSHNQELLKVKTEPVDFLDPFTCNVSVPIKDELLPVMSLPSSELLSKPFTNTLQLNLYNTPFQSMQSSGSAHQMITTLPLGMTCPIDM

SEQ ID NO: 4393 - protein, 90 aa, Synthetic construct
TEVLLDHLKAHAEEKPPSGTKEKKHQCDHCERCFYTRKDVRRHLVVHTGCKDFLCQFCAQRFGRKDHLTRHTKKTHSQELMKESLQTGDL

SEQ ID NO: 4394 - protein, 80 aa, Synthetic construct
TMLGYKRHLALHAASSGDLTCGVCALELGSTEVLLDHLKAHAEEKPPSGTKEKKHQCDHCERCFYTRKDVRRHLVVHTGC

SEQ ID NO: 4395 - protein, 160 aa, Synthetic construct
VAGGAKEKKHPCDHCDRRFYTRKDVRRHLVVHTGRKDFLCQYCAQRFGRKDHLTRHVKKSHSQELLKIKTEPVDMLGLLSCSSTVSVKEELSPVLCMASRDVMGTKAFPGMLPMGMYGAHIPTMPSTGVPHSLVHNTLPMGMSYPLESSPISSPAQLPPK

SEQ ID NO: 4396 - protein, 80 aa, Synthetic construct
MLPMGMYGAHIPTMPSTGVPHSLVHNTLPMGMSYPLESSPISSPAQLPPKYQLGSTSYLPDKLPKVEVDSFLAELPGSLS

SEQ ID NO: 4397 - protein, 100 aa, Synthetic construct
ISSPAQLPPKYQLGSTSYLPDKLPKVEVDSFLAELPGSLSLSSAEPQPASPQPAAAAALLDEALLAKSPANLSEALCAANVDFSHLLGFLPLNLPPCNPP

SEQ ID NO: 4398 - protein, 80 aa, Synthetic construct
GEKLRPHSLPQPEQRPYSCPQLHCGKAFASKYKLYRHMATHSAQKPHQCMYCDKMFHRKDHLRNHLQTHDPNKEALHCSE

SEQ ID NO: 4399 - protein, 80 aa, Synthetic construct
PQVSYPPPPAGHSGPGPAGFPVPNQPVYNQPVYNQPVGAAGVPWMPAPQPPLNCPPGLEYLSQIDQILIHQQIELLEVLT

SEQ ID NO: 4400 - protein, 110 aa, Synthetic construct
QQIELLEVLTGFETNNKYEIKNSFGQRVYFAAEDTDCCTRNCCGPSRPFTLRIIDNMGQEVITLERPLRCSSCCCPCCLQEIEIQAPPGVPIGYVIQTWHPCLPKFTIQN

SEQ ID NO: 4401 - protein, 100 aa, Synthetic construct
LRIIDNMGQEVITLERPLRCSSCCCPCCLQEIEIQAPPGVPIGYVIQTWHPCLPKFTIQNEKREDVLKISGPCVVCSCCGDVDFEIKSLDEQCVVGKISK

SEQ ID NO: 4402 - protein, 100 aa, Synthetic construct
ESTAYPLNLSLKEEEEEEEIQSRELEDGPADMQKVRICSEGGWVPALFDEVAIYFSDEEWEVLTEQQKALYREVMRMNYETVLSLEFPFPKPDMITRLEG

SEQ ID NO: 4403 - protein, 90 aa, Synthetic construct
GGWVPALFDEVAIYFSDEEWEVLTEQQKALYREVMRMNYETVLSLEFPFPKPDMITRLEGEEESQNSDEWQLQGGTSAENEESDVKPPDW

SEQ ID NO: 4404 - protein, 90 aa, Synthetic construct
QLQGGTSAENEESDVKPPDWPNPMNATSQFPQPQHFDSFGLRLPRDITELPEWSEGYPFYMAMGFPGYDLSADDIAGKFQFSRGMRRSYD

SEQ ID NO: 4405 - protein, 80 aa, Synthetic construct
PVASTPSSTPIPALSPPTKVPEPNENVGDAVQTKLIMLVDDFYYGRDGGKVAQLTNFPKVATSFRCPHCTKRLKNNIRFM

SEQ ID NO: 4406 - protein, 110 aa, Synthetic construct
ICQHCYRQFSTPFQLQCHLENVHSPYESTTKCKICEWAFESEPLFLQHMKDTHKPGEMPYVCQVCQYRSSLYSEVDVHFRMIHEDTRHLLCPYCLKVFKNGNAFQQHYMR

SEQ ID NO: 4407 - protein, 80 aa, Synthetic construct
DTHKPGEMPYVCQVCQYRSSLYSEVDVHFRMIHEDTRHLLCPYCLKVFKNGNAFQQHYMRHQKRNVYHCNKCRLQFLFAK

SEQ ID NO: 4408 - protein, 130 aa, Synthetic construct
PDFPNHFPTYVHCSLCRYSTCCSRAYANHMINNHVPRKSPKYLALFKNSVSGIKLACTSCTFVTSVGDAMAKHLVFNPSHRSSSILPRGLTWIAHSRHGQTRDRVHDRNVKNMYPPPSFPTNKAATVKSA

SEQ ID NO: 4409 - protein, 80 aa, Synthetic construct
FLDTEVLSSDDRKENALQTVGTGEPWCDVVLAILADGTVLPTLVFYRGQMDQPANMPDSILLEAKESGYSDDEIMELWST

SEQ ID NO: 4410 - protein, 80 aa, Synthetic construct
SEPLFLQHMKDTHKPGEMPYVCQVCQYRSSLYSEVDVHFRMIHEDTRHLLCPYCLKVFKNGNAFQQHYMRHQKRNVYHCN

SEQ ID NO: 4411 - protein, 80 aa, Synthetic construct
DKIEHKLQHHKTFRKPKQLEGLKPGTKVTIRASRGQPRTVPVSSNDTPPSALQEAAPLTSSMDPLPVFLYPPVQRSIQKR

SEQ ID NO: 4412 - protein, 80 aa, Synthetic construct
FSVSPTGPSTKIKAEDPSGDSAPAAPLPPQPAQPHLPQAQLMLTGSQLAGDIQQLLQLQQLVLVPGHHLQPPAQFLLPQA

SEQ ID NO: 4413 - protein, 120 aa, Synthetic construct
VNLESMHTDIKMSGDVADSTDARSTLSQVEPGNDRNGLDFNRQIKTEDLSDSLQQTLSHRPCHLSQGPAMMSGNQMSGLNASPCQDMASLHPLQQLVLVPGHLQSVSQFLLSQTQPGQQG

SEQ ID NO: 4414 - protein, 80 aa, Synthetic construct
NDFSQTTISRFEALNLSFKNMCKLKPLLEKWLNDAESSPSDPSVSTPSSYPSLSEVFGRKRKKRTSIETNIRLTLEKRFQ

SEQ ID NO: 4415 - protein, 80 aa, Synthetic construct
TQADVGLALGTLYGNVFSQTTICRFEALQLSFKNMCKLKPLLNKWLEETDSSSGSPTNLDKIAAQGRKRKKRTSIEVGVK

SEQ ID NO: 4416 - protein, 80 aa, Synthetic construct
YLQGVPSNGHPLGHHWVTSLSDGGPWSSTLATSPLDQQDVKPGREDLQLGAIIHHRSPHVAHHSPHTNHPNAWGASPAPN

SEQ ID NO: 4417 - protein, 80 aa, Synthetic construct
ATSPLDQQDVKPGREDLQLGAIIHHRSPHVAHHSPHTNHPNAWGASPAPNPSITSSGQPLNVYSQPGFTVSGMLEHGGLT

SEQ ID NO: 4418 - protein, 80 aa, Synthetic construct
QADVGLALGTLYGNVFSQTTICRFEALQLSFKNMCKLKPLLNKWLEEADSSTGSPTSIDKIAAQGRKRKKRTSIEVSVKG

SEQ ID NO: 4419 - protein, 80 aa, Synthetic construct
GVESNSDGASPEPCTVTPGAVKLEKEKLEQNPEESQDIKALQKELEQFAKLLKQKRITLGYTQADVGLTLGVLFGKVFSQ

SEQ ID NO: 4420 - protein, 80 aa, Synthetic construct; identical to SEQ ID NO: 180

SEQ ID NO: 4421 - protein, 80 aa, Synthetic construct; identical to SEQ ID NO: 706

SEQ ID NO: 4422 - protein, 80 aa, Synthetic construct
GVESNSNGASPEPCTVPPGAVKLEKEKLEQNPEKSQDIKALQKELEQFAKLLKQKRITLGYTQADVGLILGVLFGKVFSQ

SEQ ID NO: 4423 - protein, 100 aa, Synthetic construct
APSQPQASQTLTPLAVQAAPQVLTQENLATVLTGVMVPAGAVTQPLLIPISIAGQVAGQQGLAVWTIPTATVAALPGLTAASPTGGVFKPPLAGLQAAAV

SEQ ID NO: 4424 - protein, 80 aa, Synthetic construct
TYPVVPGSVDESPSGALNIECRICGDKASGYHYGVHACEGCKGFFRRTIRLKLVYDKCDRSCKIQKKNRNKCQYCRFHKC

SEQ ID NO: 4425 - protein, 80 aa, Synthetic construct
YHYGVHACEGCKGFFRRTIRLKLVYDKCDRSCKIQKKNRNKCQYCRFHKCLSVGMSHNAIRFGRMPRSEKAKLKAEILTC

SEQ ID NO: 4426 - protein, 80 aa, Synthetic construct
CRICGDKASGYHYGVHACEGCKGFFRRTIRLKLVYDKCDRSCKIQKKNRNKCQYCRFHKCLSVGMSHNAIRFGRMPRSEK

SEQ ID NO: 4427 - protein, 80 aa, Synthetic construct
SANISQEMTMVDTEMPFWPTNFGISSVDLSVMEDHSHSFDIKPFTTVDFSSISTPHYEDIPFTRTDPVVADYKYDLKLQE

SEQ ID NO: 4428 - protein, 160 aa, Synthetic construct
NFGISSVDLSVMEDHSHSFDIKPFTTVDFSSISTPHYEDIPFTRTDPVVADYKYDLKLQEYQSAIKVEPASPPYYSEKTQLYNKPHEEPSNSLMAIECRVCGDKASGFHYGVHACEGCKGFFRRTIRLKLIYDRCDLNCRIHKKSRNKCQYCRFQKCLAV

SEQ ID NO: 4429 - protein, 80 aa, Synthetic construct
LAKHLYDSYIKSFPLTKAKARAILTGKTTDKSPFVIYDMNSLMMGEDKIKFKHITPLQEQSKEVAIRIFQGCQFRSVEAV

SEQ ID NO: 4430 - protein, 90 aa, Synthetic construct
ALVGEDQPLCPDLPELDLSELDVNDLDTDSFLGGLKWCSDQSEIISNQYNNEPSNIFEKIDEENEANLLAVLTETLDSLPVDEDGLPSFD

SEQ ID NO: 4431 - protein, 110 aa, Synthetic construct
PSLLKKLLLAPANTQLSYNECSGLSTQNHANHNHRIRTNPAIVKTENSWSNKAKSICQQQKPQRRPCSELLKYLTTNDDPPHTKPTENRNSSRDKCTSKKKSHTQSQSQH

SEQ ID NO: 4432 - protein, 80 aa, Synthetic construct
NEASPSSMPDGTPPPQEAEEPSLLKKLLLAPANTQLSYNECSGLSTQNHANHNHRIRTNPAIVKTENSWSNKAKSICQQQ

SEQ ID NO: 4433 - protein, 80 aa, Synthetic construct
PGSRSSSRSCYYYESSHYRHRTHRNSPLYVRSRSRSPYSRRPRYDSYEEYQHERLKREEYRREYEKRESERAKQRERQRQ

SEQ ID NO: 4434 - protein, 140 aa, Synthetic construct
QEDMQAMVQLIRYMHTYCLPQRKLPPQTPEPLPKACSNPSQQVRSRPWSRHHSKASWAEFSILRELLAQDVLCDVSKPYRLATPVYASLTPRSRPRPPKDSQASPGRPSSVEEVRIAASPKSTGPRPSLRPLRLEVKREV

SEQ ID NO: 4435 - protein, 80 aa, Synthetic construct
TSAQCCLQDRGLQPPCLQSPRLPAKEDKEPGEDCPSPQPAPASPRDSLALGRADPGAPVSQEDMQAMVQLIRYMHTYCLP

SEQ ID NO: 4436 - protein, 80 aa, Synthetic construct
GRVVYIQNLSSDMSSRELKRRFEVFGEIEECEVLTRNRRGEKYGFITYRCSEHAALSLTKGAALRKRNEPSFQLSYGGLR

SEQ ID NO: 4437 - protein, 80 aa, Synthetic construct
SVMIQRVNGSLAVSRALGDFDYKCVHGKGPTEQLVSPEPEVHDIERSEEDDQFIILACDGIWDVMGNEELCDFVRSRLEV

SEQ ID NO: 4438 - protein, 100 aa, Synthetic construct
TEQLVSPEPEVHDIERSEEDDQFIILACDGIWDVMGNEELCDFVRSRLEVTDDLEKVCNEVVDTCLYKGSRDNMSVILICFPNAPKVSPEAVKKEAELDK

SEQ ID NO: 4439 - protein, 80 aa, Synthetic construct
PCNPREKERIQNAGGSVMIQRVNGSLAVSRALGDYDYKCVDGKGPTEQLVSPEPEVYEILRAEEDEFIILACDGIWDVMS

SEQ ID NO: 4440 - protein, 90 aa, Synthetic construct
SPEPEVYEILRAEEDEFIILACDGIWDVMSNEELCEYVKSRLEVSDDLENVCNWVVDTCLHKGSRDNMSIVLVCFSNAPKVSDEAVKKDS

SEQ ID NO: 4441 - protein, 80 aa, Synthetic construct
TAVVGIPHGLEDWSFFAVYDGHAGSRVANYCSTHLLEHITTNEDFRAAGKSGSALELSVENVKNGIRTGFLKIDEYMRNF

SEQ ID NO: 4442 - protein, 110 aa, Synthetic construct
LAMGFLGSRKAPPPLAAALAHEAVSQLLQTDLSEFRKLPREEEEEEEDDDEEEKAPVTLLDAQSLAQSFFNRLWEVAGQWQKQVPLAARASQRQWLVSIHAIRNTRRKME

SEQ ID NO: 4443 - protein, 90 aa, Synthetic construct
ADAASRALTGSEDYLLLACDGFFDVVPHQEVVGLVQSHLTRQQGSGLRVAEELVAAARERGSHDNITVMVVFLRDPQELLEGGNQGEGDP

SEQ ID NO: 4444 - protein, 110 aa, Synthetic construct
DDHEFMVIACDGIWNVMSSQEVVDFIQSKISQRDENGELRLLSSIVEELLDQCLAPDTSGDGTGCDNMTCIIICFKPRNTAELQPESGKRKLEEVLSTEGAEENGNSDKK

SEQ ID NO: 4445 - protein, 80 aa, Synthetic construct; identical to SEQ ID NO: 431

SEQ ID NO: 4446 - protein, 80 aa, Synthetic construct
RALDRLQEVPHEGPMCDLLWSDPDDRGGWGISPRGAGYTFGQDISETFNHANGLTLVSRAHQLVMEGYNWCHDRNVVTIF

SEQ ID NO: 4447 - protein, 80 aa, Synthetic construct
KVRYPDRITLIRGNHESRQITQVYGFYDECLRKYGSVTVWRYCTEIFDYLSLSAIIDGKIFCVHGGLSPSIQTLDQIRTI

SEQ ID NO: 4448 - protein, 80 aa, Synthetic construct
VVSCVYPSSEKNNSNSLNRMNGVMFPGNSPSYTERSNINGPGTPRPLNRPKVSLSAPMTTNGLPESTDSKEANLQQNEEK

SEQ ID NO: 4449 - protein, 80 aa, Synthetic construct
EIVSMLQEDEKFLSEVFAQLTDEATDDDKRRELVNFFKEFCAFSQTLQPQNRDAFFKTLAKLGILPALEIVMGMDDLQVR

SEQ ID NO: 4450 - protein, 110 aa, Synthetic construct
PVGPGSQEHRDSYAYLNASYGTEGLGSYPGYAPLPHLPPAFIPSYNAHYPKFLLPPYGMNCNGLSAVSSMNGINNFGLFPRLCPVYSNLLGGGSLPHPMLNPTSLPSSLP

SEQ ID NO: 4451 - protein, 90 aa, Synthetic construct
QYGHHVYYTTIKNVEPKQELKVWYAASYAEFVNQKIHDISEEERKVLREQEKNWPCYECNRRFISSEQLQQHLNSHDEKLDVFSRTRGRG

SEQ ID NO: 4452 - protein, 80 aa, Synthetic construct
GNCPLTCDLCNKGFISSTSLESHMKLHSDQKTYSCIFCPESFDRLDLLKDHVAIHINDGYFTCPTCKKRFPDFIQVKKHV

SEQ ID NO: 4453 - protein, 90 aa, Synthetic construct
FSGEVQKLSSLVLPAEVIIAQSSIPGEGLGIFSKTWIKAGTEMGPFTGRVIAPEHVDICKNNNLMWEVFNEDGTVRYFIDASQEDHRSWM

SEQ ID NO: 4454 - protein, 80 aa, Synthetic construct
EQNLEVVQIGTSIFYKAIEMIPPDQELLVWYGNSHNTFLGIPGVPGLEEDQKKNKHEDFHPADSAAGPAGRMRCVICHRG

SEQ ID NO: 4455 - protein, 80 aa, Synthetic construct
RAARNSQEQTLEAIADLPGGQIFYRALRDVQPGEELTVWYSNSLAQWFDIPTTATPTHDEKGEERYICWYCWRTFRYPNS

SEQ ID NO: 4456 - protein, 80 aa, Synthetic construct
QLPPAPGLPLERCALPPLDPGGLKAYPGGECSHLPAVMPAFTVYNGELLYGSPATTAYYPLKLHFGGLLKYPESISYFSG

SEQ ID NO: 4457 - protein, 100 aa, Synthetic construct
SPQNLAAYYTPFPSYGHYRNSLATVEEDFQPFRQLEAAASAAPAMPPFPFRMAPPLLSPGLGLQREPLYDLPWYSKLPPWYPIPHVPREVPPFLSSSHEY

SEQ ID NO: 4458 - protein, 90 aa, Synthetic construct
PKPSNQEGKSPARFQFTEEDLHFVLYGVTPSLEHPASLHHAISGLLVPPDSSGSDSLPQTLDKDSLQLPEGLCLMQTVFGEVPHFGVFCS

SEQ ID NO: 4459 - protein, 80 aa, Synthetic construct
RFPKEQNLVAVQCQGHIFYESCKEIHQNQELLVWYGDCYEKFLDIPVSLQVTEPGKQPSGPSEESAEGYRCERCGKVFTY

SEQ ID NO: 4460 - protein, 80 aa, Synthetic construct
VTEPGKQPSGPSEESAEGYRCERCGKVFTYKYYRDKHLKYTPCVDKGDRKFPCSLCKRSFEKRDRLRIHILHVHEKHRPH

SEQ ID NO: 4461 - protein, 90 aa, Synthetic construct
IANGGGTGAGKAECGYETESHLLEPHEIPLNVNTHKFSDCEFPYEFCTVCFSPFKLLGMSGVEGVWNQHSRSASMHTFLNHSATGIREAG

SEQ ID NO: 4462 - protein, 80 aa, Synthetic construct
EFPYEFCTVCFSPFKLLGMSGVEGVWNQHSRSASMHTFLNHSATGIREAGCRKDMPVSEMAEDGSEEIMFIWCEDCSQYH

SEQ ID NO: 4463 - protein, 80 aa, Synthetic construct
FRFFSTNSNLSKHKKKHGDKKFACEVCSKMFYRKDVMLDHQRRHLEGVRRVKREDLEAGGENLVRYKKEPSGCPVCGKVF

SEQ ID NO: 4464 - protein, 80 aa, Synthetic construct
FYRKDVMLDHQRRHLEGVRRVKREDLEAGGENLVRYKKEPSGCPVCGKVFSCRSNMNKHLLTHGDKKYTCEICGRKFFRV

SEQ ID NO: 4465 - protein, 130 aa, Synthetic construct
LLTATGAAGDSIKAIASIAEKYFGPGFMGMQEKKLGSLPYHSAFPFQFLPNFPHSLYPFTDRALAHNLLVKAEPKSPRDALKVGGPSAECPFDLTTKPKDVKPILPMPKGPSAPASGEEQPLDLSIGSRA

SEQ ID NO: 4466 - protein, 110 aa, Synthetic construct
KAEPKSPRDALKVGGPSAECPFDLTTKPKDVKPILPMPKGPSAPASGEEQPLDLSIGSRARASQNGGGREPRKNHVYGERKLGAGEGLPQVCPARMPQQPPLHYAKPSPF

SEQ ID NO: 4467 - protein, 80 aa, Synthetic construct
QAGAGSWLKYIRVACSCDDQNLTMCQISEQIYYKVIKDIEPGEELLVHVKEGVYPLGTVPPGLDEEPTFRCDECDELFQS

SEQ ID NO: 4468 - protein, 80 aa, Synthetic construct
QIPRTKEEANGDVFETFMFPCQHCERKFTTKQGLERHMHIHISTVNHAFKCKYCGKAFGTQINRRRHERRHEAGLKRKPS

SEQ ID NO: 4469 - protein, 130 aa, Synthetic construct
SADLYGINCLLTPVTVEITQNIKTTQVPVTEDLPKEPLGSTNSEAKKRRTASPPALPKIKAETDSDPMVPSCSLSLPLSISTTEAVSFHKEKSVYLSSKLKQLLQTQDKLTPAGISATEIAKLGPVCVSA

SEQ ID NO: 4470 - protein, 90 aa, Synthetic construct
SSVVSSGDNLEASLPMISFKQEELENEGLKPREEPQSAAEQDVVVQETFNKNFVCNVCESPFLSIKDLTKHLSIHAEEWPFKCEFCVQLF

SEQ ID NO: 4471 - protein, 80 aa, Synthetic construct
NQHYPSFKPPPFQYHHRNPMGIGVTATNFTTHNIPQTFTTAIRCTKCGKGVDNMPELHKHILACASASDKKRYTPKKNPV

SEQ ID NO: 4472 - protein, 80 aa, Synthetic construct
TEPEEEGEADDVYIMDISSNISENLNYYIDGKIQTNNNTSNCDVIEMESASADLYGINCLLTPVTVEITQNIKTTQVPVT

SEQ ID NO: 4473 - protein, 80 aa, Synthetic construct
KSKLESHSDSPAWSLSGRDERETVSPPCFDEYKMSKEWTASSAFSSVCNQQPLDLSSGVKQKAEGTGKTPVQWESVLDLS

SEQ ID NO: 4474 - protein, 80 aa, Synthetic construct
QPLDLSSGVKQKAEGTGKTPVQWESVLDLSVHKKHCSDSEGKEFKESHSVQPTCSAVKKRKPTTCMLQKVLLNEYNGIDL

SEQ ID NO: 4475 - protein, 80 aa, Synthetic construct
FKCEFCVQLFKDKTDLSEHRFLLHGVGNIFVCSVCKKEFAFLCNLQQHQRDLHPDKVCTHHEFESGTLRPQNFTDPSKAH

SEQ ID NO: 4476 - protein, 80 aa, Synthetic construct
KARNREEQNLVAYPHDGKIFFCTSQDIPPENELLFYYSRDYAQQIGVPEHPDVHLCNCGKECNSYTEFKAHLTSHIHNHL

SEQ ID NO: 4477 - protein, 120 aa, Synthetic construct
GEKFGPFAGEKRMPEDLDENMDYRLMWEVRGSKGEVLYILDATNPRHSNWLRFVHEAPSQEQKNLAAIQEGENIFYLAVEDIETDTELLIGYLDSDMEAEEEEQQIMTVIKEGEVENSRR

SEQ ID NO: 4478 - protein, 80 aa, Synthetic construct
QALQRHVLQCTAKSSLKESSRSFQCSVCNSSFSSASSFEQHQETCRGDARFVCKADSCGKRLKSKDALKRHQENVHTGDP

SEQ ID NO: 4479 - protein, 80 aa, Synthetic construct
RLKSKDALKRHQENVHTGDPKKKLICSVCNKKCSSASSLQEHRKIHEIFDCQECMKKFISANQLKRHMITHSEKRPYNCE

SEQ ID NO: 4480 - protein, 80 aa, Synthetic construct
GKGFAHRNVYKNHKKTHSEERPFQCEECKALFRTPFSLQRHLLIHNSERTFKCHHCDATFKRKDTLNVHVQVVHERHKKY

SEQ ID NO: 4481 - protein, 80 aa, Synthetic construct
RPFQCEECKALFRTPFSLQRHLLIHNSERTFKCHHCDATFKRKDTLNVHVQVVHERHKKYRCELCNKAFVTPSVLRSHKK

SEQ ID NO: 4482 - protein, 90 aa, Synthetic construct
CEKGFSKNDGLKMHIRTHTREKPYKCSECSKAFSQKRGLDEHKRTHTGEKPFQCDVCDLAFSLKKMLIRHKMTHNPNRPLAECQFCHKKF

SEQ ID NO: 4483 - protein, 80 aa, Synthetic construct
GAPRFRCSAEELDYYLYGQQRMEIIPLNQHTSDPNNRCDMCADNRNGECPMHGPLHSLRRLVGTSSAAAAAPPPELPEWL

SEQ ID NO: 4484 - protein, 90 aa, Synthetic construct
LVGTSSAAAAAPPPELPEWLRDLPREVCLCTSTVPGLAYGICAAQRIQQGTWIGPFQGVLLPPEKVQAGAVRNTQHLWEIYDQDGTLQHF

SEQ ID NO: 4485 - protein, 80 aa, Synthetic construct
PTTQQRSVVFPQTPCSRNFSLLDKSGPIESGFNQINVKNQRVLASPTSTSQLHSEFSDWHLWKCGQCFKTFTQRILLQMH

SEQ ID NO: 4486 - protein, 80 aa, Synthetic construct
VCTQNPDRPYQCGHCSQSFSQPSELRNHVVTHSSDRPFKCGYCGRAFAGATTLNNHIRTHTGEKPFKCERCERSFTQATQ

SEQ ID NO: 4487 - protein, 80 aa, Synthetic construct
YGQELGIRSSIEPAESLGQAVNCWSGMGMSMARNWASSGAASGRKSSWQGENQSQRSIHVPHAVWPFQVKNFSVNMWNAI

SEQ ID NO: 4488 - protein, 90 aa, Synthetic construct
HPERVPFLVAETPRARHTLDELNPQKSKHQGVRKAKWHLGIRSQSRPNDIMAEVCRAIKQLDYEWKVVNPYYLRVRRKNPVTSTYSKMSL

SEQ ID NO: 4489 - protein, 80 aa, Synthetic construct
PPLIADSPKARCPLDALNTTKPKSLAVKKAKWHLGIRSQSKPYDIMAEVYRAMKQLDFEWKVVNAYHLRVRRKNPVTGNY

SEQ ID NO: 4490 - protein, 140 aa, Synthetic construct
LERHGGHKTPRRDSSGGTKDGDRPKILMDSPEDADLFHSEEIKAPEKEEFLAWQHDLEVNDKAPAQARPTVFRWTGGGKEVYLSGSFNNWSKLPLTRSHNNFVAILDLPEGEHQYKFFVDGQWTHDPSEPIVTSQLGTVN

SEQ ID NO: 4491 - protein, 140 aa, Synthetic construct
GERHGAKAARSEGAGGHAPGKEHKIMVGSTDDPSVFSLPDSKLPGDKEFVSWQQDLEDSVKPTQQARPTVIRWSEGGKEVFISGSFNNWSTKIPLIKSHNDFVAILDLPEGEHQYKFFVDGQWVHDPSEPVVTSQLGTIN

SEQ ID NO: 4492 - protein, 80 aa, Synthetic construct
YANIAMVRTTTPVYVALGIFVQHRVSALPVVDEKGRVVDIYSKFDVINLAAEKTYNNLDVSVTKALQHRSHYFEGVLKCY

SEQ ID NO: 4493 - protein, 80 aa, Synthetic construct
LVNISPDASLFDAVYSLIKNKIHRLPVIDPISGNALYILTHKRILKFLQLFMSDMPKPAFMKQNLDELGIGTYHNIAFIH

SEQ ID NO: 4494 - protein, 80 aa, Synthetic construct
SSPSTPTQVTKQHTFPLESYKHEPERLENRIYASSSPPDTGQRFCPSSFQSPTRPPLASPTHYAPSKAAALAAALGPAEA

SEQ ID NO: 4495 - protein, 80 aa, Synthetic construct
ISGNALYILTHKRILKFLQLFMSDMPKPAFMKQNLDELGIGTYHNIAFIHPDTPIIKALNIFVERRISALPVVDESGKVV

SEQ ID NO: 4496 - protein, 80 aa, Synthetic construct
GKQGFQCQVCCFVVHKRCHEFVTFSCPGADKGPDTDDPRSKHKFKIHTYGSPTFCDHCGSLLYGLIHQGMKCDTCDMNVH

SEQ ID NO: 4497 - protein, 80 aa, Synthetic construct
QCNAAIHKKCIDKIIGRCTGTAANSRDTIFQKERFNIDMPHRFKVHNYMSPTFCDHCGSLLWGLVKQGLKCEDCGMNVHH

SEQ ID NO: 4498 - protein, 80 aa, Synthetic construct
KKDVVLIDDDVECTMVEKRVLTLAAENPFLTHLICTFQTKDHLFFVMEFLNGGDLMYHIQDKGRFELYRATFYAAEIMCG

SEQ ID NO: 4499 - protein, 80 aa, Synthetic construct
DHAQTVIPYNPSSHESLDQVGEEKEAMNTRESGKASSSLGLQDFDLLRVIGRGSYAKVLLVRLKKTDRIYAMKVVKKELV

SEQ ID NO: 4500 - protein, 80 aa, Synthetic construct
EISLALNYLHERGIIYRDLKLDNVLLDSEGHIKLTDYGMCKEGLRPGDTTSTFCGTPNYIAPEILRGEDYGFSVDWWALG

SEQ ID NO: 4501 - protein, 80 aa, Synthetic construct; identical to SEQ ID NO: 929

SEQ ID NO: 4502 - protein, 90 aa, Synthetic construct
RLARQCRDEGLIIHVFPSTPEQPGLPCPGEDKSIYRRGARRWRKLYRANGHLFQAKRFNRRAYCGQCSERIWGLARQGYRCINCKLLVHK

SEQ ID NO: 4503 - protein, 80 aa, Synthetic construct
PVLLLQDSSGDYSLAHVREMACSIVDQKFPECGFYGMYDKILLFRHDPTSENILQLVKAASDIQEGDLIEVVLSASATFE

SEQ ID NO: 4504 - protein, 80 aa, Synthetic construct
LLQKSPSESFIGREKRSNSQSYIGRPIHLDKILMSKVKVPHTFVIHSYTRPTVCQYCKKLLKGLFRQGLQCKDCRFNCHK

SEQ ID NO: 4505 - protein, 90 aa, Synthetic construct
MPVIPKGSSVGTGTNLHRDISVSISVSNCQIQENVDISTVYQIFPDEVLGSGQFGIVYGGKHRKTGRDVAIKIIDKLRFPTKQESQLRNE

SEQ ID NO: 4506 - protein, 80 aa, Synthetic construct
KIPNNCSGVRRRRLSNVSLTGVSTIRTSSAELSTSAPDEPLLQKSPSESFIGREKRSNSQSYIGRPIHLDKILMSKVKVP

SEQ ID NO: 4507 - protein, 80 aa, Synthetic construct
PPNPWKEISHEAIDLINNLLQVKMRKRYSVDKTLSHPWLQDYQTWLDLRELECKIGERYITHESDDLRWEKYAGEQGLQY

SEQ ID NO: 4508 - protein, 80 aa, Synthetic construct
IGLTREFVLLPAASELAHVKQLACSIVDQKFPECGFYGLYDKILLFKHDPTSANLLQLVRSSGDIQEGDLVEVVLSASAT

SEQ ID NO: 4509 - protein, 100 aa, Synthetic construct
TSESLPCTAEELSRSTTELLPRRPPSSSSSSSASSYTGRPIELDKMLLSKVKVPHTFLIHSYTRPTVCQACKKLLKGLFRQGLQCKDCKFNCHKRCATRV

SEQ ID NO: 4510 - protein, 140 aa, Synthetic construct
MYVSLSGTFPFNEDEDINDQIQNAAFMYPASPWSHISAGAIDLINNLLQVKMRKRYSVDKSLSHPWLQEYQTWLDLRELEGKMGERYITHESDDARWEQFAAEHPLPGSGLPTDRDLGGACPPQDHDMQGQGLAERISVL

SEQ ID NO: 4511 - protein, 80 aa, Synthetic construct
CSKPVVLPKGPESESEDHRASGEVRTGKWKVPTYKDYVDLFRHLLSSDQMMDSILADEAFFSVNSSSESLNHLLYDEFVK

SEQ ID NO: 4512 - protein, 90 aa, Synthetic construct
FGGLCERLVSLLLNPAVLSTASLGSSQGSVIHFSHGEYFYSLFSETINTELLKNLDLAVLELMQSSVDNTKMVSAVLNGMLDQSFRERAN

SEQ ID NO: 4513 - protein, 90 aa, Synthetic construct
ARSDYSEAAKQYDEALNKQDWVDGEPTEAEKDFWELASLDCYNHLAEWKSLEYCSTASIDSENPPDLNKIWSEPFYQETYLPYMIRSKLK

SEQ ID NO: 4514 - protein, 90 aa, Synthetic construct
NKDSKPPGNLKECSPWMSDFKVEFLRNELEIPGQYDGRGKPLPEYHVRIAGFDERVTVMASLRRPKRIIIRGHDEREHPFLVKGGEDLRQ

SEQ ID NO: 4515 - protein, 80 aa, Synthetic construct
RCKQMFLTQTDTGDDRVYQMPSFLQSVASVLLYLDTVPEVYTPVLEHLVVMQIDSFPQYSPKMQLVCCRAIVKVFLALAA

SEQ ID NO: 4516 - protein, 80 aa, Synthetic construct
PESESEDHRASGEVRTGKWKVPTYKDYVDLFRHLLSSDQMMDSILADEAFFSVNSSSESLNHLLYDEFVKSVLKIVEKLD

SEQ ID NO: 4517 - protein, 80 aa, Synthetic construct
ACLIKEVDIYTVKVEDLTFTSPFCLQVKRNDYVHALVAYFNIEFTRCHKRTGFSTSPESPYTHWKQTVFYMEDYLTVKTG

SEQ ID NO: 4518 - protein, 90 aa, Synthetic construct; identical to SEQ ID NO: 931

SEQ ID NO: 4519 - protein, 80 aa, Synthetic construct
VGCGTGILSMFAAKAGAKKVLGVDQSEILYQAMDIIRLNKLEDTITLIKGKIEEVHLPVEKVDVIISEWMGYFLLFESML

SEQ ID NO: 4520 - protein, 100 aa, Synthetic construct
LCMPVFHPRFKREFIQEPAKNRPGPQTRSDLLLSGRDWNTLIVGKLSPWIRPDSKVEKIRRNSEAAMLQELNFGAYLGLPAFLLPLNQEDNTNLARVLTN

SEQ ID NO: 4521 - protein, 90 aa, Synthetic construct
RPDSKVEKIRRNSEAAMLQELNFGAYLGLPAFLLPLNQEDNTNLARVLTNHIHTGHHSSMFWMRVPLVAPEDLRDDIIENAPTTHTEEYS

SEQ ID NO: 4522 - protein, 90 aa, Synthetic construct
HHSEKEFCSYLQYLEYLSQNRPPPNAYELFAKGYEDYLQSPLQPLMDNLESQTYEVFEKDPIKYSQYQQAIYKCLLDRVPEEEKDTNVQV

SEQ ID NO: 4523 - protein, 80 aa, Synthetic construct
QRLIFRLLKLEVQFIITGTNHHSEKEFCSYLQYLEYLSQNRPPPNAYELFAKGYEDYLQSPLQPLMDNLESQTYEVFEKD

SEQ ID NO: 4524 - protein, 80 aa, Synthetic construct
VEASAIWQQAREVVRFNGLEDRVHVLPGPVETVELPEQVDAIVSEWMGYGLLHESMLSSVLHARTKWLKEGGLLLPASAE

SEQ ID NO: 4525 - protein, 80 aa, Synthetic construct
AQAGARRVYAVEASAIWQQAREVVRFNGLEDRVHVLPGPVETVELPEQVDAIVSEWMGYGLLHESMLSSVLHARTKWLKE

SEQ ID NO: 4526 - protein, 100 aa, Synthetic construct
AHSDPEEMQWRDHWMQCVYFLPQEEPVVQGSALYLVAHHDDYCVWYSLQRTSPEKNERVRQMRPVCDCQAHLLWNRPRFGEINDQDRTDRYVQALRTVLK

SEQ ID NO: 4527 - protein, 80 aa, Synthetic construct
PDSVCLCVSDGSLLSVLAHHLGVEQVFTVESSAASHKLLRKIFKANHLEDKINIIEKRPELLTNEDLQGRKVSLLLGEPF

SEQ ID NO: 4528 - protein, 80 aa, Synthetic construct
GIRAAVSRVKDRGQKALVLDIGTGTGLLSMMAVTAGADFCYAIEVFKPMADAAVKIVEKNGFSDKIKVINKHSTEVTVGP

SEQ ID NO: 4529 - protein, 80 aa, Synthetic construct
KDKVVLDVGSGTGILSMFAAKAGAKKVFGIECSSISDYSEKIIKANHLDNIITIFKGKVEEVELPVEKVDIIISEWMGYC

SEQ ID NO: 4530 - protein, 90 aa, Synthetic construct
GRSRFSPQGGQRGRPHSRRRHRTTFSPVQLEQLESAFGRNQYPDIWARESLARDTGLSEARIQVWFQNRRAKQRKQERSLLQPLAHLSPA

SEQ ID NO: 4531 - protein, 90 aa, Synthetic construct
VALRGNENEREMAPQSVSPRESYRENKRKQKLPQQQQQSFQQLVSARKEQKREERRQLKQQLEDMQKQLRQLQEKFYQIYDSTDSENDED

SEQ ID NO: 4532 - protein, 90 aa, Synthetic construct
KLPQQQQQSFQQLVSARKEQKREERRQLKQQLEDMQKQLRQLQEKFYQIYDSTDSENDEDGNLSEDSMRSEILDARAQDSVGRSDNEMCE

SEQ ID NO: 4533 - protein, 90 aa, Synthetic construct
VGRSDNEMCELDPGQFIDRARALIREQEMAENKPKREGNNKERDHGPNSLQPEGKHLAETLKQELNTAMSQVVDTVVKVFSAKPSRQVPQ

SEQ ID NO: 4534 - protein, 100 aa, Synthetic construct
ENKPKREGNNKERDHGPNSLQPEGKHLAETLKQELNTAMSQVVDTVVKVFSAKPSRQVPQVFPPLQIPQARFAVNGENHNFHTANQRLQCFGDVIIPNPL

SEQ ID NO: 4535 - protein, 90 aa, Synthetic construct
TSLRTKMSSHHLSHHPCSPAHPPSTAEGLSLSLIKSECGDLQDMSEISPYSGSAMQEGLSPNHLKKAKLMFFYTRYPSSNMLKTYFSDVK

SEQ ID NO: 4536 - protein, 130 aa, Synthetic construct
PLSAKQGNGCGPRPWVVDGDHQQGTSKDLSGAEKHQESEKPSFLPSGAPASLEILRKELTRAVSQAVDSVLQKVLLDPPGHLTQLGRSFQGQVAEGRSEPSPPVGGACKDPLALAALPRRVQLQAGVPVG

SEQ ID NO: 4537 - protein, 90 aa, Synthetic construct
EKYIAENGTDPINNQPLSEEQLIDIKVAHPIRPKPPSATSIPAILKALQDEWDAVMLHSFTLRQQLQTTRQELSHALYQHDAACRVIARL

SEQ ID NO: 4538 - protein, 80 aa, Synthetic construct
PSDTNKILTGGADKNVVVFDKSSEQILATLKGHTKKVTSVVFHPSQDLVFSASPDATIRIWSVPNASCVQVVRAHESAVT

SEQ ID NO: 4539 - protein, 80 aa, Synthetic construct
VFHPSQDLVFSASPDATIRIWSVPNASCVQVVRAHESAVTGLSLHATGDYLLSSSDDQYWAFSDIQTGRVLTKVTDETSG

SEQ ID NO: 4540 - protein, 80 aa, Synthetic construct
ERTNVANFPGHSGPITSIAFSENGYYLATAADDSSVKLWDLRKLKNFKTLQLDNNFEVKSLIFDQSGTYLALGGTDVQIY

SEQ ID NO: 4541 - protein, 90 aa, Synthetic construct
RAQMAKRQKAHEEANAARKLTAEQRKVKKIKKLKEDISQGVHISVYRVRNLSNPAKKFKIEANAGQLYLTGVVVLHKDVNVVVVEGGPKA

SEQ ID NO: 4542 - protein, 100 aa, Synthetic construct
KKLKEDISQGVHISVYRVRNLSNPAKKFKIEANAGQLYLTGVVVLHKDVNVVVVEGGPKAQKKFKRLMLHRIKWDEQTSNTKGDDDEESDEEAVKKTNKC

SEQ ID NO: 4543 - protein, 80 aa, Synthetic construct
PPEPKVRISNLMRVLGTEAVQDPTKVEAHVRAQMAKRQKAHEEANAARKLTAEQRKVKKIKKLKEDISQGVHISVYRVRN

SEQ ID NO: 4544 - protein, 80 aa, Synthetic construct
GVVVLHKDVNVVVVEGGPKAQKKFKRLMLHRIKWDEQTSNTKGDDDEESDEEAVKKTNKCVLVWEGTAKDRSFGEMKFKQ

SEQ ID NO: 4545 - protein, 80 aa, Synthetic construct
MSLADELLADLEEAAEEEEGGSYGEEEEEPAIEDVQEETQLDLSGDSVKTIAKLWDSKMFAEIMMKIEEYISKQAKASEV

SEQ ID NO: 4546 - protein, 80 aa, Synthetic construct
VEIENELNIIHKFIRDKYSKRFPELESLVPNALDYIRTVKELGNSLDKCKNNENLQQILTNATIMVVSVTASTTQGQQLS

SEQ ID NO: 4547 - protein, 80 aa, Synthetic construct
RSPRRSLSPRRSPRRSRSRSHHREGHGSSSFDRELEREKERQRLEREAKEREKERRRSRSIDRGLERRRSRSRERHRSRS

SEQ ID NO: 4548 - protein, 80 aa, Synthetic construct
RHDNIKPSDEVYRRGLQAIPLSVDLWIHYINFLKETLDPGDPETNNTIRGTFEHAVLAAGTDFRSDRLWEMYINWENEQG

SEQ ID NO: 4549 - protein, 80 aa, Synthetic construct
LNLLEMEYSGDLKQNEENILNCFDKAVHGSLPIKMRITFSQRKVEFLEDFGSDVNKLLNAYDEHQTLLKEQDSLKRKAEN

SEQ ID NO: 4550 - protein, 90 aa, Synthetic construct
HIATGSGDNTCKVWDLRQRRCVYTIPAHQNLVTGVKFEPIHGNFLLTGAYDNTAKIWTHPGWSPLKTLAGHEGKVMGLDISSDGQLIATC

SEQ ID NO: 4551 - protein, 80 aa, Synthetic construct
DALICFEEHIRALEREEEEERERARLRERRQQRKNREAFQTFLDELHETGQLHSMSTWMELYPAVSTDVRFANMLGQPGS

SEQ ID NO: 4552 - protein, 90 aa, Synthetic construct
SEHVAPDGRIYYYNADDKQSVWEKPSVLKSKAELLLSQCPWKEYKSDTGKPYYYNNQSKESRWTRPKDLDDLEVLVKQEAAGKQQQQLPQ

SEQ ID NO: 4553 - protein, 80 aa, Synthetic construct
SSGQHQPQQEEEESKPEPERSGLSWSNREKAKQAFKELLRDKAVPSNASWEQAMKMVVTDPRYSALPKLSEKKQAFNAYK

SEQ ID NO: 4554 - protein, 80 aa, Synthetic construct
ARLRAKEAKQTLQHFLEQHERMTSTTRYRRAEQTFGELEVWAVVPERDRKEVYDDVLFFLAKKEKEQAKQLRRRNIQALK

SEQ ID NO: 4555 - protein, 80 aa, Synthetic construct
DHQLQNMDKEDALICFEEHIRALEREEEEERERARLRERRQQRKNREAFQTFLDELHETGQLHSMSTWMELYPAVSTDVR

SEQ ID NO: 4556 - protein, 80 aa, Synthetic construct
KQRALIKAELDNELMEGKVQSGMGLILQGYESGSEEEGEIHEKARNGNRSSTRSSSTKGKLELVDNKITTKKRSKSRSKE

SEQ ID NO: 4557 - protein, 80 aa, Synthetic construct
WYHTPNVVFIKTEDPDLPAFYFDPLINPISHRHSVKSQEPLPDDDEEFELPEFVEPFLKDTPLYTDNTANGIALLWAPRP

SEQ ID NO: 4558 - protein, 80 aa, Synthetic construct
EVGLQVCRQGYNMLNLLIHRKNLNYLHLDYNFNLKPVKTLTTKERKKSRFGNAFHLCREVLRLTKLVVDSHVQYRLGNVD

SEQ ID NO: 4559 - protein, 80 aa, Synthetic construct
LYSHLVPVYDVEPLEKITDAYLDQYLWYEADKRRLFPPWIKPADTEPPPLLVYKWCQGINNLQDVWETSEGECNVMLESR

SEQ ID NO: 4560 - protein, 90 aa, Synthetic construct
FPPVVFYTPKELGGLGMLSMGHVLIPQSDLRWSKQTDVGITHFRSGMSHEEDQLIPNLYRYIQPWESEFIDSQRVWAEYALKRQEAIAQN

SEQ ID NO: 4561 - protein, 80 aa, Synthetic construct
SAAAAAAEQSSPQLYNFSGAAPGPPPPERALPRQDTVIKHYQRPASAQPPPPPPPAHALQHYLSCGGSYPSMGHRANLAC

SEQ ID NO: 4562 - protein, 130 aa, Synthetic construct
EEAGGTRLEPLKPLKIKLSVPKAGEGLGTSSGDAISGTDHNSLDSSLTREKIEAKIKEVEEKQPEMKSGFMASFLDFLKSGKRHPPLYQAGLTPPLSPPKSVPPSVPARGLQPQPPATPAVPHPPPSGAF

SEQ ID NO: 4563 - protein, 80 aa, Synthetic construct
HLLEPATRDGAPQPPPPPPPPPPPMPLQLEAHLRSHGLEPAAPSPRLRPEESLDPPGAMQELLGALEPLPPAPGDTGVGP

SEQ ID NO: 4564 - protein, 80 aa, Synthetic construct
LALQTGREPPPIWRVQKALLQKFTPEIKDGQRQFCATSNYLGYFGDAKNRYQRLYVKFLENVNKKDYVRVCARKPWHRPP

SEQ ID NO: 4565 - protein, 80 aa, Synthetic construct
RPLRGERATSGRQTRPERSLATGQPATSRLPKARPTKVKAEPPPKKRKKWLKEAGGNATAGGGPPGSSSDSESSPGAPSE

SEQ ID NO: 4566 - protein, 80 aa, Synthetic construct
PKARPTKVKAEPPPKKRKKWLKEAGGNATAGGGPPGSSSDSESSPGAPSEDERAVPGRLLKTRAMREMYRSYVEMLVSTA

SEQ ID NO: 4567 - protein, 110 aa, Synthetic construct
MDLPGDSSPPGQPRLCRQPLTRALWGARSPKRPRLQLPGAPSPLEKASRRVLAVVLEDVMAVHMVPVVPSKQTSIPQHHSYHQDPVHRQPPASPPRQAGWSSQARPPDPL

SEQ ID NO: 4568 - protein, 80 aa, Synthetic construct
HRTSSTLRRRSRTTPGPEEGPSQKVDRAPQPTLVVMLEDIASPRPPAEGFIDETPNFIIPAQRAEPMRIVRQPTPPPGDL

SEQ ID NO: 4569 - protein, 90 aa, Synthetic construct
DQLNSEEKKKRKQRRNRTTFNSSQLQALERVFERTHYPDAFVREDLARRVNLTEARVQVWFQNRRAKFRRNERAMLANKNASLLKSYSGD

SEQ ID NO: 4570 - protein, 90 aa, Synthetic construct
PGRGSAAKRKKKQRRNRTTFNSSQLQALERVFERTHYPDAFVREELARRVNLSEARVQVWFQNRRAKFRRNERAMLASRSASLLKSYSQE

SEQ ID NO: 4571 - protein, 80 aa, Synthetic construct
STSDSEEEGDDQEGEKKRKGGRNFQTAHRRNMLKGQHEKEAADRKRKQEEQMETEQQNKDEGKKPEVKKVEKKRETSMDS

SEQ ID NO: 4572 - protein, 80 aa, Synthetic construct
DAVLLEHFPGGLDAFPSSYFDEDDFFTDQSSRDPLEDGDELLADEQAEVEFLSHQLHEYCYRDGACLLLQPAPPAAPLAL

SEQ ID NO: 4573 - protein, 110 aa, Synthetic construct
SGAAAAAARRRRRVRSEAELQQLRQAANVRERRRMQSINDAFEGLRSHIPTLPYEKRLSKVDTLRLAIGYINFLSELVQADLPLRGGGAGGCGGPGGGGRLGGDSPGSQA

SEQ ID NO: 4574 - protein, 90 aa, Synthetic construct
PQAQHSHYPHYAASATPNQAGGAAEIQELASKRVDIQKKRFYLDVKQSSRGRFLKIAEVWIGRGRQDNIRKSKLTLSLSVAAELKDCLGD

SEQ ID NO: 4575 - protein, 80 aa, Synthetic construct
MMRGTGMIGYFGHSLGQEQTIVLPAQGMIEFRDALVQLIEDYGEGDIEERRGGDDDPLELPEGTSFRVDNKRFYFDVGSN

SEQ ID NO: 4576 - protein, 80 aa, Synthetic construct
LTILVGPNGAGKTTIIECLKYICTGDFPPGTKGNTFVHDPKVAQETDVRAQIRLQFRDVNGELIAVQRSMVCTQKSKKTE

SEQ ID NO: 4577 - protein, 80 aa, Synthetic construct
LKNRLKEIEHNLSKIMKLDNEIKALDSRKKQMEKDNSELEEKMEKVFQGTDEQLNDLYHNHQRTVREKERKLVDCHRELE

SEQ ID NO: 4578 - protein, 90 aa, Synthetic construct
VKSESQSLPKKVSLSSDTTRKPLEIRSPSAESKKPKWVPPAASGGSRSSSSPLVVVSVKSPNQSLRLGLSRLARVKPLHPKPLHPNATST

SEQ ID NO: 4579 - protein, 90 aa, Synthetic construct
FRKPLSQLTNQPPCLDSSQHEAFIRSILSKPFKVPIPNYQGPLGSRALGLKRAGVRRALHDPLEKDALVLYEPPPLSAHDQLKLDKEKLP

SEQ ID NO: 4580 - protein, 90 aa, Synthetic construct
KRAKVVERFNSPSSPDFVFMLSSKAGGCGLNLIGANRLVMFDPDWNPANDEQAMARVWRDGQKKTCYIYRLLSAGTIEEKIFQRQSHKKA

SEQ ID NO: 4581 - protein, 130 aa, Synthetic construct
QEELERRKRLEQQRKDYAAPIPTVPLEFLPEEIALRASDGPQLPPRVLAQEVICLDSSSGSEDEKSSRDEVIELSSGEEDTLHIVDSSESVSEDDEEEEKGGTHVNDVLNQRDALGRVLVNLNHPPEEEN

SEQ ID NO: 4582 - protein, 100 aa, Synthetic construct
LPPPEALPADNKPEEVQPRFFKVHILNDEHKTMASRAKVMADWVSEGGVLLMGYEMYRLLTLKKSFATGRPKKTKKRSHPVIIDLDEEDRQQEFRREFEK

SEQ ID NO: 4583 - protein, 90 aa, Synthetic construct
YPASDQSLTSIPAFSQRNWQPTLKGDEKPVASVRPVQSTPIPMMPRHVPLGGSVSSASSTNPSMNFPINYLQRAGVLVQKVVTTTDIVIP

SEQ ID NO: 4584 - protein, 80 aa, Synthetic construct
PDLIAKVFRIDVKADVDSIHPTEFCHNCWSIMHRKFSSAPCEVYFPRNVTMEWHPHTPSCDICNTARRGLKRKSLQPNLQ

SEQ ID NO: 4585 - protein, 100 aa, Synthetic construct
PLHALRNAEKVLLPGYHHFEWQPPLKNVSSSTDVGIIDGLSGLSSSVDDYPVDTIAKRFRYDSALVSALMDMEEDILEGMRSQDLDDYLNGPFTVVVKES

SEQ ID NO: 4586 - protein, 80 aa, Synthetic construct
SGLSSSVDDYPVDTIAKRFRYDSALVSALMDMEEDILEGMRSQDLDDYLNGPFTVVVKESCDGMGDVSEKHGSGPVVPEK

SEQ ID NO: 4587 - protein, 80 aa, Synthetic construct
GPFTVVVKESCDGMGDVSEKHGSGPVVPEKAVRFSFTIMKITIAHSSQNVKVFEEAKPNSELCCKPLCLMLADESDHETL

SEQ ID NO: 4588 - protein, 80 aa, Synthetic construct
MKPVWRSSCPAKECPESLCQYSFNSQRFAELLSTKFKYRYEGKITNYFHKTLAHVPEIIERDGSIGAWASEGNESGNKLF

SEQ ID NO: 4589 - protein, 90 aa, Synthetic construct
SLEDNKIEIREMETPDWTPDIKHSKIWFGSNMGNGTVFLGIPGDNKQVVSEGFYFYMLKCAEDDTNEEQTTFTNSQTSTEDPGDSTPFED

SEQ ID NO: 4590 - protein, 90 aa, Synthetic construct
EGFYFYMLKCAEDDTNEEQTTFTNSQTSTEDPGDSTPFEDSEEFCFSAEANSFDGDDEFDTYNEDDEEDESETGYWITCCPTCDVDINTW

SEQ ID NO: 4591 - protein, 100 aa, Synthetic construct
DPGDSTPFEDSEEFCFSAEANSFDGDDEFDTYNEDDEEDESETGYWITCCPTCDVDINTWVPFYSTELNKPAMIYCSHGDGHWVHAQCMDLAERTLIHLS

SEQ ID NO: 4592 - protein, 80 aa, Synthetic construct
CPTGVFHLDVKHNHVKLKPTIFSKDSCYLPPLRYPATCTFKGSLESEKHQYIIHGGKTPNNEVSDKIYVMSIVCKNNKKV

SEQ ID NO: 4593 - protein, 90 aa, Synthetic construct
KRMSSPKKAKPTKGNGEPATKLPPPETPDACLKLASRAAFQGAMKTKVLPPRKGRGLKLEAIVQKITSPSLKKFACKAPGASPGNPLSPS

SEQ ID NO: 4594 - protein, 80 aa, Synthetic construct
YGVSSCEGCKGFFRRSIQKNMVYTCHRDKNCIINKVTRNRCQYCRLQKCFEVGMSKEAVRNDRNKKKKEVKEEGSPDSYE

SEQ ID NO: 4595 - protein, 80 aa, Synthetic construct
NDRNKKKKEVKEEGSPDSYELSPQLEELITKVSKAHQETFPSLCQLGKYTTNSSADHRVQLDLGLWDKFSELATKCIIKI

SEQ ID NO: 4596 - protein, 80 aa, Synthetic construct
IERGESFYQDRMNDIVKEFEDRGFVQVDDGRKIVFVPGCSIPLTIVKSDGGYTYDTSDLAAIKQRLFEEKADMIIYVVDN

SEQ ID NO: 4597 - protein, 80 aa, Synthetic construct
NRLNDYIFSFDKMLDDRGNTAAYLLYAFTRIRSIARLANIDEEMLQKAARETKILLDHEKEWKLGRCILRFPEILQKILD

SEQ ID NO: 4598 - protein, 90 aa, Synthetic construct
GEAKLSEEEQPKKKHRRNRTTFTTYQLHELERAFEKSHYPDVYSREELAGKVNLPEVRVQVWFQNRRAKWRRQEKLEVSSMKLQDSPLLS

SEQ ID NO: 4599 - protein, 90 aa, Synthetic construct
EGGGLGPGEEAPKKKHRRNRTTFTTYQLHQLERAFEASHYPDVYSREELAAKVHLPEVRVQVWFQNRRAKWRRQERLESGSGAVAAPRLP

SEQ ID NO: 4600 - protein, 80 aa, Synthetic construct
DAVQTSLMDEGASSEKKRQSSADGSQPPKKKPKTTNIELQGVPNDEVHPLLGVKGDGKSKKKQAGRPKGSKGKEKDSPFK

SEQ ID NO: 4601 - protein, 100 aa, Synthetic construct
MLTNTGKYAIPTIDAEAYAIGKKEKPPFLPEEPSSSSEEDDPIPDELLCLICKDIMTDAVVIPCCGNSYCDECIRTALLESDEHTCPTCHQNDVSPDALI

SEQ ID NO: 4602 - protein, 90 aa, Synthetic construct
ICKDIMTDAVVIPCCGNSYCDECIRTALLESDEHTCPTCHQNDVSPDALIANKFLRQAVNNFKNETGYTKRLRKQLPPPPPPIPPPRPLI

SEQ ID NO: 4603 - protein, 80 aa, Synthetic construct
LGYLVSPPQQIRRGERSCYRSINRGRHHSERSQRTQGPSLPATPVFVPVPPPPLYPPPPHTLPLPPGVPPPQFSPQFPPG

SEQ ID NO: 4604 - protein, 80 aa, Synthetic construct
SINRGRHHSERSQRTQGPSLPATPVFVPVPPPPLYPPPPHTLPLPPGVPPPQFSPQFPPGQPPPAGYSVPPPGFPPAPAN

SEQ ID NO: 4605 - protein, 80 aa, Synthetic construct
PNSADTSSDFKDLWTKLKECHDREVQGLQVKVTKLKQERILDAQRLEEFFTKNQQLREQQKVLHETIKVLEDRLRAGLCD

SEQ ID NO: 4606 - protein, 140 aa, Synthetic construct
TSKNKFRQVTLYEALKTIPKGFSSSRKASDGNCTLPKDSPGEPCSQECIILQPLNKCSPDNKPSLQIKEENAVFKIPLRPRESLETENVLDDIKSAGSHEPIKIQTRSDHGGCELASVLQLNPCRTGKIKSLQNNQDVSF

SEQ ID NO: 4607 - protein, 80 aa, Synthetic construct
KVTKLKQERILDAQRLEEFFTKNQQLREQQKVLHETIKVLEDRLRAGLCDRCAVTEEHMRKKQQEFENIRQQNLKLITEL

SEQ ID NO: 4608 - protein, 80 aa, Synthetic construct
ADLSQYKMDVTVIDTKDGSQSKLGGETVDMDCTLVSETVLLKMKKQEQKGEKSSNEERKMNDSLEDMFDRTTHEEYESCL

SEQ ID NO: 4609 - protein, 110 aa, Synthetic construct
PDEEERARLAGEEEALRQYQQRKQQQQEGNYLQHVQLDQRSLVLNTEPAECPVCYSVLAPGEAVVLRECLHTFCRECLQGTIRNSQEAEVSCPFIDNTYSCSGKLLEREI

SEQ ID NO: 4610 - protein, 80 aa, Synthetic construct
KTPDCKGWCFFEDDVNEFTCPVCFHVNCLLCKAIHEQMNCKEYQEDLALRAQNDVAARQTTEMLKVMLQQGEAMRCPQCQ

SEQ ID NO: 4611 - protein, 80 aa, Synthetic construct
AEYTFYEGMGPVLAPVTPVPVVESLQLNGGGDVAMLELTGQNFTPNLRVWFGDVEAETMYRCGESMLCVVPDISAFREGW

SEQ ID NO: 4612 - protein, 80 aa, Synthetic construct
FPPREGYVRYGSLVQLVCTVTGITLPPMIIRKVAKQCALLDVDEPISQLHKCAFQFPGSPPGGGGTYLCLATEKVVQFQA

SEQ ID NO: 4613 - protein, 80 aa, Synthetic construct
DLQSFYQLHSHYEEEHSGEDRDVKGQIKSLVQKAKKAKDRLLKREGDDRAESGTQGYESFSYGGVDPYMWEPQELGAVRS

SEQ ID NO: 4614 - protein, 80 aa, Synthetic construct
MAAAMDVDTPSGTNSGAGKKRFEVKKWNAVALWAWDIVVDNCAICRNHIMDLCIECQANQASATSEECTVAWGVCNHAFH

SEQ ID NO: 4615 - protein, 80 aa, Synthetic construct
AVALWAWDIVVDNCAICRNHIMDLCIECQANQASATSEECTVAWGVCNHAFHFHCISRWLKTRQVCPLDNREWEFQKYGH

SEQ ID NO: 4616 - protein, 80 aa, Synthetic construct
QTGLGHYNITSSPTKLGGDLAGVNVIQVATYGDCCLAVSADGGLFGWGNSEYLQLASVTDSTQVNVPRCLHFSGVGKVRQ

SEQ ID NO: 4617 - protein, 80 aa, Synthetic construct
IIEQPRQRGMRFRYKCEGRSAGSIPGEHSTDNNRTYPSIQIMNYYGKGKVRITLVTKNDPYKPHPHDLVGKDCRDGYYEA

SEQ ID NO: 4618 - protein, 80 aa, Synthetic construct
NKNCGSVRGGDEIFLLCDKVQKDDIEVRFVLNDWEAKGIFSQADVHRQVAIVFKTPPYCKAITEPVTVKMQLRRPSDQEV

SEQ ID NO: 4619 - protein, 80 aa, Synthetic construct
ELRICRINKESGPCTGGEELYLLCDKVQKEDISVVFSRASWEGRADFSQADVHRQIAIVFKTPPYEDLEIVEPVTVNVFL

SEQ ID NO: 4620 - protein, 80 aa, Synthetic construct
AGSLKNHQEVDMNVVRICFQASYRDQQGQMRRMDPVLSEPVYDKKSTNTSELRICRINKESGPCTGGEELYLLCDKVQKE

SEQ ID NO: 4621 - protein, 90 aa, Synthetic construct
NSPIRSSVDGVQTLAQTNEEKIMDSCNPTSNQVLDTSVAKEKLVRDIKTLVEIKQKFSELARKIKINKDLLMAAGCIKMTNTSYSEPAQN

SEQ ID NO: 4622 - protein, 90 aa, Synthetic construct
GNSNSQNKISNPSQQTALSMVMHNYESSGINITKGTELQIAVVSPLVLSEVKTLSVKGITPAVLPETVYPVIKEGSVCSLQNQLAENAKA

SEQ ID NO: 4623 - protein, 100 aa, Synthetic construct
AVVSPLVLSEVKTLSVKGITPAVLPETVYPVIKEGSVCSLQNQLAENAKATAALKVDVSGPVASTATSTKIFPLTQKEKQNESTNGNSEVTPNVNQGKHN

SEQ ID NO: 4624 - protein, 90 aa, Synthetic construct
NESTNGNSEVTPNVNQGKHNKLESAIHSPMNDQQISQESRNSTVVSSDTLQIDNICSLVEGDTSYNSQIAKIFSSLPLKMVEPQKPSLPN

SEQ ID NO: 4625 - protein, 190 aa, Synthetic construct
VILEKSSLEHATEKSTANDTCSSAAIQEDIYPQEIDASSNYTPQDPARNEIHSDKAPVLYLHDQLSELLKEFPYGIEAVNTREGSVGQQTTYQTSEDQTADKTSSDSKDPADQIQITILSSEQMKEIFPEQDDQPYVVDKLAEPQKEEPITEVVSQCDLQAPAAGQSRDSVILDSEKDDIHCCALGWLSM

SEQ ID NO: 4626 - protein, 80 aa, Synthetic construct
APAAGQSRDSVILDSEKDDIHCCALGWLSMVYEGVPQCQCNSIKNSSSEEEKQKEQCSPLDTNSCKQGERTSDRDVTVVQ

SEQ ID NO: 4627 - protein, 90 aa, Synthetic construct
HSHEGSDLSDNMSEGSDDSGLHGARPVPQESSRKNAKEALAVKAAKGDFVCIFCDRSFRKGKDYSKHLNRHLVNVYYLEEYLEEAAQGQE

SEQ ID NO: 4628 - protein, 120 aa, Synthetic construct
ATQVMGQSSGGGGLFTSSGNIGMALPNDMYDLHDLSKAELAAPQLIMLANVALTGEVNGSCCDYLVGEERQMAELMPVGDNNFSDSEEGEGLEESADIKGEPHGLENMELRSLELSVVEP

SEQ ID NO: 4629 - protein, 80 aa, Synthetic construct
NEKSVKAEKRDVSKEKKPSNNVSVIQVTTRTRKSVTEVKEMDVHTGSNSEKFSKTKKSKRKLEVDSHSLHGPVNDEESST

SEQ ID NO: 4630 - protein, 80 aa, Synthetic construct
QASWVCQCEESVVQRLEQDFKLTLQQQSSLDQWASWLDSVVTQVLKQHAGSPSFPKAARQFLLKWSFYSSMVIRDLTLRS

SEQ ID NO: 4631 - protein, 80 aa, Synthetic construct
ASRTVIHSADITFQMLEDWRNVDLNSITKQTLYTMEDSRDEHRKLITQLYQEFDHLLEEQSPIESYIEWLDTMVDRCVVK

SEQ ID NO: 4632 - protein, 80 aa, Synthetic construct
KTGGRAPPGGAEAGEPTTLLQRLRGTISKAVQNKVEGILQDVQKFSDNDKLYLYLQLPSGPTTGDKSSEPSTLSNEEYMY

SEQ ID NO: 4633 - protein, 80 aa, Synthetic construct
AEAGEPTTLLQRLRGTISKAVQNKVEGILQDVQKFSDNDKLYLYLQLPSGPTTGDKSSEPSTLSNEEYMYAYRWIRNHLE

SEQ ID NO: 4634 - protein, 90 aa, Synthetic construct
RPPSSYGPSLQAQDSHNMQFLNTGSFNFLSNTGAASCQGATLPPNSPNGYYGSNINYPESHRLGSMVNQHVSVISSIRSLPPYSDIHDPL

SEQ ID NO: 4635 - protein, 100 aa, Synthetic construct
TLPPNSPNGYYGSNINYPESHRLGSMVNQHVSVISSIRSLPPYSDIHDPLNILDDSGRKQTSSFYTDTSSPVACRTPVLASSLQTPIPSSSSQCMYGTSN

SEQ ID NO: 4636 - protein, 80 aa, Synthetic construct
LLGKGLLVYPEETVYLAAEGQPGGEQGGGEKGEDPELPGAVKSEMHLNNGNFSSEEEDADNHDSKTKAADQYLSQKKTIT

SEQ ID NO: 4637 - protein, 80 aa, Synthetic construct
GNFEEIQHFLLHFWQGMPDHLLPLLENPVIIDIFCVCDSILYKVLTDVLIPATMQEMPESLLADIRNFAKNWEQWVVSSL

SEQ ID NO: 4638 - protein, 80 aa, Synthetic construct
DQHVVNSMVSDIERVDLNSIGSQALLTISGSTDTESGIYTEHDSITVFQELKDLLKKNATVEAFIEWLDTVVEQRVIKTS

SEQ ID NO: 4639 - protein, 80 aa, Synthetic construct
TDLEKLYLYLQLPSGLSNGEKSDQNAMSSSRAQQMHAFSWIRNTLEEHPETSLPKQEVYDEYKSYCDNLGYHPLSAADFG

SEQ ID NO: 4640 - protein, 150 aa, Synthetic construct
VPASHMSSLNVVKMTTISLTPSNSNTPLKHSASVSSATGTTEESRSVPQIKNGSVVSLQSPGSRSSSAGGTSAVEVKVEPETSSDEHPVQCQENSDEAKAPQTPSALLGQKSNTDGALQKPSNEGVIEIKATKVCDQRTKCKSRCNEMLP

SEQ ID NO: 4641 - protein, 80 aa, Synthetic construct
VSSHIGANQPLNSSALVISDSALEQQTTPSSSPDIKVKLEGSVFLLDSDSKSVGSFNPNGWQQITKDSEFISASCEQQQD

SEQ ID NO: 4642 - protein, 80 aa, Synthetic construct
GTSTGNNQSTITLSVASQNLTFTSSSSPPNGDSINKDPKLCTKSPRKRLSSTLQETQVPPVKKPIVEQLSAATIEGQKQG

SEQ ID NO: 4643 - protein, 80 aa, Synthetic construct
SWHLFHLLLLEYMIHILQSCLEEEEEEEDMGTVKEMLPDDPTLGQPDQALFHSLNSSLSQACASPSMEPLGVMPTHMGQG

SEQ ID NO: 4644 - protein, 80 aa, Synthetic construct
RYPVGVSNMVLRILGFLVDTAMGNKLIQVLLEDETTESAVKLSLPMGQEALITLKDGQQFVIQISDVPQSSEDIYFRENN

SEQ ID NO: 4645 - protein, 80 aa, Synthetic construct
QEQAKKYSCNMMAFLADEYCNYCRDILRNVEDLLTSFWKSLQQDTVMLMSLPDVCQLFKCYDVQLYKGIEDVLLHDFLED

SEQ ID NO: 4646 - protein, 110 aa, Synthetic construct
QPPPEEPAQAAMEGPQPENMQPRTRRTKFTLLQVEELESVFRHTQYPDVPTRRELAENLGVTEDKVRVWFKNKRARCRRHQRELMLANELRADPDDCVYIPDDCVYIVVD

SEQ ID NO: 4647 - protein, 130 aa, Synthetic construct
SMAGSNVYLTPPNSQGFAPHYDDIEAFVLQLEGRKLWRVYRPRVPTEELALTSSPNFSQDDLGEPVLQTVLEPGDLLYFPRGFIHQAECQDGVHSLHLTLSTYQRNTWGDFLEAILPLAVQAAMEENVEF

SEQ ID NO: 4648 - protein, 80 aa, Synthetic construct
RAKDFIHDSLPPVLTDRERALSVYGLPIRWEAGEPVNVGAQLTTETEVHMLQDGIARLVGEGGHLFLYYTVENSRVYHLE

SEQ ID NO: 4649 - protein, 80 aa, Synthetic construct
QLTTETEVHMLQDGIARLVGEGGHLFLYYTVENSRVYHLEEPKCLEIYPQQADAMELLLGSYPEFVRVGDLPCDSVEDQL

SEQ ID NO: 4650 - protein, 80 aa, Synthetic construct
DLGEPVLQTVLEPGDLLYFPRGFIHQAECQDGVHSLHLTLSTYQRNTWGDFLEAILPLAVQAAMEENVEFRRGLPRDFMD

SEQ ID NO: 4651 - protein, 80 aa, Synthetic construct
PPVLTDRERALSVYGLPIRWEAGEPVNVGAQLTTETEVHMLQDGIARLVGEGGHLFLYYTVENSRVYHLEEPKCLEIYPQ

SEQ ID NO: 4652 - protein, 90 aa, Synthetic construct
MPKKAKPTGSGKEEGPAPCKQMKLEAAGGPSALNFDSPSSLFESLISPIKTETFFKEFWEQKPLLIQRDDPALATYYGSLFKLTDLKSLC

SEQ ID NO: 4653 - protein, 100 aa, Synthetic construct
LVGSNVYITPAGSQGLPPHYDDVEVFILQLEGEKHWRLYHPTVPLAREYSVEAEERIGRPVHEFMLKPGDLLYFPRGTIHQADTPAGLAHSTHVTISTYQ

SEQ ID NO: 4654 - protein, 80 aa, Synthetic construct
VHEFMLKPGDLLYFPRGTIHQADTPAGLAHSTHVTISTYQNNSWGDFLLDTISGLVFDTAKEDVELRTGIPRQLLLVEST

SEQ ID NO: 4655 - protein, 80 aa, Synthetic construct
SCFELLLSVSESELPCEVWLPFLQSLQESHDALLEFGNNNLQILVHVTKEGVWKNPVLLKILSQQPVETEEVNKLIAQEG

SEQ ID NO: 4656 - protein, 80 aa, Synthetic construct
SDYDEGKEDKQYRRRDLTDQHKEKRDKKPIGSSERYQRWLQYKFFCLLCKRECIEARILHHSKMHMEDGIYTCPVCIKKF

SEQ ID NO: 4657 - protein, 90 aa, Synthetic construct
HKQKHDDLRYKCELNGCNIVFSDLGQLYHHEAQHFRDASYTCNFLGCKKFYYSKIEYQNHLSMHNVENSNGDIKKSVKLEESATGEKQDC

SEQ ID NO: 4658 - protein, 80 aa, Synthetic construct
YYSKIEYQNHLSMHNVENSNGDIKKSVKLEESATGEKQDCINQPHLLNQTDKSHLPEDLFCAESANSQIDTETAENLKEN

SEQ ID NO: 4659 - protein, 80 aa, Synthetic construct
KEKKAPISFKTRAEALHMCVEHSEHTQYPCMVQGCLSVVKLESSIVRHYKRTHQMSSAYLEQQMENLVVCVKYGTKIKEE

SEQ ID NO: 4660 - protein, 90 aa, Synthetic construct
EQQMENLVVCVKYGTKIKEEPPSEADPCIKKEENRSCESERTEHSHSPGDSSAPIQNTDCCHSSERDGGQKGCIESSSVFDADTLLYRGT

SEQ ID NO: 4661 - protein, 110 aa, Synthetic construct
VVANNMVNDSEPEVDIPHSSSDSTIHENLTAIPPLIVAETTTVPSLENLRVVLDKALTDCGELALKQLHYLRPVVVLERSKFSTPILDLFPTKKTDELCVKTDELCVGSS

SEQ ID NO: 4662 - protein, 80 aa, Synthetic construct
HWPFDPEFWDWKTLKRHCHQLLGQEASDSDDDLSGYEMSINDTDVLESFLSDYDEGKEDKQYRRRDLTDQHKEKRDKKPI

SEQ ID NO: 4663 - protein, 80 aa, Synthetic construct
CIHKTCNSSFTNLKGLIRHYRTVHQYNKEQLCLEKDKARTKRELVKCKKIFACKYKECNKRFLCSKALAKHCSDSHNLDH

SEQ ID NO: 4664 - protein, 90 aa, Synthetic construct
GSGQRPPTIVLDLQVRRVRPGEYRQRDSIASRTRSRSQTPNNTVTYESERGGFRRTFSRSERAGVRTYVSTIRIPIRRILNTGLSETTSV

SEQ ID NO: 4665 - protein, 80 aa, Synthetic construct
SESTSARPSRSERNSTEALTEVPPTRGQRRARSRSPDHRRTRARAERSRSPLHPMSEIPRRSHHSISSQTFEHPLVNETE

SEQ ID NO: 4666 - protein, 80 aa, Synthetic construct
SLVDVSQPAYSQIQKLRGKNTTNDLVTAEAQVTPKPWEAKPSRMLMLQLTDGIVQIQGMEYQPIPILHSDLPPGTKILIY

SEQ ID NO: 4667 - protein, 80 aa, Synthetic construct
SIAMDLYSPPFVYLSVLMASKPKEVTTVKVKAFIVTLTGNLSSSGGIWSITAKVSDGTAYLDVDFVDEILTSLIGFSVPE

SEQ ID NO: 4668 - protein, 90 aa, Synthetic construct
MAGLGLGSAVPVWLAEDDLGCIICQGLLDWPATLPCGHSFCRHCLEALWGARDARRWACPTCRQGAAQQPHLRKNTLLQDLADKYRRAAR

SEQ ID NO: 4669 - protein, 90 aa, Synthetic construct
LADKYRRAAREIQAGSDPAHCPCPGSSSLSSAAARPRRRPELQRVAVEKSITEVAQELTELVEHLVDIVRSLQNQRPLSESGPDNELSIL

SEQ ID NO: 4670 - protein, 80 aa, Synthetic construct
SAAARPRRRPELQRVAVEKSITEVAQELTELVEHLVDIVRSLQNQRPLSESGPDNELSILGKAFSSGVDLSMASPKLVTS

SEQ ID NO: 4671 - protein, 80 aa, Synthetic construct
EILVEPVTLPCNHTLCKPCFQSTVEKASLCCPFCRRRVSSWTRYHTRRNSLVNVELWTIIQKHYPRECKLRASGQESEEV

SEQ ID NO: 4672 - protein, 80 aa, Synthetic construct
ISLGVGEQGADSSIESPMPWLCACGAEWYHEGNVKTRPSNHGKELCVLSHERPKTRVPYSKETAVMPCGRTESGCAPTSG

SEQ ID NO: 4673 - protein, 110 aa, Synthetic construct
MSQAVQTNGTQPLSKTWELSLYELQRTPQEAITDGLEIVVSPRSLHSELMCPICLDMLKNTMTTKECLHRFCADCIITALRSGNKECPTCRKKLVSKRSLRPDPNFDALI

SEQ ID NO: 4674 - protein, 80 aa, Synthetic construct
EKHRTMSQEFSKLQSKVETAESRVSVLESMIDDLQWDIDKIRKREQRLNRHLAEVLERVNSKGYKVYGAGSSLYGGTITI

SEQ ID NO: 4675 - protein, 80 aa, Synthetic construct
DMQEQNIRLMQQLREKDDANFKLMSERIKSNQIHKLLKEEKEELADQVLTLKTQVDAQLQVVRKLEEKEHLLQSNIGTGE

SEQ ID NO: 4676 - protein, 80 aa, Synthetic construct
NQIHKLLKEEKEELADQVLTLKTQVDAQLQVVRKLEEKEHLLQSNIGTGEKELGLRTQALEMNKRKAMEAAQLADDLKAQ

SEQ ID NO: 4677 - protein, 100 aa, Synthetic construct
TKEKDMFNFKRAQEDISRLRRKLETTKKPDNVPKCDEILMEEIKDYKARLTCPCCNMRKKDAVLTKCFHVFCFECVKTRYDTRQRKCPKCNAAFGANDFH

SEQ ID NO: 4678 - protein, 80 aa, Synthetic construct
ELIERDEVSLHKKLRTEVIQLEDTLAQVRKEYEMLRIEFEQTLAANEQAGPINREMRHLISSLQNHNHQLKGEVLRYKRK

SEQ ID NO: 4679 - protein, 90 aa, Synthetic construct
TLIEPIRLGGISSTEEMDLKVLQFKNKKLAERLEQRQACEDELRERIEKLEKRQATDDATLLIVNRYWAQLDETVEALLRCHESQGELSS

SEQ ID NO: 4680 - protein, 100 aa, Synthetic construct
GPGPVSTPDNRKEMAPVPGTTTTTTSVKKEELVPSEEDFQGITPGAQGPSSRGREPEARPKRELREREGPSLGPPPVASALSRADREKAKVEETKRKESE

SEQ ID NO: 4681 - protein, 90 aa, Synthetic construct
LAESRAAREKESFNLKRAQEDISRLRRKLEKQRKVEVYADADEILQEEIKEYKARLTCPCCNTRKKDAVLTKCFHVFCFECVRGRYEARQ

SEQ ID NO: 4682 - protein, 80 aa, Synthetic construct
RNHCVLKQNPEGQWTIMDNKSLNGVWLNRARLEPLRVYSIHQGDYIQLGVPLENKENAEYEYEVTEEDWETIYPCLSPKN

SEQ ID NO: 4683 - protein, 80 aa, Synthetic construct
KMQAQKEEVLSHMNDVLENELQCIICSEYFIEAVTLNCAHSFCSYCINEWMKRKIECPICRKDIKSKTYSLVLDNCINKM

SEQ ID NO: 4684 - protein, 80 aa, Synthetic construct
ELQDLQSQLCAEQAQQQARVEQLEKTFQEEEQHLQGLEIAQGEKDLKQQLAQALQEHWALMEELNRSKKDFEAIIQAKNK

SEQ ID NO: 4685 - protein, 110 aa, Synthetic construct
LTPTYNISANGLTELHDDLSNYIDGHTPEGSKADSAVSSFYLDIQPSPDQSGLDINGIKPEPICDYTPASGFFPYCSFTNGETSPTVSMAELEHLAQNISKSHLETCQYL

SEQ ID NO: 4686 - protein, 90 aa, Synthetic construct
SGLDINGIKPEPICDYTPASGFFPYCSFTNGETSPTVSMAELEHLAQNISKSHLETCQYLREELQQITWQTFLQEEIENYQNKQREVMWQ

SEQ ID NO: 4687 - protein, 80 aa, Synthetic construct
HQQQPGEAEPLTPTYNISANGLTELHDDLSNYIDGHTPEGSKADSAVSSFYLDIQPSPDQSGLDINGIKPEPICDYTPAS

SEQ ID NO: 4688 - protein, 80 aa, Synthetic construct
KLQQKIQLALQHVLQKNHREDGILTKLICKVSTLRALCGRHTEKLMAFKAIYPDIVRLHFPPLYKELFTSEFEPAMQIDG

SEQ ID NO: 4689 - protein, 150 aa, Synthetic construct
SGEAEALARVYSSSISNGLSNLNNETSGTYANGHVIDLPKSEGYYNVDSGQPSPDQSGLDMTGIKQIKQEPIYDLTSVPNLFTYSSFNNGQLAPGITMTEIDRIAQNIIKSHLETCQYTMEELHQLAWQTHTYEEIKAYQSKSREALWQQ

SEQ ID NO: 4690 - protein, 80 aa, Synthetic construct
QLAPGITMTEIDRIAQNIIKSHLETCQYTMEELHQLAWQTHTYEEIKAYQSKSREALWQQCAIQITHAIQYVVEFAKRIT

SEQ ID NO: 4691 - protein, 80 aa, Synthetic construct
QRLQEQRQQQSGEAEALARVYSSSISNGLSNLNNETSGTYANGHVIDLPKSEGYYNVDSGQPSPDQSGLDMTGIKQIKQE

SEQ ID NO: 4692 - protein, 80 aa, Synthetic construct
IDRIAQNIIKSHLETCQYTMEELHQLAWQTHTYEEIKAYQSKSREALWQQCAIQITHAIQYVVEFAKRITGFMELCQNDQ

SEQ ID NO: 4693 - protein, 80 aa, Synthetic construct
VEFAKRLSGFMELCQNDQIVLLKAGAMEVVLVRMCRAYNADNRTVFFEGKYGGMELFRALGCSELISSIFDFSHSLSALH

SEQ ID NO: 4694 - protein, 80 aa, Synthetic construct
CPPGLLKASGSGPSYSNNLAKAGLNGASCHLEYSPERGKAEGRESFYSTGSQLTPDRCGLRFEEHRHPGLGELGQGPDSY

SEQ ID NO: 4695 - protein, 90 aa, Synthetic construct
QPNSAIRKCVRVQLIKNGKKITAFVPNDGCLNFIEENDEVLVAGFGRKGHAVGDIPGVRFKVVKVANVSLLALYKGKKERYKGKKERPRS

SEQ ID NO: 4696 - protein, 80 aa, Synthetic construct
HGMDLTRDKMCSMVKKWQTMIEAHVDVKTTDGYLLRLFCVGFTKKRNNQIRKTSYAQHQQVRQIRKKMMEIMTREVQTND

SEQ ID NO: 4697 - protein, 80 aa, Synthetic construct
VNKLIPDSIGKDIEKACQSIYPLHDVFVRKVKMLKKPKFELGKLMELHGEGSSSGKATGDETGAKVERADGYEPPVQESV

SEQ ID NO: 4698 - protein, 80 aa, Synthetic construct
LVYNTKGCFAVHRITVEEAKYKLCKVRKITVGTKGIPHLVTHDARTIRYPDPLIKVNDTVQIDLGTGKITSFIKFDTGNV

SEQ ID NO: 4699 - protein, 100 aa, Synthetic construct
QTEEVSIKEIAITHHVKEGHEKADPSQFELLKVLGQGSFGKVFLVKKISGSDARQLYAMKVLKKATLKVRDRVRTKMERDILVEVNHPFIVKLHYAFQTE

SEQ ID NO: 4700 - protein, 80 aa, Synthetic construct
ENFELLKVLGTGAYGKVFLVRKAGGHDAGKLYAMKVLRKAALVQRAKTQEHTRTERSVLELVRQAPFLVTLHYAFQTDAK

SEQ ID NO: 4701 - protein, 80 aa, Synthetic construct
DLREPALGQGSFSVCRRCRQRQSGQEFAVKILSRRLEANTQREVAALRLCQSHPNVVNLHEVHHDQLHTYLVLELLRGGE

SEQ ID NO: 4702 - protein, 80 aa, Synthetic construct
HEEAGVVHRDLKPENILYADDTPGAPVKIIDFGFARLRPQSPGVPMQTPCFTLQYAAPELLAQQGYDESCDLWSLGVILY

SEQ ID NO: 4703 - protein, 80 aa, Synthetic construct
WWSLGILLFELLTGASPFTLEGERNTQAEVSRRILKCSPPFPPRIGPVAQDLLQRLLCKDPKKRLGAGPQGAQEVRNHPF

SEQ ID NO: 4704 - protein, 80 aa, Synthetic construct
MMLSGQVPFQGASGQGGQSQAAEIMCKIREGRFSLDGEAWQGVSEEAKELVRGLLTVDPAKRLKLEGLRGSSWLQDGSAR

SEQ ID NO: 4705 - protein, 80 aa, Synthetic construct
MEEEGGSSGGAAGTSADGGDGGEQLLTVKHELRTANLTGHAEKVGIENFELLKVLGTGAYGKVFLVRKISGHDTGKLYAM

SEQ ID NO: 4706 - protein, 100 aa, Synthetic construct
GGEQLLTVKHELRTANLTGHAEKVGIENFELLKVLGTGAYGKVFLVRKISGHDTGKLYAMKVLKKATIVQKAKTTEHTRTERQVLEHIRQSPFLVTLHYA

SEQ ID NO: 4707 - protein, 100 aa, Synthetic construct
QHYDLDLKDKPLGEGSFSICRKCVHKKSNQAFAVKIISKRMEANTQKEITALKLCEGHPNIVKLHEVFHDQLHTFLVMELLNGGELFERIKKKKHFSETE

SEQ ID NO: 4708 - protein, 80 aa, Synthetic construct
SSIVVKPISGESAIELADIQQILKMAASAPPQISLPPFSKAPAAPLQAIFKHMPPLKPKPLVTPRTVVATSTPPPLINAQ

SEQ ID NO: 4709 - protein, 80 aa, Synthetic construct
LPPPPLKLLKGSVEAASNAHLLQSKSGTQPHAATRLSLQQPRAELPGQPEMKTQLEQDSIIEALLPLSMEAKIKQEITEG

SEQ ID NO: 4710 - protein, 100 aa, Synthetic construct
MKTQLEQDSIIEALLPLSMEAKIKQEITEGELKAFMTAPGGKKTPAMRKVLYPCRFCNQVFAFSGVLRAHVRSHLGISPYQCNICDYIAADKAALIRHLR

SEQ ID NO: 4711 - protein, 170 aa, Synthetic construct
ESYVLAADGLGPAEAPAAEASGRGEDSGCAALGDCKPLTAFLEPQNGFLHRGPTQPPPPHVSIKLEPASSFAVDFNEPLDFSQKGLALVQVKQENISFLSPSSLVPYDCSMEPIDLSIPKNFRKGDKDLATPSEAKKPEEEAGSSEQPSPCPAPGPSLPVTLGPSGILES

SEQ ID NO: 4712 - protein, 110 aa, Synthetic construct
CETNLRRCISEQHRFVCDTCDKAFPMLCSLALHKQTHVAADQGQEKPQATPLPGDALDQKGFLALLGLQHTKDVRPAPAEEPLPDDNQAIQLQTLKCQLPQDPGCTNLLS

SEQ ID NO: 4713 - protein, 80 aa, Synthetic construct
PLPGDALDQKGFLALLGLQHTKDVRPAPAEEPLPDDNQAIQLQTLKCQLPQDPGCTNLLSLSPFEAASLGGSLTVLPATK

SEQ ID NO: 4714 - protein, 90 aa, Synthetic construct
PSSLVPYDCSMEPIDLSIPKNFRKGDKDLATPSEAKKPEEEAGSSEQPSPCPAPGPSLPVTLGPSGILESPMAPAPAATPEPPAQPLQGP

SEQ ID NO: 4715 - protein, 80 aa, Synthetic construct
CSLRRNGLIPQSKESDVGSHDSTDSQSDAETAAAAGEVLDLTSRDREQPSEGATELRQVAGDAPVEQATAETASPVHREE

SEQ ID NO: 4716 - protein, 80 aa, Synthetic construct
HVQLVMEAIGKLSDDMRRHFRMKLRNLFTKFIRKFGFELVKRLLPEEYHRVLVNIRKAEARAKRHRALSQAAVEEEEEEE

SEQ ID NO: 4717 - protein, 80 aa, Synthetic construct
EKEKLKQERLEKIKQRDKRLEWEMMCRVKPDVVQDKETERNLQRIATRGVVQLFNAVQKHQKNVDEKVKEAGSSMRKRAK

SEQ ID NO: 4718 - protein, 80 aa, Synthetic construct
NLQRIATRGVVQLFNAVQKHQKNVDEKVKEAGSSMRKRAKLISTVSKKDFISVLRGMDGSTNETASSRKKPKAKQTEVKS

SEQ ID NO: 4719 - protein, 80 aa, Synthetic construct
DTGPLLQFDYKAVADRLLEMTSRKNTPHFNRKRLSKLIKKFQDLSEGSSISQLSFAEDISADEDDQILSQGKHKKKGNKL

SEQ ID NO: 4720 - protein, 80 aa, Synthetic construct
IRDFLEEANRVLKPGGLLKVAEVSSRFEDVRTFLRAVTKLGFKIVSKDLTNSHFFLFDFQKTGPPLVGPKAQLSGLQLQP

SEQ ID NO: 4721 - protein, 100 aa, Synthetic construct
EDEETKKEEETPKQEEQKESEKMKSEEQPMDLENRSTANVLEETTVKKEKEDEKELVKLPVIVKLEKPLPENEEKKIIKEESDSFKENVKPIKVEVKECR

SEQ ID NO: 4722 - protein, 140 aa, Synthetic construct
EDEKELVKLPVIVKLEKPLPENEEKKIIKEESDSFKENVKPIKVEVKECRADPKDTKSSMEKPVAQEPERIEFGGNIKSSHEITEKSTEETEKLKNDQQAKIPLKKREIKLSDDFDSPVKGPLCKSVTPTKEFLKDEIKQ

SEQ ID NO: 4723 - protein, 100 aa, Synthetic construct
HEITEKSTEETEKLKNDQQAKIPLKKREIKLSDDFDSPVKGPLCKSVTPTKEFLKDEIKQEEETCKRISTITALGHEGKQLVNGEVSDERVAPNFKTEPI

SEQ ID NO: 4724 - protein, 90 aa, Synthetic construct
LVNGEVSDERVAPNFKTEPIETKFYETKEESYSPSKDRNIITEGNGTESLNSVITSMKTGELEKETAPLRKDADSSISVLEIHSQKAQIE

SEQ ID NO: 4725 - protein, 140 aa, Synthetic construct
RGRWKYSSNDESEGSGSEKSSAASEEEEEKESEEAILADDDEPCKKCGLPNHPELILLCDSCDSGYHTACLRPPLMIIPDGEWFCPPCQHKLLCEKLEEQLQDLDVALKKKERAERRKERLVYVGISIENIIPPQEPDFS

SEQ ID NO: 4726 - protein, 80 aa, Synthetic construct
GEWFCPPCQHKLLCEKLEEQLQDLDVALKKKERAERRKERLVYVGISIENIIPPQEPDFSEDQEEKKKDSKKSKANLLER

SEQ ID NO: 4727 - protein, 80 aa, Synthetic construct
HLKLMRKIGKSVTADRWEKYLIKICQEFNSTWAWEMEKKGYLEMSVECKLALLKYLCECQFDDNLKFKNIINEEDADTMR

SEQ ID NO: 4728 - protein, 80 aa, Synthetic construct
ALLKYLCECQFDDNLKFKNIINEEDADTMRLQPIGRDKDGLMYWYQLDQDHNVRMYIEEQDDQDGSSWKCIVRNRNELAE

SEQ ID NO: 4729 - protein, 80 aa, Synthetic construct
SRKKKPDSPPKVLEPENKQEKTEKEEEKTNVGRTLRRSPRISRPTAKVAEIRDQKADKKRGEGEDEVEEESTALQKTDKK

SEQ ID NO: 4730 - protein, 80 aa, Synthetic construct
ISDPRMHYPGAFTYSPTPVTSGIGIGMSAMGSATRYHTYLPPPYPGSSQAQGGPFQASSPSYHLYYGASAGSYQFSMVGG

SEQ ID NO: 4731 - protein, 80 aa, Synthetic construct
LTITVFTNPTQVATYHRAIKVTVDGPREPRRHRQKLEDQTKPFPDRFGDLERLRMRVTPSTPSPRGSLSTTSHFSSQPQT

SEQ ID NO: 4732 - protein, 80 aa, Synthetic construct
VYSTEIKKTEVLMENFRRAIGLRIKETKEVYEGEVTELTPCETENPMGGYGKTISHVIIGLKTAKGTKQLKLDPSIFESL

SEQ ID NO: 4733 - protein, 80 aa, Synthetic construct
VDEVHMLDIECFTYLHRALESSIAPIVIFASNRGNCVIRGTEDITSPHGIPLDLLDRVMIIRTMLYTPQEMKQIIKIRAQ

SEQ ID NO: 4734 - protein, 90 aa, Synthetic construct
RAVLIAGQPGTGKTAIAMGMAQALGPDTPFTAIAGSEIFSLEMSKTEALTQAFRRSIGVRIKEETEIIEGEVVEIQIDRPATGTGSKVGK

SEQ ID NO: 4735 - protein, 100 aa, Synthetic construct
TAIAGSEIFSLEMSKTEALTQAFRRSIGVRIKEETEIIEGEVVEIQIDRPATGTGSKVGKLTLKTTEMETIYDLGTKMIESLTKDKVQAGDVITIDKATG

SEQ ID NO: 4736 - protein, 110 aa, Synthetic construct
TVSLHEIDVINSRTQGFLALFSGDTGEIKSEVREQINAKVAEWREEGKAEIIPGVLFIDEVHMLDIESFSFLNRALESDMAPVLIMATNRGITRIRGTSYQSPHGIPIDL

SEQ ID NO: 4737 - protein, 120 aa, Synthetic construct
NGMGPPFSVISSPMGPHSMSVPTTPTLGFSTGSPQLSSPMNPVSSSEDIKPPLGLNGVLKVPAHPSGNMASFTKHICAICGDRSSGKHYGVYSCEGCKGFFKRTVRKDLTYTCRDNKDCL

SEQ ID NO: 4738 - protein, 80 aa, Synthetic construct
FKRTVRKDLTYTCRDNKDCLIDKRQRNRCQYCRYQKCLAMGMKREAVQEERQRGKDRNENEVESTSSANEDMPVERILEA

SEQ ID NO: 4739 - protein, 80 aa, Synthetic construct
PFPVISSSMGSPGLPPPAPPGFSGPVSSPQINSTVSLPGGGSGPPEDVKPPVLGVRGLHCPPPPGGPGAGKRLCAICGDR

SEQ ID NO: 4740 - protein, 90 aa, Synthetic construct
INSTVSLPGGGSGPPEDVKPPVLGVRGLHCPPPPGGPGAGKRLCAICGDRSSGKHYGVYSCEGCKGFFKRTIRKDLTYSCRDNKDCTVDK

SEQ ID NO: 4741 - protein, 80 aa, Synthetic construct
VVNSVSSSEDIKPLPGLPGIGNMNYPSTSPGSLVKHICAICGDRSSGKHYGVYSCEGCKGFFKRTIRKDLIYTCRDNKDC

SEQ ID NO: 4742 - protein, 80 aa, Synthetic construct
EDMPVERILEAELAVEPKTESYGDMNMENSTNDPVTNICHAADKQLFTLVEWAKRIPHFSDLTLEDQVILLRAGWNELLI

SEQ ID NO: 4743 - protein, 110 aa, Synthetic construct
RKLAEEEDLFDSAHPEEGDLDLASESTAHAQSSKADSLLAVVKREPAEQPGDGERTDCEPVGLEPAVEQSSAASELAEASSEELAEAPTEAPSPEARDSKEDGRKFDFDA

SEQ ID NO: 4744 - protein, 80 aa, Synthetic construct
VAETGTRRLSELRVIDLRAELKKRNLDTGGNKSVLMERLKKAVKEEGQDPDEIGIELEATSKKSAKRCVKGLKMEEEGTE

SEQ ID NO: 4745 - protein, 100 aa, Synthetic construct
LKKRNLDTGGNKSVLMERLKKAVKEEGQDPDEIGIELEATSKKSAKRCVKGLKMEEEGTEDNGLEDDSRDGQEDMEASLENLQNMGMMDMSVLDETEVAN

SEQ ID NO: 4746 - protein, 80 aa, Synthetic construct
TDGLLDSFCDSKEYVAAQLRQLPAQPPEHAVDGEGFKNTLETSSLNFKVTPDIEESLLEPENEKILDILGETCKSEPVKE

SEQ ID NO: 4747 - protein, 80 aa, Synthetic construct
ETCKSEPVKEESSELEQPFAQDTSSVGPDRKLAEEEDLFDSAHPEEGDLDLASESTAHAQSSKADSLLAVVKREPAEQPG

SEQ ID NO: 4748 - protein, 100 aa, Synthetic construct
SAHPEEGDLDLASESTAHAQSSKADSLLAVVKREPAEQPGDGERTDCEPVGLEPAVEQSSAASELAEASSEELAEAPTEAPSPEARDSKEDGRKFDFDAC

SEQ ID NO: 4749 - protein, 100 aa, Synthetic construct
EELAEAPTEAPSPEARDSKEDGRKFDFDACNEVPPAPKESSTSEGADQKMSSFKEEKDIKPIIKDEKGRVGSGSGRNLWVSGLSSTTRATDLKNLFSKYG

SEQ ID NO: 4750 - protein, 90 aa, Synthetic construct
STSEGADQKMSSFKEEKDIKPIIKDEKGRVGSGSGRNLWVSGLSSTTRATDLKNLFSKYGKVVGAKVVTNARSPGARCYGFVTMSTSDEA

SEQ ID NO: 4751 - protein, 80 aa, Synthetic construct
HSVEIKIEKTVIKKEEKIEKKEEKKPEDIKKEEKDQDELKPGPTNRSRVTKSGSRGMERTVVMDKSKGEPVISVKTTSRS

SEQ ID NO: 4752 - protein, 80 aa, Synthetic construct
KEEKKPEDIKKEEKDQDELKPGPTNRSRVTKSGSRGMERTVVMDKSKGEPVISVKTTSRSKERSSKSQDRKSESKEKRDI

SEQ ID NO: 4753 - protein, 80 aa, Synthetic construct
SSAPDFGEDGTDGLLDSFCDSKEYVAAQLRQLPAQPPEHAVDGEGFKNTLETSSLNFKVTPDIEESLLEPENEKILDILG

SEQ ID NO: 4754 - protein, 100 aa, Synthetic construct
LTTLGNFSVINSNVIIENLQSTKVAVAQFSQEARCGGASGGKLAVPALMEQLLALQQQQIHQLQLIEQIRHQILLLASQNADLPTSSSPSQGTLRTSANP

SEQ ID NO: 4755 - protein, 80 aa, Synthetic construct
GKLAVPALMEQLLALQQQQIHQLQLIEQIRHQILLLASQNADLPTSSSPSQGTLRTSANPLSTLSSHLSQQLAAAAGLAQ

SEQ ID NO: 4756 - protein, 140 aa, Synthetic construct
KYPHIQMNPYPVPEHLDNIPTSTGIPYGMSIPPEKPVTSWLDTKPVLPTLTTSVGLPLPPTLPSLIPFIKTEEPAPIPISHSATSPPGSVKSDSGGPESATRNLGGLPEEAEGSTLPPSGGKSEESGMVTNSVPTASSSV

SEQ ID NO: 4757 - protein, 90 aa, Synthetic construct
EPSSNLGPNQNSAVIPANSLSSLIKTEVNGFVHVSPQDSKDTPTSHVPSGPLSSSATSPVLLPALPRRTPKQHYCNTCGKTFSSSSALQI

SEQ ID NO: 4758 - protein, 90 aa, Synthetic construct
TAAGGGGGLILASPKLGATPLPPESTPAPPPPPPPPPPPGVGSGHLNIPLILEELRVLQQRQIHQMQMTEQICRQVLLLGSLGQTVGAPA

SEQ ID NO: 4759 - protein, 100 aa, Synthetic construct
PPPPPPPPPGVGSGHLNIPLILEELRVLQQRQIHQMQMTEQICRQVLLLGSLGQTVGAPASPSELPGTGTASSTKPLLPLFSPIKPVQTSKTLASSSSSS

SEQ ID NO: 4760 - protein, 80 aa, Synthetic construct
EEEAATPGGGVERKPLVASTTALSATESLTLLSTSAGTATAPGLPAFNKFVLMKAVEPKNKADENTPPGSEGSAISGVAE

SEQ ID NO: 4761 - protein, 110 aa, Synthetic construct
LSTKVAVAQFSQGARAAGGSGAGGGVAAAAVPLILEQLMALQQQQIHQLQLIEQIRSQVALMQRPPPRPSLSPAAAPSAPGPAPSQLPGLAALPLSAGAPAAAIAGSGPA

SEQ ID NO: 4762 - protein, 110 aa, Synthetic construct
SQALSPAPSNGESFRSKSPGLGAPEEPQEIPLKTERPDSPAAAPGSGGAPGRAGIKEEAPFSLLFLSRERGKCPSTVCGVCGKPFACKSALEIHYRSHTKERPFVCALCR

SEQ ID NO: 4763 - protein, 120 aa, Synthetic construct
AKGKVANTNVTLQALRGTKVAVNQRSADALPAPVPGANSIPWVLEQILCLQQQQLQQIQLTEQIRIQVNMWASHALHSSGAGADTLKTLGSHMSQQVSAAVALLSQKAGSQGLSLDALKQ

SEQ ID NO: 4764 - protein, 100 aa, Synthetic construct
GCPPGRKEKPSDPVEWTVMDVVEYFTEAGFPEQATAFQEQEIDGKSLLLMQRTDVLTGLSIRLGPALKIYEHHIKVLQQGHFEDDDPDGFEDDDPDGFLG

SEQ ID NO: 4765 - protein, 80 aa, Synthetic construct
AGAQHHQLNGERGPQSAKERVKEWTPCGPHQGQDEGRGPAPGSGTRQVFSMAAMNKEGGTASVATGPDSPSPVPLPPGKP

SEQ ID NO: 4766 - protein, 150 aa, Synthetic construct
VPPTAQQPPPTIPTMIAAASPPSQPAVALSTIPGAVPITPPITTIAAAPPPSVTVGGSLSSVLGPPVPEIKVKEEVEPMDIMRPVSAVPPLATNTVSPSLALLANNLSMPTSDLPPGASPRKKPRKQQHVISTEEGDMMETNSTDDEKST

SEQ ID NO: 4767 - protein, 80 aa, Synthetic construct
TNSTDDEKSTAKSLLVKAEKRKSPPKEYIDEEGVRYVPVRPRPPITLLRHYRNPWKAAYHHFQRYSDVRVKEEKKAMLQE

SEQ ID NO: 4768 - protein, 80 aa, Synthetic construct
HFQRYSDVRVKEEKKAMLQEIANQKGVSCRAQGWKVHLCAAQLLQLTNLEHDVYERLTNLQEGIIPKKKAATDDDLHRIN

SEQ ID NO: 4769 - protein, 90 aa, Synthetic construct
HDVYERLTNLQEGIIPKKKAATDDDLHRINELIQGNMQRCKLVMDQISEARDSMLKVLDHKDRVLKLLNKNGTVKKVSKLVSKLKRKEKV

SEQ ID NO: 4770 - protein, 90 aa, Synthetic construct
AVESRVTQEEIKKEPEKPIDREKTCPLLLRVFTTNNGRHHRMDEFSRGNVPSSELQIYTWMDATLKELTSLVKEVYPEARKKGTHFNFAI

SEQ ID NO: 4771 - protein, 80 aa, Synthetic construct
WGANCSSGASFSGRTLCHPSFWPLYEAASGRGLRPVAPATGHWNGQQAPPDAGFPVVCCEDVFLSDPLLPRGQRVPLYLS

SEQ ID NO: 4772 - protein, 120 aa, Synthetic construct
DVFLSDPLLPRGQRVPLYLSKAPQQMMGSLKLLPPPPIMSARVLPRPSPSRGPSTAWLSGPELIALTGLLQMSQGEPRPSSSAVGPPDHTSDPPSPCGSPSSSQGADLSLLPQTPDTHCP

SEQ ID NO: 4773 - protein, 90 aa, Synthetic construct
SDDDGGDSPVQDIDTPEVDLYQLQVNTLRRYKRHFKLPTRPGLNKAQLVEIVGCHFRSIPVNEKDTLTYFIYSVKNDKNKSDLKVDSGVH

SEQ ID NO: 4774 - protein, 80 aa, Synthetic construct
GAEVPGAGAVSAAGPPGAAGPGPGQLCCLREDGERCGRAAGNASFSKRIQKSISQKKVKIELDKSARHLYICDYHKNLIQ

SEQ ID NO: 4775 - protein, 80 aa, Synthetic construct
GNASFSKRIQKSISQKKVKIELDKSARHLYICDYHKNLIQSVRNRRKRKGSDDDGGDSPVQDIDTPEVDLYQLQVNTLRR

SEQ ID NO: 4776 - protein, 80 aa, Synthetic construct
KGTTTNATSTTTTTASTAVADAQKRKSKWDSAIPVTTIAQPTILTTTATLPAVVTVTTSASGSKTTVISAVGTIVKKAKQ

SEQ ID NO: 4777 - protein, 80 aa, Synthetic construct
RLEQNGSPLGRGRLGSTGAKMQGVPLKHSGHLMKTNLRKGTMLPVFCVVEHYENAIEYDCKEEHAEFVLVRKDMLFNQLI

SEQ ID NO: 4778 - protein, 90 aa, Synthetic construct
LDLPKYTIIKFFQNQRYYLKHHGKLKDNSGLEVDVAEYKEEELLKDLEESVQDKNTNTLFSVKLEEELSVEGNTDINTDLNTDINTDLKD

SEQ ID NO: 4779 - protein, 90 aa, Synthetic construct
DSPDRRSGSPDVKGPPPVKVARLEQNGSPMGARGRPNGAVAKAVGGLMIPVFCVVEQLDGSLEYDNREEHAEFVLVRKDVLFSQLVETAL

SEQ ID NO: 4780 - protein, 80 aa, Synthetic construct
LLKEMNQSTLAKECPLSQSMISSIVNSTYYANVSATKCQEFGRWYKKYKKIKVERVERENLSDYCVLGQRPMHLPNMNQL

SEQ ID NO: 4781 - protein, 110 aa, Synthetic construct
ISSIVNSTYYANVSATKCQEFGRWYKKYKKIKVERVERENLSDYCVLGQRPMHLPNMNQLASLGKTNEQSPHSQIHHSTPIRNQVPALQPIMSPGLLSPQLSPQLVRQQI

SEQ ID NO: 4782 - protein, 90 aa, Synthetic construct
IRNQVPALQPIMSPGLLSPQLSPQLVRQQIAMAHLINQQIAVSRLLAHQHPQAINQQFLNHPPIPRAVKPEPTNSSVEVSPDIYQQVRDE

SEQ ID NO: 4783 - protein, 80 aa, Synthetic construct
PQAINQQFLNHPPIPRAVKPEPTNSSVEVSPDIYQQVRDELKRASVSQAVFARVAFNRTQGLLSEILRKEEDPRTASQSL

SEQ ID NO: 4784 - protein, 90 aa, Synthetic construct
EGSITKHPSTWSVEAVVLFLKQTDPLALCPLVDLFRSHEIDGKALLLLTSDVLLKHLGVKLGTAVKLCYYIDRLKQGKCFRLKQGKCFEN

SEQ ID NO: 4785 - protein, 90 aa, Synthetic construct
AQDARRPRSRNPSAWTVEDVVWFVKDADPQALGPHVELFRKHEIDGNALLLLKSDMVMKYLGLKLGPALKLCYHIDKLKQHIDKLKQAKF

SEQ ID NO: 4786 - protein, 120 aa, Synthetic construct
ARRRAGGRRAGGGGPGGRPGREPRQRHTANARERDRTNSVNTAFTALRTLIPTEPADRKLSKIETLRLASSYISHLGNVLLAGEACGDGQPCHSGPAFFHAARAGSPPPPPPPPPARDGE

SEQ ID NO: 4787 - protein, 90 aa, Synthetic construct
QKEGVYRVADQVKKEVGDVSILINNAGIVTGKKFLDCPDELMEKSFDVNFKAHLWTYKAFLPAMIANDHGHLVCISSSAGLSGVNGLADY

SEQ ID NO: 4788 - protein, 80 aa, Synthetic construct
TIFRFCDRSVPPARALLKRRRSDSTLFSTVDTDEIPAKRPRLDCFIHQVKNSLYNAASLFGFPFQLTTKPMVTSACNGTR

SEQ ID NO: 4789 - protein, 80 aa, Synthetic construct
LAPPDASILISNVCSIGDHVAQELFQGSDLGMAEEAERPGEKAGQHSPLREEHVTCVQSILDEFLQTYGSLIPLSTDEVV

SEQ ID NO: 4790 - protein, 80 aa, Synthetic construct
VAYKRHVLTMDDLGTLYGQNWLNDQVMNMYGDLVMDTVPEKVHFFNSFFYDKLRTKGYDGVKRWTKNVDIFNKELLLIPI

SEQ ID NO: 4791 - protein, 120 aa, Synthetic construct
DPLLYLRRTSDLKSKKKRGRPAKTNDTMTKVPFLQGFSYPIPSGSYYAPYGMPYTSMPMMNLGYYGQYPAPLYLSHTLGAASPFMRPTVPPPQFHTNSHVKMSGAAKHKAKHGVHLQGPV

SEQ ID NO: 4792 - protein, 80 aa, Synthetic construct
FDNTEGKREGYSADSAQEASPARQNVSSASNPENDSSHVRITIPIKAPSLDPTNHKRKKRQSIKAVVEKIMPEKALASGI

SEQ ID NO: 4793 - protein, 80 aa, Synthetic construct
ETSDEAERPRPLLSHILLEHNYALAVKPTPPAPALRPPEPVPAPAALFSSPADEVLEAPEVVVAEAEEPKPQQLQQQREE

SEQ ID NO: 4794 - protein, 90 aa, Synthetic construct
PVEVPVPERVAGSPVTPLPEQEASPARPAGPTEESPPSAPLRPPEPPAGPPAPAPRPDERPSSPIPLLPPPKKRRKTVSFSAIEVVPAPE

SEQ ID NO: 4795 - protein, 80 aa, Synthetic construct
LRPPEPPAGPPAPAPRPDERPSSPIPLLPPPKKRRKTVSFSAIEVVPAPEPPPATPPQAKFPGPASRKAPRGVERTIRNL

SEQ ID NO: 4796 - protein, 80 aa, Synthetic construct
RGVERTIRNLPLDHASLVKSWPEEVSRGGRSRAGGRGRLTEEEEAEPGTEVDLAVLADLALTPARRGLPALPAVEDSEAT

SEQ ID NO: 4797 - protein, 80 aa, Synthetic construct
SRAGGRGRLTEEEEAEPGTEVDLAVLADLALTPARRGLPALPAVEDSEATETSDEAERPRPLLSHILLEHNYALAVKPTP

SEQ ID NO: 4798 - protein, 80 aa, Synthetic construct
DPSVPPPGYMPRQEDPHKATVDGVLLVVLKELKAIMKRDLNRKMVEVVAFRAFDEWWDKKERMAKASLTPVKSGEHKDED

SEQ ID NO: 4799 - protein, 80 aa, Synthetic construct
EEDIRFLCVTYERLLQQDNGMDWLNDTLWVYHPSTSLSSAKKKKRDDGIREHVTGCARSEGFYTIDKKDKLRYLNSSRAS

SEQ ID NO: 4800 - protein, 80 aa, Synthetic construct
DSDTELQMEGSPISSSSSQLSPLAPFGTNSQPGFRGPTPPSSRPSSTGLEDISPTPLPDSDEDEELDLGLGPRPPPEPGP

SEQ ID NO: 4801 - protein, 80 aa, Synthetic construct
SSRPSSTGLEDISPTPLPDSDEDEELDLGLGPRPPPEPGPPDPAGLLSQTAEVALDLVGDRTPTSEKMDEGQQSSGEDME

SEQ ID NO: 4802 - protein, 80 aa, Synthetic construct
GGKMKKERSRKKDSVDGELEALMENGEGLSDKNQVLSLSRLMVRIETLEQKLTCLELIQNTHSQSCLKSFLERHGLSLLW

SEQ ID NO: 4803 - protein, 80 aa, Synthetic construct
PERRGRPEISLDERGEGGHVHTSDDSEVVFSSCDLNLTMEDSDGVTYALKCDSSGHAPEIVSTVHEDYSGSSESSNDESD

SEQ ID NO: 4804 - protein, 80 aa, Synthetic construct
QGEIACGEDCLNRLLMIECSSRCPNGDYCSNRRFQRKQHADVEVILTEKKGWGLRAAKDLPSNTFVLEYCGEVLDHKEFK

SEQ ID NO: 4805 - protein, 80 aa, Synthetic construct
GSANCRGYLGGENRVSIRAAGGKMKKERSRKKDSVDGELEALMENGEGLSDKNQVLSLSRLMVRIETLEQKLTCLELIQN

SEQ ID NO: 4806 - protein, 80 aa, Synthetic construct
HRRKQDNISGGDSSATESWDEELSPSTVLYTATQHTPTSITLTVRRTKPKKRKKSPEKGRAAPKTKKIKNSPSEAQNLDE

SEQ ID NO: 4807 - protein, 100 aa, Synthetic construct
PFIPERRRRPLLPDGTFSSCKKRWIKQALEEGMTQTSSVPQETRTQHLYQSNENSSSSSICKDNADLLSPLKKWKSRYLMEQNVTKLLRPLSPVTPPPPN

SEQ ID NO: 4808 - protein, 80 aa, Synthetic construct
KEFVGKPTILDTINKTELACNNTVIGSQMQLQLGRVTRVQKHRKILRAARDLALDTLIIEYRGKVMLRQQFEVNGHFFKK

SEQ ID NO: 4809 - protein, 90 aa, Synthetic construct
IAELQQAVVEELGISMEELRHFIDEELEKMDCVQQRKKQLAELETWVIQKESEVAHVDQLFDDASRAVTNCESLVKDFYSKLGLQYRDSS

SEQ ID NO: 4810 - protein, 100 aa, Synthetic construct
FIEEYVTAYPNRPMVLLKSGQLIKTEWEGTWWKSRVEEVDGSLVRILFLDDKRCEWIYRGSTRLEPMFSMKTSSASALEKKQGQLRTRPNMGAVRSKGPV

SEQ ID NO: 4811 - protein, 80 aa, Synthetic construct
ESEVAHVDQLFDDASRAVTNCESLVKDFYSKLGLQYRDSSSEDESSRPTEIIEIPDEDDDVLSIDSGDAGSRTPKDQKLR

SEQ ID NO: 4812 - protein, 80 aa, Synthetic construct
QHGPQVRLQVFKTEQKGWGVRCLDDIDRGTFVCIYSGRLLSRANTEKSYGIDENGRDENTMKNIFSKKRKLEVACSDCEV

SEQ ID NO: 4813 - protein, 100 aa, Synthetic construct
RPHVAQPTLQKLNELGYEVLPHPPYSPDLLPTNYHVFKHLNNFLQGKRFHNQQDAENAFQEFVESQSTDFYATGINQLISRWQKCVDCNGCVDCNGSYFD

SEQ ID NO: 4814 - protein, 80 aa, Synthetic construct
VCKSKKSWQARHTGIKIVQQIAILMGCAILPHLRSLVEIIEHGLVDEQQKVRTISALAIAALAEAATPYGIESFDSVLKP

SEQ ID NO: 4815 - protein, 80 aa, Synthetic construct
AADLISRTAVVMKTCQEEKLMGHLGVVLYEYLGEEYPEVLGSILGALKAIVNVIGMHKMTPPIKDLLPRLTPILKNRHEK

SEQ ID NO: 4816 - protein, 100 aa, Synthetic construct
VYILNRDAAARLTISSPLEAHKANTLVYHVVGVDVGFENPMFACLEMDYEEADNDPTGEAAANTQQTLTFYELDLGLNHVVRKYSEPLEEHGNFLITVPG

SEQ ID NO: 4817 - protein, 110 aa, Synthetic construct
VLKTGFLFVASEFGNHYLYQIAHLGDDDEEPEFSSAMPLEEGDTFFFQPRPLKNLVLVDELDSLSPILFCQIADLANEDTPQLYVACGRGPRSSLRVLRHGLEVSEMAVS

SEQ ID NO: 4818 - protein, 80 aa, Synthetic construct
ATLVLSIGETVEEVTDSGFLGTTPTLSCSLLGDDALVQVYPDGIRHIRADKRVNEWKTPGKKTIVKCAVNQRQVVIALTG

SEQ ID NO: 4819 - protein, 90 aa, Synthetic construct
QRQVVIALTGGELVYFEMDPSGQLNEYTERKEMSADVVCMSLANVPPGEQRSRFLAVGLVDNTVRIISLDPSDCLQPLSMQALPAQPESL

SEQ ID NO: 4820 - protein, 80 aa, Synthetic construct
SLANVPPGEQRSRFLAVGLVDNTVRIISLDPSDCLQPLSMQALPAQPESLCIVEMGGTEKQDELGERGSIGFLYLNIGLQ

SEQ ID NO: 4821 - protein, 90 aa, Synthetic construct
YLDPFLHHVGWAAQQGYELQPPSAIRHLKNEAEWQEILAKVKEEEEEPLPSYLFKDKQVIGIHTFSVNMKLEAVDPWSPFGISPATVVKV

SEQ ID NO: 4822 - protein, 80 aa, Synthetic construct
NGLHISPPPGYPSQDFDWADYLKQCGAEAAPQRCFPPLISEHEFKENMKLEAVNPILPEEVCVATITAVRGSYLWLQLEG

SEQ ID NO: 4823 - protein, 80 aa, Synthetic construct
GSYLWLQLEGSKKPIPECIVSVESMDIFPLGWCETNGHPLSTPRRARVYKQRKIAVVQPEKQVPSSRTVHEGLRNQELNS

SEQ ID NO: 4824 - protein, 80 aa, Synthetic construct
GWCETNGHPLSTPRRARVYKQRKIAVVQPEKQVPSSRTVHEGLRNQELNSTESVMINGKYCCPKIYFNHRCFSGPYLNKG

SEQ ID NO: 4825 - protein, 110 aa, Synthetic construct
LRTFSFSDDENKPPSPKEIRIEVAERLHLDSNPLKWSVADVVRFIRSTDCAPLARIFLDQEIDGQALLLLTLPTVQECMDLKLGPAIKLCHHIERIKFAFKFAFYEQFAN

SEQ ID NO: 4826 - protein, 100 aa, Synthetic construct
EVIVDVESMDIFPVGWCEANSYPLTAPHKTVSQKKRKIAVVQPEKQLPPTVPVKKIPHDLCLFPHLDTTGTVNGKYCCPQLFINHRCFSGPYLNKGRIAE

SEQ ID NO: 4827 - protein, 90 aa, Synthetic construct
EEERLVLESNPLEWTVTDVVRFIKLTDCAPLAKIFQEQDIDGQALLLLTLPTVQECMELKLGPAIKLCHQIERVKVAFYAKVAFYAQYAN

SEQ ID NO: 4828 - protein, 90 aa, Synthetic construct
SEHNLVNIQKTHERMQTENKISPYYRTKLRGLYTTAKADAEAECNILRKALDKIAEIKSLLEERRIAAKIAGLYNDSEPPRKTMRRGVLM

SEQ ID NO: 4829 - protein, 90 aa, Synthetic construct
GLYTTAKADAEAECNILRKALDKIAEIKSLLEERRIAAKIAGLYNDSEPPRKTMRRGVLMTLLQQSAMTLPLWIGKPGDKPPPLCGAIPA

SEQ ID NO: 4830 - protein, 80 aa, Synthetic construct
AGLYNDSEPPRKTMRRGVLMTLLQQSAMTLPLWIGKPGDKPPPLCGAIPASGDYVARPGDKVAARVKAVDGDEQWILAEV

SEQ ID NO: 4831 - protein, 100 aa, Synthetic construct
QNSRTRLLYGKNHVLVQPKEDMEAVPGYLSLHQSAESLTLKWTPNQLMNGTLGDSELEKSVYWDYALVVPFSQVVCIHCHQQKSGGTLVLVSQDGIQRPP

SEQ ID NO: 4832 - protein, 80 aa, Synthetic construct
QIMEEAVTRKFVHEDSSHIIALCGAVEACLLHQLRRRAAGFLRSDKMAALFTKVGKTCPVAGEICHKVQELQQQAEGRKP

SEQ ID NO: 4833 - protein, 80 aa, Synthetic construct
QGMCDLLAPLLVTLDNDQLAYSCFSHLMKRMSQNFPNGGAMDTHFANMRSLIQILDSELFELMHQNGDYTHFYFCYRWFL

SEQ ID NO: 4834 - protein, 80 aa, Synthetic construct
QTKLKQRRSRTNFTLEQLNELERLFDETHYPDAFMREELSQRLGLSEARVQVWFQNRRAKCRKQENQMHKGVILGTANHL

SEQ ID NO: 4835 - protein, 80 aa, Synthetic construct
SQFEACRVAPYVNVGALRMPFQQDSHCNVTPLSFQVQAQLQLDSAVAHAHHHLHPHLAAHAPYMMFPAPPFGLPLATLAA

SEQ ID NO: 4836 - protein, 80 aa, Synthetic construct
LHKGVLIGAASQFEACRVAPYVNVGALRMPFQQDSHCNVTPLSFQVQAQLQLDSAVAHAHHHLHPHLAAHAPYMMFPAPP

SEQ ID NO: 4837 - protein, 80 aa, Synthetic construct
VRVDEEKRQQLHWNMHEDRRNEPIIISDDDEQPCPGSDTSSAHYIILSDSLKEEVAHRDKKRCSKVVSFSKPIEKEETVG

SEQ ID NO: 4838 - protein, 80 aa, Synthetic construct
KLLNDKAVATSQLQKKLGQLLYLTNLEKSQDKTSGGVNPEPCPICARQLGKQWAVLTCGHCFCNECISIIIEQYSVGSHR

SEQ ID NO: 4839 - protein, 80 aa, Synthetic construct
FLAEQDIVIITYDVLRSELNYVDIPHSNSEDGRRLRNQKRYMAIPSPLVAVEWWRICLDEAQMVECPTVKAAEMAQRLSG

SEQ ID NO: 4840 - protein, 90 aa, Synthetic construct
MRVVFPEGLGEAWGHSSRTSPLDNVGRELGSHLLQTLDGFIFVVAPDGKIMYISETASVHLGLSQVELTGNSIYEYIHPADHDEMTAVLT

SEQ ID NO: 4841 - protein, 80 aa, Synthetic construct
TIVHNSRSSRPHCIVSVNYVLTDTEYKGLQLSLDQISASKPAFSYTSSSTPTMTDNRKGAKSRLSSSKSKSRTSPYPQYS

SEQ ID NO: 4842 - protein, 90 aa, Synthetic construct
SMPHIASVHRIHGRGHWDEDSVVSSPDPGSASESGDRYRTEQYQSSPHEPSKIETLIRATQQMIKEEENRLQLRKAPSDQLASINGAGKK

SEQ ID NO: 4843 - protein, 80 aa, Synthetic construct
SKIETLIRATQQMIKEEENRLQLRKAPSDQLASINGAGKKHSLCFANYQQPPPTGEVCHGSALANTSPCDHIQQREGKML

SEQ ID NO: 4844 - protein, 80 aa, Synthetic construct
PHCIVSVNYVLTDTEYKGLQLSLDQISASKPAFSYTSSSTPTMTDNRKGAKSRLSSSKSKSRTSPYPQYSGFHTERSESD

SEQ ID NO: 4845 - protein, 80 aa, Synthetic construct
EQYQSSPHEPSKIETLIRATQQMIKEEENRLQLRKAPSDQLASINGAGKKHSLCFANYQQPPPTGEVCHGSALANTSPCD

SEQ ID NO: 4846 - protein, 80 aa, Synthetic construct
ISPHQTAGDHPTVSPNCFGSHRQYFDKHAYTLTGYALEHLYDSETIRNYSLGCNGSHFDVTSHLRMQPDPAQGHKGTSVI

SEQ ID NO: 4847 - protein, 80 aa, Synthetic construct
AHQPLHHHLLQEYEIERSFFLRMKCVLAKRNAGLTCSGYKVIHCSGYLKIRQYMLDMSLYDSCYQIVGLVAVGQSLPPSA

SEQ ID NO: 4848 - protein, 110 aa, Synthetic construct
DAHSTTSSASPAQSPCYSNQSDDGSDTEMASGSNRTPVFSFLDLTYWKRQKICCGIIYKGRFGEVLIDTHLFKPCCSNKKAAAEKPEEQGPEPLPISTQEEPLPISTQEW

SEQ ID NO: 4849 - protein, 80 aa, Synthetic construct
PLGAVGKYRVRRKFPLPRTIWDGEETSYCFKEKSRGVLREWYAHNPYPSPREKRELAEATGLTTTQVSNWFKNRRQRDRA

SEQ ID NO: 4850 - protein, 100 aa, Synthetic construct
RVRKKFPLPRTIWDGEQKTHCFKERTRSLLREWYLQDPYPNPSKKRELAQATGLTPTQVGNWFKNRRQRDRAAAAKNRLQHQAIGPSGMRSLAEPGCPTH

SEQ ID NO: 4851 - protein, 80 aa, Synthetic construct
NPPKMSSNIVSNGISMTDILGSTSQDVKEFKVLQSSANSATTTSYSPSVPVSFPGLIPSTEVKREGIQTVASQDGGSVVT

SEQ ID NO: 4852 - protein, 80 aa, Synthetic construct
GSTSQDVKEFKVLQSSANSATTTSYSPSVPVSFPGLIPSTEVKREGIQTVASQDGGSVVTFTTPVQINQYGIVQIPNSGA

SEQ ID NO: 4853 - protein, 80 aa, Synthetic construct
KVLQSSANSATTTSYSPSVPVSFPGLIPSTEVKREGIQTVASQDGGSVVTFTTPVQINQYGIVQIPNSGANSQFLNGSIG

SEQ ID NO: 4854 - protein, 120 aa, Synthetic construct
GSPVKVAAAAGPANVHLINSGVGVTALQLPSATAPGNFLLANPVSGSPIVTGVALQQGKIILTATFPTSMLVSQVLPPAPGLALPLKPETAISVPEGGLPVAPSPALPEAHALGTLSAQQ

SEQ ID NO: 4855 - protein, 100 aa, Synthetic construct
KYRVRKKFPLPRTIWDGEQKTHCFKERTRHLLREWYLQDPYPNPSKKRELAQATGLTPTQVGNWFKNRRQRDRAAAAKNRLQQQVLSQGSGRALRAEGDG

SEQ ID NO: 4856 - protein, 80 aa, Synthetic construct
PRTIWDGEQKTHCFKERTRHLLREWYLQDPYPNPSKKRELAQATGLTPTQVGNWFKNRRQRDRAAAAKNRLQQQVLSQGS

SEQ ID NO: 4857 - protein, 120 aa, Synthetic construct
ENLQTNFSLVQGSTKKLNGMGDDGSPPAKKMITDIHANGKTINKVPTVKKEHLDDYGEAPVETDGEHVKRTCTSVPETLHLNPSLKHTLAQFHLSSQSSLGGPAAFSARHSQESMSPTVF

SEQ ID NO: 4858 - protein, 100 aa, Synthetic construct
NGSVLPAKSSLAQLKETGSAFEVEHECLGKCQGLFAPQFYVQPDAPCIQCLECCGMFAPQTFVMHSHRSPDKRTCHWGFESAKWHCYLHVNQKYLGTPEE

SEQ ID NO: 4859 - protein, 80 aa, Synthetic construct
DKRTCHWGFESAKWHCYLHVNQKYLGTPEEKKLKIILEEMKEKFSMRSGKRNQSKTDAPSGMELQSWYPVIKQEGDHVSQ

SEQ ID NO: 4860 - protein, 110 aa, Synthetic construct
KKLKIILEEMKEKFSMRSGKRNQSKTDAPSGMELQSWYPVIKQEGDHVSQTHSFLHPSYYLYMCDKVVAPNVSLTSAVSQSKELTKTEASKSISRQSEKAHSSGKLQKTV

SEQ ID NO: 4861 - protein, 90 aa, Synthetic construct
THSFLHPSYYLYMCDKVVAPNVSLTSAVSQSKELTKTEASKSISRQSEKAHSSGKLQKTVSYPDVSLEEQEKMDLKTSRELCSRLDASIS

SEQ ID NO: 4862 - protein, 100 aa, Synthetic construct
KSISRQSEKAHSSGKLQKTVSYPDVSLEEQEKMDLKTSRELCSRLDASISNNSTSKRKSESATCNLVRDINKVGIGLVAAASSPLLVKDVICEDDKGKIM

SEQ ID NO: 4863 - protein, 80 aa, Synthetic construct
KKLEQIMKQKCTCDSNLEKDKEAEYAGQLAELRQRLDHAEADRQELQDELRQEREARQKLEMMIKELKLQILKSSKTAKE

SEQ ID NO: 4864 - protein, 90 aa, Synthetic construct
LLEQMELRKKLEREFQSLKDNFQDQMKRELAYREEMVQQLQIVRDTLCNELDQERKARYAIQQKLKEAHDALHHFSCKMLTPRHCTGNCS

SEQ ID NO: 4865 - protein, 80 aa, Synthetic construct
EAERLCKSFLGENRPPKLPDNFAFDVSHECAWGCRGSFIPARYNSSRAKCIKCSYCNMYFSPNKFIFHSHRTPDAKYTQP

SEQ ID NO: 4866 - protein, 100 aa, Synthetic construct
SPPLPPEAAHFLFGEPTLRKRKSPAQVMFQCLWKSCGKVLSTASAMQRHIRLVHLGRQAEPEQSDGEEDFYYTELDVGVDTLTDGLSSLTPVSPTASMPP

SEQ ID NO: 4867 - protein, 140 aa, Synthetic construct
QGSSVGGGFAGLEFARPQESEPRASDLGAPRTWTGAAAGPRTPSAHIPVPAQRATPGKARLDEVMAAAALTSLSTSPLLLGAPVAAFSPEPGLEPWKEALVRPPGSYSSSSNSGDWGWDLASDQSSPSTPSPPLPPEAAH

SEQ ID NO: 4868 - protein, 80 aa, Synthetic construct
ANPQSCHSDRVYQGCLTPARLEPQPTEVGACPPALSSRIGVTLRKPRGDAKKCRKVYGMERRDLWCTACRWKKACQRFLD

SEQ ID NO: 4869 - protein, 80 aa, Synthetic construct
SPQMQSAPKRWREELKRTGAPGAFHRWKVVLLVRTDKRSDSLIRVLEAGKANVILPKSSPSGITHVIASNARIKAEKEKD

SEQ ID NO: 4870 - protein, 80 aa, Synthetic construct
DALSNGHVEIGKLLLQHGGPVLLQQRNAKGELPLDYVVSPQIKEELFAITKIEDTVENFHAQAEKHFHYQQLEFGSFLLS

SEQ ID NO: 4871 - protein, 80 aa, Synthetic construct
EALVKLLLKLDCTFIKSEKYKNCTHLIAERLCKSEKFLAACAAGKWILTKDYIIHSAKSGRWLDETTYEWGYKIEKDSRY

SEQ ID NO: 4872 - protein, 80 aa, Synthetic construct
RRKRKKGKESNCKKGVEHEKIKSTLRRHIYNRDQKEMKNSIFAEYAKESKAMAIKTDVDVVEIKNTLRKHIYRAQAVRYN

SEQ ID NO: 4873 - protein, 80 aa, Synthetic construct
IFAEYAKESKAMAIKTDVDVVEIKNTLRKHIYRAQAVRYNCIRIDKQPVYNVEVKNAEFPRGVLNLIESLIEGHFFKEAI

SEQ ID NO: 4874 - protein, 80 aa, Synthetic construct
GKLLLQHGGPVLLQQRNAKGELPLDYVVSPQIKEELFAITKIEDTVENFHAQAEKHFHYQQLEFGSFLLSRMLLNFCSIF

SEQ ID NO: 4875 - protein, 80 aa, Synthetic construct
ELCLGINELSSHPHNLLWLVQLVPNWTSRGRQLRQCLSLVIISKLLDEKHEDVPNASNLQVSVLHRYLVQMKPSDLLKKM

SEQ ID NO: 4876 - protein, 80 aa, Synthetic construct
TIENTRRHIGKGVHLYYVGGEVYAECLSDSSIFVQSRNCNYHHGFHPTTVCKIPSGCSLKIFNNQEFAQLLAQSVNHGFE

SEQ ID NO: 4877 - protein, 100 aa, Synthetic construct
RTEAIERARLHIGKGVQLECKGEGDVWVRCLSDHAVFVQSYYLDREAGRAPGDAVHKIYPSAYIKVFDLRQCHRQMQQQAATAQAAAAAQAAAVAGNIPG

SEQ ID NO: 4878 - protein, 80 aa, Synthetic construct
DNMSITNTPTSNDACLSIVHSLMCHRQGGESETFAKRAIESLVKKLKEKKDELDSLITAITTNGAHPSKCVTIQRTLDGR

SEQ ID NO: 4879 - protein, 80 aa, Synthetic construct
HSDFRPVCYEEPQHWCSVAYYELNNRVGETFQASSRSVLIDGFTDPSNNRNRFCLGLLSNVNRNSTIENTRRHIGKGVHL

SEQ ID NO: 4880 - protein, 90 aa, Synthetic construct
EKGEKKKEKNVSSFQLKLAAKAPKSEKEMDPEYEEKMKADRAKRFEFLLKQTELFAHFIQPSAQKSPTSPLNMKLGRPRIKKDEKQSLIS

SEQ ID NO: 4881 - protein, 90 aa, Synthetic construct
STRAGGLGINLASADVVILYDSDWNPQVDLQAMDRAHRIGQKKPVRVFRLITDNTVEERIVERAEIKLRLDSIVIQQGRLIDQQSNKLAK

SEQ ID NO: 4882 - protein, 80 aa, Synthetic construct
TVAAADATATIVVIEDEQPGPSTSQEEGAAAAATEATAATEKGEKKKEKNVSSFQLKLAAKAPKSEKEMDPEYEEKMKAD

SEQ ID NO: 4883 - protein, 80 aa, Synthetic construct
EEVMEYSAVFWERCNELQDIEKIMAQIERGEARIQRRISIKKALDAKIARYKAPFHQLRIQYGTSKGKNYTEEEDRFLIC

SEQ ID NO: 4884 - protein, 80 aa, Synthetic construct; identical to SEQ ID NO: 441

SEQ ID NO: 4885 - protein, 80 aa, Synthetic construct; identical to SEQ ID NO: 442

SEQ ID NO: 4886 - protein, 80 aa, Synthetic construct
RRSLVPQLRSGKFNVLLTTYEYIIKDKHILAKIRWKYMIVDEGHRMKNHHCKLTQVLNTHYVAPRRILLTGTPLQNKLPE

SEQ ID NO: 4887 - protein, 80 aa, Synthetic construct; identical to SEQ ID NO: 440

SEQ ID NO: 4888 - protein, 80 aa, Synthetic construct
SQPGALIPGDPQAMSQPNRGPSPFSPVQLHQLRAQILAYKMLARGQPLPETLQLAVQGKRTLPGLQQQQQQQQQQQQQQQ

SEQ ID NO: 4889 - protein, 80 aa, Synthetic construct; identical to SEQ ID NO: 532

SEQ ID NO: 4890 - protein, 100 aa, Synthetic construct
ESQGLPTMARRNDDISELEDLSELEDLKDAKLQTLKELFPQRSDNDLLKLIESTSTMDGAIAAALLMFGDAGGGPRKRKLSSSSEPYEEDEFNDDQSIKK

SEQ ID NO: 4891 - protein, 80 aa, Synthetic construct
KEFPNFDKQELREVLKEHEWMYTEALESLKVFAEDQDMQYVSQSEVPNGKEVSSRSQNYPKNATKTKLKQKFSMKAQNGF

SEQ ID NO: 4892 - protein, 80 aa, Synthetic construct
NKKRKKNVFNPKRVVEDSEYDSGSDVGSSLDEDYSSGEEVMEDGYKGKILHFLQDASIGELTLIPQCSQKKAQKITELRP

SEQ ID NO: 4893 - protein, 80 aa, Synthetic construct
QEGNNGPHLIVVPASTIDNWLREVNLWCPTLKVLCYYGSQEERKQIRFNIHSRYEDYNVIVTTYNCAISSSDDRSLFRRL

SEQ ID NO: 4894 - protein, 80 aa, Synthetic construct
RVIIKLNIHVGNISLVDQFEWDMSEKENSPEKFALKLCSELGLGGEFVTTIAYSIRGQLSWHQKTYAFSENPLPTVEIAI

SEQ ID NO: 4895 - protein, 80 aa, Synthetic construct
LTDTCKERESDTGKKKVEHEISEGNVATAAAAALASAATKAKHLAAVEERKIKSLVALLVETQMKKLEIKLRHFEELETI

SEQ ID NO: 4896 - protein, 80 aa, Synthetic construct
VPGNLEEEEWVRPVMKRDKQVLLHWGYYPDSYDTWIPASEIEASVEDAPTPEKPRKVHAKWILDTDTFNEWMNEEDYEVN

SEQ ID NO: 4897 - protein, 80 aa, Synthetic construct
QEEVLKEVVESEGERKTKVERDIGEGNLSTAAAAALAAAAVKAKHLAAVEERKIKSLVALLVETQMKKLEIKLRHFEELE

SEQ ID NO: 4898 - protein, 80 aa, Synthetic construct
RDIGEGNLSTAAAAALAAAAVKAKHLAAVEERKIKSLVALLVETQMKKLEIKLRHFEELETIMDREREALEYQRQQLLAD

SEQ ID NO: 4899 - protein, 80 aa, Synthetic construct
QEAIKKPLTQKRKLRIYISNTFSPSKAEGDSAGTAGTPGGTPAGDKVASWELRVEGKLLDDPSKQKRKFSSFFKSLVIEL

SEQ ID NO: 4900 - protein, 80 aa, Synthetic construct
KRKLRLYISNTFNPAKPDAEDSDGSIASWELRVEGKLLDDPSKQKRKFSSFFKSLVIELDKDLYGPDNHLVEWHRTPTTQ

SEQ ID NO: 4901 - protein, 90 aa, Synthetic construct
QLARAFTMDCITLEGDQVSHRGALTGGYYDTRKSRLELQKDVRKAEEELGELEAKLNENLRRNIERINNEIDQLMNQMQQIETQQRKFKA

SEQ ID NO: 4902 - protein, 80 aa, Synthetic construct
QGKINQMATAPDSQRLKLLREVAGTRVYDERKEESISLMKETEGKREKINELLKYIEERLHTLEEEKEELAQYQKWDKMR

SEQ ID NO: 4903 - protein, 80 aa, Synthetic construct
EKSRQLRDAQQDARDKMEDIERQVRELKTKISAMKEEKEQLSAERQEQIKQRTKLELKAKDLQDELAGNSEQRKRLLKER

SEQ ID NO: 4904 - protein, 120 aa, Synthetic construct
MTIGRMENVEVFTAEGKGRGLKATKEFWAADIIFAERAYSAVVFDSLVNFVCHTCFKRQEKLHRCGQCKFAHYCDRTCQKDAWLNHKNECSAIKRYGKVPNENIRLAARIMWRVEREGTG

SEQ ID NO: 4905 - protein, 80 aa, Synthetic construct
ERKRQLKKQYYFDCTCEHCQKKLKDDLFLGVKDNPKPSQEVVKEMIQFSKDTLEKIDKARSEGLYHEVVKLCRECLEKQE

SEQ ID NO: 4906 - protein, 80 aa, Synthetic construct
VGHGMICKAYAILLVTHGPSHPITKDLEAMRVQTEMELRMFRQNEFMYYKMREAALNNQPMQVMAEPSNEPSPALFHKKQ

SEQ ID NO: 4907 - protein, 80 aa, Synthetic construct
RSDPLAYTVCKGSRGVVCDRCLLGKEKLMRCSQCRVAKYCSAKCQKKAWPDHKRECKCLKSCKPRYPPDSVRLLGRVVFK

SEQ ID NO: 4908 - protein, 80 aa, Synthetic construct
SFTICNAEMQEVGVGLYPSISLLNHSCDPNCSIVFNGPHLLLRAVRDIEVGEELTICYLDMLMTSEERRKQLRDQYCFEC

SEQ ID NO: 4909 - protein, 80 aa, Synthetic construct
SLLNHSCDPNCSIVFNGPHLLLRAVRDIEVGEELTICYLDMLMTSEERRKQLRDQYCFECDCFRCQTQDKDADMLTGDEQ

SEQ ID NO: 4910 - protein, 80 aa, Synthetic construct
TSVQVTISTAETLRDIFLHSSSLLQPEDELFLKRLSKGYLVGKDSDAPLFYREEGNKKFQEKDYTGAAVLYSKGVSHSRP

SEQ ID NO: 4911 - protein, 80 aa, Synthetic construct
PRSFLVKKHFNASKKPNYSELDTHTVIISPYLYESYSMPVIPQPEILSSGAYSPITVWTTAAPFHAQLPNGLSPLSGYSS

SEQ ID NO: 4912 - protein, 90 aa, Synthetic construct
PAAPSSAPRTPDPAPEKPSESSAGPSTEEDFAVDFEKIYKYLSSVSRSGRSPELSAAESAVVLDLLMSLPEELPLLPCTALVEHMTETYL

SEQ ID NO: 4913 - protein, 120 aa, Synthetic construct
GLGQSQAPAASRKQGLPEAPPFLPAAPSPTPLPVQPLSLTHIGGPHVATSVPLPVTWVLTAQGLLPVPVPAVVSLPRPAGTPGPAGLLATLLPPLTETRAAQGPRAPALSSSWQPPANMN

SEQ ID NO: 4914 - protein, 80 aa, Synthetic construct
QFDGRREDMASVLEMSVQFLRLASALGPSQEQHAILASSKEMWHSLQEDVLQLTLSSQIQAGVPDPGTGASSGTRTPDVK

SEQ ID NO: 4915 - protein, 110 aa, Synthetic construct
IIPENFKGCISGHGMDIALTEPLTMEKMSNVVKYWTTCPSNTVKTENATGPEELGLPLQRSYSEHLGYFPTDLFACSESLRNGNGLELNASLSEFEKNKKISLLHSSKEK

SEQ ID NO: 4916 - protein, 80 aa, Synthetic construct
SELSTMTVSQSLEVPSTTALESYNTVAQELPTTLVGETSVTVGVDPLMAPESHILASNTMETHILASNTMDSQMLASNTM

SEQ ID NO: 4917 - protein, 80 aa, Synthetic construct
EPDATGTSKGIEFTTASTLSLVNKYDVDLSLTTQDTEHDMVISTSPSGGSEADIEGPLPAKDIHLDLPSNNNLVSKDTEE

SEQ ID NO: 4918 - protein, 80 aa, Synthetic construct
IFVKVKDTHEKSKKNKNRDKGEKEKKRDSSLRSRSKRSKSSEHKSRKRTSESRSRARKRSSKSKSHRSQTRSRSRSRRRR

SEQ ID NO: 4919 - protein, 110 aa, Synthetic construct
CLSPGSAPSLGPDGGGGGSGLRASPGPGELGKVKKEQQDGEADDDKFPVCIREAVSQVLSGYDWTLVPMPVRVNGASKSKPHVKRPMNAFMVWAQAARRKLADQYPHLHN

SEQ ID NO: 4920 - protein, 80 aa, Synthetic construct
VRVNGASKSKPHVKRPMNAFMVWAQAARRKLADQYPHLHNAELSKTLGKLWRLLNESDKRPFIEEAERLRMQHKKDHPDY

SEQ ID NO: 4921 - protein, 130 aa, Synthetic construct
AGKAAQSGDYGGAGDDYVLGSLRVSGSGGGGAGKTVKCVFLDEDDDDDDDDDELQLQIKQEPDEEDEEPPHQQLLQPPGQQPSQLLRRYNVAKVPASPTLSSSAESPEGASLYDEVRAGATSGAGGGSRL

SEQ ID NO: 4922 - protein, 80 aa, Synthetic construct; identical to SEQ ID NO: 75

SEQ ID NO: 4923 - protein, 80 aa, Synthetic construct
GSSKKCGKLKAPAAAGAKAGAGKAAQSGDYGGAGDDYVLGSLRVSGSGGGGAGKTVKCVFLDEDDDDDDDDDELQLQIKQ

SEQ ID NO: 4924 - protein, 90 aa, Synthetic construct
QESLAEKELQLLVMIHQLSTLRDQLLTAHSEQKNMAAMLFEKQQQQMELARQQQEQIAKQQQQLIQQQHKINLLQQQIQQVNMPYVMIPA

SEQ ID NO: 4925 - protein, 130 aa, Synthetic construct
IVEGKRLRVGEYKALMRTRRQDARQSYVIPPQAGQVQMSSSDVLYPRAAGMPLAQPLVEHYVPRSLDPNMPVIVNTCSLREEGEGTDDRHSVADGEMYRYSEDEDSEGEEKSDGELVVLTSDGELVVLTD

SEQ ID NO: 4926 - protein, 80 aa, Synthetic construct
SMEAKDVKGTQESLAEKELQLLVMIHQLSTLRDQLLTAHSEQKNMAAMLFEKQQQQMELARQQQEQIAKQQQQLIQQQHK

SEQ ID NO: 4927 - protein, 90 aa, Synthetic construct
AQFSSSAIQKMGEVPHTLATGALPYASTLGYQNGAFGSLSCPSQHTHTHPSPTNPGYVVPCNCTAWSASTLQPPVAYILFPGMTKTGIDP

SEQ ID NO: 4928 - protein, 80 aa, Synthetic construct
YPTAGAGAFHGAAAAAAAAAAAAGGHTHSHPSPGNPGYMIPCNCSAWPSPGLQPPLAYILLPGMGKPQLDPYPAAYAAAL

SEQ ID NO: 4929 - protein, 120 aa, Synthetic construct
YDMAGLQYSPMMPPGAQSYMNVAAAAAAASGYGGMAPSATAAAAAAYGQQPATAAAAAAAAAAMSLGPMGSVVKSEPSSPPPAIASHSQRACLGDLRDMISMYLPPGGDAADAASPLPGG

SEQ ID NO: 4930 - protein, 90 aa, Synthetic construct
AAAMSLGPMGSVVKSEPSSPPPAIASHSQRACLGDLRDMISMYLPPGGDAADAASPLPGGRLHGVHQHYQGAGTAVNGTVVNGTVPLTHI

SEQ ID NO: 4931 - protein, 150 aa, Synthetic construct
LGPSLDQSVGPRGAVETGPRASRVVKLEGPGPALGYFRGDEKGKLEAEEVMRDSMQGGAGKSPAAIREGVIKTEEPERLLEDCRLGAEPASNGLVHGSAEVILAPTSGAFGPHQQDLRIPLTLHTVPPGARIQFQGAPPSELIRLTKVPL

SEQ ID NO: 4932 - protein, 80 aa, Synthetic construct
VILAPTSGAFGPHQQDLRIPLTLHTVPPGARIQFQGAPPSELIRLTKVPLTPVPTKMQSLLEPSVKIETKDVPLTVLPSD

SEQ ID NO: 4933 - protein, 100 aa, Synthetic construct
ELIRLTKVPLTPVPTKMQSLLEPSVKIETKDVPLTVLPSDAGIPDTPFSKDRNGHVKRPMNAFMVWARIHRPALAKANPAANNAEISVQLGLEWNKLSEE

SEQ ID NO: 4934 - protein, 140 aa, Synthetic construct
TAHARFATSTIQPPREYSSVSPCPRSAPIPQASPIPHPHVYQPPPLGHPATLFGTPPRFSFHHPYFLPGPHYFPSSTCPYSRPPFGYGNFPSSMPECLSYYEDRYPKHEGIFSTLNRDYSFRDYSSECTHSENSRSCENM

SEQ ID NO: 4935 - protein, 80 aa, Synthetic construct
GLEWNKLSEEQKKPYYDEAQKIKEKHREEFPGWVYQPRPGKRKRFPLSVSNVFSGTTQNIISTNPTTVYPYRSPTYSVVI

SEQ ID NO: 4936 - protein, 80 aa, Synthetic construct
VVDTLKQRKMEELIKNEPEETPSIEKLLSKDWKDKLLAMGSGNFGEIKGTPESLAEKERQLMGMINQLTSLREQLLAAHD

SEQ ID NO: 4937 - protein, 90 aa, Synthetic construct
PESLAEKERQLMGMINQLTSLREQLLAAHDEQKKLAASQIEKQRQQMELAKQQQEQIARQQQQLLQQQHKINLLQQQIQVQGQLPPLMIP

SEQ ID NO: 4938 - protein, 80 aa, Synthetic construct
QGQLPPLMIPVFPPDQRTLAAAAQQGFLLPPGFSYKAGCSDPYPVQLIPTTMAAAAAATPGLGPLQLQQLYAAQLAAMQV

SEQ ID NO: 4939 - protein, 100 aa, Synthetic construct
RRQEMRQYFNVGQQAQIPIATAGVVYPGAIAMAGMPSPHLPSEHSSVSSSPEPGMPVIQSTYGVKGEEPHIKEEIQAEDINGEIYDEYDEEEDDPDVDYG

SEQ ID NO: 4940 - protein, 80 aa, Synthetic construct
AMAGMPSPHLPSEHSSVSSSPEPGMPVIQSTYGVKGEEPHIKEEIQAEDINGEIYDEYDEEEDDPDVDYGSDSENHIAGQ

SEQ ID NO: 4941 - protein, 140 aa, Synthetic construct
EVMGTMDAFDVHEFDQYLPLGGPAPPEPGQAYGGAYFHAGASPVWAHKSAPSASASPTETGPPRPHIKTEQPSPGHYGDQPRGSPDYGSCSGQSSATPAAPAGPFAGSQGDYGDLQASSYYGAYPGYAPGLYQYPCFHSP

SEQ ID NO: 4942 - protein, 80 aa, Synthetic construct
SLVPMPVRGGGGGALKAKPHVKRPMNAFMVWAQAARRKLADQYPHLHNAELSKTLGKLWRLLSESEKRPFVEEAERLRVQ

SEQ ID NO: 4943 - protein, 80 aa, Synthetic construct
TFPKGEPDLKKESEEDKFPVCIREAVSQVLKGYDWTLVPMPVRVNGSSKNKPHVKRPMNAFMVWAQAARRKLADQYPHLH

SEQ ID NO: 4944 - protein, 80 aa, Synthetic construct
KPHVKRPMNAFMVWAQAARRKLADQYPHLHNAELSKTLGKLWRLLNESEKRPFVEEAERLRVQHKKDHPDYKYQPRRRKS

SEQ ID NO: 4945 - protein, 120 aa, Synthetic construct
APPAPQAPPQPQAAPPQQPAAPPQQPQAHTLTTLSSEPGQSQRTHIKTEQLSPSHYSEQQQHSPQQIAYSPFNLPHYSPSYPPITRSQYDYTDHQNSSSYYSHAAGQGTGLYSTFTYMNP

SEQ ID NO: 4946 - protein, 80 aa, Synthetic construct
QQTNEQCAQKAEPTESCEQIAVQVNNGDAGREMPCPLPCDEESPEAELHNHGIQINSCSVRLVDIKKEKPFSNSKVECQA

SEQ ID NO: 4947 - protein, 100 aa, Synthetic construct
REMPCPLPCDEESPEAELHNHGIQINSCSVRLVDIKKEKPFSNSKVECQAQARTHHNQASDIIVISSEDSEGSTDVDEPLEVFISAPRSEPVINNDNPLE

SEQ ID NO: 4948 - protein, 90 aa, Synthetic construct
KQGTSKKCIQSEDKKWFTPREFEIEGDRGASKNWKLSIRCGGYTLKVLMENKFLPEPPSTRKKRILESHNNTLVDPCPENSNICEVCNKW

SEQ ID NO: 4949 - protein, 100 aa, Synthetic construct
RKKRILESHNNTLVDPCPENSNICEVCNKWGRLFCCDTCPRSFHEHCHIPSVEANKNPWSCIFCRIKTIQERCPESQSGHQESEVLMRQMLPEEQLKCEF

SEQ ID NO: 4950 - protein, 80 aa, Synthetic construct
NEMNHLPAHSHDLQRMFTEDQGVDDRLLYDIVFKHFKRNKVEISNAIKKTFPFLEGLRDRDLITNKMFEDSQDSCRNLVP

SEQ ID NO: 4951 - protein, 80 aa, Synthetic construct
ECEVCRDGGELFCCDTCSRVFHEDCHIPPVEAERTPWNCIFCRMKESPGSQQCCQESEVLERQMCPEEQLKCEFLLLKVY

SEQ ID NO: 4952 - protein, 80 aa, Synthetic construct
FISEQMYEHFQEAFRNLVPVTRVMYCVLSELEKTFGWSHLEALFSRINLMAYPDLNEIYRSFQNVCYEHSPLQMNNVNDL

SEQ ID NO: 4953 - protein, 80 aa, Synthetic construct
NGMIDAARTYSTAPGEKQGEEEGRNSPRKRNQDKEKYQESPEGRDKETFDLKTPQVTNEGEPEKGLCLLPGEGEEGSDDC

SEQ ID NO: 4954 - protein, 80 aa, Synthetic construct
TESDQACGTMDTVDIANNSTLGKPKRKRRKKRGHGWSRMRMRRQENSQQNDNSKADGQVVSSEKKANVNLKDLSKIRGRK

SEQ ID NO: 4955 - protein, 80 aa, Synthetic construct
GTLAKCIQTEDGKWFTPMEFEIKGGYARSKNWRLSVRCGGWPLRRLMEEGSLPNPPRIYYRNKKRILKSQNNSSVDPCMR

SEQ ID NO: 4956 - protein, 80 aa, Synthetic construct
TAPEKPVKQEEMAALDVDSGGGGGGGGGHGEYLQQQQQHGNGAVAAAAAAQDTQPSPLALLAATCSKIGPPSPGDDEEEA

SEQ ID NO: 4957 - protein, 100 aa, Synthetic construct
QPVVQHLQLQESQQPTSQAQIVQGITPQTIHGVQASGQNISQQALQNLQLQLNPGTFLIQAQTVTPSGQVTWQTFQVQGVQNLQNLQIQNTAAQQITLTP

SEQ ID NO: 4958 - protein, 140 aa, Synthetic construct
TAAQQITLTPVQTLTLGQVAAGGAFTSTPVSLSTGQLPNLQTVTVNSIDSAGIQLHPGENADSPADIRIKEEEPDPEEWQLSGDSTLNTNDLTHLRVQVVDEEGDQQHQEGKRLRRVACTCPNCKEGGGRGTNLGKKKQH

SEQ ID NO: 4959 - protein, 90 aa, Synthetic construct
GTNLGKKKQHICHIPGCGKVYGKTSHLRAHLRWHSGERPFVCNWMYCGKRFTRSDELQRHRRTHTGEKKFVCPECSKRFMRSDHLAKHIK

SEQ ID NO: 4960 - protein, 80 aa, Synthetic construct
PLALLAATCSRIGQPGAAAPPDFLQVPYDPALGSPSRLFHPWTADMPAHSPGALPPPHPSLGLTPQKTHLQPSFGAAHEL

SEQ ID NO: 4961 - protein, 80 aa, Synthetic construct; identical to SEQ ID NO: 483

SEQ ID NO: 4962 - protein, 130 aa, Synthetic construct
GSASPGLSSVSPSHLLLPPDTVSRTGLEKAAAGAVGLERRDWSPSPPATPEQGLSAFYLSYFDMLYPEDSSWAAKAPGASSREEPPEEPEQCPVIDSQAPAGSLDLVPGGLTLEEHSLEQVQSMVVGEVL

SEQ ID NO: 4963 - protein, 80 aa, Synthetic construct
IGPETESENEFRPLDERIDEFHPKATRTLFIGNLEKTTTYHDLRNIFQRFGEIVDIDIKKVNGVPQYAFLQYCDIASVCK

SEQ ID NO: 4964 - protein, 80 aa, Synthetic construct
PVVKVVFDRLKGMALVLYNEIEYAQAAVKETKGRKIGGNKIKVDFANRESQLAFYHCMEKSGQDIRDFYEMLAERREERR

SEQ ID NO: 4965 - protein, 90 aa, Synthetic construct
GVARRMTVETDYCLLLALPCGRDQEDVVSQTESLKAAFITYLQAKQAAGIINVPNPGSNQPAYVLQIFPPCEFSESHLSRLAPDLLASIS

SEQ ID NO: 4966 - protein, 80 aa, Synthetic construct
RPPKTRRRADEEEENEAKEPAETLKPPEGWRSPRSQKTAAGGGPQGKKGKNEPKVDATRPEATTEVGPQIGVKESSMEPK

SEQ ID NO: 4967 - protein, 80 aa, Synthetic construct
LQACKMEGFPLVPPPSEDLVPYDTDLYQRQTHEYYPYLSSDGESHSDHYWDFHPHHVHSEFESFAENNFTELQSVQPPQL

SEQ ID NO: 4968 - protein, 130 aa, Synthetic construct
TCVEQDKLGQAFEDAFEVLRQHSTGDLQYSPDYRNYLALINHRPHVKGNSSCYGVLPTEEPVYNWRTVINSAADFYFEGNIHQSLQNITENQLVQPTLLQQKGGKGRKKLRLFEYLHESLYNPEMASCIQ

SEQ ID NO: 4969 - protein, 100 aa, Synthetic construct
SSDNSHQDRPEEPSPGGCPRLEEVKIPHGVKLVCYLGSGPVIQLLGAISHGQAGGQLPPKLEVLEDLMEVSSPSPAQRLRRKKRPMVQGPAGCQVFQPSP

SEQ ID NO: 4970 - protein, 80 aa, Synthetic construct
RGRGRLWPEPENWQHPGRGQWPPEPGLRQSQHPYSVAPAGHGFGRGQHFHRDSCPHQALLRHLESLATMSHQLQALLCPQ

SEQ ID NO: 4971 - protein, 90 aa, Synthetic construct
FVVRIVPSPDWFVGVDSLDLCDGDRWREQAALDLYPYDAGTDSGFTFSSPNFATIPQDTVTEITSSSPSHPANSFYYPRLKALPPIARVT

SEQ ID NO: 4972 - protein, 80 aa, Synthetic construct
VSCPKSEVRAKFKFSILNAKGEETKAMESQRAYRFVQGKDWGFKKFIRRDFLLDEANGLLPDDKLTLFCEVSVVQDSVNI

SEQ ID NO: 4973 - protein, 80 aa, Synthetic construct
MKKLERQRAQEEQAKRLEEEEAAAEKEDRGRPYTLSVALPGSILDNAQSPELRTYLAGQIARACAIFCVDEIVVFDEEGQ

SEQ ID NO: 4974 - protein, 80 aa, Synthetic construct
EGIVVDRPTRPGHGSFVNCGMKKEVKIDKNLEPGLRVTVRLNQQQHPDCKTYHGKVVSSQDPRTKAGLYWGYTVRLASCL

SEQ ID NO: 4975 - protein, 90 aa, Synthetic construct
ERGSDVASAQLPNFRHALVVFGGLQGLEAGADADPNLEVAEPSVLFDLYVNTCPGQGSRTIRTEEAILISLAALQPGLIQGLIQAGARHT

SEQ ID NO: 4976 - protein, 110 aa, Synthetic construct
TELSKLIKSYQKSQKDISETLGNNGVGFQTQPNNEVSAKHELEEQVKKLSHDTYSLQLMAALLENECQILQQRVEILKELHHQKQGTLQEKPIQINYKQDKKNQKPSEAK

SEQ ID NO: 4977 - protein, 80 aa, Synthetic construct
CGKLQTLAVLLRQLKAEGHRVLIFTQMTRMLDVLEQFLTYHGHLYLRLDGSTRVEQRQALMERFNADKRIFCFILSTRSG

SEQ ID NO: 4978 - protein, 80 aa, Synthetic construct
ELRKEGFWSLKRLPKVPEPPRPKGHWDYLCEEMQWLSADFAQERRWKRGVARKVVRMVIRHHEEQRQKEERARREEQAKL

SEQ ID NO: 4979 - protein, 100 aa, Synthetic construct
ADEMGLGKTIQTISLLAHLACEKGNWGPHLIIVPTSVMLNWEMELKRWCPSFKILTYYGAQKERKLKRQGWTKPNAFHVCITSYKLVLQDHQAFRRKNWR

SEQ ID NO: 4980 - protein, 90 aa, Synthetic construct
PAPTPLKMYPSMPAFSPGPGIKEESVPLSILQTPTPQPLPGALLPQSFPAPAPPQFSSTPVLGYPSPPGGFSTGSPPGNTQQPLPGLPLA

SEQ ID NO: 4981 - protein, 100 aa, Synthetic construct
GTEAKLNKSAVLRKAIDYIRFLQHSNQKLKQENLSLRTAVHKSKSLKDLVSACGSGGNTDVLMEGVKTEVEDTLTPPPSDAGSPFQSSPLSLGSRGSGSG

SEQ ID NO: 4982 - protein, 80 aa, Synthetic construct; identical to SEQ ID NO: 289

SEQ ID NO: 4983 - protein, 100 aa, Synthetic construct
GGYGPVSGAVSGAKPGKKTRGRVKIKMEFIDNKLRRYTTFSKRKTGIMKKAYELSTLTGTQVLLLVASETGHVYTFATRKLQPMITSETGKALIQTCLNS

SEQ ID NO: 4984 - protein, 90 aa, Synthetic construct
SKRKTGIMKKAYELSTLTGTQVLLLVASETGHVYTFATRKLQPMITSETGKALIQTCLNSPDSPPRSDPTTDQRMSATGFEETDLTYQVS

SEQ ID NO: 4985 - protein, 80 aa, Synthetic construct
AIRDIDLKNRRGGPPFAFVEFEDPRDAEDAVYGRDGYDYDGYRLRVEFPRSGRGTGRGGGGGGGGGAPRGRYGPPSRRSE

SEQ ID NO: 4986 - protein, 80 aa, Synthetic construct
YQARERDVERFFKGYGKILEVDLKNGYGFVEFDDLRDADDAVYELNGKDLCGERVIVEHARGPRRDGSYGSGRSGYGYRR

SEQ ID NO: 4987 - protein, 80 aa, Synthetic construct
VDLKNGYGFVEFEDSRDADDAVYELNGKELCGERVIVEHARGPRRDRDGYSYGSRSGGGGYSSRRTSGRDKYGPPVRTEY

SEQ ID NO: 4988 - protein, 80 aa, Synthetic construct
EAQKLQAMHREKYPNYKYRPRRKAKMLPKNCSLLPADPASVLCSEVQLDNRLYRDDCTKATHSRMEHQLGHLPPINAASS

SEQ ID NO: 4989 - protein, 80 aa, Synthetic construct
GRLRLSRQGIIFKNSKTGKVDNIQAGELTEGIWRRVALGHGLKLLTKNGHVYKYDGFRESEFEKLSDFFKTHYRLELMEK

SEQ ID NO: 4990 - protein, 80 aa, Synthetic construct
YVHKPPVHIRFDEISFVNFARGTTTTRSFDFEIETKQGTQYTFSSIEREEYGKLFDFVNAKKLNIKNRGLKEGMNPSYDE

SEQ ID NO: 4991 - protein, 80 aa, Synthetic construct
MSAYMLWLNASREKIKSDHPGISITDLSKKAGEIWKGMSKEKKEEWDRKAEDARRDYEKAMKEYEGGRGESSKRDKSKKK

SEQ ID NO: 4992 - protein, 130 aa, Synthetic construct
SQPPFCSSDDNESNSESAENGWDSGSNFSEETKPPRVPKYVLTDHKKDLLEVPEIKTEGDKFIPCENRCDSETERKDPQNALAEPLDGNAQPSFPDVEEEDSESLAVMTEEGSDLEKAKGNLSLLEQAIA

SEQ ID NO: 4993 - protein, 110 aa, Synthetic construct
IKLKATGGIESDEEIRHLDEEIKELNESNLKIEADMMKLQTQITSMESNLKTIEEENKLIEQNNESLLKELAGLSQALISSLADIQLPQMGPISEQNFEAYVNTLTDMYS

SEQ ID NO: 4994 - protein, 80 aa, Synthetic construct
KTIEEENKLIEQNNESLLKELAGLSQALISSLADIQLPQMGPISEQNFEAYVNTLTDMYSNLERDYSPECKALLESIKQA

SEQ ID NO: 4995 - protein, 80 aa, Synthetic construct
EGSDLEKAKGNLSLLEQAIALQAERGCVFHNTYKELDRFLLEHLAGERRQTKVIDMGGRQIFNNKHSPRPEKRETKCPIP

SEQ ID NO: 4996 - protein, 80 aa, Synthetic construct
TQSPGRASSYSYGQCSEDTHIAAAAAILNLSTRCREATDILSNKPQSLHAKGAEIEVDENGTLDLSMKKNRILDKSAPLT

SEQ ID NO: 4997 - protein, 80 aa, Synthetic construct
IAAAAAILNLSTRCREATDILSNKPQSLHAKGAEIEVDENGTLDLSMKKNRILDKSAPLTSSNTSIPTPSSSPFKTSSIL

SEQ ID NO: 4998 - protein, 80 aa, Synthetic construct
KVMCIEHEIKSLEDLQDEYDFKCKTLQNREHETNGVAKSDQKQEQLLLKKMYLMLDNKRKEVVHKIIELLNVTELTQNAL

SEQ ID NO: 4999 - protein, 80 aa, Synthetic construct
NVTELTQNALINDELVEWKRRQQSACIGGPPNACLDQLQNWFTIVAESLQQVRQQLKKLEELEQKYTYEHDPITKNKQVL

SEQ ID NO: 5000 - protein, 80 aa, Synthetic construct
VTFPDIIRNYKVMAAENIPENPLKYLYPNIDKDHAFGKYYSRPKEAPEPMELDGPKGTGYIKTELISVSEVHPSRLQTTD

SEQ ID NO: 5001 - protein, 80 aa, Synthetic construct
LDSKVRNVKDKVMCIEHEIKSLEDLQDEYDFKCKTLQNREHETNGVAKSDQKQEQLLLKKMYLMLDNKRKEVVHKIIELL

SEQ ID NO: 5002 - protein, 80 aa, Synthetic construct
FKCKTLQNREHETNGVAKSDQKQEQLLLKKMYLMLDNKRKEVVHKIIELLNVTELTQNALINDELVEWKRRQQSACIGGP

SEQ ID NO: 5003 - protein, 120 aa, Synthetic construct
SISQLKDQQDVFCFRYKIQAKGKTPSLDPHQTKEQKILQETLNELDKRRKEVLDASKALLGRLTTLIELLLPKLEEWKAQQQKACIRAPIDHGLEQLETWFTAGAKLLFHLRQLLKELKG

SEQ ID NO: 5004 - protein, 90 aa, Synthetic construct
QQKACIRAPIDHGLEQLETWFTAGAKLLFHLRQLLKELKGLSCLVSYQDDPLTKGVDLRNAQVTELLQRLLHRAFVVETQPCMPQTPHRP

SEQ ID NO: 5005 - protein, 90 aa, Synthetic construct
VIEPTLCMVSQTVPEPDQGPVSQPVPEPDLPCDLRHLNTEPMEIFRNCVKIEEIMPNGDPLLAGQNTVDEVYVSRPSHFYTDGPLMPSDF

SEQ ID NO: 5006 - protein, 80 aa, Synthetic construct
SRYLEKPMEIARIVARCLWEESRLLQTAATAAQQGGQANHPTAAVVTEKQQMLEQHLQDVRKRVQDLEQKMKVVENLQDD

SEQ ID NO: 5007 - protein, 80 aa, Synthetic construct
QMLEQHLQDVRKRVQDLEQKMKVVENLQDDFDFNYKTLKSQGDMQDLNGNNQSVTRQKMQQLEQMLTALDQMRRSIVSEL

SEQ ID NO: 5008 - protein, 80 aa, Synthetic construct
QGDMQDLNGNNQSVTRQKMQQLEQMLTALDQMRRSIVSELAGLLSAMEYVQKTLTDEELADWKRRQQIACIGGPPNICLD

SEQ ID NO: 5009 - protein, 80 aa, Synthetic construct
YSDSFPMELRQFLAPWIESQDWAYAASKESHATLVFHNLLGEIDQQYSRFLQESNVLYQHNLRRIKQFLQSRYLEKPMEI

SEQ ID NO: 5010 - protein, 80 aa, Synthetic construct
FDFNYKTLKSQGDMQDLNGNNQSVTRQKMQQLEQMLTALDQMRRSIVSELAGLLSAMEYVQKTLTDEELADWKRRQQIAC

SEQ ID NO: 5011 - protein, 80 aa, Synthetic construct
ETDLLMNTMLIEELQDWKRRQQIACIGGPLHNGLDQLQNCFTLLAESLFQLRRQLEKLEEQSTKMTYEGDPIPMQRTHML

SEQ ID NO: 5012 - protein, 80 aa, Synthetic construct
LVLKTLIQFTVKLRLLIKLPELNYQVKVKASIDKNVSTLSNRRFVLCGTNVKAMSIEESSNGSLSVEFRHLQPKEMKSSA

SEQ ID NO: 5013 - protein, 100 aa, Synthetic construct
LKKLQQTQEYFIIQYQESLRIQAQFAQLAQLSPQERLSRETALQQKQVSLEAWLQREAQTLQQYRVELAEKHQKTLQLLRKQQTIILDDELIQWKRRQQL

SEQ ID NO: 5014 - protein, 80 aa, Synthetic construct
HYLAQWIESQPWDAIDLDNPQDRAQATQLLEGLVQELQKKAEHQVGEDGFLLKIKLGHYATQLQKTYDRCPLELVRCIRH

SEQ ID NO: 5015 - protein, 90 aa, Synthetic construct
FIIQYQESLRIQAQFGPLAQLSPQERLSRETALQQKQVSLEAWLQREAQTLQQYRVELAEKHQKTLQLLRKQQTIILDDELIQWKRRQQL

SEQ ID NO: 5016 - protein, 80 aa, Synthetic construct
SVSWSQFNRENLPGRNYTFWQWFDGVMEVLKKHLKPHWNDGAILGFVNKQQAHDLLINKPDGTFLLRFSDSEIGGITIAW

SEQ ID NO: 5017 - protein, 80 aa, Synthetic construct
EGLVQELQKKAEHQVGEDGFLLKIKLGHYATQLQNTYDRCPMELVRCIRHILYNEQRLVREANNGSSPAGSLADAMSQKH

SEQ ID NO: 5018 - protein, 80 aa, Synthetic construct
DVLEKLGEGSYGSVYKAIHKETGQIVAIKQVPVESDLQEIIKEISIMQQCDSPHVVKYYGSYFKNTDLWIVMEYCGAGSV

SEQ ID NO: 5019 - protein, 80 aa, Synthetic construct
METVQLRNPPRRQLKKLDEDSLTKQPEEVFDVLEKLGEGSYGSVYKAIHKETGQIVAIKQVPVESDLQEIIKEISIMQQC

SEQ ID NO: 5020 - protein, 80 aa, Synthetic construct
KRQLQQLQEGTLQEYQKRMKKLDQQYKERIRNAELFLQLETEQVERNYIKEKKAAVKEFEDKKVELKENLIAELEEKKKM

SEQ ID NO: 5021 - protein, 80 aa, Synthetic construct
IAQKRMQGSLEAHVNGFRFTSVRGDKVDILYNNIKHALFQPCDGEMIIVLHFHLKNAIMFGKKRHTDVQFYTEVGEITTD

SEQ ID NO: 5022 - protein, 90 aa, Synthetic construct
HFHLKNAIMFGKKRHTDVQFYTEVGEITTDLGKHQHMHDRDDLYAEQMEREMRHKLKTAFKNFIEKVEALTKEELEFEVPFRDLGFNGAP

SEQ ID NO: 5023 - protein, 80 aa, Synthetic construct
QETLSCLVVNLYPGNEGYSLMLRGKNGSDSETIRLPYEEGELLEYLDAEELPPILVDLLEKSQVNIFHCGCVIAEIRDYR

SEQ ID NO: 5024 - protein, 80 aa, Synthetic construct
QAASQAGVPFGLKNTSSLRPLNLLQLPGGSLIFNTLQQQQQQLSQFTPQQPQQPTTCSPQQPGEQGSEQGSTSQEQALSA

SEQ ID NO: 5025 - protein, 80 aa, Synthetic construct
KNKPVKELRDDQFLKICLAEDEGLLTTDISIDLKGVEGYGNDQTYFEEIKQFYYRDEFSHQVQEWNRQRTMAIERALQQF

SEQ ID NO: 5026 - protein, 80 aa, Synthetic construct
DDDEDEGEEDEGSDSGDSEDDVGHKKRKRTSFDDRLEDDDFDLIEENLGVKVKRGQKYRRVKKMSDDEDDDEEEYGKEEH

SEQ ID NO: 5027 - protein, 100 aa, Synthetic construct
TMLDIPSEPCSLTIHTIQLIQHNRRLRNLIATAQAQNQQQTEGVKTEESEPLPSCPGSPPLPDDLLPLDCKNPNAPFQIRHSDPESDFYRGKGEPVTELS

SEQ ID NO: 5028 - protein, 130 aa, Synthetic construct
VDREARLGQTPFPDVMEQVFHEVGIGSVLSLQKFWQHRIKDYHSYMLQISKQLSEEYERIVNPEKATEDAKPVKIKEEPVSDITFPVSEELEADLASGDQSLPMGVLGAQSERFPSNLEVEASPQASSAE

SEQ ID NO: 5029 - protein, 150 aa, Synthetic construct
KPVKIKEEPVSDITFPVSEELEADLASGDQSLPMGVLGAQSERFPSNLEVEASPQASSAEVNASPLWNLAHVKMEPQESEEGNVSGHGVLGSDVFEEPMSGMSEAGIPQSPDDSDSSYGSHSTDSLMGSSPVFNQRCKKRQRCKKRMRKI

SEQ ID NO: 5030 - protein, 100 aa, Synthetic construct
QKRKERKAQRQAAKNQMYDDYYYYGPPHMPPPTRGRGRGGRGGYGYPPDYYGYEDYYDYYGYDYHNYRGGYEDPYYGYEDFQVGARGRGGRGARGAAPSR

SEQ ID NO: 5031 - protein, 80 aa, Synthetic construct
PSDKPPCRGCSSYLMEPYIKCAECGPPPFFLCLQCFTRGFEYKKHQSDHTYEIMTSDFPVLDPSWTAQEEMALLEAVMDC

SEQ ID NO: 5032 - protein, 90 aa, Synthetic construct
MAELGKKYCVYCLAEVSPLRFRCTECQDIELCPECFSAGAEIGHHRRYHGYQLVDGGRFTLWGPEAEGGWTSREEQLLLDAIEQFGFGNW

SEQ ID NO: 5033 - protein, 80 aa, Synthetic construct
QQQLGYMPLRDDYEIEYDQDAETLISGLSVNYDDDDVEIELKRAHVDMYVRKLKERQRRKNIARDYNLVPAFLGKDKKEK

SEQ ID NO: 5034 - protein, 100 aa, Synthetic construct
NYDDDDVEIELKRAHVDMYVRKLKERQRRKNIARDYNLVPAFLGKDKKEKEKALKRKITKEEKELRLKLRPLYQFMSCKEFDDLFENMHKEKMLRAKIRE

SEQ ID NO: 5035 - protein, 80 aa, Synthetic construct
AELKALSAHNRTKKHDLLRLAKEEVSRQELRQRVRMADNEVMDAFRKIMAARQKKRTPTKKEKDQAWKTLKERESILKLL

SEQ ID NO: 5036 - protein, 80 aa, Synthetic construct
AISNGVYVLPSAANGDVKPVVSSTPLVDFLMQLEDYTPTIPDAVTGYYLNRAGFEASDPRIIRLISLAAQKFISDIANDA

SEQ ID NO: 5037 - protein, 80 aa, Synthetic construct
KARIAALMQSITGRSVSENTAIAMAGIAKVFVGEVVEEALDVCEMWGETPPLQPKHLREAVRRLKPKGILPNSNYKKIMF

SEQ ID NO: 5038 - protein, 80 aa, Synthetic construct
RARVAGLMRAITGSSVSENAAIAMAGIAKLFVGEVVEEALDVCEMWGETLPLQPKHLREAVRRLKPKGLFPNSNCKRIMF

SEQ ID NO: 5039 - protein, 90 aa, Synthetic construct
MANSTAVVKIPGTPGAGGRLSPENNQVLTKKKLQDLVREVDPNEQLDEDVEEMLLQIADDFIESVVTAACQLARHRKSSTLEVKDVQLHL

SEQ ID NO: 5040 - protein, 90 aa, Synthetic construct
SLAGWLPSIKTRNVMAYNVQQGFAPTLDDDKPWYSIFPIDNEDLVYGRWEDNIIWDAQAMPRLLEPPVLALDPNDENLILEIPDEKEEAT

SEQ ID NO: 5041 - protein, 80 aa, Synthetic construct
EAAFIYNDPTLEVCHSESKQRNLNYFSNAYAAAVSAVDPDAGNGELCIKVPSELWKHVDELKVLKIHINFSLDQPKGGLH

SEQ ID NO: 5042 - protein, 80 aa, Synthetic construct
RNLNYFSNAYAAAVSAVDPDAGNGELCIKVPSELWKHVDELKVLKIHINFSLDQPKGGLHFVVPSVEGSMAERGAHVFSC

SEQ ID NO: 5043 - protein, 90 aa, Synthetic construct
APVPLPLLAQAAAGPALLPSPGPAASGASAKAPVRSVVTETVSTYVIRDEWGNQIWICPGCNKPDDGSPMIGCDDCDDWYHWPCVGIMTA

SEQ ID NO: 5044 - protein, 80 aa, Synthetic construct
KAPVRSVVTETVSTYVIRDEWGNQIWICPGCNKPDDGSPMIGCDDCDDWYHWPCVGIMTAPPEEMQWFCPKCANKKKDKK

SEQ ID NO: 5045 - protein, 80 aa, Synthetic construct
VSKNNVLQFPQPGSKDAEERKEYIPDYLPPIVSSQEEEEEEQVPTDGGTSAEAMQVPLEEDDELEEEEIINDENFLGKRP

SEQ ID NO: 5046 - protein, 80 aa, Synthetic construct
DKREKEKVKDKGREDKMKAPAPPLVLPPKELALPLFSPATASRVPAMLPSLLPVLPEKLFEEKEKVKEKEKKKDKKEKKK

SEQ ID NO: 5047 - protein, 80 aa, Synthetic construct
VAVKLEPEGPPTLLPPQAGDGAGEGSGGTTNNGPNGGGGNVAASSSTGGDGGTPKPTVAVSAAAPAGAAPVPAAAPDAGA

SEQ ID NO: 5048 - protein, 80 aa, Synthetic construct
CVRIFTGHKGPIHSLTFSPNGRFLATGATDGRVLLWDIGHGLMVGELKGHTDTVCSLRFSRDGEILASGSMDNTVRLWDA

SEQ ID NO: 5049 - protein, 110 aa, Synthetic construct
LNTAEISPDSKLLAAGFDNSCIKLWSLRSKKLKSEPHQVDVSRIHLACDILEEEDDEDDNAGTEMKILRGHCGPVYSTRFLADSSGLLSCSEDMSIRYWDLGSFTNTVLY

SEQ ID NO: 5050 - protein, 80 aa, Synthetic construct
VRLFTGHRGPVLSLAFSPNGKYLASAGEDQRLKLWDLASGTLYKELRGHTDNITSLTFSPDSGLIASASMDNSVRVWDIR

SEQ ID NO: 5051 - protein, 80 aa, Synthetic construct; identical to SEQ ID NO: 457

SEQ ID NO: 5052 - protein, 120 aa, Synthetic construct
SPYEMEITDGPHTKVVRRIFTNSRERWRQQNVNGAFAELRKLIPTHPPDKKLSKNEILRLAMKYINFLAKLLNDQEEEGTQRAKTGKDPVVGAGGGGGGGGGGAPPDDLLQDVLSPNSSC

SEQ ID NO: 5053 - protein, 80 aa, Synthetic construct
APALDVDWQNNTTFASCSTDMCIHVCRLGCDRPVKTFQGHTNEVNAIKWDPSGMLLASCSDDMTLKIWSMKQEVCIHDLQ

SEQ ID NO: 5054 - protein, 110 aa, Synthetic construct
DRPVKTFQGHTNEVNAIKWDPSGMLLASCSDDMTLKIWSMKQEVCIHDLQAHNKEIYTIKWSPTGPATSNPNSNIMLASASFDSTVRLWDIERGVCTHTLTKHQEPVYSV

SEQ ID NO: 5055 - protein, 80 aa, Synthetic construct
MTLKIWSMKQDNCVHDLQAHNKEIYTIKWSPTGPGTNNPNANLMLASASFDSTVRLWDVDRGICIHTLTKHQEPVYSVAF

SEQ ID NO: 5056 - protein, 80 aa, Synthetic construct
IHTLTKHQEPVYSVAFSPDGRYLASGSFDKCVHIWNTQTGALVHSYRGTGGIFEVCWNAAGDKVGASASDGSVCVLDLRK

SEQ ID NO: 5057 - protein, 80 aa, Synthetic construct
SIIQKGLQYVEAEVSINEDGTLFDGRPIESLSLIDAVMPDVVQTRQQAYRDKLAQQQAAAAAAAAAAASQQGSAKNGENT

SEQ ID NO: 5058 - protein, 80 aa, Synthetic construct
EKLTQQQASAAATEASAMAKAATMTPAAISQQNPPKNREATVNGEENGAHEINNHSKPMEIDGDVEIPPNKATVLRGHES

SEQ ID NO: 5059 - protein, 90 aa, Synthetic construct
LAFSADGHTMLSSGRDKICIIWDLQSCQATRTVPVFESVEAAVLLPEEPVSQLGVKSPGLYFLTAGDQGTLRVWEAASGQCVYTQAQPPG

SEQ ID NO: 5060 - protein, 80 aa, Synthetic construct
PIQNTNSLSILEEQQRQQQQQQQQQQQQQQQQQQQQQQQQQQQQQQQQQQQQQQAVAAAAVQQSTSQQATQGTSGQAPQL

SEQ ID NO: 5061 - protein, 80 aa, Synthetic construct
ATPASESSGIVPQLQNIVSTVNLGCKLDLKTIALRARNAEYNPKRFAAVIMRIREPRTTALIFSSGKMVCTGAKSEEQSR

SEQ ID NO: 5062 - protein, 80 aa, Synthetic construct
PSRYMAHHPVITNGAYNSLLSNSSPQGYPTAGYPYPQQYGHSYQGAPFYQFSSTQPGLVPGKAQVYLCNRPLWLKFHRHQ

SEQ ID NO: 5063 - protein, 80 aa, Synthetic construct
QPGRVQTFTFPETQFIAVTAYQNTDITQLKIDHNPFAKGFRDNYDTIYTGCDMDRLTPSPNDSPRSQIVPGARYAMAGSF

SEQ ID NO: 5064 - protein, 90 aa, Synthetic construct
ASPGGSPKGSPARSLARPGTPLPSPQAPRVDLQGAELWKRFHEIGTEMIITKAGRRMFPAMRVKISGLDPHQQYYIAMDIVPVDNKRYRY

SEQ ID NO: 5065 - protein, 80 aa, Synthetic construct
FHLSQHMLASQGIPMPTFGGLFPYPYTYMAAAAAAASALPATSAAAAAAAAAGSLSRSPFLGSARPRLRFSPYQIPVTIP

SEQ ID NO: 5066 - protein, 90 aa, Synthetic construct
SGCGSDSGYGNSSESLEEKDIQMELQGSELWKRFHDIGTEMIITKAGRRMFPSVRVKVKGLDPGKQYHVAIDVVPVDSKRYRYVYHSSQW

SEQ ID NO: 5067 - protein, 80 aa, Synthetic construct
GADTQSGSSGSSPVTSSGGAPSPLNSLLSPLCFSPMFHLPTSSLGMPCPEAYLPNVNLPLCYKICPTNFWQQQPLVLPAP

SEQ ID NO: 5068 - protein, 80 aa, Synthetic construct
LCFSPMFHLPTSSLGMPCPEAYLPNVNLPLCYKICPTNFWQQQPLVLPAPERLASSNSSQSLAPLMMEVPMLSSLGVTNS

SEQ ID NO: 5069 - protein, 80 aa, Synthetic construct
NQMLYGLQSPGNIFLPNSITPEALSCSFHPSYDFYRYNFSMPSRLISGSNHLKVNDDSQVSFGEGKCNHVHWYPAINHYL

SEQ ID NO: 5070 - protein, 80 aa, Synthetic construct
VEALVGRPSKRKLQDPIQAEQPELREKKGGEEEEERRSSAAGKSEPLEKQPKTEPSTSASSGCGSDSGYGNSSESLEEKD

SEQ ID NO: 5071 - protein, 80 aa, Synthetic construct
AGRRMFPSYKVKVTGMNPKTKYILLIDIVPADDHRYKFCDNKWMVAGKAEPAMPGRLYVHPDSPATGAHWMRQLVSFQKL

SEQ ID NO: 5072 - protein, 80 aa, Synthetic construct
LGAPSKSPSSPQAAFTQQGMEGIKVFLHERELWLKFHEVGTEMIITKAGRRMFPSYKVKVTGLNPKTKYILLMDIVPADD

SEQ ID NO: 5073 - protein, 80 aa, Synthetic construct
NNHLDPFGHIILNSMHKYQPRLHIVKADENNGFGSKNTAFCTHVFPETAFIAVTSYQNHKITQLKIENNPFAKGFRGSDD

SEQ ID NO: 5074 - protein, 90 aa, Synthetic construct
NPQQQRMAAIGTDKELSDLLDFSAMFSPPVNSGKTRPTTLGSSQFSGSGIDERGGTTSWGTSGQPSPSYDSSRGFTDSPHYSDHLNDSRL

SEQ ID NO: 5075 - protein, 100 aa, Synthetic construct
GNHSVLSSTVTTSSTDLNHKTQENYRGGLQSQSGTVVTTEIKTENKEKDENLHEPPSSDDMKSDDESSQKDIKVSSRGRTSSTNEDEDLNPEQKIEREKE

SEQ ID NO: 5076 - protein, 80 aa, Synthetic construct
NGMSQPGFGGILGTSTSHMSQSSSYGNLHSHDRLSYPPHSVSPTDINTSLPPMSSFHRGSTSSSPYVAASHTPPINGSDS

SEQ ID NO: 5077 - protein, 80 aa, Synthetic construct
NLHEPPSSDDMKSDDESSQKDIKVSSRGRTSSTNEDEDLNPEQKIEREKERRMANNARERLRVRDINEAFKELGRMCQLH

SEQ ID NO: 5078 - protein, 110 aa, Synthetic construct
GGGAGPVVVVRQRQAANARERDRTQSVNTAFTALRTLIPTEPVDRKLSKIETVRLASSYIAHLANVLLLGDSADDGQPCFRAAGSAKGAVPAAADGGRQPRSICTFCLSN

SEQ ID NO: 5079 - protein, 90 aa, Synthetic construct
AHSLGHMSADTRIGRNDRLNPTLSQSVILPGGLVSMETKLKSQSGQIKEEDFEQSKSQASFNNKKSGDHCHPPSIKHESYRGNASPGAAT

SEQ ID NO: 5080 - protein, 80 aa, Synthetic construct
SEDCGGGPRSLSRGLPCKKAATEGSSEKTVLDSKPSVPTTSEGGPELELQIPELPLDSNEFWVHEGCILWANGIYLVCGR

SEQ ID NO: 5081 - protein, 80 aa, Synthetic construct
AAAAAAAMASETSGHQGYQGFRKEAGDFYYMAGNKDPVTTGTPQPPQRRPSGPVQSYGPPQGSSFGNQYGSEGHVGQFQA

SEQ ID NO: 5082 - protein, 80 aa, Synthetic construct
QSGHSAAGPGFTSRTEPSKSPGSLRYSYKDSFGSAVPRNVSGFPQYPTGQEKGDFTGHGERKGRNEKFPSLLQEVLQGYH

SEQ ID NO: 5083 - protein, 80 aa, Synthetic construct
DSRPTPMRRVPGRVGGREGMRGRSPSQYHDFAEKLKMSPGRSRGPGGDPHHMNPHMTFSERANRSSLHTPFSPNSETLAS

SEQ ID NO: 5084 - protein, 90 aa, Synthetic construct
GRLLHSSKEGADKAFNSYAHLSHSQDIKSIPKRDSSKDLPSPDSRNCPAVTLTSPAKTKILPPRKGRGLKLEAIVQKITSPNIRRSASSN

SEQ ID NO: 5085 - protein, 90 aa, Synthetic construct
PKRDSSKDLPSPDSRNCPAVTLTSPAKTKILPPRKGRGLKLEAIVQKITSPNIRRSASSNSAEAGGDTVTLDDILSLKSGPPEGGSVAVQ

SEQ ID NO: 5086 - protein, 80 aa, Synthetic construct
ATEGSSEKTVLDSKPSVPTTSEGGPELELQIPELPLDSNEFWVHEGCILWANGIYLVCGRLYGLQEALEIAREMKCSHCQ

SEQ ID NO: 5087 - protein, 110 aa, Synthetic construct
APTKKSPLSGVSQEGKQVQRNAANARERARMRVLSKAFSRLKTTLPWVPPDTKLSKLDTLRLASSYIAHLRQILANDKYENGYIHPVNLTWPFMVAGKPESDLKEVVTAS

SEQ ID NO: 5088 - protein, 110 aa, Synthetic construct
PRGTRAGGLALGRSEASPENAARERSRVRTLRQAFLALQAALPAVPPDTKLSKLDVLVLAASYIAHLTRTLGHELPGPAWPPFLRGLRYLHPLKKWPMRSRLYAGGLGYS

SEQ ID NO: 5089 - protein, 110 aa, Synthetic construct
TGPGPAGPGGGSRSGSGRPAAANAARERSRVQTLRHAFLELQRTLPSVPPDTKLSKLDVLLLATTYIAHLTRSLQDDAEAPADAGLGALRGDGYLHPVKKWPMRSRLYIG

SEQ ID NO: 5090 - protein, 130 aa, Synthetic construct
LVGGSHPEDGLAGSTSLMHNHAALPSQPGTLPDLSRPPDSYSGLGRAGATAAASEIKREEKEDEENTSAADHSEEEKKELKAPRARTSPDEDEDDLLPPEQKAEREKERRVANNARERLRVRDINEAFKE

SEQ ID NO: 5091 - protein, 90 aa, Synthetic construct
HHQQRMAALGTDKELSDLLDFSAMFSPPVSSGKNGPTSLASGHFTGSNVEDRSSSGSWGNGGHPSPSRNYGDGTPYDHMTSRDLGSHDNL

SEQ ID NO: 5092 - protein, 140 aa, Synthetic construct
GQIPHPLGWLVPQQGQPMYSLPPGGFRHPYPALAMNASMSSLVSSRFSPHMVAPAHPGLPTSGIPHPAIVSPIVKQEPAPPSLSPAVSVKSPVTVKKEEEKKPHVKKPLNAFMLYMKEMRAKVVAECTLKESAAINQILG

SEQ ID NO: 5093 - protein, 90 aa, Synthetic construct
PSLSPAVSVKSPVTVKKEEEKKPHVKKPLNAFMLYMKEMRAKVVAECTLKESAAINQILGRKWHNLSREEQAKYYELARKERQLHSQLYP

SEQ ID NO: 5094 - protein, 100 aa, Synthetic construct
LSPGTVGQIPHPLGWLVPQQGQPVYPITTGGFRHPYPTALTVNASMSRFPPHMVPPHHTLHTTGIPHPAIVTPTVKQESSQSDVGSLHSSKHQDSKKEEE

SEQ ID NO: 5095 - protein, 80 aa, Synthetic construct
HTTGIPHPAIVTPTVKQESSQSDVGSLHSSKHQDSKKEEEKKKPHIKKPLNAFMLYMKEMRAKVVAECTLKESAAINQIL

SEQ ID NO: 5096 - protein, 80 aa, Synthetic construct
KKKPHIKKPLNAFMLYMKEMRAKVVAECTLKESAAINQILGRRWHALSREEQAKYYELARKERQLHMQLYPGWSARDNYG

SEQ ID NO: 5097 - protein, 80 aa, Synthetic construct
SQANLGEQAQSGPQGGRSQRRERHNRMERDRRRRIRICCDELNLLVPFCNAETDKATTLQWTTAFLKYIQERHGDSLKKE

SEQ ID NO: 5098 - protein, 140 aa, Synthetic construct
DTETLCYVMPSSSARCAQFPRAQDKVHYYIKLKDLRDQLKGIERNMDVQEVQYTFDLQLAQEDAKKMAVKEEKYDPGYEAAYGGAYGENPCSSEPCGFSSNGLIESVELRGESAFSGIPNGQWMTQSFTDQIPSFSNHCG

SEQ ID NO: 5099 - protein, 80 aa, Synthetic construct
NMAVVNEQQMPEEVPAPAPAQEPVQEAPKGRKRKPRTTEPKQPVEPKKPVESKKSGKSAKSKEKQEKITDTFKVKRKVDR

SEQ ID NO: 5100 - protein, 80 aa, Synthetic construct
YMNQLSASLKETYANVHEKDYIPVKGEVCIAKYTVDQTWNRAIIQNVDVQQKKAHVLYIDYGNEEIIPLNRIYHLNRNID

SEQ ID NO: 5101 - protein, 80 aa, Synthetic construct
NVGDEFCGVVAHIQTPEDFFCQQLQSGRKLAELQASLSKYCDQLPPRSDFYPAIGDICCAQFSEDDQWYRASVLAYASEE

SEQ ID NO: 5102 - protein, 100 aa, Synthetic construct
ITKNVHTVSVEKCSENGTVDVADKLVTFGLAKNITPQRQSALNTEKMYRMNCCCTELQKQVEKHEHILLFLLNNSTNQNKFIEMKKLLKKKTASLGGKPL

SEQ ID NO: 5103 - protein, 80 aa, Synthetic construct
NENKLPPHESLRSPGTLPNHPNFRLKSSENGNKKNNFLLCEQTKQYLASQEDNSVSSNPNGINGEVVGSKGDRKKLPAGN

SEQ ID NO: 5104 - protein, 80 aa, Synthetic construct
VANVIPAEGNWSSDCIKATKPLLMEQYCSIKIVDILEEEVVTFAVEVELPNSGKLLDHVLIEMGYGLKPSGQDSKKENAD

SEQ ID NO: 5105 - protein, 110 aa, Synthetic construct
DPGCFWVIIKGCSPFLDHDVDYQKLNSAMNDFYNSTCQDIEIKPLTLEEGQVCVVYCEELKCWCRAIVKSITSSADQYLAECFLVDFAKNIPVKSKNIRVVVESFMQLPY

SEQ ID NO: 5106 - protein, 80 aa, Synthetic construct
ITSSADQYLAECFLVDFAKNIPVKSKNIRVVVESFMQLPYRAKKFSLYCTKPVTLHIDFCRDSTDIVPAKKWDNAAIQYF

SEQ ID NO: 5107 - protein, 80 aa, Synthetic construct
LEANEQMFAILDNFKKNIEVEERESAPHQIVAVGVHWNKHIEHLIKEFMNDPYIVITAMEEAALYGNVQQVVHLCLECEK

SEQ ID NO: 5108 - protein, 100 aa, Synthetic construct
LNTDLRTIGKKFLPSDINSGKVEKLEGPCVLQIQKIRNVAAPKDNEESQAAPRMLRLQMTDGHISCTAVEFSYMSKISLNTPPGTKVKLSGIVDIKNGFL

SEQ ID NO: 5109 - protein, 90 aa, Synthetic construct
IKPEKILESSIPMEYAKMWKPGDECFALYWEDNKFYRAEVEALHSSGMTAVVKFIDYGNYEEVLLSNIKPIQTEAWEEEGTYDQTLEFRR

SEQ ID NO: 5110 - protein, 80 aa, Synthetic construct
VKETVWNCPSKKQKEPQQKICKKPNLVVKPLQLQVETNKSELNLAMANHDIPPDAVPNKKLCRLPPLDTSSLIGVFVEYI

SEQ ID NO: 5111 - protein, 110 aa, Synthetic construct
DKIQKDAGQAHGDNDIKAMVEQEYLQVEESIAESANTFMEDITVPPLMIPTEASPSVLVVELSNTNEVVIRYVGKDYSAAQELMEDEMKEYYSKNPKITPVQAVNVGQLL

SEQ ID NO: 5112 - protein, 100 aa, Synthetic construct
KSLEVHLQVDAMYTNVKVTNICSDGTLYCQVPCKGLNKLSDLLRKIEDYFHCKHMTSECFVSLPFCGKICLFHCKGKWLRVEITNVHSSRALDVQFLDSG

SEQ ID NO: 5113 - protein, 80 aa, Synthetic construct
VSEERHIAVEKDQVYAAKVENKWHRVLLKGILTNGLVSVYELDYGKHELVNIRKVQPLVDMFRKLPFQAVTAQLAGVKCN

SEQ ID NO: 5114 - protein, 80 aa, Synthetic construct
DGASQWFASLVSGCTLLVKVFSVVHSVLHVDVYQYSGVQDAINIRDVLIQQGYAELTEESYESKQSHEVLKGLFSKSVEN

SEQ ID NO: 5115 - protein, 80 aa, Synthetic construct
VTPPPKGGGDMAVVVSKEGSWEKPSDDSFQKSEAQAIPEMPMFEIPSPDFSFHADEYLEVYVSASEHPNHFWIQIVGSRS

SEQ ID NO: 5116 - protein, 80 aa, Synthetic construct
IDNDAEGVWSPDIEQSFQEALAIYPPCGRRKIILSDEGKMYGRNELIARYIKLRTGKTRTRKQVSSHIQVLARRKSRDFH

SEQ ID NO: 5117 - protein, 90 aa, Synthetic construct
GAGGDGGPDAEGVWSPDIEQSFQEALAIYPPCGRRKIILSDEGKMYGRNELIARYIKLRTGKTRTRKQVSSHIQVLARRKSREIQSKLKD

SEQ ID NO: 5118 - protein, 100 aa, Synthetic construct
PTGPQASELFQFWSGGSGPPWNVPDVKPFSQTPFTLSLTPPSTDLPGYEPPQALSPLPPPTPSPPAWQARGLGTARLQLVEFSAFVEPPDAVDSYQRHLF

SEQ ID NO: 5119 - protein, 80 aa, Synthetic construct
QAVFSTSSRFWSSPPLLGQQPGPSQDIKPFAQPAYPIQPPLPPTLSSYEPLAPLPSAAASVPVWQDRTIASSRLRLLEYS

SEQ ID NO: 5120 - protein, 90 aa, Synthetic construct
FWQGALPGQAGTSHDVKPFSQQTYAVQPPLPLPGFESPAGPAPSPSAPPAPPWQGRSVASSKLWMLEFSAFLEQQQDPDTYNKHLFVHIG

SEQ ID NO: 5121 - protein, 80 aa, Synthetic construct
SGSFPLVLKKLMENPPREARLDKEKGKEKLEEDEAAAASTMAVSASLMPPIWDKTIPYDGESFHLEYMDLDEFLLENGIP

SEQ ID NO: 5122 - protein, 110 aa, Synthetic construct
LDKEKGKEKLEEDEAAAASTMAVSASLMPPIWDKTIPYDGESFHLEYMDLDEFLLENGIPASPTHLAHNLLLPVAELEGKESASSSTASPPSSSTAIFQPSETVSSTESS

SEQ ID NO: 5123 - protein, 80 aa, Synthetic construct
ETLSSAKLAVVVTKTVDACIADNPTFGIVLSKYHIVSKLLALLLHESLDSGEKFSIMLTLGHCTEDCEENQYDLFKNNGL

SEQ ID NO: 5124 - protein, 80 aa, Synthetic construct
SIQNTWKHLHADRIGRGSKAEDEDKSHSRQLQSYKSHGVMSKACTNDDQMKTPLKSANPVHACYRESEQNKTLYKAKSSC

SEQ ID NO: 5125 - protein, 80 aa, Synthetic construct
AVAAGWMLDFLCLSLCRAFRDGRSEDFRRTRNSAEAIIHGLSSLTACQLRTIYICQFLTRIAAGKTLDAQFENDERITPL

SEQ ID NO: 5126 - protein, 80 aa, Synthetic construct
DDAEPYLLTMAKKALKSESAASSTGKEDKQPAPGPVEKPPREPARQLRNPPTTIGMMTLKAAFKTLSGAQDSEAAFAKLD

SEQ ID NO: 5127 - protein, 80 aa, Synthetic construct
LSDSYLDPIKSEHDCYPTSSLNKVIPDLNLRNCLALGGSTSPTSVIKFLLAGSKQATLGAKPDHQEAFEATANQQEVSDT

SEQ ID NO: 5128 - protein, 120 aa, Synthetic construct
CSSIPHSSHSIINHHASIHNEGDQPKTPENIPSKEPKDGSPVQPSLLSLMKDRRLTLEQVVAIEALTQLSEAPSENSSPSKSEKDEESEQRTASLLNSCKAILYTVRKDLQDPNLQGEPP

SEQ ID NO: 5129 - protein, 130 aa, Synthetic construct
ASKFQNFGQFCPHDFPTVFGKISSSTKIWKPLAQTRSIMQPKTVFPPLTQIKLQRYPESAEEKVKVEPLDSLSLFHLKTESNGKAFTDKAYNSQVQLTVNANQKAHPLTQPSSPPNQCANVMAGDDQIRF

SEQ ID NO: 5130 - protein, 80 aa, Synthetic construct
FFTNPTKNLVSITKDSELPTCSCLDRVIQKDKGPYYTHLGAGPSVAAVREIMENRYGQKGNAIRIEIVVYTGKEGKSSHG

SEQ ID NO: 5131 - protein, 80 aa, Synthetic construct
NSKPSSLPTLGSNTETVQPEVKSETEPHFILKSSDNTKTYSLMPSAPHPVKEASPGFSWSPKTASATPAPLKNDATASCG

SEQ ID NO: 5132 - protein, 80 aa, Synthetic construct
QLSQAGPSKSDRGSSQVSVTSTVHVVNTTVVTMPVPMVSTSSSSYTTLLPTLEKKKRKRCGVCEPCQQKTNCGECTYCKN

SEQ ID NO: 5133 - protein, 100 aa, Synthetic construct
SNDLHQLPPRNNEVEYCNQLLDSSKKLDSDDLSCQDATHTQIEEDVATQLTQLASIIKINYIKPEDKKVESTPTSLVTCNVQQKYNQEKGTIQQKPPSSV

SEQ ID NO: 5134 - protein, 80 aa, Synthetic construct
SSDEEKVLCLVRQRTGHHCPTAVMVVLIMVWDGIPLPMADRLYTELTENLKSYNGHPTDRRCTLNENRTCTCQGIDPETC

SEQ ID NO: 5135 - protein, 80 aa, Synthetic construct
NTTLLREVKIEGKPEAPPSQSPNPSTHVCSPSPMLSERPQNNCVNRNDIQTAGTMTVPLCSEKTRPMSEHLKHNPPIFGS

SEQ ID NO: 5136 - protein, 130 aa, Synthetic construct
HNHANVFPVPDQGGSHTQTPPQKDTQKHAALRWHLLQKQEQQQTQQPQTESCHSQMHRPIKVEPGCKPHACMHTAPPENKTWKKVTKQENPPASCDNVQQKSIIETMEQHLKQFHAKSLFDHKALTLKSQ

SEQ ID NO: 5137 - protein, 80 aa, Synthetic construct
TWKKVTKQENPPASCDNVQQKSIIETMEQHLKQFHAKSLFDHKALTLKSQKQVKVEMSGPVTVLTRQTTAAELDSHTPAL

SEQ ID NO: 5138 - protein, 80 aa, Synthetic construct
KDEGPFYTHLGAGPNVAAIREIMEERFGQKGKAIRIERVIYTGKEGKSSQGCPIAKWVVRRSSSEEKLLCLVRERAGHTC

SEQ ID NO: 5139 - protein, 100 aa, Synthetic construct
YQHKSMNEPKHGLALWEAKMAEKAREKEEECEKYGPDYVPQKSHGKKVKREPAEPHETSEPTYLRFIKSLAERTMSVTTDSTVTTSPYAFTRVTGPYNRY

SEQ ID NO: 5140 - protein, 80 aa, Synthetic construct
NHPTRISLVFYQHKSMNEPKHGLALWEAKMAEKAREKEEECEKYGPDYVPQKSHGKKVKREPAEPHETSEPTYLRFIKSL

SEQ ID NO: 5141 - protein, 130 aa, Synthetic construct
SVVMEGGEERPRLPGPLPPGEAGLPAPSTRPLLSSEVPQISPQEGLPLSQSALSIAKEKNISLQTAIAIEALTQLSSALPQPSHSTPQASCPLPEALSPPAPFRSPQSYLRAPSWPVVPPEEHSSFAPDS

SEQ ID NO: 5142 - protein, 80 aa, Synthetic construct
RAPSWPVVPPEEHSSFAPDSSAFPPATPRTEFPEAWGTDTPPATPRSSWPMPRPSPDPMAELEQLLGSASDYIQSVFKRP

SEQ ID NO: 5143 - protein, 90 aa, Synthetic construct
SAFPPATPRTEFPEAWGTDTPPATPRSSWPMPRPSPDPMAELEQLLGSASDYIQSVFKRPEALPTKPKVKVEAPSSSPAPAPSPVLQREA

SEQ ID NO: 5144 - protein, 80 aa, Synthetic construct
ELEQLLGSASDYIQSVFKRPEALPTKPKVKVEAPSSSPAPAPSPVLQREAPTPSSEPDTHQKAQTALQQHLHHKRSLFLE

SEQ ID NO: 5145 - protein, 80 aa, Synthetic construct
EALPTKPKVKVEAPSSSPAPAPSPVLQREAPTPSSEPDTHQKAQTALQQHLHHKRSLFLEQVHDTSFPAPSEPSAPGWWP

SEQ ID NO: 5146 - protein, 90 aa, Synthetic construct
LPAPESPFATRSPKQIKIESSGAVTVLSTTCFHSEEGGQEATPTKAENPLTPTLSGFLESPLKYLDTPTKSLLDTPAKRAQAEFPTCDCV

SEQ ID NO: 5147 - protein, 110 aa, Synthetic construct
RQLEARKAAAEKKKIQKEKLSTPEKIKQEALELAGITSDPGLSLKGGLSQQGLKPSLKVEPQNHFSSFKYSGNAVVESYSVLGNCRPSDPYSMNSVYSYHSYYAQPSLTS

SEQ ID NO: 5148 - protein, 130 aa, Synthetic construct
QGLKPSLKVEPQNHFSSFKYSGNAVVESYSVLGNCRPSDPYSMNSVYSYHSYYAQPSLTSVNGFHSKYALPSFSYYGFPSSNPVFPSQFLGPGAWGHSGSSGSFEKKPDLHALHNSLSPAYGGAEFAELP

SEQ ID NO: 5149 - protein, 130 aa, Synthetic construct
YGGAEFAELPSQAVPTDAHHPTPHHQQPAYPGPKEYLLPKAPLLHSVSRDPSPFAQSSNCYNRSIKQEPVDPLTQAEPVPRDAGKMGKTPLSEVSQNGGPSHLWGQYSGGPSMSPKRTNGVGGSWGVFSS

SEQ ID NO: 5150 - protein, 80 aa, Synthetic construct
EKPWALGAGDFNSALKGSPGFQDKLWNPMKGEEGRIPAAGASQLDRAWQSFGLPLGSSEKLFGALKSEEKLWDPFSLEEG

SEQ ID NO: 5151 - protein, 120 aa, Synthetic construct
FQDKLWNPMKGEEGRIPAAGASQLDRAWQSFGLPLGSSEKLFGALKSEEKLWDPFSLEEGPAEEPPSKGAVKEEKGGGGAEEEEEELWSDSEHNFLDENIGGVAVAPAHGSILIECARRE

SEQ ID NO: 5152 - protein, 80 aa, Synthetic construct
LAERARARQEEAARLGLGQQEAKLYGKKRKWGGTVVAEPQQKEKKGVVPTRQALAVPTDSAVTVSSYAYTKVTGPYSRWI

SEQ ID NO: 5153 - protein, 80 aa, Synthetic construct
PAGPSLLGTGGPWRVDQKPDWEAAPGPAHTARLEDAHDLVAFSAVAEAVSSYGALSTRLYETFNREMSREAGNNSRGPRP

SEQ ID NO: 5154 - protein, 90 aa, Synthetic construct
HSPPRDQAAIMLWKLVENVKYEDIYEDRHDGVPSHSSRLSQLGSVSQGPYSSAPPLSHTPSSDFQPPYFPPPYQPLPYHQSQDPYSHVND

SEQ ID NO: 5155 - protein, 80 aa, Synthetic construct
LWKITDNVKYEEDCEDRHDGSSNGNPRVPHLSSAGQHLYSPAPPLSHTGVAEYQPPPYFPPPYQQLAYSQSADPYSHLGE

SEQ ID NO: 5156 - protein, 80 aa, Synthetic construct
GSSPKRRRAEDKDEGIGSPDIWEDEKAEDLRREMIELRQQLDKERSVRMMLEEQVRSLEAHMYPEKLKVIAQQVQLQQQQ

SEQ ID NO: 5157 - protein, 80 aa, Synthetic construct
FDASLSGIGQELGAGAYSMSDVLALPIFKQEESSLPPDNENKILPFQYVLCAATSPAVKLHDETLTYLNQGQSYEIRMLD

SEQ ID NO: 5158 - protein, 80 aa, Synthetic construct
DVLALPIFKQEESSLPPDNENKILPFQYVLCAATSPAVKLHDETLTYLNQGQSYEIRMLDNRKLGELPEINGKLVKSIFR

SEQ ID NO: 5159 - protein, 80 aa, Synthetic construct
DNLLPTTTPQEAQQWLHRNRFSTFTRLFTNFSGADLLKLTRDDVIQICGPADGIRLFNALKGRMVRPRLTIYVCQESLQL

SEQ ID NO: 5160 - protein, 110 aa, Synthetic construct
REQQQQQQQQQQKHEDGDSNGTFFVYHAIYLEELTAVELTEKIAQLFSISPCQISQIYKQGPTGIHVLISDEMIQNFQEEACFILDTMKAETNDSYHIILTNDSYHIILK

SEQ ID NO: 5161 - protein, 100 aa, Synthetic construct
LFWHTQPEHYNQHNSGSYLRDVLALPIFKQEEPQLSPENEARLPPLQYVLCAATSPAVKLHEETLTYLNQGQSYEIRLLENRKLGDFQDLNTKYVKSIIR

SEQ ID NO: 5162 - protein, 80 aa, Synthetic construct
SFSGADLLKMSRDDLVQICGPADGIRLFNAIKGRNVRPKMTIYVCQELEQNRVPLQQKRDGSGDSNLSVYHAIFLEELTT

SEQ ID NO: 5163 - protein, 100 aa, Synthetic construct
TIYVCQELEQNRVPLQQKRDGSGDSNLSVYHAIFLEELTTLELIEKIANLYSISPQHIHRVYRQGPTGIHVVVSNEMVQNFQDESCFVLSTIKAESNDGY

SEQ ID NO: 5164 - protein, 80 aa, Synthetic construct
HILPNESAYDQKNIRRRVYDALNVLMAMNIISKEKKEIKWIGLPTNSAQECQNLEVERQRRLERIKQKQSQLQELILQQI

SEQ ID NO: 5165 - protein, 80 aa, Synthetic construct
NGKGLRHFSMKVCEKVQRKGTTSYNEVADELVAEFSAADNHILPNESAYDQKNIRRRVYDALNVLMAMNIISKEKKEIKW

SEQ ID NO: 5166 - protein, 80 aa, Synthetic construct
NSAQECQNLEIEKQRRIERIKQKRAQLQELLLQQIAFKNLVQRNRQNEQQNQGPPALNSTIQLPFIIINTSRKTVIDCSI

SEQ ID NO: 5167 - protein, 130 aa, Synthetic construct
WNKGTILKASVDYIRRMQKDLQKSRELENHSRRLEMTNKQLWLRIQELEMQARVHGLPTTSPSGMNMAELAQQVVKQELPSEEGPGEALMLGAEVPDPEPLPALPPQAPLPLPTQPPSPFHHLDFSHSLS

SEQ ID NO: 5168 - protein, 90 aa, Synthetic construct
MKREITETDTRALAKERQKKDNHNLIERRRRYNINYRIKELGTLIPKSNDPDMRWNKGTILKASVEYIKWLQKEQQRARELEHRQKKLEQ

SEQ ID NO: 5169 - protein, 80 aa, Synthetic construct
LQKEQQRARELEHRQKKLEQANRRLLLRIQELEIQARTHGLPTLASLGTVDLGAHVTKQQSHPEQNSVDYCQQLTVSQGP

SEQ ID NO: 5170 - protein, 80 aa, Synthetic construct
DEEEEAARGRRRRQRELNRRKYQALGRRCREIEQVNERVLNRLHQVQRITRRLQQERRFLMRVLDSYGDDYRASQFTIVL

SEQ ID NO: 5171 - protein, 80 aa, Synthetic construct
PEKETLSPPRRTPAPPEPGSPAPGEGPSGRKRRRVPRDGRRAGNALTPELAPVQIKVEEDFGFEADEALDSSWVSRGPDK

SEQ ID NO: 5172 - protein, 140 aa, Synthetic construct
GKDPNQFTISRRGAKISETSSVESVMGIKNFMPALEETPFHSCTAGPNPTLGRPLSPKPSSPGSVLARPSVICHTTVTALKDVPFSLCQSVGVGQNTDIQQIAAKNFTDTSLMYPEDTCKSGPSTNTQSGLFNTPPPTPP

SEQ ID NO: 5173 - protein, 100 aa, Synthetic construct
KDVPFSLCQSVGVGQNTDIQQIAAKNFTDTSLMYPEDTCKSGPSTNTQSGLFNTPPPTPPDLNQDFSGFQLLVDVALKRAAEMELQAKLTEMELQAKLTA

SEQ ID NO: 5174 - protein, 90 aa, Synthetic construct
KGKKGIVAASGSETEDEDSMDIPLDLSSSAGSGKRRRRGNLPKESVQILRDWLYEHRYNAYPSEQEKALLSQQTHLSTLQVCNWFINARR

SEQ ID NO: 5175 - protein, 110 aa, Synthetic construct
MPLHSGQGEKPAAPFPRGELESPKPLVTPGSTLTLLTRAEAGSPTGGLFNTPPPTPPEQDKEDFSSFQLLVEVALQRAAEMELQKQQDPSLPLLHTPIPLPIPLVSENPQ

SEQ ID NO: 5176 - protein, 90 aa, Synthetic construct
DNVQSLPLWPLPKGQMSREKQPDPESAPSQKLTGIAQPKKKVKVSVTSPSSPELVSPEEHADFSSFLLLVDAAVQRAAELELEKKQEPNP

SEQ ID NO: 5177 - protein, 80 aa, Synthetic construct
VGEEGFPDTGSDHSYSLSSGTTEEELLRKLNEQRDILALMEVKMKEMKGSIRHLRLTEAKLREELREKDRLLAMAVIRKK

SEQ ID NO: 5178 - protein, 80 aa, Synthetic construct
FETSMICRTSPYRTVLRDNAIPTIFDLTSHLNNPHSRHRKRIKELSEDEIRTLKQKKIDETSEQEQKHKETNNSNAQNPS

SEQ ID NO: 5179 - protein, 80 aa, Synthetic construct
CESCIREETLREVRDSHFFSIITDDVVDIAGEEHLPVLVRFVDESHNLREEFIGFLPYEADAEILAVKFHTMITEKWGLN

SEQ ID NO: 5180 - protein, 80 aa, Synthetic construct
GEEHLPVLVRFVDESHNLREEFIGFLPYEADAEILAVKFHTMITEKWGLNMEYCRGQAYIVSSGFSSKMKVVASRLLEKY

SEQ ID NO: 5181 - protein, 80 aa, Synthetic construct
MEAKKRIIKLEKEIASLRRKMKTCLQKERRATRRWIKATCLVKNLEANSVLPKGTSEHMLPTALSSLPLEDFKILEQDQQ

SEQ ID NO: 5182 - protein, 80 aa, Synthetic construct
QKETTEMEDTDIEDSLYKDVDYGTEVLQIEHSYCRQDINKEHLWQKVSKLHSKITLLELKEQQTLGRLKSLEALIRQLKQ

SEQ ID NO: 5183 - protein, 80 aa, Synthetic construct
DIEDSLYKDVDYGTEVLQIEHSYCRQDINKEHLWQKVSKLHSKITLLELKEQQTLGRLKSLEALIRQLKQENWLSEENVK

SEQ ID NO: 5184 - protein, 100 aa, Synthetic construct
PYHLQGKREKLHCRKNFTLKTVPATNYNHHLVGASSCIEEFQSQFIFEHSYSVMDSPKKLKHKLDHVIGELEDTKESLRNVLDREKRFQKSLRKTIRELK

SEQ ID NO: 5185 - protein, 90 aa, Synthetic construct
SAYMLRLPPPAGAYIQNEHSYQVGSALLWKRRAEAALDALDKAQRQLQACKRREQRLRLRLTKLQQERAREKRAQADARQTLKEHVQDFA

SEQ ID NO: 5186 - protein, 80 aa, Synthetic construct
TVATMLLTPLAPAPTPERSQPEVPAQQAQTGLGPVLGALQRRVRRLQRCQERHQAQLQALERLAQQLHGESLLARARRGL

SEQ ID NO: 5187 - protein, 80 aa, Synthetic construct
GLGPVLGALQRRVRRLQRCQERHQAQLQALERLAQQLHGESLLARARRGLQRLTTAQTLGPEESQTFTIICGGPDIAMVL

SEQ ID NO: 5188 - protein, 80 aa, Synthetic construct
EDHNYSLKTPLTIGAEKLAEVQQMLQVSKKRLISVKNYRMIKKRKGLRLIDALVEEKLLSEETECLLRAQFSDFKWELYN

SEQ ID NO: 5189 - protein, 100 aa, Synthetic construct
NYCMQEIYEVHPAAGSNCYMQSTDYYAYFEDSPGYSGCDAQAVPSNNIYMEQAWAVNQPYTCSYPGNMFKSKDSDLDMALNQYSQPEYFTEEKPTFSQVQ

SEQ ID NO: 5190 - protein, 80 aa, Synthetic construct
FMPANTTSILQPMDQGVISTFKSYYLRNTFHKALAAMDSDVSDGSGQSKLKTFWKGFTILDAIKNIRDSWEEVKLSTLTG

SEQ ID NO: 5191 - protein, 100 aa, Synthetic construct
PSSHKTSEMPPVPGGLSLEEFSRFVDLEGEEPRSGVCKEEIGTEDEKGDREGAFEPLPTKADALRALGTLRRWFECNSTSPELFEKFYDCEEEVERLCCL

SEQ ID NO: 5192 - protein, 80 aa, Synthetic construct
ETCSVGKLCKDRITLVVGTNMDGSEKLPLLVIGKKRTPHCFKGLKSLPVCYEANRMAWMTSDVFEQWMRKLDEEFQAQQR

SEQ ID NO: 5193 - protein, 80 aa, Synthetic construct
FLALRQHGVPLSGPLIQAQAEAFARQIYGPECTFKASHGWFWRWQKRHGISSQRFYGEAGPPAPSPAPGPPVKEEPALPS

SEQ ID NO: 5194 - protein, 80 aa, Synthetic construct
FWRWQKRHGISSQRFYGEAGPPAPSPAPGPPVKEEPALPSGAGPLPDRAPAPPPPAEGGYGDEQIYSASVTGLYWKLLPE

SEQ ID NO: 5195 - protein, 80 aa, Synthetic construct
DAVYMWYQQKRSAGVPVRGVELQAAAERFARCFGRTDFKASTGWLFRFRNRHAIGNRKGCGEQVLSSVSENVEPFRQKLS

SEQ ID NO: 5196 - protein, 80 aa, Synthetic construct
STGWLFRFRNRHAIGNRKGCGEQVLSSVSENVEPFRQKLSMIIKEEKLCLAQLYSGDETDLFWKSMPENSQASRKDICLP

SEQ ID NO: 5197 - protein, 80 aa, Synthetic construct
VIFEESDDEQEKGDKGVSKIKIYNIKSAIFNWAKSWEEVKQITIANAWENLLYKKEPEYDFQGLEHGDYREILEKCGELE

SEQ ID NO: 5198 - protein, 90 aa, Synthetic construct
NGDEEKGCLLKTKGGITKEVVQKGGEAEKQTAEFKLSAVRESLDYLLDFVDATPEFQRFHFTLKEMQQEIVKKQFQSKIHSRIGSFLKPR

SEQ ID NO: 5199 - protein, 80 aa, Synthetic construct
LEEKMKVLSRIEAGRSLKSVMDEFGISKSTFYDIKKNKKLILDFVLKQDMPLVGAEKRKRTTGAKYGDVDDAVYMWYQQK

SEQ ID NO: 5200 - protein, 90 aa, Synthetic construct
MFPQSRHPTPHQAAGQPFKFTIPESLDRIKEEFQFLQAQYHSLKLECEKLASEKTEMQRHYVMYYEMSYGLNIEMHKQTEIAKRLNTICA

SEQ ID NO: 5201 - protein, 90 aa, Synthetic construct
TGGKGCVKVWDISHPGNKSPVSQLDCLNRDNYIRSCKLLPDGCTLIVGGEASTLSIWDLAAPTPRIKAELTSSAPACYALAISPDSKVCF

SEQ ID NO: 5202 - protein, 90 aa, Synthetic construct
NYIRSCKLLPDGCTLIVGGEASTLSIWDLAAPTPRIKAELTSSAPACYALAISPDSKVCFSCCSDGNIAVWDLHNQTLVRQFQGHTDGAS

SEQ ID NO: 5203 - protein, 80 aa, Synthetic construct
TSSAPACYALAISPDSKVCFSCCSDGNIAVWDLHNQTLVRQFQGHTDGASCIDISNDGTKLWTGGLDNTVRSWDLREGRQ

SEQ ID NO: 5204 - protein, 80 aa, Synthetic construct
LQSGQPFKFSILEICDRIKEEFQFLQAQYHSLKLECEKLASEKTEMQRHYVMYYEMSYGLNIEMHKQAEIVKRLSGICAQ

SEQ ID NO: 5205 - protein, 120 aa, Synthetic construct
KTPVAQLDCLNRDNYIRSCKLLPDGRSLIVGGEASTLSIWDLAAPTPRIKAELTSSAPACYALAVSPDAKVCFSCCSDGNIVVWDLQNQTMVRQFQGHTDGASCIDISDYGTRLWTGGLD

SEQ ID NO: 5206 - protein, 90 aa, Synthetic construct
MYPQGRHPAPHQPGQPGFKFTVAESCDRIKDEFQFLQAQYHSLKVEYDKLANEKTEMQRHYVMYYEMSYGLNIEMHKQTEIAKRLNTILA

SEQ ID NO: 5207 - protein, 140 aa, Synthetic construct
VYTGGKGCVKIWDISQPGSKSPISQLDCLNRDNYIRSCKLLPDGRTLIVGGEASTLTIWDLASPTPRIKAELTSSAPACYALAISPDAKVCFSCCSDGNIAVWDLHNQTLVRQFQGHTDGASCIDISHDGTKLWTGGLDN

SEQ ID NO: 5208 - protein, 80 aa, Synthetic construct
TTSDSCDRIKDEFQLLQAQYHSLKLECDKLASEKSEMQRHYVMYYEMSYGLNIEMHKQAEIVKRLNGICAQVLPYLSQEH

SEQ ID NO: 5209 - protein, 80 aa, Synthetic construct
LAALESNKIQDLEKKEGRIDDLLRANCDLRRQIDEQQKLLEKYKERLNKCISMSKKLLIEKSTQEKLSSREKSMQDRLRL

SEQ ID NO: 5210 - protein, 90 aa, Synthetic construct
ALRYLNEIKPPIIHYDLKPGNILLVDGTACGEIKITDFGLSKIMDDDSYGVDGMDLTSQGAGTYWYLPPECFVVGKEPPKISNKVDVWSV

SEQ ID NO: 5211 - protein, 90 aa, Synthetic construct
HEQEEIFKLRLGHLKKEEAEIQAELERLERVRNLHIRELKRIHNEDNSQFKDHPTLNDRYLLLHLLGRGGFSEVYKAFDLTEQRYVAVKI

SEQ ID NO: 5212 - protein, 80 aa, Synthetic construct
KDHPTLNDRYLLLHLLGRGGFSEVYKAFDLTEQRYVAVKIHQLNKNWRDEKKENYHKHACREYRIHKELDHPRIVKLYDY

SEQ ID NO: 5213 - protein, 80 aa, Synthetic construct
EIKPPIIHYDLKPGNILLVNGTACGEIKITDFGLSKIMDDDSYNSVDGMELTSQGAGTYWYLPPECFVVGKEPPKISNKV

SEQ ID NO: 5214 - protein, 100 aa, Synthetic construct
RYTKDRFTGHPYQNRTPPKKKKPRTSFTRLQICELEKRFHRQKYLASAERAALAKALKMTDAQVKTWFQNRRTKWRRQTAEEREAERQQANRILLQLQQE

SEQ ID NO: 5215 - protein, 90 aa, Synthetic construct
TRRIGHPYQNRTPPKRKKPRTSFSRSQVLELERRFLRQKYLASAERAALAKALRMTDAQVKTWFQNRRTKWRRQTAEEREAERHRAGRLL

SEQ ID NO: 5216 - protein, 90 aa, Synthetic construct
RRIGHPYQNRTPPKRKKPRTSFSRVQICELEKRFHRQKYLASAERAALAKSLKMTDAQVKTWFQNRRTKWRRQTAEEREAERQQASRLML

SEQ ID NO: 5217 - protein, 80 aa, Synthetic construct
LKDEMFRVKEESSSISSLKDEFTQRIAEAEKKVQLACKERDAAKKEIKNIKEELATRLNSSETADLLKEKDEQIRGLMEE

SEQ ID NO: 5218 - protein, 100 aa, Synthetic construct
HLQLEIGNLEKTRSIMAEELVKLTNQNDELEEKVKEIPKLRTQLRDLDQRYNTILQMYGEKAEEAEELRLDLEDVKNMYKTQIDELLRQSIDELLRQSLS

SEQ ID NO: 5219 - protein, 80 aa, Synthetic construct
LDHESVISESSASSRQETTDSKSSLHLMQTSFQLLSASACPEYNRLDDFQKLTESCCSSDAFERIDSFSVQSLDSRSVSE

SEQ ID NO: 5220 - protein, 110 aa, Synthetic construct
MLQRTQDQDENVALEACEFWLTLAEQPICKDVLVRHLPKLIPVLVNGMKYSDIDIILLKGDVEEDETIPDSEQDIRPRFHRSRTVAQQHDEDGIEEEDDDDDEIDDDDTI

SEQ ID NO: 5221 - protein, 80 aa, Synthetic construct
LGAIAEGCMQGMIPYLPELIPHLIQCLSDKKALVRSITCWTLSRYAHWVVSQPPDTYLKPLMTELLKRILDSNKRVQEAA

SEQ ID NO: 5222 - protein, 80 aa, Synthetic construct
DHLFLIPVPHSSDTHSVAWLAEQAAQRYYQTCGLLPRLTLRKEGALLAPQDLIPDVLQSNDEVLAEVTSWDLPPLTDRYR

SEQ ID NO: 5223 - protein, 100 aa, Synthetic construct
NSEHKDSEKKHKEKEKTKHKDGSSEKHKDKHKDRDKEKRKEEKVRASGDAKIKKEKENGFSSPPQIKDEPEDDGYFVPPKEDIKPLKRPRDEDDADYKPK

SEQ ID NO: 5224 - protein, 100 aa, Synthetic construct
SSPPQIKDEPEDDGYFVPPKEDIKPLKRPRDEDDADYKPKKIKTEDTKKEKKRKLEEEEDGKLKKPKNKDKDKKVPEPDNKKKKPKKEEEQKWKWWEEER

SEQ ID NO: 5225 - protein, 80 aa, Synthetic construct
KDKKVPEPDNKKKKPKKEEEQKWKWWEEERYPEGIKWKFLEHKGPVFAPPYEPLPENVKFYYDGKVMKLSPKAEEVATFF

SEQ ID NO: 5226 - protein, 80 aa, Synthetic construct
DWRKEMTNEEKNIITNLSKCDFTQMSQYFKAQTEARKQMSKEEKLKIKEENEKLLKEYGFCIMDNHKERIANFKIEPPGL

SEQ ID NO: 5227 - protein, 80 aa, Synthetic construct
KEEKLKIKEENEKLLKEYGFCIMDNHKERIANFKIEPPGLFRGRGNHPKMGMLKRRIMPEDIIINCSKDAKVPSPPPGHK

SEQ ID NO: 5228 - protein, 80 aa, Synthetic construct
NAADNKQRDPKMSCIRVTIDPENNLISIWNNGKGIPVVEHKVEKMYVPALIFGQLLTSSNYDDDEKKVTGGRNGYGAKLC

SEQ ID NO: 5229 - protein, 80 aa, Synthetic construct
KDVKVFLNGNKLPVKGFRSYVDMYLKDKLDETGNSLKVIHEQVNHRWEVCLTMSEKGFQQISFVNSIATSKGGRHVDYVA

SEQ ID NO: 5230 - protein, 80 aa, Synthetic construct
FDEILVNAADNKQRDKNMTCIKVSIDPESNIISIWNNGKGIPVVEHKVEKVYVPALIFGQLLTSSNYDDDEKKVTGGRNG

SEQ ID NO: 5231 - protein, 90 aa, Synthetic construct
IKGKVGKPKVKKLQLEETMPSPYGRRIIPEITAMKADASKKLLKKKKGDLDTAAVKVEFDEEFSGAPVEGAGEEALTPSVPINKGPKPKR

SEQ ID NO: 5232 - protein, 80 aa, Synthetic construct
ITAMKADASKKLLKKKKGDLDTAAVKVEFDEEFSGAPVEGAGEEALTPSVPINKGPKPKREKKEPGTRVRKTPTSSGKPS

SEQ ID NO: 5233 - protein, 80 aa, Synthetic construct
ERWDVCLTLSEKGFQQISFVNSIATTKGGRHVDYVVDQVVGKLIEVVKKKNKAGVSVKPFQVKNHIWVFINCLIENPTFD

SEQ ID NO: 5234 - protein, 80 aa, Synthetic construct
PGHLGMGLVEGYDSMGYEMSKPDLRAELEADLKLICDGKKDKFVVLRQQVQKYKQVFIEAVAKAKKLDEALAQYFGNGTE

SEQ ID NO: 5235 - protein, 90 aa, Synthetic construct
DLKLICDGKKDKFVVLRQQVQKYKQVFIEAVAKAKKLDEALAQYFGNGTELAQQEDIYPAMPEPIRKCPQCNKDMVLKTKKNGGFYLSCM

SEQ ID NO: 5236 - protein, 80 aa, Synthetic construct
KVTEASSDDPQPGLDLVRKESLTSSESFQTVECLQSLGKESIIEGIKRRIRNKKLKSLENPPLKITENEATQNIKVEFQD

SEQ ID NO: 5237 - protein, 90 aa, Synthetic construct
VECLQSLGKESIIEGIKRRIRNKKLKSLENPPLKITENEATQNIKVEFQDELYKNTPKYSCNILSPEVENNSVLKLRDCNCFPHSKGCND

SEQ ID NO: 5238 - protein, 90 aa, Synthetic construct
PPLKITENEATQNIKVEFQDELYKNTPKYSCNILSPEVENNSVLKLRDCNCFPHSKGCNDENNLPYKPDGGCMHVAENFSKKENLRSLAE

SEQ ID NO: 5239 - protein, 110 aa, Synthetic construct
FCCNEQETFRPVSSEVRGRKITKNFSEVGFPDILKAYEDDVLLIDVIQDDPDLFGVSNEGELSFTSEVPKISQEPNVAGEHQSTDSKYMETPVKKEPSDDLRELPVLDCG

SEQ ID NO: 5240 - protein, 90 aa, Synthetic construct
PDLFGVSNEGELSFTSEVPKISQEPNVAGEHQSTDSKYMETPVKKEPSDDLRELPVLDCGWIKPDICASNSAESEIKRDPKDVNTSLGEV

SEQ ID NO: 5241 - protein, 80 aa, Synthetic construct
HQSTDSKYMETPVKKEPSDDLRELPVLDCGWIKPDICASNSAESEIKRDPKDVNTSLGEVANETSENETLGDFSEQIKGS

SEQ ID NO: 5242 - protein, 130 aa, Synthetic construct
GPSYSSSEQVHVTMSSLLNTSDSSDEELVTGGATSQIQGVQTNDDLNNDSDDSSDNCVIVGFVKPLAERTPELVELSSDSEDLGSYEKMETVKTQEQEQSYSSGDSDVSRCSSPHSVLGKDEQINKGHCD

SEQ ID NO: 5243 - protein, 100 aa, Synthetic construct
RQSSSPEFRVQSFSERTNARKKNNHSERKYYYYERHRSRSLSSNRSRTASTGTDRVRNEKPGGKRKYKTRHLEGTNEVAQPSREFASKAKDSHYQKSSSK

SEQ ID NO: 5244 - protein, 90 aa, Synthetic construct
LSSNRSRTASTGTDRVRNEKPGGKRKYKTRHLEGTNEVAQPSREFASKAKDSHYQKSSSKLDGNYKNESDTFSDSRSSDRETKHKRRKRK

SEQ ID NO: 5245 - protein, 80 aa, Synthetic construct
KRMKSKRSRSRESSRPRGRRDKKRSRTRDSSWSRRSQTLSLSSESTSRSRSRSSDHGKRRSRSRNRDRYYLRNNYGSRYK

SEQ ID NO: 5246 - protein, 90 aa, Synthetic construct
IYKQSQHMTEVVRRCPHHERCSDSDGLAPPQHLIRVEGNLRVEYLDDRNTFRHSVVVPYEPPEVGSDCTTIHYNYMCNSSCMGGMNRRPI

SEQ ID NO: 5247 - protein, 80 aa, Synthetic construct
CMGGMNRRPILTIITLEDSSGNLLGRNSFEVRVCACPGRDRRTEEENLRKKGEPHHELPPGSTKRALPNNTSSSPQPKKK

SEQ ID NO: 5248 - protein, 120 aa, Synthetic construct
RRTEEENLRKKGEPHHELPPGSTKRALPNNTSSSPQPKKKPLDGEYFTLQIRGRERFEMFRELNEALELKDAQAGKEPGGSRAHSSHLKSKKGQSTSRHKKLMFKTEGPDMFKTEGPDSD

SEQ ID NO: 5249 - protein, 80 aa, Synthetic construct
GTSTVDQNFGKQDATVQTERGSGEKPVSAPGDDTESLHSQGEEEFDMPQPPHGHVLHRHMRTIREVRTLVTRVITDVYYV

SEQ ID NO: 5250 - protein, 80 aa, Synthetic construct
GSGEKPVSAPGDDTESLHSQGEEEFDMPQPPHGHVLHRHMRTIREVRTLVTRVITDVYYVDGTEVERKVTEETEEPIVEC

SEQ ID NO: 5251 - protein, 80 aa, Synthetic construct
PHGHVLHRHMRTIREVRTLVTRVITDVYYVDGTEVERKVTEETEEPIVECQECETEVSPSQTGGSSGDLGDISSFSSKAS

SEQ ID NO: 5252 - protein, 80 aa, Synthetic construct
DSPEIPFQAAAGPSDGLDASSPGNSFVGLRVVAKWSSNGYFYSGKITRDVGAGKYKLLFDDGYECDVLGKDILLCDPIPL

SEQ ID NO: 5253 - protein, 80 aa, Synthetic construct
SPGNSFVGLRVVAKWSSNGYFYSGKITRDVGAGKYKLLFDDGYECDVLGKDILLCDPIPLDTEVTALSEDEYFSAGVVKG

SEQ ID NO: 5254 - protein, 80 aa, Synthetic construct
TSDKLASRSKLPDGPTGSSEEEEEFLEIPPFNKQYTESQLRAGAGYILEDFNEAQCNTAYQCLLIADQHCRTRKYFLCLA

SEQ ID NO: 5255 - protein, 80 aa, Synthetic construct
SGEPVELENPPLLPESTVSPQASTPISQSTPVFPPGSLPIPSQPQFSHDIFIPSPSLEEQSNDGKKDGDMHSSSLTVECS

SEQ ID NO: 5256 - protein, 80 aa, Synthetic construct; identical to SEQ ID NO: 678

SEQ ID NO: 5257 - protein, 80 aa, Synthetic construct; identical to SEQ ID NO: 40

SEQ ID NO: 5258 - protein, 80 aa, Synthetic construct
LIIVTLETRDGQVLGRRCFEARICACPGRDRKADEDSIRKQQVSDSTKNGDGTKRPFRQNTHGIQMTSIKKRRSPDDELL

SEQ ID NO: 5259 - protein, 110 aa, Synthetic construct
QQVSDSTKNGDGTKRPFRQNTHGIQMTSIKKRRSPDDELLYLPVRGRETYEMLLKIKESLELMQYLPQHTIETYRQQQQQQHQHLLQKQTSIQSPSSYGNSSPPLNKMNS

SEQ ID NO: 5260 - protein, 80 aa, Synthetic construct
NIPMMGTHMPMAGDMNGLSPTQALPPPLSMPSTSHCTPPPPYPTDCSIVSFLARLGCSSCLDYFTTQGLTTIYQIEHYSM

SEQ ID NO: 5261 - protein, 80 aa, Synthetic construct
PSSTFDALSPSPAIPSNTDYPGPHSFDVSFQQSSTAKSATWTYSTELKKLYCQIAKTCPIQIKVMTPPPQGAVIRAMPVY

SEQ ID NO: 5262 - protein, 80 aa, Synthetic construct
HAQYVEDPITGRQSVLVPYEPPQVGTEFTTVLYNFMCNSSCVGGMNRRPILIIVTLETRDGQVLGRRCFEARICACPGRD

SEQ ID NO: 5263 - protein, 80 aa, Synthetic construct
RKADEDSIRKQQVSDSTKNGDGTKRPFRQNTHGIQMTSIKKRRSPDDELLYLPVRGRETYEMLLKIKESLELMQYLPQHT

SEQ ID NO: 5264 - protein, 80 aa, Synthetic construct
IETYRQQQQQQHQHLLQKQTSIQSPSSYGNSSPPLNKMNSMNKLPSVSQLINPQQRNALTPTTIPDGMGANIPMMGTHMP

SEQ ID NO: 5265 - protein, 140 aa, Synthetic construct
GRICACPGRDRKADEDHYREQQALNESSAKNGAASKRAFKQSPPAVPALGAGVKKRRHGDEDTYYLQVRGRENFEILMKLKESLELMELVPQPLVDSYRQQQQLLQRPSHLQPPSYGPVLSPMNKVHGGMNKLPSVNQLV

SEQ ID NO: 5266 - protein, 150 aa, Synthetic construct
ANGPTSCLPPSRPINNMTATYNQLSRSTSGPRPGCQPSSPCVPKLSNSDSQDIQGRNRDSQNGAIAPGHVSVIRPPQNLYPENIVPSFSPGPSGRYGASGRSEGGRNSRVTPAAANYRSRTAKAKPSKQQGAGDAEEEEEAGDAEEEEEE

SEQ ID NO: 5267 - protein, 110 aa, Synthetic construct
LDLERKLKLNENAISRLQANQKSVLVSVSEVKAVAEMQFGELLAAVRKAQANVMLFLEEKEQAALSQANGIKAHLEYRSAEMEKSKQELERMAAISNTVQFLEEYCKFKN

SEQ ID NO: 5268 - protein, 80 aa, Synthetic construct
RKVITESTVHLIQLLENYKKKLQEFSKEEEYDIRTQVSAVVQRKYWTSKPEPSTREQFLQYAYDITFDPDTAHKYLRLQE

SEQ ID NO: 5269 - protein, 80 aa, Synthetic construct
GDIQQVGVIRCPVCRQECRQIDLVDNYFVKDTSEAPSSSDEKSEQVCTSCEDNASAVGFCVECGEWLCKTCIEAHQRVKF

SEQ ID NO: 5270 - protein, 90 aa, Synthetic construct
EDNASAVGFCVECGEWLCKTCIEAHQRVKFTKDHLIRKKEDVSESVGASGQRPVFCPVHKQEQLKLFCETCDRLTCRDCQLLEHKEHRYQ

SEQ ID NO: 5271 - protein, 200 aa, Synthetic construct
SRYISGSHLPPQPTSTMNPSPGPSALSPGSSGLSNSHTPVRPPSTSSTGSRGSCGSSGRTAEKTSLSFKSDQVKVKQEPGTEDEICSFSGGVKQEKTEDGRRSACMLSSPESSLTPPLSTNLHLESELDALASLENHVKIEPADMNESCKQSGLSSLVNGKSPIRSLMHRSARIGGDGNNKDDDPNEDWCAVCQNGGDLL

SEQ ID NO: 5272 - protein, 80 aa, Synthetic construct
QSGLSSLVNGKSPIRSLMHRSARIGGDGNNKDDDPNEDWCAVCQNGGDLLCCEKCPKVFHLTCHVPTLLSFPSGDWICTF

SEQ ID NO: 5273 - protein, 90 aa, Synthetic construct
SARIGGDGNNKDDDPNEDWCAVCQNGGDLLCCEKCPKVFHLTCHVPTLLSFPSGDWICTFCRDIGKPEVEYDCDNLQHSKKGKTAQGLSP

SEQ ID NO: 5274 - protein, 80 aa, Synthetic construct
MMKVVQVYADTQEINLKADSEVAQAGKAVALYFEDKLTEIYSDRTFAPLPEFEQEEDDGEVTEDSDEDFIQPRRKRLKSD

SEQ ID NO: 5275 - protein, 80 aa, Synthetic construct
AEYQKMPAFLHEEEQHHLERLRKEGEDIFQQLNESKARMEHSRELLRGMYEDLKQMCHKADVELLQAFGDILHRYESLLL

SEQ ID NO: 5276 - protein, 80 aa, Synthetic construct
KNMAFIARKASLRQFLSSEEQICGMHRETKKMFCEVDKSLLCLPCSNSQEHRNHIHCPIEWAAEERREELLKKMQSLWEK

SEQ ID NO: 5277 - protein, 80 aa, Synthetic construct
PKTLPCLHTYCQDCLAQLADGGRVRCPECRETVPVPPEGVASFKTNFFVNGLLDLVKARACGDLRAGKPACALCPLVGGT

SEQ ID NO: 5278 - protein, 100 aa, Synthetic construct
AGVDNNLVELEAARRVEKEALARLREQAARVGTQVEEAAEGVLRALLAQKQEVLGQLRAHVEAAEEAARERLAELEGREQVARAAAAFARRVLSLGREAE

SEQ ID NO: 5279 - protein, 90 aa, Synthetic construct
TGLCPFGPREILVADEQNRALKRFSLNGDYKGTVPVPEGCSPCSVAALQSAVAFSASARLYLINPNGEVQWRRALSLSQASHAVAALPSG

SEQ ID NO: 5280 - protein, 80 aa, Synthetic construct
PYKSFRRNPQLRNLTEIAKQLQIRRSKRKRQKENAMCEKHNQFLTLFCVKDLEILCTQCSFSTKHQKHYICPIKKAASYH

SEQ ID NO: 5281 - protein, 80 aa, Synthetic construct
QKENAMCEKHNQFLTLFCVKDLEILCTQCSFSTKHQKHYICPIKKAASYHREILEGSLEPLRNNIERVEKVIILQGSKSV

SEQ ID NO: 5282 - protein, 80 aa, Synthetic construct
VIILQGSKSVELKKKVEYKREEINSEFEQIRLFLQNEQEMILRQIQDEEMNILAKLNENLVELSDYVSTLKHLLREVEGK

SEQ ID NO: 5283 - protein, 110 aa, Synthetic construct
EEINSEFEQIRLFLQNEQEMILRQIQDEEMNILAKLNENLVELSDYVSTLKHLLREVEGKSVQSNLELLTQAKSMHHKYQNLKCPELFSFRLTKYGFSLPPQYSGLDRII

SEQ ID NO: 5284 - protein, 120 aa, Synthetic construct
LNTAHPQLLVSEDRKAVRYERKKRNICYDPRRFYVCPAVLGSQRFSSGRHYWEVEVGNKPKWILGVCQDCLLRNWQDQPSVLGGFWAIGRYMKSGYVASGPKTTQLLPVVKPSKIGIFLD

SEQ ID NO: 5285 - protein, 80 aa, Synthetic construct
LRNNIERVEKVIILQGSKSVELKKKVEYKREEINSEFEQIRLFLQNEQEMILRQIQDEEMNILAKLNENLVELSDYVSTL

SEQ ID NO: 5286 - protein, 80 aa, Synthetic construct
LLFHYESVHESQASDVKQEANHLQGSDGQQSVKESKEHSCTKCDFITQVEEEISRHYRRAHSCYKCRQCSFTAADTQSLL

SEQ ID NO: 5287 - protein, 160 aa, Synthetic construct
TKCDFITQVEEEISRHYRRAHSCYKCRQCSFTAADTQSLLEHFNTVHCQEQDITTANGEEDGHAISTIKEEPKIDFRVYNLLTPDSKMGEPVSESVVKREKLEEKDGLKEKVWTESSSDDLRNVTWRGADILRGSPSYTQASLGLLTPVSGTQEQTKTLR

SEQ ID NO: 5288 - protein, 110 aa, Synthetic construct
EKYMRPAKHPNYSPPGSPIEKYQYPLFGLPFVHNDFQSEADWLRFWSKYKLSVPGNPHYLSHVPGLPNPCQNYVPYPTFNLPPHFSAVGSDNDIPLDLAIKHSRPGPTAN

SEQ ID NO: 5289 - protein, 90 aa, Synthetic construct
QNYVPYPTFNLPPHFSAVGSDNDIPLDLAIKHSRPGPTANGASKEKTKAPPNVKNEGPLNVVKTEKVDRSTQDELSTKCVHCGIVFLDEV

SEQ ID NO: 5290 - protein, 120 aa, Synthetic construct
LLAVCEKSTPIGTSCQGAMLPSITNVINLADSHDRAAFAMVTHVKQEPRERENSESKEEDVEIDIELAPGDQTSTPKTKELSEKDIGNQLHMLTNRHDKFLDTLREVKTGALLSAFVQLC

SEQ ID NO: 5291 - protein, 80 aa, Synthetic construct; identical to SEQ ID NO: 562

SEQ ID NO: 5292 - protein, 80 aa, Synthetic construct
AYEQHGFFEQAQESYEKAMDKAKKEHERSNASPAIFPEYQLWEDHWIRCSKELNQWEALTEYGQSKGHINPYLVLECAWR

SEQ ID NO: 5293 - protein, 80 aa, Synthetic construct
FQVTDCRSLVKTLVCGVKTITWGITSCKAPGEAQFIPNKQLQPKETQIYIKLVKYAMQALDIYQVQIAGNGQTYIRVANC

SEQ ID NO: 5294 - protein, 80 aa, Synthetic construct
EKQADMLDSLRIYLLQYATLLVEHAPHHIHDNNKNRNSKLRRLMTFAWPCLLSKACVDPACKYSGHLLLAHIIAKFAIHK

SEQ ID NO: 5295 - protein, 80 aa, Synthetic construct
KMVREHLNPQAASGSTEATSGTSELVMLSLELVKTRLAVMSMEMRKNFIQAILTSLIEKSPDAKILRAVVKIVEEWVKNN

SEQ ID NO: 5296 - protein, 80 aa, Synthetic construct
SPMAANQTPTLREKSILLVKMMTYIEKRFPEDLELNAQFLDLVNYVYRDETLSGSELTAKLEPAFLSGLRCAQPLIRAKF

SEQ ID NO: 5297 - protein, 110 aa, Synthetic construct
DLGVYQLRHFSISFLSSLLGTENASVRLDNSSSGASVVAIDNKIEQAMDLVKSHLMYAVREEVEVLKEQIKELIEKNSQLEQENNLLKTLASPEQLAQFQAQLQTGSPPA

SEQ ID NO: 5298 - protein, 80 aa, Synthetic construct
STTSTSSSSGYDWHQAALAKTLQQTSSYGLLPEPSLFSTVQLYRQNNKLYGSVFTGASKFRCKDCSAAYDTLVELTVHMN

SEQ ID NO: 5299 - protein, 80 aa, Synthetic construct
SASKKGKQLVLDPVVEEKIQSIPLPPTTHTRLPASSIKKQPDSPAGSTTSEEKKEPEKEKPPVAGDAEKIKEESEDSLEK

SEQ ID NO: 5300 - protein, 90 aa, Synthetic construct
SIPLPPTTHTRLPASSIKKQPDSPAGSTTSEEKKEPEKEKPPVAGDAEKIKEESEDSLEKFEPSTLYPYLREEDLDDSPKGGLDILKSLE

SEQ ID NO: 5301 - protein, 90 aa, Synthetic construct
EEKKEPEKEKPPVAGDAEKIKEESEDSLEKFEPSTLYPYLREEDLDDSPKGGLDILKSLENTVSTAISKAQNGAPSWGGYPSIHAAYQLP

SEQ ID NO: 5302 - protein, 80 aa, Synthetic construct
HNALLHSPGSLTPPPHKSNVSAMEELVEKVTGKVNIKKEERPPEKEKSSLAKAASPIAKENKDFPKTEEVSGKPQKKGPE

SEQ ID NO: 5303 - protein, 80 aa, Synthetic construct
SALQSIMNTHLGKVSKPVSPSLDPLAMLYKISNSMLDKPVYPATPVKQADAIDRYYYENSDQPIDLTKSKNKPLVSSVAD

SEQ ID NO: 5304 - protein, 80 aa, Synthetic construct
SLDPLAMLYKISNSMLDKPVYPATPVKQADAIDRYYYENSDQPIDLTKSKNKPLVSSVADSVASPLRESALMDISDMVKN

SEQ ID NO: 5305 - protein, 80 aa, Synthetic construct
GRQSNWNPQHLLILQAQFASSLRETTEGKYIMSDLGPQERVHISKFTGLSMTTISHWLANVKYQLRRTGGTKFLKNLDTG

SEQ ID NO: 5306 - protein, 130 aa, Synthetic construct
AFQDMDKEDAQKVLKCMFCGDSFDSLQDLSVHMIKTKHYQKVPLKEPVPTISSKMVTPAKKRVFDVNRPCSPDSTTGSFADSFSSQKNANLQLSSNNRYGYQNGASYTWQFEACKSQILKCMECGSSHDT

SEQ ID NO: 5307 - protein, 140 aa, Synthetic construct
QNGAPSWSAYPSIHAAYQLSEGTKPPLPMGSQVLQIRPNLTNKLRPIAPKWKVMPLVSMPTHLAPYTQVKKESEDKDEAVKECGKESPHEEASSFSHSEGDSFRKSETPPEAKKTELGPLKEEEKLMKEGSEKEKPQPLE

SEQ ID NO: 5308 - protein, 80 aa, Synthetic construct
DQPIDLTKSKSKKAESSQAQSCMSPPQKHALSDIADMVKVLPKATTPKPASSSRVPPMKLEMDVRRFEDVSSEVSTLHKR

SEQ ID NO: 5309 - protein, 80 aa, Synthetic construct
SDRMADFESGSIKNEEETKEVTVPLEDTTVSDSLEQMKAVYNNFLSNSYWSNLNLNLHQPSSEKNNGSSSSSSSSSSSCG

SEQ ID NO: 5310 - protein, 80 aa, Synthetic construct
GKPIVETPVTPTITTLLDEKVQSVPLAATTFTSPSNTPASISPKLNVEVKKEVDKEKAVTDEKPKQKDKPGEEEEKCDIS

SEQ ID NO: 5311 - protein, 100 aa, Synthetic construct
VQSVPLAATTFTSPSNTPASISPKLNVEVKKEVDKEKAVTDEKPKQKDKPGEEEEKCDISSKYHYLTENDLEESPKGGLDILKSLENTVTSAINKAQNGT

SEQ ID NO: 5312 - protein, 90 aa, Synthetic construct
LSALQSVMNIHLGKAAKPSLPALDPMSMLFKMSNSLAEKAAVATPPPLQSKKADHLDRYFYHVNNDQPIDLTKGKSDKGCSLGSVLLSPT

SEQ ID NO: 5313 - protein, 80 aa, Synthetic construct
PPPPSEEGGVPQDAAGRGGTPQIRVVGGRGHVAIKAGQEEGQPPAEGLAAASVVMAADRSLKKGVQGGEKALEICGAQRS

SEQ ID NO: 5314 - protein, 80 aa, Synthetic construct
VCNGKLYIVMEAAATDLLQAVQRNGRIPGVQARDLFAQIAGAVRYLHDHHLVHRDLKCENVLLSPDERRVKLTDFGFGRQ

SEQ ID NO: 5315 - protein, 80 aa, Synthetic construct
GAVRYLHDHHLVHRDLKCENVLLSPDERRVKLTDFGFGRQAHGYPDLSTTYCGSAAYASPEVLLGIPYDPKKYDVWSMGV

SEQ ID NO: 5316 - protein, 110 aa, Synthetic construct
SYEELQTQRVMANVRERQRTQSLNEAFAALRKIIPTLPSDKLSKIQTLKLAARYIDFLYQVLQSDELDSKMASCSYVAHERLSYAFSVWRMEGAWSMSASEGAWSMSASH

SEQ ID NO: 5317 - protein, 120 aa, Synthetic construct
DGSPTPGKRGKKGSPSAQSFEELQSQRILANVRERQRTQSLNEAFAALRKIIPTLPSDKLSKIQTLKLAARYIDFLYQVLQSDEMDNKMTSCSYVAHERLSYAFSVWRMEEGAWSMSASH

SEQ ID NO: 5318 - protein, 80 aa, Synthetic construct
AWKTKFISQLQALQKGERKKSCGGHCKKGKCESHQHGSEEREEGSHEQDELHHRDTEEEEPFESSSEEEFGGEDHQSLNS

SEQ ID NO: 5319 - protein, 80 aa, Synthetic construct
IVDVEDLGKIMDHVKKEKREKEQQEEKSGLFRNMGRNEDGERRAMITPALREALTKQGYQLIGSHSGVKLCRWTKSMLRG

SEQ ID NO: 5320 - protein, 90 aa, Synthetic construct
TPSLACANKCVFCWRHHTNPVGTEWRWKMDQPEMILKEAIENHQNMIKQFKGVPGVKAERFEEGMTVKHCALSLVGEPIMYPEINRFLKL

SEQ ID NO: 5321 - protein, 80 aa, Synthetic construct
NVDELQAYAQLVSLGNPDFIEVKGVTYCGESSASSLTMAHVPWHEEVVQFVHELVDLIPEYEIACEHEHSNCLLIAHRKF

SEQ ID NO: 5322 - protein, 80 aa, Synthetic construct
HRCMETTPSLACANKCVFCWWHHNNPVGTEWLWKMDQPEMILKEAIENHQNMIKQFKGVPGVKAERFEEGMTVKHCALSL

SEQ ID NO: 5323 - protein, 80 aa, Synthetic construct
EDEKYYLRSLGEDPRKDVADIRKQFPLLKGDIKFPEFFKEEQFFSSVFRISSPGLQLWTHYDVMDNLLIQVTGKKRVVLF

SEQ ID NO: 5324 - protein, 80 aa, Synthetic construct
IRKQFPLLKGDIKFPEFFKEEQFFSSVFRISSPGLQLWTHYDVMDNLLIQVTGKKRVVLFSPRDAQYLYLKGTKSEVLNI

SEQ ID NO: 5325 - protein, 80 aa, Synthetic construct
YDVMDNLLIQVTGKKRVVLFSPRDAQYLYLKGTKSEVLNIDNPDLAKYPLFSKARRYECSLEAGDVLFIPALWFHNVISE

SEQ ID NO: 5326 - protein, 80 aa, Synthetic construct
RDFKRLQEDPPVGVSGAPSENNIMQWNAVIFGPEGTPFEDGTFKLVIEFSEEYPNKPPTVRFLSKMFHPNVYADGSICLD

SEQ ID NO: 5327 - protein, 110 aa, Synthetic construct
WKVRVDLPDKYPFKSPSIGFMNKIFHPNIDEASGTVCLDVINQTWTALYDLTNIFESFLPQLLAYPNPIDPLNGDAAAMYLHRPEEYKQKIKEYIQKYATEEALKEQEEG

SEQ ID NO: 5328 - protein, 80 aa, Synthetic construct
PQGTPYEGGVWKVRVDLPDKYPFKSPSIGFMNKIFHPNIDEASGTVCLDVINQTWTALYDLTNIFESFLPQLLAYPNPID

SEQ ID NO: 5329 - protein, 80 aa, Synthetic construct
YLRNLSSDDANVLVWHALLLPDQPPYHLKAFNLRISFPPEYPFKPPMIKFTTKIYHPNVDENGQICLPIISSENWKPCTK

SEQ ID NO: 5330 - protein, 100 aa, Synthetic construct
MAGLPRRIIKETQRLLAEPVPGIKAEPDESNARYFHVVIAGPQDSPFEGGTFKLELFLPEEYPMAAPKVRFMTKIYHPNVDKLGRICLDILKDKWSPALQ

SEQ ID NO: 5331 - protein, 90 aa, Synthetic construct
MQRASRLKRELHMLATEPPPGITCWQDKDQMDDLRAQILGGANTPYEKGVFKLEVIIPERYPFEPPQIRFLTPIYHPNIDSAGRICLDVL

SEQ ID NO: 5332 - protein, 110 aa, Synthetic construct
MSEPHRVQFTSLPGSLNPAFLKKSRKEEAGAGEQHQDCEPAAAAVRITLTLFEPDHKRCPEFFYPELVKNIRGKVKGLQPGDKKKDLSDPFNDEEKERHKVEALARKFEE

SEQ ID NO: 5333 - protein, 100 aa, Synthetic construct
LEKRVKELAQAARAAEGESRQKFFTQDINGILLDIEAQTRELSSQVRSGVYAYLASFLPCSKDALLKRARKLHLYEQGGRLKEPLQKLKEAIGRAMPEQM

SEQ ID NO: 5334 - protein, 80 aa, Synthetic construct
EQIQPSATIQETQQWLLKNRFSSYTRLFSNFSGADLLKLTKEDLVQICGAADGIRLYNSLKSRSVRPRLTIYVCREQPSS

SEQ ID NO: 5335 - protein, 100 aa, Synthetic construct
IYVCREQPSSTVLQGQQQAASSASENGSGAPYVYHAIYLEEMIASEVARKLALVFNIPLHQINQVYRQGPTGIHILVSDQMVQNFQDESCFLFSTVKAES

SEQ ID NO: 5336 - protein, 80 aa, Synthetic construct
TSPAVKLHDETLTYLNQGQSYEIRMLDNRKMGDMPEINGKLVKSIIRVVFHDRRLQYTEHQQLEGWKWNRPGDRLLDLDI

SEQ ID NO: 5337 - protein, 110 aa, Synthetic construct
CRGPNPFPQKEDMLAQHVLLGPMEWYLCGEDPAFGFPKLEQANKPSHLCGRVFKVGEPTYSCRDCAVDPTCVLCMECFLGSIHRDHRYRMTTSGGGGFCDCGDTEAWKEG

SEQ ID NO: 5338 - protein, 100 aa, Synthetic construct
RVFKVGEPTYSCRDCAVDPTCVLCMECFLGSIHRDHRYRMTTSGGGGFCDCGDTEAWKEGPYCQKHELNTSEIEEEEDPLVHLSEDVIARTYNIFAITFR

SEQ ID NO: 5339 - protein, 80 aa, Synthetic construct
LFNDEVHTYEQVIYTLQKAVNCTQKEAIGFATTVDRDGRRSVRYGDFQYCEQAKSVIVRNTSRQTKPLKVQVMHSSIVAH

SEQ ID NO: 5340 - protein, 80 aa, Synthetic construct
QVNATDEIKREIIHQLSIKPMAHSELVKSLPEDENKETGMESVIEAVAHFKKPGLTGRGMYELKPECAKEFNLYFYHFSR

SEQ ID NO: 5341 - protein, 100 aa, Synthetic construct
RLREVSEKLNKYNLNSHPPLNVLEQATIKQCVVGPNHAAFLLEDGRVCRIGFSVQPDRLELGKPDNNDGSKLNSNSGAGRTSRPGRTSDSPWFLSGSETL

SEQ ID NO: 5342 - protein, 80 aa, Synthetic construct
TTEAKPESKQEPVKTEMGPPPSPASTCSDASSIASSASMPYKRRRSTPAPKEEEKVNEEQWSLREVVFVEDVKNVPVGKV

SEQ ID NO: 5343 - protein, 100 aa, Synthetic construct
KAEISSSEKEEDVFMGMVCPSGTNPDDSPLYVLCCNDTCSFTWTGAEHINQDIFECRTCGLLESLCCCTECARVCHKGHDCKLKRTSPTAYCDCWEKCKC

SEQ ID NO: 5344 - protein, 120 aa, Synthetic construct
KESKFRREMEKLRNQQSRDLSLEVDRDRDLLIQQTMRQLNNHFGRRCATTPMAVHRVKVTFKDEPGEGSGVARSFYTAIAQAFLSNEKLPNLECIQNANKGTHTSLMQRLRNRGERDRER

SEQ ID NO: 5345 - protein, 80 aa, Synthetic construct
ETESDSESNHSNQDNASGRRSVVTAATAGSEAGASSVPAFFSEDDSQSNDSSDSDSSSSQSDDIEQETFMLDEPLERTTN

SEQ ID NO: 5346 - protein, 80 aa, Synthetic construct
VLPKNSLEDLTAEDFRLLVNGCGEVNVQMLISFTSFNDESGENAEKLLQFKRWFWSIVEKMSMTERQDLVYFWTSSPSLP

SEQ ID NO: 5347 - protein, 140 aa, Synthetic construct
FLWAYAAQLAVTKISTEDDGLVRNIDGIGDQEVIKPENGEHQDSTLKEDVPEQGKDDVREVKVEQNSEPCAGSSSESDLQTVFKNESLNAESKSGCKLQELKAKQLIKKDTATYWPLNWRSKLCTCQDCMKMYGDLDVLF

SEQ ID NO: 5348 - protein, 80 aa, Synthetic construct
ITNLIFNFLASDLMMAVDDPAAITSEIRKKILSKLSEETKVALTKLHNSLNEKSIEDFISCLDSAAEACDIMVKRGDKKR

SEQ ID NO: 5349 - protein, 80 aa, Synthetic construct
NCIEIVNKLIAQKQLEVVHTLDGKEYITPAQISKEMRDELHVRGGRVNIVDLQQVINVDLIHIENRIGDIIKSEKHVQLV

SEQ ID NO: 5350 - protein, 80 aa, Synthetic construct
SDLMMAVDDPAAITSEIRKKILSKLSEETKVALTKLHNSLNEKSIEDFISCLDSAAEACDIMVKRGDKKRERQILFQHRQ

SEQ ID NO: 5351 - protein, 90 aa, Synthetic construct
SVDEIFKIERPGAHPLSFADGKFLRRNDPECDLCGGDPEKKCHSCSCRVCGGKHEPNMQLLCDECNVAYHIYCLNPPLDKVPEEEYWYCP

SEQ ID NO: 5352 - protein, 90 aa, Synthetic construct
GGKHEPNMQLLCDECNVAYHIYCLNPPLDKVPEEEYWYCPSCKTDSSEVVKAGERLKMSKKKAKMPSASTESRRDWGRGMACVGRTRECT

SEQ ID NO: 5353 - protein, 110 aa, Synthetic construct
SDSAEAIEAFQLTPQQQHLIREDCQNQKLWDEVLSHLVEGPNFLKKLEQSFMCVCCQELVYQPVTTECFHNVCKDCLQRSFKAQVFSCPACRHDLGQNYIMIPNEILQTL

SEQ ID NO: 5354 - protein, 80 aa, Synthetic construct
GGTVNYFWGIPFCPDGVDPNQYTKVILCQLEVYQKSLKMAQRQLLNKKGFGEPVLPRPPSLIQNECGQGEQASEKNECIS

SEQ ID NO: 5355 - protein, 80 aa, Synthetic construct
GCKRRRTRTNFTGWQLEELEKAFNESHYPDVFMREALALRLDLVESRVQVWFQNRRAKWRKKENTKKGPGRPAHNSHPTT

SEQ ID NO: 5356 - protein, 100 aa, Synthetic construct
PGAAVAAVERGAAGLPKASPFSVESLLSDSPPRRKAASNAAAAAAAGLDFAPGLPCAPRTLIGKGHFLLYPITQPLGFLVPQAALKGGAGLEPAPKDAPP

SEQ ID NO: 5357 - protein, 80 aa, Synthetic construct
ADNSKTGASKGGILSKACDYIRELRQTNQRMQETFKEAERLQMDNELLRQQIEELKNENALLRAQLQQHNLEMVGEGTRQ

SEQ ID NO: 5358 - protein, 80 aa, Synthetic construct
QVQKKIIVYSNGNQPGGNSQGTAVQGITFNVSHNLQKQTANVVPVQRTCNLVTPVSISGVYPSENKPWHQTTVPALATNQ

SEQ ID NO: 5359 - protein, 80 aa, Synthetic construct
RQADSPMSTSSGSSRSFSVASMLPETTREDVTSNATTNTCDSCTFVEQTDIVALAARAIFDQENLEKGRVGLQADIREVA

SEQ ID NO: 5360 - protein, 80 aa, Synthetic construct
SQPSVAEQQQTQASQHLQALQQHVPAQGVSHLHSNHLYIKQQQQQQQQQQQQQQQQQAGQLRERHHLYQMQHHVPHAESS

SEQ ID NO: 5361 - protein, 80 aa, Synthetic construct
HQQQDVGSRQQGSGVSSEHVSGHNPMQRLLTSRGLEQQMVSQPSIVTRSSDMTCTPHRPERNRVSSYSAEALIGKTSSNS

SEQ ID NO: 5362 - protein, 180 aa, Synthetic construct
QHEELPGLDSQWRQIENGESGRERPLRAGESWFLVEKHWYKQWEAYVQGGDQDSSTFPGCINNATLFQDEINWRLKEGLVEGEDYVLLPAAAWHYLVSWYGLEHGQPPIERKVIELPNIQKVEVYPVELLLVRHNDLGKSHTVQFSHTDSIGLVLRTARERFLVEPQEDTRLWAKNSEGS

SEQ ID NO: 5363 - protein, 90 aa, Synthetic construct
SQELLSFLLDGLHEDLNRVKKKEYVELCDAAGRPDQEVAQEAWQNHKRRNDSVIVDTFHGLFKSTLVCPDCGNVSVTFDPFCYLSVPLPI

SEQ ID NO: 5364 - protein, 80 aa, Synthetic construct
SHKRVLEVFFIPMDPRRKPEQHRLVVPKKGKISDLCVALSKHTGISPERMMVADVFSHRFYKLYQLEEPLSSILDRDDIF

SEQ ID NO: 5365 - protein, 100 aa, Synthetic construct
TTSPEEVHAQPYIAIDWEPEMKKRYYDEVEAEGYVKHDCVGYVMKKAPVRLQECIELFTTVETLEKENPWYCPSCKQHQLATKKLDLWMLPEILIIHLKR

SEQ ID NO: 5366 - protein, 80 aa, Synthetic construct
DLDFSEFVIQPQNESNPELYKYDLIAVSNHYGGMRDGHYTTFACNKDSGQWHYFDDNSVSPVNENQIESKAAYVLFYQRQ

SEQ ID NO: 5367 - protein, 120 aa, Synthetic construct
ENNNSTPDPTWVHEIFQGTLTNETRCLTCETISSKDEDFLDLSVDVEQNTSITHCLRGFSNTETLCSEYKYYCEECRSKQEAHKRMKVKKLPMILALHLKRFKYMDQLHRYTKLSYRVVF

SEQ ID NO: 5368 - protein, 80 aa, Synthetic construct
WKKYVGFDSWDKYQMGDQNVYPGPIDNSGLLKDGDAQSLKEHLIDELDYILLPTEGWNKLVSWYTLMEGQEPIARKVVEQ

SEQ ID NO: 5369 - protein, 80 aa, Synthetic construct
MQYKVVVPKIGNILDLCTALSALSGIPADKMIVTDIYNHRFHRIFAMDENLSSIMERDDIYVFEININRTEDTEHVIIPV

SEQ ID NO: 5370 - protein, 80 aa, Synthetic construct
ALDWDPDLKKRYFDENAAEDFEKHESVEYKPPKKPFVKLKDCIELFTTKEKLGAEDPWYCPNCKEHQQATKKLDLWSLPP

SEQ ID NO: 5371 - protein, 80 aa, Synthetic construct
LKDGDAQSLKEHLIDELDYILLPTEGWNKLVSWYTLMEGQEPIARKVVEQGMFVKHCKVEVYLTELKLCENGNMNNVVTR

SEQ ID NO: 5372 - protein, 90 aa, Synthetic construct
EPVCRHIRKGLEQGNLKKALVNVEWNICQDCKTDNKVKDKAEEETEEKPSVWLCLKCGHQGCGRNSQEQHALKHYLTPRSEPHCLVLSLD

SEQ ID NO: 5373 - protein, 90 aa, Synthetic construct
EQEREKKENMAKENPPMNSPCQITVKGLSNLGNTCFFNAVMQNLSQTPVLRELLKEVKMSGTIVKIEPPDLALTEPLEINLEPPGPLTLA

SEQ ID NO: 5374 - protein, 100 aa, Synthetic construct
MQNLSQTPVLRELLKEVKMSGTIVKIEPPDLALTEPLEINLEPPGPLTLAMSQFLNEMQETKKGVVTPKELFSQVCKKAVRFKGYQQQDSQELLRYLLDG

SEQ ID NO: 5375 - protein, 80 aa, Synthetic construct
LYSLYGVVEHSGTMRSGHYTAYAKARTANSHLSNLVLHGDIPQDFEMESKGQWFHISDTHVQAVPTTKVLNSQAYLLFYE

SEQ ID NO: 5376 - protein, 80 aa, Synthetic construct
DEKPTCCRCRGRKRCIKKFSIQRFPKILVLHLKRFSESRIRTSKLTTFVNFPLRDLDLREFASENTNHAVYNLYAVSNHS

SEQ ID NO: 5377 - protein, 90 aa, Synthetic construct
FPLRDLDLREFASENTNHAVYNLYAVSNHSGTTMGGHYTAYCRSPGTGEWHTFNDSSVTPMSSSQVRTSDAYLLFYELASYELASPPSRM

SEQ ID NO: 5378 - protein, 80 aa, Synthetic construct
CLKCQACGYRSTTFEVFCDLSLPIPKKGFAGGKVSLRDCFNLFTKEEELESENAPVCDRCRQKTRSTKKLTVQRFPRILV

SEQ ID NO: 5379 - protein, 80 aa, Synthetic construct
DFPLQRLSLGDFASDKAGSPVYQLYALCNHSGSVHYGHYTALCRCQTGWHVYNDSRVSPVSENQVASSEGYVLFYQLMQE

SEQ ID NO: 5380 - protein, 80 aa, Synthetic construct
VQKVREHLQNLENSAFTADRHKKRKLLENSTLNSKLLKVNGSTTAICATGLRNLGNTCFMNAILQSLSNIEQFCCYFKEL

SEQ ID NO: 5381 - protein, 90 aa, Synthetic construct
RNKVDTYVEFPLRGLDMKCYLLEPENSGPESCLYDLAAVVVHHGSGVGSGHYTAYATHEGRWFHFNDSTVTLTDEETVVKAKAYILFYVE

SEQ ID NO: 5382 - protein, 80 aa, Synthetic construct
SPMYRREGQAQLPAVRRQEDGTQPQVNGQQVGCVTDGHHASSRKRRRKGAEGLGEEGGLHQDPLRHSCSPMGDGDPEAME

SEQ ID NO: 5383 - protein, 120 aa, Synthetic construct
EPPSSHIQPGLCGLGNLGNTCFMNSALQCLSNTAPLTDYFLKDEYEAEINRDNPLGMKGEIAEAYAELIKQMWSGRDAHVAPRMFKTQVGRFAPQFSGYQQQDSQELLAFLLDGLHEDLN

SEQ ID NO: 5384 - protein, 100 aa, Synthetic construct
QQDSQELLAFLLDGLHEDLNRVKKKPYLELKDANGRPDAVVAKEAWENHRLRNDSVIVDTFHGLFKSTLVCPECAKVSVTFDPFCYLTLPLPLKKDRVME

SEQ ID NO: 5385 - protein, 90 aa, Synthetic construct
ENMVVADVYNHRFHKIFQMDEGLNHIMPRDDIFVYEVCSTSVDGSECVTLPVYFRERKSRPSSTSSASALYGQPLLLSVPKHKLTLESLY

SEQ ID NO: 5386 - protein, 80 aa, Synthetic construct
DWDSETRRLYYDEQESEAYEKHVSMLQPQKKKKTTVALRDCIELFTTMETLGEHDPWYCPNCKKHQQATKKFDLWSLPKI

SEQ ID NO: 5387 - protein, 80 aa, Synthetic construct
VEGQQPIVRKVVEHGLFVKHCKVEVYLLELKLCENSDPTNVLSCHFSKADTIATIEKEMRKLFNIPAERETRLWNKYMSN

SEQ ID NO: 5388 - protein, 80 aa, Synthetic construct
CKVEVYLLELKLCENSDPTNVLSCHFSKADTIATIEKEMRKLFNIPAERETRLWNKYMSNTYEQLSKLDNTVQDAGLYQG

SEQ ID NO: 5389 - protein, 80 aa, Synthetic construct
DCNTTESIWACLSCSHVACGRYIEEHALKHFQESSHPVALEVNEMYVFCYLCDDYVLNDNTTGDLKLLRRTLSAIKSQNY

SEQ ID NO: 5390 - protein, 80 aa, Synthetic construct
VLNVVNNIFHGQLLSQVTCLACDNKSNTIEPFWDLSLEFPERYQCSGKDIASQPCLVTEMLAKFTETEALEGKIYVCDQC

SEQ ID NO: 5391 - protein, 110 aa, Synthetic construct
PFWDLSLEFPERYQCSGKDIASQPCLVTEMLAKFTETEALEGKIYVCDQCNSKRRRFSSKPVVLTEAQKQLMICHLPQVLRLHLKRFRWSGRNNREKIGVHVGFEEILNM

SEQ ID NO: 5392 - protein, 80 aa, Synthetic construct
TRRILIPFSQRKLTKQVLKVVNTIFHGQLLSQVTCISCNYKSNTIEPFWDLSLEFPERYHCIEKGFVPLNQTECLLTEML

SEQ ID NO: 5393 - protein, 80 aa, Synthetic construct
VVFDQVLTMEPYCCRDMLSSLDKETFAYDLSAVVMHHGKGFGSGHYTAYCYNTEGGFWVHCNDSKLNVCSVEEVCKTQAY

SEQ ID NO: 5394 - protein, 90 aa, Synthetic construct
RDAKGTIREIVLPKGLDLDRPKRTRTSFTAEQLYRLEMEFQRCQYVVGRERTELARQLNLSETQVKVWFQNRRTKQKKDQSRDLEKRASS

SEQ ID NO: 5395 - protein, 80 aa, Synthetic construct
SQLSMLPHLADLVSYSIQKVIGFAKMIPGFRDLTSEDQIVLLKSSAIEVIMLRSNESFTMDDMSWTCGNQDYKYRVSDVT

SEQ ID NO: 5396 - protein, 110 aa, Synthetic construct
EVQIKTWFQNRRMKHKRQMQDPQLHSPFSGSLHAPPAFYSTSSGLANGLQLLCPWAPLSGPQALMLPPGSFWGLCQVAQEALASAGASCCGQPLASHPPTPGRPSLGPAL

SEQ ID NO: 5397 - protein, 90 aa, Synthetic construct
EANWTAFLFQAHEASHHQQQAAQNSLLPLLSSAVEPPDQKPLLPIPITQKPQGAPETLKDAIGIKKEKPKTSFVCTYCSKAFRDSYHLRR

SEQ ID NO: 5398 - protein, 80 aa, Synthetic construct
SSAVEPPDQKPLLPIPITQKPQGAPETLKDAIGIKKEKPKTSFVCTYCSKAFRDSYHLRRHESCHTGIKLVSRPKKTPTT

SEQ ID NO: 5399 - protein, 80 aa, Synthetic construct
SVKKPSKPVKKNHACEMCGKAFRDVYHLNRHKLSHSDEKPFECPICNQRFKRKDRMTYHVRSHEGGITKPYTCSVCGKGF

SEQ ID NO: 5400 - protein, 80 aa, Synthetic construct
ASTTAMPVTQSVKKPSKPVKKNHACEMCGKAFRDVYHLNRHKLSHSDEKPFECPICNQRFKRKDRMTYHVRSHEGGITKP

SEQ ID NO: 5401 - protein, 140 aa, Synthetic construct
MPRVKAAQAGRQSSAKRHLAEQFAVGEIITDMAKKEWKVGLPIGQGGFGCIYLADMNSSESVGSDAPCVVKVEPSDNGPLFTELKFYQRAAKPEQIQKWIRTRKLKYLGVPKYWGSGLHDKNGKSYRFMIMDRFGSDLQK

SEQ ID NO: 5402 - protein, 120 aa, Synthetic construct
AYRYCPEGVHKEYKEDPKRCHDGTIEFTSIDAHNGVAPSRRGDLEILGYCMIQWLTGHLPWEDNLKDPKYVRDSKIRYRENIASLMDKCFPEKNKPGEIAKYMETVKLLDYTEKPLYENL

SEQ ID NO: 5403 - protein, 110 aa, Synthetic construct
DLKASPTLGKRKKRRHRTVFTAHQLEELEKAFSEAHYPDVYAREMLAVKTELPEDRIQVWFQNRRAKWRKREKRWGGSSVMAEYGLYGAMVRHCIPLPDSVLNSAEGGLL

SEQ ID NO: 5404 - protein, 90 aa, Synthetic construct
DRKMSKSALNQTKKRKKRRHRTIFTSYQLEELEKAFNEAHYPDVYAREMLAMKTELPEDRIQVWFQNRRAKWRKREKCWGRSSVMAEYGL

SEQ ID NO: 5405 - protein, 80 aa, Synthetic construct
YPDVYAREMLAMKTELPEDRIQVWFQNRRAKWRKREKCWGRSSVMAEYGLYGAMVRHSIPLPESILKSAKDGIMDSCAPW

SEQ ID NO: 5406 - protein, 80 aa, Synthetic construct
AHFSENLIKHVQGWPADHAEKQASRLREEAHNMGTIHMSEICTELKNLRSLVRVCEIQATLREQRILFLRQQIKELEKLK

SEQ ID NO: 5407 - protein, 80 aa, Synthetic construct
PSKTSDAPYDSADDWSEHISSSGKKYYYNCRTEVSQWEKPKEWLEREQRQKEANKMAVNSFPKDRDYRREVMQATATSGF

SEQ ID NO: 5408 - protein, 90 aa, Synthetic construct
KEANKMAVNSFPKDRDYRREVMQATATSGFASGMEDKHSSDASSLLPQNILSQTSRHNDRDYRLPRAETHSSSTPVQHPIKPVVHPTATP

SEQ ID NO: 5409 - protein, 80 aa, Synthetic construct
LSTKWGETTFMAKLGQKRPNFKPDIQEIPKKPKVEEESTGDPFGFDSDDESLPVSSKNLAQVKCSSYSESSEAAQLEEVT

SEQ ID NO: 5410 - protein, 80 aa, Synthetic construct
LDHIVDKVKECVDHLSRDEDEEKLVASLWGAERCLRVLESVTVHNPENQSYLIAYKDSQLIVSSAKALQHCEELIQQYNR

SEQ ID NO: 5411 - protein, 80 aa, Synthetic construct
SQKGNIVFVTLRGEKGRYVAVPACEHVFIWDLRKGEKILILQGLKQEVTCLCPSPDGLHLAVGYEDGSIRIFSLLSGEGN

SEQ ID NO: 5412 - protein, 80 aa, Synthetic construct
LQGLKQEVTCLCPSPDGLHLAVGYEDGSIRIFSLLSGEGNVTFNGHKAAITTLKYDQLGGRLASGSKDTDIIVWDVINES

SEQ ID NO: 5413 - protein, 80 aa, Synthetic construct
SWNKEQGFIACGGEDGLLKVLKLETQTDDAKLRGLAAPSNLSMNQTLEGHSGSVQVVTWNEQYQKLTTSDENGLIIVWML

SEQ ID NO: 5414 - protein, 80 aa, Synthetic construct
IPPVEIYSLLALCACASRAFGTCSKAFIKLKSLETLSSEQKQQYEDLALEIFTKHTSKDNRKPELDSLMEGGEGKLPTCV

SEQ ID NO: 5415 - protein, 80 aa, Synthetic construct
LNVRVMEPDPNSENIAAISQSSVGSDLFVFKPSEPRPLYIQKGISREKVQWGVFVPRDVPESFTSEAYQWLNRSQFYFLT

SEQ ID NO: 5416 - protein, 80 aa, Synthetic construct; identical to SEQ ID NO: 766

SEQ ID NO: 5417 - protein, 80 aa, Synthetic construct
GDENGTVSLVDTKSTSCVLSSAVHSQCVTGLVFSPHSVPFLASLSEDCSLAVLDSSLSELFRSQAHRDFVRDATWSPLNH

SEQ ID NO: 5418 - protein, 120 aa, Synthetic construct
PWSEEEEEEEEEEDVVLTSEMDFSPENGVFSPLATPSLIPQAALELKQAFREALQAVEATQGQQQQLRGMVPIVLVAKLGPQVMAAARVPPRLQPEELGLAGAHPLDFLLLDAPLGGPLG

SEQ ID NO: 5419 - protein, 100 aa, Synthetic construct
ASPPPTARKMFPGLAAPSLPKKLKPEQIRVEIKREMLPGALHGELHPSEGPWGAPREDMTPLNLSSRAEPVRDIRCEFCGEFFENRKGLSSHARSHLRQM

SEQ ID NO: 5420 - protein, 90 aa, Synthetic construct
PLNLSSRAEPVRDIRCEFCGEFFENRKGLSSHARSHLRQMGVTEWSVNGSPIDTLREILKKKSKPCLIKKEPPAGDLAPALAEDGPPTVA

SEQ ID NO: 5421 - protein, 110 aa, Synthetic construct
DASAARGGEDTNDLQQKLEEVRQPPPRVRPVPSLVPRPPQTSLVKFVGNIYTLKCRFCEVEFQGPLSIQEEWVRHLQRHILEMNFSKADPPPEESQAPQAQAQTAAAEAP

SEQ ID NO: 5422 - protein, 80 aa, Synthetic construct
VSPINILQELLATSAAEQPPSPLGREPGGPPGSFLTSRRPRLPLTVPFPPTWAEDPGPAYGDGLGSEENAMVAMDLGSPS

SEQ ID NO: 5423 - protein, 80 aa, Synthetic construct
PWGAPREDMTPLNLSSRAEPVRDIRCEFCGEFFENRKGLSSHARSHLRQMGVTEWSVNGSPIDTLREILKKKSKPCLIKK

SEQ ID NO: 5424 - protein, 80 aa, Synthetic construct
SVVSCDFSPDSALLVTASYDTNVIMWDPYTGERLRSLHHTQVDPAMDDSDVHISSLRSVCFSPEGLYLATVADDRLLRIW

SEQ ID NO: 5425 - protein, 170 aa, Synthetic construct
SPEPASLEELPEVYPEGPSSLPASLSLSVGTSSAKLEAINELIRFDHIYTKPLVLEIPSETESQANVVVKIEEAPLSPSENDHPEFIVSVKEEPVEDDLVPELGISNLLSSSHCPKPSSCLLDAYSDCGYGGSLSPFSDMSSLLGVNHSWEDTFANELFPNELFPQLISV

SEQ ID NO: 5426 - protein, 80 aa, Synthetic construct
RLAARPYSATAAAATGGMANVKAAPKIIDTGGGFILEEEEEEEQKIGKVVHQPGPVMEFDYVICEECGKEFMDSYLMNHF

SEQ ID NO: 5427 - protein, 80 aa, Synthetic construct
GGGFILEEEEEEEQKIGKVVHQPGPVMEFDYVICEECGKEFMDSYLMNHFDLPTCDNCRDADDKHKLITKTEAKQEYLLK

SEQ ID NO: 5428 - protein, 80 aa, Synthetic construct
ADDKHKLITKTEAKQEYLLKDCDLEKREPPLKFIVKKNPHHSQWGDMKLYLKLQIVKRSLEVWGSQEALEEAKEVRQENR

SEQ ID NO: 5429 - protein, 130 aa, Synthetic construct
RKPRPVSQLVAQQVTQQFVPPTQSKKEKKDKVEKEKSEKETTSKKNSHKKTRPRLKNVDRSSAQHLEVTVGDLTVIITDFKEKTKSPPASSAASADQHSQSGSSSDNTERGMSRSSSPRGEASSLNGESH

SEQ ID NO: 5430 - protein, 80 aa, Synthetic construct
SGAGSGGPGGLTSAAPAGGDKKVIATKVLGTVKWFNVRNGYGFINRNDTKEDVFVHQTAIKKNNPRKYLRSVGDGETVEF

SEQ ID NO: 5431 - protein, 80 aa, Synthetic construct
QAAAPAPAAHVAGNPGGDAAPAATGTAAAASLATAAGSEDAEKKVLATKVLGTVKWFNVRNGYGFINRNDTKEDVFVHQT

SEQ ID NO: 5432 - protein, 100 aa, Synthetic construct
SYKPNDLVEVREPPFHLTRRGWGEFPVRVQVHFKDSQNKRIDIIHNLKLDRTYTGLQTLGAETVVDVELHRHSLGEDCIYPQSSESDISDAPPSLPLTIP

SEQ ID NO: 5433 - protein, 150 aa, Synthetic construct
TNKISTASQVSQGTGSPVPKIHGSSFVTSTVKQEDSLFASMPPLCPIGSHPKVQSPKPITGGLGAFTKVIIKQEPGEAPHVPATGAASQSPLPQYVTVKGGHMIAVSPQKQVITPGEGIAQSAKVQPSKVVGVPVGSALPSTVKQAVAIS

SEQ ID NO: 5434 - protein, 130 aa, Synthetic construct
QSSPQQAVLTIPSQLKPLSVNTSGGVQTILMPVNKVVQSFSTSKPPAILPVAAPTPVVPSSAPAAVAKVKTEPETPGPSCLSQEGQTAVKTEESSELGNYVIKIDHLETIQQLLTAVVKKIPLITAKSED

SEQ ID NO: 5435 - protein, 80 aa, Synthetic construct
QQLLTAVVKKIPLITAKSEDASCFSAKSVEQYYGWNIGKRRAAEWQRAMTMRKVLQEILEKNPRFHHLTPLKTKHIAHWC

SEQ ID NO: 5436 - protein, 100 aa, Synthetic construct
DNLCRKLEDLQQFQKREPENEEEVDILSLSEPVKINIKKEQEEKQEEVKFYLPPTPGSEFIGDVTQKIGITLQPVALHRNVYASVVEDMILKATEQLVND

SEQ ID NO: 5437 - protein, 80 aa, Synthetic construct
QTTVSNSQQAYQEAFEISKKEMQPTHPIRLGLALNFSVFYYEILNSPEKACSLAKTAFDEAIAELDTLNEESYKDSTLIM

SEQ ID NO: 5438 - protein, 80 aa, Synthetic construct
EERNLLSVAYKNVVGARRSSWRVISSIEQKTERNEKKQQMGKEYREKIEAELQDICNDVLELLDKYLIPNATQPESKVFY

SEQ ID NO: 5439 - protein, 90 aa, Synthetic construct
ERNLLSVAYKNVIGARRASWRIISSIEQKEENKGGEDKLKMIREYRQMVETELKLICCDILDVLDKHLIPAANTGESKVFYYKMKGDYHR

SEQ ID NO: 5440 - protein, 80 aa, Synthetic construct
EQGAELSNEERNLLSVAYKNVVGGRRSAWRVISSIEQKTDTSDKKLQLIKDYREKVESELRSICTTVLELLDKYLIANAT

SEQ ID NO: 5441 - protein, 80 aa, Synthetic construct
IVDQSQQAYQEAFEISKKEMQPTHPIRLGLALNFSVFYYEILNSPEKACSLAKTAFDEAIAELDTLSEESYKDSTLIMQL

SEQ ID NO: 5442 - protein, 80 aa, Synthetic construct
LIPVPAPAGGDDDYIEQTLVTVAAAGKSGGGGSSSSGGGRVKKGGGKKSGKKSYLSGGAGAAGGGGADPGNKKWEQKQVQ

SEQ ID NO: 5443 - protein, 80 aa, Synthetic construct
LLKTADPRYELPSRKYISTKAIPEKYGAVREVILKELAEATWCGISTDMWRSENQNRAYVTLAAHFLGLGAPNCLSMGSR

SEQ ID NO: 5444 - protein, 100 aa, Synthetic construct
MRREDEEEEGTMMKAKGDLEMKEEEEISETGELVGPFVSAMPTPMPHNKGTRFSEAWEYFHLAPARAGHHPNQYATCRLCGRQVSRGPGVNVGTTALWKH

SEQ ID NO: 5445 - protein, 120 aa, Synthetic construct
LKSMHREELEKSGHGQAGQRQDPRPHGPQLPTGIEGNWGRLLEQVGTMALWASQREKEVLRRERAVEWRERAVEKRERALEEVERAILEMKWKVRAEKEACQREKELPAAPAAVHPFHFV

SEQ ID NO: 5446 - protein, 90 aa, Synthetic construct
AAPCPPPPGPAAAPEGDWARLLEQMGALAVRGSRRERELERRELAVEQGERALERRRRALQEEERAAAQARRELQAEREALQARLRDVSR

SEQ ID NO: 5447 - protein, 100 aa, Synthetic construct
ENNLKTCPKEDGDFVSDKIKFKIEEEDDDGIPPDSLERMDFKSEQEDMKQTDSGGERAGLGGTGCSCKPPGKYLSAESEDDYGALFSQYSSTLYDVAMEA

SEQ ID NO: 5448 - protein, 110 aa, Synthetic construct
WEAWVTSTGLQVGITVTDNASIGKTLNEGEHSSVQCFSHTVNLIVSEAIKSQRMVQNLLSLARKICERVHRSPKAKEKLAELQREYALPQHHLIQDVPSKWSTSFHMLER

SEQ ID NO: 5449 - protein, 110 aa, Synthetic construct
MSVECNFRELISCDQWEVMQSVCRALKPFEAASREMSTQMSTLSQVIPMVHILNRKVEMLFEETMGIDTMLRSLKEAMVSRLSATLHDPRYVFATLLDPRYKASLFTEEE

SEQ ID NO: 5450 - protein, 80 aa, Synthetic construct
ELQREYALPQHHLIQDVPSKWSTSFHMLERLIEQKRAINEMSVECNFRELISCDQWEVMQSVCRALKPFEAASREMSTQM

SEQ ID NO: 5451 - protein, 100 aa, Synthetic construct
EAVSRVFPALAGQAPEEQGEIIKVKVKEEDHTWDQESALRRNLSYTRELSRQRFRQFCYQETPGPREALSQLRELCRQWLNPEIHTKEQILELLVLEQFL

SEQ ID NO: 5452 - protein, 80 aa, Synthetic construct
MEDRMECESPEPHPLQDNGSFLWFSMMSQSMGGDNLSSLDTNEAEIEPENMREKFFRSLARLLENKSNNTKIFSKAKYCQ

SEQ ID NO: 5453 - protein, 90 aa, Synthetic construct
FKFCVGVCSDGAASMTGKHSEVVTQIKELAPECKTTHCFIHRESLAMKKISAELNSVLNDIVKIVNYIKSNSLNSRLFSLLCDNMEADHK

SEQ ID NO: 5454 - protein, 90 aa, Synthetic construct
KNATYFSMADKVEGQKQKLEAWKNRISTDCYDMFHNLTTIINEVGNDLDIAHLRKVISEHLTNLLECFEFYFPSKEDPRIGNLWIQNPFL

SEQ ID NO: 5455 - protein, 80 aa, Synthetic construct
HAFSEHSSSNKRNVNNRSYPEEGKTKRVHASFTRKYDPSYIEFGFVAVIDGEVLKPQCIICGDVLANEAMKPSKLKRHLY

SEQ ID NO: 5456 - protein, 90 aa, Synthetic construct
RIVDIRDGKDSNIKAEFGEKDSSKTFSAQTDKYRGDTSQAADDSASTTGSRKSSTVESEIASEEKSRAAERKRIIIKMEPEDIPTDELKD

SEQ ID NO: 5457 - protein, 80 aa, Synthetic construct
DKYRGDTSQAADDSASTTGSRKSSTVESEIASEEKSRAAERKRIIIKMEPEDIPTDELKDFNIIKVTDKDCNESTDNDEL

SEQ ID NO: 5458 - protein, 80 aa, Synthetic construct
RKSSTVESEIASEEKSRAAERKRIIIKMEPEDIPTDELKDFNIIKVTDKDCNESTDNDELEDEPEEPFYRYYVEEDVSIK

SEQ ID NO: 5459 - protein, 80 aa, Synthetic construct
RKRIIIKMEPEDIPTDELKDFNIIKVTDKDCNESTDNDELEDEPEEPFYRYYVEEDVSIKKSGRKTLKPRMSVSADERGG

SEQ ID NO: 5460 - protein, 80 aa, Synthetic construct
EDEPEEPFYRYYVEEDVSIKKSGRKTLKPRMSVSADERGGLENMRPPNNSSPVQEDAENASCELCGLTITEEDLSSHYLA

SEQ ID NO: 5461 - protein, 80 aa, Synthetic construct
LENMRPPNNSSPVQEDAENASCELCGLTITEEDLSSHYLAKHIENICACGKCGQILVKGRQLQEHAQRCGEPQDLTMNGL

SEQ ID NO: 5462 - protein, 90 aa, Synthetic construct
TSWLKDFPWLRYSKDTGLMSCGWCQKTPADGGSVDLPPVGHDELSRGTRNYKKTLLLRHHVSTEHKLHEANAQESEIPSEEGYCDFNSRP

SEQ ID NO: 5463 - protein, 90 aa, Synthetic construct
VASYLQMSEVVQTCRNFIKDALNISIKSEAPESVVVDYNNRKPVNRDGLSSSRDQKIASFWATRNLTNLASNVKIENDGCNVDEGQIENY

SEQ ID NO: 5464 - protein, 110 aa, Synthetic construct
PESVVVDYNNRKPVNRDGLSSSRDQKIASFWATRNLTNLASNVKIENDGCNVDEGQIENYQMNDSSWVQDGSPEMAENESEGQTKVFIWNNMGSQGIQETGKTRRKNQTT

SEQ ID NO: 5465 - protein, 100 aa, Synthetic construct
EGQTKVFIWNNMGSQGIQETGKTRRKNQTTKRFIYNIPPNNETNLEDCSVMQPPVAYPEENTLLIKEEPDLDGALLSGPDGDRNVNANLLAEAGTSQDGG

SEQ ID NO: 5466 - protein, 100 aa, Synthetic construct
NETNLEDCSVMQPPVAYPEENTLLIKEEPDLDGALLSGPDGDRNVNANLLAEAGTSQDGGDAGTSHDFKYGLMPGPSNDFKYGLIPGTSNDFKYGLIPGA

SEQ ID NO: 5467 - protein, 120 aa, Synthetic construct
DAGTSHDFKYGLMPGPSNDFKYGLIPGTSNDFKYGLIPGASNDFKYGLLPESWPKQETWENGESSLIMNKLKCPHCSYVAKYRRTLKRHLLIHTGVRSFSCDICGKLFTRREHVKRHSLV

SEQ ID NO: 5468 - protein, 80 aa, Synthetic construct
ALNISIKSEAPESVVVDYNNRKPVNRDGLSSSRDQKIASFWATRNLTNLASNVKIENDGCNVDEGQIENYQMNDSSWVQD

SEQ ID NO: 5469 - protein, 90 aa, Synthetic construct
GECGMVFQRRYALIMHKLKHERARDYKCPLCKKQFQYSASLRAHLIRHTRKDAPSSSSSNSTSNEASGTSSEKGRTKREFICSICGRTLP

SEQ ID NO: 5470 - protein, 100 aa, Synthetic construct
RQRHRKTFAELEVVLQPERRRDLIEAAHLGPGGTHHTRHQTWHYLSKTYWWRGILKQVKDYIKQCSKCQEKLDRSRPISDVSEMLEELGLDLESGEESNE

SEQ ID NO: 5471 - protein, 130 aa, Synthetic construct
ALSQFIEPKIGLKEDGVSEASLVSSISATKSLLPPARTPKPAPKPPPPPPLPPPLLRPVKLEFPLDEDLELKAEEEDEDEDEDVSDICIVKVESALEVAHRLKPPGGLGGGLGIGGSVGGHLGELAQSSV

SEQ ID NO: 5472 - protein, 80 aa, Synthetic construct
NMNQLRAEERFCDVTIVADSLKFRGHKVILAACSPFLRDQFLLNPSSELQVSLMHSARIVADLLLSCYTGALEFAVRDIV

SEQ ID NO: 5473 - protein, 100 aa, Synthetic construct
SLLQGTLQPPAGPEEPTLAGGGRHPGVAEVKTEMMQVDEVPSQDSPGAAESSISGGMGDKVEERGKEGPGTPTRSSVITSARELHYGREESAEQVPPPAE

SEQ ID NO: 5474 - protein, 80 aa, Synthetic construct
SSISGGMGDKVEERGKEGPGTPTRSSVITSARELHYGREESAEQVPPPAEAGQAPTGRPEHPAPPPEKHLGIYSVLPNHK

SEQ ID NO: 5475 - protein, 80 aa, Synthetic construct
TPTRSSVITSARELHYGREESAEQVPPPAEAGQAPTGRPEHPAPPPEKHLGIYSVLPNHKADAVLSMPSSVTSGLHVQPA

SEQ ID NO: 5476 - protein, 90 aa, Synthetic construct
IGEQCSVCGVELPDNEAVEQHRKLHSGMKTYGCELCGKRFLDSLRLRMHLLAHSAGAKAFVCDQCGAQFSKEDALETHRQTHTGTDMAVF

SEQ ID NO: 5477 - protein, 80 aa, Synthetic construct
VEERGKEGPGTPTRSSVITSARELHYGREESAEQVPPPAEAGQAPTGRPEHPAPPPEKHLGIYSVLPNHKADAVLSMPSS

SEQ ID NO: 5478 - protein, 80 aa, Synthetic construct
QTEKADAPREPPPVELKPDPTSGMAAAEAEAALSESSEQEMEVEPARKGEEEQKEQEEQEEEGAGPAEVKEEGSQLENGE

SEQ ID NO: 5479 - protein, 80 aa, Synthetic construct
PHATAAGKTVASPCSSTESLSQRSVTSVRDSADVDCVLDLSVKSSLSGVENLNSSYFSSQDVLRSNLVQVKVEKEASCDE

SEQ ID NO: 5480 - protein, 120 aa, Synthetic construct
SQRSVTSVRDSADVDCVLDLSVKSSLSGVENLNSSYFSSQDVLRSNLVQVKVEKEASCDESDVGTNDYDMEHSTVKESVSTNNRVQYEPAHLAPLREDSVLRELDREDKASDDEMMTPES

SEQ ID NO: 5481 - protein, 80 aa, Synthetic construct
ASCSMYFHLFYKDQLDKRDIVHLNSDIVTAPAFALLLEFMYEGKLQFKDLPIEDVLAAASYLHMYDIVKVCKKKLKEKAT

SEQ ID NO: 5482 - protein, 80 aa, Synthetic construct
MWMRLPSDSAGIPQAGGEAEPHATAAGKTVASPCSSTESLSQRSVTSVRDSADVDCVLDLSVKSSLSGVENLNSSYFSSQ

SEQ ID NO: 5483 - protein, 80 aa, Synthetic construct
ASPCSSTESLSQRSVTSVRDSADVDCVLDLSVKSSLSGVENLNSSYFSSQDVLRSNLVQVKVEKEASCDESDVGTNDYDM

SEQ ID NO: 5484 - protein, 80 aa, Synthetic construct
SQQMERYLSTTPETTHCRKQPRPVRIQTLVGNIHIKQEMEDDYDYYGQQRVQILERNESEECTEDTDQAEGTESEPKGES

SEQ ID NO: 5485 - protein, 90 aa, Synthetic construct
PRPVRIQTLVGNIHIKQEMEDDYDYYGQQRVQILERNESEECTEDTDQAEGTESEPKGESFDSGVSSSIGTEPDSVEQQFGPGAARDSQA

SEQ ID NO: 5486 - protein, 80 aa, Synthetic construct
EERLKGQLCDVLLIVGDQKFRAHKNVLAASSEYFQSLFTNKENESQTVFQLDFCEPDAFDNVLNYIYSSSLFVEKSSLAA

SEQ ID NO: 5487 - protein, 140 aa, Synthetic construct
SQGSSSVSSDAPGNVLCALSQKSSLKDCSEKTALDDRPQVLQPHRLRSFSASQSTDREGASPVTEVRIKTEPSSPLSDPSDIIRVTVGDAATTAAASSSSVTRDLSLKTEDDQKDMSRLPAKRRFQADRRLPFKKLKVNE

SEQ ID NO: 5488 - protein, 80 aa, Synthetic construct
LASPVENKEVYQCRLCNAKLSSLLEQGSHERLCRNAAVCPYCSLRFFSPELKQEHESKCEYKKLTCLECMRTFKSSFSIW

SEQ ID NO: 5489 - protein, 80 aa, Synthetic construct
YCSLRFFSPELKQEHESKCEYKKLTCLECMRTFKSSFSIWRHQVEVHNQNNMAPTENFSLPVLDHNGDVTGSSRPQSQPE

SEQ ID NO: 5490 - protein, 140 aa, Synthetic construct
PVLDHNGDVTGSSRPQSQPEPNKVNHIVTTKDDNVFSDSSEQVNFDSEDSSCLPEDLSLSKQLKIQVKEEPVEEAEEEAPEASTAPKEAGPSKEASLWPCEKCGKMFTVHKQLERHQELLCSVKPFICHVCNKAFRTNFR

SEQ ID NO: 5491 - protein, 80 aa, Synthetic construct
RHQVEVHNQNNMAPTENFSLPVLDHNGDVTGSSRPQSQPEPNKVNHIVTTKDDNVFSDSSEQVNFDSEDSSCLPEDLSLS

SEQ ID NO: 5492 - protein, 80 aa, Synthetic construct
PGAFETVLASAYTGRLSMAAADIVNFLTVGSVLQMWHIVDKCTELLREGRASATTTITTAAATSVTVPGAGVPSGSGGTV

SEQ ID NO: 5493 - protein, 80 aa, Synthetic construct
HRKFMDVSQLKKHLRTHTGEKPFTCEICGKSFTAKSSLQTHIRIHRGEKPYSCGICGKSFSDSSAKRRHCILHTGKKPFS

SEQ ID NO: 5494 - protein, 150 aa, Synthetic construct
QISTTQKTVVKQGLEVKEAPSSNSGNRAAVQGDHPQLQLSLAIGLDDGTADQQRACPATQALEEHQKPPVSIKQERCDPESVISQSHPSPSSEVTGPTFTENSVKIHLCHYCGERFDSRSNLRQHLHTHVSGSLPFGVPASILESNDLGE

SEQ ID NO: 5495 - protein, 80 aa, Synthetic construct
QQLNMQREFGFLCDCTVAIGDVYFKAHRAVLAAFSNYFKMIFIHQTSECIKIQPTDIQPDIFSYLLHIMYTGKGPKQIVD

SEQ ID NO: 5496 - protein, 80 aa, Synthetic construct
SGSLPFGVPASILESNDLGEVHPLNENSEALECRRLSSFIVKENEQQPDHTNRGTTEPLQISQVSLISKDTEPVELNCNF

SEQ ID NO: 5497 - protein, 80 aa, Synthetic construct
MSHIVERCTQALWKFIKPKQPMDSKEGCEPQSASPQSKEQQGDARGSPKQDSPCIHPSEDSMDMEDSDIQIVKVESIGDV

SEQ ID NO: 5498 - protein, 80 aa, Synthetic construct
IEQNHLHNYALSYTGSDNIIMASKDVFGPNIRGVDKGLQWHHQCPKCTRVFRHLENYANHLKMHKLFMCLLCGKTFTQKG

SEQ ID NO: 5499 - protein, 80 aa, Synthetic construct
GPESLRVVEPKDPGGPLQGFYPPASAPTSAPAPVSAPVPSQAPAPAEAELVQVKVEAIVISDEETDVSDEQPQGPERAFP

SEQ ID NO: 5500 - protein, 80 aa, Synthetic construct
QAPAPAEAELVQVKVEAIVISDEETDVSDEQPQGPERAFPSGGAVYGAQPSQPEAFEDPGAAGLEEVGPSDHFLPTDPHL

SEQ ID NO: 5501 - protein, 100 aa, Synthetic construct
QVKSISGTAQDGNTEPLPPDSGDKNLVIQKSKDEAQDNGATIMPIITESFSLSAEDYEMKKIIVTDSDDDDDDVIFCSEILPTKETLPSNNTVAQVQSNP

SEQ ID NO: 5502 - protein, 100 aa, Synthetic construct
TEIEGLSTGCKVYANIGEDTYDIVIPVKDDPDEGEARLENEIPKTSGSEMANKRMKVKHDDHYELIVDGRVYYICIVCKRSYVCLTSLRRHFNIHSWEKK

SEQ ID NO: 5503 - protein, 80 aa, Synthetic construct
LNEQRGHGLFCDVTVIVEDRKFRAHKNILSASSTYFHQLFSVAGQVVELSFIRAEIFAEILNYIYSSKIVRVRSDLLDEL

SEQ ID NO: 5504 - protein, 80 aa, Synthetic construct
CLACGKSFINYQFMSSHIKSVHSQDPSGDSKLYRLHPCRSLQIRQYAYLSDRSSTIPAMKDDGIGYKVDTGKEPPVGTTT

SEQ ID NO: 5505 - protein, 80 aa, Synthetic construct
DVVSFLTAASFLQMQCVIDKCTQILESIHSKISVGDVDSVTVGAEENPESRNGVKDSSFFANPVEISPPYCSQGRQPTAS

SEQ ID NO: 5506 - protein, 80 aa, Synthetic construct
KALRSRLQEEGHSDRGSSGSVSEYEIQIEGDHEQGDLLVRESQITEVKVKMEKSDRPSCSDSSSLGDDGYHTEMVDGEQV

SEQ ID NO: 5507 - protein, 90 aa, Synthetic construct
DHEQGDLLVRESQITEVKVKMEKSDRPSCSDSSSLGDDGYHTEMVDGEQVVAVNVGSYGSVLQHAYSYSQAASQPTNVSEAFGSLSNSSP

SEQ ID NO: 5508 - protein, 80 aa, Synthetic construct
ERSARGHWYPYNERLICIYCGKSFNQKGSLDRHMRLHMGITPFVCKFCGKKYTRKDQLEYHIRGHTDDKPFRCEICGKCF

SEQ ID NO: 5509 - protein, 120 aa, Synthetic construct
SSDVESREPILRINRAGQWYVETGVADRGGRSDDEVRVLGAVHIKTENLEEWLGPENQPSGEDGSSAEEVTAMVIDTTGHGSVGQENYTLGSSGAKVARPTSSEVDRFSPSGSVVPLTER

SEQ ID NO: 5510 - protein, 80 aa, Synthetic construct
VSERWFRYNPRLTCIYCAKSFNQKGSLDRHMRLHMGITPFVCRMCGKKYTRKDQLEYHIRKHTGNKPFHCHVCGKSFPFQ

SEQ ID NO: 5511 - protein, 80 aa, Synthetic construct
YSSTVVVKRQETVTDLAAAGKKLGISFLEDLTDRNFSNSPGPYVFCITEKGVVKEEKNEKRHEEPAITNGPRITNAFSII

SEQ ID NO: 5512 - protein, 80 aa, Synthetic construct
KKLGISFLEDLTDRNFSNSPGPYVFCITEKGVVKEEKNEKRHEEPAITNGPRITNAFSIIETENSNNMFSPLDLRASFKK

SEQ ID NO: 5513 - protein, 90 aa, Synthetic construct
GPYVFCITEKGVVKEEKNEKRHEEPAITNGPRITNAFSIIETENSNNMFSPLDLRASFKKVSDSMRTASLCLERTDVCHEAEPVRTLAEH

SEQ ID NO: 5514 - protein, 110 aa, Synthetic construct
YPTIGQNGGSFTGPEPLLSENRIGEFSSTGSTLPDTDHMVKFVNGQMLYSCVVCKRSYVTLSSLRRHANVHSWRRTYPCHYCNKVFALAEYRTRHEIWHTGERRYQCIFC

SEQ ID NO: 5515 - protein, 140 aa, Synthetic construct
GTKWGEEALKMDLDNNFYSTEVSVSSTENAVSSDLRAGDVPVLSLSNSSENAASVISYSGSAPSVIVHSSQFSSVIMHSNAIAAMTSSNHRAFSDPAVSQSLKDDSKPEPDKVGRFASRPKSIKEKKKTTSHTRGEIPEE

SEQ ID NO: 5516 - protein, 80 aa, Synthetic construct
RHEEPAITNGPRITNAFSIIETENSNNMFSPLDLRASFKKVSDSMRTASLCLERTDVCHEAEPVRTLAEHSYAVSSVAEA

SEQ ID NO: 5517 - protein, 90 aa, Synthetic construct
ETENSNNMFSPLDLRASFKKVSDSMRTASLCLERTDVCHEAEPVRTLAEHSYAVSSVAEAYRSQPVREHDGSSPGNTGKENCEALAAKPK

SEQ ID NO: 5518 - protein, 80 aa, Synthetic construct
LSHIGIFLFSCDMCETKFFTQWQLTLHRRDGIFENNIIVHPNDPLPGKLGLFSGAASPELKCAACGKVLAKDFHVVRGHI

SEQ ID NO: 5519 - protein, 80 aa, Synthetic construct
LFSGAASPELKCAACGKVLAKDFHVVRGHILDHLNLKGQACSVCDQRHLNLCSLMWHTLSHLGISVFSCSVCANSFVDWH

SEQ ID NO: 5520 - protein, 90 aa, Synthetic construct
GAGPGGPAGVDASALPPPVGFRGGPEHVVKVVGGHVLYVCAACERSYVTLSSLKRHSNVHSWRRKYPCRYCEKVFALAEYRTKHEVWHTG

SEQ ID NO: 5521 - protein, 110 aa, Synthetic construct
LKLYRLLPMRAAKRPYKTYSQGAPEAPLSPTLNTPAPVAMPASPPPGPPPAPEPGPPPSVITFAHPAPSVIVHGGSSSGGGGSGTASTGGSQAASVITYTAPPRPPKKRE

SEQ ID NO: 5522 - protein, 110 aa, Synthetic construct
APEPGPPPSVITFAHPAPSVIVHGGSSSGGGGSGTASTGGSQAASVITYTAPPRPPKKREYPPPPPEPAATPTSPATAVSPATAAGPAMATTTEEAKGRNPRAGRTLTYT

SEQ ID NO: 5523 - protein, 100 aa, Synthetic construct
SHSSRAGRRPSTRFTCPHCAKVCKTAAALSRHGQRHAAERPGGTPTPVIAYSKGSAGTRPGDVKEEAPQEMQVSSSSGEAGGGSTAAEEASETASLQDPI

SEQ ID NO: 5524 - protein, 80 aa, Synthetic construct
GDVKEEAPQEMQVSSSSGEAGGGSTAAEEASETASLQDPIISGGEEPPVVASGGSYVYPPVQEFPLALIGGGREPGGGRG

SEQ ID NO: 5525 - protein, 110 aa, Synthetic construct
KSGSEGPVGAGEGDRMEGIGAAKVTFYPEPYPLVYGPQLLAAYPYNFSNLAALPVALNMVLPDEKGAGALPFLPGVFGYAVNPQAAPPAPPTPPPPTLPPPIPPKGEGER

SEQ ID NO: 5526 - protein, 80 aa, Synthetic construct
DKSFHFYCRLKVHMKRCRVAKSKQVQCKECSETKDSKKELDKHQLEAHGAGGEPDAPKKKKKRLPVTCDLCGREFAHASG

SEQ ID NO: 5527 - protein, 90 aa, Synthetic construct
DKTFPNTIEHKKHIKAEHADMKFHECDQCKELFPTPALLQVHVKCQHSGSQPFRCLYCAATFRFPGALQHHVTTEHFKQSETTFPCELCG

SEQ ID NO: 5528 - protein, 90 aa, Synthetic construct
VSNKFHLEANNKEDEKAAKEDSQPGEQNDQGETGSLPGQQEKEASASPDPAKKSFICKACDKSFHFYCRLKVHMKRCRVAKSKQVQCKEC

SEQ ID NO: 5529 - protein, 80 aa, Synthetic construct
GETGSLPGQQEKEASASPDPAKKSFICKACDKSFHFYCRLKVHMKRCRVAKSKQVQCKECSETKDSKKELDKHQLEAHGA

SEQ ID NO: 5530 - protein, 80 aa, Synthetic construct
AKKSFICKACDKSFHFYCRLKVHMKRCRVAKSKQVQCKECSETKDSKKELDKHQLEAHGAGGEPDAPKKKKKRLPVTCDL

SEQ ID NO: 5531 - protein, 80 aa, Synthetic construct
WYHNRTHHPDVFAAQNHRSSKFSSLQCSSCDKTFPNTIEHKKHIKAEHADMKFHECDQCKELFPTPALLQVHVKCQHSGS

SEQ ID NO: 5532 - protein, 80 aa, Synthetic construct
STDVVTLDHVTHSVFQHLLEFLYTSEFFVYKYEIPLVLEAAKFLDIIDAVKLLNNENVAPFHSELTEKSSPEETLNELTG

SEQ ID NO: 5533 - protein, 100 aa, Synthetic construct
FGVKAALPPRASGPPPCQVPEESDQALDLSLKSGPRQERVHPPCVLQTPLCSQRQPGAQPLVKDERDSLSEQEESSSSRSPHSPPKPPPVPAAKGLVVGL

SEQ ID NO: 5534 - protein, 80 aa, Synthetic construct
DRSLDPGNPAPGAEPAQPPCPWPVWTADLCPAARKAKLPPFGVKAALPPRASGPPPCQVPEESDQALDLSLKSGPRQERV

SEQ ID NO: 5535 - protein, 80 aa, Synthetic construct
RWIHVKPERLEQACEGMDVHATYDEHQVTESINTVQTEHTVQPSGVEEDFHIGEKKVEAEFDEQADESNYDEQVDFYGSS

SEQ ID NO: 5536 - protein, 80 aa, Synthetic construct
GNLIGHRQEAALAAGYSENIEMVTGIKEEASHLGFSATDKLYPCQCGKSFTHKSQRDRHMSMHLGLRPYGCGVCGKKFKM

SEQ ID NO: 5537 - protein, 80 aa, Synthetic construct
YSKPSIMAHKRWIHVKPERLEQACEGMDVHATYDEHQVTESINTVQTEHTVQPSGVEEDFHIGEKKVEAEFDEQADESNY

SEQ ID NO: 5538 - protein, 80 aa, Synthetic construct
SINTVQTEHTVQPSGVEEDFHIGEKKVEAEFDEQADESNYDEQVDFYGSSMEEFSGERSDGNLIGHRQEAALAAGYSENI

SEQ ID NO: 5539 - protein, 140 aa, Synthetic construct
VDSSLAFPWTFPFGIDRRIQPEKVKQAENTRTLELPGPSETGRRMADYVTCESTKTTLPLGTEEDVRVKVERLSDEEVHEEVSQPVSASQSSLSDQQTVPGSEQVQEDLLISPQSSSIGSVDEGVSEGLPTLQSTSSTNA

SEQ ID NO: 5540 - protein, 80 aa, Synthetic construct
DITIRVQDKIFRAHKVVLAACSDFFRTKLVGQAEDENKNVLDLHHVTVTGFIPLLEYAYTATLSINTENIIDVLAAASYM

SEQ ID NO: 5541 - protein, 80 aa, Synthetic construct
NFTSRDGSISPVSSECSVVERTIPVCRESRRKRKSYIVMSPESPVKCGTQTSSPQVLNSSASYSENRNQPVDSSLAFPWT

SEQ ID NO: 5542 - protein, 120 aa, Synthetic construct
MAGRSISPWLARRTSPANSSGDSAIASCHDGGSSYGKEDQEPKADGPDDVSSQPLWPGDVGYGPLRIKEEQVSPSQYGGSELPSAKDGAVQNSFSEQSAGDAWQPTGRRKNRKNKETVRH

SEQ ID NO: 5543 - protein, 80 aa, Synthetic construct
TVIRKKFKCPYCSFSAMHQCILKRHMRSHTGERPYPCEICGKKFTRREHMKRHTLVHSKDKKYVCKVCSRVFMSAASVGI

SEQ ID NO: 5544 - protein, 80 aa, Synthetic construct
QVSPSQYGGSELPSAKDGAVQNSFSEQSAGDAWQPTGRRKNRKNKETVRHITQQVEDDSRASSPVPSFLPTSGWPFSSRD

SEQ ID NO: 5545 - protein, 130 aa, Synthetic construct
RSLGPPGPGTVALAQPAASCTPAAPPYYCDIKQEADTPGLPKIYAREGPDPYSVRVEDGAGTAGGTVPATIGPAQPFFKEEKEGGVEEAGGPPASLCKLEGGEELEEELGGSGTYSRREQSQIIVEVNLN

SEQ ID NO: 5546 - protein, 80 aa, Synthetic construct
KRPKPPPGVASASARGPPATDGLGAKVKLEEKQHHPCQKCPRVFNNRWYLEKHMNVTHSRMQICDQCGKRFLLESELLLH

SEQ ID NO: 5547 - protein, 80 aa, Synthetic construct
AQLQGGSNEWEVVVQVEDDGDGDYMSEPEAVLTRRKSNVIRKPCAAEPALSAGSLAAEPAENRKGTAVPVECPTCHKKFL

SEQ ID NO: 5548 - protein, 80 aa, Synthetic construct
VESQPCAVSHSECILESPEHLPSNFLAQPVNDSAPHPESDATCQQPVKQMRLKKAIHLKKLNFLKSQKYAEQVSEPKSDD

SEQ ID NO: 5549 - protein, 80 aa, Synthetic construct
HGVSDQEKLSLDPGKLAKPQMQQTQPQAYAYSDVDTPAGGEPLQADGMAMIRSSLAALDNHGGDPLGSRASSTTYRNSEG

SEQ ID NO: 5550 - protein, 100 aa, Synthetic construct
LFSVAEGDQTMNMIQLDSEVVTAEAFAALIDMMYTSTLMLGESNVMDVLLAASHLHLNSVVKACKHYLTTRTLPMSPPSERVQEQSARMQRSFMLQQLGL

SEQ ID NO: 5551 - protein, 90 aa, Synthetic construct
QSFGTQEDAQVPSQSDNSAGNMAQLSMASRATQVETSFDQEAAPEKSSFQCENPEVGLGEKEHMRVVVKSEPLSSPEPQDEVSDVTSQAE

SEQ ID NO: 5552 - protein, 110 aa, Synthetic construct
ATQVETSFDQEAAPEKSSFQCENPEVGLGEKEHMRVVVKSEPLSSPEPQDEVSDVTSQAEGSESVEVEGVVVSAEKIDLSPESSDRSFSDPQSSTDRVGDIHILEVTNNL

SEQ ID NO: 5553 - protein, 80 aa, Synthetic construct
FFSPDSLKIVDNPKADGMTDNQEDSAIMFDQSFGTQEDAQVPSQSDNSAGNMAQLSMASRATQVETSFDQEAAPEKSSFQ

SEQ ID NO: 5554 - protein, 80 aa, Synthetic construct
LMMNGATSSFENGHPSQPGPPQLTRASADVLSKCKKALSEHNVLVVEGARKYACKICCKTFLTLTDCKKHIRVHTGEKPY

SEQ ID NO: 5555 - protein, 80 aa, Synthetic construct
SMKNNNQHTDLCQSSDPDVKNEDENSDKDCEIIEISEDSPVNIDFHVKEEESNALQSTVESLTSERKEMKSPELSTVDIG

SEQ ID NO: 5556 - protein, 80 aa, Synthetic construct
VNIDFHVKEEESNALQSTVESLTSERKEMKSPELSTVDIGFKDNEICILHVESISTAGVENGQFSQPCTSSKASMYFSET

SEQ ID NO: 5557 - protein, 80 aa, Synthetic construct
AACSTFMRDQFLLTQSKHVRITILQSAEVGRKLLLSCYTGALEVKRKELLKYLTAASYLQMVHIVEKCTEALSKYLEIDL

SEQ ID NO: 5558 - protein, 80 aa, Synthetic construct
KYLTAASYLQMVHIVEKCTEALSKYLEIDLSMKNNNQHTDLCQSSDPDVKNEDENSDKDCEIIEISEDSPVNIDFHVKEE

SEQ ID NO: 5559 - protein, 80 aa, Synthetic construct
QLDLVDQIDQRNLLRAKEYLEFFQSNPMNSLPPAAAAAAASFPWSAFGASDDDLDATKEAVAAAVAAVAAGDCNGLDFYG

SEQ ID NO: 5560 - protein, 80 aa, Synthetic construct
DGLAASTLLQQMMSSVGRAGAAAGDSDEESRADDKGVMDYYLKYFSGAHDGDVYPAWSQKVEKKIRAKAFQKCPICEKVI

SEQ ID NO: 5561 - protein, 190 aa, Synthetic construct
QAGSPGHLGVIRDFSIESLLRENLYPKANIPDRRPSLSPFAPDFFPHLWPGDFGAFAQLPEQPMDSGPLDLVIKNRKIKEEEKEELPPPPPPPFPNDFFKDMFPDLPGGPLGPIKAENDYGAYLNFLSATHLGGLFPPWPLVEERKLKPKASQQCPICHKVIMGAGKLPRHMRTHTGEKPYMCTICEVRF

SEQ ID NO: 5562 - protein, 80 aa, Synthetic construct
LVEERKLKPKASQQCPICHKVIMGAGKLPRHMRTHTGEKPYMCTICEVRFTRQDKLKIHMRKHTGERPYLCIHCNAKFVH

SEQ ID NO: 5563 - protein, 100 aa, Synthetic construct
KCKRHVTDLTGQVVQEGTRRYRLCNECLAEFGIDSLPIDLEAEQHLMSPSDGDKDSRWHLSEDENRSYVEIVEDGSADLVIQQVDDSEEEEEKEIKPNIR

SEQ ID NO: 5564 - protein, 80 aa, Synthetic construct
TGIISGKSWNKYNYHPASQKNTQQPLAKHEPRKESIKKTKHLRLSQPSEVTHYKSSKREVRTSDSSSHVSQSEEQAQIDA

SEQ ID NO: 5565 - protein, 80 aa, Synthetic construct
ASYLQMNDVVNFCKTYIRSSLDICRKMEKEAAVAAAVAAAAAAAAAAAAAAAHQVDSESPSSGREGTSCGTKSLVSSPAE

SEQ ID NO: 5566 - protein, 100 aa, Synthetic construct
PLELVVRDSLGGGSADSNLSTPPKRIEPKVEFDADEVEVDVGEQLQQYAAPLNLAHVEEALPSGQAVDLAYSNYHVKQFLEALLRNSAAPSKDDADHHFS

SEQ ID NO: 5567 - protein, 80 aa, Synthetic construct
DVLVVPIKLHKCPFCPYTAKQKGILKRHIRSHTGERPYPCETCGKRFTRQEHLRSHALSVHRSNRPIICKGCRRTFTSHL

SEQ ID NO: 5568 - protein, 130 aa, Synthetic construct
SQTPQPQRVSGVFPRPHGPHPLPMTATPRKLPEGESAPLELPAPPALPPKIFYIKQEPFEPKEEISGSGTQPGGAKEETKVFSGGDTEGNGELGFLLPSGPGPTSGGGGPSWKPVDLHGNEILSGGGGPG

SEQ ID NO: 5569 - protein, 100 aa, Synthetic construct
DQQKGEISGFGQCLVWVQCSFPNCGKWRRLCGNIDPSVLPDNWSCDQNTDVQYNRCDIPEETWTGLESDVAYASYIPGSIIWAKQYGYPWWPGMIESDPD

SEQ ID NO: 5570 - protein, 80 aa, Synthetic construct
NAEFEEIVQIVLQKSLQECLGMGSGLDFAETSCAQPVVSTQSDKEPGITASATDTDNANGEEVPHTQEISVSWEGEAAPE

SEQ ID NO: 5571 - protein, 80 aa, Synthetic construct
AEQISIQERVNLFGFWSRFNGSNSNGERKDLQLSGLNSPGSCLEKKEKEEELEKEEGEKTDPILPIRKRVKIQTQKTKPR

SEQ ID NO: 5572 - protein, 160 aa, Synthetic construct
NCKKRFSHSGSYSSHISSKKCISLIPVNGRPRTGLKTSQCSSPSLSASPGSPTRPQIRQKIENKPLQEQLSVNQIKTEPVDYEFKPIVVASGINCSTPLQNGVFTGGGPLQATSSPQGMVQAVVLPTVGLVSPISINLSDIQNVLKVAVDGNVIRQVLEN

SEQ ID NO: 5573 - protein, 100 aa, Synthetic construct
KIIINYSLEQPSQLQVVPQNLKKENPVATNSCKSEKLPEDLTVKSEKDKSFEGGVNDSTCLLCDDCPGDINALPELKHYDLKQPTQPPPLPAAEAEKPES

SEQ ID NO: 5574 - protein, 80 aa, Synthetic construct
DSTVNLQSPLKMTNSPVLPVGSTTNGSRSSTPSPSPLNLSSSRNTQGYLYTAEGAQEEPQVEPLDLSLPKQQGELLERST

SEQ ID NO: 5575 - protein, 90 aa, Synthetic construct
TPSPSPLNLSSSRNTQGYLYTAEGAQEEPQVEPLDLSLPKQQGELLERSTITSVYQNSVYSVQEEPLNLSCAKKEPQKDSCVTDSEPVVN

SEQ ID NO: 5576 - protein, 80 aa, Synthetic construct
LTVKSEKDKSFEGGVNDSTCLLCDDCPGDINALPELKHYDLKQPTQPPPLPAAEAEKPESSVSSATGDGNLSPSQPPLKN

SEQ ID NO: 5577 - protein, 90 aa, Synthetic construct
TAEGAQEEPQVEPLDLSLPKQQGELLERSTITSVYQNSVYSVQEEPLNLSCAKKEPQKDSCVTDSEPVVNVIPPSANPINIAIPTVTAQL

SEQ ID NO: 5578 - protein, 80 aa, Synthetic construct
SVQEEPLNLSCAKKEPQKDSCVTDSEPVVNVIPPSANPINIAIPTVTAQLPTIVAIADQNSVPCLRALAANKQTILIPQV

SEQ ID NO: 5579 - protein, 80 aa, Synthetic construct
GARASPSQGDSDERESLTREEDEDSEKEEEEEDKEMEELQEEKECEKPQGDEEEEEEEEEVEEEEVEEAENEGEEAKTEG

SEQ ID NO: 5580 - protein, 140 aa, Synthetic construct
SGSYSSHISSKKCIGLISVNGRMRNNIKTGSSPNSVSSSPTNSAITQLRNKLENGKPLSMSEQTGLLKIKTEPLDFNDYKVLMATHGFSGTSPFMNGGLGATSPLGVHPSAQSPMQHLGVGMEAPLLGFPTMNSNLSEVQ

SEQ ID NO: 5581 - protein, 110 aa, Synthetic construct
QAEPLDLSLPKQMKEPKSIIATKNKTKASSISLDHNSVSSSSENSDEPLNLTFIKKEFSNSNNLDNKSTNPVFSMNPFSAKPLYTALPPQSAFPPATFMPPVQTSIPGLR

SEQ ID NO: 5582 - protein, 80 aa, Synthetic construct
LTFIKKEFSNSNNLDNKSTNPVFSMNPFSAKPLYTALPPQSAFPPATFMPPVQTSIPGLRPYPGLDQMSFLPHMAYTYPT

SEQ ID NO: 5583 - protein, 80 aa, Synthetic construct
CKRRKQANPRRKNVVNYDNVVDTGSETDEEDKLHIAEDDGIANPLDQETSPASVPNHESSPHVSQALLPREEEEDEIREG

SEQ ID NO: 5584 - protein, 80 aa, Synthetic construct
PSIAELHNSVTNCDPPLRLTKPSHFTNIKPVEKLDHSRSNTPSPLNLSSTSSKNSHSSSYTPNSFSSEELQAEPLDLSLP

SEQ ID NO: 5585 - protein, 80 aa, Synthetic construct
DLELEKKCKEDDREKASKRPRSQKTEKVQKISGKEARQLSGAKKPIISVVLTAHEAIPGATKIVPVEAGPPETGATNSET

SEQ ID NO: 5586 - protein, 130 aa, Synthetic construct
VEKDKEQEEEEEGLPPMDLSNHLFFTAGGEAYLVAKLSLPGGSELLLPKGFPWGEAGIKEEPSLPFLAYPPPSHLTALHIQHGFDPIQGFSSSDQILSHDTSAPSPAACEERHGAFWSYQLAPNPPGDPK

SEQ ID NO: 5587 - protein, 80 aa, Synthetic construct
PSPASLGDGAPYGSVSPLHLRCNICDFESNSKEKMQLHARGAAHEENSQIYKFLLDMEGAEAGAELGLYHCLLCAWETPS

SEQ ID NO: 5588 - protein, 80 aa, Synthetic construct
DSANQTTVYCCPYCSFLSPESSQVRAHTLSQHAVQPKYRCPLCQEQLVGRPALHFHLSHLHNVVPECVEKLLLVATTVEM

SEQ ID NO: 5589 - protein, 80 aa, Synthetic construct
LVCQAFSTDSLELLLYHCSIGRSLPEAEWKEVAGDTHRCKLCCYGTQLKANFQLHLKTDKHAQKYQLAAHLREGGGAMGT

SEQ ID NO: 5590 - protein, 80 aa, Synthetic construct
PPPTMAEEEEGTTGELRSAEPAPADSRHPLTYRKTTNFALDKFLDPARPYKCTVCKESFTQKNILLVHYNSVSHLHKMKK

SEQ ID NO: 5591 - protein, 80 aa, Synthetic construct
WFQNARAKEKKAKLQGTAAGSTGGSSEGLLAAQRTDCPYCDVKYDFYVSCRGHLFSRQHLAKLKEAVRAQLKSESKCYDL

SEQ ID NO: 5592 - protein, 90 aa, Synthetic construct
EIVYQPDGSAYIVESLSQLTQGGGACGSGSGSGPLPSLFLNSLPGAGGKQGDPSCAAPVYPQIINTFHIASSFGKWFEGPDQAFPNTSAL

SEQ ID NO: 5593 - protein, 100 aa, Synthetic construct
GSGPLPSLFLNSLPGAGGKQGDPSCAAPVYPQIINTFHIASSFGKWFEGPDQAFPNTSALAGLSPVLHSFRVFDVRHKSNKDYLNSDGSAKSSCVSKDVP

SEQ ID NO: 5594 - protein, 80 aa, Synthetic construct
NTQLKANFQLHCKTDKHVQKYQLVAHIKEGGKANEWRLKCVAIGNPVHLKCNACDYYTNSLEKLRLHTVNSRHEASLKLY

SEQ ID NO: 5595 - protein, 80 aa, Synthetic construct
TSKRISFPGSSESPLSSKRPKTAEEIKPEQMYQCPYCKYSNADVNRLRVHAMTQHSVQPMLRCPLCQDMLNNKIHLQLHL

SEQ ID NO: 5596 - protein, 120 aa, Synthetic construct
QQQQQQQQQQAQTLAQAQAQVQAHLQQELQQQAALIQSQLFNPTLLPHFPMTTETLLQLQQQQHLLFPFYIPSAEFQLNPEVSLPVTSGALTLTGTGPGLLEDLKAQVQVPQQSHQQILP

SEQ ID NO: 5597 - protein, 80 aa, Synthetic construct
YRDHYDKLYPLRPQTPEPPPPPPPPPPPPLPAAPPQPASTPAIPASAPPITSPTIAPAQPSVPLTQLSMPMELPIFSPLM

SEQ ID NO: 5598 - protein, 110 aa, Synthetic construct
SQLSHLPLKPLHTSTPQQLANLPPQLIPYQCDQCKLAFPSFEHWQEHQQLHFLSAQNQFIHPQFLDRSLDMPFMLFDPSNPLLASQLLSGAIPQIPASSATSPSTPTSTM

SEQ ID NO: 5599 - protein, 140 aa, Synthetic construct
SRHWHEAKRAGYNLTLSAMLLDCDGGLQMKGDIFDGTSFSHLPPSSSDGQGVPLSPVSKTMELSPRTLLSPSSIKVEGIEDFESPSMSSVNLNFDQTKLDNDDCSSVNTAITDTTTGDEGNADNDSATGIATETKSSSAP

SEQ ID NO: 5600 - protein, 150 aa, Synthetic construct
EKEKAHKGKGEPLPVPKKEKGEAPTATAATISAPLPTMEYAVDPAQLQALQAALTSDPTALLTSQFLPYFVPGFSPYYAPQIPGALQSGYLQPMYGMEGLFPYSPALSQALMGLSPGSLLQQYQQYQQSLQEAIQQQQQRQLQQQQQQKV

SEQ ID NO: 5601 - protein, 80 aa, Synthetic construct
FKQLERFAKQYRDHYDKLYPLRPQTPEPPPPPPPPPPPPLPAAPPQPASTPAIPASAPPITSPTIAPAQPSVPLTQLSMP

SEQ ID NO: 5602 - protein, 80 aa, Synthetic construct
NARQKARKNYENQGEGKDGERRELTNDRYIRTSNLNYQCKKCSLVFQRIFDLIKHQKKLCYKDEDEEGQDDSQNEDSMDA

SEQ ID NO: 5603 - protein, 80 aa, Synthetic construct
KKSKLSMAKHFGINQTSYEGPKTECTLCGIKYSARLSVRDHIFSQQHISKVKDTIGSQLDKEKEYFDPATVRQLMAQQEL

SEQ ID NO: 5604 - protein, 80 aa, Synthetic construct
LRHKREKDYLTSDGSAKNSCVSKDVPNNVDLSKFDGCVSDGKRKPVLMCFLCKLSFGYIRSFVTHAVHDHRMTLNDEEQK

SEQ ID NO: 5605 - protein, 140 aa, Synthetic construct
AEQPLGITQMPKAEVNLGGLSSLVVNTPITSVSLSHSSSESSKMSESKDQENNCERPKESNVLHPNGECPVKSEPTEPGDEDEEDAYSNELDDEEVLGELTDSIGNKDFPLLNQSISPLSSSVLKFIEKGTSSSSATVSD

SEQ ID NO: 5606 - protein, 110 aa, Synthetic construct
CDYETNVARNLRIHMTSEKHMHNMMLLQQNMKQIQHNLHLGLAPAEAELYQYYLAQNIGLTGMKLENPADPQLMINPFQLDPATAAALAPGLVNNELPPEIRLASGQLMG

SEQ ID NO: 5607 - protein, 80 aa, Synthetic construct
QYYLAQNIGLTGMKLENPADPQLMINPFQLDPATAAALAPGLVNNELPPEIRLASGQLMGDDLSLLTAGELSPYISDPAL

SEQ ID NO: 5608 - protein, 140 aa, Synthetic construct
DTHLDAKELNKKQTPDLISAQPAHHPPQSPAQIQMQLQHELQQQAAFFQPQFLNPAFLPHFPMTPEALLQFQQPQFLFPFYIPGTEFSLGPDLGLPGSATFGMPGMTGMAGSLLEDLKQQIQTQHHVGQTQLQILQQQAQ

SEQ ID NO: 5609 - protein, 80 aa, Synthetic construct
SLDLPLFPSIMMQPVQHPALPPQLALQLPQMDALSADLTQLCQQQLGLDPNFLRHSQFKRPRTRITDDQLKILRAYFDIN

SEQ ID NO: 5610 - protein, 110 aa, Synthetic construct
SSPLQISMTSLQNSLPPQLLQYQCDQCTVAFPTLELWQEHQHMHFLAAQNQFLHSPFLERPMDMPYMIFDPNNPLMTGQLLGSSLTQMPPQASSSHTTAPTTVAASLKRK

SEQ ID NO: 5611 - protein, 170 aa, Synthetic construct
PPSSSLSGQQTEQQNKESEKKQTKPNKVKKIKEEELEATKPEKHPKKEEKISSALSVLGKVVGETHVDPIQLQALQNAIAGDPASFIGGQFLPYFIPGFASYFTPQLPGTVQGGYFPPVCGMESLFPYGPTMPQTLAGLSPGALLQQYQQYQQNLQESLQKQQKQQQEQQ

SEQ ID NO: 5612 - protein, 80 aa, Synthetic construct
KQQKQQQEQQQKPVQAKTSKVESDQPQNSNDASETKEDKSTATESTKEEPQLESKSADFSDTYVVPFVKYEFICRKCQMM

SEQ ID NO: 5613 - protein, 80 aa, Synthetic construct
DASETKEDKSTATESTKEEPQLESKSADFSDTYVVPFVKYEFICRKCQMMFTDEDAAVNHQKSFCYFGQPLIDPQETVLR

SEQ ID NO: 5614 - protein, 80 aa, Synthetic construct
SFVTHAVHDHRMTLNDEEQKLLSNKCVSAIIQGIGKDKEPLISFLEPKKSTSVYPHFSTTNLIGPDPTFRGLWSAFHVEN

SEQ ID NO: 5615 - protein, 80 aa, Synthetic construct
FISEGEGLKEGKDTKKQKSLEPSIPPPRIASGARGNAAKALLENFGFELVIQYNENRQKVQKKGKSGEGENTDKLECGTC

SEQ ID NO: 5616 - protein, 80 aa, Synthetic construct
PDDNADRSETSSIADPSSPNPFGSSNPFKSKSNDRPGHKRFRTQMSNLQLKVLKACFSDYRTPTMQECEMLGNEIGLPKR

SEQ ID NO: 5617 - protein, 80 aa, Synthetic construct
TMPQTLAGLSPGALLQQYQQYQQNLQESLQKQQKQQQEQQQKPVQAKTSKVESDQPQNSNDASETKEDKSTATESTKEEP

SEQ ID NO: 5618 - protein, 80 aa, Synthetic construct
QKSFCYFGQPLIDPQETVLRVPVSKYQCLACDVAISGNEALSQHLQSSLHKEKTIKQAMRNAKEHVRLLPHSVCSPNPNT

SEQ ID NO: 5619 - protein, 80 aa, Synthetic construct
LSDPKQLAEFARKKPPINKEYDSLSAIACPQSGCTRKLRNRAALRKHLLIHGPRDHVCAECGKAFVESSKLKRHFLVHTG

SEQ ID NO: 5620 - protein, 80 aa, Synthetic construct
HGPRDHVCAECGKAFVESSKLKRHFLVHTGEKPFRCTFEGCGKRFSLDFNLRTHVRIHTGEKRFVCPFQGCNRRFIQSNN

SEQ ID NO: 5621 - protein, 80 aa, Synthetic construct
EASSLECSLEYMKKGVKKELPQKIVGENSLEYSEYMTGKKLPPGGIPGIDLSDPKQLAEFARKKPPINKEYDSLSAIACP

SEQ ID NO: 5622 - protein, 80 aa, Synthetic construct
CGKAFVESSKLKRHFLVHTGEKPFRCTFEGCGKRFSLDFNLRTHVRIHTGEKRFVCPFQGCNRRFIQSNNLKAHILTHAN

SEQ ID NO: 5623 - protein, 90 aa, Synthetic construct
RLLCIEKVTTDKDPKEEKEEEDDSALPQEVSIAASRPSRGWRSSRTSVSRHRDTENTRSSRSKTGSLQLICKSEPNTDQLDYDVGEEHQS

SEQ ID NO: 5624 - protein, 80 aa, Synthetic construct
PGGISSEEEEEEEEEMLISEEEIPFKDDPRDETYKPHLERETPKPRRKSGKVKEEKEKKEIKVEVEVEVKEEENEIREDE

SEQ ID NO: 5625 - protein, 90 aa, Synthetic construct
EEIPFKDDPRDETYKPHLERETPKPRRKSGKVKEEKEKKEIKVEVEVEVKEEENEIREDEEPPRKRGRRRKDDKSPRLPKRRKKPPIQYV

SEQ ID NO: 5626 - protein, 80 aa, Synthetic construct
AEPSPALTLLLVDEACWLRTLPQALTEAEANTEIHRKDDALWCRVTKPVPAGGLLSVLLTAEPHSTPGHPVKKEPAEPTC

SEQ ID NO: 5627 - protein, 110 aa, Synthetic construct
LWCRVTKPVPAGGLLSVLLTAEPHSTPGHPVKKEPAEPTCPAPAHDLQLLPQQAGMASILATAVINKDVFPCKDCGIWYRSERNLQAHLLYYCASRQGTGSPAAAATDEK

SEQ ID NO: 5628 - protein, 150 aa, Synthetic construct
TKLPPDSLGSFQQQHTALQGPLASADLGLAPTPSPGLDRKALAEATNGEARAEPLAQNGGSSEPPAAPRSIKVEAVEEPEAAPILGPGEPGPQAPSRTPSPRSPAPARVKAELSSPTPGSSPVPGELGLAGALFLPQYVFGPDAAPPASE

SEQ ID NO: 5629 - protein, 80 aa, Synthetic construct
PRSPAPARVKAELSSPTPGSSPVPGELGLAGALFLPQYVFGPDAAPPASEILAKMSELVHSRLQQGAGAGAGGAQTGLFP

SEQ ID NO: 5630 - protein, 80 aa, Synthetic construct
VGTTWGPFPGKMDLNNNSLKTKAQVPMVLTAGPKWLLDVTWQGVEDNKNNCIVYSKGGQLWCTTTKAISEGEELIAFVVD

SEQ ID NO: 5631 - protein, 90 aa, Synthetic construct
AGPKWLLDVTWQGVEDNKNNCIVYSKGGQLWCTTTKAISEGEELIAFVVDFDSRLQAASQMTLTEGMYPARLLDSIQLLPQQAAMASILP

SEQ ID NO: 5632 - protein, 80 aa, Synthetic construct
FDSRLQAASQMTLTEGMYPARLLDSIQLLPQQAAMASILPTAIVNKDIFPCKSCGIWYRSERNLQAHLMYYCSGRQREAA

SEQ ID NO: 5633 - protein, 90 aa, Synthetic construct
TAIVNKDIFPCKSCGIWYRSERNLQAHLMYYCSGRQREAAPVSEENEDSAHQISSLCPFPQCTKSFSNARALEMHLNSHSGVKMEEFLPP

SEQ ID NO: 5634 - protein, 90 aa, Synthetic construct
HQISSLCPFPQCTKSFSNARALEMHLNSHSGVKMEEFLPPGASLKCTVCSYTADSVINFHQHLFSHLTQAAFRCNHCHFGFQTQRELLQH

SEQ ID NO: 5635 - protein, 140 aa, Synthetic construct
SATEDSLQPATDLLTRSELPQSQKAMQTKDASSDTELDKCEKKTQLFLTNQRPEIQPTTNKQSFSYTKIKSEPSSPRLASSPVQPNIGPSFPVGPFLSQFSFPQDITMVPQASEILAKMSELVHRRLRHGSSSYPPVIYS

SEQ ID NO: 5636 - protein, 80 aa, Synthetic construct
PGIVSKHLETSLTINKCVPVSKCDTTHSSVSCLEMDVPIDLSKKCLSQSERTTTSPKRLLDYHECTVCKISFNKVENYLA

SEQ ID NO: 5637 - protein, 80 aa, Synthetic construct
SCLEMDVPIDLSKKCLSQSERTTTSPKRLLDYHECTVCKISFNKVENYLAHKQNFCPVTAHQRNDLGQLDGKVFPNPESE

SEQ ID NO: 5638 - protein, 80 aa, Synthetic construct
RTTTSPKRLLDYHECTVCKISFNKVENYLAHKQNFCPVTAHQRNDLGQLDGKVFPNPESERNSPDVSYERSIIKCEKNGN

SEQ ID NO: 5639 - protein, 80 aa, Synthetic construct
DANGIPVDQQDDDKGNCEDYLMISLDDAGKIEHDGSSGMTMDTESEIDPCKVDGTCPEVIKVYIFKADPGEDDLGGTVDI

SEQ ID NO: 5640 - protein, 80 aa, Synthetic construct
KVYIFKADPGEDDLGGTVDIVESEPENDHGVELLDQNSSIRVPREKMVYMTVNDSQPEDEDLNVAEIADEVYMEVIVGEE

SEQ ID NO: 5641 - protein, 110 aa, Synthetic construct
VELLDQNSSIRVPREKMVYMTVNDSQPEDEDLNVAEIADEVYMEVIVGEEDAAAAAAAAAVHEQQMDDNEIKTFMPIAWAAAYGNNSDGIENRNGTASALLHIDESAGLG

SEQ ID NO: 5642 - protein, 110 aa, Synthetic construct
DQNSSIRVPREKMVYMTVNDSQQEDEDLNVAEIADEVYMEVIVGEEDAAVAAAAAAVHEQQIDEDEMKTFVPIAWAAAYGNNSDGIENRNGTASALLHIDESAGLGRLAK

SEQ ID NO: 5643 - protein, 80 aa, Synthetic construct
ADATHMDGDQIVVEIQEAVFVSNIVDSDITVHNFVPDDPDSVVIQDVVEDVVIEEDVQCSDILEEADVSENVIIPEQVLD

SEQ ID NO: 5644 - protein, 80 aa, Synthetic construct
KGFRQQNELKKHMKTHSGRKVYQCEYCEYSTTDASGFKRHVISIHTKDYPHRCEYCKKGFRRPSEKNQHIMRHHKEVGLP

SEQ ID NO: 5645 - protein, 90 aa, Synthetic construct
TQTRISQKGRRLQPPGTPSAPPQRRPRKQLNPCRGTERVDPGFEGVTLKFQIKPDSSLQIIPTYSLPCSSRSQESPADAVGGPAAHPGGT

SEQ ID NO: 5646 - protein, 80 aa, Synthetic construct
EHPNVVLNSSYVCVECNFLTKRYDALSEHNLKYHPGEENFKLTMVKRNNQTIFEQTINDLTFDGSFVKEENAEQAESTEV

SEQ ID NO: 5647 - protein, 90 aa, Synthetic construct
IDAWFTEKKKSKALKEEKMEIDESNAGSSKEEAGETSPADESGAPKSGSTGKICKKTPEQLHMLKSAFVRTQWPSPEEYDKLAKESGLAR

SEQ ID NO: 5648 - protein, 100 aa, Synthetic construct
TAILKDYYLKHKFLNEQDLDELVNKSHMGYEQVREWFAERQRRSELGIELFEENEEEDEVIDDQEEDEEETDDSDTWEPPRHVKRKLSKSVKRKLSKSDD

SEQ ID NO: 5649 - protein, 80 aa, Synthetic construct
LHMLKSAFVRTQWPSPEEYDKLAKESGLARTDIVSWFGDTRYAWKNGNLKWYYYYQSANSSSMNGLSSLRKRGRGRPKGR

SEQ ID NO: 5650 - protein, 80 aa, Synthetic construct
ASKRKSTTPCMVRTSQVVEQDVPEEVDRAKEKGIGTPQPDVAKDSWAAELENSSKENEVIEVKSMGESQSKKLQGGYECK

SEQ ID NO: 5651 - protein, 80 aa, Synthetic construct
SFHKFPYPTKAELCYLTVVTKYPEEQLKIWFTAQRLKQGISWSPEEIEDARKKMFNTVIQSVPQPTITVLNTPLVASAGN

SEQ ID NO: 5652 - protein, 80 aa, Synthetic construct
ASKRKSTTPCMIPVKTVVLQDASMEAQPAETLPEGPQQDLPPEASAASSEAAQNPSSTDGSTLANGHRSTLDGYLYSCKY

SEQ ID NO: 5653 - protein, 80 aa, Synthetic construct
VAKPDNHVVVEQSIPESTSTPDLAGEPSAEGADGQAEIIITKTPIMKIMKGKAEAKKIHTLKENVPSQPVGEALPKLSTG

SEQ ID NO: 5654 - protein, 80 aa, Synthetic construct
AMDSNSFLKNSFHKFPYPTKAELCYLTVVTKYPEEQLKIWFTAQRLKQGISWSPEEIEDARKKMFNTVIQSVPQPTITVL

SEQ ID NO: 5655 - protein, 100 aa, Synthetic construct
GHASPNVVNGQMRLGFSGDMYPRPEQYGQVTSPRSEHYAAPQLHGYGPMNVNMAAHHGAGAFFRYMRQPIKQELICKWIEPEQLANPKKSCNKTFSTMHE

SEQ ID NO: 5656 - protein, 80 aa, Synthetic construct
VNMAAHHGAGAFFRYMRQPIKQELICKWIEPEQLANPKKSCNKTFSTMHELVTHVTVEHVGGPEQSNHICFWEECPREGK

SEQ ID NO: 5657 - protein, 80 aa, Synthetic construct
HMHVHTSDKPYLCKMCDKSYTHPSSLRKHMKVHESSSQGSQPSPAASSGYESSTPPTIVSPSTDNPTTSSLSPSSSAVHH

SEQ ID NO: 5658 - protein, 100 aa, Synthetic construct
EQYRQVASPRTDPYSAAQLHNQYGPMNMNMGMNMAAAAAHHHHHHHHHPGAFFRYMRQQCIKQELICKWIDPEQLSNPKKSCNKTFSTMHELVTHVSVEH

SEQ ID NO: 5659 - protein, 80 aa, Synthetic construct
HHHHHHHHPGAFFRYMRQQCIKQELICKWIDPEQLSNPKKSCNKTFSTMHELVTHVSVEHVGGPEQSNHVCFWEECPREG

SEQ ID NO: 5660 - protein, 80 aa, Synthetic construct
DAQGHLLFPGLPEQHGPHGSQNVLNGQMRLGLPGEVFGRSEQYRQVASPRTDPYSAAQLHNQYGPMNMNMGMNMAAAAAH

SEQ ID NO: 5661 - protein, 100 aa, Synthetic construct
NQVHLGLRGELFGRADPYRPVASPRTDPYAAGAQFPNYSPMNMNMGVNVAAHHGPGAFFRYMRQPIKQELSCKWIDEAQLSRPKKSCDRTFSTMHELVTH

SEQ ID NO: 5662 - protein, 100 aa, Synthetic construct
MNMNMGVNVAAHHGPGAFFRYMRQPIKQELSCKWIDEAQLSRPKKSCDRTFSTMHELVTHVTMEHVGGPEQNNHVCYWEECPREGKSFKAKYKLVNHIRV

SEQ ID NO: 5663 - protein, 90 aa, Synthetic construct
QASPSRPLNGLLRLGLPGDMYARPEPFPPGPAARSDALAAAAALHGYGGMNLTVNLAAPHGPGAFFRYMRQPIKQELICKWLAADGTATP

SEQ ID NO: 5664 - protein, 80 aa, Synthetic construct
GAFLRYMRQPIKQELICKWIDPDELAGLPPPPPPPPPPPPPPPAGGAKPCSKTFGTMHELVNHVTVEHVGGPEQSSHVCF

SEQ ID NO: 5665 - protein, 80 aa, Synthetic construct
QHHAPPPAPPPPPAPAQHPHQHHPHLPGAAGAFLRYMRQPIKQELICKWIDPDELAGLPPPPPPPPPPPPPPPAGGAKPC

SEQ ID NO: 5666 - protein, 80 aa, Synthetic construct
SGAISAHCSLHLPGSSDSPASASQIAGTTDAIWNEQEKAELFTDKFCQVCGVMLQFESQRISHYEGEKHAQNVSFYFQMH

SEQ ID NO: 5667 - protein, 80 aa, Synthetic construct
AGHKRKHQKRKRHLEEGKERPEKEQSKHKRKKSYEDTDLDKDKSIRQRKREEDRVKVSSGKLKHRKKKKSHDVPSEKEER

SEQ ID NO: 5668 - protein, 100 aa, Synthetic construct
MKEPLLGGECDKAVASQLGLLDEIKTEPDNAQEYCHRQQSRTQENELKINAVFSESASQLTAGIQLSLASSGVNKMLPSVSTTAIQVSCAGCKKILQKGQ

SEQ ID NO: 5669 - protein, 90 aa, Synthetic construct
TSSSLSHILQMEGQSHYFNSSKSITAYKQKPAKPLISVPCKPLKPSDEMIETTSDLGKTELFCSINCFSAYSKAKMESSSVSVVSVVHDT

SEQ ID NO: 5670 - protein, 80 aa, Synthetic construct
PAKPLISVPCKPLKPSDEMIETTSDLGKTELFCSINCFSAYSKAKMESSSVSVVSVVHDTSTELLSPKKDTTPVISNIVS

SEQ ID NO: 5671 - protein, 90 aa, Synthetic construct
ETTSDLGKTELFCSINCFSAYSKAKMESSSVSVVSVVHDTSTELLSPKKDTTPVISNIVSLADTDVALPIMNTDVLQDTVSSVTATADVI

SEQ ID NO: 5672 - protein, 80 aa, Synthetic construct
STELLSPKKDTTPVISNIVSLADTDVALPIMNTDVLQDTVSSVTATADVIVDLSKSSPSEPSNAVASSSTEQPSVSPSSS

SEQ ID NO: 5673 - protein, 80 aa, Synthetic construct
NSGITTEPDSEIQIANVTTLETGVSSVNDGQLENTDGRDMNLMITHVTSLQNTNLGDVSNGLQSSNFGVNIQTYTPSLTS

SEQ ID NO: 5674 - protein, 80 aa, Synthetic construct
YCKNSFCSKPEILEWENKVHQFCSKTCSDDYKKLHCIVTYCEYCQEEKTLHETVNFSGVKRPFCSEGCKLLYKQDFARRL

SEQ ID NO: 5675 - protein, 80 aa, Synthetic construct
QFCSKTCSDDYKKLHCIVTYCEYCQEEKTLHETVNFSGVKRPFCSEGCKLLYKQDFARRLGLRCVTCNYCSQLCKKGATK

SEQ ID NO: 5676 - protein, 110 aa, Synthetic construct
QGCQTSRTKMTGSAPPPSPTPNKEMKNKAVLCKPLTMTKATYCKPHMQTKSCQTDDTWRTEYVPVPIPVPVYIPVPMHMYSQNIPVPTTVPVPVPVPVFLPAPLDSSEKI

SEQ ID NO: 5677 - protein, 90 aa, Synthetic construct
LSHTTAELNYGLAHFVNEIRRPNGENYAPDSIYYLCLGIQEYLCGSNRKDNIFIDPGYQTFEQELNKILRSWQPSILPDGSIFSRVEEDY

SEQ ID NO: 5678 - protein, 90 aa, Synthetic construct
PFRPRRSPRMSLRSSVSQRAGRSAVGTKMTCAHCRTPLQKGQTAYQRKGLPQLFCSSSCLTTFSKKPSGKKTCTFCKKEIWNTKDSVVAQ

SEQ ID NO: 5679 - protein, 80 aa, Synthetic construct
KTGSPGPELLFHEGQQKRFCNTTCLGAYKKKNTRVYPCVWCKTLCKNFEMLSHVDRNGKTSLFCSLCCTTSYKVKQAGLT

SEQ ID NO: 5680 - protein, 100 aa, Synthetic construct
GPPRPCSFCRRSLSDPCYYNKVDRTVYQFCSPSCWTKFQRTSPEGGIHLSCHYCHSLFSGKPEVLDWQDQVFQFCCRDCCEDFKRLRGVVSQCEHCRQEK

SEQ ID NO: 5681 - protein, 80 aa, Synthetic construct
KPEVLDWQDQVFQFCCRDCCEDFKRLRGVVSQCEHCRQEKLLHEKLRFSGVEKSFCSEGCVLLYKQDFTKKLGLCCITCT

SEQ ID NO: 5682 - protein, 100 aa, Synthetic construct
YCSQTCQRGVTEQLDGSTWDFCSEDCKSKYLLWYCKAARCHACKRQGKLLETIHWRGQIRHFCNQQCLLRFYSQQNQPNLDTQSGPESLLNSQSPESKPQ

SEQ ID NO: 5683 - protein, 90 aa, Synthetic construct
HACKRQGKLLETIHWRGQIRHFCNQQCLLRFYSQQNQPNLDTQSGPESLLNSQSPESKPQTPSQTKVENSNTVRTPEENGNLGKIPVKTR

SEQ ID NO: 5684 - protein, 80 aa, Synthetic construct
PPPPATPRKNKAAMCKPLMQNRGVSCKVEMKSKGSQTEEWKPQVIVLPIPVPIFVPVPMHLYCQKVPVPFSMPIPVPVPM

SEQ ID NO: 5685 - protein, 90 aa, Synthetic construct
VRQRKGRDTGPGKRKREDEAPILEQRENRMNPLRCPVKFYEFYLSKCPESLRTRNDVFYLQPERSCIAESPLWYSVIPMDRSMLESMLNR

SEQ ID NO: 5686 - protein, 160 aa, Synthetic construct
DSRLKSSFFDKAANQVEETLHTHLPQTPETNFRDSSYPFANKESIGSELGNSFASNIRIKEEPLDDEYDKAMAPQQGLLDKIKDEPDNAQEYSHGQQQKTQEGELKISAVFSVSGSPLAPQLTTGFQPSLASSGMNKMLPSVPATAVRVSCSGCKKILQK

SEQ ID NO: 5687 - protein, 80 aa, Synthetic construct
QEGELKISAVFSVSGSPLAPQLTTGFQPSLASSGMNKMLPSVPATAVRVSCSGCKKILQKGQTAYQRKGSTQLFCSTLCL

SEQ ID NO: 5688 - protein, 100 aa, Synthetic construct
TTSKDFCSQSCLSTYELKKKPIVTINTNSISTKCSMCQKNAVIRHEVNYQNVVHKLCSDACFSKFRSANNLTMNCCENCGGYCYSGSGQCHMLQIEGQSK

SEQ ID NO: 5689 - protein, 100 aa, Synthetic construct
YCKIEKIVKETVRFSGADKSFCSEGCKLLYKHDLAKRWGNHCKMCSYCLQTSPKLVQNNLGGKVEEFCCEECMSKYTVLFYQMAKCDACKRQGKLSESLK

SEQ ID NO: 5690 - protein, 100 aa, Synthetic construct
TVNSNSVLQGAVPTVTAKIIGDASTQTDALKLPPSQPPRLLKNKALLCKPITQTKATSCKPHTQNKECQTEDTPSQPQIIVVPVPVPVFVPIPLHLYTQY

SEQ ID NO: 5691 - protein, 120 aa, Synthetic construct
NTLLFFNTKYFQLKNVTEHLKLSFAHVMRRTRTLKYSTKMTYLRFFPPLQKQESEPDKLTVGKRKRNEDDEVPVGVEMAENTDNPLRCPVRLYEFYLSKCSESVKQRNDVFYLQPERSCV

SEQ ID NO: 5692 - protein, 100 aa, Synthetic construct
MKEPLDGECGKAVVPQQELLDKIKEEPDNAQEYGCVQQPKTQESKLKIGGVSSVNERPIAQQLNPGFQLSFASSGPSVLLPSVPAVAIKVFCSGCKKMLY

SEQ ID NO: 5693 - protein, 90 aa, Synthetic construct
PPYALGKSLRPSAEMIETTNDSGKTELFCSINCLSAYRVKTVTSSGVQVSCHSCKTSAIPQYHLAMSNGTIYSFCSSSCVVAFQNVFSKP

SEQ ID NO: 5694 - protein, 80 aa, Synthetic construct
QYHLAMSNGTIYSFCSSSCVVAFQNVFSKPKGTNSSAVPLSQGQVVVSPPSSRSAVSIGGGNTSAVSPSSIRGSAAASLQ

SEQ ID NO: 5695 - protein, 110 aa, Synthetic construct
PLAEQSQQVALTHTVVKLKCQHCNHLFATKPELLFYKGKMFLFCGKNCSDEYKKKNKVVAMCDYCKLQKIIKETVRFSGVDKPFCSEVCKFLSARDFGERWGNYCKMCSY

SEQ ID NO: 5696 - protein, 80 aa, Synthetic construct
MCDYCKLQKIIKETVRFSGVDKPFCSEVCKFLSARDFGERWGNYCKMCSYCSQTSPNLVENRLEGKLEEFCCEDCMSKFT

SEQ ID NO: 5697 - protein, 160 aa, Synthetic construct
CSQTSPNLVENRLEGKLEEFCCEDCMSKFTVLFYQMAKCDGCKRQGKLSESIKWRGNIKHFCNLFCVLEFCHQQIMNDCLPQNKVNISKAKTAVTELPSARTDTTPVITSVMSLAKIPATLSTGNTNSVLKGAVTKEAAKIIQDESTQEDAMKFPSSQSS

SEQ ID NO: 5698 - protein, 90 aa, Synthetic construct
ATSCKPHTQHKECQTDLPMPNEKNDAELDSPPSKKKRLGFFQTYDTEYLKVGFIICPGSKESSPRPQCVICGEILSSENMKPANLSHHLK

SEQ ID NO: 5699 - protein, 80 aa, Synthetic construct
IDYDCRDVKEELLFCIEMPTQITGFEIFELINKYIDSKSLNWKHCVGLCTDGAASMTGRYSGLKAKIQEVAMNTAAFTHC

SEQ ID NO: 5700 - protein, 110 aa, Synthetic construct
KDGLIVETLTVGCKGSKAGIEQEGYWLPGDEIDWETENHDWYCFECHLPGEVLICDLCFRVYHSKCLSDEFRLRDSSSPWQCPVCRSIKKKNTNKQEMGTYLRFIVSRMK

SEQ ID NO: 5701 - protein, 80 aa, Synthetic construct
EVLICDLCFRVYHSKCLSDEFRLRDSSSPWQCPVCRSIKKKNTNKQEMGTYLRFIVSRMKERAIDLNKKGKDNKHPMYRR

SEQ ID NO: 5702 - protein, 80 aa, Synthetic construct
LVHSAVDVPTIQEKVNEGKYRSYEEFKADAQLLLHNTVIFYGADSEQADIARMLYKDTCHELDELQLCKNCFYLSNARPD

SEQ ID NO: 5703 - protein, 140 aa, Synthetic construct
MGWKKACDELELHQRFLREGRFWKSKNEDRGEEEAESSISSTSNEQLKVTQEPRAKKGRRNQSVEPKKEEPEPETEAVSSSQEIPTMPQPIEKVSVSTQTKKLSASSPRMLHRSTQTTNDGVCQSMCHDKYTKIFNDFKD

SEQ ID NO: 5704 - protein, 90 aa, Synthetic construct
QAVNKAVANMQGEMDRKCKQVKEKCKEEFVEEIKKLATQHKQLISQTKKKQWCYNCEEEAMYHCCWNTSYCSIKCQQEHWHAEHKRTCRR

SEQ ID NO: 5705 - protein, 80 aa, Synthetic construct
PEEDRELAPTSRESPQETNPPGESEEAAREAGGGKDGCREDRVENETRPQKRKGQRSEAAPLHVSCLLLVTDEHGTILGI

SEQ ID NO: 5706 - protein, 80 aa, Synthetic construct
LLVLLPHVALELQFVGDGLPPESDEQHFTLQRDSLEVSVRPGSGISARPSSGTKEKGGRRDLQIKVSARPYHLFQGPKPD

SEQ ID NO: 5707 - protein, 80 aa, Synthetic construct
MHPQSLAEEEIKTEQEVVEGMDISTRSKDPGSAERTAQKRKFPSPPHSSNGHSPQDTSTSPIKKKKKPGLLNSNNKEQSE

SEQ ID NO: 5708 - protein, 150 aa, Synthetic construct
QHPDYAEYIFHPMDLCTLEKNAKKKMYGCTEAFLADAKWILHNCIIYNGGNHKLTQIAKVVIKICEHEMNEIEVCPECYLAACQKRDNWFCEPCSNPHPLVWAKLKGFPFWPAKALRDKDGQVDARFFGQHDRAWVPINNCYLMSKEIPF

SEQ ID NO: 5709 - protein, 80 aa, Synthetic construct
KGKDETDSPTVHLGLDSDSESELVIDLGEDHSGREGRKNKKEPKEPSPKQDVVGKTPPSTTVGSHSPPETPVLTRSSAQT

SEQ ID NO: 5710 - protein, 90 aa, Synthetic construct
TSSGSMSTLVSSVNADLPIATASADVAADIAKYTSKMMDAIKGTMTEIYNDLSKNTTGSTIAEIRRLRIEIEKLQWLHQQELSEMKHNLE

SEQ ID NO: 5711 - protein, 100 aa, Synthetic construct
AKYTSKMMDAIKGTMTEIYNDLSKNTTGSTIAEIRRLRIEIEKLQWLHQQELSEMKHNLELTMAEMRQSLEQERDRLIAEVKKQLELEKQQAVDETKKKQ

SEQ ID NO: 5712 - protein, 80 aa, Synthetic construct
DRSKAEMDLKELSESVQQQSTPVPLISPKRQIRSRFQLNLDKTIESCKAQLGINEISEDVYTAVEHSDSEDSEKSDSSDS

SEQ ID NO: 5713 - protein, 80 aa, Synthetic construct
TPVPLISPKRQIRSRFQLNLDKTIESCKAQLGINEISEDVYTAVEHSDSEDSEKSDSSDSEYISDDEQKSKNEPEDTEDK

SEQ ID NO: 5714 - protein, 80 aa, Synthetic construct
ISSNLNKQEKIHTGGKLNKCEECDKAFNRSLKLTAHKKILMEEKPYKCEECGKVFNQFSTLTRHKIIHTGEKPYKCKECG

SEQ ID NO: 5715 - protein, 80 aa, Synthetic construct
KIIHTGEKPYKCEEHGKVFNQSSNLTTQKIIHTGENLYKFEEHGKAFNLFSNITNHKIIYTGEKPHKCEECGKAYNRFSN

SEQ ID NO: 5716 - protein, 80 aa, Synthetic construct
EEHGKAFNLFSNITNHKIIYTGEKPHKCEECGKAYNRFSNLTIHKRIHTGEKPYQCAECGKAFNCSSTLNRHKIIHTGEK

SEQ ID NO: 5717 - protein, 80 aa, Synthetic construct
TVSSHLVEHVRIHTGEKPYQCKECGRAFAGRSGLTKHVRIHTGEKPYECNECGKAYNRFYLLTEHFKTHTEEKPFECKVC

SEQ ID NO: 5718 - protein, 90 aa, Synthetic construct
TACQTGVGAKKGRKKLYECQVCNSVFNSWDQFKDHLVIHTGDKPNHCTLCDLWFMQGNELRRHLSDAHNISERLVTEEVLSVETRVQTEP

SEQ ID NO: 5719 - protein, 90 aa, Synthetic construct
QFKDHLVIHTGDKPNHCTLCDLWFMQGNELRRHLSDAHNISERLVTEEVLSVETRVQTEPVTSMTIIEQVGKVHVLPLLQVQVDSAQVTV

SEQ ID NO: 5720 - protein, 80 aa, Synthetic construct
GPGCWHEVKDEESSSEQSISIAVSHVNTSKAGLPAQTALPCDICGPILKDILHLDEHQGTHHGLKLHTCGACGRQFWFSA

SEQ ID NO: 5721 - protein, 80 aa, Synthetic construct
APLPPLPESESLLKALRRQDKEQAEALVLEGRVQMVVIQGEGRAFRCPHCPFITRREKALNLHSRTGCQGRREPLLCPEC

SEQ ID NO: 5722 - protein, 80 aa, Synthetic construct
HVKGHGGTRLYKCTDCAYSTKNRQKITWHSRIHTGEKPYHCHLCPYACADPSRLKYHMRIHKEERKYLCPECGYKCKWVN

SEQ ID NO: 5723 - protein, 80 aa, Synthetic construct
KNRQKITWHSRIHTGEKPYHCHLCPYACADPSRLKYHMRIHKEERKYLCPECGYKCKWVNQLKYHMTKHTGLKPYQCPEC

SEQ ID NO: 5724 - protein, 80 aa, Synthetic construct
PQTQPDVSPLSNGDSAPPKNGSTESSSGDGDTVLVQKQKGARFSCPTCPFSCQQERALRTHQIRGCPLEESGELHCSLCP

SEQ ID NO: 5725 - protein, 80 aa, Synthetic construct
QCGDCGFTCKQSRCMQQHRRLKHEGVKPHQCPFCDFSTTRRYRLEAHQSRHTGIGRIPCSSCPQTFGTNSKLRLHRLRVH

SEQ ID NO: 5726 - protein, 80 aa, Synthetic construct
GEKPFKCSECGTAFGQKKYLIKHQNIHTGEKPYECNECGKAFSQRTSLIVHVRIHSGDKPYECNVCGKAFSQSSSLTVHV

SEQ ID NO: 5727 - protein, 80 aa, Synthetic construct
GGLLTSEEDSGFSTSPKDNSLPKKKRQKTEKKSSGMDKESALDKSDLKKDKNDYLPLYSSSTKVKDEYMVAEYAVEMPHS

SEQ ID NO: 5728 - protein, 80 aa, Synthetic construct
LPKKKRQKTEKKSSGMDKESALDKSDLKKDKNDYLPLYSSSTKVKDEYMVAEYAVEMPHSSVGGSHLEDASGEIHPPKLV

SEQ ID NO: 5729 - protein, 100 aa, Synthetic construct
ALDKSDLKKDKNDYLPLYSSSTKVKDEYMVAEYAVEMPHSSVGGSHLEDASGEIHPPKLVLKKINSKRSLKQPLEQNQTISPLSTYEESKVSKYAFELVD

SEQ ID NO: 5730 - protein, 80 aa, Synthetic construct
SPLSTYEESKVSKYAFELVDKQALLDSEGNADIDQVDNLQEGPSKPVHSSTNYDDAMQFLKKKRYLQAASNNSREYALNV

SEQ ID NO: 5731 - protein, 80 aa, Synthetic construct
FSQSSSLIQHRRIHTGEKPHVCNVCGKAFSYSSVLRKHQIIHTGEKPYRCSVCGKAFSHSSALIQHQGVHTGDKPYACHE

SEQ ID NO: 5732 - protein, 80 aa, Synthetic construct
QKVHTGEKPYTCVECGKGFSQSSHLIQHQIIHTGERPYKCSECGKAFSQRSVLIQHQRIHTGVKPYDCAACGKAFSQRSK

SEQ ID NO: 5733 - protein, 90 aa, Synthetic construct
VKIEEEEFIHGQDTCLQRSELLKQELCRQLFRQFCYQDSPGPREALSRLRELCCQWLKPEIHTKEQILELLVLEQFLTILPGDLQAWVHE

SEQ ID NO: 5734 - protein, 80 aa, Synthetic construct
AKHAAVFSGDKTHQCNECGKAFRHSSKLARHQRIHTGERCYECNECGKSFAESSDLTRHRRIHTGERPFGCKECGRAFNL

SEQ ID NO: 5735 - protein, 90 aa, Synthetic construct
KEQILELLVMEQFLTILPPEIQARVRHRCPMSSKEIVTLVEDFHRASKKPKQWVAVCMQGQKVLLEKTGSQLGEQELPDFQPQTPRRDLR

SEQ ID NO: 5736 - protein, 80 aa, Synthetic construct
IQARVRHRCPMSSKEIVTLVEDFHRASKKPKQWVAVCMQGQKVLLEKTGSQLGEQELPDFQPQTPRRDLRESSPAEPSQA

SEQ ID NO: 5737 - protein, 90 aa, Synthetic construct
MMLLAVNGSNPEGEDPEREPVENEDYREKSSDDDEMDSSLVSQQPPDNQEKERLNTSIPQKRKMRNLLVTIENDTPLEELSKYVDISIIA

SEQ ID NO: 5738 - protein, 110 aa, Synthetic construct
SDDDEMDSSLVSQQPPDNQEKERLNTSIPQKRKMRNLLVTIENDTPLEELSKYVDISIIALTRNRRTRRWYTCPLCGKQFNESSYLISHQRTHTGEKPYDCNHCGKSFNH

SEQ ID NO: 5739 - protein, 110 aa, Synthetic construct
CHEKPLNLSVGALHNCPAISLSKSLIPSITCPFCTFKTFYPEVLMMHQRLEHKYNPDVHKNCRNKSLLRSRRTGCPPALLGKDVPPLSSFCKPKPKSAFPAQSKSLPSAK

SEQ ID NO: 5740 - protein, 80 aa, Synthetic construct
KHVLMQHRPTLCEPAVLRVEAEYLSPLDKSQVRTEPPKEKNCKENEFSCEVCGQTFRVAFDVEIHMRTHKDSFTYGCNMC

SEQ ID NO: 5741 - protein, 80 aa, Synthetic construct
ELGETNKGSCAGLSQEKEKCKHSHGEAPSVDADPKLPSSKEKPTHCSECGKAFRTYHQLVLHSRVHKKDRRAGAESPTMS

SEQ ID NO: 5742 - protein, 80 aa, Synthetic construct
LARPQAPSSSAFRCPYCKGKFRTSAERERHLHILHRPWKCGLCSFGSSQEEELLHHSLTAHGAPERPLAATSAAPPPQPQ

SEQ ID NO: 5743 - protein, 80 aa, Synthetic construct
PRSPAARLLLELEERALLREARLGRARSSGGMQATPATEGLARPQAPSSSAFRCPYCKGKFRTSAERERHLHILHRPWKC

SEQ ID NO: 5744 - protein, 120 aa, Synthetic construct
PQPATWVEGASSPRPPSSGAGPGSRRKPASPGRTLRNGRGGEAEPLDLSLRAGPGGEAGPGGALHRCLFCPFATGAPELMALHLQVHHSRRARGRRPPQADASPPYARVPSGETPPSPSQ

SEQ ID NO: 5745 - protein, 110 aa, Synthetic construct
ISPSLELLHSGLCKFPEVEGKMTTFKEAVTFKDVAVVFTEEELGLLDPAQRKLYRDVMLENFRNLLSVGNQPFHQDTFHFLGKEKFWKMKTTSQREGNSGGKIQIEMETV

SEQ ID NO: 5746 - protein, 80 aa, Synthetic construct
MGPKEEEQSCEYETRLPGNHSTSQEIFRQRFRHLRYQETPGPREALSQLRVLCCEWLRPEKHTKEQILEFLVLEQFLTIL

SEQ ID NO: 5747 - protein, 80 aa, Synthetic construct
RKPSDLVRHIRIHTHEKPFKCPQCFRAFAVKSTLTAHIKTHTGIKAFKCQYCMKSFSTSGSLKVHIRLHTGVRPFACPHC

SEQ ID NO: 5748 - protein, 90 aa, Synthetic construct
TYLPLKVSSQIDTQDSSVKFCKNEPQDHQESRRLFVMEESTERKVIKGESCSENLQVKLVSDGQELASPLLNGEATCQNGQLKESLDPID

SEQ ID NO: 5749 - protein, 100 aa, Synthetic construct
SAQSVEEDSILIIPTPDEEEKILRVKLEEDPDGEEGSSIPWNHLPDPEIFRQRFRQFGYQDSPGPREAVSQLRELCRLWLRPETHTKEQILELVVLEQFV

SEQ ID NO: 5750 - protein, 80 aa, Synthetic construct
ECGKAFSGKSNLTEHEKIHIGEKPYKCNECGTIFRQKQYLIKHHNIHTGEKPYECNKCGKAFSRITSLIVHVRIHTGDKP

SEQ ID NO: 5751 - protein, 80 aa, Synthetic construct
GTIFRQKQYLIKHHNIHTGEKPYECNKCGKAFSRITSLIVHVRIHTGDKPYECKVCGKAFCQSSSLTVHMRSHTGEKPYG

SEQ ID NO: 5752 - protein, 120 aa, Synthetic construct
KGEDAQPQEMASTSFPRASGPSPEFRQHGDSDGKRGSPQNLPIEHHFACKECGDTFRLKVLLVQHQRVHSEEKGWECGDCGKVFRGVAEFNEHRKSHVAAEPQPGPSRALENAAEKREQM

SEQ ID NO: 5753 - protein, 80 aa, Synthetic construct
VAQPPSDSDAVGPRSGFPPQPSLPLCRAPGQLGEKQLPSSTSDDRVKDEFSDLSEGDVLSEDENDKKQNAQSSDESFEPY

SEQ ID NO: 5754 - protein, 80 aa, Synthetic construct
WSDWEEHPASAVCLFCEKQAETIEKLYVHMEDAHEFDLLKIKSELGLNFYQQVKLVNFIRRQVHQCRCYGCHVKFKSKAD

SEQ ID NO: 5755 - protein, 100 aa, Synthetic construct
GDIFLCKKVESPKKNLRESKQREEDDEDPDLIYVGVEHVHRDAEVLFVGMISNSKPVVSNILNRVTPGSNSRRKKGHFRQYPAHVSQPANHVTSMAKAIM

SEQ ID NO: 5756 - protein, 100 aa, Synthetic construct
EQSCEEEKEPEPQKNIQETKQVDDEDAELIFVGVEHVNEDAELIFVGVTSNSKPVVSNILNRVTPGSWSRRKKYDHLRKDTARKLQPKSHETVTSEAVTV

SEQ ID NO: 5757 - protein, 150 aa, Synthetic construct
DDDKPFQPKNISKMAELFMECEEEELEPWQKKVEETQDEDDDELIFVGEISSSKPAISNILNRGHSSSSSKGIKSEPHSPGIPEIFRTASQRCRDPPSNPVAASPRFHLVSKSSQSSVTVENASKPDFTKNSQVGSDNSSILLFDSTQES

SEQ ID NO: 5758 - protein, 80 aa, Synthetic construct
GTNTSSPYDAGADYLRACPKCNVQFNLLDPLKYHMKHCCPDMITKFLGVIVKSERPCDEDKTDSETGKLIMLVNEFYYGR

SEQ ID NO: 5759 - protein, 80 aa, Synthetic construct
SFCKYNTNCNKAFVNHMMSSHSNHPGKRFCIFKKHSGTLRGITLVCLKCDFLADSSGLDRMAKHLSQRKTHTCQVIIENV

SEQ ID NO: 5760 - protein, 80 aa, Synthetic construct
MMSSHSNHPGKRFCIFKKHSGTLRGITLVCLKCDFLADSSGLDRMAKHLSQRKTHTCQVIIENVSKSTSTSEPTTGCSLK

SEQ ID NO: 5761 - protein, 110 aa, Synthetic construct
GDNPFQPKSNSKMAELFMECEEEELEPWQKKVKEVEDDDDDEPIFVGEISSSKPAISNILNRVNPSSYSRGLKNGALSRGITAAFKPTSQHYTNPTSNPVPASPINFHPE

SEQ ID NO: 5762 - protein, 80 aa, Synthetic construct
KGKLIMLVNDFYYGKHEGDVQEEQKTHTTFKCFSCLKILKNNIRFMNHMKHHLELEKQSSESWENHTTCQHCYRQFPTPF

SEQ ID NO: 5763 - protein, 110 aa, Synthetic construct
SNMQKKQSTLASSNKKSKVNTALRNLRYRRGIHKCIECCSEIKDFANHFPTYVHCSFCRYNTSCSKAYVNHMMSFHSNRPSKRFCIFKKHSENLRGITLVCLNCDFLSDV

SEQ ID NO: 5764 - protein, 150 aa, Synthetic construct
MFNHRLPPVTSFTRPAGSAAPPPQCVLSSSTSAAPAAEPPPPPAPDMTFKKEPAASAAAFPSQRTSWGFLQSLVSIKQEKPADPEEQQSHHHHHHHHYGGLFAGAEERSPGLGGGEGGSHGVIQDLSILHQHVQQQPAQHHRDVLLSSSS

SEQ ID NO: 5765 - protein, 90 aa, Synthetic construct
SELVQEENLSPGTQTPSNDKASMLQEYSKYLQQAFEKSTNASFTLGHGFQFVSLSSPLHNHTLFPEKQIYTTSPLECGFGQSVTSVLPSS

SEQ ID NO: 5766 - protein, 80 aa, Synthetic construct
SSLATHQRIHVGERPYECNECGKGFNRSTHLVQHQLIHTGVRPYECNECDKAFIHSSALIKHQRTHTGEKPYKCQECGKA

SEQ ID NO: 5767 - protein, 80 aa, Synthetic construct
KHQRTHTGEKPYKCQECGKAFSHCSSLTKHQRVHTGEKPYECSECGKTFSQSTHLVQHQRIHTGEKPYECSECGKTFSQS

SEQ ID NO: 5768 - protein, 80 aa, Synthetic construct
ELLLCLPVELSDKQWEQFQTLVQVAHEKLMENGSCELHFLATLAQETGVWKNPVLCTILSQEPLDKDKVNEFLAFEGPIL

SEQ ID NO: 5769 - protein, 80 aa, Synthetic construct
TNQLSQATALAKLCSDHPEIGIKGSFKQTYLVCLCTSSPNGKLIEEISEVDCKDALEMICNLESEGDEKSALVLCTAFLS

SEQ ID NO: 5770 - protein, 80 aa, Synthetic construct
EGNTNSSFLKGGNGENAVFPSQVNVANNFSSTNAQQSAPEKVKKDRGRGPNGKERKPKHNKRAKWPAIIRDGKFICSRCY

SEQ ID NO: 5771 - protein, 90 aa, Synthetic construct
HPNTLLTNQNRTSNSKTSSIEECSSLPVFPTNDLLLKTVENGLCSSSFPNSGGPSQNFTSNSSRVSVISGPQNTRSSHLNKKGNSASKRR

SEQ ID NO: 5772 - protein, 80 aa, Synthetic construct
SHTVLAPLTLKTENGDSQMMALNSCTTSINSDLQISEDNVIQNFEKTLEIIKTAMNSQILEVKSGSQGAGETSQNAQINY

SEQ ID NO: 5773 - protein, 80 aa, Synthetic construct
HYMKLHEMTPEEIESMTASVDVGKFPCDQLECKSSFTTYLNYVVHLEADHGIGLRASKTEEDGVYKCDCEGCDRIYATRS

SEQ ID NO: 5774 - protein, 90 aa, Synthetic construct
QTIEEHPASFDWSSFKPMGFEVSFLKFLEESAVKQKKNTDKDHPNTGNKKGSHSNSRKNIDKTAVTSGNHVCPCKESETFVQFANPSQLQ

SEQ ID NO: 5775 - protein, 90 aa, Synthetic construct
VCPCKESETFVQFANPSQLQCSDNVKIVLDKNLKDCTELVLKQLQEMKPTVSLKKLEVHSNDPDMSVMKDISIGKATGRGIGKATGRGQY

SEQ ID NO: 5776 - protein, 80 aa, Synthetic construct
QPDQKYDEENLPIPNSLRCELLLVLKTQWPFDPEFWDWKTLKRQCLALMGEEASIVSSIDELNDSEVYEKVVDYQEESKE

SEQ ID NO: 5777 - protein, 80 aa, Synthetic construct
CIQMKCKAGFNSYAELLTHRKEHQVFRAKCMFPKCGRIFSEAYLLYDHEAQHYNTYTCKFTGCGKVYRSQGELEKHLDDH

SEQ ID NO: 5778 - protein, 80 aa, Synthetic construct
IQPSEVNQNTAENIEKERSMLPSENNIENSLLADRSDAWDKSKAESAVTKQDQISASELRQANGPLSNGLENPATTPLLQ

SEQ ID NO: 5779 - protein, 80 aa, Synthetic construct
QANGPLSNGLENPATTPLLQSSEVAVSIKVSLNQGIEDNFGKQENSTVEGSGEALVTDLHTPVEDTCNDLCHPGFQERKE

SEQ ID NO: 5780 - protein, 80 aa, Synthetic construct
NIQLPSVNTVQNNKLPDSSPFSSFISVMPTKSNIPQSEVSHKEDQIQEILEGLQKLKLENDLSTPASQCVLINTSVTLTP

SEQ ID NO: 5781 - protein, 80 aa, Synthetic construct
ENKNAKIVQIEENKPYSLKRGKHVYSIKARNDALSECTSRFVTQYPCMIKGCTSVVTSESNIIRHYKCHKLSKAFTSQHR

SEQ ID NO: 5782 - protein, 80 aa, Synthetic construct
IELKPEPDAQPQQAPRLGPFSPKEVSSAGRFGGEPHHSPGPMPAGAALLALGPRNPWTLWTPLTPNYPDRQPWTDKHPDL

SEQ ID NO: 5783 - protein, 120 aa, Synthetic construct
FGGEPHHSPGPMPAGAALLALGPRNPWTLWTPLTPNYPDRQPWTDKHPDLLTCGRCLQTFPLEAITAFMDHKKLGCQLFRGPSRGQGSEREELKALSCLRCGKQFTVAWKLLRHAQWDHG

SEQ ID NO: 5784 - protein, 120 aa, Synthetic construct
HKKLGCQLFRGPSRGQGSEREELKALSCLRCGKQFTVAWKLLRHAQWDHGLSIYQTESEAPEAPLLGLAEVAAAVSAVVGPAAEAKSPRASGSGLTRRSPTCPVCKKTLSSFSNLKVHMR

SEQ ID NO: 5785 - protein, 80 aa, Synthetic construct
QDGSGFSRILSMLADSTSTQEKRRRSFPDIEDEEKFLYGDEEEDLKAESVPKPLGSSESEVMRQKASSLPSSAPAVKLES

SEQ ID NO: 5786 - protein, 80 aa, Synthetic construct
FTHMHNKKHTQTLDPYNRPWASKTQSEAKQDAIKRTDKITVPAKGSEFLVPISGFYCQLCEEFLGDPISGEQHVKGHQHN

SEQ ID NO: 5787 - protein, 90 aa, Synthetic construct
NTGIKLQLKEEVKKESPTSSSFGKFSWKKPEKEEEKSSLVTPSISKEEILESSKDKEDGKTEAGKAKPIKIKLSGKTVVAHTSPWMPVVT

SEQ ID NO: 5788 - protein, 80 aa, Synthetic construct
TSRYRSLKLKRERSKDFQVKKIYELAVWDENKKRPETWESPEKPKTEALELQDVHPELTVTIESKALEDFEATDLKVEEL

SEQ ID NO: 5789 - protein, 80 aa, Synthetic construct
RQAGLAVVLETERRRQSELKRKLSEKPKEEKKEKKAKAVKEVKEDDKVSEKLEDQLSEGRNSPEKAENKRNTGIKLQLKE

SEQ ID NO: 5790 - protein, 80 aa, Synthetic construct
ETKGAPETKLSGGPLANGENSNLSRTKSSDTSSTSPLNSSASQEELHQDEGLVAAPIVSNSEKPIAKTLVALGKWSVVEH

SEQ ID NO: 5791 - protein, 80 aa, Synthetic construct
RSFQCTQCLKIFHQATDLLEHQCVQAEQKPFVCGVCKMGFSLLTSLAQHHSSHSGLVKCSICEKTYKPAEAAEPATTAAP

SEQ ID NO: 5792 - protein, 80 aa, Synthetic construct
VHTLETLFKCPVCQKGFDQSAELLRHKCLPGAAERPFKCPVCNKAYKRASALQKHQLAHCAAAEKPLRCTLCERRFFSSS

SEQ ID NO: 5793 - protein, 80 aa, Synthetic construct
GAAERPFKCPVCNKAYKRASALQKHQLAHCAAAEKPLRCTLCERRFFSSSEFVQHRCDPAREKPLKCPDCEKRFKYASDL

SEQ ID NO: 5794 - protein, 100 aa, Synthetic construct
LCERRFFSSSEFVQHRCDPAREKPLKCPDCEKRFKYASDLQRHRRVHTGEKPYKCPNCDKAFKQREHLNKHQGVHAREQQFKCVWCGERFLDVALLQEHS

SEQ ID NO: 5795 - protein, 90 aa, Synthetic construct
YTSEEKCNQRTQKRKIYNVCPRKGKKIFIHMHEIIQIDGHIYQCLECKQNFCENLALIMCERTHTGEKPYKCDMCEKTFVQSSDLTSHQR

SEQ ID NO: 5796 - protein, 80 aa, Synthetic construct
RNSHLIVHQKIHSGEKPYECKECGKTFIESAYLIRHQRIHTGEKPYGCNQCQKLFRNIAGLIRHQRTHTGEKPYECNQCG

SEQ ID NO: 5797 - protein, 80 aa, Synthetic construct
KECGKTFIESAYLIRHQRIHTGEKPYGCNQCQKLFRNIAGLIRHQRTHTGEKPYECNQCGKAFRDSSCLTKHQRIHTKET

SEQ ID NO: 5798 - protein, 80 aa, Synthetic construct
MSAQRELGGTALQVAVVKSEDVEAGLASPGGQPSPEGATPQVVTLHVAEPGGGAAAESQLGPPDLPQITLAPGPFGGTGY

SEQ ID NO: 5799 - protein, 80 aa, Synthetic construct
GPSSPVQLPPASGAEEPDLQSLEAMMEVVVVQQFKCKMCQYRSSTKATLLRHMRERHFRPVAAAAAAAGKKGRLRKWSTS

SEQ ID NO: 5800 - protein, 80 aa, Synthetic construct
RRLWEAVSGAQPVGREEVEHMIQKNQCLFTNTQCKVCCALLISESQKLAHYQSKKHANKVKRYLAIHGMETLKGETKKLD

SEQ ID NO: 5801 - protein, 90 aa, Synthetic construct
TAELREAMALAPWGPVKVKKEEEEEENFPGQASSQQVHSENIKVWAPVQGLQTGLDGSEEEEKGQNISWDMAVVLKATQEAPAASTLGSY

SEQ ID NO: 5802 - protein, 150 aa, Synthetic construct
LQTGLDGSEEEEKGQNISWDMAVVLKATQEAPAASTLGSYSLPGTLAKSEILETHGTMNFLGAETKNLQLLVPKTEICEEAEKPLIISERIQKADPQGPELGEACEKGNMLKRQRIKREKKDFRQVIVNDCHLPESFKEEENQKCKKSGG

SEQ ID NO: 5803 - protein, 80 aa, Synthetic construct
LGEACEKGNMLKRQRIKREKKDFRQVIVNDCHLPESFKEEENQKCKKSGGKYSLNSGAVKNPKTQLGQKPFTCSVCGKGF

SEQ ID NO: 5804 - protein, 90 aa, Synthetic construct
HGLLGPPKSERGRKKIKAENPGGPPVLVVPYPILASGETAKEGKTYRCKVCPLTFFTKSEMQIHSKSHTEAKPHKCPHCSKSFANASYLA

SEQ ID NO: 5805 - protein, 80 aa, Synthetic construct
TRIHTGDRPYKCPHPGCEKAFTQLSNLQSHQRQHNKDKPYKCPNCYRAYSDSASLQIHLSAHAIKHAKAYCCSMCGRAYT

SEQ ID NO: 5806 - protein, 130 aa, Synthetic construct
MDLHADSLDGTRSGPGLPTSDTKASFEAHVREKFNRMVEAVDRTIEKRIDKLTKELAQKTAELLEVRAAFVQLTQKKQEVQRRERALNRQVDVAVEMIAVLRQRLTESEEELLRKEEEVVTFNHFLEAAA

SEQ ID NO: 5807 - protein, 100 aa, Synthetic construct
VDVAVEMIAVLRQRLTESEEELLRKEEEVVTFNHFLEAAAEKEVQGKARLQDFIENLLQRVELAEKQLEYYQSQQASGFVRDLSGHVLTDISSNRKPKCL

SEQ ID NO: 5808 - protein, 90 aa, Synthetic construct
EKEVQGKARLQDFIENLLQRVELAEKQLEYYQSQQASGFVRDLSGHVLTDISSNRKPKCLSRGHPHSVCNHPDLKAHFHPKGRNHLKKAK

SEQ ID NO: 5809 - protein, 120 aa, Synthetic construct
EENKNHGLPNLPLLFPQPPRPKYDSQMIDLCNVGFQFYRSLEHFGGKPVKQEPIKPSAVWPQPTPTPFLPTPYPYYPKVHPGLMFPFFVPSSSPFPFSRHTFLPKQPPEPLLPRKAEPQE

SEQ ID NO: 5810 - protein, 80 aa, Synthetic construct
LLPRKAEPQESEETKQKVERVDVNVQIDDSYYVDVGGSQKRWQCPTCEKSYTSKYNLVTHILGHSGIKPHACTHCGKLFK

SEQ ID NO: 5811 - protein, 80 aa, Synthetic construct
THKGVKEHKCGICGREFTLLANMKRHVLIHTNIRAYQCHLCYKSFVQKQTLKAHMIVHSDVKPFKCKLCGKEFNRMHNLM

SEQ ID NO: 5812 - protein, 80 aa, Synthetic construct
CYKSFVQKQTLKAHMIVHSDVKPFKCKLCGKEFNRMHNLMGHMHLHSDSKPFKCLYCPSKFTLKGNLTRHMKVKHGVMER

SEQ ID NO: 5813 - protein, 80 aa, Synthetic construct
GHMHLHSDSKPFKCLYCPSKFTLKGNLTRHMKVKHGVMERGLHSQGLGRGRIALAQTAGVLRSLEQEEPFDLSQKRRAKV

SEQ ID NO: 5814 - protein, 80 aa, Synthetic construct
MMKHKDIRPYICSECGMEFVQPHHLKQHSLTHKGVKEHKCGICGREFTLLANMKRHVLIHTNIRAYQCHLCYKSFVQKQT

SEQ ID NO: 5815 - protein, 80 aa, Synthetic construct
ANMKRHVLIHTNIRAYQCHLCYKSFVQKQTLKAHMIVHSDVKPFKCKLCGKEFNRMHNLMGHMHLHSDSKPFKCLYCPSK

SEQ ID NO: 5816 - protein, 100 aa, Synthetic construct
IRGFEAPMAENPPPPPPPVIFCHDSPKRVLVSVIRTTPIKPTCGGGGEPEPPPPLIPTSPGFSDFMVYPWRWGENAHNVTLSPGAAGAAASAALPAAAAA

SEQ ID NO: 5817 - protein, 80 aa, Synthetic construct
TCHTTTLPALVRTPTLMMQPSLDIKPFMSFPVDSSSAVGLFPNFNTMDPVQKAVINHTFGVSIPPKKKQVISCNVCQLRF

SEQ ID NO: 5818 - protein, 80 aa, Synthetic construct
TFHCEICDVHVNSEIQLKQHISSRRHKDRVAGKPLKPKYSPYNKLQRSPSILAAKLAFQKDMMKPLAPAFLSSPLAAAAA

SEQ ID NO: 5819 - protein, 80 aa, Synthetic construct
PPAPPLQPSLDIKPFLPFPLDTAAAVNLFPNFNAMDPIQKAVINHTFGVPLPHRRKQIISCNICQLRFNSDSQAAAHYKG

SEQ ID NO: 5820 - protein, 80 aa, Synthetic construct
PPSEPLLEGAAPQPFTTSDDTPCQEQPKEVLKAPSTSGLQQVAFQPGQKVYVWYGGQECTGLVEQHSWMEGQVTVWLLEQ

SEQ ID NO: 5821 - protein, 80 aa, Synthetic construct
FLLDEPAPRKRKNSVKVMYKCLWPNCGKVLRSIVGIKRHVKALHLGDTVDSDQFKREEDFYYTEVQLKEESAAAAAAAAA

SEQ ID NO: 5822 - protein, 100 aa, Synthetic construct
RSIVGIKRHVKALHLGDTVDSDQFKREEDFYYTEVQLKEESAAAAAAAAAGTPVPGTPTSEPAPTPSMTGLPLSALPPPLHKAQSSGPEHPGPESSLPSG

SEQ ID NO: 5823 - protein, 140 aa, Synthetic construct
EPAPTPSMTGLPLSALPPPLHKAQSSGPEHPGPESSLPSGALSKSAPGSFWHIQADHAYQALPSFQIPVSPHIYTSVSWAAAPSAACSLSPVRSRSLSFSEPQQPAPAMKSHLIVTSPPRAQSGARKARGEAKKCRKVYG

SEQ ID NO: 5824 - protein, 130 aa, Synthetic construct
KLQVCCRVEEVWLAELQGPCPQAPPLEPGAQALAYRPVSRNIDVPKRKSDAVEMDEMMAAMVLTSLSCSPVVQSPPGTEANFSASRAACDPWKESGDISDSGSSTTSGHWSGSSGVSTPSPPHPQASPKY

SEQ ID NO: 5825 - protein, 80 aa, Synthetic construct
AAPSAACSLSPVRSRSLSFSEPQQPAPAMKSHLIVTSPPRAQSGARKARGEAKKCRKVYGIEHRDQWCTACRWKKACQRF

SEQ ID NO: 5826 - protein, 80 aa, Synthetic construct
SAKLGKSSSLLTQTSEECNGILTEKMEEEEQTCDPDSSLHWSSSYSPETFRQQFRQFGYQDSPGPHEALSRLWELCHLWL

SEQ ID NO: 5827 - protein, 80 aa, Synthetic construct
QTCDPDSSLHWSSSYSPETFRQQFRQFGYQDSPGPHEALSRLWELCHLWLRPEVHTKEQILELLVLEQFLAILPKELQAW

SEQ ID NO: 5828 - protein, 90 aa, Synthetic construct
ILVKVEDNFSWDEKFKQNGSTQSCQELFRQQFRKFCYQETPGPREALSRLQELCYQWLMPELHTKEQILELLVLEQFLSILPEELQIWVQ

SEQ ID NO: 5829 - protein, 80 aa, Synthetic construct
EKGMLASEELSQSGGSTKDDELASTTTPKRGRPKGNISRTCSHCGLLASSITNLTVHIRRKHSHQYSYLCKVCKYYTVTK

SEQ ID NO: 5830 - protein, 80 aa, Synthetic construct
PGDVYSQRDVTGTGENKCLHCEFSAHSSASLELHVKRKHTKEFEFYCMACDYYAVTRREMTRHAATEKHKMKRQSYLNSA

SEQ ID NO: 5831 - protein, 140 aa, Synthetic construct
GVLQFAVCDTAAAGQLVKDGVTQVVVSEEGAVHMVAGEGAQIIMQEAQGEHMDLVESDGEISQIIVTEELVQAMVQESSGGFSEGTTHYILTELPPGVQDEPGLYSHTVLETADSQELLQAGATLGTEAGAPSRAEQLAS

SEQ ID NO: 5832 - protein, 80 aa, Synthetic construct
RDQRDRRGIGNKSIKHQLGLSFLPHPHELQQFQAEGKIYECNHVEKSVNHGSSVSPPQIISSTIKTHVSNKYGTDFICSS

SEQ ID NO: 5833 - protein, 80 aa, Synthetic construct
NHSVSPDPVLGSVASMSSATPDSSASVERGSTPDSTLKPLRGQKKMRDDGQGWTKVVYSCPYCSKRDFNSLAVLEIHLKT

SEQ ID NO: 5834 - protein, 140 aa, Synthetic construct
KLYKCALCLKEFRSKQDLVKLDVNGLPYGLCAGCMARSANGQVGGLAPPEPADRPCAGLRCPECSVKFESAEDLESHMQVDHRDLTPETSGPRKGTQTSPVPRKKTYQCIKCQMTFENEREIQIHVANHMIEEGINHECK

SEQ ID NO: 5835 - protein, 80 aa, Synthetic construct
TVHYMTTSTHYVCESCDKQFSSVDDLQKHLLDMHTFVLYHCTLCQEVFDSKVSIQVHLAVKHSNEKKMYRCTACNWDFRK

SEQ ID NO: 5836 - protein, 80 aa, Synthetic construct
LCNQMFDSPAKLLCHLIEHSFEGMGGTFKCPVCFTVFVQANKLQQHIFAVHGQEDKIYDCSQCPQKFFFQTELQNHTMSQ

SEQ ID NO: 5837 - protein, 80 aa, Synthetic construct
IKKPWHRCHVCNHHFQFKQHLRDHMNTHTNRRPYSCRICRKSYVRPGSLSTHMKLHHGENRLKKLMCCEFCAKVFGHIRV

SEQ ID NO: 5838 - protein, 90 aa, Synthetic construct
PGPREALGLLRALCRDWLRPEVHTKEQMLELLVLEQFLSALPADTQAWVCSRQPQSGEEAVALLEELWGPAASPDGSSATRVPQDVTQGP

SEQ ID NO: 5839 - protein, 80 aa, Synthetic construct
MIPLAGTAPGAEGPAPGDSQAVRPYKQEPSSPPLAPGLPAFLAAPGTTSCPECGKTSLKPAHLLRHRQSHSGEKPHACPE

SEQ ID NO: 5840 - protein, 80 aa, Synthetic construct
SLNQGSVFQEYDTDCEVFRQRFRQFQYREAAGPHEAFNKLWELCCQWLKPKMRSKEQILELLVLEQFLTILPTEIETWVR

SEQ ID NO: 5841 - protein, 100 aa, Synthetic construct
GDPGSEIIESVPPAGPEASESTTDENEDDIQFVSEGPLRPVLEYIDLVSSDDEEPSTSYTDRMPESKVPSSENHRPEMCSSCNVPLPIGDSSSFSGSCSS

SEQ ID NO: 5842 - protein, 110 aa, Synthetic construct
SETETLKSSQNFQTLPSSPLLVPQESLASSEVKENLRIDSSSASQHGRDAILYLQTQVAEMSRVIRDLQSRSCFRFHHSRPSENSSVPWDISTSKEENLSTVEEETDYKS

SEQ ID NO: 5843 - protein, 80 aa, Synthetic construct
AIDYRRQAWLRLTSLTKKTQEKISHLPFDGTSLFGQDVKAVVAEDNNIKENDYKDHKYYNQHRYFYSHDQKAHYHNRGYS

SEQ ID NO: 5844 - protein, 80 aa, Synthetic construct
EVLQCDGCDFRAPSYEDLKAHIQDVHTAFLQPTDVAEDNVNELRCGSVNASNQTEVEFSSIKDEFAIAEDLSGQNATSLG

SEQ ID NO: 5845 - protein, 80 aa, Synthetic construct
NELRCGSVNASNQTEVEFSSIKDEFAIAEDLSGQNATSLGTGGYYGHSPGYYGQHIAANPKPTNKFFQCKFCVRYFRSKN

SEQ ID NO: 5846 - protein, 80 aa, Synthetic construct
KLGGYFTAVYADEHEKPTLMEEEERGNFEKAEVEGEAQEIEWLPFRCIKCFKLSFSTAELLCMHYTDHHSRDLKRDFIIL

SEQ ID NO: 5847 - protein, 100 aa, Synthetic construct
AEVEGEAQEIEWLPFRCIKCFKLSFSTAELLCMHYTDHHSRDLKRDFIILGNGPRLQNSTYQCKHCDSKLQSTAELTSHLNIHNEEFQKRAKRQERRKQL

SEQ ID NO: 5848 - protein, 80 aa, Synthetic construct
SNTVKKSQTSILGLSSKNNFVAKASRKLANDFPLDLSPVKKRTRIDEIASNLQSKINQTKQQEDAVINVEDDEEEEEDNE

SEQ ID NO: 5849 - protein, 80 aa, Synthetic construct
CDVCSFASPNMHSVLVHYQKKHPEEKASYFRIQKTMRMVSVDRGSALSQLSFEVGAPMSPKMSNMGSPPPPQPPPPDLST

SEQ ID NO: 5850 - protein, 140 aa, Synthetic construct
NAQEQMSSSREERALGVCSGHEAPTPEEGAHTEQAEAPCRGQACSAQKAQPVGTCPGEEWMIRKVKVEDEDQEAEEEVEWPQHLSLLPSPFPAPDLGHLAAAYKLEPGAPGALSGLALSGWGPMPEKPYGCGECERRFRD

SEQ ID NO: 5851 - protein, 80 aa, Synthetic construct; identical to SEQ ID NO: 357

SEQ ID NO: 5852 - protein, 80 aa, Synthetic construct; identical to SEQ ID NO: 359

SEQ ID NO: 5853 - protein, 90 aa, Synthetic construct
CEKPVLPLPTQPSFEEGGDPTLGPARLPTDLSDSSSLCLCHEDPWEDEDPAGLPESFLLDGFLNSRVPGIDPWAPGLSLWALEPSREAGA

SEQ ID NO: 5854 - protein, 80 aa, Synthetic construct
HEDPWEDEDPAGLPESFLLDGFLNSRVPGIDPWAPGLSLWALEPSREAGAEKLPSHCPEDDRPEAIPELHMVPAAWRGLE

SEQ ID NO: 5855 - protein, 80 aa, Synthetic construct
AHLGGAHGLLERPELQHTPLYACELCATVMRIIKKSFACSSCNYTFAKKEQFDRHMNKHLRGGRQPFAFRGVRRPGAPGQ

SEQ ID NO: 5856 - protein, 80 aa, Synthetic construct
LLSSDSYSSLSPETESVNPGENIKTDTQKKRPGTVILSKLSSRRIISESQLSPPVIPARRPGFRVCYICGREFGSQSIAI

SEQ ID NO: 5857 - protein, 120 aa, Synthetic construct
TGEKPDGCKQCGKAFRSAKYIRIHGRTHTGEKPYECKQCGKAFHCVSSFHRHERTHAGEKPYECKHCGKAFTCSIYIRIHERIHTGEKPYQCKECGKAFIRSSYCRKHERKHERTHTINI

SEQ ID NO: 5858 - protein, 90 aa, Synthetic construct
PGPPESLDMGPLTFRDVAIEFSLEEWQCLDTAQQDLYRKVMLENYRNLVFLGIAVSKPDLVTCLEQGKDPWNMKGHSTVVKPPVICSHFA

SEQ ID NO: 5859 - protein, 80 aa, Synthetic construct
LNQYLTTTQSKIFQCDKYVKVFHKLLNSNRHNTKHTGKKPFKCKKCGKSFCMLLHLCQHKRIHIRENSYRCEECGKAFIW

SEQ ID NO: 5860 - protein, 90 aa, Synthetic construct
FKCKKCGKSFCMLLHLCQHKRIHIRENSYRCEECGKAFIWFSTLTRHRRVHTGEKSYKYECGKSFNQDSNLTTHKRIHTGQKPYKCEECG

SEQ ID NO: 5861 - protein, 80 aa, Synthetic construct
THKRIHTGEKPYKCEECGKTFSVFSILTKHKIIHTEEKPYKCEECGKAFKRSSTLTKHRIIHTEEKPYKCEECGKAFNQS

SEQ ID NO: 5862 - protein, 80 aa, Synthetic construct
PYKCKECGKAFAHSSSLTEHHRTHTGEKLYKCSECEKTFRKYAHLSEHYRIHTGEKPYECIECGKFFRHSSVLFRHQKLH

SEQ ID NO: 5863 - protein, 80 aa, Synthetic construct
RRRTNSESLRLHSLAAEALVTMPIRAAELTRANLGHYGDINLLDPDTSQRQVDSTLAAYSKMMSPLKNSSDGLTSLNQSN

SEQ ID NO: 5864 - protein, 80 aa, Synthetic construct
GISMSLLTVIEKLRERTDQNASDDDILKELQDNAQCQPNSDTSLSGNNVVEYIPNAERPYRCRLCHYTSGNKGYIKQHLR

SEQ ID NO: 5865 - protein, 80 aa, Synthetic construct
EPVSDFPASFRKSTYWMKMRRIKPAATSHVEGSGGVSAKGKRKPRQEEDEDYREFPQKKHKLYGRKQRPKTQPNPKSQAR

SEQ ID NO: 5866 - protein, 80 aa, Synthetic construct
LAYHLRSEHGPISFFPESGQPECLKEMNLESKSGGRVQRRSAKIAVYHLQELASAELAKEWPKRKVLQDLVPDDRKLKYT

SEQ ID NO: 5867 - protein, 80 aa, Synthetic construct
QQEEEKRRQQHRSRRSLRRRQQPGIELPETELSLRVGKDQRRNNEELVVSASCKEPEQEPVPAQFQKVKPPKTNHKRGRK

SEQ ID NO: 5868 - protein, 80 aa, Synthetic construct
CPFCEAAFTSKTQLEKHRIWNHMDRPLPASKPGPISRPVTISRPVGVSKPIGVSKPVTIGKPVGVSKPIGISKPVSVGRP

SEQ ID NO: 5869 - protein, 80 aa, Synthetic construct
TCPIPPKQARPENGEYGPSSMGQSSAFQLSADTSSGSLSPGSRPSGGMEALKAAGPASPPEEDPERTKHRRKQKTPKKFT

SEQ ID NO: 5870 - protein, 80 aa, Synthetic construct
MGQSSAFQLSADTSSGSLSPGSRPSGGMEALKAAGPASPPEEDPERTKHRRKQKTPKKFTGEQPSISGTFGLKGLVKAED

SEQ ID NO: 5871 - protein, 80 aa, Synthetic construct
KPFRCSLCNYSCNQSMNLKRHMLRHTGEKPFRCATCAYTTGHWDNYKRHQKVHGHGGAGGPGLSASEGWAPPHSPPSVLS

SEQ ID NO: 5872 - protein, 90 aa, Synthetic construct
RRQEQHRFSMDLKMPAFHPKQEVPVPGDGVEFPSSTGAEGQTGHPAEKLSDLHNKEHSGGGKRALAPDLMPLDLSARSTRDDPSNKETAS

SEQ ID NO: 5873 - protein, 110 aa, Synthetic construct
EFPSSTGAEGQTGHPAEKLSDLHNKEHSGGGKRALAPDLMPLDLSARSTRDDPSNKETASSLQAALVVHPCPYCSHKTYYPEVLWMHKRIWHRVSCNSVAPPWIQPNGYK

SEQ ID NO: 5874 - protein, 110 aa, Synthetic construct
PEVLWMHKRIWHRVSCNSVAPPWIQPNGYKSIRSNLVFLSRSGRTGPPPALGGKECQPLLLARFTRTQVPGGMPGSKSGSSPLGVVTKAASMPKNKESHSGGPCALWAPG

SEQ ID NO: 5875 - protein, 80 aa, Synthetic construct
DSLKAKFSAQPQGPPPAKGEGGAPPLPPREPPSKAAQELRTLATCAAGSRGDAALQAQPGVAGAPPVLHSIKQEPVAEGH

SEQ ID NO: 5876 - protein, 110 aa, Synthetic construct
PPSKAAQELRTLATCAAGSRGDAALQAQPGVAGAPPVLHSIKQEPVAEGHEKRLDILNIFKTYIPKDFATLYQGWGVSGPGLEHRGTLRTQARPGEFVCIECGKSFHQPG

SEQ ID NO: 5877 - protein, 80 aa, Synthetic construct
HMRKHTGEKPYKCPYCDHRASQKGNLKIHIRSHRTGTLIQGHEPEAGEAPLGEMRASEGLDACASPTKSASACNRLLNGA

SEQ ID NO: 5878 - protein, 80 aa, Synthetic construct
AHNAIHRRVEASRTRAPAEEGAEGPSDTKQFFLQCLNLRPSAAGDSCPGTQAGRRVAELDPVNSYQAWQLATRGKVAEPA

SEQ ID NO: 5879 - protein, 80 aa, Synthetic construct
GAEGPSDTKQFFLQCLNLRPSAAGDSCPGTQAGRRVAELDPVNSYQAWQLATRGKVAEPAEYLKYGAWDEALAGDVAFDK

SEQ ID NO: 5880 - protein, 120 aa, Synthetic construct
PSEQKQLFCDEKQTTLKKDYDVKNEIVDRSAPKPKISGSIHYALKNVKIDLPKINIPNEVLLKHEVDKYRKLFQSKQQTARKSISIKTVSCVEECTLLHKSERAEEEGVKMSAKILNFSC

SEQ ID NO: 5881 - protein, 120 aa, Synthetic construct
KPTPLSTGQGNRAEEGPNASSGFMKTAVLGPTLKNVMMKNNKLAVSPNYNATFMGFKMMDGKQHIVLKLVPIKQNVCSPGSQSGAAKDGTANLQPQTLDTNGFLTGVTTELNDTVYMKAA

SEQ ID NO: 5882 - protein, 150 aa, Synthetic construct
KPDSLLASISLLNDKDGTLKAKSEIEEQYVLEKGQNIDGQNLYSNENQNLECATEKSKWEDFSNVDSPMMPRITSVFSLQSQQASEFLPPEVNQLLQDVLKIKPDVKQDSSNTPNKGLPLHCDQSFQKHEREGKIVESSKDFKVQGIFPV

SEQ ID NO: 5883 - protein, 80 aa, Synthetic construct
LNSEQKKTIIVQTSKGFLIPLNITNKPGLPVIPGNALPLVNSQGIPASLFVNKKPGMVLTLNNGKLEGVSAVKTEGAPAR

SEQ ID NO: 5884 - protein, 80 aa, Synthetic construct
LNNGKLEGVSAVKTEGAPARGTVTKEPCKTPILKVEPNNNCLTPGLCSSIGSCLSMKSSSENTLPLKGPYILKPTSSVKA

SEQ ID NO: 5885 - protein, 120 aa, Synthetic construct
RDSYQEPPRRKATLHRKCKEKAKPEDVRETFGFSRPRLSKDSIRTLRLFPFSSKQLVKCPRRNQPVVVLNHPDADAPEVVSVMKTIAKFNGHVLKVSLSKRTINALLKPVCYNPPKTTYD

SEQ ID NO: 5886 - protein, 80 aa, Synthetic construct
SVMKTIAKFNGHVLKVSLSKRTINALLKPVCYNPPKTTYDDFSKRHKTFKPVSSVKERFVLKLTLKKTSKNNYQIVKTTS

SEQ ID NO: 5887 - protein, 110 aa, Synthetic construct
RTINALLKPVCYNPPKTTYDDFSKRHKTFKPVSSVKERFVLKLTLKKTSKNNYQIVKTTSENILKAKFNCWFCGRVFDNQDTWAGHGQRHLMEATRDWNMEATRDWNMLE

SEQ ID NO: 5888 - protein, 110 aa, Synthetic construct
PNKMTLSEPNEVNLFENKNVEVEVLSPAKEPVQPGMPLTVVAPAELVVPANCLAQLIDVKVVNGTQQLVLKLFPLEENNCLEAGRDNGGNSERMVKEKGSNEQEKVLSAE

SEQ ID NO: 5889 - protein, 90 aa, Synthetic construct
PVKVVSSNRKQEDNQTEEHKAVSTVGQISSQHKSEYLHINITGEDRSQQPGDKPLELKNSERTNNTNDGPVISSVFSLSSGSENVPEGIK

SEQ ID NO: 5890 - protein, 110 aa, Synthetic construct
QHKSEYLHINITGEDRSQQPGDKPLELKNSERTNNTNDGPVISSVFSLSSGSENVPEGIKWNSSTSKIKSIELLRRKIAQLIESCGKPSSLASNSAHRRSVGQASKGTSK

SEQ ID NO: 5891 - protein, 100 aa, Synthetic construct
KIQAEPSRCLKDPSIFQVARQLRLIAAKPDQLIKCPRRNQPVIVLNHPDVDSPEVTNVMKVINKYKGNVLKVVLSERTRCQLGIRRHHVRLTYQNAEEAS

SEQ ID NO: 5892 - protein, 80 aa, Synthetic construct
PVIVLNHPDVDSPEVTNVMKVINKYKGNVLKVVLSERTRCQLGIRRHHVRLTYQNAEEASQIKRQMMLKMKLKKVHKNNY

SEQ ID NO: 5893 - protein, 90 aa, Synthetic construct
LTYQNAEEASQIKRQMMLKMKLKKVHKNNYQVVDSLPDDSSQCVFKCWFCGRLYEDQEEWMSHGQRHLIEATRDWDVLSSDWDVLSSKGK

SEQ ID NO: 5894 - protein, 80 aa, Synthetic construct
LNEHLKQVHEAQDPGLIVSAMPAIVYQCNFCSEVVNDLNTLQEHIRCSHGFANPAAKDSNAFFCPHCYMGFLTDSSLEEH

SEQ ID NO: 5895 - protein, 80 aa, Synthetic construct
HVTIHFMITSTYYICESCDKQFTSVDDLQKHLLDMHTFVFFRCTLCQEVFDSKVSIQLHLAVKHSNEKKVYRCTSCNWDF

SEQ ID NO: 5896 - protein, 80 aa, Synthetic construct
HLLDMHTFVFFRCTLCQEVFDSKVSIQLHLAVKHSNEKKVYRCTSCNWDFRNETDLQLHVKHNHLENQGKVHKCIFCGES

SEQ ID NO: 5897 - protein, 150 aa, Synthetic construct
KEFRSKQDLVKLDINGLPYGLCAGCVNLSKSASPGINVPPGTNRPGLGQNENLSAIEGKGKVGGLKTRCSSCNVKFESESELQNHIQTIHRELVPDSNSTQLKTPQVSPMPRISPSQSDEKKTYQCIKCQMVFYNEWDIQVHVANHMIDE

SEQ ID NO: 5898 - protein, 80 aa, Synthetic construct
KKTYQCIKCQMVFYNEWDIQVHVANHMIDEGLNHECKLCSQTFDSPAKLQCHLIEHSFEGMGGTFKCPVCFTVFVQANKL

SEQ ID NO: 5899 - protein, 80 aa, Synthetic construct
ALPQGLLTFRDVAIEFSQEEWKCLDPAQRTLYRDVMLENYRNLVSLGISSKCTMKEFSSTAQGNTEVIHTGTLQRHERHH

SEQ ID NO: 5900 - protein, 80 aa, Synthetic construct
CGKTFSQKSYLACHRSIHTGKKPYECEECDKAFSFKSNLESHRITHTGEKPYKCNDCGKTFSHMSTLTCHRRLHTGEKPY

SEQ ID NO: 5901 - protein, 100 aa, Synthetic construct
ELLAHQDAHLRESANQIQYQCWDCQELFPSPELWVAHRKAQHLSATVAEPPVPPPLPPPTPLPPPSPPSEVKMEPYECPECSTLCATPEEFLEHQGTHFD

SEQ ID NO: 5902 - protein, 90 aa, Synthetic construct
PVPPPLPPPTPLPPPSPPSEVKMEPYECPECSTLCATPEEFLEHQGTHFDSLEKEERNGLEEEEEDDEEDEEDDEEMEDEEAMAEVGDDA

SEQ ID NO: 5903 - protein, 90 aa, Synthetic construct
CHSCGKTFASLANLSRHQLTHTGARPYQCLDCGKRFTQSSNLQQHRRLHLRPVAFARAPRLPITGLYNKSPYYCGTCGRWFRAMAGLRLH

SEQ ID NO: 5904 - protein, 80 aa, Synthetic construct
QKTCTICQMLLPNQCSYASHQRIHQHKSPYTCPECGAICRSVHFQTHVTKNCLHYTRRVGFRCVHCNVVYSDVAALKSHI

SEQ ID NO: 5905 - protein, 80 aa, Synthetic construct
SDVAALKSHIQGSHCEVFYKCPICPMAFKSAPSTHSHAYTQHPGIKIGEPKIIYKCSMCDTVFTLQTLLYRHFDQHIENQ

SEQ ID NO: 5906 - protein, 80 aa, Synthetic construct
RAYQSIVSNGVNFQGSLQAFMDSFVLSSLKKEKDMKDKALADPPSMKVHGVDGGEEKPSGKSSQRKSEKSQYEPLDLSVR

SEQ ID NO: 5907 - protein, 80 aa, Synthetic construct
QYEPLDLSVRPDAASLPGSSVTVQDSIAWHGCLFCAFTTSSMELMALHLQANHLGKAKRKDNTIGVTVNCKDQAREASKM

SEQ ID NO: 5908 - protein, 90 aa, Synthetic construct
AHPVPSPKPASVQEDAVAPAAGFRCTFCKGKFKKREELDRHIRILHKPYKCTLCDFAASQEEELISHVEKAHITAESAQGQGPNGGGEQS

SEQ ID NO: 5909 - protein, 100 aa, Synthetic construct
KEADEGGRATSGSARKGKRQHSSPQNPLLDCSLCGKVFSSASSLSKHYLTHSQERKHVCKICSKAFKRQDHLTGHMLTHQKTKPFVCIEQGCSKSYCDYR

SEQ ID NO: 5910 - protein, 80 aa, Synthetic construct
PSQVAMASFSSAGPPADPSKSKLTIFSRIQGGNIYRLPHPVKEENVAGRGNQQNGSPTDWTKPRSTFVCKNCSQMFYTEK

SEQ ID NO: 5911 - protein, 90 aa, Synthetic construct
SKLTIFSRIQGGNIYRLPHPVKEENVAGRGNQQNGSPTDWTKPRSTFVCKNCSQMFYTEKGLSSHMCFHSDQWPSPRGKQEPQVFGTEFC

SEQ ID NO: 5912 - protein, 80 aa, Synthetic construct
SLVWKPWGDMMISSETQDRVTELCNVACSSVMPGGGTNLELALHCLHEAQGNVQVALETLLLRGPHKPRTHLLADYRYTG

SEQ ID NO: 5913 - protein, 80 aa, Synthetic construct
VMPGGGTNLELALHCLHEAQGNVQVALETLLLRGPHKPRTHLLADYRYTGSDVWTPIEKRLFKKAFYAHKKDFYLIHKMI

SEQ ID NO: 5914 - protein, 120 aa, Synthetic construct
KDFYLIHKMIQTKTVAQCVEYYYIWKKMIKFDCGRAPGLEKRVKREPEEVERTEEKVPCSPRERPSHHPTPKLKTKSYRRESILSSSPNAGSKRTPELLGSAESQGIFPCRECERVFDKI

SEQ ID NO: 5915 - protein, 90 aa, Synthetic construct
ESILSSSPNAGSKRTPELLGSAESQGIFPCRECERVFDKIKSRNAHMKRHRLQDHVEPIIRVKWPVKPFQLKEEELGADILGADIGPLQW

SEQ ID NO: 5916 - protein, 80 aa, Synthetic construct
SAGPPADPSKSKLTIFSRIQGGNIYRLPHPVKEENVAGRGNQQNGSPTDWTKPRSTFVCKNCSQMFYTEKGLSSHMCFHS

SEQ ID NO: 5917 - protein, 80 aa, Synthetic construct
SSHLIQHLRMHTGEKPYQCGECGKSFSNTSHLIIHERTHTGEKPYKCPECGKRFSSSSHLIQHHRSHTGEKPYECSVCGK

SEQ ID NO: 5918 - protein, 80 aa, Synthetic construct
IEHRYVCSECNQLYGSLEEVLMHQNSHVPQQHFELVGVADPGVTVATDTASGTGLYQTLVQESQYQCLECGQLLMSPSQL

SEQ ID NO: 5919 - protein, 80 aa, Synthetic construct
TGEPEAPEPPVSEETSAGPAAPGTYRCLLCSREFGKALQLTRHQRFVHRLERRHKCSICGKMFKKKSHVRNHLRTHTGER

SEQ ID NO: 5920 - protein, 80 aa, Synthetic construct
RHTHHATDARPYPCPHCPKAFSFPSKLAAHRLCHDPPTAPGSQATAWHRCSSCGQAFGQRRLLLLHQRSHHQVEHKGERD

SEQ ID NO: 5921 - protein, 90 aa, Synthetic construct
TFADSKFQERHMKREHPADFVAQKLQGVLFICFTCARSFPSSKALITHQRSHGPAAKPTLPVATTTAQPTFPCPDCGKTFGQAVSLRRHR

SEQ ID NO: 5922 - protein, 140 aa, Synthetic construct
QVHAGGPAPHPCPRCPRRFSRAYSLLRHQRCHRAELERAAALQALQAQAPTSPPPPPPPLKAEQEEEGLPLPLANIKEEPPSPGTPPQSPPAPPVFLSASCFDSQDHSAFEMEEEEVDSKAHLRGLGGLAHLRGLGGLAS

SEQ ID NO: 5923 - protein, 80 aa, Synthetic construct
GAAELRAELALAAGRQEEKQVLLQADWTLLCLRCREAFATKGELKAHPCLRPEGEQEGEGGPPPRPKRHQCSICLKAFAR

SEQ ID NO: 5924 - protein, 100 aa, Synthetic construct
KPPGICMDESVSLSHSGSAPDVPAVSVIVKNTSRQESFEAEKDHITPSLLHNGFRGSDLPPDPHNCGKFDSTFMNGDSARSFPGKLEPPKSEPLPTFNQF

SEQ ID NO: 5925 - protein, 110 aa, Synthetic construct
PKHSDSYFPPPLGCGAVGGPVLEALAKFPVPELHMFDHFCKKEPKPEPLPLGSQQEHEQSGQNTVEPHKDPDATRFFGEALEFNSHPSNSIGESKGLARELGTCSSVPPR

SEQ ID NO: 5926 - protein, 100 aa, Synthetic construct
SNPVPLYAPNLSPPADSRIHVPASGYCCLECGDAFALEKSLSQHYGRRSVHIEVLCTLCSKTLLFFNKCSLLRHARDHKSKGLVMQCSQLLVKPISADQM

SEQ ID NO: 5927 - protein, 80 aa, Synthetic construct
DPVRLIRYSIKCLECHKQMRDYMVLAAHFQRTTEETEGLTCQVCQMLLPNQCSFCAHQRIHAHKSPYCCPECGVLCRSAY

SEQ ID NO: 5928 - protein, 90 aa, Synthetic construct
CCGDLEATALGRCDHPVCYRCSTKMRVLCEQRYCAVCREELRQVVFGKKLPAFATIPIHQLQHEKKYDIYFADGKVYALYRQLLQHECPR

SEQ ID NO: 5929 - protein, 80 aa, Synthetic construct
LRQVVFGKKLPAFATIPIHQLQHEKKYDIYFADGKVYALYRQLLQHECPRCPELPPFSLFGDLEQHMRRQHELFCCRLCL

SEQ ID NO: 5930 - protein, 80 aa, Synthetic construct
HIDLQFSYAPRHSRRNEGVVGGEDYEEVDRYSRQGRVARAGTRGAQQSRRGSWRYKREEEDREVAAAVRASVAAQQQEEA

SEQ ID NO: 5931 - protein, 90 aa, Synthetic construct
LCEEAAQKRKGKEPGMALPQGRLTFRDVAIEFSLAEWKCLNPSQRALYREVMLENYRNLEAVDISSKRMMKEVLSTGQGNTEVIHTGTLQ

SEQ ID NO: 5932 - protein, 90 aa, Synthetic construct
FNQQSNLARHRRIHTGEKPYKCEECDKVFSRKSTLESHKRIHTGEKPYKCKVCDTAFTWNSQLARHKRIHTGEKTYKCNECGKTFSHKSS

SEQ ID NO: 5933 - protein, 160 aa, Synthetic construct
KDKHDLLQGHQNGSGSQAPSGGHLYGFGAKSNGGGASPFHCGGTGSGSVAAAGEVSKSAPDSGLMGNSMLVKKEEEEEESHRRIKKLKTEKVDPLFTVPAPPPPISSSLTPQILPSYFSPSSSNIAAPVEQLLVRTRSVGVNTCEVGVVTEPECLGPCEP

SEQ ID NO: 5934 - protein, 80 aa, Synthetic construct
PQILPSYFSPSSSNIAAPVEQLLVRTRSVGVNTCEVGVVTEPECLGPCEPGTSVNLEGIVWHETEEGVLVVNVTWRNKTY

SEQ ID NO: 5935 - protein, 120 aa, Synthetic construct
TTAQSSQLKESHSPYYHSYDPYYSPSYMHPGQVGAPAAGNSGSTQGMKIKKESEEDAEKKDKAEQLDSKKVDHNSASLQPQHQSVITQRHPALAQSLYYGQYAYGLYMDQKSLMATSPAY

SEQ ID NO: 5936 - protein, 100 aa, Synthetic construct
MKQTGVDPTSRFKQDPDSRTWHHYVYQPKYLDQQKSEELDREKKLKEDSPRKTPNKESGVPSLPVSLTSIKEEPKEAKHPDSQSMEESKLKNDDRKTPVN

SEQ ID NO: 5937 - protein, 100 aa, Synthetic construct
REKKLKEDSPRKTPNKESGVPSLPVSLTSIKEEPKEAKHPDSQSMEESKLKNDDRKTPVNWKDSRGTRVAVSSPMSQHQSYIQYLHAYPYPQMYDPSHPA

SEQ ID NO: 5938 - protein, 90 aa, Synthetic construct
KNDDRKTPVNWKDSRGTRVAVSSPMSQHQSYIQYLHAYPYPQMYDPSHPAYRAVSPVLMHSYPGAYLSPGFHYPVYGKMSGREETEKVNT

SEQ ID NO: 5939 - protein, 80 aa, Synthetic construct
YIQYLHAYPYPQMYDPSHPAYRAVSPVLMHSYPGAYLSPGFHYPVYGKMSGREETEKVNTSPSVNTKTTTESKALDLLQQ

SEQ ID NO: 5940 - protein, 80 aa, Synthetic construct
QLLVRTRSVGVNTCEVGVVTEPECLGPCEPGTSVNLEGIVWHETEEGVLVVNVTWRNKTYVGTLLDCTKHDWAPPRFCES

SEQ ID NO: 5941 - protein, 80 aa, Synthetic construct
RGRGKRARSAAAAPGSEASFTESRGLQNKNRGGANGKGRRGSLNASGRRTPPNCAAEDIKASPSSTNKRKNKPPMELDLN

SEQ ID NO: 5942 - protein, 140 aa, Synthetic construct
DPGVLQPVPLGGRGGQYDGSAGVDTGAVEPLGSIAIEPGAALNPLGTKPEPEEGENECRLLKKVKSEKMESPVSTPAVLPIHLLVPVVNNDISSPCEQIMVRTRSVGVNTCDVALATEPECLGPCEPGTSVNLEGIVWQE

SEQ ID NO: 5943 - protein, 90 aa, Synthetic construct
IHLLVPVVNNDISSPCEQIMVRTRSVGVNTCDVALATEPECLGPCEPGTSVNLEGIVWQETEDGMLVVNVTWRNKTYVGTLLDCTRHDWA

SEQ ID NO: 5944 - protein, 80 aa, Synthetic construct
QGRSGDGANAGGLVAAIAPKGSEKAAKASRSVAGSKKEKENSSSKSKKERSEGVGTCSEKDPGVLQPVPLGGRGGQYDGS

SEQ ID NO: 5945 - protein, 80 aa, Synthetic construct
VRTRSVGVNTCDVALATEPECLGPCEPGTSVNLEGIVWQETEDGMLVVNVTWRNKTYVGTLLDCTRHDWAPPRFCDSPTS

SEQ ID NO: 5946 - protein, 80 aa, Synthetic construct
CLGPCEPGTSVNLEGIVWQETEDGMLVVNVTWRNKTYVGTLLDCTRHDWAPPRFCDSPTSDLEMRNGRGRGKRMRPNSNT

SEQ ID NO: 5947 - protein, 80 aa, Synthetic construct
LTPLHVVTQNGAEASSVKTNSPAYSDISDAGEDGEGKVDSVKSKDAEQLVKEGAKKTLFPPQPQSKDSPYYQGFESYYSP

SEQ ID NO: 5948 - protein, 80 aa, Synthetic construct
SEAKTGAECGRQAEMDPILWYRQEAEPRMWTYVYPAKYSDIKSEDERWKEERDRKLKEERSRSKDSVPKEDGKESTSSDC

SEQ ID NO: 5949 - protein, 140 aa, Synthetic construct
NQPGGAAAPQADGASAAGRKSTASRERLKRSQKSTKVEGPEPVPAEASLSAEQGTMTEVKVKTELPDDYIQEVIWQGEAKEEKKAVSKDGTSDVPAEICVVIGGVRNQQTLDGKAPEGSPHGGSVRSRYSGTWIFDQALR

SEQ ID NO: 5950 - protein, 100 aa, Synthetic construct
TEATSGEGASQSNNFRYTCDICGKKYKYYSCFQEHRDLHAVDVFSVEGAPENRADPFDQGVVATDEVKEEPPEPFQKIGPKTGNYTCEFCGKQYKYYTPY

SEQ ID NO: 5951 - protein, 90 aa, Synthetic construct
ENRADPFDQGVVATDEVKEEPPEPFQKIGPKTGNYTCEFCGKQYKYYTPYQEHVALHAPISTAPGWEPPDDPDTGSECSHPEVSPSPRFV

SEQ ID NO: 5952 - protein, 80 aa, Synthetic construct
FQTHVRAHRDTEATSGEGASQSNNFRYTCDICGKKYKYYSCFQEHRDLHAVDVFSVEGAPENRADPFDQGVVATDEVKEE

SEQ ID NO: 5953 - protein, 100 aa, Synthetic construct
LQTVWFQGLGRNLLFQEPVTFEDVAVYFTQNEWASLHPTQRALYREVMLENYANVTSLYPTAGGFPLDTERTEKVPGALSSFLPSSSSLELILALLPMSA

SEQ ID NO: 5954 - protein, 80 aa, Synthetic construct
CGEVSVGHASLNRHHRADTGHKPYEYQEYGQKPYKCTYCKKAFSDLPYFRTHEWAHTGGKPYDCEECGKSFISRSSIRRH

SEQ ID NO: 5955 - protein, 80 aa, Synthetic construct
RPYKCAECGKSFKGSSGLRYHLRDHTGERPYQCGECGKAFKRSSLLAIHQRVHTGLRAFTCGQCGLTFKWSSHYQYHLRL

SEQ ID NO: 5956 - protein, 90 aa, Synthetic construct
LGPAAPNSQTFLLVQTAQGLQLIPSSVQPPTPPPPPAPPKLILLPSSSAGAGGGRARQGPRAVGKAGQGAGVVWLPGPGGLGVQGAASAG

SEQ ID NO: 5957 - protein, 80 aa, Synthetic construct
HSGERPYACGECGKAFRNTSCLRRHRHVHTGERPHACGVCGKSFAQTSNLRQHQRVHTGERPFRCPLCPKTFTHSSNLLL

SEQ ID NO: 5958 - protein, 80 aa, Synthetic construct
CADCGKSFIMSSTLIRHQRIHTGEKPYKCSDCGKSFIRSSHLIQHRRTHTGEKPYKCPECGKSFSQSSNLITHVRTHMDE

SEQ ID NO: 5959 - protein, 80 aa, Synthetic construct
NFFVCQVCGFRSRLHTNVNRHVAIEHTKIFPHVCDDCGKGFSSMLEYCKHLNSHLSEGIYLCQYCEYSTGQIEDLKIHLD

SEQ ID NO: 5960 - protein, 90 aa, Synthetic construct
KRKMDVSKITRYTEDCFSDSNCVPNKSKMQEVDFLEQNEELQAVDSQKYALSKVKPESTDEDLESVDAFQHLIYNPDKCGEESSPVHTST

SEQ ID NO: 5961 - protein, 80 aa, Synthetic construct
LSKVKPESTDEDLESVDAFQHLIYNPDKCGEESSPVHTSTFLSNTLKKKCEESDSESPATFSTEEPSFYPCTKCNVNFRE

SEQ ID NO: 5962 - protein, 80 aa, Synthetic construct
LFKSKVEGQEPGENATLSYDQNDGFYFEYYEDTGSNNFLHEIHDPQHLETADASLSKHSSVFHWTDLSLEKKSCPYCPAT

SEQ ID NO: 5963 - protein, 120 aa, Synthetic construct
SETTSEHTCQLCGGWFDTKIGLSNHVRGHLKRLGKTKWDAHKSPICVLNEMMQNEEKYEKILKALNSRRIIPRPFVAQKLASSDDFISQNVIPLEAYRNGLKTEALSVSASEEEGLNFLN

SEQ ID NO: 5964 - protein, 140 aa, Synthetic construct
KIHNQTARKRFVQKCVLPLNEDSPLMYQPQKMDLTMHSALDCKQKKSRSRSGSKKKMLTLPHGADEVYILRCRFCGLVFRGPLSVQEDWIKHLQRHIVNANLPRTGAGMVEVTSLLKKPASITETSFSLLFSLLMAEAAS

SEQ ID NO: 5965 - protein, 80 aa, Synthetic construct
IKSDGTLINQVEVGEDGEDLLVKDDCVNTVTGISSGTDGFRSENDTNWDPQKEFIQFLMTNEETVDKAPPHSKIGLEKKR

SEQ ID NO: 5966 - protein, 80 aa, Synthetic construct
LQAVDSQKYALSKVKPESTDEDLESVDAFQHLIYNPDKCGEESSPVHTSTFLSNTLKKKCEESDSESPATFSTEEPSFYP

SEQ ID NO: 5967 - protein, 80 aa, Synthetic construct
ECGRTFRDRNSLLKHMIIHQERRQKLMEEIRELKELQDEGRSARLQCPQCVFGTNCPKTFVQHAKTHEKDKRYYCCEECN

SEQ ID NO: 5968 - protein, 90 aa, Synthetic construct
KIPGYRWGDIKINIIGEKDDLPIHFCDKCDLPIKIYGRIIPCKHAFCYHCANLYDKVGYKVCPRCRYPVLRIEAHKRGSVFMCSIVQQCK

SEQ ID NO: 5969 - protein, 90 aa, Synthetic construct
YQCSLCPRKYPNLMALRNHVRVHCKAARRSADIGAEGAPSHLKVELPPDPVEAEAAPHTDQDHVCKHEEEATDITPAADKTAAHICSICG

SEQ ID NO: 5970 - protein, 90 aa, Synthetic construct
ADIGAEGAPSHLKVELPPDPVEAEAAPHTDQDHVCKHEEEATDITPAADKTAAHICSICGLLFEDAESLERHGLTHGAGEKENSRTETTM

SEQ ID NO: 5971 - protein, 90 aa, Synthetic construct
AAYRNHLRNHPRCKGSEPQVGPIPEAAGSSELQVGPIPEGGSNKPQHMAEEGPGQAEVEKLQEELKVEPLEEVARVKEEVWEETTVKGEE

SEQ ID NO: 5972 - protein, 120 aa, Synthetic construct
ELQVGPIPEGGSNKPQHMAEEGPGQAEVEKLQEELKVEPLEEVARVKEEVWEETTVKGEEIEPRLETAEKGCQTEASSERPFSCEVCGRSYKHAGSLINHRQSHQTGHFGCQACSKGFSN

SEQ ID NO: 5973 - protein, 80 aa, Synthetic construct
QELDLSTKVYKRESGSPYSVLVDTKMSKPHLHETEEQPYFRETRAVSDVHAVKEDRENSDDTEEEEEEVSYKREQIIVEV

SEQ ID NO: 5974 - protein, 80 aa, Synthetic construct
AVAGIETKKEKEDLCLLKKEEKEEPVAPELATTVPESAEPEAEADGEELDGSDMSAIIYEIPKEPEKRRRSKRSRVMDAD

SEQ ID NO: 5975 - protein, 80 aa, Synthetic construct
VSTSKSRKESTEPKTCIESMEKKTDSLVQNGNERSDDTVSNISLIDQKMPDIEPNSENNCSSSDIVNGHSEIEQTPLVSS

SEQ ID NO: 5976 - protein, 110 aa, Synthetic construct
GLTGDGETREENKLLIPKQKISEEVHSYKVRVGRLKHDITQVPETREVYKSEDRLERLQEILRKFLYLEREFRQITISKETFTSEKNNECHEPEKSFSLDSTIDADQRVL

SEQ ID NO: 5977 - protein, 80 aa, Synthetic construct
GPLQFRDVAIEFSLEEWHCLDMAQRNLYRDVMLENYRNLVFLGIVVSKPDLITHLEQGKKPSTMQRHEMVANPSVLCSHF

SEQ ID NO: 5978 - protein, 80 aa, Synthetic construct
IYKCPMCREFFSERADLFMHQKIHTAEKPHKCDKCDKGFFHISELHIHWRDHTGEKVYKCDDCGKDFSTTTKLNRHKKIH

SEQ ID NO: 5979 - protein, 80 aa, Synthetic construct
QSSSLCIHQRVHTGEKPYRCCGCGKAFSQSSSLCIHQRVHTGEKPFKCDECGKAFSQSTSLCIHQRVHTKERNHLKISVI

SEQ ID NO: 5980 - protein, 100 aa, Synthetic construct
KCVNTDLPPKGKNNMGEAFYTVKLERLESCDTVGLSFQEVQKNTYDFECQWKDDEGNYKTVLMLQKENLPGRRAQRDRRAAGNRHIENQLGVSFQSHLPE

SEQ ID NO: 5981 - protein, 80 aa, Synthetic construct
LGDPPAGLLGLPPESGGVMATQWQVVGMTVEHVECQDAGVREAPGPLEGAGEAGGEEADEKPPQFVCRECKETFSTMTLL

SEQ ID NO: 5982 - protein, 80 aa, Synthetic construct
QRIHTGEKPFACPECGRRFSDRSDLTKHRRTHTGEKPYRCELCGKRFTCVSNLNVHRRNHAGHKPHKCPECSKAFSVASK

SEQ ID NO: 5983 - protein, 80 aa, Synthetic construct
SYSIQDLLPEQDMKDLCQKVTLTRHRSWGLDNLHLVKDWRTVNEGKGQKEYCNRLTQCSSTKSKIFQCIECGRNFSWRSI

SEQ ID NO: 5984 - protein, 80 aa, Synthetic construct
TKSKIFQCIECGRNFSWRSILTEHKRIHTGEKPYKCEECGKVFNRCSNLTKHKRIHTGEKPYKCDECGKVFNWWSQLTNH

SEQ ID NO: 5985 - protein, 80 aa, Synthetic construct
TLTRHRSWGLDNLHLVKDWRTVNEGKGQKEYCNRLTQCSSTKSKIFQCIECGRNFSWRSILTEHKRIHTGEKPYKCEECG

SEQ ID NO: 5986 - protein, 80 aa, Synthetic construct
GGSLSPSLDFQLFRGDQVFSACRPLPDMVDAHGPSCASWLCPLPLAPGRSALLACLQDLDLNLCTPQPAPLGTDLQGLQE

SEQ ID NO: 5987 - protein, 100 aa, Synthetic construct
GEGAPCPAFSSHNSSSPPPLQNRKSPSPLAFCPCPPVNSISKELPFLLHAFYPGYPLLLPPPHLFTYGALPSDQCPHLLMLPQDPSYPTMAMPSLLMMVN

SEQ ID NO: 5988 - protein, 90 aa, Synthetic construct
FYPGYPLLLPPPHLFTYGALPSDQCPHLLMLPQDPSYPTMAMPSLLMMVNELGHPSARWETLLPYPGAFQASGQALPSQARNPGAGAAPT

SEQ ID NO: 5989 - protein, 100 aa, Synthetic construct
PVSSPPLGALKQESCSPHHPQVLAQQGSGSSPKATDIPASASPPPVAGVPFFKQSPGHQSPLASPKVPVCQPLKEEDDDEGPVDKSSPGSPQSPSSGAEA

SEQ ID NO: 5990 - protein, 90 aa, Synthetic construct
FFKQSPGHQSPLASPKVPVCQPLKEEDDDEGPVDKSSPGSPQSPSSGAEAADEDSNDSPASSSSRPLKVRIKTIKTSCGNITRTVTQVPS

SEQ ID NO: 5991 - protein, 80 aa, Synthetic construct
NKILNSKNLLPAYRPNLSPPAEAGLALPPTGYRCLECGDAFSLEKSLARHYDRRSMRIEVTCNHCARRLVFFNKCSLLLH

SEQ ID NO: 5992 - protein, 80 aa, Synthetic construct
VGYRCPSCSVVFGGVNSIKSHIQTSHCEVFHKCPICPMAFKSGPSAHAHLYSQHPSFQTQQAKLIYKCAMCDTVFTHKPL

SEQ ID NO: 5993 - protein, 140 aa, Synthetic construct
CDTVFTHKPLLSSHFDQHLLPQRVSVFKCPSCPLLFAQKRTMLEHLKNTHQSGRLEETAGKGAGGALLTPKTEPEELAVSQGGAAPATEESSSSSEEEEVPSSPEPPRPAKRPRRELGSKGLKGGGGGPGGWTCGLCHSW

SEQ ID NO: 5994 - protein, 80 aa, Synthetic construct
ESAGENRLEEEEEQPAPPVLPWRRHLSLGSRHRGDKPAHRRFHRLHHPMAVDLGELDSLVASIMDAPTICPDCGESFSPG

SEQ ID NO: 5995 - protein, 100 aa, Synthetic construct
TPESSGSGSGGGGKRPAVPAAVSLLPPADPLRQANRLPIRVLKMLSAHTGHLLHPEYLQPLSSTPVSPIELDAKKSPLALLAQTCSQIGKPDPPPSSKLN

SEQ ID NO: 5996 - protein, 80 aa, Synthetic construct
PRKRKNSMKVMFKCLWKNCGKVLSTAAGIQKHIRTIHLGRVGDSDYSDGEEDFYYTEIKLNTDSVADGLSSLAPVSPSQS

SEQ ID NO: 5997 - protein, 80 aa, Synthetic construct
KVVSSNIDVPPARKSSEELDMDKVTAAMVLTSLSTSPLVRSPPVRPNESLSGSWKEGGCVPSSTSSSGYWSWSAPSDQSN

SEQ ID NO: 5998 - protein, 80 aa, Synthetic construct
GEDCTHSSTIIQCLLTHSGKKPYVSKQCGKSLSNLLSPKPHKQIHTKGKSYQCNLCEKAYTNCFHLRRPKMTHTGERPYT

SEQ ID NO: 5999 - protein, 80 aa, Synthetic construct
HLTTHKRIHTGEKPYKCEECGKAFSVFSTLTKHKIIHTEEKPYKCEECGKAFNRSSHLTNHKVIHTGEKPYKCEECGKAF

SEQ ID NO: 6000 - protein, 90 aa, Synthetic construct
AAQLLTDEALESVTFRDVTVDFTQEEWQQLEPAQKDLYRDVMLENYRNLVSLDWETRPEMKELDPKNDISEDKLSVVGEATGGPTRNGAR

SEQ ID NO: 6001 - protein, 80 aa, Synthetic construct
YACGDCGKAFSQNMHLIVHQRTHTGEKPYVCPECGRAFSQNMHLTEHQRTHTGEKPYACKECGKAFNKSSSLTLHQRNHT

SEQ ID NO: 6002 - protein, 80 aa, Synthetic construct
PVRLVPKVKFEKVEEEEQEVYEVSVPGDDKDAGPAEAPAEAASGGCDALVQSSAVKMIDLSAFSRKPRTLRHLPRTPRPE

SEQ ID NO: 6003 - protein, 80 aa, Synthetic construct
LLGHMHLHAGSKPFKCPYCSSKFNLKGNLSRHMKVKHGVMDIGLDSQDPMMELTGTDPSELDGQQEMEDFEENAYSYASV

SEQ ID NO: 6004 - protein, 80 aa, Synthetic construct
DLVTGPNGHLEHVVQDCVSGVDSPTMVSEEVLVTNSDTETVIQAAGGVPGSTVTIKTEDDDDDDVKSTSEDYLMISLDDV

SEQ ID NO: 6005 - protein, 110 aa, Synthetic construct
VDSPTMVSEEVLVTNSDTETVIQAAGGVPGSTVTIKTEDDDDDDVKSTSEDYLMISLDDVGEKLEHMGNTPLKIGSDGSQEDAKEDGFGSEVIKVYIFKAEAEDDVEIGG

SEQ ID NO: 6006 - protein, 80 aa, Synthetic construct
GEKLEHMGNTPLKIGSDGSQEDAKEDGFGSEVIKVYIFKAEAEDDVEIGGTEIVTESEYTSGHSVAGVLDQSRMQREKMV

SEQ ID NO: 6007 - protein, 80 aa, Synthetic construct
EVIKVYIFKAEAEDDVEIGGTEIVTESEYTSGHSVAGVLDQSRMQREKMVYMAVKDSSQEEDDIRDERRVSRRYEDCQAS

SEQ ID NO: 6008 - protein, 80 aa, Synthetic construct
EECGKSFNRSTTLTTHKRIHTGEKPYTCEECGKAFNWSSTLNVHKRIHSGKNPYKCEDCGKAFKVFANLHNHKKIHTGEK

SEQ ID NO: 6009 - protein, 80 aa, Synthetic construct
QCNARVKVFSKFANSNKDKTRHTGEKHFKCNECGKSFQKFSDLTQHKGIHAGEKPYTCEERGKDFGWYTDLNQHKKIHTG

SEQ ID NO: 6010 - protein, 80 aa, Synthetic construct
NECGKSFQKFSDLTQHKGIHAGEKPYTCEERGKDFGWYTDLNQHKKIHTGEKPYKCEECGKAFNRSTNLTAHKRIHNREK

SEQ ID NO: 6011 - protein, 80 aa, Synthetic construct
KKIHTGDKPYKCKECGKAFMHSSHLNKHEKIHTGEKPYKCKECGKVISSSSSFAKHKRIHTGEKPFKCLECGKAFNISTT

SEQ ID NO: 6012 - protein, 80 aa, Synthetic construct
FKQSSHLNRHEKIHTGKKPYKCKECGKVITSSSSFAKHKRIHTGEKPFKCLECGKAFTSSTTLTKHRRIHTGEKPYTCEE

SEQ ID NO: 6013 - protein, 80 aa, Synthetic construct
LALHNPTAKAVSFHTKSAFHTPGYPWKAGSPFLPPEFPHKISSTKGLGAISPYMHPTIPEYPPHFYTEHGLATIYSPYLL

SEQ ID NO: 6014 - protein, 90 aa, Synthetic construct
TPGYPWKAGSPFLPPEFPHKISSTKGLGAISPYMHPTIPEYPPHFYTEHGLATIYSPYLLAGSSPECDAPLLSVYGTQDPRHFLPHPGPI

SEQ ID NO: 6015 - protein, 130 aa, Synthetic construct
SPYMHPTIPEYPPHFYTEHGLATIYSPYLLAGSSPECDAPLLSVYGTQDPRHFLPHPGPIPKHLAPSPATYDHYRFFQQYPSNLPIPYGFYRPESAFSSYGLRLPPVTGLTRDQSSHLLEEATLVYPASS

SEQ ID NO: 6016 - protein, 90 aa, Synthetic construct
GSASLVSEAAPSSPDDSSGMGPLNLSKKSEINLAATHEPTYQGSPQAETASFSELQDLPLNLSVKDPCNTQAPRPAFPGRPRAAEPAAAV

SEQ ID NO: 6017 - protein, 100 aa, Synthetic construct
INLAATHEPTYQGSPQAETASFSELQDLPLNLSVKDPCNTQAPRPAFPGRPRAAEPAAAVPQKTGTEGSEDGPSHPETKPGSLDGDGAPPTGPGEEAPDA

SEQ ID NO: 6018 - protein, 140 aa, Synthetic construct
QAPRPAFPGRPRAAEPAAAVPQKTGTEGSEDGPSHPETKPGSLDGDGAPPTGPGEEAPDACAVDSSEEQKQTAAVALCQLAAYSPRNIRVGDGDAAAPEPACRQDTPTLSSMESQEAQCDLRPKGQKRTSLRDAGKSQQG

SEQ ID NO: 6019 - protein, 80 aa, Synthetic construct
CKPYTCSTCGKTYRQTSTLAMHKRSAHGELEATEESEQALYEQQQLEAASAAEESPPPKRPRIAYLSEVKEERDDIPAQV

SEQ ID NO: 6020 - protein, 120 aa, Synthetic construct
MHKRSAHGELEATEESEQALYEQQQLEAASAAEESPPPKRPRIAYLSEVKEERDDIPAQVAMVTEEDGAPQVALITQDGAQQVSLSPEDLQALGSAISMVTQHGSTTLTIPSPDADLATS

SEQ ID NO: 6021 - protein, 100 aa, Synthetic construct
HTGEKPYKCEECDKAFHFKSILERHRIIHTEEKPYKCNECGKTFRQKSILTRHHRLHTGEKPYKCNECGKTFSHKSSLTCHHRLHTGEKPYKCNECGKTF

SEQ ID NO: 6022 - protein, 90 aa, Synthetic construct
NVNYNASQQCQAPGVQKYEVSESDQMSGVKAESQDFIPGSTGQPCLPNVLLESEQSNPFCSYSEHQEKNDVFLYRCSVCAKSFRSPSKLE

SEQ ID NO: 6023 - protein, 80 aa, Synthetic construct
LVKGEEDEGEEKYEVVKLKIPMDNKEVPGEAPAPSADPARPHACPDCGRAFARRSTLAKHARTHTGERPFGCTECGRRFS

SEQ ID NO: 6024 - protein, 80 aa, Synthetic construct
YAQHLRVHTGEKPYACPDCGRAFGGSSCLARHRRTHTGERPYACADCGTRFAQSSALAKHRRVHTGEKPHRCAVCGRRFG

SEQ ID NO: 6025 - protein, 90 aa, Synthetic construct
ESGLAGNGTGAGLVMKVKQEKPERLLQTLAPQAMLVEKDKENIFQQHRGLPPRQTMGRPRALGGQEESGSPRWAPPTEQDAGLAGRAPGS

SEQ ID NO: 6026 - protein, 80 aa, Synthetic construct
ALGGQEESGSPRWAPPTEQDAGLAGRAPGSASGPLSPSLSSGEGHFVCLDCGKRFSWWSSLKIHQRTHTGEKPYLCGKCG

SEQ ID NO: 6027 - protein, 130 aa, Synthetic construct
SSPTPESRSQEPLDLVLVPDDCRPGTPPSDLIEIQVVKVTDTTLVPEPPEPGSFHCALCPAAFRLVSELLFHEHGHLAGAEGGGQGGDPSRCHVCGHSCPGPASLRAHYSLHTGERPYRCALCPRAFKAL

SEQ ID NO: 6028 - protein, 80 aa, Synthetic construct
RIHTGERPFRCTLCDRTFNNSSNFRKHQRTHFHGPGPGLGDSGGQLGSSAAEGSGSGCGVGDPAEEGRGETAKVKVEADQ

SEQ ID NO: 6029 - protein, 100 aa, Synthetic construct
YILEPGDPPLLQQPLQTSKSGIQQIIECFRSGTKQLKHILLKDVDTIFECKLCRSLFRGLPNLITHKKFYCPPSLQMDDNLPDVNDKQSQAINDLLEAIY

SEQ ID NO: 6030 - protein, 120 aa, Synthetic construct
LLCKRKYSSQIMLKRHMQIVHKITLSGTNSKREKGPNNTANSSEIKVKVEPADSVESSPPSITHSPQNELKGTNHSNEKKNTPAAQKNKVKQDSESPKSTSPSAAGGQQKTRKPKLSAGF

SEQ ID NO: 6031 - protein, 80 aa, Synthetic construct
NPIEVTESSSTPEQTEVQIQETSTEQSKTVPVTDTEVETVEPPPVEIVTDEVAPTSDEQPQESQADLETSDNSDFGHQLI

SEQ ID NO: 6032 - protein, 100 aa, Synthetic construct
KKPIDFVLNKVAKRGPSRDEAKHSDSKHDGTSNSPSKKYEVADVGIEVKVTKNFSLHRCNKCGKAFAKKTYLEHHKKTHKANASNSPEGNKTKGRSTRSK

SEQ ID NO: 6033 - protein, 80 aa, Synthetic construct
IGFSFAFPKKASVKLESSAAAFSEYSDDASVGKGFSRKSRFVPSACHLQQSSPTDVLLSSEEKTNSFHPPEAMCRDKETV

SEQ ID NO: 6034 - protein, 80 aa, Synthetic construct
LCQHHHMEKTKESETRCKMEAENSYTENAGKYLLEPISEKQYLAAEQLLDSHQLLDKRPKSESISLSDNEEMCKTWNTEY

SEQ ID NO: 6035 - protein, 80 aa, Synthetic construct
QFLSQIPALTRTSLPQLSVGPVGPRLCPGNQPTFVAPPQMPIIPASVLHPSHLAFPSLPHALFPSLLSPHPTVIPLQPLF

SEQ ID NO: 6036 - protein, 80 aa, Synthetic construct
EMCKTWNTEYNTYDTISSKNHCKKNTILLNGQSNATMIHSGKHNLTYSRTYCCWKTKMSSCSQDHRSLVLQNDMKHMSQN

SEQ ID NO: 6037 - protein, 80 aa, Synthetic construct
CSQDHRSLVLQNDMKHMSQNQAVKRGYNSVMNESERFYRKRRQHSHSYSSDESLNRQNHLPEEFLRPPSTSVAPCKPKKK

SEQ ID NO: 6038 - protein, 130 aa, Synthetic construct
TFLQHFAVSASLSSHSSHLPIAHLHPLSQAHFSPISFSTLTPTIIPAHPTFLAGHPLHLVAATPFHPSHITLQPLPPTAFIPTLFGPHLNPATTSIIHLNPLIQPVFQGQDFCHHSCSSQMQQLNEVKEA

SEQ ID NO: 6039 - protein, 80 aa, Synthetic construct
SDVDFTPTSREKETRNTLKNTLENCVNHPCQANASFSPPNIYNHSDARISECLDEFSSLEPSEQKSTVHLNPNSRIENRE

SEQ ID NO: 6040 - protein, 80 aa, Synthetic construct
TSEEDGGVVKVEKELENTEQPVGGNEVVEHEVTGNLNSDPLLELCQCPLCQLDCGSREQLIAHVYQHTAAVVSAKSYMCP

SEQ ID NO: 6041 - protein, 120 aa, Synthetic construct
GARFTSHATFNSEKLPEVLNMESLPTVHNEGPSSAEGKDIAFSPPVYPAGILLVCNNCAAYRKLLEAQTPSVRKWALRRQNEPLEVRLQRLERERTAKKSRRDNETPEEREVRRMRDREA

SEQ ID NO: 6042 - protein, 90 aa, Synthetic construct
HQCPLCPFRCARKDNLKSHMKVHQHQDRGETFQCQLCPFTSSRHFSLKLHMRCHQHFLRTEAKVKEEIPDPDVKGSPHLSDSACLGQQRE

SEQ ID NO: 6043 - protein, 290 aa, Synthetic construct
TFQCQLCPFTSSRHFSLKLHMRCHQHFLRTEAKVKEEIPDPDVKGSPHLSDSACLGQQREGGGTELVGTMMTSNTPERTSQGGAGVSPLLVKEEPKEDNGLPTSFTLNAADRPANHTKLKDPSEYVANSASALFSQDISVKMASDFLMKLSAANQKEPMNLNFKVKEEPKEGESLSTTLPRSSYVFSPESEVSAPGVSEDALKPQEGKGSVLRRDVSVKAASELLMKLSAESYKETQMVKIKEEPMEVDIQDSHVSISPSRNVGYSTLIGREKTEPLQKMPEGRVPPERN

SEQ ID NO: 6044 - protein, 90 aa, Synthetic construct
ESYKETQMVKIKEEPMEVDIQDSHVSISPSRNVGYSTLIGREKTEPLQKMPEGRVPPERNLFSQDISVKMASELLFQLSEKVSKEHNHTK

SEQ ID NO: 6045 - protein, 80 aa, Synthetic construct
SALSDSANSKDDSDGSQKNKGGNNLLVISVMPGSQPSLNSEEKPEKGFECVFCNFVCKTKNMFERHLQIHLITRMFECDV

SEQ ID NO: 6046 - protein, 80 aa, Synthetic construct
PRRKQEQPKRLPSHVSRQEEAEGELSEGEHWYGNSSETPSEASYGEVQENYKLSLEDRIQEQSTSPDTSLGSTTPSSHTL

SEQ ID NO: 6047 - protein, 90 aa, Synthetic construct
LVSPPQRISSTVKTHISHTYECNFVDSLFTQKEKANIGTEHYKCSERGKAFHQGLHFTIHQIIHTKETQFKCDICGKIFNKKSNLASHQR

SEQ ID NO: 6048 - protein, 80 aa, Synthetic construct
KRKAPDADDQDVKRAKATLVPQVQPSTSAWTTNFDKIGKEFIRATPSKPSGLSLLPDYEDEEEEEEEEEGDGERKRGDAS

SEQ ID NO: 6049 - protein, 80 aa, Synthetic construct
LGSPGKVRNAGKYLCPHCGRDCLKPSVLEKHIRSHTGERPFPCATCGIAFKTQSNLYKHRRTQTHLNNSRLSSESEGAGG

SEQ ID NO: 6050 - protein, 80 aa, Synthetic construct
SAEQPHAPCSPLHSLSEHSAESEGEGGPGPGPGVAGAEPGAREAGLELEKKRLEERIAQLISHNQAVVDDAQLDNVRPRK

SEQ ID NO: 6051 - protein, 80 aa, Synthetic construct
VHQRVHTGEKPYKCNECGKAFNWGSLLTVHQRIHTGEKPYKCNVCGKVFNYGGYLSVHMRCHTGEKPLHCNKCGMVFTYY

SEQ ID NO: 6052 - protein, 100 aa, Synthetic construct
LELTPVQPELQLELVPAAGGGGAAVPGAPAAVVVAPPGYVVVQELMVLPAVAAPAVVAIPGPAGSAALTPARQRRRRRARDRPTICGECGKGFSRSTDLV

SEQ ID NO: 6053 - protein, 80 aa, Synthetic construct
ARQRRRRRARDRPTICGECGKGFSRSTDLVRHQATHTGERPHRCGECGKGFSQHSNLVTHQRIHTGEKPYACSYCAKRFS

SEQ ID NO: 6054 - protein, 80 aa, Synthetic construct
CGICGRGFGRRETLKRHERIHTGEKPHQCPVCGKRFRESFHLSKHHVVHTRERPYKCELCGKVFGYPQSLTRHRQVHRLQ

SEQ ID NO: 6055 - protein, 80 aa, Synthetic construct
SLKRHVKTHSADLLRLPCGICGKAFRDASYLLKHQAAHAGAGAGGPRPVYPCDLCGKSYSAPQSLLRHKAAHAPPAAAAE

SEQ ID NO: 6056 - protein, 150 aa, Synthetic construct
SGGGLHSVAEGVRLSPEPGREGVRDLAGAEEFGGGEEGTGLTGIKEIGDGEEGSGQRPEEIPMDLTVVKQEIIDWPGTEGRLAGQWVEQEVEDRPEVKDENAGVLEVKQETDSSLVVKEAKVGEPEVKEEKVKEEVMDWSEVKEEKDNLE

SEQ ID NO: 6057 - protein, 90 aa, Synthetic construct
VEDRPEVKDENAGVLEVKQETDSSLVVKEAKVGEPEVKEEKVKEEVMDWSEVKEEKDNLEIKQEEKFVGQCIKEELMHGECVKEEKDFLK

SEQ ID NO: 6058 - protein, 120 aa, Synthetic construct
EVKEEKDNLEIKQEEKFVGQCIKEELMHGECVKEEKDFLKKEIVDDTKVKEEPPINHPVGCKRKLAMSRCETCGTEEAKYRCPRCMRYSCSLPCVKKHKAELTCNGVRDKTAYISIQQFT

SEQ ID NO: 6059 - protein, 80 aa, Synthetic construct
KEETPKIEKEDGLTSQPGNEQWKSSDTLPVYDTLMFCASRNTDRIHIYTKDGKQMSCNFIPLDIKLDLWEDLPASFQLKQ

SEQ ID NO: 6060 - protein, 80 aa, Synthetic construct
QTKQACKANSWDSRFCSLKCQEEFWIRSNNSYLRAKVFETEHGVCQLCNVNAQELFLRLRDAPKSQRKNLLYATWTSKLP

SEQ ID NO: 6061 - protein, 80 aa, Synthetic construct
PLEQLNEMIRNPGEGHFWQVDHIKPVYGGGGQCSLDNLQTLCTVCHKERTARQAKERSQVRRQSLASKHGSDITRFLVKK

SEQ ID NO: 6062 - protein, 80 aa, Synthetic construct
RKAQVTGSTLNGRKEKIQAEEGDKEKWDFLQFAEAWTPNDSSEELRKEALFTHFEKEKQHDIRSFFVPQPKKRQLMTSCD

SEQ ID NO: 6063 - protein, 80 aa, Synthetic construct
LGESVPAAVEQEQLGEVKLEEEEAVSPEDPRRPESRLRPEVAHQLFRCFQYQEDMGPRASLSRLRELCGHWLRPALHTKK

SEQ ID NO: 6064 - protein, 110 aa, Synthetic construct
ASTWAIQAHMDQDEPLEVKIEEEKYTTRQDWDLRKNNTHSREVFRQYFRQFCYQETSGPREALSRLRELCHQWLRPETHTKEQILELLVLEQFLTILPEELQAWVQEQHP

SEQ ID NO: 6065 - protein, 90 aa, Synthetic construct
LRKEGEPSMSLQSMKAQPKYESPELESQQEQVLDVETGNEYGNLKQEVSEEMEPHGKTSSKFENDMSKSARCGETREPEEITEEPSACSR

SEQ ID NO: 6066 - protein, 90 aa, Synthetic construct
YWGQDSSSQKCSPHRRELYRQHFRKLCYQDAPGPREALTQLWELCRQWLRPECHTKEQILDLLVLEQFLSILPKDLQAWVRAHHPETGEE

SEQ ID NO: 6067 - protein, 80 aa, Synthetic construct
PADLEFSRLRFREFVYQEAAGPHQTLARLHELCRQWLMPEARSKEQMLELLVLEQFLGILPDKVRPWVVAQYPESCKKAA

SEQ ID NO: 6068 - protein, 80 aa, Synthetic construct
KPYECLTCGESFSWSSNLLKHQRIHTGEKPYKCSECGKCFSQRSQLVVHQRTHTGEKPYKCLMCGKSFSRGSILVMHQRA

SEQ ID NO: 6069 - protein, 80 aa, Synthetic construct
VHTKEQMLTMLPKEIQAWLQEHRPESSEEAAALVEDLTQTLQDSDFEIQSENGENCNQDMFENESRKIFSEMPEGESAQH

SEQ ID NO: 6070 - protein, 80 aa, Synthetic construct; identical to SEQ ID NO: 764

SEQ ID NO: 6071 - protein, 80 aa, Synthetic construct
AVLTPRVPTLPKMGSVGDWEVTAESQEALGPGKHAEKELCKDPPGDDCGNSVCLGVPVSKPSNTSEKEQGPEFWGLSLIN

SEQ ID NO: 6072 - protein, 80 aa, Synthetic construct
EEKGKYLPSLEMFRQRFRQFGYHDTPGPREALSQLRVLCCEWLRPEIHTKEQILELLVLEQFLTILPQELQAWVQEHCPE

SEQ ID NO: 6073 - protein, 90 aa, Synthetic construct
AIPKHSLSPVPWEEDSFLQVKVEEEEEASLSQGGESSHDHIAHSEAARLRFRHFRYEEASGPHEALAHLRALCCQWLQPEAHSKEQILEL

SEQ ID NO: 6074 - protein, 100 aa, Synthetic construct
AITLTLQTAEMQEGLLAVKVKEEEEEHSCGPESGLSRNNPHTREIFRRRFRQFCYQESPGPREALQRLQELCHQWLRPEMHTKEQILELLVLEQFLTILP

SEQ ID NO: 6075 - protein, 80 aa, Synthetic construct
TGEKPYECDECGRAFSQRSGLFQHQRLHTGEKRYQCSVCGKAFSQNAGLFHHLRIHTGEKPYQCNQCNKSFSRRSVLIKH

SEQ ID NO: 6076 - protein, 110 aa, Synthetic construct
LKEHPEMAEAPQQQLGIPVVKLEKELPWGRGREDPSPETFRLRFRQFRYQEAAGPQEALRELQELCRRWLRPELHTKEQILELLVLEQFLTILPREFYAWIREHGPESGK

SEQ ID NO: 6077 - protein, 80 aa, Synthetic construct
ERALEAKAVPCHRQGEQEETALCRGAWEPGIQLGPVEVKPEWGMPPGEGVQGPDPGTEEQLSQDPGDETRAFQEQALPVL

SEQ ID NO: 6078 - protein, 80 aa, Synthetic construct
SKGLGQEPLCKQFRQLRYEETTGPREALSRLRELCQQWLQPETHTKEQILELLVLEQFLIILPKELQARVQEHHPESRED

SEQ ID NO: 6079 - protein, 120 aa, Synthetic construct
SGEATVLAYHAPEEQEGLLVVKVEEENYVLDQDFGLQENPWSQEVFRQKFRQFSYSDSTGPREALSRLRELCCQWLRPEVHSKEQILELLMLEQFLAILPEELQAWLREHRPENGEEAVT

SEQ ID NO: 6080 - protein, 80 aa, Synthetic construct
IVKVEEDPIWDQETHLRGNNFSGQEASRQLFRQFCYQETPGPREALSRLRELCHQWLRPEIHTKEQILELLVLEQFLTIL

SEQ ID NO: 6081 - protein, 100 aa, Synthetic construct
SEPGNQAPDHEHGHSEVLLEDVEHLKVKQEPTDIQLQPMVTQLRYESFCLHQFQEQDGESIPENQELASKQEILKEMEHLGDSKLQRDVSLDSKYRETCK

SEQ ID NO: 6082 - protein, 90 aa, Synthetic construct
FMIGGHCNDKASVKEKWKSSGKNLERFIEDLTDDSINPPALVHVHMQGQEALFSEDMPLRDVIVHLTKQVNAQTTREANMGTPSQTSQDT

SEQ ID NO: 6083 - protein, 90 aa, Synthetic construct
AGCISQPEQSSPESALTHQSNEGNSTCEVHQKGSHGVQKSYKCEECPKVFKYLCHLLAHQRRHRNERPFVCPECQKGFFQISDLRVHQII

SEQ ID NO: 6084 - protein, 80 aa, Synthetic construct
LQRLYRIFHSWLQPEKHSKDEIISLLVLEQFMIGGHCNDKASVKEKWKSSGKNLERFIEDLTDDSINPPALVHVHMQGQE

SEQ ID NO: 6085 - protein, 100 aa, Synthetic construct
LPRSMASSETQLGNHDVDPEISHVNFRMFSCPKESDPIQALRKLTELCHLWLRPDLHTKEQILDMLVMEQFMISMPQELQVLVMMNGVQSCKDLEDLLRN

SEQ ID NO: 6086 - protein, 130 aa, Synthetic construct
WLRPDLHTKEQILDMLVMEQFMISMPQELQVLVMMNGVQSCKDLEDLLRNNRRPKKWSVVTFHGKEYIVQDSDIEMAEAPSSVRDDLKDVSSQRASSVNQMRPGEGQAHRELQILPRVPALSRRQGEDFL

SEQ ID NO: 6087 - protein, 100 aa, Synthetic construct
TPRSVASPETQLGNHDRNPETWHMNFRMFSCPEESDPIQALRKLTELCHLWLRPDLHTKEQILDMLVMEQFMISMPQELQVLVKVNGVQSCKDLEDLLRN

SEQ ID NO: 6088 - protein, 80 aa, Synthetic construct
WLRPDLHTKEQILDMLVMEQFMISMPQELQVLVKVNGVQSCKDLEDLLRNNRRPKKWSIVNLLGKEYLMLNSDVEMAEAP

SEQ ID NO: 6089 - protein, 100 aa, Synthetic construct
PPQSMPSPATQLGNHDSDPETCHVNFRMFSCPKESDPIQALRKLTELCHLWLRPDLHTKEQILDMLVMEQFMISMPQELQVLVMMNGVQSCKDLEDLLRN

SEQ ID NO: 6090 - protein, 120 aa, Synthetic construct
QILDMLVMEQFMISMPQELQVLVMMNGVQSCKDLEDLLRNNRRPKKWSVVSFLGKEYLMQESDVEMAEAPASVRDDPRHVSSQRTSSVNQMCPEEGQASQELQTLPRVPALFRRQEEDFL

SEQ ID NO: 6091 - protein, 100 aa, Synthetic construct
LLTMKVEAKSHLQWQESRLKRSNPLAREIFRRHFRQLCYQETPGPREALTRLQELCYQWLRPHVSTKEQILDLLVLEQFLSILPKELQGWVREHCPESGE

SEQ ID NO: 6092 - protein, 80 aa, Synthetic construct
SGGYKQQQLRNMEIEVNRGRMPPSEFHRRKADMMESLALGFDDGKTKTSGIIEALHRYYQNAATDVRRVWLSSVVDHFHS

SEQ ID NO: 6093 - protein, 140 aa, Synthetic construct
QQGSFSVDDVQTVSAGALGCLVALPMKNLSDDPLALTSNSNLAAHITTPTSSSTPRENASVPELLAPIKVEPDSPSRPGAVGQQEGSHGLPQSTLPSPAEQHGAQDTELSAGTGNFYLESGGSARTDYRAIQLAKEKKQR

SEQ ID NO: 6094 - protein, 80 aa, Synthetic construct
NSWLCGSLVVPSGGRPGPAPAAGVQCGAQGVQVQLVQDDPSGEGVLPSARGPATFLPFLTVDLPVYVLQEVLPSSGGPAG

SEQ ID NO: 6095 - protein, 80 aa, Synthetic construct; identical to SEQ ID NO: 638

SEQ ID NO: 6096 - protein, 80 aa, Synthetic construct; identical to SEQ ID NO: 1728

SEQ ID NO: 6097 - protein, 80 aa, Synthetic construct
AQNCRKRKLDIILNLEDDVCNLQAKKETLKREQAQCNKAINIMKQKLHDLYHDIFSRLRDDQGRPVNPNHYALQCTHDGS

SEQ ID NO: 6098 - protein, 80 aa, Synthetic construct
NGYGSPYLYMGGPVSQPPRAPLQRTPKCARCRNHGVLSWLKGHKRYCRFKDCTCEKCILIIERQRVMAAQVALRRQQANE

SEQ ID NO: 6099 - protein, 80 aa, Synthetic construct
GGPVSQPPRAPLQRTPKCARCRNHGVLSWLKGHKRYCRFKDCTCEKCILIIERQRVMAAQVALRRQQANESLESLIPDSL

SEQ ID NO: 6100 - protein, 80 aa, Synthetic construct; identical to SEQ ID NO: 5155

SEQ ID NO: 6101 - protein, 80 aa, Synthetic construct
QLLSDLFAVKPAPEARGLKGPGTPAFPHYLPPDPRPFAYPPHTFGPDRKALGPGIYSSPGSYDPRAVAVKEEPRGPEGSR

SEQ ID NO: 6102 - protein, 80 aa, Synthetic construct
PGTPAFPHYLPPDPRPFAYPPHTFGPDRKALGPGIYSSPGSYDPRAVAVKEEPRGPEGSRAASRGSYNPLQYQVAHCGQT

SEQ ID NO: 6103 - protein, 80 aa, Synthetic construct
PHTFGPDRKALGPGIYSSPGSYDPRAVAVKEEPRGPEGSRAASRGSYNPLQYQVAHCGQTAMHLPPTLAAPGQPLRVLKA

SEQ ID NO: 6104 - protein, 80 aa, Synthetic construct
LGPGIYSSPGSYDPRAVAVKEEPRGPEGSRAASRGSYNPLQYQVAHCGQTAMHLPPTLAAPGQPLRVLKAPLATAAPPCS

SEQ ID NO: 6105 - protein, 80 aa, Synthetic construct
SYDPRAVAVKEEPRGPEGSRAASRGSYNPLQYQVAHCGQTAMHLPPTLAAPGQPLRVLKAPLATAAPPCSPLLKAPSPAG

SEQ ID NO: 6106 - protein, 80 aa, Synthetic construct; identical to SEQ ID NO: 2087

SEQ ID NO: 6107 - protein, 80 aa, Synthetic construct
PLHKGKKAVNKDSLEYRLRRERNNIAVRKSRDKAKRRILETQQKVLEYMAENERLRSRVEQLTQELDTLRNLFRQIPEAA

SEQ ID NO: 6108 - protein, 80 aa, Synthetic construct; identical to SEQ ID NO: 2059

SEQ ID NO: 6109 - protein, 80 aa, Synthetic construct
AGAYIQNEHSYQVGSALLWKRRAEAALDALDKAQRQLQACKRREQRLRLRLTKLQQERAREKRAQADARQTLKEHVQDFA

SEQ ID NO: 6110 - protein, 80 aa, Synthetic construct
SPEPASLEELPEVYPEGPSSLPASLSLSVGTSSAKLEAINELIRFDHIYTKPLVLEIPSETESQANVVVKIEEAPLSPSE

SEQ ID NO: 6111 - protein, 80 aa, Synthetic construct
PEVYPEGPSSLPASLSLSVGTSSAKLEAINELIRFDHIYTKPLVLEIPSETESQANVVVKIEEAPLSPSENDHPEFIVSV

SEQ ID NO: 6112 - protein, 80 aa, Synthetic construct; identical to SEQ ID NO: 1848

SEQ ID NO: 6113 - protein, 80 aa, Synthetic construct
TSSAKLEAINELIRFDHIYTKPLVLEIPSETESQANVVVKIEEAPLSPSENDHPEFIVSVKEEPVEDDLVPELGISNLLS

SEQ ID NO: 6114 - protein, 80 aa, Synthetic construct
ELIRFDHIYTKPLVLEIPSETESQANVVVKIEEAPLSPSENDHPEFIVSVKEEPVEDDLVPELGISNLLSSSHCPKPSSC

SEQ ID NO: 6115 - protein, 80 aa, Synthetic construct
KPLVLEIPSETESQANVVVKIEEAPLSPSENDHPEFIVSVKEEPVEDDLVPELGISNLLSSSHCPKPSSCLLDAYSDCGY

SEQ ID NO: 6116 - protein, 80 aa, Synthetic construct; identical to SEQ ID NO: 1849

SEQ ID NO: 6117 - protein, 80 aa, Synthetic construct
IEEAPLSPSENDHPEFIVSVKEEPVEDDLVPELGISNLLSSSHCPKPSSCLLDAYSDCGYGGSLSPFSDMSSLLGVNHSW

SEQ ID NO: 6118 - protein, 80 aa, Synthetic construct
NDHPEFIVSVKEEPVEDDLVPELGISNLLSSSHCPKPSSCLLDAYSDCGYGGSLSPFSDMSSLLGVNHSWEDTFANELFP

SEQ ID NO: 6119 - protein, 80 aa, Synthetic construct
FIVSVKEEPVEDDLVPELGISNLLSSSHCPKPSSCLLDAYSDCGYGGSLSPFSDMSSLLGVNHSWEDTFANELFPQLISV

SEQ ID NO: 6120 - protein, 80 aa, Synthetic construct
ENNLKTCPKEDGDFVSDKIKFKIEEEDDDGIPPDSLERMDFKSEQEDMKQTDSGGERAGLGGTGCSCKPPGKYLSAESED

SEQ ID NO: 6121 - protein, 80 aa, Synthetic construct
DGDFVSDKIKFKIEEEDDDGIPPDSLERMDFKSEQEDMKQTDSGGERAGLGGTGCSCKPPGKYLSAESEDDYGALFSQYS

SEQ ID NO: 6122 - protein, 80 aa, Synthetic construct
FKIEEEDDDGIPPDSLERMDFKSEQEDMKQTDSGGERAGLGGTGCSCKPPGKYLSAESEDDYGALFSQYSSTLYDVAMEA

SEQ ID NO: 6123 - protein, 80 aa, Synthetic construct
QVGITVTDNASIGKTLNEGEHSSVQCFSHTVNLIVSEAIKSQRMVQNLLSLARKICERVHRSPKAKEKLAELQREYALPQ

SEQ ID NO: 6124 - protein, 80 aa, Synthetic construct
SIGKTLNEGEHSSVQCFSHTVNLIVSEAIKSQRMVQNLLSLARKICERVHRSPKAKEKLAELQREYALPQHHLIQDVPSK

SEQ ID NO: 6125 - protein, 80 aa, Synthetic construct
HSSVQCFSHTVNLIVSEAIKSQRMVQNLLSLARKICERVHRSPKAKEKLAELQREYALPQHHLIQDVPSKWSTSFHMLER

SEQ ID NO: 6126 - protein, 80 aa, Synthetic construct
MSVECNFRELISCDQWEVMQSVCRALKPFEAASREMSTQMSTLSQVIPMVHILNRKVEMLFEETMGIDTMLRSLKEAMVS

SEQ ID NO: 6127 - protein, 80 aa, Synthetic construct; identical to SEQ ID NO: 1836

SEQ ID NO: 6128 - protein, 80 aa, Synthetic construct
AASREMSTQMSTLSQVIPMVHILNRKVEMLFEETMGIDTMLRSLKEAMVSRLSATLHDPRYVFATLLDPRYKASLFTEEE

SEQ ID NO: 6129 - protein, 80 aa, Synthetic construct
KMLPGRTDNAVKNHWNSTIKRKVDTGGFLSESKDCKPPVYLLLELEDKDGLQSAQPTEGQGSLLTNWPSVPPTIKEEENS

SEQ ID NO: 6130 - protein, 80 aa, Synthetic construct
VKNHWNSTIKRKVDTGGFLSESKDCKPPVYLLLELEDKDGLQSAQPTEGQGSLLTNWPSVPPTIKEEENSEEELAAATTS

SEQ ID NO: 6131 - protein, 80 aa, Synthetic construct; identical to SEQ ID NO: 2091

SEQ ID NO: 6132 - protein, 80 aa, Synthetic construct
ESKDCKPPVYLLLELEDKDGLQSAQPTEGQGSLLTNWPSVPPTIKEEENSEEELAAATTSKEQEPIGTDLDAVRTPEPLE

SEQ ID NO: 6133 - protein, 80 aa, Synthetic construct
LLLELEDKDGLQSAQPTEGQGSLLTNWPSVPPTIKEEENSEEELAAATTSKEQEPIGTDLDAVRTPEPLEEFPKREDQEG

SEQ ID NO: 6134 - protein, 80 aa, Synthetic construct
LQSAQPTEGQGSLLTNWPSVPPTIKEEENSEEELAAATTSKEQEPIGTDLDAVRTPEPLEEFPKREDQEGSPPETSLPYK

SEQ ID NO: 6135 - protein, 80 aa, Synthetic construct
GSLLTNWPSVPPTIKEEENSEEELAAATTSKEQEPIGTDLDAVRTPEPLEEFPKREDQEGSPPETSLPYKWVVEAANLLI

SEQ ID NO: 6136 - protein, 80 aa, Synthetic construct; identical to SEQ ID NO: 2092

SEQ ID NO: 6137 - protein, 80 aa, Synthetic construct
EEELAAATTSKEQEPIGTDLDAVRTPEPLEEFPKREDQEGSPPETSLPYKWVVEAANLLIPAVGSSLSEALDLIESDPDA

SEQ ID NO: 6138 - protein, 80 aa, Synthetic construct
KEQEPIGTDLDAVRTPEPLEEFPKREDQEGSPPETSLPYKWVVEAANLLIPAVGSSLSEALDLIESDPDAWCDLSKFDLP

SEQ ID NO: 6139 - protein, 80 aa, Synthetic construct
DAVRTPEPLEEFPKREDQEGSPPETSLPYKWVVEAANLLIPAVGSSLSEALDLIESDPDAWCDLSKFDLPEEPSAEDSIN

SEQ ID NO: 6140 - protein, 80 aa, Synthetic construct
EFPKREDQEGSPPETSLPYKWVVEAANLLIPAVGSSLSEALDLIESDPDAWCDLSKFDLPEEPSAEDSINNSLVQLQASH

SEQ ID NO: 6141 - protein, 80 aa, Synthetic construct; identical to SEQ ID NO: 2093

SEQ ID NO: 6142 - protein, 80 aa, Synthetic construct; identical to SEQ ID NO: 3965

SEQ ID NO: 6143 - protein, 80 aa, Synthetic construct; identical to SEQ ID NO: 4619

SEQ ID NO: 6144 - protein, 80 aa, Synthetic construct
PAAPSSAPRTPDPAPEKPSESSAGPSTEEDFAVDFEKIYKYLSSVSRSGRSPELSAAESAVVLDLLMSLPEELPLLPCTA

SEQ ID NO: 6145 - protein, 80 aa, Synthetic construct
PDPAPEKPSESSAGPSTEEDFAVDFEKIYKYLSSVSRSGRSPELSAAESAVVLDLLMSLPEELPLLPCTALVEHMTETYL

SEQ ID NO: 6146 - protein, 80 aa, Synthetic construct
SSASSSSSSSSSPFKFKLQPPPLGRRQRAAGEKAVAGADKSGGSAGGLAEGAGALAPPPPPPQIKVEPISEGESEEVEVT

SEQ ID NO: 6147 - protein, 80 aa, Synthetic construct
SSPFKFKLQPPPLGRRQRAAGEKAVAGADKSGGSAGGLAEGAGALAPPPPPPQIKVEPISEGESEEVEVTDISDEDEEDG

SEQ ID NO: 6148 - protein, 80 aa, Synthetic construct
PPLGRRQRAAGEKAVAGADKSGGSAGGLAEGAGALAPPPPPPQIKVEPISEGESEEVEVTDISDEDEEDGEVFKTPRAPP

SEQ ID NO: 6149 - protein, 80 aa, Synthetic construct
GEKAVAGADKSGGSAGGLAEGAGALAPPPPPPQIKVEPISEGESEEVEVTDISDEDEEDGEVFKTPRAPPAPPKPEPGEA

SEQ ID NO: 6150 - protein, 80 aa, Synthetic construct
SGGSAGGLAEGAGALAPPPPPPQIKVEPISEGESEEVEVTDISDEDEEDGEVFKTPRAPPAPPKPEPGEAPGASQCMPLK

SEQ ID NO: 6151 - protein, 80 aa, Synthetic construct; identical to SEQ ID NO: 1739

SEQ ID NO: 6152 - protein, 80 aa, Synthetic construct; identical to SEQ ID NO: 985

SEQ ID NO: 6153 - protein, 80 aa, Synthetic construct
EGESEEVEVTDISDEDEEDGEVFKTPRAPPAPPKPEPGEAPGASQCMPLKLRFKRRWSEDCRLEGGGGPAGGFEDEGEDK

SEQ ID NO: 6154 - protein, 80 aa, Synthetic construct; identical to SEQ ID NO: 1740

SEQ ID NO: 6155 - protein, 80 aa, Synthetic construct; identical to SEQ ID NO: 986

SEQ ID NO: 6156 - protein, 80 aa, Synthetic construct; identical to SEQ ID NO: 987

SEQ ID NO: 6157 - protein, 80 aa, Synthetic construct; identical to SEQ ID NO: 4123

SEQ ID NO: 6158 - protein, 80 aa, Synthetic construct
RESLLLQDSDCKASPEGREAHKHGLAALRSTSRNEYIHSGLYSSFTINSLQNPPDAFKAIKTEKLEEPPEDSPPVEEVRT

SEQ ID NO: 6159 - protein, 80 aa, Synthetic construct
CKASPEGREAHKHGLAALRSTSRNEYIHSGLYSSFTINSLQNPPDAFKAIKTEKLEEPPEDSPPVEEVRTVIRFVTNKTD

SEQ ID NO: 6160 - protein, 80 aa, Synthetic construct; identical to SEQ ID NO: 988

SEQ ID NO: 6161 - protein, 80 aa, Synthetic construct; identical to SEQ ID NO: 1867

SEQ ID NO: 6162 - protein, 80 aa, Synthetic construct; identical to SEQ ID NO: 989

SEQ ID NO: 6163 - protein, 80 aa, Synthetic construct; identical to SEQ ID NO: 990

SEQ ID NO: 6164 - protein, 80 aa, Synthetic construct; identical to SEQ ID NO: 991

SEQ ID NO: 6165 - protein, 80 aa, Synthetic construct; identical to SEQ ID NO: 992

SEQ ID NO: 6166 - protein, 80 aa, Synthetic construct; identical to SEQ ID NO: 2068

SEQ ID NO: 6167 - protein, 80 aa, Synthetic construct
KKPGKRGRKPAKIDLKAKLERSRQSARECRARKKLRYQYLEELVSSRERAICALREELEMYKQWCMAMDQGKIPSEIKAL

SEQ ID NO: 6168 - protein, 80 aa, Synthetic construct
RSRQSARECRARKKLRYQYLEELVSSRERAICALREELEMYKQWCMAMDQGKIPSEIKALLTGEEQNKSQQNSSRHTKAG

SEQ ID NO: 6169 - protein, 80 aa, Synthetic construct
RARKKLRYQYLEELVSSRERAICALREELEMYKQWCMAMDQGKIPSEIKALLTGEEQNKSQQNSSRHTKAGKTDANSNSW

SEQ ID NO: 6170 - protein, 80 aa, Synthetic construct; identical to SEQ ID NO: 5065

SEQ ID NO: 6171 - protein, 80 aa, Synthetic construct; identical to SEQ ID NO: 1960

SEQ ID NO: 6172 - protein, 80 aa, Synthetic construct
LDYSKFQELVLPHFGKEDAGDVQQFYDLLSGSLEVIRKWAEKIPGFAELSPADQDLLLESAFLELFILRLAYRSKPGEGK

SEQ ID NO: 6173 - protein, 80 aa, Synthetic construct; identical to SEQ ID NO: 4955

SEQ ID NO: 6174 - protein, 80 aa, Synthetic construct; identical to SEQ ID NO: 3542

SEQ ID NO: 6175 - protein, 80 aa, Synthetic construct; identical to SEQ ID NO: 711

SEQ ID NO: 6176 - protein, 80 aa, Synthetic construct
EQSEWQPTNVDGKGYLLNEPGVQPTSVYGDFSCKEEPEIDSPGGDIGLSLQRVFTDLKNMDATWLDSLLTPVRLPSIQAI

SEQ ID NO: 6177 - protein, 80 aa, Synthetic construct
WQPTNVDGKGYLLNEPGVQPTSVYGDFSCKEEPEIDSPGGDIGLSLQRVFTDLKNMDATWLDSLLTPVRLPSIQAIPCAP

SEQ ID NO: 6178 - protein, 80 aa, Synthetic construct; identical to SEQ ID NO: 4944

SEQ ID NO: 6179 - protein, 80 aa, Synthetic construct
APPAPQAPPQPQAAPPQQPAAPPQQPQAHTLTTLSSEPGQSQRTHIKTEQLSPSHYSEQQQHSPQQIAYSPFNLPHYSPS

SEQ ID NO: 6180 - protein, 80 aa, Synthetic construct
PQAAPPQQPAAPPQQPQAHTLTTLSSEPGQSQRTHIKTEQLSPSHYSEQQQHSPQQIAYSPFNLPHYSPSYPPITRSQYD

SEQ ID NO: 6181 - protein, 80 aa, Synthetic construct
APPQQPQAHTLTTLSSEPGQSQRTHIKTEQLSPSHYSEQQQHSPQQIAYSPFNLPHYSPSYPPITRSQYDYTDHQNSSSY

SEQ ID NO: 6182 - protein, 80 aa, Synthetic construct
LTTLSSEPGQSQRTHIKTEQLSPSHYSEQQQHSPQQIAYSPFNLPHYSPSYPPITRSQYDYTDHQNSSSYYSHAAGQGTG

SEQ ID NO: 6183 - protein, 80 aa, Synthetic construct
SQRTHIKTEQLSPSHYSEQQQHSPQQIAYSPFNLPHYSPSYPPITRSQYDYTDHQNSSSYYSHAAGQGTGLYSTFTYMNP

SEQ ID NO: 6184 - protein, 80 aa, Synthetic construct; identical to SEQ ID NO: 4195

SEQ ID NO: 6185 - protein, 80 aa, Synthetic construct
CLDEVAEELNVERRRIYDIVNVLESLHMVSRLAKNRYTWHGRHNLNKTLGTLKSIGEENKYAEQIMMIKKKEYEQEFDFI

SEQ ID NO: 6186 - protein, 80 aa, Synthetic construct; identical to SEQ ID NO: 3214

SEQ ID NO: 6187 - protein, 80 aa, Synthetic construct; identical to SEQ ID NO: 2101

SEQ ID NO: 6188 - protein, 80 aa, Synthetic construct; identical to SEQ ID NO: 4744

SEQ ID NO: 6189 - protein, 80 aa, Synthetic construct
LKKRNLDTGGNKSVLMERLKKAVKEEGQDPDEIGIELEATSKKSAKRCVKGLKMEEEGTEDNGLEDDSRDGQEDMEASLE

SEQ ID NO: 6190 - protein, 80 aa, Synthetic construct; identical to SEQ ID NO: 1788

SEQ ID NO: 6191 - protein, 80 aa, Synthetic construct
KAVKEEGQDPDEIGIELEATSKKSAKRCVKGLKMEEEGTEDNGLEDDSRDGQEDMEASLENLQNMGMMDMSVLDETEVAN

SEQ ID NO: 6192 - protein, 80 aa, Synthetic construct; identical to SEQ ID NO: 4753

SEQ ID NO: 6193 - protein, 80 aa, Synthetic construct; identical to SEQ ID NO: 4746

SEQ ID NO: 6194 - protein, 80 aa, Synthetic construct; identical to SEQ ID NO: 4747

SEQ ID NO: 6195 - protein, 80 aa, Synthetic construct
SAHPEEGDLDLASESTAHAQSSKADSLLAVVKREPAEQPGDGERTDCEPVGLEPAVEQSSAASELAEASSEELAEAPTEA

SEQ ID NO: 6196 - protein, 80 aa, Synthetic construct
LASESTAHAQSSKADSLLAVVKREPAEQPGDGERTDCEPVGLEPAVEQSSAASELAEASSEELAEAPTEAPSPEARDSKE

SEQ ID NO: 6197 - protein, 80 aa, Synthetic construct
SSKADSLLAVVKREPAEQPGDGERTDCEPVGLEPAVEQSSAASELAEASSEELAEAPTEAPSPEARDSKEDGRKFDFDAC

SEQ ID NO: 6198 - protein, 80 aa, Synthetic construct
PSPEARDSKEDGRKFDFDACNEVPPAPKESSTSEGADQKMSSFKEEKDIKPIIKDEKGRVGSGSGRNLWVSGLSSTTRAT

SEQ ID NO: 6199 - protein, 80 aa, Synthetic construct
DGRKFDFDACNEVPPAPKESSTSEGADQKMSSFKEEKDIKPIIKDEKGRVGSGSGRNLWVSGLSSTTRATDLKNLFSKYG

SEQ ID NO: 6200 - protein, 80 aa, Synthetic construct
STSEGADQKMSSFKEEKDIKPIIKDEKGRVGSGSGRNLWVSGLSSTTRATDLKNLFSKYGKVVGAKVVTNARSPGARCYG

SEQ ID NO: 6201 - protein, 80 aa, Synthetic construct
SSFKEEKDIKPIIKDEKGRVGSGSGRNLWVSGLSSTTRATDLKNLFSKYGKVVGAKVVTNARSPGARCYGFVTMSTSDEA

SEQ ID NO: 6202 - protein, 80 aa, Synthetic construct
FVTMSTSDEATKCISHLHRTELHGRMISVEKAKNEPAGKKLSDRKECEVKKEKLSSVDRHHSVEIKIEKTVIKKEEKIEK

SEQ ID NO: 6203 - protein, 80 aa, Synthetic construct; identical to SEQ ID NO: 1789

SEQ ID NO: 6204 - protein, 80 aa, Synthetic construct
LSDRKECEVKKEKLSSVDRHHSVEIKIEKTVIKKEEKIEKKEEKKPEDIKKEEKDQDELKPGPTNRSRVTKSGSRGMERT

SEQ ID NO: 6205 - protein, 80 aa, Synthetic construct; identical to SEQ ID NO: 4751

SEQ ID NO: 6206 - protein, 80 aa, Synthetic construct; identical to SEQ ID NO: 4752

SEQ ID NO: 6207 - protein, 80 aa, Synthetic construct; identical to SEQ ID NO: 3282

SEQ ID NO: 6208 - protein, 80 aa, Synthetic construct; identical to SEQ ID NO: 4197

SEQ ID NO: 6209 - protein, 80 aa, Synthetic construct
PLPGNGPPQPGAPSSSPTVKEEGPEPWPGGPDPDVPGTDEASSACSTDWVIPDPEEEPERKRKKGPAPKMLGHELCRVCG

SEQ ID NO: 6210 - protein, 80 aa, Synthetic construct
GAPSSSPTVKEEGPEPWPGGPDPDVPGTDEASSACSTDWVIPDPEEEPERKRKKGPAPKMLGHELCRVCGDKASGFHYNV

SEQ ID NO: 6211 - protein, 80 aa, Synthetic construct; identical to SEQ ID NO: 993

SEQ ID NO: 6212 - protein, 80 aa, Synthetic construct; identical to SEQ ID NO: 994

SEQ ID NO: 6213 - protein, 80 aa, Synthetic construct; identical to SEQ ID NO: 995

SEQ ID NO: 6214 - protein, 80 aa, Synthetic construct; identical to SEQ ID NO: 2209

SEQ ID NO: 6215 - protein, 80 aa, Synthetic construct; identical to SEQ ID NO: 996

SEQ ID NO: 6216 - protein, 80 aa, Synthetic construct; identical to SEQ ID NO: 997

SEQ ID NO: 6217 - protein, 80 aa, Synthetic construct; identical to SEQ ID NO: 998

SEQ ID NO: 6218 - protein, 80 aa, Synthetic construct
AAPCPPPPGPAAAPEGDWARLLEQMGALAVRGSRRERELERRELAVEQGERALERRRRALQEEERAAAQARRELQAEREA

SEQ ID NO: 6219 - protein, 80 aa, Synthetic construct; identical to SEQ ID NO: 1732

SEQ ID NO: 6220 - protein, 80 aa, Synthetic construct; identical to SEQ ID NO: 3838

SEQ ID NO: 6221 - protein, 80 aa, Synthetic construct
KEEALLPEPDVPTDTKESSEKDALTQYPRYKKYQLACTKNVYNASSHSTSGFASTFREDNSSNSLKPGLARGQIKSEPPS

SEQ ID NO: 6222 - protein, 80 aa, Synthetic construct
VPTDTKESSEKDALTQYPRYKKYQLACTKNVYNASSHSTSGFASTFREDNSSNSLKPGLARGQIKSEPPSEENEEESITL

SEQ ID NO: 6223 - protein, 80 aa, Synthetic construct
KDALTQYPRYKKYQLACTKNVYNASSHSTSGFASTFREDNSSNSLKPGLARGQIKSEPPSEENEEESITLCLSGDEPDAK

SEQ ID NO: 6224 - protein, 80 aa, Synthetic construct
KKYQLACTKNVYNASSHSTSGFASTFREDNSSNSLKPGLARGQIKSEPPSEENEEESITLCLSGDEPDAKDRAGDVEMDR

SEQ ID NO: 6225 - protein, 80 aa, Synthetic construct
VYNASSHSTSGFASTFREDNSSNSLKPGLARGQIKSEPPSEENEEESITLCLSGDEPDAKDRAGDVEMDRKQPSPAPTPT

SEQ ID NO: 6226 - protein, 80 aa, Synthetic construct
GFASTFREDNSSNSLKPGLARGQIKSEPPSEENEEESITLCLSGDEPDAKDRAGDVEMDRKQPSPAPTPTAPAGAACLER

SEQ ID NO: 6227 - protein, 80 aa, Synthetic construct
SSNSLKPGLARGQIKSEPPSEENEEESITLCLSGDEPDAKDRAGDVEMDRKQPSPAPTPTAPAGAACLERSRSVASPSCL

SEQ ID NO: 6228 - protein, 80 aa, Synthetic construct
RGQIKSEPPSEENEEESITLCLSGDEPDAKDRAGDVEMDRKQPSPAPTPTAPAGAACLERSRSVASPSCLRSLFSITKSV

SEQ ID NO: 6229 - protein, 80 aa, Synthetic construct
QGARFLATEHQEPGLMGDGMYNQVRPQIKCEQSYGTNSSDESGSFSEADSESCPVQDRGQEVKLPFPVDQITDLPRNDFQ

SEQ ID NO: 6230 - protein, 80 aa, Synthetic construct
ILEGGGVMNLNPGNNLLHQPPAWTDSYSTCNVSSGFFGGQWHEIHPQYWTKYQVWEWLQHLLDTNQLDANCIPFQEFDIN

SEQ ID NO: 6231 - protein, 80 aa, Synthetic construct
NPGNNLLHQPPAWTDSYSTCNVSSGFFGGQWHEIHPQYWTKYQVWEWLQHLLDTNQLDANCIPFQEFDINGEHLCSMSLQ

SEQ ID NO: 6232 - protein, 80 aa, Synthetic construct
PAWTDSYSTCNVSSGFFGGQWHEIHPQYWTKYQVWEWLQHLLDTNQLDANCIPFQEFDINGEHLCSMSLQEFTRAAGTAG

SEQ ID NO: 6233 - protein, 80 aa, Synthetic construct
LLDTNQLDANCIPFQEFDINGEHLCSMSLQEFTRAAGTAGQLLYSNLQHLKWNGQCSSDLFQSTHNVIVKTEQTEPSIMN

SEQ ID NO: 6234 - protein, 80 aa, Synthetic construct
CIPFQEFDINGEHLCSMSLQEFTRAAGTAGQLLYSNLQHLKWNGQCSSDLFQSTHNVIVKTEQTEPSIMNTWKDENYLYD

SEQ ID NO: 6235 - protein, 80 aa, Synthetic construct
GEHLCSMSLQEFTRAAGTAGQLLYSNLQHLKWNGQCSSDLFQSTHNVIVKTEQTEPSIMNTWKDENYLYDTNYGSTVDLL

SEQ ID NO: 6236 - protein, 80 aa, Synthetic construct
EFTRAAGTAGQLLYSNLQHLKWNGQCSSDLFQSTHNVIVKTEQTEPSIMNTWKDENYLYDTNYGSTVDLLDSKTFCRAQI

SEQ ID NO: 6237 - protein, 80 aa, Synthetic construct
QLLYSNLQHLKWNGQCSSDLFQSTHNVIVKTEQTEPSIMNTWKDENYLYDTNYGSTVDLLDSKTFCRAQISMTTTSHLPV

SEQ ID NO: 6238 - protein, 80 aa, Synthetic construct
KWNGQCSSDLFQSTHNVIVKTEQTEPSIMNTWKDENYLYDTNYGSTVDLLDSKTFCRAQISMTTTSHLPVAESPDMKKEQ

SEQ ID NO: 6239 - protein, 80 aa, Synthetic construct
FQSTHNVIVKTEQTEPSIMNTWKDENYLYDTNYGSTVDLLDSKTFCRAQISMTTTSHLPVAESPDMKKEQDPPAKCHTKK

SEQ ID NO: 6240 - protein, 80 aa, Synthetic construct
TEQTEPSIMNTWKDENYLYDTNYGSTVDLLDSKTFCRAQISMTTTSHLPVAESPDMKKEQDPPAKCHTKKHNPRGTHLWE

SEQ ID NO: 6241 - protein, 80 aa, Synthetic construct; identical to SEQ ID NO: 5157

SEQ ID NO: 6242 - protein, 80 aa, Synthetic construct; identical to SEQ ID NO: 5158

SEQ ID NO: 6243 - protein, 80 aa, Synthetic construct; identical to SEQ ID NO: 5159

SEQ ID NO: 6244 - protein, 80 aa, Synthetic construct
REQQQQQQQQQQKHEDGDSNGTFFVYHAIYLEELTAVELTEKIAQLFSISPCQISQIYKQGPTGIHVLISDEMIQNFQEE

SEQ ID NO: 6245 - protein, 80 aa, Synthetic construct
QQKHEDGDSNGTFFVYHAIYLEELTAVELTEKIAQLFSISPCQISQIYKQGPTGIHVLISDEMIQNFQEEACFILDTMKA

SEQ ID NO: 6246 - protein, 80 aa, Synthetic construct
GTFFVYHAIYLEELTAVELTEKIAQLFSISPCQISQIYKQGPTGIHVLISDEMIQNFQEEACFILDTMKAETNDSYHIIL

SEQ ID NO: 6247 - protein, 80 aa, Synthetic construct
TFFVYHAIYLEELTAVELTEKIAQLFSISPCQISQIYKQGPTGIHVLISDEMIQNFQEEACFILDTMKAETNDSYHIILK

SEQ ID NO: 6248 - protein, 80 aa, Synthetic construct
CGRDCLAEEGRKIYLRPAICDKARQKQQRKRCPNCDGPLKLIPCRGHGGFPVTNFWRHDGRFIFFQSKGEHDHPKPETKL

SEQ ID NO: 6249 - protein, 80 aa, Synthetic construct; identical to SEQ ID NO: 2362

SEQ ID NO: 6250 - protein, 80 aa, Synthetic construct
DKARQKQQRKRCPNCDGPLKLIPCRGHGGFPVTNFWRHDGRFIFFQSKGEHDHPKPETKLEAEARRAMKKVNTAPSSVSL

SEQ ID NO: 6251 - protein, 80 aa, Synthetic construct
RCPNCDGPLKLIPCRGHGGFPVTNFWRHDGRFIFFQSKGEHDHPKPETKLEAEARRAMKKVNTAPSSVSLSLKGSTETRS

SEQ ID NO: 6252 - protein, 80 aa, Synthetic construct; identical to SEQ ID NO: 38

SEQ ID NO: 6253 - protein, 80 aa, Synthetic construct
PLEPPAAKTGCPPLWPNPAGNLYEEKVHVDFNSYVQSPAYHSPQEDPFLFTYASHPHQQYSLPSKSSKWDFEEEMTYLGL

SEQ ID NO: 6254 - protein, 80 aa, Synthetic construct
CPPLWPNPAGNLYEEKVHVDFNSYVQSPAYHSPQEDPFLFTYASHPHQQYSLPSKSSKWDFEEEMTYLGLDHCNNDMLLN

SEQ ID NO: 6255 - protein, 80 aa, Synthetic construct; identical to SEQ ID NO: 848

SEQ ID NO: 6256 - protein, 80 aa, Synthetic construct; identical to SEQ ID NO: 999

SEQ ID NO: 6257 - protein, 80 aa, Synthetic construct; identical to SEQ ID NO: 2111

SEQ ID NO: 6258 - protein, 80 aa, Synthetic construct; identical to SEQ ID NO: 4780

SEQ ID NO: 6259 - protein, 80 aa, Synthetic construct
ISSIVNSTYYANVSATKCQEFGRWYKKYKKIKVERVERENLSDYCVLGQRPMHLPNMNQLASLGKTNEQSPHSQIHHSTP

SEQ ID NO: 6260 - protein, 80 aa, Synthetic construct
ANVSATKCQEFGRWYKKYKKIKVERVERENLSDYCVLGQRPMHLPNMNQLASLGKTNEQSPHSQIHHSTPIRNQVPALQP

SEQ ID NO: 6261 - protein, 80 aa, Synthetic construct
FGRWYKKYKKIKVERVERENLSDYCVLGQRPMHLPNMNQLASLGKTNEQSPHSQIHHSTPIRNQVPALQPIMSPGLLSPQ

SEQ ID NO: 6262 - protein, 80 aa, Synthetic construct
IKVERVERENLSDYCVLGQRPMHLPNMNQLASLGKTNEQSPHSQIHHSTPIRNQVPALQPIMSPGLLSPQLSPQLVRQQI

SEQ ID NO: 6263 - protein, 80 aa, Synthetic construct
IRNQVPALQPIMSPGLLSPQLSPQLVRQQIAMAHLINQQIAVSRLLAHQHPQAINQQFLNHPPIPRAVKPEPTNSSVEVS

SEQ ID NO: 6264 - protein, 80 aa, Synthetic construct
IMSPGLLSPQLSPQLVRQQIAMAHLINQQIAVSRLLAHQHPQAINQQFLNHPPIPRAVKPEPTNSSVEVSPDIYQQVRDE

SEQ ID NO: 6265 - protein, 80 aa, Synthetic construct; identical to SEQ ID NO: 4783

SEQ ID NO: 6266 - protein, 80 aa, Synthetic construct
KELNSVASELSARQEESEHSHKHLIELRREFKKNVPEEIREMVAPVLKSFQAEVVALSKRSQEAEAAFLSVYKQLIEAPD

SEQ ID NO: 6267 - protein, 80 aa, Synthetic construct
SPAGPTLTEGSRLPGIPGKALLTETLLQRNEAEKQKGLQEVQITLAARLGEAEEKIKVLHSALKATQAELLELRRKYDEE

SEQ ID NO: 6268 - protein, 80 aa, Synthetic construct; identical to SEQ ID NO: 2117

SEQ ID NO: 6269 - protein, 80 aa, Synthetic construct
LLTETLLQRNEAEKQKGLQEVQITLAARLGEAEEKIKVLHSALKATQAELLELRRKYDEEAASKADEVGLIMTNLEKANQ

SEQ ID NO: 6270 - protein, 80 aa, Synthetic construct
LEMEVAPRGRSVPPSPPERPSLATASQNGAPALVKQEEGSGGPAQAPLPVLSPAAFVQSIIRKVKSEIGDAGYFDHHWAS

SEQ ID NO: 6271 - protein, 80 aa, Synthetic construct
SVPPSPPERPSLATASQNGAPALVKQEEGSGGPAQAPLPVLSPAAFVQSIIRKVKSEIGDAGYFDHHWASDRGLLSRPYA

SEQ ID NO: 6272 - protein, 80 aa, Synthetic construct
SLATASQNGAPALVKQEEGSGGPAQAPLPVLSPAAFVQSIIRKVKSEIGDAGYFDHHWASDRGLLSRPYASVSPSLSSSS

SEQ ID NO: 6273 - protein, 80 aa, Synthetic construct
PALVKQEEGSGGPAQAPLPVLSPAAFVQSIIRKVKSEIGDAGYFDHHWASDRGLLSRPYASVSPSLSSSSSSGYSGQPNG

SEQ ID NO: 6274 - protein, 80 aa, Synthetic construct
GGPAQAPLPVLSPAAFVQSIIRKVKSEIGDAGYFDHHWASDRGLLSRPYASVSPSLSSSSSSGYSGQPNGRAWPRGDEAP

SEQ ID NO: 6275 - protein, 80 aa, Synthetic construct; identical to SEQ ID NO: 2916

SEQ ID NO: 6276 - protein, 80 aa, Synthetic construct
TQDEPDLDPSGGPGILPPGHSHPDPTPQSPDSETEDQKPTVKELELQEGPEENSTPLTTQDKAQVRIKQEQMEEDAEEEA

SEQ ID NO: 6277 - protein, 80 aa, Synthetic construct; identical to SEQ ID NO: 2118

SEQ ID NO: 6278 - protein, 80 aa, Synthetic construct
SHPDPTPQSPDSETEDQKPTVKELELQEGPEENSTPLTTQDKAQVRIKQEQMEEDAEEEAGSQPQDSGELDKGQGPPKEE

SEQ ID NO: 6279 - protein, 80 aa, Synthetic construct
DSETEDQKPTVKELELQEGPEENSTPLTTQDKAQVRIKQEQMEEDAEEEAGSQPQDSGELDKGQGPPKEEHPDPPGNDGL

SEQ ID NO: 6280 - protein, 80 aa, Synthetic construct
VKELELQEGPEENSTPLTTQDKAQVRIKQEQMEEDAEEEAGSQPQDSGELDKGQGPPKEEHPDPPGNDGLPKVAPGPLLP

SEQ ID NO: 6281 - protein, 80 aa, Synthetic construct
EENSTPLTTQDKAQVRIKQEQMEEDAEEEAGSQPQDSGELDKGQGPPKEEHPDPPGNDGLPKVAPGPLLPGGSTPDCPSL

SEQ ID NO: 6282 - protein, 80 aa, Synthetic construct
DKAQVRIKQEQMEEDAEEEAGSQPQDSGELDKGQGPPKEEHPDPPGNDGLPKVAPGPLLPGGSTPDCPSLHPQQESEAGE

SEQ ID NO: 6283 - protein, 80 aa, Synthetic construct; identical to SEQ ID NO: 3231

SEQ ID NO: 6284 - protein, 80 aa, Synthetic construct
RQHYPEAYASPSHTKGEQGLYPLPLLNSTLDDGKATLTPSNTPLGRNLSTHQTYPVVADPHSPFAIKQETPEVSSSSSTP

SEQ ID NO: 6285 - protein, 80 aa, Synthetic construct
PSHTKGEQGLYPLPLLNSTLDDGKATLTPSNTPLGRNLSTHQTYPVVADPHSPFAIKQETPEVSSSSSTPSSLSSSAFLD

SEQ ID NO: 6286 - protein, 80 aa, Synthetic construct
YPLPLLNSTLDDGKATLTPSNTPLGRNLSTHQTYPVVADPHSPFAIKQETPEVSSSSSTPSSLSSSAFLDLQQVGSGVPP

SEQ ID NO: 6287 - protein, 80 aa, Synthetic construct
DDGKATLTPSNTPLGRNLSTHQTYPVVADPHSPFAIKQETPEVSSSSSTPSSLSSSAFLDLQQVGSGVPPFNAFPHAASV

SEQ ID NO: 6288 - protein, 80 aa, Synthetic construct
NTPLGRNLSTHQTYPVVADPHSPFAIKQETPEVSSSSSTPSSLSSSAFLDLQQVGSGVPPFNAFPHAASVYGQFTGQALL

SEQ ID NO: 6289 - protein, 80 aa, Synthetic construct
HQTYPVVADPHSPFAIKQETPEVSSSSSTPSSLSSSAFLDLQQVGSGVPPFNAFPHAASVYGQFTGQALLSGREMVGPTL

SEQ ID NO: 6290 - protein, 80 aa, Synthetic construct
HSPFAIKQETPEVSSSSSTPSSLSSSAFLDLQQVGSGVPPFNAFPHAASVYGQFTGQALLSGREMVGPTLPGYPPHIPTS

SEQ ID NO: 6291 - protein, 80 aa, Synthetic construct
LYPYECEKRGLSNPNELQAAIDSNRREGRRQSFGGSLFAYSPGGAHGMLSSPKLPVSSLGLAASTNGSSITPAPKIKKEE

SEQ ID NO: 6292 - protein, 80 aa, Synthetic construct; identical to SEQ ID NO: 2250

SEQ ID NO: 6293 - protein, 80 aa, Synthetic construct; identical to SEQ ID NO: 1000

SEQ ID NO: 6294 - protein, 80 aa, Synthetic construct; identical to SEQ ID NO: 1001

SEQ ID NO: 6295 - protein, 80 aa, Synthetic construct; identical to SEQ ID NO: 1002

SEQ ID NO: 6296 - protein, 80 aa, Synthetic construct; identical to SEQ ID NO: 1003

SEQ ID NO: 6297 - protein, 80 aa, Synthetic construct; identical to SEQ ID NO: 1004

SEQ ID NO: 6298 - protein, 80 aa, Synthetic construct; identical to SEQ ID NO: 1005

SEQ ID NO: 6299 - protein, 80 aa, Synthetic construct
KMALVADEQQRLMQRALQQNFLAMAAQLPMSIRINSQASESRQDSAVNLTGTNGSNSISMSVEINGIMYTGVLFAQPPAP

SEQ ID NO: 6300 - protein, 80 aa, Synthetic construct; identical to SEQ ID NO: 2251

SEQ ID NO: 6301 - protein, 80 aa, Synthetic construct
FLAMAAQLPMSIRINSQASESRQDSAVNLTGTNGSNSISMSVEINGIMYTGVLFAQPPAPTPTSAPNKGGGGGGGSSSNA

SEQ ID NO: 6302 - protein, 80 aa, Synthetic construct
SIRINSQASESRQDSAVNLTGTNGSNSISMSVEINGIMYTGVLFAQPPAPTPTSAPNKGGGGGGGSSSNAGGRGGNTGTS

SEQ ID NO: 6303 - protein, 80 aa, Synthetic construct
SRQDSAVNLTGTNGSNSISMSVEINGIMYTGVLFAQPPAPTPTSAPNKGGGGGGGSSSNAGGRGGNTGTSGGQAGPAGLS

SEQ ID NO: 6304 - protein, 80 aa, Synthetic construct
GTNGSNSISMSVEINGIMYTGVLFAQPPAPTPTSAPNKGGGGGGGSSSNAGGRGGNTGTSGGQAGPAGLSTPSTSTSNNS

SEQ ID NO: 6305 - protein, 80 aa, Synthetic construct
NGSNSISMSVEINGIMYTGVLFAQPPAPTPTSAPNKGGGGGGGSSSNAGGRGGNTGTSGGQAGPAGLSTPSTSTSNNSLP

SEQ ID NO: 6306 - protein, 80 aa, Synthetic construct
LFWHTQPEHYNQHNSGSYLRDVLALPIFKQEEPQLSPENEARLPPLQYVLCAATSPAVKLHEETLTYLNQGQSYEIRLLE

SEQ ID NO: 6307 - protein, 80 aa, Synthetic construct
NQHNSGSYLRDVLALPIFKQEEPQLSPENEARLPPLQYVLCAATSPAVKLHEETLTYLNQGQSYEIRLLENRKLGDFQDL

SEQ ID NO: 6308 - protein, 80 aa, Synthetic construct
DVLALPIFKQEEPQLSPENEARLPPLQYVLCAATSPAVKLHEETLTYLNQGQSYEIRLLENRKLGDFQDLNTKYVKSIIR

SEQ ID NO: 6309 - protein, 80 aa, Synthetic construct; identical to SEQ ID NO: 5162

SEQ ID NO: 6310 - protein, 80 aa, Synthetic construct
TIYVCQELEQNRVPLQQKRDGSGDSNLSVYHAIFLEELTTLELIEKIANLYSISPQHIHRVYRQGPTGIHVVVSNEMVQN

SEQ ID NO: 6311 - protein, 80 aa, Synthetic construct
NRVPLQQKRDGSGDSNLSVYHAIFLEELTTLELIEKIANLYSISPQHIHRVYRQGPTGIHVVVSNEMVQNFQDESCFVLS

SEQ ID NO: 6312 - protein, 80 aa, Synthetic construct
GSGDSNLSVYHAIFLEELTTLELIEKIANLYSISPQHIHRVYRQGPTGIHVVVSNEMVQNFQDESCFVLSTIKAESNDGY

SEQ ID NO: 6313 - protein, 80 aa, Synthetic construct; identical to SEQ ID NO: 5006

SEQ ID NO: 6314 - protein, 80 aa, Synthetic construct; identical to SEQ ID NO: 1006

SEQ ID NO: 6315 - protein, 80 aa, Synthetic construct; identical to SEQ ID NO: 1007

SEQ ID NO: 6316 - protein, 80 aa, Synthetic construct; identical to SEQ ID NO: 1008

SEQ ID NO: 6317 - protein, 80 aa, Synthetic construct; identical to SEQ ID NO: 1878

SEQ ID NO: 6318 - protein, 80 aa, Synthetic construct
MSNPYPRSHPYSPLPGLASVPGHMALPRPGVIKTIGTTVGRRRRDEQLSPEEEEKRRIRRERNKLAAAKCRNRRRELTEK

SEQ ID NO: 6319 - protein, 80 aa, Synthetic construct; identical to SEQ ID NO: 1009

SEQ ID NO: 6320 - protein, 80 aa, Synthetic construct
LQAETEELEEEKSGLQKEIAELQKEKEKLEFMLVAHGPVCKISPEERRSPPAPGLQPMRSGGGSVGAVVVKQEPLEEDSP

SEQ ID NO: 6321 - protein, 80 aa, Synthetic construct
EKSGLQKEIAELQKEKEKLEFMLVAHGPVCKISPEERRSPPAPGLQPMRSGGGSVGAVVVKQEPLEEDSPSSSSAGLDKA

SEQ ID NO: 6322 - protein, 80 aa, Synthetic construct
ELQKEKEKLEFMLVAHGPVCKISPEERRSPPAPGLQPMRSGGGSVGAVVVKQEPLEEDSPSSSSAGLDKAQRSVIKPISI

SEQ ID NO: 6323 - protein, 80 aa, Synthetic construct
KISPEERRSPPAPGLQPMRSGGGSVGAVVVKQEPLEEDSPSSSSAGLDKAQRSVIKPISIAGGFYGEEPLHTPIVVTSTP

SEQ ID NO: 6324 - protein, 80 aa, Synthetic construct; identical to SEQ ID NO: 1879

SEQ ID NO: 6325 - protein, 80 aa, Synthetic construct
GGGSVGAVVVKQEPLEEDSPSSSSAGLDKAQRSVIKPISIAGGFYGEEPLHTPIVVTSTPAVTPGTSNLVFTYPSVLEQE

SEQ ID NO: 6326 - protein, 80 aa, Synthetic construct; identical to SEQ ID NO: 678

SEQ ID NO: 6327 - protein, 80 aa, Synthetic construct; identical to SEQ ID NO: 40

SEQ ID NO: 6328 - protein, 80 aa, Synthetic construct
QQVSDSTKNGDGTKRPFRQNTHGIQMTSIKKRRSPDDELLYLPVRGRETYEMLLKIKESLELMQYLPQHTIETYRQQQQQ

SEQ ID NO: 6329 - protein, 80 aa, Synthetic construct
DGTKRPFRQNTHGIQMTSIKKRRSPDDELLYLPVRGRETYEMLLKIKESLELMQYLPQHTIETYRQQQQQQHQHLLQKQT

SEQ ID NO: 6330 - protein, 80 aa, Synthetic construct
THGIQMTSIKKRRSPDDELLYLPVRGRETYEMLLKIKESLELMQYLPQHTIETYRQQQQQQHQHLLQKQTSIQSPSSYGN

SEQ ID NO: 6331 - protein, 80 aa, Synthetic construct; identical to SEQ ID NO: 1993

SEQ ID NO: 6332 - protein, 80 aa, Synthetic construct
LGPSLDQSVGPRGAVETGPRASRVVKLEGPGPALGYFRGDEKGKLEAEEVMRDSMQGGAGKSPAAIREGVIKTEEPERLL

SEQ ID NO: 6333 - protein, 80 aa, Synthetic construct
PRGAVETGPRASRVVKLEGPGPALGYFRGDEKGKLEAEEVMRDSMQGGAGKSPAAIREGVIKTEEPERLLEDCRLGAEPA

SEQ ID NO: 6334 - protein, 80 aa, Synthetic construct
ASRVVKLEGPGPALGYFRGDEKGKLEAEEVMRDSMQGGAGKSPAAIREGVIKTEEPERLLEDCRLGAEPASNGLVHGSAE

SEQ ID NO: 6335 - protein, 80 aa, Synthetic construct
GPALGYFRGDEKGKLEAEEVMRDSMQGGAGKSPAAIREGVIKTEEPERLLEDCRLGAEPASNGLVHGSAEVILAPTSGAF

SEQ ID NO: 6336 - protein, 80 aa, Synthetic construct
EKGKLEAEEVMRDSMQGGAGKSPAAIREGVIKTEEPERLLEDCRLGAEPASNGLVHGSAEVILAPTSGAFGPHQQDLRIP

SEQ ID NO: 6337 - protein, 80 aa, Synthetic construct
MRDSMQGGAGKSPAAIREGVIKTEEPERLLEDCRLGAEPASNGLVHGSAEVILAPTSGAFGPHQQDLRIPLTLHTVPPGA

SEQ ID NO: 6338 - protein, 80 aa, Synthetic construct
KSPAAIREGVIKTEEPERLLEDCRLGAEPASNGLVHGSAEVILAPTSGAFGPHQQDLRIPLTLHTVPPGARIQFQGAPPS

SEQ ID NO: 6339 - protein, 80 aa, Synthetic construct
IKTEEPERLLEDCRLGAEPASNGLVHGSAEVILAPTSGAFGPHQQDLRIPLTLHTVPPGARIQFQGAPPSELIRLTKVPL

SEQ ID NO: 6340 - protein, 80 aa, Synthetic construct; identical to SEQ ID NO: 4932

SEQ ID NO: 6341 - protein, 80 aa, Synthetic construct
LEPSVKIETKDVPLTVLPSDAGIPDTPFSKDRNGHVKRPMNAFMVWARIHRPALAKANPAANNAEISVQLGLEWNKLSEE

SEQ ID NO: 6342 - protein, 80 aa, Synthetic construct; identical to SEQ ID NO: 1010

SEQ ID NO: 6343 - protein, 80 aa, Synthetic construct; identical to SEQ ID NO: 1939

SEQ ID NO: 6344 - protein, 80 aa, Synthetic construct; identical to SEQ ID NO: 1011

SEQ ID NO: 6345 - protein, 80 aa, Synthetic construct; identical to SEQ ID NO: 1012

SEQ ID NO: 6346 - protein, 80 aa, Synthetic construct; identical to SEQ ID NO: 1013

SEQ ID NO: 6347 - protein, 80 aa, Synthetic construct; identical to SEQ ID NO: 1014

SEQ ID NO: 6348 - protein, 80 aa, Synthetic construct
FHHPYFLPGPHYFPSSTCPYSRPPFGYGNFPSSMPECLSYYEDRYPKHEGIFSTLNRDYSFRDYSSECTHSENSRSCENM

SEQ ID NO: 6349 - protein, 80 aa, Synthetic construct
DIPTFYPLSPGGVGQITPPLGWQGQPVYPITGGFRQPYPSSLSVDTSMSRFSHHMIPGPPGPHTTGIPHPAIVTPQVKQE

SEQ ID NO: 6350 - protein, 80 aa, Synthetic construct
GGVGQITPPLGWQGQPVYPITGGFRQPYPSSLSVDTSMSRFSHHMIPGPPGPHTTGIPHPAIVTPQVKQEHPHTDSDLMH

SEQ ID NO: 6351 - protein, 80 aa, Synthetic construct
GWQGQPVYPITGGFRQPYPSSLSVDTSMSRFSHHMIPGPPGPHTTGIPHPAIVTPQVKQEHPHTDSDLMHVKPQHEQRKE

SEQ ID NO: 6352 - protein, 80 aa, Synthetic construct
TGGFRQPYPSSLSVDTSMSRFSHHMIPGPPGPHTTGIPHPAIVTPQVKQEHPHTDSDLMHVKPQHEQRKEQEPKRPHIKK

SEQ ID NO: 6353 - protein, 80 aa, Synthetic construct
SLSVDTSMSRFSHHMIPGPPGPHTTGIPHPAIVTPQVKQEHPHTDSDLMHVKPQHEQRKEQEPKRPHIKKPLNAFMLYMK

SEQ ID NO: 6354 - protein, 80 aa, Synthetic construct
FSHHMIPGPPGPHTTGIPHPAIVTPQVKQEHPHTDSDLMHVKPQHEQRKEQEPKRPHIKKPLNAFMLYMKEMRANVVAEC

SEQ ID NO: 6355 - protein, 80 aa, Synthetic construct
GGYGPVSGAVSGAKPGKKTRGRVKIKMEFIDNKLRRYTTFSKRKTGIMKKAYELSTLTGTQVLLLVASETGHVYTFATRK

SEQ ID NO: 6356 - protein, 80 aa, Synthetic construct
GRVKIKMEFIDNKLRRYTTFSKRKTGIMKKAYELSTLTGTQVLLLVASETGHVYTFATRKLQPMITSETGKALIQTCLNS

SEQ ID NO: 6357 - protein, 80 aa, Synthetic construct
SKRKTGIMKKAYELSTLTGTQVLLLVASETGHVYTFATRKLQPMITSETGKALIQTCLNSPDSPPRSDPTTDQRMSATGF

SEQ ID NO: 6358 - protein, 80 aa, Synthetic construct
AYELSTLTGTQVLLLVASETGHVYTFATRKLQPMITSETGKALIQTCLNSPDSPPRSDPTTDQRMSATGFEETDLTYQVS

SEQ ID NO: 6359 - protein, 80 aa, Synthetic construct; identical to SEQ ID NO: 5121

SEQ ID NO: 6360 - protein, 80 aa, Synthetic construct
LDKEKGKEKLEEDEAAAASTMAVSASLMPPIWDKTIPYDGESFHLEYMDLDEFLLENGIPASPTHLAHNLLLPVAELEGK

SEQ ID NO: 6361 - protein, 80 aa, Synthetic construct
EEDEAAAASTMAVSASLMPPIWDKTIPYDGESFHLEYMDLDEFLLENGIPASPTHLAHNLLLPVAELEGKESASSSTASP

SEQ ID NO: 6362 - protein, 80 aa, Synthetic construct
MAVSASLMPPIWDKTIPYDGESFHLEYMDLDEFLLENGIPASPTHLAHNLLLPVAELEGKESASSSTASPPSSSTAIFQP

SEQ ID NO: 6363 - protein, 80 aa, Synthetic construct; identical to SEQ ID NO: 42

SEQ ID NO: 6364 - protein, 80 aa, Synthetic construct
EIVYQPDGSAYIVESLSQLTQGGGACGSGSGSGPLPSLFLNSLPGAGGKQGDPSCAAPVYPQIINTFHIASSFGKWFEGP

SEQ ID NO: 6365 - protein, 80 aa, Synthetic construct
YIVESLSQLTQGGGACGSGSGSGPLPSLFLNSLPGAGGKQGDPSCAAPVYPQIINTFHIASSFGKWFEGPDQAFPNTSAL

SEQ ID NO: 6366 - protein, 80 aa, Synthetic construct
GSGPLPSLFLNSLPGAGGKQGDPSCAAPVYPQIINTFHIASSFGKWFEGPDQAFPNTSALAGLSPVLHSFRVFDVRHKSN

SEQ ID NO: 6367 - protein, 80 aa, Synthetic construct
NSLPGAGGKQGDPSCAAPVYPQIINTFHIASSFGKWFEGPDQAFPNTSALAGLSPVLHSFRVFDVRHKSNKDYLNSDGSA

SEQ ID NO: 6368 - protein, 80 aa, Synthetic construct
GDPSCAAPVYPQIINTFHIASSFGKWFEGPDQAFPNTSALAGLSPVLHSFRVFDVRHKSNKDYLNSDGSAKSSCVSKDVP

SEQ ID NO: 6369 - protein, 80 aa, Synthetic construct; identical to SEQ ID NO: 5595

SEQ ID NO: 6370 - protein, 80 aa, Synthetic construct; identical to SEQ ID NO: 1979

SEQ ID NO: 6371 - protein, 80 aa, Synthetic construct
AQTLAQAQAQVQAHLQQELQQQAALIQSQLFNPTLLPHFPMTTETLLQLQQQQHLLFPFYIPSAEFQLNPEVSLPVTSGA

SEQ ID NO: 6372 - protein, 80 aa, Synthetic construct
VQAHLQQELQQQAALIQSQLFNPTLLPHFPMTTETLLQLQQQQHLLFPFYIPSAEFQLNPEVSLPVTSGALTLTGTGPGL

SEQ ID NO: 6373 - protein, 80 aa, Synthetic construct
QQAALIQSQLFNPTLLPHFPMTTETLLQLQQQQHLLFPFYIPSAEFQLNPEVSLPVTSGALTLTGTGPGLLEDLKAQVQV

SEQ ID NO: 6374 - protein, 80 aa, Synthetic construct
FNPTLLPHFPMTTETLLQLQQQQHLLFPFYIPSAEFQLNPEVSLPVTSGALTLTGTGPGLLEDLKAQVQVPQQSHQQILP

SEQ ID NO: 6375 - protein, 80 aa, Synthetic construct; identical to SEQ ID NO: 5597

SEQ ID NO: 6376 - protein, 80 aa, Synthetic construct
SQLSHLPLKPLHTSTPQQLANLPPQLIPYQCDQCKLAFPSFEHWQEHQQLHFLSAQNQFIHPQFLDRSLDMPFMLFDPSN

SEQ ID NO: 6377 - protein, 80 aa, Synthetic construct
LHTSTPQQLANLPPQLIPYQCDQCKLAFPSFEHWQEHQQLHFLSAQNQFIHPQFLDRSLDMPFMLFDPSNPLLASQLLSG

SEQ ID NO: 6378 - protein, 80 aa, Synthetic construct
NLPPQLIPYQCDQCKLAFPSFEHWQEHQQLHFLSAQNQFIHPQFLDRSLDMPFMLFDPSNPLLASQLLSGAIPQIPASSA

SEQ ID NO: 6379 - protein, 80 aa, Synthetic construct
CDQCKLAFPSFEHWQEHQQLHFLSAQNQFIHPQFLDRSLDMPFMLFDPSNPLLASQLLSGAIPQIPASSATSPSTPTSTM

SEQ ID NO: 6380 - protein, 80 aa, Synthetic construct
SRHWHEAKRAGYNLTLSAMLLDCDGGLQMKGDIFDGTSFSHLPPSSSDGQGVPLSPVSKTMELSPRTLLSPSSIKVEGIE

SEQ ID NO: 6381 - protein, 80 aa, Synthetic construct
GYNLTLSAMLLDCDGGLQMKGDIFDGTSFSHLPPSSSDGQGVPLSPVSKTMELSPRTLLSPSSIKVEGIEDFESPSMSSV

SEQ ID NO: 6382 - protein, 80 aa, Synthetic construct
LDCDGGLQMKGDIFDGTSFSHLPPSSSDGQGVPLSPVSKTMELSPRTLLSPSSIKVEGIEDFESPSMSSVNLNFDQTKLD

SEQ ID NO: 6383 - protein, 80 aa, Synthetic construct
GDIFDGTSFSHLPPSSSDGQGVPLSPVSKTMELSPRTLLSPSSIKVEGIEDFESPSMSSVNLNFDQTKLDNDDCSSVNTA

SEQ ID NO: 6384 - protein, 80 aa, Synthetic construct
HLPPSSSDGQGVPLSPVSKTMELSPRTLLSPSSIKVEGIEDFESPSMSSVNLNFDQTKLDNDDCSSVNTAITDTTTGDEG

SEQ ID NO: 6385 - protein, 80 aa, Synthetic construct
GVPLSPVSKTMELSPRTLLSPSSIKVEGIEDFESPSMSSVNLNFDQTKLDNDDCSSVNTAITDTTTGDEGNADNDSATGI

SEQ ID NO: 6386 - protein, 80 aa, Synthetic construct
MELSPRTLLSPSSIKVEGIEDFESPSMSSVNLNFDQTKLDNDDCSSVNTAITDTTTGDEGNADNDSATGIATETKSSSAP

SEQ ID NO: 6387 - protein, 80 aa, Synthetic construct
EKEKAHKGKGEPLPVPKKEKGEAPTATAATISAPLPTMEYAVDPAQLQALQAALTSDPTALLTSQFLPYFVPGFSPYYAP

SEQ ID NO: 6388 - protein, 80 aa, Synthetic construct
EPLPVPKKEKGEAPTATAATISAPLPTMEYAVDPAQLQALQAALTSDPTALLTSQFLPYFVPGFSPYYAPQIPGALQSGY

SEQ ID NO: 6389 - protein, 80 aa, Synthetic construct; identical to SEQ ID NO: 1980

SEQ ID NO: 6390 - protein, 80 aa, Synthetic construct
ISAPLPTMEYAVDPAQLQALQAALTSDPTALLTSQFLPYFVPGFSPYYAPQIPGALQSGYLQPMYGMEGLFPYSPALSQA

SEQ ID NO: 6391 - protein, 80 aa, Synthetic construct
AVDPAQLQALQAALTSDPTALLTSQFLPYFVPGFSPYYAPQIPGALQSGYLQPMYGMEGLFPYSPALSQALMGLSPGSLL

SEQ ID NO: 6392 - protein, 80 aa, Synthetic construct
QAALTSDPTALLTSQFLPYFVPGFSPYYAPQIPGALQSGYLQPMYGMEGLFPYSPALSQALMGLSPGSLLQQYQQYQQSL

SEQ ID NO: 6393 - protein, 80 aa, Synthetic construct
LLTSQFLPYFVPGFSPYYAPQIPGALQSGYLQPMYGMEGLFPYSPALSQALMGLSPGSLLQQYQQYQQSLQEAIQQQQQR

SEQ ID NO: 6394 - protein, 80 aa, Synthetic construct
VPGFSPYYAPQIPGALQSGYLQPMYGMEGLFPYSPALSQALMGLSPGSLLQQYQQYQQSLQEAIQQQQQRQLQQQQQQKV

SEQ ID NO: 6395 - protein, 80 aa, Synthetic construct
QNSRTRLLYGKNHVLVQPKEDMEAVPGYLSLHQSAESLTLKWTPNQLMNGTLGDSELEKSVYWDYALVVPFSQVVCIHCH

SEQ ID NO: 6396 - protein, 80 aa, Synthetic construct
KNHVLVQPKEDMEAVPGYLSLHQSAESLTLKWTPNQLMNGTLGDSELEKSVYWDYALVVPFSQVVCIHCHQQKSGGTLVL

SEQ ID NO: 6397 - protein, 80 aa, Synthetic construct
DMEAVPGYLSLHQSAESLTLKWTPNQLMNGTLGDSELEKSVYWDYALVVPFSQVVCIHCHQQKSGGTLVLVSQDGIQRPP

SEQ ID NO: 6398 - protein, 80 aa, Synthetic construct; identical to SEQ ID NO: 3284

SEQ ID NO: 6399 - protein, 80 aa, Synthetic construct; identical to SEQ ID NO: 1015

SEQ ID NO: 6400 - protein, 80 aa, Synthetic construct
LAPTPPGKNSCGPLLLSHPPEASPLSWTPVPPGPWVPGHWLPPGFSMPPPVVCRLLYQEPAVSLPPFPGFDPGTSLQLPT

SEQ ID NO: 6401 - protein, 80 aa, Synthetic construct; identical to SEQ ID NO: 1016

SEQ ID NO: 6402 - protein, 80 aa, Synthetic construct; identical to SEQ ID NO: 2132

SEQ ID NO: 6403 - protein, 80 aa, Synthetic construct; identical to SEQ ID NO: 1909

SEQ ID NO: 6404 - protein, 80 aa, Synthetic construct
NRPMVLLKSGQLIKTEWEGTWWKSRVEEVDGSLVRILFLDDKRCEWIYRGSTRLEPMFSMKTSSASALEKKQGQLRTRPN

SEQ ID NO: 6405 - protein, 80 aa, Synthetic construct; identical to SEQ ID NO: 2873

SEQ ID NO: 6406 - protein, 80 aa, Synthetic construct; identical to SEQ ID NO: 2051

SEQ ID NO: 6407 - protein, 80 aa, Synthetic construct; identical to SEQ ID NO: 4016

SEQ ID NO: 6408 - protein, 80 aa, Synthetic construct
LQRDLYMKAEPPIPHYAAMGQGLVPTDLHHTQQSQMLHQLLQQHGAELPTHPSKKRKHSESPPSTLNAQMLNGMIKQEPG

SEQ ID NO: 6409 - protein, 80 aa, Synthetic construct
PPIPHYAAMGQGLVPTDLHHTQQSQMLHQLLQQHGAELPTHPSKKRKHSESPPSTLNAQMLNGMIKQEPGTVTALPLHPT

SEQ ID NO: 6410 - protein, 80 aa, Synthetic construct
QGLVPTDLHHTQQSQMLHQLLQQHGAELPTHPSKKRKHSESPPSTLNAQMLNGMIKQEPGTVTALPLHPTRAPSPPWPPQ

SEQ ID NO: 6411 - protein, 80 aa, Synthetic construct
TQQSQMLHQLLQQHGAELPTHPSKKRKHSESPPSTLNAQMLNGMIKQEPGTVTALPLHPTRAPSPPWPPQGPLSPGPGSL

SEQ ID NO: 6412 - protein, 80 aa, Synthetic construct
LQQHGAELPTHPSKKRKHSESPPSTLNAQMLNGMIKQEPGTVTALPLHPTRAPSPPWPPQGPLSPGPGSLPLSIARVQTP

SEQ ID NO: 6413 - protein, 80 aa, Synthetic construct
HPSKKRKHSESPPSTLNAQMLNGMIKQEPGTVTALPLHPTRAPSPPWPPQGPLSPGPGSLPLSIARVQTPPWHPPGAPSP

SEQ ID NO: 6414 - protein, 80 aa, Synthetic construct
SPPSTLNAQMLNGMIKQEPGTVTALPLHPTRAPSPPWPPQGPLSPGPGSLPLSIARVQTPPWHPPGAPSPGLLQDSDSLS

SEQ ID NO: 6415 - protein, 80 aa, Synthetic construct
LNGMIKQEPGTVTALPLHPTRAPSPPWPPQGPLSPGPGSLPLSIARVQTPPWHPPGAPSPGLLQDSDSLSGSYLDPNYQS

SEQ ID NO: 6416 - protein, 80 aa, Synthetic construct; identical to SEQ ID NO: 3992

SEQ ID NO: 6417 - protein, 80 aa, Synthetic construct
LENSMSITSQYCAPGDACRPGNFTYHIPVSSGTPLHLSLTLQMNSSSPVSVVLCSLRSKEEPCEEGSLPQSLHTHQDTQG

SEQ ID NO: 6418 - protein, 80 aa, Synthetic construct
YCAPGDACRPGNFTYHIPVSSGTPLHLSLTLQMNSSSPVSVVLCSLRSKEEPCEEGSLPQSLHTHQDTQGTSHRWPITIL

SEQ ID NO: 6419 - protein, 80 aa, Synthetic construct
GNPGIMSPLAKKKLLSQVSGASLSSSYPYGSPPPLISKKKLIARDDLCSSLSQTHHGQSTDHMAVSRPSVIQHVQSFRSK

SEQ ID NO: 6420 - protein, 80 aa, Synthetic construct; identical to SEQ ID NO: 1017

SEQ ID NO: 6421 - protein, 80 aa, Synthetic construct; identical to SEQ ID NO: 1018

SEQ ID NO: 6422 - protein, 80 aa, Synthetic construct; identical to SEQ ID NO: 1019

SEQ ID NO: 6423 - protein, 80 aa, Synthetic construct; identical to SEQ ID NO: 2244

SEQ ID NO: 6424 - protein, 80 aa, Synthetic construct; identical to SEQ ID NO: 1020

SEQ ID NO: 6425 - protein, 80 aa, Synthetic construct; identical to SEQ ID NO: 1021

SEQ ID NO: 6426 - protein, 80 aa, Synthetic construct
YGQPHKINPLPPQQEWINQPVRVNVKREYDHMNGSRESPVDCSVSKCSKLVGGGESNPMNYNSYMDEKNGPPPPNMTTNE

SEQ ID NO: 6427 - protein, 80 aa, Synthetic construct; identical to SEQ ID NO: 2056

SEQ ID NO: 6428 - protein, 80 aa, Synthetic construct
VRVNVKREYDHMNGSRESPVDCSVSKCSKLVGGGESNPMNYNSYMDEKNGPPPPNMTTNERRVIVPADPTLWTQEHVRQW

SEQ ID NO: 6429 - protein, 80 aa, Synthetic construct; identical to SEQ ID NO: 2057

SEQ ID NO: 6430 - protein, 80 aa, Synthetic construct
GQIPHPLGWLVPQQGQPMYSLPPGGFRHPYPALAMNASMSSLVSSRFSPHMVAPAHPGLPTSGIPHPAIVSPIVKQEPAP

SEQ ID NO: 6431 - protein, 80 aa, Synthetic construct
VPQQGQPMYSLPPGGFRHPYPALAMNASMSSLVSSRFSPHMVAPAHPGLPTSGIPHPAIVSPIVKQEPAPPSLSPAVSVK

SEQ ID NO: 6432 - protein, 80 aa, Synthetic construct
LPPGGFRHPYPALAMNASMSSLVSSRFSPHMVAPAHPGLPTSGIPHPAIVSPIVKQEPAPPSLSPAVSVKSPVTVKKEEE

SEQ ID NO: 6433 - protein, 80 aa, Synthetic construct
PALAMNASMSSLVSSRFSPHMVAPAHPGLPTSGIPHPAIVSPIVKQEPAPPSLSPAVSVKSPVTVKKEEEKKPHVKKPLN

SEQ ID NO: 6434 - protein, 80 aa, Synthetic construct
SLVSSRFSPHMVAPAHPGLPTSGIPHPAIVSPIVKQEPAPPSLSPAVSVKSPVTVKKEEEKKPHVKKPLNAFMLYMKEMR

SEQ ID NO: 6435 - protein, 80 aa, Synthetic construct
MVAPAHPGLPTSGIPHPAIVSPIVKQEPAPPSLSPAVSVKSPVTVKKEEEKKPHVKKPLNAFMLYMKEMRAKVVAECTLK

SEQ ID NO: 6436 - protein, 80 aa, Synthetic construct
TSGIPHPAIVSPIVKQEPAPPSLSPAVSVKSPVTVKKEEEKKPHVKKPLNAFMLYMKEMRAKVVAECTLKESAAINQILG

SEQ ID NO: 6437 - protein, 80 aa, Synthetic construct
PSLSPAVSVKSPVTVKKEEEKKPHVKKPLNAFMLYMKEMRAKVVAECTLKESAAINQILGRKWHNLSREEQAKYYELARK

SEQ ID NO: 6438 - protein, 80 aa, Synthetic construct
SPVTVKKEEEKKPHVKKPLNAFMLYMKEMRAKVVAECTLKESAAINQILGRKWHNLSREEQAKYYELARKERQLHSQLYP

SEQ ID NO: 6439 - protein, 80 aa, Synthetic construct; identical to SEQ ID NO: 5334

SEQ ID NO: 6440 - protein, 80 aa, Synthetic construct; identical to SEQ ID NO: 2921

SEQ ID NO: 6441 - protein, 80 aa, Synthetic construct; identical to SEQ ID NO: 2188

SEQ ID NO: 6442 - protein, 80 aa, Synthetic construct; identical to SEQ ID NO: 2922

SEQ ID NO: 6443 - protein, 80 aa, Synthetic construct; identical to SEQ ID NO: 2923

SEQ ID NO: 6444 - protein, 80 aa, Synthetic construct
EMTASSSSDYGQTSKMSPRVPQQDWLSQPPARVTIKMECNPSQVNGSRNSPDECSVAKGGKMVGSPDTVGMNYGSYMEEK

SEQ ID NO: 6445 - protein, 80 aa, Synthetic construct
GQTSKMSPRVPQQDWLSQPPARVTIKMECNPSQVNGSRNSPDECSVAKGGKMVGSPDTVGMNYGSYMEEKHMPPPNMTTN

SEQ ID NO: 6446 - protein, 80 aa, Synthetic construct
PQQDWLSQPPARVTIKMECNPSQVNGSRNSPDECSVAKGGKMVGSPDTVGMNYGSYMEEKHMPPPNMTTNERRVIVPADP

SEQ ID NO: 6447 - protein, 80 aa, Synthetic construct; identical to SEQ ID NO: 1831

SEQ ID NO: 6448 - protein, 80 aa, Synthetic construct; identical to SEQ ID NO: 4632

SEQ ID NO: 6449 - protein, 80 aa, Synthetic construct; identical to SEQ ID NO: 5186

SEQ ID NO: 6450 - protein, 80 aa, Synthetic construct; identical to SEQ ID NO: 5187

SEQ ID NO: 6451 - protein, 80 aa, Synthetic construct
FIIQYQESLRIQAQFGPLAQLSPQERLSRETALQQKQVSLEAWLQREAQTLQQYRVELAEKHQKTLQLLRKQQTIILDDE

SEQ ID NO: 6452 - protein, 80 aa, Synthetic construct; identical to SEQ ID NO: 5016

SEQ ID NO: 6453 - protein, 80 aa, Synthetic construct
EVMGTMDAFDVHEFDQYLPLGGPAPPEPGQAYGGAYFHAGASPVWAHKSAPSASASPTETGPPRPHIKTEQPSPGHYGDQ

SEQ ID NO: 6454 - protein, 80 aa, Synthetic construct
VHEFDQYLPLGGPAPPEPGQAYGGAYFHAGASPVWAHKSAPSASASPTETGPPRPHIKTEQPSPGHYGDQPRGSPDYGSC

SEQ ID NO: 6455 - protein, 80 aa, Synthetic construct
GGPAPPEPGQAYGGAYFHAGASPVWAHKSAPSASASPTETGPPRPHIKTEQPSPGHYGDQPRGSPDYGSCSGQSSATPAA

SEQ ID NO: 6456 - protein, 80 aa, Synthetic construct
AYGGAYFHAGASPVWAHKSAPSASASPTETGPPRPHIKTEQPSPGHYGDQPRGSPDYGSCSGQSSATPAAPAGPFAGSQG

SEQ ID NO: 6457 - protein, 80 aa, Synthetic construct
ASPVWAHKSAPSASASPTETGPPRPHIKTEQPSPGHYGDQPRGSPDYGSCSGQSSATPAAPAGPFAGSQGDYGDLQASSY

SEQ ID NO: 6458 - protein, 80 aa, Synthetic construct
PSASASPTETGPPRPHIKTEQPSPGHYGDQPRGSPDYGSCSGQSSATPAAPAGPFAGSQGDYGDLQASSYYGAYPGYAPG

SEQ ID NO: 6459 - protein, 80 aa, Synthetic construct; identical to SEQ ID NO: 2228

SEQ ID NO: 6460 - protein, 80 aa, Synthetic construct
NTAVVAVETHTIHKIEEGIDTGTIEANEDMEIAYPITCGESKAILLWKKFVCPGINVKCVKFNDQLISPKHFVHLAGKST

SEQ ID NO: 6461 - protein, 80 aa, Synthetic construct
ITQIAISEESMEEAGLEWNSALTAAVTMATEEGVKKDSEEISEDTLMFWKGIADVGLMEEVVCNIQKEIEELLRGVQQRL

SEQ ID NO: 6462 - protein, 80 aa, Synthetic construct
MEEAGLEWNSALTAAVTMATEEGVKKDSEEISEDTLMFWKGIADVGLMEEVVCNIQKEIEELLRGVQQRLIQAPFQVTDA

SEQ ID NO: 6463 - protein, 80 aa, Synthetic construct
ASGAYNPYIEIIEQPRQRGMRFRYKCEGRSAGSIPGEHSTDNNRTYPSIQIMNYYGKGKVRITLVTKNDPYKPHPHDLVG

SEQ ID NO: 6464 - protein, 80 aa, Synthetic construct; identical to SEQ ID NO: 4617

SEQ ID NO: 6465 - protein, 80 aa, Synthetic construct; identical to SEQ ID NO: 3634

SEQ ID NO: 6466 - protein, 80 aa, Synthetic construct; identical to SEQ ID NO: 3080

SEQ ID NO: 6467 - protein, 80 aa, Synthetic construct; identical to SEQ ID NO: 3081

SEQ ID NO: 6468 - protein, 80 aa, Synthetic construct
QRKMAAGLPWTSRTSPTVFSEDQLSKEKVKEEIGSSWIETPPSIKSLDSNDSGVYTSACKRRRLSPSNSSNENSPSIKCE

SEQ ID NO: 6469 - protein, 80 aa, Synthetic construct; identical to SEQ ID NO: 1022

SEQ ID NO: 6470 - protein, 80 aa, Synthetic construct; identical to SEQ ID NO: 1023

SEQ ID NO: 6471 - protein, 80 aa, Synthetic construct; identical to SEQ ID NO: 1719

SEQ ID NO: 6472 - protein, 80 aa, Synthetic construct; identical to SEQ ID NO: 1024

SEQ ID NO: 6473 - protein, 80 aa, Synthetic construct; identical to SEQ ID NO: 1025

SEQ ID NO: 6474 - protein, 80 aa, Synthetic construct; identical to SEQ ID NO: 1026

SEQ ID NO: 6475 - protein, 80 aa, Synthetic construct; identical to SEQ ID NO: 1027

SEQ ID NO: 6476 - protein, 80 aa, Synthetic construct; identical to SEQ ID NO: 1028

SEQ ID NO: 6477 - protein, 80 aa, Synthetic construct; identical to SEQ ID NO: 1832

SEQ ID NO: 6478 - protein, 80 aa, Synthetic construct; identical to SEQ ID NO: 1029

SEQ ID NO: 6479 - protein, 80 aa, Synthetic construct; identical to SEQ ID NO: 4117

SEQ ID NO: 6480 - protein, 80 aa, Synthetic construct
YQTSKSNVSSFVDEHEPSMVSSSCISVIKHSPQSSLSDVSEVSSVEHTQESSVQGSCRSPENKFQIIKQEPMELESYTRE

SEQ ID NO: 6481 - protein, 80 aa, Synthetic construct; identical to SEQ ID NO: 1965

SEQ ID NO: 6482 - protein, 80 aa, Synthetic construct
SSSCISVIKHSPQSSLSDVSEVSSVEHTQESSVQGSCRSPENKFQIIKQEPMELESYTREPRDDRGSYTASIYQNYMGNS

SEQ ID NO: 6483 - protein, 80 aa, Synthetic construct
EVSSVEHTQESSVQGSCRSPENKFQIIKQEPMELESYTREPRDDRGSYTASIYQNYMGNSFSGYSHSPPLLQVNRSSSNS

SEQ ID NO: 6484 - protein, 80 aa, Synthetic construct
SSVQGSCRSPENKFQIIKQEPMELESYTREPRDDRGSYTASIYQNYMGNSFSGYSHSPPLLQVNRSSSNSPRTSETDDGV

SEQ ID NO: 6485 - protein, 80 aa, Synthetic construct
ENKFQIIKQEPMELESYTREPRDDRGSYTASIYQNYMGNSFSGYSHSPPLLQVNRSSSNSPRTSETDDGVVGKSSDGEDE

SEQ ID NO: 6486 - protein, 80 aa, Synthetic construct; identical to SEQ ID NO: 1966

SEQ ID NO: 6487 - protein, 80 aa, Synthetic construct; identical to SEQ ID NO: 1030

SEQ ID NO: 6488 - protein, 80 aa, Synthetic construct; identical to SEQ ID NO: 1031

SEQ ID NO: 6489 - protein, 80 aa, Synthetic construct; identical to SEQ ID NO: 1032

SEQ ID NO: 6490 - protein, 80 aa, Synthetic construct; identical to SEQ ID NO: 1033

SEQ ID NO: 6491 - protein, 80 aa, Synthetic construct; identical to SEQ ID NO: 1034

SEQ ID NO: 6492 - protein, 80 aa, Synthetic construct; identical to SEQ ID NO: 1035

SEQ ID NO: 6493 - protein, 80 aa, Synthetic construct
KAMQIKVEAFDNEFEATQKLSSPIDMTSKRHFELEKHSAPSMVHSSLTPFSVQVTNIQDWSLKSEHWHQKELSGKTQNSF

SEQ ID NO: 6494 - protein, 80 aa, Synthetic construct
GLGQSQAPAASRKQGLPEAPPFLPAAPSPTPLPVQPLSLTHIGGPHVATSVPLPVTWVLTAQGLLPVPVPAVVSLPRPAG

SEQ ID NO: 6495 - protein, 80 aa, Synthetic construct
SRKQGLPEAPPFLPAAPSPTPLPVQPLSLTHIGGPHVATSVPLPVTWVLTAQGLLPVPVPAVVSLPRPAGTPGPAGLLAT

SEQ ID NO: 6496 - protein, 80 aa, Synthetic construct
PFLPAAPSPTPLPVQPLSLTHIGGPHVATSVPLPVTWVLTAQGLLPVPVPAVVSLPRPAGTPGPAGLLATLLPPLTETRA

SEQ ID NO: 6497 - protein, 80 aa, Synthetic construct
PLPVQPLSLTHIGGPHVATSVPLPVTWVLTAQGLLPVPVPAVVSLPRPAGTPGPAGLLATLLPPLTETRAAQGPRAPALS

SEQ ID NO: 6498 - protein, 80 aa, Synthetic construct
HIGGPHVATSVPLPVTWVLTAQGLLPVPVPAVVSLPRPAGTPGPAGLLATLLPPLTETRAAQGPRAPALSSSWQPPANMN

SEQ ID NO: 6499 - protein, 80 aa, Synthetic construct; identical to SEQ ID NO: 55

SEQ ID NO: 6500 - protein, 80 aa, Synthetic construct; identical to SEQ ID NO: 56

SEQ ID NO: 6501 - protein, 80 aa, Synthetic construct; identical to SEQ ID NO: 694

SEQ ID NO: 6502 - protein, 80 aa, Synthetic construct; identical to SEQ ID NO: 57

SEQ ID NO: 6503 - protein, 80 aa, Synthetic construct; identical to SEQ ID NO: 2334

SEQ ID NO: 6504 - protein, 80 aa, Synthetic construct; identical to SEQ ID NO: 1036

SEQ ID NO: 6505 - protein, 80 aa, Synthetic construct; identical to SEQ ID NO: 4584

SEQ ID NO: 6506 - protein, 80 aa, Synthetic construct; identical to SEQ ID NO: 2335

SEQ ID NO: 6507 - protein, 80 aa, Synthetic construct
WQPPLKNVSSSTDVGIIDGLSGLSSSVDDYPVDTIAKRFRYDSALVSALMDMEEDILEGMRSQDLDDYLNGPFTVVVKES

SEQ ID NO: 6508 - protein, 80 aa, Synthetic construct
RYLDWRALMKRKRMKANIKLVGSGFPLPSSDLDDSLTEEIDEKIGFRNDANFDWQNVADFRDAGGSLTEVKVEEEERDPQ

SEQ ID NO: 6509 - protein, 80 aa, Synthetic construct
RKRMKANIKLVGSGFPLPSSDLDDSLTEEIDEKIGFRNDANFDWQNVADFRDAGGSLTEVKVEEEERDPQSPEFEIEEEE

SEQ ID NO: 6510 - protein, 80 aa, Synthetic construct
VGSGFPLPSSDLDDSLTEEIDEKIGFRNDANFDWQNVADFRDAGGSLTEVKVEEEERDPQSPEFEIEEEEEMLSSVIPDS

SEQ ID NO: 6511 - protein, 80 aa, Synthetic construct
DLDDSLTEEIDEKIGFRNDANFDWQNVADFRDAGGSLTEVKVEEEERDPQSPEFEIEEEEEMLSSVIPDSRRENELPDFP

SEQ ID NO: 6512 - protein, 80 aa, Synthetic construct
DEKIGFRNDANFDWQNVADFRDAGGSLTEVKVEEEERDPQSPEFEIEEEEEMLSSVIPDSRRENELPDFPHIDEFFTLNS

SEQ ID NO: 6513 - protein, 80 aa, Synthetic construct
NFDWQNVADFRDAGGSLTEVKVEEEERDPQSPEFEIEEEEEMLSSVIPDSRRENELPDFPHIDEFFTLNSTPSRSAYDEP

SEQ ID NO: 6514 - protein, 80 aa, Synthetic construct
RDAGGSLTEVKVEEEERDPQSPEFEIEEEEEMLSSVIPDSRRENELPDFPHIDEFFTLNSTPSRSAYDEPHLLVNIEKQK

SEQ ID NO: 6515 - protein, 80 aa, Synthetic construct
EMLSSVIPDSRRENELPDFPHIDEFFTLNSTPSRSAYDEPHLLVNIEKQKLELEKRRLDIEAERLQVEKERLQIEKERLR

SEQ ID NO: 6516 - protein, 80 aa, Synthetic construct
RRENELPDFPHIDEFFTLNSTPSRSAYDEPHLLVNIEKQKLELEKRRLDIEAERLQVEKERLQIEKERLRHLDMEHERLQ

SEQ ID NO: 6517 - protein, 80 aa, Synthetic construct
HIDEFFTLNSTPSRSAYDEPHLLVNIEKQKLELEKRRLDIEAERLQVEKERLQIEKERLRHLDMEHERLQLEKERLQIER

SEQ ID NO: 6518 - protein, 80 aa, Synthetic construct; identical to SEQ ID NO: 1950

SEQ ID NO: 6519 - protein, 80 aa, Synthetic construct
LELEKRRLDIEAERLQVEKERLQIEKERLRHLDMEHERLQLEKERLQIEREKLRLQIVNSEKPSLENELGQGEKSMLQPQ

SEQ ID NO: 6520 - protein, 80 aa, Synthetic construct; identical to SEQ ID NO: 3219

SEQ ID NO: 6521 - protein, 80 aa, Synthetic construct
TELAAEGQLTLQQFAQSTEMLKRVVQEHLPLMSEAGAGLPDMEAVAGAEALNGQSDFPYLGAFPINPGLFIMTPAGVFLA

SEQ ID NO: 6522 - protein, 80 aa, Synthetic construct
LQQFAQSTEMLKRVVQEHLPLMSEAGAGLPDMEAVAGAEALNGQSDFPYLGAFPINPGLFIMTPAGVFLAESALHMAGLA

SEQ ID NO: 6523 - protein, 80 aa, Synthetic construct
LKRVVQEHLPLMSEAGAGLPDMEAVAGAEALNGQSDFPYLGAFPINPGLFIMTPAGVFLAESALHMAGLAEYPMQGELAS

SEQ ID NO: 6524 - protein, 80 aa, Synthetic construct
LMSEAGAGLPDMEAVAGAEALNGQSDFPYLGAFPINPGLFIMTPAGVFLAESALHMAGLAEYPMQGELASAISSGKKKRK

SEQ ID NO: 6525 - protein, 80 aa, Synthetic construct
LNGQSDFPYLGAFPINPGLFIMTPAGVFLAESALHMAGLAEYPMQGELASAISSGKKKRKRCGMCAPCRRRINCEQCSSC

SEQ ID NO: 6526 - protein, 80 aa, Synthetic construct
GAFPINPGLFIMTPAGVFLAESALHMAGLAEYPMQGELASAISSGKKKRKRCGMCAPCRRRINCEQCSSCRNRKTGHQIC

SEQ ID NO: 6527 - protein, 80 aa, Synthetic construct; identical to SEQ ID NO: 1037

SEQ ID NO: 6528 - protein, 80 aa, Synthetic construct; identical to SEQ ID NO: 1038

SEQ ID NO: 6529 - protein, 80 aa, Synthetic construct; identical to SEQ ID NO: 1039

SEQ ID NO: 6530 - protein, 80 aa, Synthetic construct; identical to SEQ ID NO: 2016

SEQ ID NO: 6531 - protein, 80 aa, Synthetic construct
KKPAEYGYVSLGRLGAAKGALHPGCFAPLHPPPPPPPPPAELKAEPGFEPADCKRKEEAGAPGGGAGMAAGFPYALRAYL

SEQ ID NO: 6532 - protein, 80 aa, Synthetic construct
LGRLGAAKGALHPGCFAPLHPPPPPPPPPAELKAEPGFEPADCKRKEEAGAPGGGAGMAAGFPYALRAYLGYQAVPSGSS

SEQ ID NO: 6533 - protein, 80 aa, Synthetic construct; identical to SEQ ID NO: 1900

SEQ ID NO: 6534 - protein, 80 aa, Synthetic construct; identical to SEQ ID NO: 2756

SEQ ID NO: 6535 - protein, 80 aa, Synthetic construct; identical to SEQ ID NO: 1901

SEQ ID NO: 6536 - protein, 80 aa, Synthetic construct; identical to SEQ ID NO: 2172

SEQ ID NO: 6537 - protein, 80 aa, Synthetic construct
PAVPEASASPKQRRSIIRDRGPMYDDPTLPEGWTRKLKQRKSGRSAGKYDVYLINPQGKAFRSKVELIAYFEKVGDTSLD

SEQ ID NO: 6538 - protein, 80 aa, Synthetic construct; identical to SEQ ID NO: 3855

SEQ ID NO: 6539 - protein, 80 aa, Synthetic construct
STQVMVIKRPGRKRKAEADPQAIPKKRGRKPGSVVAAAAAEAKKKAVKESSIRSVQETVLPIKKRKTRETVSIEVKEVVK

SEQ ID NO: 6540 - protein, 80 aa, Synthetic construct; identical to SEQ ID NO: 2173

SEQ ID NO: 6541 - protein, 80 aa, Synthetic construct; identical to SEQ ID NO: 1040

SEQ ID NO: 6542 - protein, 80 aa, Synthetic construct
EAKKKAVKESSIRSVQETVLPIKKRKTRETVSIEVKEVVKPLLVSTLGEKSGKGLKTCKSPGRKSKESSPKGRSSSASSP

SEQ ID NO: 6543 - protein, 80 aa, Synthetic construct
SIRSVQETVLPIKKRKTRETVSIEVKEVVKPLLVSTLGEKSGKGLKTCKSPGRKSKESSPKGRSSSASSPPKKEHHHHHH

SEQ ID NO: 6544 - protein, 80 aa, Synthetic construct
DLTGGLPEVATPESEEAFTLPLLNDPEPKPSVEPVKSISSMELKTEPFDDFLFPASSRPSGSETARSVPDMDLSGSFYAA

SEQ ID NO: 6545 - protein, 80 aa, Synthetic construct
TPESEEAFTLPLLNDPEPKPSVEPVKSISSMELKTEPFDDFLFPASSRPSGSETARSVPDMDLSGSFYAADWEPLHSGSL

SEQ ID NO: 6546 - protein, 80 aa, Synthetic construct
PLLNDPEPKPSVEPVKSISSMELKTEPFDDFLFPASSRPSGSETARSVPDMDLSGSFYAADWEPLHSGSLGMGPMATELE

SEQ ID NO: 6547 - protein, 80 aa, Synthetic construct
SVEPVKSISSMELKTEPFDDFLFPASSRPSGSETARSVPDMDLSGSFYAADWEPLHSGSLGMGPMATELEPLCTPVVTCT

SEQ ID NO: 6548 - protein, 80 aa, Synthetic construct
MELKTEPFDDFLFPASSRPSGSETARSVPDMDLSGSFYAADWEPLHSGSLGMGPMATELEPLCTPVVTCTPSCTAYTSSF

SEQ ID NO: 6549 - protein, 80 aa, Synthetic construct; identical to SEQ ID NO: 2707

SEQ ID NO: 6550 - protein, 80 aa, Synthetic construct
GGRKIPETTMNFDPDCFLNNPKQGQTYGGGGLKAEMVSSNIRHSPPGERSFSFTTVLTKEIKTEDTSFEQQMAKEAYSSS

SEQ ID NO: 6551 - protein, 80 aa, Synthetic construct
NFDPDCFLNNPKQGQTYGGGGLKAEMVSSNIRHSPPGERSFSFTTVLTKEIKTEDTSFEQQMAKEAYSSSAAAVAASSLT

SEQ ID NO: 6552 - protein, 80 aa, Synthetic construct
PKQGQTYGGGGLKAEMVSSNIRHSPPGERSFSFTTVLTKEIKTEDTSFEQQMAKEAYSSSAAAVAASSLTLTAGSSLLPS

SEQ ID NO: 6553 - protein, 80 aa, Synthetic construct
GLKAEMVSSNIRHSPPGERSFSFTTVLTKEIKTEDTSFEQQMAKEAYSSSAAAVAASSLTLTAGSSLLPSGGGLSPSTTL

SEQ ID NO: 6554 - protein, 80 aa, Synthetic construct
IRHSPPGERSFSFTTVLTKEIKTEDTSFEQQMAKEAYSSSAAAVAASSLTLTAGSSLLPSGGGLSPSTTLEQMDFSAIDS

SEQ ID NO: 6555 - protein, 80 aa, Synthetic construct
FSFTTVLTKEIKTEDTSFEQQMAKEAYSSSAAAVAASSLTLTAGSSLLPSGGGLSPSTTLEQMDFSAIDSNKDYTSSFSQ

SEQ ID NO: 6556 - protein, 80 aa, Synthetic construct
IKTEDTSFEQQMAKEAYSSSAAAVAASSLTLTAGSSLLPSGGGLSPSTTLEQMDFSAIDSNKDYTSSFSQTGHSPHIHQT

SEQ ID NO: 6557 - protein, 80 aa, Synthetic construct
PSPSFFLQDASKPLPVEQNTHSSLSDSGGTFVMPTVKTEASSQTSSCSGHVETRIESTSSLHLMQFQANFQAMTAEGEVT

SEQ ID NO: 6558 - protein, 80 aa, Synthetic construct
SKPLPVEQNTHSSLSDSGGTFVMPTVKTEASSQTSSCSGHVETRIESTSSLHLMQFQANFQAMTAEGEVTMETSQAAEGS

SEQ ID NO: 6559 - protein, 80 aa, Synthetic construct; identical to SEQ ID NO: 2713

SEQ ID NO: 6560 - protein, 80 aa, Synthetic construct; identical to SEQ ID NO: 2710

SEQ ID NO: 6561 - protein, 80 aa, Synthetic construct
PCCSPQQGSLQLSSSEGGASTMAYMHVAEVVSAASAQGTLGMLQQSGRVFMVTDYSPEWSYPEGGVKVLITGPWQEASNN

SEQ ID NO: 6562 - protein, 80 aa, Synthetic construct
QLSSSEGGASTMAYMHVAEVVSAASAQGTLGMLQQSGRVFMVTDYSPEWSYPEGGVKVLITGPWQEASNNYSCLFDQISV

SEQ ID NO: 6563 - protein, 80 aa, Synthetic construct
PASLIQPGVLRCYCPAHDTGLVTLQVAFNNQIISNSVVFEYKARALPTLPSSQHDWLSLDDNQFRMSILERLEQMERRMA

SEQ ID NO: 6564 - protein, 80 aa, Synthetic construct
LVTLQVAFNNQIISNSVVFEYKARALPTLPSSQHDWLSLDDNQFRMSILERLEQMERRMAEMTGSQQHKQASGGGSSGGG

SEQ ID NO: 6565 - protein, 80 aa, Synthetic construct; identical to SEQ ID NO: 1713

SEQ ID NO: 6566 - protein, 80 aa, Synthetic construct; identical to SEQ ID NO: 1041

SEQ ID NO: 6567 - protein, 80 aa, Synthetic construct
SSQHDWLSLDDNQFRMSILERLEQMERRMAEMTGSQQHKQASGGGSSGGGSGSGNGGSQAQCASGTGALGSCFESRVVVV

SEQ ID NO: 6568 - protein, 80 aa, Synthetic construct
DNQFRMSILERLEQMERRMAEMTGSQQHKQASGGGSSGGGSGSGNGGSQAQCASGTGALGSCFESRVVVVCEKMMSRACW

SEQ ID NO: 6569 - protein, 80 aa, Synthetic construct; identical to SEQ ID NO: 4630

SEQ ID NO: 6570 - protein, 80 aa, Synthetic construct
AQFSSSAIQKMGEVPHTLATGALPYASTLGYQNGAFGSLSCPSQHTHTHPSPTNPGYVVPCNCTAWSASTLQPPVAYILF

SEQ ID NO: 6571 - protein, 80 aa, Synthetic construct
MGEVPHTLATGALPYASTLGYQNGAFGSLSCPSQHTHTHPSPTNPGYVVPCNCTAWSASTLQPPVAYILFPGMTKTGIDP

SEQ ID NO: 6572 - protein, 80 aa, Synthetic construct; identical to SEQ ID NO: 70

SEQ ID NO: 6573 - protein, 80 aa, Synthetic construct; identical to SEQ ID NO: 3235

SEQ ID NO: 6574 - protein, 80 aa, Synthetic construct
QLQEAWLAEAQVPDDEQFVPDFQSDNLVLHAPPPTKIKRELHSPSSELSSCSHEQALGANYGEKCLYNYCAYDRKPPSGF

SEQ ID NO: 6575 - protein, 80 aa, Synthetic construct
QVPDDEQFVPDFQSDNLVLHAPPPTKIKRELHSPSSELSSCSHEQALGANYGEKCLYNYCAYDRKPPSGFKPLTPPTTPL

SEQ ID NO: 6576 - protein, 80 aa, Synthetic construct
DFQSDNLVLHAPPPTKIKRELHSPSSELSSCSHEQALGANYGEKCLYNYCAYDRKPPSGFKPLTPPTTPLSPTHQNPLFP

SEQ ID NO: 6577 - protein, 80 aa, Synthetic construct
APPPTKIKRELHSPSSELSSCSHEQALGANYGEKCLYNYCAYDRKPPSGFKPLTPPTTPLSPTHQNPLFPPPQATLPTSG

SEQ ID NO: 6578 - protein, 80 aa, Synthetic construct
QMPKMMPENQYPSEQRFQRQLSEPCHPFPPQPGVPGDNRPSYHRQMSEPIVPAAPPPPQGFKQEYHDPLYEHGVPGMPGP

SEQ ID NO: 6579 - protein, 80 aa, Synthetic construct
YPSEQRFQRQLSEPCHPFPPQPGVPGDNRPSYHRQMSEPIVPAAPPPPQGFKQEYHDPLYEHGVPGMPGPPAHGFQSPMG

SEQ ID NO: 6580 - protein, 80 aa, Synthetic construct; identical to SEQ ID NO: 1042

SEQ ID NO: 6581 - protein, 80 aa, Synthetic construct; identical to SEQ ID NO: 2366

SEQ ID NO: 6582 - protein, 80 aa, Synthetic construct; identical to SEQ ID NO: 1043

SEQ ID NO: 6583 - protein, 80 aa, Synthetic construct
VPAAPPPPQGFKQEYHDPLYEHGVPGMPGPPAHGFQSPMGIKQEPRDYCVDSEVPNCQSSYMRGGYFSSSHEGFSYEKDP

SEQ ID NO: 6584 - protein, 80 aa, Synthetic construct; identical to SEQ ID NO: 1044

SEQ ID NO: 6585 - protein, 80 aa, Synthetic construct
EHGVPGMPGPPAHGFQSPMGIKQEPRDYCVDSEVPNCQSSYMRGGYFSSSHEGFSYEKDPRLYFDDTCVVPERLEGKVKQ

SEQ ID NO: 6586 - protein, 80 aa, Synthetic construct
PAHGFQSPMGIKQEPRDYCVDSEVPNCQSSYMRGGYFSSSHEGFSYEKDPRLYFDDTCVVPERLEGKVKQEPTMYREGPP

SEQ ID NO: 6587 - protein, 80 aa, Synthetic construct
IKQEPRDYCVDSEVPNCQSSYMRGGYFSSSHEGFSYEKDPRLYFDDTCVVPERLEGKVKQEPTMYREGPPYQRRGSLQLW

SEQ ID NO: 6588 - protein, 80 aa, Synthetic construct; identical to SEQ ID NO: 3157

SEQ ID NO: 6589 - protein, 80 aa, Synthetic construct; identical to SEQ ID NO: 3158

SEQ ID NO: 6590 - protein, 80 aa, Synthetic construct; identical to SEQ ID NO: 2647

SEQ ID NO: 6591 - protein, 80 aa, Synthetic construct
TFPVKHQVWKQKGEEYRVTGYGGWSWISKTHVYRFVPKLPGNTNVNYRKSLEGTKNNMDENMDESDKRKCSRSPKKIKIE

SEQ ID NO: 6592 - protein, 80 aa, Synthetic construct
QKGEEYRVTGYGGWSWISKTHVYRFVPKLPGNTNVNYRKSLEGTKNNMDENMDESDKRKCSRSPKKIKIEPDSEKDEVKG

SEQ ID NO: 6593 - protein, 80 aa, Synthetic construct
YGGWSWISKTHVYRFVPKLPGNTNVNYRKSLEGTKNNMDENMDESDKRKCSRSPKKIKIEPDSEKDEVKGSDAAKGADQN

SEQ ID NO: 6594 - protein, 80 aa, Synthetic construct
GNTNVNYRKSLEGTKNNMDENMDESDKRKCSRSPKKIKIEPDSEKDEVKGSDAAKGADQNEMDISKITEKKDQDVKELLD

SEQ ID NO: 6595 - protein, 80 aa, Synthetic construct; identical to SEQ ID NO: 2649

SEQ ID NO: 6596 - protein, 80 aa, Synthetic construct; identical to SEQ ID NO: 1045

SEQ ID NO: 6597 - protein, 80 aa, Synthetic construct
PDSEKDEVKGSDAAKGADQNEMDISKITEKKDQDVKELLDSDSDKPCKEEPMEVDDDMKTESHVNCQESSQVDVVNVSEG

SEQ ID NO: 6598 - protein, 80 aa, Synthetic construct
SDAAKGADQNEMDISKITEKKDQDVKELLDSDSDKPCKEEPMEVDDDMKTESHVNCQESSQVDVVNVSEGFHLRTSYKKK

SEQ ID NO: 6599 - protein, 80 aa, Synthetic construct
EMDISKITEKKDQDVKELLDSDSDKPCKEEPMEVDDDMKTESHVNCQESSQVDVVNVSEGFHLRTSYKKKTKSSKLDGLL

SEQ ID NO: 6600 - protein, 80 aa, Synthetic construct
SNLSNDFIDENGLPINKNENVNGESKRKTVITEVTTMTSTVATESKTVIKVEKGDKQTVVSSTENCAKSTVTTTTTTVTK

SEQ ID NO: 6601 - protein, 80 aa, Synthetic construct
NGLPINKNENVNGESKRKTVITEVTTMTSTVATESKTVIKVEKGDKQTVVSSTENCAKSTVTTTTTTVTKLSTPSTGGSV

SEQ ID NO: 6602 - protein, 80 aa, Synthetic construct
VNGESKRKTVITEVTTMTSTVATESKTVIKVEKGDKQTVVSSTENCAKSTVTTTTTTVTKLSTPSTGGSVDIISVKEQSK

SEQ ID NO: 6603 - protein, 80 aa, Synthetic construct
ITEVTTMTSTVATESKTVIKVEKGDKQTVVSSTENCAKSTVTTTTTTVTKLSTPSTGGSVDIISVKEQSKTVVTTTVTDS

SEQ ID NO: 6604 - protein, 80 aa, Synthetic construct
EILKKRALLDKDLQIEVQEELKRDLKIKKEKDLMQLAQATAVAAPCPPVTPAPPAPPAPPPSPPPPPAVQHTGLLSTPTL

SEQ ID NO: 6605 - protein, 80 aa, Synthetic construct
KDLQIEVQEELKRDLKIKKEKDLMQLAQATAVAAPCPPVTPAPPAPPAPPPSPPPPPAVQHTGLLSTPTLPAASQKRKRE

SEQ ID NO: 6606 - protein, 80 aa, Synthetic construct
LKRDLKIKKEKDLMQLAQATAVAAPCPPVTPAPPAPPAPPPSPPPPPAVQHTGLLSTPTLPAASQKRKREEEKDSSSKSK

SEQ ID NO: 6607 - protein, 80 aa, Synthetic construct; identical to SEQ ID NO: 1046

SEQ ID NO: 6608 - protein, 80 aa, Synthetic construct; identical to SEQ ID NO: 1919

SEQ ID NO: 6609 - protein, 80 aa, Synthetic construct
EKEAKKMDVYICNDCKRAQEGSSEELYCICRTPYDESQFYIGCDRCQNWYHGRCVGILQSEAELIDEYVCPQCQSTEDAM

SEQ ID NO: 6610 - protein, 80 aa, Synthetic construct
RTPYDESQFYIGCDRCQNWYHGRCVGILQSEAELIDEYVCPQCQSTEDAMTVLTPLTEKDYEGLKRVLRSLQAHKMAWPF

SEQ ID NO: 6611 - protein, 80 aa, Synthetic construct
IGCDRCQNWYHGRCVGILQSEAELIDEYVCPQCQSTEDAMTVLTPLTEKDYEGLKRVLRSLQAHKMAWPFLEPVDPNDAP

SEQ ID NO: 6612 - protein, 80 aa, Synthetic construct
HGRCVGILQSEAELIDEYVCPQCQSTEDAMTVLTPLTEKDYEGLKRVLRSLQAHKMAWPFLEPVDPNDAPDYYGVIKEPM

SEQ ID NO: 6613 - protein, 80 aa, Synthetic construct; identical to SEQ ID NO: 1920

SEQ ID NO: 6614 - protein, 80 aa, Synthetic construct
LGPQPWEEGKGLASPPGGGCISFSIESIMQGVRGAGTGAAQSLSPTAWSYCPLLQRPSSLSDNFAATAAASGGGLRQRLR

SEQ ID NO: 6615 - protein, 80 aa, Synthetic construct
EADGPGSATSGAEKATTRRKASSTPSPKQRSKQAGSSPRPPPGLWYLATAPPAPAPPAFAYISSVPIMPYPPAAVYYAPA

SEQ ID NO: 6616 - protein, 80 aa, Synthetic construct
GAEKATTRRKASSTPSPKQRSKQAGSSPRPPPGLWYLATAPPAPAPPAFAYISSVPIMPYPPAAVYYAPAGPTSAQPAAK

SEQ ID NO: 6617 - protein, 80 aa, Synthetic construct
ASSTPSPKQRSKQAGSSPRPPPGLWYLATAPPAPAPPAFAYISSVPIMPYPPAAVYYAPAGPTSAQPAAKWPPTASPPPA

SEQ ID NO: 6618 - protein, 80 aa, Synthetic construct
SKQAGSSPRPPPGLWYLATAPPAPAPPAFAYISSVPIMPYPPAAVYYAPAGPTSAQPAAKWPPTASPPPARRHRHSIQLD

SEQ ID NO: 6619 - protein, 80 aa, Synthetic construct
PPGLWYLATAPPAPAPPAFAYISSVPIMPYPPAAVYYAPAGPTSAQPAAKWPPTASPPPARRHRHSIQLDLGDLEELNKA

SEQ ID NO: 6620 - protein, 80 aa, Synthetic construct; identical to SEQ ID NO: 2271

SEQ ID NO: 6621 - protein, 80 aa, Synthetic construct
FDLTGQTRRLKMDAVPTIFDFCTHIKSMKLKSRNLLKKNNSCSPAGPSNLKSNISSQQVLLEHSYAFRNPMEAKKRIIKL

SEQ ID NO: 6622 - protein, 80 aa, Synthetic construct; identical to SEQ ID NO: 4731

SEQ ID NO: 6623 - protein, 80 aa, Synthetic construct
PSSHKTSEMPPVPGGLSLEEFSRFVDLEGEEPRSGVCKEEIGTEDEKGDREGAFEPLPTKADALRALGTLRRWFECNSTS

SEQ ID NO: 6624 - protein, 80 aa, Synthetic construct
PVPGGLSLEEFSRFVDLEGEEPRSGVCKEEIGTEDEKGDREGAFEPLPTKADALRALGTLRRWFECNSTSPELFEKFYDC

SEQ ID NO: 6625 - protein, 80 aa, Synthetic construct
FSRFVDLEGEEPRSGVCKEEIGTEDEKGDREGAFEPLPTKADALRALGTLRRWFECNSTSPELFEKFYDCEEEVERLCCL

SEQ ID NO: 6626 - protein, 80 aa, Synthetic construct
SKKTVINCSISDDKSEYLFKFNSSFEIHDDTEVLMWMGMTFGLESGSCSAEDLKMARNLVPKALEPYVTEMAQGTFGGVF

SEQ ID NO: 6627 - protein, 80 aa, Synthetic construct; identical to SEQ ID NO: 5072

SEQ ID NO: 6628 - protein, 80 aa, Synthetic construct; identical to SEQ ID NO: 1047

SEQ ID NO: 6629 - protein, 80 aa, Synthetic construct; identical to SEQ ID NO: 1734

SEQ ID NO: 6630 - protein, 80 aa, Synthetic construct
PYHLQGKREKLHCRKNFTLKTVPATNYNHHLVGASSCIEEFQSQFIFEHSYSVMDSPKKLKHKLDHVIGELEDTKESLRN

SEQ ID NO: 6631 - protein, 80 aa, Synthetic construct; identical to SEQ ID NO: 1856

SEQ ID NO: 6632 - protein, 80 aa, Synthetic construct; identical to SEQ ID NO: 1048

SEQ ID NO: 6633 - protein, 80 aa, Synthetic construct; identical to SEQ ID NO: 3052

SEQ ID NO: 6634 - protein, 80 aa, Synthetic construct
SGNGGGYGGPAQPPAAAQAAQQKFHLVPSINTMSGSQELQWMVQPHFLGPSSYPRPLTYPQYSPPQPRPGVIRALGPPPG

SEQ ID NO: 6635 - protein, 80 aa, Synthetic construct
AQPPAAAQAAQQKFHLVPSINTMSGSQELQWMVQPHFLGPSSYPRPLTYPQYSPPQPRPGVIRALGPPPGVRRRPCEQIS

SEQ ID NO: 6636 - protein, 80 aa, Synthetic construct; identical to SEQ ID NO: 2073

SEQ ID NO: 6637 - protein, 80 aa, Synthetic construct
GSSMKEEPLGSGMNAVRTWMQGAGVLDANTAAQSGVGLARAHFEKQPPSNLRKSNFFHFVLALYDRQGQPVEIERTAFVG

SEQ ID NO: 6638 - protein, 80 aa, Synthetic construct
AHFEKQPPSNLRKSNFFHFVLALYDRQGQPVEIERTAFVGFVEKEKEANSEKTNNGIHYRLQLLYSNGIRTEQDFYVRLI

SEQ ID NO: 6639 - protein, 80 aa, Synthetic construct
LRKSNFFHFVLALYDRQGQPVEIERTAFVGFVEKEKEANSEKTNNGIHYRLQLLYSNGIRTEQDFYVRLIDSMTKQAIVY

SEQ ID NO: 6640 - protein, 80 aa, Synthetic construct; identical to SEQ ID NO: 3035

SEQ ID NO: 6641 - protein, 80 aa, Synthetic construct; identical to SEQ ID NO: 3036

SEQ ID NO: 6642 - protein, 80 aa, Synthetic construct
LKCNQNCLKNAGNPRDMRRFQVVVSTTVNVDGHVLAVSDNMFVHNNSKHGRRARRLDPSEGTPSYLEHATPCIKAISPSE

SEQ ID NO: 6643 - protein, 80 aa, Synthetic construct
SISQLKDQQDVFCFRYKIQAKGKTPSLDPHQTKEQKILQETLNELDKRRKEVLDASKALLGRLTTLIELLLPKLEEWKAQ

SEQ ID NO: 6644 - protein, 80 aa, Synthetic construct
KGKTPSLDPHQTKEQKILQETLNELDKRRKEVLDASKALLGRLTTLIELLLPKLEEWKAQQQKACIRAPIDHGLEQLETW

SEQ ID NO: 6645 - protein, 80 aa, Synthetic construct
TLNELDKRRKEVLDASKALLGRLTTLIELLLPKLEEWKAQQQKACIRAPIDHGLEQLETWFTAGAKLLFHLRQLLKELKG

SEQ ID NO: 6646 - protein, 80 aa, Synthetic construct
QQKACIRAPIDHGLEQLETWFTAGAKLLFHLRQLLKELKGLSCLVSYQDDPLTKGVDLRNAQVTELLQRLLHRAFVVETQ

SEQ ID NO: 6647 - protein, 80 aa, Synthetic construct
QTVPEPDQGPVSQPVPEPDLPCDLRHLNTEPMEIFRNCVKIEEIMPNGDPLLAGQNTVDEVYVSRPSHFYTDGPLMPSDF

SEQ ID NO: 6648 - protein, 80 aa, Synthetic construct; identical to SEQ ID NO: 3267

SEQ ID NO: 6649 - protein, 80 aa, Synthetic construct
MRREDEEEEGTMMKAKGDLEMKEEEEISETGELVGPFVSAMPTPMPHNKGTRFSEAWEYFHLAPARAGHHPNQYATCRLC

SEQ ID NO: 6650 - protein, 80 aa, Synthetic construct
TMMKAKGDLEMKEEEEISETGELVGPFVSAMPTPMPHNKGTRFSEAWEYFHLAPARAGHHPNQYATCRLCGRQVSRGPGV

SEQ ID NO: 6651 - protein, 80 aa, Synthetic construct
MKEEEEISETGELVGPFVSAMPTPMPHNKGTRFSEAWEYFHLAPARAGHHPNQYATCRLCGRQVSRGPGVNVGTTALWKH

SEQ ID NO: 6652 - protein, 80 aa, Synthetic construct
LKSMHREELEKSGHGQAGQRQDPRPHGPQLPTGIEGNWGRLLEQVGTMALWASQREKEVLRRERAVEWRERAVEKRERAL

SEQ ID NO: 6653 - protein, 80 aa, Synthetic construct
KSGHGQAGQRQDPRPHGPQLPTGIEGNWGRLLEQVGTMALWASQREKEVLRRERAVEWRERAVEKRERALEEVERAILEM

SEQ ID NO: 6654 - protein, 80 aa, Synthetic construct; identical to SEQ ID NO: 1828

SEQ ID NO: 6655 - protein, 80 aa, Synthetic construct
PTGIEGNWGRLLEQVGTMALWASQREKEVLRRERAVEWRERAVEKRERALEEVERAILEMKWKVRAEKEACQREKELPAA

SEQ ID NO: 6656 - protein, 80 aa, Synthetic construct
WGRLLEQVGTMALWASQREKEVLRRERAVEWRERAVEKRERALEEVERAILEMKWKVRAEKEACQREKELPAAVHPFHFV

SEQ ID NO: 6657 - protein, 80 aa, Synthetic construct
GGLFKTDRVLGTAQLKLDALEIACEVREILEVLDGRRPTGGRLEVMVRIREPLTAQQLETTTERWLVIDPVPAAVPTQVA

SEQ ID NO: 6658 - protein, 80 aa, Synthetic construct
SHAYCTPLNAALQASMAENSIPLYTTASMGNPTLGNLASAIREELNGAMEHTNSNESDSSPGRSPMQAVHPVHVKEEPLD

SEQ ID NO: 6659 - protein, 80 aa, Synthetic construct
ALQASMAENSIPLYTTASMGNPTLGNLASAIREELNGAMEHTNSNESDSSPGRSPMQAVHPVHVKEEPLDPEEAEGPLSL

SEQ ID NO: 6660 - protein, 80 aa, Synthetic construct
IPLYTTASMGNPTLGNLASAIREELNGAMEHTNSNESDSSPGRSPMQAVHPVHVKEEPLDPEEAEGPLSLVTTANHSPDF

SEQ ID NO: 6661 - protein, 80 aa, Synthetic construct
NPTLGNLASAIREELNGAMEHTNSNESDSSPGRSPMQAVHPVHVKEEPLDPEEAEGPLSLVTTANHSPDFDHDRDYEDEP

SEQ ID NO: 6662 - protein, 80 aa, Synthetic construct; identical to SEQ ID NO: 1933

SEQ ID NO: 6663 - protein, 80 aa, Synthetic construct; identical to SEQ ID NO: 3151

SEQ ID NO: 6664 - protein, 80 aa, Synthetic construct
DLFQDLSHFQETWLAEAQVPDSDEQFVPDFHSENLAFHSPTTRIKKEPQSPRTDPALSCSRKPPLPYHHGEQCLYSSAYD

SEQ ID NO: 6665 - protein, 80 aa, Synthetic construct
ETWLAEAQVPDSDEQFVPDFHSENLAFHSPTTRIKKEPQSPRTDPALSCSRKPPLPYHHGEQCLYSSAYDPPRQIAIKSP

SEQ ID NO: 6666 - protein, 80 aa, Synthetic construct
DSDEQFVPDFHSENLAFHSPTTRIKKEPQSPRTDPALSCSRKPPLPYHHGEQCLYSSAYDPPRQIAIKSPAPGALGQSPL

SEQ ID NO: 6667 - protein, 80 aa, Synthetic construct
HSENLAFHSPTTRIKKEPQSPRTDPALSCSRKPPLPYHHGEQCLYSSAYDPPRQIAIKSPAPGALGQSPLQPFPRAEQRN

SEQ ID NO: 6668 - protein, 80 aa, Synthetic construct
TTRIKKEPQSPRTDPALSCSRKPPLPYHHGEQCLYSSAYDPPRQIAIKSPAPGALGQSPLQPFPRAEQRNFLRSSGTSQP

SEQ ID NO: 6669 - protein, 80 aa, Synthetic construct
FLRSSGTSQPHPGHGYLGEHSSVFQQPLDICHSFTSQGGGREPLPAPYQHQLSEPCPPYPQQSFKQEYHDPLYEQAGQPA

SEQ ID NO: 6670 - protein, 80 aa, Synthetic construct
HPGHGYLGEHSSVFQQPLDICHSFTSQGGGREPLPAPYQHQLSEPCPPYPQQSFKQEYHDPLYEQAGQPAVDQGGVNGHR

SEQ ID NO: 6671 - protein, 80 aa, Synthetic construct
SSVFQQPLDICHSFTSQGGGREPLPAPYQHQLSEPCPPYPQQSFKQEYHDPLYEQAGQPAVDQGGVNGHRYPGAGVVIKQ

SEQ ID NO: 6672 - protein, 80 aa, Synthetic construct; identical to SEQ ID NO: 1049

SEQ ID NO: 6673 - protein, 80 aa, Synthetic construct; identical to SEQ ID NO: 2268

SEQ ID NO: 6674 - protein, 80 aa, Synthetic construct; identical to SEQ ID NO: 1050

SEQ ID NO: 6675 - protein, 80 aa, Synthetic construct; identical to SEQ ID NO: 1051

SEQ ID NO: 6676 - protein, 80 aa, Synthetic construct
PLYEQAGQPAVDQGGVNGHRYPGAGVVIKQEQTDFAYDSDVTGCASMYLHTEGFSGPSPGDGAMGYGYEKPLRPFPDDVC

SEQ ID NO: 6677 - protein, 80 aa, Synthetic construct
VDQGGVNGHRYPGAGVVIKQEQTDFAYDSDVTGCASMYLHTEGFSGPSPGDGAMGYGYEKPLRPFPDDVCVVPEKFEGDI

SEQ ID NO: 6678 - protein, 80 aa, Synthetic construct; identical to SEQ ID NO: 2269

SEQ ID NO: 6679 - protein, 80 aa, Synthetic construct
WPGKIVNPPKDLKKPRGKKCFFVKFFGTEDHAWIKVEQLKPYHAHKEEMIKINKGKRFQQAVDAVEEFLRRAKGKDQTSS

SEQ ID NO: 6680 - protein, 80 aa, Synthetic construct
AGKAAQSGDYGGAGDDYVLGSLRVSGSGGGGAGKTVKCVFLDEDDDDDDDDDELQLQIKQEPDEEDEEPPHQQLLQPPGQ

SEQ ID NO: 6681 - protein, 80 aa, Synthetic construct
GGAGDDYVLGSLRVSGSGGGGAGKTVKCVFLDEDDDDDDDDDELQLQIKQEPDEEDEEPPHQQLLQPPGQQPSQLLRRYN

SEQ ID NO: 6682 - protein, 80 aa, Synthetic construct
SLRVSGSGGGGAGKTVKCVFLDEDDDDDDDDDELQLQIKQEPDEEDEEPPHQQLLQPPGQQPSQLLRRYNVAKVPASPTL

SEQ ID NO: 6683 - protein, 80 aa, Synthetic construct
GAGKTVKCVFLDEDDDDDDDDDELQLQIKQEPDEEDEEPPHQQLLQPPGQQPSQLLRRYNVAKVPASPTLSSSAESPEGA

SEQ ID NO: 6684 - protein, 80 aa, Synthetic construct
LDEDDDDDDDDDELQLQIKQEPDEEDEEPPHQQLLQPPGQQPSQLLRRYNVAKVPASPTLSSSAESPEGASLYDEVRAGA

SEQ ID NO: 6685 - protein, 80 aa, Synthetic construct
DDELQLQIKQEPDEEDEEPPHQQLLQPPGQQPSQLLRRYNVAKVPASPTLSSSAESPEGASLYDEVRAGATSGAGGGSRL

SEQ ID NO: 6686 - protein, 80 aa, Synthetic construct; identical to SEQ ID NO: 75

SEQ ID NO: 6687 - protein, 80 aa, Synthetic construct
PLAQVAPSPPSPPPPPRPPPTLSASDPSLDFLRAQQETANAIRELAGTLRQGLAKLSEALSALLPLLPGTPVDSLPPPLP

SEQ ID NO: 6688 - protein, 80 aa, Synthetic construct
SPPPPPRPPPTLSASDPSLDFLRAQQETANAIRELAGTLRQGLAKLSEALSALLPLLPGTPVDSLPPPLPPPPPPPPPPR

SEQ ID NO: 6689 - protein, 80 aa, Synthetic construct
TLSASDPSLDFLRAQQETANAIRELAGTLRQGLAKLSEALSALLPLLPGTPVDSLPPPLPPPPPPPPPPRPVLPPPAPKV

SEQ ID NO: 6690 - protein, 80 aa, Synthetic construct
FLRAQQETANAIRELAGTLRQGLAKLSEALSALLPLLPGTPVDSLPPPLPPPPPPPPPPRPVLPPPAPKVEITPEPVSVV

SEQ ID NO: 6691 - protein, 80 aa, Synthetic construct
AIRELAGTLRQGLAKLSEALSALLPLLPGTPVDSLPPPLPPPPPPPPPPRPVLPPPAPKVEITPEPVSVVAAVVDGAVVA

SEQ ID NO: 6692 - protein, 80 aa, Synthetic construct
PFPVLSVDPEYCVNPLAHPVFSVAQTDLQAFSMQNGLNGQVDVSLASAASAVESLKPALLAGQPLVYVPSASLFMLYGSL

SEQ ID NO: 6693 - protein, 80 aa, Synthetic construct
YCVNPLAHPVFSVAQTDLQAFSMQNGLNGQVDVSLASAASAVESLKPALLAGQPLVYVPSASLFMLYGSLQEGPASGSGS

SEQ ID NO: 6694 - protein, 80 aa, Synthetic construct; identical to SEQ ID NO: 3030

SEQ ID NO: 6695 - protein, 80 aa, Synthetic construct; identical to SEQ ID NO: 3237

SEQ ID NO: 6696 - protein, 80 aa, Synthetic construct
ELQTLQEALKVEIQVHQKLVAQMKQDPQNADLKKQLHELQAKITALSEKQKRVVEQLRKNLIVKQEQPDKFQIQPLPQSE

SEQ ID NO: 6697 - protein, 80 aa, Synthetic construct
VEIQVHQKLVAQMKQDPQNADLKKQLHELQAKITALSEKQKRVVEQLRKNLIVKQEQPDKFQIQPLPQSENKLQTAQQQP

SEQ ID NO: 6698 - protein, 80 aa, Synthetic construct
AKITALSEKQKRVVEQLRKNLIVKQEQPDKFQIQPLPQSENKLQTAQQQPLQQLQQQQQYHHHHAQQSAAASPNLTASQK

SEQ ID NO: 6699 - protein, 80 aa, Synthetic construct; identical to SEQ ID NO: 4362

SEQ ID NO: 6700 - protein, 80 aa, Synthetic construct; identical to SEQ ID NO: 1052

SEQ ID NO: 6701 - protein, 80 aa, Synthetic construct; identical to SEQ ID NO: 1053

SEQ ID NO: 6702 - protein, 80 aa, Synthetic construct; identical to SEQ ID NO: 1054

SEQ ID NO: 6703 - protein, 80 aa, Synthetic construct
GQLLMCDTCSRVYHLDCLDPPLKTIPKGMWICPRCQDQMLKKEEAIPWPGTLAIVHSYIAYKAAKEEEKQKLLKWSSDLK

SEQ ID NO: 6704 - protein, 80 aa, Synthetic construct
RVYHLDCLDPPLKTIPKGMWICPRCQDQMLKKEEAIPWPGTLAIVHSYIAYKAAKEEEKQKLLKWSSDLKQEREQLEQKV

SEQ ID NO: 6705 - protein, 80 aa, Synthetic construct
PLKTIPKGMWICPRCQDQMLKKEEAIPWPGTLAIVHSYIAYKAAKEEEKQKLLKWSSDLKQEREQLEQKVKQLSNSISKC

SEQ ID NO: 6706 - protein, 80 aa, Synthetic construct; identical to SEQ ID NO: 2338

SEQ ID NO: 6707 - protein, 80 aa, Synthetic construct
LSSCVTPTASSYAHCNYFQNPSMQSSYPVEFLPSNWPCSTTDENTKTEVNLEAVFQIVDELHSSPKLEMVKVEPVENQCP

SEQ ID NO: 6708 - protein, 80 aa, Synthetic construct
SYAHCNYFQNPSMQSSYPVEFLPSNWPCSTTDENTKTEVNLEAVFQIVDELHSSPKLEMVKVEPVENQCPTSPSYRGQHI

SEQ ID NO: 6709 - protein, 80 aa, Synthetic construct
PSMQSSYPVEFLPSNWPCSTTDENTKTEVNLEAVFQIVDELHSSPKLEMVKVEPVENQCPTSPSYRGQHILANSNNSNPC

SEQ ID NO: 6710 - protein, 80 aa, Synthetic construct
FLPSNWPCSTTDENTKTEVNLEAVFQIVDELHSSPKLEMVKVEPVENQCPTSPSYRGQHILANSNNSNPCSASQASQLEP

SEQ ID NO: 6711 - protein, 80 aa, Synthetic construct
TDENTKTEVNLEAVFQIVDELHSSPKLEMVKVEPVENQCPTSPSYRGQHILANSNNSNPCSASQASQLEPLTPVGSDIMS

SEQ ID NO: 6712 - protein, 80 aa, Synthetic construct
LEAVFQIVDELHSSPKLEMVKVEPVENQCPTSPSYRGQHILANSNNSNPCSASQASQLEPLTPVGSDIMSFVVGTEQAVA

SEQ ID NO: 6713 - protein, 80 aa, Synthetic construct
LHSSPKLEMVKVEPVENQCPTSPSYRGQHILANSNNSNPCSASQASQLEPLTPVGSDIMSFVVGTEQAVACSLPQSPEYI

SEQ ID NO: 6714 - protein, 80 aa, Synthetic construct
VQVLKNVPFNIVLPHGNQLGIDKRGHLTAPDTTVTVSIATMPTHSIKTETQPHGFAVGIPPAVYHPEPTERVVVFDRNLN

SEQ ID NO: 6715 - protein, 80 aa, Synthetic construct
IDKRGHLTAPDTTVTVSIATMPTHSIKTETQPHGFAVGIPPAVYHPEPTERVVVFDRNLNTDQFSSGAQAPNAQRRTPDS

SEQ ID NO: 6716 - protein, 80 aa, Synthetic construct
DTTVTVSIATMPTHSIKTETQPHGFAVGIPPAVYHPEPTERVVVFDRNLNTDQFSSGAQAPNAQRRTPDSTFSETFKEGV

SEQ ID NO: 6717 - protein, 80 aa, Synthetic construct; identical to SEQ ID NO: 3323

SEQ ID NO: 6718 - protein, 80 aa, Synthetic construct
QLLEDESYDGGAGAASAFAPPRSSPCASSTPVAVGDFPDCAYPPDAEPKDDAYPLYSDFQPPALKIKEEEEGAEASARSP

SEQ ID NO: 6719 - protein, 80 aa, Synthetic construct
GAGAASAFAPPRSSPCASSTPVAVGDFPDCAYPPDAEPKDDAYPLYSDFQPPALKIKEEEEGAEASARSPRSYLVAGANP

SEQ ID NO: 6720 - protein, 80 aa, Synthetic construct
PRSSPCASSTPVAVGDFPDCAYPPDAEPKDDAYPLYSDFQPPALKIKEEEEGAEASARSPRSYLVAGANPAAFPDFPLGP

SEQ ID NO: 6721 - protein, 80 aa, Synthetic construct
PVAVGDFPDCAYPPDAEPKDDAYPLYSDFQPPALKIKEEEEGAEASARSPRSYLVAGANPAAFPDFPLGPPPPLPPRATP

SEQ ID NO: 6722 - protein, 80 aa, Synthetic construct
AYPPDAEPKDDAYPLYSDFQPPALKIKEEEEGAEASARSPRSYLVAGANPAAFPDFPLGPPPPLPPRATPSRPGEAAVTA

SEQ ID NO: 6723 - protein, 80 aa, Synthetic construct
DAYPLYSDFQPPALKIKEEEEGAEASARSPRSYLVAGANPAAFPDFPLGPPPPLPPRATPSRPGEAAVTAAPASASVSSA

SEQ ID NO: 6724 - protein, 80 aa, Synthetic construct
PPALKIKEEEEGAEASARSPRSYLVAGANPAAFPDFPLGPPPPLPPRATPSRPGEAAVTAAPASASVSSASSSGSTLECI

SEQ ID NO: 6725 - protein, 80 aa, Synthetic construct; identical to SEQ ID NO: 4323

SEQ ID NO: 6726 - protein, 80 aa, Synthetic construct; identical to SEQ ID NO: 2054

SEQ ID NO: 6727 - protein, 80 aa, Synthetic construct; identical to SEQ ID NO: 2612

SEQ ID NO: 6728 - protein, 80 aa, Synthetic construct; identical to SEQ ID NO: 2613

SEQ ID NO: 6729 - protein, 80 aa, Synthetic construct; identical to SEQ ID NO: 2614

SEQ ID NO: 6730 - protein, 80 aa, Synthetic construct; identical to SEQ ID NO: 2615

SEQ ID NO: 6731 - protein, 80 aa, Synthetic construct
KNISGETPEGIKAEPLTPMEDALPPSLSGQAKPEDSDCHRKIETCGSRKSERSCKGALYKTLVSEGMLTSLRANVDRGKR

SEQ ID NO: 6732 - protein, 80 aa, Synthetic construct
IKAEPLTPMEDALPPSLSGQAKPEDSDCHRKIETCGSRKSERSCKGALYKTLVSEGMLTSLRANVDRGKRSSGKGNSSDH

SEQ ID NO: 6733 - protein, 80 aa, Synthetic construct; identical to SEQ ID NO: 2004

SEQ ID NO: 6734 - protein, 80 aa, Synthetic construct
RVSPAGGTLDDKPKEQLQRSLPKATETDCNDKCSHNTEVGETRSSTPEMPAVSAFFSLAALAEVAAMENVHRGQRSTPLT

SEQ ID NO: 6735 - protein, 80 aa, Synthetic construct; identical to SEQ ID NO: 3821

SEQ ID NO: 6736 - protein, 80 aa, Synthetic construct; identical to SEQ ID NO: 3822

SEQ ID NO: 6737 - protein, 80 aa, Synthetic construct; identical to SEQ ID NO: 1055

SEQ ID NO: 6738 - protein, 80 aa, Synthetic construct
YISKSGKTQENRNGSIGPSIVCKSIQMNQAENSLQEEQEGPLDLTVNRMQEQNTQQGDGVLDLSTKKTSIKSEESSICDP

SEQ ID NO: 6739 - protein, 80 aa, Synthetic construct; identical to SEQ ID NO: 2009

SEQ ID NO: 6740 - protein, 80 aa, Synthetic construct; identical to SEQ ID NO: 1056

SEQ ID NO: 6741 - protein, 80 aa, Synthetic construct
EQNTQQGDGVLDLSTKKTSIKSEESSICDPSSENSVAGSTVDAKSEEATKMEKRKSALNKVLESLCIHHQQQVLAMLKFL

SEQ ID NO: 6742 - protein, 80 aa, Synthetic construct
LDLSTKKTSIKSEESSICDPSSENSVAGSTVDAKSEEATKMEKRKSALNKVLESLCIHHQQQVLAMLKFLVQEQNAASLC

SEQ ID NO: 6743 - protein, 80 aa, Synthetic construct
KSEESSICDPSSENSVAGSTVDAKSEEATKMEKRKSALNKVLESLCIHHQQQVLAMLKFLVQEQNAASLCCCNTSCVVSS

SEQ ID NO: 6744 - protein, 80 aa, Synthetic construct
VDAKSEEATKMEKRKSALNKVLESLCIHHQQQVLAMLKFLVQEQNAASLCCCNTSCVVSSESQKPLIEDDLCGLFCSCEY

SEQ ID NO: 6745 - protein, 80 aa, Synthetic construct
MEKRKSALNKVLESLCIHHQQQVLAMLKFLVQEQNAASLCCCNTSCVVSSESQKPLIEDDLCGLFCSCEYRLAERGCLQN

SEQ ID NO: 6746 - protein, 80 aa, Synthetic construct
VLESLCIHHQQQVLAMLKFLVQEQNAASLCCCNTSCVVSSESQKPLIEDDLCGLFCSCEYRLAERGCLQNEKQSPGLEPL

SEQ ID NO: 6747 - protein, 80 aa, Synthetic construct
GNIINSHCMPTVDLNNKRLENLKKSSILDMGRLISSVENVPAKYEGTESSSVSNYSSPIKLMFLSEVKSSEGVKYTLTSV

SEQ ID NO: 6748 - protein, 80 aa, Synthetic construct
TVDLNNKRLENLKKSSILDMGRLISSVENVPAKYEGTESSSVSNYSSPIKLMFLSEVKSSEGVKYTLTSVGTSHSNVVLP

SEQ ID NO: 6749 - protein, 80 aa, Synthetic construct
NLKKSSILDMGRLISSVENVPAKYEGTESSSVSNYSSPIKLMFLSEVKSSEGVKYTLTSVGTSHSNVVLPSEKPTTHHVT

SEQ ID NO: 6750 - protein, 80 aa, Synthetic construct; identical to SEQ ID NO: 3799

SEQ ID NO: 6751 - protein, 80 aa, Synthetic construct; identical to SEQ ID NO: 2150

SEQ ID NO: 6752 - protein, 80 aa, Synthetic construct
VSMEVEPSPTSPAPLIQAEHSYSLCEEPRAQSPFTHITTSDSFNDDEVESEKWYLSTDFPSTSIKTEPVTDEPPPGLVPS

SEQ ID NO: 6753 - protein, 80 aa, Synthetic construct
SPAPLIQAEHSYSLCEEPRAQSPFTHITTSDSFNDDEVESEKWYLSTDFPSTSIKTEPVTDEPPPGLVPSVTLTITAIST

SEQ ID NO: 6754 - protein, 80 aa, Synthetic construct
SYSLCEEPRAQSPFTHITTSDSFNDDEVESEKWYLSTDFPSTSIKTEPVTDEPPPGLVPSVTLTITAISTPLEKEEPPLE

SEQ ID NO: 6755 - protein, 80 aa, Synthetic construct
QSPFTHITTSDSFNDDEVESEKWYLSTDFPSTSIKTEPVTDEPPPGLVPSVTLTITAISTPLEKEEPPLEMNTGVDSSCQ

SEQ ID NO: 6756 - protein, 80 aa, Synthetic construct
DSFNDDEVESEKWYLSTDFPSTSIKTEPVTDEPPPGLVPSVTLTITAISTPLEKEEPPLEMNTGVDSSCQTIIPKIKLEP

SEQ ID NO: 6757 - protein, 80 aa, Synthetic construct; identical to SEQ ID NO: 2097

SEQ ID NO: 6758 - protein, 80 aa, Synthetic construct
STSIKTEPVTDEPPPGLVPSVTLTITAISTPLEKEEPPLEMNTGVDSSCQTIIPKIKLEPHEVDQFLNFSPKEAPVDHLH

SEQ ID NO: 6759 - protein, 80 aa, Synthetic construct
DEPPPGLVPSVTLTITAISTPLEKEEPPLEMNTGVDSSCQTIIPKIKLEPHEVDQFLNFSPKEAPVDHLHLPPTPPSSHG

SEQ ID NO: 6760 - protein, 80 aa, Synthetic construct
VTLTITAISTPLEKEEPPLEMNTGVDSSCQTIIPKIKLEPHEVDQFLNFSPKEAPVDHLHLPPTPPSSHGSDSEGSLSPN

SEQ ID NO: 6761 - protein, 80 aa, Synthetic construct
PLEKEEPPLEMNTGVDSSCQTIIPKIKLEPHEVDQFLNFSPKEAPVDHLHLPPTPPSSHGSDSEGSLSPNPRLHPFSLPQ

SEQ ID NO: 6762 - protein, 80 aa, Synthetic construct
MNTGVDSSCQTIIPKIKLEPHEVDQFLNFSPKEAPVDHLHLPPTPPSSHGSDSEGSLSPNPRLHPFSLPQTHSPSRAAPR

SEQ ID NO: 6763 - protein, 80 aa, Synthetic construct
TIIPKIKLEPHEVDQFLNFSPKEAPVDHLHLPPTPPSSHGSDSEGSLSPNPRLHPFSLPQTHSPSRAAPRAPSALSSSPL

SEQ ID NO: 6764 - protein, 80 aa, Synthetic construct
RPPSSYGPSLQAQDSHNMQFLNTGSFNFLSNTGAASCQGATLPPNSPNGYYGSNINYPESHRLGSMVNQHVSVISSIRSL

SEQ ID NO: 6765 - protein, 80 aa, Synthetic construct; identical to SEQ ID NO: 1974

SEQ ID NO: 6766 - protein, 80 aa, Synthetic construct; identical to SEQ ID NO: 1975

SEQ ID NO: 6767 - protein, 80 aa, Synthetic construct; identical to SEQ ID NO: 1057

SEQ ID NO: 6768 - protein, 80 aa, Synthetic construct
HRLGSMVNQHVSVISSIRSLPPYSDIHDPLNILDDSGRKQTSSFYTDTSSPVACRTPVLASSLQTPIPSSSSQCMYGTSN

SEQ ID NO: 6769 - protein, 80 aa, Synthetic construct; identical to SEQ ID NO: 3823

SEQ ID NO: 6770 - protein, 80 aa, Synthetic construct; identical to SEQ ID NO: 3435

SEQ ID NO: 6771 - protein, 80 aa, Synthetic construct; identical to SEQ ID NO: 3433

SEQ ID NO: 6772 - protein, 80 aa, Synthetic construct; identical to SEQ ID NO: 3434

SEQ ID NO: 6773 - protein, 80 aa, Synthetic construct
AYKMCTEKIQEKKIKKEDSSSGLMNTLLNGHKGGDCDGFSTFDVPIFTEEFLDQNKAREAELRRLRKMNVAFEEQNAVLQ

SEQ ID NO: 6774 - protein, 80 aa, Synthetic construct
KRMTNGRRIYYGMNALRAKVSLIERLYEINVEDTNEIDWEDLASAIGDVPPSYVQTKFSRLKAVYVPFWQKKTFPEIIDY

SEQ ID NO: 6775 - protein, 80 aa, Synthetic construct; identical to SEQ ID NO: 2451

SEQ ID NO: 6776 - protein, 80 aa, Synthetic construct; identical to SEQ ID NO: 2452

SEQ ID NO: 6777 - protein, 80 aa, Synthetic construct; identical to SEQ ID NO: 1917

SEQ ID NO: 6778 - protein, 80 aa, Synthetic construct; identical to SEQ ID NO: 2453

SEQ ID NO: 6779 - protein, 80 aa, Synthetic construct; identical to SEQ ID NO: 3239

SEQ ID NO: 6780 - protein, 80 aa, Synthetic construct; identical to SEQ ID NO: 3242

SEQ ID NO: 6781 - protein, 80 aa, Synthetic construct
NTYTVSGQAVVTPAAVLAPPKAEAQENGDHREVKVKVEPIPAIGHATLGTASRIIQTAQTTPVQTVTIVQQAPLGQHQLP

SEQ ID NO: 6782 - protein, 80 aa, Synthetic construct
VTPAAVLAPPKAEAQENGDHREVKVKVEPIPAIGHATLGTASRIIQTAQTTPVQTVTIVQQAPLGQHQLPIKTVTQNGTH

SEQ ID NO: 6783 - protein, 80 aa, Synthetic construct
KAEAQENGDHREVKVKVEPIPAIGHATLGTASRIIQTAQTTPVQTVTIVQQAPLGQHQLPIKTVTQNGTHVASVPTAVHG

SEQ ID NO: 6784 - protein, 80 aa, Synthetic construct; identical to SEQ ID NO: 3243

SEQ ID NO: 6785 - protein, 80 aa, Synthetic construct; identical to SEQ ID NO: 1954

SEQ ID NO: 6786 - protein, 80 aa, Synthetic construct
IKTVTQNGTHVASVPTAVHGQVNNAAASPLHMLATHASASASLPTKRHNGDQPEQPELKRIKTEDGEGIVIALSVDTPPA

SEQ ID NO: 6787 - protein, 80 aa, Synthetic construct
HVASVPTAVHGQVNNAAASPLHMLATHASASASLPTKRHNGDQPEQPELKRIKTEDGEGIVIALSVDTPPAAVREKGVQN

SEQ ID NO: 6788 - protein, 80 aa, Synthetic construct; identical to SEQ ID NO: 4687

SEQ ID NO: 6789 - protein, 80 aa, Synthetic construct
LTPTYNISANGLTELHDDLSNYIDGHTPEGSKADSAVSSFYLDIQPSPDQSGLDINGIKPEPICDYTPASGFFPYCSFTN

SEQ ID NO: 6790 - protein, 80 aa, Synthetic construct
GLTELHDDLSNYIDGHTPEGSKADSAVSSFYLDIQPSPDQSGLDINGIKPEPICDYTPASGFFPYCSFTNGETSPTVSMA

SEQ ID NO: 6791 - protein, 80 aa, Synthetic construct
NYIDGHTPEGSKADSAVSSFYLDIQPSPDQSGLDINGIKPEPICDYTPASGFFPYCSFTNGETSPTVSMAELEHLAQNIS

SEQ ID NO: 6792 - protein, 80 aa, Synthetic construct
SKADSAVSSFYLDIQPSPDQSGLDINGIKPEPICDYTPASGFFPYCSFTNGETSPTVSMAELEHLAQNISKSHLETCQYL

SEQ ID NO: 6793 - protein, 80 aa, Synthetic construct
SGLDINGIKPEPICDYTPASGFFPYCSFTNGETSPTVSMAELEHLAQNISKSHLETCQYLREELQQITWQTFLQEEIENY

SEQ ID NO: 6794 - protein, 80 aa, Synthetic construct
EPICDYTPASGFFPYCSFTNGETSPTVSMAELEHLAQNISKSHLETCQYLREELQQITWQTFLQEEIENYQNKQREVMWQ

SEQ ID NO: 6795 - protein, 80 aa, Synthetic construct
LGSEVDITEGDRKPDYTAYVAMIPQCIKEEDTPSDNDSGICMSPESYLGSPQHSPSTRGSPNRSLPSPGVLCGSARPKPY

SEQ ID NO: 6796 - protein, 80 aa, Synthetic construct
DRKPDYTAYVAMIPQCIKEEDTPSDNDSGICMSPESYLGSPQHSPSTRGSPNRSLPSPGVLCGSARPKPYDPPGEKMVAA

SEQ ID NO: 6797 - protein, 80 aa, Synthetic construct; identical to SEQ ID NO: 1780

SEQ ID NO: 6798 - protein, 80 aa, Synthetic construct; identical to SEQ ID NO: 1058

SEQ ID NO: 6799 - protein, 80 aa, Synthetic construct; identical to SEQ ID NO: 2241

SEQ ID NO: 6800 - protein, 80 aa, Synthetic construct; identical to SEQ ID NO: 1059

SEQ ID NO: 6801 - protein, 80 aa, Synthetic construct
ELEREVDKLARENAAMRLELDALRGKCEALQGFARSVAAARGPATLVAPASVITIVKSTPGSGSGPAHGPDPAHGPASCS

SEQ ID NO: 6802 - protein, 80 aa, Synthetic construct
PPPPPPPPPPPRSREQRRNYQPRWRGEYLMDYDGSRRGLVCMVCGGALATLKVSTIKRHILQVHPFSMDFTPEERQTILE

SEQ ID NO: 6803 - protein, 80 aa, Synthetic construct
PRSREQRRNYQPRWRGEYLMDYDGSRRGLVCMVCGGALATLKVSTIKRHILQVHPFSMDFTPEERQTILEAYEEAALRCY

SEQ ID NO: 6804 - protein, 80 aa, Synthetic construct; identical to SEQ ID NO: 4777

SEQ ID NO: 6805 - protein, 80 aa, Synthetic construct
LDLPKYTIIKFFQNQRYYLKHHGKLKDNSGLEVDVAEYKEEELLKDLEESVQDKNTNTLFSVKLEEELSVEGNTDINTDL

SEQ ID NO: 6806 - protein, 80 aa, Synthetic construct
LPKYTIIKFFQNQRYYLKHHGKLKDNSGLEVDVAEYKEEELLKDLEESVQDKNTNTLFSVKLEEELSVEGNTDINTDLKD

SEQ ID NO: 6807 - protein, 80 aa, Synthetic construct; identical to SEQ ID NO: 2292

SEQ ID NO: 6808 - protein, 80 aa, Synthetic construct; identical to SEQ ID NO: 5119

SEQ ID NO: 6809 - protein, 80 aa, Synthetic construct; identical to SEQ ID NO: 3268

SEQ ID NO: 6810 - protein, 80 aa, Synthetic construct
PQAQHSHYPHYAASATPNQAGGAAEIQELASKRVDIQKKRFYLDVKQSSRGRFLKIAEVWIGRGRQDNIRKSKLTLSLSV

SEQ ID NO: 6811 - protein, 80 aa, Synthetic construct
YAASATPNQAGGAAEIQELASKRVDIQKKRFYLDVKQSSRGRFLKIAEVWIGRGRQDNIRKSKLTLSLSVAAELKDCLGD

SEQ ID NO: 6812 - protein, 80 aa, Synthetic construct; identical to SEQ ID NO: 4575

SEQ ID NO: 6813 - protein, 80 aa, Synthetic construct
FSMDLTNTEITATTSLPSFSTFMDNYSTGYDVKPPCLYQMPLSGQQSSIKVEDIQMHNYQQHSHLPPQSEEMMPHSGSVY

SEQ ID NO: 6814 - protein, 80 aa, Synthetic construct
TATTSLPSFSTFMDNYSTGYDVKPPCLYQMPLSGQQSSIKVEDIQMHNYQQHSHLPPQSEEMMPHSGSVYYKPSSPPTPT

SEQ ID NO: 6815 - protein, 80 aa, Synthetic construct; identical to SEQ ID NO: 2198

SEQ ID NO: 6816 - protein, 80 aa, Synthetic construct
DVKPPCLYQMPLSGQQSSIKVEDIQMHNYQQHSHLPPQSEEMMPHSGSVYYKPSSPPTPTTPGFQVQHSPMWDDPGSLHN

SEQ ID NO: 6817 - protein, 80 aa, Synthetic construct
PLSGQQSSIKVEDIQMHNYQQHSHLPPQSEEMMPHSGSVYYKPSSPPTPTTPGFQVQHSPMWDDPGSLHNFHQNYVATTH

SEQ ID NO: 6818 - protein, 80 aa, Synthetic construct; identical to SEQ ID NO: 4219

SEQ ID NO: 6819 - protein, 80 aa, Synthetic construct; identical to SEQ ID NO: 4220

SEQ ID NO: 6820 - protein, 80 aa, Synthetic construct; identical to SEQ ID NO: 4946

SEQ ID NO: 6821 - protein, 80 aa, Synthetic construct
REMPCPLPCDEESPEAELHNHGIQINSCSVRLVDIKKEKPFSNSKVECQAQARTHHNQASDIIVISSEDSEGSTDVDEPL

SEQ ID NO: 6822 - protein, 80 aa, Synthetic construct
EESPEAELHNHGIQINSCSVRLVDIKKEKPFSNSKVECQAQARTHHNQASDIIVISSEDSEGSTDVDEPLEVFISAPRSE

SEQ ID NO: 6823 - protein, 80 aa, Synthetic construct
HGIQINSCSVRLVDIKKEKPFSNSKVECQAQARTHHNQASDIIVISSEDSEGSTDVDEPLEVFISAPRSEPVINNDNPLE

SEQ ID NO: 6824 - protein, 80 aa, Synthetic construct
KQGTSKKCIQSEDKKWFTPREFEIEGDRGASKNWKLSIRCGGYTLKVLMENKFLPEPPSTRKKRILESHNNTLVDPCPEN

SEQ ID NO: 6825 - protein, 80 aa, Synthetic construct
SEDKKWFTPREFEIEGDRGASKNWKLSIRCGGYTLKVLMENKFLPEPPSTRKKRILESHNNTLVDPCPENSNICEVCNKW

SEQ ID NO: 6826 - protein, 80 aa, Synthetic construct
RKKRILESHNNTLVDPCPENSNICEVCNKWGRLFCCDTCPRSFHEHCHIPSVEANKNPWSCIFCRIKTIQERCPESQSGH

SEQ ID NO: 6827 - protein, 80 aa, Synthetic construct
NTLVDPCPENSNICEVCNKWGRLFCCDTCPRSFHEHCHIPSVEANKNPWSCIFCRIKTIQERCPESQSGHQESEVLMRQM

SEQ ID NO: 6828 - protein, 80 aa, Synthetic construct
SNICEVCNKWGRLFCCDTCPRSFHEHCHIPSVEANKNPWSCIFCRIKTIQERCPESQSGHQESEVLMRQMLPEEQLKCEF

SEQ ID NO: 6829 - protein, 80 aa, Synthetic construct
LSSQISDLLTRPTPALNSGGGKLPFTFVTKEVAEATCNCLLAQAEQADKKGKSKAAAERMILEEFGRCLMSVINSAGKAK

SEQ ID NO: 6830 - protein, 80 aa, Synthetic construct
LTRPTPALNSGGGKLPFTFVTKEVAEATCNCLLAQAEQADKKGKSKAAAERMILEEFGRCLMSVINSAGKAKSDPCAMNC

SEQ ID NO: 6831 - protein, 80 aa, Synthetic construct; identical to SEQ ID NO: 2302

SEQ ID NO: 6832 - protein, 80 aa, Synthetic construct
MADANSPPKPLSKPRTPRRSKSDGEAKPEPSPSPRITRKSTRQTTITSHFAKGPAKRKPQEESERAKSDESIKEEDKDQD

SEQ ID NO: 6833 - protein, 80 aa, Synthetic construct; identical to SEQ ID NO: 2983

SEQ ID NO: 6834 - protein, 80 aa, Synthetic construct; identical to SEQ ID NO: 2984

SEQ ID NO: 6835 - protein, 80 aa, Synthetic construct
VKVIYKAPSENWAMEGGMDPESLLEGDDGKTYFYQLWYDQDYARFESPPKTQPTEDNKFKFCVSCARLAEMRQKEIPRVL

SEQ ID NO: 6836 - protein, 80 aa, Synthetic construct; identical to SEQ ID NO: 2986

SEQ ID NO: 6837 - protein, 80 aa, Synthetic construct
EQLEDLDSRVLYYSATKNGILYRVGDGVYLPPEAFTFNIKLSSPVKRPRKEPVDEDLYPEHYRKYSDYIKGSNLDAPEPY

SEQ ID NO: 6838 - protein, 80 aa, Synthetic construct
LYYSATKNGILYRVGDGVYLPPEAFTFNIKLSSPVKRPRKEPVDEDLYPEHYRKYSDYIKGSNLDAPEPYRIGRIKEIFC

SEQ ID NO: 6839 - protein, 80 aa, Synthetic construct; identical to SEQ ID NO: 2064

SEQ ID NO: 6840 - protein, 80 aa, Synthetic construct
LLEQMELRKKLEREFQSLKDNFQDQMKRELAYREEMVQQLQIVRDTLCNELDQERKARYAIQQKLKEAHDALHHFSCKML

SEQ ID NO: 6841 - protein, 80 aa, Synthetic construct
LEREFQSLKDNFQDQMKRELAYREEMVQQLQIVRDTLCNELDQERKARYAIQQKLKEAHDALHHFSCKMLTPRHCTGNCS

SEQ ID NO: 6842 - protein, 80 aa, Synthetic construct; identical to SEQ ID NO: 1060

SEQ ID NO: 6843 - protein, 80 aa, Synthetic construct; identical to SEQ ID NO: 1884

SEQ ID NO: 6844 - protein, 80 aa, Synthetic construct; identical to SEQ ID NO: 1061

SEQ ID NO: 6845 - protein, 80 aa, Synthetic construct; identical to SEQ ID NO: 4299

SEQ ID NO: 6846 - protein, 80 aa, Synthetic construct
TTPFHRDQTVKTQKENTVFRTPAIKRSILESSPRTPTPFKHALAAQEIKYGPLKMLPQTPSHLVEDLQDVIKQESDESGI

SEQ ID NO: 6847 - protein, 80 aa, Synthetic construct
KTQKENTVFRTPAIKRSILESSPRTPTPFKHALAAQEIKYGPLKMLPQTPSHLVEDLQDVIKQESDESGIVAEFQENGPP

SEQ ID NO: 6848 - protein, 80 aa, Synthetic construct
TPAIKRSILESSPRTPTPFKHALAAQEIKYGPLKMLPQTPSHLVEDLQDVIKQESDESGIVAEFQENGPPLLKKIKQEVE

SEQ ID NO: 6849 - protein, 80 aa, Synthetic construct; identical to SEQ ID NO: 1062

SEQ ID NO: 6850 - protein, 80 aa, Synthetic construct; identical to SEQ ID NO: 1733

SEQ ID NO: 6851 - protein, 80 aa, Synthetic construct; identical to SEQ ID NO: 1063

SEQ ID NO: 6852 - protein, 80 aa, Synthetic construct; identical to SEQ ID NO: 1064

SEQ ID NO: 6853 - protein, 80 aa, Synthetic construct; identical to SEQ ID NO: 1065

SEQ ID NO: 6854 - protein, 80 aa, Synthetic construct
VAEFQENGPPLLKKIKQEVESPTDKSGNFFCSHHWEGDSLNTQLFTQTSPVADAPNILTSSVLMAPASEDEDNVLKAFTV

SEQ ID NO: 6855 - protein, 80 aa, Synthetic construct
LLKKIKQEVESPTDKSGNFFCSHHWEGDSLNTQLFTQTSPVADAPNILTSSVLMAPASEDEDNVLKAFTVPKNRSLASPL

SEQ ID NO: 6856 - protein, 80 aa, Synthetic construct; identical to SEQ ID NO: 2886

SEQ ID NO: 6857 - protein, 80 aa, Synthetic construct; identical to SEQ ID NO: 4399

SEQ ID NO: 6858 - protein, 80 aa, Synthetic construct
QQIELLEVLTGFETNNKYEIKNSFGQRVYFAAEDTDCCTRNCCGPSRPFTLRIIDNMGQEVITLERPLRCSSCCCPCCLQ

SEQ ID NO: 6859 - protein, 80 aa, Synthetic construct
GFETNNKYEIKNSFGQRVYFAAEDTDCCTRNCCGPSRPFTLRIIDNMGQEVITLERPLRCSSCCCPCCLQEIEIQAPPGV

SEQ ID NO: 6860 - protein, 80 aa, Synthetic construct
KNSFGQRVYFAAEDTDCCTRNCCGPSRPFTLRIIDNMGQEVITLERPLRCSSCCCPCCLQEIEIQAPPGVPIGYVIQTWH

SEQ ID NO: 6861 - protein, 80 aa, Synthetic construct
AAEDTDCCTRNCCGPSRPFTLRIIDNMGQEVITLERPLRCSSCCCPCCLQEIEIQAPPGVPIGYVIQTWHPCLPKFTIQN

SEQ ID NO: 6862 - protein, 80 aa, Synthetic construct
LRIIDNMGQEVITLERPLRCSSCCCPCCLQEIEIQAPPGVPIGYVIQTWHPCLPKFTIQNEKREDVLKISGPCVVCSCCG

SEQ ID NO: 6863 - protein, 80 aa, Synthetic construct; identical to SEQ ID NO: 2181

SEQ ID NO: 6864 - protein, 80 aa, Synthetic construct
SSCCCPCCLQEIEIQAPPGVPIGYVIQTWHPCLPKFTIQNEKREDVLKISGPCVVCSCCGDVDFEIKSLDEQCVVGKISK

SEQ ID NO: 6865 - protein, 80 aa, Synthetic construct
RGYAASCRIKRVTQKEELERQRVELQQEVEKLARENSSMRLELDALRSKYEALQTFARTVARGPVAPSKVATTSVITIVK

SEQ ID NO: 6866 - protein, 80 aa, Synthetic construct
RVTQKEELERQRVELQQEVEKLARENSSMRLELDALRSKYEALQTFARTVARGPVAPSKVATTSVITIVKSTELSSTSVP

SEQ ID NO: 6867 - protein, 80 aa, Synthetic construct; identical to SEQ ID NO: 2191

SEQ ID NO: 6868 - protein, 80 aa, Synthetic construct; identical to SEQ ID NO: 4612

SEQ ID NO: 6869 - protein, 80 aa, Synthetic construct; identical to SEQ ID NO: 104

SEQ ID NO: 6870 - protein, 80 aa, Synthetic construct; identical to SEQ ID NO: 105

SEQ ID NO: 6871 - protein, 80 aa, Synthetic construct; identical to SEQ ID NO: 106

SEQ ID NO: 6872 - protein, 80 aa, Synthetic construct; identical to SEQ ID NO: 1744

SEQ ID NO: 6873 - protein, 80 aa, Synthetic construct; identical to SEQ ID NO: 1066

SEQ ID NO: 6874 - protein, 80 aa, Synthetic construct; identical to SEQ ID NO: 1067

SEQ ID NO: 6875 - protein, 80 aa, Synthetic construct; identical to SEQ ID NO: 1068

SEQ ID NO: 6876 - protein, 80 aa, Synthetic construct; identical to SEQ ID NO: 2263

SEQ ID NO: 6877 - protein, 80 aa, Synthetic construct
IQAQFAQLAQLSPQERLSRETALQQKQVSLEAWLQREAQTLQQYRVELAEKHQKTLQLLRKQQTIILDDELIQWKRRQQL

SEQ ID NO: 6878 - protein, 80 aa, Synthetic construct; identical to SEQ ID NO: 1971

SEQ ID NO: 6879 - protein, 80 aa, Synthetic construct
SEEEQRLVQQAFQRNFFSMARQLPMKIRINGREDRAEASAAALNLTTSSIGSINMSVDIDGTTYAGVLFAQKPVVHLITG

SEQ ID NO: 6880 - protein, 80 aa, Synthetic construct
AFQRNFFSMARQLPMKIRINGREDRAEASAAALNLTTSSIGSINMSVDIDGTTYAGVLFAQKPVVHLITGSAPQSLGSSA

SEQ ID NO: 6881 - protein, 80 aa, Synthetic construct
RQLPMKIRINGREDRAEASAAALNLTTSSIGSINMSVDIDGTTYAGVLFAQKPVVHLITGSAPQSLGSSASSSSSSHCSP

SEQ ID NO: 6882 - protein, 80 aa, Synthetic construct
GREDRAEASAAALNLTTSSIGSINMSVDIDGTTYAGVLFAQKPVVHLITGSAPQSLGSSASSSSSSHCSPSPTSSRGTPS

SEQ ID NO: 6883 - protein, 80 aa, Synthetic construct
AAALNLTTSSIGSINMSVDIDGTTYAGVLFAQKPVVHLITGSAPQSLGSSASSSSSSHCSPSPTSSRGTPSAEPSTSWSL

SEQ ID NO: 6884 - protein, 80 aa, Synthetic construct
KLDELIQSCTLDLKLLTEDSENQRLAYVTYQDIRKISGLKDQTVIVVKAPPETRLEVPDSIESLQIHLASTQGPIEVYLC

SEQ ID NO: 6885 - protein, 80 aa, Synthetic construct
LDLKLLTEDSENQRLAYVTYQDIRKISGLKDQTVIVVKAPPETRLEVPDSIESLQIHLASTQGPIEVYLCPEETETHSPM

SEQ ID NO: 6886 - protein, 80 aa, Synthetic construct; identical to SEQ ID NO: 2192

SEQ ID NO: 6887 - protein, 80 aa, Synthetic construct; identical to SEQ ID NO: 2193

SEQ ID NO: 6888 - protein, 80 aa, Synthetic construct; identical to SEQ ID NO: 1069

SEQ ID NO: 6889 - protein, 80 aa, Synthetic construct; identical to SEQ ID NO: 2194

SEQ ID NO: 6890 - protein, 80 aa, Synthetic construct
PDHTQAPTKQEAGGGFVLPPPGTDLVFLREGASSPVQVPGPVAASTEALLQEAQCSGLSWVVALPQVKQEKADTQDEWTP

SEQ ID NO: 6891 - protein, 80 aa, Synthetic construct
EAGGGFVLPPPGTDLVFLREGASSPVQVPGPVAASTEALLQEAQCSGLSWVVALPQVKQEKADTQDEWTPGTAVLTSPVL

SEQ ID NO: 6892 - protein, 80 aa, Synthetic construct
GASSPVQVPGPVAASTEALLQEAQCSGLSWVVALPQVKQEKADTQDEWTPGTAVLTSPVLVPGCPSKAVDPGLPSVKQEP

SEQ ID NO: 6893 - protein, 80 aa, Synthetic construct
PVAASTEALLQEAQCSGLSWVVALPQVKQEKADTQDEWTPGTAVLTSPVLVPGCPSKAVDPGLPSVKQEPPDPEEDKEEN

SEQ ID NO: 6894 - protein, 80 aa, Synthetic construct
QEAQCSGLSWVVALPQVKQEKADTQDEWTPGTAVLTSPVLVPGCPSKAVDPGLPSVKQEPPDPEEDKEENKDDSASKLAP

SEQ ID NO: 6895 - protein, 80 aa, Synthetic construct; identical to SEQ ID NO: 1070

SEQ ID NO: 6896 - protein, 80 aa, Synthetic construct; identical to SEQ ID NO: 1071

SEQ ID NO: 6897 - protein, 80 aa, Synthetic construct; identical to SEQ ID NO: 2195

SEQ ID NO: 6898 - protein, 80 aa, Synthetic construct; identical to SEQ ID NO: 1072

SEQ ID NO: 6899 - protein, 80 aa, Synthetic construct; identical to SEQ ID NO: 1073

SEQ ID NO: 6900 - protein, 80 aa, Synthetic construct
PQQPQQPQPPQQQPPQPQQPQPQQPQQPQQPPQQQSHLVPVSLSNLIPGSPLPHVGAALTVTTHPHISIKSEPVSPSRER

SEQ ID NO: 6901 - protein, 80 aa, Synthetic construct
QQQPPQPQQPQPQQPQQPQQPPQQQSHLVPVSLSNLIPGSPLPHVGAALTVTTHPHISIKSEPVSPSRERSPAPPPPAVF

SEQ ID NO: 6902 - protein, 80 aa, Synthetic construct
QPQQPQQPQQPPQQQSHLVPVSLSNLIPGSPLPHVGAALTVTTHPHISIKSEPVSPSRERSPAPPPPAVFPAARPEPGDG

SEQ ID NO: 6903 - protein, 80 aa, Synthetic construct
PPQQQSHLVPVSLSNLIPGSPLPHVGAALTVTTHPHISIKSEPVSPSRERSPAPPPPAVFPAARPEPGDGLSSPAGGSYE

SEQ ID NO: 6904 - protein, 80 aa, Synthetic construct
VSLSNLIPGSPLPHVGAALTVTTHPHISIKSEPVSPSRERSPAPPPPAVFPAARPEPGDGLSSPAGGSYETGDRDDGRGD

SEQ ID NO: 6905 - protein, 80 aa, Synthetic construct
PLPHVGAALTVTTHPHISIKSEPVSPSRERSPAPPPPAVFPAARPEPGDGLSSPAGGSYETGDRDDGRGDFGPTLGLLRP

SEQ ID NO: 6906 - protein, 80 aa, Synthetic construct
VTTHPHISIKSEPVSPSRERSPAPPPPAVFPAARPEPGDGLSSPAGGSYETGDRDDGRGDFGPTLGLLRPAPEPEAEGSA

SEQ ID NO: 6907 - protein, 80 aa, Synthetic construct
WPLPAHFGQCELKIEVQPKTHHRAHYETEGSRGAVKASTGGHPVVKLLGYNEKPINLQMFIGTADDRYLRPHAFYQVHRI

SEQ ID NO: 6908 - protein, 80 aa, Synthetic construct
VNGGHEMVVTGSNFLPESKIIFLEKGQDGRPQWEVEGKIIREKCQGAHIVLEVPPYHNPAVTAAVQVHFYLCNGKRKKSQ

SEQ ID NO: 6909 - protein, 80 aa, Synthetic construct
PQWEVEGKIIREKCQGAHIVLEVPPYHNPAVTAAVQVHFYLCNGKRKKSQSQRFTYTPVLMKQEHREEIDLSSVPSLPVP

SEQ ID NO: 6910 - protein, 80 aa, Synthetic construct
LEVPPYHNPAVTAAVQVHFYLCNGKRKKSQSQRFTYTPVLMKQEHREEIDLSSVPSLPVPHPAQTQRPSSDSGCSHDSVL

SEQ ID NO: 6911 - protein, 80 aa, Synthetic construct
VTAAVQVHFYLCNGKRKKSQSQRFTYTPVLMKQEHREEIDLSSVPSLPVPHPAQTQRPSSDSGCSHDSVLSGQRSLICSI

SEQ ID NO: 6912 - protein, 80 aa, Synthetic construct
PPSPQLQPMPYQSPSSGTASSPSPATRMHSGQHSTQAQSTGQGGLSAPSSLICHSLCDPASFPPDGATVSIKPEPEDREP

SEQ ID NO: 6913 - protein, 80 aa, Synthetic construct
YQSPSSGTASSPSPATRMHSGQHSTQAQSTGQGGLSAPSSLICHSLCDPASFPPDGATVSIKPEPEDREPNFATIGLQDI

SEQ ID NO: 6914 - protein, 80 aa, Synthetic construct
NGTLENQKGTGVKKSPMLCGQYPVKSEGKELKIVVQPETQHRARYLTEGSRGSVKDRTQQGFPTVKLEGHNEPVVLQVFV

SEQ ID NO: 6915 - protein, 80 aa, Synthetic construct
GVKKSPMLCGQYPVKSEGKELKIVVQPETQHRARYLTEGSRGSVKDRTQQGFPTVKLEGHNEPVVLQVFVGNDSGRVKPH

SEQ ID NO: 6916 - protein, 80 aa, Synthetic construct
QYPVKSEGKELKIVVQPETQHRARYLTEGSRGSVKDRTQQGFPTVKLEGHNEPVVLQVFVGNDSGRVKPHGFYQACRVTG

SEQ ID NO: 6917 - protein, 80 aa, Synthetic construct
GFPTVKLEGHNEPVVLQVFVGNDSGRVKPHGFYQACRVTGRNTTPCKEVDIEGTTVIEVGLDPSNNMTLAVDCVGILKLR

SEQ ID NO: 6918 - protein, 80 aa, Synthetic construct
NEPVVLQVFVGNDSGRVKPHGFYQACRVTGRNTTPCKEVDIEGTTVIEVGLDPSNNMTLAVDCVGILKLRNADVEARIGI

SEQ ID NO: 6919 - protein, 80 aa, Synthetic construct
LHSCSVKGEEEVFLIGKNFLKGTKVIFQENVSDENSWKSEAEIDMELFHQNHLIVKVPPYHDQHITLPVSVGIYVVTNAG

SEQ ID NO: 6920 - protein, 80 aa, Synthetic construct
KGTKVIFQENVSDENSWKSEAEIDMELFHQNHLIVKVPPYHDQHITLPVSVGIYVVTNAGRSHDVQPFTYTPDPAAAGAL

SEQ ID NO: 6921 - protein, 80 aa, Synthetic construct
AEIDMELFHQNHLIVKVPPYHDQHITLPVSVGIYVVTNAGRSHDVQPFTYTPDPAAAGALNVNVKKEISSPARPCSFEEA

SEQ ID NO: 6922 - protein, 80 aa, Synthetic construct
NHLIVKVPPYHDQHITLPVSVGIYVVTNAGRSHDVQPFTYTPDPAAAGALNVNVKKEISSPARPCSFEEAMKAMKTTGCN

SEQ ID NO: 6923 - protein, 80 aa, Synthetic construct
HDQHITLPVSVGIYVVTNAGRSHDVQPFTYTPDPAAAGALNVNVKKEISSPARPCSFEEAMKAMKTTGCNLDKVNIIPNA

SEQ ID NO: 6924 - protein, 80 aa, Synthetic construct
VGIYVVTNAGRSHDVQPFTYTPDPAAAGALNVNVKKEISSPARPCSFEEAMKAMKTTGCNLDKVNIIPNALMTPLIPSSM

SEQ ID NO: 6925 - protein, 80 aa, Synthetic construct
RSHDVQPFTYTPDPAAAGALNVNVKKEISSPARPCSFEEAMKAMKTTGCNLDKVNIIPNALMTPLIPSSMIKSEDVTPME

SEQ ID NO: 6926 - protein, 80 aa, Synthetic construct
TPDPAAAGALNVNVKKEISSPARPCSFEEAMKAMKTTGCNLDKVNIIPNALMTPLIPSSMIKSEDVTPMEVTAEKRSSTI

SEQ ID NO: 6927 - protein, 80 aa, Synthetic construct
PARPCSFEEAMKAMKTTGCNLDKVNIIPNALMTPLIPSSMIKSEDVTPMEVTAEKRSSTIFKTTKSVGSTQQTLENISNI

SEQ ID NO: 6928 - protein, 80 aa, Synthetic construct
MKAMKTTGCNLDKVNIIPNALMTPLIPSSMIKSEDVTPMEVTAEKRSSTIFKTTKSVGSTQQTLENISNIAGNGSFSSPS

SEQ ID NO: 6929 - protein, 80 aa, Synthetic construct
LDKVNIIPNALMTPLIPSSMIKSEDVTPMEVTAEKRSSTIFKTTKSVGSTQQTLENISNIAGNGSFSSPSSSHLPSENEK

SEQ ID NO: 6930 - protein, 80 aa, Synthetic construct
LMTPLIPSSMIKSEDVTPMEVTAEKRSSTIFKTTKSVGSTQQTLENISNIAGNGSFSSPSSSHLPSENEKQQQIQPKAYN

SEQ ID NO: 6931 - protein, 80 aa, Synthetic construct
LGYGAALNASLQAALAESSLPLLSNPGLINNASSGLLQAVHEDLNGSLDHIDSNGNSSPGCSPQPHIHSIHVKEEPVIAE

SEQ ID NO: 6932 - protein, 80 aa, Synthetic construct
LQAALAESSLPLLSNPGLINNASSGLLQAVHEDLNGSLDHIDSNGNSSPGCSPQPHIHSIHVKEEPVIAEDEDCPMSLVT

SEQ ID NO: 6933 - protein, 80 aa, Synthetic construct
PLLSNPGLINNASSGLLQAVHEDLNGSLDHIDSNGNSSPGCSPQPHIHSIHVKEEPVIAEDEDCPMSLVTTANHSPELED

SEQ ID NO: 6934 - protein, 80 aa, Synthetic construct
NASSGLLQAVHEDLNGSLDHIDSNGNSSPGCSPQPHIHSIHVKEEPVIAEDEDCPMSLVTTANHSPELEDDREIEEEPLS

SEQ ID NO: 6935 - protein, 80 aa, Synthetic construct
GLLQAVHEDLNGSLDHIDSNGNSSPGCSPQPHIHSIHVKEEPVIAEDEDCPMSLVTTANHSPELEDDREIEEEPLSEDLE

SEQ ID NO: 6936 - protein, 80 aa, Synthetic construct
YQIRTAPTSTIAPGVVMASSPALPTQPAEEAARKREVRLMKNREAARECRRKKKEYVKCLENRVAVLENQNKTLIEELKA

SEQ ID NO: 6937 - protein, 80 aa, Synthetic construct; identical to SEQ ID NO: 1731

SEQ ID NO: 6938 - protein, 80 aa, Synthetic construct; identical to SEQ ID NO: 109

SEQ ID NO: 6939 - protein, 80 aa, Synthetic construct; identical to SEQ ID NO: 4812

SEQ ID NO: 6940 - protein, 80 aa, Synthetic construct
EEKYKKINEEFDNMMRNHKIAPGLPPQNFSMSVTVPVTSPNALSYTNPGSSLVSPSLAASSTLTDSSMLSPPQTTLHRNV

SEQ ID NO: 6941 - protein, 80 aa, Synthetic construct
SAMPTAYNTDYSLTSADLSALQGFNSPGMLSLGQVSAWQQHHLGQAALSSLVAGGQLSQGSNLSINTNQNISIKSEPISP

SEQ ID NO: 6942 - protein, 80 aa, Synthetic construct
YSLTSADLSALQGFNSPGMLSLGQVSAWQQHHLGQAALSSLVAGGQLSQGSNLSINTNQNISIKSEPISPPRDRMTPSGF

SEQ ID NO: 6943 - protein, 80 aa, Synthetic construct
LQGFNSPGMLSLGQVSAWQQHHLGQAALSSLVAGGQLSQGSNLSINTNQNISIKSEPISPPRDRMTPSGFQQQQQQQQQQ

SEQ ID NO: 6944 - protein, 80 aa, Synthetic construct
SLGQVSAWQQHHLGQAALSSLVAGGQLSQGSNLSINTNQNISIKSEPISPPRDRMTPSGFQQQQQQQQQQQPPPPPQPQP

SEQ ID NO: 6945 - protein, 80 aa, Synthetic construct
HHLGQAALSSLVAGGQLSQGSNLSINTNQNISIKSEPISPPRDRMTPSGFQQQQQQQQQQQPPPPPQPQPQPPQPQPRQE

SEQ ID NO: 6946 - protein, 80 aa, Synthetic construct
LVAGGQLSQGSNLSINTNQNISIKSEPISPPRDRMTPSGFQQQQQQQQQQQPPPPPQPQPQPPQPQPRQEMGRSPVDSLS

SEQ ID NO: 6947 - protein, 80 aa, Synthetic construct
SNLSINTNQNISIKSEPISPPRDRMTPSGFQQQQQQQQQQQPPPPPQPQPQPPQPQPRQEMGRSPVDSLSSSSSSYDGSD

SEQ ID NO: 6948 - protein, 80 aa, Synthetic construct
ISIKSEPISPPRDRMTPSGFQQQQQQQQQQQPPPPPQPQPQPPQPQPRQEMGRSPVDSLSSSSSSYDGSDREDPRGDFHS

SEQ ID NO: 6949 - protein, 80 aa, Synthetic construct; identical to SEQ ID NO: 3269

SEQ ID NO: 6950 - protein, 80 aa, Synthetic construct; identical to SEQ ID NO: 4611

SEQ ID NO: 6951 - protein, 80 aa, Synthetic construct
LSPGTVGQIPHPLGWLVPQQGQPVYPITTGGFRHPYPTALTVNASMSRFPPHMVPPHHTLHTTGIPHPAIVTPTVKQESS

SEQ ID NO: 6952 - protein, 80 aa, Synthetic construct
HPLGWLVPQQGQPVYPITTGGFRHPYPTALTVNASMSRFPPHMVPPHHTLHTTGIPHPAIVTPTVKQESSQSDVGSLHSS

SEQ ID NO: 6953 - protein, 80 aa, Synthetic construct
GQPVYPITTGGFRHPYPTALTVNASMSRFPPHMVPPHHTLHTTGIPHPAIVTPTVKQESSQSDVGSLHSSKHQDSKKEEE

SEQ ID NO: 6954 - protein, 80 aa, Synthetic construct
TVNASMSRFPPHMVPPHHTLHTTGIPHPAIVTPTVKQESSQSDVGSLHSSKHQDSKKEEEKKKPHIKKPLNAFMLYMKEM

SEQ ID NO: 6955 - protein, 80 aa, Synthetic construct
PDEEERARLAGEEEALRQYQQRKQQQQEGNYLQHVQLDQRSLVLNTEPAECPVCYSVLAPGEAVVLRECLHTFCRECLQG

SEQ ID NO: 6956 - protein, 80 aa, Synthetic construct
GEEEALRQYQQRKQQQQEGNYLQHVQLDQRSLVLNTEPAECPVCYSVLAPGEAVVLRECLHTFCRECLQGTIRNSQEAEV

SEQ ID NO: 6957 - protein, 80 aa, Synthetic construct
QRKQQQQEGNYLQHVQLDQRSLVLNTEPAECPVCYSVLAPGEAVVLRECLHTFCRECLQGTIRNSQEAEVSCPFIDNTYS

SEQ ID NO: 6958 - protein, 80 aa, Synthetic construct
YLQHVQLDQRSLVLNTEPAECPVCYSVLAPGEAVVLRECLHTFCRECLQGTIRNSQEAEVSCPFIDNTYSCSGKLLEREI

SEQ ID NO: 6959 - protein, 80 aa, Synthetic construct; identical to SEQ ID NO: 4610

SEQ ID NO: 6960 - protein, 80 aa, Synthetic construct
NYCMQEIYEVHPAAGSNCYMQSTDYYAYFEDSPGYSGCDAQAVPSNNIYMEQAWAVNQPYTCSYPGNMFKSKDSDLDMAL

SEQ ID NO: 6961 - protein, 80 aa, Synthetic construct; identical to SEQ ID NO: 589

SEQ ID NO: 6962 - protein, 80 aa, Synthetic construct
QSTDYYAYFEDSPGYSGCDAQAVPSNNIYMEQAWAVNQPYTCSYPGNMFKSKDSDLDMALNQYSQPEYFTEEKPTFSQVQ

SEQ ID NO: 6963 - protein, 80 aa, Synthetic construct; identical to SEQ ID NO: 4693

SEQ ID NO: 6964 - protein, 80 aa, Synthetic construct
LFCIPWRHATRHGPSQDGDNTIFKAWAKETGKYTEGVDEADPAKWKANLRCALNKSRDFRLIYDGPRDMPPQPYKIYEVC

SEQ ID NO: 6965 - protein, 80 aa, Synthetic construct
RHGPSQDGDNTIFKAWAKETGKYTEGVDEADPAKWKANLRCALNKSRDFRLIYDGPRDMPPQPYKIYEVCSNGPAPTDSQ

SEQ ID NO: 6966 - protein, 80 aa, Synthetic construct
TIFKAWAKETGKYTEGVDEADPAKWKANLRCALNKSRDFRLIYDGPRDMPPQPYKIYEVCSNGPAPTDSQPPEDYSFGAG

SEQ ID NO: 6967 - protein, 80 aa, Synthetic construct
GKYTEGVDEADPAKWKANLRCALNKSRDFRLIYDGPRDMPPQPYKIYEVCSNGPAPTDSQPPEDYSFGAGEEEEEEEELQ

SEQ ID NO: 6968 - protein, 80 aa, Synthetic construct
TTPNKGNKALKVKREPGENGTSLTDEELVTMSVRELNQHLRGLSKEEIVQLKQRRRTLKNRGYAASCRVKRVTQKEELEK

SEQ ID NO: 6969 - protein, 80 aa, Synthetic construct
KVKREPGENGTSLTDEELVTMSVRELNQHLRGLSKEEIVQLKQRRRTLKNRGYAASCRVKRVTQKEELEKQKAELQQEVE

SEQ ID NO: 6970 - protein, 80 aa, Synthetic construct; identical to SEQ ID NO: 1074

SEQ ID NO: 6971 - protein, 80 aa, Synthetic construct; identical to SEQ ID NO: 2151

SEQ ID NO: 6972 - protein, 80 aa, Synthetic construct
GAKTSSRNDYIHSGLYSSFTLNSLNSSNVKLFKLIKTENPAEKLAEKKSPQEPTPSVIKFVTTPSKKPPVEPVAATISIG

SEQ ID NO: 6973 - protein, 80 aa, Synthetic construct
IHSGLYSSFTLNSLNSSNVKLFKLIKTENPAEKLAEKKSPQEPTPSVIKFVTTPSKKPPVEPVAATISIGPSISPSSEET

SEQ ID NO: 6974 - protein, 80 aa, Synthetic construct
LNSLNSSNVKLFKLIKTENPAEKLAEKKSPQEPTPSVIKFVTTPSKKPPVEPVAATISIGPSISPSSEETIQALETLVSP

SEQ ID NO: 6975 - protein, 80 aa, Synthetic construct
GSSKEKQELLPCLQQDNNRPGILTSDIKTELESKELSATVAESMGLYMDSVRDADYSYEQQNQQGSMSPAKIYQNVEQLV

SEQ ID NO: 6976 - protein, 80 aa, Synthetic construct
PCLQQDNNRPGILTSDIKTELESKELSATVAESMGLYMDSVRDADYSYEQQNQQGSMSPAKIYQNVEQLVKFYKGNGHRP

SEQ ID NO: 6977 - protein, 80 aa, Synthetic construct
GILTSDIKTELESKELSATVAESMGLYMDSVRDADYSYEQQNQQGSMSPAKIYQNVEQLVKFYKGNGHRPSTLSCVNTPL

SEQ ID NO: 6978 - protein, 80 aa, Synthetic construct
LSSPAASTVGSICSPVNNAFSYTASGTSAGSSTLRDVVPSPDTQEKGAQEVPFPKTEEVESAISNGVTGQLNIVQYIKPE

SEQ ID NO: 6979 - protein, 80 aa, Synthetic construct
SICSPVNNAFSYTASGTSAGSSTLRDVVPSPDTQEKGAQEVPFPKTEEVESAISNGVTGQLNIVQYIKPEPDGAFSSSCL

SEQ ID NO: 6980 - protein, 80 aa, Synthetic construct
SYTASGTSAGSSTLRDVVPSPDTQEKGAQEVPFPKTEEVESAISNGVTGQLNIVQYIKPEPDGAFSSSCLGGNSKINSDS

SEQ ID NO: 6981 - protein, 80 aa, Synthetic construct
PDTQEKGAQEVPFPKTEEVESAISNGVTGQLNIVQYIKPEPDGAFSSSCLGGNSKINSDSSFSVPIKQESTKHSCSGTSF

SEQ ID NO: 6982 - protein, 80 aa, Synthetic construct; identical to SEQ ID NO: 1813

SEQ ID NO: 6983 - protein, 80 aa, Synthetic construct
SAISNGVTGQLNIVQYIKPEPDGAFSSSCLGGNSKINSDSSFSVPIKQESTKHSCSGTSFKGNPTVNPFPFMDGSYFSFM

SEQ ID NO: 6984 - protein, 80 aa, Synthetic construct; identical to SEQ ID NO: 1075

SEQ ID NO: 6985 - protein, 80 aa, Synthetic construct
PDGAFSSSCLGGNSKINSDSSFSVPIKQESTKHSCSGTSFKGNPTVNPFPFMDGSYFSFMDDKDYYSLSGILGPPVPGFD

SEQ ID NO: 6986 - protein, 80 aa, Synthetic construct
GGNSKINSDSSFSVPIKQESTKHSCSGTSFKGNPTVNPFPFMDGSYFSFMDDKDYYSLSGILGPPVPGFDGNCEGSGFPV

SEQ ID NO: 6987 - protein, 80 aa, Synthetic construct
SFSVPIKQESTKHSCSGTSFKGNPTVNPFPFMDGSYFSFMDDKDYYSLSGILGPPVPGFDGNCEGSGFPVGIKQEPDDGS

SEQ ID NO: 6988 - protein, 80 aa, Synthetic construct
TKHSCSGTSFKGNPTVNPFPFMDGSYFSFMDDKDYYSLSGILGPPVPGFDGNCEGSGFPVGIKQEPDDGSYYPEASIPSS

SEQ ID NO: 6989 - protein, 80 aa, Synthetic construct
KGNPTVNPFPFMDGSYFSFMDDKDYYSLSGILGPPVPGFDGNCEGSGFPVGIKQEPDDGSYYPEASIPSSAIVGVNSGGQ

SEQ ID NO: 6990 - protein, 80 aa, Synthetic construct
FMDGSYFSFMDDKDYYSLSGILGPPVPGFDGNCEGSGFPVGIKQEPDDGSYYPEASIPSSAIVGVNSGGQSFHYRIGAQG

SEQ ID NO: 6991 - protein, 80 aa, Synthetic construct
ILGPPVPGFDGNCEGSGFPVGIKQEPDDGSYYPEASIPSSAIVGVNSGGQSFHYRIGAQGTISLSRSARDQSFQHLSSFP

SEQ ID NO: 6992 - protein, 80 aa, Synthetic construct
GNCEGSGFPVGIKQEPDDGSYYPEASIPSSAIVGVNSGGQSFHYRIGAQGTISLSRSARDQSFQHLSSFPPVNTLVESWK

SEQ ID NO: 6993 - protein, 80 aa, Synthetic construct
GIKQEPDDGSYYPEASIPSSAIVGVNSGGQSFHYRIGAQGTISLSRSARDQSFQHLSSFPPVNTLVESWKSHGDLSSRRS

SEQ ID NO: 6994 - protein, 80 aa, Synthetic construct; identical to SEQ ID NO: 1076

SEQ ID NO: 6995 - protein, 80 aa, Synthetic construct; identical to SEQ ID NO: 1814

SEQ ID NO: 6996 - protein, 80 aa, Synthetic construct; identical to SEQ ID NO: 1077

SEQ ID NO: 6997 - protein, 80 aa, Synthetic construct
KMVTKCPNNSGQSWQRFYQLTKLLDSMHDLVSDLLEFCFYTFRESHALKVEFPAMLVEIISDQLPKVESGNAKPLYFHRK

SEQ ID NO: 6998 - protein, 80 aa, Synthetic construct; identical to SEQ ID NO: 5011

SEQ ID NO: 6999 - protein, 80 aa, Synthetic construct; identical to SEQ ID NO: 1783

SEQ ID NO: 7000 - protein, 80 aa, Synthetic construct; identical to SEQ ID NO: 3289

SEQ ID NO: 7001 - protein, 80 aa, Synthetic construct
AHSLGHMSADTRIGRNDRLNPTLSQSVILPGGLVSMETKLKSQSGQIKEEDFEQSKSQASFNNKKSGDHCHPPSIKHESY

SEQ ID NO: 7002 - protein, 80 aa, Synthetic construct
TRIGRNDRLNPTLSQSVILPGGLVSMETKLKSQSGQIKEEDFEQSKSQASFNNKKSGDHCHPPSIKHESYRGNASPGAAT

SEQ ID NO: 7003 - protein, 80 aa, Synthetic construct; identical to SEQ ID NO: 5080

SEQ ID NO: 7004 - protein, 80 aa, Synthetic construct
KRTEVTLETLGPKPAARDVNLPRPPGALCEQKRETCADGEAAGCTINNSLSNIQWLRKMSSDGLGSRSIKQEMEEKENCH

SEQ ID NO: 7005 - protein, 80 aa, Synthetic construct
GPKPAARDVNLPRPPGALCEQKRETCADGEAAGCTINNSLSNIQWLRKMSSDGLGSRSIKQEMEEKENCHLEQRQVKVEE

SEQ ID NO: 7006 - protein, 80 aa, Synthetic construct
LPRPPGALCEQKRETCADGEAAGCTINNSLSNIQWLRKMSSDGLGSRSIKQEMEEKENCHLEQRQVKVEEPSRPSASWQN

SEQ ID NO: 7007 - protein, 80 aa, Synthetic construct
QKRETCADGEAAGCTINNSLSNIQWLRKMSSDGLGSRSIKQEMEEKENCHLEQRQVKVEEPSRPSASWQNSVSERPPYSY

SEQ ID NO: 7008 - protein, 80 aa, Synthetic construct
AAGCTINNSLSNIQWLRKMSSDGLGSRSIKQEMEEKENCHLEQRQVKVEEPSRPSASWQNSVSERPPYSYMAMIQFAINS

SEQ ID NO: 7009 - protein, 80 aa, Synthetic construct; identical to SEQ ID NO: 2305

SEQ ID NO: 7010 - protein, 80 aa, Synthetic construct
SDGLGSRSIKQEMEEKENCHLEQRQVKVEEPSRPSASWQNSVSERPPYSYMAMIQFAINSTERKRMTLKDIYTWIEDHFP

SEQ ID NO: 7011 - protein, 80 aa, Synthetic construct; identical to SEQ ID NO: 3246

SEQ ID NO: 7012 - protein, 80 aa, Synthetic construct; identical to SEQ ID NO: 2306

SEQ ID NO: 7013 - protein, 80 aa, Synthetic construct
SSAGPGKEEKLLFGEGFSPLLPVQTIKEEEIQPGEEMPHLARPIKVESPPLEEWPSPAPSFKEESSHSWEDSSQSPTPRP

SEQ ID NO: 7014 - protein, 80 aa, Synthetic construct; identical to SEQ ID NO: 1078

SEQ ID NO: 7015 - protein, 80 aa, Synthetic construct; identical to SEQ ID NO: 1079

SEQ ID NO: 7016 - protein, 80 aa, Synthetic construct
IQPGEEMPHLARPIKVESPPLEEWPSPAPSFKEESSHSWEDSSQSPTPRPKKSYSGLRSPTRCVSEMLVIQHRERRERSR

SEQ ID NO: 7017 - protein, 80 aa, Synthetic construct
ARPIKVESPPLEEWPSPAPSFKEESSHSWEDSSQSPTPRPKKSYSGLRSPTRCVSEMLVIQHRERRERSRSRRKQHLLPP

SEQ ID NO: 7018 - protein, 80 aa, Synthetic construct; identical to SEQ ID NO: 2022

SEQ ID NO: 7019 - protein, 80 aa, Synthetic construct
FWQGALPGQAGTSHDVKPFSQQTYAVQPPLPLPGFESPAGPAPSPSAPPAPPWQGRSVASSKLWMLEFSAFLEQQQDPDT

SEQ ID NO: 7020 - protein, 80 aa, Synthetic construct
GTSHDVKPFSQQTYAVQPPLPLPGFESPAGPAPSPSAPPAPPWQGRSVASSKLWMLEFSAFLEQQQDPDTYNKHLFVHIG

SEQ ID NO: 7021 - protein, 80 aa, Synthetic construct
SNKDRHIDSSCSSFIKTEPSSPASLTDSVNHHSPGGSSDASGSYSSTMNGHQNGLDSPPLYPSAPILGGSGPVRKLYDDC

SEQ ID NO: 7022 - protein, 80 aa, Synthetic construct
CSSFIKTEPSSPASLTDSVNHHSPGGSSDASGSYSSTMNGHQNGLDSPPLYPSAPILGGSGPVRKLYDDCSSTIVEDPQT

SEQ ID NO: 7023 - protein, 80 aa, Synthetic construct; identical to SEQ ID NO: 2197

SEQ ID NO: 7024 - protein, 80 aa, Synthetic construct; identical to SEQ ID NO: 1080

SEQ ID NO: 7025 - protein, 80 aa, Synthetic construct
SSTIVEDPQTKCEYMLNSMPKRLCLVCGDIASGYHYGVASCEACKAFFKRTIQGNIEYSCPATNECEITKRRRKSCQACR

SEQ ID NO: 7026 - protein, 80 aa, Synthetic construct
ISLKKPSAAPEAGASALPNPPALKKEAQDAPGLDPQGAADCAQGVLRQVKNEVGRSGAWKDHWWSAVQPERRNAASSEEA

SEQ ID NO: 7027 - protein, 80 aa, Synthetic construct
EAGASALPNPPALKKEAQDAPGLDPQGAADCAQGVLRQVKNEVGRSGAWKDHWWSAVQPERRNAASSEEAKAEETGGGKE

SEQ ID NO: 7028 - protein, 80 aa, Synthetic construct
PALKKEAQDAPGLDPQGAADCAQGVLRQVKNEVGRSGAWKDHWWSAVQPERRNAASSEEAKAEETGGGKEKGSGGSGGGS

SEQ ID NO: 7029 - protein, 80 aa, Synthetic construct
GPSYSSSEQVHVTMSSLLNTSDSSDEELVTGGATSQIQGVQTNDDLNNDSDDSSDNCVIVGFVKPLAERTPELVELSSDS

SEQ ID NO: 7030 - protein, 80 aa, Synthetic construct
HVTMSSLLNTSDSSDEELVTGGATSQIQGVQTNDDLNNDSDDSSDNCVIVGFVKPLAERTPELVELSSDSEDLGSYEKME

SEQ ID NO: 7031 - protein, 80 aa, Synthetic construct
SDSSDEELVTGGATSQIQGVQTNDDLNNDSDDSSDNCVIVGFVKPLAERTPELVELSSDSEDLGSYEKMETVKTQEQEQS

SEQ ID NO: 7032 - protein, 80 aa, Synthetic construct; identical to SEQ ID NO: 1081

SEQ ID NO: 7033 - protein, 80 aa, Synthetic construct
QTNDDLNNDSDDSSDNCVIVGFVKPLAERTPELVELSSDSEDLGSYEKMETVKTQEQEQSYSSGDSDVSRCSSPHSVLGK

SEQ ID NO: 7034 - protein, 80 aa, Synthetic construct; identical to SEQ ID NO: 2280

SEQ ID NO: 7035 - protein, 80 aa, Synthetic construct
RQSSSPEFRVQSFSERTNARKKNNHSERKYYYYERHRSRSLSSNRSRTASTGTDRVRNEKPGGKRKYKTRHLEGTNEVAQ

SEQ ID NO: 7036 - protein, 80 aa, Synthetic construct
QSFSERTNARKKNNHSERKYYYYERHRSRSLSSNRSRTASTGTDRVRNEKPGGKRKYKTRHLEGTNEVAQPSREFASKAK

SEQ ID NO: 7037 - protein, 80 aa, Synthetic construct
KKNNHSERKYYYYERHRSRSLSSNRSRTASTGTDRVRNEKPGGKRKYKTRHLEGTNEVAQPSREFASKAKDSHYQKSSSK

SEQ ID NO: 7038 - protein, 80 aa, Synthetic construct
LSSNRSRTASTGTDRVRNEKPGGKRKYKTRHLEGTNEVAQPSREFASKAKDSHYQKSSSKLDGNYKNESDTFSDSRSSDR

SEQ ID NO: 7039 - protein, 80 aa, Synthetic construct
TGTDRVRNEKPGGKRKYKTRHLEGTNEVAQPSREFASKAKDSHYQKSSSKLDGNYKNESDTFSDSRSSDRETKHKRRKRK

SEQ ID NO: 7040 - protein, 80 aa, Synthetic construct; identical to SEQ ID NO: 4999

SEQ ID NO: 7041 - protein, 80 aa, Synthetic construct; identical to SEQ ID NO: 3329

SEQ ID NO: 7042 - protein, 80 aa, Synthetic construct
ELISDEAPSIPAPTPQLSPALSTITDFSPEWSYPEGGVKVLITGPWTEAAEHYSCVFDHIAVPASLVQPGVLRCYCPAHE

SEQ ID NO: 7043 - protein, 80 aa, Synthetic construct
PAPTPQLSPALSTITDFSPEWSYPEGGVKVLITGPWTEAAEHYSCVFDHIAVPASLVQPGVLRCYCPAHEVGLVSLQVAG

SEQ ID NO: 7044 - protein, 80 aa, Synthetic construct
LSTITDFSPEWSYPEGGVKVLITGPWTEAAEHYSCVFDHIAVPASLVQPGVLRCYCPAHEVGLVSLQVAGREGPLSASVL

SEQ ID NO: 7045 - protein, 80 aa, Synthetic construct
VGLVSLQVAGREGPLSASVLFEYRARRFLSLPSTQLDWLSLDDNQFRMSILERLEQMEKRMAEIAAAGQVPCQGPDAPPV

SEQ ID NO: 7046 - protein, 80 aa, Synthetic construct
REGPLSASVLFEYRARRFLSLPSTQLDWLSLDDNQFRMSILERLEQMEKRMAEIAAAGQVPCQGPDAPPVQDEGQGPGFE

SEQ ID NO: 7047 - protein, 80 aa, Synthetic construct
FEYRARRFLSLPSTQLDWLSLDDNQFRMSILERLEQMEKRMAEIAAAGQVPCQGPDAPPVQDEGQGPGFEARVVVLVESM

SEQ ID NO: 7048 - protein, 80 aa, Synthetic construct
LPSTQLDWLSLDDNQFRMSILERLEQMEKRMAEIAAAGQVPCQGPDAPPVQDEGQGPGFEARVVVLVESMIPRSTWKGPE

SEQ ID NO: 7049 - protein, 80 aa, Synthetic construct
LDDNQFRMSILERLEQMEKRMAEIAAAGQVPCQGPDAPPVQDEGQGPGFEARVVVLVESMIPRSTWKGPERLAHGSPFRG

SEQ ID NO: 7050 - protein, 80 aa, Synthetic construct
SYSSHISSKKCISLIPVNGRPRTGLKTSQCSSPSLSASPGSPTRPQIRQKIENKPLQEQLSVNQIKTEPVDYEFKPIVVA

SEQ ID NO: 7051 - protein, 80 aa, Synthetic construct
CISLIPVNGRPRTGLKTSQCSSPSLSASPGSPTRPQIRQKIENKPLQEQLSVNQIKTEPVDYEFKPIVVASGINCSTPLQ

SEQ ID NO: 7052 - protein, 80 aa, Synthetic construct
PRTGLKTSQCSSPSLSASPGSPTRPQIRQKIENKPLQEQLSVNQIKTEPVDYEFKPIVVASGINCSTPLQNGVFTGGGPL

SEQ ID NO: 7053 - protein, 80 aa, Synthetic construct
SSPSLSASPGSPTRPQIRQKIENKPLQEQLSVNQIKTEPVDYEFKPIVVASGINCSTPLQNGVFTGGGPLQATSSPQGMV

SEQ ID NO: 7054 - protein, 80 aa, Synthetic construct; identical to SEQ ID NO: 2099

SEQ ID NO: 7055 - protein, 80 aa, Synthetic construct
IENKPLQEQLSVNQIKTEPVDYEFKPIVVASGINCSTPLQNGVFTGGGPLQATSSPQGMVQAVVLPTVGLVSPISINLSD

SEQ ID NO: 7056 - protein, 80 aa, Synthetic construct; identical to SEQ ID NO: 1082

SEQ ID NO: 7057 - protein, 80 aa, Synthetic construct
DYEFKPIVVASGINCSTPLQNGVFTGGGPLQATSSPQGMVQAVVLPTVGLVSPISINLSDIQNVLKVAVDGNVIRQVLEN

SEQ ID NO: 7058 - protein, 80 aa, Synthetic construct
KIIINYSLEQPSQLQVVPQNLKKENPVATNSCKSEKLPEDLTVKSEKDKSFEGGVNDSTCLLCDDCPGDINALPELKHYD

SEQ ID NO: 7059 - protein, 80 aa, Synthetic construct
PSQLQVVPQNLKKENPVATNSCKSEKLPEDLTVKSEKDKSFEGGVNDSTCLLCDDCPGDINALPELKHYDLKQPTQPPPL

SEQ ID NO: 7060 - protein, 80 aa, Synthetic construct; identical to SEQ ID NO: 1893

SEQ ID NO: 7061 - protein, 80 aa, Synthetic construct
QSQHHVPIQDTFPFLNINGSPMAPASVGNCSVGNCSPEAVWPKTEPLEMEVPQAPIQPFYSSPELWISSLPMTDLDIKFQ

SEQ ID NO: 7062 - protein, 80 aa, Synthetic construct
TFPFLNINGSPMAPASVGNCSVGNCSPEAVWPKTEPLEMEVPQAPIQPFYSSPELWISSLPMTDLDIKFQYRGKEYGQTM

SEQ ID NO: 7063 - protein, 80 aa, Synthetic construct
PMAPASVGNCSVGNCSPEAVWPKTEPLEMEVPQAPIQPFYSSPELWISSLPMTDLDIKFQYRGKEYGQTMTVSNPQGCRL

SEQ ID NO: 7064 - protein, 80 aa, Synthetic construct
SVGNCSPEAVWPKTEPLEMEVPQAPIQPFYSSPELWISSLPMTDLDIKFQYRGKEYGQTMTVSNPQGCRLFYGDLGPMPD

SEQ ID NO: 7065 - protein, 80 aa, Synthetic construct
WPKTEPLEMEVPQAPIQPFYSSPELWISSLPMTDLDIKFQYRGKEYGQTMTVSNPQGCRLFYGDLGPMPDQEELFGPVSL

SEQ ID NO: 7066 - protein, 80 aa, Synthetic construct
QESLAEKELQLLVMIHQLSTLRDQLLTAHSEQKNMAAMLFEKQQQQMELARQQQEQIAKQQQQLIQQQHKINLLQQQIQQ

SEQ ID NO: 7067 - protein, 80 aa, Synthetic construct
LLVMIHQLSTLRDQLLTAHSEQKNMAAMLFEKQQQQMELARQQQEQIAKQQQQLIQQQHKINLLQQQIQQVNMPYVMIPA

SEQ ID NO: 7068 - protein, 80 aa, Synthetic construct
LRDQLLTAHSEQKNMAAMLFEKQQQQMELARQQQEQIAKQQQQLIQQQHKINLLQQQIQQVNMPYVMIPAFPPSHQPLPV

SEQ ID NO: 7069 - protein, 80 aa, Synthetic construct; identical to SEQ ID NO: 1781

SEQ ID NO: 7070 - protein, 80 aa, Synthetic construct; identical to SEQ ID NO: 1083

SEQ ID NO: 7071 - protein, 80 aa, Synthetic construct; identical to SEQ ID NO: 1084

SEQ ID NO: 7072 - protein, 80 aa, Synthetic construct
PQAGQVQMSSSDVLYPRAAGMPLAQPLVEHYVPRSLDPNMPVIVNTCSLREEGEGTDDRHSVADGEMYRYSEDEDSEGEE

SEQ ID NO: 7073 - protein, 80 aa, Synthetic construct
SDVLYPRAAGMPLAQPLVEHYVPRSLDPNMPVIVNTCSLREEGEGTDDRHSVADGEMYRYSEDEDSEGEEKSDGELVVLT

SEQ ID NO: 7074 - protein, 80 aa, Synthetic construct; identical to SEQ ID NO: 1782

SEQ ID NO: 7075 - protein, 80 aa, Synthetic construct
RGHYERILNPYNLFLSGDSLRCLQKPNLTTDTKDKEYKPHDIPQRQSVQPSETCPPARRAKRMRAEAMNIKIEPEETTEA

SEQ ID NO: 7076 - protein, 80 aa, Synthetic construct
YNLFLSGDSLRCLQKPNLTTDTKDKEYKPHDIPQRQSVQPSETCPPARRAKRMRAEAMNIKIEPEETTEARTHNLRRRMG

SEQ ID NO: 7077 - protein, 80 aa, Synthetic construct
RCLQKPNLTTDTKDKEYKPHDIPQRQSVQPSETCPPARRAKRMRAEAMNIKIEPEETTEARTHNLRRRMGCPTPKCENEK

SEQ ID NO: 7078 - protein, 80 aa, Synthetic construct
SETCPPARRAKRMRAEAMNIKIEPEETTEARTHNLRRRMGCPTPKCENEKEMKSSIKQEPIERKDYIVENEKEKPKSRSK

SEQ ID NO: 7079 - protein, 80 aa, Synthetic construct; identical to SEQ ID NO: 2129

SEQ ID NO: 7080 - protein, 80 aa, Synthetic construct; identical to SEQ ID NO: 1085

SEQ ID NO: 7081 - protein, 80 aa, Synthetic construct
CPTPKCENEKEMKSSIKQEPIERKDYIVENEKEKPKSRSKKATNAVDLYVCLLCGSGNDEDRLLLCDGCDDSYHTFCLIP

SEQ ID NO: 7082 - protein, 80 aa, Synthetic construct
DRLLLCDGCDDSYHTFCLIPPLHDVPKGDWRCPKCLAQECSKPQEAFGFEQAARDYTLRTFGEMADAFKSDYFNMPVHMV

SEQ ID NO: 7083 - protein, 80 aa, Synthetic construct
DSYHTFCLIPPLHDVPKGDWRCPKCLAQECSKPQEAFGFEQAARDYTLRTFGEMADAFKSDYFNMPVHMVPTELVEKEFW

SEQ ID NO: 7084 - protein, 80 aa, Synthetic construct
PLHDVPKGDWRCPKCLAQECSKPQEAFGFEQAARDYTLRTFGEMADAFKSDYFNMPVHMVPTELVEKEFWRLVSTIEEDV

SEQ ID NO: 7085 - protein, 80 aa, Synthetic construct
RCPKCLAQECSKPQEAFGFEQAARDYTLRTFGEMADAFKSDYFNMPVHMVPTELVEKEFWRLVSTIEEDVTVEYGADIAS

SEQ ID NO: 7086 - protein, 80 aa, Synthetic construct; identical to SEQ ID NO: 3676

SEQ ID NO: 7087 - protein, 80 aa, Synthetic construct
GAGLPDRHGSPIPARGRLVMLPKVETEALGLARSHGEQGQMPENMQVSQFKMVNYSYDEDLEELCPVCGDKVSGYHYGLL

SEQ ID NO: 7088 - protein, 80 aa, Synthetic construct
PIPARGRLVMLPKVETEALGLARSHGEQGQMPENMQVSQFKMVNYSYDEDLEELCPVCGDKVSGYHYGLLTCESCKGFFK

SEQ ID NO: 7089 - protein, 80 aa, Synthetic construct
LPKVETEALGLARSHGEQGQMPENMQVSQFKMVNYSYDEDLEELCPVCGDKVSGYHYGLLTCESCKGFFKRTVQNNKRYT

SEQ ID NO: 7090 - protein, 80 aa, Synthetic construct
AMPSDLTISSAIQNIHSASKGLPLNHAALPPTDYDRSPFVTSPISMTMPPHGSLQGYQTYGHFPSRAIKSEYPDPYTSSP

SEQ ID NO: 7091 - protein, 80 aa, Synthetic construct
AIQNIHSASKGLPLNHAALPPTDYDRSPFVTSPISMTMPPHGSLQGYQTYGHFPSRAIKSEYPDPYTSSPESIMGYSYMD

SEQ ID NO: 7092 - protein, 80 aa, Synthetic construct
GLPLNHAALPPTDYDRSPFVTSPISMTMPPHGSLQGYQTYGHFPSRAIKSEYPDPYTSSPESIMGYSYMDSYQTSSPASI

SEQ ID NO: 7093 - protein, 80 aa, Synthetic construct
TSPISMTMPPHGSLQGYQTYGHFPSRAIKSEYPDPYTSSPESIMGYSYMDSYQTSSPASIPHLILELLKCEPDEPQVQAK

SEQ ID NO: 7094 - protein, 80 aa, Synthetic construct
HGSLQGYQTYGHFPSRAIKSEYPDPYTSSPESIMGYSYMDSYQTSSPASIPHLILELLKCEPDEPQVQAKIMAYLQQEQA

SEQ ID NO: 7095 - protein, 80 aa, Synthetic construct
GHFPSRAIKSEYPDPYTSSPESIMGYSYMDSYQTSSPASIPHLILELLKCEPDEPQVQAKIMAYLQQEQANRSKHEKLST

SEQ ID NO: 7096 - protein, 80 aa, Synthetic construct; identical to SEQ ID NO: 1086

SEQ ID NO: 7097 - protein, 80 aa, Synthetic construct; identical to SEQ ID NO: 1087

SEQ ID NO: 7098 - protein, 80 aa, Synthetic construct; identical to SEQ ID NO: 2083

SEQ ID NO: 7099 - protein, 80 aa, Synthetic construct; identical to SEQ ID NO: 1088

SEQ ID NO: 7100 - protein, 80 aa, Synthetic construct
VAIYFSDEEWEVLTEQQKALYREVMRMNYETVLSLEFPFPKPDMITRLEGEEESQNSDEWQLQGGTSAENEESDVKPPDW

SEQ ID NO: 7101 - protein, 80 aa, Synthetic construct
QLQGGTSAENEESDVKPPDWPNPMNATSQFPQPQHFDSFGLRLPRDITELPEWSEGYPFYMAMGFPGYDLSADDIAGKFQ

SEQ ID NO: 7102 - protein, 80 aa, Synthetic construct
EESDVKPPDWPNPMNATSQFPQPQHFDSFGLRLPRDITELPEWSEGYPFYMAMGFPGYDLSADDIAGKFQFSRGMRRSYD

SEQ ID NO: 7103 - protein, 80 aa, Synthetic construct; identical to SEQ ID NO: 738

SEQ ID NO: 7104 - protein, 80 aa, Synthetic construct; identical to SEQ ID NO: 127

SEQ ID NO: 7105 - protein, 80 aa, Synthetic construct
RLDEDWDSALFAELGYFTDTDELQLEAANETYENNFDNLDFDLDLMPWESDIWDINNQICTVKDIKAEPQPLSPASSSYS

SEQ ID NO: 7106 - protein, 80 aa, Synthetic construct
FAELGYFTDTDELQLEAANETYENNFDNLDFDLDLMPWESDIWDINNQICTVKDIKAEPQPLSPASSSYSVSSPRSVDSY

SEQ ID NO: 7107 - protein, 80 aa, Synthetic construct
YHLSPRTFPRYPGLMVPPLQCQMHPEESTQFSIKLQPPPVGRKNRERVESSEESAPVTTPTMASIPPRIKVEPASEKDPE

SEQ ID NO: 7108 - protein, 80 aa, Synthetic construct
YPGLMVPPLQCQMHPEESTQFSIKLQPPPVGRKNRERVESSEESAPVTTPTMASIPPRIKVEPASEKDPESLRQSAREKE

SEQ ID NO: 7109 - protein, 80 aa, Synthetic construct
FSIKLQPPPVGRKNRERVESSEESAPVTTPTMASIPPRIKVEPASEKDPESLRQSAREKEEHTQEEGTVPSRTIEEEKGT

SEQ ID NO: 7110 - protein, 80 aa, Synthetic construct
GRKNRERVESSEESAPVTTPTMASIPPRIKVEPASEKDPESLRQSAREKEEHTQEEGTVPSRTIEEEKGTIFARPAAPPI

SEQ ID NO: 7111 - protein, 80 aa, Synthetic construct
SEESAPVTTPTMASIPPRIKVEPASEKDPESLRQSAREKEEHTQEEGTVPSRTIEEEKGTIFARPAAPPIWPSVPISTPS

SEQ ID NO: 7112 - protein, 80 aa, Synthetic construct
TMASIPPRIKVEPASEKDPESLRQSAREKEEHTQEEGTVPSRTIEEEKGTIFARPAAPPIWPSVPISTPSGEPLEVTEDS

SEQ ID NO: 7113 - protein, 80 aa, Synthetic construct
EHTQEEGTVPSRTIEEEKGTIFARPAAPPIWPSVPISTPSGEPLEVTEDSEDRPGKEPSAPEKKEDALMPPKLRLKRRWN

SEQ ID NO: 7114 - protein, 80 aa, Synthetic construct
IFARPAAPPIWPSVPISTPSGEPLEVTEDSEDRPGKEPSAPEKKEDALMPPKLRLKRRWNDDPEARELSKSGKFLWNGSG

SEQ ID NO: 7115 - protein, 80 aa, Synthetic construct
PSVPISTPSGEPLEVTEDSEDRPGKEPSAPEKKEDALMPPKLRLKRRWNDDPEARELSKSGKFLWNGSGPQGLATAAADA

SEQ ID NO: 7116 - protein, 80 aa, Synthetic construct; identical to SEQ ID NO: 1089

SEQ ID NO: 7117 - protein, 80 aa, Synthetic construct; identical to SEQ ID NO: 2247

SEQ ID NO: 7118 - protein, 80 aa, Synthetic construct; identical to SEQ ID NO: 2248

SEQ ID NO: 7119 - protein, 80 aa, Synthetic construct
RHEASAQIDEIVGETASEADSSETSVSEKENGHEKDDDVIRCICGLYKDEGLMIQCDKCMVWQHCDCMGVNSDVEHYLCE

SEQ ID NO: 7120 - protein, 80 aa, Synthetic construct; identical to SEQ ID NO: 2249

SEQ ID NO: 7121 - protein, 80 aa, Synthetic construct; identical to SEQ ID NO: 1090

SEQ ID NO: 7122 - protein, 80 aa, Synthetic construct
GTTMKEEPLGSGMNPVRSWMHTAGVVDANTAAQSGVGLARAHFEKQPPSNLRKSNFFHFVLALYDRQGQPVEIERTAFVD

SEQ ID NO: 7123 - protein, 80 aa, Synthetic construct
SGMNPVRSWMHTAGVVDANTAAQSGVGLARAHFEKQPPSNLRKSNFFHFVLALYDRQGQPVEIERTAFVDFVEKEKEPNN

SEQ ID NO: 7124 - protein, 80 aa, Synthetic construct
AHFEKQPPSNLRKSNFFHFVLALYDRQGQPVEIERTAFVDFVEKEKEPNNEKTNNGIHYKLQLLYSNGVRTEQDLYVRLI

SEQ ID NO: 7125 - protein, 80 aa, Synthetic construct
LRKSNFFHFVLALYDRQGQPVEIERTAFVDFVEKEKEPNNEKTNNGIHYKLQLLYSNGVRTEQDLYVRLIDSMTKQAIVY

SEQ ID NO: 7126 - protein, 80 aa, Synthetic construct; identical to SEQ ID NO: 3036

SEQ ID NO: 7127 - protein, 80 aa, Synthetic construct; identical to SEQ ID NO: 1811

SEQ ID NO: 7128 - protein, 80 aa, Synthetic construct; identical to SEQ ID NO: 1725

SEQ ID NO: 7129 - protein, 80 aa, Synthetic construct; identical to SEQ ID NO: 1091

SEQ ID NO: 7130 - protein, 80 aa, Synthetic construct
ASPGGSPKGSPARSLARPGTPLPSPQAPRVDLQGAELWKRFHEIGTEMIITKAGRRMFPAMRVKISGLDPHQQYYIAMDI

SEQ ID NO: 7131 - protein, 80 aa, Synthetic construct
PARSLARPGTPLPSPQAPRVDLQGAELWKRFHEIGTEMIITKAGRRMFPAMRVKISGLDPHQQYYIAMDIVPVDNKRYRY

SEQ ID NO: 7132 - protein, 80 aa, Synthetic construct
RFRGRFEDEDEELEEEEELEEEEEEEEEDMSHFSLRLEGGRQDSEDEEERLINLSELTPYILCSICKGYLIDATTITECL

SEQ ID NO: 7133 - protein, 80 aa, Synthetic construct
EELEEEEELEEEEEEEEEDMSHFSLRLEGGRQDSEDEEERLINLSELTPYILCSICKGYLIDATTITECLHTFCKSCIVR

SEQ ID NO: 7134 - protein, 80 aa, Synthetic construct
EEEEEEEEDMSHFSLRLEGGRQDSEDEEERLINLSELTPYILCSICKGYLIDATTITECLHTFCKSCIVRHFYYSNRCPK

SEQ ID NO: 7135 - protein, 80 aa, Synthetic construct; identical to SEQ ID NO: 129

SEQ ID NO: 7136 - protein, 80 aa, Synthetic construct
PTSAEYIPLTPAAADVNGSPATITIETCEDPGDWTAAIGDDTFTFWRGLKDAGLLDEVIQEFHQELVETMRGLQQRVQDP

SEQ ID NO: 7137 - protein, 80 aa, Synthetic construct; identical to SEQ ID NO: 3319

SEQ ID NO: 7138 - protein, 80 aa, Synthetic construct; identical to SEQ ID NO: 3954

SEQ ID NO: 7139 - protein, 80 aa, Synthetic construct
VIDSDEKWLCRQCVFATTTKRGGALKKGPNAKALQVMKQTLPYSVADLEWDAGHKTNVQQCYCYCGGPGDWYLKMLQCCK

SEQ ID NO: 7140 - protein, 80 aa, Synthetic construct
RQCVFATTTKRGGALKKGPNAKALQVMKQTLPYSVADLEWDAGHKTNVQQCYCYCGGPGDWYLKMLQCCKCKQWFHEACV

SEQ ID NO: 7141 - protein, 80 aa, Synthetic construct
RGGALKKGPNAKALQVMKQTLPYSVADLEWDAGHKTNVQQCYCYCGGPGDWYLKMLQCCKCKQWFHEACVQCLQKPMLFG

SEQ ID NO: 7142 - protein, 80 aa, Synthetic construct
LPYSVADLEWDAGHKTNVQQCYCYCGGPGDWYLKMLQCCKCKQWFHEACVQCLQKPMLFGDRFYTFICSVCSSGPEYLKR

SEQ ID NO: 7143 - protein, 80 aa, Synthetic construct
TQPAGEWSEGSQAHVTPVAAVPGPAALPFLYVPGSPTQMNSYGPVVALPTASRSTLAMDTTGLPAPGMLPFCHLWVPVTL

SEQ ID NO: 7144 - protein, 80 aa, Synthetic construct
SQAHVTPVAAVPGPAALPFLYVPGSPTQMNSYGPVVALPTASRSTLAMDTTGLPAPGMLPFCHLWVPVTLVAAGAAQPAA

SEQ ID NO: 7145 - protein, 80 aa, Synthetic construct
ASRSTLAMDTTGLPAPGMLPFCHLWVPVTLVAAGAAQPAASMVMFPHLPALHHHCPHSHRTSQYMPASDGPQAYPDYADQ

SEQ ID NO: 7146 - protein, 80 aa, Synthetic construct
RSTLAMDTTGLPAPGMLPFCHLWVPVTLVAAGAAQPAASMVMFPHLPALHHHCPHSHRTSQYMPASDGPQAYPDYADQST

SEQ ID NO: 7147 - protein, 80 aa, Synthetic construct
YDMAGLQYSPMMPPGAQSYMNVAAAAAAASGYGGMAPSATAAAAAAYGQQPATAAAAAAAAAAMSLGPMGSVVKSEPSSP

SEQ ID NO: 7148 - protein, 80 aa, Synthetic construct
MMPPGAQSYMNVAAAAAAASGYGGMAPSATAAAAAAYGQQPATAAAAAAAAAAMSLGPMGSVVKSEPSSPPPAIASHSQR

SEQ ID NO: 7149 - protein, 80 aa, Synthetic construct
NVAAAAAAASGYGGMAPSATAAAAAAYGQQPATAAAAAAAAAAMSLGPMGSVVKSEPSSPPPAIASHSQRACLGDLRDMI

SEQ ID NO: 7150 - protein, 80 aa, Synthetic construct
GYGGMAPSATAAAAAAYGQQPATAAAAAAAAAAMSLGPMGSVVKSEPSSPPPAIASHSQRACLGDLRDMISMYLPPGGDA

SEQ ID NO: 7151 - protein, 80 aa, Synthetic construct
AAAAAAYGQQPATAAAAAAAAAAMSLGPMGSVVKSEPSSPPPAIASHSQRACLGDLRDMISMYLPPGGDAADAASPLPGG

SEQ ID NO: 7152 - protein, 80 aa, Synthetic construct
AAAMSLGPMGSVVKSEPSSPPPAIASHSQRACLGDLRDMISMYLPPGGDAADAASPLPGGRLHGVHQHYQGAGTAVNGTV

SEQ ID NO: 7153 - protein, 80 aa, Synthetic construct
LGPMGSVVKSEPSSPPPAIASHSQRACLGDLRDMISMYLPPGGDAADAASPLPGGRLHGVHQHYQGAGTAVNGTVPLTHI

SEQ ID NO: 7154 - protein, 80 aa, Synthetic construct; identical to SEQ ID NO: 1910

SEQ ID NO: 7155 - protein, 80 aa, Synthetic construct
GWLGPGPMPAVHKAANGHSRTKMISTSIKTARKSKRASGLRINDYDNQCDVVYISQPITECHFENQKSILSSRKTARKST

SEQ ID NO: 7156 - protein, 80 aa, Synthetic construct; identical to SEQ ID NO: 1911

SEQ ID NO: 7157 - protein, 80 aa, Synthetic construct; identical to SEQ ID NO: 1092

SEQ ID NO: 7158 - protein, 80 aa, Synthetic construct; identical to SEQ ID NO: 1093

SEQ ID NO: 7159 - protein, 80 aa, Synthetic construct; identical to SEQ ID NO: 1094

SEQ ID NO: 7160 - protein, 80 aa, Synthetic construct; identical to SEQ ID NO: 1095

SEQ ID NO: 7161 - protein, 80 aa, Synthetic construct
SSRKTARKSTRGYFFNGDCCELPTVRTLARNLHSQEKASCSALASEAVFTPKQTLTIPAPRHTVDVQLPREDNPEEPSKE

SEQ ID NO: 7162 - protein, 80 aa, Synthetic construct; identical to SEQ ID NO: 2076

SEQ ID NO: 7163 - protein, 80 aa, Synthetic construct
TSPDVGLLKLASPELERLIIQSSNGHITTTPTPTQFLCPKNVTDEQEGFAEGFVRALAELHSQNTLPSVTSAAQPVNGAG

SEQ ID NO: 7164 - protein, 80 aa, Synthetic construct
NVTDEQEGFAEGFVRALAELHSQNTLPSVTSAAQPVNGAGMVAPAVASVAGGSGSGGFSASLHSEPPVYANLSNFNPGAL

SEQ ID NO: 7165 - protein, 80 aa, Synthetic construct
AIPICSIPVTASLPPLEWPLSSQSGSYELRIEVQPKPHHRAHYETEGSRGAVKAPTGGHPVVQLHGYMENKPLGLQIFIG

SEQ ID NO: 7166 - protein, 80 aa, Synthetic construct
ASLPPLEWPLSSQSGSYELRIEVQPKPHHRAHYETEGSRGAVKAPTGGHPVVQLHGYMENKPLGLQIFIGTADERILKPH

SEQ ID NO: 7167 - protein, 80 aa, Synthetic construct
SSQSGSYELRIEVQPKPHHRAHYETEGSRGAVKAPTGGHPVVQLHGYMENKPLGLQIFIGTADERILKPHAFYQVHRITG

SEQ ID NO: 7168 - protein, 80 aa, Synthetic construct
IEVQPKPHHRAHYETEGSRGAVKAPTGGHPVVQLHGYMENKPLGLQIFIGTADERILKPHAFYQVHRITGKTVTTTSYEK

SEQ ID NO: 7169 - protein, 80 aa, Synthetic construct
WEMEATVDKDKSQPNMLFVEIPEYRNKHIRTPVKVNFYVINGKRKRSQPQHFTYHPVPAIKTEPTDEYDPTLICSPTHGG

SEQ ID NO: 7170 - protein, 80 aa, Synthetic construct
KSQPNMLFVEIPEYRNKHIRTPVKVNFYVINGKRKRSQPQHFTYHPVPAIKTEPTDEYDPTLICSPTHGGLGSQPYYPQH

SEQ ID NO: 7171 - protein, 80 aa, Synthetic construct
IPEYRNKHIRTPVKVNFYVINGKRKRSQPQHFTYHPVPAIKTEPTDEYDPTLICSPTHGGLGSQPYYPQHPMVAESPSCL

SEQ ID NO: 7172 - protein, 80 aa, Synthetic construct
TPVKVNFYVINGKRKRSQPQHFTYHPVPAIKTEPTDEYDPTLICSPTHGGLGSQPYYPQHPMVAESPSCLVATMAPCQQF

SEQ ID NO: 7173 - protein, 80 aa, Synthetic construct; identical to SEQ ID NO: 1997

SEQ ID NO: 7174 - protein, 80 aa, Synthetic construct
HFTYHPVPAIKTEPTDEYDPTLICSPTHGGLGSQPYYPQHPMVAESPSCLVATMAPCQQFRTGLSSPDARYQQQNPAAVL

SEQ ID NO: 7175 - protein, 80 aa, Synthetic construct
CGSHQEFQHIMYCENFAPGTTRPGPPPVSQGQRLSPGSYPTVIQQQNATSQRAAKNGPPVSDQKEVLPAGVTIKQEQNLD

SEQ ID NO: 7176 - protein, 80 aa, Synthetic construct
MYCENFAPGTTRPGPPPVSQGQRLSPGSYPTVIQQQNATSQRAAKNGPPVSDQKEVLPAGVTIKQEQNLDQTYLDDVNEI

SEQ ID NO: 7177 - protein, 80 aa, Synthetic construct; identical to SEQ ID NO: 4095

SEQ ID NO: 7178 - protein, 80 aa, Synthetic construct; identical to SEQ ID NO: 2123

SEQ ID NO: 7179 - protein, 80 aa, Synthetic construct; identical to SEQ ID NO: 2988

SEQ ID NO: 7180 - protein, 80 aa, Synthetic construct; identical to SEQ ID NO: 3263

SEQ ID NO: 7181 - protein, 80 aa, Synthetic construct
LSYGALNASYQAALAESSFPLLNSPGMLNPGSASSLLPLSHDDVGAPVEPLPSNGSSSPPRLSPPQYSHQVQVKEEPAEA

SEQ ID NO: 7182 - protein, 80 aa, Synthetic construct
QAALAESSFPLLNSPGMLNPGSASSLLPLSHDDVGAPVEPLPSNGSSSPPRLSPPQYSHQVQVKEEPAEAEEDRQPGPPL

SEQ ID NO: 7183 - protein, 80 aa, Synthetic construct
LLNSPGMLNPGSASSLLPLSHDDVGAPVEPLPSNGSSSPPRLSPPQYSHQVQVKEEPAEAEEDRQPGPPLGAPNPSASGP

SEQ ID NO: 7184 - protein, 80 aa, Synthetic construct
GSASSLLPLSHDDVGAPVEPLPSNGSSSPPRLSPPQYSHQVQVKEEPAEAEEDRQPGPPLGAPNPSASGPPEDRDLEEEL

SEQ ID NO: 7185 - protein, 80 aa, Synthetic construct
LPLSHDDVGAPVEPLPSNGSSSPPRLSPPQYSHQVQVKEEPAEAEEDRQPGPPLGAPNPSASGPPEDRDLEEELPGEELS

SEQ ID NO: 7186 - protein, 80 aa, Synthetic construct
SVKPQALKSRIALNSAKLIQEQRVTNLHVKEIAQHLEQQNDLLQMIRRSQEVQACAQERQAQAMEGTQAALSVLIQVLRP

SEQ ID NO: 7187 - protein, 80 aa, Synthetic construct
IALNSAKLIQEQRVTNLHVKEIAQHLEQQNDLLQMIRRSQEVQACAQERQAQAMEGTQAALSVLIQVLRPMIKDFRRYLQ

SEQ ID NO: 7188 - protein, 80 aa, Synthetic construct; identical to SEQ ID NO: 1774

SEQ ID NO: 7189 - protein, 80 aa, Synthetic construct; identical to SEQ ID NO: 1096

SEQ ID NO: 7190 - protein, 80 aa, Synthetic construct
EQQNDLLQMIRRSQEVQACAQERQAQAMEGTQAALSVLIQVLRPMIKDFRRYLQSNTANPAPASDPGQVAQNGQPDSIIQ

SEQ ID NO: 7191 - protein, 80 aa, Synthetic construct; identical to SEQ ID NO: 2931

SEQ ID NO: 7192 - protein, 80 aa, Synthetic construct; identical to SEQ ID NO: 2933

SEQ ID NO: 7193 - protein, 80 aa, Synthetic construct; identical to SEQ ID NO: 2932

SEQ ID NO: 7194 - protein, 80 aa, Synthetic construct
SGCGSDSGYGNSSESLEEKDIQMELQGSELWKRFHDIGTEMIITKAGRRMFPSVRVKVKGLDPGKQYHVAIDVVPVDSKR

SEQ ID NO: 7195 - protein, 80 aa, Synthetic construct
NSSESLEEKDIQMELQGSELWKRFHDIGTEMIITKAGRRMFPSVRVKVKGLDPGKQYHVAIDVVPVDSKRYRYVYHSSQW

SEQ ID NO: 7196 - protein, 80 aa, Synthetic construct; identical to SEQ ID NO: 5068

SEQ ID NO: 7197 - protein, 80 aa, Synthetic construct; identical to SEQ ID NO: 5069

SEQ ID NO: 7198 - protein, 80 aa, Synthetic construct
PPPAPDYVLPPSLHGPEPKGLAAGPPAGPLGDFGAPALPMAVPGAHGPLAGYLYPAFPGRAIKSEYPEPYASPPQPGLPY

SEQ ID NO: 7199 - protein, 80 aa, Synthetic construct
PSLHGPEPKGLAAGPPAGPLGDFGAPALPMAVPGAHGPLAGYLYPAFPGRAIKSEYPEPYASPPQPGLPYGYPEPFSGGP

SEQ ID NO: 7200 - protein, 80 aa, Synthetic construct; identical to SEQ ID NO: 4225

SEQ ID NO: 7201 - protein, 80 aa, Synthetic construct; identical to SEQ ID NO: 4226

SEQ ID NO: 7202 - protein, 80 aa, Synthetic construct; identical to SEQ ID NO: 1097

SEQ ID NO: 7203 - protein, 80 aa, Synthetic construct; identical to SEQ ID NO: 1098

SEQ ID NO: 7204 - protein, 80 aa, Synthetic construct; identical to SEQ ID NO: 1099

SEQ ID NO: 7205 - protein, 80 aa, Synthetic construct; identical to SEQ ID NO: 2110

SEQ ID NO: 7206 - protein, 80 aa, Synthetic construct; identical to SEQ ID NO: 1100

SEQ ID NO: 7207 - protein, 80 aa, Synthetic construct
ASKFQNFGQFCPHDFPTVFGKISSSTKIWKPLAQTRSIMQPKTVFPPLTQIKLQRYPESAEEKVKVEPLDSLSLFHLKTE

SEQ ID NO: 7208 - protein, 80 aa, Synthetic construct
CPHDFPTVFGKISSSTKIWKPLAQTRSIMQPKTVFPPLTQIKLQRYPESAEEKVKVEPLDSLSLFHLKTESNGKAFTDKA

SEQ ID NO: 7209 - protein, 80 aa, Synthetic construct
KISSSTKIWKPLAQTRSIMQPKTVFPPLTQIKLQRYPESAEEKVKVEPLDSLSLFHLKTESNGKAFTDKAYNSQVQLTVN

SEQ ID NO: 7210 - protein, 80 aa, Synthetic construct
PLAQTRSIMQPKTVFPPLTQIKLQRYPESAEEKVKVEPLDSLSLFHLKTESNGKAFTDKAYNSQVQLTVNANQKAHPLTQ

SEQ ID NO: 7211 - protein, 80 aa, Synthetic construct
PKTVFPPLTQIKLQRYPESAEEKVKVEPLDSLSLFHLKTESNGKAFTDKAYNSQVQLTVNANQKAHPLTQPSSPPNQCAN

SEQ ID NO: 7212 - protein, 80 aa, Synthetic construct
IKLQRYPESAEEKVKVEPLDSLSLFHLKTESNGKAFTDKAYNSQVQLTVNANQKAHPLTQPSSPPNQCANVMAGDDQIRF

SEQ ID NO: 7213 - protein, 80 aa, Synthetic construct; identical to SEQ ID NO: 5134

SEQ ID NO: 7214 - protein, 80 aa, Synthetic construct
FSTHAFSENPRPPPRRDPSTRRPPVLAKGDDPLPPRAARPVSQARCPTPVGDGSSSRRCWDNGRVNLRPVVQLIDIMKDL

SEQ ID NO: 7215 - protein, 80 aa, Synthetic construct; identical to SEQ ID NO: 1101

SEQ ID NO: 7216 - protein, 80 aa, Synthetic construct; identical to SEQ ID NO: 1102

SEQ ID NO: 7217 - protein, 80 aa, Synthetic construct; identical to SEQ ID NO: 1103

SEQ ID NO: 7218 - protein, 80 aa, Synthetic construct; identical to SEQ ID NO: 1104

SEQ ID NO: 7219 - protein, 80 aa, Synthetic construct; identical to SEQ ID NO: 1105

SEQ ID NO: 7220 - protein, 80 aa, Synthetic construct; identical to SEQ ID NO: 2359

SEQ ID NO: 7221 - protein, 80 aa, Synthetic construct
KVLIHFKRWNHRYDEWFCWDSPYLRPLEKIQLRKEGLHEEDGSSEFQINEQVLACWSDCRFYPAKVTAVNKDGTYTVKFY

SEQ ID NO: 7222 - protein, 80 aa, Synthetic construct
HRYDEWFCWDSPYLRPLEKIQLRKEGLHEEDGSSEFQINEQVLACWSDCRFYPAKVTAVNKDGTYTVKFYDGVVQTVKHI

SEQ ID NO: 7223 - protein, 80 aa, Synthetic construct; identical to SEQ ID NO: 4351

SEQ ID NO: 7224 - protein, 80 aa, Synthetic construct
KGKVKALEEDNLSESSSESFLWSDDEYGQDVDVTTNPDEELDGDDRYDFEVVRCICEVQEENDFMIQCEECQCWQHGVCM

SEQ ID NO: 7225 - protein, 80 aa, Synthetic construct; identical to SEQ ID NO: 1815

SEQ ID NO: 7226 - protein, 80 aa, Synthetic construct
ENDFMIQCEECQCWQHGVCMGLLEENVPEKYTCYVCQDPPGQRPGFKYWYDKEWLSRGHMHGLAFLEENYSHQNAKKIVA

SEQ ID NO: 7227 - protein, 80 aa, Synthetic construct
GSASPGLSSVSPSHLLLPPDTVSRTGLEKAAAGAVGLERRDWSPSPPATPEQGLSAFYLSYFDMLYPEDSSWAAKAPGAS

SEQ ID NO: 7228 - protein, 80 aa, Synthetic construct; identical to SEQ ID NO: 1857

SEQ ID NO: 7229 - protein, 80 aa, Synthetic construct
TVSRTGLEKAAAGAVGLERRDWSPSPPATPEQGLSAFYLSYFDMLYPEDSSWAAKAPGASSREEPPEEPEQCPVIDSQAP

SEQ ID NO: 7230 - protein, 80 aa, Synthetic construct
AAGAVGLERRDWSPSPPATPEQGLSAFYLSYFDMLYPEDSSWAAKAPGASSREEPPEEPEQCPVIDSQAPAGSLDLVPGG

SEQ ID NO: 7231 - protein, 80 aa, Synthetic construct
DWSPSPPATPEQGLSAFYLSYFDMLYPEDSSWAAKAPGASSREEPPEEPEQCPVIDSQAPAGSLDLVPGGLTLEEHSLEQ

SEQ ID NO: 7232 - protein, 80 aa, Synthetic construct
EQGLSAFYLSYFDMLYPEDSSWAAKAPGASSREEPPEEPEQCPVIDSQAPAGSLDLVPGGLTLEEHSLEQVQSMVVGEVL

SEQ ID NO: 7233 - protein, 80 aa, Synthetic construct; identical to SEQ ID NO: 133

SEQ ID NO: 7234 - protein, 80 aa, Synthetic construct; identical to SEQ ID NO: 477

SEQ ID NO: 7235 - protein, 80 aa, Synthetic construct
ASSLWDPASPAPTSGPRPRLWEGQDVLARWTDGLLYLGTIKKVDSAREVCLVQFEDDSQFLVLWKDISPAALPGEELLCC

SEQ ID NO: 7236 - protein, 80 aa, Synthetic construct
WEGQDVLARWTDGLLYLGTIKKVDSAREVCLVQFEDDSQFLVLWKDISPAALPGEELLCCVCRSETVVPGNRLVSCEKCR

SEQ ID NO: 7237 - protein, 80 aa, Synthetic construct
TDGLLYLGTIKKVDSAREVCLVQFEDDSQFLVLWKDISPAALPGEELLCCVCRSETVVPGNRLVSCEKCRHAYHQDCHVP

SEQ ID NO: 7238 - protein, 80 aa, Synthetic construct
KKVDSAREVCLVQFEDDSQFLVLWKDISPAALPGEELLCCVCRSETVVPGNRLVSCEKCRHAYHQDCHVPRAPAPGEGEG

SEQ ID NO: 7239 - protein, 80 aa, Synthetic construct; identical to SEQ ID NO: 2236

SEQ ID NO: 7240 - protein, 80 aa, Synthetic construct
RAPAPGEGEGTSWVCRQCVFAIATKRGGALKKGPYARAMLGMKLSLPYGLKGLDWDAGHLSNRQQSYCYCGGPGEWNLKM

SEQ ID NO: 7241 - protein, 80 aa, Synthetic construct; identical to SEQ ID NO: 4330

SEQ ID NO: 7242 - protein, 80 aa, Synthetic construct; identical to SEQ ID NO: 4739

SEQ ID NO: 7243 - protein, 80 aa, Synthetic construct
INSTVSLPGGGSGPPEDVKPPVLGVRGLHCPPPPGGPGAGKRLCAICGDRSSGKHYGVYSCEGCKGFFKRTIRKDLTYSC

SEQ ID NO: 7244 - protein, 80 aa, Synthetic construct
GSGPPEDVKPPVLGVRGLHCPPPPGGPGAGKRLCAICGDRSSGKHYGVYSCEGCKGFFKRTIRKDLTYSCRDNKDCTVDK

SEQ ID NO: 7245 - protein, 80 aa, Synthetic construct
GESLGCSGSAAAGSSGTLELPSTLSLYKSGALDEAAAYQSRDYYNFPLALAGPPPPPPPPHPHARIKLENPLDYGSAWAA

SEQ ID NO: 7246 - protein, 80 aa, Synthetic construct
AAGSSGTLELPSTLSLYKSGALDEAAAYQSRDYYNFPLALAGPPPPPPPPHPHARIKLENPLDYGSAWAAAAAQCRYGDL

SEQ ID NO: 7247 - protein, 80 aa, Synthetic construct
PSTLSLYKSGALDEAAAYQSRDYYNFPLALAGPPPPPPPPHPHARIKLENPLDYGSAWAAAAAQCRYGDLASLHGAGAAG

SEQ ID NO: 7248 - protein, 80 aa, Synthetic construct
ALDEAAAYQSRDYYNFPLALAGPPPPPPPPHPHARIKLENPLDYGSAWAAAAAQCRYGDLASLHGAGAAGPGSGSPSAAA

SEQ ID NO: 7249 - protein, 80 aa, Synthetic construct
RDYYNFPLALAGPPPPPPPPHPHARIKLENPLDYGSAWAAAAAQCRYGDLASLHGAGAAGPGSGSPSAAASSSWHTLFTA

SEQ ID NO: 7250 - protein, 80 aa, Synthetic construct
AGPPPPPPPPHPHARIKLENPLDYGSAWAAAAAQCRYGDLASLHGAGAAGPGSGSPSAAASSSWHTLFTAEEGQLYGPCG

SEQ ID NO: 7251 - protein, 80 aa, Synthetic construct
HPHARIKLENPLDYGSAWAAAAAQCRYGDLASLHGAGAAGPGSGSPSAAASSSWHTLFTAEEGQLYGPCGGGGGGGGGGG

SEQ ID NO: 7252 - protein, 80 aa, Synthetic construct
GYTRPPQGLAGQESDFTAPDVWYPGGMVSRVPYPSPTCVKSEMGPWMDSYSGPYGDMRLETARDHVLPIDYYFPPQKTCL

SEQ ID NO: 7253 - protein, 80 aa, Synthetic construct
GQESDFTAPDVWYPGGMVSRVPYPSPTCVKSEMGPWMDSYSGPYGDMRLETARDHVLPIDYYFPPQKTCLICGDEASGCH

SEQ ID NO: 7254 - protein, 80 aa, Synthetic construct
VWYPGGMVSRVPYPSPTCVKSEMGPWMDSYSGPYGDMRLETARDHVLPIDYYFPPQKTCLICGDEASGCHYGALTCGSCK

SEQ ID NO: 7255 - protein, 80 aa, Synthetic construct
VPYPSPTCVKSEMGPWMDSYSGPYGDMRLETARDHVLPIDYYFPPQKTCLICGDEASGCHYGALTCGSCKVFFKRAAEGK

SEQ ID NO: 7256 - protein, 80 aa, Synthetic construct
TAESGPPPPQPEVLATVKEERGETAAGAGVPGEATGRGAGGRRRKRPLQRGKPPYSYIALIAMAIAHAPERRLTLGGIYK

SEQ ID NO: 7257 - protein, 80 aa, Synthetic construct
PEVLATVKEERGETAAGAGVPGEATGRGAGGRRRKRPLQRGKPPYSYIALIAMAIAHAPERRLTLGGIYKFITERFPFYR

SEQ ID NO: 7258 - protein, 80 aa, Synthetic construct; identical to SEQ ID NO: 5426

SEQ ID NO: 7259 - protein, 80 aa, Synthetic construct; identical to SEQ ID NO: 5427

SEQ ID NO: 7260 - protein, 80 aa, Synthetic construct; identical to SEQ ID NO: 134

SEQ ID NO: 7261 - protein, 80 aa, Synthetic construct; identical to SEQ ID NO: 2552

SEQ ID NO: 7262 - protein, 80 aa, Synthetic construct; identical to SEQ ID NO: 2553

SEQ ID NO: 7263 - protein, 80 aa, Synthetic construct
SESSRLSTEPSSEALGVGEVLHVKTESLAPPLCLLGDDPTSSFETVQINVIPTSDDSSDVQTKIEPVSPCSSVNSEASLL

SEQ ID NO: 7264 - protein, 80 aa, Synthetic construct
SSEALGVGEVLHVKTESLAPPLCLLGDDPTSSFETVQINVIPTSDDSSDVQTKIEPVSPCSSVNSEASLLSADSSSQAFI

SEQ ID NO: 7265 - protein, 80 aa, Synthetic construct
LHVKTESLAPPLCLLGDDPTSSFETVQINVIPTSDDSSDVQTKIEPVSPCSSVNSEASLLSADSSSQAFIGEEVLEVKTE

SEQ ID NO: 7266 - protein, 80 aa, Synthetic construct
PLCLLGDDPTSSFETVQINVIPTSDDSSDVQTKIEPVSPCSSVNSEASLLSADSSSQAFIGEEVLEVKTESLSPSGCLLW

SEQ ID NO: 7267 - protein, 80 aa, Synthetic construct
SSFETVQINVIPTSDDSSDVQTKIEPVSPCSSVNSEASLLSADSSSQAFIGEEVLEVKTESLSPSGCLLWDVPAPSLGAV

SEQ ID NO: 7268 - protein, 80 aa, Synthetic construct
IPTSDDSSDVQTKIEPVSPCSSVNSEASLLSADSSSQAFIGEEVLEVKTESLSPSGCLLWDVPAPSLGAVQISMGPSLDG

SEQ ID NO: 7269 - protein, 80 aa, Synthetic construct
QTKIEPVSPCSSVNSEASLLSADSSSQAFIGEEVLEVKTESLSPSGCLLWDVPAPSLGAVQISMGPSLDGSSGKALPTRK

SEQ ID NO: 7270 - protein, 80 aa, Synthetic construct; identical to SEQ ID NO: 5164

SEQ ID NO: 7271 - protein, 80 aa, Synthetic construct; identical to SEQ ID NO: 4964

SEQ ID NO: 7272 - protein, 80 aa, Synthetic construct
DYCLLLALPCGRDQEDVVSQTESLKAAFITYLQAKQAAGIINVPNPGSNQPAYVLQIFPPCEFSESHLSRLAPDLLASIS

SEQ ID NO: 7273 - protein, 80 aa, Synthetic construct; identical to SEQ ID NO: 3275

SEQ ID NO: 7274 - protein, 80 aa, Synthetic construct
EDLDGKGSTSFLETLKTERLSPDLLTLGPALPSSLPVPNSAYGGPDFSSTFFSPTGSPLNSAAYSSPKLRGTLPLPPCEA

SEQ ID NO: 7275 - protein, 80 aa, Synthetic construct
FLETLKTERLSPDLLTLGPALPSSLPVPNSAYGGPDFSSTFFSPTGSPLNSAAYSSPKLRGTLPLPPCEARECVNCGATA

SEQ ID NO: 7276 - protein, 80 aa, Synthetic construct
IRPKKRLIVSKRAGTQCTNCQTTTTTLWRRNASGDPVCNACGLYYKLHQVNRPLTMRKDGIQTRNRKASGKGKKKRGSSL

SEQ ID NO: 7277 - protein, 80 aa, Synthetic construct
KRAGTQCTNCQTTTTTLWRRNASGDPVCNACGLYYKLHQVNRPLTMRKDGIQTRNRKASGKGKKKRGSSLGGTGAAEGPA

SEQ ID NO: 7278 - protein, 80 aa, Synthetic construct
SGEAEALARVYSSSISNGLSNLNNETSGTYANGHVIDLPKSEGYYNVDSGQPSPDQSGLDMTGIKQIKQEPIYDLTSVPN

SEQ ID NO: 7279 - protein, 80 aa, Synthetic construct
YSSSISNGLSNLNNETSGTYANGHVIDLPKSEGYYNVDSGQPSPDQSGLDMTGIKQIKQEPIYDLTSVPNLFTYSSFNNG

SEQ ID NO: 7280 - protein, 80 aa, Synthetic construct
NLNNETSGTYANGHVIDLPKSEGYYNVDSGQPSPDQSGLDMTGIKQIKQEPIYDLTSVPNLFTYSSFNNGQLAPGITMTE

SEQ ID NO: 7281 - protein, 80 aa, Synthetic construct
ANGHVIDLPKSEGYYNVDSGQPSPDQSGLDMTGIKQIKQEPIYDLTSVPNLFTYSSFNNGQLAPGITMTEIDRIAQNIIK

SEQ ID NO: 7282 - protein, 80 aa, Synthetic construct; identical to SEQ ID NO: 2008

SEQ ID NO: 7283 - protein, 80 aa, Synthetic construct
QPSPDQSGLDMTGIKQIKQEPIYDLTSVPNLFTYSSFNNGQLAPGITMTEIDRIAQNIIKSHLETCQYTMEELHQLAWQT

SEQ ID NO: 7284 - protein, 80 aa, Synthetic construct
MTGIKQIKQEPIYDLTSVPNLFTYSSFNNGQLAPGITMTEIDRIAQNIIKSHLETCQYTMEELHQLAWQTHTYEEIKAYQ

SEQ ID NO: 7285 - protein, 80 aa, Synthetic construct
PIYDLTSVPNLFTYSSFNNGQLAPGITMTEIDRIAQNIIKSHLETCQYTMEELHQLAWQTHTYEEIKAYQSKSREALWQQ

SEQ ID NO: 7286 - protein, 80 aa, Synthetic construct
LFTYSSFNNGQLAPGITMTEIDRIAQNIIKSHLETCQYTMEELHQLAWQTHTYEEIKAYQSKSREALWQQCAIQITHAIQ

SEQ ID NO: 7287 - protein, 80 aa, Synthetic construct; identical to SEQ ID NO: 4690

SEQ ID NO: 7288 - protein, 80 aa, Synthetic construct
EAGLPLQVILTPPEAPNLKSEELNVEPGLGRALPPEVKVEGPKEELEVAGERGFVPETTKAEPEVPPQEGVPARLPAVVM

SEQ ID NO: 7289 - protein, 80 aa, Synthetic construct
TPPEAPNLKSEELNVEPGLGRALPPEVKVEGPKEELEVAGERGFVPETTKAEPEVPPQEGVPARLPAVVMDTAGQAGGHA

SEQ ID NO: 7290 - protein, 80 aa, Synthetic construct; identical to SEQ ID NO: 1106

SEQ ID NO: 7291 - protein, 80 aa, Synthetic construct; identical to SEQ ID NO: 1709

SEQ ID NO: 7292 - protein, 80 aa, Synthetic construct
TECGECHFCKDMKKFGGPGRMKQSCIMRQCIAPVLPHTAVCLVCGEAGKEDTVEEEEGKFNLMLMECSICNEIIHPGCLK

SEQ ID NO: 7293 - protein, 80 aa, Synthetic construct; identical to SEQ ID NO: 1710

SEQ ID NO: 7294 - protein, 80 aa, Synthetic construct
SPRPPLGSSLSPWWRSSLTYFQQQLKPGKEDKLFRKKRRSWKNAEDRMALANKPLRRFKQEPEDELPEAPPKTRESDHSR

SEQ ID NO: 7295 - protein, 80 aa, Synthetic construct
SPWWRSSLTYFQQQLKPGKEDKLFRKKRRSWKNAEDRMALANKPLRRFKQEPEDELPEAPPKTRESDHSRSSSPTAGPST

SEQ ID NO: 7296 - protein, 80 aa, Synthetic construct
FQQQLKPGKEDKLFRKKRRSWKNAEDRMALANKPLRRFKQEPEDELPEAPPKTRESDHSRSSSPTAGPSTEGAEGPEEKK

SEQ ID NO: 7297 - protein, 80 aa, Synthetic construct; identical to SEQ ID NO: 1711

SEQ ID NO: 7298 - protein, 80 aa, Synthetic construct
WKNAEDRMALANKPLRRFKQEPEDELPEAPPKTRESDHSRSSSPTAGPSTEGAEGPEEKKKVKMRRKRRLPNKELSRELS

SEQ ID NO: 7299 - protein, 80 aa, Synthetic construct
ANKPLRRFKQEPEDELPEAPPKTRESDHSRSSSPTAGPSTEGAEGPEEKKKVKMRRKRRLPNKELSRELSKELNHEIQRT

SEQ ID NO: 7300 - protein, 80 aa, Synthetic construct
SSSPTAGPSTEGAEGPEEKKKVKMRRKRRLPNKELSRELSKELNHEIQRTENSLANENQQPIKSEPESEGEEPKRPPGIC

SEQ ID NO: 7301 - protein, 80 aa, Synthetic construct
KVKMRRKRRLPNKELSRELSKELNHEIQRTENSLANENQQPIKSEPESEGEEPKRPPGICERPHRFSKGLNGTPRELRHQ

SEQ ID NO: 7302 - protein, 80 aa, Synthetic construct
PNKELSRELSKELNHEIQRTENSLANENQQPIKSEPESEGEEPKRPPGICERPHRFSKGLNGTPRELRHQLGPSLRSPPR

SEQ ID NO: 7303 - protein, 80 aa, Synthetic construct
KELNHEIQRTENSLANENQQPIKSEPESEGEEPKRPPGICERPHRFSKGLNGTPRELRHQLGPSLRSPPRVISRPPPSVS

SEQ ID NO: 7304 - protein, 80 aa, Synthetic construct
ENSLANENQQPIKSEPESEGEEPKRPPGICERPHRFSKGLNGTPRELRHQLGPSLRSPPRVISRPPPSVSPPKCIQMERH

SEQ ID NO: 7305 - protein, 80 aa, Synthetic construct
PIKSEPESEGEEPKRPPGICERPHRFSKGLNGTPRELRHQLGPSLRSPPRVISRPPPSVSPPKCIQMERHVIRPPPISPP

SEQ ID NO: 7306 - protein, 80 aa, Synthetic construct
SLWGQLPTSYLPIYTPNVVMPLAPPPTSCPQCPSTSPAYWGVAPETRGPPGLLCDLDALFQGVPPNKSIYDVWVSHPRDL

SEQ ID NO: 7307 - protein, 80 aa, Synthetic construct
LPIYTPNVVMPLAPPPTSCPQCPSTSPAYWGVAPETRGPPGLLCDLDALFQGVPPNKSIYDVWVSHPRDLAAPGPGWLLS

SEQ ID NO: 7308 - protein, 80 aa, Synthetic construct
TPNVVMPLAPPPTSCPQCPSTSPAYWGVAPETRGPPGLLCDLDALFQGVPPNKSIYDVWVSHPRDLAAPGPGWLLSWCSL

SEQ ID NO: 7309 - protein, 80 aa, Synthetic construct
GRICACPGRDRKADEDHYREQQALNESSAKNGAASKRAFKQSPPAVPALGAGVKKRRHGDEDTYYLQVRGRENFEILMKL

SEQ ID NO: 7310 - protein, 80 aa, Synthetic construct
RKADEDHYREQQALNESSAKNGAASKRAFKQSPPAVPALGAGVKKRRHGDEDTYYLQVRGRENFEILMKLKESLELMELV

SEQ ID NO: 7311 - protein, 80 aa, Synthetic construct
QQALNESSAKNGAASKRAFKQSPPAVPALGAGVKKRRHGDEDTYYLQVRGRENFEILMKLKESLELMELVPQPLVDSYRQ

SEQ ID NO: 7312 - protein, 80 aa, Synthetic construct
NGAASKRAFKQSPPAVPALGAGVKKRRHGDEDTYYLQVRGRENFEILMKLKESLELMELVPQPLVDSYRQQQQLLQRPSH

SEQ ID NO: 7313 - protein, 80 aa, Synthetic construct
QSPPAVPALGAGVKKRRHGDEDTYYLQVRGRENFEILMKLKESLELMELVPQPLVDSYRQQQQLLQRPSHLQPPSYGPVL

SEQ ID NO: 7314 - protein, 80 aa, Synthetic construct
AGVKKRRHGDEDTYYLQVRGRENFEILMKLKESLELMELVPQPLVDSYRQQQQLLQRPSHLQPPSYGPVLSPMNKVHGGM

SEQ ID NO: 7315 - protein, 80 aa, Synthetic construct
EDTYYLQVRGRENFEILMKLKESLELMELVPQPLVDSYRQQQQLLQRPSHLQPPSYGPVLSPMNKVHGGMNKLPSVNQLV

SEQ ID NO: 7316 - protein, 80 aa, Synthetic construct; identical to SEQ ID NO: 4967

SEQ ID NO: 7317 - protein, 80 aa, Synthetic construct
KLAPEEPPEKRAVLMGPMDPPRPCMPPSFLPRGKVPLREERLDGPLNLAGSGISSINMALEINGVVYTGVLFARRQPVPA

SEQ ID NO: 7318 - protein, 80 aa, Synthetic construct
RAVLMGPMDPPRPCMPPSFLPRGKVPLREERLDGPLNLAGSGISSINMALEINGVVYTGVLFARRQPVPASQGPTNPAPP

SEQ ID NO: 7319 - protein, 80 aa, Synthetic construct
PRPCMPPSFLPRGKVPLREERLDGPLNLAGSGISSINMALEINGVVYTGVLFARRQPVPASQGPTNPAPPPSTGPPSSIL

SEQ ID NO: 7320 - protein, 80 aa, Synthetic construct
RPCMPPSFLPRGKVPLREERLDGPLNLAGSGISSINMALEINGVVYTGVLFARRQPVPASQGPTNPAPPPSTGPPSSILP

SEQ ID NO: 7321 - protein, 80 aa, Synthetic construct; identical to SEQ ID NO: 4189

SEQ ID NO: 7322 - protein, 80 aa, Synthetic construct; identical to SEQ ID NO: 4190

SEQ ID NO: 7323 - protein, 80 aa, Synthetic construct; identical to SEQ ID NO: 4193

SEQ ID NO: 7324 - protein, 80 aa, Synthetic construct
KMNGQNRPLIKPKRRLSAARRAGTSCANCQTTTTTLWRRNANGDPVCNACGLYYKLHNINRPLTMKKEGIQTRNRKMSSK

SEQ ID NO: 7325 - protein, 80 aa, Synthetic construct; identical to SEQ ID NO: 2304

SEQ ID NO: 7326 - protein, 80 aa, Synthetic construct
QQSIRNVTEDVQNSCLAYVTHEDICRCFAGDTLLAIRAPSGTSLEVPIPEGLNGQKKYQIHLKSVSGPIEVLLVNKEAWS

SEQ ID NO: 7327 - protein, 80 aa, Synthetic construct
VQNSCLAYVTHEDICRCFAGDTLLAIRAPSGTSLEVPIPEGLNGQKKYQIHLKSVSGPIEVLLVNKEAWSSPPVAVPVPP

SEQ ID NO: 7328 - protein, 80 aa, Synthetic construct
HEDICRCFAGDTLLAIRAPSGTSLEVPIPEGLNGQKKYQIHLKSVSGPIEVLLVNKEAWSSPPVAVPVPPPEDLLQSPSA

SEQ ID NO: 7329 - protein, 80 aa, Synthetic construct
DTLLAIRAPSGTSLEVPIPEGLNGQKKYQIHLKSVSGPIEVLLVNKEAWSSPPVAVPVPPPEDLLQSPSAVSTPPPLPKP

SEQ ID NO: 7330 - protein, 80 aa, Synthetic construct; identical to SEQ ID NO: 141

SEQ ID NO: 7331 - protein, 80 aa, Synthetic construct; identical to SEQ ID NO: 142

SEQ ID NO: 7332 - protein, 80 aa, Synthetic construct
RAVSLGQDRYRRRYWVLPYLAGIFVEGTEGNLVPEEVIKKETDSLKVAAHASLNPALFSMKMELAGSNTTASSPARARGR

SEQ ID NO: 7333 - protein, 80 aa, Synthetic construct
RRRYWVLPYLAGIFVEGTEGNLVPEEVIKKETDSLKVAAHASLNPALFSMKMELAGSNTTASSPARARGRPRKTKPGSMQ

SEQ ID NO: 7334 - protein, 80 aa, Synthetic construct; identical to SEQ ID NO: 1107

SEQ ID NO: 7335 - protein, 80 aa, Synthetic construct; identical to SEQ ID NO: 1108

SEQ ID NO: 7336 - protein, 80 aa, Synthetic construct; identical to SEQ ID NO: 1109

SEQ ID NO: 7337 - protein, 80 aa, Synthetic construct; identical to SEQ ID NO: 1110

SEQ ID NO: 7338 - protein, 80 aa, Synthetic construct; identical to SEQ ID NO: 2183

SEQ ID NO: 7339 - protein, 80 aa, Synthetic construct; identical to SEQ ID NO: 1111

SEQ ID NO: 7340 - protein, 80 aa, Synthetic construct; identical to SEQ ID NO: 1112

SEQ ID NO: 7341 - protein, 80 aa, Synthetic construct; identical to SEQ ID NO: 2602

SEQ ID NO: 7342 - protein, 80 aa, Synthetic construct
RSAAQVCLCLGQLERSIAWEKSVNKVTCLVCRKGDNDEFLLLCDGCDRGCHIYCHRPKMEAVPEGDWFCTVCLAQQVEGE

SEQ ID NO: 7343 - protein, 80 aa, Synthetic construct
GQLERSIAWEKSVNKVTCLVCRKGDNDEFLLLCDGCDRGCHIYCHRPKMEAVPEGDWFCTVCLAQQVEGEFTQKPGFPKR

SEQ ID NO: 7344 - protein, 80 aa, Synthetic construct
KSVNKVTCLVCRKGDNDEFLLLCDGCDRGCHIYCHRPKMEAVPEGDWFCTVCLAQQVEGEFTQKPGFPKRGQKRKSGYSL

SEQ ID NO: 7345 - protein, 80 aa, Synthetic construct
CRKGDNDEFLLLCDGCDRGCHIYCHRPKMEAVPEGDWFCTVCLAQQVEGEFTQKPGFPKRGQKRKSGYSLNFSEGDGRRR

SEQ ID NO: 7346 - protein, 80 aa, Synthetic construct
QEKCTVRRQDPQVVSPFSRGKQNHVLKNVETHTGSLIEQLTTEKYECMVCCELVRVTAPVWSCQSCYHVFHLNCIKKWAR

SEQ ID NO: 7347 - protein, 80 aa, Synthetic construct
PQVVSPFSRGKQNHVLKNVETHTGSLIEQLTTEKYECMVCCELVRVTAPVWSCQSCYHVFHLNCIKKWARSPASQADGQS

SEQ ID NO: 7348 - protein, 80 aa, Synthetic construct; identical to SEQ ID NO: 4131

SEQ ID NO: 7349 - protein, 80 aa, Synthetic construct; identical to SEQ ID NO: 144

SEQ ID NO: 7350 - protein, 80 aa, Synthetic construct; identical to SEQ ID NO: 145

SEQ ID NO: 7351 - protein, 80 aa, Synthetic construct; identical to SEQ ID NO: 1113

SEQ ID NO: 7352 - protein, 80 aa, Synthetic construct; identical to SEQ ID NO: 1114

SEQ ID NO: 7353 - protein, 80 aa, Synthetic construct; identical to SEQ ID NO: 2196

SEQ ID NO: 7354 - protein, 80 aa, Synthetic construct; identical to SEQ ID NO: 2973

SEQ ID NO: 7355 - protein, 80 aa, Synthetic construct; identical to SEQ ID NO: 2971

SEQ ID NO: 7356 - protein, 80 aa, Synthetic construct
QIAPFPEAALPTSHPKIVLTSLPALAVPPPTPTKAAPPALVNGLELSEPRSWLYLEEMVNSLLNTAQQLKTLFEQAKHAS

SEQ ID NO: 7357 - protein, 80 aa, Synthetic construct
PTSHPKIVLTSLPALAVPPPTPTKAAPPALVNGLELSEPRSWLYLEEMVNSLLNTAQQLKTLFEQAKHASTYREAATNQA

SEQ ID NO: 7358 - protein, 80 aa, Synthetic construct
SLPALAVPPPTPTKAAPPALVNGLELSEPRSWLYLEEMVNSLLNTAQQLKTLFEQAKHASTYREAATNQAKIHADAERKE

SEQ ID NO: 7359 - protein, 80 aa, Synthetic construct
TPTKAAPPALVNGLELSEPRSWLYLEEMVNSLLNTAQQLKTLFEQAKHASTYREAATNQAKIHADAERKEQSCVNCGREA

SEQ ID NO: 7360 - protein, 80 aa, Synthetic construct
VNGLELSEPRSWLYLEEMVNSLLNTAQQLKTLFEQAKHASTYREAATNQAKIHADAERKEQSCVNCGREAMSECTGCHKV

SEQ ID NO: 7361 - protein, 80 aa, Synthetic construct
SWLYLEEMVNSLLNTAQQLKTLFEQAKHASTYREAATNQAKIHADAERKEQSCVNCGREAMSECTGCHKVNYCSTFCQRK

SEQ ID NO: 7362 - protein, 80 aa, Synthetic construct; identical to SEQ ID NO: 4412

SEQ ID NO: 7363 - protein, 80 aa, Synthetic construct; identical to SEQ ID NO: 5062

SEQ ID NO: 7364 - protein, 80 aa, Synthetic construct
KAAVDLKPTLTIIKTEKVDLELFPSPDMECADVPLLTPSSKEMMSQALKATFSGFTKEQQRLGIPKDPRQWTETHVRDWV

SEQ ID NO: 7365 - protein, 80 aa, Synthetic construct
TIIKTEKVDLELFPSPDMECADVPLLTPSSKEMMSQALKATFSGFTKEQQRLGIPKDPRQWTETHVRDWVMWAVNEFSLK

SEQ ID NO: 7366 - protein, 80 aa, Synthetic construct
CFLELAPDFVGDILWEHLEILQKEDVKPYQVNGVNPAYPESRYTSDYFISYGIEHAQCVPPSEFSEPSFITESYQTLHPI

SEQ ID NO: 7367 - protein, 80 aa, Synthetic construct
GDILWEHLEILQKEDVKPYQVNGVNPAYPESRYTSDYFISYGIEHAQCVPPSEFSEPSFITESYQTLHPISSEELLSLKY

SEQ ID NO: 7368 - protein, 80 aa, Synthetic construct; identical to SEQ ID NO: 3138

SEQ ID NO: 7369 - protein, 80 aa, Synthetic construct
TESYQTLHPISSEELLSLKYENDYPSVILRDPLQTDTLQNDYFAIKQEVVTPDNMCMGRTSRGKLGGQDSFESIESYDSC

SEQ ID NO: 7370 - protein, 80 aa, Synthetic construct
SSEELLSLKYENDYPSVILRDPLQTDTLQNDYFAIKQEVVTPDNMCMGRTSRGKLGGQDSFESIESYDSCDRLTQSWSSQ

SEQ ID NO: 7371 - protein, 80 aa, Synthetic construct
DPLQTDTLQNDYFAIKQEVVTPDNMCMGRTSRGKLGGQDSFESIESYDSCDRLTQSWSSQSSFNSLQRVPSYDSFDSEDY

SEQ ID NO: 7372 - protein, 80 aa, Synthetic construct
DYFAIKQEVVTPDNMCMGRTSRGKLGGQDSFESIESYDSCDRLTQSWSSQSSFNSLQRVPSYDSFDSEDYPAALPNHKPK

SEQ ID NO: 7373 - protein, 80 aa, Synthetic construct; identical to SEQ ID NO: 2604

SEQ ID NO: 7374 - protein, 80 aa, Synthetic construct
EKLSKQQSQYRRKLFDASHSLRSVMFGQDRYRRRYWILPQCGGIFVEGMESGEGLEEIAKEREKLKKAESVQIKEEMFET

SEQ ID NO: 7375 - protein, 80 aa, Synthetic construct
RRKLFDASHSLRSVMFGQDRYRRRYWILPQCGGIFVEGMESGEGLEEIAKEREKLKKAESVQIKEEMFETSGDSLNCSNT

SEQ ID NO: 7376 - protein, 80 aa, Synthetic construct
LRSVMFGQDRYRRRYWILPQCGGIFVEGMESGEGLEEIAKEREKLKKAESVQIKEEMFETSGDSLNCSNTDHCEQKEDLK

SEQ ID NO: 7377 - protein, 80 aa, Synthetic construct
YRRRYWILPQCGGIFVEGMESGEGLEEIAKEREKLKKAESVQIKEEMFETSGDSLNCSNTDHCEQKEDLKEKDNTNLFLQ

SEQ ID NO: 7378 - protein, 80 aa, Synthetic construct
CGGIFVEGMESGEGLEEIAKEREKLKKAESVQIKEEMFETSGDSLNCSNTDHCEQKEDLKEKDNTNLFLQKPGSFSKLSK

SEQ ID NO: 7379 - protein, 80 aa, Synthetic construct
EREKLKKAESVQIKEEMFETSGDSLNCSNTDHCEQKEDLKEKDNTNLFLQKPGSFSKLSKLLEVAKMPPESEVMTPKPNA

SEQ ID NO: 7380 - protein, 80 aa, Synthetic construct
VQIKEEMFETSGDSLNCSNTDHCEQKEDLKEKDNTNLFLQKPGSFSKLSKLLEVAKMPPESEVMTPKPNAGANGCTLSYQ

SEQ ID NO: 7381 - protein, 80 aa, Synthetic construct
NEELLLLCDGCDKGCHTYCHRPKITTIPDGDWFCPACIAKASGQTLKIKKLHVKGKKTNESKKGKKVTLTGDTEDEDSAS

SEQ ID NO: 7382 - protein, 80 aa, Synthetic construct
CDKGCHTYCHRPKITTIPDGDWFCPACIAKASGQTLKIKKLHVKGKKTNESKKGKKVTLTGDTEDEDSASTSSSLKRGNK

SEQ ID NO: 7383 - protein, 80 aa, Synthetic construct; identical to SEQ ID NO: 4631

SEQ ID NO: 7384 - protein, 80 aa, Synthetic construct
PDPKTWKANFRCAMNSLPDIEEVKDKSIKKGNNAFRVYRMLPLSERPSKKGKKPKTEKEDKVKHIKQEPVESSLGLSNGV

SEQ ID NO: 7385 - protein, 80 aa, Synthetic construct; identical to SEQ ID NO: 1115

SEQ ID NO: 7386 - protein, 80 aa, Synthetic construct; identical to SEQ ID NO: 2189

SEQ ID NO: 7387 - protein, 80 aa, Synthetic construct
LPLSERPSKKGKKPKTEKEDKVKHIKQEPVESSLGLSNGVSDLSPEYAVLTSTIKNEVDSTVNIIVVGQSHLDSNIENQE

SEQ ID NO: 7388 - protein, 80 aa, Synthetic construct
GKKPKTEKEDKVKHIKQEPVESSLGLSNGVSDLSPEYAVLTSTIKNEVDSTVNIIVVGQSHLDSNIENQEIVTNPPDICQ

SEQ ID NO: 7389 - protein, 80 aa, Synthetic construct
KVKHIKQEPVESSLGLSNGVSDLSPEYAVLTSTIKNEVDSTVNIIVVGQSHLDSNIENQEIVTNPPDICQVVEVTTESDE

SEQ ID NO: 7390 - protein, 80 aa, Synthetic construct; identical to SEQ ID NO: 1116

SEQ ID NO: 7391 - protein, 80 aa, Synthetic construct
DEESAEGRPHWRKRNIEGKQYLSNMGTRGSYLLPGMASFVTSNKPDLQVTIKEESNPVPYNSSWPPFQDLPLSSSMTPAS

SEQ ID NO: 7392 - protein, 80 aa, Synthetic construct; identical to SEQ ID NO: 1117

SEQ ID NO: 7393 - protein, 80 aa, Synthetic construct; identical to SEQ ID NO: 2190

SEQ ID NO: 7394 - protein, 80 aa, Synthetic construct
HSPPRDQAAIMLWKLVENVKYEDIYEDRHDGVPSHSSRLSQLGSVSQGPYSSAPPLSHTPSSDFQPPYFPPPYQPLPYHQ

SEQ ID NO: 7395 - protein, 80 aa, Synthetic construct
MLWKLVENVKYEDIYEDRHDGVPSHSSRLSQLGSVSQGPYSSAPPLSHTPSSDFQPPYFPPPYQPLPYHQSQDPYSHVND

SEQ ID NO: 7396 - protein, 80 aa, Synthetic construct
GSPGKETNESPWRSDLLIDENCLLSPLAGEDDSFLLEGNSNEDCKPLILPDTKPKIKDNGDLVLSSPSNVTLPQVKTEKE

SEQ ID NO: 7397 - protein, 80 aa, Synthetic construct
PWRSDLLIDENCLLSPLAGEDDSFLLEGNSNEDCKPLILPDTKPKIKDNGDLVLSSPSNVTLPQVKTEKEDFIELCTPGV

SEQ ID NO: 7398 - protein, 80 aa, Synthetic construct; identical to SEQ ID NO: 1995

SEQ ID NO: 7399 - protein, 80 aa, Synthetic construct; identical to SEQ ID NO: 1118

SEQ ID NO: 7400 - protein, 80 aa, Synthetic construct
DTKPKIKDNGDLVLSSPSNVTLPQVKTEKEDFIELCTPGVIKQEKLGTVYCQASFPGANIIGNKMSAISVHGVSTSGGQM

SEQ ID NO: 7401 - protein, 80 aa, Synthetic construct
DLVLSSPSNVTLPQVKTEKEDFIELCTPGVIKQEKLGTVYCQASFPGANIIGNKMSAISVHGVSTSGGQMYHYDMNTASL

SEQ ID NO: 7402 - protein, 80 aa, Synthetic construct
TLPQVKTEKEDFIELCTPGVIKQEKLGTVYCQASFPGANIIGNKMSAISVHGVSTSGGQMYHYDMNTASLSQQQDQKPIF

SEQ ID NO: 7403 - protein, 80 aa, Synthetic construct
DFIELCTPGVIKQEKLGTVYCQASFPGANIIGNKMSAISVHGVSTSGGQMYHYDMNTASLSQQQDQKPIFNVIPPIPVGS

SEQ ID NO: 7404 - protein, 80 aa, Synthetic construct
IKQEKLGTVYCQASFPGANIIGNKMSAISVHGVSTSGGQMYHYDMNTASLSQQQDQKPIFNVIPPIPVGSENWNRCQGSG

SEQ ID NO: 7405 - protein, 80 aa, Synthetic construct; identical to SEQ ID NO: 1119

SEQ ID NO: 7406 - protein, 80 aa, Synthetic construct; identical to SEQ ID NO: 1120

SEQ ID NO: 7407 - protein, 80 aa, Synthetic construct; identical to SEQ ID NO: 1778

SEQ ID NO: 7408 - protein, 80 aa, Synthetic construct
ALKKMHEEEHHQQMSILQLQLIQMNEVHVAKIQQIERECEMAEEEHRIKMEVLNKKKMYWERKLQTFTKEWPVSSFNRPF

SEQ ID NO: 7409 - protein, 80 aa, Synthetic construct
MHEEEHHQQMSILQLQLIQMNEVHVAKIQQIERECEMAEEEHRIKMEVLNKKKMYWERKLQTFTKEWPVSSFNRPFPNSP

SEQ ID NO: 7410 - protein, 80 aa, Synthetic construct; identical to SEQ ID NO: 4222

SEQ ID NO: 7411 - protein, 80 aa, Synthetic construct
FVEGYSSNYELKPSCVYQMQRPLIKVEEGRAPSYHHHHHHHHHHHHHHQQQHQQPSIPPASSPEDEVLPSTSMYFKQSPP

SEQ ID NO: 7412 - protein, 80 aa, Synthetic construct
LKPSCVYQMQRPLIKVEEGRAPSYHHHHHHHHHHHHHHQQQHQQPSIPPASSPEDEVLPSTSMYFKQSPPSTPTTPAFPP

SEQ ID NO: 7413 - protein, 80 aa, Synthetic construct
RPLIKVEEGRAPSYHHHHHHHHHHHHHHQQQHQQPSIPPASSPEDEVLPSTSMYFKQSPPSTPTTPAFPPQAGALWDEAL

SEQ ID NO: 7414 - protein, 80 aa, Synthetic construct
APSYHHHHHHHHHHHHHHQQQHQQPSIPPASSPEDEVLPSTSMYFKQSPPSTPTTPAFPPQAGALWDEALPSAPGCIAPG

SEQ ID NO: 7415 - protein, 80 aa, Synthetic construct
HHHHHHHHQQQHQQPSIPPASSPEDEVLPSTSMYFKQSPPSTPTTPAFPPQAGALWDEALPSAPGCIAPGPLLDPPMKAV

SEQ ID NO: 7416 - protein, 80 aa, Synthetic construct
QHQQPSIPPASSPEDEVLPSTSMYFKQSPPSTPTTPAFPPQAGALWDEALPSAPGCIAPGPLLDPPMKAVPTVAGARFPL

SEQ ID NO: 7417 - protein, 80 aa, Synthetic construct
SSPEDEVLPSTSMYFKQSPPSTPTTPAFPPQAGALWDEALPSAPGCIAPGPLLDPPMKAVPTVAGARFPLFHFKPSPPHP

SEQ ID NO: 7418 - protein, 80 aa, Synthetic construct
TSMYFKQSPPSTPTTPAFPPQAGALWDEALPSAPGCIAPGPLLDPPMKAVPTVAGARFPLFHFKPSPPHPPAPSPAGGHH

SEQ ID NO: 7419 - protein, 80 aa, Synthetic construct
TKCDFITQVEEEISRHYRRAHSCYKCRQCSFTAADTQSLLEHFNTVHCQEQDITTANGEEDGHAISTIKEEPKIDFRVYN

SEQ ID NO: 7420 - protein, 80 aa, Synthetic construct
EEISRHYRRAHSCYKCRQCSFTAADTQSLLEHFNTVHCQEQDITTANGEEDGHAISTIKEEPKIDFRVYNLLTPDSKMGE

SEQ ID NO: 7421 - protein, 80 aa, Synthetic construct
HSCYKCRQCSFTAADTQSLLEHFNTVHCQEQDITTANGEEDGHAISTIKEEPKIDFRVYNLLTPDSKMGEPVSESVVKRE

SEQ ID NO: 7422 - protein, 80 aa, Synthetic construct
FTAADTQSLLEHFNTVHCQEQDITTANGEEDGHAISTIKEEPKIDFRVYNLLTPDSKMGEPVSESVVKREKLEEKDGLKE

SEQ ID NO: 7423 - protein, 80 aa, Synthetic construct
EHFNTVHCQEQDITTANGEEDGHAISTIKEEPKIDFRVYNLLTPDSKMGEPVSESVVKREKLEEKDGLKEKVWTESSSDD

SEQ ID NO: 7424 - protein, 80 aa, Synthetic construct
QDITTANGEEDGHAISTIKEEPKIDFRVYNLLTPDSKMGEPVSESVVKREKLEEKDGLKEKVWTESSSDDLRNVTWRGAD

SEQ ID NO: 7425 - protein, 80 aa, Synthetic construct; identical to SEQ ID NO: 1824

SEQ ID NO: 7426 - protein, 80 aa, Synthetic construct
EPKIDFRVYNLLTPDSKMGEPVSESVVKREKLEEKDGLKEKVWTESSSDDLRNVTWRGADILRGSPSYTQASLGLLTPVS

SEQ ID NO: 7427 - protein, 80 aa, Synthetic construct
LLTPDSKMGEPVSESVVKREKLEEKDGLKEKVWTESSSDDLRNVTWRGADILRGSPSYTQASLGLLTPVSGTQEQTKTLR

SEQ ID NO: 7428 - protein, 80 aa, Synthetic construct
NYSPPGSPIEKYQYPLFGLPFVHNDFQSEADWLRFWSKYKLSVPGNPHYLSHVPGLPNPCQNYVPYPTFNLPPHFSAVGS

SEQ ID NO: 7429 - protein, 80 aa, Synthetic construct
KYQYPLFGLPFVHNDFQSEADWLRFWSKYKLSVPGNPHYLSHVPGLPNPCQNYVPYPTFNLPPHFSAVGSDNDIPLDLAI

SEQ ID NO: 7430 - protein, 80 aa, Synthetic construct
QNYVPYPTFNLPPHFSAVGSDNDIPLDLAIKHSRPGPTANGASKEKTKAPPNVKNEGPLNVVKTEKVDRSTQDELSTKCV

SEQ ID NO: 7431 - protein, 80 aa, Synthetic construct; identical to SEQ ID NO: 1825

SEQ ID NO: 7432 - protein, 80 aa, Synthetic construct
SFPESSAIIPVSGITVVKAEDFTPVFMAPPVHYPRGDGEEQRVVIFEQTQYDVPSLATHSAYLKDDQRSTPDSTYSESFK

SEQ ID NO: 7433 - protein, 80 aa, Synthetic construct; identical to SEQ ID NO: 1121

SEQ ID NO: 7434 - protein, 80 aa, Synthetic construct; identical to SEQ ID NO: 1122

SEQ ID NO: 7435 - protein, 80 aa, Synthetic construct; identical to SEQ ID NO: 2237

SEQ ID NO: 7436 - protein, 80 aa, Synthetic construct; identical to SEQ ID NO: 3159

SEQ ID NO: 7437 - protein, 80 aa, Synthetic construct; identical to SEQ ID NO: 2277

SEQ ID NO: 7438 - protein, 80 aa, Synthetic construct; identical to SEQ ID NO: 5195

SEQ ID NO: 7439 - protein, 80 aa, Synthetic construct; identical to SEQ ID NO: 5197

SEQ ID NO: 7440 - protein, 80 aa, Synthetic construct
NGDEEKGCLLKTKGGITKEVVQKGGEAEKQTAEFKLSAVRESLDYLLDFVDATPEFQRFHFTLKEMQQEIVKKQFQSKIH

SEQ ID NO: 7441 - protein, 80 aa, Synthetic construct
KTKGGITKEVVQKGGEAEKQTAEFKLSAVRESLDYLLDFVDATPEFQRFHFTLKEMQQEIVKKQFQSKIHSRIGSFLKPR

SEQ ID NO: 7442 - protein, 80 aa, Synthetic construct
CLSPGSAPSLGPDGGGGGSGLRASPGPGELGKVKKEQQDGEADDDKFPVCIREAVSQVLSGYDWTLVPMPVRVNGASKSK

SEQ ID NO: 7443 - protein, 80 aa, Synthetic construct
GPDGGGGGSGLRASPGPGELGKVKKEQQDGEADDDKFPVCIREAVSQVLSGYDWTLVPMPVRVNGASKSKPHVKRPMNAF

SEQ ID NO: 7444 - protein, 80 aa, Synthetic construct; identical to SEQ ID NO: 1876

SEQ ID NO: 7445 - protein, 80 aa, Synthetic construct
GKVKKEQQDGEADDDKFPVCIREAVSQVLSGYDWTLVPMPVRVNGASKSKPHVKRPMNAFMVWAQAARRKLADQYPHLHN

SEQ ID NO: 7446 - protein, 80 aa, Synthetic construct
YVNDFDLMKFEVKREPSEGRPGPPTASLGSTPYSSVPPSPTFSEPGMVGATEGTRPGLEELYWLATLQQQLGAGEALGLS

SEQ ID NO: 7447 - protein, 80 aa, Synthetic construct
EVKREPSEGRPGPPTASLGSTPYSSVPPSPTFSEPGMVGATEGTRPGLEELYWLATLQQQLGAGEALGLSPEEAMELLQG

SEQ ID NO: 7448 - protein, 80 aa, Synthetic construct; identical to SEQ ID NO: 4427

SEQ ID NO: 7449 - protein, 80 aa, Synthetic construct
VDTEMPFWPTNFGISSVDLSVMEDHSHSFDIKPFTTVDFSSISTPHYEDIPFTRTDPVVADYKYDLKLQEYQSAIKVEPA

SEQ ID NO: 7450 - protein, 80 aa, Synthetic construct
NFGISSVDLSVMEDHSHSFDIKPFTTVDFSSISTPHYEDIPFTRTDPVVADYKYDLKLQEYQSAIKVEPASPPYYSEKTQ

SEQ ID NO: 7451 - protein, 80 aa, Synthetic construct
VMEDHSHSFDIKPFTTVDFSSISTPHYEDIPFTRTDPVVADYKYDLKLQEYQSAIKVEPASPPYYSEKTQLYNKPHEEPS

SEQ ID NO: 7452 - protein, 80 aa, Synthetic construct
IKPFTTVDFSSISTPHYEDIPFTRTDPVVADYKYDLKLQEYQSAIKVEPASPPYYSEKTQLYNKPHEEPSNSLMAIECRV

SEQ ID NO: 7453 - protein, 80 aa, Synthetic construct
SISTPHYEDIPFTRTDPVVADYKYDLKLQEYQSAIKVEPASPPYYSEKTQLYNKPHEEPSNSLMAIECRVCGDKASGFHY

SEQ ID NO: 7454 - protein, 80 aa, Synthetic construct
PFTRTDPVVADYKYDLKLQEYQSAIKVEPASPPYYSEKTQLYNKPHEEPSNSLMAIECRVCGDKASGFHYGVHACEGCKG

SEQ ID NO: 7455 - protein, 80 aa, Synthetic construct
DYKYDLKLQEYQSAIKVEPASPPYYSEKTQLYNKPHEEPSNSLMAIECRVCGDKASGFHYGVHACEGCKGFFRRTIRLKL

SEQ ID NO: 7456 - protein, 80 aa, Synthetic construct
YQSAIKVEPASPPYYSEKTQLYNKPHEEPSNSLMAIECRVCGDKASGFHYGVHACEGCKGFFRRTIRLKLIYDRCDLNCR

SEQ ID NO: 7457 - protein, 80 aa, Synthetic construct; identical to SEQ ID NO: 496

SEQ ID NO: 7458 - protein, 80 aa, Synthetic construct; identical to SEQ ID NO: 5217

SEQ ID NO: 7459 - protein, 80 aa, Synthetic construct; identical to SEQ ID NO: 1123

SEQ ID NO: 7460 - protein, 80 aa, Synthetic construct
KTRSIMAEELVKLTNQNDELEEKVKEIPKLRTQLRDLDQRYNTILQMYGEKAEEAEELRLDLEDVKNMYKTQIDELLRQS

SEQ ID NO: 7461 - protein, 80 aa, Synthetic construct; identical to SEQ ID NO: 2013

SEQ ID NO: 7462 - protein, 80 aa, Synthetic construct; identical to SEQ ID NO: 166

SEQ ID NO: 7463 - protein, 80 aa, Synthetic construct; identical to SEQ ID NO: 167

SEQ ID NO: 7464 - protein, 80 aa, Synthetic construct; identical to SEQ ID NO: 168

SEQ ID NO: 7465 - protein, 80 aa, Synthetic construct; identical to SEQ ID NO: 1124

SEQ ID NO: 7466 - protein, 80 aa, Synthetic construct; identical to SEQ ID NO: 2264

SEQ ID NO: 7467 - protein, 80 aa, Synthetic construct; identical to SEQ ID NO: 2444

SEQ ID NO: 7468 - protein, 80 aa, Synthetic construct; identical to SEQ ID NO: 1125

SEQ ID NO: 7469 - protein, 80 aa, Synthetic construct; identical to SEQ ID NO: 2242

SEQ ID NO: 7470 - protein, 80 aa, Synthetic construct
EPPVALAPGPAPTRCLPGHKEEEDGEGAGPGEQGGGKLVLSSLPKRLCLVCGDVASGYHYGVASCEACKAFFKRTIQGSI

SEQ ID NO: 7471 - protein, 80 aa, Synthetic construct; identical to SEQ ID NO: 2243

SEQ ID NO: 7472 - protein, 80 aa, Synthetic construct
EEEDGEGAGPGEQGGGKLVLSSLPKRLCLVCGDVASGYHYGVASCEACKAFFKRTIQGSIEYSCPASNECEITKRRRKAC

SEQ ID NO: 7473 - protein, 80 aa, Synthetic construct
GEQGGGKLVLSSLPKRLCLVCGDVASGYHYGVASCEACKAFFKRTIQGSIEYSCPASNECEITKRRRKACQACRFTKCLR

SEQ ID NO: 7474 - protein, 80 aa, Synthetic construct; identical to SEQ ID NO: 4424

SEQ ID NO: 7475 - protein, 80 aa, Synthetic construct; identical to SEQ ID NO: 4425

SEQ ID NO: 7476 - protein, 80 aa, Synthetic construct
MYDDESAIDFSAYIDSMAAVPTLELCHDELFADLFNSNHKAGGAGPLELLPGGPARPLGPGPAAPRLLKREPDWGDGDAP

SEQ ID NO: 7477 - protein, 80 aa, Synthetic construct; identical to SEQ ID NO: 2759

SEQ ID NO: 7478 - protein, 80 aa, Synthetic construct
PGGPARPLGPGPAAPRLLKREPDWGDGDAPGSLLPAQVAACAQTVVSLAAAGQPTPPTSPEPPRSSPRQTPAPGPAREKS

SEQ ID NO: 7479 - protein, 80 aa, Synthetic construct
GPAAPRLLKREPDWGDGDAPGSLLPAQVAACAQTVVSLAAAGQPTPPTSPEPPRSSPRQTPAPGPAREKSAGKRGPDRGS

SEQ ID NO: 7480 - protein, 80 aa, Synthetic construct
PAPGPAREKSAGKRGPDRGSPEYRQRRERNNIAVRKSRDKAKRRNQEMQQKLVELSAENEKLHQRVEQLTRDLAGLRQFF

SEQ ID NO: 7481 - protein, 80 aa, Synthetic construct; identical to SEQ ID NO: 2301

SEQ ID NO: 7482 - protein, 80 aa, Synthetic construct
DPPPPPGLLQPPTLAPWQPSRGDGPPAVSSQPSGGRSLGEEGPPTRGASPPTPPVSIKSERLSPAPGGPGDFPKTFPYPL

SEQ ID NO: 7483 - protein, 80 aa, Synthetic construct
PPTLAPWQPSRGDGPPAVSSQPSGGRSLGEEGPPTRGASPPTPPVSIKSERLSPAPGGPGDFPKTFPYPLLLARSLAEPL

SEQ ID NO: 7484 - protein, 80 aa, Synthetic construct
RGDGPPAVSSQPSGGRSLGEEGPPTRGASPPTPPVSIKSERLSPAPGGPGDFPKTFPYPLLLARSLAEPLRPGPALRRLP

SEQ ID NO: 7485 - protein, 80 aa, Synthetic construct
VSSQPSGGRSLGEEGPPTRGASPPTPPVSIKSERLSPAPGGPGDFPKTFPYPLLLARSLAEPLRPGPALRRLPLADGWPR

SEQ ID NO: 7486 - protein, 80 aa, Synthetic construct; identical to SEQ ID NO: 1126

SEQ ID NO: 7487 - protein, 80 aa, Synthetic construct; identical to SEQ ID NO: 1127

SEQ ID NO: 7488 - protein, 80 aa, Synthetic construct; identical to SEQ ID NO: 1128

SEQ ID NO: 7489 - protein, 80 aa, Synthetic construct; identical to SEQ ID NO: 1129

SEQ ID NO: 7490 - protein, 80 aa, Synthetic construct; identical to SEQ ID NO: 1998

SEQ ID NO: 7491 - protein, 80 aa, Synthetic construct; identical to SEQ ID NO: 1130

SEQ ID NO: 7492 - protein, 80 aa, Synthetic construct
SAFPPATPRTEFPEAWGTDTPPATPRSSWPMPRPSPDPMAELEQLLGSASDYIQSVFKRPEALPTKPKVKVEAPSSSPAP

SEQ ID NO: 7493 - protein, 80 aa, Synthetic construct; identical to SEQ ID NO: 5145

SEQ ID NO: 7494 - protein, 80 aa, Synthetic construct
RQLEARKAAAEKKKIQKEKLSTPEKIKQEALELAGITSDPGLSLKGGLSQQGLKPSLKVEPQNHFSSFKYSGNAVVESYS

SEQ ID NO: 7495 - protein, 80 aa, Synthetic construct
EKKKIQKEKLSTPEKIKQEALELAGITSDPGLSLKGGLSQQGLKPSLKVEPQNHFSSFKYSGNAVVESYSVLGNCRPSDP

SEQ ID NO: 7496 - protein, 80 aa, Synthetic construct
STPEKIKQEALELAGITSDPGLSLKGGLSQQGLKPSLKVEPQNHFSSFKYSGNAVVESYSVLGNCRPSDPYSMNSVYSYH

SEQ ID NO: 7497 - protein, 80 aa, Synthetic construct
QGLKPSLKVEPQNHFSSFKYSGNAVVESYSVLGNCRPSDPYSMNSVYSYHSYYAQPSLTSVNGFHSKYALPSFSYYGFPS

SEQ ID NO: 7498 - protein, 80 aa, Synthetic construct; identical to SEQ ID NO: 1131

SEQ ID NO: 7499 - protein, 80 aa, Synthetic construct; identical to SEQ ID NO: 1999

SEQ ID NO: 7500 - protein, 80 aa, Synthetic construct
VLGNCRPSDPYSMNSVYSYHSYYAQPSLTSVNGFHSKYALPSFSYYGFPSSNPVFPSQFLGPGAWGHSGSSGSFEKKPDL

SEQ ID NO: 7501 - protein, 80 aa, Synthetic construct
YSMNSVYSYHSYYAQPSLTSVNGFHSKYALPSFSYYGFPSSNPVFPSQFLGPGAWGHSGSSGSFEKKPDLHALHNSLSPA

SEQ ID NO: 7502 - protein, 80 aa, Synthetic construct
SYYAQPSLTSVNGFHSKYALPSFSYYGFPSSNPVFPSQFLGPGAWGHSGSSGSFEKKPDLHALHNSLSPAYGGAEFAELP

SEQ ID NO: 7503 - protein, 80 aa, Synthetic construct
YGGAEFAELPSQAVPTDAHHPTPHHQQPAYPGPKEYLLPKAPLLHSVSRDPSPFAQSSNCYNRSIKQEPVDPLTQAEPVP

SEQ ID NO: 7504 - protein, 80 aa, Synthetic construct
SQAVPTDAHHPTPHHQQPAYPGPKEYLLPKAPLLHSVSRDPSPFAQSSNCYNRSIKQEPVDPLTQAEPVPRDAGKMGKTP

SEQ ID NO: 7505 - protein, 80 aa, Synthetic construct
PTPHHQQPAYPGPKEYLLPKAPLLHSVSRDPSPFAQSSNCYNRSIKQEPVDPLTQAEPVPRDAGKMGKTPLSEVSQNGGP

SEQ ID NO: 7506 - protein, 80 aa, Synthetic construct
PGPKEYLLPKAPLLHSVSRDPSPFAQSSNCYNRSIKQEPVDPLTQAEPVPRDAGKMGKTPLSEVSQNGGPSHLWGQYSGG

SEQ ID NO: 7507 - protein, 80 aa, Synthetic construct
APLLHSVSRDPSPFAQSSNCYNRSIKQEPVDPLTQAEPVPRDAGKMGKTPLSEVSQNGGPSHLWGQYSGGPSMSPKRTNG

SEQ ID NO: 7508 - protein, 80 aa, Synthetic construct
PSPFAQSSNCYNRSIKQEPVDPLTQAEPVPRDAGKMGKTPLSEVSQNGGPSHLWGQYSGGPSMSPKRTNGVGGSWGVFSS

SEQ ID NO: 7509 - protein, 80 aa, Synthetic construct
FQDKLWNPMKGEEGRIPAAGASQLDRAWQSFGLPLGSSEKLFGALKSEEKLWDPFSLEEGPAEEPPSKGAVKEEKGGGGA

SEQ ID NO: 7510 - protein, 80 aa, Synthetic construct
GEEGRIPAAGASQLDRAWQSFGLPLGSSEKLFGALKSEEKLWDPFSLEEGPAEEPPSKGAVKEEKGGGGAEEEEEELWSD

SEQ ID NO: 7511 - protein, 80 aa, Synthetic construct
ASQLDRAWQSFGLPLGSSEKLFGALKSEEKLWDPFSLEEGPAEEPPSKGAVKEEKGGGGAEEEEEELWSDSEHNFLDENI

SEQ ID NO: 7512 - protein, 80 aa, Synthetic construct
FGLPLGSSEKLFGALKSEEKLWDPFSLEEGPAEEPPSKGAVKEEKGGGGAEEEEEELWSDSEHNFLDENIGGVAVAPAHG

SEQ ID NO: 7513 - protein, 80 aa, Synthetic construct
LFGALKSEEKLWDPFSLEEGPAEEPPSKGAVKEEKGGGGAEEEEEELWSDSEHNFLDENIGGVAVAPAHGSILIECARRE

SEQ ID NO: 7514 - protein, 80 aa, Synthetic construct; identical to SEQ ID NO: 5152

SEQ ID NO: 7515 - protein, 80 aa, Synthetic construct
GGHSPIFRTSALPPLDWPLPSQYEQLELRIEVQPRAHHRAHYETEGSRGAVKAAPGGHPVVKLLGYSEKPLTLQMFIGTA

SEQ ID NO: 7516 - protein, 80 aa, Synthetic construct
ALPPLDWPLPSQYEQLELRIEVQPRAHHRAHYETEGSRGAVKAAPGGHPVVKLLGYSEKPLTLQMFIGTADERNLRPHAF

SEQ ID NO: 7517 - protein, 80 aa, Synthetic construct
SQYEQLELRIEVQPRAHHRAHYETEGSRGAVKAAPGGHPVVKLLGYSEKPLTLQMFIGTADERNLRPHAFYQVHRITGKM

SEQ ID NO: 7518 - protein, 80 aa, Synthetic construct
SPSACSVRGGEELVLTGSNFLPDSKVVFIERGPDGKLQWEEEATVNRLQSNEVTLTLTVPEYSNKRVSRPVQVYFYVSNG

SEQ ID NO: 7519 - protein, 80 aa, Synthetic construct
LPDSKVVFIERGPDGKLQWEEEATVNRLQSNEVTLTLTVPEYSNKRVSRPVQVYFYVSNGRRKRSPTQSFRFLPVICKEE

SEQ ID NO: 7520 - protein, 80 aa, Synthetic construct
VQVYFYVSNGRRKRSPTQSFRFLPVICKEEPLPDSSLRGFPSASATPFGTDMDFSPPRPPYPSYPHEDPACETPYLSEGF

SEQ ID NO: 7521 - protein, 80 aa, Synthetic construct
RRKRSPTQSFRFLPVICKEEPLPDSSLRGFPSASATPFGTDMDFSPPRPPYPSYPHEDPACETPYLSEGFGYGMPPLYPQ

SEQ ID NO: 7522 - protein, 80 aa, Synthetic construct
RFLPVICKEEPLPDSSLRGFPSASATPFGTDMDFSPPRPPYPSYPHEDPACETPYLSEGFGYGMPPLYPQTGPPPSYRPG

SEQ ID NO: 7523 - protein, 80 aa, Synthetic construct; identical to SEQ ID NO: 5182

SEQ ID NO: 7524 - protein, 80 aa, Synthetic construct; identical to SEQ ID NO: 2341

SEQ ID NO: 7525 - protein, 80 aa, Synthetic construct
TLAVRQKRRIYDITNVLEGIDLIEKKSKNSIQWKGVGAGCNTKEVIDRLRYLKAEIEDLELKERELDQQKLWLQQSIKNV

SEQ ID NO: 7526 - protein, 80 aa, Synthetic construct
DLIEKKSKNSIQWKGVGAGCNTKEVIDRLRYLKAEIEDLELKERELDQQKLWLQQSIKNVMDDSINNRFSYVTHEDICNC

SEQ ID NO: 7527 - protein, 80 aa, Synthetic construct
IQWKGVGAGCNTKEVIDRLRYLKAEIEDLELKERELDQQKLWLQQSIKNVMDDSINNRFSYVTHEDICNCFNGDTLLAIQ

SEQ ID NO: 7528 - protein, 80 aa, Synthetic construct
NTKEVIDRLRYLKAEIEDLELKERELDQQKLWLQQSIKNVMDDSINNRFSYVTHEDICNCFNGDTLLAIQAPSGTQLEVP

SEQ ID NO: 7529 - protein, 80 aa, Synthetic construct
YLKAEIEDLELKERELDQQKLWLQQSIKNVMDDSINNRFSYVTHEDICNCFNGDTLLAIQAPSGTQLEVPIPEMGQNGQK

SEQ ID NO: 7530 - protein, 80 aa, Synthetic construct
MDDSINNRFSYVTHEDICNCFNGDTLLAIQAPSGTQLEVPIPEMGQNGQKKYQINLKSHSGPIHVLLINKESSSSKPVVF

SEQ ID NO: 7531 - protein, 80 aa, Synthetic construct
YVTHEDICNCFNGDTLLAIQAPSGTQLEVPIPEMGQNGQKKYQINLKSHSGPIHVLLINKESSSSKPVVFPVPPPDDLTQ

SEQ ID NO: 7532 - protein, 80 aa, Synthetic construct; identical to SEQ ID NO: 1758

SEQ ID NO: 7533 - protein, 80 aa, Synthetic construct; identical to SEQ ID NO: 1132

SEQ ID NO: 7534 - protein, 80 aa, Synthetic construct
LPVSVAGGLLRGPPLLLRAAEKYPRTPKCARCRNHGVVSALKGHKRYCRWKDCLCAKCTLIAERQRVMAAQVALRRQQAQ

SEQ ID NO: 7535 - protein, 80 aa, Synthetic construct
RGPPLLLRAAEKYPRTPKCARCRNHGVVSALKGHKRYCRWKDCLCAKCTLIAERQRVMAAQVALRRQQAQEENEARELQL

SEQ ID NO: 7536 - protein, 80 aa, Synthetic construct; identical to SEQ ID NO: 1948

SEQ ID NO: 7537 - protein, 80 aa, Synthetic construct; identical to SEQ ID NO: 4563

SEQ ID NO: 7538 - protein, 80 aa, Synthetic construct
EEAGGTRLEPLKPLKIKLSVPKAGEGLGTSSGDAISGTDHNSLDSSLTREKIEAKIKEVEEKQPEMKSGFMASFLDFLKS

SEQ ID NO: 7539 - protein, 80 aa, Synthetic construct; identical to SEQ ID NO: 1133

SEQ ID NO: 7540 - protein, 80 aa, Synthetic construct; identical to SEQ ID NO: 1134

SEQ ID NO: 7541 - protein, 80 aa, Synthetic construct; identical to SEQ ID NO: 1949

SEQ ID NO: 7542 - protein, 80 aa, Synthetic construct; identical to SEQ ID NO: 1135

SEQ ID NO: 7543 - protein, 80 aa, Synthetic construct
KIEAKIKEVEEKQPEMKSGFMASFLDFLKSGKRHPPLYQAGLTPPLSPPKSVPPSVPARGLQPQPPATPAVPHPPPSGAF

SEQ ID NO: 7544 - protein, 80 aa, Synthetic construct; identical to SEQ ID NO: 3217

SEQ ID NO: 7545 - protein, 80 aa, Synthetic construct; identical to SEQ ID NO: 1136

SEQ ID NO: 7546 - protein, 80 aa, Synthetic construct; identical to SEQ ID NO: 1961

SEQ ID NO: 7547 - protein, 80 aa, Synthetic construct; identical to SEQ ID NO: 3728

SEQ ID NO: 7548 - protein, 80 aa, Synthetic construct
RVDFKEDCDLENVWLMGGLSVLTSVPGGPPMVCLLCASKGLHELVFCQVCCDPFHPFCLEEAERPLPQHHDTWCCRRCKF

SEQ ID NO: 7549 - protein, 80 aa, Synthetic construct
VLTSVPGGPPMVCLLCASKGLHELVFCQVCCDPFHPFCLEEAERPLPQHHDTWCCRRCKFCHVCGRKGRGSKHLLECERC

SEQ ID NO: 7550 - protein, 80 aa, Synthetic construct
MVCLLCASKGLHELVFCQVCCDPFHPFCLEEAERPLPQHHDTWCCRRCKFCHVCGRKGRGSKHLLECERCRHAYHPACLG

SEQ ID NO: 7551 - protein, 80 aa, Synthetic construct
LHELVFCQVCCDPFHPFCLEEAERPLPQHHDTWCCRRCKFCHVCGRKGRGSKHLLECERCRHAYHPACLGPSYPTRATRK

SEQ ID NO: 7552 - protein, 80 aa, Synthetic construct
SKHLLECERCRHAYHPACLGPSYPTRATRKRRHWICSACVRCKSCGATPGKNWDVEWSGDYSLCPRCTQLYEKGNYCPIC

SEQ ID NO: 7553 - protein, 80 aa, Synthetic construct; identical to SEQ ID NO: 1962

SEQ ID NO: 7554 - protein, 80 aa, Synthetic construct
PSYPTRATRKRRHWICSACVRCKSCGATPGKNWDVEWSGDYSLCPRCTQLYEKGNYCPICTRCYEDNDYESKMMQCAQCD

SEQ ID NO: 7555 - protein, 80 aa, Synthetic construct
RRHWICSACVRCKSCGATPGKNWDVEWSGDYSLCPRCTQLYEKGNYCPICTRCYEDNDYESKMMQCAQCDHWVHAKCEGL

SEQ ID NO: 7556 - protein, 80 aa, Synthetic construct
RCKSCGATPGKNWDVEWSGDYSLCPRCTQLYEKGNYCPICTRCYEDNDYESKMMQCAQCDHWVHAKCEGLSDEDYEILSG

SEQ ID NO: 7557 - protein, 80 aa, Synthetic construct; identical to SEQ ID NO: 1963

SEQ ID NO: 7558 - protein, 80 aa, Synthetic construct; identical to SEQ ID NO: 1137

SEQ ID NO: 7559 - protein, 80 aa, Synthetic construct
EMTLKFGPARTDSVIIADQTPTPTRFLKNCEEVGLFNELASSFEHEFKKAADEDEKKAAAGPLDMSLPSTPDIKIKEEEP

SEQ ID NO: 7560 - protein, 80 aa, Synthetic construct
TDSVIIADQTPTPTRFLKNCEEVGLFNELASSFEHEFKKAADEDEKKAAAGPLDMSLPSTPDIKIKEEEPVEVDSSPPDS

SEQ ID NO: 7561 - protein, 80 aa, Synthetic construct
PTPTRFLKNCEEVGLFNELASSFEHEFKKAADEDEKKAAAGPLDMSLPSTPDIKIKEEEPVEVDSSPPDSPASSPCSPPL

SEQ ID NO: 7562 - protein, 80 aa, Synthetic construct
EEVGLFNELASSFEHEFKKAADEDEKKAAAGPLDMSLPSTPDIKIKEEEPVEVDSSPPDSPASSPCSPPLKEKEVTPKPV

SEQ ID NO: 7563 - protein, 80 aa, Synthetic construct
SSFEHEFKKAADEDEKKAAAGPLDMSLPSTPDIKIKEEEPVEVDSSPPDSPASSPCSPPLKEKEVTPKPVLISTPTPTIV

SEQ ID NO: 7564 - protein, 80 aa, Synthetic construct
ADEDEKKAAAGPLDMSLPSTPDIKIKEEEPVEVDSSPPDSPASSPCSPPLKEKEVTPKPVLISTPTPTIVRPGSLPLHLG

SEQ ID NO: 7565 - protein, 80 aa, Synthetic construct
GPLDMSLPSTPDIKIKEEEPVEVDSSPPDSPASSPCSPPLKEKEVTPKPVLISTPTPTIVRPGSLPLHLGYDPLHPTLPS

SEQ ID NO: 7566 - protein, 80 aa, Synthetic construct
PDIKIKEEEPVEVDSSPPDSPASSPCSPPLKEKEVTPKPVLISTPTPTIVRPGSLPLHLGYDPLHPTLPSPTSVITQAPP

SEQ ID NO: 7567 - protein, 80 aa, Synthetic construct
ERQMCPEEQLKCEFLLLKVYCCSESSFFAKIPYYYYIREACQGLKEPMWLDKIKKRLNEHGYPQVEGFVQDMRLIFQNHR

SEQ ID NO: 7568 - protein, 80 aa, Synthetic construct; identical to SEQ ID NO: 4595

SEQ ID NO: 7569 - protein, 80 aa, Synthetic construct
DPLLYLRRTSDLKSKKKRGRPAKTNDTMTKVPFLQGFSYPIPSGSYYAPYGMPYTSMPMMNLGYYGQYPAPLYLSHTLGA

SEQ ID NO: 7570 - protein, 80 aa, Synthetic construct
DLKSKKKRGRPAKTNDTMTKVPFLQGFSYPIPSGSYYAPYGMPYTSMPMMNLGYYGQYPAPLYLSHTLGAASPFMRPTVP

SEQ ID NO: 7571 - protein, 80 aa, Synthetic construct; identical to SEQ ID NO: 1790

SEQ ID NO: 7572 - protein, 80 aa, Synthetic construct
VPFLQGFSYPIPSGSYYAPYGMPYTSMPMMNLGYYGQYPAPLYLSHTLGAASPFMRPTVPPPQFHTNSHVKMSGAAKHKA

SEQ ID NO: 7573 - protein, 80 aa, Synthetic construct
IPSGSYYAPYGMPYTSMPMMNLGYYGQYPAPLYLSHTLGAASPFMRPTVPPPQFHTNSHVKMSGAAKHKAKHGVHLQGPV

SEQ ID NO: 7574 - protein, 80 aa, Synthetic construct
QDTIMATIEAVIHMAREAPPLPPPPPPPLPPPPPPPLPPPPPLPKTPRGGKRKHKPQAPAQPPQQSPPQQPLPQEEEVKA

SEQ ID NO: 7575 - protein, 80 aa, Synthetic construct; identical to SEQ ID NO: 1860

SEQ ID NO: 7576 - protein, 80 aa, Synthetic construct
GPSALLTPPMSSSSRGPGAGARRRRTRCRRCRACVRTECGDCHFCRDMKKFGGPGRMKQSCLLRQCTAPVLPHTAVCLLC

SEQ ID NO: 7577 - protein, 80 aa, Synthetic construct; identical to SEQ ID NO: 1138

SEQ ID NO: 7578 - protein, 80 aa, Synthetic construct; identical to SEQ ID NO: 1139

SEQ ID NO: 7579 - protein, 80 aa, Synthetic construct; identical to SEQ ID NO: 1861

SEQ ID NO: 7580 - protein, 80 aa, Synthetic construct
AEGPAVPSPSPQREKLERFKRMCQLLERVPDTSSSSSDSDSDSDSSGTSLSEDEAPGEARNGRRPARGSSGEKENRGGRR

SEQ ID NO: 7581 - protein, 80 aa, Synthetic construct; identical to SEQ ID NO: 4644

SEQ ID NO: 7582 - protein, 80 aa, Synthetic construct
CNEKPTNVRKRKFINRDLAHDSEELFQDLSQLQETWLAEAQVPDNDEQFVPDYQAESLAFHGLPLKIKKEPHSPCSEISS

SEQ ID NO: 7583 - protein, 80 aa, Synthetic construct
RKFINRDLAHDSEELFQDLSQLQETWLAEAQVPDNDEQFVPDYQAESLAFHGLPLKIKKEPHSPCSEISSACSQEQPFKF

SEQ ID NO: 7584 - protein, 80 aa, Synthetic construct
QLQETWLAEAQVPDNDEQFVPDYQAESLAFHGLPLKIKKEPHSPCSEISSACSQEQPFKFSYGEKCLYNVSAYDQKPQVG

SEQ ID NO: 7585 - protein, 80 aa, Synthetic construct
QVPDNDEQFVPDYQAESLAFHGLPLKIKKEPHSPCSEISSACSQEQPFKFSYGEKCLYNVSAYDQKPQVGMRPSNPPTPS

SEQ ID NO: 7586 - protein, 80 aa, Synthetic construct
PDYQAESLAFHGLPLKIKKEPHSPCSEISSACSQEQPFKFSYGEKCLYNVSAYDQKPQVGMRPSNPPTPSSTPVSPLHHA

SEQ ID NO: 7587 - protein, 80 aa, Synthetic construct; identical to SEQ ID NO: 1845

SEQ ID NO: 7588 - protein, 80 aa, Synthetic construct; identical to SEQ ID NO: 3142

SEQ ID NO: 7589 - protein, 80 aa, Synthetic construct; identical to SEQ ID NO: 1140

SEQ ID NO: 7590 - protein, 80 aa, Synthetic construct
EPCNSFPPLPTMPREGRPMYQRQMSEPNIPFPPQGFKQEYHDPVYEHNTMVGSAASQSFPPPLMIKQEPRDFAYDSEVPS

SEQ ID NO: 7591 - protein, 80 aa, Synthetic construct; identical to SEQ ID NO: 1141

SEQ ID NO: 7592 - protein, 80 aa, Synthetic construct; identical to SEQ ID NO: 1142

SEQ ID NO: 7593 - protein, 80 aa, Synthetic construct; identical to SEQ ID NO: 1846

SEQ ID NO: 7594 - protein, 80 aa, Synthetic construct
HDPVYEHNTMVGSAASQSFPPPLMIKQEPRDFAYDSEVPSCHSIYMRQEGFLAHPSRTEGCMFEKGPRQFYDDTCVVPEK

SEQ ID NO: 7595 - protein, 80 aa, Synthetic construct; identical to SEQ ID NO: 1143

SEQ ID NO: 7596 - protein, 80 aa, Synthetic construct
PPLMIKQEPRDFAYDSEVPSCHSIYMRQEGFLAHPSRTEGCMFEKGPRQFYDDTCVVPEKFDGDIKQEPGMYREGPTYQR

SEQ ID NO: 7597 - protein, 80 aa, Synthetic construct
DFAYDSEVPSCHSIYMRQEGFLAHPSRTEGCMFEKGPRQFYDDTCVVPEKFDGDIKQEPGMYREGPTYQRRGSLQLWQFL

SEQ ID NO: 7598 - protein, 80 aa, Synthetic construct
YDDTCVVPEKFDGDIKQEPGMYREGPTYQRRGSLQLWQFLVALLDDPSNSHFIAWTGRGMEFKLIEPEEVARRWGIQKNR

SEQ ID NO: 7599 - protein, 80 aa, Synthetic construct
FDGDIKQEPGMYREGPTYQRRGSLQLWQFLVALLDDPSNSHFIAWTGRGMEFKLIEPEEVARRWGIQKNRPAMNYDKLSR

SEQ ID NO: 7600 - protein, 80 aa, Synthetic construct
NSLPMDLLLKQGSLKQEVESFCYQIVSESNDQKVGILQSEDKQLQPSVSKKSEGELSRVKFISNSNKITFSKKPKRRKYD

SEQ ID NO: 7601 - protein, 80 aa, Synthetic construct; identical to SEQ ID NO: 1144

SEQ ID NO: 7602 - protein, 80 aa, Synthetic construct; identical to SEQ ID NO: 1145

SEQ ID NO: 7603 - protein, 80 aa, Synthetic construct; identical to SEQ ID NO: 2000

SEQ ID NO: 7604 - protein, 80 aa, Synthetic construct; identical to SEQ ID NO: 1146

SEQ ID NO: 7605 - protein, 80 aa, Synthetic construct; identical to SEQ ID NO: 3352

SEQ ID NO: 7606 - protein, 80 aa, Synthetic construct
PVEEESSSETRMVVTFLVSALESMCKELAKSKAEVACIAVYETDVFVVGTERGCAFVNARTDFQKDFAKYCVAEGLCEVK

SEQ ID NO: 7607 - protein, 80 aa, Synthetic construct
RMVVTFLVSALESMCKELAKSKAEVACIAVYETDVFVVGTERGCAFVNARTDFQKDFAKYCVAEGLCEVKPPCPVNGMQV

SEQ ID NO: 7608 - protein, 80 aa, Synthetic construct
QSAVVVQGLPEGVAFQHPENYDLATLKWILENKAGISFIINRPFLGPESQLGGPGMVTDAERSIVSPSESCGPINVKTEP

SEQ ID NO: 7609 - protein, 80 aa, Synthetic construct
EGVAFQHPENYDLATLKWILENKAGISFIINRPFLGPESQLGGPGMVTDAERSIVSPSESCGPINVKTEPMEDSGISLKA

SEQ ID NO: 7610 - protein, 80 aa, Synthetic construct; identical to SEQ ID NO: 1147

SEQ ID NO: 7611 - protein, 80 aa, Synthetic construct; identical to SEQ ID NO: 1148

SEQ ID NO: 7612 - protein, 80 aa, Synthetic construct; identical to SEQ ID NO: 1149

SEQ ID NO: 7613 - protein, 80 aa, Synthetic construct; identical to SEQ ID NO: 2347

SEQ ID NO: 7614 - protein, 80 aa, Synthetic construct; identical to SEQ ID NO: 1150

SEQ ID NO: 7615 - protein, 80 aa, Synthetic construct
MEDSGISLKAEAVSVKKESEDPNYYQYNMQGSHPSSTSNEVIEMELPMEDSTPLVPSEEPNEDPEAEVKIEGNTNSSSVT

SEQ ID NO: 7616 - protein, 80 aa, Synthetic construct
EAVSVKKESEDPNYYQYNMQGSHPSSTSNEVIEMELPMEDSTPLVPSEEPNEDPEAEVKIEGNTNSSSVTNSAAGVEDLN

SEQ ID NO: 7617 - protein, 80 aa, Synthetic construct; identical to SEQ ID NO: 3356

SEQ ID NO: 7618 - protein, 80 aa, Synthetic construct; identical to SEQ ID NO: 4936

SEQ ID NO: 7619 - protein, 80 aa, Synthetic construct
LMGMINQLTSLREQLLAAHDEQKKLAASQIEKQRQQMELAKQQQEQIARQQQQLLQQQHKINLLQQQIQVQGQLPPLMIP

SEQ ID NO: 7620 - protein, 80 aa, Synthetic construct; identical to SEQ ID NO: 4938

SEQ ID NO: 7621 - protein, 80 aa, Synthetic construct
RRQEMRQYFNVGQQAQIPIATAGVVYPGAIAMAGMPSPHLPSEHSSVSSSPEPGMPVIQSTYGVKGEEPHIKEEIQAEDI

SEQ ID NO: 7622 - protein, 80 aa, Synthetic construct
VGQQAQIPIATAGVVYPGAIAMAGMPSPHLPSEHSSVSSSPEPGMPVIQSTYGVKGEEPHIKEEIQAEDINGEIYDEYDE

SEQ ID NO: 7623 - protein, 80 aa, Synthetic construct
TAGVVYPGAIAMAGMPSPHLPSEHSSVSSSPEPGMPVIQSTYGVKGEEPHIKEEIQAEDINGEIYDEYDEEEDDPDVDYG

SEQ ID NO: 7624 - protein, 80 aa, Synthetic construct
HTNEFITWSQNGQSFLVLDEQRFAKEILPKYFKHNNMASFVRQLNMYGFRKVVHIDSGIVKQERDGPVEFQHPYFKQGQD

SEQ ID NO: 7625 - protein, 80 aa, Synthetic construct
NGQSFLVLDEQRFAKEILPKYFKHNNMASFVRQLNMYGFRKVVHIDSGIVKQERDGPVEFQHPYFKQGQDDLLENIKRKV

SEQ ID NO: 7626 - protein, 80 aa, Synthetic construct
YFKHNNMASFVRQLNMYGFRKVVHIDSGIVKQERDGPVEFQHPYFKQGQDDLLENIKRKVSSSKPEENKIRQEDLTKIIS

SEQ ID NO: 7627 - protein, 80 aa, Synthetic construct
VRQLNMYGFRKVVHIDSGIVKQERDGPVEFQHPYFKQGQDDLLENIKRKVSSSKPEENKIRQEDLTKIISSAQKVQIKQE

SEQ ID NO: 7628 - protein, 80 aa, Synthetic construct
KVVHIDSGIVKQERDGPVEFQHPYFKQGQDDLLENIKRKVSSSKPEENKIRQEDLTKIISSAQKVQIKQETIESRLSELK

SEQ ID NO: 7629 - protein, 80 aa, Synthetic construct
KQERDGPVEFQHPYFKQGQDDLLENIKRKVSSSKPEENKIRQEDLTKIISSAQKVQIKQETIESRLSELKSENESLWKEV

SEQ ID NO: 7630 - protein, 80 aa, Synthetic construct
QHPYFKQGQDDLLENIKRKVSSSKPEENKIRQEDLTKIISSAQKVQIKQETIESRLSELKSENESLWKEVSELRAKHAQQ

SEQ ID NO: 7631 - protein, 80 aa, Synthetic construct
DLLENIKRKVSSSKPEENKIRQEDLTKIISSAQKVQIKQETIESRLSELKSENESLWKEVSELRAKHAQQQQVIRKIVQF

SEQ ID NO: 7632 - protein, 80 aa, Synthetic construct; identical to SEQ ID NO: 1151

SEQ ID NO: 7633 - protein, 80 aa, Synthetic construct; identical to SEQ ID NO: 1152

SEQ ID NO: 7634 - protein, 80 aa, Synthetic construct; identical to SEQ ID NO: 1885

SEQ ID NO: 7635 - protein, 80 aa, Synthetic construct; identical to SEQ ID NO: 1153

SEQ ID NO: 7636 - protein, 80 aa, Synthetic construct
EAVSRVFPALAGQAPEEQGEIIKVKVKEEDHTWDQESALRRNLSYTRELSRQRFRQFCYQETPGPREALSQLRELCRQWL

SEQ ID NO: 7637 - protein, 80 aa, Synthetic construct
AGQAPEEQGEIIKVKVKEEDHTWDQESALRRNLSYTRELSRQRFRQFCYQETPGPREALSQLRELCRQWLNPEIHTKEQI

SEQ ID NO: 7638 - protein, 80 aa, Synthetic construct
IIKVKVKEEDHTWDQESALRRNLSYTRELSRQRFRQFCYQETPGPREALSQLRELCRQWLNPEIHTKEQILELLVLEQFL

SEQ ID NO: 7639 - protein, 80 aa, Synthetic construct
FKFCVGVCSDGAASMTGKHSEVVTQIKELAPECKTTHCFIHRESLAMKKISAELNSVLNDIVKIVNYIKSNSLNSRLFSL

SEQ ID NO: 7640 - protein, 80 aa, Synthetic construct
GAASMTGKHSEVVTQIKELAPECKTTHCFIHRESLAMKKISAELNSVLNDIVKIVNYIKSNSLNSRLFSLLCDNMEADHK

SEQ ID NO: 7641 - protein, 80 aa, Synthetic construct
KNATYFSMADKVEGQKQKLEAWKNRISTDCYDMFHNLTTIINEVGNDLDIAHLRKVISEHLTNLLECFEFYFPSKEDPRI

SEQ ID NO: 7642 - protein, 80 aa, Synthetic construct
KVEGQKQKLEAWKNRISTDCYDMFHNLTTIINEVGNDLDIAHLRKVISEHLTNLLECFEFYFPSKEDPRIGNLWIQNPFL

SEQ ID NO: 7643 - protein, 80 aa, Synthetic construct
TGTPGPLKGQAALPFSPLVIPAFPAHFLATAGPSPMAAGLMHFPPTSFDSALRHRLCPASSAWHAPPVTTYAAPHFFHLN

SEQ ID NO: 7644 - protein, 80 aa, Synthetic construct
PGPLKGQAALPFSPLVIPAFPAHFLATAGPSPMAAGLMHFPPTSFDSALRHRLCPASSAWHAPPVTTYAAPHFFHLNTKL

SEQ ID NO: 7645 - protein, 80 aa, Synthetic construct
ENLQTNFSLVQGSTKKLNGMGDDGSPPAKKMITDIHANGKTINKVPTVKKEHLDDYGEAPVETDGEHVKRTCTSVPETLH

SEQ ID NO: 7646 - protein, 80 aa, Synthetic construct
QGSTKKLNGMGDDGSPPAKKMITDIHANGKTINKVPTVKKEHLDDYGEAPVETDGEHVKRTCTSVPETLHLNPSLKHTLA

SEQ ID NO: 7647 - protein, 80 aa, Synthetic construct
GDDGSPPAKKMITDIHANGKTINKVPTVKKEHLDDYGEAPVETDGEHVKRTCTSVPETLHLNPSLKHTLAQFHLSSQSSL

SEQ ID NO: 7648 - protein, 80 aa, Synthetic construct
MITDIHANGKTINKVPTVKKEHLDDYGEAPVETDGEHVKRTCTSVPETLHLNPSLKHTLAQFHLSSQSSLGGPAAFSARH

SEQ ID NO: 7649 - protein, 80 aa, Synthetic construct
TINKVPTVKKEHLDDYGEAPVETDGEHVKRTCTSVPETLHLNPSLKHTLAQFHLSSQSSLGGPAAFSARHSQESMSPTVF

SEQ ID NO: 7650 - protein, 80 aa, Synthetic construct
NGSVLPAKSSLAQLKETGSAFEVEHECLGKCQGLFAPQFYVQPDAPCIQCLECCGMFAPQTFVMHSHRSPDKRTCHWGFE

SEQ ID NO: 7651 - protein, 80 aa, Synthetic construct; identical to SEQ ID NO: 4859

SEQ ID NO: 7652 - protein, 80 aa, Synthetic construct
KKLKIILEEMKEKFSMRSGKRNQSKTDAPSGMELQSWYPVIKQEGDHVSQTHSFLHPSYYLYMCDKVVAPNVSLTSAVSQ

SEQ ID NO: 7653 - protein, 80 aa, Synthetic construct
KEKFSMRSGKRNQSKTDAPSGMELQSWYPVIKQEGDHVSQTHSFLHPSYYLYMCDKVVAPNVSLTSAVSQSKELTKTEAS

SEQ ID NO: 7654 - protein, 80 aa, Synthetic construct
RNQSKTDAPSGMELQSWYPVIKQEGDHVSQTHSFLHPSYYLYMCDKVVAPNVSLTSAVSQSKELTKTEASKSISRQSEKA

SEQ ID NO: 7655 - protein, 80 aa, Synthetic construct
GMELQSWYPVIKQEGDHVSQTHSFLHPSYYLYMCDKVVAPNVSLTSAVSQSKELTKTEASKSISRQSEKAHSSGKLQKTV

SEQ ID NO: 7656 - protein, 80 aa, Synthetic construct
IKQEGDHVSQTHSFLHPSYYLYMCDKVVAPNVSLTSAVSQSKELTKTEASKSISRQSEKAHSSGKLQKTVSYPDVSLEEQ

SEQ ID NO: 7657 - protein, 80 aa, Synthetic construct; identical to SEQ ID NO: 2143

SEQ ID NO: 7658 - protein, 80 aa, Synthetic construct
LYMCDKVVAPNVSLTSAVSQSKELTKTEASKSISRQSEKAHSSGKLQKTVSYPDVSLEEQEKMDLKTSRELCSRLDASIS

SEQ ID NO: 7659 - protein, 80 aa, Synthetic construct
HSSGKLQKTVSYPDVSLEEQEKMDLKTSRELCSRLDASISNNSTSKRKSESATCNLVRDINKVGIGLVAAASSPLLVKDV

SEQ ID NO: 7660 - protein, 80 aa, Synthetic construct; identical to SEQ ID NO: 2144

SEQ ID NO: 7661 - protein, 80 aa, Synthetic construct
SISFLSSLLGTENASVRLDNSSSGASVVAIDNKIEQAMDLVKSHLMYAVREEVEVLKEQIKELIEKNSQLEQENNLLKTL

SEQ ID NO: 7662 - protein, 80 aa, Synthetic construct
TENASVRLDNSSSGASVVAIDNKIEQAMDLVKSHLMYAVREEVEVLKEQIKELIEKNSQLEQENNLLKTLASPEQLAQFQ

SEQ ID NO: 7663 - protein, 80 aa, Synthetic construct
SSSGASVVAIDNKIEQAMDLVKSHLMYAVREEVEVLKEQIKELIEKNSQLEQENNLLKTLASPEQLAQFQAQLQTGSPPA

SEQ ID NO: 7664 - protein, 80 aa, Synthetic construct; identical to SEQ ID NO: 180

SEQ ID NO: 7665 - protein, 80 aa, Synthetic construct; identical to SEQ ID NO: 706

SEQ ID NO: 7666 - protein, 80 aa, Synthetic construct; identical to SEQ ID NO: 4422

SEQ ID NO: 7667 - protein, 80 aa, Synthetic construct; identical to SEQ ID NO: 4199

SEQ ID NO: 7668 - protein, 80 aa, Synthetic construct
KISKLIGSRTVLQVKSYARQYFKNKVKCGLDKETPNQKTGHNLQVKNEDKGTKAWTPSCLRGRADPNLNAVKIEKLSDDE

SEQ ID NO: 7669 - protein, 80 aa, Synthetic construct
VLQVKSYARQYFKNKVKCGLDKETPNQKTGHNLQVKNEDKGTKAWTPSCLRGRADPNLNAVKIEKLSDDEEVDITDEVDE

SEQ ID NO: 7670 - protein, 80 aa, Synthetic construct
DKETPNQKTGHNLQVKNEDKGTKAWTPSCLRGRADPNLNAVKIEKLSDDEEVDITDEVDELSSQTPQKNSSSDLLLDFPN

SEQ ID NO: 7671 - protein, 80 aa, Synthetic construct
HNLQVKNEDKGTKAWTPSCLRGRADPNLNAVKIEKLSDDEEVDITDEVDELSSQTPQKNSSSDLLLDFPNSKMHETNQGE

SEQ ID NO: 7672 - protein, 80 aa, Synthetic construct
GTKAWTPSCLRGRADPNLNAVKIEKLSDDEEVDITDEVDELSSQTPQKNSSSDLLLDFPNSKMHETNQGEFITSDSQEAL

SEQ ID NO: 7673 - protein, 80 aa, Synthetic construct
RGRADPNLNAVKIEKLSDDEEVDITDEVDELSSQTPQKNSSSDLLLDFPNSKMHETNQGEFITSDSQEALFSKSSRGCLQ

SEQ ID NO: 7674 - protein, 80 aa, Synthetic construct
VKIEKLSDDEEVDITDEVDELSSQTPQKNSSSDLLLDFPNSKMHETNQGEFITSDSQEALFSKSSRGCLQNEKQDETLSS

SEQ ID NO: 7675 - protein, 80 aa, Synthetic construct; identical to SEQ ID NO: 1154

SEQ ID NO: 7676 - protein, 80 aa, Synthetic construct; identical to SEQ ID NO: 2297

SEQ ID NO: 7677 - protein, 80 aa, Synthetic construct
IIKRMFDERIFTGNKFTKDTTKLEPASPPEDTSAEVSRATVLDLAGNARSDKGSMSEDCGPGTSGELGGLRPIKIEPEDL

SEQ ID NO: 7678 - protein, 80 aa, Synthetic construct
FTGNKFTKDTTKLEPASPPEDTSAEVSRATVLDLAGNARSDKGSMSEDCGPGTSGELGGLRPIKIEPEDLDIIQVTVPDP

SEQ ID NO: 7679 - protein, 80 aa, Synthetic construct
TKLEPASPPEDTSAEVSRATVLDLAGNARSDKGSMSEDCGPGTSGELGGLRPIKIEPEDLDIIQVTVPDPSPTSEEMTDS

SEQ ID NO: 7680 - protein, 80 aa, Synthetic construct
DTSAEVSRATVLDLAGNARSDKGSMSEDCGPGTSGELGGLRPIKIEPEDLDIIQVTVPDPSPTSEEMTDSMPGHLPSEDS

SEQ ID NO: 7681 - protein, 80 aa, Synthetic construct
VLDLAGNARSDKGSMSEDCGPGTSGELGGLRPIKIEPEDLDIIQVTVPDPSPTSEEMTDSMPGHLPSEDSGYGMEMLTDK

SEQ ID NO: 7682 - protein, 80 aa, Synthetic construct
DKGSMSEDCGPGTSGELGGLRPIKIEPEDLDIIQVTVPDPSPTSEEMTDSMPGHLPSEDSGYGMEMLTDKGLSEDARPEE

SEQ ID NO: 7683 - protein, 80 aa, Synthetic construct
PGTSGELGGLRPIKIEPEDLDIIQVTVPDPSPTSEEMTDSMPGHLPSEDSGYGMEMLTDKGLSEDARPEERPVEDSHGDV

SEQ ID NO: 7684 - protein, 80 aa, Synthetic construct
RPIKIEPEDLDIIQVTVPDPSPTSEEMTDSMPGHLPSEDSGYGMEMLTDKGLSEDARPEERPVEDSHGDVIRPLRKQVEL

SEQ ID NO: 7685 - protein, 80 aa, Synthetic construct
NGMGPPFSVISSPMGPHSMSVPTTPTLGFSTGSPQLSSPMNPVSSSEDIKPPLGLNGVLKVPAHPSGNMASFTKHICAIC

SEQ ID NO: 7686 - protein, 80 aa, Synthetic construct
SSPMGPHSMSVPTTPTLGFSTGSPQLSSPMNPVSSSEDIKPPLGLNGVLKVPAHPSGNMASFTKHICAICGDRSSGKHYG

SEQ ID NO: 7687 - protein, 80 aa, Synthetic construct
VPTTPTLGFSTGSPQLSSPMNPVSSSEDIKPPLGLNGVLKVPAHPSGNMASFTKHICAICGDRSSGKHYGVYSCEGCKGF

SEQ ID NO: 7688 - protein, 80 aa, Synthetic construct
TGSPQLSSPMNPVSSSEDIKPPLGLNGVLKVPAHPSGNMASFTKHICAICGDRSSGKHYGVYSCEGCKGFFKRTVRKDLT

SEQ ID NO: 7689 - protein, 80 aa, Synthetic construct
NPVSSSEDIKPPLGLNGVLKVPAHPSGNMASFTKHICAICGDRSSGKHYGVYSCEGCKGFFKRTVRKDLTYTCRDNKDCL

SEQ ID NO: 7690 - protein, 80 aa, Synthetic construct
PGSTLSSSRSVELNGFMAFREQYMGMSVPPHYQYIPHLFSYSGHSPLLPQQARSLDPQSYSLIHQLLSAEDLEPLGTPML

SEQ ID NO: 7691 - protein, 80 aa, Synthetic construct
VELNGFMAFREQYMGMSVPPHYQYIPHLFSYSGHSPLLPQQARSLDPQSYSLIHQLLSAEDLEPLGTPMLIEDGYAVTQA

SEQ ID NO: 7692 - protein, 80 aa, Synthetic construct; identical to SEQ ID NO: 1786

SEQ ID NO: 7693 - protein, 80 aa, Synthetic construct; identical to SEQ ID NO: 4907

SEQ ID NO: 7694 - protein, 80 aa, Synthetic construct; identical to SEQ ID NO: 4909

SEQ ID NO: 7695 - protein, 80 aa, Synthetic construct; identical to SEQ ID NO: 4262

SEQ ID NO: 7696 - protein, 80 aa, Synthetic construct
RAHFEKQPPSNLRKSNFFHFVLAMYDRQGQPVEVERTAFIDFVEKDREPGAEKTNNGIHYRLRLVYNNGLRTEQDLYVRL

SEQ ID NO: 7697 - protein, 80 aa, Synthetic construct; identical to SEQ ID NO: 3044

SEQ ID NO: 7698 - protein, 80 aa, Synthetic construct; identical to SEQ ID NO: 1819

SEQ ID NO: 7699 - protein, 80 aa, Synthetic construct
EMAPQSVSPRESYRENKRKQKLPQQQQQSFQQLVSARKEQKREERRQLKQQLEDMQKQLRQLQEKFYQIYDSTDSENDED

SEQ ID NO: 7700 - protein, 80 aa, Synthetic construct
KLPQQQQQSFQQLVSARKEQKREERRQLKQQLEDMQKQLRQLQEKFYQIYDSTDSENDEDGNLSEDSMRSEILDARAQDS

SEQ ID NO: 7701 - protein, 80 aa, Synthetic construct
VGRSDNEMCELDPGQFIDRARALIREQEMAENKPKREGNNKERDHGPNSLQPEGKHLAETLKQELNTAMSQVVDTVVKVF

SEQ ID NO: 7702 - protein, 80 aa, Synthetic construct
LDPGQFIDRARALIREQEMAENKPKREGNNKERDHGPNSLQPEGKHLAETLKQELNTAMSQVVDTVVKVFSAKPSRQVPQ

SEQ ID NO: 7703 - protein, 80 aa, Synthetic construct
ENKPKREGNNKERDHGPNSLQPEGKHLAETLKQELNTAMSQVVDTVVKVFSAKPSRQVPQVFPPLQIPQARFAVNGENHN

SEQ ID NO: 7704 - protein, 80 aa, Synthetic construct
KERDHGPNSLQPEGKHLAETLKQELNTAMSQVVDTVVKVFSAKPSRQVPQVFPPLQIPQARFAVNGENHNFHTANQRLQC

SEQ ID NO: 7705 - protein, 80 aa, Synthetic construct
QPEGKHLAETLKQELNTAMSQVVDTVVKVFSAKPSRQVPQVFPPLQIPQARFAVNGENHNFHTANQRLQCFGDVIIPNPL

SEQ ID NO: 7706 - protein, 80 aa, Synthetic construct
TSLRTKMSSHHLSHHPCSPAHPPSTAEGLSLSLIKSECGDLQDMSEISPYSGSAMQEGLSPNHLKKAKLMFFYTRYPSSN

SEQ ID NO: 7707 - protein, 80 aa, Synthetic construct
HLSHHPCSPAHPPSTAEGLSLSLIKSECGDLQDMSEISPYSGSAMQEGLSPNHLKKAKLMFFYTRYPSSNMLKTYFSDVK

SEQ ID NO: 7708 - protein, 80 aa, Synthetic construct
HPPSTAEGLSLSLIKSECGDLQDMSEISPYSGSAMQEGLSPNHLKKAKLMFFYTRYPSSNMLKTYFSDVKFNRCITSQLI

SEQ ID NO: 7709 - protein, 80 aa, Synthetic construct
KAAVGPTGGGGGGDFDYPGAPAGPGGAVMPGGAHGPPPGYGCAAAGYLDGRLEPLYERVGAPALRPLVIKQEPREEDEAK

SEQ ID NO: 7710 - protein, 80 aa, Synthetic construct
GGGDFDYPGAPAGPGGAVMPGGAHGPPPGYGCAAAGYLDGRLEPLYERVGAPALRPLVIKQEPREEDEAKQLALAGLFPY

SEQ ID NO: 7711 - protein, 80 aa, Synthetic construct
PAGPGGAVMPGGAHGPPPGYGCAAAGYLDGRLEPLYERVGAPALRPLVIKQEPREEDEAKQLALAGLFPYQPPPPPPPSH

SEQ ID NO: 7712 - protein, 80 aa, Synthetic construct
GGAHGPPPGYGCAAAGYLDGRLEPLYERVGAPALRPLVIKQEPREEDEAKQLALAGLFPYQPPPPPPPSHPHPHPPPAHL

SEQ ID NO: 7713 - protein, 80 aa, Synthetic construct
GCAAAGYLDGRLEPLYERVGAPALRPLVIKQEPREEDEAKQLALAGLFPYQPPPPPPPSHPHPHPPPAHLAAPHLQFQIA

SEQ ID NO: 7714 - protein, 80 aa, Synthetic construct; identical to SEQ ID NO: 2082

SEQ ID NO: 7715 - protein, 80 aa, Synthetic construct
APALRPLVIKQEPREEDEAKQLALAGLFPYQPPPPPPPSHPHPHPPPAHLAAPHLQFQIAHCGQTTMHLQPGHPTPPPTP

SEQ ID NO: 7716 - protein, 80 aa, Synthetic construct
GKAKKSVDKNSNEYRVRRERNNIAVRKSRDKAKQRNVETQQKVLELTSDNDRLRKRVEQLSRELDTLRGIFRQLPESSLV

SEQ ID NO: 7717 - protein, 80 aa, Synthetic construct; identical to SEQ ID NO: 5193

SEQ ID NO: 7718 - protein, 80 aa, Synthetic construct; identical to SEQ ID NO: 5194

SEQ ID NO: 7719 - protein, 80 aa, Synthetic construct
EYSLSSADLSSLSGFNTASALHLGSVTGWQQQHLHNMPPSALSQLGACTSTHLSQSSNLSLPSTQSLNIKSEPVSPPRDR

SEQ ID NO: 7720 - protein, 80 aa, Synthetic construct
SLSGFNTASALHLGSVTGWQQQHLHNMPPSALSQLGACTSTHLSQSSNLSLPSTQSLNIKSEPVSPPRDRTTTPSRYPQH

SEQ ID NO: 7721 - protein, 80 aa, Synthetic construct; identical to SEQ ID NO: 1802

SEQ ID NO: 7722 - protein, 80 aa, Synthetic construct; identical to SEQ ID NO: 1155

SEQ ID NO: 7723 - protein, 80 aa, Synthetic construct
ALSQLGACTSTHLSQSSNLSLPSTQSLNIKSEPVSPPRDRTTTPSRYPQHTRHEAGRSPVDSLSSCSSSYDGSDREDHRN

SEQ ID NO: 7724 - protein, 80 aa, Synthetic construct
THLSQSSNLSLPSTQSLNIKSEPVSPPRDRTTTPSRYPQHTRHEAGRSPVDSLSSCSSSYDGSDREDHRNEFHSPIGLTR

SEQ ID NO: 7725 - protein, 80 aa, Synthetic construct
LPSTQSLNIKSEPVSPPRDRTTTPSRYPQHTRHEAGRSPVDSLSSCSSSYDGSDREDHRNEFHSPIGLTRPSPDERESPS

SEQ ID NO: 7726 - protein, 80 aa, Synthetic construct; identical to SEQ ID NO: 4132

SEQ ID NO: 7727 - protein, 80 aa, Synthetic construct
NHTCMKECHKVTKTDGCTGKNKAGPECLHCEEGCSKSRPLGCLHPCILRCHPGECPPCVQMLRIKCHCKITSLYVECRKI

SEQ ID NO: 7728 - protein, 80 aa, Synthetic construct
VTKTDGCTGKNKAGPECLHCEEGCSKSRPLGCLHPCILRCHPGECPPCVQMLRIKCHCKITSLYVECRKITTADVNEKNL

SEQ ID NO: 7729 - protein, 80 aa, Synthetic construct
NKAGPECLHCEEGCSKSRPLGCLHPCILRCHPGECPPCVQMLRIKCHCKITSLYVECRKITTADVNEKNLLSCCKNQCPK

SEQ ID NO: 7730 - protein, 80 aa, Synthetic construct
EEGCSKSRPLGCLHPCILRCHPGECPPCVQMLRIKCHCKITSLYVECRKITTADVNEKNLLSCCKNQCPKELPCGHRCKE

SEQ ID NO: 7731 - protein, 80 aa, Synthetic construct
QCSYEGRFEDDRSDSSSSLLSLKFRSEERPVKKRKVQSCHLQKKQLRLLEAMVEEQRRLSRAVEETCREVRRVLDQQHIL

SEQ ID NO: 7732 - protein, 80 aa, Synthetic construct
DRSDSSSSLLSLKFRSEERPVKKRKVQSCHLQKKQLRLLEAMVEEQRRLSRAVEETCREVRRVLDQQHILQVQSLQLQER

SEQ ID NO: 7733 - protein, 80 aa, Synthetic construct; identical to SEQ ID NO: 1937

SEQ ID NO: 7734 - protein, 80 aa, Synthetic construct
RSEERPVKKRKVQSCHLQKKQLRLLEAMVEEQRRLSRAVEETCREVRRVLDQQHILQVQSLQLQERMMSLLERIITKSSV

SEQ ID NO: 7735 - protein, 80 aa, Synthetic construct
DVSELCIPDPLGYHNQLLNRMSSDDRHLGSSCGSFIKTEPSSPSSGIDALSHHSPSGSSDASGGFGLALGTHANGLDSPP

SEQ ID NO: 7736 - protein, 80 aa, Synthetic construct
LGYHNQLLNRMSSDDRHLGSSCGSFIKTEPSSPSSGIDALSHHSPSGSSDASGGFGLALGTHANGLDSPPMFAGAGLGGT

SEQ ID NO: 7737 - protein, 80 aa, Synthetic construct
MSSDDRHLGSSCGSFIKTEPSSPSSGIDALSHHSPSGSSDASGGFGLALGTHANGLDSPPMFAGAGLGGTPCRKSYEDCA

SEQ ID NO: 7738 - protein, 80 aa, Synthetic construct
SCGSFIKTEPSSPSSGIDALSHHSPSGSSDASGGFGLALGTHANGLDSPPMFAGAGLGGTPCRKSYEDCASGIMEDSAIK

SEQ ID NO: 7739 - protein, 80 aa, Synthetic construct; identical to SEQ ID NO: 2114

SEQ ID NO: 7740 - protein, 80 aa, Synthetic construct; identical to SEQ ID NO: 1156

SEQ ID NO: 7741 - protein, 80 aa, Synthetic construct; identical to SEQ ID NO: 1157

SEQ ID NO: 7742 - protein, 80 aa, Synthetic construct
TELSKLIKSYQKSQKDISETLGNNGVGFQTQPNNEVSAKHELEEQVKKLSHDTYSLQLMAALLENECQILQQRVEILKEL

SEQ ID NO: 7743 - protein, 80 aa, Synthetic construct
QKSQKDISETLGNNGVGFQTQPNNEVSAKHELEEQVKKLSHDTYSLQLMAALLENECQILQQRVEILKELHHQKQGTLQE

SEQ ID NO: 7744 - protein, 80 aa, Synthetic construct
LGNNGVGFQTQPNNEVSAKHELEEQVKKLSHDTYSLQLMAALLENECQILQQRVEILKELHHQKQGTLQEKPIQINYKQD

SEQ ID NO: 7745 - protein, 80 aa, Synthetic construct
QPNNEVSAKHELEEQVKKLSHDTYSLQLMAALLENECQILQQRVEILKELHHQKQGTLQEKPIQINYKQDKKNQKPSEAK

SEQ ID NO: 7746 - protein, 80 aa, Synthetic construct
HDTYSLQLMAALLENECQILQQRVEILKELHHQKQGTLQEKPIQINYKQDKKNQKPSEAKKVEMYKQNKQAMKGTFWKKD

SEQ ID NO: 7747 - protein, 80 aa, Synthetic construct
HNHANVFPVPDQGGSHTQTPPQKDTQKHAALRWHLLQKQEQQQTQQPQTESCHSQMHRPIKVEPGCKPHACMHTAPPENK

SEQ ID NO: 7748 - protein, 80 aa, Synthetic construct
DQGGSHTQTPPQKDTQKHAALRWHLLQKQEQQQTQQPQTESCHSQMHRPIKVEPGCKPHACMHTAPPENKTWKKVTKQEN

SEQ ID NO: 7749 - protein, 80 aa, Synthetic construct
PQKDTQKHAALRWHLLQKQEQQQTQQPQTESCHSQMHRPIKVEPGCKPHACMHTAPPENKTWKKVTKQENPPASCDNVQQ

SEQ ID NO: 7750 - protein, 80 aa, Synthetic construct
LRWHLLQKQEQQQTQQPQTESCHSQMHRPIKVEPGCKPHACMHTAPPENKTWKKVTKQENPPASCDNVQQKSIIETMEQH

SEQ ID NO: 7751 - protein, 80 aa, Synthetic construct
QQQTQQPQTESCHSQMHRPIKVEPGCKPHACMHTAPPENKTWKKVTKQENPPASCDNVQQKSIIETMEQHLKQFHAKSLF

SEQ ID NO: 7752 - protein, 80 aa, Synthetic construct; identical to SEQ ID NO: 2257

SEQ ID NO: 7753 - protein, 80 aa, Synthetic construct
KVEPGCKPHACMHTAPPENKTWKKVTKQENPPASCDNVQQKSIIETMEQHLKQFHAKSLFDHKALTLKSQKQVKVEMSGP

SEQ ID NO: 7754 - protein, 80 aa, Synthetic construct
YQHKSMNEPKHGLALWEAKMAEKAREKEEECEKYGPDYVPQKSHGKKVKREPAEPHETSEPTYLRFIKSLAERTMSVTTD

SEQ ID NO: 7755 - protein, 80 aa, Synthetic construct
HGLALWEAKMAEKAREKEEECEKYGPDYVPQKSHGKKVKREPAEPHETSEPTYLRFIKSLAERTMSVTTDSTVTTSPYAF

SEQ ID NO: 7756 - protein, 80 aa, Synthetic construct; identical to SEQ ID NO: 2258

SEQ ID NO: 7757 - protein, 80 aa, Synthetic construct; identical to SEQ ID NO: 1158

SEQ ID NO: 7758 - protein, 80 aa, Synthetic construct; identical to SEQ ID NO: 4419

SEQ ID NO: 7759 - protein, 80 aa, Synthetic construct
FGIQDTLGRGPTLKEKSLGAEMDSVRSWVRNVGVVDANVAAQSGVALSRAHFEKQPPSNLRKSNFFHFVLALYDRQGQPV

SEQ ID NO: 7760 - protein, 80 aa, Synthetic construct
PTLKEKSLGAEMDSVRSWVRNVGVVDANVAAQSGVALSRAHFEKQPPSNLRKSNFFHFVLALYDRQGQPVEIERTAFVDF

SEQ ID NO: 7761 - protein, 80 aa, Synthetic construct
EMDSVRSWVRNVGVVDANVAAQSGVALSRAHFEKQPPSNLRKSNFFHFVLALYDRQGQPVEIERTAFVDFVENDKEQGNE

SEQ ID NO: 7762 - protein, 80 aa, Synthetic construct
AQSGVALSRAHFEKQPPSNLRKSNFFHFVLALYDRQGQPVEIERTAFVDFVENDKEQGNEKTNNGTHYKLQLLYSNGVRT

SEQ ID NO: 7763 - protein, 80 aa, Synthetic construct
HFEKQPPSNLRKSNFFHFVLALYDRQGQPVEIERTAFVDFVENDKEQGNEKTNNGTHYKLQLLYSNGVRTEQDLYVRLID

SEQ ID NO: 7764 - protein, 80 aa, Synthetic construct
RKSNFFHFVLALYDRQGQPVEIERTAFVDFVENDKEQGNEKTNNGTHYKLQLLYSNGVRTEQDLYVRLIDSVTKQPIAYE

SEQ ID NO: 7765 - protein, 80 aa, Synthetic construct
KTNNGTHYKLQLLYSNGVRTEQDLYVRLIDSVTKQPIAYEGQNKNPEMCRVLLTHEVMCSRCCEKKSCGNRNETPSDPVI

SEQ ID NO: 7766 - protein, 80 aa, Synthetic construct; identical to SEQ ID NO: 3494

SEQ ID NO: 7767 - protein, 80 aa, Synthetic construct; identical to SEQ ID NO: 3495

SEQ ID NO: 7768 - protein, 80 aa, Synthetic construct
PEGTRLSPSSDGRREKGLALLKEEPASPGGDGEAGLALAPNECDFCVTAPPPLPVAVVQAILEGKGSFSPEGPRNAQQPE

SEQ ID NO: 7769 - protein, 80 aa, Synthetic construct
DGRREKGLALLKEEPASPGGDGEAGLALAPNECDFCVTAPPPLPVAVVQAILEGKGSFSPEGPRNAQQPEPGDPREIPDR

SEQ ID NO: 7770 - protein, 80 aa, Synthetic construct
LKEEPASPGGDGEAGLALAPNECDFCVTAPPPLPVAVVQAILEGKGSFSPEGPRNAQQPEPGDPREIPDRGPLGLESGDR

SEQ ID NO: 7771 - protein, 80 aa, Synthetic construct
DQKENVGFRTPTIRRSILGTTPRTPTPFKNALAAQEKKYGPLKIVSQPLAFLEEDIREVLKEETGTDLFLKEEDEPAYKS

SEQ ID NO: 7772 - protein, 80 aa, Synthetic construct
PTIRRSILGTTPRTPTPFKNALAAQEKKYGPLKIVSQPLAFLEEDIREVLKEETGTDLFLKEEDEPAYKSCKQENTASGK

SEQ ID NO: 7773 - protein, 80 aa, Synthetic construct
TPRTPTPFKNALAAQEKKYGPLKIVSQPLAFLEEDIREVLKEETGTDLFLKEEDEPAYKSCKQENTASGKKVRKSLVLDN

SEQ ID NO: 7774 - protein, 80 aa, Synthetic construct
ALAAQEKKYGPLKIVSQPLAFLEEDIREVLKEETGTDLFLKEEDEPAYKSCKQENTASGKKVRKSLVLDNWEKEESGTQL

SEQ ID NO: 7775 - protein, 80 aa, Synthetic construct; identical to SEQ ID NO: 3963

SEQ ID NO: 7776 - protein, 80 aa, Synthetic construct
AEQPLGITQMPKAEVNLGGLSSLVVNTPITSVSLSHSSSESSKMSESKDQENNCERPKESNVLHPNGECPVKSEPTEPGD

SEQ ID NO: 7777 - protein, 80 aa, Synthetic construct
PKAEVNLGGLSSLVVNTPITSVSLSHSSSESSKMSESKDQENNCERPKESNVLHPNGECPVKSEPTEPGDEDEEDAYSNE

SEQ ID NO: 7778 - protein, 80 aa, Synthetic construct
SVSLSHSSSESSKMSESKDQENNCERPKESNVLHPNGECPVKSEPTEPGDEDEEDAYSNELDDEEVLGELTDSIGNKDFP

SEQ ID NO: 7779 - protein, 80 aa, Synthetic construct
SSKMSESKDQENNCERPKESNVLHPNGECPVKSEPTEPGDEDEEDAYSNELDDEEVLGELTDSIGNKDFPLLNQSISPLS

SEQ ID NO: 7780 - protein, 80 aa, Synthetic construct
ENNCERPKESNVLHPNGECPVKSEPTEPGDEDEEDAYSNELDDEEVLGELTDSIGNKDFPLLNQSISPLSSSVLKFIEKG

SEQ ID NO: 7781 - protein, 80 aa, Synthetic construct
NVLHPNGECPVKSEPTEPGDEDEEDAYSNELDDEEVLGELTDSIGNKDFPLLNQSISPLSSSVLKFIEKGTSSSSATVSD

SEQ ID NO: 7782 - protein, 80 aa, Synthetic construct
CDYETNVARNLRIHMTSEKHMHNMMLLQQNMKQIQHNLHLGLAPAEAELYQYYLAQNIGLTGMKLENPADPQLMINPFQL

SEQ ID NO: 7783 - protein, 80 aa, Synthetic construct
LRIHMTSEKHMHNMMLLQQNMKQIQHNLHLGLAPAEAELYQYYLAQNIGLTGMKLENPADPQLMINPFQLDPATAAALAP

SEQ ID NO: 7784 - protein, 80 aa, Synthetic construct
MHNMMLLQQNMKQIQHNLHLGLAPAEAELYQYYLAQNIGLTGMKLENPADPQLMINPFQLDPATAAALAPGLVNNELPPE

SEQ ID NO: 7785 - protein, 80 aa, Synthetic construct
MKQIQHNLHLGLAPAEAELYQYYLAQNIGLTGMKLENPADPQLMINPFQLDPATAAALAPGLVNNELPPEIRLASGQLMG

SEQ ID NO: 7786 - protein, 80 aa, Synthetic construct; identical to SEQ ID NO: 5607

SEQ ID NO: 7787 - protein, 80 aa, Synthetic construct; identical to SEQ ID NO: 1159

SEQ ID NO: 7788 - protein, 80 aa, Synthetic construct; identical to SEQ ID NO: 1750

SEQ ID NO: 7789 - protein, 80 aa, Synthetic construct
AQIQMQLQHELQQQAAFFQPQFLNPAFLPHFPMTPEALLQFQQPQFLFPFYIPGTEFSLGPDLGLPGSATFGMPGMTGMA

SEQ ID NO: 7790 - protein, 80 aa, Synthetic construct
LQQQAAFFQPQFLNPAFLPHFPMTPEALLQFQQPQFLFPFYIPGTEFSLGPDLGLPGSATFGMPGMTGMAGSLLEDLKQQ

SEQ ID NO: 7791 - protein, 80 aa, Synthetic construct
QFLNPAFLPHFPMTPEALLQFQQPQFLFPFYIPGTEFSLGPDLGLPGSATFGMPGMTGMAGSLLEDLKQQIQTQHHVGQT

SEQ ID NO: 7792 - protein, 80 aa, Synthetic construct
FPMTPEALLQFQQPQFLFPFYIPGTEFSLGPDLGLPGSATFGMPGMTGMAGSLLEDLKQQIQTQHHVGQTQLQILQQQAQ

SEQ ID NO: 7793 - protein, 80 aa, Synthetic construct
SSPLQISMTSLQNSLPPQLLQYQCDQCTVAFPTLELWQEHQHMHFLAAQNQFLHSPFLERPMDMPYMIFDPNNPLMTGQL

SEQ ID NO: 7794 - protein, 80 aa, Synthetic construct; identical to SEQ ID NO: 1751

SEQ ID NO: 7795 - protein, 80 aa, Synthetic construct
QYQCDQCTVAFPTLELWQEHQHMHFLAAQNQFLHSPFLERPMDMPYMIFDPNNPLMTGQLLGSSLTQMPPQASSSHTTAP

SEQ ID NO: 7796 - protein, 80 aa, Synthetic construct
FPTLELWQEHQHMHFLAAQNQFLHSPFLERPMDMPYMIFDPNNPLMTGQLLGSSLTQMPPQASSSHTTAPTTVAASLKRK

SEQ ID NO: 7797 - protein, 80 aa, Synthetic construct
PPSSSLSGQQTEQQNKESEKKQTKPNKVKKIKEEELEATKPEKHPKKEEKISSALSVLGKVVGETHVDPIQLQALQNAIA

SEQ ID NO: 7798 - protein, 80 aa, Synthetic construct
TEQQNKESEKKQTKPNKVKKIKEEELEATKPEKHPKKEEKISSALSVLGKVVGETHVDPIQLQALQNAIAGDPASFIGGQ

SEQ ID NO: 7799 - protein, 80 aa, Synthetic construct
KQTKPNKVKKIKEEELEATKPEKHPKKEEKISSALSVLGKVVGETHVDPIQLQALQNAIAGDPASFIGGQFLPYFIPGFA

SEQ ID NO: 7800 - protein, 80 aa, Synthetic construct
IKEEELEATKPEKHPKKEEKISSALSVLGKVVGETHVDPIQLQALQNAIAGDPASFIGGQFLPYFIPGFASYFTPQLPGT

SEQ ID NO: 7801 - protein, 80 aa, Synthetic construct
VVGETHVDPIQLQALQNAIAGDPASFIGGQFLPYFIPGFASYFTPQLPGTVQGGYFPPVCGMESLFPYGPTMPQTLAGLS

SEQ ID NO: 7802 - protein, 80 aa, Synthetic construct
QLQALQNAIAGDPASFIGGQFLPYFIPGFASYFTPQLPGTVQGGYFPPVCGMESLFPYGPTMPQTLAGLSPGALLQQYQQ

SEQ ID NO: 7803 - protein, 80 aa, Synthetic construct
GDPASFIGGQFLPYFIPGFASYFTPQLPGTVQGGYFPPVCGMESLFPYGPTMPQTLAGLSPGALLQQYQQYQQNLQESLQ

SEQ ID NO: 7804 - protein, 80 aa, Synthetic construct
FLPYFIPGFASYFTPQLPGTVQGGYFPPVCGMESLFPYGPTMPQTLAGLSPGALLQQYQQYQQNLQESLQKQQKQQQEQQ

SEQ ID NO: 7805 - protein, 80 aa, Synthetic construct; identical to SEQ ID NO: 5612

SEQ ID NO: 7806 - protein, 80 aa, Synthetic construct; identical to SEQ ID NO: 5613

SEQ ID NO: 7807 - protein, 80 aa, Synthetic construct; identical to SEQ ID NO: 5116

SEQ ID NO: 7808 - protein, 80 aa, Synthetic construct
DALICWSPSGNSFHVFDQGQFAKEVLPKYFKHNNMASFVRQLNMYGFRKVVHIEQGGLVKPERDDTEFQHPCFLRGQEQL

SEQ ID NO: 7809 - protein, 80 aa, Synthetic construct
FAKEVLPKYFKHNNMASFVRQLNMYGFRKVVHIEQGGLVKPERDDTEFQHPCFLRGQEQLLENIKRKVTSVSTLKSEDIK

SEQ ID NO: 7810 - protein, 80 aa, Synthetic construct
KHNNMASFVRQLNMYGFRKVVHIEQGGLVKPERDDTEFQHPCFLRGQEQLLENIKRKVTSVSTLKSEDIKIRQDSVTKLL

SEQ ID NO: 7811 - protein, 80 aa, Synthetic construct
QLNMYGFRKVVHIEQGGLVKPERDDTEFQHPCFLRGQEQLLENIKRKVTSVSTLKSEDIKIRQDSVTKLLTDVQLMKGKQ

SEQ ID NO: 7812 - protein, 80 aa, Synthetic construct; identical to SEQ ID NO: 3486

SEQ ID NO: 7813 - protein, 80 aa, Synthetic construct
PCFLRGQEQLLENIKRKVTSVSTLKSEDIKIRQDSVTKLLTDVQLMKGKQECMDSKLLAMKHENEALWREVASLRQKHAQ

SEQ ID NO: 7814 - protein, 80 aa, Synthetic construct; identical to SEQ ID NO: 1160

SEQ ID NO: 7815 - protein, 80 aa, Synthetic construct
VSTLKSEDIKIRQDSVTKLLTDVQLMKGKQECMDSKLLAMKHENEALWREVASLRQKHAQQQKVVNKLIQFLISLVQSNR

SEQ ID NO: 7816 - protein, 80 aa, Synthetic construct; identical to SEQ ID NO: 1894

SEQ ID NO: 7817 - protein, 80 aa, Synthetic construct
TDVQLMKGKQECMDSKLLAMKHENEALWREVASLRQKHAQQQKVVNKLIQFLISLVQSNRILGVKRKIPLMLNDSGSAHS

SEQ ID NO: 7818 - protein, 80 aa, Synthetic construct
ECMDSKLLAMKHENEALWREVASLRQKHAQQQKVVNKLIQFLISLVQSNRILGVKRKIPLMLNDSGSAHSMPKYSRQFSL

SEQ ID NO: 7819 - protein, 80 aa, Synthetic construct
KHENEALWREVASLRQKHAQQQKVVNKLIQFLISLVQSNRILGVKRKIPLMLNDSGSAHSMPKYSRQFSLEHVHGSGPYS

SEQ ID NO: 7820 - protein, 80 aa, Synthetic construct
MPKYSRQFSLEHVHGSGPYSAPSPAYSSSSLYAPDAVASSGPIISDITELAPASPMASPGGSIDERPLSSSPLVRVKEEP

SEQ ID NO: 7821 - protein, 80 aa, Synthetic construct
EHVHGSGPYSAPSPAYSSSSLYAPDAVASSGPIISDITELAPASPMASPGGSIDERPLSSSPLVRVKEEPPSPPQSPRVE

SEQ ID NO: 7822 - protein, 80 aa, Synthetic construct
LYAPDAVASSGPIISDITELAPASPMASPGGSIDERPLSSSPLVRVKEEPPSPPQSPRVEEASPGRPSSVDTLLSPTALI

SEQ ID NO: 7823 - protein, 80 aa, Synthetic construct
GPIISDITELAPASPMASPGGSIDERPLSSSPLVRVKEEPPSPPQSPRVEEASPGRPSSVDTLLSPTALIDSILRESEPA

SEQ ID NO: 7824 - protein, 80 aa, Synthetic construct
APASPMASPGGSIDERPLSSSPLVRVKEEPPSPPQSPRVEEASPGRPSSVDTLLSPTALIDSILRESEPAPASVTALTDA

SEQ ID NO: 7825 - protein, 80 aa, Synthetic construct
GSIDERPLSSSPLVRVKEEPPSPPQSPRVEEASPGRPSSVDTLLSPTALIDSILRESEPAPASVTALTDARGHTDTEGRP

SEQ ID NO: 7826 - protein, 80 aa, Synthetic construct
SPLVRVKEEPPSPPQSPRVEEASPGRPSSVDTLLSPTALIDSILRESEPAPASVTALTDARGHTDTEGRPPSPPPTSTPE

SEQ ID NO: 7827 - protein, 80 aa, Synthetic construct; identical to SEQ ID NO: 1843

SEQ ID NO: 7828 - protein, 80 aa, Synthetic construct; identical to SEQ ID NO: 1161

SEQ ID NO: 7829 - protein, 80 aa, Synthetic construct; identical to SEQ ID NO: 1862

SEQ ID NO: 7830 - protein, 80 aa, Synthetic construct
PKNLNKSKTPAAPSGSESLPPASGASSNSSNATTSSSEEMRPIKTEPGLSSHYGHSSSVSQTFSVSAMSGHGPSIHPVLS

SEQ ID NO: 7831 - protein, 80 aa, Synthetic construct
PASGASSNSSNATTSSSEEMRPIKTEPGLSSHYGHSSSVSQTFSVSAMSGHGPSIHPVLSALKLSPQGYASPVSQSPQTS

SEQ ID NO: 7832 - protein, 80 aa, Synthetic construct
NATTSSSEEMRPIKTEPGLSSHYGHSSSVSQTFSVSAMSGHGPSIHPVLSALKLSPQGYASPVSQSPQTSSKQDSWNSLV

SEQ ID NO: 7833 - protein, 80 aa, Synthetic construct
RPIKTEPGLSSHYGHSSSVSQTFSVSAMSGHGPSIHPVLSALKLSPQGYASPVSQSPQTSSKQDSWNSLVLADSHGDIIT

SEQ ID NO: 7834 - protein, 80 aa, Synthetic construct
PIKTEPGLSSHYGHSSSVSQTFSVSAMSGHGPSIHPVLSALKLSPQGYASPVSQSPQTSSKQDSWNSLVLADSHGDIITA

SEQ ID NO: 7835 - protein, 80 aa, Synthetic construct; identical to SEQ ID NO: 2881

SEQ ID NO: 7836 - protein, 80 aa, Synthetic construct; identical to SEQ ID NO: 1817

SEQ ID NO: 7837 - protein, 80 aa, Synthetic construct; identical to SEQ ID NO: 1162

SEQ ID NO: 7838 - protein, 80 aa, Synthetic construct
QEPPVKKGRRSRRCGQCPGCQVPEDCGVCTNCLDKPKFGGRNIKKQCCKMRKCQNLQWMPSKAYLQKQAKAVKKKEKKSK

SEQ ID NO: 7839 - protein, 80 aa, Synthetic construct
ENVWEMGGLGILTSVPITPRVVCFLCASSGHVEFVYCQVCCEPFHKFCLEENERPLEDQLENWCCRRCKFCHVCGRQHQA

SEQ ID NO: 7840 - protein, 80 aa, Synthetic construct
RNSYHPECLGPNYPTKPTKKKKVWICTKCVRCKSCGSTTPGKGWDAQWSHDFSLCHDCAKLFAKGNFCPLCDKCYDDDDY

SEQ ID NO: 7841 - protein, 80 aa, Synthetic construct
PNYPTKPTKKKKVWICTKCVRCKSCGSTTPGKGWDAQWSHDFSLCHDCAKLFAKGNFCPLCDKCYDDDDYESKMMQCGKC

SEQ ID NO: 7842 - protein, 80 aa, Synthetic construct; identical to SEQ ID NO: 1163

SEQ ID NO: 7843 - protein, 80 aa, Synthetic construct
RCKSCGSTTPGKGWDAQWSHDFSLCHDCAKLFAKGNFCPLCDKCYDDDDYESKMMQCGKCDRWVHSKCENLSDEMYEILS

SEQ ID NO: 7844 - protein, 80 aa, Synthetic construct; identical to SEQ ID NO: 1164

SEQ ID NO: 7845 - protein, 80 aa, Synthetic construct; identical to SEQ ID NO: 1818

SEQ ID NO: 7846 - protein, 80 aa, Synthetic construct; identical to SEQ ID NO: 2232

SEQ ID NO: 7847 - protein, 80 aa, Synthetic construct
RRGKNKVAAQNCRKRKLETIVQLERELERLTNERERLLRARGEADRTLEVMRQQLTELYRDIFQHLRDESGNSYSPEEYA

SEQ ID NO: 7848 - protein, 80 aa, Synthetic construct; identical to SEQ ID NO: 4104

SEQ ID NO: 7849 - protein, 80 aa, Synthetic construct
KDCAQQLFELTDDKENERLAYVTYQDIHSIQAFHEQIVIAVKAPAETRLDVPAPREDSITVHIRSTNGPIDVYLCEVEQG

SEQ ID NO: 7850 - protein, 80 aa, Synthetic construct; identical to SEQ ID NO: 2337

SEQ ID NO: 7851 - protein, 80 aa, Synthetic construct
YVTYQDIHSIQAFHEQIVIAVKAPAETRLDVPAPREDSITVHIRSTNGPIDVYLCEVEQGQTSNKRSEGVGTSSSESTHP

SEQ ID NO: 7852 - protein, 80 aa, Synthetic construct
QAFHEQIVIAVKAPAETRLDVPAPREDSITVHIRSTNGPIDVYLCEVEQGQTSNKRSEGVGTSSSESTHPEGPEEEENPQ

SEQ ID NO: 7853 - protein, 80 aa, Synthetic construct
VNLESMHTDIKMSGDVADSTDARSTLSQVEPGNDRNGLDFNRQIKTEDLSDSLQQTLSHRPCHLSQGPAMMSGNQMSGLN

SEQ ID NO: 7854 - protein, 80 aa, Synthetic construct
KMSGDVADSTDARSTLSQVEPGNDRNGLDFNRQIKTEDLSDSLQQTLSHRPCHLSQGPAMMSGNQMSGLNASPCQDMASL

SEQ ID NO: 7855 - protein, 80 aa, Synthetic construct
DARSTLSQVEPGNDRNGLDFNRQIKTEDLSDSLQQTLSHRPCHLSQGPAMMSGNQMSGLNASPCQDMASLHPLQQLVLVP

SEQ ID NO: 7856 - protein, 80 aa, Synthetic construct
PGNDRNGLDFNRQIKTEDLSDSLQQTLSHRPCHLSQGPAMMSGNQMSGLNASPCQDMASLHPLQQLVLVPGHLQSVSQFL

SEQ ID NO: 7857 - protein, 80 aa, Synthetic construct
NRQIKTEDLSDSLQQTLSHRPCHLSQGPAMMSGNQMSGLNASPCQDMASLHPLQQLVLVPGHLQSVSQFLLSQTQPGQQG

SEQ ID NO: 7858 - protein, 80 aa, Synthetic construct
GSKMNLIEHSHLPTTDEFSFSENLFGVLTEQVAGPLGQNLEVEPYSQYSNVQFPQVQPQISSSSYYSNLGFYPQQPEEWY

SEQ ID NO: 7859 - protein, 80 aa, Synthetic construct; identical to SEQ ID NO: 217

SEQ ID NO: 7860 - protein, 80 aa, Synthetic construct; identical to SEQ ID NO: 4201

SEQ ID NO: 7861 - protein, 80 aa, Synthetic construct; identical to SEQ ID NO: 2949

SEQ ID NO: 7862 - protein, 80 aa, Synthetic construct; identical to SEQ ID NO: 646

SEQ ID NO: 7863 - protein, 80 aa, Synthetic construct
AFEDAFEVLRQHSTGDLQYSPDYRNYLALINHRPHVKGNSSCYGVLPTEEPVYNWRTVINSAADFYFEGNIHQSLQNITE

SEQ ID NO: 7864 - protein, 80 aa, Synthetic construct
QHSTGDLQYSPDYRNYLALINHRPHVKGNSSCYGVLPTEEPVYNWRTVINSAADFYFEGNIHQSLQNITENQLVQPTLLQ

SEQ ID NO: 7865 - protein, 80 aa, Synthetic construct
PDYRNYLALINHRPHVKGNSSCYGVLPTEEPVYNWRTVINSAADFYFEGNIHQSLQNITENQLVQPTLLQQKGGKGRKKL

SEQ ID NO: 7866 - protein, 80 aa, Synthetic construct
SCYGVLPTEEPVYNWRTVINSAADFYFEGNIHQSLQNITENQLVQPTLLQQKGGKGRKKLRLFEYLHESLYNPEMASCIQ

SEQ ID NO: 7867 - protein, 80 aa, Synthetic construct
AAPNVFHNPVEKNKQMVRILQESYLDVGGSEANMKVWLLKLLSQNPFILLNSPTAIKETLEFLQEQGFTSFEILQLLSKL

SEQ ID NO: 7868 - protein, 80 aa, Synthetic construct; identical to SEQ ID NO: 1771

SEQ ID NO: 7869 - protein, 80 aa, Synthetic construct
LTPLAVQAAPQVLTQENLATVLTGVMVPAGAVTQPLLIPISIAGQVAGQQGLAVWTIPTATVAALPGLTAASPTGGVFKP

SEQ ID NO: 7870 - protein, 80 aa, Synthetic construct
QVLTQENLATVLTGVMVPAGAVTQPLLIPISIAGQVAGQQGLAVWTIPTATVAALPGLTAASPTGGVFKPPLAGLQAAAV

SEQ ID NO: 7871 - protein, 80 aa, Synthetic construct
PLSAKQGNGCGPRPWVVDGDHQQGTSKDLSGAEKHQESEKPSFLPSGAPASLEILRKELTRAVSQAVDSVLQKVLLDPPG

SEQ ID NO: 7872 - protein, 80 aa, Synthetic construct; identical to SEQ ID NO: 1800

SEQ ID NO: 7873 - protein, 80 aa, Synthetic construct
HQQGTSKDLSGAEKHQESEKPSFLPSGAPASLEILRKELTRAVSQAVDSVLQKVLLDPPGHLTQLGRSFQGQVAEGRSEP

SEQ ID NO: 7874 - protein, 80 aa, Synthetic construct
GAEKHQESEKPSFLPSGAPASLEILRKELTRAVSQAVDSVLQKVLLDPPGHLTQLGRSFQGQVAEGRSEPSPPVGGACKD

SEQ ID NO: 7875 - protein, 80 aa, Synthetic construct
PSFLPSGAPASLEILRKELTRAVSQAVDSVLQKVLLDPPGHLTQLGRSFQGQVAEGRSEPSPPVGGACKDPLALAALPRR

SEQ ID NO: 7876 - protein, 80 aa, Synthetic construct
SLEILRKELTRAVSQAVDSVLQKVLLDPPGHLTQLGRSFQGQVAEGRSEPSPPVGGACKDPLALAALPRRVQLQAGVPVG

SEQ ID NO: 7877 - protein, 80 aa, Synthetic construct; identical to SEQ ID NO: 4639

SEQ ID NO: 7878 - protein, 80 aa, Synthetic construct
VPASHMSSLNVVKMTTISLTPSNSNTPLKHSASVSSATGTTEESRSVPQIKNGSVVSLQSPGSRSSSAGGTSAVEVKVEP

SEQ ID NO: 7879 - protein, 80 aa, Synthetic construct
VVKMTTISLTPSNSNTPLKHSASVSSATGTTEESRSVPQIKNGSVVSLQSPGSRSSSAGGTSAVEVKVEPETSSDEHPVQ

SEQ ID NO: 7880 - protein, 80 aa, Synthetic construct
PSNSNTPLKHSASVSSATGTTEESRSVPQIKNGSVVSLQSPGSRSSSAGGTSAVEVKVEPETSSDEHPVQCQENSDEAKA

SEQ ID NO: 7881 - protein, 80 aa, Synthetic construct
SASVSSATGTTEESRSVPQIKNGSVVSLQSPGSRSSSAGGTSAVEVKVEPETSSDEHPVQCQENSDEAKAPQTPSALLGQ

SEQ ID NO: 7882 - protein, 80 aa, Synthetic construct
TEESRSVPQIKNGSVVSLQSPGSRSSSAGGTSAVEVKVEPETSSDEHPVQCQENSDEAKAPQTPSALLGQKSNTDGALQK

SEQ ID NO: 7883 - protein, 80 aa, Synthetic construct
KNGSVVSLQSPGSRSSSAGGTSAVEVKVEPETSSDEHPVQCQENSDEAKAPQTPSALLGQKSNTDGALQKPSNEGVIEIK

SEQ ID NO: 7884 - protein, 80 aa, Synthetic construct
PGSRSSSAGGTSAVEVKVEPETSSDEHPVQCQENSDEAKAPQTPSALLGQKSNTDGALQKPSNEGVIEIKATKVCDQRTK

SEQ ID NO: 7885 - protein, 80 aa, Synthetic construct
TSAVEVKVEPETSSDEHPVQCQENSDEAKAPQTPSALLGQKSNTDGALQKPSNEGVIEIKATKVCDQRTKCKSRCNEMLP

SEQ ID NO: 7886 - protein, 80 aa, Synthetic construct; identical to SEQ ID NO: 4641

SEQ ID NO: 7887 - protein, 80 aa, Synthetic construct; identical to SEQ ID NO: 2774

SEQ ID NO: 7888 - protein, 80 aa, Synthetic construct
IQPGDLDPLSRGHETSGKGLEKTSLNIKRDFLGFMDTDSALSEVPQLKQEISECLIASSFEDDSRVASPLDQNGSFNVVI

SEQ ID NO: 7889 - protein, 80 aa, Synthetic construct
RGHETSGKGLEKTSLNIKRDFLGFMDTDSALSEVPQLKQEISECLIASSFEDDSRVASPLDQNGSFNVVIKEEPLDDYDY

SEQ ID NO: 7890 - protein, 80 aa, Synthetic construct
EKTSLNIKRDFLGFMDTDSALSEVPQLKQEISECLIASSFEDDSRVASPLDQNGSFNVVIKEEPLDDYDYELGECPEGVT

SEQ ID NO: 7891 - protein, 80 aa, Synthetic construct
FLGFMDTDSALSEVPQLKQEISECLIASSFEDDSRVASPLDQNGSFNVVIKEEPLDDYDYELGECPEGVTVKQEETDEET

SEQ ID NO: 7892 - protein, 80 aa, Synthetic construct
LSEVPQLKQEISECLIASSFEDDSRVASPLDQNGSFNVVIKEEPLDDYDYELGECPEGVTVKQEETDEETDVYSNSDDDP

SEQ ID NO: 7893 - protein, 80 aa, Synthetic construct
ISECLIASSFEDDSRVASPLDQNGSFNVVIKEEPLDDYDYELGECPEGVTVKQEETDEETDVYSNSDDDPILEKQLKRHN

SEQ ID NO: 7894 - protein, 80 aa, Synthetic construct
EDDSRVASPLDQNGSFNVVIKEEPLDDYDYELGECPEGVTVKQEETDEETDVYSNSDDDPILEKQLKRHNKVDNPEADHL

SEQ ID NO: 7895 - protein, 80 aa, Synthetic construct
DQNGSFNVVIKEEPLDDYDYELGECPEGVTVKQEETDEETDVYSNSDDDPILEKQLKRHNKVDNPEADHLSSKWLPSSPS

SEQ ID NO: 7896 - protein, 80 aa, Synthetic construct
KEEPLDDYDYELGECPEGVTVKQEETDEETDVYSNSDDDPILEKQLKRHNKVDNPEADHLSSKWLPSSPSGVAKAKMFKL

SEQ ID NO: 7897 - protein, 80 aa, Synthetic construct
ELGECPEGVTVKQEETDEETDVYSNSDDDPILEKQLKRHNKVDNPEADHLSSKWLPSSPSGVAKAKMFKLDTGKMPVVYL

SEQ ID NO: 7898 - protein, 80 aa, Synthetic construct
VKQEETDEETDVYSNSDDDPILEKQLKRHNKVDNPEADHLSSKWLPSSPSGVAKAKMFKLDTGKMPVVYLEPCAVTRSTV

SEQ ID NO: 7899 - protein, 80 aa, Synthetic construct
VIHPGLQEVGLKLNSVDPTMSIDLKYLGVQLPLAPATSFPFWNLTGTNPASPDAGFPFVSRTGKTNDFTKIKGWRGKFHS

SEQ ID NO: 7900 - protein, 80 aa, Synthetic construct; identical to SEQ ID NO: 2134

SEQ ID NO: 7901 - protein, 80 aa, Synthetic construct
SIDLKYLGVQLPLAPATSFPFWNLTGTNPASPDAGFPFVSRTGKTNDFTKIKGWRGKFHSASASRNEGGNSESSLKNRSA

SEQ ID NO: 7902 - protein, 80 aa, Synthetic construct
LPLAPATSFPFWNLTGTNPASPDAGFPFVSRTGKTNDFTKIKGWRGKFHSASASRNEGGNSESSLKNRSAFCSDKLDEYL

SEQ ID NO: 7903 - protein, 80 aa, Synthetic construct; identical to SEQ ID NO: 2135

SEQ ID NO: 7904 - protein, 80 aa, Synthetic construct
SPDAGFPFVSRTGKTNDFTKIKGWRGKFHSASASRNEGGNSESSLKNRSAFCSDKLDEYLENEGKLMETSMGFSSNAPTS

SEQ ID NO: 7905 - protein, 80 aa, Synthetic construct
KAAHRDPVFYDTLGEEAREEEEGIREEEEQLKEKKKRKKLEYTICETEPEQPVRHYPLWVKVEGEVDPEPVYIPTPSVIE

SEQ ID NO: 7906 - protein, 80 aa, Synthetic construct
DTLGEEAREEEEGIREEEEQLKEKKKRKKLEYTICETEPEQPVRHYPLWVKVEGEVDPEPVYIPTPSVIEPMKPLLLPQP

SEQ ID NO: 7907 - protein, 80 aa, Synthetic construct
EEGIREEEEQLKEKKKRKKLEYTICETEPEQPVRHYPLWVKVEGEVDPEPVYIPTPSVIEPMKPLLLPQPEVLSPTVKGK

SEQ ID NO: 7908 - protein, 80 aa, Synthetic construct
LKEKKKRKKLEYTICETEPEQPVRHYPLWVKVEGEVDPEPVYIPTPSVIEPMKPLLLPQPEVLSPTVKGKLLTGIKSPRS

SEQ ID NO: 7909 - protein, 80 aa, Synthetic construct
EYTICETEPEQPVRHYPLWVKVEGEVDPEPVYIPTPSVIEPMKPLLLPQPEVLSPTVKGKLLTGIKSPRSYTPKPNPVIR

SEQ ID NO: 7910 - protein, 80 aa, Synthetic construct
QPVRHYPLWVKVEGEVDPEPVYIPTPSVIEPMKPLLLPQPEVLSPTVKGKLLTGIKSPRSYTPKPNPVIREEDKDPVYLY

SEQ ID NO: 7911 - protein, 80 aa, Synthetic construct; identical to SEQ ID NO: 3875

SEQ ID NO: 7912 - protein, 80 aa, Synthetic construct
VKVEQQKGFDNPEENSSEFPVTFKEESKFELSGSKVMEQQSNLQPEAKEKECGDSLEKDRERWRKHLKGPLTRKCVGASQ

SEQ ID NO: 7913 - protein, 80 aa, Synthetic construct
NPEENSSEFPVTFKEESKFELSGSKVMEQQSNLQPEAKEKECGDSLEKDRERWRKHLKGPLTRKCVGASQECKKEADEQL

SEQ ID NO: 7914 - protein, 80 aa, Synthetic construct
VTFKEESKFELSGSKVMEQQSNLQPEAKEKECGDSLEKDRERWRKHLKGPLTRKCVGASQECKKEADEQLIKETKTCQEN

SEQ ID NO: 7915 - protein, 80 aa, Synthetic construct
ERWRKHLKGPLTRKCVGASQECKKEADEQLIKETKTCQENSDVFQQEQGISDLLGKSGITEDARVLKTECDSWSRISNPS

SEQ ID NO: 7916 - protein, 80 aa, Synthetic construct
LTRKCVGASQECKKEADEQLIKETKTCQENSDVFQQEQGISDLLGKSGITEDARVLKTECDSWSRISNPSAFSIVPRRAA

SEQ ID NO: 7917 - protein, 80 aa, Synthetic construct
ECKKEADEQLIKETKTCQENSDVFQQEQGISDLLGKSGITEDARVLKTECDSWSRISNPSAFSIVPRRAAKSSRGNGHFQ

SEQ ID NO: 7918 - protein, 80 aa, Synthetic construct; identical to SEQ ID NO: 1165

SEQ ID NO: 7919 - protein, 80 aa, Synthetic construct; identical to SEQ ID NO: 1166

SEQ ID NO: 7920 - protein, 80 aa, Synthetic construct; identical to SEQ ID NO: 1167

SEQ ID NO: 7921 - protein, 80 aa, Synthetic construct; identical to SEQ ID NO: 1168

SEQ ID NO: 7922 - protein, 80 aa, Synthetic construct; identical to SEQ ID NO: 1169

SEQ ID NO: 7923 - protein, 80 aa, Synthetic construct; identical to SEQ ID NO: 1170

SEQ ID NO: 7924 - protein, 80 aa, Synthetic construct; identical to SEQ ID NO: 2136

SEQ ID NO: 7925 - protein, 80 aa, Synthetic construct
AQVAMSTLPVEDEESSESRMVVTFLMSALESMCKELAKSKAEVACIAVYETDVFVVGTERGRAFVNTRKDFQKDFVKYCV

SEQ ID NO: 7926 - protein, 80 aa, Synthetic construct
EDEESSESRMVVTFLMSALESMCKELAKSKAEVACIAVYETDVFVVGTERGRAFVNTRKDFQKDFVKYCVEEEEKAAEMH

SEQ ID NO: 7927 - protein, 80 aa, Synthetic construct
VVTFLMSALESMCKELAKSKAEVACIAVYETDVFVVGTERGRAFVNTRKDFQKDFVKYCVEEEEKAAEMHKMKSTTQANR

SEQ ID NO: 7928 - protein, 80 aa, Synthetic construct
SMCKELAKSKAEVACIAVYETDVFVVGTERGRAFVNTRKDFQKDFVKYCVEEEEKAAEMHKMKSTTQANRMSVDAVEIET

SEQ ID NO: 7929 - protein, 80 aa, Synthetic construct
GLPEGVAFKHPENYDLATLKWILENKAGISFIIKRPFLEPKKHVGGRVMVTDADRSILSPGGSCGPIKVKTEPTEDSGIS

SEQ ID NO: 7930 - protein, 80 aa, Synthetic construct
PENYDLATLKWILENKAGISFIIKRPFLEPKKHVGGRVMVTDADRSILSPGGSCGPIKVKTEPTEDSGISLEMAAVTVKE

SEQ ID NO: 7931 - protein, 80 aa, Synthetic construct
WILENKAGISFIIKRPFLEPKKHVGGRVMVTDADRSILSPGGSCGPIKVKTEPTEDSGISLEMAAVTVKEESEDPDYYQY

SEQ ID NO: 7932 - protein, 80 aa, Synthetic construct; identical to SEQ ID NO: 2267

SEQ ID NO: 7933 - protein, 80 aa, Synthetic construct
KKHVGGRVMVTDADRSILSPGGSCGPIKVKTEPTEDSGISLEMAAVTVKEESEDPDYYQYNIQAGPSETDDVDEKQPLSK

SEQ ID NO: 7934 - protein, 80 aa, Synthetic construct
TDADRSILSPGGSCGPIKVKTEPTEDSGISLEMAAVTVKEESEDPDYYQYNIQAGPSETDDVDEKQPLSKPLQGSHHSSE

SEQ ID NO: 7935 - protein, 80 aa, Synthetic construct
GGSCGPIKVKTEPTEDSGISLEMAAVTVKEESEDPDYYQYNIQAGPSETDDVDEKQPLSKPLQGSHHSSEGNEGTEMEVP

SEQ ID NO: 7936 - protein, 80 aa, Synthetic construct
TEPTEDSGISLEMAAVTVKEESEDPDYYQYNIQAGPSETDDVDEKQPLSKPLQGSHHSSEGNEGTEMEVPAEDSTQHVPS

SEQ ID NO: 7937 - protein, 80 aa, Synthetic construct
LEMAAVTVKEESEDPDYYQYNIQAGPSETDDVDEKQPLSKPLQGSHHSSEGNEGTEMEVPAEDSTQHVPSETSEDPEVEV

SEQ ID NO: 7938 - protein, 80 aa, Synthetic construct
GAGRPAAVAAREGSTEFDWGDETSRDSEASSVAARGDSRPRLVAPADLSRFEFDECEAAVMLVSLGSSRSGTPSFSPVST

SEQ ID NO: 7939 - protein, 80 aa, Synthetic construct; identical to SEQ ID NO: 1171

SEQ ID NO: 7940 - protein, 80 aa, Synthetic construct; identical to SEQ ID NO: 1172

SEQ ID NO: 7941 - protein, 80 aa, Synthetic construct; identical to SEQ ID NO: 2327

SEQ ID NO: 7942 - protein, 80 aa, Synthetic construct
SDSLDSGVDSVSHTPTPSTPAGFRAVSPAVPFSRSRQPSPLLLLPPPAGLTSDPGPSVRRVPAVQRDSPVIVRNPDVPLP

SEQ ID NO: 7943 - protein, 80 aa, Synthetic construct; identical to SEQ ID NO: 1173

SEQ ID NO: 7944 - protein, 80 aa, Synthetic construct; identical to SEQ ID NO: 1174

SEQ ID NO: 7945 - protein, 80 aa, Synthetic construct
PFSRSRQPSPLLLLPPPAGLTSDPGPSVRRVPAVQRDSPVIVRNPDVPLPSKFPGEVGTAGEVRAGGPGRGCRETPVPPG

SEQ ID NO: 7946 - protein, 80 aa, Synthetic construct; identical to SEQ ID NO: 2328

SEQ ID NO: 7947 - protein, 80 aa, Synthetic construct; identical to SEQ ID NO: 1175

SEQ ID NO: 7948 - protein, 80 aa, Synthetic construct; identical to SEQ ID NO: 4121

SEQ ID NO: 7949 - protein, 80 aa, Synthetic construct; identical to SEQ ID NO: 4122

SEQ ID NO: 7950 - protein, 80 aa, Synthetic construct
RKLAEEEDLFDSAHPEEGDLDLASESTAHAQSSKADSLLAVVKREPAEQPGDGERTDCEPVGLEPAVEQSSAASELAEAS

SEQ ID NO: 7951 - protein, 80 aa, Synthetic construct
DSAHPEEGDLDLASESTAHAQSSKADSLLAVVKREPAEQPGDGERTDCEPVGLEPAVEQSSAASELAEASSEELAEAPTE

SEQ ID NO: 7952 - protein, 80 aa, Synthetic construct
DLASESTAHAQSSKADSLLAVVKREPAEQPGDGERTDCEPVGLEPAVEQSSAASELAEASSEELAEAPTEAPSPEARDSK

SEQ ID NO: 7953 - protein, 80 aa, Synthetic construct
QSSKADSLLAVVKREPAEQPGDGERTDCEPVGLEPAVEQSSAASELAEASSEELAEAPTEAPSPEARDSKEDGRKFDFDA

SEQ ID NO: 7954 - protein, 80 aa, Synthetic construct
PLESTDGERLVKAAQCGHPVLCVQPHHIGVAVKELDLYLAYFVRERDAEQSGSPRTGMGSDQEDSKPITLDTTDFQESFV

SEQ ID NO: 7955 - protein, 80 aa, Synthetic construct
VKAAQCGHPVLCVQPHHIGVAVKELDLYLAYFVRERDAEQSGSPRTGMGSDQEDSKPITLDTTDFQESFVTSGVFSVTEL

SEQ ID NO: 7956 - protein, 80 aa, Synthetic construct; identical to SEQ ID NO: 4115

SEQ ID NO: 7957 - protein, 80 aa, Synthetic construct
RTEAIERARLHIGKGVQLECKGEGDVWVRCLSDHAVFVQSYYLDREAGRAPGDAVHKIYPSAYIKVFDLRQCHRQMQQQA

SEQ ID NO: 7958 - protein, 80 aa, Synthetic construct
HIGKGVQLECKGEGDVWVRCLSDHAVFVQSYYLDREAGRAPGDAVHKIYPSAYIKVFDLRQCHRQMQQQAATAQAAAAAQ

SEQ ID NO: 7959 - protein, 80 aa, Synthetic construct; identical to SEQ ID NO: 4088

SEQ ID NO: 7960 - protein, 80 aa, Synthetic construct
PVKSRKTTLEQPPSVALKVEPVGEDLGSPPPPADFAPEDYSSFQHIRKGGFCDQYLAVPQHPYQWAKPKPLSPTSYMSPT

SEQ ID NO: 7961 - protein, 80 aa, Synthetic construct
QPPSVALKVEPVGEDLGSPPPPADFAPEDYSSFQHIRKGGFCDQYLAVPQHPYQWAKPKPLSPTSYMSPTLPALDWQLPS

SEQ ID NO: 7962 - protein, 80 aa, Synthetic construct
LSPTSYMSPTLPALDWQLPSHSGPYELRIEVQPKSHHRAHYETEGSRGAVKASAGGHPIVQLHGYLENEPLMLQLFIGTA

SEQ ID NO: 7963 - protein, 80 aa, Synthetic construct
HSGPYELRIEVQPKSHHRAHYETEGSRGAVKASAGGHPIVQLHGYLENEPLMLQLFIGTADDRLLRPHAFYQVHRITGKT

SEQ ID NO: 7964 - protein, 80 aa, Synthetic construct
KAPDGHHVWEMEAKTDRDLCKPNSLVVEIPPFRNQRITSPVHVSFYVCNGKRKRSQYQRFTYLPANVPIIKTEPTDDYEP

SEQ ID NO: 7965 - protein, 80 aa, Synthetic construct
MEAKTDRDLCKPNSLVVEIPPFRNQRITSPVHVSFYVCNGKRKRSQYQRFTYLPANVPIIKTEPTDDYEPAPTCGPVSQG

SEQ ID NO: 7966 - protein, 80 aa, Synthetic construct
KPNSLVVEIPPFRNQRITSPVHVSFYVCNGKRKRSQYQRFTYLPANVPIIKTEPTDDYEPAPTCGPVSQGLSPLPRPYYS

SEQ ID NO: 7967 - protein, 80 aa, Synthetic construct
PFRNQRITSPVHVSFYVCNGKRKRSQYQRFTYLPANVPIIKTEPTDDYEPAPTCGPVSQGLSPLPRPYYSQQLAMPPDPS

SEQ ID NO: 7968 - protein, 80 aa, Synthetic construct
VHVSFYVCNGKRKRSQYQRFTYLPANVPIIKTEPTDDYEPAPTCGPVSQGLSPLPRPYYSQQLAMPPDPSSCLVAGFPPC

SEQ ID NO: 7969 - protein, 80 aa, Synthetic construct; identical to SEQ ID NO: 2170

SEQ ID NO: 7970 - protein, 80 aa, Synthetic construct
TYLPANVPIIKTEPTDDYEPAPTCGPVSQGLSPLPRPYYSQQLAMPPDPSSCLVAGFPPCPQRSTLMPAAPGVSPKLHDL

SEQ ID NO: 7971 - protein, 80 aa, Synthetic construct
SGSARKGKRQHSSPQNPLLDCSLCGKVFSSASSLSKHYLTHSQERKHVCKICSKAFKRQDHLTGHMLTHQKTKPFVCIEQ

SEQ ID NO: 7972 - protein, 80 aa, Synthetic construct; identical to SEQ ID NO: 2229

SEQ ID NO: 7973 - protein, 80 aa, Synthetic construct; identical to SEQ ID NO: 5910

SEQ ID NO: 7974 - protein, 80 aa, Synthetic construct
GGNIYRLPHPVKEENVAGRGNQQNGSPTDWTKPRSTFVCKNCSQMFYTEKGLSSHMCFHSDQWPSPRGKQEPQVFGTEFC

SEQ ID NO: 7975 - protein, 80 aa, Synthetic construct
KDFYLIHKMIQTKTVAQCVEYYYIWKKMIKFDCGRAPGLEKRVKREPEEVERTEEKVPCSPRERPSHHPTPKLKTKSYRR

SEQ ID NO: 7976 - protein, 80 aa, Synthetic construct
QTKTVAQCVEYYYIWKKMIKFDCGRAPGLEKRVKREPEEVERTEEKVPCSPRERPSHHPTPKLKTKSYRRESILSSSPNA

SEQ ID NO: 7977 - protein, 80 aa, Synthetic construct
YYYIWKKMIKFDCGRAPGLEKRVKREPEEVERTEEKVPCSPRERPSHHPTPKLKTKSYRRESILSSSPNAGSKRTPELLG

SEQ ID NO: 7978 - protein, 80 aa, Synthetic construct
FDCGRAPGLEKRVKREPEEVERTEEKVPCSPRERPSHHPTPKLKTKSYRRESILSSSPNAGSKRTPELLGSAESQGIFPC

SEQ ID NO: 7979 - protein, 80 aa, Synthetic construct; identical to SEQ ID NO: 2230

SEQ ID NO: 7980 - protein, 80 aa, Synthetic construct
SSPNAGSKRTPELLGSAESQGIFPCRECERVFDKIKSRNAHMKRHRLQDHVEPIIRVKWPVKPFQLKEEELGADIGPLQW

SEQ ID NO: 7981 - protein, 80 aa, Synthetic construct; identical to SEQ ID NO: 1176

SEQ ID NO: 7982 - protein, 80 aa, Synthetic construct; identical to SEQ ID NO: 1712

SEQ ID NO: 7983 - protein, 80 aa, Synthetic construct
PTGPQASELFQFWSGGSGPPWNVPDVKPFSQTPFTLSLTPPSTDLPGYEPPQALSPLPPPTPSPPAWQARGLGTARLQLV

SEQ ID NO: 7984 - protein, 80 aa, Synthetic construct
QFWSGGSGPPWNVPDVKPFSQTPFTLSLTPPSTDLPGYEPPQALSPLPPPTPSPPAWQARGLGTARLQLVEFSAFVEPPD

SEQ ID NO: 7985 - protein, 80 aa, Synthetic construct
WNVPDVKPFSQTPFTLSLTPPSTDLPGYEPPQALSPLPPPTPSPPAWQARGLGTARLQLVEFSAFVEPPDAVDSYQRHLF

SEQ ID NO: 7986 - protein, 80 aa, Synthetic construct; identical to SEQ ID NO: 2927

SEQ ID NO: 7987 - protein, 80 aa, Synthetic construct; identical to SEQ ID NO: 2928

SEQ ID NO: 7988 - protein, 80 aa, Synthetic construct
LTGHGQPLPPGFPSPFLFPDGLSSIETLLTNIQGLLKVAIDNARAQEKQVQLEKTELKMDFLRERELRETLEKQLAMEQK

SEQ ID NO: 7989 - protein, 80 aa, Synthetic construct
GFPSPFLFPDGLSSIETLLTNIQGLLKVAIDNARAQEKQVQLEKTELKMDFLRERELRETLEKQLAMEQKNRAIVQKRLK

SEQ ID NO: 7990 - protein, 80 aa, Synthetic construct
LAAEHGLSAEQVYNADETGLFWRCLPNPTPEGGAVPGPKQGKDRLTVLMCANATGSHRLKPLAIGKCSGPRAFKGIQHLP

SEQ ID NO: 7991 - protein, 80 aa, Synthetic construct
QVYNADETGLFWRCLPNPTPEGGAVPGPKQGKDRLTVLMCANATGSHRLKPLAIGKCSGPRAFKGIQHLPVAYKAQGNAW

SEQ ID NO: 7992 - protein, 80 aa, Synthetic construct
FWRCLPNPTPEGGAVPGPKQGKDRLTVLMCANATGSHRLKPLAIGKCSGPRAFKGIQHLPVAYKAQGNAWVDKEIFSDWF

SEQ ID NO: 7993 - protein, 80 aa, Synthetic construct
PPAATSPAEVVWSSEKTPKADQDGRGDPGEGEEVAWEQAAVAFDAVLRFAERQPCFSAQEVGQLRALRAVFRSQQQVRRR

SEQ ID NO: 7994 - protein, 80 aa, Synthetic construct
VWSSEKTPKADQDGRGDPGEGEEVAWEQAAVAFDAVLRFAERQPCFSAQEVGQLRALRAVFRSQQQVRRRRGALGAVVKV

SEQ ID NO: 7995 - protein, 80 aa, Synthetic construct; identical to SEQ ID NO: 1764

SEQ ID NO: 7996 - protein, 80 aa, Synthetic construct
GEEVAWEQAAVAFDAVLRFAERQPCFSAQEVGQLRALRAVFRSQQQVRRRRGALGAVVKVEALQEGPGGCGATAQSPLPC

SEQ ID NO: 7997 - protein, 80 aa, Synthetic construct
INLLGEGGICKLPGRLRIQPALWSREDVLHWLRWAEQEYSLPCTAEHGFEMNGRALCILTKDDFRHRAPSSGDVLYELLQ

SEQ ID NO: 7998 - protein, 80 aa, Synthetic construct; identical to SEQ ID NO: 1844

SEQ ID NO: 7999 - protein, 80 aa, Synthetic construct; identical to SEQ ID NO: 2233

SEQ ID NO: 8000 - protein, 80 aa, Synthetic construct; identical to SEQ ID NO: 1177

SEQ ID NO: 8001 - protein, 80 aa, Synthetic construct
ENRALDPGTRDSYGATSHLPNKGALAKVKNNFKDLMSKLTEGQYVLCRWTDGLYYLGKIKRVSSSKQSCLVTFEDNSKYW

SEQ ID NO: 8002 - protein, 80 aa, Synthetic construct
DSYGATSHLPNKGALAKVKNNFKDLMSKLTEGQYVLCRWTDGLYYLGKIKRVSSSKQSCLVTFEDNSKYWVLWKDIQHAG

SEQ ID NO: 8003 - protein, 80 aa, Synthetic construct
NKGALAKVKNNFKDLMSKLTEGQYVLCRWTDGLYYLGKIKRVSSSKQSCLVTFEDNSKYWVLWKDIQHAGVPGEEPKCNI

SEQ ID NO: 8004 - protein, 80 aa, Synthetic construct
NFKDLMSKLTEGQYVLCRWTDGLYYLGKIKRVSSSKQSCLVTFEDNSKYWVLWKDIQHAGVPGEEPKCNICLGKTSGPLN

SEQ ID NO: 8005 - protein, 80 aa, Synthetic construct
EGQYVLCRWTDGLYYLGKIKRVSSSKQSCLVTFEDNSKYWVLWKDIQHAGVPGEEPKCNICLGKTSGPLNEILICGKCGL

SEQ ID NO: 8006 - protein, 80 aa, Synthetic construct
DGLYYLGKIKRVSSSKQSCLVTFEDNSKYWVLWKDIQHAGVPGEEPKCNICLGKTSGPLNEILICGKCGLGYHQQCHIPI

SEQ ID NO: 8007 - protein, 80 aa, Synthetic construct; identical to SEQ ID NO: 2005

SEQ ID NO: 8008 - protein, 80 aa, Synthetic construct; identical to SEQ ID NO: 5247

SEQ ID NO: 8009 - protein, 80 aa, Synthetic construct
VRVCACPGRDRRTEEENLRKKGEPHHELPPGSTKRALPNNTSSSPQPKKKPLDGEYFTLQIRGRERFEMFRELNEALELK

SEQ ID NO: 8010 - protein, 80 aa, Synthetic construct
RRTEEENLRKKGEPHHELPPGSTKRALPNNTSSSPQPKKKPLDGEYFTLQIRGRERFEMFRELNEALELKDAQAGKEPGG

SEQ ID NO: 8011 - protein, 80 aa, Synthetic construct
KGEPHHELPPGSTKRALPNNTSSSPQPKKKPLDGEYFTLQIRGRERFEMFRELNEALELKDAQAGKEPGGSRAHSSHLKS

SEQ ID NO: 8012 - protein, 80 aa, Synthetic construct
TSSSPQPKKKPLDGEYFTLQIRGRERFEMFRELNEALELKDAQAGKEPGGSRAHSSHLKSKKGQSTSRHKKLMFKTEGPD

SEQ ID NO: 8013 - protein, 80 aa, Synthetic construct; identical to SEQ ID NO: 2006

SEQ ID NO: 8014 - protein, 80 aa, Synthetic construct; identical to SEQ ID NO: 4741

SEQ ID NO: 8015 - protein, 80 aa, Synthetic construct; identical to SEQ ID NO: 756

SEQ ID NO: 8016 - protein, 80 aa, Synthetic construct; identical to SEQ ID NO: 227

SEQ ID NO: 8017 - protein, 80 aa, Synthetic construct
NNAHFPEHLDHFTENMEDFSNDLFSSFFDDPVLDEKSPLLDMELDSPTPGIQAEHSYSLSGDSAPQSPLVPIKMEDTTQD

SEQ ID NO: 8018 - protein, 80 aa, Synthetic construct
HFTENMEDFSNDLFSSFFDDPVLDEKSPLLDMELDSPTPGIQAEHSYSLSGDSAPQSPLVPIKMEDTTQDAEHGAWALGH

SEQ ID NO: 8019 - protein, 80 aa, Synthetic construct
NDLFSSFFDDPVLDEKSPLLDMELDSPTPGIQAEHSYSLSGDSAPQSPLVPIKMEDTTQDAEHGAWALGHKLCSIMVKQE

SEQ ID NO: 8020 - protein, 80 aa, Synthetic construct; identical to SEQ ID NO: 1178

SEQ ID NO: 8021 - protein, 80 aa, Synthetic construct; identical to SEQ ID NO: 2094

SEQ ID NO: 8022 - protein, 80 aa, Synthetic construct
GDSAPQSPLVPIKMEDTTQDAEHGAWALGHKLCSIMVKQEQSPELPVDPLAAPSAMAAAAAMATTPLLGLSPLSRLPIPH

SEQ ID NO: 8023 - protein, 80 aa, Synthetic construct
PIKMEDTTQDAEHGAWALGHKLCSIMVKQEQSPELPVDPLAAPSAMAAAAAMATTPLLGLSPLSRLPIPHQAPGEMTQLP

SEQ ID NO: 8024 - protein, 80 aa, Synthetic construct
AEHGAWALGHKLCSIMVKQEQSPELPVDPLAAPSAMAAAAAMATTPLLGLSPLSRLPIPHQAPGEMTQLPVIKAEPLEVN

SEQ ID NO: 8025 - protein, 80 aa, Synthetic construct
KLCSIMVKQEQSPELPVDPLAAPSAMAAAAAMATTPLLGLSPLSRLPIPHQAPGEMTQLPVIKAEPLEVNQFLKVTPEDL

SEQ ID NO: 8026 - protein, 80 aa, Synthetic construct
QSPELPVDPLAAPSAMAAAAAMATTPLLGLSPLSRLPIPHQAPGEMTQLPVIKAEPLEVNQFLKVTPEDLVQMPPTPPSS

SEQ ID NO: 8027 - protein, 80 aa, Synthetic construct
AAPSAMAAAAAMATTPLLGLSPLSRLPIPHQAPGEMTQLPVIKAEPLEVNQFLKVTPEDLVQMPPTPPSSHGSDSDGSQS

SEQ ID NO: 8028 - protein, 80 aa, Synthetic construct
SPLSRLPIPHQAPGEMTQLPVIKAEPLEVNQFLKVTPEDLVQMPPTPPSSHGSDSDGSQSPRSLPPSSPVRPMARSSTAI

SEQ ID NO: 8029 - protein, 80 aa, Synthetic construct
QAPGEMTQLPVIKAEPLEVNQFLKVTPEDLVQMPPTPPSSHGSDSDGSQSPRSLPPSSPVRPMARSSTAISTSPLLTAPH

SEQ ID NO: 8030 - protein, 80 aa, Synthetic construct; identical to SEQ ID NO: 3186

SEQ ID NO: 8031 - protein, 80 aa, Synthetic construct; identical to SEQ ID NO: 3187

SEQ ID NO: 8032 - protein, 80 aa, Synthetic construct
SGSYSSHISSKKCIGLISVNGRMRNNIKTGSSPNSVSSSPTNSAITQLRNKLENGKPLSMSEQTGLLKIKTEPLDFNDYK

SEQ ID NO: 8033 - protein, 80 aa, Synthetic construct
KKCIGLISVNGRMRNNIKTGSSPNSVSSSPTNSAITQLRNKLENGKPLSMSEQTGLLKIKTEPLDFNDYKVLMATHGFSG

SEQ ID NO: 8034 - protein, 80 aa, Synthetic construct
GRMRNNIKTGSSPNSVSSSPTNSAITQLRNKLENGKPLSMSEQTGLLKIKTEPLDFNDYKVLMATHGFSGTSPFMNGGLG

SEQ ID NO: 8035 - protein, 80 aa, Synthetic construct
SSPNSVSSSPTNSAITQLRNKLENGKPLSMSEQTGLLKIKTEPLDFNDYKVLMATHGFSGTSPFMNGGLGATSPLGVHPS

SEQ ID NO: 8036 - protein, 80 aa, Synthetic construct
TNSAITQLRNKLENGKPLSMSEQTGLLKIKTEPLDFNDYKVLMATHGFSGTSPFMNGGLGATSPLGVHPSAQSPMQHLGV

SEQ ID NO: 8037 - protein, 80 aa, Synthetic construct
KLENGKPLSMSEQTGLLKIKTEPLDFNDYKVLMATHGFSGTSPFMNGGLGATSPLGVHPSAQSPMQHLGVGMEAPLLGFP

SEQ ID NO: 8038 - protein, 80 aa, Synthetic construct
SEQTGLLKIKTEPLDFNDYKVLMATHGFSGTSPFMNGGLGATSPLGVHPSAQSPMQHLGVGMEAPLLGFPTMNSNLSEVQ

SEQ ID NO: 8039 - protein, 80 aa, Synthetic construct
SSKNSHSSSYTPNSFSSEELQAEPLDLSLPKQMKEPKSIIATKNKTKASSISLDHNSVSSSSENSDEPLNLTFIKKEFSN

SEQ ID NO: 8040 - protein, 80 aa, Synthetic construct
QAEPLDLSLPKQMKEPKSIIATKNKTKASSISLDHNSVSSSSENSDEPLNLTFIKKEFSNSNNLDNKSTNPVFSMNPFSA

SEQ ID NO: 8041 - protein, 80 aa, Synthetic construct
ATKNKTKASSISLDHNSVSSSSENSDEPLNLTFIKKEFSNSNNLDNKSTNPVFSMNPFSAKPLYTALPPQSAFPPATFMP

SEQ ID NO: 8042 - protein, 80 aa, Synthetic construct
ISLDHNSVSSSSENSDEPLNLTFIKKEFSNSNNLDNKSTNPVFSMNPFSAKPLYTALPPQSAFPPATFMPPVQTSIPGLR

SEQ ID NO: 8043 - protein, 80 aa, Synthetic construct; identical to SEQ ID NO: 5582

SEQ ID NO: 8044 - protein, 80 aa, Synthetic construct; identical to SEQ ID NO: 4416

SEQ ID NO: 8045 - protein, 80 aa, Synthetic construct; identical to SEQ ID NO: 4417

SEQ ID NO: 8046 - protein, 80 aa, Synthetic construct; identical to SEQ ID NO: 3222

SEQ ID NO: 8047 - protein, 80 aa, Synthetic construct; identical to SEQ ID NO: 3223

SEQ ID NO: 8048 - protein, 80 aa, Synthetic construct
PPAPPEQADGNAPGPQPPPVRIQDIKTENGTCPSPPQPLSPAAALGSGSAAAVPKIESPDSSSSSLSSGSSPPGSLPSAR

SEQ ID NO: 8049 - protein, 80 aa, Synthetic construct
NAPGPQPPPVRIQDIKTENGTCPSPPQPLSPAAALGSGSAAAVPKIESPDSSSSSLSSGSSPPGSLPSARPLSLDGADSA

SEQ ID NO: 8050 - protein, 80 aa, Synthetic construct
RIQDIKTENGTCPSPPQPLSPAAALGSGSAAAVPKIESPDSSSSSLSSGSSPPGSLPSARPLSLDGADSAPPPPAPSAPP

SEQ ID NO: 8051 - protein, 80 aa, Synthetic construct
SYNMFENGSFLRRRRRFKKKDVSKEKEERAHLKEPPPAASKGAPATPHLADAPKEAEKKVVIKSEAASPALPVITKVETL

SEQ ID NO: 8052 - protein, 80 aa, Synthetic construct
LRRRRRFKKKDVSKEKEERAHLKEPPPAASKGAPATPHLADAPKEAEKKVVIKSEAASPALPVITKVETLSPESALQGSP

SEQ ID NO: 8053 - protein, 80 aa, Synthetic construct; identical to SEQ ID NO: 1179

SEQ ID NO: 8054 - protein, 80 aa, Synthetic construct
HLKEPPPAASKGAPATPHLADAPKEAEKKVVIKSEAASPALPVITKVETLSPESALQGSPRSAASTPAGSPDGSLPEHHA

SEQ ID NO: 8055 - protein, 80 aa, Synthetic construct; identical to SEQ ID NO: 1180

SEQ ID NO: 8056 - protein, 80 aa, Synthetic construct; identical to SEQ ID NO: 2303

SEQ ID NO: 8057 - protein, 80 aa, Synthetic construct; identical to SEQ ID NO: 1181

SEQ ID NO: 8058 - protein, 80 aa, Synthetic construct
LPVITKVETLSPESALQGSPRSAASTPAGSPDGSLPEHHAAAPNGLPGFSVENIMTLRTSPPGGELSPGAGRAGLVVPPL

SEQ ID NO: 8059 - protein, 80 aa, Synthetic construct; identical to SEQ ID NO: 2313

SEQ ID NO: 8060 - protein, 80 aa, Synthetic construct; identical to SEQ ID NO: 2278

SEQ ID NO: 8061 - protein, 80 aa, Synthetic construct; identical to SEQ ID NO: 2279

SEQ ID NO: 8062 - protein, 80 aa, Synthetic construct
DKKTSNLSVLRTALRYIQSLKRKEKEYEHEMERLAREKIATQQRLAELKHELSQWMDVLEIDRVLRQTGQPEDDQASTST

SEQ ID NO: 8063 - protein, 80 aa, Synthetic construct; identical to SEQ ID NO: 1182

SEQ ID NO: 8064 - protein, 80 aa, Synthetic construct
AQQVQLQQQQEQVRLLHQEKLEREQQQLRTQLLPPPAPTHHPTVIVPAPPPPPSHHINVVTMGPSSVINSVSTSRQNLDT

SEQ ID NO: 8065 - protein, 80 aa, Synthetic construct; identical to SEQ ID NO: 1183

SEQ ID NO: 8066 - protein, 80 aa, Synthetic construct; identical to SEQ ID NO: 1922

SEQ ID NO: 8067 - protein, 80 aa, Synthetic construct; identical to SEQ ID NO: 4852

SEQ ID NO: 8068 - protein, 80 aa, Synthetic construct
QPPPEEPAQAAMEGPQPENMQPRTRRTKFTLLQVEELESVFRHTQYPDVPTRRELAENLGVTEDKVRVWFKNKRARCRRH

SEQ ID NO: 8069 - protein, 80 aa, Synthetic construct; identical to SEQ ID NO: 1184

SEQ ID NO: 8070 - protein, 80 aa, Synthetic construct; identical to SEQ ID NO: 1718

SEQ ID NO: 8071 - protein, 80 aa, Synthetic construct; identical to SEQ ID NO: 1185

SEQ ID NO: 8072 - protein, 80 aa, Synthetic construct; identical to SEQ ID NO: 2883

SEQ ID NO: 8073 - protein, 80 aa, Synthetic construct; identical to SEQ ID NO: 2365

SEQ ID NO: 8074 - protein, 80 aa, Synthetic construct
LNEKRKQRRIRTTFTSAQLKELERVFAETHYPDIYTREELALKIDLTEARVQVWFQNRRAKFRKQERAAAAAAAAAKNGS

SEQ ID NO: 8075 - protein, 80 aa, Synthetic construct; identical to SEQ ID NO: 3973

SEQ ID NO: 8076 - protein, 80 aa, Synthetic construct
ANPNQRLPKVEILRSAISYIERLQDLLHRLDQQEKMQELGVDPFSYRPKQENLEGADFLRTCSSQWPSVSDHSRGLVITA

SEQ ID NO: 8077 - protein, 80 aa, Synthetic construct
EILRSAISYIERLQDLLHRLDQQEKMQELGVDPFSYRPKQENLEGADFLRTCSSQWPSVSDHSRGLVITAKEGGASIDSS

SEQ ID NO: 8078 - protein, 80 aa, Synthetic construct; identical to SEQ ID NO: 2285

SEQ ID NO: 8079 - protein, 80 aa, Synthetic construct
ERRRLKKVNQAFETLKRCTTTNPNQRLPKVEILRNAIRYIESLQELLREQVENYYSLPGQSCSEPTSPTSNCSDGMPECN

SEQ ID NO: 8080 - protein, 80 aa, Synthetic construct; identical to SEQ ID NO: 4019

SEQ ID NO: 8081 - protein, 80 aa, Synthetic construct
RWQKNNWPKNSNGVTQKASAPTYPSLYSSYHQGCLVNPTGNLPMWSNQTWNNSTWSNQTQNIQSWSNHSWNTQTWCTQSW

SEQ ID NO: 8082 - protein, 80 aa, Synthetic construct
SNGVTQKASAPTYPSLYSSYHQGCLVNPTGNLPMWSNQTWNNSTWSNQTQNIQSWSNHSWNTQTWCTQSWNNQAWNSPFY

SEQ ID NO: 8083 - protein, 80 aa, Synthetic construct; identical to SEQ ID NO: 234

SEQ ID NO: 8084 - protein, 80 aa, Synthetic construct; identical to SEQ ID NO: 234

SEQ ID NO: 8085 - protein, 80 aa, Synthetic construct; identical to SEQ ID NO: 235

SEQ ID NO: 8086 - protein, 80 aa, Synthetic construct; identical to SEQ ID NO: 528

SEQ ID NO: 8087 - protein, 80 aa, Synthetic construct; identical to SEQ ID NO: 237

SEQ ID NO: 8088 - protein, 80 aa, Synthetic construct; identical to SEQ ID NO: 238

SEQ ID NO: 8089 - protein, 80 aa, Synthetic construct; identical to SEQ ID NO: 239

SEQ ID NO: 8090 - protein, 80 aa, Synthetic construct
WNKGTILKASVDYIRRMQKDLQKSRELENHSRRLEMTNKQLWLRIQELEMQARVHGLPTTSPSGMNMAELAQQVVKQELP

SEQ ID NO: 8091 - protein, 80 aa, Synthetic construct
VDYIRRMQKDLQKSRELENHSRRLEMTNKQLWLRIQELEMQARVHGLPTTSPSGMNMAELAQQVVKQELPSEEGPGEALM

SEQ ID NO: 8092 - protein, 80 aa, Synthetic construct
LQKSRELENHSRRLEMTNKQLWLRIQELEMQARVHGLPTTSPSGMNMAELAQQVVKQELPSEEGPGEALMLGAEVPDPEP

SEQ ID NO: 8093 - protein, 80 aa, Synthetic construct
SRRLEMTNKQLWLRIQELEMQARVHGLPTTSPSGMNMAELAQQVVKQELPSEEGPGEALMLGAEVPDPEPLPALPPQAPL

SEQ ID NO: 8094 - protein, 80 aa, Synthetic construct
LWLRIQELEMQARVHGLPTTSPSGMNMAELAQQVVKQELPSEEGPGEALMLGAEVPDPEPLPALPPQAPLPLPTQPPSPF

SEQ ID NO: 8095 - protein, 80 aa, Synthetic construct
QARVHGLPTTSPSGMNMAELAQQVVKQELPSEEGPGEALMLGAEVPDPEPLPALPPQAPLPLPTQPPSPFHHLDFSHSLS

SEQ ID NO: 8096 - protein, 80 aa, Synthetic construct
DGKTYCKRDYIRLYGIKCAKCSIGFSKNDFVMRARSKVYHIECFRCVACSRQLIPGDEFALREDGLFCRADHDVVERASL

SEQ ID NO: 8097 - protein, 80 aa, Synthetic construct
IRLYGIKCAKCSIGFSKNDFVMRARSKVYHIECFRCVACSRQLIPGDEFALREDGLFCRADHDVVERASLGAGDPLSPLH

SEQ ID NO: 8098 - protein, 80 aa, Synthetic construct; identical to SEQ ID NO: 1186

SEQ ID NO: 8099 - protein, 80 aa, Synthetic construct; identical to SEQ ID NO: 1187

SEQ ID NO: 8100 - protein, 80 aa, Synthetic construct
LGRRKGSGPKKERRRTESINSAFAELRECIPNVPADTKLSKIKTLRLATSYIAYLMDVLAKDAQSGDPEAFKAELKKADG

SEQ ID NO: 8101 - protein, 80 aa, Synthetic construct; identical to SEQ ID NO: 1188

SEQ ID NO: 8102 - protein, 80 aa, Synthetic construct; identical to SEQ ID NO: 1772

SEQ ID NO: 8103 - protein, 80 aa, Synthetic construct; identical to SEQ ID NO: 1994

SEQ ID NO: 8104 - protein, 80 aa, Synthetic construct; identical to SEQ ID NO: 2182

SEQ ID NO: 8105 - protein, 80 aa, Synthetic construct
TRRIGHPYQNRTPPKRKKPRTSFSRSQVLELERRFLRQKYLASAERAALAKALRMTDAQVKTWFQNRRTKWRRQTAEERE

SEQ ID NO: 8106 - protein, 80 aa, Synthetic construct; identical to SEQ ID NO: 2137

SEQ ID NO: 8107 - protein, 80 aa, Synthetic construct
RDAKGTIREIVLPKGLDLDRPKRTRTSFTAEQLYRLEMEFQRCQYVVGRERTELARQLNLSETQVKVWFQNRRTKQKKDQ

SEQ ID NO: 8108 - protein, 80 aa, Synthetic construct; identical to SEQ ID NO: 1189

SEQ ID NO: 8109 - protein, 80 aa, Synthetic construct; identical to SEQ ID NO: 2174

SEQ ID NO: 8110 - protein, 80 aa, Synthetic construct; identical to SEQ ID NO: 1190

SEQ ID NO: 8111 - protein, 80 aa, Synthetic construct; identical to SEQ ID NO: 1191

SEQ ID NO: 8112 - protein, 80 aa, Synthetic construct; identical to SEQ ID NO: 3950

SEQ ID NO: 8113 - protein, 80 aa, Synthetic construct
AGATLRPLLLSGHGAREAHSPGPLVKPFETASVKSENSEDGAAWMQEPGRYSPPPRHMSPTTCTLRKHKTNRKPRTPFTT

SEQ ID NO: 8114 - protein, 80 aa, Synthetic construct
SGHGAREAHSPGPLVKPFETASVKSENSEDGAAWMQEPGRYSPPPRHMSPTTCTLRKHKTNRKPRTPFTTSQLLALERKF

SEQ ID NO: 8115 - protein, 80 aa, Synthetic construct
PGPLVKPFETASVKSENSEDGAAWMQEPGRYSPPPRHMSPTTCTLRKHKTNRKPRTPFTTSQLLALERKFRQKQYLSIAE

SEQ ID NO: 8116 - protein, 80 aa, Synthetic construct; identical to SEQ ID NO: 2217

SEQ ID NO: 8117 - protein, 80 aa, Synthetic construct; identical to SEQ ID NO: 2966

SEQ ID NO: 8118 - protein, 80 aa, Synthetic construct
DVIHQSVYELIHTEDRAEFQRQLHWALNPSQCTESGQGIEEATGLPQTVVCYNPDQIPPENSPLMERCFICRLRCLLDNS

SEQ ID NO: 8119 - protein, 80 aa, Synthetic construct
IHTEDRAEFQRQLHWALNPSQCTESGQGIEEATGLPQTVVCYNPDQIPPENSPLMERCFICRLRCLLDNSSGFLAMNFQG

SEQ ID NO: 8120 - protein, 80 aa, Synthetic construct; identical to SEQ ID NO: 2411

SEQ ID NO: 8121 - protein, 80 aa, Synthetic construct; identical to SEQ ID NO: 240

SEQ ID NO: 8122 - protein, 80 aa, Synthetic construct; identical to SEQ ID NO: 241

SEQ ID NO: 8123 - protein, 80 aa, Synthetic construct
GSSSGGGSPQSYEELQTQRVMANVRERQRTQSLNEAFAALRKIIPTLPSDKLSKIQTLKLAARYIDFLYQVLQSDELDSK

SEQ ID NO: 8124 - protein, 80 aa, Synthetic construct; identical to SEQ ID NO: 1192

SEQ ID NO: 8125 - protein, 80 aa, Synthetic construct; identical to SEQ ID NO: 1193

SEQ ID NO: 8126 - protein, 80 aa, Synthetic construct; identical to SEQ ID NO: 2226

SEQ ID NO: 8127 - protein, 80 aa, Synthetic construct; identical to SEQ ID NO: 1194

SEQ ID NO: 8128 - protein, 80 aa, Synthetic construct; identical to SEQ ID NO: 2060

SEQ ID NO: 8129 - protein, 80 aa, Synthetic construct
KSELALSKQRRSRRKKANDRERNRMHNLNSALDALRGVLPTFPDDAKLTKIETLRFAHNYIWALTQTLRIADHSLYALEP

SEQ ID NO: 8130 - protein, 80 aa, Synthetic construct
RSRRKKANDRERNRMHNLNSALDALRGVLPTFPDDAKLTKIETLRFAHNYIWALTQTLRIADHSLYALEPPAPHCGELGS

SEQ ID NO: 8131 - protein, 80 aa, Synthetic construct
ERNRMHNLNSALDALRGVLPTFPDDAKLTKIETLRFAHNYIWALTQTLRIADHSLYALEPPAPHCGELGSPGGSPGDWGS

SEQ ID NO: 8132 - protein, 80 aa, Synthetic construct; identical to SEQ ID NO: 1977

SEQ ID NO: 8133 - protein, 80 aa, Synthetic construct; identical to SEQ ID NO: 1195

SEQ ID NO: 8134 - protein, 80 aa, Synthetic construct
QFLPTPQLLTQQVPLSKGTGAPSAAGSAAAPCLERAGQKLEPLAYCVPVIQRTQPSAELAAENDTDTDSGYGGEAEARPD

SEQ ID NO: 8135 - protein, 80 aa, Synthetic construct
QQVPLSKGTGAPSAAGSAAAPCLERAGQKLEPLAYCVPVIQRTQPSAELAAENDTDTDSGYGGEAEARPDREKGKGAGAS

SEQ ID NO: 8136 - protein, 80 aa, Synthetic construct
APSAAGSAAAPCLERAGQKLEPLAYCVPVIQRTQPSAELAAENDTDTDSGYGGEAEARPDREKGKGAGASRVTIKQEPPG

SEQ ID NO: 8137 - protein, 80 aa, Synthetic construct; identical to SEQ ID NO: 1978

SEQ ID NO: 8138 - protein, 80 aa, Synthetic construct
EPLAYCVPVIQRTQPSAELAAENDTDTDSGYGGEAEARPDREKGKGAGASRVTIKQEPPGEDSPAPKRMKLDSRGGGSGG

SEQ ID NO: 8139 - protein, 80 aa, Synthetic construct
QRTQPSAELAAENDTDTDSGYGGEAEARPDREKGKGAGASRVTIKQEPPGEDSPAPKRMKLDSRGGGSGGGPGGGAAAAA

SEQ ID NO: 8140 - protein, 80 aa, Synthetic construct
AENDTDTDSGYGGEAEARPDREKGKGAGASRVTIKQEPPGEDSPAPKRMKLDSRGGGSGGGPGGGAAAAAAALLGPDPAA

SEQ ID NO: 8141 - protein, 80 aa, Synthetic construct
YGGEAEARPDREKGKGAGASRVTIKQEPPGEDSPAPKRMKLDSRGGGSGGGPGGGAAAAAAALLGPDPAAAAALLRPDAA

SEQ ID NO: 8142 - protein, 80 aa, Synthetic construct
REKGKGAGASRVTIKQEPPGEDSPAPKRMKLDSRGGGSGGGPGGGAAAAAAALLGPDPAAAAALLRPDAALLSSLVAFGG

SEQ ID NO: 8143 - protein, 80 aa, Synthetic construct
RVTIKQEPPGEDSPAPKRMKLDSRGGGSGGGPGGGAAAAAAALLGPDPAAAAALLRPDAALLSSLVAFGGGGGAPFPQPA

SEQ ID NO: 8144 - protein, 80 aa, Synthetic construct; identical to SEQ ID NO: 1866

SEQ ID NO: 8145 - protein, 80 aa, Synthetic construct; identical to SEQ ID NO: 3466

SEQ ID NO: 8146 - protein, 80 aa, Synthetic construct
QPEVSSYRRGRKKRVPYTKVQLKELEKEYAASKFITKEKRRRISATTNLSERQVTIWFQNRRVKEKKVVSKSKAPHLHST

SEQ ID NO: 8147 - protein, 80 aa, Synthetic construct; identical to SEQ ID NO: 1196

SEQ ID NO: 8148 - protein, 80 aa, Synthetic construct; identical to SEQ ID NO: 1947

SEQ ID NO: 8149 - protein, 80 aa, Synthetic construct; identical to SEQ ID NO: 1197

SEQ ID NO: 8150 - protein, 80 aa, Synthetic construct
FTALRTLIPTEPVDRKLSKIETVRLASSYIAHLANVLLLGDSADDGQPCFRAAGSAKGAVPAAADGGRQPRSICTFCLSN

SEQ ID NO: 8151 - protein, 80 aa, Synthetic construct
GLLPSLAKREVNHQNMGMNVHPYIPQVDSWTDPNRSCRIEQPVTQQVPTCSFTTNIKEESNCCMYSDKRNKLISAEVPSY

SEQ ID NO: 8152 - protein, 80 aa, Synthetic construct
VNHQNMGMNVHPYIPQVDSWTDPNRSCRIEQPVTQQVPTCSFTTNIKEESNCCMYSDKRNKLISAEVPSYQRLVPESCPV

SEQ ID NO: 8153 - protein, 80 aa, Synthetic construct
HPYIPQVDSWTDPNRSCRIEQPVTQQVPTCSFTTNIKEESNCCMYSDKRNKLISAEVPSYQRLVPESCPVENPEVPVPGY

SEQ ID NO: 8154 - protein, 80 aa, Synthetic construct
TDPNRSCRIEQPVTQQVPTCSFTTNIKEESNCCMYSDKRNKLISAEVPSYQRLVPESCPVENPEVPVPGYFRLSQTYATG

SEQ ID NO: 8155 - protein, 80 aa, Synthetic construct
QPVTQQVPTCSFTTNIKEESNCCMYSDKRNKLISAEVPSYQRLVPESCPVENPEVPVPGYFRLSQTYATGKTQEYNNSPE

SEQ ID NO: 8156 - protein, 80 aa, Synthetic construct
SFTTNIKEESNCCMYSDKRNKLISAEVPSYQRLVPESCPVENPEVPVPGYFRLSQTYATGKTQEYNNSPEGSSTVMLQLN

SEQ ID NO: 8157 - protein, 80 aa, Synthetic construct; identical to SEQ ID NO: 1791

SEQ ID NO: 8158 - protein, 80 aa, Synthetic construct
SAVAPQRSRKKRCPYTKYQIRELEREFFFNVYINKEKRLQLSRMLNLTDRQVKIWFQNRRMKEKKLNRDRLQYFTGNPLF

SEQ ID NO: 8159 - protein, 80 aa, Synthetic construct; identical to SEQ ID NO: 1805

SEQ ID NO: 8160 - protein, 80 aa, Synthetic construct
KAATMRERRRLSKVNEAFETLKRCTSSNPNQRLPKVEILRNAIRYIEGLQALLRDQDAAPPGAAAAFYAPGPLPPGRGGE

SEQ ID NO: 8161 - protein, 80 aa, Synthetic construct; identical to SEQ ID NO: 1198

SEQ ID NO: 8162 - protein, 80 aa, Synthetic construct; identical to SEQ ID NO: 1882

SEQ ID NO: 8163 - protein, 80 aa, Synthetic construct; identical to SEQ ID NO: 1199

SEQ ID NO: 8164 - protein, 80 aa, Synthetic construct
EVLQYLAKHENTRDLKSSQLVTHLHRVVSELLQGGTSRKPSDPAPKVMDFKEKPSSPAKGSEGPGKNCVPVIQRTFAHSS

SEQ ID NO: 8165 - protein, 80 aa, Synthetic construct
NTRDLKSSQLVTHLHRVVSELLQGGTSRKPSDPAPKVMDFKEKPSSPAKGSEGPGKNCVPVIQRTFAHSSGEQSGSDTDT

SEQ ID NO: 8166 - protein, 80 aa, Synthetic construct
SEGPGKNCVPVIQRTFAHSSGEQSGSDTDTDSGYGGESEKGDLRSEQPCFKSDHGRRFTMGERIGAIKQESEEPPTKKNR

SEQ ID NO: 8167 - protein, 80 aa, Synthetic construct
VIQRTFAHSSGEQSGSDTDTDSGYGGESEKGDLRSEQPCFKSDHGRRFTMGERIGAIKQESEEPPTKKNRMQLSDDEGHF

SEQ ID NO: 8168 - protein, 80 aa, Synthetic construct
DSGYGGESEKGDLRSEQPCFKSDHGRRFTMGERIGAIKQESEEPPTKKNRMQLSDDEGHFTSSDLISSPFLGPHPHQPPF

SEQ ID NO: 8169 - protein, 80 aa, Synthetic construct
GDLRSEQPCFKSDHGRRFTMGERIGAIKQESEEPPTKKNRMQLSDDEGHFTSSDLISSPFLGPHPHQPPFCLPFYLIPPS

SEQ ID NO: 8170 - protein, 80 aa, Synthetic construct
KSDHGRRFTMGERIGAIKQESEEPPTKKNRMQLSDDEGHFTSSDLISSPFLGPHPHQPPFCLPFYLIPPSATAYLPMLEK

SEQ ID NO: 8171 - protein, 80 aa, Synthetic construct
GERIGAIKQESEEPPTKKNRMQLSDDEGHFTSSDLISSPFLGPHPHQPPFCLPFYLIPPSATAYLPMLEKCWYPTSVPVL

SEQ ID NO: 8172 - protein, 80 aa, Synthetic construct
SEEPPTKKNRMQLSDDEGHFTSSDLISSPFLGPHPHQPPFCLPFYLIPPSATAYLPMLEKCWYPTSVPVLYPGLNASAAA

SEQ ID NO: 8173 - protein, 80 aa, Synthetic construct
FQASDVPQDGLLLHGPFARKPKRIRTAFSPSQLLRLERAFEKNHYVVGAERKQLAGSLSLSETQVKVWFQNRRTKYKRQK

SEQ ID NO: 8174 - protein, 80 aa, Synthetic construct
LLLHGPFARKPKRIRTAFSPSQLLRLERAFEKNHYVVGAERKQLAGSLSLSETQVKVWFQNRRTKYKRQKLEEEGPESEQ

SEQ ID NO: 8175 - protein, 80 aa, Synthetic construct; identical to SEQ ID NO: 4166

SEQ ID NO: 8176 - protein, 80 aa, Synthetic construct
RVRKKFPLPRTIWDGEQKTHCFKERTRSLLREWYLQDPYPNPSKKRELAQATGLTPTQVGNWFKNRRQRDRAAAAKNRLQ

SEQ ID NO: 8177 - protein, 80 aa, Synthetic construct; identical to SEQ ID NO: 2124

SEQ ID NO: 8178 - protein, 80 aa, Synthetic construct
CFKERTRSLLREWYLQDPYPNPSKKRELAQATGLTPTQVGNWFKNRRQRDRAAAAKNRLQHQAIGPSGMRSLAEPGCPTH

SEQ ID NO: 8179 - protein, 80 aa, Synthetic construct
PAPTPLKMYPSMPAFSPGPGIKEESVPLSILQTPTPQPLPGALLPQSFPAPAPPQFSSTPVLGYPSPPGGFSTGSPPGNT

SEQ ID NO: 8180 - protein, 80 aa, Synthetic construct
SMPAFSPGPGIKEESVPLSILQTPTPQPLPGALLPQSFPAPAPPQFSSTPVLGYPSPPGGFSTGSPPGNTQQPLPGLPLA

SEQ ID NO: 8181 - protein, 80 aa, Synthetic construct
GTEAKLNKSAVLRKAIDYIRFLQHSNQKLKQENLSLRTAVHKSKSLKDLVSACGSGGNTDVLMEGVKTEVEDTLTPPPSD

SEQ ID NO: 8182 - protein, 80 aa, Synthetic construct
VLRKAIDYIRFLQHSNQKLKQENLSLRTAVHKSKSLKDLVSACGSGGNTDVLMEGVKTEVEDTLTPPPSDAGSPFQSSPL

SEQ ID NO: 8183 - protein, 80 aa, Synthetic construct
FLQHSNQKLKQENLSLRTAVHKSKSLKDLVSACGSGGNTDVLMEGVKTEVEDTLTPPPSDAGSPFQSSPLSLGSRGSGSG

SEQ ID NO: 8184 - protein, 80 aa, Synthetic construct
DRKMSKSALNQTKKRKKRRHRTIFTSYQLEELEKAFNEAHYPDVYAREMLAMKTELPEDRIQVWFQNRRAKWRKREKCWG

SEQ ID NO: 8185 - protein, 80 aa, Synthetic construct
QTKKRKKRRHRTIFTSYQLEELEKAFNEAHYPDVYAREMLAMKTELPEDRIQVWFQNRRAKWRKREKCWGRSSVMAEYGL

SEQ ID NO: 8186 - protein, 80 aa, Synthetic construct
QLLPSGAAAPMAGSMPGMPSPPVLVNAAQSVFVQASSSAADTNQVLKQAKQWKTCPVCNELFPSNVYQVHMEVAHKHSES

SEQ ID NO: 8187 - protein, 80 aa, Synthetic construct
MAGSMPGMPSPPVLVNAAQSVFVQASSSAADTNQVLKQAKQWKTCPVCNELFPSNVYQVHMEVAHKHSESKSGEKLEPEK

SEQ ID NO: 8188 - protein, 80 aa, Synthetic construct
PPVLVNAAQSVFVQASSSAADTNQVLKQAKQWKTCPVCNELFPSNVYQVHMEVAHKHSESKSGEKLEPEKLAACAPFLKW

SEQ ID NO: 8189 - protein, 80 aa, Synthetic construct
VFVQASSSAADTNQVLKQAKQWKTCPVCNELFPSNVYQVHMEVAHKHSESKSGEKLEPEKLAACAPFLKWMREKTVRCLS

SEQ ID NO: 8190 - protein, 80 aa, Synthetic construct
DTNQVLKQAKQWKTCPVCNELFPSNVYQVHMEVAHKHSESKSGEKLEPEKLAACAPFLKWMREKTVRCLSCKCLVSEEEL

SEQ ID NO: 8191 - protein, 80 aa, Synthetic construct
EEKKQFLKDYFHKKPYPSKKEIELLSSLFWVWKIDVASFFGKRRYICMKAIKNHKPSVLLGFDMSELKNVKHRLNFEYEP

SEQ ID NO: 8192 - protein, 80 aa, Synthetic construct
LVGGSHPEDGLAGSTSLMHNHAALPSQPGTLPDLSRPPDSYSGLGRAGATAAASEIKREEKEDEENTSAADHSEEEKKEL

SEQ ID NO: 8193 - protein, 80 aa, Synthetic construct
LAGSTSLMHNHAALPSQPGTLPDLSRPPDSYSGLGRAGATAAASEIKREEKEDEENTSAADHSEEEKKELKAPRARTSPD

SEQ ID NO: 8194 - protein, 80 aa, Synthetic construct
HAALPSQPGTLPDLSRPPDSYSGLGRAGATAAASEIKREEKEDEENTSAADHSEEEKKELKAPRARTSPDEDEDDLLPPE

SEQ ID NO: 8195 - protein, 80 aa, Synthetic construct
LPDLSRPPDSYSGLGRAGATAAASEIKREEKEDEENTSAADHSEEEKKELKAPRARTSPDEDEDDLLPPEQKAEREKERR

SEQ ID NO: 8196 - protein, 80 aa, Synthetic construct
YSGLGRAGATAAASEIKREEKEDEENTSAADHSEEEKKELKAPRARTSPDEDEDDLLPPEQKAEREKERRVANNARERLR

SEQ ID NO: 8197 - protein, 80 aa, Synthetic construct
AAASEIKREEKEDEENTSAADHSEEEKKELKAPRARTSPDEDEDDLLPPEQKAEREKERRVANNARERLRVRDINEAFKE

SEQ ID NO: 8198 - protein, 80 aa, Synthetic construct; identical to SEQ ID NO: 1200

SEQ ID NO: 8199 - protein, 80 aa, Synthetic construct; identical to SEQ ID NO: 1765

SEQ ID NO: 8200 - protein, 80 aa, Synthetic construct
LADCKPLAACAPYSSSGQPAAPEPGGRLAAKAAEDFRDKLDKSGSNASSDSEYKVKEEGDREISSSRDSPPVRLKKPRKA

SEQ ID NO: 8201 - protein, 80 aa, Synthetic construct; identical to SEQ ID NO: 1766

SEQ ID NO: 8202 - protein, 80 aa, Synthetic construct
EVFYELAHELPLPHSVSSHLDKASIMRLAISFLRTHKLLSSVCSENESEAEADQQMDNLYLKALEGFIAVVTQDGDMIFL

SEQ ID NO: 8203 - protein, 80 aa, Synthetic construct
PLPHSVSSHLDKASIMRLAISFLRTHKLLSSVCSENESEAEADQQMDNLYLKALEGFIAVVTQDGDMIFLSENISKFMGL

SEQ ID NO: 8204 - protein, 80 aa, Synthetic construct
DKASIMRLAISFLRTHKLLSSVCSENESEAEADQQMDNLYLKALEGFIAVVTQDGDMIFLSENISKFMGLTQVELTGHSI

SEQ ID NO: 8205 - protein, 80 aa, Synthetic construct; identical to SEQ ID NO: 1898

SEQ ID NO: 8206 - protein, 80 aa, Synthetic construct
EADQQMDNLYLKALEGFIAVVTQDGDMIFLSENISKFMGLTQVELTGHSIFDFTHPCDHEEIRENLSLKNGSGFGKKSKD

SEQ ID NO: 8207 - protein, 80 aa, Synthetic construct
LKALEGFIAVVTQDGDMIFLSENISKFMGLTQVELTGHSIFDFTHPCDHEEIRENLSLKNGSGFGKKSKDMSTERDFFMR

SEQ ID NO: 8208 - protein, 80 aa, Synthetic construct
QGTVIYNPRNLQPQCIMCVNYVLSEIEKNDVVFSMDQTESLFKPHLMAMNSIFDSSGKGAVSEKSNFLFTKLKEEPEELA

SEQ ID NO: 8209 - protein, 80 aa, Synthetic construct
LQPQCIMCVNYVLSEIEKNDVVFSMDQTESLFKPHLMAMNSIFDSSGKGAVSEKSNFLFTKLKEEPEELAQLAPTPGDAI

SEQ ID NO: 8210 - protein, 80 aa, Synthetic construct; identical to SEQ ID NO: 3097

SEQ ID NO: 8211 - protein, 80 aa, Synthetic construct
VSEKSNFLFTKLKEEPEELAQLAPTPGDAIISLDFGNQNFEESSAYGKAILPPSQPWATELRSHSTQSEAGSLPAFTVPQ

SEQ ID NO: 8212 - protein, 80 aa, Synthetic construct
KLKEEPEELAQLAPTPGDAIISLDFGNQNFEESSAYGKAILPPSQPWATELRSHSTQSEAGSLPAFTVPQAAAPGSTTPS

SEQ ID NO: 8213 - protein, 80 aa, Synthetic construct; identical to SEQ ID NO: 1874

SEQ ID NO: 8214 - protein, 80 aa, Synthetic construct
EGHQPQKVARRVFTNSRERWRQQNVNGAFAELRKLLPTHPPDRKLSKNEVLRLAMKYIGFLVRLLRDQAAALAAGPTPPG

SEQ ID NO: 8215 - protein, 80 aa, Synthetic construct
RVFTNSRERWRQQNVNGAFAELRKLLPTHPPDRKLSKNEVLRLAMKYIGFLVRLLRDQAAALAAGPTPPGPRKRPVHRVP

SEQ ID NO: 8216 - protein, 80 aa, Synthetic construct; identical to SEQ ID NO: 1875

SEQ ID NO: 8217 - protein, 80 aa, Synthetic construct
MKREITETDTRALAKERQKKDNHNLIERRRRYNINYRIKELGTLIPKSNDPDMRWNKGTILKASVEYIKWLQKEQQRARE

SEQ ID NO: 8218 - protein, 80 aa, Synthetic construct
QLSSFDISPREKLIDAKTGLQVHSNLHAGRTRVYSGSRRSFFCRIKSCKISVKEEHGCLPNSKKKEHRKFYTIHCTGYLR

SEQ ID NO: 8219 - protein, 80 aa, Synthetic construct; identical to SEQ ID NO: 2496

SEQ ID NO: 8220 - protein, 80 aa, Synthetic construct; identical to SEQ ID NO: 1201

SEQ ID NO: 8221 - protein, 80 aa, Synthetic construct; identical to SEQ ID NO: 1202

SEQ ID NO: 8222 - protein, 80 aa, Synthetic construct; identical to SEQ ID NO: 1203

SEQ ID NO: 8223 - protein, 80 aa, Synthetic construct; identical to SEQ ID NO: 1943

SEQ ID NO: 8224 - protein, 80 aa, Synthetic construct
RRVQGVLRGRAREREQLQAEASERFAAGYIQCMHEVHTFVSTCQAIDATVAAELLNHLLESMPLREGSSFQDLLGDALAG

SEQ ID NO: 8225 - protein, 80 aa, Synthetic construct
AREREQLQAEASERFAAGYIQCMHEVHTFVSTCQAIDATVAAELLNHLLESMPLREGSSFQDLLGDALAGPPRAPGRSGW

SEQ ID NO: 8226 - protein, 80 aa, Synthetic construct; identical to SEQ ID NO: 2205

SEQ ID NO: 8227 - protein, 80 aa, Synthetic construct; identical to SEQ ID NO: 1204

SEQ ID NO: 8228 - protein, 80 aa, Synthetic construct; identical to SEQ ID NO: 2055

SEQ ID NO: 8229 - protein, 80 aa, Synthetic construct; identical to SEQ ID NO: 3930

SEQ ID NO: 8230 - protein, 80 aa, Synthetic construct
KPRRSRTIFTELQLMGLEKKFQKQKYLSTPDRLDLAQSLGLTQLQVKTWYQNRRMKWKKMVLKGGQEAPTKPKGRPKKNS

SEQ ID NO: 8231 - protein, 80 aa, Synthetic construct; identical to SEQ ID NO: 1205

SEQ ID NO: 8232 - protein, 80 aa, Synthetic construct; identical to SEQ ID NO: 1206

SEQ ID NO: 8233 - protein, 80 aa, Synthetic construct; identical to SEQ ID NO: 2126

SEQ ID NO: 8234 - protein, 80 aa, Synthetic construct; identical to SEQ ID NO: 1207

SEQ ID NO: 8235 - protein, 80 aa, Synthetic construct; identical to SEQ ID NO: 1208

SEQ ID NO: 8236 - protein, 80 aa, Synthetic construct
KPLLWSPFLQRPLHKRKGGQVRFSNDQTIELEKKFETQKYLSPPERKRLAKMLQLSERQVKTWFQNRRAKWRRLKQENPQ

SEQ ID NO: 8237 - protein, 80 aa, Synthetic construct; identical to SEQ ID NO: 2127

SEQ ID NO: 8238 - protein, 80 aa, Synthetic construct; identical to SEQ ID NO: 1953

SEQ ID NO: 8239 - protein, 80 aa, Synthetic construct; identical to SEQ ID NO: 1209

SEQ ID NO: 8240 - protein, 80 aa, Synthetic construct
PPPPQPPQPAPQATSCSFAQNIKEESSYCLYDSADKCPKVSATAAELAPFPRGPPPDGCALGTSSGVPVPGYFRLSQAYG

SEQ ID NO: 8241 - protein, 80 aa, Synthetic construct
PQATSCSFAQNIKEESSYCLYDSADKCPKVSATAAELAPFPRGPPPDGCALGTSSGVPVPGYFRLSQAYGTAKGYGSGGG

SEQ ID NO: 8242 - protein, 80 aa, Synthetic construct
NIKEESSYCLYDSADKCPKVSATAAELAPFPRGPPPDGCALGTSSGVPVPGYFRLSQAYGTAKGYGSGGGGAQQLGAGPF

SEQ ID NO: 8243 - protein, 80 aa, Synthetic construct
VKPDKCKILKKTVDQIQLMKRMEQEKSTTDDDVQKSDISSSSQGVIEKESLGPLLLEALDGFFFVVNCEGRIVFVSENVT

SEQ ID NO: 8244 - protein, 80 aa, Synthetic construct
RMEQEKSTTDDDVQKSDISSSSQGVIEKESLGPLLLEALDGFFFVVNCEGRIVFVSENVTSYLGYNQEELMNTSVYSILH

SEQ ID NO: 8245 - protein, 80 aa, Synthetic construct
DDVQKSDISSSSQGVIEKESLGPLLLEALDGFFFVVNCEGRIVFVSENVTSYLGYNQEELMNTSVYSILHVGDHAEFVKN

SEQ ID NO: 8246 - protein, 80 aa, Synthetic construct
ITTLSVEPDKKDSASTSVSVTGQVQGNSSIKLELDASKKKESKDHQLLRYLLDKDEKDLRSTPNLSLDDVKVKVEKKEQM

SEQ ID NO: 8247 - protein, 80 aa, Synthetic construct
KDSASTSVSVTGQVQGNSSIKLELDASKKKESKDHQLLRYLLDKDEKDLRSTPNLSLDDVKVKVEKKEQMDPCNTNPTPM

SEQ ID NO: 8248 - protein, 80 aa, Synthetic construct
TGQVQGNSSIKLELDASKKKESKDHQLLRYLLDKDEKDLRSTPNLSLDDVKVKVEKKEQMDPCNTNPTPMTKPTPEEIKL

SEQ ID NO: 8249 - protein, 80 aa, Synthetic construct
ESKDHQLLRYLLDKDEKDLRSTPNLSLDDVKVKVEKKEQMDPCNTNPTPMTKPTPEEIKLEAQSQFTADLDQFDQLLPTL

SEQ ID NO: 8250 - protein, 80 aa, Synthetic construct
LLDKDEKDLRSTPNLSLDDVKVKVEKKEQMDPCNTNPTPMTKPTPEEIKLEAQSQFTADLDQFDQLLPTLEKAAQLPGLC

SEQ ID NO: 8251 - protein, 80 aa, Synthetic construct
STPNLSLDDVKVKVEKKEQMDPCNTNPTPMTKPTPEEIKLEAQSQFTADLDQFDQLLPTLEKAAQLPGLCETDRMDGAVT

SEQ ID NO: 8252 - protein, 80 aa, Synthetic construct
KVKVEKKEQMDPCNTNPTPMTKPTPEEIKLEAQSQFTADLDQFDQLLPTLEKAAQLPGLCETDRMDGAVTSVTIKSEILP

SEQ ID NO: 8253 - protein, 80 aa, Synthetic construct
DPCNTNPTPMTKPTPEEIKLEAQSQFTADLDQFDQLLPTLEKAAQLPGLCETDRMDGAVTSVTIKSEILPASLQSATARP

SEQ ID NO: 8254 - protein, 80 aa, Synthetic construct
TKPTPEEIKLEAQSQFTADLDQFDQLLPTLEKAAQLPGLCETDRMDGAVTSVTIKSEILPASLQSATARPTSRLNRLPEL

SEQ ID NO: 8255 - protein, 80 aa, Synthetic construct
TSRLNRLPELELEAIDNQFGQPGTGDQIPWTNNTVTAINQSKSEDQCISSQLDELLCPPTTVEGRNDEKALLEQLVSFLS

SEQ ID NO: 8256 - protein, 80 aa, Synthetic construct
QPGTGDQIPWTNNTVTAINQSKSEDQCISSQLDELLCPPTTVEGRNDEKALLEQLVSFLSGKDETELAELDRALGIDKLV

SEQ ID NO: 8257 - protein, 80 aa, Synthetic construct
TNNTVTAINQSKSEDQCISSQLDELLCPPTTVEGRNDEKALLEQLVSFLSGKDETELAELDRALGIDKLVQGGGLDVLSE

SEQ ID NO: 8258 - protein, 80 aa, Synthetic construct; identical to SEQ ID NO: 1210

SEQ ID NO: 8259 - protein, 80 aa, Synthetic construct; identical to SEQ ID NO: 2084

SEQ ID NO: 8260 - protein, 80 aa, Synthetic construct; identical to SEQ ID NO: 250

SEQ ID NO: 8261 - protein, 80 aa, Synthetic construct; identical to SEQ ID NO: 3459

SEQ ID NO: 8262 - protein, 80 aa, Synthetic construct; identical to SEQ ID NO: 2221

SEQ ID NO: 8263 - protein, 80 aa, Synthetic construct
YDSRLLGSARPELGAALGIYGAPYAAAAAAQSYPGYLPYSPEPPSLYGALNPQYEFKEAAGSFTSSLAQPGAYYPYERTL

SEQ ID NO: 8264 - protein, 80 aa, Synthetic construct; identical to SEQ ID NO: 1926

SEQ ID NO: 8265 - protein, 80 aa, Synthetic construct; identical to SEQ ID NO: 1927

SEQ ID NO: 8266 - protein, 80 aa, Synthetic construct
NATRETTSTLKAWLNEHRKNPYPTKGEKIMLAIITKMTLTQVSTWFANARRRLKKENKMTWAPKNKGGEERKAEGGEEDS

SEQ ID NO: 8267 - protein, 80 aa, Synthetic construct; identical to SEQ ID NO: 3567

SEQ ID NO: 8268 - protein, 80 aa, Synthetic construct
MATQTLSIDSYQDGQQMQVVTELKTEQDPNCSEPDAEGVSPPPVESQTPMDVDKQAIYRHPLFPLLALLFEKCEQSTQGS

SEQ ID NO: 8269 - protein, 80 aa, Synthetic construct
YQDGQQMQVVTELKTEQDPNCSEPDAEGVSPPPVESQTPMDVDKQAIYRHPLFPLLALLFEKCEQSTQGSEGTTSASFDV

SEQ ID NO: 8270 - protein, 80 aa, Synthetic construct
EKCEQSTQGSEGTTSASFDVDIENFVRKQEKEGKPFFCEDPETDNLMVKAIQVLRIHLLELEKVNELCKDFCSRYIACLK

SEQ ID NO: 8271 - protein, 80 aa, Synthetic construct
EGTTSASFDVDIENFVRKQEKEGKPFFCEDPETDNLMVKAIQVLRIHLLELEKVNELCKDFCSRYIACLKTKMNSETLLS

SEQ ID NO: 8272 - protein, 80 aa, Synthetic construct
KEGKPFFCEDPETDNLMVKAIQVLRIHLLELEKVNELCKDFCSRYIACLKTKMNSETLLSGEPGSPYSPVQSQQIQSAIT

SEQ ID NO: 8273 - protein, 80 aa, Synthetic construct; identical to SEQ ID NO: 1775

SEQ ID NO: 8274 - protein, 80 aa, Synthetic construct
IQVLRIHLLELEKVNELCKDFCSRYIACLKTKMNSETLLSGEPGSPYSPVQSQQIQSAITGTISPQGIVVPASALQQGNV

SEQ ID NO: 8275 - protein, 80 aa, Synthetic construct; identical to SEQ ID NO: 1928

SEQ ID NO: 8276 - protein, 80 aa, Synthetic construct; identical to SEQ ID NO: 1211

SEQ ID NO: 8277 - protein, 80 aa, Synthetic construct; identical to SEQ ID NO: 1212

SEQ ID NO: 8278 - protein, 80 aa, Synthetic construct; identical to SEQ ID NO: 1213

SEQ ID NO: 8279 - protein, 80 aa, Synthetic construct
KLIPTHPPDKKLSKNEILRLAMKYINFLAKLLNDQEEEGTQRAKTGKDPVVGAGGGGGGGGGGAPPDDLLQDVLSPNSSC

SEQ ID NO: 8280 - protein, 80 aa, Synthetic construct
MASGSGCPPGKCVCNSCGLEIVDKYLLKVNDLCWHVRCLSCSVCRTSLGRHTSCYIKDKDIFCKLDYFRRYGTRCSRCGR

SEQ ID NO: 8281 - protein, 80 aa, Synthetic construct; identical to SEQ ID NO: 1935

SEQ ID NO: 8282 - protein, 80 aa, Synthetic construct; identical to SEQ ID NO: 1936

SEQ ID NO: 8283 - protein, 80 aa, Synthetic construct; identical to SEQ ID NO: 1837

SEQ ID NO: 8284 - protein, 80 aa, Synthetic construct
TKARLERFKLRRMKANARERNRMHGLNAALDNLRKVVPCYSKTQKLSKIETLRLAKNYIWALSEILRSGKSPDLVSFVQT

SEQ ID NO: 8285 - protein, 80 aa, Synthetic construct; identical to SEQ ID NO: 1838

SEQ ID NO: 8286 - protein, 80 aa, Synthetic construct; identical to SEQ ID NO: 4071

SEQ ID NO: 8287 - protein, 80 aa, Synthetic construct; identical to SEQ ID NO: 3078

SEQ ID NO: 8288 - protein, 80 aa, Synthetic construct; identical to SEQ ID NO: 1214

SEQ ID NO: 8289 - protein, 80 aa, Synthetic construct; identical to SEQ ID NO: 1215

SEQ ID NO: 8290 - protein, 80 aa, Synthetic construct; identical to SEQ ID NO: 2168

SEQ ID NO: 8291 - protein, 80 aa, Synthetic construct; identical to SEQ ID NO: 1216

SEQ ID NO: 8292 - protein, 80 aa, Synthetic construct; identical to SEQ ID NO: 1217

SEQ ID NO: 8293 - protein, 80 aa, Synthetic construct; identical to SEQ ID NO: 1218

SEQ ID NO: 8294 - protein, 80 aa, Synthetic construct; identical to SEQ ID NO: 4171

SEQ ID NO: 8295 - protein, 80 aa, Synthetic construct; identical to SEQ ID NO: 2295

SEQ ID NO: 8296 - protein, 80 aa, Synthetic construct; identical to SEQ ID NO: 3387

SEQ ID NO: 8297 - protein, 80 aa, Synthetic construct; identical to SEQ ID NO: 1219

SEQ ID NO: 8298 - protein, 80 aa, Synthetic construct; identical to SEQ ID NO: 1220

SEQ ID NO: 8299 - protein, 80 aa, Synthetic construct; identical to SEQ ID NO: 2272

SEQ ID NO: 8300 - protein, 80 aa, Synthetic construct
RRIGHPYQNRTPPKRKKPRTSFSRVQICELEKRFHRQKYLASAERAALAKSLKMTDAQVKTWFQNRRTKWRRQTAEEREA

SEQ ID NO: 8301 - protein, 80 aa, Synthetic construct
TPPKRKKPRTSFSRVQICELEKRFHRQKYLASAERAALAKSLKMTDAQVKTWFQNRRTKWRRQTAEEREAERQQASRLML

SEQ ID NO: 8302 - protein, 80 aa, Synthetic construct
GLPRRRGLRKKKTTKLRLERVKFRRQEANARERNRMHGLNDALDNLRKVVPCYSKTQKLSKIETLRLAKNYIWALSEILR

SEQ ID NO: 8303 - protein, 80 aa, Synthetic construct
KKTTKLRLERVKFRRQEANARERNRMHGLNDALDNLRKVVPCYSKTQKLSKIETLRLAKNYIWALSEILRIGKRPDLLTF

SEQ ID NO: 8304 - protein, 80 aa, Synthetic construct; identical to SEQ ID NO: 1868

SEQ ID NO: 8305 - protein, 80 aa, Synthetic construct
DALDNLRKVVPCYSKTQKLSKIETLRLAKNYIWALSEILRIGKRPDLLTFVQNLCKGLSQPTTNLVAGCLQLNARSFLMG

SEQ ID NO: 8306 - protein, 80 aa, Synthetic construct
SPYSTFYPPYHSPELTTPPGHGTLDNSKSMKPYNYCSAYESFYESTSPECASPQFEGPLSPPPINYNGIFSLKQEETLDY

SEQ ID NO: 8307 - protein, 80 aa, Synthetic construct
KPYNYCSAYESFYESTSPECASPQFEGPLSPPPINYNGIFSLKQEETLDYGKNYNYGMHYCAVPPRGPLGQGAMFRLPTD

SEQ ID NO: 8308 - protein, 80 aa, Synthetic construct
SFYESTSPECASPQFEGPLSPPPINYNGIFSLKQEETLDYGKNYNYGMHYCAVPPRGPLGQGAMFRLPTDSHFPYDLHLR

SEQ ID NO: 8309 - protein, 80 aa, Synthetic construct; identical to SEQ ID NO: 1869

SEQ ID NO: 8310 - protein, 80 aa, Synthetic construct; identical to SEQ ID NO: 1221

SEQ ID NO: 8311 - protein, 80 aa, Synthetic construct; identical to SEQ ID NO: 2152

SEQ ID NO: 8312 - protein, 80 aa, Synthetic construct; identical to SEQ ID NO: 1222

SEQ ID NO: 8313 - protein, 80 aa, Synthetic construct; identical to SEQ ID NO: 1223

SEQ ID NO: 8314 - protein, 80 aa, Synthetic construct; identical to SEQ ID NO: 1224

SEQ ID NO: 8315 - protein, 80 aa, Synthetic construct; identical to SEQ ID NO: 1225

SEQ ID NO: 8316 - protein, 80 aa, Synthetic construct; identical to SEQ ID NO: 1226

SEQ ID NO: 8317 - protein, 80 aa, Synthetic construct; identical to SEQ ID NO: 1858

SEQ ID NO: 8318 - protein, 80 aa, Synthetic construct
GNGGGGGGGPGTAFSIDSLIGPPPPRSGHLLYTGYPMFMPYRPLVLPQALAPAPLPAGLPPLAPLASFAGRLTNTFCAGL

SEQ ID NO: 8319 - protein, 80 aa, Synthetic construct
GTAFSIDSLIGPPPPRSGHLLYTGYPMFMPYRPLVLPQALAPAPLPAGLPPLAPLASFAGRLTNTFCAGLGQAVPSMVAL

SEQ ID NO: 8320 - protein, 80 aa, Synthetic construct
LYTGYPMFMPYRPLVLPQALAPAPLPAGLPPLAPLASFAGRLTNTFCAGLGQAVPSMVALTTALPSFAEPPDAFYGPQEL

SEQ ID NO: 8321 - protein, 80 aa, Synthetic construct; identical to SEQ ID NO: 1872

SEQ ID NO: 8322 - protein, 80 aa, Synthetic construct
QATQGSECITSASFDVDIENFVHQQEQEHKPFFSDDPELDNLMVKAIQVLRIHLLELEKVNELCKDFCNRYITCLKTKMH

SEQ ID NO: 8323 - protein, 80 aa, Synthetic construct
SASFDVDIENFVHQQEQEHKPFFSDDPELDNLMVKAIQVLRIHLLELEKVNELCKDFCNRYITCLKTKMHSDNLLRNDLG

SEQ ID NO: 8324 - protein, 80 aa, Synthetic construct
FVHQQEQEHKPFFSDDPELDNLMVKAIQVLRIHLLELEKVNELCKDFCNRYITCLKTKMHSDNLLRNDLGGPYSPNQPSI

SEQ ID NO: 8325 - protein, 80 aa, Synthetic construct
PFFSDDPELDNLMVKAIQVLRIHLLELEKVNELCKDFCNRYITCLKTKMHSDNLLRNDLGGPYSPNQPSINLHSQDLLQN

SEQ ID NO: 8326 - protein, 80 aa, Synthetic construct
NLMVKAIQVLRIHLLELEKVNELCKDFCNRYITCLKTKMHSDNLLRNDLGGPYSPNQPSINLHSQDLLQNSPNSMSGVSN

SEQ ID NO: 8327 - protein, 80 aa, Synthetic construct
RDPRAPSVGRRGARSSRLGSGQRQSASEREKLRMRTLARALHELRRFLPPSVAPAGQSLTKIETLRLAIRYIGHLSAVLG

SEQ ID NO: 8328 - protein, 80 aa, Synthetic construct
RGARSSRLGSGQRQSASEREKLRMRTLARALHELRRFLPPSVAPAGQSLTKIETLRLAIRYIGHLSAVLGLSEESLQRRC

SEQ ID NO: 8329 - protein, 80 aa, Synthetic construct; identical to SEQ ID NO: 3867

SEQ ID NO: 8330 - protein, 80 aa, Synthetic construct; identical to SEQ ID NO: 3555

SEQ ID NO: 8331 - protein, 80 aa, Synthetic construct; identical to SEQ ID NO: 1747

SEQ ID NO: 8332 - protein, 80 aa, Synthetic construct; identical to SEQ ID NO: 2261

SEQ ID NO: 8333 - protein, 80 aa, Synthetic construct; identical to SEQ ID NO: 1227

SEQ ID NO: 8334 - protein, 80 aa, Synthetic construct; identical to SEQ ID NO: 1228

SEQ ID NO: 8335 - protein, 80 aa, Synthetic construct; identical to SEQ ID NO: 2222

SEQ ID NO: 8336 - protein, 80 aa, Synthetic construct; identical to SEQ ID NO: 4075

SEQ ID NO: 8337 - protein, 80 aa, Synthetic construct
FHCISVDSSSNQLPSSKRMRTAFTSTQLLELEREFASNMYLSRLRRIEIATYLNLSEKQVKIWFQNRRVKHKKEGKGSNH

SEQ ID NO: 8338 - protein, 80 aa, Synthetic construct; identical to SEQ ID NO: 2175

SEQ ID NO: 8339 - protein, 80 aa, Synthetic construct; identical to SEQ ID NO: 2492

SEQ ID NO: 8340 - protein, 80 aa, Synthetic construct; identical to SEQ ID NO: 1944

SEQ ID NO: 8341 - protein, 80 aa, Synthetic construct
YLSQLDSWGDPKAAYRLEQPVGRPLSSCSYPPSVKEENVCCMYSAEKRAKSGPEAALYSHPLPESCLGEHEVPVPSYYRA

SEQ ID NO: 8342 - protein, 80 aa, Synthetic construct
EIKAENTTGNWLTAKSGRKKRCPYTKHQTLELEKEFLFNMYLTRERRLEISKTINLTDRQVKIWFQNRRMKLKKMNRENR

SEQ ID NO: 8343 - protein, 80 aa, Synthetic construct; identical to SEQ ID NO: 1777

SEQ ID NO: 8344 - protein, 80 aa, Synthetic construct; identical to SEQ ID NO: 1229

SEQ ID NO: 8345 - protein, 80 aa, Synthetic construct; identical to SEQ ID NO: 1230

SEQ ID NO: 8346 - protein, 80 aa, Synthetic construct; identical to SEQ ID NO: 1834

SEQ ID NO: 8347 - protein, 80 aa, Synthetic construct; identical to SEQ ID NO: 1231

SEQ ID NO: 8348 - protein, 80 aa, Synthetic construct; identical to SEQ ID NO: 1232

SEQ ID NO: 8349 - protein, 80 aa, Synthetic construct; identical to SEQ ID NO: 1798

SEQ ID NO: 8350 - protein, 80 aa, Synthetic construct; identical to SEQ ID NO: 1233

SEQ ID NO: 8351 - protein, 80 aa, Synthetic construct; identical to SEQ ID NO: 1234

SEQ ID NO: 8352 - protein, 80 aa, Synthetic construct
QKQKRHRTRFTPAQLNELERSFAKTHYPDIFMREELALRIGLTESRVQVWFQNRRAKWKKRKKTTNVFRAPGTLLPTPGL

SEQ ID NO: 8353 - protein, 80 aa, Synthetic construct; identical to SEQ ID NO: 1235

SEQ ID NO: 8354 - protein, 80 aa, Synthetic construct; identical to SEQ ID NO: 2210

SEQ ID NO: 8355 - protein, 80 aa, Synthetic construct; identical to SEQ ID NO: 3164

SEQ ID NO: 8356 - protein, 80 aa, Synthetic construct; identical to SEQ ID NO: 2153

SEQ ID NO: 8357 - protein, 80 aa, Synthetic construct; identical to SEQ ID NO: 1236

SEQ ID NO: 8358 - protein, 80 aa, Synthetic construct; identical to SEQ ID NO: 1892

SEQ ID NO: 8359 - protein, 80 aa, Synthetic construct; identical to SEQ ID NO: 1237

SEQ ID NO: 8360 - protein, 80 aa, Synthetic construct
NQRAKWRKQEKIGNLGAPQQLSEASVALPTNLDVAGPTWTSTALRRLAPPTSCCPSAQDQLASAWFPAWITLLPAHPWET

SEQ ID NO: 8361 - protein, 80 aa, Synthetic construct
KIGNLGAPQQLSEASVALPTNLDVAGPTWTSTALRRLAPPTSCCPSAQDQLASAWFPAWITLLPAHPWETQPVPGLPIHQ

SEQ ID NO: 8362 - protein, 80 aa, Synthetic construct; identical to SEQ ID NO: 4186

SEQ ID NO: 8363 - protein, 80 aa, Synthetic construct; identical to SEQ ID NO: 1238

SEQ ID NO: 8364 - protein, 80 aa, Synthetic construct
TAETVQRIKKTRRLKANNRERNRMHNLNAALDALREVLPTFPEDAKLTKIETLRFAHNYIWALTETLRLADHCGGGGGGL

SEQ ID NO: 8365 - protein, 80 aa, Synthetic construct; identical to SEQ ID NO: 1801

SEQ ID NO: 8366 - protein, 80 aa, Synthetic construct
RNRMHNLNAALDALREVLPTFPEDAKLTKIETLRFAHNYIWALTETLRLADHCGGGGGGLPGALFSEAVLLSPGGASAAL

SEQ ID NO: 8367 - protein, 80 aa, Synthetic construct; identical to SEQ ID NO: 1913

SEQ ID NO: 8368 - protein, 80 aa, Synthetic construct
PLLVPKAERLSPPAPSGSERRLSGDLSSMPGPGTLSVRVSPPQPILSRGRPDSNKTENRRITHISAEQKRRFNIKLGFDT

SEQ ID NO: 8369 - protein, 80 aa, Synthetic construct; identical to SEQ ID NO: 2234

SEQ ID NO: 8370 - protein, 80 aa, Synthetic construct
SEALLHSLRRSRRVKANDRERNRMHNLNAALDALRSVLPSFPDDTKLTKIETLRFAYNYIWALAETLRLADQGLPGGGAR

SEQ ID NO: 8371 - protein, 80 aa, Synthetic construct
SRRVKANDRERNRMHNLNAALDALRSVLPSFPDDTKLTKIETLRFAYNYIWALAETLRLADQGLPGGGARERLLPPQCVP

SEQ ID NO: 8372 - protein, 80 aa, Synthetic construct
RNRMHNLNAALDALRSVLPSFPDDTKLTKIETLRFAYNYIWALAETLRLADQGLPGGGARERLLPPQCVPCLPGPPSPAS

SEQ ID NO: 8373 - protein, 80 aa, Synthetic construct; identical to SEQ ID NO: 5355

SEQ ID NO: 8374 - protein, 80 aa, Synthetic construct; identical to SEQ ID NO: 2086

SEQ ID NO: 8375 - protein, 80 aa, Synthetic construct; identical to SEQ ID NO: 1239

SEQ ID NO: 8376 - protein, 80 aa, Synthetic construct
FSVESLLSDSPPRRKAASNAAAAAAAGLDFAPGLPCAPRTLIGKGHFLLYPITQPLGFLVPQAALKGGAGLEPAPKDAPP

SEQ ID NO: 8377 - protein, 80 aa, Synthetic construct; identical to SEQ ID NO: 2162

SEQ ID NO: 8378 - protein, 80 aa, Synthetic construct
KCDSNVSSSKKRRHRTTFTSLQLEELEKVFQKTHYPDVYVREQLALRTELTEARVQVWFQNRRAKWRKRERYGQIQQAKS

SEQ ID NO: 8379 - protein, 80 aa, Synthetic construct
GSPVKVAAAAGPANVHLINSGVGVTALQLPSATAPGNFLLANPVSGSPIVTGVALQQGKIILTATFPTSMLVSQVLPPAP

SEQ ID NO: 8380 - protein, 80 aa, Synthetic construct
GPANVHLINSGVGVTALQLPSATAPGNFLLANPVSGSPIVTGVALQQGKIILTATFPTSMLVSQVLPPAPGLALPLKPET

SEQ ID NO: 8381 - protein, 80 aa, Synthetic construct
GVGVTALQLPSATAPGNFLLANPVSGSPIVTGVALQQGKIILTATFPTSMLVSQVLPPAPGLALPLKPETAISVPEGGLP

SEQ ID NO: 8382 - protein, 80 aa, Synthetic construct
SATAPGNFLLANPVSGSPIVTGVALQQGKIILTATFPTSMLVSQVLPPAPGLALPLKPETAISVPEGGLPVAPSPALPEA

SEQ ID NO: 8383 - protein, 80 aa, Synthetic construct
ANPVSGSPIVTGVALQQGKIILTATFPTSMLVSQVLPPAPGLALPLKPETAISVPEGGLPVAPSPALPEAHALGTLSAQQ

SEQ ID NO: 8384 - protein, 80 aa, Synthetic construct
YHKWRTYFKKRLQQHKDEDLSSLVQDDDMLYWHKHGDGWKTPVPMEEDPLLDTDMLMSEFSDTLFSTLSSHQPVAWPNPR

SEQ ID NO: 8385 - protein, 80 aa, Synthetic construct; identical to SEQ ID NO: 269

SEQ ID NO: 8386 - protein, 80 aa, Synthetic construct; identical to SEQ ID NO: 271

SEQ ID NO: 8387 - protein, 80 aa, Synthetic construct; identical to SEQ ID NO: 272

SEQ ID NO: 8388 - protein, 80 aa, Synthetic construct; identical to SEQ ID NO: 273

SEQ ID NO: 8389 - protein, 80 aa, Synthetic construct; identical to SEQ ID NO: 1891

SEQ ID NO: 8390 - protein, 80 aa, Synthetic construct
VGNSGDSVRGGRSEQPKARQRRKPRVLFSQAQVLALERRFKQQRYLSAPEREHLASALQLTSTQVKIWFQNRRYKCKRQR

SEQ ID NO: 8391 - protein, 80 aa, Synthetic construct
GRSEQPKARQRRKPRVLFSQAQVLALERRFKQQRYLSAPEREHLASALQLTSTQVKIWFQNRRYKCKRQRQDKSLELAGH

SEQ ID NO: 8392 - protein, 80 aa, Synthetic construct
RRKPRVLFSQAQVLALERRFKQQRYLSAPEREHLASALQLTSTQVKIWFQNRRYKCKRQRQDKSLELAGHPLTPRRVAVP

SEQ ID NO: 8393 - protein, 80 aa, Synthetic construct
KKPLPAKGSAAECKQSQRNAANARERARMRVLSKAFSRLKTSLPWVPPDTKLSKLDTLRLASSYIAHLRQLLQEDRYENG

SEQ ID NO: 8394 - protein, 80 aa, Synthetic construct; identical to SEQ ID NO: 2131

SEQ ID NO: 8395 - protein, 80 aa, Synthetic construct
EVQIKTWFQNRRMKHKRQMQDPQLHSPFSGSLHAPPAFYSTSSGLANGLQLLCPWAPLSGPQALMLPPGSFWGLCQVAQE

SEQ ID NO: 8396 - protein, 80 aa, Synthetic construct
RRMKHKRQMQDPQLHSPFSGSLHAPPAFYSTSSGLANGLQLLCPWAPLSGPQALMLPPGSFWGLCQVAQEALASAGASCC

SEQ ID NO: 8397 - protein, 80 aa, Synthetic construct
DPQLHSPFSGSLHAPPAFYSTSSGLANGLQLLCPWAPLSGPQALMLPPGSFWGLCQVAQEALASAGASCCGQPLASHPPT

SEQ ID NO: 8398 - protein, 80 aa, Synthetic construct; identical to SEQ ID NO: 3339

SEQ ID NO: 8399 - protein, 80 aa, Synthetic construct
KYRVRKKFPLPRTIWDGEQKTHCFKERTRHLLREWYLQDPYPNPSKKRELAQATGLTPTQVGNWFKNRRQRDRAAAAKNR

SEQ ID NO: 8400 - protein, 80 aa, Synthetic construct; identical to SEQ ID NO: 4856

SEQ ID NO: 8401 - protein, 80 aa, Synthetic construct
THCFKERTRHLLREWYLQDPYPNPSKKRELAQATGLTPTQVGNWFKNRRQRDRAAAAKNRLQQQVLSQGSGRALRAEGDG

SEQ ID NO: 8402 - protein, 80 aa, Synthetic construct; identical to SEQ ID NO: 4163

SEQ ID NO: 8403 - protein, 80 aa, Synthetic construct; identical to SEQ ID NO: 3558

SEQ ID NO: 8404 - protein, 80 aa, Synthetic construct; identical to SEQ ID NO: 1240

SEQ ID NO: 8405 - protein, 80 aa, Synthetic construct; identical to SEQ ID NO: 1241

SEQ ID NO: 8406 - protein, 80 aa, Synthetic construct; identical to SEQ ID NO: 1242

SEQ ID NO: 8407 - protein, 80 aa, Synthetic construct; identical to SEQ ID NO: 2270

SEQ ID NO: 8408 - protein, 80 aa, Synthetic construct
AVCRLKRLPSGGYSSTENLQLVLERRRVANAKERERIKNLNRGFARLKALVPFLPQSRKPSKVDILKGATEYIQVLSDLL

SEQ ID NO: 8409 - protein, 80 aa, Synthetic construct; identical to SEQ ID NO: 1243

SEQ ID NO: 8410 - protein, 80 aa, Synthetic construct; identical to SEQ ID NO: 1244

SEQ ID NO: 8411 - protein, 80 aa, Synthetic construct; identical to SEQ ID NO: 1245

SEQ ID NO: 8412 - protein, 80 aa, Synthetic construct; identical to SEQ ID NO: 2223

SEQ ID NO: 8413 - protein, 80 aa, Synthetic construct; identical to SEQ ID NO: 1992

SEQ ID NO: 8414 - protein, 80 aa, Synthetic construct; identical to SEQ ID NO: 1246

SEQ ID NO: 8415 - protein, 80 aa, Synthetic construct; identical to SEQ ID NO: 1247

SEQ ID NO: 8416 - protein, 80 aa, Synthetic construct; identical to SEQ ID NO: 2293

SEQ ID NO: 8417 - protein, 80 aa, Synthetic construct; identical to SEQ ID NO: 1248

SEQ ID NO: 8418 - protein, 80 aa, Synthetic construct; identical to SEQ ID NO: 1932

SEQ ID NO: 8419 - protein, 80 aa, Synthetic construct
GTDKELSDLLDFSAMFSPPVNSGKTRPTTLGSSQFSGSGIDERGGTTSWGTSGQPSPSYDSSRGFTDSPHYSDHLNDSRL

SEQ ID NO: 8420 - protein, 80 aa, Synthetic construct
GNHSVLSSTVTTSSTDLNHKTQENYRGGLQSQSGTVVTTEIKTENKEKDENLHEPPSSDDMKSDDESSQKDIKVSSRGRT

SEQ ID NO: 8421 - protein, 80 aa, Synthetic construct
TTSSTDLNHKTQENYRGGLQSQSGTVVTTEIKTENKEKDENLHEPPSSDDMKSDDESSQKDIKVSSRGRTSSTNEDEDLN

SEQ ID NO: 8422 - protein, 80 aa, Synthetic construct
TQENYRGGLQSQSGTVVTTEIKTENKEKDENLHEPPSSDDMKSDDESSQKDIKVSSRGRTSSTNEDEDLNPEQKIEREKE

SEQ ID NO: 8423 - protein, 80 aa, Synthetic construct
KKNVPTSPRTSPSPYAFSPVISDFYSSLPSQPLDPSNWAWNSTFTESSTSDFQMQDTQWERLVASVPALYSDAYDIFQII

SEQ ID NO: 8424 - protein, 80 aa, Synthetic construct; identical to SEQ ID NO: 280

SEQ ID NO: 8425 - protein, 80 aa, Synthetic construct; identical to SEQ ID NO: 281

SEQ ID NO: 8426 - protein, 80 aa, Synthetic construct; identical to SEQ ID NO: 1729

SEQ ID NO: 8427 - protein, 80 aa, Synthetic construct; identical to SEQ ID NO: 282

SEQ ID NO: 8428 - protein, 80 aa, Synthetic construct; identical to SEQ ID NO: 283

SEQ ID NO: 8429 - protein, 80 aa, Synthetic construct; identical to SEQ ID NO: 610

SEQ ID NO: 8430 - protein, 80 aa, Synthetic construct; identical to SEQ ID NO: 2154

SEQ ID NO: 8431 - protein, 80 aa, Synthetic construct
PKKKHRRNRTTFTTYQLHELERAFEKSHYPDVYSREELAGKVNLPEVRVQVWFQNRRAKWRRQEKLEVSSMKLQDSPLLS

SEQ ID NO: 8432 - protein, 80 aa, Synthetic construct; identical to SEQ ID NO: 5097

SEQ ID NO: 8433 - protein, 80 aa, Synthetic construct; identical to SEQ ID NO: 4179

SEQ ID NO: 8434 - protein, 80 aa, Synthetic construct
TDGSIIYVSDSITPLLGHLPSDVMDQNLLNFLPEQEHSEVYKILSSHMLVTDSPSPEYLKSDSDLEFYCHLLRGSLNPKE

SEQ ID NO: 8435 - protein, 80 aa, Synthetic construct
SITPLLGHLPSDVMDQNLLNFLPEQEHSEVYKILSSHMLVTDSPSPEYLKSDSDLEFYCHLLRGSLNPKEFPTYEYIKFV

SEQ ID NO: 8436 - protein, 80 aa, Synthetic construct
SCDLTQQLLPQTVLQSTPAPMAQFSAQFSMFQTIKDQLEQRTRILQANIRWQQEELHKIQEQLCLVQDSNVQMFLQQPAV

SEQ ID NO: 8437 - protein, 80 aa, Synthetic construct
QTVLQSTPAPMAQFSAQFSMFQTIKDQLEQRTRILQANIRWQQEELHKIQEQLCLVQDSNVQMFLQQPAVSLSFSSTQRP

SEQ ID NO: 8438 - protein, 80 aa, Synthetic construct
MAQFSAQFSMFQTIKDQLEQRTRILQANIRWQQEELHKIQEQLCLVQDSNVQMFLQQPAVSLSFSSTQRPEAQQQLQQRS

SEQ ID NO: 8439 - protein, 80 aa, Synthetic construct; identical to SEQ ID NO: 1707

SEQ ID NO: 8440 - protein, 80 aa, Synthetic construct; identical to SEQ ID NO: 1250

SEQ ID NO: 8441 - protein, 80 aa, Synthetic construct; identical to SEQ ID NO: 3441

SEQ ID NO: 8442 - protein, 80 aa, Synthetic construct; identical to SEQ ID NO: 2215

SEQ ID NO: 8443 - protein, 80 aa, Synthetic construct
RRARTGPAGGQRQSASEREKLRMRTLARALHELRRFLPPSLAPAGQSLTKIETLRLAIRYIGHLSAVLGLSEESLQCRRR

SEQ ID NO: 8444 - protein, 80 aa, Synthetic construct
QRQSASEREKLRMRTLARALHELRRFLPPSLAPAGQSLTKIETLRLAIRYIGHLSAVLGLSEESLQCRRRQRGDAGSPWG

SEQ ID NO: 8445 - protein, 80 aa, Synthetic construct; identical to SEQ ID NO: 1251

SEQ ID NO: 8446 - protein, 80 aa, Synthetic construct; identical to SEQ ID NO: 1252

SEQ ID NO: 8447 - protein, 80 aa, Synthetic construct; identical to SEQ ID NO: 1253

SEQ ID NO: 8448 - protein, 80 aa, Synthetic construct; identical to SEQ ID NO: 2078

SEQ ID NO: 8449 - protein, 80 aa, Synthetic construct; identical to SEQ ID NO: 1254

SEQ ID NO: 8450 - protein, 80 aa, Synthetic construct; identical to SEQ ID NO: 1877

SEQ ID NO: 8451 - protein, 80 aa, Synthetic construct; identical to SEQ ID NO: 1255

SEQ ID NO: 8452 - protein, 80 aa, Synthetic construct; identical to SEQ ID NO: 2208

SEQ ID NO: 8453 - protein, 80 aa, Synthetic construct
PNNPAANWLHARSTRKKRCPYTKHQTLELEKEFLFNMYLTRDRRYEVARLLNLTERQVKIWFQNRRMKMKKINKDRAKDE

SEQ ID NO: 8454 - protein, 80 aa, Synthetic construct; identical to SEQ ID NO: 1256

SEQ ID NO: 8455 - protein, 80 aa, Synthetic construct; identical to SEQ ID NO: 1257

SEQ ID NO: 8456 - protein, 80 aa, Synthetic construct; identical to SEQ ID NO: 1258

SEQ ID NO: 8457 - protein, 80 aa, Synthetic construct; identical to SEQ ID NO: 1259

SEQ ID NO: 8458 - protein, 80 aa, Synthetic construct; identical to SEQ ID NO: 1260

SEQ ID NO: 8459 - protein, 80 aa, Synthetic construct; identical to SEQ ID NO: 1261

SEQ ID NO: 8460 - protein, 80 aa, Synthetic construct; identical to SEQ ID NO: 1262

SEQ ID NO: 8461 - protein, 80 aa, Synthetic construct; identical to SEQ ID NO: 1263

SEQ ID NO: 8462 - protein, 80 aa, Synthetic construct; identical to SEQ ID NO: 2020

SEQ ID NO: 8463 - protein, 80 aa, Synthetic construct; identical to SEQ ID NO: 1264

SEQ ID NO: 8464 - protein, 80 aa, Synthetic construct; identical to SEQ ID NO: 2115

SEQ ID NO: 8465 - protein, 80 aa, Synthetic construct; identical to SEQ ID NO: 4159

SEQ ID NO: 8466 - protein, 80 aa, Synthetic construct; identical to SEQ ID NO: 4182

SEQ ID NO: 8467 - protein, 80 aa, Synthetic construct; identical to SEQ ID NO: 4183

SEQ ID NO: 8468 - protein, 80 aa, Synthetic construct
RKRQKGGSASRRRLSSASSPGGLDAGLVEPPRLLSSPNSASVLKIKTEISEPINFDNDSSIWNYPPNREISRNESPYSMT

SEQ ID NO: 8469 - protein, 80 aa, Synthetic construct
RRRLSSASSPGGLDAGLVEPPRLLSSPNSASVLKIKTEISEPINFDNDSSIWNYPPNREISRNESPYSMTKPPSSEHFPS

SEQ ID NO: 8470 - protein, 80 aa, Synthetic construct
GGLDAGLVEPPRLLSSPNSASVLKIKTEISEPINFDNDSSIWNYPPNREISRNESPYSMTKPPSSEHFPSPQGGGGGGGG

SEQ ID NO: 8471 - protein, 80 aa, Synthetic construct
PRLLSSPNSASVLKIKTEISEPINFDNDSSIWNYPPNREISRNESPYSMTKPPSSEHFPSPQGGGGGGGGGGGLHVAIPD

SEQ ID NO: 8472 - protein, 80 aa, Synthetic construct
SVLKIKTEISEPINFDNDSSIWNYPPNREISRNESPYSMTKPPSSEHFPSPQGGGGGGGGGGGLHVAIPDSVLTPPGADG

SEQ ID NO: 8473 - protein, 80 aa, Synthetic construct
AAKSLGPLHAAAAAAAPRRKRRVLFSQAQVYELERRFKQQKYLSAPEREHLASMIHLTPTQVKIWFQNHRYKMKRQAKDK

SEQ ID NO: 8474 - protein, 80 aa, Synthetic construct
AAAAAAPRRKRRVLFSQAQVYELERRFKQQKYLSAPEREHLASMIHLTPTQVKIWFQNHRYKMKRQAKDKAAQQLQQEGG

SEQ ID NO: 8475 - protein, 80 aa, Synthetic construct
RRVLFSQAQVYELERRFKQQKYLSAPEREHLASMIHLTPTQVKIWFQNHRYKMKRQAKDKAAQQLQQEGGLGPPPPPPPS

SEQ ID NO: 8476 - protein, 80 aa, Synthetic construct; identical to SEQ ID NO: 3887

SEQ ID NO: 8477 - protein, 80 aa, Synthetic construct
WNKGTILKASVDYIRKLQREQQRAKELENRQKKLEHANRHLLLRIQELEMQARAHGLSLIPSTGLCSPDLVNRIIKQEPV

SEQ ID NO: 8478 - protein, 80 aa, Synthetic construct
VDYIRKLQREQQRAKELENRQKKLEHANRHLLLRIQELEMQARAHGLSLIPSTGLCSPDLVNRIIKQEPVLENCSQDLLQ

SEQ ID NO: 8479 - protein, 80 aa, Synthetic construct
QQRAKELENRQKKLEHANRHLLLRIQELEMQARAHGLSLIPSTGLCSPDLVNRIIKQEPVLENCSQDLLQHHADLTCTTT

SEQ ID NO: 8480 - protein, 80 aa, Synthetic construct
QKKLEHANRHLLLRIQELEMQARAHGLSLIPSTGLCSPDLVNRIIKQEPVLENCSQDLLQHHADLTCTTTLDLTDGTITF

SEQ ID NO: 8481 - protein, 80 aa, Synthetic construct
LLLRIQELEMQARAHGLSLIPSTGLCSPDLVNRIIKQEPVLENCSQDLLQHHADLTCTTTLDLTDGTITFNNNLGTGTEA

SEQ ID NO: 8482 - protein, 80 aa, Synthetic construct
QARAHGLSLIPSTGLCSPDLVNRIIKQEPVLENCSQDLLQHHADLTCTTTLDLTDGTITFNNNLGTGTEANQAYSVPTKM

SEQ ID NO: 8483 - protein, 80 aa, Synthetic construct; identical to SEQ ID NO: 4372

SEQ ID NO: 8484 - protein, 80 aa, Synthetic construct; identical to SEQ ID NO: 3816

SEQ ID NO: 8485 - protein, 80 aa, Synthetic construct
NESSWHEECLQCAACQQALTTSCYFRDRKLYCKQDYQQLFAAKCSGCMEKIAPTEFVMRALECVYHLGCFCCCVCERQLR

SEQ ID NO: 8486 - protein, 80 aa, Synthetic construct
QGSQSKGSGDDGKDPRRPKRPRTILTTQQRRAFKASFEVSSKPCRKVRETLAAETGLSVRVVQVWFQNQRAKMKKLARRH

SEQ ID NO: 8487 - protein, 80 aa, Synthetic construct
DGKDPRRPKRPRTILTTQQRRAFKASFEVSSKPCRKVRETLAAETGLSVRVVQVWFQNQRAKMKKLARRHQQQQEQQNSQ

SEQ ID NO: 8488 - protein, 80 aa, Synthetic construct; identical to SEQ ID NO: 1853

SEQ ID NO: 8489 - protein, 80 aa, Synthetic construct
QLVWTQAAQTSELDSNEHLLKTFSYFPYPSLADIALLCLRYGLQMEKVKTWFMAQRLRCGISWSSEEIEETRARVVYRRD

SEQ ID NO: 8490 - protein, 80 aa, Synthetic construct
SELDSNEHLLKTFSYFPYPSLADIALLCLRYGLQMEKVKTWFMAQRLRCGISWSSEEIEETRARVVYRRDQLHFKSLLSF

SEQ ID NO: 8491 - protein, 80 aa, Synthetic construct; identical to SEQ ID NO: 3450

SEQ ID NO: 8492 - protein, 80 aa, Synthetic construct; identical to SEQ ID NO: 3451

SEQ ID NO: 8493 - protein, 80 aa, Synthetic construct
DIQPLERYWAAHQQLRETDIPQLSQASRLSTQQVLDWFDSRLPQPAEVVVCLDEEEEEEEEELPEDDEEEEEEEEEDDDD

SEQ ID NO: 8494 - protein, 80 aa, Synthetic construct; identical to SEQ ID NO: 2253

SEQ ID NO: 8495 - protein, 80 aa, Synthetic construct
WKKGAESPEKKPACRKKKTRTVFSRSQVFQLESTFDMKRYLSSSERAGLAASLHLTETQVKIWFQNRRNKWKRQLAAELE

SEQ ID NO: 8496 - protein, 80 aa, Synthetic construct; identical to SEQ ID NO: 1918

SEQ ID NO: 8497 - protein, 80 aa, Synthetic construct; identical to SEQ ID NO: 2488

SEQ ID NO: 8498 - protein, 80 aa, Synthetic construct
LRGTGNTSTDGSYKPSFLTDQELKHLILEAADGFLFIVSCETGRVVYVSDSVTPVLNQPQSEWFGSTLYDQVHPDDVDKL

SEQ ID NO: 8499 - protein, 80 aa, Synthetic construct; identical to SEQ ID NO: 2490

SEQ ID NO: 8500 - protein, 80 aa, Synthetic construct
GVPPGAGPPGLGGPRPVKRRGTANRKERRRTQSINSAFAELRECIPNVPADTKLSKIKTLRLATSYIAYLMDLLAKDDQN

SEQ ID NO: 8501 - protein, 80 aa, Synthetic construct
LGGPRPVKRRGTANRKERRRTQSINSAFAELRECIPNVPADTKLSKIKTLRLATSYIAYLMDLLAKDDQNGEAEAFKAEI

SEQ ID NO: 8502 - protein, 80 aa, Synthetic construct; identical to SEQ ID NO: 1883

SEQ ID NO: 8503 - protein, 80 aa, Synthetic construct; identical to SEQ ID NO: 289

SEQ ID NO: 8504 - protein, 80 aa, Synthetic construct
TVVEGGEVRFNGKGKKIRKPRTIYSSLQLQALNRRFQQTQYLALPERAELAASLGLTQTQVKIWFQNKRSKFKKLMKQGG

SEQ ID NO: 8505 - protein, 80 aa, Synthetic construct
NGKGKKIRKPRTIYSSLQLQALNRRFQQTQYLALPERAELAASLGLTQTQVKIWFQNKRSKFKKLMKQGGAALEGSALAN

SEQ ID NO: 8506 - protein, 80 aa, Synthetic construct; identical to SEQ ID NO: 3889

SEQ ID NO: 8507 - protein, 80 aa, Synthetic construct; identical to SEQ ID NO: 1265

SEQ ID NO: 8508 - protein, 80 aa, Synthetic construct; identical to SEQ ID NO: 1835

SEQ ID NO: 8509 - protein, 80 aa, Synthetic construct; identical to SEQ ID NO: 1266

SEQ ID NO: 8510 - protein, 80 aa, Synthetic construct; identical to SEQ ID NO: 1267

SEQ ID NO: 8511 - protein, 80 aa, Synthetic construct; identical to SEQ ID NO: 1268

SEQ ID NO: 8512 - protein, 80 aa, Synthetic construct; identical to SEQ ID NO: 1269

SEQ ID NO: 8513 - protein, 80 aa, Synthetic construct; identical to SEQ ID NO: 1270

SEQ ID NO: 8514 - protein, 80 aa, Synthetic construct
GKGTAEEGKDHKRPKRPRTILTTQQRRAFKASFEVSSKPCRKVRETLAAETGLSVRVVQVWFQNQRAKMKKLARRQQQQQ

SEQ ID NO: 8515 - protein, 80 aa, Synthetic construct
HKRPKRPRTILTTQQRRAFKASFEVSSKPCRKVRETLAAETGLSVRVVQVWFQNQRAKMKKLARRQQQQQQDQQNTQRLS

SEQ ID NO: 8516 - protein, 80 aa, Synthetic construct; identical to SEQ ID NO: 2227

SEQ ID NO: 8517 - protein, 80 aa, Synthetic construct
LAGPAPAGGVLDKDGKKKHSRPTFSGQQIFALEKTFEQTKYLAGPERARLAYSLGMTESQVKVWFQNRRTKWRKRHAVEM

SEQ ID NO: 8518 - protein, 80 aa, Synthetic construct
LDKDGKKKHSRPTFSGQQIFALEKTFEQTKYLAGPERARLAYSLGMTESQVKVWFQNRRTKWRKRHAVEMASAKKKQDSD

SEQ ID NO: 8519 - protein, 80 aa, Synthetic construct; identical to SEQ ID NO: 4841

SEQ ID NO: 8520 - protein, 80 aa, Synthetic construct
SMPHIASVHRIHGRGHWDEDSVVSSPDPGSASESGDRYRTEQYQSSPHEPSKIETLIRATQQMIKEEENRLQLRKAPSDQ

SEQ ID NO: 8521 - protein, 80 aa, Synthetic construct; identical to SEQ ID NO: 4375

SEQ ID NO: 8522 - protein, 80 aa, Synthetic construct; identical to SEQ ID NO: 1271

SEQ ID NO: 8523 - protein, 80 aa, Synthetic construct; identical to SEQ ID NO: 1272

SEQ ID NO: 8524 - protein, 80 aa, Synthetic construct; identical to SEQ ID NO: 2346

SEQ ID NO: 8525 - protein, 80 aa, Synthetic construct
RYTKDRFTGHPYQNRTPPKKKKPRTSFTRLQICELEKRFHRQKYLASAERAALAKALKMTDAQVKTWFQNRRTKWRRQTA

SEQ ID NO: 8526 - protein, 80 aa, Synthetic construct
PYQNRTPPKKKKPRTSFTRLQICELEKRFHRQKYLASAERAALAKALKMTDAQVKTWFQNRRTKWRRQTAEEREAERQQA

SEQ ID NO: 8527 - protein, 80 aa, Synthetic construct; identical to SEQ ID NO: 1273

SEQ ID NO: 8528 - protein, 80 aa, Synthetic construct; identical to SEQ ID NO: 1274

SEQ ID NO: 8529 - protein, 80 aa, Synthetic construct
TQSLQPLPQQQQPLPPQQPPPPPPQQLGSAASAPRTSTSSFLIKDILGDSKPLAACAPYSTSVSSPHHTPKQESNAVHES

SEQ ID NO: 8530 - protein, 80 aa, Synthetic construct; identical to SEQ ID NO: 2212

SEQ ID NO: 8531 - protein, 80 aa, Synthetic construct; identical to SEQ ID NO: 2587

SEQ ID NO: 8532 - protein, 80 aa, Synthetic construct; identical to SEQ ID NO: 2384

SEQ ID NO: 8533 - protein, 80 aa, Synthetic construct
RMVHIDEEMGPKTDSTLSFDLTLQQGSHTNIHLLVTTYNLRDAPAESVAYHAQNNPPVPPKPQPKVQEKADIPVKSSPQA

SEQ ID NO: 8534 - protein, 80 aa, Synthetic construct
PKTDSTLSFDLTLQQGSHTNIHLLVTTYNLRDAPAESVAYHAQNNPPVPPKPQPKVQEKADIPVKSSPQAAVPYKKDVGK

SEQ ID NO: 8535 - protein, 80 aa, Synthetic construct
HLRERHQVIQTVHPVEKKLTYKCIHCLGVYTSNMTASTITLHLVHCRGVGKTQNGQDKTNAPSRLNQSPSLAPVKRTYEQ

SEQ ID NO: 8536 - protein, 80 aa, Synthetic construct; identical to SEQ ID NO: 2386

SEQ ID NO: 8537 - protein, 80 aa, Synthetic construct; identical to SEQ ID NO: 2387

SEQ ID NO: 8538 - protein, 80 aa, Synthetic construct; identical to SEQ ID NO: 4053

SEQ ID NO: 8539 - protein, 80 aa, Synthetic construct; identical to SEQ ID NO: 4054

SEQ ID NO: 8540 - protein, 80 aa, Synthetic construct; identical to SEQ ID NO: 4056

SEQ ID NO: 8541 - protein, 80 aa, Synthetic construct; identical to SEQ ID NO: 4057

SEQ ID NO: 8542 - protein, 80 aa, Synthetic construct; identical to SEQ ID NO: 4058

SEQ ID NO: 8543 - protein, 80 aa, Synthetic construct; identical to SEQ ID NO: 4059

SEQ ID NO: 8544 - protein, 80 aa, Synthetic construct
SKELQPQVEGVDNKMSQCTSSTIPSSSQEKDPKIKTETSEEGSGDLDNLDAILGDLTSSDFYNNSISSNGSHLGTKQQVF

SEQ ID NO: 8545 - protein, 80 aa, Synthetic construct
VDNKMSQCTSSTIPSSSQEKDPKIKTETSEEGSGDLDNLDAILGDLTSSDFYNNSISSNGSHLGTKQQVFQGTNSLGLKS

SEQ ID NO: 8546 - protein, 80 aa, Synthetic construct
STIPSSSQEKDPKIKTETSEEGSGDLDNLDAILGDLTSSDFYNNSISSNGSHLGTKQQVFQGTNSLGLKSSQSVQSIRPP

SEQ ID NO: 8547 - protein, 80 aa, Synthetic construct
DPKIKTETSEEGSGDLDNLDAILGDLTSSDFYNNSISSNGSHLGTKQQVFQGTNSLGLKSSQSVQSIRPPYNRAVSLDSP

SEQ ID NO: 8548 - protein, 80 aa, Synthetic construct
PGRGSAAKRKKKQRRNRTTFNSSQLQALERVFERTHYPDAFVREELARRVNLSEARVQVWFQNRRAKFRRNERAMLASRS

SEQ ID NO: 8549 - protein, 80 aa, Synthetic construct
KKQRRNRTTFNSSQLQALERVFERTHYPDAFVREELARRVNLSEARVQVWFQNRRAKFRRNERAMLASRSASLLKSYSQE

SEQ ID NO: 8550 - protein, 80 aa, Synthetic construct
QDREGGGGHEPEQQQEEPPLTKPEQQQEEPPLLELKQEQEEPPQTTVEGPQPAEGPQTAEGPQPPERKRRRRTAFTQFQL

SEQ ID NO: 8551 - protein, 80 aa, Synthetic construct
PEQQQEEPPLTKPEQQQEEPPLLELKQEQEEPPQTTVEGPQPAEGPQTAEGPQPPERKRRRRTAFTQFQLQELENFFDES

SEQ ID NO: 8552 - protein, 80 aa, Synthetic construct
TKPEQQQEEPPLLELKQEQEEPPQTTVEGPQPAEGPQTAEGPQPPERKRRRRTAFTQFQLQELENFFDESQYPDVVARER

SEQ ID NO: 8553 - protein, 80 aa, Synthetic construct
PLLELKQEQEEPPQTTVEGPQPAEGPQTAEGPQPPERKRRRRTAFTQFQLQELENFFDESQYPDVVARERLAARLNLTED

SEQ ID NO: 8554 - protein, 80 aa, Synthetic construct
QPAEGPQTAEGPQPPERKRRRRTAFTQFQLQELENFFDESQYPDVVARERLAARLNLTEDRVQVWFQNRRAKWKRNQRVL

SEQ ID NO: 8555 - protein, 80 aa, Synthetic construct; identical to SEQ ID NO: 1940

SEQ ID NO: 8556 - protein, 80 aa, Synthetic construct
HAKKNYGNSSVQASEMTVPQKPSVCHRPCKIEPVGIQRSYKPEHTGPALHNLCGQKPTIRDPYCRTQNLEIREVFSLAVS

SEQ ID NO: 8557 - protein, 80 aa, Synthetic construct
VQASEMTVPQKPSVCHRPCKIEPVGIQRSYKPEHTGPALHNLCGQKPTIRDPYCRTQNLEIREVFSLAVSDYPQRILGGN

SEQ ID NO: 8558 - protein, 80 aa, Synthetic construct
KPSVCHRPCKIEPVGIQRSYKPEHTGPALHNLCGQKPTIRDPYCRTQNLEIREVFSLAVSDYPQRILGGNAPQKPSSAEG

SEQ ID NO: 8559 - protein, 80 aa, Synthetic construct; identical to SEQ ID NO: 3378

SEQ ID NO: 8560 - protein, 80 aa, Synthetic construct; identical to SEQ ID NO: 3379

SEQ ID NO: 8561 - protein, 80 aa, Synthetic construct; identical to SEQ ID NO: 299

SEQ ID NO: 8562 - protein, 80 aa, Synthetic construct; identical to SEQ ID NO: 2058

SEQ ID NO: 8563 - protein, 80 aa, Synthetic construct; identical to SEQ ID NO: 2345

SEQ ID NO: 8564 - protein, 80 aa, Synthetic construct
AGRLESAARRRLAANARERRRMQGLNTAFDRLRRVVPQWGQDKKLSKYETLQMALSYIMALTRILAEAERFGSERDWVGL

SEQ ID NO: 8565 - protein, 80 aa, Synthetic construct; identical to SEQ ID NO: 1275

SEQ ID NO: 8566 - protein, 80 aa, Synthetic construct; identical to SEQ ID NO: 1276

SEQ ID NO: 8567 - protein, 80 aa, Synthetic construct; identical to SEQ ID NO: 2044

SEQ ID NO: 8568 - protein, 80 aa, Synthetic construct; identical to SEQ ID NO: 1277

SEQ ID NO: 8569 - protein, 80 aa, Synthetic construct; identical to SEQ ID NO: 2061

SEQ ID NO: 8570 - protein, 80 aa, Synthetic construct; identical to SEQ ID NO: 1278

SEQ ID NO: 8571 - protein, 80 aa, Synthetic construct; identical to SEQ ID NO: 1279

SEQ ID NO: 8572 - protein, 80 aa, Synthetic construct; identical to SEQ ID NO: 3899

SEQ ID NO: 8573 - protein, 80 aa, Synthetic construct; identical to SEQ ID NO: 3896

SEQ ID NO: 8574 - protein, 80 aa, Synthetic construct; identical to SEQ ID NO: 1280

SEQ ID NO: 8575 - protein, 80 aa, Synthetic construct; identical to SEQ ID NO: 1281

SEQ ID NO: 8576 - protein, 80 aa, Synthetic construct; identical to SEQ ID NO: 2140

SEQ ID NO: 8577 - protein, 80 aa, Synthetic construct; identical to SEQ ID NO: 1282

SEQ ID NO: 8578 - protein, 80 aa, Synthetic construct; identical to SEQ ID NO: 1283

SEQ ID NO: 8579 - protein, 80 aa, Synthetic construct; identical to SEQ ID NO: 1284

SEQ ID NO: 8580 - protein, 80 aa, Synthetic construct; identical to SEQ ID NO: 1285

SEQ ID NO: 8581 - protein, 80 aa, Synthetic construct; identical to SEQ ID NO: 2141

SEQ ID NO: 8582 - protein, 80 aa, Synthetic construct; identical to SEQ ID NO: 1286

SEQ ID NO: 8583 - protein, 80 aa, Synthetic construct; identical to SEQ ID NO: 4572

SEQ ID NO: 8584 - protein, 80 aa, Synthetic construct; identical to SEQ ID NO: 1287

SEQ ID NO: 8585 - protein, 80 aa, Synthetic construct; identical to SEQ ID NO: 1743

SEQ ID NO: 8586 - protein, 80 aa, Synthetic construct; identical to SEQ ID NO: 1288

SEQ ID NO: 8587 - protein, 80 aa, Synthetic construct; identical to SEQ ID NO: 1289

SEQ ID NO: 8588 - protein, 80 aa, Synthetic construct; identical to SEQ ID NO: 3000

SEQ ID NO: 8589 - protein, 80 aa, Synthetic construct
EGGVSTSVGLRNADTLPRLPNAAHPIGLVYTGHRVPSFQLILYPNLKVPANDFIGHRIVHFGCCRDPNIYCLYPILESQV

SEQ ID NO: 8590 - protein, 80 aa, Synthetic construct
RNADTLPRLPNAAHPIGLVYTGHRVPSFQLILYPNLKVPANDFIGHRIVHFGCCRDPNIYCLYPILESQVCAPSFHSGSP

SEQ ID NO: 8591 - protein, 80 aa, Synthetic construct
NAAHPIGLVYTGHRVPSFQLILYPNLKVPANDFIGHRIVHFGCCRDPNIYCLYPILESQVCAPSFHSGSPACSSNQSRER

SEQ ID NO: 8592 - protein, 80 aa, Synthetic construct; identical to SEQ ID NO: 2273

SEQ ID NO: 8593 - protein, 80 aa, Synthetic construct
RKKRRHRTVFTAHQLEELEKAFSEAHYPDVYAREMLAVKTELPEDRIQVWFQNRRAKWRKREKRWGGSSVMAEYGLYGAM

SEQ ID NO: 8594 - protein, 80 aa, Synthetic construct
PDNDKETPGGGGDAGKKRKRRVLFSKAQTYELERRFRQQRYLSAPEREHLASLIRLTPTQVKIWFQNHRYKMKRARAEKG

SEQ ID NO: 8595 - protein, 80 aa, Synthetic construct
GGDAGKKRKRRVLFSKAQTYELERRFRQQRYLSAPEREHLASLIRLTPTQVKIWFQNHRYKMKRARAEKGMEVTPLPSPR

SEQ ID NO: 8596 - protein, 80 aa, Synthetic construct; identical to SEQ ID NO: 1921

SEQ ID NO: 8597 - protein, 80 aa, Synthetic construct; identical to SEQ ID NO: 1290

SEQ ID NO: 8598 - protein, 80 aa, Synthetic construct; identical to SEQ ID NO: 2211

SEQ ID NO: 8599 - protein, 80 aa, Synthetic construct; identical to SEQ ID NO: 1946

SEQ ID NO: 8600 - protein, 80 aa, Synthetic construct
IIPENFKGCISGHGMDIALTEPLTMEKMSNVVKYWTTCPSNTVKTENATGPEELGLPLQRSYSEHLGYFPTDLFACSESL

SEQ ID NO: 8601 - protein, 80 aa, Synthetic construct
SGHGMDIALTEPLTMEKMSNVVKYWTTCPSNTVKTENATGPEELGLPLQRSYSEHLGYFPTDLFACSESLRNGNGLELNA

SEQ ID NO: 8602 - protein, 80 aa, Synthetic construct
EPLTMEKMSNVVKYWTTCPSNTVKTENATGPEELGLPLQRSYSEHLGYFPTDLFACSESLRNGNGLELNASLSEFEKNKK

SEQ ID NO: 8603 - protein, 80 aa, Synthetic construct
VVKYWTTCPSNTVKTENATGPEELGLPLQRSYSEHLGYFPTDLFACSESLRNGNGLELNASLSEFEKNKKISLLHSSKEK

SEQ ID NO: 8604 - protein, 80 aa, Synthetic construct
LRVPEPRPGEAKAEGAAPPTPSKPLTSFLIQDILRDGAQRQGGRTSSQRQRDPEPEPEPEPEGGRSRAGAQNDQLSTGPR

SEQ ID NO: 8605 - protein, 80 aa, Synthetic construct; identical to SEQ ID NO: 2282

SEQ ID NO: 8606 - protein, 80 aa, Synthetic construct
KTRTKDKYRVVYTDHQRLELEKEFHYSRYITIRRKAELAATLGLSERQVKIWFQNRRAKERKINKKKLQQQQQQQPPQPP

SEQ ID NO: 8607 - protein, 80 aa, Synthetic construct; identical to SEQ ID NO: 4168

SEQ ID NO: 8608 - protein, 80 aa, Synthetic construct; identical to SEQ ID NO: 1291

SEQ ID NO: 8609 - protein, 80 aa, Synthetic construct; identical to SEQ ID NO: 1292

SEQ ID NO: 8610 - protein, 80 aa, Synthetic construct; identical to SEQ ID NO: 2164

SEQ ID NO: 8611 - protein, 80 aa, Synthetic construct; identical to SEQ ID NO: 4835

SEQ ID NO: 8612 - protein, 80 aa, Synthetic construct; identical to SEQ ID NO: 1293

SEQ ID NO: 8613 - protein, 80 aa, Synthetic construct; identical to SEQ ID NO: 1294

SEQ ID NO: 8614 - protein, 80 aa, Synthetic construct; identical to SEQ ID NO: 1295

SEQ ID NO: 8615 - protein, 80 aa, Synthetic construct; identical to SEQ ID NO: 1784

SEQ ID NO: 8616 - protein, 80 aa, Synthetic construct
EVPARAKEVSFYQGYTSPYQHVPGYIDMVSTFGSGEPRHEAYISMEGYQSWTLANGWNSQVYCTKDQPQGSHFWKSSFPG

SEQ ID NO: 8617 - protein, 80 aa, Synthetic construct
FYQGYTSPYQHVPGYIDMVSTFGSGEPRHEAYISMEGYQSWTLANGWNSQVYCTKDQPQGSHFWKSSFPGDVALNQPDMC

SEQ ID NO: 8618 - protein, 80 aa, Synthetic construct; identical to SEQ ID NO: 3473

SEQ ID NO: 8619 - protein, 80 aa, Synthetic construct; identical to SEQ ID NO: 5646

SEQ ID NO: 8620 - protein, 80 aa, Synthetic construct
KRYDALSEHNLKYHPGEENFKLTMVKRNNQTIFEQTINDLTFDGSFVKEENAEQAESTEVSSSGISISKTPIMKMMKNKV

SEQ ID NO: 8621 - protein, 80 aa, Synthetic construct
IDAWFTEKKKSKALKEEKMEIDESNAGSSKEEAGETSPADESGAPKSGSTGKICKKTPEQLHMLKSAFVRTQWPSPEEYD

SEQ ID NO: 8622 - protein, 80 aa, Synthetic construct
SKALKEEKMEIDESNAGSSKEEAGETSPADESGAPKSGSTGKICKKTPEQLHMLKSAFVRTQWPSPEEYDKLAKESGLAR

SEQ ID NO: 8623 - protein, 80 aa, Synthetic construct
TAILKDYYLKHKFLNEQDLDELVNKSHMGYEQVREWFAERQRRSELGIELFEENEEEDEVIDDQEEDEEETDDSDTWEPP

SEQ ID NO: 8624 - protein, 80 aa, Synthetic construct; identical to SEQ ID NO: 2363

SEQ ID NO: 8625 - protein, 80 aa, Synthetic construct; identical to SEQ ID NO: 1296

SEQ ID NO: 8626 - protein, 80 aa, Synthetic construct
KWKRQQRQQMQTRPSLGPANQTTSVKKEETPSAITTANIRPVSPGISDANDHDLREPSGIKNPGGASASARVSSWDSQSY

SEQ ID NO: 8627 - protein, 80 aa, Synthetic construct
QTRPSLGPANQTTSVKKEETPSAITTANIRPVSPGISDANDHDLREPSGIKNPGGASASARVSSWDSQSYDIEQICLGAS

SEQ ID NO: 8628 - protein, 80 aa, Synthetic construct
QTTSVKKEETPSAITTANIRPVSPGISDANDHDLREPSGIKNPGGASASARVSSWDSQSYDIEQICLGASNPPWASTLFE

SEQ ID NO: 8629 - protein, 80 aa, Synthetic construct; identical to SEQ ID NO: 757

SEQ ID NO: 8630 - protein, 80 aa, Synthetic construct; identical to SEQ ID NO: 302

SEQ ID NO: 8631 - protein, 80 aa, Synthetic construct; identical to SEQ ID NO: 2300

SEQ ID NO: 8632 - protein, 80 aa, Synthetic construct; identical to SEQ ID NO: 1297

SEQ ID NO: 8633 - protein, 80 aa, Synthetic construct; identical to SEQ ID NO: 1298

SEQ ID NO: 8634 - protein, 80 aa, Synthetic construct; identical to SEQ ID NO: 2307

SEQ ID NO: 8635 - protein, 80 aa, Synthetic construct
FTIEQIDLLQRLRRTGMTKHEILHALETLDRLDQEHSDKFGRRSSYGGSSYGNSTNNVPASSSTATASTQTQHSGMSPSP

SEQ ID NO: 8636 - protein, 80 aa, Synthetic construct; identical to SEQ ID NO: 1299

SEQ ID NO: 8637 - protein, 80 aa, Synthetic construct; identical to SEQ ID NO: 1300

SEQ ID NO: 8638 - protein, 80 aa, Synthetic construct; identical to SEQ ID NO: 1301

SEQ ID NO: 8639 - protein, 80 aa, Synthetic construct; identical to SEQ ID NO: 2256

SEQ ID NO: 8640 - protein, 80 aa, Synthetic construct; identical to SEQ ID NO: 1302

SEQ ID NO: 8641 - protein, 80 aa, Synthetic construct
TRGGVGVGGGRKKKTRTVFSRSQVFQLESTFDLKRYLSSAERAGLAASLQLTETQVKIWFQNRRNKWKRQLAAELEAASL

SEQ ID NO: 8642 - protein, 80 aa, Synthetic construct
RKKKTRTVFSRSQVFQLESTFDLKRYLSSAERAGLAASLQLTETQVKIWFQNRRNKWKRQLAAELEAASLSPPGAQRLVR

SEQ ID NO: 8643 - protein, 80 aa, Synthetic construct; identical to SEQ ID NO: 303

SEQ ID NO: 8644 - protein, 80 aa, Synthetic construct; identical to SEQ ID NO: 5651

SEQ ID NO: 8645 - protein, 80 aa, Synthetic construct; identical to SEQ ID NO: 2138

SEQ ID NO: 8646 - protein, 80 aa, Synthetic construct; identical to SEQ ID NO: 1303

SEQ ID NO: 8647 - protein, 80 aa, Synthetic construct; identical to SEQ ID NO: 1304

SEQ ID NO: 8648 - protein, 80 aa, Synthetic construct; identical to SEQ ID NO: 1305

SEQ ID NO: 8649 - protein, 80 aa, Synthetic construct; identical to SEQ ID NO: 1306

SEQ ID NO: 8650 - protein, 80 aa, Synthetic construct
AAKPKRKRTGSDSKSGKPRRARTAFTYEQLVALENKFKATRYLSVCERLNLALSLSLTETQVKIWFQNRRTKWKKQNPGA

SEQ ID NO: 8651 - protein, 80 aa, Synthetic construct; identical to SEQ ID NO: 1810

SEQ ID NO: 8652 - protein, 80 aa, Synthetic construct
SGQPYGQTVNPYTYHHQFNLNGLAGTGAYSPKSEYTYGASYRQYGAYREQPLPAQDPVSVKEEPEAEVRMVNGKPKKVRK

SEQ ID NO: 8653 - protein, 80 aa, Synthetic construct
PYTYHHQFNLNGLAGTGAYSPKSEYTYGASYRQYGAYREQPLPAQDPVSVKEEPEAEVRMVNGKPKKVRKPRTIYSSYQL

SEQ ID NO: 8654 - protein, 80 aa, Synthetic construct
NGLAGTGAYSPKSEYTYGASYRQYGAYREQPLPAQDPVSVKEEPEAEVRMVNGKPKKVRKPRTIYSSYQLAALQRRFQKA

SEQ ID NO: 8655 - protein, 80 aa, Synthetic construct
PKSEYTYGASYRQYGAYREQPLPAQDPVSVKEEPEAEVRMVNGKPKKVRKPRTIYSSYQLAALQRRFQKAQYLALPERAE

SEQ ID NO: 8656 - protein, 80 aa, Synthetic construct
YRQYGAYREQPLPAQDPVSVKEEPEAEVRMVNGKPKKVRKPRTIYSSYQLAALQRRFQKAQYLALPERAELAAQLGLTQT

SEQ ID NO: 8657 - protein, 80 aa, Synthetic construct
PLPAQDPVSVKEEPEAEVRMVNGKPKKVRKPRTIYSSYQLAALQRRFQKAQYLALPERAELAAQLGLTQTQVKIWFQNRR

SEQ ID NO: 8658 - protein, 80 aa, Synthetic construct
KEEPEAEVRMVNGKPKKVRKPRTIYSSYQLAALQRRFQKAQYLALPERAELAAQLGLTQTQVKIWFQNRRSKFKKLYKNG

SEQ ID NO: 8659 - protein, 80 aa, Synthetic construct
VNGKPKKVRKPRTIYSSYQLAALQRRFQKAQYLALPERAELAAQLGLTQTQVKIWFQNRRSKFKKLYKNGEVPLEHSPNN

SEQ ID NO: 8660 - protein, 80 aa, Synthetic construct; identical to SEQ ID NO: 2320

SEQ ID NO: 8661 - protein, 80 aa, Synthetic construct; identical to SEQ ID NO: 2351

SEQ ID NO: 8662 - protein, 80 aa, Synthetic construct; identical to SEQ ID NO: 1307

SEQ ID NO: 8663 - protein, 80 aa, Synthetic construct; identical to SEQ ID NO: 1308

SEQ ID NO: 8664 - protein, 80 aa, Synthetic construct
APLPPAEPLGNVPFLLYPGPAEPPYYDAYAGVFPYVPFPGAFGVYEYPFEPAFIQKRNERERQRVKCVNEGYARLRGHLP

SEQ ID NO: 8665 - protein, 80 aa, Synthetic construct; identical to SEQ ID NO: 1309

SEQ ID NO: 8666 - protein, 80 aa, Synthetic construct; identical to SEQ ID NO: 1310

SEQ ID NO: 8667 - protein, 80 aa, Synthetic construct; identical to SEQ ID NO: 1311

SEQ ID NO: 8668 - protein, 80 aa, Synthetic construct; identical to SEQ ID NO: 1312

SEQ ID NO: 8669 - protein, 80 aa, Synthetic construct; identical to SEQ ID NO: 2352

SEQ ID NO: 8670 - protein, 80 aa, Synthetic construct
RRRRLEPNCAKPRRARTAFTYEQLVALENKFRATRYLSVCERLNLALSLSLTETQVKIWFQNRRTKWKKQNPGADGAAQV

SEQ ID NO: 8671 - protein, 80 aa, Synthetic construct; identical to SEQ ID NO: 1720

SEQ ID NO: 8672 - protein, 80 aa, Synthetic construct
RNTEKRNREQENKYIEELAELIFANFNDIDNFNFKPDKCAILKETVKQIRQIKEQEKAAAANIDEVQKSDVSSTGQGVID

SEQ ID NO: 8673 - protein, 80 aa, Synthetic construct
ENKYIEELAELIFANFNDIDNFNFKPDKCAILKETVKQIRQIKEQEKAAAANIDEVQKSDVSSTGQGVIDKDALGPMMLE

SEQ ID NO: 8674 - protein, 80 aa, Synthetic construct
NFNFKPDKCAILKETVKQIRQIKEQEKAAAANIDEVQKSDVSSTGQGVIDKDALGPMMLEALDGFFFVVNLEGNVVFVSE

SEQ ID NO: 8675 - protein, 80 aa, Synthetic construct
ILKETVKQIRQIKEQEKAAAANIDEVQKSDVSSTGQGVIDKDALGPMMLEALDGFFFVVNLEGNVVFVSENVTQYLRYNQ

SEQ ID NO: 8676 - protein, 80 aa, Synthetic construct
QIKEQEKAAAANIDEVQKSDVSSTGQGVIDKDALGPMMLEALDGFFFVVNLEGNVVFVSENVTQYLRYNQEELMNKSVYS

SEQ ID NO: 8677 - protein, 80 aa, Synthetic construct
VKNLLPKSIVNGGSWSGEPPRRNSHTFNCRMLVKPLPDSEEEGHDNQEAHQKYETMQCFAVSQPKSIKEEGEDLQSCLIC

SEQ ID NO: 8678 - protein, 80 aa, Synthetic construct
NGGSWSGEPPRRNSHTFNCRMLVKPLPDSEEEGHDNQEAHQKYETMQCFAVSQPKSIKEEGEDLQSCLICVARRVPMKER

SEQ ID NO: 8679 - protein, 80 aa, Synthetic construct; identical to SEQ ID NO: 1313

SEQ ID NO: 8680 - protein, 80 aa, Synthetic construct; identical to SEQ ID NO: 1796

SEQ ID NO: 8681 - protein, 80 aa, Synthetic construct
EEGHDNQEAHQKYETMQCFAVSQPKSIKEEGEDLQSCLICVARRVPMKERPVLPSSESFTTRQDLQGKITSLDTSTMRAA

SEQ ID NO: 8682 - protein, 80 aa, Synthetic construct
QKYETMQCFAVSQPKSIKEEGEDLQSCLICVARRVPMKERPVLPSSESFTTRQDLQGKITSLDTSTMRAAMKPGWEDLVR

SEQ ID NO: 8683 - protein, 80 aa, Synthetic construct
SDTNKDSTGSLPGSGSTHGTSLKEKHKILHRLLQDSSSPVDLAKLTAEATGKDLSQESSSTAPGSEVTIKQEPVSPKKKE

SEQ ID NO: 8684 - protein, 80 aa, Synthetic construct
LPGSGSTHGTSLKEKHKILHRLLQDSSSPVDLAKLTAEATGKDLSQESSSTAPGSEVTIKQEPVSPKKKENALLRYLLDK

SEQ ID NO: 8685 - protein, 80 aa, Synthetic construct; identical to SEQ ID NO: 1797

SEQ ID NO: 8686 - protein, 80 aa, Synthetic construct
DLAKLTAEATGKDLSQESSSTAPGSEVTIKQEPVSPKKKENALLRYLLDKDDTKDIGLPEITPKLERLDSKTDPASNTKL

SEQ ID NO: 8687 - protein, 80 aa, Synthetic construct
TAPGSEVTIKQEPVSPKKKENALLRYLLDKDDTKDIGLPEITPKLERLDSKTDPASNTKLIAMKTEKEEMSFEPGDQPGS

SEQ ID NO: 8688 - protein, 80 aa, Synthetic construct
QEPVSPKKKENALLRYLLDKDDTKDIGLPEITPKLERLDSKTDPASNTKLIAMKTEKEEMSFEPGDQPGSELDNLEEILD

SEQ ID NO: 8689 - protein, 80 aa, Synthetic construct
NALLRYLLDKDDTKDIGLPEITPKLERLDSKTDPASNTKLIAMKTEKEEMSFEPGDQPGSELDNLEEILDDLQNSQLPQL

SEQ ID NO: 8690 - protein, 80 aa, Synthetic construct
DDTKDIGLPEITPKLERLDSKTDPASNTKLIAMKTEKEEMSFEPGDQPGSELDNLEEILDDLQNSQLPQLFPDTRPGAPA

SEQ ID NO: 8691 - protein, 80 aa, Synthetic construct; identical to SEQ ID NO: 1748

SEQ ID NO: 8692 - protein, 80 aa, Synthetic construct
QGTLACSASDQMRRYRTAFTREQIARLEKEFYRENYVSRPRRCELAAALNLPETTIKVWFQNRRMKDKRQRLAMTWPHPA

SEQ ID NO: 8693 - protein, 80 aa, Synthetic construct
QMRRYRTAFTREQIARLEKEFYRENYVSRPRRCELAAALNLPETTIKVWFQNRRMKDKRQRLAMTWPHPADPAFYTYMMS

SEQ ID NO: 8694 - protein, 80 aa, Synthetic construct
QNRRMKDKRQRLAMTWPHPADPAFYTYMMSHAAAAGGLPYPFPSHLPLPYYSPVGLGAASAASAAASPFSGSLRPLDTFR

SEQ ID NO: 8695 - protein, 80 aa, Synthetic construct; identical to SEQ ID NO: 2266

SEQ ID NO: 8696 - protein, 80 aa, Synthetic construct
DPAFYTYMMSHAAAAGGLPYPFPSHLPLPYYSPVGLGAASAASAAASPFSGSLRPLDTFRVLSQPYPRPELLCAFRHPPL

SEQ ID NO: 8697 - protein, 80 aa, Synthetic construct; identical to SEQ ID NO: 4157

SEQ ID NO: 8698 - protein, 80 aa, Synthetic construct; identical to SEQ ID NO: 1314

SEQ ID NO: 8699 - protein, 80 aa, Synthetic construct; identical to SEQ ID NO: 704

SEQ ID NO: 8700 - protein, 80 aa, Synthetic construct
YPYDRYGTMDSGTRRKNATRETTSTLKAWLQEHRKNPYPTKGEKIMLAIITKMTLTQVSTWFANARRRLKKENKMTWPPR

SEQ ID NO: 8701 - protein, 80 aa, Synthetic construct
SGTRRKNATRETTSTLKAWLQEHRKNPYPTKGEKIMLAIITKMTLTQVSTWFANARRRLKKENKMTWPPRNKCADEKRPY

SEQ ID NO: 8702 - protein, 80 aa, Synthetic construct
ENFKGCISGHGMDIALTEPLTMEKMSNVVKYWTTCPSNTVKTENATGPEELGLPLQRSYSEHLGYFPTDLFACSESLRNG

SEQ ID NO: 8703 - protein, 80 aa, Synthetic construct
GMDIALTEPLTMEKMSNVVKYWTTCPSNTVKTENATGPEELGLPLQRSYSEHLGYFPTDLFACSESLRNGNGLELNASLS

SEQ ID NO: 8704 - protein, 80 aa, Synthetic construct
TMEKMSNVVKYWTTCPSNTVKTENATGPEELGLPLQRSYSEHLGYFPTDLFACSESLRNGNGLELNASLSEFEKNKKISL

SEQ ID NO: 8705 - protein, 80 aa, Synthetic construct; identical to SEQ ID NO: 2738

SEQ ID NO: 8706 - protein, 80 aa, Synthetic construct
VIENGEIRFNGKGKKIRKPRTIYSSLQLQALNHRFQQTQYLALPERAELAASLGLTQTQVKIWFQNKRSKFKKLLKQGSN

SEQ ID NO: 8707 - protein, 80 aa, Synthetic construct
GKGKKIRKPRTIYSSLQLQALNHRFQQTQYLALPERAELAASLGLTQTQVKIWFQNKRSKFKKLLKQGSNPHESDPLQGS

SEQ ID NO: 8708 - protein, 80 aa, Synthetic construct; identical to SEQ ID NO: 1315

SEQ ID NO: 8709 - protein, 80 aa, Synthetic construct; identical to SEQ ID NO: 2166

SEQ ID NO: 8710 - protein, 80 aa, Synthetic construct; identical to SEQ ID NO: 1316

SEQ ID NO: 8711 - protein, 80 aa, Synthetic construct
DKLPIFPDSARLPLTRSFYLEPMVTFHVHPEAPVSSPYSEELPRLPFPSDSLILGNYSEPCPFSFPMPYPNYRGCEYSYG

SEQ ID NO: 8712 - protein, 80 aa, Synthetic construct
CPFSFPMPYPNYRGCEYSYGPAFTRKRNERERQRVKCVNEGYAQLRHHLPEEYLEKRLSKVETLRAAIKYINYLQSLLYP

SEQ ID NO: 8713 - protein, 80 aa, Synthetic construct; identical to SEQ ID NO: 1317

SEQ ID NO: 8714 - protein, 80 aa, Synthetic construct; identical to SEQ ID NO: 2360

SEQ ID NO: 8715 - protein, 80 aa, Synthetic construct; identical to SEQ ID NO: 2324

SEQ ID NO: 8716 - protein, 80 aa, Synthetic construct; identical to SEQ ID NO: 2274

SEQ ID NO: 8717 - protein, 80 aa, Synthetic construct; identical to SEQ ID NO: 1318

SEQ ID NO: 8718 - protein, 80 aa, Synthetic construct; identical to SEQ ID NO: 3076

SEQ ID NO: 8719 - protein, 80 aa, Synthetic construct
KTNHRRCRTKFTEEQLKILINTFNQKPYPGYATKQKLALEINTEESRIQIWFQNRRARHGFQKRPEAETLESSQSQGQDQ

SEQ ID NO: 8720 - protein, 80 aa, Synthetic construct
NTFNQKPYPGYATKQKLALEINTEESRIQIWFQNRRARHGFQKRPEAETLESSQSQGQDQPGVEFQSREARRCRTTYSAS

SEQ ID NO: 8721 - protein, 80 aa, Synthetic construct; identical to SEQ ID NO: 2336

SEQ ID NO: 8722 - protein, 80 aa, Synthetic construct
APKKKHRRNRTTFTTYQLHQLERAFEASHYPDVYSREELAAKVHLPEVRVQVWFQNRRAKWRRQERLESGSGAVAAPRLP

SEQ ID NO: 8723 - protein, 80 aa, Synthetic construct; identical to SEQ ID NO: 3863

SEQ ID NO: 8724 - protein, 80 aa, Synthetic construct; identical to SEQ ID NO: 1319

SEQ ID NO: 8725 - protein, 80 aa, Synthetic construct; identical to SEQ ID NO: 2145

SEQ ID NO: 8726 - protein, 80 aa, Synthetic construct; identical to SEQ ID NO: 1320

SEQ ID NO: 8727 - protein, 80 aa, Synthetic construct; identical to SEQ ID NO: 1321

SEQ ID NO: 8728 - protein, 80 aa, Synthetic construct; identical to SEQ ID NO: 1322

SEQ ID NO: 8729 - protein, 80 aa, Synthetic construct; identical to SEQ ID NO: 1323

SEQ ID NO: 8730 - protein, 80 aa, Synthetic construct; identical to SEQ ID NO: 1851

SEQ ID NO: 8731 - protein, 80 aa, Synthetic construct; identical to SEQ ID NO: 1324

SEQ ID NO: 8732 - protein, 80 aa, Synthetic construct
NTAFTALRTLIPTEPADRKLSKIETLRLASSYISHLGNVLLAGEACGDGQPCHSGPAFFHAARAGSPPPPPPPPPARDGE

SEQ ID NO: 8733 - protein, 80 aa, Synthetic construct
PTEGKQAAPAENEAPQTQGKRIKVEPGPRETKGSEDSGDEDPSSHPATPRPEFTSVIRAGVLKQDPVRPWGLAPPGDPPP

SEQ ID NO: 8734 - protein, 80 aa, Synthetic construct
ENEAPQTQGKRIKVEPGPRETKGSEDSGDEDPSSHPATPRPEFTSVIRAGVLKQDPVRPWGLAPPGDPPPTLLHAGFLPP

SEQ ID NO: 8735 - protein, 80 aa, Synthetic construct
RIKVEPGPRETKGSEDSGDEDPSSHPATPRPEFTSVIRAGVLKQDPVRPWGLAPPGDPPPTLLHAGFLPPVVRGLCTPGT

SEQ ID NO: 8736 - protein, 80 aa, Synthetic construct
DPSSHPATPRPEFTSVIRAGVLKQDPVRPWGLAPPGDPPPTLLHAGFLPPVVRGLCTPGTIRYGPAELGLVYPHLQRLGP

SEQ ID NO: 8737 - protein, 80 aa, Synthetic construct
PEFTSVIRAGVLKQDPVRPWGLAPPGDPPPTLLHAGFLPPVVRGLCTPGTIRYGPAELGLVYPHLQRLGPGPALPEAFYP

SEQ ID NO: 8738 - protein, 80 aa, Synthetic construct; identical to SEQ ID NO: 1325

SEQ ID NO: 8739 - protein, 80 aa, Synthetic construct; identical to SEQ ID NO: 1326

SEQ ID NO: 8740 - protein, 80 aa, Synthetic construct; identical to SEQ ID NO: 1327

SEQ ID NO: 8741 - protein, 80 aa, Synthetic construct; identical to SEQ ID NO: 1328

SEQ ID NO: 8742 - protein, 80 aa, Synthetic construct; identical to SEQ ID NO: 2074

SEQ ID NO: 8743 - protein, 80 aa, Synthetic construct
VEKDKEQEEEEEGLPPMDLSNHLFFTAGGEAYLVAKLSLPGGSELLLPKGFPWGEAGIKEEPSLPFLAYPPPSHLTALHI

SEQ ID NO: 8744 - protein, 80 aa, Synthetic construct
EEGLPPMDLSNHLFFTAGGEAYLVAKLSLPGGSELLLPKGFPWGEAGIKEEPSLPFLAYPPPSHLTALHIQHGFDPIQGF

SEQ ID NO: 8745 - protein, 80 aa, Synthetic construct
NHLFFTAGGEAYLVAKLSLPGGSELLLPKGFPWGEAGIKEEPSLPFLAYPPPSHLTALHIQHGFDPIQGFSSSDQILSHD

SEQ ID NO: 8746 - protein, 80 aa, Synthetic construct
AYLVAKLSLPGGSELLLPKGFPWGEAGIKEEPSLPFLAYPPPSHLTALHIQHGFDPIQGFSSSDQILSHDTSAPSPAACE

SEQ ID NO: 8747 - protein, 80 aa, Synthetic construct
GGSELLLPKGFPWGEAGIKEEPSLPFLAYPPPSHLTALHIQHGFDPIQGFSSSDQILSHDTSAPSPAACEERHGAFWSYQ

SEQ ID NO: 8748 - protein, 80 aa, Synthetic construct
FPWGEAGIKEEPSLPFLAYPPPSHLTALHIQHGFDPIQGFSSSDQILSHDTSAPSPAACEERHGAFWSYQLAPNPPGDPK

SEQ ID NO: 8749 - protein, 80 aa, Synthetic construct; identical to SEQ ID NO: 5587

SEQ ID NO: 8750 - protein, 80 aa, Synthetic construct; identical to SEQ ID NO: 5588

SEQ ID NO: 8751 - protein, 80 aa, Synthetic construct; identical to SEQ ID NO: 5591

SEQ ID NO: 8752 - protein, 80 aa, Synthetic construct; identical to SEQ ID NO: 3443

SEQ ID NO: 8753 - protein, 80 aa, Synthetic construct
SRLVCKADYETAKQREAEATAKRPRTTITAKQLETLKSAYNTSPKPARHVREQLSSETGLDMRVVQVWFQNRRAKEKRLK

SEQ ID NO: 8754 - protein, 80 aa, Synthetic construct
TAKQREAEATAKRPRTTITAKQLETLKSAYNTSPKPARHVREQLSSETGLDMRVVQVWFQNRRAKEKRLKKDAGRQRWGQ

SEQ ID NO: 8755 - protein, 80 aa, Synthetic construct; identical to SEQ ID NO: 8081

SEQ ID NO: 8756 - protein, 80 aa, Synthetic construct; identical to SEQ ID NO: 8082

SEQ ID NO: 8757 - protein, 80 aa, Synthetic construct; identical to SEQ ID NO: 234

SEQ ID NO: 8758 - protein, 80 aa, Synthetic construct; identical to SEQ ID NO: 234

SEQ ID NO: 8759 - protein, 80 aa, Synthetic construct; identical to SEQ ID NO: 323

SEQ ID NO: 8760 - protein, 80 aa, Synthetic construct; identical to SEQ ID NO: 324

SEQ ID NO: 8761 - protein, 80 aa, Synthetic construct; identical to SEQ ID NO: 325

SEQ ID NO: 8762 - protein, 80 aa, Synthetic construct; identical to SEQ ID NO: 326

SEQ ID NO: 8763 - protein, 80 aa, Synthetic construct; identical to SEQ ID NO: 327

SEQ ID NO: 8764 - protein, 80 aa, Synthetic construct
RCLPIHQQHNYAAPSPYVESEDAPPQKKIKSEASPRPLKSVIPPKAKSLSPRNSDSEDSERRRNHNILERQRRNDLRSSF

SEQ ID NO: 8765 - protein, 80 aa, Synthetic construct
YAAPSPYVESEDAPPQKKIKSEASPRPLKSVIPPKAKSLSPRNSDSEDSERRRNHNILERQRRNDLRSSFLTLRDHVPEL

SEQ ID NO: 8766 - protein, 80 aa, Synthetic construct; identical to SEQ ID NO: 2036

SEQ ID NO: 8767 - protein, 80 aa, Synthetic construct; identical to SEQ ID NO: 1329

SEQ ID NO: 8768 - protein, 80 aa, Synthetic construct
WKSTLPDVVSHPSDASSYRRGRKKRVPYTKVQLKELEREYATNKFITKDKRRRISATTNLSERQVTIWFQNRRVKEKKVI

SEQ ID NO: 8769 - protein, 80 aa, Synthetic construct; identical to SEQ ID NO: 2321

SEQ ID NO: 8770 - protein, 80 aa, Synthetic construct
LEKADSESNKGKKRRNRTTFTSYQLEELEKVFQKTHYPDVYAREQLAMRTDLTEARVQVWFQNRRAKWRKRERFGQMQQV

SEQ ID NO: 8771 - protein, 80 aa, Synthetic construct; identical to SEQ ID NO: 2422

SEQ ID NO: 8772 - protein, 80 aa, Synthetic construct; identical to SEQ ID NO: 2015

SEQ ID NO: 8773 - protein, 80 aa, Synthetic construct; identical to SEQ ID NO: 1330

SEQ ID NO: 8774 - protein, 80 aa, Synthetic construct; identical to SEQ ID NO: 1331

SEQ ID NO: 8775 - protein, 80 aa, Synthetic construct
RPAVLGSPDRAPPEDEGPVMVKLEDSEEEGEAALWDPGPEAARLRFRCFRYEEATGPQEALAQLRELCRQWLRPEVRSKE

SEQ ID NO: 8776 - protein, 80 aa, Synthetic construct
APPEDEGPVMVKLEDSEEEGEAALWDPGPEAARLRFRCFRYEEATGPQEALAQLRELCRQWLRPEVRSKEQMLELLVLEQ

SEQ ID NO: 8777 - protein, 80 aa, Synthetic construct
VKLEDSEEEGEAALWDPGPEAARLRFRCFRYEEATGPQEALAQLRELCRQWLRPEVRSKEQMLELLVLEQFLGALPPEIQ

SEQ ID NO: 8778 - protein, 80 aa, Synthetic construct; identical to SEQ ID NO: 4009

SEQ ID NO: 8779 - protein, 80 aa, Synthetic construct
TPEPGPKTPPRTMQESPLGLQVKEESEVTEDSDFLESGPLAATQESVPTLLPEEAQRCGTVLDQIFPHSKTGPEGPSWRE

SEQ ID NO: 8780 - protein, 80 aa, Synthetic construct
RTMQESPLGLQVKEESEVTEDSDFLESGPLAATQESVPTLLPEEAQRCGTVLDQIFPHSKTGPEGPSWREHPRALWHEEA

SEQ ID NO: 8781 - protein, 80 aa, Synthetic construct
AKGKVANTNVTLQALRGTKVAVNQRSADALPAPVPGANSIPWVLEQILCLQQQQLQQIQLTEQIRIQVNMWASHALHSSG

SEQ ID NO: 8782 - protein, 80 aa, Synthetic construct
TLQALRGTKVAVNQRSADALPAPVPGANSIPWVLEQILCLQQQQLQQIQLTEQIRIQVNMWASHALHSSGAGADTLKTLG

SEQ ID NO: 8783 - protein, 80 aa, Synthetic construct
AVNQRSADALPAPVPGANSIPWVLEQILCLQQQQLQQIQLTEQIRIQVNMWASHALHSSGAGADTLKTLGSHMSQQVSAA

SEQ ID NO: 8784 - protein, 80 aa, Synthetic construct
PAPVPGANSIPWVLEQILCLQQQQLQQIQLTEQIRIQVNMWASHALHSSGAGADTLKTLGSHMSQQVSAAVALLSQKAGS

SEQ ID NO: 8785 - protein, 80 aa, Synthetic construct
PWVLEQILCLQQQQLQQIQLTEQIRIQVNMWASHALHSSGAGADTLKTLGSHMSQQVSAAVALLSQKAGSQGLSLDALKQ

SEQ ID NO: 8786 - protein, 80 aa, Synthetic construct; identical to SEQ ID NO: 4476

SEQ ID NO: 8787 - protein, 80 aa, Synthetic construct
RSLGPPGPGTVALAQPAASCTPAAPPYYCDIKQEADTPGLPKIYAREGPDPYSVRVEDGAGTAGGTVPATIGPAQPFFKE

SEQ ID NO: 8788 - protein, 80 aa, Synthetic construct
VALAQPAASCTPAAPPYYCDIKQEADTPGLPKIYAREGPDPYSVRVEDGAGTAGGTVPATIGPAQPFFKEEKEGGVEEAG

SEQ ID NO: 8789 - protein, 80 aa, Synthetic construct; identical to SEQ ID NO: 2146

SEQ ID NO: 8790 - protein, 80 aa, Synthetic construct
IKQEADTPGLPKIYAREGPDPYSVRVEDGAGTAGGTVPATIGPAQPFFKEEKEGGVEEAGGPPASLCKLEGGEELEEELG

SEQ ID NO: 8791 - protein, 80 aa, Synthetic construct
PKIYAREGPDPYSVRVEDGAGTAGGTVPATIGPAQPFFKEEKEGGVEEAGGPPASLCKLEGGEELEEELGGSGTYSRREQ

SEQ ID NO: 8792 - protein, 80 aa, Synthetic construct
PYSVRVEDGAGTAGGTVPATIGPAQPFFKEEKEGGVEEAGGPPASLCKLEGGEELEEELGGSGTYSRREQSQIIVEVNLN

SEQ ID NO: 8793 - protein, 80 aa, Synthetic construct; identical to SEQ ID NO: 5546

SEQ ID NO: 8794 - protein, 80 aa, Synthetic construct
SADLYGINCLLTPVTVEITQNIKTTQVPVTEDLPKEPLGSTNSEAKKRRTASPPALPKIKAETDSDPMVPSCSLSLPLSI

SEQ ID NO: 8795 - protein, 80 aa, Synthetic construct
LTPVTVEITQNIKTTQVPVTEDLPKEPLGSTNSEAKKRRTASPPALPKIKAETDSDPMVPSCSLSLPLSISTTEAVSFHK

SEQ ID NO: 8796 - protein, 80 aa, Synthetic construct
NIKTTQVPVTEDLPKEPLGSTNSEAKKRRTASPPALPKIKAETDSDPMVPSCSLSLPLSISTTEAVSFHKEKSVYLSSKL

SEQ ID NO: 8797 - protein, 80 aa, Synthetic construct
EDLPKEPLGSTNSEAKKRRTASPPALPKIKAETDSDPMVPSCSLSLPLSISTTEAVSFHKEKSVYLSSKLKQLLQTQDKL

SEQ ID NO: 8798 - protein, 80 aa, Synthetic construct
TNSEAKKRRTASPPALPKIKAETDSDPMVPSCSLSLPLSISTTEAVSFHKEKSVYLSSKLKQLLQTQDKLTPAGISATEI

SEQ ID NO: 8799 - protein, 80 aa, Synthetic construct
ASPPALPKIKAETDSDPMVPSCSLSLPLSISTTEAVSFHKEKSVYLSSKLKQLLQTQDKLTPAGISATEIAKLGPVCVSA

SEQ ID NO: 8800 - protein, 80 aa, Synthetic construct
SSVVSSGDNLEASLPMISFKQEELENEGLKPREEPQSAAEQDVVVQETFNKNFVCNVCESPFLSIKDLTKHLSIHAEEWP

SEQ ID NO: 8801 - protein, 80 aa, Synthetic construct
EASLPMISFKQEELENEGLKPREEPQSAAEQDVVVQETFNKNFVCNVCESPFLSIKDLTKHLSIHAEEWPFKCEFCVQLF

SEQ ID NO: 8802 - protein, 80 aa, Synthetic construct; identical to SEQ ID NO: 4471

SEQ ID NO: 8803 - protein, 80 aa, Synthetic construct
PFQYHHRNPMGIGVTATNFTTHNIPQTFTTAIRCTKCGKGVDNMPELHKHILACASASDKKRYTPKKNPVPLKQTVQPKN

SEQ ID NO: 8804 - protein, 80 aa, Synthetic construct; identical to SEQ ID NO: 5309

SEQ ID NO: 8805 - protein, 80 aa, Synthetic construct
VQSVPLAATTFTSPSNTPASISPKLNVEVKKEVDKEKAVTDEKPKQKDKPGEEEEKCDISSKYHYLTENDLEESPKGGLD

SEQ ID NO: 8806 - protein, 80 aa, Synthetic construct
FTSPSNTPASISPKLNVEVKKEVDKEKAVTDEKPKQKDKPGEEEEKCDISSKYHYLTENDLEESPKGGLDILKSLENTVT

SEQ ID NO: 8807 - protein, 80 aa, Synthetic construct
ISPKLNVEVKKEVDKEKAVTDEKPKQKDKPGEEEEKCDISSKYHYLTENDLEESPKGGLDILKSLENTVTSAINKAQNGT

SEQ ID NO: 8808 - protein, 80 aa, Synthetic construct
LEHLKAHSRRVAGGAKEKKHPCDHCDRRFYTRKDVRRHLVVHTGRKDFLCQYCAQRFGRKDHLTRHVKKSHSQELLKIKT

SEQ ID NO: 8809 - protein, 80 aa, Synthetic construct; identical to SEQ ID NO: 1850

SEQ ID NO: 8810 - protein, 80 aa, Synthetic construct
PCDHCDRRFYTRKDVRRHLVVHTGRKDFLCQYCAQRFGRKDHLTRHVKKSHSQELLKIKTEPVDMLGLLSCSSTVSVKEE

SEQ ID NO: 8811 - protein, 80 aa, Synthetic construct
TRKDVRRHLVVHTGRKDFLCQYCAQRFGRKDHLTRHVKKSHSQELLKIKTEPVDMLGLLSCSSTVSVKEELSPVLCMASR

SEQ ID NO: 8812 - protein, 80 aa, Synthetic construct
VHTGRKDFLCQYCAQRFGRKDHLTRHVKKSHSQELLKIKTEPVDMLGLLSCSSTVSVKEELSPVLCMASRDVMGTKAFPG

SEQ ID NO: 8813 - protein, 80 aa, Synthetic construct
QYCAQRFGRKDHLTRHVKKSHSQELLKIKTEPVDMLGLLSCSSTVSVKEELSPVLCMASRDVMGTKAFPGMLPMGMYGAH

SEQ ID NO: 8814 - protein, 80 aa, Synthetic construct
DHLTRHVKKSHSQELLKIKTEPVDMLGLLSCSSTVSVKEELSPVLCMASRDVMGTKAFPGMLPMGMYGAHIPTMPSTGVP

SEQ ID NO: 8815 - protein, 80 aa, Synthetic construct
HSQELLKIKTEPVDMLGLLSCSSTVSVKEELSPVLCMASRDVMGTKAFPGMLPMGMYGAHIPTMPSTGVPHSLVHNTLPM

SEQ ID NO: 8816 - protein, 80 aa, Synthetic construct
EPVDMLGLLSCSSTVSVKEELSPVLCMASRDVMGTKAFPGMLPMGMYGAHIPTMPSTGVPHSLVHNTLPMGMSYPLESSP

SEQ ID NO: 8817 - protein, 80 aa, Synthetic construct
CSSTVSVKEELSPVLCMASRDVMGTKAFPGMLPMGMYGAHIPTMPSTGVPHSLVHNTLPMGMSYPLESSPISSPAQLPPK

SEQ ID NO: 8818 - protein, 80 aa, Synthetic construct
YQLGSTSYLPDKLPKVEVDSFLAELPGSLSLSSAEPQPASPQPAAAAALLDEALLAKSPANLSEALCAANVDFSHLLGFL

SEQ ID NO: 8819 - protein, 80 aa, Synthetic construct
PEPPPPPPPPAFYYPEPGAPPPYSAPAGGLVSELLRPELDAPLGPALHGRFLLAPPGRLVKAEPPEADGGGGYGCAPGLT

SEQ ID NO: 8820 - protein, 80 aa, Synthetic construct
AFYYPEPGAPPPYSAPAGGLVSELLRPELDAPLGPALHGRFLLAPPGRLVKAEPPEADGGGGYGCAPGLTRGPRGLKREG

SEQ ID NO: 8821 - protein, 80 aa, Synthetic construct
PPYSAPAGGLVSELLRPELDAPLGPALHGRFLLAPPGRLVKAEPPEADGGGGYGCAPGLTRGPRGLKREGAPGPAASCMR

SEQ ID NO: 8822 - protein, 80 aa, Synthetic construct
VSELLRPELDAPLGPALHGRFLLAPPGRLVKAEPPEADGGGGYGCAPGLTRGPRGLKREGAPGPAASCMRGPGGRPPPPP

SEQ ID NO: 8823 - protein, 80 aa, Synthetic construct
APLGPALHGRFLLAPPGRLVKAEPPEADGGGGYGCAPGLTRGPRGLKREGAPGPAASCMRGPGGRPPPPPDTPPLSPDGP

SEQ ID NO: 8824 - protein, 80 aa, Synthetic construct
FLLAPPGRLVKAEPPEADGGGGYGCAPGLTRGPRGLKREGAPGPAASCMRGPGGRPPPPPDTPPLSPDGPARLPAPGPRA

SEQ ID NO: 8825 - protein, 80 aa, Synthetic construct; identical to SEQ ID NO: 1895

SEQ ID NO: 8826 - protein, 80 aa, Synthetic construct
NSNVIIENLQSTKVAVAQFSQEARCGGASGGKLAVPALMEQLLALQQQQIHQLQLIEQIRHQILLLASQNADLPTSSSPS

SEQ ID NO: 8827 - protein, 80 aa, Synthetic construct
STKVAVAQFSQEARCGGASGGKLAVPALMEQLLALQQQQIHQLQLIEQIRHQILLLASQNADLPTSSSPSQGTLRTSANP

SEQ ID NO: 8828 - protein, 80 aa, Synthetic construct; identical to SEQ ID NO: 4755

SEQ ID NO: 8829 - protein, 80 aa, Synthetic construct
KYPHIQMNPYPVPEHLDNIPTSTGIPYGMSIPPEKPVTSWLDTKPVLPTLTTSVGLPLPPTLPSLIPFIKTEEPAPIPIS

SEQ ID NO: 8830 - protein, 80 aa, Synthetic construct
PVPEHLDNIPTSTGIPYGMSIPPEKPVTSWLDTKPVLPTLTTSVGLPLPPTLPSLIPFIKTEEPAPIPISHSATSPPGSV

SEQ ID NO: 8831 - protein, 80 aa, Synthetic construct
TSTGIPYGMSIPPEKPVTSWLDTKPVLPTLTTSVGLPLPPTLPSLIPFIKTEEPAPIPISHSATSPPGSVKSDSGGPESA

SEQ ID NO: 8832 - protein, 80 aa, Synthetic construct
IPPEKPVTSWLDTKPVLPTLTTSVGLPLPPTLPSLIPFIKTEEPAPIPISHSATSPPGSVKSDSGGPESATRNLGGLPEE

SEQ ID NO: 8833 - protein, 80 aa, Synthetic construct; identical to SEQ ID NO: 1896

SEQ ID NO: 8834 - protein, 80 aa, Synthetic construct
TTSVGLPLPPTLPSLIPFIKTEEPAPIPISHSATSPPGSVKSDSGGPESATRNLGGLPEEAEGSTLPPSGGKSEESGMVT

SEQ ID NO: 8835 - protein, 80 aa, Synthetic construct
TLPSLIPFIKTEEPAPIPISHSATSPPGSVKSDSGGPESATRNLGGLPEEAEGSTLPPSGGKSEESGMVTNSVPTASSSV

SEQ ID NO: 8836 - protein, 80 aa, Synthetic construct
EPSSNLGPNQNSAVIPANSLSSLIKTEVNGFVHVSPQDSKDTPTSHVPSGPLSSSATSPVLLPALPRRTPKQHYCNTCGK

SEQ ID NO: 8837 - protein, 80 aa, Synthetic construct
NSAVIPANSLSSLIKTEVNGFVHVSPQDSKDTPTSHVPSGPLSSSATSPVLLPALPRRTPKQHYCNTCGKTFSSSSALQI

SEQ ID NO: 8838 - protein, 80 aa, Synthetic construct; identical to SEQ ID NO: 2019

SEQ ID NO: 8839 - protein, 80 aa, Synthetic construct; identical to SEQ ID NO: 1332

SEQ ID NO: 8840 - protein, 80 aa, Synthetic construct; identical to SEQ ID NO: 1333

SEQ ID NO: 8841 - protein, 80 aa, Synthetic construct
FKDVAVVFTEEELGLLDPAQRKLYRDVMLENFRNLLSVGNQPFHQDTFHFLGKEKFWKMKTTSQREGNSGGKIQIEMETV

SEQ ID NO: 8842 - protein, 80 aa, Synthetic construct; identical to SEQ ID NO: 6063

SEQ ID NO: 8843 - protein, 80 aa, Synthetic construct
LVLPAEVIIAQSSIPGEGLGIFSKTWIKAGTEMGPFTGRVIAPEHVDICKNNNLMWEVFNEDGTVRYFIDASQEDHRSWM

SEQ ID NO: 8844 - protein, 80 aa, Synthetic construct; identical to SEQ ID NO: 4454

SEQ ID NO: 8845 - protein, 80 aa, Synthetic construct; identical to SEQ ID NO: 3631

SEQ ID NO: 8846 - protein, 80 aa, Synthetic construct; identical to SEQ ID NO: 1870

SEQ ID NO: 8847 - protein, 80 aa, Synthetic construct
LKFPSSHRRASPGLSMPSSSPPIKKYSPPSPGVQPFGVPLSMPPVMAAALSRHGIRSPGILPVIQPVVVQPVPFMYTSHL

SEQ ID NO: 8848 - protein, 80 aa, Synthetic construct
SPGLSMPSSSPPIKKYSPPSPGVQPFGVPLSMPPVMAAALSRHGIRSPGILPVIQPVVVQPVPFMYTSHLQQPLMVSLSE

SEQ ID NO: 8849 - protein, 80 aa, Synthetic construct
SRHGIRSPGILPVIQPVVVQPVPFMYTSHLQQPLMVSLSEEMENSSSSMQVPVIESYEKPISQKKIKIEPGIEPQRTDYY

SEQ ID NO: 8850 - protein, 80 aa, Synthetic construct
LPVIQPVVVQPVPFMYTSHLQQPLMVSLSEEMENSSSSMQVPVIESYEKPISQKKIKIEPGIEPQRTDYYPEEMSPPLMN

SEQ ID NO: 8851 - protein, 80 aa, Synthetic construct
PVPFMYTSHLQQPLMVSLSEEMENSSSSMQVPVIESYEKPISQKKIKIEPGIEPQRTDYYPEEMSPPLMNSVSPPQALLQ

SEQ ID NO: 8852 - protein, 80 aa, Synthetic construct
QQPLMVSLSEEMENSSSSMQVPVIESYEKPISQKKIKIEPGIEPQRTDYYPEEMSPPLMNSVSPPQALLQENHPSVIVQP

SEQ ID NO: 8853 - protein, 80 aa, Synthetic construct; identical to SEQ ID NO: 1871

SEQ ID NO: 8854 - protein, 80 aa, Synthetic construct; identical to SEQ ID NO: 1334

SEQ ID NO: 8855 - protein, 80 aa, Synthetic construct; identical to SEQ ID NO: 1335

SEQ ID NO: 8856 - protein, 80 aa, Synthetic construct; identical to SEQ ID NO: 5833

SEQ ID NO: 8857 - protein, 80 aa, Synthetic construct; identical to SEQ ID NO: 5835

SEQ ID NO: 8858 - protein, 80 aa, Synthetic construct
KLYKCALCLKEFRSKQDLVKLDVNGLPYGLCAGCMARSANGQVGGLAPPEPADRPCAGLRCPECSVKFESAEDLESHMQV

SEQ ID NO: 8859 - protein, 80 aa, Synthetic construct
EFRSKQDLVKLDVNGLPYGLCAGCMARSANGQVGGLAPPEPADRPCAGLRCPECSVKFESAEDLESHMQVDHRDLTPETS

SEQ ID NO: 8860 - protein, 80 aa, Synthetic construct; identical to SEQ ID NO: 1336

SEQ ID NO: 8861 - protein, 80 aa, Synthetic construct; identical to SEQ ID NO: 2252

SEQ ID NO: 8862 - protein, 80 aa, Synthetic construct; identical to SEQ ID NO: 1337

SEQ ID NO: 8863 - protein, 80 aa, Synthetic construct
PADRPCAGLRCPECSVKFESAEDLESHMQVDHRDLTPETSGPRKGTQTSPVPRKKTYQCIKCQMTFENEREIQIHVANHM

SEQ ID NO: 8864 - protein, 80 aa, Synthetic construct
CPECSVKFESAEDLESHMQVDHRDLTPETSGPRKGTQTSPVPRKKTYQCIKCQMTFENEREIQIHVANHMIEEGINHECK

SEQ ID NO: 8865 - protein, 80 aa, Synthetic construct; identical to SEQ ID NO: 1929

SEQ ID NO: 8866 - protein, 80 aa, Synthetic construct; identical to SEQ ID NO: 1338

SEQ ID NO: 8867 - protein, 80 aa, Synthetic construct; identical to SEQ ID NO: 1339

SEQ ID NO: 8868 - protein, 80 aa, Synthetic construct; identical to SEQ ID NO: 1340

SEQ ID NO: 8869 - protein, 80 aa, Synthetic construct
EELQGAYENEVSKEGLAESEPMICHTLPLPEGFQVVKVGANGEVETLEQGELPPQEDPSWQKDPDYQPPAKKTKKTKKSK

SEQ ID NO: 8870 - protein, 80 aa, Synthetic construct; identical to SEQ ID NO: 1930

SEQ ID NO: 8871 - protein, 80 aa, Synthetic construct
NEDEEEPAVEIEPEPEPQPVTPAPPPAKKRRGRPPGRTNQPKQNQPTAIIQVEDQNTGAIENIIVEVKKEPDAEPAEGEE

SEQ ID NO: 8872 - protein, 80 aa, Synthetic construct
IEPEPEPQPVTPAPPPAKKRRGRPPGRTNQPKQNQPTAIIQVEDQNTGAIENIIVEVKKEPDAEPAEGEEEEAQPAATDA

SEQ ID NO: 8873 - protein, 80 aa, Synthetic construct
TPAPPPAKKRRGRPPGRTNQPKQNQPTAIIQVEDQNTGAIENIIVEVKKEPDAEPAEGEEEEAQPAATDAPNGDLTPEMI

SEQ ID NO: 8874 - protein, 80 aa, Synthetic construct
AKKRRGRPPGRTNQPKQNQPTAIIQVEDQNTGAIENIIVEVKKEPDAEPAEGEEEEAQPAATDAPNGDLTPEMILSMMDR

SEQ ID NO: 8875 - protein, 80 aa, Synthetic construct
GEKFGPFAGEKRMPEDLDENMDYRLMWEVRGSKGEVLYILDATNPRHSNWLRFVHEAPSQEQKNLAAIQEGENIFYLAVE

SEQ ID NO: 8876 - protein, 80 aa, Synthetic construct; identical to SEQ ID NO: 2045

SEQ ID NO: 8877 - protein, 80 aa, Synthetic construct
MDYRLMWEVRGSKGEVLYILDATNPRHSNWLRFVHEAPSQEQKNLAAIQEGENIFYLAVEDIETDTELLIGYLDSDMEAE

SEQ ID NO: 8878 - protein, 80 aa, Synthetic construct; identical to SEQ ID NO: 1341

SEQ ID NO: 8879 - protein, 80 aa, Synthetic construct
DATNPRHSNWLRFVHEAPSQEQKNLAAIQEGENIFYLAVEDIETDTELLIGYLDSDMEAEEEEQQIMTVIKEGEVENSRR

SEQ ID NO: 8880 - protein, 80 aa, Synthetic construct; identical to SEQ ID NO: 3695

SEQ ID NO: 8881 - protein, 80 aa, Synthetic construct
YILEPGDPPLLQQPLQTSKSGIQQIIECFRSGTKQLKHILLKDVDTIFECKLCRSLFRGLPNLITHKKFYCPPSLQMDDN

SEQ ID NO: 8882 - protein, 80 aa, Synthetic construct
LQQPLQTSKSGIQQIIECFRSGTKQLKHILLKDVDTIFECKLCRSLFRGLPNLITHKKFYCPPSLQMDDNLPDVNDKQSQ

SEQ ID NO: 8883 - protein, 80 aa, Synthetic construct
AEYNLTACKCLLCKRKYSSQIMLKRHMQIVHKITLSGTNSKREKGPNNTANSSEIKVKVEPADSVESSPPSITHSPQNEL

SEQ ID NO: 8884 - protein, 80 aa, Synthetic construct
LLCKRKYSSQIMLKRHMQIVHKITLSGTNSKREKGPNNTANSSEIKVKVEPADSVESSPPSITHSPQNELKGTNHSNEKK

SEQ ID NO: 8885 - protein, 80 aa, Synthetic construct
IMLKRHMQIVHKITLSGTNSKREKGPNNTANSSEIKVKVEPADSVESSPPSITHSPQNELKGTNHSNEKKNTPAAQKNKV

SEQ ID NO: 8886 - protein, 80 aa, Synthetic construct
HKITLSGTNSKREKGPNNTANSSEIKVKVEPADSVESSPPSITHSPQNELKGTNHSNEKKNTPAAQKNKVKQDSESPKST

SEQ ID NO: 8887 - protein, 80 aa, Synthetic construct
KREKGPNNTANSSEIKVKVEPADSVESSPPSITHSPQNELKGTNHSNEKKNTPAAQKNKVKQDSESPKSTSPSAAGGQQK

SEQ ID NO: 8888 - protein, 80 aa, Synthetic construct
NSSEIKVKVEPADSVESSPPSITHSPQNELKGTNHSNEKKNTPAAQKNKVKQDSESPKSTSPSAAGGQQKTRKPKLSAGF

SEQ ID NO: 8889 - protein, 80 aa, Synthetic construct; identical to SEQ ID NO: 2100

SEQ ID NO: 8890 - protein, 80 aa, Synthetic construct; identical to SEQ ID NO: 1342

SEQ ID NO: 8891 - protein, 80 aa, Synthetic construct; identical to SEQ ID NO: 5664

SEQ ID NO: 8892 - protein, 80 aa, Synthetic construct; identical to SEQ ID NO: 6002

SEQ ID NO: 8893 - protein, 80 aa, Synthetic construct
KEQILELLVMEQFLTILPPEIQARVRHRCPMSSKEIVTLVEDFHRASKKPKQWVAVCMQGQKVLLEKTGSQLGEQELPDF

SEQ ID NO: 8894 - protein, 80 aa, Synthetic construct
EQFLTILPPEIQARVRHRCPMSSKEIVTLVEDFHRASKKPKQWVAVCMQGQKVLLEKTGSQLGEQELPDFQPQTPRRDLR

SEQ ID NO: 8895 - protein, 80 aa, Synthetic construct
TPGYPWKAGSPFLPPEFPHKISSTKGLGAISPYMHPTIPEYPPHFYTEHGLATIYSPYLLAGSSPECDAPLLSVYGTQDP

SEQ ID NO: 8896 - protein, 80 aa, Synthetic construct
PFLPPEFPHKISSTKGLGAISPYMHPTIPEYPPHFYTEHGLATIYSPYLLAGSSPECDAPLLSVYGTQDPRHFLPHPGPI

SEQ ID NO: 8897 - protein, 80 aa, Synthetic construct; identical to SEQ ID NO: 1343

SEQ ID NO: 8898 - protein, 80 aa, Synthetic construct; identical to SEQ ID NO: 2027

SEQ ID NO: 8899 - protein, 80 aa, Synthetic construct; identical to SEQ ID NO: 1344

SEQ ID NO: 8900 - protein, 80 aa, Synthetic construct
AGSSPECDAPLLSVYGTQDPRHFLPHPGPIPKHLAPSPATYDHYRFFQQYPSNLPIPYGFYRPESAFSSYGLRLPPVTGL

SEQ ID NO: 8901 - protein, 80 aa, Synthetic construct
LLSVYGTQDPRHFLPHPGPIPKHLAPSPATYDHYRFFQQYPSNLPIPYGFYRPESAFSSYGLRLPPVTGLTRDQSSHLLE

SEQ ID NO: 8902 - protein, 80 aa, Synthetic construct
RHFLPHPGPIPKHLAPSPATYDHYRFFQQYPSNLPIPYGFYRPESAFSSYGLRLPPVTGLTRDQSSHLLEEATLVYPASS

SEQ ID NO: 8903 - protein, 80 aa, Synthetic construct; identical to SEQ ID NO: 4467

SEQ ID NO: 8904 - protein, 80 aa, Synthetic construct
KYFGPGFMGMQEKKLGSLPYHSAFPFQFLPNFPHSLYPFTDRALAHNLLVKAEPKSPRDALKVGGPSAECPFDLTTKPKD

SEQ ID NO: 8905 - protein, 80 aa, Synthetic construct
QEKKLGSLPYHSAFPFQFLPNFPHSLYPFTDRALAHNLLVKAEPKSPRDALKVGGPSAECPFDLTTKPKDVKPILPMPKG

SEQ ID NO: 8906 - protein, 80 aa, Synthetic construct
HSAFPFQFLPNFPHSLYPFTDRALAHNLLVKAEPKSPRDALKVGGPSAECPFDLTTKPKDVKPILPMPKGPSAPASGEEQ

SEQ ID NO: 8907 - protein, 80 aa, Synthetic construct; identical to SEQ ID NO: 2102

SEQ ID NO: 8908 - protein, 80 aa, Synthetic construct
KAEPKSPRDALKVGGPSAECPFDLTTKPKDVKPILPMPKGPSAPASGEEQPLDLSIGSRARASQNGGGREPRKNHVYGER

SEQ ID NO: 8909 - protein, 80 aa, Synthetic construct
LKVGGPSAECPFDLTTKPKDVKPILPMPKGPSAPASGEEQPLDLSIGSRARASQNGGGREPRKNHVYGERKLGAGEGLPQ

SEQ ID NO: 8910 - protein, 80 aa, Synthetic construct; identical to SEQ ID NO: 2103

SEQ ID NO: 8911 - protein, 80 aa, Synthetic construct; identical to SEQ ID NO: 1759

SEQ ID NO: 8912 - protein, 80 aa, Synthetic construct; identical to SEQ ID NO: 1345

SEQ ID NO: 8913 - protein, 80 aa, Synthetic construct
SQPPFCSSDDNESNSESAENGWDSGSNFSEETKPPRVPKYVLTDHKKDLLEVPEIKTEGDKFIPCENRCDSETERKDPQN

SEQ ID NO: 8914 - protein, 80 aa, Synthetic construct
NESNSESAENGWDSGSNFSEETKPPRVPKYVLTDHKKDLLEVPEIKTEGDKFIPCENRCDSETERKDPQNALAEPLDGNA

SEQ ID NO: 8915 - protein, 80 aa, Synthetic construct
GWDSGSNFSEETKPPRVPKYVLTDHKKDLLEVPEIKTEGDKFIPCENRCDSETERKDPQNALAEPLDGNAQPSFPDVEEE

SEQ ID NO: 8916 - protein, 80 aa, Synthetic construct
ETKPPRVPKYVLTDHKKDLLEVPEIKTEGDKFIPCENRCDSETERKDPQNALAEPLDGNAQPSFPDVEEEDSESLAVMTE

SEQ ID NO: 8917 - protein, 80 aa, Synthetic construct
VLTDHKKDLLEVPEIKTEGDKFIPCENRCDSETERKDPQNALAEPLDGNAQPSFPDVEEEDSESLAVMTEEGSDLEKAKG

SEQ ID NO: 8918 - protein, 80 aa, Synthetic construct
IKLKATGGIESDEEIRHLDEEIKELNESNLKIEADMMKLQTQITSMESNLKTIEEENKLIEQNNESLLKELAGLSQALIS

SEQ ID NO: 8919 - protein, 80 aa, Synthetic construct; identical to SEQ ID NO: 1346

SEQ ID NO: 8920 - protein, 80 aa, Synthetic construct; identical to SEQ ID NO: 1768

SEQ ID NO: 8921 - protein, 80 aa, Synthetic construct; identical to SEQ ID NO: 1347

SEQ ID NO: 8922 - protein, 80 aa, Synthetic construct; identical to SEQ ID NO: 1827

SEQ ID NO: 8923 - protein, 80 aa, Synthetic construct
PFPSYGHYRNSLATVEEDFQPFRQLEAAASAAPAMPPFPFRMAPPLLSPGLGLQREPLYDLPWYSKLPPWYPIPHVPREV

SEQ ID NO: 8924 - protein, 80 aa, Synthetic construct; identical to SEQ ID NO: 1348

SEQ ID NO: 8925 - protein, 80 aa, Synthetic construct
PARFQFTEEDLHFVLYGVTPSLEHPASLHHAISGLLVPPDSSGSDSLPQTLDKDSLQLPEGLCLMQTVFGEVPHFGVFCS

SEQ ID NO: 8926 - protein, 80 aa, Synthetic construct; identical to SEQ ID NO: 4459

SEQ ID NO: 8927 - protein, 80 aa, Synthetic construct; identical to SEQ ID NO: 5844

SEQ ID NO: 8928 - protein, 80 aa, Synthetic construct; identical to SEQ ID NO: 5845

SEQ ID NO: 8929 - protein, 80 aa, Synthetic construct; identical to SEQ ID NO: 5846

SEQ ID NO: 8930 - protein, 80 aa, Synthetic construct
AEVEGEAQEIEWLPFRCIKCFKLSFSTAELLCMHYTDHHSRDLKRDFIILGNGPRLQNSTYQCKHCDSKLQSTAELTSHL

SEQ ID NO: 8931 - protein, 80 aa, Synthetic construct
EWLPFRCIKCFKLSFSTAELLCMHYTDHHSRDLKRDFIILGNGPRLQNSTYQCKHCDSKLQSTAELTSHLNIHNEEFQKR

SEQ ID NO: 8932 - protein, 80 aa, Synthetic construct; identical to SEQ ID NO: 2340

SEQ ID NO: 8933 - protein, 80 aa, Synthetic construct
GHASPNVVNGQMRLGFSGDMYPRPEQYGQVTSPRSEHYAAPQLHGYGPMNVNMAAHHGAGAFFRYMRQPIKQELICKWIE

SEQ ID NO: 8934 - protein, 80 aa, Synthetic construct
QMRLGFSGDMYPRPEQYGQVTSPRSEHYAAPQLHGYGPMNVNMAAHHGAGAFFRYMRQPIKQELICKWIEPEQLANPKKS

SEQ ID NO: 8935 - protein, 80 aa, Synthetic construct
YPRPEQYGQVTSPRSEHYAAPQLHGYGPMNVNMAAHHGAGAFFRYMRQPIKQELICKWIEPEQLANPKKSCNKTFSTMHE

SEQ ID NO: 8936 - protein, 80 aa, Synthetic construct; identical to SEQ ID NO: 5656

SEQ ID NO: 8937 - protein, 80 aa, Synthetic construct; identical to SEQ ID NO: 1349

SEQ ID NO: 8938 - protein, 80 aa, Synthetic construct; identical to SEQ ID NO: 1350

SEQ ID NO: 8939 - protein, 80 aa, Synthetic construct; identical to SEQ ID NO: 1809

SEQ ID NO: 8940 - protein, 80 aa, Synthetic construct
NQVHLGLRGELFGRADPYRPVASPRTDPYAAGAQFPNYSPMNMNMGVNVAAHHGPGAFFRYMRQPIKQELSCKWIDEAQL

SEQ ID NO: 8941 - protein, 80 aa, Synthetic construct
VASPRTDPYAAGAQFPNYSPMNMNMGVNVAAHHGPGAFFRYMRQPIKQELSCKWIDEAQLSRPKKSCDRTFSTMHELVTH

SEQ ID NO: 8942 - protein, 80 aa, Synthetic construct
MNMNMGVNVAAHHGPGAFFRYMRQPIKQELSCKWIDEAQLSRPKKSCDRTFSTMHELVTHVTMEHVGGPEQNNHVCYWEE

SEQ ID NO: 8943 - protein, 80 aa, Synthetic construct
AHHGPGAFFRYMRQPIKQELSCKWIDEAQLSRPKKSCDRTFSTMHELVTHVTMEHVGGPEQNNHVCYWEECPREGKSFKA

SEQ ID NO: 8944 - protein, 80 aa, Synthetic construct
YMRQPIKQELSCKWIDEAQLSRPKKSCDRTFSTMHELVTHVTMEHVGGPEQNNHVCYWEECPREGKSFKAKYKLVNHIRV

SEQ ID NO: 8945 - protein, 80 aa, Synthetic construct
AITLTLQTAEMQEGLLAVKVKEEEEEHSCGPESGLSRNNPHTREIFRRRFRQFCYQESPGPREALQRLQELCHQWLRPEM

SEQ ID NO: 8946 - protein, 80 aa, Synthetic construct
MQEGLLAVKVKEEEEEHSCGPESGLSRNNPHTREIFRRRFRQFCYQESPGPREALQRLQELCHQWLRPEMHTKEQILELL

SEQ ID NO: 8947 - protein, 80 aa, Synthetic construct
KEEEEEHSCGPESGLSRNNPHTREIFRRRFRQFCYQESPGPREALQRLQELCHQWLRPEMHTKEQILELLVLEQFLTILP

SEQ ID NO: 8948 - protein, 80 aa, Synthetic construct; identical to SEQ ID NO: 6072

SEQ ID NO: 8949 - protein, 80 aa, Synthetic construct; identical to SEQ ID NO: 5974

SEQ ID NO: 8950 - protein, 80 aa, Synthetic construct
MFNHRLPPVTSFTRPAGSAAPPPQCVLSSSTSAAPAAEPPPPPAPDMTFKKEPAASAAAFPSQRTSWGFLQSLVSIKQEK

SEQ ID NO: 8951 - protein, 80 aa, Synthetic construct
SFTRPAGSAAPPPQCVLSSSTSAAPAAEPPPPPAPDMTFKKEPAASAAAFPSQRTSWGFLQSLVSIKQEKPADPEEQQSH

SEQ ID NO: 8952 - protein, 80 aa, Synthetic construct
PPPQCVLSSSTSAAPAAEPPPPPAPDMTFKKEPAASAAAFPSQRTSWGFLQSLVSIKQEKPADPEEQQSHHHHHHHHYGG

SEQ ID NO: 8953 - protein, 80 aa, Synthetic construct
TSAAPAAEPPPPPAPDMTFKKEPAASAAAFPSQRTSWGFLQSLVSIKQEKPADPEEQQSHHHHHHHHYGGLFAGAEERSP

SEQ ID NO: 8954 - protein, 80 aa, Synthetic construct
PPPAPDMTFKKEPAASAAAFPSQRTSWGFLQSLVSIKQEKPADPEEQQSHHHHHHHHYGGLFAGAEERSPGLGGGEGGSH

SEQ ID NO: 8955 - protein, 80 aa, Synthetic construct
KEPAASAAAFPSQRTSWGFLQSLVSIKQEKPADPEEQQSHHHHHHHHYGGLFAGAEERSPGLGGGEGGSHGVIQDLSILH

SEQ ID NO: 8956 - protein, 80 aa, Synthetic construct
PSQRTSWGFLQSLVSIKQEKPADPEEQQSHHHHHHHHYGGLFAGAEERSPGLGGGEGGSHGVIQDLSILHQHVQQQPAQH

SEQ ID NO: 8957 - protein, 80 aa, Synthetic construct
QSLVSIKQEKPADPEEQQSHHHHHHHHYGGLFAGAEERSPGLGGGEGGSHGVIQDLSILHQHVQQQPAQHHRDVLLSSSS

SEQ ID NO: 8958 - protein, 80 aa, Synthetic construct
SELVQEENLSPGTQTPSNDKASMLQEYSKYLQQAFEKSTNASFTLGHGFQFVSLSSPLHNHTLFPEKQIYTTSPLECGFG

SEQ ID NO: 8959 - protein, 80 aa, Synthetic construct
PGTQTPSNDKASMLQEYSKYLQQAFEKSTNASFTLGHGFQFVSLSSPLHNHTLFPEKQIYTTSPLECGFGQSVTSVLPSS

SEQ ID NO: 8960 - protein, 80 aa, Synthetic construct; identical to SEQ ID NO: 1351

SEQ ID NO: 8961 - protein, 80 aa, Synthetic construct; identical to SEQ ID NO: 1352

SEQ ID NO: 8962 - protein, 80 aa, Synthetic construct; identical to SEQ ID NO: 2186

SEQ ID NO: 8963 - protein, 80 aa, Synthetic construct; identical to SEQ ID NO: 1353

SEQ ID NO: 8964 - protein, 80 aa, Synthetic construct; identical to SEQ ID NO: 5856

SEQ ID NO: 8965 - protein, 80 aa, Synthetic construct; identical to SEQ ID NO: 1787

SEQ ID NO: 8966 - protein, 80 aa, Synthetic construct; identical to SEQ ID NO: 1354

SEQ ID NO: 8967 - protein, 80 aa, Synthetic construct; identical to SEQ ID NO: 1355

SEQ ID NO: 8968 - protein, 80 aa, Synthetic construct; identical to SEQ ID NO: 1356

SEQ ID NO: 8969 - protein, 80 aa, Synthetic construct; identical to SEQ ID NO: 5791

SEQ ID NO: 8970 - protein, 80 aa, Synthetic construct; identical to SEQ ID NO: 5792

SEQ ID NO: 8971 - protein, 80 aa, Synthetic construct; identical to SEQ ID NO: 5793

SEQ ID NO: 8972 - protein, 80 aa, Synthetic construct
LCERRFFSSSEFVQHRCDPAREKPLKCPDCEKRFKYASDLQRHRRVHTGEKPYKCPNCDKAFKQREHLNKHQGVHAREQQ

SEQ ID NO: 8973 - protein, 80 aa, Synthetic construct; identical to SEQ ID NO: 1964

SEQ ID NO: 8974 - protein, 80 aa, Synthetic construct; identical to SEQ ID NO: 1357

SEQ ID NO: 8975 - protein, 80 aa, Synthetic construct; identical to SEQ ID NO: 5829

SEQ ID NO: 8976 - protein, 80 aa, Synthetic construct; identical to SEQ ID NO: 1358

SEQ ID NO: 8977 - protein, 80 aa, Synthetic construct; identical to SEQ ID NO: 1359

SEQ ID NO: 8978 - protein, 80 aa, Synthetic construct; identical to SEQ ID NO: 2116

SEQ ID NO: 8979 - protein, 80 aa, Synthetic construct; identical to SEQ ID NO: 1360

SEQ ID NO: 8980 - protein, 80 aa, Synthetic construct; identical to SEQ ID NO: 1361

SEQ ID NO: 8981 - protein, 80 aa, Synthetic construct; identical to SEQ ID NO: 1362

SEQ ID NO: 8982 - protein, 80 aa, Synthetic construct; identical to SEQ ID NO: 1363

SEQ ID NO: 8983 - protein, 80 aa, Synthetic construct; identical to SEQ ID NO: 5519

SEQ ID NO: 8984 - protein, 80 aa, Synthetic construct; identical to SEQ ID NO: 2245

SEQ ID NO: 8985 - protein, 80 aa, Synthetic construct; identical to SEQ ID NO: 5981

SEQ ID NO: 8986 - protein, 80 aa, Synthetic construct
YQCSLCPRKYPNLMALRNHVRVHCKAARRSADIGAEGAPSHLKVELPPDPVEAEAAPHTDQDHVCKHEEEATDITPAADK

SEQ ID NO: 8987 - protein, 80 aa, Synthetic construct
PNLMALRNHVRVHCKAARRSADIGAEGAPSHLKVELPPDPVEAEAAPHTDQDHVCKHEEEATDITPAADKTAAHICSICG

SEQ ID NO: 8988 - protein, 80 aa, Synthetic construct
ADIGAEGAPSHLKVELPPDPVEAEAAPHTDQDHVCKHEEEATDITPAADKTAAHICSICGLLFEDAESLERHGLTHGAGE

SEQ ID NO: 8989 - protein, 80 aa, Synthetic construct
HLKVELPPDPVEAEAAPHTDQDHVCKHEEEATDITPAADKTAAHICSICGLLFEDAESLERHGLTHGAGEKENSRTETTM

SEQ ID NO: 8990 - protein, 80 aa, Synthetic construct
AAYRNHLRNHPRCKGSEPQVGPIPEAAGSSELQVGPIPEGGSNKPQHMAEEGPGQAEVEKLQEELKVEPLEEVARVKEEV

SEQ ID NO: 8991 - protein, 80 aa, Synthetic construct
PRCKGSEPQVGPIPEAAGSSELQVGPIPEGGSNKPQHMAEEGPGQAEVEKLQEELKVEPLEEVARVKEEVWEETTVKGEE

SEQ ID NO: 8992 - protein, 80 aa, Synthetic construct
ELQVGPIPEGGSNKPQHMAEEGPGQAEVEKLQEELKVEPLEEVARVKEEVWEETTVKGEEIEPRLETAEKGCQTEASSER

SEQ ID NO: 8993 - protein, 80 aa, Synthetic construct
GSNKPQHMAEEGPGQAEVEKLQEELKVEPLEEVARVKEEVWEETTVKGEEIEPRLETAEKGCQTEASSERPFSCEVCGRS

SEQ ID NO: 8994 - protein, 80 aa, Synthetic construct
EGPGQAEVEKLQEELKVEPLEEVARVKEEVWEETTVKGEEIEPRLETAEKGCQTEASSERPFSCEVCGRSYKHAGSLINH

SEQ ID NO: 8995 - protein, 80 aa, Synthetic construct
LQEELKVEPLEEVARVKEEVWEETTVKGEEIEPRLETAEKGCQTEASSERPFSCEVCGRSYKHAGSLINHRQSHQTGHFG

SEQ ID NO: 8996 - protein, 80 aa, Synthetic construct
EEVARVKEEVWEETTVKGEEIEPRLETAEKGCQTEASSERPFSCEVCGRSYKHAGSLINHRQSHQTGHFGCQACSKGFSN

SEQ ID NO: 8997 - protein, 80 aa, Synthetic construct
ELLAHQDAHLRESANQIQYQCWDCQELFPSPELWVAHRKAQHLSATVAEPPVPPPLPPPTPLPPPSPPSEVKMEPYECPE

SEQ ID NO: 8998 - protein, 80 aa, Synthetic construct
RESANQIQYQCWDCQELFPSPELWVAHRKAQHLSATVAEPPVPPPLPPPTPLPPPSPPSEVKMEPYECPECSTLCATPEE

SEQ ID NO: 8999 - protein, 80 aa, Synthetic construct
CWDCQELFPSPELWVAHRKAQHLSATVAEPPVPPPLPPPTPLPPPSPPSEVKMEPYECPECSTLCATPEEFLEHQGTHFD

SEQ ID NO: 9000 - protein, 80 aa, Synthetic construct
PLPPPSPPSEVKMEPYECPECSTLCATPEEFLEHQGTHFDSLEKEERNGLEEEEEDDEEDEEDDEEMEDEEAMAEVGDDA

SEQ ID NO: 9001 - protein, 80 aa, Synthetic construct
LANLSRHQLTHTGARPYQCLDCGKRFTQSSNLQQHRRLHLRPVAFARAPRLPITGLYNKSPYYCGTCGRWFRAMAGLRLH

SEQ ID NO: 9002 - protein, 80 aa, Synthetic construct
NAQEQMSSSREERALGVCSGHEAPTPEEGAHTEQAEAPCRGQACSAQKAQPVGTCPGEEWMIRKVKVEDEDQEAEEEVEW

SEQ ID NO: 9003 - protein, 80 aa, Synthetic construct
EERALGVCSGHEAPTPEEGAHTEQAEAPCRGQACSAQKAQPVGTCPGEEWMIRKVKVEDEDQEAEEEVEWPQHLSLLPSP

SEQ ID NO: 9004 - protein, 80 aa, Synthetic construct
HEAPTPEEGAHTEQAEAPCRGQACSAQKAQPVGTCPGEEWMIRKVKVEDEDQEAEEEVEWPQHLSLLPSPFPAPDLGHLA

SEQ ID NO: 9005 - protein, 80 aa, Synthetic construct
HTEQAEAPCRGQACSAQKAQPVGTCPGEEWMIRKVKVEDEDQEAEEEVEWPQHLSLLPSPFPAPDLGHLAAAYKLEPGAP

SEQ ID NO: 9006 - protein, 80 aa, Synthetic construct
GQACSAQKAQPVGTCPGEEWMIRKVKVEDEDQEAEEEVEWPQHLSLLPSPFPAPDLGHLAAAYKLEPGAPGALSGLALSG

SEQ ID NO: 9007 - protein, 80 aa, Synthetic construct
PVGTCPGEEWMIRKVKVEDEDQEAEEEVEWPQHLSLLPSPFPAPDLGHLAAAYKLEPGAPGALSGLALSGWGPMPEKPYG

SEQ ID NO: 9008 - protein, 80 aa, Synthetic construct
MIRKVKVEDEDQEAEEEVEWPQHLSLLPSPFPAPDLGHLAAAYKLEPGAPGALSGLALSGWGPMPEKPYGCGECERRFRD

SEQ ID NO: 9009 - protein, 80 aa, Synthetic construct; identical to SEQ ID NO: 1364

SEQ ID NO: 9010 - protein, 80 aa, Synthetic construct; identical to SEQ ID NO: 2098

SEQ ID NO: 9011 - protein, 80 aa, Synthetic construct; identical to SEQ ID NO: 1365

SEQ ID NO: 9012 - protein, 80 aa, Synthetic construct; identical to SEQ ID NO: 1366

SEQ ID NO: 9013 - protein, 80 aa, Synthetic construct; identical to SEQ ID NO: 6033

SEQ ID NO: 9014 - protein, 80 aa, Synthetic construct; identical to SEQ ID NO: 6034

SEQ ID NO: 9015 - protein, 80 aa, Synthetic construct; identical to SEQ ID NO: 6035

SEQ ID NO: 9016 - protein, 80 aa, Synthetic construct; identical to SEQ ID NO: 1367

SEQ ID NO: 9017 - protein, 80 aa, Synthetic construct; identical to SEQ ID NO: 1888

SEQ ID NO: 9018 - protein, 80 aa, Synthetic construct; identical to SEQ ID NO: 1368

SEQ ID NO: 9019 - protein, 80 aa, Synthetic construct
CPFCTFKTFYPEVLMMHQRLEHKYNPDVHKNCRNKSLLRSRRTGCPPALLGKDVPPLSSFCKPKPKSAFPAQSKSLPSAK

SEQ ID NO: 9020 - protein, 80 aa, Synthetic construct; identical to SEQ ID NO: 5782

SEQ ID NO: 9021 - protein, 80 aa, Synthetic construct; identical to SEQ ID NO: 2315

SEQ ID NO: 9022 - protein, 80 aa, Synthetic construct
PMPAGAALLALGPRNPWTLWTPLTPNYPDRQPWTDKHPDLLTCGRCLQTFPLEAITAFMDHKKLGCQLFRGPSRGQGSER

SEQ ID NO: 9023 - protein, 80 aa, Synthetic construct
LGPRNPWTLWTPLTPNYPDRQPWTDKHPDLLTCGRCLQTFPLEAITAFMDHKKLGCQLFRGPSRGQGSEREELKALSCLR

SEQ ID NO: 9024 - protein, 80 aa, Synthetic construct
TPLTPNYPDRQPWTDKHPDLLTCGRCLQTFPLEAITAFMDHKKLGCQLFRGPSRGQGSEREELKALSCLRCGKQFTVAWK

SEQ ID NO: 9025 - protein, 80 aa, Synthetic construct
QPWTDKHPDLLTCGRCLQTFPLEAITAFMDHKKLGCQLFRGPSRGQGSEREELKALSCLRCGKQFTVAWKLLRHAQWDHG

SEQ ID NO: 9026 - protein, 80 aa, Synthetic construct
ARAVDIMDICESILERKRHDSERSTCSILEQTDMEAVEALVCMSSWGQRSQKGDLLRIRPLTPVSDSGDVTTTVHMDAAT

SEQ ID NO: 9027 - protein, 80 aa, Synthetic construct; identical to SEQ ID NO: 2160

SEQ ID NO: 9028 - protein, 80 aa, Synthetic construct; identical to SEQ ID NO: 1369

SEQ ID NO: 9029 - protein, 80 aa, Synthetic construct; identical to SEQ ID NO: 2161

SEQ ID NO: 9030 - protein, 80 aa, Synthetic construct; identical to SEQ ID NO: 1370

SEQ ID NO: 9031 - protein, 80 aa, Synthetic construct; identical to SEQ ID NO: 1371

SEQ ID NO: 9032 - protein, 80 aa, Synthetic construct; identical to SEQ ID NO: 1372

SEQ ID NO: 9033 - protein, 80 aa, Synthetic construct
PVPSSPCRAKGTSVIRHTGESPAACFPTIQTPDCRLSDSREGEEQLLGHFETLQDTHLTDSLLSTNLVSCQPCLHKSGGL

SEQ ID NO: 9034 - protein, 80 aa, Synthetic construct
KDKHDLLQGHQNGSGSQAPSGGHLYGFGAKSNGGGASPFHCGGTGSGSVAAAGEVSKSAPDSGLMGNSMLVKKEEEEEES

SEQ ID NO: 9035 - protein, 80 aa, Synthetic construct
QNGSGSQAPSGGHLYGFGAKSNGGGASPFHCGGTGSGSVAAAGEVSKSAPDSGLMGNSMLVKKEEEEEESHRRIKKLKTE

SEQ ID NO: 9036 - protein, 80 aa, Synthetic construct
GGHLYGFGAKSNGGGASPFHCGGTGSGSVAAAGEVSKSAPDSGLMGNSMLVKKEEEEEESHRRIKKLKTEKVDPLFTVPA

SEQ ID NO: 9037 - protein, 80 aa, Synthetic construct
SNGGGASPFHCGGTGSGSVAAAGEVSKSAPDSGLMGNSMLVKKEEEEEESHRRIKKLKTEKVDPLFTVPAPPPPISSSLT

SEQ ID NO: 9038 - protein, 80 aa, Synthetic construct
CGGTGSGSVAAAGEVSKSAPDSGLMGNSMLVKKEEEEEESHRRIKKLKTEKVDPLFTVPAPPPPISSSLTPQILPSYFSP

SEQ ID NO: 9039 - protein, 80 aa, Synthetic construct; identical to SEQ ID NO: 1373

SEQ ID NO: 9040 - protein, 80 aa, Synthetic construct; identical to SEQ ID NO: 1374

SEQ ID NO: 9041 - protein, 80 aa, Synthetic construct; identical to SEQ ID NO: 2028

SEQ ID NO: 9042 - protein, 80 aa, Synthetic construct
HRRIKKLKTEKVDPLFTVPAPPPPISSSLTPQILPSYFSPSSSNIAAPVEQLLVRTRSVGVNTCEVGVVTEPECLGPCEP

SEQ ID NO: 9043 - protein, 80 aa, Synthetic construct; identical to SEQ ID NO: 5940

SEQ ID NO: 9044 - protein, 80 aa, Synthetic construct
EPECLGPCEPGTSVNLEGIVWHETEEGVLVVNVTWRNKTYVGTLLDCTKHDWAPPRFCESPTSDLEMRGGRGRGKRARSA

SEQ ID NO: 9045 - protein, 80 aa, Synthetic construct
GTSVNLEGIVWHETEEGVLVVNVTWRNKTYVGTLLDCTKHDWAPPRFCESPTSDLEMRGGRGRGKRARSAAAAPGSEASF

SEQ ID NO: 9046 - protein, 80 aa, Synthetic construct; identical to SEQ ID NO: 2029

SEQ ID NO: 9047 - protein, 80 aa, Synthetic construct
ASSPSDIISSKDSVVKGHSSTTAQSSQLKESHSPYYHSYDPYYSPSYMHPGQVGAPAAGNSGSTQGMKIKKESEEDAEKK

SEQ ID NO: 9048 - protein, 80 aa, Synthetic construct
TTAQSSQLKESHSPYYHSYDPYYSPSYMHPGQVGAPAAGNSGSTQGMKIKKESEEDAEKKDKAEQLDSKKVDHNSASLQP

SEQ ID NO: 9049 - protein, 80 aa, Synthetic construct
SHSPYYHSYDPYYSPSYMHPGQVGAPAAGNSGSTQGMKIKKESEEDAEKKDKAEQLDSKKVDHNSASLQPQHQSVITQRH

SEQ ID NO: 9050 - protein, 80 aa, Synthetic construct
PYYSPSYMHPGQVGAPAAGNSGSTQGMKIKKESEEDAEKKDKAEQLDSKKVDHNSASLQPQHQSVITQRHPALAQSLYYG

SEQ ID NO: 9051 - protein, 80 aa, Synthetic construct
GQVGAPAAGNSGSTQGMKIKKESEEDAEKKDKAEQLDSKKVDHNSASLQPQHQSVITQRHPALAQSLYYGQYAYGLYMDQ

SEQ ID NO: 9052 - protein, 80 aa, Synthetic construct; identical to SEQ ID NO: 2030

SEQ ID NO: 9053 - protein, 80 aa, Synthetic construct
MKQTGVDPTSRFKQDPDSRTWHHYVYQPKYLDQQKSEELDREKKLKEDSPRKTPNKESGVPSLPVSLTSIKEEPKEAKHP

SEQ ID NO: 9054 - protein, 80 aa, Synthetic construct
RFKQDPDSRTWHHYVYQPKYLDQQKSEELDREKKLKEDSPRKTPNKESGVPSLPVSLTSIKEEPKEAKHPDSQSMEESKL

SEQ ID NO: 9055 - protein, 80 aa, Synthetic construct
WHHYVYQPKYLDQQKSEELDREKKLKEDSPRKTPNKESGVPSLPVSLTSIKEEPKEAKHPDSQSMEESKLKNDDRKTPVN

SEQ ID NO: 9056 - protein, 80 aa, Synthetic construct
REKKLKEDSPRKTPNKESGVPSLPVSLTSIKEEPKEAKHPDSQSMEESKLKNDDRKTPVNWKDSRGTRVAVSSPMSQHQS

SEQ ID NO: 9057 - protein, 80 aa, Synthetic construct
RKTPNKESGVPSLPVSLTSIKEEPKEAKHPDSQSMEESKLKNDDRKTPVNWKDSRGTRVAVSSPMSQHQSYIQYLHAYPY

SEQ ID NO: 9058 - protein, 80 aa, Synthetic construct
PSLPVSLTSIKEEPKEAKHPDSQSMEESKLKNDDRKTPVNWKDSRGTRVAVSSPMSQHQSYIQYLHAYPYPQMYDPSHPA

SEQ ID NO: 9059 - protein, 80 aa, Synthetic construct; identical to SEQ ID NO: 2031

SEQ ID NO: 9060 - protein, 80 aa, Synthetic construct
WKDSRGTRVAVSSPMSQHQSYIQYLHAYPYPQMYDPSHPAYRAVSPVLMHSYPGAYLSPGFHYPVYGKMSGREETEKVNT

SEQ ID NO: 9061 - protein, 80 aa, Synthetic construct; identical to SEQ ID NO: 2218

SEQ ID NO: 9062 - protein, 80 aa, Synthetic construct
KRAAGGERRGKAPTDCASGPAAAGIKKPKAMRKLSFADEVTTSPVLGLKIKEEEPGAPSRGLGGSRTPLGEFICQLCKEQ

SEQ ID NO: 9063 - protein, 80 aa, Synthetic construct
KAPTDCASGPAAAGIKKPKAMRKLSFADEVTTSPVLGLKIKEEEPGAPSRGLGGSRTPLGEFICQLCKEQYADPFALAQH

SEQ ID NO: 9064 - protein, 80 aa, Synthetic construct
AAAGIKKPKAMRKLSFADEVTTSPVLGLKIKEEEPGAPSRGLGGSRTPLGEFICQLCKEQYADPFALAQHRCSRIVRVEY

SEQ ID NO: 9065 - protein, 80 aa, Synthetic construct
MRKLSFADEVTTSPVLGLKIKEEEPGAPSRGLGGSRTPLGEFICQLCKEQYADPFALAQHRCSRIVRVEYRCPECDKVFS

SEQ ID NO: 9066 - protein, 80 aa, Synthetic construct
TTSPVLGLKIKEEEPGAPSRGLGGSRTPLGEFICQLCKEQYADPFALAQHRCSRIVRVEYRCPECDKVFSCPANLASHRR

SEQ ID NO: 9067 - protein, 80 aa, Synthetic construct; identical to SEQ ID NO: 2361

SEQ ID NO: 9068 - protein, 80 aa, Synthetic construct
LFSVAEGDQTMNMIQLDSEVVTAEAFAALIDMMYTSTLMLGESNVMDVLLAASHLHLNSVVKACKHYLTTRTLPMSPPSE

SEQ ID NO: 9069 - protein, 80 aa, Synthetic construct
MNMIQLDSEVVTAEAFAALIDMMYTSTLMLGESNVMDVLLAASHLHLNSVVKACKHYLTTRTLPMSPPSERVQEQSARMQ

SEQ ID NO: 9070 - protein, 80 aa, Synthetic construct
VTAEAFAALIDMMYTSTLMLGESNVMDVLLAASHLHLNSVVKACKHYLTTRTLPMSPPSERVQEQSARMQRSFMLQQLGL

SEQ ID NO: 9071 - protein, 80 aa, Synthetic construct
QSFGTQEDAQVPSQSDNSAGNMAQLSMASRATQVETSFDQEAAPEKSSFQCENPEVGLGEKEHMRVVVKSEPLSSPEPQD

SEQ ID NO: 9072 - protein, 80 aa, Synthetic construct
VPSQSDNSAGNMAQLSMASRATQVETSFDQEAAPEKSSFQCENPEVGLGEKEHMRVVVKSEPLSSPEPQDEVSDVTSQAE

SEQ ID NO: 9073 - protein, 80 aa, Synthetic construct
ATQVETSFDQEAAPEKSSFQCENPEVGLGEKEHMRVVVKSEPLSSPEPQDEVSDVTSQAEGSESVEVEGVVVSAEKIDLS

SEQ ID NO: 9074 - protein, 80 aa, Synthetic construct
EAAPEKSSFQCENPEVGLGEKEHMRVVVKSEPLSSPEPQDEVSDVTSQAEGSESVEVEGVVVSAEKIDLSPESSDRSFSD

SEQ ID NO: 9075 - protein, 80 aa, Synthetic construct
CENPEVGLGEKEHMRVVVKSEPLSSPEPQDEVSDVTSQAEGSESVEVEGVVVSAEKIDLSPESSDRSFSDPQSSTDRVGD

SEQ ID NO: 9076 - protein, 80 aa, Synthetic construct
KEHMRVVVKSEPLSSPEPQDEVSDVTSQAEGSESVEVEGVVVSAEKIDLSPESSDRSFSDPQSSTDRVGDIHILEVTNNL

SEQ ID NO: 9077 - protein, 80 aa, Synthetic construct; identical to SEQ ID NO: 1375

SEQ ID NO: 9078 - protein, 80 aa, Synthetic construct; identical to SEQ ID NO: 1816

SEQ ID NO: 9079 - protein, 80 aa, Synthetic construct; identical to SEQ ID NO: 475

SEQ ID NO: 9080 - protein, 80 aa, Synthetic construct; identical to SEQ ID NO: 342

SEQ ID NO: 9081 - protein, 80 aa, Synthetic construct; identical to SEQ ID NO: 343

SEQ ID NO: 9082 - protein, 80 aa, Synthetic construct
WQQTCLELERYLQTEPRRISETFGEDLDCFLHASPPPCIEESFRRLDPLLLPVEAAICEKSSAVDILLSRDKLLSETCLS

SEQ ID NO: 9083 - protein, 80 aa, Synthetic construct
QPVVQHLQLQESQQPTSQAQIVQGITPQTIHGVQASGQNISQQALQNLQLQLNPGTFLIQAQTVTPSGQVTWQTFQVQGV

SEQ ID NO: 9084 - protein, 80 aa, Synthetic construct
ESQQPTSQAQIVQGITPQTIHGVQASGQNISQQALQNLQLQLNPGTFLIQAQTVTPSGQVTWQTFQVQGVQNLQNLQIQN

SEQ ID NO: 9085 - protein, 80 aa, Synthetic construct
IVQGITPQTIHGVQASGQNISQQALQNLQLQLNPGTFLIQAQTVTPSGQVTWQTFQVQGVQNLQNLQIQNTAAQQITLTP

SEQ ID NO: 9086 - protein, 80 aa, Synthetic construct
TAAQQITLTPVQTLTLGQVAAGGAFTSTPVSLSTGQLPNLQTVTVNSIDSAGIQLHPGENADSPADIRIKEEEPDPEEWQ

SEQ ID NO: 9087 - protein, 80 aa, Synthetic construct
VQTLTLGQVAAGGAFTSTPVSLSTGQLPNLQTVTVNSIDSAGIQLHPGENADSPADIRIKEEEPDPEEWQLSGDSTLNTN

SEQ ID NO: 9088 - protein, 80 aa, Synthetic construct
AGGAFTSTPVSLSTGQLPNLQTVTVNSIDSAGIQLHPGENADSPADIRIKEEEPDPEEWQLSGDSTLNTNDLTHLRVQVV

SEQ ID NO: 9089 - protein, 80 aa, Synthetic construct
SLSTGQLPNLQTVTVNSIDSAGIQLHPGENADSPADIRIKEEEPDPEEWQLSGDSTLNTNDLTHLRVQVVDEEGDQQHQE

SEQ ID NO: 9090 - protein, 80 aa, Synthetic construct
QTVTVNSIDSAGIQLHPGENADSPADIRIKEEEPDPEEWQLSGDSTLNTNDLTHLRVQVVDEEGDQQHQEGKRLRRVACT

SEQ ID NO: 9091 - protein, 80 aa, Synthetic construct; identical to SEQ ID NO: 2179

SEQ ID NO: 9092 - protein, 80 aa, Synthetic construct
ADSPADIRIKEEEPDPEEWQLSGDSTLNTNDLTHLRVQVVDEEGDQQHQEGKRLRRVACTCPNCKEGGGRGTNLGKKKQH

SEQ ID NO: 9093 - protein, 80 aa, Synthetic construct; identical to SEQ ID NO: 2180

SEQ ID NO: 9094 - protein, 80 aa, Synthetic construct; identical to SEQ ID NO: 1376

SEQ ID NO: 9095 - protein, 80 aa, Synthetic construct
SQGSSSVSSDAPGNVLCALSQKSSLKDCSEKTALDDRPQVLQPHRLRSFSASQSTDREGASPVTEVRIKTEPSSPLSDPS

SEQ ID NO: 9096 - protein, 80 aa, Synthetic construct
APGNVLCALSQKSSLKDCSEKTALDDRPQVLQPHRLRSFSASQSTDREGASPVTEVRIKTEPSSPLSDPSDIIRVTVGDA

SEQ ID NO: 9097 - protein, 80 aa, Synthetic construct
QKSSLKDCSEKTALDDRPQVLQPHRLRSFSASQSTDREGASPVTEVRIKTEPSSPLSDPSDIIRVTVGDAATTAAASSSS

SEQ ID NO: 9098 - protein, 80 aa, Synthetic construct
KTALDDRPQVLQPHRLRSFSASQSTDREGASPVTEVRIKTEPSSPLSDPSDIIRVTVGDAATTAAASSSSVTRDLSLKTE

SEQ ID NO: 9099 - protein, 80 aa, Synthetic construct
LQPHRLRSFSASQSTDREGASPVTEVRIKTEPSSPLSDPSDIIRVTVGDAATTAAASSSSVTRDLSLKTEDDQKDMSRLP

SEQ ID NO: 9100 - protein, 80 aa, Synthetic construct
ASQSTDREGASPVTEVRIKTEPSSPLSDPSDIIRVTVGDAATTAAASSSSVTRDLSLKTEDDQKDMSRLPAKRRFQADRR

SEQ ID NO: 9101 - protein, 80 aa, Synthetic construct
SPVTEVRIKTEPSSPLSDPSDIIRVTVGDAATTAAASSSSVTRDLSLKTEDDQKDMSRLPAKRRFQADRRLPFKKLKVNE

SEQ ID NO: 9102 - protein, 80 aa, Synthetic construct
PVLDHNGDVTGSSRPQSQPEPNKVNHIVTTKDDNVFSDSSEQVNFDSEDSSCLPEDLSLSKQLKIQVKEEPVEEAEEEAP

SEQ ID NO: 9103 - protein, 80 aa, Synthetic construct
GSSRPQSQPEPNKVNHIVTTKDDNVFSDSSEQVNFDSEDSSCLPEDLSLSKQLKIQVKEEPVEEAEEEAPEASTAPKEAG

SEQ ID NO: 9104 - protein, 80 aa, Synthetic construct
PNKVNHIVTTKDDNVFSDSSEQVNFDSEDSSCLPEDLSLSKQLKIQVKEEPVEEAEEEAPEASTAPKEAGPSKEASLWPC

SEQ ID NO: 9105 - protein, 80 aa, Synthetic construct; identical to SEQ ID NO: 2358

SEQ ID NO: 9106 - protein, 80 aa, Synthetic construct; identical to SEQ ID NO: 1377

SEQ ID NO: 9107 - protein, 80 aa, Synthetic construct
SCLPEDLSLSKQLKIQVKEEPVEEAEEEAPEASTAPKEAGPSKEASLWPCEKCGKMFTVHKQLERHQELLCSVKPFICHV

SEQ ID NO: 9108 - protein, 80 aa, Synthetic construct
KQLKIQVKEEPVEEAEEEAPEASTAPKEAGPSKEASLWPCEKCGKMFTVHKQLERHQELLCSVKPFICHVCNKAFRTNFR

SEQ ID NO: 9109 - protein, 80 aa, Synthetic construct
GAGPGGPAGVDASALPPPVGFRGGPEHVVKVVGGHVLYVCAACERSYVTLSSLKRHSNVHSWRRKYPCRYCEKVFALAEY

SEQ ID NO: 9110 - protein, 80 aa, Synthetic construct; identical to SEQ ID NO: 1378

SEQ ID NO: 9111 - protein, 80 aa, Synthetic construct; identical to SEQ ID NO: 1379

SEQ ID NO: 9112 - protein, 80 aa, Synthetic construct; identical to SEQ ID NO: 1380

SEQ ID NO: 9113 - protein, 80 aa, Synthetic construct; identical to SEQ ID NO: 1981

SEQ ID NO: 9114 - protein, 80 aa, Synthetic construct; identical to SEQ ID NO: 1381

SEQ ID NO: 9115 - protein, 80 aa, Synthetic construct
SHSSRAGRRPSTRFTCPHCAKVCKTAAALSRHGQRHAAERPGGTPTPVIAYSKGSAGTRPGDVKEEAPQEMQVSSSSGEA

SEQ ID NO: 9116 - protein, 80 aa, Synthetic construct
STRFTCPHCAKVCKTAAALSRHGQRHAAERPGGTPTPVIAYSKGSAGTRPGDVKEEAPQEMQVSSSSGEAGGGSTAAEEA

SEQ ID NO: 9117 - protein, 80 aa, Synthetic construct
KVCKTAAALSRHGQRHAAERPGGTPTPVIAYSKGSAGTRPGDVKEEAPQEMQVSSSSGEAGGGSTAAEEASETASLQDPI

SEQ ID NO: 9118 - protein, 80 aa, Synthetic construct; identical to SEQ ID NO: 5524

SEQ ID NO: 9119 - protein, 80 aa, Synthetic construct
KSGSEGPVGAGEGDRMEGIGAAKVTFYPEPYPLVYGPQLLAAYPYNFSNLAALPVALNMVLPDEKGAGALPFLPGVFGYA

SEQ ID NO: 9120 - protein, 80 aa, Synthetic construct
GEGDRMEGIGAAKVTFYPEPYPLVYGPQLLAAYPYNFSNLAALPVALNMVLPDEKGAGALPFLPGVFGYAVNPQAAPPAP

SEQ ID NO: 9121 - protein, 80 aa, Synthetic construct
AAKVTFYPEPYPLVYGPQLLAAYPYNFSNLAALPVALNMVLPDEKGAGALPFLPGVFGYAVNPQAAPPAPPTPPPPTLPP

SEQ ID NO: 9122 - protein, 80 aa, Synthetic construct
SSQTSLVTCVNGLRSPPLTGDLGGPSKRARPGPASTDSHEGSLQLEACRKASFLKQEPADEFSELFGPHQQGLPPPYPLS

SEQ ID NO: 9123 - protein, 80 aa, Synthetic construct
NGLRSPPLTGDLGGPSKRARPGPASTDSHEGSLQLEACRKASFLKQEPADEFSELFGPHQQGLPPPYPLSQLPPGPSLGG

SEQ ID NO: 9124 - protein, 80 aa, Synthetic construct
DLGGPSKRARPGPASTDSHEGSLQLEACRKASFLKQEPADEFSELFGPHQQGLPPPYPLSQLPPGPSLGGLGLGLAGRVV

SEQ ID NO: 9125 - protein, 80 aa, Synthetic construct
PGPASTDSHEGSLQLEACRKASFLKQEPADEFSELFGPHQQGLPPPYPLSQLPPGPSLGGLGLGLAGRVVAGRQACRWVD

SEQ ID NO: 9126 - protein, 80 aa, Synthetic construct
GSLQLEACRKASFLKQEPADEFSELFGPHQQGLPPPYPLSQLPPGPSLGGLGLGLAGRVVAGRQACRWVDCCAAYEQQEE

SEQ ID NO: 9127 - protein, 80 aa, Synthetic construct
ASFLKQEPADEFSELFGPHQQGLPPPYPLSQLPPGPSLGGLGLGLAGRVVAGRQACRWVDCCAAYEQQEELVRHIEKSHI

SEQ ID NO: 9128 - protein, 80 aa, Synthetic construct
YALIMHKLKHERARDYKCPLCKKQFQYSASLRAHLIRHTRKDAPSSSSSNSTSNEASGTSSEKGRTKREFICSICGRTLP

SEQ ID NO: 9129 - protein, 80 aa, Synthetic construct; identical to SEQ ID NO: 6040

SEQ ID NO: 9130 - protein, 80 aa, Synthetic construct
GARFTSHATFNSEKLPEVLNMESLPTVHNEGPSSAEGKDIAFSPPVYPAGILLVCNNCAAYRKLLEAQTPSVRKWALRRQ

SEQ ID NO: 9131 - protein, 80 aa, Synthetic construct
NSEKLPEVLNMESLPTVHNEGPSSAEGKDIAFSPPVYPAGILLVCNNCAAYRKLLEAQTPSVRKWALRRQNEPLEVRLQR

SEQ ID NO: 9132 - protein, 80 aa, Synthetic construct
MESLPTVHNEGPSSAEGKDIAFSPPVYPAGILLVCNNCAAYRKLLEAQTPSVRKWALRRQNEPLEVRLQRLERERTAKKS

SEQ ID NO: 9133 - protein, 80 aa, Synthetic construct
GPSSAEGKDIAFSPPVYPAGILLVCNNCAAYRKLLEAQTPSVRKWALRRQNEPLEVRLQRLERERTAKKSRRDNETPEER

SEQ ID NO: 9134 - protein, 80 aa, Synthetic construct
AFSPPVYPAGILLVCNNCAAYRKLLEAQTPSVRKWALRRQNEPLEVRLQRLERERTAKKSRRDNETPEEREVRRMRDREA

SEQ ID NO: 9135 - protein, 80 aa, Synthetic construct; identical to SEQ ID NO: 1741

SEQ ID NO: 9136 - protein, 80 aa, Synthetic construct; identical to SEQ ID NO: 1382

SEQ ID NO: 9137 - protein, 80 aa, Synthetic construct; identical to SEQ ID NO: 1383

SEQ ID NO: 9138 - protein, 80 aa, Synthetic construct
RLLCIEKVTTDKDPKEEKEEEDDSALPQEVSIAASRPSRGWRSSRTSVSRHRDTENTRSSRSKTGSLQLICKSEPNTDQL

SEQ ID NO: 9139 - protein, 80 aa, Synthetic construct
DKDPKEEKEEEDDSALPQEVSIAASRPSRGWRSSRTSVSRHRDTENTRSSRSKTGSLQLICKSEPNTDQLDYDVGEEHQS

SEQ ID NO: 9140 - protein, 80 aa, Synthetic construct; identical to SEQ ID NO: 5624

SEQ ID NO: 9141 - protein, 80 aa, Synthetic construct
EEIPFKDDPRDETYKPHLERETPKPRRKSGKVKEEKEKKEIKVEVEVEVKEEENEIREDEEPPRKRGRRRKDDKSPRLPK

SEQ ID NO: 9142 - protein, 80 aa, Synthetic construct
DETYKPHLERETPKPRRKSGKVKEEKEKKEIKVEVEVEVKEEENEIREDEEPPRKRGRRRKDDKSPRLPKRRKKPPIQYV

SEQ ID NO: 9143 - protein, 80 aa, Synthetic construct
ETPKPRRKSGKVKEEKEKKEIKVEVEVEVKEEENEIREDEEPPRKRGRRRKDDKSPRLPKRRKKPPIQYVRCEMEGCGTV

SEQ ID NO: 9144 - protein, 80 aa, Synthetic construct; identical to SEQ ID NO: 1951

SEQ ID NO: 9145 - protein, 80 aa, Synthetic construct
IKVEVEVEVKEEENEIREDEEPPRKRGRRRKDDKSPRLPKRRKKPPIQYVRCEMEGCGTVLAHPRYLQHHIKYQHLLKKK

SEQ ID NO: 9146 - protein, 80 aa, Synthetic construct; identical to SEQ ID NO: 1952

SEQ ID NO: 9147 - protein, 80 aa, Synthetic construct
RCEMEGCGTVLAHPRYLQHHIKYQHLLKKKYVCPHPSCGRLFRLQKQLLRHAKHHTDQRDYICEYCARAFKSSHNLAVHR

SEQ ID NO: 9148 - protein, 80 aa, Synthetic construct; identical to SEQ ID NO: 2121

SEQ ID NO: 9149 - protein, 80 aa, Synthetic construct
RRFYTRKDVRRHMVVHTGRKDFLCQYCAQRFGRKDHLTRHMKKSHNQELLKVKTEPVDFLDPFTCNVSVPIKDELLPVMS

SEQ ID NO: 9150 - protein, 80 aa, Synthetic construct
RHMVVHTGRKDFLCQYCAQRFGRKDHLTRHMKKSHNQELLKVKTEPVDFLDPFTCNVSVPIKDELLPVMSLPSSELLSKP

SEQ ID NO: 9151 - protein, 80 aa, Synthetic construct
DFLCQYCAQRFGRKDHLTRHMKKSHNQELLKVKTEPVDFLDPFTCNVSVPIKDELLPVMSLPSSELLSKPFTNTLQLNLY

SEQ ID NO: 9152 - protein, 80 aa, Synthetic construct; identical to SEQ ID NO: 2122

SEQ ID NO: 9153 - protein, 80 aa, Synthetic construct
MKKSHNQELLKVKTEPVDFLDPFTCNVSVPIKDELLPVMSLPSSELLSKPFTNTLQLNLYNTPFQSMQSSGSAHQMITTL

SEQ ID NO: 9154 - protein, 80 aa, Synthetic construct
KVKTEPVDFLDPFTCNVSVPIKDELLPVMSLPSSELLSKPFTNTLQLNLYNTPFQSMQSSGSAHQMITTLPLGMTCPIDM

SEQ ID NO: 9155 - protein, 80 aa, Synthetic construct
FMIGGHCNDKASVKEKWKSSGKNLERFIEDLTDDSINPPALVHVHMQGQEALFSEDMPLRDVIVHLTKQVNAQTTREANM

SEQ ID NO: 9156 - protein, 80 aa, Synthetic construct
ASVKEKWKSSGKNLERFIEDLTDDSINPPALVHVHMQGQEALFSEDMPLRDVIVHLTKQVNAQTTREANMGTPSQTSQDT

SEQ ID NO: 9157 - protein, 80 aa, Synthetic construct; identical to SEQ ID NO: 2213

SEQ ID NO: 9158 - protein, 80 aa, Synthetic construct; identical to SEQ ID NO: 1384

SEQ ID NO: 9159 - protein, 80 aa, Synthetic construct; identical to SEQ ID NO: 2214

SEQ ID NO: 9160 - protein, 80 aa, Synthetic construct
EENKNHGLPNLPLLFPQPPRPKYDSQMIDLCNVGFQFYRSLEHFGGKPVKQEPIKPSAVWPQPTPTPFLPTPYPYYPKVH

SEQ ID NO: 9161 - protein, 80 aa, Synthetic construct
CNVGFQFYRSLEHFGGKPVKQEPIKPSAVWPQPTPTPFLPTPYPYYPKVHPGLMFPFFVPSSSPFPFSRHTFLPKQPPEP

SEQ ID NO: 9162 - protein, 80 aa, Synthetic construct
LEHFGGKPVKQEPIKPSAVWPQPTPTPFLPTPYPYYPKVHPGLMFPFFVPSSSPFPFSRHTFLPKQPPEPLLPRKAEPQE

SEQ ID NO: 9163 - protein, 80 aa, Synthetic construct; identical to SEQ ID NO: 5811

SEQ ID NO: 9164 - protein, 80 aa, Synthetic construct; identical to SEQ ID NO: 5505

SEQ ID NO: 9165 - protein, 80 aa, Synthetic construct; identical to SEQ ID NO: 5506

SEQ ID NO: 9166 - protein, 80 aa, Synthetic construct
DHEQGDLLVRESQITEVKVKMEKSDRPSCSDSSSLGDDGYHTEMVDGEQVVAVNVGSYGSVLQHAYSYSQAASQPTNVSE

SEQ ID NO: 9167 - protein, 80 aa, Synthetic construct
ESQITEVKVKMEKSDRPSCSDSSSLGDDGYHTEMVDGEQVVAVNVGSYGSVLQHAYSYSQAASQPTNVSEAFGSLSNSSP

SEQ ID NO: 9168 - protein, 80 aa, Synthetic construct; identical to SEQ ID NO: 5508

SEQ ID NO: 9169 - protein, 80 aa, Synthetic construct; identical to SEQ ID NO: 5626

SEQ ID NO: 9170 - protein, 80 aa, Synthetic construct
LWCRVTKPVPAGGLLSVLLTAEPHSTPGHPVKKEPAEPTCPAPAHDLQLLPQQAGMASILATAVINKDVFPCKDCGIWYR

SEQ ID NO: 9171 - protein, 80 aa, Synthetic construct
AGGLLSVLLTAEPHSTPGHPVKKEPAEPTCPAPAHDLQLLPQQAGMASILATAVINKDVFPCKDCGIWYRSERNLQAHLL

SEQ ID NO: 9172 - protein, 80 aa, Synthetic construct
AEPHSTPGHPVKKEPAEPTCPAPAHDLQLLPQQAGMASILATAVINKDVFPCKDCGIWYRSERNLQAHLLYYCASRQGTG

SEQ ID NO: 9173 - protein, 80 aa, Synthetic construct
VKKEPAEPTCPAPAHDLQLLPQQAGMASILATAVINKDVFPCKDCGIWYRSERNLQAHLLYYCASRQGTGSPAAAATDEK

SEQ ID NO: 9174 - protein, 80 aa, Synthetic construct
TKLPPDSLGSFQQQHTALQGPLASADLGLAPTPSPGLDRKALAEATNGEARAEPLAQNGGSSEPPAAPRSIKVEAVEEPE

SEQ ID NO: 9175 - protein, 80 aa, Synthetic construct
FQQQHTALQGPLASADLGLAPTPSPGLDRKALAEATNGEARAEPLAQNGGSSEPPAAPRSIKVEAVEEPEAAPILGPGEP

SEQ ID NO: 9176 - protein, 80 aa, Synthetic construct
PLASADLGLAPTPSPGLDRKALAEATNGEARAEPLAQNGGSSEPPAAPRSIKVEAVEEPEAAPILGPGEPGPQAPSRTPS

SEQ ID NO: 9177 - protein, 80 aa, Synthetic construct
PTPSPGLDRKALAEATNGEARAEPLAQNGGSSEPPAAPRSIKVEAVEEPEAAPILGPGEPGPQAPSRTPSPRSPAPARVK

SEQ ID NO: 9178 - protein, 80 aa, Synthetic construct
ALAEATNGEARAEPLAQNGGSSEPPAAPRSIKVEAVEEPEAAPILGPGEPGPQAPSRTPSPRSPAPARVKAELSSPTPGS

SEQ ID NO: 9179 - protein, 80 aa, Synthetic construct
RAEPLAQNGGSSEPPAAPRSIKVEAVEEPEAAPILGPGEPGPQAPSRTPSPRSPAPARVKAELSSPTPGSSPVPGELGLA

SEQ ID NO: 9180 - protein, 80 aa, Synthetic construct
SSEPPAAPRSIKVEAVEEPEAAPILGPGEPGPQAPSRTPSPRSPAPARVKAELSSPTPGSSPVPGELGLAGALFLPQYVF

SEQ ID NO: 9181 - protein, 80 aa, Synthetic construct
IKVEAVEEPEAAPILGPGEPGPQAPSRTPSPRSPAPARVKAELSSPTPGSSPVPGELGLAGALFLPQYVFGPDAAPPASE

SEQ ID NO: 9182 - protein, 80 aa, Synthetic construct; identical to SEQ ID NO: 5629

SEQ ID NO: 9183 - protein, 80 aa, Synthetic construct; identical to SEQ ID NO: 5298

SEQ ID NO: 9184 - protein, 80 aa, Synthetic construct; identical to SEQ ID NO: 5299

SEQ ID NO: 9185 - protein, 80 aa, Synthetic construct
SIPLPPTTHTRLPASSIKKQPDSPAGSTTSEEKKEPEKEKPPVAGDAEKIKEESEDSLEKFEPSTLYPYLREEDLDDSPK

SEQ ID NO: 9186 - protein, 80 aa, Synthetic construct
RLPASSIKKQPDSPAGSTTSEEKKEPEKEKPPVAGDAEKIKEESEDSLEKFEPSTLYPYLREEDLDDSPKGGLDILKSLE

SEQ ID NO: 9187 - protein, 80 aa, Synthetic construct
EEKKEPEKEKPPVAGDAEKIKEESEDSLEKFEPSTLYPYLREEDLDDSPKGGLDILKSLENTVSTAISKAQNGAPSWGGY

SEQ ID NO: 9188 - protein, 80 aa, Synthetic construct
PPVAGDAEKIKEESEDSLEKFEPSTLYPYLREEDLDDSPKGGLDILKSLENTVSTAISKAQNGAPSWGGYPSIHAAYQLP

SEQ ID NO: 9189 - protein, 80 aa, Synthetic construct; identical to SEQ ID NO: 3045

SEQ ID NO: 9190 - protein, 80 aa, Synthetic construct
KLELQGKADSLKAAVEQEKRNQQILKDQVKKEEEELKKEFIEKEAKLHSEIKEKEVGMKKHEENEAKLTMQITALNENLG

SEQ ID NO: 9191 - protein, 80 aa, Synthetic construct; identical to SEQ ID NO: 3046

SEQ ID NO: 9192 - protein, 80 aa, Synthetic construct; identical to SEQ ID NO: 5798

SEQ ID NO: 9193 - protein, 80 aa, Synthetic construct
IRIHGRTHTGEKPYECKQCGKAFHCVSSFHRHERTHAGEKPYECKHCGKAFTCSIYIRIHERIHTGEKPYQCKECGKAFI

SEQ ID NO: 9194 - protein, 80 aa, Synthetic construct
PVSSPPLGALKQESCSPHHPQVLAQQGSGSSPKATDIPASASPPPVAGVPFFKQSPGHQSPLASPKVPVCQPLKEEDDDE

SEQ ID NO: 9195 - protein, 80 aa, Synthetic construct
KQESCSPHHPQVLAQQGSGSSPKATDIPASASPPPVAGVPFFKQSPGHQSPLASPKVPVCQPLKEEDDDEGPVDKSSPGS

SEQ ID NO: 9196 - protein, 80 aa, Synthetic construct
FFKQSPGHQSPLASPKVPVCQPLKEEDDDEGPVDKSSPGSPQSPSSGAEAADEDSNDSPASSSSRPLKVRIKTIKTSCGN

SEQ ID NO: 9197 - protein, 80 aa, Synthetic construct
PLASPKVPVCQPLKEEDDDEGPVDKSSPGSPQSPSSGAEAADEDSNDSPASSSSRPLKVRIKTIKTSCGNITRTVTQVPS

SEQ ID NO: 9198 - protein, 80 aa, Synthetic construct; identical to SEQ ID NO: 5991

SEQ ID NO: 9199 - protein, 80 aa, Synthetic construct; identical to SEQ ID NO: 2065

SEQ ID NO: 9200 - protein, 80 aa, Synthetic construct
LSSHFDQHLLPQRVSVFKCPSCPLLFAQKRTMLEHLKNTHQSGRLEETAGKGAGGALLTPKTEPEELAVSQGGAAPATEE

SEQ ID NO: 9201 - protein, 80 aa, Synthetic construct; identical to SEQ ID NO: 1385

SEQ ID NO: 9202 - protein, 80 aa, Synthetic construct
SCPLLFAQKRTMLEHLKNTHQSGRLEETAGKGAGGALLTPKTEPEELAVSQGGAAPATEESSSSSEEEEVPSSPEPPRPA

SEQ ID NO: 9203 - protein, 80 aa, Synthetic construct
TMLEHLKNTHQSGRLEETAGKGAGGALLTPKTEPEELAVSQGGAAPATEESSSSSEEEEVPSSPEPPRPAKRPRRELGSK

SEQ ID NO: 9204 - protein, 80 aa, Synthetic construct
QSGRLEETAGKGAGGALLTPKTEPEELAVSQGGAAPATEESSSSSEEEEVPSSPEPPRPAKRPRRELGSKGLKGGGGGPG

SEQ ID NO: 9205 - protein, 80 aa, Synthetic construct
KGAGGALLTPKTEPEELAVSQGGAAPATEESSSSSEEEEVPSSPEPPRPAKRPRRELGSKGLKGGGGGPGGWTCGLCHSW

SEQ ID NO: 9206 - protein, 80 aa, Synthetic construct; identical to SEQ ID NO: 2062

SEQ ID NO: 9207 - protein, 80 aa, Synthetic construct; identical to SEQ ID NO: 1386

SEQ ID NO: 9208 - protein, 80 aa, Synthetic construct
DCRPGTPPSDLIEIQVVKVTDTTLVPEPPEPGSFHCALCPAAFRLVSELLFHEHGHLAGAEGGGQGGDPSRCHVCGHSCP

SEQ ID NO: 9209 - protein, 80 aa, Synthetic construct
LIEIQVVKVTDTTLVPEPPEPGSFHCALCPAAFRLVSELLFHEHGHLAGAEGGGQGGDPSRCHVCGHSCPGPASLRAHYS

SEQ ID NO: 9210 - protein, 80 aa, Synthetic construct
DTTLVPEPPEPGSFHCALCPAAFRLVSELLFHEHGHLAGAEGGGQGGDPSRCHVCGHSCPGPASLRAHYSLHTGERPYRC

SEQ ID NO: 9211 - protein, 80 aa, Synthetic construct
PGSFHCALCPAAFRLVSELLFHEHGHLAGAEGGGQGGDPSRCHVCGHSCPGPASLRAHYSLHTGERPYRCALCPRAFKAL

SEQ ID NO: 9212 - protein, 80 aa, Synthetic construct; identical to SEQ ID NO: 6028

SEQ ID NO: 9213 - protein, 80 aa, Synthetic construct
QVHAGGPAPHPCPRCPRRFSRAYSLLRHQRCHRAELERAAALQALQAQAPTSPPPPPPPLKAEQEEEGLPLPLANIKEEP

SEQ ID NO: 9214 - protein, 80 aa, Synthetic construct
PCPRCPRRFSRAYSLLRHQRCHRAELERAAALQALQAQAPTSPPPPPPPLKAEQEEEGLPLPLANIKEEPPSPGTPPQSP

SEQ ID NO: 9215 - protein, 80 aa, Synthetic construct
RAYSLLRHQRCHRAELERAAALQALQAQAPTSPPPPPPPLKAEQEEEGLPLPLANIKEEPPSPGTPPQSPPAPPVFLSAS

SEQ ID NO: 9216 - protein, 80 aa, Synthetic construct
CHRAELERAAALQALQAQAPTSPPPPPPPLKAEQEEEGLPLPLANIKEEPPSPGTPPQSPPAPPVFLSASCFDSQDHSAF

SEQ ID NO: 9217 - protein, 80 aa, Synthetic construct
ALQALQAQAPTSPPPPPPPLKAEQEEEGLPLPLANIKEEPPSPGTPPQSPPAPPVFLSASCFDSQDHSAFEMEEEEVDSK

SEQ ID NO: 9218 - protein, 80 aa, Synthetic construct
TSPPPPPPPLKAEQEEEGLPLPLANIKEEPPSPGTPPQSPPAPPVFLSASCFDSQDHSAFEMEEEEVDSKAHLRGLGGLA

SEQ ID NO: 9219 - protein, 80 aa, Synthetic construct
SPPPPPPPLKAEQEEEGLPLPLANIKEEPPSPGTPPQSPPAPPVFLSASCFDSQDHSAFEMEEEEVDSKAHLRGLGGLAS

SEQ ID NO: 9220 - protein, 80 aa, Synthetic construct
FSTNMLLIEHAKLHEEDPYICKYCDYKTVIFENLSQHIADTHFSDHLYWCEQCDVQFSSSSELYLHFQEHSCDEQYLCQF

SEQ ID NO: 9221 - protein, 80 aa, Synthetic construct; identical to SEQ ID NO: 4319

SEQ ID NO: 9222 - protein, 80 aa, Synthetic construct; identical to SEQ ID NO: 4320

SEQ ID NO: 9223 - protein, 80 aa, Synthetic construct; identical to SEQ ID NO: 1387

SEQ ID NO: 9224 - protein, 80 aa, Synthetic construct; identical to SEQ ID NO: 2201

SEQ ID NO: 9225 - protein, 80 aa, Synthetic construct; identical to SEQ ID NO: 1388

SEQ ID NO: 9226 - protein, 80 aa, Synthetic construct; identical to SEQ ID NO: 1389

SEQ ID NO: 9227 - protein, 80 aa, Synthetic construct; identical to SEQ ID NO: 2202

SEQ ID NO: 9228 - protein, 80 aa, Synthetic construct; identical to SEQ ID NO: 1390

SEQ ID NO: 9229 - protein, 80 aa, Synthetic construct
AVSTVGQISSQHKSEYLHINITGEDRSQQPGDKPLELKNSERTNNTNDGPVISSVFSLSSGSENVPEGIKWNSSTSKIKS

SEQ ID NO: 9230 - protein, 80 aa, Synthetic construct; identical to SEQ ID NO: 1391

SEQ ID NO: 9231 - protein, 80 aa, Synthetic construct; identical to SEQ ID NO: 1392

SEQ ID NO: 9232 - protein, 80 aa, Synthetic construct; identical to SEQ ID NO: 1393

SEQ ID NO: 9233 - protein, 80 aa, Synthetic construct; identical to SEQ ID NO: 1394

SEQ ID NO: 9234 - protein, 80 aa, Synthetic construct; identical to SEQ ID NO: 1395

SEQ ID NO: 9235 - protein, 80 aa, Synthetic construct; identical to SEQ ID NO: 1396

SEQ ID NO: 9236 - protein, 80 aa, Synthetic construct; identical to SEQ ID NO: 2203

SEQ ID NO: 9237 - protein, 80 aa, Synthetic construct; identical to SEQ ID NO: 5892

SEQ ID NO: 9238 - protein, 80 aa, Synthetic construct
DSPEVTNVMKVINKYKGNVLKVVLSERTRCQLGIRRHHVRLTYQNAEEASQIKRQMMLKMKLKKVHKNNYQVVDSLPDDS

SEQ ID NO: 9239 - protein, 80 aa, Synthetic construct; identical to SEQ ID NO: 2204

SEQ ID NO: 9240 - protein, 80 aa, Synthetic construct; identical to SEQ ID NO: 1397

SEQ ID NO: 9241 - protein, 80 aa, Synthetic construct; identical to SEQ ID NO: 5619

SEQ ID NO: 9242 - protein, 80 aa, Synthetic construct
QPDDGIDEAEASNLLFDEPIPRKRKNSMKVMFKCLWKNCGKVLSTAAGIQKHIRTIHLGRVGDSDYSDGEEDFYYTEIKL

SEQ ID NO: 9243 - protein, 80 aa, Synthetic construct
ASNLLFDEPIPRKRKNSMKVMFKCLWKNCGKVLSTAAGIQKHIRTIHLGRVGDSDYSDGEEDFYYTEIKLNTDSVADGLS

SEQ ID NO: 9244 - protein, 80 aa, Synthetic construct; identical to SEQ ID NO: 1398

SEQ ID NO: 9245 - protein, 80 aa, Synthetic construct; identical to SEQ ID NO: 2104

SEQ ID NO: 9246 - protein, 80 aa, Synthetic construct; identical to SEQ ID NO: 1399

SEQ ID NO: 9247 - protein, 80 aa, Synthetic construct; identical to SEQ ID NO: 2130

SEQ ID NO: 9248 - protein, 80 aa, Synthetic construct
ERKYPGEVTLTNFKLKFLSKDIKKELLTCPTPGCDGSGHITGNYASHRSLSGCPLADKSLRNLMAAHSADLKCPTPGCDG

SEQ ID NO: 9249 - protein, 80 aa, Synthetic construct
TNFKLKFLSKDIKKELLTCPTPGCDGSGHITGNYASHRSLSGCPLADKSLRNLMAAHSADLKCPTPGCDGSGHITGNYAS

SEQ ID NO: 9250 - protein, 80 aa, Synthetic construct
FKTSDVLENDEEIKQLNQEIRDLNESNSEMEAAMVQLQSQISSMEKNLKNIEEENKLIEEQNEALFLELSGLSQALIQSL

SEQ ID NO: 9251 - protein, 80 aa, Synthetic construct
RDLNESNSEMEAAMVQLQSQISSMEKNLKNIEEENKLIEEQNEALFLELSGLSQALIQSLANIRLPHMEPICEQNFDAYV

SEQ ID NO: 9252 - protein, 80 aa, Synthetic construct
ESGLAGNGTGAGLVMKVKQEKPERLLQTLAPQAMLVEKDKENIFQQHRGLPPRQTMGRPRALGGQEESGSPRWAPPTEQD

SEQ ID NO: 9253 - protein, 80 aa, Synthetic construct
AGLVMKVKQEKPERLLQTLAPQAMLVEKDKENIFQQHRGLPPRQTMGRPRALGGQEESGSPRWAPPTEQDAGLAGRAPGS

SEQ ID NO: 9254 - protein, 80 aa, Synthetic construct
AIPKHSLSPVPWEEDSFLQVKVEEEEEASLSQGGESSHDHIAHSEAARLRFRHFRYEEASGPHEALAHLRALCCQWLQPE

SEQ ID NO: 9255 - protein, 80 aa, Synthetic construct
PWEEDSFLQVKVEEEEEASLSQGGESSHDHIAHSEAARLRFRHFRYEEASGPHEALAHLRALCCQWLQPEAHSKEQILEL

SEQ ID NO: 9256 - protein, 80 aa, Synthetic construct
ILVKVEDNFSWDEKFKQNGSTQSCQELFRQQFRKFCYQETPGPREALSRLQELCYQWLMPELHTKEQILELLVLEQFLSI

SEQ ID NO: 9257 - protein, 80 aa, Synthetic construct
WDEKFKQNGSTQSCQELFRQQFRKFCYQETPGPREALSRLQELCYQWLMPELHTKEQILELLVLEQFLSILPEELQIWVQ

SEQ ID NO: 9258 - protein, 80 aa, Synthetic construct; identical to SEQ ID NO: 1996

SEQ ID NO: 9259 - protein, 80 aa, Synthetic construct
PIPEDLSTTSGGQQSSKSDRVVASNVKVETQSDEENGRACEMNGEECAEDLRMLDASGEKMNGSHRDQGSSALSGVGGIR

SEQ ID NO: 9260 - protein, 80 aa, Synthetic construct
GGQQSSKSDRVVASNVKVETQSDEENGRACEMNGEECAEDLRMLDASGEKMNGSHRDQGSSALSGVGGIRLPNGKLKCDI

SEQ ID NO: 9261 - protein, 80 aa, Synthetic construct
VVASNVKVETQSDEENGRACEMNGEECAEDLRMLDASGEKMNGSHRDQGSSALSGVGGIRLPNGKLKCDICGIICIGPNV

SEQ ID NO: 9262 - protein, 80 aa, Synthetic construct; identical to SEQ ID NO: 3513

SEQ ID NO: 9263 - protein, 80 aa, Synthetic construct
PFKCHLCNYACRRRDALTGHLRTHSVGKPHKCGYCGRSYKQRSSLEEHKERCHNYLESMGLPGTLYPVIKEETNHSEMAE

SEQ ID NO: 9264 - protein, 80 aa, Synthetic construct
CRRRDALTGHLRTHSVGKPHKCGYCGRSYKQRSSLEEHKERCHNYLESMGLPGTLYPVIKEETNHSEMAEDLCKIGSERS

SEQ ID NO: 9265 - protein, 80 aa, Synthetic construct
LRTHSVGKPHKCGYCGRSYKQRSSLEEHKERCHNYLESMGLPGTLYPVIKEETNHSEMAEDLCKIGSERSLVLDRLASNV

SEQ ID NO: 9266 - protein, 80 aa, Synthetic construct
KCGYCGRSYKQRSSLEEHKERCHNYLESMGLPGTLYPVIKEETNHSEMAEDLCKIGSERSLVLDRLASNVAKRKSSMPQK

SEQ ID NO: 9267 - protein, 80 aa, Synthetic construct; identical to SEQ ID NO: 1854

SEQ ID NO: 9268 - protein, 80 aa, Synthetic construct; identical to SEQ ID NO: 1785

SEQ ID NO: 9269 - protein, 80 aa, Synthetic construct; identical to SEQ ID NO: 5837

SEQ ID NO: 9270 - protein, 80 aa, Synthetic construct
TFLQHFAVSASLSSHSSHLPIAHLHPLSQAHFSPISFSTLTPTIIPAHPTFLAGHPLHLVAATPFHPSHITLQPLPPTAF

SEQ ID NO: 9271 - protein, 80 aa, Synthetic construct
SLSSHSSHLPIAHLHPLSQAHFSPISFSTLTPTIIPAHPTFLAGHPLHLVAATPFHPSHITLQPLPPTAFIPTLFGPHLN

SEQ ID NO: 9272 - protein, 80 aa, Synthetic construct
IAHLHPLSQAHFSPISFSTLTPTIIPAHPTFLAGHPLHLVAATPFHPSHITLQPLPPTAFIPTLFGPHLNPATTSIIHLN

SEQ ID NO: 9273 - protein, 80 aa, Synthetic construct
HFSPISFSTLTPTIIPAHPTFLAGHPLHLVAATPFHPSHITLQPLPPTAFIPTLFGPHLNPATTSIIHLNPLIQPVFQGQ

SEQ ID NO: 9274 - protein, 80 aa, Synthetic construct
TPTIIPAHPTFLAGHPLHLVAATPFHPSHITLQPLPPTAFIPTLFGPHLNPATTSIIHLNPLIQPVFQGQDFCHHSCSSQ

SEQ ID NO: 9275 - protein, 80 aa, Synthetic construct
FLAGHPLHLVAATPFHPSHITLQPLPPTAFIPTLFGPHLNPATTSIIHLNPLIQPVFQGQDFCHHSCSSQMQQLNEVKEA

SEQ ID NO: 9276 - protein, 80 aa, Synthetic construct
VKVEEENYVLDQDFGLQENPWSQEVFRQKFRQFSYSDSTGPREALSRLRELCCQWLRPEVHSKEQILELLMLEQFLAILP

SEQ ID NO: 9277 - protein, 80 aa, Synthetic construct
DQDFGLQENPWSQEVFRQKFRQFSYSDSTGPREALSRLRELCCQWLRPEVHSKEQILELLMLEQFLAILPEELQAWLREH

SEQ ID NO: 9278 - protein, 80 aa, Synthetic construct
WSQEVFRQKFRQFSYSDSTGPREALSRLRELCCQWLRPEVHSKEQILELLMLEQFLAILPEELQAWLREHRPENGEEAVT

SEQ ID NO: 9279 - protein, 80 aa, Synthetic construct
LKEHPEMAEAPQQQLGIPVVKLEKELPWGRGREDPSPETFRLRFRQFRYQEAAGPQEALRELQELCRRWLRPELHTKEQI

SEQ ID NO: 9280 - protein, 80 aa, Synthetic construct
PQQQLGIPVVKLEKELPWGRGREDPSPETFRLRFRQFRYQEAAGPQEALRELQELCRRWLRPELHTKEQILELLVLEQFL

SEQ ID NO: 9281 - protein, 80 aa, Synthetic construct
KLEKELPWGRGREDPSPETFRLRFRQFRYQEAAGPQEALRELQELCRRWLRPELHTKEQILELLVLEQFLTILPREFYAW

SEQ ID NO: 9282 - protein, 80 aa, Synthetic construct
GREDPSPETFRLRFRQFRYQEAAGPQEALRELQELCRRWLRPELHTKEQILELLVLEQFLTILPREFYAWIREHGPESGK

SEQ ID NO: 9283 - protein, 80 aa, Synthetic construct; identical to SEQ ID NO: 6077

SEQ ID NO: 9284 - protein, 80 aa, Synthetic construct
LSKREFSPEPLEAILTDDEPDHGPLGAPEGDHDLLTCGQCQMNFPLGDILIFIEHKRKQCNGSLCLEKAVDKPPSPSPIE

SEQ ID NO: 9285 - protein, 80 aa, Synthetic construct
LEAILTDDEPDHGPLGAPEGDHDLLTCGQCQMNFPLGDILIFIEHKRKQCNGSLCLEKAVDKPPSPSPIEMKKASNPVEV

SEQ ID NO: 9286 - protein, 80 aa, Synthetic construct
DHGPLGAPEGDHDLLTCGQCQMNFPLGDILIFIEHKRKQCNGSLCLEKAVDKPPSPSPIEMKKASNPVEVGIQVTPEDDD

SEQ ID NO: 9287 - protein, 80 aa, Synthetic construct
RGHLAEAEGHRDTCDEDSVAGESDRIDDGTVNGRGCSPGESASGGLSKKLLLGSPSSLSPFSKRIKLEKEFDLPPAAMPN

SEQ ID NO: 9288 - protein, 80 aa, Synthetic construct
GESDRIDDGTVNGRGCSPGESASGGLSKKLLLGSPSSLSPFSKRIKLEKEFDLPPAAMPNTENVYSQWLAGYAASRQLKD

SEQ ID NO: 9289 - protein, 80 aa, Synthetic construct
VNGRGCSPGESASGGLSKKLLLGSPSSLSPFSKRIKLEKEFDLPPAAMPNTENVYSQWLAGYAASRQLKDPFLSFGDSRQ

SEQ ID NO: 9290 - protein, 80 aa, Synthetic construct
SASGGLSKKLLLGSPSSLSPFSKRIKLEKEFDLPPAAMPNTENVYSQWLAGYAASRQLKDPFLSFGDSRQSPFASSSEHS

SEQ ID NO: 9291 - protein, 80 aa, Synthetic construct
LLGSPSSLSPFSKRIKLEKEFDLPPAAMPNTENVYSQWLAGYAASRQLKDPFLSFGDSRQSPFASSSEHSSENGSLRFST

SEQ ID NO: 9292 - protein, 80 aa, Synthetic construct
FSKRIKLEKEFDLPPAAMPNTENVYSQWLAGYAASRQLKDPFLSFGDSRQSPFASSSEHSSENGSLRFSTPPGELDGGIS

SEQ ID NO: 9293 - protein, 80 aa, Synthetic construct
SLLQGTLQPPAGPEEPTLAGGGRHPGVAEVKTEMMQVDEVPSQDSPGAAESSISGGMGDKVEERGKEGPGTPTRSSVITS

SEQ ID NO: 9294 - protein, 80 aa, Synthetic construct; identical to SEQ ID NO: 1400

SEQ ID NO: 9295 - protein, 80 aa, Synthetic construct; identical to SEQ ID NO: 1705

SEQ ID NO: 9296 - protein, 80 aa, Synthetic construct; identical to SEQ ID NO: 1706

SEQ ID NO: 9297 - protein, 80 aa, Synthetic construct; identical to SEQ ID NO: 1401

SEQ ID NO: 9298 - protein, 80 aa, Synthetic construct; identical to SEQ ID NO: 1402

SEQ ID NO: 9299 - protein, 80 aa, Synthetic construct; identical to SEQ ID NO: 2043

SEQ ID NO: 9300 - protein, 80 aa, Synthetic construct
FRPPRGAITQPLKKLKINVFKVHKCAVCGFTTENLLQFHEHIPQHKSDGSSYQCRECGLCYTSHVSLSRHLFIVHKLKEP

SEQ ID NO: 9301 - protein, 80 aa, Synthetic construct
TFADSKFQERHMKREHPADFVAQKLQGVLFICFTCARSFPSSKALITHQRSHGPAAKPTLPVATTTAQPTFPCPDCGKTF

SEQ ID NO: 9302 - protein, 80 aa, Synthetic construct
HMKREHPADFVAQKLQGVLFICFTCARSFPSSKALITHQRSHGPAAKPTLPVATTTAQPTFPCPDCGKTFGQAVSLRRHR

SEQ ID NO: 9303 - protein, 80 aa, Synthetic construct; identical to SEQ ID NO: 1839

SEQ ID NO: 9304 - protein, 80 aa, Synthetic construct
RALCRDWLRPEVHTKEQMLELLVLEQFLSALPADTQAWVCSRQPQSGEEAVALLEELWGPAASPDGSSATRVPQDVTQGP

SEQ ID NO: 9305 - protein, 80 aa, Synthetic construct; identical to SEQ ID NO: 5839

SEQ ID NO: 9306 - protein, 80 aa, Synthetic construct
RYTEDCFSDSNCVPNKSKMQEVDFLEQNEELQAVDSQKYALSKVKPESTDEDLESVDAFQHLIYNPDKCGEESSPVHTST

SEQ ID NO: 9307 - protein, 80 aa, Synthetic construct; identical to SEQ ID NO: 5966

SEQ ID NO: 9308 - protein, 80 aa, Synthetic construct; identical to SEQ ID NO: 5961

SEQ ID NO: 9309 - protein, 80 aa, Synthetic construct
INQEHVNLFPLFKSKVEGQEPGENATLSYDQNDGFYFEYYEDTGSNNFLHEIHDPQHLETADASLSKHSSVFHWTDLSLE

SEQ ID NO: 9310 - protein, 80 aa, Synthetic construct
VKRVRKAIEKSETTSEHTCQLCGGWFDTKIGLSNHVRGHLKRLGKTKWDAHKSPICVLNEMMQNEEKYEKILKALNSRRI

SEQ ID NO: 9311 - protein, 80 aa, Synthetic construct; identical to SEQ ID NO: 1403

SEQ ID NO: 9312 - protein, 80 aa, Synthetic construct
LCGGWFDTKIGLSNHVRGHLKRLGKTKWDAHKSPICVLNEMMQNEEKYEKILKALNSRRIIPRPFVAQKLASSDDFISQN

SEQ ID NO: 9313 - protein, 80 aa, Synthetic construct; identical to SEQ ID NO: 1404

SEQ ID NO: 9314 - protein, 80 aa, Synthetic construct; identical to SEQ ID NO: 1405

SEQ ID NO: 9315 - protein, 80 aa, Synthetic construct; identical to SEQ ID NO: 2342

SEQ ID NO: 9316 - protein, 80 aa, Synthetic construct
KIHNQTARKRFVQKCVLPLNEDSPLMYQPQKMDLTMHSALDCKQKKSRSRSGSKKKMLTLPHGADEVYILRCRFCGLVFR

SEQ ID NO: 9317 - protein, 80 aa, Synthetic construct
FVQKCVLPLNEDSPLMYQPQKMDLTMHSALDCKQKKSRSRSGSKKKMLTLPHGADEVYILRCRFCGLVFRGPLSVQEDWI

SEQ ID NO: 9318 - protein, 80 aa, Synthetic construct; identical to SEQ ID NO: 1406

SEQ ID NO: 9319 - protein, 80 aa, Synthetic construct; identical to SEQ ID NO: 2343

SEQ ID NO: 9320 - protein, 80 aa, Synthetic construct; identical to SEQ ID NO: 1407

SEQ ID NO: 9321 - protein, 80 aa, Synthetic construct; identical to SEQ ID NO: 1408

SEQ ID NO: 9322 - protein, 80 aa, Synthetic construct; identical to SEQ ID NO: 1409

SEQ ID NO: 9323 - protein, 80 aa, Synthetic construct; identical to SEQ ID NO: 1410

SEQ ID NO: 9324 - protein, 80 aa, Synthetic construct; identical to SEQ ID NO: 2038

SEQ ID NO: 9325 - protein, 80 aa, Synthetic construct
RRIHTGEKPYKCEECDKVFSRKSTLESHKRIHTGEKPYKCKVCDTAFTWNSQLARHKRIHTGEKTYKCNECGKTFSHKSS

SEQ ID NO: 9326 - protein, 80 aa, Synthetic construct
NSPVLSTLFPNQCLDWTNLKREPELEQDQNLARMAPAPEGPIVLSRPQDGDSPLSDSPPFYKPSFSWDTLATTYGHSYRQ

SEQ ID NO: 9327 - protein, 80 aa, Synthetic construct
NQCLDWTNLKREPELEQDQNLARMAPAPEGPIVLSRPQDGDSPLSDSPPFYKPSFSWDTLATTYGHSYRQAPSTMQSAFL

SEQ ID NO: 9328 - protein, 80 aa, Synthetic construct
YWGQDSSSQKCSPHRRELYRQHFRKLCYQDAPGPREALTQLWELCRQWLRPECHTKEQILDLLVLEQFLSILPKDLQAWV

SEQ ID NO: 9329 - protein, 80 aa, Synthetic construct
CSPHRRELYRQHFRKLCYQDAPGPREALTQLWELCRQWLRPECHTKEQILDLLVLEQFLSILPKDLQAWVRAHHPETGEE

SEQ ID NO: 9330 - protein, 80 aa, Synthetic construct
HSNMAIDLTSSTPNGQHASPSHMTSTNSVKLEMQSDEECDRKPLSREDEIRGHDEGSSLEEPLIESSEVADNRKVQELQG

SEQ ID NO: 9331 - protein, 80 aa, Synthetic construct; identical to SEQ ID NO: 2039

SEQ ID NO: 9332 - protein, 80 aa, Synthetic construct
SHMTSTNSVKLEMQSDEECDRKPLSREDEIRGHDEGSSLEEPLIESSEVADNRKVQELQGEGGIRLPNGKLKCDVCGMVC

SEQ ID NO: 9333 - protein, 80 aa, Synthetic construct
KALDTTKAPKGSLKDIYKVFNGEGEQIRAFKCEHCRVLFLDHVMYTIHMGCHGYRDPLECNICGYRSQDRYEFSSHIVRG

SEQ ID NO: 9334 - protein, 80 aa, Synthetic construct; identical to SEQ ID NO: 2040

SEQ ID NO: 9335 - protein, 80 aa, Synthetic construct; identical to SEQ ID NO: 483

SEQ ID NO: 9336 - protein, 80 aa, Synthetic construct; identical to SEQ ID NO: 5984

SEQ ID NO: 9337 - protein, 80 aa, Synthetic construct; identical to SEQ ID NO: 5820

SEQ ID NO: 9338 - protein, 80 aa, Synthetic construct; identical to SEQ ID NO: 5821

SEQ ID NO: 9339 - protein, 80 aa, Synthetic construct
RSIVGIKRHVKALHLGDTVDSDQFKREEDFYYTEVQLKEESAAAAAAAAAGTPVPGTPTSEPAPTPSMTGLPLSALPPPL

SEQ ID NO: 9340 - protein, 80 aa, Synthetic construct
KALHLGDTVDSDQFKREEDFYYTEVQLKEESAAAAAAAAAGTPVPGTPTSEPAPTPSMTGLPLSALPPPLHKAQSSGPEH

SEQ ID NO: 9341 - protein, 80 aa, Synthetic construct
SDQFKREEDFYYTEVQLKEESAAAAAAAAAGTPVPGTPTSEPAPTPSMTGLPLSALPPPLHKAQSSGPEHPGPESSLPSG

SEQ ID NO: 9342 - protein, 80 aa, Synthetic construct; identical to SEQ ID NO: 1411

SEQ ID NO: 9343 - protein, 80 aa, Synthetic construct; identical to SEQ ID NO: 1412

SEQ ID NO: 9344 - protein, 80 aa, Synthetic construct; identical to SEQ ID NO: 1413

SEQ ID NO: 9345 - protein, 80 aa, Synthetic construct; identical to SEQ ID NO: 1414

SEQ ID NO: 9346 - protein, 80 aa, Synthetic construct; identical to SEQ ID NO: 1415

SEQ ID NO: 9347 - protein, 80 aa, Synthetic construct; identical to SEQ ID NO: 2326

SEQ ID NO: 9348 - protein, 80 aa, Synthetic construct; identical to SEQ ID NO: 1416

SEQ ID NO: 9349 - protein, 80 aa, Synthetic construct; identical to SEQ ID NO: 2641

SEQ ID NO: 9350 - protein, 80 aa, Synthetic construct; identical to SEQ ID NO: 3518

SEQ ID NO: 9351 - protein, 80 aa, Synthetic construct
DIGDDSMKVKDEYSERDENVLKSEPMGNAEEPEIPYSYSREYNEYENIKLERHVVSFDSSRPTSGKMNCDVCGLSCISFN

SEQ ID NO: 9352 - protein, 80 aa, Synthetic construct; identical to SEQ ID NO: 3519

SEQ ID NO: 9353 - protein, 80 aa, Synthetic construct; identical to SEQ ID NO: 3520

SEQ ID NO: 9354 - protein, 80 aa, Synthetic construct; identical to SEQ ID NO: 3975

SEQ ID NO: 9355 - protein, 80 aa, Synthetic construct; identical to SEQ ID NO: 1847

SEQ ID NO: 9356 - protein, 80 aa, Synthetic construct
HAEEKPPSGTKEKKHQCDHCERCFYTRKDVRRHLVVHTGCKDFLCQFCAQRFGRKDHLTRHTKKTHSQELMKESLQTGDL

SEQ ID NO: 9357 - protein, 80 aa, Synthetic construct
NVNYNASQQCQAPGVQKYEVSESDQMSGVKAESQDFIPGSTGQPCLPNVLLESEQSNPFCSYSEHQEKNDVFLYRCSVCA

SEQ ID NO: 9358 - protein, 80 aa, Synthetic construct
QAPGVQKYEVSESDQMSGVKAESQDFIPGSTGQPCLPNVLLESEQSNPFCSYSEHQEKNDVFLYRCSVCAKSFRSPSKLE

SEQ ID NO: 9359 - protein, 80 aa, Synthetic construct; identical to SEQ ID NO: 2157

SEQ ID NO: 9360 - protein, 80 aa, Synthetic construct; identical to SEQ ID NO: 5999

SEQ ID NO: 9361 - protein, 80 aa, Synthetic construct
GEKPYKCEECGKAFSVFSTLTKHKIIHTEEKPYKCEECGKAFNRSSHLTNHKVIHTGEKPYKCEECGKAFTKSSTLTYHK

SEQ ID NO: 9362 - protein, 80 aa, Synthetic construct
SGLGLMVGGPDPDLLTCGQCQMNFPLGDILVFIEHKRKQCGGSLGACYDKALDKDSPPPSSRSELRKVSEPVEIGIQVTP

SEQ ID NO: 9363 - protein, 80 aa, Synthetic construct
DPDLLTCGQCQMNFPLGDILVFIEHKRKQCGGSLGACYDKALDKDSPPPSSRSELRKVSEPVEIGIQVTPDEDDHLLSPT

SEQ ID NO: 9364 - protein, 80 aa, Synthetic construct
CGDAGAGGAVNGRGGGFAPGTEPFPGLFPRKPAPLPSPGLNSAAKRIKVEKDLELPPAALIPSENVYSQWLVGYAASRHF

SEQ ID NO: 9365 - protein, 80 aa, Synthetic construct
NGRGGGFAPGTEPFPGLFPRKPAPLPSPGLNSAAKRIKVEKDLELPPAALIPSENVYSQWLVGYAASRHFMKDPFLGFTD

SEQ ID NO: 9366 - protein, 80 aa, Synthetic construct
TEPFPGLFPRKPAPLPSPGLNSAAKRIKVEKDLELPPAALIPSENVYSQWLVGYAASRHFMKDPFLGFTDARQSPFATSS

SEQ ID NO: 9367 - protein, 80 aa, Synthetic construct
KPAPLPSPGLNSAAKRIKVEKDLELPPAALIPSENVYSQWLVGYAASRHFMKDPFLGFTDARQSPFATSSEHSSENGSLR

SEQ ID NO: 9368 - protein, 80 aa, Synthetic construct
NSAAKRIKVEKDLELPPAALIPSENVYSQWLVGYAASRHFMKDPFLGFTDARQSPFATSSEHSSENGSLRFSTPPGDLLD

SEQ ID NO: 9369 - protein, 80 aa, Synthetic construct
PRPVRIQTLVGNIHIKQEMEDDYDYYGQQRVQILERNESEECTEDTDQAEGTESEPKGESFDSGVSSSIGTEPDSVEQQF

SEQ ID NO: 9370 - protein, 80 aa, Synthetic construct
GNIHIKQEMEDDYDYYGQQRVQILERNESEECTEDTDQAEGTESEPKGESFDSGVSSSIGTEPDSVEQQFGPGAARDSQA

SEQ ID NO: 9371 - protein, 80 aa, Synthetic construct; identical to SEQ ID NO: 5800

SEQ ID NO: 9372 - protein, 80 aa, Synthetic construct
SQRSVTSVRDSADVDCVLDLSVKSSLSGVENLNSSYFSSQDVLRSNLVQVKVEKEASCDESDVGTNDYDMEHSTVKESVS

SEQ ID NO: 9373 - protein, 80 aa, Synthetic construct
SADVDCVLDLSVKSSLSGVENLNSSYFSSQDVLRSNLVQVKVEKEASCDESDVGTNDYDMEHSTVKESVSTNNRVQYEPA

SEQ ID NO: 9374 - protein, 80 aa, Synthetic construct
SVKSSLSGVENLNSSYFSSQDVLRSNLVQVKVEKEASCDESDVGTNDYDMEHSTVKESVSTNNRVQYEPAHLAPLREDSV

SEQ ID NO: 9375 - protein, 80 aa, Synthetic construct
NLNSSYFSSQDVLRSNLVQVKVEKEASCDESDVGTNDYDMEHSTVKESVSTNNRVQYEPAHLAPLREDSVLRELDREDKA

SEQ ID NO: 9376 - protein, 80 aa, Synthetic construct
DVLRSNLVQVKVEKEASCDESDVGTNDYDMEHSTVKESVSTNNRVQYEPAHLAPLREDSVLRELDREDKASDDEMMTPES

SEQ ID NO: 9377 - protein, 80 aa, Synthetic construct
RIVDIRDGKDSNIKAEFGEKDSSKTFSAQTDKYRGDTSQAADDSASTTGSRKSSTVESEIASEEKSRAAERKRIIIKMEP

SEQ ID NO: 9378 - protein, 80 aa, Synthetic construct
SNIKAEFGEKDSSKTFSAQTDKYRGDTSQAADDSASTTGSRKSSTVESEIASEEKSRAAERKRIIIKMEPEDIPTDELKD

SEQ ID NO: 9379 - protein, 80 aa, Synthetic construct; identical to SEQ ID NO: 5457

SEQ ID NO: 9380 - protein, 80 aa, Synthetic construct; identical to SEQ ID NO: 5458

SEQ ID NO: 9381 - protein, 80 aa, Synthetic construct; identical to SEQ ID NO: 5459

SEQ ID NO: 9382 - protein, 80 aa, Synthetic construct
IKNVEPKQELKVWYAASYAEFVNQKIHDISEEERKVLREQEKNWPCYECNRRFISSEQLQQHLNSHDEKLDVFSRTRGRG

SEQ ID NO: 9383 - protein, 80 aa, Synthetic construct; identical to SEQ ID NO: 5918

SEQ ID NO: 9384 - protein, 80 aa, Synthetic construct; identical to SEQ ID NO: 5728

SEQ ID NO: 9385 - protein, 80 aa, Synthetic construct
ALDKSDLKKDKNDYLPLYSSSTKVKDEYMVAEYAVEMPHSSVGGSHLEDASGEIHPPKLVLKKINSKRSLKQPLEQNQTI

SEQ ID NO: 9386 - protein, 80 aa, Synthetic construct
KNDYLPLYSSSTKVKDEYMVAEYAVEMPHSSVGGSHLEDASGEIHPPKLVLKKINSKRSLKQPLEQNQTISPLSTYEESK

SEQ ID NO: 9387 - protein, 80 aa, Synthetic construct
STKVKDEYMVAEYAVEMPHSSVGGSHLEDASGEIHPPKLVLKKINSKRSLKQPLEQNQTISPLSTYEESKVSKYAFELVD

SEQ ID NO: 9388 - protein, 80 aa, Synthetic construct; identical to SEQ ID NO: 6004

SEQ ID NO: 9389 - protein, 80 aa, Synthetic construct
VDSPTMVSEEVLVTNSDTETVIQAAGGVPGSTVTIKTEDDDDDDVKSTSEDYLMISLDDVGEKLEHMGNTPLKIGSDGSQ

SEQ ID NO: 9390 - protein, 80 aa, Synthetic construct
VLVTNSDTETVIQAAGGVPGSTVTIKTEDDDDDDVKSTSEDYLMISLDDVGEKLEHMGNTPLKIGSDGSQEDAKEDGFGS

SEQ ID NO: 9391 - protein, 80 aa, Synthetic construct
VIQAAGGVPGSTVTIKTEDDDDDDVKSTSEDYLMISLDDVGEKLEHMGNTPLKIGSDGSQEDAKEDGFGSEVIKVYIFKA

SEQ ID NO: 9392 - protein, 80 aa, Synthetic construct
STVTIKTEDDDDDDVKSTSEDYLMISLDDVGEKLEHMGNTPLKIGSDGSQEDAKEDGFGSEVIKVYIFKAEAEDDVEIGG

SEQ ID NO: 9393 - protein, 80 aa, Synthetic construct; identical to SEQ ID NO: 6006

SEQ ID NO: 9394 - protein, 80 aa, Synthetic construct; identical to SEQ ID NO: 6007

SEQ ID NO: 9395 - protein, 80 aa, Synthetic construct
ASTWAIQAHMDQDEPLEVKIEEEKYTTRQDWDLRKNNTHSREVFRQYFRQFCYQETSGPREALSRLRELCHQWLRPETHT

SEQ ID NO: 9396 - protein, 80 aa, Synthetic construct
EEEKYTTRQDWDLRKNNTHSREVFRQYFRQFCYQETSGPREALSRLRELCHQWLRPETHTKEQILELLVLEQFLTILPEE

SEQ ID NO: 9397 - protein, 80 aa, Synthetic construct
WDLRKNNTHSREVFRQYFRQFCYQETSGPREALSRLRELCHQWLRPETHTKEQILELLVLEQFLTILPEELQAWVQEQHP

SEQ ID NO: 9398 - protein, 80 aa, Synthetic construct
LQSMKAQPKYESPELESQQEQVLDVETGNEYGNLKQEVSEEMEPHGKTSSKFENDMSKSARCGETREPEEITEEPSACSR

SEQ ID NO: 9399 - protein, 80 aa, Synthetic construct; identical to SEQ ID NO: 2784

SEQ ID NO: 9400 - protein, 80 aa, Synthetic construct; identical to SEQ ID NO: 1417

SEQ ID NO: 9401 - protein, 80 aa, Synthetic construct; identical to SEQ ID NO: 1418

SEQ ID NO: 9402 - protein, 80 aa, Synthetic construct; identical to SEQ ID NO: 1769

SEQ ID NO: 9403 - protein, 80 aa, Synthetic construct; identical to SEQ ID NO: 1419

SEQ ID NO: 9404 - protein, 80 aa, Synthetic construct; identical to SEQ ID NO: 3014

SEQ ID NO: 9405 - protein, 80 aa, Synthetic construct
EDEKCPHCQSGVDPVLLKLIRLAQFTIEYLLHSQEFLTSQLHTLEERLRLSHCDGEQSKKLLTKQAGEIKTLKEECKRRK

SEQ ID NO: 9406 - protein, 80 aa, Synthetic construct
GVDPVLLKLIRLAQFTIEYLLHSQEFLTSQLHTLEERLRLSHCDGEQSKKLLTKQAGEIKTLKEECKRRKKMISTQQLMI

SEQ ID NO: 9407 - protein, 80 aa, Synthetic construct
RLAQFTIEYLLHSQEFLTSQLHTLEERLRLSHCDGEQSKKLLTKQAGEIKTLKEECKRRKKMISTQQLMIEAKANYYQCH

SEQ ID NO: 9408 - protein, 80 aa, Synthetic construct
PVPPPQNKGSFGKNTVKSDADGTEGSEIEDTDDSPKPAGVAVKTPTEKVEKMFPHRKNVNKPVGGTNVPEMFIKKEELQE

SEQ ID NO: 9409 - protein, 80 aa, Synthetic construct; identical to SEQ ID NO: 2075

SEQ ID NO: 9410 - protein, 80 aa, Synthetic construct
KMFPHRKNVNKPVGGTNVPEMFIKKEELQELKCADVEDEDWDISSLEEEISLGKKSGKEQKEPPPAKNEPHFAHVLNAWG

SEQ ID NO: 9411 - protein, 80 aa, Synthetic construct
KPVGGTNVPEMFIKKEELQELKCADVEDEDWDISSLEEEISLGKKSGKEQKEPPPAKNEPHFAHVLNAWGAFNPKGPKGE

SEQ ID NO: 9412 - protein, 80 aa, Synthetic construct
MFIKKEELQELKCADVEDEDWDISSLEEEISLGKKSGKEQKEPPPAKNEPHFAHVLNAWGAFNPKGPKGEGLQENESSTL

SEQ ID NO: 9413 - protein, 80 aa, Synthetic construct
SMLADSTSTQEKRRRSFPDIEDEEKFLYGDEEEDLKAESVPKPLGSSESEVMRQKASSLPSSAPAVKLESLEETNPEYAK

SEQ ID NO: 9414 - protein, 80 aa, Synthetic construct; identical to SEQ ID NO: 5786

SEQ ID NO: 9415 - protein, 80 aa, Synthetic construct
NTGIKLQLKEEVKKESPTSSSFGKFSWKKPEKEEEKSSLVTPSISKEEILESSKDKEDGKTEAGKAKPIKIKLSGKTVVA

SEQ ID NO: 9416 - protein, 80 aa, Synthetic construct
EVKKESPTSSSFGKFSWKKPEKEEEKSSLVTPSISKEEILESSKDKEDGKTEAGKAKPIKIKLSGKTVVAHTSPWMPVVT

SEQ ID NO: 9417 - protein, 80 aa, Synthetic construct; identical to SEQ ID NO: 5788

SEQ ID NO: 9418 - protein, 80 aa, Synthetic construct
NQNKQSSESAVSSTVNPVAIHKRSKVKTEPEGLRPASPLALTQGQVSGHGSCGCALPLSQEQLADLKEDLDRDDCKQEAE

SEQ ID NO: 9419 - protein, 80 aa, Synthetic construct
VSSTVNPVAIHKRSKVKTEPEGLRPASPLALTQGQVSGHGSCGCALPLSQEQLADLKEDLDRDDCKQEAEVVIYETNCHW

SEQ ID NO: 9420 - protein, 80 aa, Synthetic construct
HKRSKVKTEPEGLRPASPLALTQGQVSGHGSCGCALPLSQEQLADLKEDLDRDDCKQEAEVVIYETNCHWEDCTKEYDTQ

SEQ ID NO: 9421 - protein, 80 aa, Synthetic construct
AHASGALDEGTGQVYPTESTGFSDNPRLPSPGLHGQRRMVAADSNVGPSAPMLGGCQLGFGAPSSLNKNNMPVQWNEVSS

SEQ ID NO: 9422 - protein, 80 aa, Synthetic construct
TGQVYPTESTGFSDNPRLPSPGLHGQRRMVAADSNVGPSAPMLGGCQLGFGAPSSLNKNNMPVQWNEVSSGTVDALASQV

SEQ ID NO: 9423 - protein, 80 aa, Synthetic construct
PMLGGCQLGFGAPSSLNKNNMPVQWNEVSSGTVDALASQVKPPPFPQGNLAVVQQKPAFGQYPGYSPQGLQASPGGLDST

SEQ ID NO: 9424 - protein, 80 aa, Synthetic construct
MPVQWNEVSSGTVDALASQVKPPPFPQGNLAVVQQKPAFGQYPGYSPQGLQASPGGLDSTQPHLQPRSGAPSQGIPRVNY

SEQ ID NO: 9425 - protein, 80 aa, Synthetic construct; identical to SEQ ID NO: 5894

SEQ ID NO: 9426 - protein, 80 aa, Synthetic construct; identical to SEQ ID NO: 5896

SEQ ID NO: 9427 - protein, 80 aa, Synthetic construct
KEFRSKQDLVKLDINGLPYGLCAGCVNLSKSASPGINVPPGTNRPGLGQNENLSAIEGKGKVGGLKTRCSSCNVKFESES

SEQ ID NO: 9428 - protein, 80 aa, Synthetic construct
KLDINGLPYGLCAGCVNLSKSASPGINVPPGTNRPGLGQNENLSAIEGKGKVGGLKTRCSSCNVKFESESELQNHIQTIH

SEQ ID NO: 9429 - protein, 80 aa, Synthetic construct
LCAGCVNLSKSASPGINVPPGTNRPGLGQNENLSAIEGKGKVGGLKTRCSSCNVKFESESELQNHIQTIHRELVPDSNST

SEQ ID NO: 9430 - protein, 80 aa, Synthetic construct; identical to SEQ ID NO: 1967

SEQ ID NO: 9431 - protein, 80 aa, Synthetic construct
GTNRPGLGQNENLSAIEGKGKVGGLKTRCSSCNVKFESESELQNHIQTIHRELVPDSNSTQLKTPQVSPMPRISPSQSDE

SEQ ID NO: 9432 - protein, 80 aa, Synthetic construct
ENLSAIEGKGKVGGLKTRCSSCNVKFESESELQNHIQTIHRELVPDSNSTQLKTPQVSPMPRISPSQSDEKKTYQCIKCQ

SEQ ID NO: 9433 - protein, 80 aa, Synthetic construct
KVGGLKTRCSSCNVKFESESELQNHIQTIHRELVPDSNSTQLKTPQVSPMPRISPSQSDEKKTYQCIKCQMVFYNEWDIQ

SEQ ID NO: 9434 - protein, 80 aa, Synthetic construct; identical to SEQ ID NO: 5898

SEQ ID NO: 9435 - protein, 80 aa, Synthetic construct; identical to SEQ ID NO: 6048

SEQ ID NO: 9436 - protein, 80 aa, Synthetic construct; identical to SEQ ID NO: 1916

SEQ ID NO: 9437 - protein, 80 aa, Synthetic construct
QAEEAHKKEHKPKKPGKYICPYCSRACAKPSVLKKHIRSHTGERPYPCIPCGFSFKTKSNLYKHRKSHAHAIKAGLVPFT

SEQ ID NO: 9438 - protein, 80 aa, Synthetic construct
KPKKPGKYICPYCSRACAKPSVLKKHIRSHTGERPYPCIPCGFSFKTKSNLYKHRKSHAHAIKAGLVPFTESAVSKLDLE

SEQ ID NO: 9439 - protein, 80 aa, Synthetic construct; identical to SEQ ID NO: 1420

SEQ ID NO: 9440 - protein, 80 aa, Synthetic construct; identical to SEQ ID NO: 1421

SEQ ID NO: 9441 - protein, 80 aa, Synthetic construct; identical to SEQ ID NO: 1708

SEQ ID NO: 9442 - protein, 80 aa, Synthetic construct; identical to SEQ ID NO: 1422

SEQ ID NO: 9443 - protein, 80 aa, Synthetic construct; identical to SEQ ID NO: 1423

SEQ ID NO: 9444 - protein, 80 aa, Synthetic construct; identical to SEQ ID NO: 1424

SEQ ID NO: 9445 - protein, 80 aa, Synthetic construct; identical to SEQ ID NO: 1425

SEQ ID NO: 9446 - protein, 80 aa, Synthetic construct
RVTEEPDKPEKEKEAQSKEPEKPVEEFQWPQRSETLSQLPAEKLPPKKKRLRLADMEHSSGESSFESTGTGLSRSPSQES

SEQ ID NO: 9447 - protein, 80 aa, Synthetic construct
HLAQPQIMHMDSQESLRNPLIQPTSYMTSKHLPEQPHLFPHQETIPFSPIQNALFQFQYPTVCMVHLPAQQPPWWQAHFP

SEQ ID NO: 9448 - protein, 80 aa, Synthetic construct; identical to SEQ ID NO: 3416

SEQ ID NO: 9449 - protein, 80 aa, Synthetic construct
LRINRAGQWYVETGVADRGGRSDDEVRVLGAVHIKTENLEEWLGPENQPSGEDGSSAEEVTAMVIDTTGHGSVGQENYTL

SEQ ID NO: 9450 - protein, 80 aa, Synthetic construct
VETGVADRGGRSDDEVRVLGAVHIKTENLEEWLGPENQPSGEDGSSAEEVTAMVIDTTGHGSVGQENYTLGSSGAKVARP

SEQ ID NO: 9451 - protein, 80 aa, Synthetic construct
RSDDEVRVLGAVHIKTENLEEWLGPENQPSGEDGSSAEEVTAMVIDTTGHGSVGQENYTLGSSGAKVARPTSSEVDRFSP

SEQ ID NO: 9452 - protein, 80 aa, Synthetic construct
AVHIKTENLEEWLGPENQPSGEDGSSAEEVTAMVIDTTGHGSVGQENYTLGSSGAKVARPTSSEVDRFSPSGSVVPLTER

SEQ ID NO: 9453 - protein, 80 aa, Synthetic construct; identical to SEQ ID NO: 5510

SEQ ID NO: 9454 - protein, 80 aa, Synthetic construct; identical to SEQ ID NO: 2329

SEQ ID NO: 9455 - protein, 80 aa, Synthetic construct
DSYAYLNASYGTEGLGSYPGYAPLPHLPPAFIPSYNAHYPKFLLPPYGMNCNGLSAVSSMNGINNFGLFPRLCPVYSNLL

SEQ ID NO: 9456 - protein, 80 aa, Synthetic construct
GTEGLGSYPGYAPLPHLPPAFIPSYNAHYPKFLLPPYGMNCNGLSAVSSMNGINNFGLFPRLCPVYSNLLGGGSLPHPML

SEQ ID NO: 9457 - protein, 80 aa, Synthetic construct; identical to SEQ ID NO: 4455

SEQ ID NO: 9458 - protein, 80 aa, Synthetic construct; identical to SEQ ID NO: 1912

SEQ ID NO: 9459 - protein, 80 aa, Synthetic construct; identical to SEQ ID NO: 5768

SEQ ID NO: 9460 - protein, 80 aa, Synthetic construct; identical to SEQ ID NO: 5770

SEQ ID NO: 9461 - protein, 80 aa, Synthetic construct; identical to SEQ ID NO: 1426

SEQ ID NO: 9462 - protein, 80 aa, Synthetic construct; identical to SEQ ID NO: 1955

SEQ ID NO: 9463 - protein, 80 aa, Synthetic construct; identical to SEQ ID NO: 5772

SEQ ID NO: 9464 - protein, 80 aa, Synthetic construct
NKKRKVEKAEPASAAELSSVRKEEETAVAIQTIEEHPASFDWSSFKPMGFEVSFLKFLEESAVKQKKNTDKDHPNTGNKK

SEQ ID NO: 9465 - protein, 80 aa, Synthetic construct; identical to SEQ ID NO: 1956

SEQ ID NO: 9466 - protein, 80 aa, Synthetic construct
QTIEEHPASFDWSSFKPMGFEVSFLKFLEESAVKQKKNTDKDHPNTGNKKGSHSNSRKNIDKTAVTSGNHVCPCKESETF

SEQ ID NO: 9467 - protein, 80 aa, Synthetic construct
DWSSFKPMGFEVSFLKFLEESAVKQKKNTDKDHPNTGNKKGSHSNSRKNIDKTAVTSGNHVCPCKESETFVQFANPSQLQ

SEQ ID NO: 9468 - protein, 80 aa, Synthetic construct; identical to SEQ ID NO: 1957

SEQ ID NO: 9469 - protein, 80 aa, Synthetic construct
DKTAVTSGNHVCPCKESETFVQFANPSQLQCSDNVKIVLDKNLKDCTELVLKQLQEMKPTVSLKKLEVHSNDPDMSVMKD

SEQ ID NO: 9470 - protein, 80 aa, Synthetic construct
VCPCKESETFVQFANPSQLQCSDNVKIVLDKNLKDCTELVLKQLQEMKPTVSLKKLEVHSNDPDMSVMKDISIGKATGRG

SEQ ID NO: 9471 - protein, 80 aa, Synthetic construct; identical to SEQ ID NO: 1958

SEQ ID NO: 9472 - protein, 80 aa, Synthetic construct; identical to SEQ ID NO: 1427

SEQ ID NO: 9473 - protein, 80 aa, Synthetic construct; identical to SEQ ID NO: 1428

SEQ ID NO: 9474 - protein, 80 aa, Synthetic construct; identical to SEQ ID NO: 2147

SEQ ID NO: 9475 - protein, 80 aa, Synthetic construct; identical to SEQ ID NO: 1429

SEQ ID NO: 9476 - protein, 80 aa, Synthetic construct; identical to SEQ ID NO: 1430

SEQ ID NO: 9477 - protein, 80 aa, Synthetic construct; identical to SEQ ID NO: 1887

SEQ ID NO: 9478 - protein, 80 aa, Synthetic construct; identical to SEQ ID NO: 1431

SEQ ID NO: 9479 - protein, 80 aa, Synthetic construct; identical to SEQ ID NO: 1432

SEQ ID NO: 9480 - protein, 80 aa, Synthetic construct
SETETLKSSQNFQTLPSSPLLVPQESLASSEVKENLRIDSSSASQHGRDAILYLQTQVAEMSRVIRDLQSRSCFRFHHSR

SEQ ID NO: 9481 - protein, 80 aa, Synthetic construct
NFQTLPSSPLLVPQESLASSEVKENLRIDSSSASQHGRDAILYLQTQVAEMSRVIRDLQSRSCFRFHHSRPSENSSVPWD

SEQ ID NO: 9482 - protein, 80 aa, Synthetic construct
LVPQESLASSEVKENLRIDSSSASQHGRDAILYLQTQVAEMSRVIRDLQSRSCFRFHHSRPSENSSVPWDISTSKEENLS

SEQ ID NO: 9483 - protein, 80 aa, Synthetic construct
EVKENLRIDSSSASQHGRDAILYLQTQVAEMSRVIRDLQSRSCFRFHHSRPSENSSVPWDISTSKEENLSTVEEETDYKS

SEQ ID NO: 9484 - protein, 80 aa, Synthetic construct
DDDKPFQPKNISKMAELFMECEEEELEPWQKKVEETQDEDDDELIFVGEISSSKPAISNILNRGHSSSSSKGIKSEPHSP

SEQ ID NO: 9485 - protein, 80 aa, Synthetic construct
ISKMAELFMECEEEELEPWQKKVEETQDEDDDELIFVGEISSSKPAISNILNRGHSSSSSKGIKSEPHSPGIPEIFRTAS

SEQ ID NO: 9486 - protein, 80 aa, Synthetic construct
CEEEELEPWQKKVEETQDEDDDELIFVGEISSSKPAISNILNRGHSSSSSKGIKSEPHSPGIPEIFRTASQRCRDPPSNP

SEQ ID NO: 9487 - protein, 80 aa, Synthetic construct
KKVEETQDEDDDELIFVGEISSSKPAISNILNRGHSSSSSKGIKSEPHSPGIPEIFRTASQRCRDPPSNPVAASPRFHLV

SEQ ID NO: 9488 - protein, 80 aa, Synthetic construct
DDELIFVGEISSSKPAISNILNRGHSSSSSKGIKSEPHSPGIPEIFRTASQRCRDPPSNPVAASPRFHLVSKSSQSSVTV

SEQ ID NO: 9489 - protein, 80 aa, Synthetic construct
SSSKPAISNILNRGHSSSSSKGIKSEPHSPGIPEIFRTASQRCRDPPSNPVAASPRFHLVSKSSQSSVTVENASKPDFTK

SEQ ID NO: 9490 - protein, 80 aa, Synthetic construct
LNRGHSSSSSKGIKSEPHSPGIPEIFRTASQRCRDPPSNPVAASPRFHLVSKSSQSSVTVENASKPDFTKNSQVGSDNSS

SEQ ID NO: 9491 - protein, 80 aa, Synthetic construct
KGIKSEPHSPGIPEIFRTASQRCRDPPSNPVAASPRFHLVSKSSQSSVTVENASKPDFTKNSQVGSDNSSILLFDSTQES

SEQ ID NO: 9492 - protein, 80 aa, Synthetic construct
KTDSETGKLIMLVNEFYYGRHEGVTEKEPKTYTTFKCFSCSKVLKNNIRFMNHMKHHLELEKQNNESWENHTTCQHCYRQ

SEQ ID NO: 9493 - protein, 80 aa, Synthetic construct
AFQDMDKEDAQKVLKCMFCGDSFDSLQDLSVHMIKTKHYQKVPLKEPVPTISSKMVTPAKKRVFDVNRPCSPDSTTGSFA

SEQ ID NO: 9494 - protein, 80 aa, Synthetic construct
QKVLKCMFCGDSFDSLQDLSVHMIKTKHYQKVPLKEPVPTISSKMVTPAKKRVFDVNRPCSPDSTTGSFADSFSSQKNAN

SEQ ID NO: 9495 - protein, 80 aa, Synthetic construct
VHMIKTKHYQKVPLKEPVPTISSKMVTPAKKRVFDVNRPCSPDSTTGSFADSFSSQKNANLQLSSNNRYGYQNGASYTWQ

SEQ ID NO: 9496 - protein, 80 aa, Synthetic construct
KVPLKEPVPTISSKMVTPAKKRVFDVNRPCSPDSTTGSFADSFSSQKNANLQLSSNNRYGYQNGASYTWQFEACKSQILK

SEQ ID NO: 9497 - protein, 80 aa, Synthetic construct
ISSKMVTPAKKRVFDVNRPCSPDSTTGSFADSFSSQKNANLQLSSNNRYGYQNGASYTWQFEACKSQILKCMECGSSHDT

SEQ ID NO: 9498 - protein, 80 aa, Synthetic construct
QNGAPSWSAYPSIHAAYQLSEGTKPPLPMGSQVLQIRPNLTNKLRPIAPKWKVMPLVSMPTHLAPYTQVKKESEDKDEAV

SEQ ID NO: 9499 - protein, 80 aa, Synthetic construct
PSIHAAYQLSEGTKPPLPMGSQVLQIRPNLTNKLRPIAPKWKVMPLVSMPTHLAPYTQVKKESEDKDEAVKECGKESPHE

SEQ ID NO: 9500 - protein, 80 aa, Synthetic construct
EGTKPPLPMGSQVLQIRPNLTNKLRPIAPKWKVMPLVSMPTHLAPYTQVKKESEDKDEAVKECGKESPHEEASSFSHSEG

SEQ ID NO: 9501 - protein, 80 aa, Synthetic construct
SQVLQIRPNLTNKLRPIAPKWKVMPLVSMPTHLAPYTQVKKESEDKDEAVKECGKESPHEEASSFSHSEGDSFRKSETPP

SEQ ID NO: 9502 - protein, 80 aa, Synthetic construct
TNKLRPIAPKWKVMPLVSMPTHLAPYTQVKKESEDKDEAVKECGKESPHEEASSFSHSEGDSFRKSETPPEAKKTELGPL

SEQ ID NO: 9503 - protein, 80 aa, Synthetic construct
WKVMPLVSMPTHLAPYTQVKKESEDKDEAVKECGKESPHEEASSFSHSEGDSFRKSETPPEAKKTELGPLKEEEKLMKEG

SEQ ID NO: 9504 - protein, 80 aa, Synthetic construct
THLAPYTQVKKESEDKDEAVKECGKESPHEEASSFSHSEGDSFRKSETPPEAKKTELGPLKEEEKLMKEGSEKEKPQPLE

SEQ ID NO: 9505 - protein, 80 aa, Synthetic construct; identical to SEQ ID NO: 1808

SEQ ID NO: 9506 - protein, 80 aa, Synthetic construct
SLKPTEEAHKKERKPQKPGKYICQYCSRPCAKPSVLQKHIRSHTGERPYPCGPCGFSFKTKSNLYKHRKSHAHRIKAGLA

SEQ ID NO: 9507 - protein, 80 aa, Synthetic construct
KERKPQKPGKYICQYCSRPCAKPSVLQKHIRSHTGERPYPCGPCGFSFKTKSNLYKHRKSHAHRIKAGLASGMGGEMYPH

SEQ ID NO: 9508 - protein, 80 aa, Synthetic construct; identical to SEQ ID NO: 1433

SEQ ID NO: 9509 - protein, 80 aa, Synthetic construct; identical to SEQ ID NO: 1434

SEQ ID NO: 9510 - protein, 80 aa, Synthetic construct; identical to SEQ ID NO: 1435

SEQ ID NO: 9511 - protein, 80 aa, Synthetic construct; identical to SEQ ID NO: 2106

SEQ ID NO: 9512 - protein, 80 aa, Synthetic construct; identical to SEQ ID NO: 1436

SEQ ID NO: 9513 - protein, 80 aa, Synthetic construct; identical to SEQ ID NO: 1437

SEQ ID NO: 9514 - protein, 80 aa, Synthetic construct; identical to SEQ ID NO: 1438

SEQ ID NO: 9515 - protein, 80 aa, Synthetic construct
PPAPHGRSAHSLQPKLVRQPNIQVPEILVTEEPDRPDTEPEPPPKEPEKTEEFQWPQRSQTLAQLPAEKLPPKKKRLRLA

SEQ ID NO: 9516 - protein, 80 aa, Synthetic construct
SLQPKLVRQPNIQVPEILVTEEPDRPDTEPEPPPKEPEKTEEFQWPQRSQTLAQLPAEKLPPKKKRLRLAEMAQSSGESS

SEQ ID NO: 9517 - protein, 80 aa, Synthetic construct; identical to SEQ ID NO: 2107

SEQ ID NO: 9518 - protein, 80 aa, Synthetic construct
EPPPKEPEKTEEFQWPQRSQTLAQLPAEKLPPKKKRLRLAEMAQSSGESSFESSVPLSRSPSQESNVSLSGSSRSASFER

SEQ ID NO: 9519 - protein, 80 aa, Synthetic construct; identical to SEQ ID NO: 2108

SEQ ID NO: 9520 - protein, 80 aa, Synthetic construct; identical to SEQ ID NO: 1439

SEQ ID NO: 9521 - protein, 80 aa, Synthetic construct
HRRGLTPLSVKKEDSKEQPDLPSLAPPSSLPLSETSSRPAKSQEGTDSKKVLQFPSLHTTTNVSWCYLNYIKPNHIQHAD

SEQ ID NO: 9522 - protein, 80 aa, Synthetic construct
KKEDSKEQPDLPSLAPPSSLPLSETSSRPAKSQEGTDSKKVLQFPSLHTTTNVSWCYLNYIKPNHIQHADRRSSVYAGWC

SEQ ID NO: 9523 - protein, 80 aa, Synthetic construct
LPSLAPPSSLPLSETSSRPAKSQEGTDSKKVLQFPSLHTTTNVSWCYLNYIKPNHIQHADRRSSVYAGWCISLYNPNLPG

SEQ ID NO: 9524 - protein, 80 aa, Synthetic construct; identical to SEQ ID NO: 2109

SEQ ID NO: 9525 - protein, 80 aa, Synthetic construct; identical to SEQ ID NO: 4655

SEQ ID NO: 9526 - protein, 80 aa, Synthetic construct
HKQKHDDLRYKCELNGCNIVFSDLGQLYHHEAQHFRDASYTCNFLGCKKFYYSKIEYQNHLSMHNVENSNGDIKKSVKLE

SEQ ID NO: 9527 - protein, 80 aa, Synthetic construct
KCELNGCNIVFSDLGQLYHHEAQHFRDASYTCNFLGCKKFYYSKIEYQNHLSMHNVENSNGDIKKSVKLEESATGEKQDC

SEQ ID NO: 9528 - protein, 80 aa, Synthetic construct
EAQHFRDASYTCNFLGCKKFYYSKIEYQNHLSMHNVENSNGDIKKSVKLEESATGEKQDCINQPHLLNQTDKSHLPEDLF

SEQ ID NO: 9529 - protein, 80 aa, Synthetic construct; identical to SEQ ID NO: 4658

SEQ ID NO: 9530 - protein, 80 aa, Synthetic construct; identical to SEQ ID NO: 4659

SEQ ID NO: 9531 - protein, 80 aa, Synthetic construct
EQQMENLVVCVKYGTKIKEEPPSEADPCIKKEENRSCESERTEHSHSPGDSSAPIQNTDCCHSSERDGGQKGCIESSSVF

SEQ ID NO: 9532 - protein, 80 aa, Synthetic construct
VKYGTKIKEEPPSEADPCIKKEENRSCESERTEHSHSPGDSSAPIQNTDCCHSSERDGGQKGCIESSSVFDADTLLYRGT

SEQ ID NO: 9533 - protein, 80 aa, Synthetic construct; identical to SEQ ID NO: 1440

SEQ ID NO: 9534 - protein, 80 aa, Synthetic construct; identical to SEQ ID NO: 1441

SEQ ID NO: 9535 - protein, 80 aa, Synthetic construct; identical to SEQ ID NO: 2046

SEQ ID NO: 9536 - protein, 80 aa, Synthetic construct
TIHENLTAIPPLIVAETTTVPSLENLRVVLDKALTDCGELALKQLHYLRPVVVLERSKFSTPILDLFPTKKTDELCVGSS

SEQ ID NO: 9537 - protein, 80 aa, Synthetic construct
ITPTPNTAILQSSLVMGEQNLQWILNGATSSPQNQEQIQQASKVEKVFFTTAVPVASSPGSSVQQIGLSVPVIIIKQEEA

SEQ ID NO: 9538 - protein, 80 aa, Synthetic construct
QSSLVMGEQNLQWILNGATSSPQNQEQIQQASKVEKVFFTTAVPVASSPGSSVQQIGLSVPVIIIKQEEACQCQCACRDS

SEQ ID NO: 9539 - protein, 80 aa, Synthetic construct
LQWILNGATSSPQNQEQIQQASKVEKVFFTTAVPVASSPGSSVQQIGLSVPVIIIKQEEACQCQCACRDSAKERASSRRK

SEQ ID NO: 9540 - protein, 80 aa, Synthetic construct
SPQNQEQIQQASKVEKVFFTTAVPVASSPGSSVQQIGLSVPVIIIKQEEACQCQCACRDSAKERASSRRKGCSSPPPPEP

SEQ ID NO: 9541 - protein, 80 aa, Synthetic construct
ASKVEKVFFTTAVPVASSPGSSVQQIGLSVPVIIIKQEEACQCQCACRDSAKERASSRRKGCSSPPPPEPSPQAPDGPSL

SEQ ID NO: 9542 - protein, 80 aa, Synthetic construct
TAVPVASSPGSSVQQIGLSVPVIIIKQEEACQCQCACRDSAKERASSRRKGCSSPPPPEPSPQAPDGPSLQLPAQTFSSA

SEQ ID NO: 9543 - protein, 80 aa, Synthetic construct
SSVQQIGLSVPVIIIKQEEACQCQCACRDSAKERASSRRKGCSSPPPPEPSPQAPDGPSLQLPAQTFSSAPVPGSSSSTL

SEQ ID NO: 9544 - protein, 80 aa, Synthetic construct; identical to SEQ ID NO: 3772

SEQ ID NO: 9545 - protein, 80 aa, Synthetic construct
EAVDRMNPSLVCVASVTDVVDSRFLVHFDNWDDTYDYWCDPSSPYIHPVGWCQKQGKPLTPPQDYPDPDNFCWEKYLEET

SEQ ID NO: 9546 - protein, 80 aa, Synthetic construct
VCVASVTDVVDSRFLVHFDNWDDTYDYWCDPSSPYIHPVGWCQKQGKPLTPPQDYPDPDNFCWEKYLEETGASAVPTWAF

SEQ ID NO: 9547 - protein, 80 aa, Synthetic construct
DSRFLVHFDNWDDTYDYWCDPSSPYIHPVGWCQKQGKPLTPPQDYPDPDNFCWEKYLEETGASAVPTWAFKVRPPHSFLV

SEQ ID NO: 9548 - protein, 80 aa, Synthetic construct
WDDTYDYWCDPSSPYIHPVGWCQKQGKPLTPPQDYPDPDNFCWEKYLEETGASAVPTWAFKVRPPHSFLVNMKLEAVDRR

SEQ ID NO: 9549 - protein, 80 aa, Synthetic construct
PSSPYIHPVGWCQKQGKPLTPPQDYPDPDNFCWEKYLEETGASAVPTWAFKVRPPHSFLVNMKLEAVDRRNPALIRVASV

SEQ ID NO: 9550 - protein, 80 aa, Synthetic construct; identical to SEQ ID NO: 3774

SEQ ID NO: 9551 - protein, 80 aa, Synthetic construct; identical to SEQ ID NO: 764

SEQ ID NO: 9552 - protein, 80 aa, Synthetic construct
HGLLGPPKSERGRKKIKAENPGGPPVLVVPYPILASGETAKEGKTYRCKVCPLTFFTKSEMQIHSKSHTEAKPHKCPHCS

SEQ ID NO: 9553 - protein, 80 aa, Synthetic construct
RGRKKIKAENPGGPPVLVVPYPILASGETAKEGKTYRCKVCPLTFFTKSEMQIHSKSHTEAKPHKCPHCSKSFANASYLA

SEQ ID NO: 9554 - protein, 80 aa, Synthetic construct; identical to SEQ ID NO: 5537

SEQ ID NO: 9555 - protein, 80 aa, Synthetic construct; identical to SEQ ID NO: 5535

SEQ ID NO: 9556 - protein, 80 aa, Synthetic construct; identical to SEQ ID NO: 5536

SEQ ID NO: 9557 - protein, 80 aa, Synthetic construct
KCKRHVTDLTGQVVQEGTRRYRLCNECLAEFGIDSLPIDLEAEQHLMSPSDGDKDSRWHLSEDENRSYVEIVEDGSADLV

SEQ ID NO: 9558 - protein, 80 aa, Synthetic construct; identical to SEQ ID NO: 2105

SEQ ID NO: 9559 - protein, 80 aa, Synthetic construct
YRLCNECLAEFGIDSLPIDLEAEQHLMSPSDGDKDSRWHLSEDENRSYVEIVEDGSADLVIQQVDDSEEEEEKEIKPNIR

SEQ ID NO: 9560 - protein, 80 aa, Synthetic construct; identical to SEQ ID NO: 5497

SEQ ID NO: 9561 - protein, 80 aa, Synthetic construct; identical to SEQ ID NO: 5498

SEQ ID NO: 9562 - protein, 80 aa, Synthetic construct; identical to SEQ ID NO: 5555

SEQ ID NO: 9563 - protein, 80 aa, Synthetic construct; identical to SEQ ID NO: 5556

SEQ ID NO: 9564 - protein, 80 aa, Synthetic construct; identical to SEQ ID NO: 6019

SEQ ID NO: 9565 - protein, 80 aa, Synthetic construct
KTYRQTSTLAMHKRSAHGELEATEESEQALYEQQQLEAASAAEESPPPKRPRIAYLSEVKEERDDIPAQVAMVTEEDGAP

SEQ ID NO: 9566 - protein, 80 aa, Synthetic construct
MHKRSAHGELEATEESEQALYEQQQLEAASAAEESPPPKRPRIAYLSEVKEERDDIPAQVAMVTEEDGAPQVALITQDGA

SEQ ID NO: 9567 - protein, 80 aa, Synthetic construct
YEQQQLEAASAAEESPPPKRPRIAYLSEVKEERDDIPAQVAMVTEEDGAPQVALITQDGAQQVSLSPEDLQALGSAISMV

SEQ ID NO: 9568 - protein, 80 aa, Synthetic construct
AAEESPPPKRPRIAYLSEVKEERDDIPAQVAMVTEEDGAPQVALITQDGAQQVSLSPEDLQALGSAISMVTQHGSTTLTI

SEQ ID NO: 9569 - protein, 80 aa, Synthetic construct
PRIAYLSEVKEERDDIPAQVAMVTEEDGAPQVALITQDGAQQVSLSPEDLQALGSAISMVTQHGSTTLTIPSPDADLATS

SEQ ID NO: 9570 - protein, 80 aa, Synthetic construct; identical to SEQ ID NO: 3711

SEQ ID NO: 9571 - protein, 80 aa, Synthetic construct
YGSPSVISVSKGSPDGSHPVVVAPYNGGPPRTCPKIKQEAVSSCTHLGAGPPLSNGHRPAAHDFPLGRQLPSRTTPTLGL

SEQ ID NO: 9572 - protein, 80 aa, Synthetic construct
KGSPDGSHPVVVAPYNGGPPRTCPKIKQEAVSSCTHLGAGPPLSNGHRPAAHDFPLGRQLPSRTTPTLGLEEVLSSRDCH

SEQ ID NO: 9573 - protein, 80 aa, Synthetic construct
VVAPYNGGPPRTCPKIKQEAVSSCTHLGAGPPLSNGHRPAAHDFPLGRQLPSRTTPTLGLEEVLSSRDCHPALPLPPGFH

SEQ ID NO: 9574 - protein, 80 aa, Synthetic construct
RTCPKIKQEAVSSCTHLGAGPPLSNGHRPAAHDFPLGRQLPSRTTPTLGLEEVLSSRDCHPALPLPPGFHPHPGPNYPSF

SEQ ID NO: 9575 - protein, 80 aa, Synthetic construct
IRGFEAPMAENPPPPPPPVIFCHDSPKRVLVSVIRTTPIKPTCGGGGEPEPPPPLIPTSPGFSDFMVYPWRWGENAHNVT

SEQ ID NO: 9576 - protein, 80 aa, Synthetic construct
NPPPPPPPVIFCHDSPKRVLVSVIRTTPIKPTCGGGGEPEPPPPLIPTSPGFSDFMVYPWRWGENAHNVTLSPGAAGAAA

SEQ ID NO: 9577 - protein, 80 aa, Synthetic construct; identical to SEQ ID NO: 1442

SEQ ID NO: 9578 - protein, 80 aa, Synthetic construct
ALSQFIEPKIGLKEDGVSEASLVSSISATKSLLPPARTPKPAPKPPPPPPLPPPLLRPVKLEFPLDEDLELKAEEEDEDE

SEQ ID NO: 9579 - protein, 80 aa, Synthetic construct
GLKEDGVSEASLVSSISATKSLLPPARTPKPAPKPPPPPPLPPPLLRPVKLEFPLDEDLELKAEEEDEDEDEDVSDICIV

SEQ ID NO: 9580 - protein, 80 aa, Synthetic construct
SLVSSISATKSLLPPARTPKPAPKPPPPPPLPPPLLRPVKLEFPLDEDLELKAEEEDEDEDEDVSDICIVKVESALEVAH

SEQ ID NO: 9581 - protein, 80 aa, Synthetic construct
SLLPPARTPKPAPKPPPPPPLPPPLLRPVKLEFPLDEDLELKAEEEDEDEDEDVSDICIVKVESALEVAHRLKPPGGLGG

SEQ ID NO: 9582 - protein, 80 aa, Synthetic construct
PAPKPPPPPPLPPPLLRPVKLEFPLDEDLELKAEEEDEDEDEDVSDICIVKVESALEVAHRLKPPGGLGGGLGIGGSVGG

SEQ ID NO: 9583 - protein, 80 aa, Synthetic construct
LPPPLLRPVKLEFPLDEDLELKAEEEDEDEDEDVSDICIVKVESALEVAHRLKPPGGLGGGLGIGGSVGGHLGELAQSSV

SEQ ID NO: 9584 - protein, 80 aa, Synthetic construct; identical to SEQ ID NO: 5526

SEQ ID NO: 9585 - protein, 80 aa, Synthetic construct
DKTFPNTIEHKKHIKAEHADMKFHECDQCKELFPTPALLQVHVKCQHSGSQPFRCLYCAATFRFPGALQHHVTTEHFKQS

SEQ ID NO: 9586 - protein, 80 aa, Synthetic construct
KKHIKAEHADMKFHECDQCKELFPTPALLQVHVKCQHSGSQPFRCLYCAATFRFPGALQHHVTTEHFKQSETTFPCELCG

SEQ ID NO: 9587 - protein, 80 aa, Synthetic construct
EQYRQVASPRTDPYSAAQLHNQYGPMNMNMGMNMAAAAAHHHHHHHHHPGAFFRYMRQQCIKQELICKWIDPEQLSNPKK

SEQ ID NO: 9588 - protein, 80 aa, Synthetic construct; identical to SEQ ID NO: 2726

SEQ ID NO: 9589 - protein, 80 aa, Synthetic construct
AASVPAPPASIMERISASKGLISPMMARLAAAALKPSATFDPGSGQQVTPARFPPAQVKPEPGESTGAPGPHEASQDRSL

SEQ ID NO: 9590 - protein, 80 aa, Synthetic construct
IMERISASKGLISPMMARLAAAALKPSATFDPGSGQQVTPARFPPAQVKPEPGESTGAPGPHEASQDRSLDLTVKEPSNE

SEQ ID NO: 9591 - protein, 80 aa, Synthetic construct
LISPMMARLAAAALKPSATFDPGSGQQVTPARFPPAQVKPEPGESTGAPGPHEASQDRSLDLTVKEPSNESNGHAVPANS

SEQ ID NO: 9592 - protein, 80 aa, Synthetic construct
DPGSGQQVTPARFPPAQVKPEPGESTGAPGPHEASQDRSLDLTVKEPSNESNGHAVPANSSLLSSLMNKMSQGNPGLGSL

SEQ ID NO: 9593 - protein, 80 aa, Synthetic construct
ARFPPAQVKPEPGESTGAPGPHEASQDRSLDLTVKEPSNESNGHAVPANSSLLSSLMNKMSQGNPGLGSLLNIKAEAEGS

SEQ ID NO: 9594 - protein, 80 aa, Synthetic construct; identical to SEQ ID NO: 2355

SEQ ID NO: 9595 - protein, 80 aa, Synthetic construct
LNIKAEAEGSPAAEPSPFLGKAVKALVQEKLAEPWKVYLRRFGTKDFCDGQCDFLHKAHFHCVVEECGALFSTLDGAIKH

SEQ ID NO: 9596 - protein, 80 aa, Synthetic construct; identical to SEQ ID NO: 2120

SEQ ID NO: 9597 - protein, 80 aa, Synthetic construct; identical to SEQ ID NO: 1443

SEQ ID NO: 9598 - protein, 80 aa, Synthetic construct; identical to SEQ ID NO: 1444

SEQ ID NO: 9599 - protein, 80 aa, Synthetic construct; identical to SEQ ID NO: 1445

SEQ ID NO: 9600 - protein, 80 aa, Synthetic construct
VKIEEEEFIHGQDTCLQRSELLKQELCRQLFRQFCYQDSPGPREALSRLRELCCQWLKPEIHTKEQILELLVLEQFLTIL

SEQ ID NO: 9601 - protein, 80 aa, Synthetic construct
GQDTCLQRSELLKQELCRQLFRQFCYQDSPGPREALSRLRELCCQWLKPEIHTKEQILELLVLEQFLTILPGDLQAWVHE

SEQ ID NO: 9602 - protein, 80 aa, Synthetic construct; identical to SEQ ID NO: 1446

SEQ ID NO: 9603 - protein, 80 aa, Synthetic construct; identical to SEQ ID NO: 1447

SEQ ID NO: 9604 - protein, 80 aa, Synthetic construct; identical to SEQ ID NO: 2032

SEQ ID NO: 9605 - protein, 80 aa, Synthetic construct; identical to SEQ ID NO: 1448

SEQ ID NO: 9606 - protein, 80 aa, Synthetic construct; identical to SEQ ID NO: 1449

SEQ ID NO: 9607 - protein, 80 aa, Synthetic construct; identical to SEQ ID NO: 1450

SEQ ID NO: 9608 - protein, 80 aa, Synthetic construct; identical to SEQ ID NO: 3701

SEQ ID NO: 9609 - protein, 80 aa, Synthetic construct; identical to SEQ ID NO: 3702

SEQ ID NO: 9610 - protein, 80 aa, Synthetic construct
MEKYLTPQLPPVPIIPEHKKYRRDSASVVDQFFTDTEGLPYSINMNVFLPDITHLRTGLYKSQRPCVTHIKTEPVAIFSH

SEQ ID NO: 9611 - protein, 80 aa, Synthetic construct
PVPIIPEHKKYRRDSASVVDQFFTDTEGLPYSINMNVFLPDITHLRTGLYKSQRPCVTHIKTEPVAIFSHQSETTAPPPA

SEQ ID NO: 9612 - protein, 80 aa, Synthetic construct
YRRDSASVVDQFFTDTEGLPYSINMNVFLPDITHLRTGLYKSQRPCVTHIKTEPVAIFSHQSETTAPPPAPTQALPEFTS

SEQ ID NO: 9613 - protein, 80 aa, Synthetic construct
QFFTDTEGLPYSINMNVFLPDITHLRTGLYKSQRPCVTHIKTEPVAIFSHQSETTAPPPAPTQALPEFTSIFSSHQTAAP

SEQ ID NO: 9614 - protein, 80 aa, Synthetic construct
YSINMNVFLPDITHLRTGLYKSQRPCVTHIKTEPVAIFSHQSETTAPPPAPTQALPEFTSIFSSHQTAAPEVNNIFIKQE

SEQ ID NO: 9615 - protein, 80 aa, Synthetic construct; identical to SEQ ID NO: 2014

SEQ ID NO: 9616 - protein, 80 aa, Synthetic construct
KTEPVAIFSHQSETTAPPPAPTQALPEFTSIFSSHQTAAPEVNNIFIKQELPTPDLHLSVPTQQGHLYQLLNTPDLDMPS

SEQ ID NO: 9617 - protein, 80 aa, Synthetic construct
PTQALPEFTSIFSSHQTAAPEVNNIFIKQELPTPDLHLSVPTQQGHLYQLLNTPDLDMPSSTNQTAAMDTLNVSMSAAMA

SEQ ID NO: 9618 - protein, 80 aa, Synthetic construct
IFSSHQTAAPEVNNIFIKQELPTPDLHLSVPTQQGHLYQLLNTPDLDMPSSTNQTAAMDTLNVSMSAAMAGLNTHTSAVP

SEQ ID NO: 9619 - protein, 80 aa, Synthetic construct
EVNNIFIKQELPTPDLHLSVPTQQGHLYQLLNTPDLDMPSSTNQTAAMDTLNVSMSAAMAGLNTHTSAVPQTAVKQFQGM

SEQ ID NO: 9620 - protein, 80 aa, Synthetic construct; identical to SEQ ID NO: 5639

SEQ ID NO: 9621 - protein, 80 aa, Synthetic construct; identical to SEQ ID NO: 1451

SEQ ID NO: 9622 - protein, 80 aa, Synthetic construct; identical to SEQ ID NO: 2238

SEQ ID NO: 9623 - protein, 80 aa, Synthetic construct
DLNVAEIADEVYMEVIVGEEDAAAAAAAAAVHEQQMDDNEIKTFMPIAWAAAYGNNSDGIENRNGTASALLHIDESAGLG

SEQ ID NO: 9624 - protein, 80 aa, Synthetic construct
KQGKYICEYCNRACAKPSVLLKHIRSHTGERPYPCVTCGFSFKTKSNLYKHKKSHAHTIKLGLVLQPDAGGLFLSHESPK

SEQ ID NO: 9625 - protein, 80 aa, Synthetic construct
NALGCNPSLPKHNVTIRSDQQHKNIQLQNSHIHLVARGPEQTMDPKLSTIMEQQISSAAQDKIELQRHGTGISVIQHTNS

SEQ ID NO: 9626 - protein, 80 aa, Synthetic construct; identical to SEQ ID NO: 2291

SEQ ID NO: 9627 - protein, 80 aa, Synthetic construct; identical to SEQ ID NO: 1452

SEQ ID NO: 9628 - protein, 80 aa, Synthetic construct; identical to SEQ ID NO: 1453

SEQ ID NO: 9629 - protein, 80 aa, Synthetic construct; identical to SEQ ID NO: 1454

SEQ ID NO: 9630 - protein, 80 aa, Synthetic construct; identical to SEQ ID NO: 1455

SEQ ID NO: 9631 - protein, 80 aa, Synthetic construct; identical to SEQ ID NO: 1456

SEQ ID NO: 9632 - protein, 80 aa, Synthetic construct
GISVIQHTNSLSRPNSFDKPEPFERASPVSFQELNRTGKSGSLKVIGISQEESHPSRDGSHPHQLALSDALRGELQESSR

SEQ ID NO: 9633 - protein, 80 aa, Synthetic construct; identical to SEQ ID NO: 3408

SEQ ID NO: 9634 - protein, 80 aa, Synthetic construct; identical to SEQ ID NO: 3409

SEQ ID NO: 9635 - protein, 80 aa, Synthetic construct
KQQITLQPTPGLPSPHTHLFSHLPLHSQQQSRTPYNMVPVGGIHVVPAGLTYSTFVPLQAGPVQLTIPAVSVVHRTLGTH

SEQ ID NO: 9636 - protein, 80 aa, Synthetic construct
GLPSPHTHLFSHLPLHSQQQSRTPYNMVPVGGIHVVPAGLTYSTFVPLQAGPVQLTIPAVSVVHRTLGTHRNTVTEVSGT

SEQ ID NO: 9637 - protein, 80 aa, Synthetic construct; identical to SEQ ID NO: 2298

SEQ ID NO: 9638 - protein, 80 aa, Synthetic construct; identical to SEQ ID NO: 4708

SEQ ID NO: 9639 - protein, 80 aa, Synthetic construct; identical to SEQ ID NO: 4709

SEQ ID NO: 9640 - protein, 80 aa, Synthetic construct
MKTQLEQDSIIEALLPLSMEAKIKQEITEGELKAFMTAPGGKKTPAMRKVLYPCRFCNQVFAFSGVLRAHVRSHLGISPY

SEQ ID NO: 9641 - protein, 80 aa, Synthetic construct
IEALLPLSMEAKIKQEITEGELKAFMTAPGGKKTPAMRKVLYPCRFCNQVFAFSGVLRAHVRSHLGISPYQCNICDYIAA

SEQ ID NO: 9642 - protein, 80 aa, Synthetic construct
AKIKQEITEGELKAFMTAPGGKKTPAMRKVLYPCRFCNQVFAFSGVLRAHVRSHLGISPYQCNICDYIAADKAALIRHLR

SEQ ID NO: 9643 - protein, 80 aa, Synthetic construct
ESYVLAADGLGPAEAPAAEASGRGEDSGCAALGDCKPLTAFLEPQNGFLHRGPTQPPPPHVSIKLEPASSFAVDFNEPLD

SEQ ID NO: 9644 - protein, 80 aa, Synthetic construct
GPAEAPAAEASGRGEDSGCAALGDCKPLTAFLEPQNGFLHRGPTQPPPPHVSIKLEPASSFAVDFNEPLDFSQKGLALVQ

SEQ ID NO: 9645 - protein, 80 aa, Synthetic construct; identical to SEQ ID NO: 1457

SEQ ID NO: 9646 - protein, 80 aa, Synthetic construct
ALGDCKPLTAFLEPQNGFLHRGPTQPPPPHVSIKLEPASSFAVDFNEPLDFSQKGLALVQVKQENISFLSPSSLVPYDCS

SEQ ID NO: 9647 - protein, 80 aa, Synthetic construct; identical to SEQ ID NO: 1458

SEQ ID NO: 9648 - protein, 80 aa, Synthetic construct; identical to SEQ ID NO: 1459

SEQ ID NO: 9649 - protein, 80 aa, Synthetic construct; identical to SEQ ID NO: 1460

SEQ ID NO: 9650 - protein, 80 aa, Synthetic construct; identical to SEQ ID NO: 1461

SEQ ID NO: 9651 - protein, 80 aa, Synthetic construct; identical to SEQ ID NO: 2299

SEQ ID NO: 9652 - protein, 80 aa, Synthetic construct
VKQENISFLSPSSLVPYDCSMEPIDLSIPKNFRKGDKDLATPSEAKKPEEEAGSSEQPSPCPAPGPSLPVTLGPSGILES

SEQ ID NO: 9653 - protein, 80 aa, Synthetic construct; identical to SEQ ID NO: 2316

SEQ ID NO: 9654 - protein, 80 aa, Synthetic construct
QQGSFSVDDVQTVSAGALGCLVALPMKNLSDDPLALTSNSNLAAHITTPTSSSTPRENASVPELLAPIKVEPDSPSRPGA

SEQ ID NO: 9655 - protein, 80 aa, Synthetic construct
QTVSAGALGCLVALPMKNLSDDPLALTSNSNLAAHITTPTSSSTPRENASVPELLAPIKVEPDSPSRPGAVGQQEGSHGL

SEQ ID NO: 9656 - protein, 80 aa, Synthetic construct
LVALPMKNLSDDPLALTSNSNLAAHITTPTSSSTPRENASVPELLAPIKVEPDSPSRPGAVGQQEGSHGLPQSTLPSPAE

SEQ ID NO: 9657 - protein, 80 aa, Synthetic construct
DDPLALTSNSNLAAHITTPTSSSTPRENASVPELLAPIKVEPDSPSRPGAVGQQEGSHGLPQSTLPSPAEQHGAQDTELS

SEQ ID NO: 9658 - protein, 80 aa, Synthetic construct
NLAAHITTPTSSSTPRENASVPELLAPIKVEPDSPSRPGAVGQQEGSHGLPQSTLPSPAEQHGAQDTELSAGTGNFYLES

SEQ ID NO: 9659 - protein, 80 aa, Synthetic construct
SSSTPRENASVPELLAPIKVEPDSPSRPGAVGQQEGSHGLPQSTLPSPAEQHGAQDTELSAGTGNFYLESGGSARTDYRA

SEQ ID NO: 9660 - protein, 80 aa, Synthetic construct
VPELLAPIKVEPDSPSRPGAVGQQEGSHGLPQSTLPSPAEQHGAQDTELSAGTGNFYLESGGSARTDYRAIQLAKEKKQR

SEQ ID NO: 9661 - protein, 80 aa, Synthetic construct; identical to SEQ ID NO: 6094

SEQ ID NO: 9662 - protein, 80 aa, Synthetic construct; identical to SEQ ID NO: 1462

SEQ ID NO: 9663 - protein, 80 aa, Synthetic construct; identical to SEQ ID NO: 1463

SEQ ID NO: 9664 - protein, 80 aa, Synthetic construct; identical to SEQ ID NO: 1803

SEQ ID NO: 9665 - protein, 80 aa, Synthetic construct
WLRPDLHTKEQILDMLVMEQFMISMPQELQVLVMMNGVQSCKDLEDLLRNNRRPKKWSVVTFHGKEYIVQDSDIEMAEAP

SEQ ID NO: 9666 - protein, 80 aa, Synthetic construct
QILDMLVMEQFMISMPQELQVLVMMNGVQSCKDLEDLLRNNRRPKKWSVVTFHGKEYIVQDSDIEMAEAPSSVRDDLKDV

SEQ ID NO: 9667 - protein, 80 aa, Synthetic construct
FMISMPQELQVLVMMNGVQSCKDLEDLLRNNRRPKKWSVVTFHGKEYIVQDSDIEMAEAPSSVRDDLKDVSSQRASSVNQ

SEQ ID NO: 9668 - protein, 80 aa, Synthetic construct; identical to SEQ ID NO: 1804

SEQ ID NO: 9669 - protein, 80 aa, Synthetic construct
CKDLEDLLRNNRRPKKWSVVTFHGKEYIVQDSDIEMAEAPSSVRDDLKDVSSQRASSVNQMRPGEGQAHRELQILPRVPA

SEQ ID NO: 9670 - protein, 80 aa, Synthetic construct
NRRPKKWSVVTFHGKEYIVQDSDIEMAEAPSSVRDDLKDVSSQRASSVNQMRPGEGQAHRELQILPRVPALSRRQGEDFL

SEQ ID NO: 9671 - protein, 80 aa, Synthetic construct; identical to SEQ ID NO: 2356

SEQ ID NO: 9672 - protein, 80 aa, Synthetic construct; identical to SEQ ID NO: 1464

SEQ ID NO: 9673 - protein, 80 aa, Synthetic construct; identical to SEQ ID NO: 5859

SEQ ID NO: 9674 - protein, 80 aa, Synthetic construct
CMLLHLCQHKRIHIRENSYRCEECGKAFIWFSTLTRHRRVHTGEKSYKYECGKSFNQDSNLTTHKRIHTGQKPYKCEECG

SEQ ID NO: 9675 - protein, 80 aa, Synthetic construct; identical to SEQ ID NO: 5861

SEQ ID NO: 9676 - protein, 80 aa, Synthetic construct
GLTGDGETREENKLLIPKQKISEEVHSYKVRVGRLKHDITQVPETREVYKSEDRLERLQEILRKFLYLEREFRQITISKE

SEQ ID NO: 9677 - protein, 80 aa, Synthetic construct
ENKLLIPKQKISEEVHSYKVRVGRLKHDITQVPETREVYKSEDRLERLQEILRKFLYLEREFRQITISKETFTSEKNNEC

SEQ ID NO: 9678 - protein, 80 aa, Synthetic construct
ISEEVHSYKVRVGRLKHDITQVPETREVYKSEDRLERLQEILRKFLYLEREFRQITISKETFTSEKNNECHEPEKSFSLD

SEQ ID NO: 9679 - protein, 80 aa, Synthetic construct
RVGRLKHDITQVPETREVYKSEDRLERLQEILRKFLYLEREFRQITISKETFTSEKNNECHEPEKSFSLDSTIDADQRVL

SEQ ID NO: 9680 - protein, 80 aa, Synthetic construct; identical to SEQ ID NO: 5499

SEQ ID NO: 9681 - protein, 80 aa, Synthetic construct; identical to SEQ ID NO: 5500

SEQ ID NO: 9682 - protein, 80 aa, Synthetic construct
SQTPQPQRVSGVFPRPHGPHPLPMTATPRKLPEGESAPLELPAPPALPPKIFYIKQEPFEPKEEISGSGTQPGGAKEETK

SEQ ID NO: 9683 - protein, 80 aa, Synthetic construct
GVFPRPHGPHPLPMTATPRKLPEGESAPLELPAPPALPPKIFYIKQEPFEPKEEISGSGTQPGGAKEETKVFSGGDTEGN

SEQ ID NO: 9684 - protein, 80 aa, Synthetic construct
PLPMTATPRKLPEGESAPLELPAPPALPPKIFYIKQEPFEPKEEISGSGTQPGGAKEETKVFSGGDTEGNGELGFLLPSG

SEQ ID NO: 9685 - protein, 80 aa, Synthetic construct
LPEGESAPLELPAPPALPPKIFYIKQEPFEPKEEISGSGTQPGGAKEETKVFSGGDTEGNGELGFLLPSGPGPTSGGGGP

SEQ ID NO: 9686 - protein, 80 aa, Synthetic construct
LPAPPALPPKIFYIKQEPFEPKEEISGSGTQPGGAKEETKVFSGGDTEGNGELGFLLPSGPGPTSGGGGPSWKPVDLHGN

SEQ ID NO: 9687 - protein, 80 aa, Synthetic construct
IFYIKQEPFEPKEEISGSGTQPGGAKEETKVFSGGDTEGNGELGFLLPSGPGPTSGGGGPSWKPVDLHGNEILSGGGGPG

SEQ ID NO: 9688 - protein, 80 aa, Synthetic construct
MAGRSISPWLARRTSPANSSGDSAIASCHDGGSSYGKEDQEPKADGPDDVSSQPLWPGDVGYGPLRIKEEQVSPSQYGGS

SEQ ID NO: 9689 - protein, 80 aa, Synthetic construct
ARRTSPANSSGDSAIASCHDGGSSYGKEDQEPKADGPDDVSSQPLWPGDVGYGPLRIKEEQVSPSQYGGSELPSAKDGAV

SEQ ID NO: 9690 - protein, 80 aa, Synthetic construct
GDSAIASCHDGGSSYGKEDQEPKADGPDDVSSQPLWPGDVGYGPLRIKEEQVSPSQYGGSELPSAKDGAVQNSFSEQSAG

SEQ ID NO: 9691 - protein, 80 aa, Synthetic construct
GGSSYGKEDQEPKADGPDDVSSQPLWPGDVGYGPLRIKEEQVSPSQYGGSELPSAKDGAVQNSFSEQSAGDAWQPTGRRK

SEQ ID NO: 9692 - protein, 80 aa, Synthetic construct
EPKADGPDDVSSQPLWPGDVGYGPLRIKEEQVSPSQYGGSELPSAKDGAVQNSFSEQSAGDAWQPTGRRKNRKNKETVRH

SEQ ID NO: 9693 - protein, 80 aa, Synthetic construct; identical to SEQ ID NO: 2199

SEQ ID NO: 9694 - protein, 80 aa, Synthetic construct
DTKASFEAHVREKFNRMVEAVDRTIEKRIDKLTKELAQKTAELLEVRAAFVQLTQKKQEVQRRERALNRQVDVAVEMIAV

SEQ ID NO: 9695 - protein, 80 aa, Synthetic construct; identical to SEQ ID NO: 1465

SEQ ID NO: 9696 - protein, 80 aa, Synthetic construct; identical to SEQ ID NO: 1466

SEQ ID NO: 9697 - protein, 80 aa, Synthetic construct
VDVAVEMIAVLRQRLTESEEELLRKEEEVVTFNHFLEAAAEKEVQGKARLQDFIENLLQRVELAEKQLEYYQSQQASGFV

SEQ ID NO: 9698 - protein, 80 aa, Synthetic construct
LRQRLTESEEELLRKEEEVVTFNHFLEAAAEKEVQGKARLQDFIENLLQRVELAEKQLEYYQSQQASGFVRDLSGHVLTD

SEQ ID NO: 9699 - protein, 80 aa, Synthetic construct
ELLRKEEEVVTFNHFLEAAAEKEVQGKARLQDFIENLLQRVELAEKQLEYYQSQQASGFVRDLSGHVLTDISSNRKPKCL

SEQ ID NO: 9700 - protein, 80 aa, Synthetic construct
EKEVQGKARLQDFIENLLQRVELAEKQLEYYQSQQASGFVRDLSGHVLTDISSNRKPKCLSRGHPHSVCNHPDLKAHFHP

SEQ ID NO: 9701 - protein, 80 aa, Synthetic construct; identical to SEQ ID NO: 2200

SEQ ID NO: 9702 - protein, 80 aa, Synthetic construct; identical to SEQ ID NO: 2163

SEQ ID NO: 9703 - protein, 80 aa, Synthetic construct
PDFHTIPAFCLTPPYSPSDFEPSQVSNLMAPAPSTVHFKSLSDTAKPHIAAPFKEEEKSPVSAPKLPKAQATSVIRHTAD

SEQ ID NO: 9704 - protein, 80 aa, Synthetic construct; identical to SEQ ID NO: 1467

SEQ ID NO: 9705 - protein, 80 aa, Synthetic construct; identical to SEQ ID NO: 1468

SEQ ID NO: 9706 - protein, 80 aa, Synthetic construct; identical to SEQ ID NO: 1469

SEQ ID NO: 9707 - protein, 80 aa, Synthetic construct; identical to SEQ ID NO: 1855

SEQ ID NO: 9708 - protein, 80 aa, Synthetic construct; identical to SEQ ID NO: 1470

SEQ ID NO: 9709 - protein, 80 aa, Synthetic construct; identical to SEQ ID NO: 1471

SEQ ID NO: 9710 - protein, 80 aa, Synthetic construct
ATSVIRHTADAQLCNHQTCPMKAASILNYQNNSFRRRTHLNVEAARKNIPCAAVSPNRSKCERNTVADVDEKASAALYDF

SEQ ID NO: 9711 - protein, 80 aa, Synthetic construct
TAELREAMALAPWGPVKVKKEEEEEENFPGQASSQQVHSENIKVWAPVQGLQTGLDGSEEEEKGQNISWDMAVVLKATQE

SEQ ID NO: 9712 - protein, 80 aa, Synthetic construct
APWGPVKVKKEEEEEENFPGQASSQQVHSENIKVWAPVQGLQTGLDGSEEEEKGQNISWDMAVVLKATQEAPAASTLGSY

SEQ ID NO: 9713 - protein, 80 aa, Synthetic construct
LQTGLDGSEEEEKGQNISWDMAVVLKATQEAPAASTLGSYSLPGTLAKSEILETHGTMNFLGAETKNLQLLVPKTEICEE

SEQ ID NO: 9714 - protein, 80 aa, Synthetic construct
EEKGQNISWDMAVVLKATQEAPAASTLGSYSLPGTLAKSEILETHGTMNFLGAETKNLQLLVPKTEICEEAEKPLIISER

SEQ ID NO: 9715 - protein, 80 aa, Synthetic construct
MAVVLKATQEAPAASTLGSYSLPGTLAKSEILETHGTMNFLGAETKNLQLLVPKTEICEEAEKPLIISERIQKADPQGPE

SEQ ID NO: 9716 - protein, 80 aa, Synthetic construct
APAASTLGSYSLPGTLAKSEILETHGTMNFLGAETKNLQLLVPKTEICEEAEKPLIISERIQKADPQGPELGEACEKGNM

SEQ ID NO: 9717 - protein, 80 aa, Synthetic construct; identical to SEQ ID NO: 1472

SEQ ID NO: 9718 - protein, 80 aa, Synthetic construct; identical to SEQ ID NO: 1473

SEQ ID NO: 9719 - protein, 80 aa, Synthetic construct; identical to SEQ ID NO: 1842

SEQ ID NO: 9720 - protein, 80 aa, Synthetic construct
LVPKTEICEEAEKPLIISERIQKADPQGPELGEACEKGNMLKRQRIKREKKDFRQVIVNDCHLPESFKEEENQKCKKSGG

SEQ ID NO: 9721 - protein, 80 aa, Synthetic construct; identical to SEQ ID NO: 5803

SEQ ID NO: 9722 - protein, 80 aa, Synthetic construct; identical to SEQ ID NO: 5720

SEQ ID NO: 9723 - protein, 80 aa, Synthetic construct; identical to SEQ ID NO: 2364

SEQ ID NO: 9724 - protein, 80 aa, Synthetic construct
KCVNTDLPPKGKNNMGEAFYTVKLERLESCDTVGLSFQEVQKNTYDFECQWKDDEGNYKTVLMLQKENLPGRRAQRDRRA

SEQ ID NO: 9725 - protein, 80 aa, Synthetic construct
GKNNMGEAFYTVKLERLESCDTVGLSFQEVQKNTYDFECQWKDDEGNYKTVLMLQKENLPGRRAQRDRRAAGNRHIENQL

SEQ ID NO: 9726 - protein, 80 aa, Synthetic construct
TVKLERLESCDTVGLSFQEVQKNTYDFECQWKDDEGNYKTVLMLQKENLPGRRAQRDRRAAGNRHIENQLGVSFQSHLPE

SEQ ID NO: 9727 - protein, 80 aa, Synthetic construct; identical to SEQ ID NO: 6080

SEQ ID NO: 9728 - protein, 80 aa, Synthetic construct
SEPGNQAPDHEHGHSEVLLEDVEHLKVKQEPTDIQLQPMVTQLRYESFCLHQFQEQDGESIPENQELASKQEILKEMEHL

SEQ ID NO: 9729 - protein, 80 aa, Synthetic construct
EHGHSEVLLEDVEHLKVKQEPTDIQLQPMVTQLRYESFCLHQFQEQDGESIPENQELASKQEILKEMEHLGDSKLQRDVS

SEQ ID NO: 9730 - protein, 80 aa, Synthetic construct
DVEHLKVKQEPTDIQLQPMVTQLRYESFCLHQFQEQDGESIPENQELASKQEILKEMEHLGDSKLQRDVSLDSKYRETCK

SEQ ID NO: 9731 - protein, 80 aa, Synthetic construct
ATIADIVEDRLLVHFDNWDDSYDYWCDVNSPYVQPVGWCQENGRTLIAPQGYPNPENFSWTEYLEATQTNAVPAKVFKMR

SEQ ID NO: 9732 - protein, 80 aa, Synthetic construct
LLVHFDNWDDSYDYWCDVNSPYVQPVGWCQENGRTLIAPQGYPNPENFSWTEYLEATQTNAVPAKVFKMRLPHGFLPNMK

SEQ ID NO: 9733 - protein, 80 aa, Synthetic construct; identical to SEQ ID NO: 1991

SEQ ID NO: 9734 - protein, 80 aa, Synthetic construct; identical to SEQ ID NO: 1474

SEQ ID NO: 9735 - protein, 80 aa, Synthetic construct
SHNSSSPPPLQNRKSPSPLAFCPCPPVNSISKELPFLLHAFYPGYPLLLPPPHLFTYGALPSDQCPHLLMLPQDPSYPTM

SEQ ID NO: 9736 - protein, 80 aa, Synthetic construct
FYPGYPLLLPPPHLFTYGALPSDQCPHLLMLPQDPSYPTMAMPSLLMMVNELGHPSARWETLLPYPGAFQASGQALPSQA

SEQ ID NO: 9737 - protein, 80 aa, Synthetic construct
PPHLFTYGALPSDQCPHLLMLPQDPSYPTMAMPSLLMMVNELGHPSARWETLLPYPGAFQASGQALPSQARNPGAGAAPT

SEQ ID NO: 9738 - protein, 80 aa, Synthetic construct; identical to SEQ ID NO: 1968

SEQ ID NO: 9739 - protein, 80 aa, Synthetic construct; identical to SEQ ID NO: 5630

SEQ ID NO: 9740 - protein, 80 aa, Synthetic construct
AGPKWLLDVTWQGVEDNKNNCIVYSKGGQLWCTTTKAISEGEELIAFVVDFDSRLQAASQMTLTEGMYPARLLDSIQLLP

SEQ ID NO: 9741 - protein, 80 aa, Synthetic construct
WQGVEDNKNNCIVYSKGGQLWCTTTKAISEGEELIAFVVDFDSRLQAASQMTLTEGMYPARLLDSIQLLPQQAAMASILP

SEQ ID NO: 9742 - protein, 80 aa, Synthetic construct; identical to SEQ ID NO: 5632

SEQ ID NO: 9743 - protein, 80 aa, Synthetic construct; identical to SEQ ID NO: 1903

SEQ ID NO: 9744 - protein, 80 aa, Synthetic construct
QCTKSFSNARALEMHLNSHSGVKMEEFLPPGASLKCTVCSYTADSVINFHQHLFSHLTQAAFRCNHCHFGFQTQRELLQH

SEQ ID NO: 9745 - protein, 80 aa, Synthetic construct
SATEDSLQPATDLLTRSELPQSQKAMQTKDASSDTELDKCEKKTQLFLTNQRPEIQPTTNKQSFSYTKIKSEPSSPRLAS

SEQ ID NO: 9746 - protein, 80 aa, Synthetic construct
TDLLTRSELPQSQKAMQTKDASSDTELDKCEKKTQLFLTNQRPEIQPTTNKQSFSYTKIKSEPSSPRLASSPVQPNIGPS

SEQ ID NO: 9747 - protein, 80 aa, Synthetic construct
QSQKAMQTKDASSDTELDKCEKKTQLFLTNQRPEIQPTTNKQSFSYTKIKSEPSSPRLASSPVQPNIGPSFPVGPFLSQF

SEQ ID NO: 9748 - protein, 80 aa, Synthetic construct
ASSDTELDKCEKKTQLFLTNQRPEIQPTTNKQSFSYTKIKSEPSSPRLASSPVQPNIGPSFPVGPFLSQFSFPQDITMVP

SEQ ID NO: 9749 - protein, 80 aa, Synthetic construct
EKKTQLFLTNQRPEIQPTTNKQSFSYTKIKSEPSSPRLASSPVQPNIGPSFPVGPFLSQFSFPQDITMVPQASEILAKMS

SEQ ID NO: 9750 - protein, 80 aa, Synthetic construct
QRPEIQPTTNKQSFSYTKIKSEPSSPRLASSPVQPNIGPSFPVGPFLSQFSFPQDITMVPQASEILAKMSELVHRRLRHG

SEQ ID NO: 9751 - protein, 80 aa, Synthetic construct
KQSFSYTKIKSEPSSPRLASSPVQPNIGPSFPVGPFLSQFSFPQDITMVPQASEILAKMSELVHRRLRHGSSSYPPVIYS

SEQ ID NO: 9752 - protein, 80 aa, Synthetic construct; identical to SEQ ID NO: 4483

SEQ ID NO: 9753 - protein, 80 aa, Synthetic construct
APPPELPEWLRDLPREVCLCTSTVPGLAYGICAAQRIQQGTWIGPFQGVLLPPEKVQAGAVRNTQHLWEIYDQDGTLQHF

SEQ ID NO: 9754 - protein, 80 aa, Synthetic construct; identical to SEQ ID NO: 4485

SEQ ID NO: 9755 - protein, 80 aa, Synthetic construct; identical to SEQ ID NO: 3633

SEQ ID NO: 9756 - protein, 80 aa, Synthetic construct; identical to SEQ ID NO: 5817

SEQ ID NO: 9757 - protein, 80 aa, Synthetic construct
ANGPTSCLPPSRPINNMTATYNQLSRSTSGPRPGCQPSSPCVPKLSNSDSQDIQGRNRDSQNGAIAPGHVSVIRPPQNLY

SEQ ID NO: 9758 - protein, 80 aa, Synthetic construct
SRPINNMTATYNQLSRSTSGPRPGCQPSSPCVPKLSNSDSQDIQGRNRDSQNGAIAPGHVSVIRPPQNLYPENIVPSFSP

SEQ ID NO: 9759 - protein, 80 aa, Synthetic construct; identical to SEQ ID NO: 1475

SEQ ID NO: 9760 - protein, 80 aa, Synthetic construct; identical to SEQ ID NO: 1476

SEQ ID NO: 9761 - protein, 80 aa, Synthetic construct; identical to SEQ ID NO: 2081

SEQ ID NO: 9762 - protein, 80 aa, Synthetic construct; identical to SEQ ID NO: 1477

SEQ ID NO: 9763 - protein, 80 aa, Synthetic construct
QNGAIAPGHVSVIRPPQNLYPENIVPSFSPGPSGRYGASGRSEGGRNSRVTPAAANYRSRTAKAKPSKQQGAGDAEEEEE

SEQ ID NO: 9764 - protein, 80 aa, Synthetic construct
NGAIAPGHVSVIRPPQNLYPENIVPSFSPGPSGRYGASGRSEGGRNSRVTPAAANYRSRTAKAKPSKQQGAGDAEEEEEE

SEQ ID NO: 9765 - protein, 80 aa, Synthetic construct
YTSEEKCNQRTQKRKIYNVCPRKGKKIFIHMHEIIQIDGHIYQCLECKQNFCENLALIMCERTHTGEKPYKCDMCEKTFV

SEQ ID NO: 9766 - protein, 80 aa, Synthetic construct
TQKRKIYNVCPRKGKKIFIHMHEIIQIDGHIYQCLECKQNFCENLALIMCERTHTGEKPYKCDMCEKTFVQSSDLTSHQR

SEQ ID NO: 9767 - protein, 80 aa, Synthetic construct
DPGVLQPVPLGGRGGQYDGSAGVDTGAVEPLGSIAIEPGAALNPLGTKPEPEEGENECRLLKKVKSEKMESPVSTPAVLP

SEQ ID NO: 9768 - protein, 80 aa, Synthetic construct
GGRGGQYDGSAGVDTGAVEPLGSIAIEPGAALNPLGTKPEPEEGENECRLLKKVKSEKMESPVSTPAVLPIHLLVPVVNN

SEQ ID NO: 9769 - protein, 80 aa, Synthetic construct
AGVDTGAVEPLGSIAIEPGAALNPLGTKPEPEEGENECRLLKKVKSEKMESPVSTPAVLPIHLLVPVVNNDISSPCEQIM

SEQ ID NO: 9770 - protein, 80 aa, Synthetic construct
LGSIAIEPGAALNPLGTKPEPEEGENECRLLKKVKSEKMESPVSTPAVLPIHLLVPVVNNDISSPCEQIMVRTRSVGVNT

SEQ ID NO: 9771 - protein, 80 aa, Synthetic construct
ALNPLGTKPEPEEGENECRLLKKVKSEKMESPVSTPAVLPIHLLVPVVNNDISSPCEQIMVRTRSVGVNTCDVALATEPE

SEQ ID NO: 9772 - protein, 80 aa, Synthetic construct
PEEGENECRLLKKVKSEKMESPVSTPAVLPIHLLVPVVNNDISSPCEQIMVRTRSVGVNTCDVALATEPECLGPCEPGTS

SEQ ID NO: 9773 - protein, 80 aa, Synthetic construct
LKKVKSEKMESPVSTPAVLPIHLLVPVVNNDISSPCEQIMVRTRSVGVNTCDVALATEPECLGPCEPGTSVNLEGIVWQE

SEQ ID NO: 9774 - protein, 80 aa, Synthetic construct
IHLLVPVVNNDISSPCEQIMVRTRSVGVNTCDVALATEPECLGPCEPGTSVNLEGIVWQETEDGMLVVNVTWRNKTYVGT

SEQ ID NO: 9775 - protein, 80 aa, Synthetic construct; identical to SEQ ID NO: 1792

SEQ ID NO: 9776 - protein, 80 aa, Synthetic construct; identical to SEQ ID NO: 5945

SEQ ID NO: 9777 - protein, 80 aa, Synthetic construct; identical to SEQ ID NO: 5946

SEQ ID NO: 9778 - protein, 80 aa, Synthetic construct; identical to SEQ ID NO: 1793

SEQ ID NO: 9779 - protein, 80 aa, Synthetic construct; identical to SEQ ID NO: 6078

SEQ ID NO: 9780 - protein, 80 aa, Synthetic construct; identical to SEQ ID NO: 4464

SEQ ID NO: 9781 - protein, 80 aa, Synthetic construct; identical to SEQ ID NO: 1478

SEQ ID NO: 9782 - protein, 80 aa, Synthetic construct; identical to SEQ ID NO: 1479

SEQ ID NO: 9783 - protein, 80 aa, Synthetic construct
VENEDYREKSSDDDEMDSSLVSQQPPDNQEKERLNTSIPQKRKMRNLLVTIENDTPLEELSKYVDISIIALTRNRRTRRW

SEQ ID NO: 9784 - protein, 80 aa, Synthetic construct; identical to SEQ ID NO: 1480

SEQ ID NO: 9785 - protein, 80 aa, Synthetic construct; identical to SEQ ID NO: 1481

SEQ ID NO: 9786 - protein, 80 aa, Synthetic construct; identical to SEQ ID NO: 1749

SEQ ID NO: 9787 - protein, 80 aa, Synthetic construct; identical to SEQ ID NO: 1482

SEQ ID NO: 9788 - protein, 80 aa, Synthetic construct; identical to SEQ ID NO: 1914

SEQ ID NO: 9789 - protein, 80 aa, Synthetic construct
YLDGVPSSFQFFLPLGSGGALHLPASSFLTPPKDKCLSPDLPLPKQLVCRWAKCNQLFELLQDLVDHVNDYHVKPEKDAG

SEQ ID NO: 9790 - protein, 80 aa, Synthetic construct
FFLPLGSGGALHLPASSFLTPPKDKCLSPDLPLPKQLVCRWAKCNQLFELLQDLVDHVNDYHVKPEKDAGYCCHWEGCAR

SEQ ID NO: 9791 - protein, 80 aa, Synthetic construct
LHLPASSFLTPPKDKCLSPDLPLPKQLVCRWAKCNQLFELLQDLVDHVNDYHVKPEKDAGYCCHWEGCARHGRGFNARYK

SEQ ID NO: 9792 - protein, 80 aa, Synthetic construct; identical to SEQ ID NO: 1931

SEQ ID NO: 9793 - protein, 80 aa, Synthetic construct
WAKCNQLFELLQDLVDHVNDYHVKPEKDAGYCCHWEGCARHGRGFNARYKMLIHIRTHTNEKPHRCPTCSKSFSRLENLK

SEQ ID NO: 9794 - protein, 80 aa, Synthetic construct
LQDLVDHVNDYHVKPEKDAGYCCHWEGCARHGRGFNARYKMLIHIRTHTNEKPHRCPTCSKSFSRLENLKIHNRSHTGEK

SEQ ID NO: 9795 - protein, 80 aa, Synthetic construct
CEKPVLPLPTQPSFEEGGDPTLGPARLPTDLSDSSSLCLCHEDPWEDEDPAGLPESFLLDGFLNSRVPGIDPWAPGLSLW

SEQ ID NO: 9796 - protein, 80 aa, Synthetic construct; identical to SEQ ID NO: 716

SEQ ID NO: 9797 - protein, 80 aa, Synthetic construct; identical to SEQ ID NO: 5854

SEQ ID NO: 9798 - protein, 80 aa, Synthetic construct; identical to SEQ ID NO: 2128

SEQ ID NO: 9799 - protein, 80 aa, Synthetic construct; identical to SEQ ID NO: 1826

SEQ ID NO: 9800 - protein, 80 aa, Synthetic construct; identical to SEQ ID NO: 1483

SEQ ID NO: 9801 - protein, 80 aa, Synthetic construct; identical to SEQ ID NO: 1484

SEQ ID NO: 9802 - protein, 80 aa, Synthetic construct; identical to SEQ ID NO: 1721

SEQ ID NO: 9803 - protein, 80 aa, Synthetic construct
EFPSSTGAEGQTGHPAEKLSDLHNKEHSGGGKRALAPDLMPLDLSARSTRDDPSNKETASSLQAALVVHPCPYCSHKTYY

SEQ ID NO: 9804 - protein, 80 aa, Synthetic construct; identical to SEQ ID NO: 1485

SEQ ID NO: 9805 - protein, 80 aa, Synthetic construct; identical to SEQ ID NO: 1722

SEQ ID NO: 9806 - protein, 80 aa, Synthetic construct
GKRALAPDLMPLDLSARSTRDDPSNKETASSLQAALVVHPCPYCSHKTYYPEVLWMHKRIWHRVSCNSVAPPWIQPNGYK

SEQ ID NO: 9807 - protein, 80 aa, Synthetic construct
PEVLWMHKRIWHRVSCNSVAPPWIQPNGYKSIRSNLVFLSRSGRTGPPPALGGKECQPLLLARFTRTQVPGGMPGSKSGS

SEQ ID NO: 9808 - protein, 80 aa, Synthetic construct; identical to SEQ ID NO: 1723

SEQ ID NO: 9809 - protein, 80 aa, Synthetic construct; identical to SEQ ID NO: 1486

SEQ ID NO: 9810 - protein, 80 aa, Synthetic construct; identical to SEQ ID NO: 1487

SEQ ID NO: 9811 - protein, 80 aa, Synthetic construct; identical to SEQ ID NO: 5875

SEQ ID NO: 9812 - protein, 80 aa, Synthetic construct
PPSKAAQELRTLATCAAGSRGDAALQAQPGVAGAPPVLHSIKQEPVAEGHEKRLDILNIFKTYIPKDFATLYQGWGVSGP

SEQ ID NO: 9813 - protein, 80 aa, Synthetic construct
TLATCAAGSRGDAALQAQPGVAGAPPVLHSIKQEPVAEGHEKRLDILNIFKTYIPKDFATLYQGWGVSGPGLEHRGTLRT

SEQ ID NO: 9814 - protein, 80 aa, Synthetic construct
GDAALQAQPGVAGAPPVLHSIKQEPVAEGHEKRLDILNIFKTYIPKDFATLYQGWGVSGPGLEHRGTLRTQARPGEFVCI

SEQ ID NO: 9815 - protein, 80 aa, Synthetic construct
VAGAPPVLHSIKQEPVAEGHEKRLDILNIFKTYIPKDFATLYQGWGVSGPGLEHRGTLRTQARPGEFVCIECGKSFHQPG

SEQ ID NO: 9816 - protein, 80 aa, Synthetic construct; identical to SEQ ID NO: 3393

SEQ ID NO: 9817 - protein, 80 aa, Synthetic construct; identical to SEQ ID NO: 3394

SEQ ID NO: 9818 - protein, 80 aa, Synthetic construct; identical to SEQ ID NO: 5721

SEQ ID NO: 9819 - protein, 80 aa, Synthetic construct; identical to SEQ ID NO: 5722

SEQ ID NO: 9820 - protein, 80 aa, Synthetic construct; identical to SEQ ID NO: 1924

SEQ ID NO: 9821 - protein, 80 aa, Synthetic construct; identical to SEQ ID NO: 1488

SEQ ID NO: 9822 - protein, 80 aa, Synthetic construct
CGWCQKTPADGGSVDLPPVGHDELSRGTRNYKKTLLLRHHVSTEHKLHEANAQESEIPSEEGYCDFNSRPNENSYCYQLL

SEQ ID NO: 9823 - protein, 80 aa, Synthetic construct
GGSVDLPPVGHDELSRGTRNYKKTLLLRHHVSTEHKLHEANAQESEIPSEEGYCDFNSRPNENSYCYQLLRQLNEQRKKG

SEQ ID NO: 9824 - protein, 80 aa, Synthetic construct
VASYLQMSEVVQTCRNFIKDALNISIKSEAPESVVVDYNNRKPVNRDGLSSSRDQKIASFWATRNLTNLASNVKIENDGC

SEQ ID NO: 9825 - protein, 80 aa, Synthetic construct
VQTCRNFIKDALNISIKSEAPESVVVDYNNRKPVNRDGLSSSRDQKIASFWATRNLTNLASNVKIENDGCNVDEGQIENY

SEQ ID NO: 9826 - protein, 80 aa, Synthetic construct
PESVVVDYNNRKPVNRDGLSSSRDQKIASFWATRNLTNLASNVKIENDGCNVDEGQIENYQMNDSSWVQDGSPEMAENES

SEQ ID NO: 9827 - protein, 80 aa, Synthetic construct
RKPVNRDGLSSSRDQKIASFWATRNLTNLASNVKIENDGCNVDEGQIENYQMNDSSWVQDGSPEMAENESEGQTKVFIWN

SEQ ID NO: 9828 - protein, 80 aa, Synthetic construct
SSRDQKIASFWATRNLTNLASNVKIENDGCNVDEGQIENYQMNDSSWVQDGSPEMAENESEGQTKVFIWNNMGSQGIQET

SEQ ID NO: 9829 - protein, 80 aa, Synthetic construct
WATRNLTNLASNVKIENDGCNVDEGQIENYQMNDSSWVQDGSPEMAENESEGQTKVFIWNNMGSQGIQETGKTRRKNQTT

SEQ ID NO: 9830 - protein, 80 aa, Synthetic construct
EGQTKVFIWNNMGSQGIQETGKTRRKNQTTKRFIYNIPPNNETNLEDCSVMQPPVAYPEENTLLIKEEPDLDGALLSGPD

SEQ ID NO: 9831 - protein, 80 aa, Synthetic construct
NMGSQGIQETGKTRRKNQTTKRFIYNIPPNNETNLEDCSVMQPPVAYPEENTLLIKEEPDLDGALLSGPDGDRNVNANLL

SEQ ID NO: 9832 - protein, 80 aa, Synthetic construct
GKTRRKNQTTKRFIYNIPPNNETNLEDCSVMQPPVAYPEENTLLIKEEPDLDGALLSGPDGDRNVNANLLAEAGTSQDGG

SEQ ID NO: 9833 - protein, 80 aa, Synthetic construct
NETNLEDCSVMQPPVAYPEENTLLIKEEPDLDGALLSGPDGDRNVNANLLAEAGTSQDGGDAGTSHDFKYGLMPGPSNDF

SEQ ID NO: 9834 - protein, 80 aa, Synthetic construct; identical to SEQ ID NO: 1925

SEQ ID NO: 9835 - protein, 80 aa, Synthetic construct
NTLLIKEEPDLDGALLSGPDGDRNVNANLLAEAGTSQDGGDAGTSHDFKYGLMPGPSNDFKYGLIPGTSNDFKYGLIPGA

SEQ ID NO: 9836 - protein, 80 aa, Synthetic construct
DAGTSHDFKYGLMPGPSNDFKYGLIPGTSNDFKYGLIPGASNDFKYGLLPESWPKQETWENGESSLIMNKLKCPHCSYVA

SEQ ID NO: 9837 - protein, 80 aa, Synthetic construct
GLMPGPSNDFKYGLIPGTSNDFKYGLIPGASNDFKYGLLPESWPKQETWENGESSLIMNKLKCPHCSYVAKYRRTLKRHL

SEQ ID NO: 9838 - protein, 80 aa, Synthetic construct
DFKYGLIPGASNDFKYGLLPESWPKQETWENGESSLIMNKLKCPHCSYVAKYRRTLKRHLLIHTGVRSFSCDICGKLFTR

SEQ ID NO: 9839 - protein, 80 aa, Synthetic construct
SNDFKYGLLPESWPKQETWENGESSLIMNKLKCPHCSYVAKYRRTLKRHLLIHTGVRSFSCDICGKLFTRREHVKRHSLV

SEQ ID NO: 9840 - protein, 80 aa, Synthetic construct; identical to SEQ ID NO: 1889

SEQ ID NO: 9841 - protein, 80 aa, Synthetic construct
LELTPVQPELQLELVPAAGGGGAAVPGAPAAVVVAPPGYVVVQELMVLPAVAAPAVVAIPGPAGSAALTPARQRRRRRAR

SEQ ID NO: 9842 - protein, 80 aa, Synthetic construct; identical to SEQ ID NO: 1489

SEQ ID NO: 9843 - protein, 80 aa, Synthetic construct; identical to SEQ ID NO: 1906

SEQ ID NO: 9844 - protein, 80 aa, Synthetic construct
RFAGCYDQHNLVACQINDQIFYRVVADIAPGEELLLFMKSEDYPHETMAPDIHEERQYRCEDCDQLFESKAELADHQKFP

SEQ ID NO: 9845 - protein, 80 aa, Synthetic construct
QDKKVGALPYPSMFPLPFFPAFSQSMYPFPDRDLRSLPLKMEPQSPGEVKKLQKGSSESPFDLTTKRKDEKPLTPVPSKP

SEQ ID NO: 9846 - protein, 80 aa, Synthetic construct
AFSQSMYPFPDRDLRSLPLKMEPQSPGEVKKLQKGSSESPFDLTTKRKDEKPLTPVPSKPPVTPATSQDQPLDLSMGSRS

SEQ ID NO: 9847 - protein, 80 aa, Synthetic construct; identical to SEQ ID NO: 2142

SEQ ID NO: 9848 - protein, 80 aa, Synthetic construct; identical to SEQ ID NO: 1490

SEQ ID NO: 9849 - protein, 80 aa, Synthetic construct; identical to SEQ ID NO: 1491

SEQ ID NO: 9850 - protein, 80 aa, Synthetic construct
FDLTTKRKDEKPLTPVPSKPPVTPATSQDQPLDLSMGSRSRASGTKLTEPRKNHVFGGKKGSNVESRPASDGSLQHARPT

SEQ ID NO: 9851 - protein, 80 aa, Synthetic construct
KPLTPVPSKPPVTPATSQDQPLDLSMGSRSRASGTKLTEPRKNHVFGGKKGSNVESRPASDGSLQHARPTPFFMDPIYRV

SEQ ID NO: 9852 - protein, 80 aa, Synthetic construct
EVQLNSEGGSMQVFKQVTASVRNRDPPEIEYRSNMTSPTLLDANPMENPALFNDIKIEPPEELLASDFSLPQVEPVDLSF

SEQ ID NO: 9853 - protein, 80 aa, Synthetic construct
MQVFKQVTASVRNRDPPEIEYRSNMTSPTLLDANPMENPALFNDIKIEPPEELLASDFSLPQVEPVDLSFHKPKAPLQPA

SEQ ID NO: 9854 - protein, 80 aa, Synthetic construct; identical to SEQ ID NO: 1492

SEQ ID NO: 9855 - protein, 80 aa, Synthetic construct; identical to SEQ ID NO: 1493

SEQ ID NO: 9856 - protein, 80 aa, Synthetic construct
LDANPMENPALFNDIKIEPPEELLASDFSLPQVEPVDLSFHKPKAPLQPASMLQAPIRPPKPQSSPQTLVVSTSTSDMST

SEQ ID NO: 9857 - protein, 80 aa, Synthetic construct; identical to SEQ ID NO: 1730

SEQ ID NO: 9858 - protein, 80 aa, Synthetic construct; identical to SEQ ID NO: 3719

SEQ ID NO: 9859 - protein, 80 aa, Synthetic construct; identical to SEQ ID NO: 5899

SEQ ID NO: 9860 - protein, 80 aa, Synthetic construct
SSQNKPTSESAVSSTGDPMHNKRSKIKPDEDLPSPGARGQQEQPEGTTLVKEEGDKDESKQEPEVIYETNCHWEGCAREF

SEQ ID NO: 9861 - protein, 80 aa, Synthetic construct
AVSSTGDPMHNKRSKIKPDEDLPSPGARGQQEQPEGTTLVKEEGDKDESKQEPEVIYETNCHWEGCAREFDTQEQLVHHI

SEQ ID NO: 9862 - protein, 80 aa, Synthetic construct
NKRSKIKPDEDLPSPGARGQQEQPEGTTLVKEEGDKDESKQEPEVIYETNCHWEGCAREFDTQEQLVHHINNDHIHGEKK

SEQ ID NO: 9863 - protein, 80 aa, Synthetic construct
DLPSPGARGQQEQPEGTTLVKEEGDKDESKQEPEVIYETNCHWEGCAREFDTQEQLVHHINNDHIHGEKKEFVCRWLDCS

SEQ ID NO: 9864 - protein, 80 aa, Synthetic construct
QEQPEGTTLVKEEGDKDESKQEPEVIYETNCHWEGCAREFDTQEQLVHHINNDHIHGEKKEFVCRWLDCSREQKPFKAQY

SEQ ID NO: 9865 - protein, 80 aa, Synthetic construct; identical to SEQ ID NO: 3306

SEQ ID NO: 9866 - protein, 80 aa, Synthetic construct
QFHALEQPCPEGSKTDLPIQWNEVSSGSADLSSSKLKCGPRPAVPQTRAFGFCNGMVVHPQNPLRSGPAGGYQTLGENSN

SEQ ID NO: 9867 - protein, 80 aa, Synthetic construct
EGSKTDLPIQWNEVSSGSADLSSSKLKCGPRPAVPQTRAFGFCNGMVVHPQNPLRSGPAGGYQTLGENSNPYGGPEHLML

SEQ ID NO: 9868 - protein, 80 aa, Synthetic construct
ELQIVHETGYFSALPSLEEYWQQTCLELERYLQSEPCYVSASEIKFDSQEDLWTKIILAREKKEESELKISSSPPEDTLI

SEQ ID NO: 9869 - protein, 80 aa, Synthetic construct
FSALPSLEEYWQQTCLELERYLQSEPCYVSASEIKFDSQEDLWTKIILAREKKEESELKISSSPPEDTLISPSFCYNLET

SEQ ID NO: 9870 - protein, 80 aa, Synthetic construct
WQQTCLELERYLQSEPCYVSASEIKFDSQEDLWTKIILAREKKEESELKISSSPPEDTLISPSFCYNLETNSLNSDVSSE

SEQ ID NO: 9871 - protein, 80 aa, Synthetic construct
HQCPLCPFRCARKDNLKSHMKVHQHQDRGETFQCQLCPFTSSRHFSLKLHMRCHQHFLRTEAKVKEEIPDPDVKGSPHLS

SEQ ID NO: 9872 - protein, 80 aa, Synthetic construct
ARKDNLKSHMKVHQHQDRGETFQCQLCPFTSSRHFSLKLHMRCHQHFLRTEAKVKEEIPDPDVKGSPHLSDSACLGQQRE

SEQ ID NO: 9873 - protein, 80 aa, Synthetic construct
TFQCQLCPFTSSRHFSLKLHMRCHQHFLRTEAKVKEEIPDPDVKGSPHLSDSACLGQQREGGGTELVGTMMTSNTPERTS

SEQ ID NO: 9874 - protein, 80 aa, Synthetic construct
SSRHFSLKLHMRCHQHFLRTEAKVKEEIPDPDVKGSPHLSDSACLGQQREGGGTELVGTMMTSNTPERTSQGGAGVSPLL

SEQ ID NO: 9875 - protein, 80 aa, Synthetic construct; identical to SEQ ID NO: 1863

SEQ ID NO: 9876 - protein, 80 aa, Synthetic construct
EAKVKEEIPDPDVKGSPHLSDSACLGQQREGGGTELVGTMMTSNTPERTSQGGAGVSPLLVKEEPKEDNGLPTSFTLNAA

SEQ ID NO: 9877 - protein, 80 aa, Synthetic construct
PDVKGSPHLSDSACLGQQREGGGTELVGTMMTSNTPERTSQGGAGVSPLLVKEEPKEDNGLPTSFTLNAADRPANHTKLK

SEQ ID NO: 9878 - protein, 80 aa, Synthetic construct
DSACLGQQREGGGTELVGTMMTSNTPERTSQGGAGVSPLLVKEEPKEDNGLPTSFTLNAADRPANHTKLKDPSEYVANSA

SEQ ID NO: 9879 - protein, 80 aa, Synthetic construct
GGGTELVGTMMTSNTPERTSQGGAGVSPLLVKEEPKEDNGLPTSFTLNAADRPANHTKLKDPSEYVANSASALFSQDISV

SEQ ID NO: 9880 - protein, 80 aa, Synthetic construct
MTSNTPERTSQGGAGVSPLLVKEEPKEDNGLPTSFTLNAADRPANHTKLKDPSEYVANSASALFSQDISVKMASDFLMKL

SEQ ID NO: 9881 - protein, 80 aa, Synthetic construct
QGGAGVSPLLVKEEPKEDNGLPTSFTLNAADRPANHTKLKDPSEYVANSASALFSQDISVKMASDFLMKLSAANQKEPMN

SEQ ID NO: 9882 - protein, 80 aa, Synthetic construct
VKEEPKEDNGLPTSFTLNAADRPANHTKLKDPSEYVANSASALFSQDISVKMASDFLMKLSAANQKEPMNLNFKVKEEPK

SEQ ID NO: 9883 - protein, 80 aa, Synthetic construct
LPTSFTLNAADRPANHTKLKDPSEYVANSASALFSQDISVKMASDFLMKLSAANQKEPMNLNFKVKEEPKEGESLSTTLP

SEQ ID NO: 9884 - protein, 80 aa, Synthetic construct
DRPANHTKLKDPSEYVANSASALFSQDISVKMASDFLMKLSAANQKEPMNLNFKVKEEPKEGESLSTTLPRSSYVFSPES

SEQ ID NO: 9885 - protein, 80 aa, Synthetic construct
DPSEYVANSASALFSQDISVKMASDFLMKLSAANQKEPMNLNFKVKEEPKEGESLSTTLPRSSYVFSPESEVSAPGVSED

SEQ ID NO: 9886 - protein, 80 aa, Synthetic construct
SALFSQDISVKMASDFLMKLSAANQKEPMNLNFKVKEEPKEGESLSTTLPRSSYVFSPESEVSAPGVSEDALKPQEGKGS

SEQ ID NO: 9887 - protein, 80 aa, Synthetic construct
KMASDFLMKLSAANQKEPMNLNFKVKEEPKEGESLSTTLPRSSYVFSPESEVSAPGVSEDALKPQEGKGSVLRRDVSVKA

SEQ ID NO: 9888 - protein, 80 aa, Synthetic construct
SAANQKEPMNLNFKVKEEPKEGESLSTTLPRSSYVFSPESEVSAPGVSEDALKPQEGKGSVLRRDVSVKAASELLMKLSA

SEQ ID NO: 9889 - protein, 80 aa, Synthetic construct
LNFKVKEEPKEGESLSTTLPRSSYVFSPESEVSAPGVSEDALKPQEGKGSVLRRDVSVKAASELLMKLSAESYKETQMVK

SEQ ID NO: 9890 - protein, 80 aa, Synthetic construct
EGESLSTTLPRSSYVFSPESEVSAPGVSEDALKPQEGKGSVLRRDVSVKAASELLMKLSAESYKETQMVKIKEEPMEVDI

SEQ ID NO: 9891 - protein, 80 aa, Synthetic construct
RSSYVFSPESEVSAPGVSEDALKPQEGKGSVLRRDVSVKAASELLMKLSAESYKETQMVKIKEEPMEVDIQDSHVSISPS

SEQ ID NO: 9892 - protein, 80 aa, Synthetic construct; identical to SEQ ID NO: 1864

SEQ ID NO: 9893 - protein, 80 aa, Synthetic construct
ALKPQEGKGSVLRRDVSVKAASELLMKLSAESYKETQMVKIKEEPMEVDIQDSHVSISPSRNVGYSTLIGREKTEPLQKM

SEQ ID NO: 9894 - protein, 80 aa, Synthetic construct
VLRRDVSVKAASELLMKLSAESYKETQMVKIKEEPMEVDIQDSHVSISPSRNVGYSTLIGREKTEPLQKMPEGRVPPERN

SEQ ID NO: 9895 - protein, 80 aa, Synthetic construct
ESYKETQMVKIKEEPMEVDIQDSHVSISPSRNVGYSTLIGREKTEPLQKMPEGRVPPERNLFSQDISVKMASELLFQLSE

SEQ ID NO: 9896 - protein, 80 aa, Synthetic construct
IKEEPMEVDIQDSHVSISPSRNVGYSTLIGREKTEPLQKMPEGRVPPERNLFSQDISVKMASELLFQLSEKVSKEHNHTK

SEQ ID NO: 9897 - protein, 80 aa, Synthetic construct; identical to SEQ ID NO: 1865

SEQ ID NO: 9898 - protein, 80 aa, Synthetic construct; identical to SEQ ID NO: 5511

SEQ ID NO: 9899 - protein, 80 aa, Synthetic construct; identical to SEQ ID NO: 5512

SEQ ID NO: 9900 - protein, 80 aa, Synthetic construct
GPYVFCITEKGVVKEEKNEKRHEEPAITNGPRITNAFSIIETENSNNMFSPLDLRASFKKVSDSMRTASLCLERTDVCHE

SEQ ID NO: 9901 - protein, 80 aa, Synthetic construct
GVVKEEKNEKRHEEPAITNGPRITNAFSIIETENSNNMFSPLDLRASFKKVSDSMRTASLCLERTDVCHEAEPVRTLAEH

SEQ ID NO: 9902 - protein, 80 aa, Synthetic construct; identical to SEQ ID NO: 1494

SEQ ID NO: 9903 - protein, 80 aa, Synthetic construct
FTGPEPLLSENRIGEFSSTGSTLPDTDHMVKFVNGQMLYSCVVCKRSYVTLSSLRRHANVHSWRRTYPCHYCNKVFALAE

SEQ ID NO: 9904 - protein, 80 aa, Synthetic construct; identical to SEQ ID NO: 1806

SEQ ID NO: 9905 - protein, 80 aa, Synthetic construct
STLPDTDHMVKFVNGQMLYSCVVCKRSYVTLSSLRRHANVHSWRRTYPCHYCNKVFALAEYRTRHEIWHTGERRYQCIFC

SEQ ID NO: 9906 - protein, 80 aa, Synthetic construct; identical to SEQ ID NO: 1495

SEQ ID NO: 9907 - protein, 80 aa, Synthetic construct; identical to SEQ ID NO: 1496

SEQ ID NO: 9908 - protein, 80 aa, Synthetic construct; identical to SEQ ID NO: 1497

SEQ ID NO: 9909 - protein, 80 aa, Synthetic construct; identical to SEQ ID NO: 1498

SEQ ID NO: 9910 - protein, 80 aa, Synthetic construct; identical to SEQ ID NO: 1499

SEQ ID NO: 9911 - protein, 80 aa, Synthetic construct; identical to SEQ ID NO: 1500

SEQ ID NO: 9912 - protein, 80 aa, Synthetic construct; identical to SEQ ID NO: 1807

SEQ ID NO: 9913 - protein, 80 aa, Synthetic construct; identical to SEQ ID NO: 2275

SEQ ID NO: 9914 - protein, 80 aa, Synthetic construct; identical to SEQ ID NO: 1501

SEQ ID NO: 9915 - protein, 80 aa, Synthetic construct; identical to SEQ ID NO: 1502

SEQ ID NO: 9916 - protein, 80 aa, Synthetic construct; identical to SEQ ID NO: 2177

SEQ ID NO: 9917 - protein, 80 aa, Synthetic construct; identical to SEQ ID NO: 1503

SEQ ID NO: 9918 - protein, 80 aa, Synthetic construct; identical to SEQ ID NO: 1859

SEQ ID NO: 9919 - protein, 80 aa, Synthetic construct
VDSSLAFPWTFPFGIDRRIQPEKVKQAENTRTLELPGPSETGRRMADYVTCESTKTTLPLGTEEDVRVKVERLSDEEVHE

SEQ ID NO: 9920 - protein, 80 aa, Synthetic construct
FPFGIDRRIQPEKVKQAENTRTLELPGPSETGRRMADYVTCESTKTTLPLGTEEDVRVKVERLSDEEVHEEVSQPVSASQ

SEQ ID NO: 9921 - protein, 80 aa, Synthetic construct
PEKVKQAENTRTLELPGPSETGRRMADYVTCESTKTTLPLGTEEDVRVKVERLSDEEVHEEVSQPVSASQSSLSDQQTVP

SEQ ID NO: 9922 - protein, 80 aa, Synthetic construct
RTLELPGPSETGRRMADYVTCESTKTTLPLGTEEDVRVKVERLSDEEVHEEVSQPVSASQSSLSDQQTVPGSEQVQEDLL

SEQ ID NO: 9923 - protein, 80 aa, Synthetic construct
TGRRMADYVTCESTKTTLPLGTEEDVRVKVERLSDEEVHEEVSQPVSASQSSLSDQQTVPGSEQVQEDLLISPQSSSIGS

SEQ ID NO: 9924 - protein, 80 aa, Synthetic construct
CESTKTTLPLGTEEDVRVKVERLSDEEVHEEVSQPVSASQSSLSDQQTVPGSEQVQEDLLISPQSSSIGSVDEGVSEGLP

SEQ ID NO: 9925 - protein, 80 aa, Synthetic construct
GTEEDVRVKVERLSDEEVHEEVSQPVSASQSSLSDQQTVPGSEQVQEDLLISPQSSSIGSVDEGVSEGLPTLQSTSSTNA

SEQ ID NO: 9926 - protein, 80 aa, Synthetic construct
LLTMKVEAKSHLQWQESRLKRSNPLAREIFRRHFRQLCYQETPGPREALTRLQELCYQWLRPHVSTKEQILDLLVLEQFL

SEQ ID NO: 9927 - protein, 80 aa, Synthetic construct
RSNPLAREIFRRHFRQLCYQETPGPREALTRLQELCYQWLRPHVSTKEQILDLLVLEQFLSILPKELQGWVREHCPESGE

SEQ ID NO: 9928 - protein, 80 aa, Synthetic construct; identical to SEQ ID NO: 3777

SEQ ID NO: 9929 - protein, 80 aa, Synthetic construct
VFPPAYWTSPPGCPTVFSEKTGMPFRLKDPVKVEGLQFCENCCQYGNVDECLSGGNYCSQNCARHIKDKDQKEERDVEED

SEQ ID NO: 9930 - protein, 80 aa, Synthetic construct
PGCPTVFSEKTGMPFRLKDPVKVEGLQFCENCCQYGNVDECLSGGNYCSQNCARHIKDKDQKEERDVEEDNEEEDPKCSR

SEQ ID NO: 9931 - protein, 80 aa, Synthetic construct
TGMPFRLKDPVKVEGLQFCENCCQYGNVDECLSGGNYCSQNCARHIKDKDQKEERDVEEDNEEEDPKCSRKKKPKLSLKA

SEQ ID NO: 9932 - protein, 80 aa, Synthetic construct
KAVAVPAKLFKEHQSFPYNKNGFKVGMKLEGVDPEHQSVYCVLTVAEVCGYRIKLHFDGYSDCYDFWVNADALDIHPVGW

SEQ ID NO: 9933 - protein, 80 aa, Synthetic construct
KEHQSFPYNKNGFKVGMKLEGVDPEHQSVYCVLTVAEVCGYRIKLHFDGYSDCYDFWVNADALDIHPVGWCEKTGHKLHP

SEQ ID NO: 9934 - protein, 80 aa, Synthetic construct
NGFKVGMKLEGVDPEHQSVYCVLTVAEVCGYRIKLHFDGYSDCYDFWVNADALDIHPVGWCEKTGHKLHPPKGYKEEEFN

SEQ ID NO: 9935 - protein, 80 aa, Synthetic construct
PKGYKEEEFNWQTYLKTCKAQAAPKSLFENQNITVIPSGFRVGMKLEAVDKKNPSFICVATVTDMVDNRFLVHFDNWDES

SEQ ID NO: 9936 - protein, 80 aa, Synthetic construct
VFLSFKSPIPCLPLRWEQQSKLLPTVAGIPASKVSKWSTDEVSEFIQSLPGCEEHGKVFKDEQIDGEAFLLMTQTDIVKI

SEQ ID NO: 9937 - protein, 80 aa, Synthetic construct
CLPLRWEQQSKLLPTVAGIPASKVSKWSTDEVSEFIQSLPGCEEHGKVFKDEQIDGEAFLLMTQTDIVKIMSIKLGPALK

SEQ ID NO: 9938 - protein, 80 aa, Synthetic construct; identical to SEQ ID NO: 2171

SEQ ID NO: 9939 - protein, 80 aa, Synthetic construct; identical to SEQ ID NO: 1504

SEQ ID NO: 9940 - protein, 80 aa, Synthetic construct; identical to SEQ ID NO: 1505

SEQ ID NO: 9941 - protein, 80 aa, Synthetic construct; identical to SEQ ID NO: 1506

SEQ ID NO: 9942 - protein, 80 aa, Synthetic construct; identical to SEQ ID NO: 1776

SEQ ID NO: 9943 - protein, 80 aa, Synthetic construct
FMISMPQELQVLVMMNGVQSCKDLEDLLRNNRRPKKWSVVSFLGKEYLMQESDVEMAEAPASVRDDPRHVSSQRTSSVNQ

SEQ ID NO: 9944 - protein, 80 aa, Synthetic construct
VLVMMNGVQSCKDLEDLLRNNRRPKKWSVVSFLGKEYLMQESDVEMAEAPASVRDDPRHVSSQRTSSVNQMCPEEGQASQ

SEQ ID NO: 9945 - protein, 80 aa, Synthetic construct
CKDLEDLLRNNRRPKKWSVVSFLGKEYLMQESDVEMAEAPASVRDDPRHVSSQRTSSVNQMCPEEGQASQELQTLPRVPA

SEQ ID NO: 9946 - protein, 80 aa, Synthetic construct
NRRPKKWSVVSFLGKEYLMQESDVEMAEAPASVRDDPRHVSSQRTSSVNQMCPEEGQASQELQTLPRVPALFRRQEEDFL

SEQ ID NO: 9947 - protein, 80 aa, Synthetic construct
LSTKVAVAQFSQGARAAGGSGAGGGVAAAAVPLILEQLMALQQQQIHQLQLIEQIRSQVALMQRPPPRPSLSPAAAPSAP

SEQ ID NO: 9948 - protein, 80 aa, Synthetic construct
SQGARAAGGSGAGGGVAAAAVPLILEQLMALQQQQIHQLQLIEQIRSQVALMQRPPPRPSLSPAAAPSAPGPAPSQLPGL

SEQ ID NO: 9949 - protein, 80 aa, Synthetic construct
GAGGGVAAAAVPLILEQLMALQQQQIHQLQLIEQIRSQVALMQRPPPRPSLSPAAAPSAPGPAPSQLPGLAALPLSAGAP

SEQ ID NO: 9950 - protein, 80 aa, Synthetic construct
VPLILEQLMALQQQQIHQLQLIEQIRSQVALMQRPPPRPSLSPAAAPSAPGPAPSQLPGLAALPLSAGAPAAAIAGSGPA

SEQ ID NO: 9951 - protein, 80 aa, Synthetic construct
SQALSPAPSNGESFRSKSPGLGAPEEPQEIPLKTERPDSPAAAPGSGGAPGRAGIKEEAPFSLLFLSRERGKCPSTVCGV

SEQ ID NO: 9952 - protein, 80 aa, Synthetic construct
GESFRSKSPGLGAPEEPQEIPLKTERPDSPAAAPGSGGAPGRAGIKEEAPFSLLFLSRERGKCPSTVCGVCGKPFACKSA

SEQ ID NO: 9953 - protein, 80 aa, Synthetic construct
LGAPEEPQEIPLKTERPDSPAAAPGSGGAPGRAGIKEEAPFSLLFLSRERGKCPSTVCGVCGKPFACKSALEIHYRSHTK

SEQ ID NO: 9954 - protein, 80 aa, Synthetic construct
PLKTERPDSPAAAPGSGGAPGRAGIKEEAPFSLLFLSRERGKCPSTVCGVCGKPFACKSALEIHYRSHTKERPFVCALCR

SEQ ID NO: 9955 - protein, 80 aa, Synthetic construct
NKKSGRPEELVSCADCGRSGHPTCLQFTLNMTEAVKTYKWQCIECKSCILCGTSENDDQLLFCDDCDRGYHMYCLNPPVA

SEQ ID NO: 9956 - protein, 80 aa, Synthetic construct
VSCADCGRSGHPTCLQFTLNMTEAVKTYKWQCIECKSCILCGTSENDDQLLFCDDCDRGYHMYCLNPPVAEPPEGSWSCH

SEQ ID NO: 9957 - protein, 80 aa, Synthetic construct; identical to SEQ ID NO: 1507

SEQ ID NO: 9958 - protein, 80 aa, Synthetic construct; identical to SEQ ID NO: 1508

SEQ ID NO: 9959 - protein, 80 aa, Synthetic construct; identical to SEQ ID NO: 1988

SEQ ID NO: 9960 - protein, 80 aa, Synthetic construct; identical to SEQ ID NO: 1509

SEQ ID NO: 9961 - protein, 80 aa, Synthetic construct; identical to SEQ ID NO: 1510

SEQ ID NO: 9962 - protein, 80 aa, Synthetic construct
ASPPPTARKMFPGLAAPSLPKKLKPEQIRVEIKREMLPGALHGELHPSEGPWGAPREDMTPLNLSSRAEPVRDIRCEFCG

SEQ ID NO: 9963 - protein, 80 aa, Synthetic construct
FPGLAAPSLPKKLKPEQIRVEIKREMLPGALHGELHPSEGPWGAPREDMTPLNLSSRAEPVRDIRCEFCGEFFENRKGLS

SEQ ID NO: 9964 - protein, 80 aa, Synthetic construct
KKLKPEQIRVEIKREMLPGALHGELHPSEGPWGAPREDMTPLNLSSRAEPVRDIRCEFCGEFFENRKGLSSHARSHLRQM

SEQ ID NO: 9965 - protein, 80 aa, Synthetic construct
PLNLSSRAEPVRDIRCEFCGEFFENRKGLSSHARSHLRQMGVTEWSVNGSPIDTLREILKKKSKPCLIKKEPPAGDLAPA

SEQ ID NO: 9966 - protein, 80 aa, Synthetic construct
VRDIRCEFCGEFFENRKGLSSHARSHLRQMGVTEWSVNGSPIDTLREILKKKSKPCLIKKEPPAGDLAPALAEDGPPTVA

SEQ ID NO: 9967 - protein, 80 aa, Synthetic construct; identical to SEQ ID NO: 1511

SEQ ID NO: 9968 - protein, 80 aa, Synthetic construct; identical to SEQ ID NO: 1512

SEQ ID NO: 9969 - protein, 80 aa, Synthetic construct; identical to SEQ ID NO: 1989

SEQ ID NO: 9970 - protein, 80 aa, Synthetic construct; identical to SEQ ID NO: 1513

SEQ ID NO: 9971 - protein, 80 aa, Synthetic construct; identical to SEQ ID NO: 2642

SEQ ID NO: 9972 - protein, 80 aa, Synthetic construct
TSEDQEPERDYENESESSEPKLGEESMEGDEHIHSEVSEKVLMNSERPDENHSEPSHQDVIKVKEEFTDPTYDMFYMSQY

SEQ ID NO: 9973 - protein, 80 aa, Synthetic construct
YENESESSEPKLGEESMEGDEHIHSEVSEKVLMNSERPDENHSEPSHQDVIKVKEEFTDPTYDMFYMSQYGLYNGGGASM

SEQ ID NO: 9974 - protein, 80 aa, Synthetic construct
KLGEESMEGDEHIHSEVSEKVLMNSERPDENHSEPSHQDVIKVKEEFTDPTYDMFYMSQYGLYNGGGASMAALHESFTSS

SEQ ID NO: 9975 - protein, 80 aa, Synthetic construct
EHIHSEVSEKVLMNSERPDENHSEPSHQDVIKVKEEFTDPTYDMFYMSQYGLYNGGGASMAALHESFTSSLNYGSPQKFS

SEQ ID NO: 9976 - protein, 80 aa, Synthetic construct
VLMNSERPDENHSEPSHQDVIKVKEEFTDPTYDMFYMSQYGLYNGGGASMAALHESFTSSLNYGSPQKFSPEGDLCSSPD

SEQ ID NO: 9977 - protein, 80 aa, Synthetic construct
NHSEPSHQDVIKVKEEFTDPTYDMFYMSQYGLYNGGGASMAALHESFTSSLNYGSPQKFSPEGDLCSSPDPKICYVCKKS

SEQ ID NO: 9978 - protein, 80 aa, Synthetic construct
IKVKEEFTDPTYDMFYMSQYGLYNGGGASMAALHESFTSSLNYGSPQKFSPEGDLCSSPDPKICYVCKKSFKSSYSVKLH

SEQ ID NO: 9979 - protein, 80 aa, Synthetic construct; identical to SEQ ID NO: 3521

SEQ ID NO: 9980 - protein, 80 aa, Synthetic construct
QEGLLRGTPGPSKEVLRVVGESGEPVKAFKCEHCRILFLDHVMFTIHMGCHGFRDPFECNICGYHSQDRYEFSSHIVRGE

SEQ ID NO: 9981 - protein, 80 aa, Synthetic construct; identical to SEQ ID NO: 2339

SEQ ID NO: 9982 - protein, 80 aa, Synthetic construct
FGVKAALPPRASGPPPCQVPEESDQALDLSLKSGPRQERVHPPCVLQTPLCSQRQPGAQPLVKDERDSLSEQEESSSSRS

SEQ ID NO: 9983 - protein, 80 aa, Synthetic construct
ASGPPPCQVPEESDQALDLSLKSGPRQERVHPPCVLQTPLCSQRQPGAQPLVKDERDSLSEQEESSSSRSPHSPPKPPPV

SEQ ID NO: 9984 - protein, 80 aa, Synthetic construct; identical to SEQ ID NO: 1873

SEQ ID NO: 9985 - protein, 80 aa, Synthetic construct; identical to SEQ ID NO: 5503

SEQ ID NO: 9986 - protein, 80 aa, Synthetic construct; identical to SEQ ID NO: 1840

SEQ ID NO: 9987 - protein, 80 aa, Synthetic construct; identical to SEQ ID NO: 1514

SEQ ID NO: 9988 - protein, 80 aa, Synthetic construct; identical to SEQ ID NO: 1515

SEQ ID NO: 9989 - protein, 80 aa, Synthetic construct
SKDEAQDNGATIMPIITESFSLSAEDYEMKKIIVTDSDDDDDDVIFCSEILPTKETLPSNNTVAQVQSNPGPVAISDVAP

SEQ ID NO: 9990 - protein, 80 aa, Synthetic construct; identical to SEQ ID NO: 1516

SEQ ID NO: 9991 - protein, 80 aa, Synthetic construct
TEIEGLSTGCKVYANIGEDTYDIVIPVKDDPDEGEARLENEIPKTSGSEMANKRMKVKHDDHYELIVDGRVYYICIVCKR

SEQ ID NO: 9992 - protein, 80 aa, Synthetic construct
KVYANIGEDTYDIVIPVKDDPDEGEARLENEIPKTSGSEMANKRMKVKHDDHYELIVDGRVYYICIVCKRSYVCLTSLRR

SEQ ID NO: 9993 - protein, 80 aa, Synthetic construct; identical to SEQ ID NO: 1841

SEQ ID NO: 9994 - protein, 80 aa, Synthetic construct
GDNPFQPKSNSKMAELFMECEEEELEPWQKKVKEVEDDDDDEPIFVGEISSSKPAISNILNRVNPSSYSRGLKNGALSRG

SEQ ID NO: 9995 - protein, 80 aa, Synthetic construct; identical to SEQ ID NO: 1517

SEQ ID NO: 9996 - protein, 80 aa, Synthetic construct; identical to SEQ ID NO: 2187

SEQ ID NO: 9997 - protein, 80 aa, Synthetic construct
KVKEVEDDDDDEPIFVGEISSSKPAISNILNRVNPSSYSRGLKNGALSRGITAAFKPTSQHYTNPTSNPVPASPINFHPE

SEQ ID NO: 9998 - protein, 80 aa, Synthetic construct
SNMQKKQSTLASSNKKSKVNTALRNLRYRRGIHKCIECCSEIKDFANHFPTYVHCSFCRYNTSCSKAYVNHMMSFHSNRP

SEQ ID NO: 9999 - protein, 80 aa, Synthetic construct
ASSNKKSKVNTALRNLRYRRGIHKCIECCSEIKDFANHFPTYVHCSFCRYNTSCSKAYVNHMMSFHSNRPSKRFCIFKKH

SEQ ID NO: 10000 - protein, 80 aa, Synthetic construct
TALRNLRYRRGIHKCIECCSEIKDFANHFPTYVHCSFCRYNTSCSKAYVNHMMSFHSNRPSKRFCIFKKHSENLRGITLV

SEQ ID NO: 10001 - protein, 80 aa, Synthetic construct
GIHKCIECCSEIKDFANHFPTYVHCSFCRYNTSCSKAYVNHMMSFHSNRPSKRFCIFKKHSENLRGITLVCLNCDFLSDV

SEQ ID NO: 10002 - protein, 80 aa, Synthetic construct; identical to SEQ ID NO: 1984

SEQ ID NO: 10003 - protein, 80 aa, Synthetic construct
DVPAVSVIVKNTSRQESFEAEKDHITPSLLHNGFRGSDLPPDPHNCGKFDSTFMNGDSARSFPGKLEPPKSEPLPTFNQF

SEQ ID NO: 10004 - protein, 80 aa, Synthetic construct
PKHSDSYFPPPLGCGAVGGPVLEALAKFPVPELHMFDHFCKKEPKPEPLPLGSQQEHEQSGQNTVEPHKDPDATRFFGEA

SEQ ID NO: 10005 - protein, 80 aa, Synthetic construct
PLGCGAVGGPVLEALAKFPVPELHMFDHFCKKEPKPEPLPLGSQQEHEQSGQNTVEPHKDPDATRFFGEALEFNSHPSNS

SEQ ID NO: 10006 - protein, 80 aa, Synthetic construct; identical to SEQ ID NO: 1985

SEQ ID NO: 10007 - protein, 80 aa, Synthetic construct
PELHMFDHFCKKEPKPEPLPLGSQQEHEQSGQNTVEPHKDPDATRFFGEALEFNSHPSNSIGESKGLARELGTCSSVPPR

SEQ ID NO: 10008 - protein, 80 aa, Synthetic construct
SNPVPLYAPNLSPPADSRIHVPASGYCCLECGDAFALEKSLSQHYGRRSVHIEVLCTLCSKTLLFFNKCSLLRHARDHKS

SEQ ID NO: 10009 - protein, 80 aa, Synthetic construct; identical to SEQ ID NO: 1986

SEQ ID NO: 10010 - protein, 80 aa, Synthetic construct; identical to SEQ ID NO: 5927

SEQ ID NO: 10011 - protein, 80 aa, Synthetic construct; identical to SEQ ID NO: 1987

SEQ ID NO: 10012 - protein, 80 aa, Synthetic construct
CCGDLEATALGRCDHPVCYRCSTKMRVLCEQRYCAVCREELRQVVFGKKLPAFATIPIHQLQHEKKYDIYFADGKVYALY

SEQ ID NO: 10013 - protein, 80 aa, Synthetic construct
GRCDHPVCYRCSTKMRVLCEQRYCAVCREELRQVVFGKKLPAFATIPIHQLQHEKKYDIYFADGKVYALYRQLLQHECPR

SEQ ID NO: 10014 - protein, 80 aa, Synthetic construct; identical to SEQ ID NO: 5929

SEQ ID NO: 10015 - protein, 80 aa, Synthetic construct
RTALQSHIYRTGHEIPAEHRDPPSKKRKMENCAQNQKLSNKTIESLNNQPIPRPDTQELEASEIKLEPSFEDSCGSNTDK

SEQ ID NO: 10016 - protein, 80 aa, Synthetic construct
TGHEIPAEHRDPPSKKRKMENCAQNQKLSNKTIESLNNQPIPRPDTQELEASEIKLEPSFEDSCGSNTDKQTLTTPPRYP

SEQ ID NO: 10017 - protein, 80 aa, Synthetic construct
DPPSKKRKMENCAQNQKLSNKTIESLNNQPIPRPDTQELEASEIKLEPSFEDSCGSNTDKQTLTTPPRYPQKLLLPKPKV

SEQ ID NO: 10018 - protein, 80 aa, Synthetic construct
NCAQNQKLSNKTIESLNNQPIPRPDTQELEASEIKLEPSFEDSCGSNTDKQTLTTPPRYPQKLLLPKPKVALVKLPVMQF

SEQ ID NO: 10019 - protein, 80 aa, Synthetic construct
KTIESLNNQPIPRPDTQELEASEIKLEPSFEDSCGSNTDKQTLTTPPRYPQKLLLPKPKVALVKLPVMQFSVMPVFVPTA

SEQ ID NO: 10020 - protein, 80 aa, Synthetic construct
IPRPDTQELEASEIKLEPSFEDSCGSNTDKQTLTTPPRYPQKLLLPKPKVALVKLPVMQFSVMPVFVPTADSSAQPVVLG

SEQ ID NO: 10021 - protein, 80 aa, Synthetic construct
ASEIKLEPSFEDSCGSNTDKQTLTTPPRYPQKLLLPKPKVALVKLPVMQFSVMPVFVPTADSSAQPVVLGVDQGSATGAV

SEQ ID NO: 10022 - protein, 80 aa, Synthetic construct
EDSCGSNTDKQTLTTPPRYPQKLLLPKPKVALVKLPVMQFSVMPVFVPTADSSAQPVVLGVDQGSATGAVHLMPLSVGTL

SEQ ID NO: 10023 - protein, 80 aa, Synthetic construct; identical to SEQ ID NO: 2561

SEQ ID NO: 10024 - protein, 80 aa, Synthetic construct; identical to SEQ ID NO: 6023

SEQ ID NO: 10025 - protein, 80 aa, Synthetic construct; identical to SEQ ID NO: 6054

SEQ ID NO: 10026 - protein, 80 aa, Synthetic construct; identical to SEQ ID NO: 5746

SEQ ID NO: 10027 - protein, 80 aa, Synthetic construct
EANWTAFLFQAHEASHHQQQAAQNSLLPLLSSAVEPPDQKPLLPIPITQKPQGAPETLKDAIGIKKEKPKTSFVCTYCSK

SEQ ID NO: 10028 - protein, 80 aa, Synthetic construct
AHEASHHQQQAAQNSLLPLLSSAVEPPDQKPLLPIPITQKPQGAPETLKDAIGIKKEKPKTSFVCTYCSKAFRDSYHLRR

SEQ ID NO: 10029 - protein, 80 aa, Synthetic construct; identical to SEQ ID NO: 5398

SEQ ID NO: 10030 - protein, 80 aa, Synthetic construct; identical to SEQ ID NO: 5399

SEQ ID NO: 10031 - protein, 80 aa, Synthetic construct; identical to SEQ ID NO: 5717

SEQ ID NO: 10032 - protein, 80 aa, Synthetic construct
TPRSVASPETQLGNHDRNPETWHMNFRMFSCPEESDPIQALRKLTELCHLWLRPDLHTKEQILDMLVMEQFMISMPQELQ

SEQ ID NO: 10033 - protein, 80 aa, Synthetic construct
TWHMNFRMFSCPEESDPIQALRKLTELCHLWLRPDLHTKEQILDMLVMEQFMISMPQELQVLVKVNGVQSCKDLEDLLRN

SEQ ID NO: 10034 - protein, 80 aa, Synthetic construct; identical to SEQ ID NO: 6088

SEQ ID NO: 10035 - protein, 80 aa, Synthetic construct; identical to SEQ ID NO: 2296

SEQ ID NO: 10036 - protein, 80 aa, Synthetic construct
QAGSPGHLGVIRDFSIESLLRENLYPKANIPDRRPSLSPFAPDFFPHLWPGDFGAFAQLPEQPMDSGPLDLVIKNRKIKE

SEQ ID NO: 10037 - protein, 80 aa, Synthetic construct
IRDFSIESLLRENLYPKANIPDRRPSLSPFAPDFFPHLWPGDFGAFAQLPEQPMDSGPLDLVIKNRKIKEEEKEELPPPP

SEQ ID NO: 10038 - protein, 80 aa, Synthetic construct
RENLYPKANIPDRRPSLSPFAPDFFPHLWPGDFGAFAQLPEQPMDSGPLDLVIKNRKIKEEEKEELPPPPPPPFPNDFFK

SEQ ID NO: 10039 - protein, 80 aa, Synthetic construct
PDRRPSLSPFAPDFFPHLWPGDFGAFAQLPEQPMDSGPLDLVIKNRKIKEEEKEELPPPPPPPFPNDFFKDMFPDLPGGP

SEQ ID NO: 10040 - protein, 80 aa, Synthetic construct
APDFFPHLWPGDFGAFAQLPEQPMDSGPLDLVIKNRKIKEEEKEELPPPPPPPFPNDFFKDMFPDLPGGPLGPIKAENDY

SEQ ID NO: 10041 - protein, 80 aa, Synthetic construct
GDFGAFAQLPEQPMDSGPLDLVIKNRKIKEEEKEELPPPPPPPFPNDFFKDMFPDLPGGPLGPIKAENDYGAYLNFLSAT

SEQ ID NO: 10042 - protein, 80 aa, Synthetic construct
EQPMDSGPLDLVIKNRKIKEEEKEELPPPPPPPFPNDFFKDMFPDLPGGPLGPIKAENDYGAYLNFLSATHLGGLFPPWP

SEQ ID NO: 10043 - protein, 80 aa, Synthetic construct
LVIKNRKIKEEEKEELPPPPPPPFPNDFFKDMFPDLPGGPLGPIKAENDYGAYLNFLSATHLGGLFPPWPLVEERKLKPK

SEQ ID NO: 10044 - protein, 80 aa, Synthetic construct
EEKEELPPPPPPPFPNDFFKDMFPDLPGGPLGPIKAENDYGAYLNFLSATHLGGLFPPWPLVEERKLKPKASQQCPICHK

SEQ ID NO: 10045 - protein, 80 aa, Synthetic construct
DMFPDLPGGPLGPIKAENDYGAYLNFLSATHLGGLFPPWPLVEERKLKPKASQQCPICHKVIMGAGKLPRHMRTHTGEKP

SEQ ID NO: 10046 - protein, 80 aa, Synthetic construct
LGPIKAENDYGAYLNFLSATHLGGLFPPWPLVEERKLKPKASQQCPICHKVIMGAGKLPRHMRTHTGEKPYMCTICEVRF

SEQ ID NO: 10047 - protein, 80 aa, Synthetic construct; identical to SEQ ID NO: 5562

SEQ ID NO: 10048 - protein, 80 aa, Synthetic construct; identical to SEQ ID NO: 5827

SEQ ID NO: 10049 - protein, 80 aa, Synthetic construct
SAQSVEEDSILIIPTPDEEEKILRVKLEEDPDGEEGSSIPWNHLPDPEIFRQRFRQFGYQDSPGPREAVSQLRELCRLWL

SEQ ID NO: 10050 - protein, 80 aa, Synthetic construct
LIIPTPDEEEKILRVKLEEDPDGEEGSSIPWNHLPDPEIFRQRFRQFGYQDSPGPREAVSQLRELCRLWLRPETHTKEQI

SEQ ID NO: 10051 - protein, 80 aa, Synthetic construct
KILRVKLEEDPDGEEGSSIPWNHLPDPEIFRQRFRQFGYQDSPGPREAVSQLRELCRLWLRPETHTKEQILELVVLEQFV

SEQ ID NO: 10052 - protein, 80 aa, Synthetic construct
PCCSHRSCREDPGTSESREMDPVACEDVAVNFTQEEWALLDISQRKLYREVMLETFRNLTSIGKKWKDQNIEYEYQNPRR

SEQ ID NO: 10053 - protein, 80 aa, Synthetic construct
DPGTSESREMDPVACEDVAVNFTQEEWALLDISQRKLYREVMLETFRNLTSIGKKWKDQNIEYEYQNPRRNFRSLIEGNV

SEQ ID NO: 10054 - protein, 80 aa, Synthetic construct; identical to SEQ ID NO: 1822

SEQ ID NO: 10055 - protein, 80 aa, Synthetic construct; identical to SEQ ID NO: 2374

SEQ ID NO: 10056 - protein, 80 aa, Synthetic construct; identical to SEQ ID NO: 5750

SEQ ID NO: 10057 - protein, 80 aa, Synthetic construct; identical to SEQ ID NO: 1972

SEQ ID NO: 10058 - protein, 80 aa, Synthetic construct
LVSPPQRISSTVKTHISHTYECNFVDSLFTQKEKANIGTEHYKCSERGKAFHQGLHFTIHQIIHTKETQFKCDICGKIFN

SEQ ID NO: 10059 - protein, 80 aa, Synthetic construct
TVKTHISHTYECNFVDSLFTQKEKANIGTEHYKCSERGKAFHQGLHFTIHQIIHTKETQFKCDICGKIFNKKSNLASHQR

SEQ ID NO: 10060 - protein, 80 aa, Synthetic construct; identical to SEQ ID NO: 5955

SEQ ID NO: 10061 - protein, 80 aa, Synthetic construct
LGPAAPNSQTFLLVQTAQGLQLIPSSVQPPTPPPPPAPPKLILLPSSSAGAGGGRARQGPRAVGKAGQGAGVVWLPGPGG

SEQ ID NO: 10062 - protein, 80 aa, Synthetic construct
FLLVQTAQGLQLIPSSVQPPTPPPPPAPPKLILLPSSSAGAGGGRARQGPRAVGKAGQGAGVVWLPGPGGLGVQGAASAG

SEQ ID NO: 10063 - protein, 80 aa, Synthetic construct; identical to SEQ ID NO: 2892

SEQ ID NO: 10064 - protein, 80 aa, Synthetic construct; identical to SEQ ID NO: 2893

SEQ ID NO: 10065 - protein, 80 aa, Synthetic construct
QISTTQKTVVKQGLEVKEAPSSNSGNRAAVQGDHPQLQLSLAIGLDDGTADQQRACPATQALEEHQKPPVSIKQERCDPE

SEQ ID NO: 10066 - protein, 80 aa, Synthetic construct
KQGLEVKEAPSSNSGNRAAVQGDHPQLQLSLAIGLDDGTADQQRACPATQALEEHQKPPVSIKQERCDPESVISQSHPSP

SEQ ID NO: 10067 - protein, 80 aa, Synthetic construct
SSNSGNRAAVQGDHPQLQLSLAIGLDDGTADQQRACPATQALEEHQKPPVSIKQERCDPESVISQSHPSPSSEVTGPTFT

SEQ ID NO: 10068 - protein, 80 aa, Synthetic construct
QGDHPQLQLSLAIGLDDGTADQQRACPATQALEEHQKPPVSIKQERCDPESVISQSHPSPSSEVTGPTFTENSVKIHLCH

SEQ ID NO: 10069 - protein, 80 aa, Synthetic construct
LAIGLDDGTADQQRACPATQALEEHQKPPVSIKQERCDPESVISQSHPSPSSEVTGPTFTENSVKIHLCHYCGERFDSRS

SEQ ID NO: 10070 - protein, 80 aa, Synthetic construct
DQQRACPATQALEEHQKPPVSIKQERCDPESVISQSHPSPSSEVTGPTFTENSVKIHLCHYCGERFDSRSNLRQHLHTHV

SEQ ID NO: 10071 - protein, 80 aa, Synthetic construct
ALEEHQKPPVSIKQERCDPESVISQSHPSPSSEVTGPTFTENSVKIHLCHYCGERFDSRSNLRQHLHTHVSGSLPFGVPA

SEQ ID NO: 10072 - protein, 80 aa, Synthetic construct
SIKQERCDPESVISQSHPSPSSEVTGPTFTENSVKIHLCHYCGERFDSRSNLRQHLHTHVSGSLPFGVPASILESNDLGE

SEQ ID NO: 10073 - protein, 80 aa, Synthetic construct; identical to SEQ ID NO: 5565

SEQ ID NO: 10074 - protein, 80 aa, Synthetic construct
PLELVVRDSLGGGSADSNLSTPPKRIEPKVEFDADEVEVDVGEQLQQYAAPLNLAHVEEALPSGQAVDLAYSNYHVKQFL

SEQ ID NO: 10075 - protein, 80 aa, Synthetic construct
GGGSADSNLSTPPKRIEPKVEFDADEVEVDVGEQLQQYAAPLNLAHVEEALPSGQAVDLAYSNYHVKQFLEALLRNSAAP

SEQ ID NO: 10076 - protein, 80 aa, Synthetic construct
TPPKRIEPKVEFDADEVEVDVGEQLQQYAAPLNLAHVEEALPSGQAVDLAYSNYHVKQFLEALLRNSAAPSKDDADHHFS

SEQ ID NO: 10077 - protein, 80 aa, Synthetic construct; identical to SEQ ID NO: 5567

SEQ ID NO: 10078 - protein, 80 aa, Synthetic construct; identical to SEQ ID NO: 1907

SEQ ID NO: 10079 - protein, 80 aa, Synthetic construct
LAPGQIYTYPARCWRKKRRLNILEDPRLRPCEYKIDCEAPLKKEGGLPEGPVLEALLCAETGEKKIELKEEETIMDCQKQ

SEQ ID NO: 10080 - protein, 80 aa, Synthetic construct
ARCWRKKRRLNILEDPRLRPCEYKIDCEAPLKKEGGLPEGPVLEALLCAETGEKKIELKEEETIMDCQKQQLLEFPHDLE

SEQ ID NO: 10081 - protein, 80 aa, Synthetic construct
CEYKIDCEAPLKKEGGLPEGPVLEALLCAETGEKKIELKEEETIMDCQKQQLLEFPHDLEVEDLEDDIPRRKNRAKGKAY

SEQ ID NO: 10082 - protein, 80 aa, Synthetic construct
LKKEGGLPEGPVLEALLCAETGEKKIELKEEETIMDCQKQQLLEFPHDLEVEDLEDDIPRRKNRAKGKAYGIGGLRKRQD

SEQ ID NO: 10083 - protein, 80 aa, Synthetic construct; identical to SEQ ID NO: 2995

SEQ ID NO: 10084 - protein, 80 aa, Synthetic construct; identical to SEQ ID NO: 1823

SEQ ID NO: 10085 - protein, 80 aa, Synthetic construct
LASPKLGATPLPPESTPAPPPPPPPPPPPGVGSGHLNIPLILEELRVLQQRQIHQMQMTEQICRQVLLLGSLGQTVGAPA

SEQ ID NO: 10086 - protein, 80 aa, Synthetic construct; identical to SEQ ID NO: 1518

SEQ ID NO: 10087 - protein, 80 aa, Synthetic construct
PPPPPPPPPGVGSGHLNIPLILEELRVLQQRQIHQMQMTEQICRQVLLLGSLGQTVGAPASPSELPGTGTASSTKPLLPL

SEQ ID NO: 10088 - protein, 80 aa, Synthetic construct
VGSGHLNIPLILEELRVLQQRQIHQMQMTEQICRQVLLLGSLGQTVGAPASPSELPGTGTASSTKPLLPLFSPIKPVQTS

SEQ ID NO: 10089 - protein, 80 aa, Synthetic construct
ILEELRVLQQRQIHQMQMTEQICRQVLLLGSLGQTVGAPASPSELPGTGTASSTKPLLPLFSPIKPVQTSKTLASSSSSS

SEQ ID NO: 10090 - protein, 80 aa, Synthetic construct
NQPGGAAAPQADGASAAGRKSTASRERLKRSQKSTKVEGPEPVPAEASLSAEQGTMTEVKVKTELPDDYIQEVIWQGEAK

SEQ ID NO: 10091 - protein, 80 aa, Synthetic construct
ADGASAAGRKSTASRERLKRSQKSTKVEGPEPVPAEASLSAEQGTMTEVKVKTELPDDYIQEVIWQGEAKEEKKAVSKDG

SEQ ID NO: 10092 - protein, 80 aa, Synthetic construct
STASRERLKRSQKSTKVEGPEPVPAEASLSAEQGTMTEVKVKTELPDDYIQEVIWQGEAKEEKKAVSKDGTSDVPAEICV

SEQ ID NO: 10093 - protein, 80 aa, Synthetic construct
SQKSTKVEGPEPVPAEASLSAEQGTMTEVKVKTELPDDYIQEVIWQGEAKEEKKAVSKDGTSDVPAEICVVIGGVRNQQT

SEQ ID NO: 10094 - protein, 80 aa, Synthetic construct
EPVPAEASLSAEQGTMTEVKVKTELPDDYIQEVIWQGEAKEEKKAVSKDGTSDVPAEICVVIGGVRNQQTLDGKAPEGSP

SEQ ID NO: 10095 - protein, 80 aa, Synthetic construct
AEQGTMTEVKVKTELPDDYIQEVIWQGEAKEEKKAVSKDGTSDVPAEICVVIGGVRNQQTLDGKAPEGSPHGGSVRSRYS

SEQ ID NO: 10096 - protein, 80 aa, Synthetic construct
VKTELPDDYIQEVIWQGEAKEEKKAVSKDGTSDVPAEICVVIGGVRNQQTLDGKAPEGSPHGGSVRSRYSGTWIFDQALR

SEQ ID NO: 10097 - protein, 80 aa, Synthetic construct
TEATSGEGASQSNNFRYTCDICGKKYKYYSCFQEHRDLHAVDVFSVEGAPENRADPFDQGVVATDEVKEEPPEPFQKIGP

SEQ ID NO: 10098 - protein, 80 aa, Synthetic construct
QSNNFRYTCDICGKKYKYYSCFQEHRDLHAVDVFSVEGAPENRADPFDQGVVATDEVKEEPPEPFQKIGPKTGNYTCEFC

SEQ ID NO: 10099 - protein, 80 aa, Synthetic construct
ICGKKYKYYSCFQEHRDLHAVDVFSVEGAPENRADPFDQGVVATDEVKEEPPEPFQKIGPKTGNYTCEFCGKQYKYYTPY

SEQ ID NO: 10100 - protein, 80 aa, Synthetic construct
ENRADPFDQGVVATDEVKEEPPEPFQKIGPKTGNYTCEFCGKQYKYYTPYQEHVALHAPISTAPGWEPPDDPDTGSECSH

SEQ ID NO: 10101 - protein, 80 aa, Synthetic construct
VVATDEVKEEPPEPFQKIGPKTGNYTCEFCGKQYKYYTPYQEHVALHAPISTAPGWEPPDDPDTGSECSHPEVSPSPRFV

SEQ ID NO: 10102 - protein, 80 aa, Synthetic construct; identical to SEQ ID NO: 1519

SEQ ID NO: 10103 - protein, 80 aa, Synthetic construct; identical to SEQ ID NO: 2063

SEQ ID NO: 10104 - protein, 80 aa, Synthetic construct; identical to SEQ ID NO: 1520

SEQ ID NO: 10105 - protein, 80 aa, Synthetic construct; identical to SEQ ID NO: 2309

SEQ ID NO: 10106 - protein, 80 aa, Synthetic construct; identical to SEQ ID NO: 1521

SEQ ID NO: 10107 - protein, 80 aa, Synthetic construct
APKPKISGSIHYALKNVKIDLPKINIPNEVLLKHEVDKYRKLFQSKQQTARKSISIKTVSCVEECTLLHKSERAEEEGVK

SEQ ID NO: 10108 - protein, 80 aa, Synthetic construct; identical to SEQ ID NO: 1522

SEQ ID NO: 10109 - protein, 80 aa, Synthetic construct
KPTPLSTGQGNRAEEGPNASSGFMKTAVLGPTLKNVMMKNNKLAVSPNYNATFMGFKMMDGKQHIVLKLVPIKQNVCSPG

SEQ ID NO: 10110 - protein, 80 aa, Synthetic construct
NRAEEGPNASSGFMKTAVLGPTLKNVMMKNNKLAVSPNYNATFMGFKMMDGKQHIVLKLVPIKQNVCSPGSQSGAAKDGT

SEQ ID NO: 10111 - protein, 80 aa, Synthetic construct
SGFMKTAVLGPTLKNVMMKNNKLAVSPNYNATFMGFKMMDGKQHIVLKLVPIKQNVCSPGSQSGAAKDGTANLQPQTLDT

SEQ ID NO: 10112 - protein, 80 aa, Synthetic construct
PTLKNVMMKNNKLAVSPNYNATFMGFKMMDGKQHIVLKLVPIKQNVCSPGSQSGAAKDGTANLQPQTLDTNGFLTGVTTE

SEQ ID NO: 10113 - protein, 80 aa, Synthetic construct
NKLAVSPNYNATFMGFKMMDGKQHIVLKLVPIKQNVCSPGSQSGAAKDGTANLQPQTLDTNGFLTGVTTELNDTVYMKAA

SEQ ID NO: 10114 - protein, 80 aa, Synthetic construct; identical to SEQ ID NO: 1523

SEQ ID NO: 10115 - protein, 80 aa, Synthetic construct; identical to SEQ ID NO: 1524

SEQ ID NO: 10116 - protein, 80 aa, Synthetic construct; identical to SEQ ID NO: 1525

SEQ ID NO: 10117 - protein, 80 aa, Synthetic construct; identical to SEQ ID NO: 1526

SEQ ID NO: 10118 - protein, 80 aa, Synthetic construct; identical to SEQ ID NO: 1527

SEQ ID NO: 10119 - protein, 80 aa, Synthetic construct; identical to SEQ ID NO: 1528

SEQ ID NO: 10120 - protein, 80 aa, Synthetic construct; identical to SEQ ID NO: 1529

SEQ ID NO: 10121 - protein, 80 aa, Synthetic construct; identical to SEQ ID NO: 2310

SEQ ID NO: 10122 - protein, 80 aa, Synthetic construct; identical to SEQ ID NO: 5883

SEQ ID NO: 10123 - protein, 80 aa, Synthetic construct; identical to SEQ ID NO: 5884

SEQ ID NO: 10124 - protein, 80 aa, Synthetic construct
RDSYQEPPRRKATLHRKCKEKAKPEDVRETFGFSRPRLSKDSIRTLRLFPFSSKQLVKCPRRNQPVVVLNHPDADAPEVV

SEQ ID NO: 10125 - protein, 80 aa, Synthetic construct; identical to SEQ ID NO: 1530

SEQ ID NO: 10126 - protein, 80 aa, Synthetic construct; identical to SEQ ID NO: 1531

SEQ ID NO: 10127 - protein, 80 aa, Synthetic construct; identical to SEQ ID NO: 1532

SEQ ID NO: 10128 - protein, 80 aa, Synthetic construct; identical to SEQ ID NO: 2311

SEQ ID NO: 10129 - protein, 80 aa, Synthetic construct; identical to SEQ ID NO: 5886

SEQ ID NO: 10130 - protein, 80 aa, Synthetic construct
RTINALLKPVCYNPPKTTYDDFSKRHKTFKPVSSVKERFVLKLTLKKTSKNNYQIVKTTSENILKAKFNCWFCGRVFDNQ

SEQ ID NO: 10131 - protein, 80 aa, Synthetic construct
CYNPPKTTYDDFSKRHKTFKPVSSVKERFVLKLTLKKTSKNNYQIVKTTSENILKAKFNCWFCGRVFDNQDTWAGHGQRH

SEQ ID NO: 10132 - protein, 80 aa, Synthetic construct
DFSKRHKTFKPVSSVKERFVLKLTLKKTSKNNYQIVKTTSENILKAKFNCWFCGRVFDNQDTWAGHGQRHLMEATRDWNM

SEQ ID NO: 10133 - protein, 80 aa, Synthetic construct
SKRHKTFKPVSSVKERFVLKLTLKKTSKNNYQIVKTTSENILKAKFNCWFCGRVFDNQDTWAGHGQRHLMEATRDWNMLE

SEQ ID NO: 10134 - protein, 80 aa, Synthetic construct; identical to SEQ ID NO: 1779

SEQ ID NO: 10135 - protein, 80 aa, Synthetic construct; identical to SEQ ID NO: 1533

SEQ ID NO: 10136 - protein, 80 aa, Synthetic construct; identical to SEQ ID NO: 1534

SEQ ID NO: 10137 - protein, 80 aa, Synthetic construct; identical to SEQ ID NO: 2007

SEQ ID NO: 10138 - protein, 80 aa, Synthetic construct
RYTRGTGGRGTMLQGEYTYSLGQVYDPTTTYLGAPVFYAPQTYAAIPSLHFPATKGHLSNRAIIRAPSVREIYMNVPVGA

SEQ ID NO: 10139 - protein, 80 aa, Synthetic construct
TMLQGEYTYSLGQVYDPTTTYLGAPVFYAPQTYAAIPSLHFPATKGHLSNRAIIRAPSVREIYMNVPVGAAGVRGLGGRG

SEQ ID NO: 10140 - protein, 80 aa, Synthetic construct
LGQVYDPTTTYLGAPVFYAPQTYAAIPSLHFPATKGHLSNRAIIRAPSVREIYMNVPVGAAGVRGLGGRGYLAYTGLGRG

SEQ ID NO: 10141 - protein, 80 aa, Synthetic construct; identical to SEQ ID NO: 2206

SEQ ID NO: 10142 - protein, 80 aa, Synthetic construct; identical to SEQ ID NO: 2377

SEQ ID NO: 10143 - protein, 80 aa, Synthetic construct; identical to SEQ ID NO: 1899

SEQ ID NO: 10144 - protein, 80 aa, Synthetic construct; identical to SEQ ID NO: 1535

SEQ ID NO: 10145 - protein, 80 aa, Synthetic construct; identical to SEQ ID NO: 1536

SEQ ID NO: 10146 - protein, 80 aa, Synthetic construct
ALHVPRDGAEVMSPLKNGMIEDWECFRAILDHTYSKHVKSEPNLHPVLMSEAPWNTRAKREKLTELMFEQYNIPAFFLCK

SEQ ID NO: 10147 - protein, 80 aa, Synthetic construct
EDWECFRAILDHTYSKHVKSEPNLHPVLMSEAPWNTRAKREKLTELMFEQYNIPAFFLCKTAVLTAFANGRSTGLVLDSG

SEQ ID NO: 10148 - protein, 80 aa, Synthetic construct
DHTYSKHVKSEPNLHPVLMSEAPWNTRAKREKLTELMFEQYNIPAFFLCKTAVLTAFANGRSTGLVLDSGATHTTAIPVH

SEQ ID NO: 10149 - protein, 80 aa, Synthetic construct; identical to SEQ ID NO: 2380

SEQ ID NO: 10150 - protein, 80 aa, Synthetic construct
LSDNIISGGLEVLAEKCPNLTYLNLSGNKIKDLSTVEALQNLKNLKSLDLFNCEITNLEDYRESIFELLQQITYLDGFDQ

SEQ ID NO: 10151 - protein, 80 aa, Synthetic construct
EVLAEKCPNLTYLNLSGNKIKDLSTVEALQNLKNLKSLDLFNCEITNLEDYRESIFELLQQITYLDGFDQEDNEAPDSEE

SEQ ID NO: 10152 - protein, 80 aa, Synthetic construct
KKNDKEAAGEGPALYEDPPDQKTSPSGKPATLKICSWNVDGLRAWIKKKGLDWVKEEAPDILCLQETKCSENKLPAELQE

SEQ ID NO: 10153 - protein, 80 aa, Synthetic construct
GPALYEDPPDQKTSPSGKPATLKICSWNVDGLRAWIKKKGLDWVKEEAPDILCLQETKCSENKLPAELQELPGLSHQYWS

SEQ ID NO: 10154 - protein, 80 aa, Synthetic construct
QKTSPSGKPATLKICSWNVDGLRAWIKKKGLDWVKEEAPDILCLQETKCSENKLPAELQELPGLSHQYWSAPSDKEGYSG

SEQ ID NO: 10155 - protein, 80 aa, Synthetic construct
GLRAWIKKKGLDWVKEEAPDILCLQETKCSENKLPAELQELPGLSHQYWSAPSDKEGYSGVGLLSRQCPLKVSYGIGDEE

SEQ ID NO: 10156 - protein, 80 aa, Synthetic construct; identical to SEQ ID NO: 2433

SEQ ID NO: 10157 - protein, 80 aa, Synthetic construct; identical to SEQ ID NO: 2436

SEQ ID NO: 10158 - protein, 80 aa, Synthetic construct
SLKKQYIQCLYAFECKIERGEDPPPDIFAAADSKKSQPKIQPPSPAGSGSMQGPQTPQSTSSSMAEGGDLKPPTPASTPH

SEQ ID NO: 10159 - protein, 80 aa, Synthetic construct
YAFECKIERGEDPPPDIFAAADSKKSQPKIQPPSPAGSGSMQGPQTPQSTSSSMAEGGDLKPPTPASTPHSQIPPLPGMS

SEQ ID NO: 10160 - protein, 80 aa, Synthetic construct; identical to SEQ ID NO: 2449

SEQ ID NO: 10161 - protein, 80 aa, Synthetic construct
YHQGGCDNIDSGAVWKQIYMDLGIPILNSAASYNVKTAYRKYLYGFEEYCRSANIQFRTVHHHEPKVKEEKKDLEESMEE

SEQ ID NO: 10162 - protein, 80 aa, Synthetic construct; identical to SEQ ID NO: 1760

SEQ ID NO: 10163 - protein, 80 aa, Synthetic construct
ASYNVKTAYRKYLYGFEEYCRSANIQFRTVHHHEPKVKEEKKDLEESMEEALKLDQEMPLTEVKSEPEENIDSNSESERE

SEQ ID NO: 10164 - protein, 80 aa, Synthetic construct
KYLYGFEEYCRSANIQFRTVHHHEPKVKEEKKDLEESMEEALKLDQEMPLTEVKSEPEENIDSNSESEREEIELKSPRGR

SEQ ID NO: 10165 - protein, 80 aa, Synthetic construct
RSANIQFRTVHHHEPKVKEEKKDLEESMEEALKLDQEMPLTEVKSEPEENIDSNSESEREEIELKSPRGRRRIARDVNSI

SEQ ID NO: 10166 - protein, 80 aa, Synthetic construct
KKDLEESMEEALKLDQEMPLTEVKSEPEENIDSNSESEREEIELKSPRGRRRIARDVNSIKKEIEEEKTEDKLKDNDTEN

SEQ ID NO: 10167 - protein, 80 aa, Synthetic construct
ALKLDQEMPLTEVKSEPEENIDSNSESEREEIELKSPRGRRRIARDVNSIKKEIEEEKTEDKLKDNDTENKDVDDDYETA

SEQ ID NO: 10168 - protein, 80 aa, Synthetic construct; identical to SEQ ID NO: 2467

SEQ ID NO: 10169 - protein, 80 aa, Synthetic construct; identical to SEQ ID NO: 2468

SEQ ID NO: 10170 - protein, 80 aa, Synthetic construct; identical to SEQ ID NO: 2472

SEQ ID NO: 10171 - protein, 80 aa, Synthetic construct
FGTPVIGKKTNRGRRSNHIPEEESSSSSSDEDEDDRKQIDELLGKVVCVDYISLDKKKALWFPALVVCPDCSDEIAVKKD

SEQ ID NO: 10172 - protein, 80 aa, Synthetic construct; identical to SEQ ID NO: 2178

SEQ ID NO: 10173 - protein, 80 aa, Synthetic construct; identical to SEQ ID NO: 1537

SEQ ID NO: 10174 - protein, 80 aa, Synthetic construct
EDEDDRKQIDELLGKVVCVDYISLDKKKALWFPALVVCPDCSDEIAVKKDNILVRSFKDGKFTSVPRKDVHEITSDTAPK

SEQ ID NO: 10175 - protein, 80 aa, Synthetic construct
ELLGKVVCVDYISLDKKKALWFPALVVCPDCSDEIAVKKDNILVRSFKDGKFTSVPRKDVHEITSDTAPKPDAVLKQAFE

SEQ ID NO: 10176 - protein, 80 aa, Synthetic construct
YISLDKKKALWFPALVVCPDCSDEIAVKKDNILVRSFKDGKFTSVPRKDVHEITSDTAPKPDAVLKQAFEQALEFHKSRT

SEQ ID NO: 10177 - protein, 80 aa, Synthetic construct
WFPALVVCPDCSDEIAVKKDNILVRSFKDGKFTSVPRKDVHEITSDTAPKPDAVLKQAFEQALEFHKSRTIPANWKTELK

SEQ ID NO: 10178 - protein, 80 aa, Synthetic construct
VWKQVYQDLGIPVLNSAAGYNVKCAYKKYLYGFEEYCRSANIEFQMALPEKVVNKQCKECENVKEIKVKEENETEIKEIK

SEQ ID NO: 10179 - protein, 80 aa, Synthetic construct
KVVNKQCKECENVKEIKVKEENETEIKEIKMEEERNIIPREEKPIEDEIERKENIKPSLGSKKNLLESIPTHSDQEKEVN

SEQ ID NO: 10180 - protein, 80 aa, Synthetic construct; identical to SEQ ID NO: 2474

SEQ ID NO: 10181 - protein, 80 aa, Synthetic construct; identical to SEQ ID NO: 2475

SEQ ID NO: 10182 - protein, 80 aa, Synthetic construct
QQSSVTVSEPLAPNQEEVRSIKSETDSTIEVDSVAGELQDLQSEGNSSPAGFDASVSSSSSNQPEPEHPEKACTGQKRVK

SEQ ID NO: 10183 - protein, 80 aa, Synthetic construct
LAPNQEEVRSIKSETDSTIEVDSVAGELQDLQSEGNSSPAGFDASVSSSSSNQPEPEHPEKACTGQKRVKDAQGGGSSSK

SEQ ID NO: 10184 - protein, 80 aa, Synthetic construct; identical to SEQ ID NO: 2498

SEQ ID NO: 10185 - protein, 80 aa, Synthetic construct; identical to SEQ ID NO: 2330

SEQ ID NO: 10186 - protein, 80 aa, Synthetic construct
VQYAPERPGPQPTAETTRQFLMSDKPLHLEASLDKEIYYHGEPISVNVHVTNNTNKTVKKIKISVRQYADICLFNTAQYK

SEQ ID NO: 10187 - protein, 80 aa, Synthetic construct; identical to SEQ ID NO: 2500

SEQ ID NO: 10188 - protein, 80 aa, Synthetic construct; identical to SEQ ID NO: 2502

SEQ ID NO: 10189 - protein, 80 aa, Synthetic construct
MAKVSVLNVAVLENPSPFHSPFRFEISFECSEALADDLEWKIIYVGSAESEEFDQILDSVLVGPVPAGRHMFVFQADAPN

SEQ ID NO: 10190 - protein, 80 aa, Synthetic construct
VLENPSPFHSPFRFEISFECSEALADDLEWKIIYVGSAESEEFDQILDSVLVGPVPAGRHMFVFQADAPNPSLIPETDAV

SEQ ID NO: 10191 - protein, 80 aa, Synthetic construct; identical to SEQ ID NO: 2522

SEQ ID NO: 10192 - protein, 80 aa, Synthetic construct; identical to SEQ ID NO: 2523

SEQ ID NO: 10193 - protein, 80 aa, Synthetic construct; identical to SEQ ID NO: 2524

SEQ ID NO: 10194 - protein, 80 aa, Synthetic construct; identical to SEQ ID NO: 2525

SEQ ID NO: 10195 - protein, 80 aa, Synthetic construct
FAKHQARAHLFQTSKETRLPPPLSSKEGPPNLEVSSTPETKMEGSTGVIIVNPNCRSPSNKSAHLRETTTVLQQSLNPSK

SEQ ID NO: 10196 - protein, 80 aa, Synthetic construct; identical to SEQ ID NO: 2262

SEQ ID NO: 10197 - protein, 80 aa, Synthetic construct
EPTAPSHNFAEQARGPAPFKSEADTTCSNQYNPSNRICWNDDGMRSTGQPLVTHSGSSKQKEYLEQSCPKAIKTEHANYL

SEQ ID NO: 10198 - protein, 80 aa, Synthetic construct
EQARGPAPFKSEADTTCSNQYNPSNRICWNDDGMRSTGQPLVTHSGSSKQKEYLEQSCPKAIKTEHANYLNVSELHPRNL

SEQ ID NO: 10199 - protein, 80 aa, Synthetic construct
DDGMRSTGQPLVTHSGSSKQKEYLEQSCPKAIKTEHANYLNVSELHPRNLVTNVALPVKSELHEADKGFRMDTEDFPGPE

SEQ ID NO: 10200 - protein, 80 aa, Synthetic construct
LVTHSGSSKQKEYLEQSCPKAIKTEHANYLNVSELHPRNLVTNVALPVKSELHEADKGFRMDTEDFPGPELPPPAAEGAS

SEQ ID NO: 10201 - protein, 80 aa, Synthetic construct
KEYLEQSCPKAIKTEHANYLNVSELHPRNLVTNVALPVKSELHEADKGFRMDTEDFPGPELPPPAAEGASSVQQTQNMKA

SEQ ID NO: 10202 - protein, 80 aa, Synthetic construct
LPPPLPNAEVPSDQKQPPVTMETTKRLSWPQSTGICSNIKSEPLSFEEGLSSSCELGMKQVSYDQNEMKEQLKAFALKSA

SEQ ID NO: 10203 - protein, 80 aa, Synthetic construct
PSDQKQPPVTMETTKRLSWPQSTGICSNIKSEPLSFEEGLSSSCELGMKQVSYDQNEMKEQLKAFALKSADFSSYLLSEP

SEQ ID NO: 10204 - protein, 80 aa, Synthetic construct
METTKRLSWPQSTGICSNIKSEPLSFEEGLSSSCELGMKQVSYDQNEMKEQLKAFALKSADFSSYLLSEPQKPFTQLAAQ

SEQ ID NO: 10205 - protein, 80 aa, Synthetic construct
QSTGICSNIKSEPLSFEEGLSSSCELGMKQVSYDQNEMKEQLKAFALKSADFSSYLLSEPQKPFTQLAAQKMQVQQQQQL

SEQ ID NO: 10206 - protein, 80 aa, Synthetic construct
YVTVIKQPMDLSSVISKIDLHKYLTVKDYLRDIDLICSNALEYNPDRDPGDRLIRHRACALRDTAYAIIKEELDEDFEQL

SEQ ID NO: 10207 - protein, 80 aa, Synthetic construct; identical to SEQ ID NO: 1538

SEQ ID NO: 10208 - protein, 80 aa, Synthetic construct; identical to SEQ ID NO: 1908

SEQ ID NO: 10209 - protein, 80 aa, Synthetic construct
LEYNPDRDPGDRLIRHRACALRDTAYAIIKEELDEDFEQLCEEIQESRKKRGCSSSKYAPSYYHVMPKQNSTLVGDKRSD

SEQ ID NO: 10210 - protein, 80 aa, Synthetic construct
DRLIRHRACALRDTAYAIIKEELDEDFEQLCEEIQESRKKRGCSSSKYAPSYYHVMPKQNSTLVGDKRSDPEQNEKLKTP

SEQ ID NO: 10211 - protein, 80 aa, Synthetic construct
LRDTAYAIIKEELDEDFEQLCEEIQESRKKRGCSSSKYAPSYYHVMPKQNSTLVGDKRSDPEQNEKLKTPSTPVACSTPA

SEQ ID NO: 10212 - protein, 80 aa, Synthetic construct
PVDSNKDCTTPLEMFSNVEFKKKRKRVNLSHQLNNIKTENEAPIEISSDDSKEDYSLNNDFVESSTSVLRYKKQVEVLAE

SEQ ID NO: 10213 - protein, 80 aa, Synthetic construct
PLEMFSNVEFKKKRKRVNLSHQLNNIKTENEAPIEISSDDSKEDYSLNNDFVESSTSVLRYKKQVEVLAENIQDTKSQPN

SEQ ID NO: 10214 - protein, 80 aa, Synthetic construct
KKKRKRVNLSHQLNNIKTENEAPIEISSDDSKEDYSLNNDFVESSTSVLRYKKQVEVLAENIQDTKSQPNTMTSLQNSKK

SEQ ID NO: 10215 - protein, 80 aa, Synthetic construct; identical to SEQ ID NO: 2540

SEQ ID NO: 10216 - protein, 80 aa, Synthetic construct; identical to SEQ ID NO: 2542

SEQ ID NO: 10217 - protein, 80 aa, Synthetic construct; identical to SEQ ID NO: 2559

SEQ ID NO: 10218 - protein, 80 aa, Synthetic construct; identical to SEQ ID NO: 2558

SEQ ID NO: 10219 - protein, 80 aa, Synthetic construct
TATPPGYKPGSPPSFRTGTPPGYRGTSPPAGPGTFKPGSPTVGPGPLPPAGPSGLPSLPPPPAAPASGPPLSATQIKQEP

SEQ ID NO: 10220 - protein, 80 aa, Synthetic construct
PGYRGTSPPAGPGTFKPGSPTVGPGPLPPAGPSGLPSLPPPPAAPASGPPLSATQIKQEPAEEYETPESPVPPARSPSPP

SEQ ID NO: 10221 - protein, 80 aa, Synthetic construct
GPGTFKPGSPTVGPGPLPPAGPSGLPSLPPPPAAPASGPPLSATQIKQEPAEEYETPESPVPPARSPSPPPKVVDVPSHA

SEQ ID NO: 10222 - protein, 80 aa, Synthetic construct
GPSGLPSLPPPPAAPASGPPLSATQIKQEPAEEYETPESPVPPARSPSPPPKVVDVPSHASQSARFNKHLDRGFNSCARS

SEQ ID NO: 10223 - protein, 80 aa, Synthetic construct
PPAAPASGPPLSATQIKQEPAEEYETPESPVPPARSPSPPPKVVDVPSHASQSARFNKHLDRGFNSCARSDLYFVPLEGS

SEQ ID NO: 10224 - protein, 80 aa, Synthetic construct
LSATQIKQEPAEEYETPESPVPPARSPSPPPKVVDVPSHASQSARFNKHLDRGFNSCARSDLYFVPLEGSKLAKKRADLV

SEQ ID NO: 10225 - protein, 80 aa, Synthetic construct; identical to SEQ ID NO: 2566

SEQ ID NO: 10226 - protein, 80 aa, Synthetic construct; identical to SEQ ID NO: 2567

SEQ ID NO: 10227 - protein, 80 aa, Synthetic construct
PPVHESPHPPLPATEPASRLSSEEGEGDDKEESVEKLDCHYSGHHPQPASFCTFGSRQIGRGYYVFDSRWNRLRCALNLM

SEQ ID NO: 10228 - protein, 80 aa, Synthetic construct
SSEEGEGDDKEESVEKLDCHYSGHHPQPASFCTFGSRQIGRGYYVFDSRWNRLRCALNLMVEKHLNAQLWKKIPPVPSTT

SEQ ID NO: 10229 - protein, 80 aa, Synthetic construct; identical to SEQ ID NO: 2569

SEQ ID NO: 10230 - protein, 80 aa, Synthetic construct
RPHLPLLMGGQAALKPEPGRPGEESPAPKQELHQPSFPTPQLSPLPMPGNPADYNGLCVGPELTALGSFYLYCGQEGLQC

SEQ ID NO: 10231 - protein, 80 aa, Synthetic construct
QAALKPEPGRPGEESPAPKQELHQPSFPTPQLSPLPMPGNPADYNGLCVGPELTALGSFYLYCGQEGLQCGGYSPCPMLP

SEQ ID NO: 10232 - protein, 80 aa, Synthetic construct
GEIFIILRDEVIGDTVEVEFTSSNKRIRTRPALWNKKVWCMKALEFPAGSVHVNVYCDGIVKATTKIKYYPTAKAKECLF

SEQ ID NO: 10233 - protein, 80 aa, Synthetic construct
DHPVVLENHVVTDEDEPALKRQRLEINCQDPSIKSFLYSINQTICLRLDSIEAKLQALEATCKSLEEKLDLVTNKQHSPI

SEQ ID NO: 10234 - protein, 80 aa, Synthetic construct
VTDEDEPALKRQRLEINCQDPSIKSFLYSINQTICLRLDSIEAKLQALEATCKSLEEKLDLVTNKQHSPIQVPMVAGSPL

SEQ ID NO: 10235 - protein, 80 aa, Synthetic construct
RQRLEINCQDPSIKSFLYSINQTICLRLDSIEAKLQALEATCKSLEEKLDLVTNKQHSPIQVPMVAGSPLGATQTCNKVR

SEQ ID NO: 10236 - protein, 80 aa, Synthetic construct
PSIKSFLYSINQTICLRLDSIEAKLQALEATCKSLEEKLDLVTNKQHSPIQVPMVAGSPLGATQTCNKVRCAVPGRRQNT

SEQ ID NO: 10237 - protein, 80 aa, Synthetic construct
NQTICLRLDSIEAKLQALEATCKSLEEKLDLVTNKQHSPIQVPMVAGSPLGATQTCNKVRCAVPGRRQNTIVVKVPGQED

SEQ ID NO: 10238 - protein, 80 aa, Synthetic construct; identical to SEQ ID NO: 2590

SEQ ID NO: 10239 - protein, 80 aa, Synthetic construct
YLTSLTHRSRLHEICDDIFAYVKDRYFVEETVEVIRNNGARLQCRILEVLPPSHQNGFANGHVNSVDGETIIISDSDDSE

SEQ ID NO: 10240 - protein, 80 aa, Synthetic construct
LHEICDDIFAYVKDRYFVEETVEVIRNNGARLQCRILEVLPPSHQNGFANGHVNSVDGETIIISDSDDSETQSCSFQNGK

SEQ ID NO: 10241 - protein, 80 aa, Synthetic construct; identical to SEQ ID NO: 2592

SEQ ID NO: 10242 - protein, 80 aa, Synthetic construct; identical to SEQ ID NO: 2593

SEQ ID NO: 10243 - protein, 80 aa, Synthetic construct; identical to SEQ ID NO: 1539

SEQ ID NO: 10244 - protein, 80 aa, Synthetic construct; identical to SEQ ID NO: 1540

SEQ ID NO: 10245 - protein, 80 aa, Synthetic construct; identical to SEQ ID NO: 2240

SEQ ID NO: 10246 - protein, 80 aa, Synthetic construct
RQSPEPSPVTLGRRSSGRQGGVHELSAFEQLVVELVRHDDSWPFLKLVSKIQVPDYYDIIKKPIALNIIREKVNKCEYKL

SEQ ID NO: 10247 - protein, 80 aa, Synthetic construct; identical to SEQ ID NO: 2596

SEQ ID NO: 10248 - protein, 80 aa, Synthetic construct
EVATRLQKGGLGYVEETSEFEARVISLEKLKDFGECVIALQASVIKKFLQGFMAPKQKRRKLQSEDSAKTEEVDEEKKMV

SEQ ID NO: 10249 - protein, 80 aa, Synthetic construct
LGYVEETSEFEARVISLEKLKDFGECVIALQASVIKKFLQGFMAPKQKRRKLQSEDSAKTEEVDEEKKMVEEAKVASALE

SEQ ID NO: 10250 - protein, 80 aa, Synthetic construct; identical to SEQ ID NO: 2598

SEQ ID NO: 10251 - protein, 80 aa, Synthetic construct; identical to SEQ ID NO: 1752

SEQ ID NO: 10252 - protein, 80 aa, Synthetic construct; identical to SEQ ID NO: 2184

SEQ ID NO: 10253 - protein, 80 aa, Synthetic construct
KPKNQVLATYMSHELVLATPQNLPKMPELPLLPHDSHPKELILDVVPSSRRGSSTERPQLGSQVDLGRVKMEKVDGDVVF

SEQ ID NO: 10254 - protein, 80 aa, Synthetic construct
MSHELVLATPQNLPKMPELPLLPHDSHPKELILDVVPSSRRGSSTERPQLGSQVDLGRVKMEKVDGDVVFNLATCFRADG

SEQ ID NO: 10255 - protein, 80 aa, Synthetic construct
QNLPKMPELPLLPHDSHPKELILDVVPSSRRGSSTERPQLGSQVDLGRVKMEKVDGDVVFNLATCFRADGLPVAPQRGQA

SEQ ID NO: 10256 - protein, 80 aa, Synthetic construct
LLPHDSHPKELILDVVPSSRRGSSTERPQLGSQVDLGRVKMEKVDGDVVFNLATCFRADGLPVAPQRGQAEVRAKAGQAR

SEQ ID NO: 10257 - protein, 80 aa, Synthetic construct
LILDVVPSSRRGSSTERPQLGSQVDLGRVKMEKVDGDVVFNLATCFRADGLPVAPQRGQAEVRAKAGQARVKQESVGVFA

SEQ ID NO: 10258 - protein, 80 aa, Synthetic construct
RGSSTERPQLGSQVDLGRVKMEKVDGDVVFNLATCFRADGLPVAPQRGQAEVRAKAGQARVKQESVGVFACKNKWQPDDV

SEQ ID NO: 10259 - protein, 80 aa, Synthetic construct; identical to SEQ ID NO: 2630

SEQ ID NO: 10260 - protein, 80 aa, Synthetic construct
RNLLLPNKVQGISDSPNGFLPNNLEEPACLENSEKPSGKRKCKTKHMATVSEEAKDVVLYCLQKDSEDVNHRDNAGYTAL

SEQ ID NO: 10261 - protein, 80 aa, Synthetic construct; identical to SEQ ID NO: 2185

SEQ ID NO: 10262 - protein, 80 aa, Synthetic construct
PNNLEEPACLENSEKPSGKRKCKTKHMATVSEEAKDVVLYCLQKDSEDVNHRDNAGYTALHEACSRGWTDILNILLEHGA

SEQ ID NO: 10263 - protein, 80 aa, Synthetic construct; identical to SEQ ID NO: 2656

SEQ ID NO: 10264 - protein, 80 aa, Synthetic construct
ENYKRNTENEDNKYTAASRNSHNLEFDGSDSSKNDTVCIHKDETDLLFTDQHNICLKLSGQFMKEGNTQIKEDLSDLTFL

SEQ ID NO: 10265 - protein, 80 aa, Synthetic construct
KNTKTGRVLYTCFQSIQAQKSSESLHGPRDFWSSSQHISIEGQKEEERYERIEIPIHIVPHVTIGKVCLESAVELPKILC

SEQ ID NO: 10266 - protein, 80 aa, Synthetic construct; identical to SEQ ID NO: 2661

SEQ ID NO: 10267 - protein, 80 aa, Synthetic construct
EKRKGDCVPAVSQSMFEFLMDRFEKESHCENQKQGEQQSLIDEDAVCCICMDGECQNSNVILFCDMCNLAVHQECYGVPY

SEQ ID NO: 10268 - protein, 80 aa, Synthetic construct
VSQSMFEFLMDRFEKESHCENQKQGEQQSLIDEDAVCCICMDGECQNSNVILFCDMCNLAVHQECYGVPYIPEGQWLCRH

SEQ ID NO: 10269 - protein, 80 aa, Synthetic construct
MDGECQNSNVILFCDMCNLAVHQECYGVPYIPEGQWLCRHCLQSRARPADCVLCPNKGGAFKKTDDDRWGHVVCALWIPE

SEQ ID NO: 10270 - protein, 80 aa, Synthetic construct
VHQECYGVPYIPEGQWLCRHCLQSRARPADCVLCPNKGGAFKKTDDDRWGHVVCALWIPEVGFANTVFIEPIDGVRNIPP

SEQ ID NO: 10271 - protein, 80 aa, Synthetic construct
QHHHSPRHHKSDPYSTGHLREAPSPLMIHSPQMSQFQSLTHQSPPQQNVQPKKQELRAASVVQPQPLVVVKEEKIHSPII

SEQ ID NO: 10272 - protein, 80 aa, Synthetic construct
SDPYSTGHLREAPSPLMIHSPQMSQFQSLTHQSPPQQNVQPKKQELRAASVVQPQPLVVVKEEKIHSPIIRSEPFSPSLR

SEQ ID NO: 10273 - protein, 80 aa, Synthetic construct
PQMSQFQSLTHQSPPQQNVQPKKQELRAASVVQPQPLVVVKEEKIHSPIIRSEPFSPSLRPEPPKHPESIKAPVHLPQRP

SEQ ID NO: 10274 - protein, 80 aa, Synthetic construct
HQSPPQQNVQPKKQELRAASVVQPQPLVVVKEEKIHSPIIRSEPFSPSLRPEPPKHPESIKAPVHLPQRPEMKPVDVGRP

SEQ ID NO: 10275 - protein, 80 aa, Synthetic construct
PKKQELRAASVVQPQPLVVVKEEKIHSPIIRSEPFSPSLRPEPPKHPESIKAPVHLPQRPEMKPVDVGRPVIRPPEQNAP

SEQ ID NO: 10276 - protein, 80 aa, Synthetic construct
VVQPQPLVVVKEEKIHSPIIRSEPFSPSLRPEPPKHPESIKAPVHLPQRPEMKPVDVGRPVIRPPEQNAPPPGAPDKDKQ

SEQ ID NO: 10277 - protein, 80 aa, Synthetic construct
GVNTLQGFKEDKRNKVTPVLYLNYGPYSSYAPHYDSTFANISKDDSDLIYSTYGEDSDLPSDFSIHEFLATCQDYPYVMA

SEQ ID NO: 10278 - protein, 80 aa, Synthetic construct; identical to SEQ ID NO: 371

SEQ ID NO: 10279 - protein, 80 aa, Synthetic construct
AALSFCEENDDPQSLPGPWEHPIQQERDKPVPLPAPEMTVKQERLDFEETENKGIHELVDIREPSAEIKVEPAEPEPVIS

SEQ ID NO: 10280 - protein, 80 aa, Synthetic construct
DPQSLPGPWEHPIQQERDKPVPLPAPEMTVKQERLDFEETENKGIHELVDIREPSAEIKVEPAEPEPVISGAEIVAGVVP

SEQ ID NO: 10281 - protein, 80 aa, Synthetic construct
HPIQQERDKPVPLPAPEMTVKQERLDFEETENKGIHELVDIREPSAEIKVEPAEPEPVISGAEIVAGVVPATSMEPPELR

SEQ ID NO: 10282 - protein, 80 aa, Synthetic construct
VPLPAPEMTVKQERLDFEETENKGIHELVDIREPSAEIKVEPAEPEPVISGAEIVAGVVPATSMEPPELRSQDLDEELGS

SEQ ID NO: 10283 - protein, 80 aa, Synthetic construct
KQERLDFEETENKGIHELVDIREPSAEIKVEPAEPEPVISGAEIVAGVVPATSMEPPELRSQDLDEELGSTAAGEIVEAD

SEQ ID NO: 10284 - protein, 80 aa, Synthetic construct
TAAGEIVEADVAIGKGDETPLTNVKTEASPESMLSPSHGSNPIEDPLEAETQHKFEMSDSLKEESGTIFGSQIKDAPGED

SEQ ID NO: 10285 - protein, 80 aa, Synthetic construct; identical to SEQ ID NO: 1938

SEQ ID NO: 10286 - protein, 80 aa, Synthetic construct
LTNVKTEASPESMLSPSHGSNPIEDPLEAETQHKFEMSDSLKEESGTIFGSQIKDAPGEDEEEDGVSEAASLEEPKEEDQ

SEQ ID NO: 10287 - protein, 80 aa, Synthetic construct; identical to SEQ ID NO: 2674

SEQ ID NO: 10288 - protein, 80 aa, Synthetic construct; identical to SEQ ID NO: 2675

SEQ ID NO: 10289 - protein, 80 aa, Synthetic construct
SMKSYPDVSVDISMLSSLGKVKKELDPDDSHLNLDETTKLLQDLHEAQAERGGSRPSSNLSSLSNASERDQHHLGSPSRL

SEQ ID NO: 10290 - protein, 80 aa, Synthetic construct
DISMLSSLGKVKKELDPDDSHLNLDETTKLLQDLHEAQAERGGSRPSSNLSSLSNASERDQHHLGSPSRLSVGEQPDVTH

SEQ ID NO: 10291 - protein, 80 aa, Synthetic construct; identical to SEQ ID NO: 2677

SEQ ID NO: 10292 - protein, 80 aa, Synthetic construct
LLLYDTVQSELEEKIRRLEEDRHSIDITSELWNDELQSRKKRKDPFSPDKKKPVVVSGPYIVYMLQDLDILEDWTTIRKA

SEQ ID NO: 10293 - protein, 80 aa, Synthetic construct; identical to SEQ ID NO: 2052

SEQ ID NO: 10294 - protein, 80 aa, Synthetic construct
DRHSIDITSELWNDELQSRKKRKDPFSPDKKKPVVVSGPYIVYMLQDLDILEDWTTIRKAMATLGPHRVKTEPPVKLEKH

SEQ ID NO: 10295 - protein, 80 aa, Synthetic construct; identical to SEQ ID NO: 2053

SEQ ID NO: 10296 - protein, 80 aa, Synthetic construct; identical to SEQ ID NO: 2681

SEQ ID NO: 10297 - protein, 80 aa, Synthetic construct; identical to SEQ ID NO: 2682

SEQ ID NO: 10298 - protein, 80 aa, Synthetic construct; identical to SEQ ID NO: 2683

SEQ ID NO: 10299 - protein, 80 aa, Synthetic construct; identical to SEQ ID NO: 2095

SEQ ID NO: 10300 - protein, 80 aa, Synthetic construct
ACDKDGQTDSAAEESSSQETSKGLGPNMSSTPAHEVGRRTSVLFSKKNPKTAGPPKRPGRPPKNRESQMTPSHGGSPVGP

SEQ ID NO: 10301 - protein, 80 aa, Synthetic construct; identical to SEQ ID NO: 1541

SEQ ID NO: 10302 - protein, 80 aa, Synthetic construct; identical to SEQ ID NO: 2686

SEQ ID NO: 10303 - protein, 80 aa, Synthetic construct
RRVDGHSLVSADTFELLVDRLEKESYLESRSSGAQQSLIDEDAFCCVCLDDECHNSNVILFCDICNLAVHQECYGVPYIP

SEQ ID NO: 10304 - protein, 80 aa, Synthetic construct; identical to SEQ ID NO: 2353

SEQ ID NO: 10305 - protein, 80 aa, Synthetic construct
LEKESYLESRSSGAQQSLIDEDAFCCVCLDDECHNSNVILFCDICNLAVHQECYGVPYIPEGQWLCRCCLQSPSRPVDCI

SEQ ID NO: 10306 - protein, 80 aa, Synthetic construct
SSGAQQSLIDEDAFCCVCLDDECHNSNVILFCDICNLAVHQECYGVPYIPEGQWLCRCCLQSPSRPVDCILCPNKGGAFK

SEQ ID NO: 10307 - protein, 80 aa, Synthetic construct
EGLKEGDGEEEEEEEVEEEEQEAQGGVSGSLKGVPKKSKMSLKQKIKKEPEEAGQDTPSTLPMLAVPQIPSYRLNKICSG

SEQ ID NO: 10308 - protein, 80 aa, Synthetic construct
EEEEEVEEEEQEAQGGVSGSLKGVPKKSKMSLKQKIKKEPEEAGQDTPSTLPMLAVPQIPSYRLNKICSGLSFQRKNQFM

SEQ ID NO: 10309 - protein, 80 aa, Synthetic construct
QEAQGGVSGSLKGVPKKSKMSLKQKIKKEPEEAGQDTPSTLPMLAVPQIPSYRLNKICSGLSFQRKNQFMQRLHNYWLLK

SEQ ID NO: 10310 - protein, 80 aa, Synthetic construct
LKGVPKKSKMSLKQKIKKEPEEAGQDTPSTLPMLAVPQIPSYRLNKICSGLSFQRKNQFMQRLHNYWLLKRQARNGVPLI

SEQ ID NO: 10311 - protein, 80 aa, Synthetic construct
SLKQKIKKEPEEAGQDTPSTLPMLAVPQIPSYRLNKICSGLSFQRKNQFMQRLHNYWLLKRQARNGVPLIRRLHSHLQSQ

SEQ ID NO: 10312 - protein, 80 aa, Synthetic construct; identical to SEQ ID NO: 2354

SEQ ID NO: 10313 - protein, 80 aa, Synthetic construct; identical to SEQ ID NO: 1542

SEQ ID NO: 10314 - protein, 80 aa, Synthetic construct; identical to SEQ ID NO: 2690

SEQ ID NO: 10315 - protein, 80 aa, Synthetic construct
CVAFDRTGHRIFTGSDDCLVKIWSTHNGRLLSTLRGHSAEISDMAVNYENTMIAAGSCDKIIRVWCLRTCAPVAVLQGHT

SEQ ID NO: 10316 - protein, 80 aa, Synthetic construct
IFTGSDDCLVKIWSTHNGRLLSTLRGHSAEISDMAVNYENTMIAAGSCDKIIRVWCLRTCAPVAVLQGHTGSITSLQFSP

SEQ ID NO: 10317 - protein, 80 aa, Synthetic construct
YIEHNARTFNEPESVIARSAKKITDQLLKFIKNQHCTNISELSNTSENDEQNAEDLDDSDLPKTSSGRRRVHDGKKSIRA

SEQ ID NO: 10318 - protein, 80 aa, Synthetic construct
KNWHANGYKSHTPAPSKTKFLKIESSEEDSKSHDSDHACNRTAGPSTSVQKLKAESISEEADSEPGRSGGRKYNTFHKNA

SEQ ID NO: 10319 - protein, 80 aa, Synthetic construct
HTPAPSKTKFLKIESSEEDSKSHDSDHACNRTAGPSTSVQKLKAESISEEADSEPGRSGGRKYNTFHKNASFFKKTKILS

SEQ ID NO: 10320 - protein, 80 aa, Synthetic construct; identical to SEQ ID NO: 377

SEQ ID NO: 10321 - protein, 80 aa, Synthetic construct; identical to SEQ ID NO: 698

SEQ ID NO: 10322 - protein, 80 aa, Synthetic construct; identical to SEQ ID NO: 378

SEQ ID NO: 10323 - protein, 80 aa, Synthetic construct
IFSAAGAAFTKLGELTMQLHPVADSSPAGAKWTETEIEMLRAAVKRFGDDLNHISCVIKERTVAQIKATVKRKVYEDSGI

SEQ ID NO: 10324 - protein, 80 aa, Synthetic construct
KLGELTMQLHPVADSSPAGAKWTETEIEMLRAAVKRFGDDLNHISCVIKERTVAQIKATVKRKVYEDSGIPLPAESPKKG

SEQ ID NO: 10325 - protein, 80 aa, Synthetic construct; identical to SEQ ID NO: 2066

SEQ ID NO: 10326 - protein, 80 aa, Synthetic construct
KWTETEIEMLRAAVKRFGDDLNHISCVIKERTVAQIKATVKRKVYEDSGIPLPAESPKKGPKKVASGVLSPPPAAPPPSS

SEQ ID NO: 10327 - protein, 80 aa, Synthetic construct; identical to SEQ ID NO: 2717

SEQ ID NO: 10328 - protein, 80 aa, Synthetic construct
DTYKKWKLTKMDGNWRRGSTAGGCRNYPNTFWMNPQYLIKLEEEDEDEEDGESGCTFLVGLIQKHRRRQRKMGEDMHTIG

SEQ ID NO: 10329 - protein, 80 aa, Synthetic construct
MDGNWRRGSTAGGCRNYPNTFWMNPQYLIKLEEEDEDEEDGESGCTFLVGLIQKHRRRQRKMGEDMHTIGFGIYEVPEEL

SEQ ID NO: 10330 - protein, 80 aa, Synthetic construct
LIQKHRRRQRKMGEDMHTIGFGIYEVPEELSGQTNIHLSKNFFLTNRARERSDTFINLREVLNRFKLPPGEYILVPSTFE

SEQ ID NO: 10331 - protein, 80 aa, Synthetic construct
KMGEDMHTIGFGIYEVPEELSGQTNIHLSKNFFLTNRARERSDTFINLREVLNRFKLPPGEYILVPSTFEPNKDGDFCIR

SEQ ID NO: 10332 - protein, 80 aa, Synthetic construct
FGIYEVPEELSGQTNIHLSKNFFLTNRARERSDTFINLREVLNRFKLPPGEYILVPSTFEPNKDGDFCIRVFSEKKADYQ

SEQ ID NO: 10333 - protein, 80 aa, Synthetic construct; identical to SEQ ID NO: 2721

SEQ ID NO: 10334 - protein, 80 aa, Synthetic construct; identical to SEQ ID NO: 2722

SEQ ID NO: 10335 - protein, 80 aa, Synthetic construct; identical to SEQ ID NO: 2723

SEQ ID NO: 10336 - protein, 80 aa, Synthetic construct; identical to SEQ ID NO: 2745

SEQ ID NO: 10337 - protein, 80 aa, Synthetic construct; identical to SEQ ID NO: 2010

SEQ ID NO: 10338 - protein, 80 aa, Synthetic construct
TQIHPLMSQMSGSVTASMATGSATRKGIVVLIDPLAANGTTDMHTSVPRVKGGQRNITDDSRDQPFIKKMHFTIRLTESA

SEQ ID NO: 10339 - protein, 80 aa, Synthetic construct
SGSVTASMATGSATRKGIVVLIDPLAANGTTDMHTSVPRVKGGQRNITDDSRDQPFIKKMHFTIRLTESASTYRDIVVKK

SEQ ID NO: 10340 - protein, 80 aa, Synthetic construct; identical to SEQ ID NO: 2011

SEQ ID NO: 10341 - protein, 80 aa, Synthetic construct; identical to SEQ ID NO: 1543

SEQ ID NO: 10342 - protein, 80 aa, Synthetic construct
STYRDIVVKKEDGFTQIVLSTRSTEKNALNTEVIKEIVNALNSAAADDSKLVLFSAAGSVFCCGLDFGYFVKHLRNNRNT

SEQ ID NO: 10343 - protein, 80 aa, Synthetic construct
KTQMHPLMSQMSGSVTASMATGSATRKGIVVLIDPLAANGTTDMHTSVPRVKGGQRNITDDSRGQPFIKKMHFTIRLTES

SEQ ID NO: 10344 - protein, 80 aa, Synthetic construct
MSGSVTASMATGSATRKGIVVLIDPLAANGTTDMHTSVPRVKGGQRNITDDSRGQPFIKKMHFTIRLTESAITYRDIVVK

SEQ ID NO: 10345 - protein, 80 aa, Synthetic construct; identical to SEQ ID NO: 2113

SEQ ID NO: 10346 - protein, 80 aa, Synthetic construct
VLIDPLAANGTTDMHTSVPRVKGGQRNITDDSRGQPFIKKMHFTIRLTESAITYRDIVVKKEDGFTQIVLSTRSTEKNAL

SEQ ID NO: 10347 - protein, 80 aa, Synthetic construct; identical to SEQ ID NO: 2348

SEQ ID NO: 10348 - protein, 80 aa, Synthetic construct; identical to SEQ ID NO: 2041

SEQ ID NO: 10349 - protein, 80 aa, Synthetic construct
CNMIAQKGKRPQRTKAELHPRWMSDHLSIKPVKQEETPVLTRIEKQKRKEEEEERQILLAVQKKEQEQMLKEERKRELEE

SEQ ID NO: 10350 - protein, 80 aa, Synthetic construct; identical to SEQ ID NO: 2003

SEQ ID NO: 10351 - protein, 80 aa, Synthetic construct; identical to SEQ ID NO: 2246

SEQ ID NO: 10352 - protein, 80 aa, Synthetic construct
FPGETLSDIPCKTEEEGVGCGGAGRRGDSQECSPRSCPELTSGPRMCPRKEQDSWSEAGGILFKGKVPMVVLQDILAVRP

SEQ ID NO: 10353 - protein, 80 aa, Synthetic construct
CKTEEEGVGCGGAGRRGDSQECSPRSCPELTSGPRMCPRKEQDSWSEAGGILFKGKVPMVVLQDILAVRPPQIKSLPATP

SEQ ID NO: 10354 - protein, 80 aa, Synthetic construct
GGAGRRGDSQECSPRSCPELTSGPRMCPRKEQDSWSEAGGILFKGKVPMVVLQDILAVRPPQIKSLPATPQGKNMTPESE

SEQ ID NO: 10355 - protein, 80 aa, Synthetic construct
TSGPRMCPRKEQDSWSEAGGILFKGKVPMVVLQDILAVRPPQIKSLPATPQGKNMTPESEVLESFPEEDSVLSHSSLSSP

SEQ ID NO: 10356 - protein, 80 aa, Synthetic construct
ELRKQALDHFNAEGSEDFCFLLSTRAGGLGINLASADTVVIFDSDWNPQNDLQAQARAHRIGQKKQVNIYRLVTKGSVEE

SEQ ID NO: 10357 - protein, 80 aa, Synthetic construct
NAEGSEDFCFLLSTRAGGLGINLASADTVVIFDSDWNPQNDLQAQARAHRIGQKKQVNIYRLVTKGSVEEDILERAKKKM

SEQ ID NO: 10358 - protein, 80 aa, Synthetic construct; identical to SEQ ID NO: 2787

SEQ ID NO: 10359 - protein, 80 aa, Synthetic construct
DDPDKKPQAKQLQTRADYLIKLLSRDLAKKEALSGAGSSKRRKARAKKNKAMKSIKVKEEIKSDSSPLPSEKSDEDDDKL

SEQ ID NO: 10360 - protein, 80 aa, Synthetic construct
QLQTRADYLIKLLSRDLAKKEALSGAGSSKRRKARAKKNKAMKSIKVKEEIKSDSSPLPSEKSDEDDDKLSESKSDGRER

SEQ ID NO: 10361 - protein, 80 aa, Synthetic construct
KLLSRDLAKKEALSGAGSSKRRKARAKKNKAMKSIKVKEEIKSDSSPLPSEKSDEDDDKLSESKSDGRERSKKSSVSDAP

SEQ ID NO: 10362 - protein, 80 aa, Synthetic construct
EALSGAGSSKRRKARAKKNKAMKSIKVKEEIKSDSSPLPSEKSDEDDDKLSESKSDGRERSKKSSVSDAPVHITASGEPV

SEQ ID NO: 10363 - protein, 80 aa, Synthetic construct
RRKARAKKNKAMKSIKVKEEIKSDSSPLPSEKSDEDDDKLSESKSDGRERSKKSSVSDAPVHITASGEPVPISEESEELD

SEQ ID NO: 10364 - protein, 80 aa, Synthetic construct
AMKSIKVKEEIKSDSSPLPSEKSDEDDDKLSESKSDGRERSKKSSVSDAPVHITASGEPVPISEESEELDQKTFSICKER

SEQ ID NO: 10365 - protein, 80 aa, Synthetic construct; identical to SEQ ID NO: 2795

SEQ ID NO: 10366 - protein, 80 aa, Synthetic construct
RSNRSRQEPSRFNIKEEASSGSESGSPKRRGQRQLKKQEKWKQEPSEDEQEQGTSAESEPEQKKVKARRPVPRRTVPKPR

SEQ ID NO: 10367 - protein, 80 aa, Synthetic construct
RFNIKEEASSGSESGSPKRRGQRQLKKQEKWKQEPSEDEQEQGTSAESEPEQKKVKARRPVPRRTVPKPRVKKQPKTQRG

SEQ ID NO: 10368 - protein, 80 aa, Synthetic construct
IKGEIRKQALDHFNADGSEDFCFLLSTRAGGLGINLASADTVVIFDSDWNPQNDLQAQARAHRIGQKKQVNIYRLVTKGT

SEQ ID NO: 10369 - protein, 80 aa, Synthetic construct
DHFNADGSEDFCFLLSTRAGGLGINLASADTVVIFDSDWNPQNDLQAQARAHRIGQKKQVNIYRLVTKGTVEEEIIERAK

SEQ ID NO: 10370 - protein, 80 aa, Synthetic construct; identical to SEQ ID NO: 2800

SEQ ID NO: 10371 - protein, 80 aa, Synthetic construct; identical to SEQ ID NO: 2801

SEQ ID NO: 10372 - protein, 80 aa, Synthetic construct; identical to SEQ ID NO: 2802

SEQ ID NO: 10373 - protein, 80 aa, Synthetic construct; identical to SEQ ID NO: 2803

SEQ ID NO: 10374 - protein, 80 aa, Synthetic construct; identical to SEQ ID NO: 2804

SEQ ID NO: 10375 - protein, 80 aa, Synthetic construct; identical to SEQ ID NO: 2805

SEQ ID NO: 10376 - protein, 80 aa, Synthetic construct
EDTDVQNMNEYLSSFKVAQYVVREEDKIEEIEREIIKQEENVDPDYWEKLLRHHYEQQQEDLARNLGKGKRVRKQVNYND

SEQ ID NO: 10377 - protein, 80 aa, Synthetic construct
YLSSFKVAQYVVREEDKIEEIEREIIKQEENVDPDYWEKLLRHHYEQQQEDLARNLGKGKRVRKQVNYNDAAQEDQDNQS

SEQ ID NO: 10378 - protein, 80 aa, Synthetic construct
IEREIIKQEENVDPDYWEKLLRHHYEQQQEDLARNLGKGKRVRKQVNYNDAAQEDQDNQSEYSVGSEEEDEDFDERPEGR

SEQ ID NO: 10379 - protein, 80 aa, Synthetic construct; identical to SEQ ID NO: 1742

SEQ ID NO: 10380 - protein, 80 aa, Synthetic construct; identical to SEQ ID NO: 2809

SEQ ID NO: 10381 - protein, 80 aa, Synthetic construct
KAYIPDLFKSKTNTIAMEGEPTAIPSQPFKVKHELLKEPWKESAEGQNVFPTYPLEGSELKSEDMDFENKDDYDRDGNCH

SEQ ID NO: 10382 - protein, 80 aa, Synthetic construct; identical to SEQ ID NO: 2813

SEQ ID NO: 10383 - protein, 80 aa, Synthetic construct
EDEDPEYKPTRTPFKDEIDEFANSPSEDKEESMEIHATGKHSESNAELGQLYWPNTSTLTTRLRRLITAYQRSYKRQQMR

SEQ ID NO: 10384 - protein, 80 aa, Synthetic construct
RTPFKDEIDEFANSPSEDKEESMEIHATGKHSESNAELGQLYWPNTSTLTTRLRRLITAYQRSYKRQQMRQEALMKTDRR

SEQ ID NO: 10385 - protein, 80 aa, Synthetic construct; identical to SEQ ID NO: 2819

SEQ ID NO: 10386 - protein, 80 aa, Synthetic construct; identical to SEQ ID NO: 2826

SEQ ID NO: 10387 - protein, 80 aa, Synthetic construct; identical to SEQ ID NO: 2827

SEQ ID NO: 10388 - protein, 80 aa, Synthetic construct; identical to SEQ ID NO: 2829

SEQ ID NO: 10389 - protein, 80 aa, Synthetic construct
TSTPLLQQYQVALSASPLTSLPRLLDAKGIILEEMKVKSENLKEEPQSSEEESMSSVETRTLIKSEPVSPKNGVLPQATG

SEQ ID NO: 10390 - protein, 80 aa, Synthetic construct
VALSASPLTSLPRLLDAKGIILEEMKVKSENLKEEPQSSEEESMSSVETRTLIKSEPVSPKNGVLPQATGDQKSGGKCET

SEQ ID NO: 10391 - protein, 80 aa, Synthetic construct; identical to SEQ ID NO: 1544

SEQ ID NO: 10392 - protein, 80 aa, Synthetic construct; identical to SEQ ID NO: 2368

SEQ ID NO: 10393 - protein, 80 aa, Synthetic construct; identical to SEQ ID NO: 2831

SEQ ID NO: 10394 - protein, 80 aa, Synthetic construct; identical to SEQ ID NO: 2833

SEQ ID NO: 10395 - protein, 80 aa, Synthetic construct
VYPKALRDEYIMSKTLGSGACGEVKLAFERKTCKKVAIKIISKRKFAIGSAREADPALNVETEIEILKKLNHPCIIKIKN

SEQ ID NO: 10396 - protein, 80 aa, Synthetic construct
IMSKTLGSGACGEVKLAFERKTCKKVAIKIISKRKFAIGSAREADPALNVETEIEILKKLNHPCIIKIKNFFDAEDYYIV

SEQ ID NO: 10397 - protein, 80 aa, Synthetic construct; identical to SEQ ID NO: 2834

SEQ ID NO: 10398 - protein, 80 aa, Synthetic construct; identical to SEQ ID NO: 2835

SEQ ID NO: 10399 - protein, 80 aa, Synthetic construct; identical to SEQ ID NO: 2042

SEQ ID NO: 10400 - protein, 80 aa, Synthetic construct
RRQGDLMESLEQRAIDLYKQLKHRPSDHSYSDSTEMVKIIVHTVQSQDRVLKELFGHLSKLLGCKQKIIDLLPKVEVALS

SEQ ID NO: 10401 - protein, 80 aa, Synthetic construct
EQRAIDLYKQLKHRPSDHSYSDSTEMVKIIVHTVQSQDRVLKELFGHLSKLLGCKQKIIDLLPKVEVALSNIKEADNTVM

SEQ ID NO: 10402 - protein, 80 aa, Synthetic construct
LKHRPSDHSYSDSTEMVKIIVHTVQSQDRVLKELFGHLSKLLGCKQKIIDLLPKVEVALSNIKEADNTVMFMQGKRQKEI

SEQ ID NO: 10403 - protein, 80 aa, Synthetic construct
SDSTEMVKIIVHTVQSQDRVLKELFGHLSKLLGCKQKIIDLLPKVEVALSNIKEADNTVMFMQGKRQKEIWHLLKIACTQ

SEQ ID NO: 10404 - protein, 80 aa, Synthetic construct
MRQPYLSSREVSSSRKRWRTFPVDCVAMCGDCVEKEYPNRGNTCLENGSFLLNFTGCAVCSKRDFMLITNKSLKEEDGEE

SEQ ID NO: 10405 - protein, 80 aa, Synthetic construct
VSSSRKRWRTFPVDCVAMCGDCVEKEYPNRGNTCLENGSFLLNFTGCAVCSKRDFMLITNKSLKEEDGEEIVTYDHLCKN

SEQ ID NO: 10406 - protein, 80 aa, Synthetic construct
FPVDCVAMCGDCVEKEYPNRGNTCLENGSFLLNFTGCAVCSKRDFMLITNKSLKEEDGEEIVTYDHLCKNCHHVIARHEY

SEQ ID NO: 10407 - protein, 80 aa, Synthetic construct
DCVEKEYPNRGNTCLENGSFLLNFTGCAVCSKRDFMLITNKSLKEEDGEEIVTYDHLCKNCHHVIARHEYTFSIMDEFQE

SEQ ID NO: 10408 - protein, 80 aa, Synthetic construct
AVCSKRDFMLITNKSLKEEDGEEIVTYDHLCKNCHHVIARHEYTFSIMDEFQAKVEEKIQEVFSSYKFNHLVPRLVLQRE

SEQ ID NO: 10409 - protein, 80 aa, Synthetic construct
ITNKSLKEEDGEEIVTYDHLCKNCHHVIARHEYTFSIMDEFQAKVEEKIQEVFSSYKFNHLVPRLVLQREKHFHYLKRGL

SEQ ID NO: 10410 - protein, 80 aa, Synthetic construct; identical to SEQ ID NO: 2845

SEQ ID NO: 10411 - protein, 80 aa, Synthetic construct
CRVRELQRMLDTEKQSRARADQRITESRQVVELAVKEHKAEILALQQALKEQKLKAESLSDKLNDLEKKHAMLEMNARSL

SEQ ID NO: 10412 - protein, 80 aa, Synthetic construct
HIFRLTQGLQEALDRADLLKTERSDLEYQLENIQVLYSHEKVKMEGTISQQTKLIDFLQAKMDQPAKKKKGLFSRRKEDP

SEQ ID NO: 10413 - protein, 80 aa, Synthetic construct; identical to SEQ ID NO: 1773

SEQ ID NO: 10414 - protein, 80 aa, Synthetic construct; identical to SEQ ID NO: 1545

SEQ ID NO: 10415 - protein, 80 aa, Synthetic construct
TEEGLYALNVLKNSLTHVPGIGAVFQIYIIKDLEKLLMIAGEERALCLVDVKKVKQSLAQSHLPAQPDISPNIFEAVKGC

SEQ ID NO: 10416 - protein, 80 aa, Synthetic construct; identical to SEQ ID NO: 2852

SEQ ID NO: 10417 - protein, 80 aa, Synthetic construct
LLAADSQPWGGPFRGCLQDLRLDGCHLPFFPLPLDNSSQPSELGGRQSWNLTAGCVSEDMCSPDPCFNGGTCLVTWNDFH

SEQ ID NO: 10418 - protein, 80 aa, Synthetic construct
GPFRGCLQDLRLDGCHLPFFPLPLDNSSQPSELGGRQSWNLTAGCVSEDMCSPDPCFNGGTCLVTWNDFHCTCPANFTGP

SEQ ID NO: 10419 - protein, 80 aa, Synthetic construct
RLDGCHLPFFPLPLDNSSQPSELGGRQSWNLTAGCVSEDMCSPDPCFNGGTCLVTWNDFHCTCPANFTGPTCAQQLWCPG

SEQ ID NO: 10420 - protein, 80 aa, Synthetic construct; identical to SEQ ID NO: 1735

SEQ ID NO: 10421 - protein, 80 aa, Synthetic construct
DVPVLEMKTETQAEDTEPDPGESKGEPRSEMMEEDLQGASQVKEETDIAEQKSEPMEVDEKKPEVKVEVKEEEESSSNGT

SEQ ID NO: 10422 - protein, 80 aa, Synthetic construct
TQAEDTEPDPGESKGEPRSEMMEEDLQGASQVKEETDIAEQKSEPMEVDEKKPEVKVEVKEEEESSSNGTASQSTSPSQP

SEQ ID NO: 10423 - protein, 80 aa, Synthetic construct
GESKGEPRSEMMEEDLQGASQVKEETDIAEQKSEPMEVDEKKPEVKVEVKEEEESSSNGTASQSTSPSQPRKKIFKPEEL

SEQ ID NO: 10424 - protein, 80 aa, Synthetic construct; identical to SEQ ID NO: 1546

SEQ ID NO: 10425 - protein, 80 aa, Synthetic construct; identical to SEQ ID NO: 1547

SEQ ID NO: 10426 - protein, 80 aa, Synthetic construct; identical to SEQ ID NO: 1736

SEQ ID NO: 10427 - protein, 80 aa, Synthetic construct; identical to SEQ ID NO: 1548

SEQ ID NO: 10428 - protein, 80 aa, Synthetic construct
LAEVFEQEIDPVMQSLGYCCGRKYEFSPQTLCCYGKQLCTIPRDAAYYSYQNRYHFCEKCFTEIQGENVTLGDDPSQPQT

SEQ ID NO: 10429 - protein, 80 aa, Synthetic construct; identical to SEQ ID NO: 2877

SEQ ID NO: 10430 - protein, 80 aa, Synthetic construct
VDCKECGRKMHQICVLHYDIIWPSGFVCDNCLKKTGRPRKENKFSAKRLQTTRLGNHLEDRVNKFLRRQNHPEAGEVFVR

SEQ ID NO: 10431 - protein, 80 aa, Synthetic construct
HQICVLHYDIIWPSGFVCDNCLKKTGRPRKENKFSAKRLQTTRLGNHLEDRVNKFLRRQNHPEAGEVFVRVVASSDKTVE

SEQ ID NO: 10432 - protein, 80 aa, Synthetic construct; identical to SEQ ID NO: 1737

SEQ ID NO: 10433 - protein, 80 aa, Synthetic construct; identical to SEQ ID NO: 1738

SEQ ID NO: 10434 - protein, 80 aa, Synthetic construct; identical to SEQ ID NO: 2254

SEQ ID NO: 10435 - protein, 80 aa, Synthetic construct
REYWDYESHVVEWGNQDDYQLVRKLGRGKYSEVFEAINITNNEKVVVKILKPVKKKKIKREIKILENLRGGPNIITLADI

SEQ ID NO: 10436 - protein, 80 aa, Synthetic construct; identical to SEQ ID NO: 2885

SEQ ID NO: 10437 - protein, 80 aa, Synthetic construct; identical to SEQ ID NO: 2888

SEQ ID NO: 10438 - protein, 80 aa, Synthetic construct
LSAYGTATRILQEKVQADVPPEILNNVGALHFRLGNLGEAKKYFLASLDRAKAEAEHDEHYYNAISVTTSYNLARLYEAM

SEQ ID NO: 10439 - protein, 80 aa, Synthetic construct; identical to SEQ ID NO: 2897

SEQ ID NO: 10440 - protein, 80 aa, Synthetic construct
EIFHTEFQNLLDADKNEDLGRMYNLVSRIQDGLGELKKLLETHIHNQGLAAIEKCGEAALNDPKMYVQTVLDVHKKYNAL

SEQ ID NO: 10441 - protein, 80 aa, Synthetic construct
LDADKNEDLGRMYNLVSRIQDGLGELKKLLETHIHNQGLAAIEKCGEAALNDPKMYVQTVLDVHKKYNALVMSAFNNDAG

SEQ ID NO: 10442 - protein, 80 aa, Synthetic construct
RMYNLVSRIQDGLGELKKLLETHIHNQGLAAIEKCGEAALNDPKMYVQTVLDVHKKYNALVMSAFNNDAGFVAALDKACG

SEQ ID NO: 10443 - protein, 80 aa, Synthetic construct; identical to SEQ ID NO: 2900

SEQ ID NO: 10444 - protein, 80 aa, Synthetic construct; identical to SEQ ID NO: 2901

SEQ ID NO: 10445 - protein, 80 aa, Synthetic construct; identical to SEQ ID NO: 2904

SEQ ID NO: 10446 - protein, 80 aa, Synthetic construct; identical to SEQ ID NO: 2905

SEQ ID NO: 10447 - protein, 80 aa, Synthetic construct
GYWPTQSATPKCNIPPAPRHAFEIFRRFYLAKHSGRQLTLQHHMGSADLNATFYGPVKKEDGSEVGVGGAQVTGSNTRKH

SEQ ID NO: 10448 - protein, 80 aa, Synthetic construct
KCNIPPAPRHAFEIFRRFYLAKHSGRQLTLQHHMGSADLNATFYGPVKKEDGSEVGVGGAQVTGSNTRKHILQVSTFQMT

SEQ ID NO: 10449 - protein, 80 aa, Synthetic construct; identical to SEQ ID NO: 2265

SEQ ID NO: 10450 - protein, 80 aa, Synthetic construct; identical to SEQ ID NO: 2908

SEQ ID NO: 10451 - protein, 80 aa, Synthetic construct
IEREVSILKEIQHPNVITLHEVYENKTDVILILELVAGGELFDFLAEKESLTEEEATEFLKQILNGVYYLHSLQIAHFDL

SEQ ID NO: 10452 - protein, 80 aa, Synthetic construct
IQHPNVITLHEVYENKTDVILILELVAGGELFDFLAEKESLTEEEATEFLKQILNGVYYLHSLQIAHFDLKPENIMLLDR

SEQ ID NO: 10453 - protein, 80 aa, Synthetic construct; identical to SEQ ID NO: 2936

SEQ ID NO: 10454 - protein, 80 aa, Synthetic construct; identical to SEQ ID NO: 2937

SEQ ID NO: 10455 - protein, 80 aa, Synthetic construct; identical to SEQ ID NO: 2942

SEQ ID NO: 10456 - protein, 80 aa, Synthetic construct
NVEAEASMVIAVPEPFGGAIIIGQESITYHNGDKYLAIAPPIIKQSTIVCHNRVDPNGSRYLLGDMEGRLFMLLLEKEEQ

SEQ ID NO: 10457 - protein, 80 aa, Synthetic construct
AVPEPFGGAIIIGQESITYHNGDKYLAIAPPIIKQSTIVCHNRVDPNGSRYLLGDMEGRLFMLLLEKEEQMDGTVTLKDL

SEQ ID NO: 10458 - protein, 80 aa, Synthetic construct; identical to SEQ ID NO: 2944

SEQ ID NO: 10459 - protein, 80 aa, Synthetic construct; identical to SEQ ID NO: 2945

SEQ ID NO: 10460 - protein, 80 aa, Synthetic construct
LLLAYKPMEGNFEEIARDFNPNWMSAVEILDDDNFLGAENAFNLFVCQKDSAATTDEERQHLQEVGLFHLGEFVNVFCHG

SEQ ID NO: 10461 - protein, 80 aa, Synthetic construct
NFEEIARDFNPNWMSAVEILDDDNFLGAENAFNLFVCQKDSAATTDEERQHLQEVGLFHLGEFVNVFCHGSLVMQNLGET

SEQ ID NO: 10462 - protein, 80 aa, Synthetic construct
PNWMSAVEILDDDNFLGAENAFNLFVCQKDSAATTDEERQHLQEVGLFHLGEFVNVFCHGSLVMQNLGETSTPTQGSVLF

SEQ ID NO: 10463 - protein, 80 aa, Synthetic construct
DDDNFLGAENAFNLFVCQKDSAATTDEERQHLQEVGLFHLGEFVNVFCHGSLVMQNLGETSTPTQGSVLFGTVNGMIGLV

SEQ ID NO: 10464 - protein, 80 aa, Synthetic construct
YQESPGIQMKTRLKEGASQRAKQSRRNLPRRSSFRLQTEAQEDDWYDCHREIRLSFSDTYQDYEEYWRAYYRAWQEYYAA

SEQ ID NO: 10465 - protein, 80 aa, Synthetic construct
TRLKEGASQRAKQSRRNLPRRSSFRLQTEAQEDDWYDCHREIRLSFSDTYQDYEEYWRAYYRAWQEYYAAASHSYYWNAQ

SEQ ID NO: 10466 - protein, 80 aa, Synthetic construct
AKQSRRNLPRRSSFRLQTEAQEDDWYDCHREIRLSFSDTYQDYEEYWRAYYRAWQEYYAAASHSYYWNAQRHPSWMAAYH

SEQ ID NO: 10467 - protein, 80 aa, Synthetic construct
RSSFRLQTEAQEDDWYDCHREIRLSFSDTYQDYEEYWRAYYRAWQEYYAAASHSYYWNAQRHPSWMAAYHMNTIYLQEMM

SEQ ID NO: 10468 - protein, 80 aa, Synthetic construct
RLQTEAQEDDWYDCHREIRLSFSDTYQDYEEYWRAYYRAWQEYYAAASHSYYWNAQRHPSWMAAYHMNTIYLQEMMHSNQ

SEQ ID NO: 10469 - protein, 80 aa, Synthetic construct; identical to SEQ ID NO: 2955

SEQ ID NO: 10470 - protein, 80 aa, Synthetic construct; identical to SEQ ID NO: 2956

SEQ ID NO: 10471 - protein, 80 aa, Synthetic construct; identical to SEQ ID NO: 2958

SEQ ID NO: 10472 - protein, 80 aa, Synthetic construct
KINKKTGQPEELVSCSDCGRSGHPSCLQFTPVMMAAVKTYRWQCIECKCCNICGTSENDDQLLFCDDCDRGYHMYCLTPS

SEQ ID NO: 10473 - protein, 80 aa, Synthetic construct
ELVSCSDCGRSGHPSCLQFTPVMMAAVKTYRWQCIECKCCNICGTSENDDQLLFCDDCDRGYHMYCLTPSMSEPPEGSWS

SEQ ID NO: 10474 - protein, 80 aa, Synthetic construct
PVNGLGFPPQNVARVVVWEWLNEHSRWRPYTATVCHHIENVLKEDARGSVVLGQVDAQLVPYIIDLQSMHQFRQDTGTMR

SEQ ID NO: 10475 - protein, 80 aa, Synthetic construct
NVARVVVWEWLNEHSRWRPYTATVCHHIENVLKEDARGSVVLGQVDAQLVPYIIDLQSMHQFRQDTGTMRPVRRNFYDPS

SEQ ID NO: 10476 - protein, 80 aa, Synthetic construct; identical to SEQ ID NO: 3004

SEQ ID NO: 10477 - protein, 80 aa, Synthetic construct
IEKVCGDFQDIERIHQFLSEQFLESEQKQQFSPSMTERKPLSQQERDSCISPSEPETKAEQKSNYFEVPLPYFEYFKYIC

SEQ ID NO: 10478 - protein, 80 aa, Synthetic construct; identical to SEQ ID NO: 3006

SEQ ID NO: 10479 - protein, 80 aa, Synthetic construct; identical to SEQ ID NO: 1902

SEQ ID NO: 10480 - protein, 80 aa, Synthetic construct; identical to SEQ ID NO: 3058

SEQ ID NO: 10481 - protein, 80 aa, Synthetic construct
PPMCTYQLLFPHPVNQVTFLAHPQKSNDLAVLDASNQISVYKCGDCPSADPTVKLGAVGGSGFKVCLRTPHLEKRYKIQF

SEQ ID NO: 10482 - protein, 80 aa, Synthetic construct; identical to SEQ ID NO: 3062

SEQ ID NO: 10483 - protein, 80 aa, Synthetic construct
EHGQLNVSSSAAVDGVIISLCCNSKTKSVVLQLADGQIFKYLWESPSLAIKPWKNSGGFPVRFPYPCTQTELAMIGEEEC

SEQ ID NO: 10484 - protein, 80 aa, Synthetic construct; identical to SEQ ID NO: 1746

SEQ ID NO: 10485 - protein, 80 aa, Synthetic construct; identical to SEQ ID NO: 3068

SEQ ID NO: 10486 - protein, 80 aa, Synthetic construct
ALGLSNKAVFQGDIASQPSDEEELLTSTGFEYQQVAFQPSILTEPPTEDHLLQNTLWPEVQKLYGHGYEIFCVTCNSSKT

SEQ ID NO: 10487 - protein, 80 aa, Synthetic construct
HTLLVASAKEDPANILQELPAPLLDDKCKKEFDEDVYNHKTPESNIKMKIAWRYQLLPKMEIGPVSSSRFGHYYDASKRM

SEQ ID NO: 10488 - protein, 80 aa, Synthetic construct
DPANILQELPAPLLDDKCKKEFDEDVYNHKTPESNIKMKIAWRYQLLPKMEIGPVSSSRFGHYYDASKRMPQELIEASNW

SEQ ID NO: 10489 - protein, 80 aa, Synthetic construct
HQQQPQQSPLPPGIKPTIQIKQESGVKIITQQVQPSKILPKPVTATLPTSSNSPIMVVSSNGAIMTTKLVTTPTGTQATY

SEQ ID NO: 10490 - protein, 80 aa, Synthetic construct
PPGIKPTIQIKQESGVKIITQQVQPSKILPKPVTATLPTSSNSPIMVVSSNGAIMTTKLVTTPTGTQATYTRPTVSPSIG

SEQ ID NO: 10491 - protein, 80 aa, Synthetic construct; identical to SEQ ID NO: 3083

SEQ ID NO: 10492 - protein, 80 aa, Synthetic construct; identical to SEQ ID NO: 2219

SEQ ID NO: 10493 - protein, 80 aa, Synthetic construct
QPSQEVKMEAKMEVDQPEPADTQPEDISESKVEDCKMESTETEERSTELKTEIKEEEDQPSTSATQSSPAPGQSKKKIFK

SEQ ID NO: 10494 - protein, 80 aa, Synthetic construct
KMEVDQPEPADTQPEDISESKVEDCKMESTETEERSTELKTEIKEEEDQPSTSATQSSPAPGQSKKKIFKPEELRQALMP

SEQ ID NO: 10495 - protein, 80 aa, Synthetic construct
DTQPEDISESKVEDCKMESTETEERSTELKTEIKEEEDQPSTSATQSSPAPGQSKKKIFKPEELRQALMPTLEALYRQDP

SEQ ID NO: 10496 - protein, 80 aa, Synthetic construct
ETEERSTELKTEIKEEEDQPSTSATQSSPAPGQSKKKIFKPEELRQALMPTLEALYRQDPESLPFRQPVDPQLLGIPDYF

SEQ ID NO: 10497 - protein, 80 aa, Synthetic construct
TEIKEEEDQPSTSATQSSPAPGQSKKKIFKPEELRQALMPTLEALYRQDPESLPFRQPVDPQLLGIPDYFDIVKSPMDLS

SEQ ID NO: 10498 - protein, 80 aa, Synthetic construct; identical to SEQ ID NO: 3086

SEQ ID NO: 10499 - protein, 80 aa, Synthetic construct; identical to SEQ ID NO: 2220

SEQ ID NO: 10500 - protein, 80 aa, Synthetic construct; identical to SEQ ID NO: 1549

SEQ ID NO: 10501 - protein, 80 aa, Synthetic construct; identical to SEQ ID NO: 3088

SEQ ID NO: 10502 - protein, 80 aa, Synthetic construct
KRKNCRGPSLIPSVKQEKRDGSSTNDPYVAFRRRTEKMQTRKNRKNDEASYEKMLKLRRDLSRAVTILEMIKRREKSKRE

SEQ ID NO: 10503 - protein, 80 aa, Synthetic construct; identical to SEQ ID NO: 3099

SEQ ID NO: 10504 - protein, 80 aa, Synthetic construct
DETLLNRLNRKMEIKPLQFEIMIDRLEKASSNQLVTLQEAKLLLNEDDYLIKAVYDYWVRKRKNCRGPSLIPQIKQEKRD

SEQ ID NO: 10505 - protein, 80 aa, Synthetic construct
KMEIKPLQFEIMIDRLEKASSNQLVTLQEAKLLLNEDDYLIKAVYDYWVRKRKNCRGPSLIPQIKQEKRDGSTNNDPYVA

SEQ ID NO: 10506 - protein, 80 aa, Synthetic construct
IMIDRLEKASSNQLVTLQEAKLLLNEDDYLIKAVYDYWVRKRKNCRGPSLIPQIKQEKRDGSTNNDPYVAFRRRTEKMQT

SEQ ID NO: 10507 - protein, 80 aa, Synthetic construct; identical to SEQ ID NO: 3103

SEQ ID NO: 10508 - protein, 80 aa, Synthetic construct; identical to SEQ ID NO: 3104

SEQ ID NO: 10509 - protein, 80 aa, Synthetic construct; identical to SEQ ID NO: 3105

SEQ ID NO: 10510 - protein, 80 aa, Synthetic construct
DCLACLHFNHSGICELHCPALVTYNTDTFESMPNPEGRYTFGASCVTACPYNYLSTDVGSCTLVCPLHNQEVTAEDGTQR

SEQ ID NO: 10511 - protein, 80 aa, Synthetic construct; identical to SEQ ID NO: 3109

SEQ ID NO: 10512 - protein, 80 aa, Synthetic construct
KSDIPMDLFDFYEQMDKDEEEEEETQTVSFEVKQEMIEELQKRCIHLEYPLLAEYDFRNDSVNPDINIDLKPTAVLRPYQ

SEQ ID NO: 10513 - protein, 80 aa, Synthetic construct
FYEQMDKDEEEEEETQTVSFEVKQEMIEELQKRCIHLEYPLLAEYDFRNDSVNPDINIDLKPTAVLRPYQEKSLRKMFGN

SEQ ID NO: 10514 - protein, 80 aa, Synthetic construct; identical to SEQ ID NO: 3113

SEQ ID NO: 10515 - protein, 80 aa, Synthetic construct
EEGYRREISSSPESCPEEIKHEEFDVNLSSDAAFGILKEPLTIIHPLLGCSDPYALTRVLHEVEPRYVVLYDAELTFVRQ

SEQ ID NO: 10516 - protein, 80 aa, Synthetic construct
MPNEGIPHSSQTQEQDCLQSQPVSNNEEMAIKQESGGDGEVEEYLSFRSVGDGLSTSAVGCASAAPRRGPALLHIDRHQI

SEQ ID NO: 10517 - protein, 80 aa, Synthetic construct
QTQEQDCLQSQPVSNNEEMAIKQESGGDGEVEEYLSFRSVGDGLSTSAVGCASAAPRRGPALLHIDRHQIQAVEPSAQAL

SEQ ID NO: 10518 - protein, 80 aa, Synthetic construct
QPVSNNEEMAIKQESGGDGEVEEYLSFRSVGDGLSTSAVGCASAAPRRGPALLHIDRHQIQAVEPSAQALELQGLGVDVY

SEQ ID NO: 10519 - protein, 80 aa, Synthetic construct
IKQESGGDGEVEEYLSFRSVGDGLSTSAVGCASAAPRRGPALLHIDRHQIQAVEPSAQALELQGLGVDVYDQDVLEQGVL

SEQ ID NO: 10520 - protein, 80 aa, Synthetic construct
NKIIEQLSPQAATSRDINRKLDSVKRQKYNKEQQLKKITAKQKHLQAILGGAEVKIELDHASLEEDAEPGPSSLGSMLMP

SEQ ID NO: 10521 - protein, 80 aa, Synthetic construct
LDSVKRQKYNKEQQLKKITAKQKHLQAILGGAEVKIELDHASLEEDAEPGPSSLGSMLMPVQETAWEELIRTGQMTPFGT

SEQ ID NO: 10522 - protein, 80 aa, Synthetic construct
KEQQLKKITAKQKHLQAILGGAEVKIELDHASLEEDAEPGPSSLGSMLMPVQETAWEELIRTGQMTPFGTQIPQKQEKKP

SEQ ID NO: 10523 - protein, 80 aa, Synthetic construct
KQKHLQAILGGAEVKIELDHASLEEDAEPGPSSLGSMLMPVQETAWEELIRTGQMTPFGTQIPQKQEKKPRKIMLNEASG

SEQ ID NO: 10524 - protein, 80 aa, Synthetic construct
GAEVKIELDHASLEEDAEPGPSSLGSMLMPVQETAWEELIRTGQMTPFGTQIPQKQEKKPRKIMLNEASGFEKYLADQAK

SEQ ID NO: 10525 - protein, 80 aa, Synthetic construct
GSMPLKNSFRGTIRKEDVRATEKDKVEIYKSFRPGDIVLAKVISLGDAQSNYLLTTAENELGVVVAHSESGIQMVPISWC

SEQ ID NO: 10526 - protein, 80 aa, Synthetic construct
GTIRKEDVRATEKDKVEIYKSFRPGDIVLAKVISLGDAQSNYLLTTAENELGVVVAHSESGIQMVPISWCEMQCPKTHTK

SEQ ID NO: 10527 - protein, 80 aa, Synthetic construct
TEKDKVEIYKSFRPGDIVLAKVISLGDAQSNYLLTTAENELGVVVAHSESGIQMVPISWCEMQCPKTHTKEFRKVARVQP

SEQ ID NO: 10528 - protein, 80 aa, Synthetic construct
VEIYKSFRPGDIVLAKVISLGDAQSNYLLTTAENELGVVVAHSESGIQMVPISWCEMQCPKTHTKEFRKVARVQPEFLQT

SEQ ID NO: 10529 - protein, 80 aa, Synthetic construct; identical to SEQ ID NO: 3167

SEQ ID NO: 10530 - protein, 80 aa, Synthetic construct; identical to SEQ ID NO: 3168

SEQ ID NO: 10531 - protein, 80 aa, Synthetic construct; identical to SEQ ID NO: 3170

SEQ ID NO: 10532 - protein, 80 aa, Synthetic construct; identical to SEQ ID NO: 3171

SEQ ID NO: 10533 - protein, 80 aa, Synthetic construct; identical to SEQ ID NO: 3172

SEQ ID NO: 10534 - protein, 80 aa, Synthetic construct; identical to SEQ ID NO: 3173

SEQ ID NO: 10535 - protein, 80 aa, Synthetic construct
MEMQDLTSPHSRLSGSSESPSGPKLGNSHINSNSMTPNGTEVKTEPMSSSETASTTADGSLNNFSGSAIGSSSFSPRPTH

SEQ ID NO: 10536 - protein, 80 aa, Synthetic construct
SRLSGSSESPSGPKLGNSHINSNSMTPNGTEVKTEPMSSSETASTTADGSLNNFSGSAIGSSSFSPRPTHQFSPPQIYPS

SEQ ID NO: 10537 - protein, 80 aa, Synthetic construct
SGPKLGNSHINSNSMTPNGTEVKTEPMSSSETASTTADGSLNNFSGSAIGSSSFSPRPTHQFSPPQIYPSNRPYPHILPT

SEQ ID NO: 10538 - protein, 80 aa, Synthetic construct
NSNSMTPNGTEVKTEPMSSSETASTTADGSLNNFSGSAIGSSSFSPRPTHQFSPPQIYPSNRPYPHILPTPSSQTMAAYG

SEQ ID NO: 10539 - protein, 80 aa, Synthetic construct
EVKTEPMSSSETASTTADGSLNNFSGSAIGSSSFSPRPTHQFSPPQIYPSNRPYPHILPTPSSQTMAAYGQTQFTTGMQQ

SEQ ID NO: 10540 - protein, 80 aa, Synthetic construct
SSSFSPRPTHQFSPPQIYPSNRPYPHILPTPSSQTMAAYGQTQFTTGMQQATAYATYPQPGQPYGISSYGALWAGIKTEG

SEQ ID NO: 10541 - protein, 80 aa, Synthetic construct
QFSPPQIYPSNRPYPHILPTPSSQTMAAYGQTQFTTGMQQATAYATYPQPGQPYGISSYGALWAGIKTEGGLSQSQSPGQ

SEQ ID NO: 10542 - protein, 80 aa, Synthetic construct
NRPYPHILPTPSSQTMAAYGQTQFTTGMQQATAYATYPQPGQPYGISSYGALWAGIKTEGGLSQSQSPGQTGFLSYGTSF

SEQ ID NO: 10543 - protein, 80 aa, Synthetic construct
PSSQTMAAYGQTQFTTGMQQATAYATYPQPGQPYGISSYGALWAGIKTEGGLSQSQSPGQTGFLSYGTSFSTPQPGQAPY

SEQ ID NO: 10544 - protein, 80 aa, Synthetic construct
QTQFTTGMQQATAYATYPQPGQPYGISSYGALWAGIKTEGGLSQSQSPGQTGFLSYGTSFSTPQPGQAPYSYQMQGSSFT

SEQ ID NO: 10545 - protein, 80 aa, Synthetic construct
ATAYATYPQPGQPYGISSYGALWAGIKTEGGLSQSQSPGQTGFLSYGTSFSTPQPGQAPYSYQMQGSSFTTSSGIYTGNN

SEQ ID NO: 10546 - protein, 80 aa, Synthetic construct
GQPYGISSYGALWAGIKTEGGLSQSQSPGQTGFLSYGTSFSTPQPGQAPYSYQMQGSSFTTSSGIYTGNNSLTNSSGFNS

SEQ ID NO: 10547 - protein, 80 aa, Synthetic construct
ALWAGIKTEGGLSQSQSPGQTGFLSYGTSFSTPQPGQAPYSYQMQGSSFTTSSGIYTGNNSLTNSSGFNSSQQDYPSYPS

SEQ ID NO: 10548 - protein, 80 aa, Synthetic construct
SAPLRVSQLFSRSCPRVLPRQPSTAMAAYGQTQYSAGIQQATPYTAYPPPAQAYGIPSYSIKTEDSLNHSPGQSGFLSYG

SEQ ID NO: 10549 - protein, 80 aa, Synthetic construct
SRSCPRVLPRQPSTAMAAYGQTQYSAGIQQATPYTAYPPPAQAYGIPSYSIKTEDSLNHSPGQSGFLSYGSSFSTSPTGQ

SEQ ID NO: 10550 - protein, 80 aa, Synthetic construct
QPSTAMAAYGQTQYSAGIQQATPYTAYPPPAQAYGIPSYSIKTEDSLNHSPGQSGFLSYGSSFSTSPTGQSPYTYQMHGT

SEQ ID NO: 10551 - protein, 80 aa, Synthetic construct
QTQYSAGIQQATPYTAYPPPAQAYGIPSYSIKTEDSLNHSPGQSGFLSYGSSFSTSPTGQSPYTYQMHGTTGFYQGGNGL

SEQ ID NO: 10552 - protein, 80 aa, Synthetic construct
ATPYTAYPPPAQAYGIPSYSIKTEDSLNHSPGQSGFLSYGSSFSTSPTGQSPYTYQMHGTTGFYQGGNGLGNAAGFGSVH

SEQ ID NO: 10553 - protein, 80 aa, Synthetic construct
AQAYGIPSYSIKTEDSLNHSPGQSGFLSYGSSFSTSPTGQSPYTYQMHGTTGFYQGGNGLGNAAGFGSVHQDYPSYPGFP

SEQ ID NO: 10554 - protein, 80 aa, Synthetic construct; identical to SEQ ID NO: 2149

SEQ ID NO: 10555 - protein, 80 aa, Synthetic construct; identical to SEQ ID NO: 3181

SEQ ID NO: 10556 - protein, 80 aa, Synthetic construct
ENMTVLNTADWLLSCNTPSSATMSLLAVKTEPLNSSETTATTGDGALDTFTGSVITSSGYSPRSAHQYSPQLYPSKPYPH

SEQ ID NO: 10557 - protein, 80 aa, Synthetic construct
WLLSCNTPSSATMSLLAVKTEPLNSSETTATTGDGALDTFTGSVITSSGYSPRSAHQYSPQLYPSKPYPHILSTPAAQTM

SEQ ID NO: 10558 - protein, 80 aa, Synthetic construct
ATMSLLAVKTEPLNSSETTATTGDGALDTFTGSVITSSGYSPRSAHQYSPQLYPSKPYPHILSTPAAQTMSAYAGQTQYS

SEQ ID NO: 10559 - protein, 80 aa, Synthetic construct
SPRSAHQYSPQLYPSKPYPHILSTPAAQTMSAYAGQTQYSGMQQPAVYTAYSQTGQPYSLPTYDLGVMLPAIKTESGLSQ

SEQ ID NO: 10560 - protein, 80 aa, Synthetic construct
QLYPSKPYPHILSTPAAQTMSAYAGQTQYSGMQQPAVYTAYSQTGQPYSLPTYDLGVMLPAIKTESGLSQTQSPLQSGCL

SEQ ID NO: 10561 - protein, 80 aa, Synthetic construct
ILSTPAAQTMSAYAGQTQYSGMQQPAVYTAYSQTGQPYSLPTYDLGVMLPAIKTESGLSQTQSPLQSGCLSYSPGFSTPQ

SEQ ID NO: 10562 - protein, 80 aa, Synthetic construct
SAYAGQTQYSGMQQPAVYTAYSQTGQPYSLPTYDLGVMLPAIKTESGLSQTQSPLQSGCLSYSPGFSTPQPGQTPYSYQM

SEQ ID NO: 10563 - protein, 80 aa, Synthetic construct
GMQQPAVYTAYSQTGQPYSLPTYDLGVMLPAIKTESGLSQTQSPLQSGCLSYSPGFSTPQPGQTPYSYQMPGSSFAPSST

SEQ ID NO: 10564 - protein, 80 aa, Synthetic construct
YSQTGQPYSLPTYDLGVMLPAIKTESGLSQTQSPLQSGCLSYSPGFSTPQPGQTPYSYQMPGSSFAPSSTIYANNSVSNS

SEQ ID NO: 10565 - protein, 80 aa, Synthetic construct
PTYDLGVMLPAIKTESGLSQTQSPLQSGCLSYSPGFSTPQPGQTPYSYQMPGSSFAPSSTIYANNSVSNSTNFSGSQQDY

SEQ ID NO: 10566 - protein, 80 aa, Synthetic construct; identical to SEQ ID NO: 1550

SEQ ID NO: 10567 - protein, 80 aa, Synthetic construct; identical to SEQ ID NO: 1724

SEQ ID NO: 10568 - protein, 80 aa, Synthetic construct; identical to SEQ ID NO: 1551

SEQ ID NO: 10569 - protein, 80 aa, Synthetic construct; identical to SEQ ID NO: 1552

SEQ ID NO: 10570 - protein, 80 aa, Synthetic construct; identical to SEQ ID NO: 1553

SEQ ID NO: 10571 - protein, 80 aa, Synthetic construct
ASILSQKPGRWCAVHVQIAWQIYRHQQKIKEMQLDPHKLEVGAKLDLFGRPPAPGVFAGFHYPQDLARPLFPSTGAAHPA

SEQ ID NO: 10572 - protein, 80 aa, Synthetic construct
WCAVHVQIAWQIYRHQQKIKEMQLDPHKLEVGAKLDLFGRPPAPGVFAGFHYPQDLARPLFPSTGAAHPASNPFGPSAHP

SEQ ID NO: 10573 - protein, 80 aa, Synthetic construct; identical to SEQ ID NO: 3192

SEQ ID NO: 10574 - protein, 80 aa, Synthetic construct
GRSGAPAEREAEPRVKESRSPAKEEAAKMPARASPPHSKAAPGDVKVKEERGEDEASEPPAGGLHPAPLQLGLGRERLGA

SEQ ID NO: 10575 - protein, 80 aa, Synthetic construct
AEPRVKESRSPAKEEAAKMPARASPPHSKAAPGDVKVKEERGEDEASEPPAGGLHPAPLQLGLGRERLGAPGFAWEPFRG

SEQ ID NO: 10576 - protein, 80 aa, Synthetic construct
PAKEEAAKMPARASPPHSKAAPGDVKVKEERGEDEASEPPAGGLHPAPLQLGLGRERLGAPGFAWEPFRGLELPRRAFPA

SEQ ID NO: 10577 - protein, 80 aa, Synthetic construct
ARASPPHSKAAPGDVKVKEERGEDEASEPPAGGLHPAPLQLGLGRERLGAPGFAWEPFRGLELPRRAFPAAAPAPGSAAL

SEQ ID NO: 10578 - protein, 80 aa, Synthetic construct; identical to SEQ ID NO: 3285

SEQ ID NO: 10579 - protein, 80 aa, Synthetic construct; identical to SEQ ID NO: 3286

SEQ ID NO: 10580 - protein, 80 aa, Synthetic construct; identical to SEQ ID NO: 3331

SEQ ID NO: 10581 - protein, 80 aa, Synthetic construct; identical to SEQ ID NO: 1554

SEQ ID NO: 10582 - protein, 80 aa, Synthetic construct; identical to SEQ ID NO: 2259

SEQ ID NO: 10583 - protein, 80 aa, Synthetic construct; identical to SEQ ID NO: 1555

SEQ ID NO: 10584 - protein, 80 aa, Synthetic construct; identical to SEQ ID NO: 1556

SEQ ID NO: 10585 - protein, 80 aa, Synthetic construct; identical to SEQ ID NO: 1557

SEQ ID NO: 10586 - protein, 80 aa, Synthetic construct; identical to SEQ ID NO: 2260

SEQ ID NO: 10587 - protein, 80 aa, Synthetic construct
FSMAHLDGNTEPGLTLGGYFCPQCRAKYCELPVECKICGLTLVSAPHLARSYHHLFPLDAFQEIPLEEYNGERFCYGCQG

SEQ ID NO: 10588 - protein, 80 aa, Synthetic construct
EPGLTLGGYFCPQCRAKYCELPVECKICGLTLVSAPHLARSYHHLFPLDAFQEIPLEEYNGERFCYGCQGELKDQHVYVC

SEQ ID NO: 10589 - protein, 80 aa, Synthetic construct
CPQCRAKYCELPVECKICGLTLVSAPHLARSYHHLFPLDAFQEIPLEEYNGERFCYGCQGELKDQHVYVCAVCQNVFCVD

SEQ ID NO: 10590 - protein, 80 aa, Synthetic construct
LPVECKICGLTLVSAPHLARSYHHLFPLDAFQEIPLEEYNGERFCYGCQGELKDQHVYVCAVCQNVFCVDCDVFVHDSLH

SEQ ID NO: 10591 - protein, 80 aa, Synthetic construct; identical to SEQ ID NO: 3343

SEQ ID NO: 10592 - protein, 80 aa, Synthetic construct
MAAAADERSPEDGEDEEEEEQLVLVELSGIIDSDFLSKCENKCKVLGIDTERPILQVDSCVFAGEYEDTLGTCVIFEENV

SEQ ID NO: 10593 - protein, 80 aa, Synthetic construct
EDGEDEEEEEQLVLVELSGIIDSDFLSKCENKCKVLGIDTERPILQVDSCVFAGEYEDTLGTCVIFEENVEHADTEGNNK

SEQ ID NO: 10594 - protein, 80 aa, Synthetic construct
QTMVTQQTIKTESSSTNGAVVKDETSLTTFSTKSEVDETYALPATKISRVETHATATPFSKETPSNPVATVKAGERQWCD

SEQ ID NO: 10595 - protein, 80 aa, Synthetic construct; identical to SEQ ID NO: 3374

SEQ ID NO: 10596 - protein, 80 aa, Synthetic construct; identical to SEQ ID NO: 3381

SEQ ID NO: 10597 - protein, 80 aa, Synthetic construct; identical to SEQ ID NO: 3398

SEQ ID NO: 10598 - protein, 80 aa, Synthetic construct; identical to SEQ ID NO: 3402

SEQ ID NO: 10599 - protein, 80 aa, Synthetic construct
TAAATLSVWDVHRQVVVVKEESLHSILAGSDMTVSQILLTQHGIPVMNLSDGKAYCFNPSLSTWNLVSDKQDSLAQCADF

SEQ ID NO: 10600 - protein, 80 aa, Synthetic construct
VHRQVVVVKEESLHSILAGSDMTVSQILLTQHGIPVMNLSDGKAYCFNPSLSTWNLVSDKQDSLAQCADFRSSLPSQDAM

SEQ ID NO: 10601 - protein, 80 aa, Synthetic construct; identical to SEQ ID NO: 3426

SEQ ID NO: 10602 - protein, 80 aa, Synthetic construct; identical to SEQ ID NO: 3427

SEQ ID NO: 10603 - protein, 80 aa, Synthetic construct
SSRKMKTKSDMMEENIDTSAQAVAETKQEAVVEEDYNENAKNGEAKITEAPASEKEIVEVKEENIEDATEKGGEKKEAVA

SEQ ID NO: 10604 - protein, 80 aa, Synthetic construct
MMEENIDTSAQAVAETKQEAVVEEDYNENAKNGEAKITEAPASEKEIVEVKEENIEDATEKGGEKKEAVAAEVKNEEEDQ

SEQ ID NO: 10605 - protein, 80 aa, Synthetic construct
QAVAETKQEAVVEEDYNENAKNGEAKITEAPASEKEIVEVKEENIEDATEKGGEKKEAVAAEVKNEEEDQKEDEEDQNEE

SEQ ID NO: 10606 - protein, 80 aa, Synthetic construct; identical to SEQ ID NO: 2284

SEQ ID NO: 10607 - protein, 80 aa, Synthetic construct
KNGEAKITEAPASEKEIVEVKEENIEDATEKGGEKKEAVAAEVKNEEEDQKEDEEDQNEEKGEAGKEDKDEKGEEDGKED

SEQ ID NO: 10608 - protein, 80 aa, Synthetic construct; identical to SEQ ID NO: 3438

SEQ ID NO: 10609 - protein, 80 aa, Synthetic construct
GYSLKGIKTCNCETEDYGEKFDENDVITCFANFESDEVELSYAKNGQDLGVAFKISKEVLAGRPLFPHVLCHNCAVEFNF

SEQ ID NO: 10610 - protein, 80 aa, Synthetic construct
FDENDVITCFANFESDEVELSYAKNGQDLGVAFKISKEVLAGRPLFPHVLCHNCAVEFNFGQKEKPYFPIPEEYTFIQNV

SEQ ID NO: 10611 - protein, 80 aa, Synthetic construct; identical to SEQ ID NO: 3478

SEQ ID NO: 10612 - protein, 80 aa, Synthetic construct; identical to SEQ ID NO: 1558

SEQ ID NO: 10613 - protein, 80 aa, Synthetic construct; identical to SEQ ID NO: 2322

SEQ ID NO: 10614 - protein, 80 aa, Synthetic construct; identical to SEQ ID NO: 1559

SEQ ID NO: 10615 - protein, 80 aa, Synthetic construct; identical to SEQ ID NO: 1560

SEQ ID NO: 10616 - protein, 80 aa, Synthetic construct
EVNKASGPRACPPSHHTKLKKTWLTRHSEQFECPRGCPEVEERPVARLRALKRAGSPEVQGAMGSPAPKRPPDPFPGTAE

SEQ ID NO: 10617 - protein, 80 aa, Synthetic construct
AELSTAMHQVWVKFDIRGHCPCQADARVWAPGDAGQQKESTQKTPPTPQPSCNGDTHRTKSIKEETPDSAETPAEDRAGR

SEQ ID NO: 10618 - protein, 80 aa, Synthetic construct
WVKFDIRGHCPCQADARVWAPGDAGQQKESTQKTPPTPQPSCNGDTHRTKSIKEETPDSAETPAEDRAGRGPLPCPSLCE

SEQ ID NO: 10619 - protein, 80 aa, Synthetic construct
PCQADARVWAPGDAGQQKESTQKTPPTPQPSCNGDTHRTKSIKEETPDSAETPAEDRAGRGPLPCPSLCELLASTAVKLC

SEQ ID NO: 10620 - protein, 80 aa, Synthetic construct; identical to SEQ ID NO: 3483

SEQ ID NO: 10621 - protein, 80 aa, Synthetic construct; identical to SEQ ID NO: 3501

SEQ ID NO: 10622 - protein, 80 aa, Synthetic construct
SGDKSENVQDLLLLDVTPLSLGIETAGGVMTVLIKRNTTIPTKQTQTFTTYSDNQPGVLIQVYEGERAMTKDNNLLGKFE

SEQ ID NO: 10623 - protein, 80 aa, Synthetic construct
LGIETAGGVMTVLIKRNTTIPTKQTQTFTTYSDNQPGVLIQVYEGERAMTKDNNLLGKFELTGIPPAPRGVPQIEVTFDI

SEQ ID NO: 10624 - protein, 80 aa, Synthetic construct
DVDQPSPSAQDTQSIASDGTPQGEKEKEERPPELPLLSEQLSLDELWDMLGECLKELEESHDQHAVLVLQPAVEAFFLVH

SEQ ID NO: 10625 - protein, 80 aa, Synthetic construct
DTQSIASDGTPQGEKEKEERPPELPLLSEQLSLDELWDMLGECLKELEESHDQHAVLVLQPAVEAFFLVHATERESKPPV

SEQ ID NO: 10626 - protein, 80 aa, Synthetic construct
HDQHAVLVLQPAVEAFFLVHATERESKPPVRDTRESQLAHIKDEPPPLSPAPLTPATPSSLDPFFSREPSSMHISSSLPP

SEQ ID NO: 10627 - protein, 80 aa, Synthetic construct
PAVEAFFLVHATERESKPPVRDTRESQLAHIKDEPPPLSPAPLTPATPSSLDPFFSREPSSMHISSSLPPDTQKFLRFAE

SEQ ID NO: 10628 - protein, 80 aa, Synthetic construct
ATERESKPPVRDTRESQLAHIKDEPPPLSPAPLTPATPSSLDPFFSREPSSMHISSSLPPDTQKFLRFAETHRTVLNQIL

SEQ ID NO: 10629 - protein, 80 aa, Synthetic construct
RDTRESQLAHIKDEPPPLSPAPLTPATPSSLDPFFSREPSSMHISSSLPPDTQKFLRFAETHRTVLNQILRQSTTHLADG

SEQ ID NO: 10630 - protein, 80 aa, Synthetic construct
IKDEPPPLSPAPLTPATPSSLDPFFSREPSSMHISSSLPPDTQKFLRFAETHRTVLNQILRQSTTHLADGPFAVLVDYIR

SEQ ID NO: 10631 - protein, 80 aa, Synthetic construct; identical to SEQ ID NO: 3527

SEQ ID NO: 10632 - protein, 80 aa, Synthetic construct; identical to SEQ ID NO: 3528

SEQ ID NO: 10633 - protein, 80 aa, Synthetic construct; identical to SEQ ID NO: 3529

SEQ ID NO: 10634 - protein, 80 aa, Synthetic construct; identical to SEQ ID NO: 3530

SEQ ID NO: 10635 - protein, 80 aa, Synthetic construct
RGRGRRTSEEDTPKKKKHKGGSEFTDTILSVHPSDVLDMPVDPNEPTYCLCHQVSYGEMIGCDNPDCPIEWFHFACVDLT

SEQ ID NO: 10636 - protein, 80 aa, Synthetic construct
DTPKKKKHKGGSEFTDTILSVHPSDVLDMPVDPNEPTYCLCHQVSYGEMIGCDNPDCPIEWFHFACVDLTTKPKGKWFCP

SEQ ID NO: 10637 - protein, 80 aa, Synthetic construct
MASELGARDDGGCTELAKPLYLQYLERALRLDHFLRQTSAIFNRNISSDDSEDGLDDSNPLLPQSGDPLIQVKEEPPNSL

SEQ ID NO: 10638 - protein, 80 aa, Synthetic construct
GGCTELAKPLYLQYLERALRLDHFLRQTSAIFNRNISSDDSEDGLDDSNPLLPQSGDPLIQVKEEPPNSLLGETSGAGSS

SEQ ID NO: 10639 - protein, 80 aa, Synthetic construct
YLQYLERALRLDHFLRQTSAIFNRNISSDDSEDGLDDSNPLLPQSGDPLIQVKEEPPNSLLGETSGAGSSGMLNTYSLNG

SEQ ID NO: 10640 - protein, 80 aa, Synthetic construct
LDHFLRQTSAIFNRNISSDDSEDGLDDSNPLLPQSGDPLIQVKEEPPNSLLGETSGAGSSGMLNTYSLNGVLQSESKCDK

SEQ ID NO: 10641 - protein, 80 aa, Synthetic construct; identical to SEQ ID NO: 3534

SEQ ID NO: 10642 - protein, 80 aa, Synthetic construct; identical to SEQ ID NO: 3540

SEQ ID NO: 10643 - protein, 80 aa, Synthetic construct; identical to SEQ ID NO: 400

SEQ ID NO: 10644 - protein, 80 aa, Synthetic construct; identical to SEQ ID NO: 401

SEQ ID NO: 10645 - protein, 80 aa, Synthetic construct
SEPPELGYVDIRTLADSVCRYDLNDMDAAWLELTNEEFKEMGMPELDEYTMERVLEEFEQRCYDNMNHAIETEEGLGIEY

SEQ ID NO: 10646 - protein, 80 aa, Synthetic construct; identical to SEQ ID NO: 403

SEQ ID NO: 10647 - protein, 80 aa, Synthetic construct
MGMPELDEYTMERVLEEFEQRCYDNMNHAIETEEGLGIEYDEDVVCDVCQSPDGEDGNEMVFCDKCNICVHQACYGILKV

SEQ ID NO: 10648 - protein, 80 aa, Synthetic construct; identical to SEQ ID NO: 405

SEQ ID NO: 10649 - protein, 80 aa, Synthetic construct; identical to SEQ ID NO: 3577

SEQ ID NO: 10650 - protein, 80 aa, Synthetic construct; identical to SEQ ID NO: 3578

SEQ ID NO: 10651 - protein, 80 aa, Synthetic construct; identical to SEQ ID NO: 1561

SEQ ID NO: 10652 - protein, 80 aa, Synthetic construct; identical to SEQ ID NO: 1754

SEQ ID NO: 10653 - protein, 80 aa, Synthetic construct; identical to SEQ ID NO: 1755

SEQ ID NO: 10654 - protein, 80 aa, Synthetic construct; identical to SEQ ID NO: 1562

SEQ ID NO: 10655 - protein, 80 aa, Synthetic construct; identical to SEQ ID NO: 1563

SEQ ID NO: 10656 - protein, 80 aa, Synthetic construct; identical to SEQ ID NO: 1564

SEQ ID NO: 10657 - protein, 80 aa, Synthetic construct; identical to SEQ ID NO: 1565

SEQ ID NO: 10658 - protein, 80 aa, Synthetic construct; identical to SEQ ID NO: 1566

SEQ ID NO: 10659 - protein, 80 aa, Synthetic construct
DKFCQLVTSEKTALSWVKKDAKIAWKRAVRGVREMCDACEATLFNIHWVCQKCGFVVCLDCYKAKERKSSRDKELYAWMK

SEQ ID NO: 10660 - protein, 80 aa, Synthetic construct
KTALSWVKKDAKIAWKRAVRGVREMCDACEATLFNIHWVCQKCGFVVCLDCYKAKERKSSRDKELYAWMKCVKGQPHDHK

SEQ ID NO: 10661 - protein, 80 aa, Synthetic construct
GVREMCDACEATLFNIHWVCQKCGFVVCLDCYKAKERKSSRDKELYAWMKCVKGQPHDHKHLMPTQIIPGSVLTDLLDAM

SEQ ID NO: 10662 - protein, 80 aa, Synthetic construct
QKCGFVVCLDCYKAKERKSSRDKELYAWMKCVKGQPHDHKHLMPTQIIPGSVLTDLLDAMHTLREKYGIKSHCHCTNKQN

SEQ ID NO: 10663 - protein, 80 aa, Synthetic construct; identical to SEQ ID NO: 1756

SEQ ID NO: 10664 - protein, 80 aa, Synthetic construct
TPPESQSPLHWLADLAEQKAREEKKENKELTLENQIKEEREQDNSESPNGRTSPLVSQNNEQGSTLRDLLTTTAGKLRVG

SEQ ID NO: 10665 - protein, 80 aa, Synthetic construct
WLADLAEQKAREEKKENKELTLENQIKEEREQDNSESPNGRTSPLVSQNNEQGSTLRDLLTTTAGKLRVGSTDAGIAFAP

SEQ ID NO: 10666 - protein, 80 aa, Synthetic construct
REEKKENKELTLENQIKEEREQDNSESPNGRTSPLVSQNNEQGSTLRDLLTTTAGKLRVGSTDAGIAFAPVYSMGAPSSK

SEQ ID NO: 10667 - protein, 80 aa, Synthetic construct
TLENQIKEEREQDNSESPNGRTSPLVSQNNEQGSTLRDLLTTTAGKLRVGSTDAGIAFAPVYSMGAPSSKSGRTMPNILD

SEQ ID NO: 10668 - protein, 80 aa, Synthetic construct
TTTAGKLRVGSTDAGIAFAPVYSMGAPSSKSGRTMPNILDDIIASVVENKIPPSKTSKINVKPELKEEPEESIISAVDEN

SEQ ID NO: 10669 - protein, 80 aa, Synthetic construct
STDAGIAFAPVYSMGAPSSKSGRTMPNILDDIIASVVENKIPPSKTSKINVKPELKEEPEESIISAVDENNKLYSDIPHS

SEQ ID NO: 10670 - protein, 80 aa, Synthetic construct; identical to SEQ ID NO: 1757

SEQ ID NO: 10671 - protein, 80 aa, Synthetic construct
SGRTMPNILDDIIASVVENKIPPSKTSKINVKPELKEEPEESIISAVDENNKLYSDIPHSWICEKHILWLKDYKNSSNWK

SEQ ID NO: 10672 - protein, 80 aa, Synthetic construct; identical to SEQ ID NO: 3590

SEQ ID NO: 10673 - protein, 80 aa, Synthetic construct
VKPELKEEPEESIISAVDENNKLYSDIPHSWICEKHILWLKDYKNSSNWKLFKECWKQGQPAVVSGVHKKMNISLWKAES

SEQ ID NO: 10674 - protein, 80 aa, Synthetic construct
NLPYDVTSPALCDTHLHPRNQLAGPPLEITQEAGEMVFVPSGWHHQVHNLDDTISINHNWVNGFNLANMWRFLQQELCAV

SEQ ID NO: 10675 - protein, 80 aa, Synthetic construct
LCDTHLHPRNQLAGPPLEITQEAGEMVFVPSGWHHQVHNLDDTISINHNWVNGFNLANMWRFLQQELCAVQEEVSEWRDS

SEQ ID NO: 10676 - protein, 80 aa, Synthetic construct
QLAGPPLEITQEAGEMVFVPSGWHHQVHNLDDTISINHNWVNGFNLANMWRFLQQELCAVQEEVSEWRDSMPDWHHHCQV

SEQ ID NO: 10677 - protein, 80 aa, Synthetic construct; identical to SEQ ID NO: 3595

SEQ ID NO: 10678 - protein, 80 aa, Synthetic construct; identical to SEQ ID NO: 1567

SEQ ID NO: 10679 - protein, 80 aa, Synthetic construct; identical to SEQ ID NO: 1905

SEQ ID NO: 10680 - protein, 80 aa, Synthetic construct
VLLNAQEGWSAQEKWTLERLKRKYRNQKFKCGEDNDGYSVKMKMKYYIEYMESTRDDSPLYIFDSSYGEHPKRRKLLEDY

SEQ ID NO: 10681 - protein, 80 aa, Synthetic construct
TIAITQNFASSTNFPVVWHKTVRGRPKLSRKWYRILKQEHPELAVLADSVDLQESTGIASDSSSDSSSSSSSSSSDSDSE

SEQ ID NO: 10682 - protein, 80 aa, Synthetic construct; identical to SEQ ID NO: 2281

SEQ ID NO: 10683 - protein, 80 aa, Synthetic construct
QHPGVLYVQKQCSNLPSELPQLLPDLESHVPWASEALGKMPDAVNFWLGEAAAVTSLHKDHYENLYCVVSGEKHFLFHPP

SEQ ID NO: 10684 - protein, 80 aa, Synthetic construct
QCSNLPSELPQLLPDLESHVPWASEALGKMPDAVNFWLGEAAAVTSLHKDHYENLYCVVSGEKHFLFHPPSDRPFIPYEL

SEQ ID NO: 10685 - protein, 80 aa, Synthetic construct
QLLPDLESHVPWASEALGKMPDAVNFWLGEAAAVTSLHKDHYENLYCVVSGEKHFLFHPPSDRPFIPYELYTPATYQLTE

SEQ ID NO: 10686 - protein, 80 aa, Synthetic construct
PWASEALGKMPDAVNFWLGEAAAVTSLHKDHYENLYCVVSGEKHFLFHPPSDRPFIPYELYTPATYQLTEEGTFKVVDEE

SEQ ID NO: 10687 - protein, 80 aa, Synthetic construct
PDAVNFWLGEAAAVTSLHKDHYENLYCVVSGEKHFLFHPPSDRPFIPYELYTPATYQLTEEGTFKVVDEEAMEKVPWIPL

SEQ ID NO: 10688 - protein, 80 aa, Synthetic construct
HYENLYCVVSGEKHFLFHPPSDRPFIPYELYTPATYQLTEEGTFKVVDEEAMEKVPWIPLDPLAPDLARYPSYSQAQALR

SEQ ID NO: 10689 - protein, 80 aa, Synthetic construct
SDRPFIPYELYTPATYQLTEEGTFKVVDEEAMEKVPWIPLDPLAPDLARYPSYSQAQALRCTVRAGEMLYLPALWFHHVQ

SEQ ID NO: 10690 - protein, 80 aa, Synthetic construct
LGEPSCNKLKNILYNGSNIQLSKICLSHSEEFIKKEPLSDTTSQCMKDVQIILDSNITKDTNVDKVQLQNCKWYQENALL

SEQ ID NO: 10691 - protein, 80 aa, Synthetic construct
NILYNGSNIQLSKICLSHSEEFIKKEPLSDTTSQCMKDVQIILDSNITKDTNVDKVQLQNCKWYQENALLDKVTDAEIKK

SEQ ID NO: 10692 - protein, 80 aa, Synthetic construct
LSKICLSHSEEFIKKEPLSDTTSQCMKDVQIILDSNITKDTNVDKVQLQNCKWYQENALLDKVTDAEIKKGLLHCTQKKI

SEQ ID NO: 10693 - protein, 80 aa, Synthetic construct
EFIKKEPLSDTTSQCMKDVQIILDSNITKDTNVDKVQLQNCKWYQENALLDKVTDAEIKKGLLHCTQKKIVPGHSNVPVS

SEQ ID NO: 10694 - protein, 80 aa, Synthetic construct
DKVTDAEIKKGLLHCTQKKIVPGHSNVPVSSSAAEKEEEVHARLLHCVSKQKILLSQARRTQKHLQMLLAKHVVKHYGQQ

SEQ ID NO: 10695 - protein, 80 aa, Synthetic construct
MAHRGGERDFQTSARRMGTSLLFQLSVHERELDLVFLDHSYAKPWSAHPDASSARPTRMLFVTPRRQHESTIESDVPIDV

SEQ ID NO: 10696 - protein, 80 aa, Synthetic construct; identical to SEQ ID NO: 2133

SEQ ID NO: 10697 - protein, 80 aa, Synthetic construct
ISRHDDEATRTSTSEGLEEGEVEGETLLIVESEDQASVDLSHDQSGDSLNSDEGDVSWMEEQLSYFCDKCQKWIPASQLR

SEQ ID NO: 10698 - protein, 80 aa, Synthetic construct; identical to SEQ ID NO: 2021

SEQ ID NO: 10699 - protein, 80 aa, Synthetic construct
EMEGDGVIDPGMEYVPPPAGSVASGPVVGVRKKVRGPEQIKQEVESEEEKPDRMDIDSEDTDSNTSLQTRAREKRKPQLE

SEQ ID NO: 10700 - protein, 80 aa, Synthetic construct
GMEYVPPPAGSVASGPVVGVRKKVRGPEQIKQEVESEEEKPDRMDIDSEDTDSNTSLQTRAREKRKPQLEKDTKPKEPRY

SEQ ID NO: 10701 - protein, 80 aa, Synthetic construct; identical to SEQ ID NO: 3613

SEQ ID NO: 10702 - protein, 80 aa, Synthetic construct; identical to SEQ ID NO: 3616

SEQ ID NO: 10703 - protein, 80 aa, Synthetic construct; identical to SEQ ID NO: 3618

SEQ ID NO: 10704 - protein, 80 aa, Synthetic construct
GERPQITINEISEITSIKKEDVISTLQYLNLINYYKGQYILTLSEDIVDGHERAMLKRLLRIDSKCLHFTPKDWSKRGKW

SEQ ID NO: 10705 - protein, 80 aa, Synthetic construct
VSALFGGSAASGFHQQLRLAIKRAIGHGRLLKDGPLYRLNTKATNVDGKESCESLSCLPPVSLLPHEKDKPVAEPIPICS

SEQ ID NO: 10706 - protein, 80 aa, Synthetic construct
SGFHQQLRLAIKRAIGHGRLLKDGPLYRLNTKATNVDGKESCESLSCLPPVSLLPHEKDKPVAEPIPICSFCLGTKEQNR

SEQ ID NO: 10707 - protein, 80 aa, Synthetic construct; identical to SEQ ID NO: 3621

SEQ ID NO: 10708 - protein, 80 aa, Synthetic construct; identical to SEQ ID NO: 3622

SEQ ID NO: 10709 - protein, 80 aa, Synthetic construct; identical to SEQ ID NO: 3623

SEQ ID NO: 10710 - protein, 80 aa, Synthetic construct; identical to SEQ ID NO: 3625

SEQ ID NO: 10711 - protein, 80 aa, Synthetic construct
GSIFKAIAHFKRTTFLKKHRMLGRLKYKVTPQMGTPSPGKGSLTDGRIKPDQDDDTEIKINIKQESADVNVIGNKDVVTE

SEQ ID NO: 10712 - protein, 80 aa, Synthetic construct
KRTTFLKKHRMLGRLKYKVTPQMGTPSPGKGSLTDGRIKPDQDDDTEIKINIKQESADVNVIGNKDVVTEEDLDVFKQAQ

SEQ ID NO: 10713 - protein, 80 aa, Synthetic construct
MLGRLKYKVTPQMGTPSPGKGSLTDGRIKPDQDDDTEIKINIKQESADVNVIGNKDVVTEEDLDVFKQAQELSWEKIECE

SEQ ID NO: 10714 - protein, 80 aa, Synthetic construct
PQMGTPSPGKGSLTDGRIKPDQDDDTEIKINIKQESADVNVIGNKDVVTEEDLDVFKQAQELSWEKIECESGVEDCGRYP

SEQ ID NO: 10715 - protein, 80 aa, Synthetic construct
GSLTDGRIKPDQDDDTEIKINIKQESADVNVIGNKDVVTEEDLDVFKQAQELSWEKIECESGVEDCGRYPSVIEFGKYEI

SEQ ID NO: 10716 - protein, 80 aa, Synthetic construct
DQDDDTEIKINIKQESADVNVIGNKDVVTEEDLDVFKQAQELSWEKIECESGVEDCGRYPSVIEFGKYEIQTWYSSPYPQ

SEQ ID NO: 10717 - protein, 80 aa, Synthetic construct
NIKQESADVNVIGNKDVVTEEDLDVFKQAQELSWEKIECESGVEDCGRYPSVIEFGKYEIQTWYSSPYPQEYARLPKLYL

SEQ ID NO: 10718 - protein, 80 aa, Synthetic construct
VIGNKDVVTEEDLDVFKQAQELSWEKIECESGVEDCGRYPSVIEFGKYEIQTWYSSPYPQEYARLPKLYLCEFCLKYMKS

SEQ ID NO: 10719 - protein, 80 aa, Synthetic construct
EDLDVFKQAQELSWEKIECESGVEDCGRYPSVIEFGKYEIQTWYSSPYPQEYARLPKLYLCEFCLKYMKSKNILLRHSKK

SEQ ID NO: 10720 - protein, 80 aa, Synthetic construct
SGVEDCGRYPSVIEFGKYEIQTWYSSPYPQEYARLPKLYLCEFCLKYMKSKNILLRHSKKCGWFHPPANEIYRRKDLSVF

SEQ ID NO: 10721 - protein, 80 aa, Synthetic construct; identical to SEQ ID NO: 3632

SEQ ID NO: 10722 - protein, 80 aa, Synthetic construct
TCPVCFASASERCAKNGYTSRWYHLSCGEHFCNECFDHYYRSHKDGYDKYTTWKKIWTSNGKTEPSPKAFMADQQLPYWV

SEQ ID NO: 10723 - protein, 80 aa, Synthetic construct; identical to SEQ ID NO: 3645

SEQ ID NO: 10724 - protein, 80 aa, Synthetic construct
GIDLETSKYILANVGDQFCQLVMSEKEAMMMVEPHQKVAWKRAVRGVREMCDVCETTLFNIHWVCRKCGFGVCLDCYRLR

SEQ ID NO: 10725 - protein, 80 aa, Synthetic construct
LANVGDQFCQLVMSEKEAMMMVEPHQKVAWKRAVRGVREMCDVCETTLFNIHWVCRKCGFGVCLDCYRLRKSRPRSETEE

SEQ ID NO: 10726 - protein, 80 aa, Synthetic construct
LVMSEKEAMMMVEPHQKVAWKRAVRGVREMCDVCETTLFNIHWVCRKCGFGVCLDCYRLRKSRPRSETEEMGDEEVFSWL

SEQ ID NO: 10727 - protein, 80 aa, Synthetic construct; identical to SEQ ID NO: 1969

SEQ ID NO: 10728 - protein, 80 aa, Synthetic construct
MGLNVLDPHTSHSWLCDGRLLCLHDPSNKNNWKIFRECWKQGQPVLVSGVHKKLKSELWKPEAFSQEFGDQDVDLVNCRN

SEQ ID NO: 10729 - protein, 80 aa, Synthetic construct
LCLHDPSNKNNWKIFRECWKQGQPVLVSGVHKKLKSELWKPEAFSQEFGDQDVDLVNCRNCAIISDVKVRDFWDGFEIIC

SEQ ID NO: 10730 - protein, 80 aa, Synthetic construct
QGQPVLVSGVHKKLKSELWKPEAFSQEFGDQDVDLVNCRNCAIISDVKVRDFWDGFEIICKRLRSEDGQPMVLKLKDWPP

SEQ ID NO: 10731 - protein, 80 aa, Synthetic construct
LNLASRLPSYFVRPDLGPKMYNAYGLITAEDRRVGTTNLHLDVSDAVNVMVYVGIPIGEGAHDEEVLKTIDEGDADEVTK

SEQ ID NO: 10732 - protein, 80 aa, Synthetic construct
YNAYGLITAEDRRVGTTNLHLDVSDAVNVMVYVGIPIGEGAHDEEVLKTIDEGDADEVTKQRIHDGKEKPGALWHIYAAK

SEQ ID NO: 10733 - protein, 80 aa, Synthetic construct
DRRVGTTNLHLDVSDAVNVMVYVGIPIGEGAHDEEVLKTIDEGDADEVTKQRIHDGKEKPGALWHIYAAKDAEKIRELLR

SEQ ID NO: 10734 - protein, 80 aa, Synthetic construct
QSELFPKEDLSSEQYEMTECPAALAPVRPTHSSVRQVEDGLTFPDYSDSTEVKFEELKNVKLEEEDEEEEQAAAALDLSV

SEQ ID NO: 10735 - protein, 80 aa, Synthetic construct
SSEQYEMTECPAALAPVRPTHSSVRQVEDGLTFPDYSDSTEVKFEELKNVKLEEEDEEEEQAAAALDLSVNPASVGGRLV

SEQ ID NO: 10736 - protein, 80 aa, Synthetic construct; identical to SEQ ID NO: 1982

SEQ ID NO: 10737 - protein, 80 aa, Synthetic construct
HSSVRQVEDGLTFPDYSDSTEVKFEELKNVKLEEEDEEEEQAAAALDLSVNPASVGGRLVFSGSKKKSSSSLGSGSSRDS

SEQ ID NO: 10738 - protein, 80 aa, Synthetic construct
LTFPDYSDSTEVKFEELKNVKLEEEDEEEEQAAAALDLSVNPASVGGRLVFSGSKKKSSSSLGSGSSRDSISSDSETSEP

SEQ ID NO: 10739 - protein, 80 aa, Synthetic construct
EVKFEELKNVKLEEEDEEEEQAAAALDLSVNPASVGGRLVFSGSKKKSSSSLGSGSSRDSISSDSETSEPLSCRAQGQTG

SEQ ID NO: 10740 - protein, 80 aa, Synthetic construct
RAKGALQSITAGQKVISKHKNGRFYQCEVVRLTTETFYEVNFDDGSFSDNLYPEDIVSQDCLQFGPPAEGEVVQVRWTDG

SEQ ID NO: 10741 - protein, 80 aa, Synthetic construct; identical to SEQ ID NO: 1983

SEQ ID NO: 10742 - protein, 80 aa, Synthetic construct
GAGRMETKARAGEGQAPSTFSKLKMEIKKSRRHPLGRPPTRSPLSVVKQEASSDEEASPFSGEEDVSDPDALRPLLSLQW

SEQ ID NO: 10743 - protein, 80 aa, Synthetic construct
AGEGQAPSTFSKLKMEIKKSRRHPLGRPPTRSPLSVVKQEASSDEEASPFSGEEDVSDPDALRPLLSLQWKNRAASFQAE

SEQ ID NO: 10744 - protein, 80 aa, Synthetic construct
SKLKMEIKKSRRHPLGRPPTRSPLSVVKQEASSDEEASPFSGEEDVSDPDALRPLLSLQWKNRAASFQAERKFNAAAART

SEQ ID NO: 10745 - protein, 80 aa, Synthetic construct
RRHPLGRPPTRSPLSVVKQEASSDEEASPFSGEEDVSDPDALRPLLSLQWKNRAASFQAERKFNAAAARTEPYCAICTLF

SEQ ID NO: 10746 - protein, 80 aa, Synthetic construct
RSPLSVVKQEASSDEEASPFSGEEDVSDPDALRPLLSLQWKNRAASFQAERKFNAAAARTEPYCAICTLFYPYCQALQTE

SEQ ID NO: 10747 - protein, 80 aa, Synthetic construct; identical to SEQ ID NO: 3658

SEQ ID NO: 10748 - protein, 80 aa, Synthetic construct; identical to SEQ ID NO: 3659

SEQ ID NO: 10749 - protein, 80 aa, Synthetic construct
NFDDGSYSDNLYPESITSRDCVQLGPPSEGELVELRWTDGNLYKAKFISSVTSHIYQVEFEDGSQLTVKRGDIFTLEEEL

SEQ ID NO: 10750 - protein, 80 aa, Synthetic construct
LYPESITSRDCVQLGPPSEGELVELRWTDGNLYKAKFISSVTSHIYQVEFEDGSQLTVKRGDIFTLEEELPKRVRSRLSL

SEQ ID NO: 10751 - protein, 80 aa, Synthetic construct
CVQLGPPSEGELVELRWTDGNLYKAKFISSVTSHIYQVEFEDGSQLTVKRGDIFTLEEELPKRVRSRLSLSTGAPQEPAF

SEQ ID NO: 10752 - protein, 80 aa, Synthetic construct
FIYSEENIEYSPPNAFLEEDGTSLLISCAKCCVRVHASCYGIPSHEICDGWLCARCKRNAWTAECCLCNLRGGALKQTKN

SEQ ID NO: 10753 - protein, 80 aa, Synthetic construct
KLYGAKYFGSNIAHMYQVEFEDGSQIAMKREDIYTLDEELPKRVKARFSTASDMRFEDTFYGADIIQGERKRQRVLSSRF

SEQ ID NO: 10754 - protein, 80 aa, Synthetic construct
NIAHMYQVEFEDGSQIAMKREDIYTLDEELPKRVKARFSTASDMRFEDTFYGADIIQGERKRQRVLSSRFKNEYVADPVY

SEQ ID NO: 10755 - protein, 80 aa, Synthetic construct
TSHTIMTFYPTMEEFADFNTYVAYMESQGAHQAGLAKVIPPKEWKARQMYDDIEDILIATPLQQVTSGQGGVFTQYHKKK

SEQ ID NO: 10756 - protein, 80 aa, Synthetic construct
LKENGIPFNCMTQEAGEFMVTFPYGYHAGFNHGFNCAEAINFATPRWIDYGKMASQCSCGESTVTFSMDPFVRIVQPESY

SEQ ID NO: 10757 - protein, 80 aa, Synthetic construct
MTQEAGEFMVTFPYGYHAGFNHGFNCAEAINFATPRWIDYGKMASQCSCGESTVTFSMDPFVRIVQPESYELWKHRQDLA

SEQ ID NO: 10758 - protein, 80 aa, Synthetic construct
TFPYGYHAGFNHGFNCAEAINFATPRWIDYGKMASQCSCGESTVTFSMDPFVRIVQPESYELWKHRQDLAIVEHTEPRVA

SEQ ID NO: 10759 - protein, 80 aa, Synthetic construct
GKMASQCSCGESTVTFSMDPFVRIVQPESYELWKHRQDLAIVEHTEPRVAESQELSNWRDDIVLRRAALGLRLLPNLTAQ

SEQ ID NO: 10760 - protein, 80 aa, Synthetic construct
ESTVTFSMDPFVRIVQPESYELWKHRQDLAIVEHTEPRVAESQELSNWRDDIVLRRAALGLRLLPNLTAQCPTQPVSSGH

SEQ ID NO: 10761 - protein, 80 aa, Synthetic construct
FVRIVQPESYELWKHRQDLAIVEHTEPRVAESQELSNWRDDIVLRRAALGLRLLPNLTAQCPTQPVSSGHCYNPKGCGTD

SEQ ID NO: 10762 - protein, 80 aa, Synthetic construct; identical to SEQ ID NO: 2012

SEQ ID NO: 10763 - protein, 80 aa, Synthetic construct
IAAGKEIIWHGRTKEEPAHYCSICEVEVFDLLFVTNESNSRKTYIVHCQDCARKTSGNLENFVVLEQYKMEDLMQVYDQF

SEQ ID NO: 10764 - protein, 80 aa, Synthetic construct
GRTKEEPAHYCSICEVEVFDLLFVTNESNSRKTYIVHCQDCARKTSGNLENFVVLEQYKMEDLMQVYDQFTLAPPLPSAS

SEQ ID NO: 10765 - protein, 80 aa, Synthetic construct
RTKEEPAHYCSICEVEVFDLLFVTNESNSRKTYIVHCQDCARKTSGNLENFVVLEQYKMEDLMQVYDQFTLAPPLPSASS

SEQ ID NO: 10766 - protein, 80 aa, Synthetic construct; identical to SEQ ID NO: 3682

SEQ ID NO: 10767 - protein, 80 aa, Synthetic construct
VCRQPYDVNRFMIECDICKDWFHGSCVGVEEHHAVDIDLYHCPNCAVLHGSSLMKKRRNWHRHDYTEIDDGSKPVQAGTR

SEQ ID NO: 10768 - protein, 80 aa, Synthetic construct; identical to SEQ ID NO: 2344

SEQ ID NO: 10769 - protein, 80 aa, Synthetic construct
SKLNGKFNKHLQPSSTVPEWRAKDNDLRLLLTNGRIIKDERQPFADQSLYTADSENEEDKRRTKKAKMKIEESSGVEGVE

SEQ ID NO: 10770 - protein, 80 aa, Synthetic construct
LQPSSTVPEWRAKDNDLRLLLTNGRIIKDERQPFADQSLYTADSENEEDKRRTKKAKMKIEESSGVEGVEHEESQKPLNG

SEQ ID NO: 10771 - protein, 80 aa, Synthetic construct
RAKDNDLRLLLTNGRIIKDERQPFADQSLYTADSENEEDKRRTKKAKMKIEESSGVEGVEHEESQKPLNGFFTRVKSELR

SEQ ID NO: 10772 - protein, 80 aa, Synthetic construct
LTNGRIIKDERQPFADQSLYTADSENEEDKRRTKKAKMKIEESSGVEGVEHEESQKPLNGFFTRVKSELRSRSSGYSDIS

SEQ ID NO: 10773 - protein, 80 aa, Synthetic construct
SCHGSNHEVRQLYRYDKPVECGYHVKTEDPDLRTSSWIKQFDTSRFHPQDLSRSQKCIRKEGSSEISQRVQSRNYVDSSG

SEQ ID NO: 10774 - protein, 80 aa, Synthetic construct
QLYRYDKPVECGYHVKTEDPDLRTSSWIKQFDTSRFHPQDLSRSQKCIRKEGSSEISQRVQSRNYVDSSGSSLQNGKYMQ

SEQ ID NO: 10775 - protein, 80 aa, Synthetic construct; identical to SEQ ID NO: 3690

SEQ ID NO: 10776 - protein, 80 aa, Synthetic construct
EQPCTKKARADHGLIPDVKLEKTVPRLHRPSLQHFREQFLVPGRPVILKGVADHWPCMQKWSLEYIQEIAGCRTVPVEVG

SEQ ID NO: 10777 - protein, 80 aa, Synthetic construct
VSTQTASDDQAGKLWDELSLVGLPDAIDIQALFDSTGTCWAHHRCVEWSLGVCQMEEPLLVNVDKAVVSGSTERCAFCKH

SEQ ID NO: 10778 - protein, 80 aa, Synthetic construct
VGLPDAIDIQALFDSTGTCWAHHRCVEWSLGVCQMEEPLLVNVDKAVVSGSTERCAFCKHLGATIKCCEEKCTQMYHYPC

SEQ ID NO: 10779 - protein, 80 aa, Synthetic construct
LGATIKCCEEKCTQMYHYPCAAGAGTFQDFSHIFLLCPEHIDQAPERSKEDANCAVCDSPGDLLDQFFCTTCGQHYHGMC

SEQ ID NO: 10780 - protein, 80 aa, Synthetic construct
KCTQMYHYPCAAGAGTFQDFSHIFLLCPEHIDQAPERSKEDANCAVCDSPGDLLDQFFCTTCGQHYHGMCLDIAVTPLKR

SEQ ID NO: 10781 - protein, 80 aa, Synthetic construct; identical to SEQ ID NO: 3734

SEQ ID NO: 10782 - protein, 80 aa, Synthetic construct
GWRCLECTVCEACGKATDPGRLLLCDDCDISYHTYCLDPPLQTVPKGGWKCKWCVWCRHCGATSAGLRCEWQNNYTQCAP

SEQ ID NO: 10783 - protein, 80 aa, Synthetic construct
EACGKATDPGRLLLCDDCDISYHTYCLDPPLQTVPKGGWKCKWCVWCRHCGATSAGLRCEWQNNYTQCAPCASLSSCPVC

SEQ ID NO: 10784 - protein, 80 aa, Synthetic construct
LQTVPKGGWKCKWCVWCRHCGATSAGLRCEWQNNYTQCAPCASLSSCPVCYRNYREEDLILQCRQCDRWMHAVCQNLNTE

SEQ ID NO: 10785 - protein, 80 aa, Synthetic construct
CKWCVWCRHCGATSAGLRCEWQNNYTQCAPCASLSSCPVCYRNYREEDLILQCRQCDRWMHAVCQNLNTEEEVENVADIG

SEQ ID NO: 10786 - protein, 80 aa, Synthetic construct
GATSAGLRCEWQNNYTQCAPCASLSSCPVCYRNYREEDLILQCRQCDRWMHAVCQNLNTEEEVENVADIGFDCSMCRPYM

SEQ ID NO: 10787 - protein, 80 aa, Synthetic construct
WQNNYTQCAPCASLSSCPVCYRNYREEDLILQCRQCDRWMHAVCQNLNTEEEVENVADIGFDCSMCRPYMPASNVPSSDC

SEQ ID NO: 10788 - protein, 80 aa, Synthetic construct
NSAFNPMASDPNNSWTSSAPTVEGENDTMSNAQRSTLKWEKEEALGEMATVAPVLYTNINFPNLKEEFPDWTTRVKQIAK

SEQ ID NO: 10789 - protein, 80 aa, Synthetic construct
PNNSWTSSAPTVEGENDTMSNAQRSTLKWEKEEALGEMATVAPVLYTNINFPNLKEEFPDWTTRVKQIAKLWRKASSQER

SEQ ID NO: 10790 - protein, 80 aa, Synthetic construct; identical to SEQ ID NO: 411

SEQ ID NO: 10791 - protein, 80 aa, Synthetic construct; identical to SEQ ID NO: 3738

SEQ ID NO: 10792 - protein, 80 aa, Synthetic construct; identical to SEQ ID NO: 3739

SEQ ID NO: 10793 - protein, 80 aa, Synthetic construct
ALAQGPKTVDVPASLPTPPHNNQEELRIQDHCGDRDTPDSFVPSSSPESVVGVEVSRYPDLSLVKEEPPEPVPSPIIPIL

SEQ ID NO: 10794 - protein, 80 aa, Synthetic construct
VPASLPTPPHNNQEELRIQDHCGDRDTPDSFVPSSSPESVVGVEVSRYPDLSLVKEEPPEPVPSPIIPILPSTAGKSSES

SEQ ID NO: 10795 - protein, 80 aa, Synthetic construct
NNQEELRIQDHCGDRDTPDSFVPSSSPESVVGVEVSRYPDLSLVKEEPPEPVPSPIIPILPSTAGKSSESRRNDIKTEPG

SEQ ID NO: 10796 - protein, 80 aa, Synthetic construct
HCGDRDTPDSFVPSSSPESVVGVEVSRYPDLSLVKEEPPEPVPSPIIPILPSTAGKSSESRRNDIKTEPGTLYFASPFGP

SEQ ID NO: 10797 - protein, 80 aa, Synthetic construct
FVPSSSPESVVGVEVSRYPDLSLVKEEPPEPVPSPIIPILPSTAGKSSESRRNDIKTEPGTLYFASPFGPSPNGPRSGLI

SEQ ID NO: 10798 - protein, 80 aa, Synthetic construct
VGVEVSRYPDLSLVKEEPPEPVPSPIIPILPSTAGKSSESRRNDIKTEPGTLYFASPFGPSPNGPRSGLISVAITLHPTA

SEQ ID NO: 10799 - protein, 80 aa, Synthetic construct
LSLVKEEPPEPVPSPIIPILPSTAGKSSESRRNDIKTEPGTLYFASPFGPSPNGPRSGLISVAITLHPTAAENISSVVAA

SEQ ID NO: 10800 - protein, 80 aa, Synthetic construct; identical to SEQ ID NO: 3741

SEQ ID NO: 10801 - protein, 80 aa, Synthetic construct
ELRRFELPFDWPRCPVVSPGGSPGPNEAVLPSEDLSQIGFPEGLTPAHLGEPGGSCWAHHWCAAWSAGVWGQEGPELCGV

SEQ ID NO: 10802 - protein, 80 aa, Synthetic construct; identical to SEQ ID NO: 3746

SEQ ID NO: 10803 - protein, 80 aa, Synthetic construct
EEEEEDDDTMQNTVVLFSNTDKFVLMQDMCVVCGSFGRGAEGHLLACSQCSQCYHPYCVNSKITKVMLLKGWRCVECIVC

SEQ ID NO: 10804 - protein, 80 aa, Synthetic construct
QNTVVLFSNTDKFVLMQDMCVVCGSFGRGAEGHLLACSQCSQCYHPYCVNSKITKVMLLKGWRCVECIVCEVCGQASDPS

SEQ ID NO: 10805 - protein, 80 aa, Synthetic construct
DKFVLMQDMCVVCGSFGRGAEGHLLACSQCSQCYHPYCVNSKITKVMLLKGWRCVECIVCEVCGQASDPSRLLLCDDCDI

SEQ ID NO: 10806 - protein, 80 aa, Synthetic construct
VVCGSFGRGAEGHLLACSQCSQCYHPYCVNSKITKVMLLKGWRCVECIVCEVCGQASDPSRLLLCDDCDISYHTYCLDPP

SEQ ID NO: 10807 - protein, 80 aa, Synthetic construct
EGHLLACSQCSQCYHPYCVNSKITKVMLLKGWRCVECIVCEVCGQASDPSRLLLCDDCDISYHTYCLDPPLLTVPKGGWK

SEQ ID NO: 10808 - protein, 80 aa, Synthetic construct
SKITKVMLLKGWRCVECIVCEVCGQASDPSRLLLCDDCDISYHTYCLDPPLLTVPKGGWKCKWCVSCMQCGAASPGFHCE

SEQ ID NO: 10809 - protein, 80 aa, Synthetic construct
GWRCVECIVCEVCGQASDPSRLLLCDDCDISYHTYCLDPPLLTVPKGGWKCKWCVSCMQCGAASPGFHCEWQNSYTHCGP

SEQ ID NO: 10810 - protein, 80 aa, Synthetic construct
EVCGQASDPSRLLLCDDCDISYHTYCLDPPLLTVPKGGWKCKWCVSCMQCGAASPGFHCEWQNSYTHCGPCASLVTCPIC

SEQ ID NO: 10811 - protein, 80 aa, Synthetic construct
RLLLCDDCDISYHTYCLDPPLLTVPKGGWKCKWCVSCMQCGAASPGFHCEWQNSYTHCGPCASLVTCPICHAPYVEEDLL

SEQ ID NO: 10812 - protein, 80 aa, Synthetic construct
SYHTYCLDPPLLTVPKGGWKCKWCVSCMQCGAASPGFHCEWQNSYTHCGPCASLVTCPICHAPYVEEDLLIQCRHCERWM

SEQ ID NO: 10813 - protein, 80 aa, Synthetic construct
LLTVPKGGWKCKWCVSCMQCGAASPGFHCEWQNSYTHCGPCASLVTCPICHAPYVEEDLLIQCRHCERWMHAGCESLFTE

SEQ ID NO: 10814 - protein, 80 aa, Synthetic construct
CKWCVSCMQCGAASPGFHCEWQNSYTHCGPCASLVTCPICHAPYVEEDLLIQCRHCERWMHAGCESLFTEDDVEQAADEG

SEQ ID NO: 10815 - protein, 80 aa, Synthetic construct; identical to SEQ ID NO: 1799

SEQ ID NO: 10816 - protein, 80 aa, Synthetic construct
WQNSYTHCGPCASLVTCPICHAPYVEEDLLIQCRHCERWMHAGCESLFTEDDVEQAADEGFDCVSCQPYVVKPVAPVAPP

SEQ ID NO: 10817 - protein, 80 aa, Synthetic construct
CASLVTCPICHAPYVEEDLLIQCRHCERWMHAGCESLFTEDDVEQAADEGFDCVSCQPYVVKPVAPVAPPELVPMKVKEP

SEQ ID NO: 10818 - protein, 80 aa, Synthetic construct
HAPYVEEDLLIQCRHCERWMHAGCESLFTEDDVEQAADEGFDCVSCQPYVVKPVAPVAPPELVPMKVKEPEPQYFRFEGV

SEQ ID NO: 10819 - protein, 80 aa, Synthetic construct
RRQRRGRLGLPGEAGLEGSEPSDALGPDDKKDGDLDTDELLKGEGGVEHMECEIKLEGPVSPDVEPGKEETEESKKRKRK

SEQ ID NO: 10820 - protein, 80 aa, Synthetic construct
PGEAGLEGSEPSDALGPDDKKDGDLDTDELLKGEGGVEHMECEIKLEGPVSPDVEPGKEETEESKKRKRKPYRPGIGGFM

SEQ ID NO: 10821 - protein, 80 aa, Synthetic construct; identical to SEQ ID NO: 3751

SEQ ID NO: 10822 - protein, 80 aa, Synthetic construct; identical to SEQ ID NO: 3752

SEQ ID NO: 10823 - protein, 80 aa, Synthetic construct
LEPPPGRVSPAAAQLADTLFSKGLGPWDPPDNLAETQKPEQSSLVPGHLDQVNGQVVPEASQLSIKQEPREEPCALGAQS

SEQ ID NO: 10824 - protein, 80 aa, Synthetic construct
AAAQLADTLFSKGLGPWDPPDNLAETQKPEQSSLVPGHLDQVNGQVVPEASQLSIKQEPREEPCALGAQSVKREANGEPI

SEQ ID NO: 10825 - protein, 80 aa, Synthetic construct
SKGLGPWDPPDNLAETQKPEQSSLVPGHLDQVNGQVVPEASQLSIKQEPREEPCALGAQSVKREANGEPIGAPGTSNHLL

SEQ ID NO: 10826 - protein, 80 aa, Synthetic construct
DNLAETQKPEQSSLVPGHLDQVNGQVVPEASQLSIKQEPREEPCALGAQSVKREANGEPIGAPGTSNHLLLAGPRSEAGH

SEQ ID NO: 10827 - protein, 80 aa, Synthetic construct
QSSLVPGHLDQVNGQVVPEASQLSIKQEPREEPCALGAQSVKREANGEPIGAPGTSNHLLLAGPRSEAGHLLLQKLLRAK

SEQ ID NO: 10828 - protein, 80 aa, Synthetic construct
QVNGQVVPEASQLSIKQEPREEPCALGAQSVKREANGEPIGAPGTSNHLLLAGPRSEAGHLLLQKLLRAKNVQLSTGRGS

SEQ ID NO: 10829 - protein, 80 aa, Synthetic construct
SQLSIKQEPREEPCALGAQSVKREANGEPIGAPGTSNHLLLAGPRSEAGHLLLQKLLRAKNVQLSTGRGSEGLRAEINGH

SEQ ID NO: 10830 - protein, 80 aa, Synthetic construct
RLLLTIQKGSGRQEDEREVAEFMEQLGTALRPDKVPRDMRRCCFCHEEGDGATDGPARLLNLDLDLWVHLNCALWSTEVY

SEQ ID NO: 10831 - protein, 80 aa, Synthetic construct
EFMEQLGTALRPDKVPRDMRRCCFCHEEGDGATDGPARLLNLDLDLWVHLNCALWSTEVYETQGGALMNVEVALHRGLLT

SEQ ID NO: 10832 - protein, 80 aa, Synthetic construct; identical to SEQ ID NO: 3760

SEQ ID NO: 10833 - protein, 80 aa, Synthetic construct
CTPNAEVRHEIQDGTIHLYIYSIHSIPKGTEITIAFDFDYGNCKYKVDCACLKENPECPVLKRSSESMENINSGYETRRK

SEQ ID NO: 10834 - protein, 80 aa, Synthetic construct
IQDGTIHLYIYSIHSIPKGTEITIAFDFDYGNCKYKVDCACLKENPECPVLKRSSESMENINSGYETRRKKGKKDKDISK

SEQ ID NO: 10835 - protein, 80 aa, Synthetic construct; identical to SEQ ID NO: 2017

SEQ ID NO: 10836 - protein, 80 aa, Synthetic construct
LNSLPGLTYSPHVYSTPKHYIRFTSPFLSEKRRRKEPTENISGSCKKRWLKQALEEENSAILHRFNSPCQERSRSPAVNG

SEQ ID NO: 10837 - protein, 80 aa, Synthetic construct; identical to SEQ ID NO: 1568

SEQ ID NO: 10838 - protein, 80 aa, Synthetic construct
IRFTSPFLSEKRRRKEPTENISGSCKKRWLKQALEEENSAILHRFNSPCQERSRSPAVNGENKSPLLLNDSCSLPDLTTP

SEQ ID NO: 10839 - protein, 80 aa, Synthetic construct; identical to SEQ ID NO: 2018

SEQ ID NO: 10840 - protein, 80 aa, Synthetic construct; identical to SEQ ID NO: 1569

SEQ ID NO: 10841 - protein, 80 aa, Synthetic construct
EITDAKKREALYAQDPSTGCYMYYFQYLSKTYCVDATRETNRLGRLINHSKCGNCQTKLHDIDGVPHLILIASRDIAAGE

SEQ ID NO: 10842 - protein, 80 aa, Synthetic construct; identical to SEQ ID NO: 3766

SEQ ID NO: 10843 - protein, 80 aa, Synthetic construct; identical to SEQ ID NO: 3769

SEQ ID NO: 10844 - protein, 80 aa, Synthetic construct
SSPCTYITRRSVRTRTNLKEASDIKLEPNTLNGYKSSVTEPCPDSGEQLQPAPVLQEEELAHETAQKGEAKCHKSDTGMS

SEQ ID NO: 10845 - protein, 80 aa, Synthetic construct
SVRTRTNLKEASDIKLEPNTLNGYKSSVTEPCPDSGEQLQPAPVLQEEELAHETAQKGEAKCHKSDTGMSKKKSRQGKLV

SEQ ID NO: 10846 - protein, 80 aa, Synthetic construct; identical to SEQ ID NO: 3768

SEQ ID NO: 10847 - protein, 80 aa, Synthetic construct; identical to SEQ ID NO: 1570

SEQ ID NO: 10848 - protein, 80 aa, Synthetic construct; identical to SEQ ID NO: 1571

SEQ ID NO: 10849 - protein, 80 aa, Synthetic construct; identical to SEQ ID NO: 1572

SEQ ID NO: 10850 - protein, 80 aa, Synthetic construct; identical to SEQ ID NO: 1573

SEQ ID NO: 10851 - protein, 80 aa, Synthetic construct; identical to SEQ ID NO: 1574

SEQ ID NO: 10852 - protein, 80 aa, Synthetic construct; identical to SEQ ID NO: 1575

SEQ ID NO: 10853 - protein, 80 aa, Synthetic construct; identical to SEQ ID NO: 1576

SEQ ID NO: 10854 - protein, 80 aa, Synthetic construct; identical to SEQ ID NO: 2312

SEQ ID NO: 10855 - protein, 80 aa, Synthetic construct; identical to SEQ ID NO: 3818

SEQ ID NO: 10856 - protein, 80 aa, Synthetic construct; identical to SEQ ID NO: 3830

SEQ ID NO: 10857 - protein, 80 aa, Synthetic construct; identical to SEQ ID NO: 3842

SEQ ID NO: 10858 - protein, 80 aa, Synthetic construct; identical to SEQ ID NO: 3844

SEQ ID NO: 10859 - protein, 80 aa, Synthetic construct
TPIHASQIQKVEPAGRSRFTPELQPKASQSRKRSLATMDSPPHQKQPQRGEVSQKTVIIKEEEEDTAEKPGKEEDVVTPK

SEQ ID NO: 10860 - protein, 80 aa, Synthetic construct; identical to SEQ ID NO: 2165

SEQ ID NO: 10861 - protein, 80 aa, Synthetic construct
PELQPKASQSRKRSLATMDSPPHQKQPQRGEVSQKTVIIKEEEEDTAEKPGKEEDVVTPKPGKRKRDQAEEEPNRIPSRS

SEQ ID NO: 10862 - protein, 80 aa, Synthetic construct
RKRSLATMDSPPHQKQPQRGEVSQKTVIIKEEEEDTAEKPGKEEDVVTPKPGKRKRDQAEEEPNRIPSRSLRRTKLNQES

SEQ ID NO: 10863 - protein, 80 aa, Synthetic construct
PPHQKQPQRGEVSQKTVIIKEEEEDTAEKPGKEEDVVTPKPGKRKRDQAEEEPNRIPSRSLRRTKLNQESTAPKVLFTGV

SEQ ID NO: 10864 - protein, 80 aa, Synthetic construct
EVSQKTVIIKEEEEDTAEKPGKEEDVVTPKPGKRKRDQAEEEPNRIPSRSLRRTKLNQESTAPKVLFTGVVDARGERAVL

SEQ ID NO: 10865 - protein, 80 aa, Synthetic construct
FFLPPDEYVVTDPEQEKNFGFSLQDALSRARERRLLEGYEIYVTPGVQPPPPQMGEIISCCGGTYLPSMPRSYKPQRVVI

SEQ ID NO: 10866 - protein, 80 aa, Synthetic construct
PPPQMGEIISCCGGTYLPSMPRSYKPQRVVITCPQDFPHCSIPLRVGLPLLSPEFLLTGVLKQEAKPEAFVLSPLEMSST

SEQ ID NO: 10867 - protein, 80 aa, Synthetic construct; identical to SEQ ID NO: 498

SEQ ID NO: 10868 - protein, 80 aa, Synthetic construct
YNYCREDEEIYKEFFEVANDVIPNLLKEAASLLEAGEERPGEQSQGTQSQGSALQDPECFAHLLRFYDGICKWEEGSPTP

SEQ ID NO: 10869 - protein, 80 aa, Synthetic construct
YKEFFEVANDVIPNLLKEAASLLEAGEERPGEQSQGTQSQGSALQDPECFAHLLRFYDGICKWEEGSPTPVLHVGWATFL

SEQ ID NO: 10870 - protein, 80 aa, Synthetic construct; identical to SEQ ID NO: 3869

SEQ ID NO: 10871 - protein, 80 aa, Synthetic construct
LCEMAKHLPSLNEMEHQTLQLVEEDTSVTEQDLFLRVVENNSSFTKVITLMGQKYLLPPKSSFLLSDISCMQPLLNYRKT

SEQ ID NO: 10872 - protein, 80 aa, Synthetic construct
LNEMEHQTLQLVEEDTSVTEQDLFLRVVENNSSFTKVITLMGQKYLLPPKSSFLLSDISCMQPLLNYRKTFDVIVIDPPW

SEQ ID NO: 10873 - protein, 80 aa, Synthetic construct
LEVVDTTASTKRHLRTRVQKVQVKEEPSAVKFTQTSGETTDADKEPAGEDKGIKALKESAKQTPAPAASVTGSRRRPRAP

SEQ ID NO: 10874 - protein, 80 aa, Synthetic construct
KRHLRTRVQKVQVKEEPSAVKFTQTSGETTDADKEPAGEDKGIKALKESAKQTPAPAASVTGSRRRPRAPRESAQAIEDL

SEQ ID NO: 10875 - protein, 80 aa, Synthetic construct
VQVKEEPSAVKFTQTSGETTDADKEPAGEDKGIKALKESAKQTPAPAASVTGSRRRPRAPRESAQAIEDLAGFKDPAAGH

SEQ ID NO: 10876 - protein, 80 aa, Synthetic construct
MASSCAVQVKLELGHRAQVRKKPTVEGFTHDWMVFVRGPEHSNIQHFVEKVVFHLHESFPRPKRVCKDPPYKVEESGYAG

SEQ ID NO: 10877 - protein, 80 aa, Synthetic construct
LELGHRAQVRKKPTVEGFTHDWMVFVRGPEHSNIQHFVEKVVFHLHESFPRPKRVCKDPPYKVEESGYAGFILPIEVYFK

SEQ ID NO: 10878 - protein, 80 aa, Synthetic construct
RPKRVCKDPPYKVEESGYAGFILPIEVYFKNKEEPRKVRFDYDLFLHLEGHPPVNHLRCEKLTFNNPTEDFRRKLLKAGG

SEQ ID NO: 10879 - protein, 80 aa, Synthetic construct; identical to SEQ ID NO: 3909

SEQ ID NO: 10880 - protein, 80 aa, Synthetic construct; identical to SEQ ID NO: 3913

SEQ ID NO: 10881 - protein, 80 aa, Synthetic construct; identical to SEQ ID NO: 1577

SEQ ID NO: 10882 - protein, 80 aa, Synthetic construct; identical to SEQ ID NO: 2314

SEQ ID NO: 10883 - protein, 80 aa, Synthetic construct; identical to SEQ ID NO: 1578

SEQ ID NO: 10884 - protein, 80 aa, Synthetic construct; identical to SEQ ID NO: 1579

SEQ ID NO: 10885 - protein, 80 aa, Synthetic construct; identical to SEQ ID NO: 3920

SEQ ID NO: 10886 - protein, 80 aa, Synthetic construct
HKTKENKQSLKERRNTRDETDTWAYIAAEGDQEVLDSVCQADENSDGRQQILSLGMDLQLEWMKLEDFQKHLDGKDENFA

SEQ ID NO: 10887 - protein, 80 aa, Synthetic construct
KERRNTRDETDTWAYIAAEGDQEVLDSVCQADENSDGRQQILSLGMDLQLEWMKLEDFQKHLDGKDENFAATDAIPSNVL

SEQ ID NO: 10888 - protein, 80 aa, Synthetic construct; identical to SEQ ID NO: 2088

SEQ ID NO: 10889 - protein, 80 aa, Synthetic construct; identical to SEQ ID NO: 1580

SEQ ID NO: 10890 - protein, 80 aa, Synthetic construct; identical to SEQ ID NO: 3932

SEQ ID NO: 10891 - protein, 80 aa, Synthetic construct
MASLGANPRRTPQGPRPGAASSGFPSPAPVPGPREAEEEEVEEEEELAEIHLCVLWNSGYLGIAYYDTSDSTIHFMPDAP

SEQ ID NO: 10892 - protein, 80 aa, Synthetic construct
GHIKNVPLILKRMKLSHTKVSDWQVLYKTVYSALGLRDACRSLPQSIQLFRDIAQEFSDDLHHIASLIGKVVDFEGSLAE

SEQ ID NO: 10893 - protein, 80 aa, Synthetic construct
KRMKLSHTKVSDWQVLYKTVYSALGLRDACRSLPQSIQLFRDIAQEFSDDLHHIASLIGKVVDFEGSLAENRFTVLPNID

SEQ ID NO: 10894 - protein, 80 aa, Synthetic construct; identical to SEQ ID NO: 2125

SEQ ID NO: 10895 - protein, 80 aa, Synthetic construct
SEAGPGPRPLARSASPPKAKNLNGGLRRSVAPAAPTSCDFSPGDLVWAKMEGYPWWPCLVYNHPFDGTFIREKGKSVRVH

SEQ ID NO: 10896 - protein, 80 aa, Synthetic construct; identical to SEQ ID NO: 3938

SEQ ID NO: 10897 - protein, 80 aa, Synthetic construct; identical to SEQ ID NO: 3939

SEQ ID NO: 10898 - protein, 80 aa, Synthetic construct; identical to SEQ ID NO: 3941

SEQ ID NO: 10899 - protein, 80 aa, Synthetic construct
SLSCCVCGHLLQDPIAPTNSTCQHYVCKTCKGKKMMMKPSCSWCKDYEQFEENKQLSILVNCYKKLCEYITQTTLARDII

SEQ ID NO: 10900 - protein, 80 aa, Synthetic construct
LQDPIAPTNSTCQHYVCKTCKGKKMMMKPSCSWCKDYEQFEENKQLSILVNCYKKLCEYITQTTLARDIIEAVDCSSDIL

SEQ ID NO: 10901 - protein, 80 aa, Synthetic construct
QASLSPMSESTLSIAIGSSVINGLPTYNGLSIDRFGINIPSPEHSNTIDVCNTVDIKTEDLSDSLPPVCDTVATDLCSTG

SEQ ID NO: 10902 - protein, 80 aa, Synthetic construct
TLSIAIGSSVINGLPTYNGLSIDRFGINIPSPEHSNTIDVCNTVDIKTEDLSDSLPPVCDTVATDLCSTGIDICSFSEDI

SEQ ID NO: 10903 - protein, 80 aa, Synthetic construct
INGLPTYNGLSIDRFGINIPSPEHSNTIDVCNTVDIKTEDLSDSLPPVCDTVATDLCSTGIDICSFSEDIKPGDSLLLSV

SEQ ID NO: 10904 - protein, 80 aa, Synthetic construct
SIDRFGINIPSPEHSNTIDVCNTVDIKTEDLSDSLPPVCDTVATDLCSTGIDICSFSEDIKPGDSLLLSVEEVLRSLETV

SEQ ID NO: 10905 - protein, 80 aa, Synthetic construct
SPEHSNTIDVCNTVDIKTEDLSDSLPPVCDTVATDLCSTGIDICSFSEDIKPGDSLLLSVEEVLRSLETVSNTEVCCPNL

SEQ ID NO: 10906 - protein, 80 aa, Synthetic construct; identical to SEQ ID NO: 3946

SEQ ID NO: 10907 - protein, 80 aa, Synthetic construct; identical to SEQ ID NO: 3986

SEQ ID NO: 10908 - protein, 80 aa, Synthetic construct; identical to SEQ ID NO: 3981

SEQ ID NO: 10909 - protein, 80 aa, Synthetic construct; identical to SEQ ID NO: 3982

SEQ ID NO: 10910 - protein, 80 aa, Synthetic construct; identical to SEQ ID NO: 3983

SEQ ID NO: 10911 - protein, 80 aa, Synthetic construct; identical to SEQ ID NO: 1581

SEQ ID NO: 10912 - protein, 80 aa, Synthetic construct
YFVEKCEAGTENWQRVNTELPVKSPRFALFDLAEGKSYCFRVRCSNSAGVGEPSEATEVTVVGDKLDIPKAPGKIIPSRN

SEQ ID NO: 10913 - protein, 80 aa, Synthetic construct; identical to SEQ ID NO: 2148

SEQ ID NO: 10914 - protein, 80 aa, Synthetic construct; identical to SEQ ID NO: 3985

SEQ ID NO: 10915 - protein, 80 aa, Synthetic construct
ECNVLLKCKVANIKKETHIVWYKDEREISVDEKHDFKDGICTLLITEFSKKDAGIYEVILKDDRGKDKSRLKLVDEAFKE

SEQ ID NO: 10916 - protein, 80 aa, Synthetic construct; identical to SEQ ID NO: 4011

SEQ ID NO: 10917 - protein, 80 aa, Synthetic construct; identical to SEQ ID NO: 4012

SEQ ID NO: 10918 - protein, 80 aa, Synthetic construct; identical to SEQ ID NO: 4014

SEQ ID NO: 10919 - protein, 80 aa, Synthetic construct
ASNTEKLTDQVMQNPRVLAALQERLDNVPHTPSSYIETLPKAVKRRINALKQLQVRCAHIEAKFYEEVHDLERKYAALYQ

SEQ ID NO: 10920 - protein, 80 aa, Synthetic construct
VMQNPRVLAALQERLDNVPHTPSSYIETLPKAVKRRINALKQLQVRCAHIEAKFYEEVHDLERKYAALYQPLFDKRREFI

SEQ ID NO: 10921 - protein, 80 aa, Synthetic construct
LQERLDNVPHTPSSYIETLPKAVKRRINALKQLQVRCAHIEAKFYEEVHDLERKYAALYQPLFDKRREFITGDVEPTDAE

SEQ ID NO: 10922 - protein, 80 aa, Synthetic construct; identical to SEQ ID NO: 4031

SEQ ID NO: 10923 - protein, 80 aa, Synthetic construct; identical to SEQ ID NO: 2231

SEQ ID NO: 10924 - protein, 80 aa, Synthetic construct; identical to SEQ ID NO: 4062

SEQ ID NO: 10925 - protein, 80 aa, Synthetic construct; identical to SEQ ID NO: 4065

SEQ ID NO: 10926 - protein, 80 aa, Synthetic construct; identical to SEQ ID NO: 4069

SEQ ID NO: 10927 - protein, 80 aa, Synthetic construct; identical to SEQ ID NO: 896

SEQ ID NO: 10928 - protein, 80 aa, Synthetic construct
LKVASEAPLEHKPQVEASSPRLNPAVTCAGKGTPLTPPACACSSLQVEVERLQGLVLKCLAEQQKLQQENLQIFTQLQKL

SEQ ID NO: 10929 - protein, 80 aa, Synthetic construct
HKPQVEASSPRLNPAVTCAGKGTPLTPPACACSSLQVEVERLQGLVLKCLAEQQKLQQENLQIFTQLQKLNKKLEGGQQV

SEQ ID NO: 10930 - protein, 80 aa, Synthetic construct
KGTPLTPPACACSSLQVEVERLQGLVLKCLAEQQKLQQENLQIFTQLQKLNKKLEGGQQVGMHSKGTQTAKEEMEMDPKP

SEQ ID NO: 10931 - protein, 80 aa, Synthetic construct
ACSSLQVEVERLQGLVLKCLAEQQKLQQENLQIFTQLQKLNKKLEGGQQVGMHSKGTQTAKEEMEMDPKPDLDSDSWCLL

SEQ ID NO: 10932 - protein, 80 aa, Synthetic construct
ERLQGLVLKCLAEQQKLQQENLQIFTQLQKLNKKLEGGQQVGMHSKGTQTAKEEMEMDPKPDLDSDSWCLLGTDSCRPSL

SEQ ID NO: 10933 - protein, 80 aa, Synthetic construct; identical to SEQ ID NO: 4126

SEQ ID NO: 10934 - protein, 80 aa, Synthetic construct; identical to SEQ ID NO: 4127

SEQ ID NO: 10935 - protein, 80 aa, Synthetic construct; identical to SEQ ID NO: 1582

SEQ ID NO: 10936 - protein, 80 aa, Synthetic construct; identical to SEQ ID NO: 2169

SEQ ID NO: 10937 - protein, 80 aa, Synthetic construct; identical to SEQ ID NO: 1583

SEQ ID NO: 10938 - protein, 80 aa, Synthetic construct; identical to SEQ ID NO: 1584

SEQ ID NO: 10939 - protein, 80 aa, Synthetic construct
EPKDKVEKIGLVEDLNKGAKPVVVLQKLSLDDVQKLIKDREDKSRSSLKPIKNKPSKSNKGSIDQSVLKELPPELLAEIE

SEQ ID NO: 10940 - protein, 80 aa, Synthetic construct
LVEDLNKGAKPVVVLQKLSLDDVQKLIKDREDKSRSSLKPIKNKPSKSNKGSIDQSVLKELPPELLAEIESTMPLCERVK

SEQ ID NO: 10941 - protein, 80 aa, Synthetic construct
PVVVLQKLSLDDVQKLIKDREDKSRSSLKPIKNKPSKSNKGSIDQSVLKELPPELLAEIESTMPLCERVKMNKRKRSTVN

SEQ ID NO: 10942 - protein, 80 aa, Synthetic construct; identical to SEQ ID NO: 4148

SEQ ID NO: 10943 - protein, 80 aa, Synthetic construct; identical to SEQ ID NO: 4140

SEQ ID NO: 10944 - protein, 80 aa, Synthetic construct; identical to SEQ ID NO: 4149

SEQ ID NO: 10945 - protein, 80 aa, Synthetic construct; identical to SEQ ID NO: 1585

SEQ ID NO: 10946 - protein, 80 aa, Synthetic construct; identical to SEQ ID NO: 1586

SEQ ID NO: 10947 - protein, 80 aa, Synthetic construct; identical to SEQ ID NO: 1990

SEQ ID NO: 10948 - protein, 80 aa, Synthetic construct
WMRHRYHSCCNRLGELLGHPSFQVKELALSALLKFVQLEGAHPLEKSKWEGNYLFPRELFKLVVGGLLSPEEDQSLLLSQ

SEQ ID NO: 10949 - protein, 80 aa, Synthetic construct; identical to SEQ ID NO: 4187

SEQ ID NO: 10950 - protein, 80 aa, Synthetic construct; identical to SEQ ID NO: 2024

SEQ ID NO: 10951 - protein, 80 aa, Synthetic construct
HDPGMPASKKMQGERGGGAALKENVCQNCEKLGELLLCEAQCCGAFHLECLGLTEMPRGKFICNECRTGIHTCFVCKQSG

SEQ ID NO: 10952 - protein, 80 aa, Synthetic construct
MQGERGGGAALKENVCQNCEKLGELLLCEAQCCGAFHLECLGLTEMPRGKFICNECRTGIHTCFVCKQSGEDVKRCLLPL

SEQ ID NO: 10953 - protein, 80 aa, Synthetic construct; identical to SEQ ID NO: 1587

SEQ ID NO: 10954 - protein, 80 aa, Synthetic construct
KLGELLLCEAQCCGAFHLECLGLTEMPRGKFICNECRTGIHTCFVCKQSGEDVKRCLLPLCGKFYHEECVQKYPPTVMQN

SEQ ID NO: 10955 - protein, 80 aa, Synthetic construct; identical to SEQ ID NO: 2025

SEQ ID NO: 10956 - protein, 80 aa, Synthetic construct
LGLTEMPRGKFICNECRTGIHTCFVCKQSGEDVKRCLLPLCGKFYHEECVQKYPPTVMQNKGFRCSLHICITCHAANPAN

SEQ ID NO: 10957 - protein, 80 aa, Synthetic construct
FICNECRTGIHTCFVCKQSGEDVKRCLLPLCGKFYHEECVQKYPPTVMQNKGFRCSLHICITCHAANPANVSASKGRLMR

SEQ ID NO: 10958 - protein, 80 aa, Synthetic construct
NDFCLAAGSKILASNSIICPNHFTPRRGCRNHEHVNVSWCFVCSEGGSLLCCDSCPAAFHRECLNIDIPEGNWYCNDCKA

SEQ ID NO: 10959 - protein, 80 aa, Synthetic construct
ILASNSIICPNHFTPRRGCRNHEHVNVSWCFVCSEGGSLLCCDSCPAAFHRECLNIDIPEGNWYCNDCKAGKKPHYREIV

SEQ ID NO: 10960 - protein, 80 aa, Synthetic construct
NHEHVNVSWCFVCSEGGSLLCCDSCPAAFHRECLNIDIPEGNWYCNDCKAGKKPHYREIVWVKVGRYRWWPAEICHPRAV

SEQ ID NO: 10961 - protein, 80 aa, Synthetic construct
FVCSEGGSLLCCDSCPAAFHRECLNIDIPEGNWYCNDCKAGKKPHYREIVWVKVGRYRWWPAEICHPRAVPSNIDKMRHD

SEQ ID NO: 10962 - protein, 80 aa, Synthetic construct; identical to SEQ ID NO: 4237

SEQ ID NO: 10963 - protein, 80 aa, Synthetic construct
RIQDPTEDAEAEDTPRKRLRTDKHSLRKRDTITDKTARTSSYKAMEAASSLKSQAATKNLSDACKPLKKRNRASTAASSA

SEQ ID NO: 10964 - protein, 80 aa, Synthetic construct
AEDTPRKRLRTDKHSLRKRDTITDKTARTSSYKAMEAASSLKSQAATKNLSDACKPLKKRNRASTAASSALGFSKSSSPS

SEQ ID NO: 10965 - protein, 80 aa, Synthetic construct; identical to SEQ ID NO: 1588

SEQ ID NO: 10966 - protein, 80 aa, Synthetic construct; identical to SEQ ID NO: 1745

SEQ ID NO: 10967 - protein, 80 aa, Synthetic construct; identical to SEQ ID NO: 1589

SEQ ID NO: 10968 - protein, 80 aa, Synthetic construct; identical to SEQ ID NO: 4244

SEQ ID NO: 10969 - protein, 80 aa, Synthetic construct
PQPPPPPSVPQTVIPKKTGSPEIKLKITKTIQNGRELFESSLCGDLLNEVQASEHTKSKHESRKEKRKKSNKHDSSRSEE

SEQ ID NO: 10970 - protein, 80 aa, Synthetic construct; identical to SEQ ID NO: 1726

SEQ ID NO: 10971 - protein, 80 aa, Synthetic construct
QASEHTKSKHESRKEKRKKSNKHDSSRSEERKSHKIPKLEPEEQNRPNERVDTVSEKPREEPVLKEEAPVQPILSSVPTT

SEQ ID NO: 10972 - protein, 80 aa, Synthetic construct
ESRKEKRKKSNKHDSSRSEERKSHKIPKLEPEEQNRPNERVDTVSEKPREEPVLKEEAPVQPILSSVPTTEVSTGVKFQV

SEQ ID NO: 10973 - protein, 80 aa, Synthetic construct
NKHDSSRSEERKSHKIPKLEPEEQNRPNERVDTVSEKPREEPVLKEEAPVQPILSSVPTTEVSTGVKFQVGDLVWSKVGT

SEQ ID NO: 10974 - protein, 80 aa, Synthetic construct
RKSHKIPKLEPEEQNRPNERVDTVSEKPREEPVLKEEAPVQPILSSVPTTEVSTGVKFQVGDLVWSKVGTYPWWPCMVSS

SEQ ID NO: 10975 - protein, 80 aa, Synthetic construct; identical to SEQ ID NO: 4248

SEQ ID NO: 10976 - protein, 80 aa, Synthetic construct
RNEKPTQSVSSPEATSGSTGSVEKKQQRRSIRTRSESEKSTEVVPKKKIKKEQVETVPQATVKTGLQKGASEISDSCKPL

SEQ ID NO: 10977 - protein, 80 aa, Synthetic construct; identical to SEQ ID NO: 1590

SEQ ID NO: 10978 - protein, 80 aa, Synthetic construct; identical to SEQ ID NO: 1591

SEQ ID NO: 10979 - protein, 80 aa, Synthetic construct; identical to SEQ ID NO: 1592

SEQ ID NO: 10980 - protein, 80 aa, Synthetic construct; identical to SEQ ID NO: 1727

SEQ ID NO: 10981 - protein, 80 aa, Synthetic construct; identical to SEQ ID NO: 4250

SEQ ID NO: 10982 - protein, 80 aa, Synthetic construct
VRVGLFALCDIPAGMELTFNYNLDCLGNGRTECHCGADNCSGFLGVRPKSACASTNEEKAKNAKLKQKRRKIKTEPKQMH

SEQ ID NO: 10983 - protein, 80 aa, Synthetic construct; identical to SEQ ID NO: 4252

SEQ ID NO: 10984 - protein, 80 aa, Synthetic construct
GELVMCDKKDCPKAYHLLCLNLTQPPYGKWECPWHQCDECSSAAVSFCEFCPHSFCKDHEKGALVPSALEGRLCCSEHDP

SEQ ID NO: 10985 - protein, 80 aa, Synthetic construct
CPKAYHLLCLNLTQPPYGKWECPWHQCDECSSAAVSFCEFCPHSFCKDHEKGALVPSALEGRLCCSEHDPMAPVSPEYWS

SEQ ID NO: 10986 - protein, 80 aa, Synthetic construct
NLTQPPYGKWECPWHQCDECSSAAVSFCEFCPHSFCKDHEKGALVPSALEGRLCCSEHDPMAPVSPEYWSKIKCKWESQD

SEQ ID NO: 10987 - protein, 80 aa, Synthetic construct; identical to SEQ ID NO: 4260

SEQ ID NO: 10988 - protein, 80 aa, Synthetic construct
SPEMSMQEDCISDIAPMQTDEQTNKEQFVPGPNEKPLYTAEPVTLEDLQLLADLFYLPYEHGPKGAQMLREFQWLRANSS

SEQ ID NO: 10989 - protein, 80 aa, Synthetic construct
ISDIAPMQTDEQTNKEQFVPGPNEKPLYTAEPVTLEDLQLLADLFYLPYEHGPKGAQMLREFQWLRANSSVVSVNCKGKD

SEQ ID NO: 10990 - protein, 80 aa, Synthetic construct; identical to SEQ ID NO: 4259

SEQ ID NO: 10991 - protein, 80 aa, Synthetic construct; identical to SEQ ID NO: 4268

SEQ ID NO: 10992 - protein, 80 aa, Synthetic construct
YLTGVDISLEVDTGRTGKVKRSQGDKKTWRWGPEGYGAILLVNCDRDNHRSAEPDLTHSWLMSLADLQDMSPMLLSCNGP

SEQ ID NO: 10993 - protein, 80 aa, Synthetic construct
VDTGRTGKVKRSQGDKKTWRWGPEGYGAILLVNCDRDNHRSAEPDLTHSWLMSLADLQDMSPMLLSCNGPDKLFDSHKLV

SEQ ID NO: 10994 - protein, 80 aa, Synthetic construct
LVNCDRDNHRSAEPDLTHSWLMSLADLQDMSPMLLSCNGPDKLFDSHKLVLNVPFSDSKRVRVFCARGGNSLSDYKQVLG

SEQ ID NO: 10995 - protein, 80 aa, Synthetic construct
SAEPDLTHSWLMSLADLQDMSPMLLSCNGPDKLFDSHKLVLNVPFSDSKRVRVFCARGGNSLSDYKQVLGPQCLSYEVER

SEQ ID NO: 10996 - protein, 80 aa, Synthetic construct; identical to SEQ ID NO: 4271

SEQ ID NO: 10997 - protein, 80 aa, Synthetic construct
GGNLPGSSGRRVTQVVRDFLHAQKVQPPVELFVDWLAVGHVDEFLSFVPAPDGKGFRMLLASPGACFKLFQEKQKCGHGR

SEQ ID NO: 10998 - protein, 80 aa, Synthetic construct; identical to SEQ ID NO: 2069

SEQ ID NO: 10999 - protein, 80 aa, Synthetic construct; identical to SEQ ID NO: 1593

SEQ ID NO: 11000 - protein, 80 aa, Synthetic construct; identical to SEQ ID NO: 2317

SEQ ID NO: 11001 - protein, 80 aa, Synthetic construct
SINASPGVVVDIAHGPPAKKKSTGSSTWPLDPGVEVTLTMKVASGSTGDQKVQISYYGPKTPPVKALLYLTGVEISLCAD

SEQ ID NO: 11002 - protein, 80 aa, Synthetic construct
DIAHGPPAKKKSTGSSTWPLDPGVEVTLTMKVASGSTGDQKVQISYYGPKTPPVKALLYLTGVEISLCADITRTGKVKPT

SEQ ID NO: 11003 - protein, 80 aa, Synthetic construct
SQHYSKPRVTPVEVMPVFPDFKMWINPCAQVIFDSDPAPKDTSGAAALEMMSQAMIRGMMDEEGNQFVAYFLPVEETLKK

SEQ ID NO: 11004 - protein, 80 aa, Synthetic construct
PVEVMPVFPDFKMWINPCAQVIFDSDPAPKDTSGAAALEMMSQAMIRGMMDEEGNQFVAYFLPVEETLKKRKRDQEEEMD

SEQ ID NO: 11005 - protein, 80 aa, Synthetic construct; identical to SEQ ID NO: 4277

SEQ ID NO: 11006 - protein, 80 aa, Synthetic construct
DEEGNQFVAYFLPVEETLKKRKRDQEEEMDYAPDDVYDYKIAREYNWNVKNKASKGYEENYFFIFREGDGVYYNELETRV

SEQ ID NO: 11007 - protein, 80 aa, Synthetic construct
VVMEYLAGGSLTDVVTETCMDEAQIAAVCRECLQALEFLHANQVIHRDIKSDNVLLGMEGSVKLTDFGFCAQITPEQSKR

SEQ ID NO: 11008 - protein, 80 aa, Synthetic construct
LTDVVTETCMDEAQIAAVCRECLQALEFLHANQVIHRDIKSDNVLLGMEGSVKLTDFGFCAQITPEQSKRSTMVGTPYWM

SEQ ID NO: 11009 - protein, 80 aa, Synthetic construct
ELFLAHILSPWGAEVKAEPVEVVAPRGKSGAALSKKSKGQVKEEGINKSEKRMKLTLKGGAAVDPDSGLEHSAHVLEKGG

SEQ ID NO: 11010 - protein, 80 aa, Synthetic construct
WGAEVKAEPVEVVAPRGKSGAALSKKSKGQVKEEGINKSEKRMKLTLKGGAAVDPDSGLEHSAHVLEKGGKVFSATLGLV

SEQ ID NO: 11011 - protein, 80 aa, Synthetic construct; identical to SEQ ID NO: 4287

SEQ ID NO: 11012 - protein, 80 aa, Synthetic construct; identical to SEQ ID NO: 4288

SEQ ID NO: 11013 - protein, 80 aa, Synthetic construct
NPIKVDPTMWDTIKNDVKDDRILIEFDTLKEMVILAGKSEDVQSIEVQVRELIESTTQKIKREEQSLKEKMIISPGRYFL

SEQ ID NO: 11014 - protein, 80 aa, Synthetic construct
DTIKNDVKDDRILIEFDTLKEMVILAGKSEDVQSIEVQVRELIESTTQKIKREEQSLKEKMIISPGRYFLLCHSSLLDHL

SEQ ID NO: 11015 - protein, 80 aa, Synthetic construct
RILIEFDTLKEMVILAGKSEDVQSIEVQVRELIESTTQKIKREEQSLKEKMIISPGRYFLLCHSSLLDHLLTECPEIEIC

SEQ ID NO: 11016 - protein, 80 aa, Synthetic construct
DVQSIEVQVRELIESTTQKIKREEQSLKEKMIISPGRYFLLCHSSLLDHLLTECPEIEICYDRVTQHLCLKGPSADVYKA

SEQ ID NO: 11017 - protein, 80 aa, Synthetic construct
ELIESTTQKIKREEQSLKEKMIISPGRYFLLCHSSLLDHLLTECPEIEICYDRVTQHLCLKGPSADVYKAKCEIQEKVYT

SEQ ID NO: 11018 - protein, 80 aa, Synthetic construct
KREEQSLKEKMIISPGRYFLLCHSSLLDHLLTECPEIEICYDRVTQHLCLKGPSADVYKAKCEIQEKVYTMAQKNIQVSP

SEQ ID NO: 11019 - protein, 80 aa, Synthetic construct
MIISPGRYFLLCHSSLLDHLLTECPEIEICYDRVTQHLCLKGPSADVYKAKCEIQEKVYTMAQKNIQVSPEIFQFLQQVN

SEQ ID NO: 11020 - protein, 80 aa, Synthetic construct; identical to SEQ ID NO: 4293

SEQ ID NO: 11021 - protein, 80 aa, Synthetic construct; identical to SEQ ID NO: 2085

SEQ ID NO: 11022 - protein, 80 aa, Synthetic construct; identical to SEQ ID NO: 1594

SEQ ID NO: 11023 - protein, 80 aa, Synthetic construct; identical to SEQ ID NO: 1595

SEQ ID NO: 11024 - protein, 80 aa, Synthetic construct; identical to SEQ ID NO: 1596

SEQ ID NO: 11025 - protein, 80 aa, Synthetic construct; identical to SEQ ID NO: 1597

SEQ ID NO: 11026 - protein, 80 aa, Synthetic construct; identical to SEQ ID NO: 4303

SEQ ID NO: 11027 - protein, 80 aa, Synthetic construct; identical to SEQ ID NO: 4305

SEQ ID NO: 11028 - protein, 80 aa, Synthetic construct; identical to SEQ ID NO: 4309

SEQ ID NO: 11029 - protein, 80 aa, Synthetic construct; identical to SEQ ID NO: 2370

SEQ ID NO: 11030 - protein, 80 aa, Synthetic construct; identical to SEQ ID NO: 1598

SEQ ID NO: 11031 - protein, 80 aa, Synthetic construct; identical to SEQ ID NO: 2176

SEQ ID NO: 11032 - protein, 80 aa, Synthetic construct; identical to SEQ ID NO: 1941

SEQ ID NO: 11033 - protein, 80 aa, Synthetic construct
ENSDLLPVAQTEPSIWTVDDVWAFIHSLPGCQDIADEFRAQEIDGQALLLLKEDHLMSAMNIKLGPALKICARINSLKES

SEQ ID NO: 11034 - protein, 80 aa, Synthetic construct
GICLKGKESNKKGKAESLIHCSQCENSGHPSCLDMTMELVSMIKTYPWQCMECKTCIICGQPHHEEEMMFCDMCDRGYHT

SEQ ID NO: 11035 - protein, 80 aa, Synthetic construct
KKGKAESLIHCSQCENSGHPSCLDMTMELVSMIKTYPWQCMECKTCIICGQPHHEEEMMFCDMCDRGYHTFCVGLGAIPS

SEQ ID NO: 11036 - protein, 80 aa, Synthetic construct
NPTQFQLPNELTCTTALPGSSKRRRKEETTGKNVKKTQHELDHNGLVPLPVKVCFTCNRSCRVAPLIQCDYCPLLFHMDC

SEQ ID NO: 11037 - protein, 80 aa, Synthetic construct
LTCTTALPGSSKRRRKEETTGKNVKKTQHELDHNGLVPLPVKVCFTCNRSCRVAPLIQCDYCPLLFHMDCLEPPLTAMPL

SEQ ID NO: 11038 - protein, 80 aa, Synthetic construct; identical to SEQ ID NO: 1599

SEQ ID NO: 11039 - protein, 80 aa, Synthetic construct; identical to SEQ ID NO: 2349

SEQ ID NO: 11040 - protein, 80 aa, Synthetic construct; identical to SEQ ID NO: 4334

SEQ ID NO: 11041 - protein, 80 aa, Synthetic construct; identical to SEQ ID NO: 2283

SEQ ID NO: 11042 - protein, 80 aa, Synthetic construct
KRKRRDSDAPGKEGYRGGLLKLEAADPYVETPTSPTLQDIPQAPSDPCSGWDSDTPSSGSCATVSPDQVKEIKTEGKRTI

SEQ ID NO: 11043 - protein, 80 aa, Synthetic construct
GKEGYRGGLLKLEAADPYVETPTSPTLQDIPQAPSDPCSGWDSDTPSSGSCATVSPDQVKEIKTEGKRTIVRQGKQVVFR

SEQ ID NO: 11044 - protein, 80 aa, Synthetic construct; identical to SEQ ID NO: 4338

SEQ ID NO: 11045 - protein, 80 aa, Synthetic construct
NEDIKVKEEQLKNSAEEEVLSSEKQLIKMEKKEEEENGERPRKKKEKEKEKEKEKEKEKEREKEKEKATVSENVAASAAA

SEQ ID NO: 11046 - protein, 80 aa, Synthetic construct
LKNSAEEEVLSSEKQLIKMEKKEEEENGERPRKKKEKEKEKEKEKEKEKEREKEKEKATVSENVAASAAATTPATSPPAV

SEQ ID NO: 11047 - protein, 80 aa, Synthetic construct
KKSKVLSRNSADDEELTNDSLTLSQSKSNEDSLILEKSQNWSSQKMDHILICCVCLGDNSEDADEIIQCDNCGITVHEGC

SEQ ID NO: 11048 - protein, 80 aa, Synthetic construct
ADDEELTNDSLTLSQSKSNEDSLILEKSQNWSSQKMDHILICCVCLGDNSEDADEIIQCDNCGITVHEGCYGVDGESDSI

SEQ ID NO: 11049 - protein, 80 aa, Synthetic construct
LTLSQSKSNEDSLILEKSQNWSSQKMDHILICCVCLGDNSEDADEIIQCDNCGITVHEGCYGVDGESDSIMSSASENSTE

SEQ ID NO: 11050 - protein, 80 aa, Synthetic construct
DSLILEKSQNWSSQKMDHILICCVCLGDNSEDADEIIQCDNCGITVHEGCYGVDGESDSIMSSASENSTEPWFCDACKCG

SEQ ID NO: 11051 - protein, 80 aa, Synthetic construct; identical to SEQ ID NO: 1970

SEQ ID NO: 11052 - protein, 80 aa, Synthetic construct; identical to SEQ ID NO: 1600

SEQ ID NO: 11053 - protein, 80 aa, Synthetic construct; identical to SEQ ID NO: 4341

SEQ ID NO: 11054 - protein, 80 aa, Synthetic construct; identical to SEQ ID NO: 4342

SEQ ID NO: 11055 - protein, 80 aa, Synthetic construct; identical to SEQ ID NO: 4347

SEQ ID NO: 11056 - protein, 80 aa, Synthetic construct
DDSSDEGSLHIDTDTKPGRNARVKKESGSSAAGILDLLQASEEVGALEYNPSSQPPASPSTQEAIQGMLSMANLQASDSC

SEQ ID NO: 11057 - protein, 80 aa, Synthetic construct
SRSMFTEKTTTYQYPRAILSVDLSGENLSDVDFLDDSSTESLLLSGDEYNQDFDSTNFEESQDEDDALNEIVRCICEMDE

SEQ ID NO: 11058 - protein, 80 aa, Synthetic construct; identical to SEQ ID NO: 541

SEQ ID NO: 11059 - protein, 80 aa, Synthetic construct; identical to SEQ ID NO: 2325

SEQ ID NO: 11060 - protein, 80 aa, Synthetic construct; identical to SEQ ID NO: 4365

SEQ ID NO: 11061 - protein, 80 aa, Synthetic construct
RFRSVIDDAWWFGTIESQEPLQLEYPDSLFQCYNVCWDNGDTEKMSPWDMELIPNNAVFPEELGTSVPLTDGECRSLIYK

SEQ ID NO: 11062 - protein, 80 aa, Synthetic construct
WFGTIESQEPLQLEYPDSLFQCYNVCWDNGDTEKMSPWDMELIPNNAVFPEELGTSVPLTDGECRSLIYKPLDGEWGTNP

SEQ ID NO: 11063 - protein, 80 aa, Synthetic construct; identical to SEQ ID NO: 485

SEQ ID NO: 11064 - protein, 80 aa, Synthetic construct
QRLENRFYRRVSSLMWEVRYIEHNTRTFNEPGSPIVKSAKFVTDLLLHFIKDQTCYNIIPLYNSMKKKVLSDSEDEEKDA

SEQ ID NO: 11065 - protein, 80 aa, Synthetic construct; identical to SEQ ID NO: 4377

SEQ ID NO: 11066 - protein, 80 aa, Synthetic construct
RYNNRTYRIDDVDWNKTPKDSFTMSDGKEITFLEYYSKNYGITVKEEDQPLLIHRPSERQDNHGMLLKGEILLLPELSFM

SEQ ID NO: 11067 - protein, 80 aa, Synthetic construct
DVDWNKTPKDSFTMSDGKEITFLEYYSKNYGITVKEEDQPLLIHRPSERQDNHGMLLKGEILLLPELSFMTGIPEKMKKD

SEQ ID NO: 11068 - protein, 80 aa, Synthetic construct
SFTMSDGKEITFLEYYSKNYGITVKEEDQPLLIHRPSERQDNHGMLLKGEILLLPELSFMTGIPEKMKKDFRAMKDLAQQ

SEQ ID NO: 11069 - protein, 80 aa, Synthetic construct
TFLEYYSKNYGITVKEEDQPLLIHRPSERQDNHGMLLKGEILLLPELSFMTGIPEKMKKDFRAMKDLAQQINLSPKQHHS

SEQ ID NO: 11070 - protein, 80 aa, Synthetic construct
GITVKEEDQPLLIHRPSERQDNHGMLLKGEILLLPELSFMTGIPEKMKKDFRAMKDLAQQINLSPKQHHSALECLLQRIA

SEQ ID NO: 11071 - protein, 80 aa, Synthetic construct; identical to SEQ ID NO: 4382

SEQ ID NO: 11072 - protein, 80 aa, Synthetic construct; identical to SEQ ID NO: 4383

SEQ ID NO: 11073 - protein, 80 aa, Synthetic construct; identical to SEQ ID NO: 4384

SEQ ID NO: 11074 - protein, 80 aa, Synthetic construct; identical to SEQ ID NO: 2224

SEQ ID NO: 11075 - protein, 80 aa, Synthetic construct; identical to SEQ ID NO: 4405

SEQ ID NO: 11076 - protein, 80 aa, Synthetic construct
NVHSPYESTTKCKICEWAFESEPLFLQHMKDTHKPGEMPYVCQVCQYRSSLYSEVDVHFRMIHEDTRHLLCPYCLKVFKN

SEQ ID NO: 11077 - protein, 80 aa, Synthetic construct
KCKICEWAFESEPLFLQHMKDTHKPGEMPYVCQVCQYRSSLYSEVDVHFRMIHEDTRHLLCPYCLKVFKNGNAFQQHYMR

SEQ ID NO: 11078 - protein, 80 aa, Synthetic construct; identical to SEQ ID NO: 4407

SEQ ID NO: 11079 - protein, 80 aa, Synthetic construct
VHCSLCRYSTCCSRAYANHMINNHVPRKSPKYLALFKNSVSGIKLACTSCTFVTSVGDAMAKHLVFNPSHRSSSILPRGL

SEQ ID NO: 11080 - protein, 80 aa, Synthetic construct; identical to SEQ ID NO: 2225

SEQ ID NO: 11081 - protein, 80 aa, Synthetic construct
INNHVPRKSPKYLALFKNSVSGIKLACTSCTFVTSVGDAMAKHLVFNPSHRSSSILPRGLTWIAHSRHGQTRDRVHDRNV

SEQ ID NO: 11082 - protein, 80 aa, Synthetic construct
KYLALFKNSVSGIKLACTSCTFVTSVGDAMAKHLVFNPSHRSSSILPRGLTWIAHSRHGQTRDRVHDRNVKNMYPPPSFP

SEQ ID NO: 11083 - protein, 80 aa, Synthetic construct
SGIKLACTSCTFVTSVGDAMAKHLVFNPSHRSSSILPRGLTWIAHSRHGQTRDRVHDRNVKNMYPPPSFPTNKAATVKSA

SEQ ID NO: 11084 - protein, 80 aa, Synthetic construct; identical to SEQ ID NO: 4409

SEQ ID NO: 11085 - protein, 80 aa, Synthetic construct; identical to SEQ ID NO: 423

SEQ ID NO: 11086 - protein, 80 aa, Synthetic construct
PSLLKKLLLAPANTQLSYNECSGLSTQNHANHNHRIRTNPAIVKTENSWSNKAKSICQQQKPQRRPCSELLKYLTTNDDP

SEQ ID NO: 11087 - protein, 80 aa, Synthetic construct
PANTQLSYNECSGLSTQNHANHNHRIRTNPAIVKTENSWSNKAKSICQQQKPQRRPCSELLKYLTTNDDPPHTKPTENRN

SEQ ID NO: 11088 - protein, 80 aa, Synthetic construct
CSGLSTQNHANHNHRIRTNPAIVKTENSWSNKAKSICQQQKPQRRPCSELLKYLTTNDDPPHTKPTENRNSSRDKCTSKK

SEQ ID NO: 11089 - protein, 80 aa, Synthetic construct
NHNHRIRTNPAIVKTENSWSNKAKSICQQQKPQRRPCSELLKYLTTNDDPPHTKPTENRNSSRDKCTSKKKSHTQSQSQH

SEQ ID NO: 11090 - protein, 80 aa, Synthetic construct
GRADPGAPVSQEDMQAMVQLIRYMHTYCLPQRKLPPQTPEPLPKACSNPSQQVRSRPWSRHHSKASWAEFSILRELLAQD

SEQ ID NO: 11091 - protein, 80 aa, Synthetic construct; identical to SEQ ID NO: 2158

SEQ ID NO: 11092 - protein, 80 aa, Synthetic construct
IRYMHTYCLPQRKLPPQTPEPLPKACSNPSQQVRSRPWSRHHSKASWAEFSILRELLAQDVLCDVSKPYRLATPVYASLT

SEQ ID NO: 11093 - protein, 80 aa, Synthetic construct
QRKLPPQTPEPLPKACSNPSQQVRSRPWSRHHSKASWAEFSILRELLAQDVLCDVSKPYRLATPVYASLTPRSRPRPPKD

SEQ ID NO: 11094 - protein, 80 aa, Synthetic construct; identical to SEQ ID NO: 1601

SEQ ID NO: 11095 - protein, 80 aa, Synthetic construct; identical to SEQ ID NO: 1602

SEQ ID NO: 11096 - protein, 80 aa, Synthetic construct
HHSKASWAEFSILRELLAQDVLCDVSKPYRLATPVYASLTPRSRPRPPKDSQASPGRPSSVEEVRIAASPKSTGPRPSLR

SEQ ID NO: 11097 - protein, 80 aa, Synthetic construct; identical to SEQ ID NO: 2159

SEQ ID NO: 11098 - protein, 80 aa, Synthetic construct; identical to SEQ ID NO: 4437

SEQ ID NO: 11099 - protein, 80 aa, Synthetic construct
TEQLVSPEPEVHDIERSEEDDQFIILACDGIWDVMGNEELCDFVRSRLEVTDDLEKVCNEVVDTCLYKGSRDNMSVILIC

SEQ ID NO: 11100 - protein, 80 aa, Synthetic construct
VHDIERSEEDDQFIILACDGIWDVMGNEELCDFVRSRLEVTDDLEKVCNEVVDTCLYKGSRDNMSVILICFPNAPKVSPE

SEQ ID NO: 11101 - protein, 80 aa, Synthetic construct
DQFIILACDGIWDVMGNEELCDFVRSRLEVTDDLEKVCNEVVDTCLYKGSRDNMSVILICFPNAPKVSPEAVKKEAELDK

SEQ ID NO: 11102 - protein, 80 aa, Synthetic construct; identical to SEQ ID NO: 4439

SEQ ID NO: 11103 - protein, 80 aa, Synthetic construct
SPEPEVYEILRAEEDEFIILACDGIWDVMSNEELCEYVKSRLEVSDDLENVCNWVVDTCLHKGSRDNMSIVLVCFSNAPK

SEQ ID NO: 11104 - protein, 80 aa, Synthetic construct; identical to SEQ ID NO: 1603

SEQ ID NO: 11105 - protein, 80 aa, Synthetic construct; identical to SEQ ID NO: 1604

SEQ ID NO: 11106 - protein, 80 aa, Synthetic construct; identical to SEQ ID NO: 2001

SEQ ID NO: 11107 - protein, 80 aa, Synthetic construct
DLSEFRKLPREEEEEEEDDDEEEKAPVTLLDAQSLAQSFFNRLWEVAGQWQKQVPLAARASQRQWLVSIHAIRNTRRKME

SEQ ID NO: 11108 - protein, 80 aa, Synthetic construct; identical to SEQ ID NO: 2002

SEQ ID NO: 11109 - protein, 80 aa, Synthetic construct
SEDYLLLACDGFFDVVPHQEVVGLVQSHLTRQQGSGLRVAEELVAAARERGSHDNITVMVVFLRDPQELLEGGNQGEGDP

SEQ ID NO: 11110 - protein, 80 aa, Synthetic construct
DDHEFMVIACDGIWNVMSSQEVVDFIQSKISQRDENGELRLLSSIVEELLDQCLAPDTSGDGTGCDNMTCIIICFKPRNT

SEQ ID NO: 11111 - protein, 80 aa, Synthetic construct
DGIWNVMSSQEVVDFIQSKISQRDENGELRLLSSIVEELLDQCLAPDTSGDGTGCDNMTCIIICFKPRNTAELQPESGKR

SEQ ID NO: 11112 - protein, 80 aa, Synthetic construct
EVVDFIQSKISQRDENGELRLLSSIVEELLDQCLAPDTSGDGTGCDNMTCIIICFKPRNTAELQPESGKRKLEEVLSTEG

SEQ ID NO: 11113 - protein, 80 aa, Synthetic construct
SQRDENGELRLLSSIVEELLDQCLAPDTSGDGTGCDNMTCIIICFKPRNTAELQPESGKRKLEEVLSTEGAEENGNSDKK

SEQ ID NO: 11114 - protein, 80 aa, Synthetic construct; identical to SEQ ID NO: 431

SEQ ID NO: 11115 - protein, 80 aa, Synthetic construct; identical to SEQ ID NO: 4446

SEQ ID NO: 11116 - protein, 80 aa, Synthetic construct
MHVLTAPLLTNTSEDKCEKDNIVGSNKNNTICPDNYQTAQLLALILELLTFCVEHHTYHIKNYIMNKDLLRRVLVLMNSK

SEQ ID NO: 11117 - protein, 80 aa, Synthetic construct
HPERVPFLVAETPRARHTLDELNPQKSKHQGVRKAKWHLGIRSQSRPNDIMAEVCRAIKQLDYEWKVVNPYYLRVRRKNP

SEQ ID NO: 11118 - protein, 80 aa, Synthetic construct
ETPRARHTLDELNPQKSKHQGVRKAKWHLGIRSQSRPNDIMAEVCRAIKQLDYEWKVVNPYYLRVRRKNPVTSTYSKMSL

SEQ ID NO: 11119 - protein, 80 aa, Synthetic construct
LERHGGHKTPRRDSSGGTKDGDRPKILMDSPEDADLFHSEEIKAPEKEEFLAWQHDLEVNDKAPAQARPTVFRWTGGGKE

SEQ ID NO: 11120 - protein, 80 aa, Synthetic construct; identical to SEQ ID NO: 2318

SEQ ID NO: 11121 - protein, 80 aa, Synthetic construct; identical to SEQ ID NO: 1605

SEQ ID NO: 11122 - protein, 80 aa, Synthetic construct; identical to SEQ ID NO: 1606

SEQ ID NO: 11123 - protein, 80 aa, Synthetic construct
EIKAPEKEEFLAWQHDLEVNDKAPAQARPTVFRWTGGGKEVYLSGSFNNWSKLPLTRSHNNFVAILDLPEGEHQYKFFVD

SEQ ID NO: 11124 - protein, 80 aa, Synthetic construct; identical to SEQ ID NO: 1607

SEQ ID NO: 11125 - protein, 80 aa, Synthetic construct
DKAPAQARPTVFRWTGGGKEVYLSGSFNNWSKLPLTRSHNNFVAILDLPEGEHQYKFFVDGQWTHDPSEPIVTSQLGTVN

SEQ ID NO: 11126 - protein, 80 aa, Synthetic construct; identical to SEQ ID NO: 1812

SEQ ID NO: 11127 - protein, 80 aa, Synthetic construct; identical to SEQ ID NO: 1608

SEQ ID NO: 11128 - protein, 80 aa, Synthetic construct; identical to SEQ ID NO: 1609

SEQ ID NO: 11129 - protein, 80 aa, Synthetic construct; identical to SEQ ID NO: 1610

SEQ ID NO: 11130 - protein, 80 aa, Synthetic construct; identical to SEQ ID NO: 1611

SEQ ID NO: 11131 - protein, 80 aa, Synthetic construct; identical to SEQ ID NO: 1612

SEQ ID NO: 11132 - protein, 80 aa, Synthetic construct; identical to SEQ ID NO: 1613

SEQ ID NO: 11133 - protein, 80 aa, Synthetic construct; identical to SEQ ID NO: 4495

SEQ ID NO: 11134 - protein, 80 aa, Synthetic construct
PDTPIIKALNIFVERRISALPVVDESGKVVDIYSKFDVINLAAEKTYNNLDITVTQALQHRSQYFEGVVKCNKLEILETI

SEQ ID NO: 11135 - protein, 80 aa, Synthetic construct; identical to SEQ ID NO: 4496

SEQ ID NO: 11136 - protein, 80 aa, Synthetic construct; identical to SEQ ID NO: 4497

SEQ ID NO: 11137 - protein, 80 aa, Synthetic construct; identical to SEQ ID NO: 929

SEQ ID NO: 11138 - protein, 80 aa, Synthetic construct
RLARQCRDEGLIIHVFPSTPEQPGLPCPGEDKSIYRRGARRWRKLYRANGHLFQAKRFNRRAYCGQCSERIWGLARQGYR

SEQ ID NO: 11139 - protein, 80 aa, Synthetic construct
LIIHVFPSTPEQPGLPCPGEDKSIYRRGARRWRKLYRANGHLFQAKRFNRRAYCGQCSERIWGLARQGYRCINCKLLVHK

SEQ ID NO: 11140 - protein, 80 aa, Synthetic construct; identical to SEQ ID NO: 4504

SEQ ID NO: 11141 - protein, 80 aa, Synthetic construct
GTGTNLHRDISVSISVSNCQIQENVDISTVYQIFPDEVLGSGQFGIVYGGKHRKTGRDVAIKIIDKLRFPTKQESQLRNE

SEQ ID NO: 11142 - protein, 80 aa, Synthetic construct; identical to SEQ ID NO: 4508

SEQ ID NO: 11143 - protein, 80 aa, Synthetic construct
TSESLPCTAEELSRSTTELLPRRPPSSSSSSSASSYTGRPIELDKMLLSKVKVPHTFLIHSYTRPTVCQACKKLLKGLFR

SEQ ID NO: 11144 - protein, 80 aa, Synthetic construct
ELSRSTTELLPRRPPSSSSSSSASSYTGRPIELDKMLLSKVKVPHTFLIHSYTRPTVCQACKKLLKGLFRQGLQCKDCKF

SEQ ID NO: 11145 - protein, 80 aa, Synthetic construct
PRRPPSSSSSSSASSYTGRPIELDKMLLSKVKVPHTFLIHSYTRPTVCQACKKLLKGLFRQGLQCKDCKFNCHKRCATRV

SEQ ID NO: 11146 - protein, 80 aa, Synthetic construct
MYVSLSGTFPFNEDEDINDQIQNAAFMYPASPWSHISAGAIDLINNLLQVKMRKRYSVDKSLSHPWLQEYQTWLDLRELE

SEQ ID NO: 11147 - protein, 80 aa, Synthetic construct; identical to SEQ ID NO: 1614

SEQ ID NO: 11148 - protein, 80 aa, Synthetic construct; identical to SEQ ID NO: 1615

SEQ ID NO: 11149 - protein, 80 aa, Synthetic construct; identical to SEQ ID NO: 1770

SEQ ID NO: 11150 - protein, 80 aa, Synthetic construct; identical to SEQ ID NO: 1616

SEQ ID NO: 11151 - protein, 80 aa, Synthetic construct; identical to SEQ ID NO: 1617

SEQ ID NO: 11152 - protein, 80 aa, Synthetic construct; identical to SEQ ID NO: 1618

SEQ ID NO: 11153 - protein, 80 aa, Synthetic construct
FGGLCERLVSLLLNPAVLSTASLGSSQGSVIHFSHGEYFYSLFSETINTELLKNLDLAVLELMQSSVDNTKMVSAVLNGM

SEQ ID NO: 11154 - protein, 80 aa, Synthetic construct; identical to SEQ ID NO: 2319

SEQ ID NO: 11155 - protein, 80 aa, Synthetic construct
ARSDYSEAAKQYDEALNKQDWVDGEPTEAEKDFWELASLDCYNHLAEWKSLEYCSTASIDSENPPDLNKIWSEPFYQETY

SEQ ID NO: 11156 - protein, 80 aa, Synthetic construct
QYDEALNKQDWVDGEPTEAEKDFWELASLDCYNHLAEWKSLEYCSTASIDSENPPDLNKIWSEPFYQETYLPYMIRSKLK

SEQ ID NO: 11157 - protein, 80 aa, Synthetic construct
NKDSKPPGNLKECSPWMSDFKVEFLRNELEIPGQYDGRGKPLPEYHVRIAGFDERVTVMASLRRPKRIIIRGHDEREHPF

SEQ ID NO: 11158 - protein, 80 aa, Synthetic construct
KECSPWMSDFKVEFLRNELEIPGQYDGRGKPLPEYHVRIAGFDERVTVMASLRRPKRIIIRGHDEREHPFLVKGGEDLRQ

SEQ ID NO: 11159 - protein, 80 aa, Synthetic construct
RPDSKVEKIRRNSEAAMLQELNFGAYLGLPAFLLPLNQEDNTNLARVLTNHIHTGHHSSMFWMRVPLVAPEDLRDDIIEN

SEQ ID NO: 11160 - protein, 80 aa, Synthetic construct
RNSEAAMLQELNFGAYLGLPAFLLPLNQEDNTNLARVLTNHIHTGHHSSMFWMRVPLVAPEDLRDDIIENAPTTHTEEYS

SEQ ID NO: 11161 - protein, 80 aa, Synthetic construct
EVQFIITGTNHHSEKEFCSYLQYLEYLSQNRPPPNAYELFAKGYEDYLQSPLQPLMDNLESQTYEVFEKDPIKYSQYQQA

SEQ ID NO: 11162 - protein, 80 aa, Synthetic construct
HHSEKEFCSYLQYLEYLSQNRPPPNAYELFAKGYEDYLQSPLQPLMDNLESQTYEVFEKDPIKYSQYQQAIYKCLLDRVP

SEQ ID NO: 11163 - protein, 80 aa, Synthetic construct
LQYLEYLSQNRPPPNAYELFAKGYEDYLQSPLQPLMDNLESQTYEVFEKDPIKYSQYQQAIYKCLLDRVPEEEKDTNVQV

SEQ ID NO: 11164 - protein, 80 aa, Synthetic construct; identical to SEQ ID NO: 4524

SEQ ID NO: 11165 - protein, 80 aa, Synthetic construct
AHSDPEEMQWRDHWMQCVYFLPQEEPVVQGSALYLVAHHDDYCVWYSLQRTSPEKNERVRQMRPVCDCQAHLLWNRPRFG

SEQ ID NO: 11166 - protein, 80 aa, Synthetic construct
RDHWMQCVYFLPQEEPVVQGSALYLVAHHDDYCVWYSLQRTSPEKNERVRQMRPVCDCQAHLLWNRPRFGEINDQDRTDR

SEQ ID NO: 11167 - protein, 80 aa, Synthetic construct
LPQEEPVVQGSALYLVAHHDDYCVWYSLQRTSPEKNERVRQMRPVCDCQAHLLWNRPRFGEINDQDRTDRYVQALRTVLK

SEQ ID NO: 11168 - protein, 80 aa, Synthetic construct; identical to SEQ ID NO: 4527

SEQ ID NO: 11169 - protein, 80 aa, Synthetic construct
YTVKTEELSFTSAFCLQIQRNDYVHALVTYFNIEFTKCHKKMGFSTAPDAPYTHWKQTVFYLEDYLTVRRGEEIYGTISM

SEQ ID NO: 11170 - protein, 80 aa, Synthetic construct; identical to SEQ ID NO: 1934

SEQ ID NO: 11171 - protein, 80 aa, Synthetic construct
EKYIAENGTDPINNQPLSEEQLIDIKVAHPIRPKPPSATSIPAILKALQDEWDAVMLHSFTLRQQLQTTRQELSHALYQH

SEQ ID NO: 11172 - protein, 80 aa, Synthetic construct; identical to SEQ ID NO: 4538

SEQ ID NO: 11173 - protein, 80 aa, Synthetic construct; identical to SEQ ID NO: 4540

SEQ ID NO: 11174 - protein, 80 aa, Synthetic construct
RAQMAKRQKAHEEANAARKLTAEQRKVKKIKKLKEDISQGVHISVYRVRNLSNPAKKFKIEANAGQLYLTGVVVLHKDVN

SEQ ID NO: 11175 - protein, 80 aa, Synthetic construct
HEEANAARKLTAEQRKVKKIKKLKEDISQGVHISVYRVRNLSNPAKKFKIEANAGQLYLTGVVVLHKDVNVVVVEGGPKA

SEQ ID NO: 11176 - protein, 80 aa, Synthetic construct
KKLKEDISQGVHISVYRVRNLSNPAKKFKIEANAGQLYLTGVVVLHKDVNVVVVEGGPKAQKKFKRLMLHRIKWDEQTSN

SEQ ID NO: 11177 - protein, 80 aa, Synthetic construct
LSNPAKKFKIEANAGQLYLTGVVVLHKDVNVVVVEGGPKAQKKFKRLMLHRIKWDEQTSNTKGDDDEESDEEAVKKTNKC

SEQ ID NO: 11178 - protein, 80 aa, Synthetic construct
GSYGEEEEEPAIEDVQEETQLDLSGDSVKTIAKLWDSKMFAEIMMKIEEYISKQAKASEVMGPVEAAPEYRVIVDANNLT

SEQ ID NO: 11179 - protein, 80 aa, Synthetic construct; identical to SEQ ID NO: 4548

SEQ ID NO: 11180 - protein, 80 aa, Synthetic construct
SEHVAPDGRIYYYNADDKQSVWEKPSVLKSKAELLLSQCPWKEYKSDTGKPYYYNNQSKESRWTRPKDLDDLEVLVKQEA

SEQ ID NO: 11181 - protein, 80 aa, Synthetic construct
YYYNADDKQSVWEKPSVLKSKAELLLSQCPWKEYKSDTGKPYYYNNQSKESRWTRPKDLDDLEVLVKQEAAGKQQQQLPQ

SEQ ID NO: 11182 - protein, 80 aa, Synthetic construct; identical to SEQ ID NO: 2255

SEQ ID NO: 11183 - protein, 80 aa, Synthetic construct
GQPRLCRQPLTRALWGARSPKRPRLQLPGAPSPLEKASRRVLAVVLEDVMAVHMVPVVPSKQTSIPQHHSYHQDPVHRQP

SEQ ID NO: 11184 - protein, 80 aa, Synthetic construct; identical to SEQ ID NO: 1619

SEQ ID NO: 11185 - protein, 80 aa, Synthetic construct; identical to SEQ ID NO: 1620

SEQ ID NO: 11186 - protein, 80 aa, Synthetic construct
VKSESQSLPKKVSLSSDTTRKPLEIRSPSAESKKPKWVPPAASGGSRSSSSPLVVVSVKSPNQSLRLGLSRLARVKPLHP

SEQ ID NO: 11187 - protein, 80 aa, Synthetic construct; identical to SEQ ID NO: 2333

SEQ ID NO: 11188 - protein, 80 aa, Synthetic construct; identical to SEQ ID NO: 1923

SEQ ID NO: 11189 - protein, 80 aa, Synthetic construct
TQIQECFLSPFRKPLSQLTNQPPCLDSSQHEAFIRSILSKPFKVPIPNYQGPLGSRALGLKRAGVRRALHDPLEKDALVL

SEQ ID NO: 11190 - protein, 80 aa, Synthetic construct; identical to SEQ ID NO: 1621

SEQ ID NO: 11191 - protein, 80 aa, Synthetic construct
QPPCLDSSQHEAFIRSILSKPFKVPIPNYQGPLGSRALGLKRAGVRRALHDPLEKDALVLYEPPPLSAHDQLKLDKEKLP

SEQ ID NO: 11192 - protein, 80 aa, Synthetic construct
KRAKVVERFNSPSSPDFVFMLSSKAGGCGLNLIGANRLVMFDPDWNPANDEQAMARVWRDGQKKTCYIYRLLSAGTIEEK

SEQ ID NO: 11193 - protein, 80 aa, Synthetic construct
SPSSPDFVFMLSSKAGGCGLNLIGANRLVMFDPDWNPANDEQAMARVWRDGQKKTCYIYRLLSAGTIEEKIFQRQSHKKA

SEQ ID NO: 11194 - protein, 80 aa, Synthetic construct
QEELERRKRLEQQRKDYAAPIPTVPLEFLPEEIALRASDGPQLPPRVLAQEVICLDSSSGSEDEKSSRDEVIELSSGEED

SEQ ID NO: 11195 - protein, 80 aa, Synthetic construct
EQQRKDYAAPIPTVPLEFLPEEIALRASDGPQLPPRVLAQEVICLDSSSGSEDEKSSRDEVIELSSGEEDTLHIVDSSES

SEQ ID NO: 11196 - protein, 80 aa, Synthetic construct
IPTVPLEFLPEEIALRASDGPQLPPRVLAQEVICLDSSSGSEDEKSSRDEVIELSSGEEDTLHIVDSSESVSEDDEEEEK

SEQ ID NO: 11197 - protein, 80 aa, Synthetic construct
EEIALRASDGPQLPPRVLAQEVICLDSSSGSEDEKSSRDEVIELSSGEEDTLHIVDSSESVSEDDEEEEKGGTHVNDVLN

SEQ ID NO: 11198 - protein, 80 aa, Synthetic construct
PQLPPRVLAQEVICLDSSSGSEDEKSSRDEVIELSSGEEDTLHIVDSSESVSEDDEEEEKGGTHVNDVLNQRDALGRVLV

SEQ ID NO: 11199 - protein, 80 aa, Synthetic construct
EVICLDSSSGSEDEKSSRDEVIELSSGEEDTLHIVDSSESVSEDDEEEEKGGTHVNDVLNQRDALGRVLVNLNHPPEEEN

SEQ ID NO: 11200 - protein, 80 aa, Synthetic construct
LPPPEALPADNKPEEVQPRFFKVHILNDEHKTMASRAKVMADWVSEGGVLLMGYEMYRLLTLKKSFATGRPKKTKKRSHP

SEQ ID NO: 11201 - protein, 80 aa, Synthetic construct
NKPEEVQPRFFKVHILNDEHKTMASRAKVMADWVSEGGVLLMGYEMYRLLTLKKSFATGRPKKTKKRSHPVIIDLDEEDR

SEQ ID NO: 11202 - protein, 80 aa, Synthetic construct
IPAFSQRNWQPTLKGDEKPVASVRPVQSTPIPMMPRHVPLGGSVSSASSTNPSMNFPINYLQRAGVLVQKVVTTTDIVIP

SEQ ID NO: 11203 - protein, 80 aa, Synthetic construct
NQKRMICNIISLEDNKIEIREMETPDWTPDIKHSKIWFGSNMGNGTVFLGIPGDNKQVVSEGFYFYMLKCAEDDTNEEQT

SEQ ID NO: 11204 - protein, 80 aa, Synthetic construct
SLEDNKIEIREMETPDWTPDIKHSKIWFGSNMGNGTVFLGIPGDNKQVVSEGFYFYMLKCAEDDTNEEQTTFTNSQTSTE

SEQ ID NO: 11205 - protein, 80 aa, Synthetic construct
EGFYFYMLKCAEDDTNEEQTTFTNSQTSTEDPGDSTPFEDSEEFCFSAEANSFDGDDEFDTYNEDDEEDESETGYWITCC

SEQ ID NO: 11206 - protein, 80 aa, Synthetic construct; identical to SEQ ID NO: 1880

SEQ ID NO: 11207 - protein, 80 aa, Synthetic construct
DPGDSTPFEDSEEFCFSAEANSFDGDDEFDTYNEDDEEDESETGYWITCCPTCDVDINTWVPFYSTELNKPAMIYCSHGD

SEQ ID NO: 11208 - protein, 80 aa, Synthetic construct; identical to SEQ ID NO: 1881

SEQ ID NO: 11209 - protein, 80 aa, Synthetic construct
NSFDGDDEFDTYNEDDEEDESETGYWITCCPTCDVDINTWVPFYSTELNKPAMIYCSHGDGHWVHAQCMDLAERTLIHLS

SEQ ID NO: 11210 - protein, 80 aa, Synthetic construct; identical to SEQ ID NO: 4596

SEQ ID NO: 11211 - protein, 80 aa, Synthetic construct; identical to SEQ ID NO: 4597

SEQ ID NO: 11212 - protein, 80 aa, Synthetic construct; identical to SEQ ID NO: 1622

SEQ ID NO: 11213 - protein, 80 aa, Synthetic construct; identical to SEQ ID NO: 2089

SEQ ID NO: 11214 - protein, 80 aa, Synthetic construct; identical to SEQ ID NO: 1623

SEQ ID NO: 11215 - protein, 80 aa, Synthetic construct; identical to SEQ ID NO: 2090

SEQ ID NO: 11216 - protein, 80 aa, Synthetic construct
VIPCCGNSYCDECIRTALLESDEHTCPTCHQNDVSPDALIANKFLRQAVNNFKNETGYTKRLRKQLPPPPPPIPPPRPLI

SEQ ID NO: 11217 - protein, 80 aa, Synthetic construct; identical to SEQ ID NO: 4605

SEQ ID NO: 11218 - protein, 80 aa, Synthetic construct
LYEALKTIPKGFSSSRKASDGNCTLPKDSPGEPCSQECIILQPLNKCSPDNKPSLQIKEENAVFKIPLRPRESLETENVL

SEQ ID NO: 11219 - protein, 80 aa, Synthetic construct
GFSSSRKASDGNCTLPKDSPGEPCSQECIILQPLNKCSPDNKPSLQIKEENAVFKIPLRPRESLETENVLDDIKSAGSHE

SEQ ID NO: 11220 - protein, 80 aa, Synthetic construct
GNCTLPKDSPGEPCSQECIILQPLNKCSPDNKPSLQIKEENAVFKIPLRPRESLETENVLDDIKSAGSHEPIKIQTRSDH

SEQ ID NO: 11221 - protein, 80 aa, Synthetic construct
GEPCSQECIILQPLNKCSPDNKPSLQIKEENAVFKIPLRPRESLETENVLDDIKSAGSHEPIKIQTRSDHGGCELASVLQ

SEQ ID NO: 11222 - protein, 80 aa, Synthetic construct
LQPLNKCSPDNKPSLQIKEENAVFKIPLRPRESLETENVLDDIKSAGSHEPIKIQTRSDHGGCELASVLQLNPCRTGKIK

SEQ ID NO: 11223 - protein, 80 aa, Synthetic construct
NKPSLQIKEENAVFKIPLRPRESLETENVLDDIKSAGSHEPIKIQTRSDHGGCELASVLQLNPCRTGKIKSLQNNQDVSF

SEQ ID NO: 11224 - protein, 80 aa, Synthetic construct; identical to SEQ ID NO: 4614

SEQ ID NO: 11225 - protein, 80 aa, Synthetic construct
NSPIRSSVDGVQTLAQTNEEKIMDSCNPTSNQVLDTSVAKEKLVRDIKTLVEIKQKFSELARKIKINKDLLMAAGCIKMT

SEQ ID NO: 11226 - protein, 80 aa, Synthetic construct
VQTLAQTNEEKIMDSCNPTSNQVLDTSVAKEKLVRDIKTLVEIKQKFSELARKIKINKDLLMAAGCIKMTNTSYSEPAQN

SEQ ID NO: 11227 - protein, 80 aa, Synthetic construct
GNSNSQNKISNPSQQTALSMVMHNYESSGINITKGTELQIAVVSPLVLSEVKTLSVKGITPAVLPETVYPVIKEGSVCSL

SEQ ID NO: 11228 - protein, 80 aa, Synthetic construct; identical to SEQ ID NO: 1714

SEQ ID NO: 11229 - protein, 80 aa, Synthetic construct; identical to SEQ ID NO: 1624

SEQ ID NO: 11230 - protein, 80 aa, Synthetic construct; identical to SEQ ID NO: 1625

SEQ ID NO: 11231 - protein, 80 aa, Synthetic construct; identical to SEQ ID NO: 1715

SEQ ID NO: 11232 - protein, 80 aa, Synthetic construct; identical to SEQ ID NO: 1716

SEQ ID NO: 11233 - protein, 80 aa, Synthetic construct; identical to SEQ ID NO: 1626

SEQ ID NO: 11234 - protein, 80 aa, Synthetic construct; identical to SEQ ID NO: 1627

SEQ ID NO: 11235 - protein, 80 aa, Synthetic construct; identical to SEQ ID NO: 1628

SEQ ID NO: 11236 - protein, 80 aa, Synthetic construct; identical to SEQ ID NO: 1629

SEQ ID NO: 11237 - protein, 80 aa, Synthetic construct; identical to SEQ ID NO: 1630

SEQ ID NO: 11238 - protein, 80 aa, Synthetic construct; identical to SEQ ID NO: 1631

SEQ ID NO: 11239 - protein, 80 aa, Synthetic construct; identical to SEQ ID NO: 1632

SEQ ID NO: 11240 - protein, 80 aa, Synthetic construct; identical to SEQ ID NO: 1717

SEQ ID NO: 11241 - protein, 80 aa, Synthetic construct; identical to SEQ ID NO: 1633

SEQ ID NO: 11242 - protein, 80 aa, Synthetic construct; identical to SEQ ID NO: 1634

SEQ ID NO: 11243 - protein, 80 aa, Synthetic construct; identical to SEQ ID NO: 1635

SEQ ID NO: 11244 - protein, 80 aa, Synthetic construct; identical to SEQ ID NO: 1636

SEQ ID NO: 11245 - protein, 80 aa, Synthetic construct; identical to SEQ ID NO: 1637

SEQ ID NO: 11246 - protein, 80 aa, Synthetic construct; identical to SEQ ID NO: 1638

SEQ ID NO: 11247 - protein, 80 aa, Synthetic construct; identical to SEQ ID NO: 1639

SEQ ID NO: 11248 - protein, 80 aa, Synthetic construct; identical to SEQ ID NO: 2357

SEQ ID NO: 11249 - protein, 80 aa, Synthetic construct; identical to SEQ ID NO: 1640

SEQ ID NO: 11250 - protein, 80 aa, Synthetic construct; identical to SEQ ID NO: 1641

SEQ ID NO: 11251 - protein, 80 aa, Synthetic construct
LEGRKLWRVYRPRVPTEELALTSSPNFSQDDLGEPVLQTVLEPGDLLYFPRGFIHQAECQDGVHSLHLTLSTYQRNTWGD

SEQ ID NO: 11252 - protein, 80 aa, Synthetic construct
LTSSPNFSQDDLGEPVLQTVLEPGDLLYFPRGFIHQAECQDGVHSLHLTLSTYQRNTWGDFLEAILPLAVQAAMEENVEF

SEQ ID NO: 11253 - protein, 80 aa, Synthetic construct; identical to SEQ ID NO: 4648

SEQ ID NO: 11254 - protein, 80 aa, Synthetic construct; identical to SEQ ID NO: 4649

SEQ ID NO: 11255 - protein, 80 aa, Synthetic construct
MPKKAKPTGSGKEEGPAPCKQMKLEAAGGPSALNFDSPSSLFESLISPIKTETFFKEFWEQKPLLIQRDDPALATYYGSL

SEQ ID NO: 11256 - protein, 80 aa, Synthetic construct
GKEEGPAPCKQMKLEAAGGPSALNFDSPSSLFESLISPIKTETFFKEFWEQKPLLIQRDDPALATYYGSLFKLTDLKSLC

SEQ ID NO: 11257 - protein, 80 aa, Synthetic construct
LVGSNVYITPAGSQGLPPHYDDVEVFILQLEGEKHWRLYHPTVPLAREYSVEAEERIGRPVHEFMLKPGDLLYFPRGTIH

SEQ ID NO: 11258 - protein, 80 aa, Synthetic construct
AGSQGLPPHYDDVEVFILQLEGEKHWRLYHPTVPLAREYSVEAEERIGRPVHEFMLKPGDLLYFPRGTIHQADTPAGLAH

SEQ ID NO: 11259 - protein, 80 aa, Synthetic construct
DDVEVFILQLEGEKHWRLYHPTVPLAREYSVEAEERIGRPVHEFMLKPGDLLYFPRGTIHQADTPAGLAHSTHVTISTYQ

SEQ ID NO: 11260 - protein, 80 aa, Synthetic construct
GSGQRPPTIVLDLQVRRVRPGEYRQRDSIASRTRSRSQTPNNTVTYESERGGFRRTFSRSERAGVRTYVSTIRIPIRRIL

SEQ ID NO: 11261 - protein, 80 aa, Synthetic construct; identical to SEQ ID NO: 1897

SEQ ID NO: 11262 - protein, 80 aa, Synthetic construct; identical to SEQ ID NO: 4666

SEQ ID NO: 11263 - protein, 80 aa, Synthetic construct
MAGLGLGSAVPVWLAEDDLGCIICQGLLDWPATLPCGHSFCRHCLEALWGARDARRWACPTCRQGAAQQPHLRKNTLLQD

SEQ ID NO: 11264 - protein, 80 aa, Synthetic construct
PVWLAEDDLGCIICQGLLDWPATLPCGHSFCRHCLEALWGARDARRWACPTCRQGAAQQPHLRKNTLLQDLADKYRRAAR

SEQ ID NO: 11265 - protein, 80 aa, Synthetic construct
LADKYRRAAREIQAGSDPAHCPCPGSSSLSSAAARPRRRPELQRVAVEKSITEVAQELTELVEHLVDIVRSLQNQRPLSE

SEQ ID NO: 11266 - protein, 80 aa, Synthetic construct
EIQAGSDPAHCPCPGSSSLSSAAARPRRRPELQRVAVEKSITEVAQELTELVEHLVDIVRSLQNQRPLSESGPDNELSIL

SEQ ID NO: 11267 - protein, 80 aa, Synthetic construct; identical to SEQ ID NO: 4671

SEQ ID NO: 11268 - protein, 80 aa, Synthetic construct; identical to SEQ ID NO: 1642

SEQ ID NO: 11269 - protein, 80 aa, Synthetic construct; identical to SEQ ID NO: 1904

SEQ ID NO: 11270 - protein, 80 aa, Synthetic construct; identical to SEQ ID NO: 1643

SEQ ID NO: 11271 - protein, 80 aa, Synthetic construct
AITDGLEIVVSPRSLHSELMCPICLDMLKNTMTTKECLHRFCADCIITALRSGNKECPTCRKKLVSKRSLRPDPNFDALI

SEQ ID NO: 11272 - protein, 80 aa, Synthetic construct; identical to SEQ ID NO: 2139

SEQ ID NO: 11273 - protein, 80 aa, Synthetic construct; identical to SEQ ID NO: 4674

SEQ ID NO: 11274 - protein, 80 aa, Synthetic construct; identical to SEQ ID NO: 4675

SEQ ID NO: 11275 - protein, 80 aa, Synthetic construct; identical to SEQ ID NO: 4676

SEQ ID NO: 11276 - protein, 80 aa, Synthetic construct
TKEKDMFNFKRAQEDISRLRRKLETTKKPDNVPKCDEILMEEIKDYKARLTCPCCNMRKKDAVLTKCFHVFCFECVKTRY

SEQ ID NO: 11277 - protein, 80 aa, Synthetic construct
RAQEDISRLRRKLETTKKPDNVPKCDEILMEEIKDYKARLTCPCCNMRKKDAVLTKCFHVFCFECVKTRYDTRQRKCPKC

SEQ ID NO: 11278 - protein, 80 aa, Synthetic construct
RKLETTKKPDNVPKCDEILMEEIKDYKARLTCPCCNMRKKDAVLTKCFHVFCFECVKTRYDTRQRKCPKCNAAFGANDFH

SEQ ID NO: 11279 - protein, 80 aa, Synthetic construct
ISSTEEMDLKVLQFKNKKLAERLEQRQACEDELRERIEKLEKRQATDDATLLIVNRYWAQLDETVEALLRCHESQGELSS

SEQ ID NO: 11280 - protein, 80 aa, Synthetic construct
GPGPVSTPDNRKEMAPVPGTTTTTTSVKKEELVPSEEDFQGITPGAQGPSSRGREPEARPKRELREREGPSLGPPPVASA

SEQ ID NO: 11281 - protein, 80 aa, Synthetic construct
RKEMAPVPGTTTTTTSVKKEELVPSEEDFQGITPGAQGPSSRGREPEARPKRELREREGPSLGPPPVASALSRADREKAK

SEQ ID NO: 11282 - protein, 80 aa, Synthetic construct
TTTTTSVKKEELVPSEEDFQGITPGAQGPSSRGREPEARPKRELREREGPSLGPPPVASALSRADREKAKVEETKRKESE

SEQ ID NO: 11283 - protein, 80 aa, Synthetic construct
LAESRAAREKESFNLKRAQEDISRLRRKLEKQRKVEVYADADEILQEEIKEYKARLTCPCCNTRKKDAVLTKCFHVFCFE

SEQ ID NO: 11284 - protein, 80 aa, Synthetic construct
ESFNLKRAQEDISRLRRKLEKQRKVEVYADADEILQEEIKEYKARLTCPCCNTRKKDAVLTKCFHVFCFECVRGRYEARQ

SEQ ID NO: 11285 - protein, 80 aa, Synthetic construct; identical to SEQ ID NO: 4683

SEQ ID NO: 11286 - protein, 80 aa, Synthetic construct
QPNSAIRKCVRVQLIKNGKKITAFVPNDGCLNFIEENDEVLVAGFGRKGHAVGDIPGVRFKVVKVANVSLLALYKGKKER

SEQ ID NO: 11287 - protein, 80 aa, Synthetic construct
SAIRKCVRVQLIKNGKKITAFVPNDGCLNFIEENDEVLVAGFGRKGHAVGDIPGVRFKVVKVANVSLLALYKGKKERPRS

SEQ ID NO: 11288 - protein, 80 aa, Synthetic construct; identical to SEQ ID NO: 4698

SEQ ID NO: 11289 - protein, 80 aa, Synthetic construct; identical to SEQ ID NO: 4700

SEQ ID NO: 11290 - protein, 80 aa, Synthetic construct; identical to SEQ ID NO: 4701

SEQ ID NO: 11291 - protein, 80 aa, Synthetic construct; identical to SEQ ID NO: 4702

SEQ ID NO: 11292 - protein, 80 aa, Synthetic construct; identical to SEQ ID NO: 4705

SEQ ID NO: 11293 - protein, 80 aa, Synthetic construct
AAGTSADGGDGGEQLLTVKHELRTANLTGHAEKVGIENFELLKVLGTGAYGKVFLVRKISGHDTGKLYAMKVLKKATIVQ

SEQ ID NO: 11294 - protein, 80 aa, Synthetic construct
GGEQLLTVKHELRTANLTGHAEKVGIENFELLKVLGTGAYGKVFLVRKISGHDTGKLYAMKVLKKATIVQKAKTTEHTRT

SEQ ID NO: 11295 - protein, 80 aa, Synthetic construct
ELRTANLTGHAEKVGIENFELLKVLGTGAYGKVFLVRKISGHDTGKLYAMKVLKKATIVQKAKTTEHTRTERQVLEHIRQ

SEQ ID NO: 11296 - protein, 80 aa, Synthetic construct
AEKVGIENFELLKVLGTGAYGKVFLVRKISGHDTGKLYAMKVLKKATIVQKAKTTEHTRTERQVLEHIRQSPFLVTLHYA

SEQ ID NO: 11297 - protein, 80 aa, Synthetic construct
QHYDLDLKDKPLGEGSFSICRKCVHKKSNQAFAVKIISKRMEANTQKEITALKLCEGHPNIVKLHEVFHDQLHTFLVMEL

SEQ ID NO: 11298 - protein, 80 aa, Synthetic construct
PLGEGSFSICRKCVHKKSNQAFAVKIISKRMEANTQKEITALKLCEGHPNIVKLHEVFHDQLHTFLVMELLNGGELFERI

SEQ ID NO: 11299 - protein, 80 aa, Synthetic construct
RKCVHKKSNQAFAVKIISKRMEANTQKEITALKLCEGHPNIVKLHEVFHDQLHTFLVMELLNGGELFERIKKKKHFSETE

SEQ ID NO: 11300 - protein, 80 aa, Synthetic construct; identical to SEQ ID NO: 2216

SEQ ID NO: 11301 - protein, 80 aa, Synthetic construct
EDEETKKEEETPKQEEQKESEKMKSEEQPMDLENRSTANVLEETTVKKEKEDEKELVKLPVIVKLEKPLPENEEKKIIKE

SEQ ID NO: 11302 - protein, 80 aa, Synthetic construct
TPKQEEQKESEKMKSEEQPMDLENRSTANVLEETTVKKEKEDEKELVKLPVIVKLEKPLPENEEKKIIKEESDSFKENVK

SEQ ID NO: 11303 - protein, 80 aa, Synthetic construct; identical to SEQ ID NO: 2070

SEQ ID NO: 11304 - protein, 80 aa, Synthetic construct
EDEKELVKLPVIVKLEKPLPENEEKKIIKEESDSFKENVKPIKVEVKECRADPKDTKSSMEKPVAQEPERIEFGGNIKSS

SEQ ID NO: 11305 - protein, 80 aa, Synthetic construct
VIVKLEKPLPENEEKKIIKEESDSFKENVKPIKVEVKECRADPKDTKSSMEKPVAQEPERIEFGGNIKSSHEITEKSTEE

SEQ ID NO: 11306 - protein, 80 aa, Synthetic construct
ENEEKKIIKEESDSFKENVKPIKVEVKECRADPKDTKSSMEKPVAQEPERIEFGGNIKSSHEITEKSTEETEKLKNDQQA

SEQ ID NO: 11307 - protein, 80 aa, Synthetic construct
ESDSFKENVKPIKVEVKECRADPKDTKSSMEKPVAQEPERIEFGGNIKSSHEITEKSTEETEKLKNDQQAKIPLKKREIK

SEQ ID NO: 11308 - protein, 80 aa, Synthetic construct; identical to SEQ ID NO: 1644

SEQ ID NO: 11309 - protein, 80 aa, Synthetic construct
ADPKDTKSSMEKPVAQEPERIEFGGNIKSSHEITEKSTEETEKLKNDQQAKIPLKKREIKLSDDFDSPVKGPLCKSVTPT

SEQ ID NO: 11310 - protein, 80 aa, Synthetic construct; identical to SEQ ID NO: 1645

SEQ ID NO: 11311 - protein, 80 aa, Synthetic construct
IEFGGNIKSSHEITEKSTEETEKLKNDQQAKIPLKKREIKLSDDFDSPVKGPLCKSVTPTKEFLKDEIKQEEETCKRIST

SEQ ID NO: 11312 - protein, 80 aa, Synthetic construct; identical to SEQ ID NO: 2071

SEQ ID NO: 11313 - protein, 80 aa, Synthetic construct; identical to SEQ ID NO: 1646

SEQ ID NO: 11314 - protein, 80 aa, Synthetic construct
KIPLKKREIKLSDDFDSPVKGPLCKSVTPTKEFLKDEIKQEEETCKRISTITALGHEGKQLVNGEVSDERVAPNFKTEPI

SEQ ID NO: 11315 - protein, 80 aa, Synthetic construct
LVNGEVSDERVAPNFKTEPIETKFYETKEESYSPSKDRNIITEGNGTESLNSVITSMKTGELEKETAPLRKDADSSISVL

SEQ ID NO: 11316 - protein, 80 aa, Synthetic construct
VAPNFKTEPIETKFYETKEESYSPSKDRNIITEGNGTESLNSVITSMKTGELEKETAPLRKDADSSISVLEIHSQKAQIE

SEQ ID NO: 11317 - protein, 80 aa, Synthetic construct
RGRWKYSSNDESEGSGSEKSSAASEEEEEKESEEAILADDDEPCKKCGLPNHPELILLCDSCDSGYHTACLRPPLMIIPD

SEQ ID NO: 11318 - protein, 80 aa, Synthetic construct; identical to SEQ ID NO: 1647

SEQ ID NO: 11319 - protein, 80 aa, Synthetic construct; identical to SEQ ID NO: 2072

SEQ ID NO: 11320 - protein, 80 aa, Synthetic construct; identical to SEQ ID NO: 1648

SEQ ID NO: 11321 - protein, 80 aa, Synthetic construct
DEPCKKCGLPNHPELILLCDSCDSGYHTACLRPPLMIIPDGEWFCPPCQHKLLCEKLEEQLQDLDVALKKKERAERRKER

SEQ ID NO: 11322 - protein, 80 aa, Synthetic construct
SCDSGYHTACLRPPLMIIPDGEWFCPPCQHKLLCEKLEEQLQDLDVALKKKERAERRKERLVYVGISIENIIPPQEPDFS

SEQ ID NO: 11323 - protein, 80 aa, Synthetic construct; identical to SEQ ID NO: 4726

SEQ ID NO: 11324 - protein, 80 aa, Synthetic construct
RAVLIAGQPGTGKTAIAMGMAQALGPDTPFTAIAGSEIFSLEMSKTEALTQAFRRSIGVRIKEETEIIEGEVVEIQIDRP

SEQ ID NO: 11325 - protein, 80 aa, Synthetic construct
TGKTAIAMGMAQALGPDTPFTAIAGSEIFSLEMSKTEALTQAFRRSIGVRIKEETEIIEGEVVEIQIDRPATGTGSKVGK

SEQ ID NO: 11326 - protein, 80 aa, Synthetic construct
TAIAGSEIFSLEMSKTEALTQAFRRSIGVRIKEETEIIEGEVVEIQIDRPATGTGSKVGKLTLKTTEMETIYDLGTKMIE

SEQ ID NO: 11327 - protein, 80 aa, Synthetic construct
LEMSKTEALTQAFRRSIGVRIKEETEIIEGEVVEIQIDRPATGTGSKVGKLTLKTTEMETIYDLGTKMIESLTKDKVQAG

SEQ ID NO: 11328 - protein, 80 aa, Synthetic construct
QAFRRSIGVRIKEETEIIEGEVVEIQIDRPATGTGSKVGKLTLKTTEMETIYDLGTKMIESLTKDKVQAGDVITIDKATG

SEQ ID NO: 11329 - protein, 80 aa, Synthetic construct
TVSLHEIDVINSRTQGFLALFSGDTGEIKSEVREQINAKVAEWREEGKAEIIPGVLFIDEVHMLDIESFSFLNRALESDM

SEQ ID NO: 11330 - protein, 80 aa, Synthetic construct
NSRTQGFLALFSGDTGEIKSEVREQINAKVAEWREEGKAEIIPGVLFIDEVHMLDIESFSFLNRALESDMAPVLIMATNR

SEQ ID NO: 11331 - protein, 80 aa, Synthetic construct
EVREQINAKVAEWREEGKAEIIPGVLFIDEVHMLDIESFSFLNRALESDMAPVLIMATNRGITRIRGTSYQSPHGIPIDL

SEQ ID NO: 11332 - protein, 80 aa, Synthetic construct; identical to SEQ ID NO: 1649

SEQ ID NO: 11333 - protein, 80 aa, Synthetic construct; identical to SEQ ID NO: 2276

SEQ ID NO: 11334 - protein, 80 aa, Synthetic construct
PVEWTVMDVVEYFTEAGFPEQATAFQEQEIDGKSLLLMQRTDVLTGLSIRLGPALKIYEHHIKVLQQGHFEDDDPDGFLG

SEQ ID NO: 11335 - protein, 80 aa, Synthetic construct
VPPTAQQPPPTIPTMIAAASPPSQPAVALSTIPGAVPITPPITTIAAAPPPSVTVGGSLSSVLGPPVPEIKVKEEVEPMD

SEQ ID NO: 11336 - protein, 80 aa, Synthetic construct
TIPTMIAAASPPSQPAVALSTIPGAVPITPPITTIAAAPPPSVTVGGSLSSVLGPPVPEIKVKEEVEPMDIMRPVSAVPP

SEQ ID NO: 11337 - protein, 80 aa, Synthetic construct
PPSQPAVALSTIPGAVPITPPITTIAAAPPPSVTVGGSLSSVLGPPVPEIKVKEEVEPMDIMRPVSAVPPLATNTVSPSL

SEQ ID NO: 11338 - protein, 80 aa, Synthetic construct
TIPGAVPITPPITTIAAAPPPSVTVGGSLSSVLGPPVPEIKVKEEVEPMDIMRPVSAVPPLATNTVSPSLALLANNLSMP

SEQ ID NO: 11339 - protein, 80 aa, Synthetic construct
PITTIAAAPPPSVTVGGSLSSVLGPPVPEIKVKEEVEPMDIMRPVSAVPPLATNTVSPSLALLANNLSMPTSDLPPGASP

SEQ ID NO: 11340 - protein, 80 aa, Synthetic construct; identical to SEQ ID NO: 2155

SEQ ID NO: 11341 - protein, 80 aa, Synthetic construct
SVLGPPVPEIKVKEEVEPMDIMRPVSAVPPLATNTVSPSLALLANNLSMPTSDLPPGASPRKKPRKQQHVISTEEGDMME

SEQ ID NO: 11342 - protein, 80 aa, Synthetic construct
KVKEEVEPMDIMRPVSAVPPLATNTVSPSLALLANNLSMPTSDLPPGASPRKKPRKQQHVISTEEGDMMETNSTDDEKST

SEQ ID NO: 11343 - protein, 80 aa, Synthetic construct; identical to SEQ ID NO: 4768

SEQ ID NO: 11344 - protein, 80 aa, Synthetic construct; identical to SEQ ID NO: 2156

SEQ ID NO: 11345 - protein, 80 aa, Synthetic construct
LTNLQEGIIPKKKAATDDDLHRINELIQGNMQRCKLVMDQISEARDSMLKVLDHKDRVLKLLNKNGTVKKVSKLKRKEKV

SEQ ID NO: 11346 - protein, 80 aa, Synthetic construct
AVESRVTQEEIKKEPEKPIDREKTCPLLLRVFTTNNGRHHRMDEFSRGNVPSSELQIYTWMDATLKELTSLVKEVYPEAR

SEQ ID NO: 11347 - protein, 80 aa, Synthetic construct
IKKEPEKPIDREKTCPLLLRVFTTNNGRHHRMDEFSRGNVPSSELQIYTWMDATLKELTSLVKEVYPEARKKGTHFNFAI

SEQ ID NO: 11348 - protein, 80 aa, Synthetic construct; identical to SEQ ID NO: 2331

SEQ ID NO: 11349 - protein, 80 aa, Synthetic construct; identical to SEQ ID NO: 1650

SEQ ID NO: 11350 - protein, 80 aa, Synthetic construct; identical to SEQ ID NO: 1651

SEQ ID NO: 11351 - protein, 80 aa, Synthetic construct; identical to SEQ ID NO: 1652

SEQ ID NO: 11352 - protein, 80 aa, Synthetic construct; identical to SEQ ID NO: 1653

SEQ ID NO: 11353 - protein, 80 aa, Synthetic construct; identical to SEQ ID NO: 1654

SEQ ID NO: 11354 - protein, 80 aa, Synthetic construct; identical to SEQ ID NO: 2026

SEQ ID NO: 11355 - protein, 80 aa, Synthetic construct
EGSITKHPSTWSVEAVVLFLKQTDPLALCPLVDLFRSHEIDGKALLLLTSDVLLKHLGVKLGTAVKLCYYIDRLKQGKCF

SEQ ID NO: 11356 - protein, 80 aa, Synthetic construct; identical to SEQ ID NO: 2308

SEQ ID NO: 11357 - protein, 80 aa, Synthetic construct
QKEGVYRVADQVKKEVGDVSILINNAGIVTGKKFLDCPDELMEKSFDVNFKAHLWTYKAFLPAMIANDHGHLVCISSSAG

SEQ ID NO: 11358 - protein, 80 aa, Synthetic construct
QVKKEVGDVSILINNAGIVTGKKFLDCPDELMEKSFDVNFKAHLWTYKAFLPAMIANDHGHLVCISSSAGLSGVNGLADY

SEQ ID NO: 11359 - protein, 80 aa, Synthetic construct; identical to SEQ ID NO: 4789

SEQ ID NO: 11360 - protein, 80 aa, Synthetic construct; identical to SEQ ID NO: 4797

SEQ ID NO: 11361 - protein, 80 aa, Synthetic construct
VDLAVLADLALTPARRGLPALPAVEDSEATETSDEAERPRPLLSHILLEHNYALAVKPTPPAPALRPPEPVPAPAALFSS

SEQ ID NO: 11362 - protein, 80 aa, Synthetic construct
LTPARRGLPALPAVEDSEATETSDEAERPRPLLSHILLEHNYALAVKPTPPAPALRPPEPVPAPAALFSSPADEVLEAPE

SEQ ID NO: 11363 - protein, 80 aa, Synthetic construct; identical to SEQ ID NO: 4798

SEQ ID NO: 11364 - protein, 80 aa, Synthetic construct; identical to SEQ ID NO: 4799

SEQ ID NO: 11365 - protein, 80 aa, Synthetic construct; identical to SEQ ID NO: 2207

SEQ ID NO: 11366 - protein, 80 aa, Synthetic construct; identical to SEQ ID NO: 1655

SEQ ID NO: 11367 - protein, 80 aa, Synthetic construct; identical to SEQ ID NO: 4802

SEQ ID NO: 11368 - protein, 80 aa, Synthetic construct
NNDQQSQEVPEKVTVSSDHEEVDNPEEKPEEEKEEVIDDQENLAHSRRTREDRKVEAIMHAFENLEKRKKRRDQPLEQSN

SEQ ID NO: 11369 - protein, 80 aa, Synthetic construct; identical to SEQ ID NO: 1794

SEQ ID NO: 11370 - protein, 80 aa, Synthetic construct
GLIHSPLICTTPKHYIRFGSPFIPERRRRPLLPDGTFSSCKKRWIKQALEEGMTQTSSVPQETRTQHLYQSNENSSSSSI

SEQ ID NO: 11371 - protein, 80 aa, Synthetic construct; identical to SEQ ID NO: 1656

SEQ ID NO: 11372 - protein, 80 aa, Synthetic construct; identical to SEQ ID NO: 1795

SEQ ID NO: 11373 - protein, 80 aa, Synthetic construct; identical to SEQ ID NO: 1657

SEQ ID NO: 11374 - protein, 80 aa, Synthetic construct
EGMTQTSSVPQETRTQHLYQSNENSSSSSICKDNADLLSPLKKWKSRYLMEQNVTKLLRPLSPVTPPPPNSGSKSPQLAT

SEQ ID NO: 11375 - protein, 80 aa, Synthetic construct
QETRTQHLYQSNENSSSSSICKDNADLLSPLKKWKSRYLMEQNVTKLLRPLSPVTPPPPNSGSKSPQLATPGSSHPGEEE

SEQ ID NO: 11376 - protein, 80 aa, Synthetic construct
RPHVAQPTLQKLNELGYEVLPHPPYSPDLLPTNYHVFKHLNNFLQGKRFHNQQDAENAFQEFVESQSTDFYATGINQLIS

SEQ ID NO: 11377 - protein, 80 aa, Synthetic construct
KLNELGYEVLPHPPYSPDLLPTNYHVFKHLNNFLQGKRFHNQQDAENAFQEFVESQSTDFYATGINQLISRWQKCVDCNG

SEQ ID NO: 11378 - protein, 80 aa, Synthetic construct
LGYEVLPHPPYSPDLLPTNYHVFKHLNNFLQGKRFHNQQDAENAFQEFVESQSTDFYATGINQLISRWQKCVDCNGSYFD

SEQ ID NO: 11379 - protein, 80 aa, Synthetic construct
VYILNRDAAARLTISSPLEAHKANTLVYHVVGVDVGFENPMFACLEMDYEEADNDPTGEAAANTQQTLTFYELDLGLNHV

SEQ ID NO: 11380 - protein, 80 aa, Synthetic construct
RLTISSPLEAHKANTLVYHVVGVDVGFENPMFACLEMDYEEADNDPTGEAAANTQQTLTFYELDLGLNHVVRKYSEPLEE

SEQ ID NO: 11381 - protein, 80 aa, Synthetic construct
HKANTLVYHVVGVDVGFENPMFACLEMDYEEADNDPTGEAAANTQQTLTFYELDLGLNHVVRKYSEPLEEHGNFLITVPG

SEQ ID NO: 11382 - protein, 80 aa, Synthetic construct
VLKTGFLFVASEFGNHYLYQIAHLGDDDEEPEFSSAMPLEEGDTFFFQPRPLKNLVLVDELDSLSPILFCQIADLANEDT

SEQ ID NO: 11383 - protein, 80 aa, Synthetic construct
SEFGNHYLYQIAHLGDDDEEPEFSSAMPLEEGDTFFFQPRPLKNLVLVDELDSLSPILFCQIADLANEDTPQLYVACGRG

SEQ ID NO: 11384 - protein, 80 aa, Synthetic construct
IAHLGDDDEEPEFSSAMPLEEGDTFFFQPRPLKNLVLVDELDSLSPILFCQIADLANEDTPQLYVACGRGPRSSLRVLRH

SEQ ID NO: 11385 - protein, 80 aa, Synthetic construct
PEFSSAMPLEEGDTFFFQPRPLKNLVLVDELDSLSPILFCQIADLANEDTPQLYVACGRGPRSSLRVLRHGLEVSEMAVS

SEQ ID NO: 11386 - protein, 80 aa, Synthetic construct; identical to SEQ ID NO: 4818

SEQ ID NO: 11387 - protein, 80 aa, Synthetic construct; identical to SEQ ID NO: 4820

SEQ ID NO: 11388 - protein, 80 aa, Synthetic construct
YLDPFLHHVGWAAQQGYELQPPSAIRHLKNEAEWQEILAKVKEEEEEPLPSYLFKDKQVIGIHTFSVNMKLEAVDPWSPF

SEQ ID NO: 11389 - protein, 80 aa, Synthetic construct
WAAQQGYELQPPSAIRHLKNEAEWQEILAKVKEEEEEPLPSYLFKDKQVIGIHTFSVNMKLEAVDPWSPFGISPATVVKV

SEQ ID NO: 11390 - protein, 80 aa, Synthetic construct; identical to SEQ ID NO: 4822

SEQ ID NO: 11391 - protein, 80 aa, Synthetic construct; identical to SEQ ID NO: 2369

SEQ ID NO: 11392 - protein, 80 aa, Synthetic construct; identical to SEQ ID NO: 1658

SEQ ID NO: 11393 - protein, 80 aa, Synthetic construct
KAKYRGKTYRAVVKIVRTSDQVANFCRRVCAKLECCPNLFSPVLISENCPENCSIHTKTKYTYYYGKRKKISKPPIGESN

SEQ ID NO: 11394 - protein, 80 aa, Synthetic construct
LVLESNPLEWTVTDVVRFIKLTDCAPLAKIFQEQDIDGQALLLLTLPTVQECMELKLGPAIKLCHQIERVKVAFYAQYAN

SEQ ID NO: 11395 - protein, 80 aa, Synthetic construct
THERMQTENKISPYYRTKLRGLYTTAKADAEAECNILRKALDKIAEIKSLLEERRIAAKIAGLYNDSEPPRKTMRRGVLM

SEQ ID NO: 11396 - protein, 80 aa, Synthetic construct; identical to SEQ ID NO: 2119

SEQ ID NO: 11397 - protein, 80 aa, Synthetic construct; identical to SEQ ID NO: 4838

SEQ ID NO: 11398 - protein, 80 aa, Synthetic construct; identical to SEQ ID NO: 1659

SEQ ID NO: 11399 - protein, 80 aa, Synthetic construct; identical to SEQ ID NO: 1660

SEQ ID NO: 11400 - protein, 80 aa, Synthetic construct; identical to SEQ ID NO: 1661

SEQ ID NO: 11401 - protein, 80 aa, Synthetic construct; identical to SEQ ID NO: 2235

SEQ ID NO: 11402 - protein, 80 aa, Synthetic construct; identical to SEQ ID NO: 4871

SEQ ID NO: 11403 - protein, 80 aa, Synthetic construct; identical to SEQ ID NO: 4870

SEQ ID NO: 11404 - protein, 80 aa, Synthetic construct
VSSFQLKLAAKAPKSEKEMDPEYEEKMKADRAKRFEFLLKQTELFAHFIQPSAQKSPTSPLNMKLGRPRIKKDEKQSLIS

SEQ ID NO: 11405 - protein, 80 aa, Synthetic construct
STRAGGLGINLASADVVILYDSDWNPQVDLQAMDRAHRIGQKKPVRVFRLITDNTVEERIVERAEIKLRLDSIVIQQGRL

SEQ ID NO: 11406 - protein, 80 aa, Synthetic construct
LASADVVILYDSDWNPQVDLQAMDRAHRIGQKKPVRVFRLITDNTVEERIVERAEIKLRLDSIVIQQGRLIDQQSNKLAK

SEQ ID NO: 11407 - protein, 80 aa, Synthetic construct; identical to SEQ ID NO: 441

SEQ ID NO: 11408 - protein, 80 aa, Synthetic construct
ALITYLMEHKRINGPFLIIVPLSTLSNWAYEFDKWAPSVVKVSYKGSPAARRAFVPQLRSGKFNVLLTTYEYIIKDKHIL

SEQ ID NO: 11409 - protein, 80 aa, Synthetic construct; identical to SEQ ID NO: 1662

SEQ ID NO: 11410 - protein, 80 aa, Synthetic construct; identical to SEQ ID NO: 2332

SEQ ID NO: 11411 - protein, 80 aa, Synthetic construct; identical to SEQ ID NO: 1663

SEQ ID NO: 11412 - protein, 80 aa, Synthetic construct
LDMEIDGQKLRDAFTWNMNEKLMTPEMFSEILCDDLDLNPLTFVPAIASAIRQQIESYPTDSILEDQSDQRVIIKLNIHV

SEQ ID NO: 11413 - protein, 80 aa, Synthetic construct; identical to SEQ ID NO: 4894

SEQ ID NO: 11414 - protein, 80 aa, Synthetic construct; identical to SEQ ID NO: 4895

SEQ ID NO: 11415 - protein, 80 aa, Synthetic construct; identical to SEQ ID NO: 4897

SEQ ID NO: 11416 - protein, 80 aa, Synthetic construct; identical to SEQ ID NO: 4898

SEQ ID NO: 11417 - protein, 80 aa, Synthetic construct; identical to SEQ ID NO: 4900

SEQ ID NO: 11418 - protein, 80 aa, Synthetic construct
RDKWIKKELKSLDQAINDKKRQIAAIHKDLEDTEANKEKNLEQYNKLDQDLNEVKARVEELDRKYYEVKNKKDELQSERN

SEQ ID NO: 11419 - protein, 80 aa, Synthetic construct
ITLEGDQVSHRGALTGGYYDTRKSRLELQKDVRKAEEELGELEAKLNENLRRNIERINNEIDQLMNQMQQIETQQRKFKA

SEQ ID NO: 11420 - protein, 80 aa, Synthetic construct; identical to SEQ ID NO: 2239

SEQ ID NO: 11421 - protein, 80 aa, Synthetic construct
MTIGRMENVEVFTAEGKGRGLKATKEFWAADIIFAERAYSAVVFDSLVNFVCHTCFKRQEKLHRCGQCKFAHYCDRTCQK

SEQ ID NO: 11422 - protein, 80 aa, Synthetic construct
LKATKEFWAADIIFAERAYSAVVFDSLVNFVCHTCFKRQEKLHRCGQCKFAHYCDRTCQKDAWLNHKNECSAIKRYGKVP

SEQ ID NO: 11423 - protein, 80 aa, Synthetic construct
DIIFAERAYSAVVFDSLVNFVCHTCFKRQEKLHRCGQCKFAHYCDRTCQKDAWLNHKNECSAIKRYGKVPNENIRLAARI

SEQ ID NO: 11424 - protein, 80 aa, Synthetic construct
AVVFDSLVNFVCHTCFKRQEKLHRCGQCKFAHYCDRTCQKDAWLNHKNECSAIKRYGKVPNENIRLAARIMWRVEREGTG

SEQ ID NO: 11425 - protein, 80 aa, Synthetic construct; identical to SEQ ID NO: 4905

SEQ ID NO: 11426 - protein, 80 aa, Synthetic construct
SSDNSHQDRPEEPSPGGCPRLEEVKIPHGVKLVCYLGSGPVIQLLGAISHGQAGGQLPPKLEVLEDLMEVSSPSPAQRLR

SEQ ID NO: 11427 - protein, 80 aa, Synthetic construct
EEPSPGGCPRLEEVKIPHGVKLVCYLGSGPVIQLLGAISHGQAGGQLPPKLEVLEDLMEVSSPSPAQRLRRKKRPMVQGP

SEQ ID NO: 11428 - protein, 80 aa, Synthetic construct
LEEVKIPHGVKLVCYLGSGPVIQLLGAISHGQAGGQLPPKLEVLEDLMEVSSPSPAQRLRRKKRPMVQGPAGCQVFQPSP

SEQ ID NO: 11429 - protein, 80 aa, Synthetic construct; identical to SEQ ID NO: 4970

SEQ ID NO: 11430 - protein, 80 aa, Synthetic construct; identical to SEQ ID NO: 4973

SEQ ID NO: 11431 - protein, 80 aa, Synthetic construct
ERGSDVASAQLPNFRHALVVFGGLQGLEAGADADPNLEVAEPSVLFDLYVNTCPGQGSRTIRTEEAILISLAALQPGLIQ

SEQ ID NO: 11432 - protein, 80 aa, Synthetic construct
ASAQLPNFRHALVVFGGLQGLEAGADADPNLEVAEPSVLFDLYVNTCPGQGSRTIRTEEAILISLAALQPGLIQAGARHT

SEQ ID NO: 11433 - protein, 80 aa, Synthetic construct
HFHLKNAIMFGKKRHTDVQFYTEVGEITTDLGKHQHMHDRDDLYAEQMEREMRHKLKTAFKNFIEKVEALTKEELEFEVP

SEQ ID NO: 11434 - protein, 80 aa, Synthetic construct; identical to SEQ ID NO: 2112

SEQ ID NO: 11435 - protein, 80 aa, Synthetic construct; identical to SEQ ID NO: 5025

SEQ ID NO: 11436 - protein, 80 aa, Synthetic construct
TMLDIPSEPCSLTIHTIQLIQHNRRLRNLIATAQAQNQQQTEGVKTEESEPLPSCPGSPPLPDDLLPLDCKNPNAPFQIR

SEQ ID NO: 11437 - protein, 80 aa, Synthetic construct
SLTIHTIQLIQHNRRLRNLIATAQAQNQQQTEGVKTEESEPLPSCPGSPPLPDDLLPLDCKNPNAPFQIRHSDPESDFYR

SEQ ID NO: 11438 - protein, 80 aa, Synthetic construct
QHNRRLRNLIATAQAQNQQQTEGVKTEESEPLPSCPGSPPLPDDLLPLDCKNPNAPFQIRHSDPESDFYRGKGEPVTELS

SEQ ID NO: 11439 - protein, 80 aa, Synthetic construct
VDREARLGQTPFPDVMEQVFHEVGIGSVLSLQKFWQHRIKDYHSYMLQISKQLSEEYERIVNPEKATEDAKPVKIKEEPV

SEQ ID NO: 11440 - protein, 80 aa, Synthetic construct
PFPDVMEQVFHEVGIGSVLSLQKFWQHRIKDYHSYMLQISKQLSEEYERIVNPEKATEDAKPVKIKEEPVSDITFPVSEE

SEQ ID NO: 11441 - protein, 80 aa, Synthetic construct
HEVGIGSVLSLQKFWQHRIKDYHSYMLQISKQLSEEYERIVNPEKATEDAKPVKIKEEPVSDITFPVSEELEADLASGDQ

SEQ ID NO: 11442 - protein, 80 aa, Synthetic construct
LQKFWQHRIKDYHSYMLQISKQLSEEYERIVNPEKATEDAKPVKIKEEPVSDITFPVSEELEADLASGDQSLPMGVLGAQ

SEQ ID NO: 11443 - protein, 80 aa, Synthetic construct
KQLSEEYERIVNPEKATEDAKPVKIKEEPVSDITFPVSEELEADLASGDQSLPMGVLGAQSERFPSNLEVEASPQASSAE

SEQ ID NO: 11444 - protein, 80 aa, Synthetic construct; identical to SEQ ID NO: 2077

SEQ ID NO: 11445 - protein, 80 aa, Synthetic construct
SDITFPVSEELEADLASGDQSLPMGVLGAQSERFPSNLEVEASPQASSAEVNASPLWNLAHVKMEPQESEEGNVSGHGVL

SEQ ID NO: 11446 - protein, 80 aa, Synthetic construct
LEADLASGDQSLPMGVLGAQSERFPSNLEVEASPQASSAEVNASPLWNLAHVKMEPQESEEGNVSGHGVLGSDVFEEPMS

SEQ ID NO: 11447 - protein, 80 aa, Synthetic construct
SLPMGVLGAQSERFPSNLEVEASPQASSAEVNASPLWNLAHVKMEPQESEEGNVSGHGVLGSDVFEEPMSGMSEAGIPQS

SEQ ID NO: 11448 - protein, 80 aa, Synthetic construct
SERFPSNLEVEASPQASSAEVNASPLWNLAHVKMEPQESEEGNVSGHGVLGSDVFEEPMSGMSEAGIPQSPDDSDSSYGS

SEQ ID NO: 11449 - protein, 80 aa, Synthetic construct
EASPQASSAEVNASPLWNLAHVKMEPQESEEGNVSGHGVLGSDVFEEPMSGMSEAGIPQSPDDSDSSYGSHSTDSLMGSS

SEQ ID NO: 11450 - protein, 80 aa, Synthetic construct
VNASPLWNLAHVKMEPQESEEGNVSGHGVLGSDVFEEPMSGMSEAGIPQSPDDSDSSYGSHSTDSLMGSSPVFNQRCKKR

SEQ ID NO: 11451 - protein, 80 aa, Synthetic construct
PLWNLAHVKMEPQESEEGNVSGHGVLGSDVFEEPMSGMSEAGIPQSPDDSDSSYGSHSTDSLMGSSPVFNQRCKKRMRKI

SEQ ID NO: 11452 - protein, 80 aa, Synthetic construct; identical to SEQ ID NO: 1664

SEQ ID NO: 11453 - protein, 80 aa, Synthetic construct; identical to SEQ ID NO: 1753

SEQ ID NO: 11454 - protein, 80 aa, Synthetic construct
YYYYGPPHMPPPTRGRGRGGRGGYGYPPDYYGYEDYYDYYGYDYHNYRGGYEDPYYGYEDFQVGARGRGGRGARGAAPSR

SEQ ID NO: 11455 - protein, 80 aa, Synthetic construct; identical to SEQ ID NO: 5031

SEQ ID NO: 11456 - protein, 80 aa, Synthetic construct; identical to SEQ ID NO: 2294

SEQ ID NO: 11457 - protein, 80 aa, Synthetic construct
YCLAEVSPLRFRCTECQDIELCPECFSAGAEIGHHRRYHGYQLVDGGRFTLWGPEAEGGWTSREEQLLLDAIEQFGFGNW

SEQ ID NO: 11458 - protein, 80 aa, Synthetic construct; identical to SEQ ID NO: 5033

SEQ ID NO: 11459 - protein, 80 aa, Synthetic construct
LKRAHVDMYVRKLKERQRRKNIARDYNLVPAFLGKDKKEKEKALKRKITKEEKELRLKLRPLYQFMSCKEFDDLFENMHK

SEQ ID NO: 11460 - protein, 80 aa, Synthetic construct
RKLKERQRRKNIARDYNLVPAFLGKDKKEKEKALKRKITKEEKELRLKLRPLYQFMSCKEFDDLFENMHKEKMLRAKIRE

SEQ ID NO: 11461 - protein, 80 aa, Synthetic construct; identical to SEQ ID NO: 5038

SEQ ID NO: 11462 - protein, 80 aa, Synthetic construct
MANSTAVVKIPGTPGAGGRLSPENNQVLTKKKLQDLVREVDPNEQLDEDVEEMLLQIADDFIESVVTAACQLARHRKSST

SEQ ID NO: 11463 - protein, 80 aa, Synthetic construct; identical to SEQ ID NO: 453

SEQ ID NO: 11464 - protein, 80 aa, Synthetic construct; identical to SEQ ID NO: 5041

SEQ ID NO: 11465 - protein, 80 aa, Synthetic construct; identical to SEQ ID NO: 5042

SEQ ID NO: 11466 - protein, 80 aa, Synthetic construct; identical to SEQ ID NO: 1665

SEQ ID NO: 11467 - protein, 80 aa, Synthetic construct; identical to SEQ ID NO: 1666

SEQ ID NO: 11468 - protein, 80 aa, Synthetic construct; identical to SEQ ID NO: 2023

SEQ ID NO: 11469 - protein, 80 aa, Synthetic construct; identical to SEQ ID NO: 5044

SEQ ID NO: 11470 - protein, 80 aa, Synthetic construct; identical to SEQ ID NO: 5047

SEQ ID NO: 11471 - protein, 80 aa, Synthetic construct
CIKLWSLRSKKLKSEPHQVDVSRIHLACDILEEEDDEDDNAGTEMKILRGHCGPVYSTRFLADSSGLLSCSEDMSIRYWD

SEQ ID NO: 11472 - protein, 80 aa, Synthetic construct; identical to SEQ ID NO: 5050

SEQ ID NO: 11473 - protein, 80 aa, Synthetic construct; identical to SEQ ID NO: 457

SEQ ID NO: 11474 - protein, 80 aa, Synthetic construct; identical to SEQ ID NO: 2323

SEQ ID NO: 11475 - protein, 80 aa, Synthetic construct; identical to SEQ ID NO: 5053

SEQ ID NO: 11476 - protein, 80 aa, Synthetic construct
PSGMLLASCSDDMTLKIWSMKQEVCIHDLQAHNKEIYTIKWSPTGPATSNPNSNIMLASASFDSTVRLWDIERGVCTHTL

SEQ ID NO: 11477 - protein, 80 aa, Synthetic construct
DDMTLKIWSMKQEVCIHDLQAHNKEIYTIKWSPTGPATSNPNSNIMLASASFDSTVRLWDIERGVCTHTLTKHQEPVYSV

SEQ ID NO: 11478 - protein, 80 aa, Synthetic construct; identical to SEQ ID NO: 1915

SEQ ID NO: 11479 - protein, 80 aa, Synthetic construct; identical to SEQ ID NO: 2367

SEQ ID NO: 11480 - protein, 80 aa, Synthetic construct
LAFSADGHTMLSSGRDKICIIWDLQSCQATRTVPVFESVEAAVLLPEEPVSQLGVKSPGLYFLTAGDQGTLRVWEAASGQ

SEQ ID NO: 11481 - protein, 80 aa, Synthetic construct
LSSGRDKICIIWDLQSCQATRTVPVFESVEAAVLLPEEPVSQLGVKSPGLYFLTAGDQGTLRVWEAASGQCVYTQAQPPG

SEQ ID NO: 11482 - protein, 80 aa, Synthetic construct
DTETLCYVMPSSSARCAQFPRAQDKVHYYIKLKDLRDQLKGIERNMDVQEVQYTFDLQLAQEDAKKMAVKEEKYDPGYEA

SEQ ID NO: 11483 - protein, 80 aa, Synthetic construct
SSSARCAQFPRAQDKVHYYIKLKDLRDQLKGIERNMDVQEVQYTFDLQLAQEDAKKMAVKEEKYDPGYEAAYGGAYGENP

SEQ ID NO: 11484 - protein, 80 aa, Synthetic construct
RAQDKVHYYIKLKDLRDQLKGIERNMDVQEVQYTFDLQLAQEDAKKMAVKEEKYDPGYEAAYGGAYGENPCSSEPCGFSS

SEQ ID NO: 11485 - protein, 80 aa, Synthetic construct
KLKDLRDQLKGIERNMDVQEVQYTFDLQLAQEDAKKMAVKEEKYDPGYEAAYGGAYGENPCSSEPCGFSSNGLIESVELR

SEQ ID NO: 11486 - protein, 80 aa, Synthetic construct
GIERNMDVQEVQYTFDLQLAQEDAKKMAVKEEKYDPGYEAAYGGAYGENPCSSEPCGFSSNGLIESVELRGESAFSGIPN

SEQ ID NO: 11487 - protein, 80 aa, Synthetic construct
VQYTFDLQLAQEDAKKMAVKEEKYDPGYEAAYGGAYGENPCSSEPCGFSSNGLIESVELRGESAFSGIPNGQWMTQSFTD

SEQ ID NO: 11488 - protein, 80 aa, Synthetic construct
QEDAKKMAVKEEKYDPGYEAAYGGAYGENPCSSEPCGFSSNGLIESVELRGESAFSGIPNGQWMTQSFTDQIPSFSNHCG

SEQ ID NO: 11489 - protein, 80 aa, Synthetic construct; identical to SEQ ID NO: 5101

SEQ ID NO: 11490 - protein, 80 aa, Synthetic construct; identical to SEQ ID NO: 1959

SEQ ID NO: 11491 - protein, 80 aa, Synthetic construct
EKCSENGTVDVADKLVTFGLAKNITPQRQSALNTEKMYRMNCCCTELQKQVEKHEHILLFLLNNSTNQNKFIEMKKLLKK

SEQ ID NO: 11492 - protein, 80 aa, Synthetic construct
DVADKLVTFGLAKNITPQRQSALNTEKMYRMNCCCTELQKQVEKHEHILLFLLNNSTNQNKFIEMKKLLKKTASLGGKPL

SEQ ID NO: 11493 - protein, 80 aa, Synthetic construct
DPGCFWVIIKGCSPFLDHDVDYQKLNSAMNDFYNSTCQDIEIKPLTLEEGQVCVVYCEELKCWCRAIVKSITSSADQYLA

SEQ ID NO: 11494 - protein, 80 aa, Synthetic construct
GCSPFLDHDVDYQKLNSAMNDFYNSTCQDIEIKPLTLEEGQVCVVYCEELKCWCRAIVKSITSSADQYLAECFLVDFAKN

SEQ ID NO: 11495 - protein, 80 aa, Synthetic construct
DYQKLNSAMNDFYNSTCQDIEIKPLTLEEGQVCVVYCEELKCWCRAIVKSITSSADQYLAECFLVDFAKNIPVKSKNIRV

SEQ ID NO: 11496 - protein, 80 aa, Synthetic construct
DFYNSTCQDIEIKPLTLEEGQVCVVYCEELKCWCRAIVKSITSSADQYLAECFLVDFAKNIPVKSKNIRVVVESFMQLPY

SEQ ID NO: 11497 - protein, 80 aa, Synthetic construct; identical to SEQ ID NO: 5107

SEQ ID NO: 11498 - protein, 80 aa, Synthetic construct
KFLPSDINSGKVEKLEGPCVLQIQKIRNVAAPKDNEESQAAPRMLRLQMTDGHISCTAVEFSYMSKISLNTPPGTKVKLS

SEQ ID NO: 11499 - protein, 80 aa, Synthetic construct
KVEKLEGPCVLQIQKIRNVAAPKDNEESQAAPRMLRLQMTDGHISCTAVEFSYMSKISLNTPPGTKVKLSGIVDIKNGFL

SEQ ID NO: 11500 - protein, 80 aa, Synthetic construct; identical to SEQ ID NO: 1667

SEQ ID NO: 11501 - protein, 80 aa, Synthetic construct; identical to SEQ ID NO: 1833

SEQ ID NO: 11502 - protein, 80 aa, Synthetic construct
IPMEYAKMWKPGDECFALYWEDNKFYRAEVEALHSSGMTAVVKFIDYGNYEEVLLSNIKPIQTEAWEEEGTYDQTLEFRR

SEQ ID NO: 11503 - protein, 80 aa, Synthetic construct
DKIQKDAGQAHGDNDIKAMVEQEYLQVEESIAESANTFMEDITVPPLMIPTEASPSVLVVELSNTNEVVIRYVGKDYSAA

SEQ ID NO: 11504 - protein, 80 aa, Synthetic construct
HGDNDIKAMVEQEYLQVEESIAESANTFMEDITVPPLMIPTEASPSVLVVELSNTNEVVIRYVGKDYSAAQELMEDEMKE

SEQ ID NO: 11505 - protein, 80 aa, Synthetic construct
EQEYLQVEESIAESANTFMEDITVPPLMIPTEASPSVLVVELSNTNEVVIRYVGKDYSAAQELMEDEMKEYYSKNPKITP

SEQ ID NO: 11506 - protein, 80 aa, Synthetic construct
IAESANTFMEDITVPPLMIPTEASPSVLVVELSNTNEVVIRYVGKDYSAAQELMEDEMKEYYSKNPKITPVQAVNVGQLL

SEQ ID NO: 11507 - protein, 80 aa, Synthetic construct; identical to SEQ ID NO: 5115

SEQ ID NO: 11508 - protein, 80 aa, Synthetic construct; identical to SEQ ID NO: 5170

SEQ ID NO: 11509 - protein, 80 aa, Synthetic construct; identical to SEQ ID NO: 5171

SEQ ID NO: 11510 - protein, 80 aa, Synthetic construct
MFPQSRHPTPHQAAGQPFKFTIPESLDRIKEEFQFLQAQYHSLKLECEKLASEKTEMQRHYVMYYEMSYGLNIEMHKQTE

SEQ ID NO: 11511 - protein, 80 aa, Synthetic construct
HQAAGQPFKFTIPESLDRIKEEFQFLQAQYHSLKLECEKLASEKTEMQRHYVMYYEMSYGLNIEMHKQTEIAKRLNTICA

SEQ ID NO: 11512 - protein, 80 aa, Synthetic construct
TGGKGCVKVWDISHPGNKSPVSQLDCLNRDNYIRSCKLLPDGCTLIVGGEASTLSIWDLAAPTPRIKAELTSSAPACYAL

SEQ ID NO: 11513 - protein, 80 aa, Synthetic construct
DGCTLIVGGEASTLSIWDLAAPTPRIKAELTSSAPACYALAISPDSKVCFSCCSDGNIAVWDLHNQTLVRQFQGHTDGAS

SEQ ID NO: 11514 - protein, 80 aa, Synthetic construct; identical to SEQ ID NO: 5204

SEQ ID NO: 11515 - protein, 80 aa, Synthetic construct
KTPVAQLDCLNRDNYIRSCKLLPDGRSLIVGGEASTLSIWDLAAPTPRIKAELTSSAPACYALAVSPDAKVCFSCCSDGN

SEQ ID NO: 11516 - protein, 80 aa, Synthetic construct
NRDNYIRSCKLLPDGRSLIVGGEASTLSIWDLAAPTPRIKAELTSSAPACYALAVSPDAKVCFSCCSDGNIVVWDLQNQT

SEQ ID NO: 11517 - protein, 80 aa, Synthetic construct
LLPDGRSLIVGGEASTLSIWDLAAPTPRIKAELTSSAPACYALAVSPDAKVCFSCCSDGNIVVWDLQNQTMVRQFQGHTD

SEQ ID NO: 11518 - protein, 80 aa, Synthetic construct
GGEASTLSIWDLAAPTPRIKAELTSSAPACYALAVSPDAKVCFSCCSDGNIVVWDLQNQTMVRQFQGHTDGASCIDISDY

SEQ ID NO: 11519 - protein, 80 aa, Synthetic construct
DLAAPTPRIKAELTSSAPACYALAVSPDAKVCFSCCSDGNIVVWDLQNQTMVRQFQGHTDGASCIDISDYGTRLWTGGLD

SEQ ID NO: 11520 - protein, 80 aa, Synthetic construct
MYPQGRHPAPHQPGQPGFKFTVAESCDRIKDEFQFLQAQYHSLKVEYDKLANEKTEMQRHYVMYYEMSYGLNIEMHKQTE

SEQ ID NO: 11521 - protein, 80 aa, Synthetic construct
HQPGQPGFKFTVAESCDRIKDEFQFLQAQYHSLKVEYDKLANEKTEMQRHYVMYYEMSYGLNIEMHKQTEIAKRLNTILA

SEQ ID NO: 11522 - protein, 80 aa, Synthetic construct
VYTGGKGCVKIWDISQPGSKSPISQLDCLNRDNYIRSCKLLPDGRTLIVGGEASTLTIWDLASPTPRIKAELTSSAPACY

SEQ ID NO: 11523 - protein, 80 aa, Synthetic construct
SPISQLDCLNRDNYIRSCKLLPDGRTLIVGGEASTLTIWDLASPTPRIKAELTSSAPACYALAISPDAKVCFSCCSDGNI

SEQ ID NO: 11524 - protein, 80 aa, Synthetic construct
RDNYIRSCKLLPDGRTLIVGGEASTLTIWDLASPTPRIKAELTSSAPACYALAISPDAKVCFSCCSDGNIAVWDLHNQTL

SEQ ID NO: 11525 - protein, 80 aa, Synthetic construct
LPDGRTLIVGGEASTLTIWDLASPTPRIKAELTSSAPACYALAISPDAKVCFSCCSDGNIAVWDLHNQTLVRQFQGHTDG

SEQ ID NO: 11526 - protein, 80 aa, Synthetic construct
GEASTLTIWDLASPTPRIKAELTSSAPACYALAISPDAKVCFSCCSDGNIAVWDLHNQTLVRQFQGHTDGASCIDISHDG

SEQ ID NO: 11527 - protein, 80 aa, Synthetic construct
LASPTPRIKAELTSSAPACYALAISPDAKVCFSCCSDGNIAVWDLHNQTLVRQFQGHTDGASCIDISHDGTKLWTGGLDN

SEQ ID NO: 11528 - protein, 80 aa, Synthetic construct
ALRYLNEIKPPIIHYDLKPGNILLVDGTACGEIKITDFGLSKIMDDDSYGVDGMDLTSQGAGTYWYLPPECFVVGKEPPK

SEQ ID NO: 11529 - protein, 80 aa, Synthetic construct
PIIHYDLKPGNILLVDGTACGEIKITDFGLSKIMDDDSYGVDGMDLTSQGAGTYWYLPPECFVVGKEPPKISNKVDVWSV

SEQ ID NO: 11530 - protein, 80 aa, Synthetic construct
LGHLKKEEAEIQAELERLERVRNLHIRELKRIHNEDNSQFKDHPTLNDRYLLLHLLGRGGFSEVYKAFDLTEQRYVAVKI

SEQ ID NO: 11531 - protein, 80 aa, Synthetic construct; identical to SEQ ID NO: 5212

SEQ ID NO: 11532 - protein, 80 aa, Synthetic construct; identical to SEQ ID NO: 5213

SEQ ID NO: 11533 - protein, 80 aa, Synthetic construct
NVALEACEFWLTLAEQPICKDVLVRHLPKLIPVLVNGMKYSDIDIILLKGDVEEDETIPDSEQDIRPRFHRSRTVAQQHD

SEQ ID NO: 11534 - protein, 80 aa, Synthetic construct
LTLAEQPICKDVLVRHLPKLIPVLVNGMKYSDIDIILLKGDVEEDETIPDSEQDIRPRFHRSRTVAQQHDEDGIEEEDDD

SEQ ID NO: 11535 - protein, 80 aa, Synthetic construct
DVLVRHLPKLIPVLVNGMKYSDIDIILLKGDVEEDETIPDSEQDIRPRFHRSRTVAQQHDEDGIEEEDDDDDEIDDDDTI

SEQ ID NO: 11536 - protein, 80 aa, Synthetic construct
NSEHKDSEKKHKEKEKTKHKDGSSEKHKDKHKDRDKEKRKEEKVRASGDAKIKKEKENGFSSPPQIKDEPEDDGYFVPPK

SEQ ID NO: 11537 - protein, 80 aa, Synthetic construct; identical to SEQ ID NO: 1668

SEQ ID NO: 11538 - protein, 80 aa, Synthetic construct; identical to SEQ ID NO: 1704

SEQ ID NO: 11539 - protein, 80 aa, Synthetic construct; identical to SEQ ID NO: 1669

SEQ ID NO: 11540 - protein, 80 aa, Synthetic construct; identical to SEQ ID NO: 1670

SEQ ID NO: 11541 - protein, 80 aa, Synthetic construct
SSPPQIKDEPEDDGYFVPPKEDIKPLKRPRDEDDADYKPKKIKTEDTKKEKKRKLEEEEDGKLKKPKNKDKDKKVPEPDN

SEQ ID NO: 11542 - protein, 80 aa, Synthetic construct
EDIKPLKRPRDEDDADYKPKKIKTEDTKKEKKRKLEEEEDGKLKKPKNKDKDKKVPEPDNKKKKPKKEEEQKWKWWEEER

SEQ ID NO: 11543 - protein, 80 aa, Synthetic construct; identical to SEQ ID NO: 5225

SEQ ID NO: 11544 - protein, 80 aa, Synthetic construct; identical to SEQ ID NO: 5226

SEQ ID NO: 11545 - protein, 80 aa, Synthetic construct; identical to SEQ ID NO: 5227

SEQ ID NO: 11546 - protein, 80 aa, Synthetic construct
KVPSPPPGHKWKEVRHDNKVTWLVSWTENIQGSIKYIMLNPSSRIKGEKDWQKYETARRLKKCVDKIRNQYREDWKSKEM

SEQ ID NO: 11547 - protein, 80 aa, Synthetic construct; identical to SEQ ID NO: 5230

SEQ ID NO: 11548 - protein, 80 aa, Synthetic construct
IKGKVGKPKVKKLQLEETMPSPYGRRIIPEITAMKADASKKLLKKKKGDLDTAAVKVEFDEEFSGAPVEGAGEEALTPSV

SEQ ID NO: 11549 - protein, 80 aa, Synthetic construct
KKLQLEETMPSPYGRRIIPEITAMKADASKKLLKKKKGDLDTAAVKVEFDEEFSGAPVEGAGEEALTPSVPINKGPKPKR

SEQ ID NO: 11550 - protein, 80 aa, Synthetic construct; identical to SEQ ID NO: 5232

SEQ ID NO: 11551 - protein, 80 aa, Synthetic construct; identical to SEQ ID NO: 5234

SEQ ID NO: 11552 - protein, 80 aa, Synthetic construct
DLKLICDGKKDKFVVLRQQVQKYKQVFIEAVAKAKKLDEALAQYFGNGTELAQQEDIYPAMPEPIRKCPQCNKDMVLKTK

SEQ ID NO: 11553 - protein, 80 aa, Synthetic construct
DKFVVLRQQVQKYKQVFIEAVAKAKKLDEALAQYFGNGTELAQQEDIYPAMPEPIRKCPQCNKDMVLKTKKNGGFYLSCM

SEQ ID NO: 11554 - protein, 80 aa, Synthetic construct
VECLQSLGKESIIEGIKRRIRNKKLKSLENPPLKITENEATQNIKVEFQDELYKNTPKYSCNILSPEVENNSVLKLRDCN

SEQ ID NO: 11555 - protein, 80 aa, Synthetic construct
SIIEGIKRRIRNKKLKSLENPPLKITENEATQNIKVEFQDELYKNTPKYSCNILSPEVENNSVLKLRDCNCFPHSKGCND

SEQ ID NO: 11556 - protein, 80 aa, Synthetic construct
PPLKITENEATQNIKVEFQDELYKNTPKYSCNILSPEVENNSVLKLRDCNCFPHSKGCNDENNLPYKPDGGCMHVAENFS

SEQ ID NO: 11557 - protein, 80 aa, Synthetic construct
TQNIKVEFQDELYKNTPKYSCNILSPEVENNSVLKLRDCNCFPHSKGCNDENNLPYKPDGGCMHVAENFSKKENLRSLAE

SEQ ID NO: 11558 - protein, 80 aa, Synthetic construct; identical to SEQ ID NO: 1671

SEQ ID NO: 11559 - protein, 80 aa, Synthetic construct; identical to SEQ ID NO: 1672

SEQ ID NO: 11560 - protein, 80 aa, Synthetic construct; identical to SEQ ID NO: 1767

SEQ ID NO: 11561 - protein, 80 aa, Synthetic construct; identical to SEQ ID NO: 1673

SEQ ID NO: 11562 - protein, 80 aa, Synthetic construct; identical to SEQ ID NO: 1674

SEQ ID NO: 11563 - protein, 80 aa, Synthetic construct
PDLFGVSNEGELSFTSEVPKISQEPNVAGEHQSTDSKYMETPVKKEPSDDLRELPVLDCGWIKPDICASNSAESEIKRDP

SEQ ID NO: 11564 - protein, 80 aa, Synthetic construct
ELSFTSEVPKISQEPNVAGEHQSTDSKYMETPVKKEPSDDLRELPVLDCGWIKPDICASNSAESEIKRDPKDVNTSLGEV

SEQ ID NO: 11565 - protein, 80 aa, Synthetic construct; identical to SEQ ID NO: 5241

SEQ ID NO: 11566 - protein, 80 aa, Synthetic construct; identical to SEQ ID NO: 5249

SEQ ID NO: 11567 - protein, 80 aa, Synthetic construct; identical to SEQ ID NO: 5250

SEQ ID NO: 11568 - protein, 80 aa, Synthetic construct; identical to SEQ ID NO: 5251

SEQ ID NO: 11569 - protein, 80 aa, Synthetic construct; identical to SEQ ID NO: 5252

SEQ ID NO: 11570 - protein, 80 aa, Synthetic construct; identical to SEQ ID NO: 5253

SEQ ID NO: 11571 - protein, 80 aa, Synthetic construct
LDLERKLKLNENAISRLQANQKSVLVSVSEVKAVAEMQFGELLAAVRKAQANVMLFLEEKEQAALSQANGIKAHLEYRSA

SEQ ID NO: 11572 - protein, 80 aa, Synthetic construct
ENAISRLQANQKSVLVSVSEVKAVAEMQFGELLAAVRKAQANVMLFLEEKEQAALSQANGIKAHLEYRSAEMEKSKQELE

SEQ ID NO: 11573 - protein, 80 aa, Synthetic construct
QKSVLVSVSEVKAVAEMQFGELLAAVRKAQANVMLFLEEKEQAALSQANGIKAHLEYRSAEMEKSKQELERMAAISNTVQ

SEQ ID NO: 11574 - protein, 80 aa, Synthetic construct; identical to SEQ ID NO: 5268

SEQ ID NO: 11575 - protein, 80 aa, Synthetic construct; identical to SEQ ID NO: 5269

SEQ ID NO: 11576 - protein, 80 aa, Synthetic construct
EDNASAVGFCVECGEWLCKTCIEAHQRVKFTKDHLIRKKEDVSESVGASGQRPVFCPVHKQEQLKLFCETCDRLTCRDCQ

SEQ ID NO: 11577 - protein, 80 aa, Synthetic construct
SRYISGSHLPPQPTSTMNPSPGPSALSPGSSGLSNSHTPVRPPSTSSTGSRGSCGSSGRTAEKTSLSFKSDQVKVKQEPG

SEQ ID NO: 11578 - protein, 80 aa, Synthetic construct
PQPTSTMNPSPGPSALSPGSSGLSNSHTPVRPPSTSSTGSRGSCGSSGRTAEKTSLSFKSDQVKVKQEPGTEDEICSFSG

SEQ ID NO: 11579 - protein, 80 aa, Synthetic construct
PGPSALSPGSSGLSNSHTPVRPPSTSSTGSRGSCGSSGRTAEKTSLSFKSDQVKVKQEPGTEDEICSFSGGVKQEKTEDG

SEQ ID NO: 11580 - protein, 80 aa, Synthetic construct; identical to SEQ ID NO: 1829

SEQ ID NO: 11581 - protein, 80 aa, Synthetic construct
RPPSTSSTGSRGSCGSSGRTAEKTSLSFKSDQVKVKQEPGTEDEICSFSGGVKQEKTEDGRRSACMLSSPESSLTPPLST

SEQ ID NO: 11582 - protein, 80 aa, Synthetic construct
RGSCGSSGRTAEKTSLSFKSDQVKVKQEPGTEDEICSFSGGVKQEKTEDGRRSACMLSSPESSLTPPLSTNLHLESELDA

SEQ ID NO: 11583 - protein, 80 aa, Synthetic construct
AEKTSLSFKSDQVKVKQEPGTEDEICSFSGGVKQEKTEDGRRSACMLSSPESSLTPPLSTNLHLESELDALASLENHVKI

SEQ ID NO: 11584 - protein, 80 aa, Synthetic construct; identical to SEQ ID NO: 1830

SEQ ID NO: 11585 - protein, 80 aa, Synthetic construct
TEDEICSFSGGVKQEKTEDGRRSACMLSSPESSLTPPLSTNLHLESELDALASLENHVKIEPADMNESCKQSGLSSLVNG

SEQ ID NO: 11586 - protein, 80 aa, Synthetic construct
GVKQEKTEDGRRSACMLSSPESSLTPPLSTNLHLESELDALASLENHVKIEPADMNESCKQSGLSSLVNGKSPIRSLMHR

SEQ ID NO: 11587 - protein, 80 aa, Synthetic construct
RRSACMLSSPESSLTPPLSTNLHLESELDALASLENHVKIEPADMNESCKQSGLSSLVNGKSPIRSLMHRSARIGGDGNN

SEQ ID NO: 11588 - protein, 80 aa, Synthetic construct
ESSLTPPLSTNLHLESELDALASLENHVKIEPADMNESCKQSGLSSLVNGKSPIRSLMHRSARIGGDGNNKDDDPNEDWC

SEQ ID NO: 11589 - protein, 80 aa, Synthetic construct
NLHLESELDALASLENHVKIEPADMNESCKQSGLSSLVNGKSPIRSLMHRSARIGGDGNNKDDDPNEDWCAVCQNGGDLL

SEQ ID NO: 11590 - protein, 80 aa, Synthetic construct; identical to SEQ ID NO: 5272

SEQ ID NO: 11591 - protein, 80 aa, Synthetic construct
SARIGGDGNNKDDDPNEDWCAVCQNGGDLLCCEKCPKVFHLTCHVPTLLSFPSGDWICTFCRDIGKPEVEYDCDNLQHSK

SEQ ID NO: 11592 - protein, 80 aa, Synthetic construct
KDDDPNEDWCAVCQNGGDLLCCEKCPKVFHLTCHVPTLLSFPSGDWICTFCRDIGKPEVEYDCDNLQHSKKGKTAQGLSP

SEQ ID NO: 11593 - protein, 80 aa, Synthetic construct; identical to SEQ ID NO: 5274

SEQ ID NO: 11594 - protein, 80 aa, Synthetic construct; identical to SEQ ID NO: 5275

SEQ ID NO: 11595 - protein, 80 aa, Synthetic construct; identical to SEQ ID NO: 5277

SEQ ID NO: 11596 - protein, 80 aa, Synthetic construct
AGVDNNLVELEAARRVEKEALARLREQAARVGTQVEEAAEGVLRALLAQKQEVLGQLRAHVEAAEEAARERLAELEGREQ

SEQ ID NO: 11597 - protein, 80 aa, Synthetic construct
EAARRVEKEALARLREQAARVGTQVEEAAEGVLRALLAQKQEVLGQLRAHVEAAEEAARERLAELEGREQVARAAAAFAR

SEQ ID NO: 11598 - protein, 80 aa, Synthetic construct
LARLREQAARVGTQVEEAAEGVLRALLAQKQEVLGQLRAHVEAAEEAARERLAELEGREQVARAAAAFARRVLSLGREAE

SEQ ID NO: 11599 - protein, 80 aa, Synthetic construct; identical to SEQ ID NO: 5280

SEQ ID NO: 11600 - protein, 80 aa, Synthetic construct; identical to SEQ ID NO: 5281

SEQ ID NO: 11601 - protein, 80 aa, Synthetic construct
EEINSEFEQIRLFLQNEQEMILRQIQDEEMNILAKLNENLVELSDYVSTLKHLLREVEGKSVQSNLELLTQAKSMHHKYQ

SEQ ID NO: 11602 - protein, 80 aa, Synthetic construct
RLFLQNEQEMILRQIQDEEMNILAKLNENLVELSDYVSTLKHLLREVEGKSVQSNLELLTQAKSMHHKYQNLKCPELFSF

SEQ ID NO: 11603 - protein, 80 aa, Synthetic construct
ILRQIQDEEMNILAKLNENLVELSDYVSTLKHLLREVEGKSVQSNLELLTQAKSMHHKYQNLKCPELFSFRLTKYGFSLP

SEQ ID NO: 11604 - protein, 80 aa, Synthetic construct
NILAKLNENLVELSDYVSTLKHLLREVEGKSVQSNLELLTQAKSMHHKYQNLKCPELFSFRLTKYGFSLPPQYSGLDRII

SEQ ID NO: 11605 - protein, 80 aa, Synthetic construct; identical to SEQ ID NO: 1886

SEQ ID NO: 11606 - protein, 80 aa, Synthetic construct
SEDRKAVRYERKKRNICYDPRRFYVCPAVLGSQRFSSGRHYWEVEVGNKPKWILGVCQDCLLRNWQDQPSVLGGFWAIGR

SEQ ID NO: 11607 - protein, 80 aa, Synthetic construct
RKKRNICYDPRRFYVCPAVLGSQRFSSGRHYWEVEVGNKPKWILGVCQDCLLRNWQDQPSVLGGFWAIGRYMKSGYVASG

SEQ ID NO: 11608 - protein, 80 aa, Synthetic construct
RRFYVCPAVLGSQRFSSGRHYWEVEVGNKPKWILGVCQDCLLRNWQDQPSVLGGFWAIGRYMKSGYVASGPKTTQLLPVV

SEQ ID NO: 11609 - protein, 80 aa, Synthetic construct
GSQRFSSGRHYWEVEVGNKPKWILGVCQDCLLRNWQDQPSVLGGFWAIGRYMKSGYVASGPKTTQLLPVVKPSKIGIFLD

SEQ ID NO: 11610 - protein, 80 aa, Synthetic construct
LLAVCEKSTPIGTSCQGAMLPSITNVINLADSHDRAAFAMVTHVKQEPRERENSESKEEDVEIDIELAPGDQTSTPKTKE

SEQ ID NO: 11611 - protein, 80 aa, Synthetic construct
IGTSCQGAMLPSITNVINLADSHDRAAFAMVTHVKQEPRERENSESKEEDVEIDIELAPGDQTSTPKTKELSEKDIGNQL

SEQ ID NO: 11612 - protein, 80 aa, Synthetic construct
PSITNVINLADSHDRAAFAMVTHVKQEPRERENSESKEEDVEIDIELAPGDQTSTPKTKELSEKDIGNQLHMLTNRHDKF

SEQ ID NO: 11613 - protein, 80 aa, Synthetic construct
DSHDRAAFAMVTHVKQEPRERENSESKEEDVEIDIELAPGDQTSTPKTKELSEKDIGNQLHMLTNRHDKFLDTLREVKTG

SEQ ID NO: 11614 - protein, 80 aa, Synthetic construct
VTHVKQEPRERENSESKEEDVEIDIELAPGDQTSTPKTKELSEKDIGNQLHMLTNRHDKFLDTLREVKTGALLSAFVQLC

SEQ ID NO: 11615 - protein, 80 aa, Synthetic construct; identical to SEQ ID NO: 562

SEQ ID NO: 11616 - protein, 80 aa, Synthetic construct; identical to SEQ ID NO: 5292

SEQ ID NO: 11617 - protein, 80 aa, Synthetic construct; identical to SEQ ID NO: 5315

SEQ ID NO: 11618 - protein, 80 aa, Synthetic construct; identical to SEQ ID NO: 5318

SEQ ID NO: 11619 - protein, 80 aa, Synthetic construct; identical to SEQ ID NO: 5319

SEQ ID NO: 11620 - protein, 80 aa, Synthetic construct; identical to SEQ ID NO: 5322

SEQ ID NO: 11621 - protein, 80 aa, Synthetic construct; identical to SEQ ID NO: 5324

SEQ ID NO: 11622 - protein, 80 aa, Synthetic construct; identical to SEQ ID NO: 5325

SEQ ID NO: 11623 - protein, 80 aa, Synthetic construct; identical to SEQ ID NO: 5326

SEQ ID NO: 11624 - protein, 80 aa, Synthetic construct
WKVRVDLPDKYPFKSPSIGFMNKIFHPNIDEASGTVCLDVINQTWTALYDLTNIFESFLPQLLAYPNPIDPLNGDAAAMY

SEQ ID NO: 11625 - protein, 80 aa, Synthetic construct
YPFKSPSIGFMNKIFHPNIDEASGTVCLDVINQTWTALYDLTNIFESFLPQLLAYPNPIDPLNGDAAAMYLHRPEEYKQK

SEQ ID NO: 11626 - protein, 80 aa, Synthetic construct
MNKIFHPNIDEASGTVCLDVINQTWTALYDLTNIFESFLPQLLAYPNPIDPLNGDAAAMYLHRPEEYKQKIKEYIQKYAT

SEQ ID NO: 11627 - protein, 80 aa, Synthetic construct; identical to SEQ ID NO: 2096

SEQ ID NO: 11628 - protein, 80 aa, Synthetic construct
MAGLPRRIIKETQRLLAEPVPGIKAEPDESNARYFHVVIAGPQDSPFEGGTFKLELFLPEEYPMAAPKVRFMTKIYHPNV

SEQ ID NO: 11629 - protein, 80 aa, Synthetic construct
ETQRLLAEPVPGIKAEPDESNARYFHVVIAGPQDSPFEGGTFKLELFLPEEYPMAAPKVRFMTKIYHPNVDKLGRICLDI

SEQ ID NO: 11630 - protein, 80 aa, Synthetic construct
PGIKAEPDESNARYFHVVIAGPQDSPFEGGTFKLELFLPEEYPMAAPKVRFMTKIYHPNVDKLGRICLDILKDKWSPALQ

SEQ ID NO: 11631 - protein, 80 aa, Synthetic construct
MQRASRLKRELHMLATEPPPGITCWQDKDQMDDLRAQILGGANTPYEKGVFKLEVIIPERYPFEPPQIRFLTPIYHPNID

SEQ ID NO: 11632 - protein, 80 aa, Synthetic construct
LHMLATEPPPGITCWQDKDQMDDLRAQILGGANTPYEKGVFKLEVIIPERYPFEPPQIRFLTPIYHPNIDSAGRICLDVL

SEQ ID NO: 11633 - protein, 80 aa, Synthetic construct
MSEPHRVQFTSLPGSLNPAFLKKSRKEEAGAGEQHQDCEPAAAAVRITLTLFEPDHKRCPEFFYPELVKNIRGKVKGLQP

SEQ ID NO: 11634 - protein, 80 aa, Synthetic construct
SLPGSLNPAFLKKSRKEEAGAGEQHQDCEPAAAAVRITLTLFEPDHKRCPEFFYPELVKNIRGKVKGLQPGDKKKDLSDP

SEQ ID NO: 11635 - protein, 80 aa, Synthetic construct; identical to SEQ ID NO: 1976

SEQ ID NO: 11636 - protein, 80 aa, Synthetic construct
AGEQHQDCEPAAAAVRITLTLFEPDHKRCPEFFYPELVKNIRGKVKGLQPGDKKKDLSDPFNDEEKERHKVEALARKFEE

SEQ ID NO: 11637 - protein, 80 aa, Synthetic construct
LEKRVKELAQAARAAEGESRQKFFTQDINGILLDIEAQTRELSSQVRSGVYAYLASFLPCSKDALLKRARKLHLYEQGGR

SEQ ID NO: 11638 - protein, 80 aa, Synthetic construct
AARAAEGESRQKFFTQDINGILLDIEAQTRELSSQVRSGVYAYLASFLPCSKDALLKRARKLHLYEQGGRLKEPLQKLKE

SEQ ID NO: 11639 - protein, 80 aa, Synthetic construct
CRGPNPFPQKEDMLAQHVLLGPMEWYLCGEDPAFGFPKLEQANKPSHLCGRVFKVGEPTYSCRDCAVDPTCVLCMECFLG

SEQ ID NO: 11640 - protein, 80 aa, Synthetic construct
EDMLAQHVLLGPMEWYLCGEDPAFGFPKLEQANKPSHLCGRVFKVGEPTYSCRDCAVDPTCVLCMECFLGSIHRDHRYRM

SEQ ID NO: 11641 - protein, 80 aa, Synthetic construct
GPMEWYLCGEDPAFGFPKLEQANKPSHLCGRVFKVGEPTYSCRDCAVDPTCVLCMECFLGSIHRDHRYRMTTSGGGGFCD

SEQ ID NO: 11642 - protein, 80 aa, Synthetic construct; identical to SEQ ID NO: 1675

SEQ ID NO: 11643 - protein, 80 aa, Synthetic construct; identical to SEQ ID NO: 1676

SEQ ID NO: 11644 - protein, 80 aa, Synthetic construct; identical to SEQ ID NO: 2167

SEQ ID NO: 11645 - protein, 80 aa, Synthetic construct
CVLCMECFLGSIHRDHRYRMTTSGGGGFCDCGDTEAWKEGPYCQKHELNTSEIEEEEDPLVHLSEDVIARTYNIFAITFR

SEQ ID NO: 11646 - protein, 80 aa, Synthetic construct; identical to SEQ ID NO: 5339

SEQ ID NO: 11647 - protein, 80 aa, Synthetic construct
RLREVSEKLNKYNLNSHPPLNVLEQATIKQCVVGPNHAAFLLEDGRVCRIGFSVQPDRLELGKPDNNDGSKLNSNSGAGR

SEQ ID NO: 11648 - protein, 80 aa, Synthetic construct
KYNLNSHPPLNVLEQATIKQCVVGPNHAAFLLEDGRVCRIGFSVQPDRLELGKPDNNDGSKLNSNSGAGRTSRPGRTSDS

SEQ ID NO: 11649 - protein, 80 aa, Synthetic construct
NVLEQATIKQCVVGPNHAAFLLEDGRVCRIGFSVQPDRLELGKPDNNDGSKLNSNSGAGRTSRPGRTSDSPWFLSGSETL

SEQ ID NO: 11650 - protein, 80 aa, Synthetic construct
KAEISSSEKEEDVFMGMVCPSGTNPDDSPLYVLCCNDTCSFTWTGAEHINQDIFECRTCGLLESLCCCTECARVCHKGHD

SEQ ID NO: 11651 - protein, 80 aa, Synthetic construct
SGTNPDDSPLYVLCCNDTCSFTWTGAEHINQDIFECRTCGLLESLCCCTECARVCHKGHDCKLKRTSPTAYCDCWEKCKC

SEQ ID NO: 11652 - protein, 80 aa, Synthetic construct
KESKFRREMEKLRNQQSRDLSLEVDRDRDLLIQQTMRQLNNHFGRRCATTPMAVHRVKVTFKDEPGEGSGVARSFYTAIA

SEQ ID NO: 11653 - protein, 80 aa, Synthetic construct
VTKISTEDDGLVRNIDGIGDQEVIKPENGEHQDSTLKEDVPEQGKDDVREVKVEQNSEPCAGSSSESDLQTVFKNESLNA

SEQ ID NO: 11654 - protein, 80 aa, Synthetic construct
LVRNIDGIGDQEVIKPENGEHQDSTLKEDVPEQGKDDVREVKVEQNSEPCAGSSSESDLQTVFKNESLNAESKSGCKLQE

SEQ ID NO: 11655 - protein, 80 aa, Synthetic construct; identical to SEQ ID NO: 1852

SEQ ID NO: 11656 - protein, 80 aa, Synthetic construct
HQDSTLKEDVPEQGKDDVREVKVEQNSEPCAGSSSESDLQTVFKNESLNAESKSGCKLQELKAKQLIKKDTATYWPLNWR

SEQ ID NO: 11657 - protein, 80 aa, Synthetic construct
PEQGKDDVREVKVEQNSEPCAGSSSESDLQTVFKNESLNAESKSGCKLQELKAKQLIKKDTATYWPLNWRSKLCTCQDCM

SEQ ID NO: 11658 - protein, 80 aa, Synthetic construct
VKVEQNSEPCAGSSSESDLQTVFKNESLNAESKSGCKLQELKAKQLIKKDTATYWPLNWRSKLCTCQDCMKMYGDLDVLF

SEQ ID NO: 11659 - protein, 80 aa, Synthetic construct; identical to SEQ ID NO: 5348

SEQ ID NO: 11660 - protein, 80 aa, Synthetic construct
SVDEIFKIERPGAHPLSFADGKFLRRNDPECDLCGGDPEKKCHSCSCRVCGGKHEPNMQLLCDECNVAYHIYCLNPPLDK

SEQ ID NO: 11661 - protein, 80 aa, Synthetic construct
PGAHPLSFADGKFLRRNDPECDLCGGDPEKKCHSCSCRVCGGKHEPNMQLLCDECNVAYHIYCLNPPLDKVPEEEYWYCP

SEQ ID NO: 11662 - protein, 80 aa, Synthetic construct; identical to SEQ ID NO: 2350

SEQ ID NO: 11663 - protein, 80 aa, Synthetic construct; identical to SEQ ID NO: 1677

SEQ ID NO: 11664 - protein, 80 aa, Synthetic construct
SDSAEAIEAFQLTPQQQHLIREDCQNQKLWDEVLSHLVEGPNFLKKLEQSFMCVCCQELVYQPVTTECFHNVCKDCLQRS

SEQ ID NO: 11665 - protein, 80 aa, Synthetic construct
QLTPQQQHLIREDCQNQKLWDEVLSHLVEGPNFLKKLEQSFMCVCCQELVYQPVTTECFHNVCKDCLQRSFKAQVFSCPA

SEQ ID NO: 11666 - protein, 80 aa, Synthetic construct
REDCQNQKLWDEVLSHLVEGPNFLKKLEQSFMCVCCQELVYQPVTTECFHNVCKDCLQRSFKAQVFSCPACRHDLGQNYI

SEQ ID NO: 11667 - protein, 80 aa, Synthetic construct
DEVLSHLVEGPNFLKKLEQSFMCVCCQELVYQPVTTECFHNVCKDCLQRSFKAQVFSCPACRHDLGQNYIMIPNEILQTL

SEQ ID NO: 11668 - protein, 80 aa, Synthetic construct; identical to SEQ ID NO: 1973

SEQ ID NO: 11669 - protein, 80 aa, Synthetic construct
KQWEAYVQGGDQDSSTFPGCINNATLFQDEINWRLKEGLVEGEDYVLLPAAAWHYLVSWYGLEHGQPPIERKVIELPNIQ

SEQ ID NO: 11670 - protein, 80 aa, Synthetic construct
DQDSSTFPGCINNATLFQDEINWRLKEGLVEGEDYVLLPAAAWHYLVSWYGLEHGQPPIERKVIELPNIQKVEVYPVELL

SEQ ID NO: 11671 - protein, 80 aa, Synthetic construct
INNATLFQDEINWRLKEGLVEGEDYVLLPAAAWHYLVSWYGLEHGQPPIERKVIELPNIQKVEVYPVELLLVRHNDLGKS

SEQ ID NO: 11672 - protein, 80 aa, Synthetic construct
INWRLKEGLVEGEDYVLLPAAAWHYLVSWYGLEHGQPPIERKVIELPNIQKVEVYPVELLLVRHNDLGKSHTVQFSHTDS

SEQ ID NO: 11673 - protein, 80 aa, Synthetic construct
EGEDYVLLPAAAWHYLVSWYGLEHGQPPIERKVIELPNIQKVEVYPVELLLVRHNDLGKSHTVQFSHTDSIGLVLRTARE

SEQ ID NO: 11674 - protein, 80 aa, Synthetic construct
GLEHGQPPIERKVIELPNIQKVEVYPVELLLVRHNDLGKSHTVQFSHTDSIGLVLRTARERFLVEPQEDTRLWAKNSEGS

SEQ ID NO: 11675 - protein, 80 aa, Synthetic construct
SQELLSFLLDGLHEDLNRVKKKEYVELCDAAGRPDQEVAQEAWQNHKRRNDSVIVDTFHGLFKSTLVCPDCGNVSVTFDP

SEQ ID NO: 11676 - protein, 80 aa, Synthetic construct
GLHEDLNRVKKKEYVELCDAAGRPDQEVAQEAWQNHKRRNDSVIVDTFHGLFKSTLVCPDCGNVSVTFDPFCYLSVPLPI

SEQ ID NO: 11677 - protein, 80 aa, Synthetic construct; identical to SEQ ID NO: 5364

SEQ ID NO: 11678 - protein, 80 aa, Synthetic construct
TTSPEEVHAQPYIAIDWEPEMKKRYYDEVEAEGYVKHDCVGYVMKKAPVRLQECIELFTTVETLEKENPWYCPSCKQHQL

SEQ ID NO: 11679 - protein, 80 aa, Synthetic construct
PYIAIDWEPEMKKRYYDEVEAEGYVKHDCVGYVMKKAPVRLQECIELFTTVETLEKENPWYCPSCKQHQLATKKLDLWML

SEQ ID NO: 11680 - protein, 80 aa, Synthetic construct
MKKRYYDEVEAEGYVKHDCVGYVMKKAPVRLQECIELFTTVETLEKENPWYCPSCKQHQLATKKLDLWMLPEILIIHLKR

SEQ ID NO: 11681 - protein, 80 aa, Synthetic construct; identical to SEQ ID NO: 5366

SEQ ID NO: 11682 - protein, 80 aa, Synthetic construct
ENNNSTPDPTWVHEIFQGTLTNETRCLTCETISSKDEDFLDLSVDVEQNTSITHCLRGFSNTETLCSEYKYYCEECRSKQ

SEQ ID NO: 11683 - protein, 80 aa, Synthetic construct
WVHEIFQGTLTNETRCLTCETISSKDEDFLDLSVDVEQNTSITHCLRGFSNTETLCSEYKYYCEECRSKQEAHKRMKVKK

SEQ ID NO: 11684 - protein, 80 aa, Synthetic construct
TNETRCLTCETISSKDEDFLDLSVDVEQNTSITHCLRGFSNTETLCSEYKYYCEECRSKQEAHKRMKVKKLPMILALHLK

SEQ ID NO: 11685 - protein, 80 aa, Synthetic construct
TISSKDEDFLDLSVDVEQNTSITHCLRGFSNTETLCSEYKYYCEECRSKQEAHKRMKVKKLPMILALHLKRFKYMDQLHR

SEQ ID NO: 11686 - protein, 80 aa, Synthetic construct
DLSVDVEQNTSITHCLRGFSNTETLCSEYKYYCEECRSKQEAHKRMKVKKLPMILALHLKRFKYMDQLHRYTKLSYRVVF

SEQ ID NO: 11687 - protein, 80 aa, Synthetic construct; identical to SEQ ID NO: 5369

SEQ ID NO: 11688 - protein, 80 aa, Synthetic construct; identical to SEQ ID NO: 5370

SEQ ID NO: 11689 - protein, 80 aa, Synthetic construct; identical to SEQ ID NO: 2067

SEQ ID NO: 11690 - protein, 80 aa, Synthetic construct
LEQGNLKKALVNVEWNICQDCKTDNKVKDKAEEETEEKPSVWLCLKCGHQGCGRNSQEQHALKHYLTPRSEPHCLVLSLD

SEQ ID NO: 11691 - protein, 80 aa, Synthetic construct
EQEREKKENMAKENPPMNSPCQITVKGLSNLGNTCFFNAVMQNLSQTPVLRELLKEVKMSGTIVKIEPPDLALTEPLEIN

SEQ ID NO: 11692 - protein, 80 aa, Synthetic construct
AKENPPMNSPCQITVKGLSNLGNTCFFNAVMQNLSQTPVLRELLKEVKMSGTIVKIEPPDLALTEPLEINLEPPGPLTLA

SEQ ID NO: 11693 - protein, 80 aa, Synthetic construct
MQNLSQTPVLRELLKEVKMSGTIVKIEPPDLALTEPLEINLEPPGPLTLAMSQFLNEMQETKKGVVTPKELFSQVCKKAV

SEQ ID NO: 11694 - protein, 80 aa, Synthetic construct
RELLKEVKMSGTIVKIEPPDLALTEPLEINLEPPGPLTLAMSQFLNEMQETKKGVVTPKELFSQVCKKAVRFKGYQQQDS

SEQ ID NO: 11695 - protein, 80 aa, Synthetic construct
GTIVKIEPPDLALTEPLEINLEPPGPLTLAMSQFLNEMQETKKGVVTPKELFSQVCKKAVRFKGYQQQDSQELLRYLLDG

SEQ ID NO: 11696 - protein, 80 aa, Synthetic construct
QCNGPKANIKGERKHVYTNAKKQMLISLAPPVLTLHLKRFQQAGFNLRKVNKHIKFPEILDLAPFCTLKCKNVAEENTRV

SEQ ID NO: 11697 - protein, 80 aa, Synthetic construct; identical to SEQ ID NO: 5375

SEQ ID NO: 11698 - protein, 80 aa, Synthetic construct
FPLRDLDLREFASENTNHAVYNLYAVSNHSGTTMGGHYTAYCRSPGTGEWHTFNDSSVTPMSSSQVRTSDAYLLFYELAS

SEQ ID NO: 11699 - protein, 80 aa, Synthetic construct
LDLREFASENTNHAVYNLYAVSNHSGTTMGGHYTAYCRSPGTGEWHTFNDSSVTPMSSSQVRTSDAYLLFYELASPPSRM

SEQ ID NO: 11700 - protein, 80 aa, Synthetic construct; identical to SEQ ID NO: 5378

SEQ ID NO: 11701 - protein, 80 aa, Synthetic construct; identical to SEQ ID NO: 5380

SEQ ID NO: 11702 - protein, 80 aa, Synthetic construct
EPPSSHIQPGLCGLGNLGNTCFMNSALQCLSNTAPLTDYFLKDEYEAEINRDNPLGMKGEIAEAYAELIKQMWSGRDAHV

SEQ ID NO: 11703 - protein, 80 aa, Synthetic construct
LCGLGNLGNTCFMNSALQCLSNTAPLTDYFLKDEYEAEINRDNPLGMKGEIAEAYAELIKQMWSGRDAHVAPRMFKTQVG

SEQ ID NO: 11704 - protein, 80 aa, Synthetic construct
SNTAPLTDYFLKDEYEAEINRDNPLGMKGEIAEAYAELIKQMWSGRDAHVAPRMFKTQVGRFAPQFSGYQQQDSQELLAF

SEQ ID NO: 11705 - protein, 80 aa, Synthetic construct
QQDSQELLAFLLDGLHEDLNRVKKKPYLELKDANGRPDAVVAKEAWENHRLRNDSVIVDTFHGLFKSTLVCPECAKVSVT

SEQ ID NO: 11706 - protein, 80 aa, Synthetic construct
LLDGLHEDLNRVKKKPYLELKDANGRPDAVVAKEAWENHRLRNDSVIVDTFHGLFKSTLVCPECAKVSVTFDPFCYLTLP

SEQ ID NO: 11707 - protein, 80 aa, Synthetic construct
RVKKKPYLELKDANGRPDAVVAKEAWENHRLRNDSVIVDTFHGLFKSTLVCPECAKVSVTFDPFCYLTLPLPLKKDRVME

SEQ ID NO: 11708 - protein, 80 aa, Synthetic construct; identical to SEQ ID NO: 5386

SEQ ID NO: 11709 - protein, 80 aa, Synthetic construct; identical to SEQ ID NO: 5389

SEQ ID NO: 11710 - protein, 80 aa, Synthetic construct
PFWDLSLEFPERYQCSGKDIASQPCLVTEMLAKFTETEALEGKIYVCDQCNSKRRRFSSKPVVLTEAQKQLMICHLPQVL

SEQ ID NO: 11711 - protein, 80 aa, Synthetic construct
ERYQCSGKDIASQPCLVTEMLAKFTETEALEGKIYVCDQCNSKRRRFSSKPVVLTEAQKQLMICHLPQVLRLHLKRFRWS

SEQ ID NO: 11712 - protein, 80 aa, Synthetic construct
LAKFTETEALEGKIYVCDQCNSKRRRFSSKPVVLTEAQKQLMICHLPQVLRLHLKRFRWSGRNNREKIGVHVGFEEILNM

SEQ ID NO: 11713 - protein, 80 aa, Synthetic construct
MPRVKAAQAGRQSSAKRHLAEQFAVGEIITDMAKKEWKVGLPIGQGGFGCIYLADMNSSESVGSDAPCVVKVEPSDNGPL

SEQ ID NO: 11714 - protein, 80 aa, Synthetic construct
RQSSAKRHLAEQFAVGEIITDMAKKEWKVGLPIGQGGFGCIYLADMNSSESVGSDAPCVVKVEPSDNGPLFTELKFYQRA

SEQ ID NO: 11715 - protein, 80 aa, Synthetic construct
EQFAVGEIITDMAKKEWKVGLPIGQGGFGCIYLADMNSSESVGSDAPCVVKVEPSDNGPLFTELKFYQRAAKPEQIQKWI

SEQ ID NO: 11716 - protein, 80 aa, Synthetic construct
LPIGQGGFGCIYLADMNSSESVGSDAPCVVKVEPSDNGPLFTELKFYQRAAKPEQIQKWIRTRKLKYLGVPKYWGSGLHD

SEQ ID NO: 11717 - protein, 80 aa, Synthetic construct
SVGSDAPCVVKVEPSDNGPLFTELKFYQRAAKPEQIQKWIRTRKLKYLGVPKYWGSGLHDKNGKSYRFMIMDRFGSDLQK

SEQ ID NO: 11718 - protein, 80 aa, Synthetic construct
AYRYCPEGVHKEYKEDPKRCHDGTIEFTSIDAHNGVAPSRRGDLEILGYCMIQWLTGHLPWEDNLKDPKYVRDSKIRYRE

SEQ ID NO: 11719 - protein, 80 aa, Synthetic construct
HDGTIEFTSIDAHNGVAPSRRGDLEILGYCMIQWLTGHLPWEDNLKDPKYVRDSKIRYRENIASLMDKCFPEKNKPGEIA

SEQ ID NO: 11720 - protein, 80 aa, Synthetic construct
RGDLEILGYCMIQWLTGHLPWEDNLKDPKYVRDSKIRYRENIASLMDKCFPEKNKPGEIAKYMETVKLLDYTEKPLYENL

SEQ ID NO: 11721 - protein, 80 aa, Synthetic construct; identical to SEQ ID NO: 5406

SEQ ID NO: 11722 - protein, 80 aa, Synthetic construct; identical to SEQ ID NO: 5411

SEQ ID NO: 11723 - protein, 80 aa, Synthetic construct; identical to SEQ ID NO: 5413

SEQ ID NO: 11724 - protein, 80 aa, Synthetic construct; identical to SEQ ID NO: 5415

SEQ ID NO: 11725 - protein, 80 aa, Synthetic construct; identical to SEQ ID NO: 766

SEQ ID NO: 11726 - protein, 80 aa, Synthetic construct; identical to SEQ ID NO: 1678

SEQ ID NO: 11727 - protein, 80 aa, Synthetic construct; identical to SEQ ID NO: 1679

SEQ ID NO: 11728 - protein, 80 aa, Synthetic construct; identical to SEQ ID NO: 1942

SEQ ID NO: 11729 - protein, 80 aa, Synthetic construct; identical to SEQ ID NO: 1680

SEQ ID NO: 11730 - protein, 80 aa, Synthetic construct; identical to SEQ ID NO: 1681

SEQ ID NO: 11731 - protein, 80 aa, Synthetic construct; identical to SEQ ID NO: 1682

SEQ ID NO: 11732 - protein, 80 aa, Synthetic construct
SYKPNDLVEVREPPFHLTRRGWGEFPVRVQVHFKDSQNKRIDIIHNLKLDRTYTGLQTLGAETVVDVELHRHSLGEDCIY

SEQ ID NO: 11733 - protein, 80 aa, Synthetic construct
REPPFHLTRRGWGEFPVRVQVHFKDSQNKRIDIIHNLKLDRTYTGLQTLGAETVVDVELHRHSLGEDCIYPQSSESDISD

SEQ ID NO: 11734 - protein, 80 aa, Synthetic construct
GWGEFPVRVQVHFKDSQNKRIDIIHNLKLDRTYTGLQTLGAETVVDVELHRHSLGEDCIYPQSSESDISDAPPSLPLTIP

SEQ ID NO: 11735 - protein, 80 aa, Synthetic construct
TNKISTASQVSQGTGSPVPKIHGSSFVTSTVKQEDSLFASMPPLCPIGSHPKVQSPKPITGGLGAFTKVIIKQEPGEAPH

SEQ ID NO: 11736 - protein, 80 aa, Synthetic construct; identical to SEQ ID NO: 1683

SEQ ID NO: 11737 - protein, 80 aa, Synthetic construct; identical to SEQ ID NO: 1684

SEQ ID NO: 11738 - protein, 80 aa, Synthetic construct; identical to SEQ ID NO: 1820

SEQ ID NO: 11739 - protein, 80 aa, Synthetic construct
MPPLCPIGSHPKVQSPKPITGGLGAFTKVIIKQEPGEAPHVPATGAASQSPLPQYVTVKGGHMIAVSPQKQVITPGEGIA

SEQ ID NO: 11740 - protein, 80 aa, Synthetic construct
PKVQSPKPITGGLGAFTKVIIKQEPGEAPHVPATGAASQSPLPQYVTVKGGHMIAVSPQKQVITPGEGIAQSAKVQPSKV

SEQ ID NO: 11741 - protein, 80 aa, Synthetic construct
GGLGAFTKVIIKQEPGEAPHVPATGAASQSPLPQYVTVKGGHMIAVSPQKQVITPGEGIAQSAKVQPSKVVGVPVGSALP

SEQ ID NO: 11742 - protein, 80 aa, Synthetic construct
IKQEPGEAPHVPATGAASQSPLPQYVTVKGGHMIAVSPQKQVITPGEGIAQSAKVQPSKVVGVPVGSALPSTVKQAVAIS

SEQ ID NO: 11743 - protein, 80 aa, Synthetic construct
QSSPQQAVLTIPSQLKPLSVNTSGGVQTILMPVNKVVQSFSTSKPPAILPVAAPTPVVPSSAPAAVAKVKTEPETPGPSC

SEQ ID NO: 11744 - protein, 80 aa, Synthetic construct
IPSQLKPLSVNTSGGVQTILMPVNKVVQSFSTSKPPAILPVAAPTPVVPSSAPAAVAKVKTEPETPGPSCLSQEGQTAVK

SEQ ID NO: 11745 - protein, 80 aa, Synthetic construct
NTSGGVQTILMPVNKVVQSFSTSKPPAILPVAAPTPVVPSSAPAAVAKVKTEPETPGPSCLSQEGQTAVKTEESSELGNY

SEQ ID NO: 11746 - protein, 80 aa, Synthetic construct
MPVNKVVQSFSTSKPPAILPVAAPTPVVPSSAPAAVAKVKTEPETPGPSCLSQEGQTAVKTEESSELGNYVIKIDHLETI

SEQ ID NO: 11747 - protein, 80 aa, Synthetic construct
STSKPPAILPVAAPTPVVPSSAPAAVAKVKTEPETPGPSCLSQEGQTAVKTEESSELGNYVIKIDHLETIQQLLTAVVKK

SEQ ID NO: 11748 - protein, 80 aa, Synthetic construct
VAAPTPVVPSSAPAAVAKVKTEPETPGPSCLSQEGQTAVKTEESSELGNYVIKIDHLETIQQLLTAVVKKIPLITAKSED

SEQ ID NO: 11749 - protein, 80 aa, Synthetic construct; identical to SEQ ID NO: 1821

SEQ ID NO: 11750 - protein, 80 aa, Synthetic construct; identical to SEQ ID NO: 1685

SEQ ID NO: 11751 - protein, 80 aa, Synthetic construct
EEEVDILSLSEPVKINIKKEQEEKQEEVKFYLPPTPGSEFIGDVTQKIGITLQPVALHRNVYASVVEDMILKATEQLVND

SEQ ID NO: 11752 - protein, 80 aa, Synthetic construct
EMIFQDPTAMMQQLLTTSRQLTLGAYKHETEFAELEVKTREKLEAAKKKTSFEIAELKERLKASRETINCLKNEIRKLEE

SEQ ID NO: 11753 - protein, 80 aa, Synthetic construct
ERNLLSVAYKNVIGARRASWRIISSIEQKEENKGGEDKLKMIREYRQMVETELKLICCDILDVLDKHLIPAANTGESKVF

SEQ ID NO: 11754 - protein, 80 aa, Synthetic construct
NVIGARRASWRIISSIEQKEENKGGEDKLKMIREYRQMVETELKLICCDILDVLDKHLIPAANTGESKVFYYKMKGDYHR

SEQ ID NO: 11755 - protein, 80 aa, Synthetic construct; identical to SEQ ID NO: 5440

SEQ ID NO: 11756 - protein, 80 aa, Synthetic construct; identical to SEQ ID NO: 5441

SEQ ID NO: 11757 - protein, 80 aa, Synthetic construct; identical to SEQ ID NO: 1945

SEQ ID NO: 11758 - protein, 80 aa, Synthetic construct
GQCLVWVQCSFPNCGKWRRLCGNIDPSVLPDNWSCDQNTDVQYNRCDIPEETWTGLESDVAYASYIPGSIIWAKQYGYPW

SEQ ID NO: 11759 - protein, 80 aa, Synthetic construct
FPNCGKWRRLCGNIDPSVLPDNWSCDQNTDVQYNRCDIPEETWTGLESDVAYASYIPGSIIWAKQYGYPWWPGMIESDPD

SEQ ID NO: 11760 - protein, 80 aa, Synthetic construct
MKEPLLGGECDKAVASQLGLLDEIKTEPDNAQEYCHRQQSRTQENELKINAVFSESASQLTAGIQLSLASSGVNKMLPSV

SEQ ID NO: 11761 - protein, 80 aa, Synthetic construct
DKAVASQLGLLDEIKTEPDNAQEYCHRQQSRTQENELKINAVFSESASQLTAGIQLSLASSGVNKMLPSVSTTAIQVSCA

SEQ ID NO: 11762 - protein, 80 aa, Synthetic construct
LDEIKTEPDNAQEYCHRQQSRTQENELKINAVFSESASQLTAGIQLSLASSGVNKMLPSVSTTAIQVSCAGCKKILQKGQ

SEQ ID NO: 11763 - protein, 80 aa, Synthetic construct; identical to SEQ ID NO: 1686

SEQ ID NO: 11764 - protein, 80 aa, Synthetic construct; identical to SEQ ID NO: 2033

SEQ ID NO: 11765 - protein, 80 aa, Synthetic construct
TSSSLSHILQMEGQSHYFNSSKSITAYKQKPAKPLISVPCKPLKPSDEMIETTSDLGKTELFCSINCFSAYSKAKMESSS

SEQ ID NO: 11766 - protein, 80 aa, Synthetic construct; identical to SEQ ID NO: 2034

SEQ ID NO: 11767 - protein, 80 aa, Synthetic construct; identical to SEQ ID NO: 5670

SEQ ID NO: 11768 - protein, 80 aa, Synthetic construct; identical to SEQ ID NO: 2035

SEQ ID NO: 11769 - protein, 80 aa, Synthetic construct
LFCSINCFSAYSKAKMESSSVSVVSVVHDTSTELLSPKKDTTPVISNIVSLADTDVALPIMNTDVLQDTVSSVTATADVI

SEQ ID NO: 11770 - protein, 80 aa, Synthetic construct
RKHEKSEMHLKSLEFWREYQFCDGAVSDDLSIHSKQIEGNKKYLKLIIENILFLGKQCLPLRGNDQSVSSVNKGNFLELL

SEQ ID NO: 11771 - protein, 80 aa, Synthetic construct; identical to SEQ ID NO: 5673

SEQ ID NO: 11772 - protein, 80 aa, Synthetic construct; identical to SEQ ID NO: 5674

SEQ ID NO: 11773 - protein, 80 aa, Synthetic construct; identical to SEQ ID NO: 5675

SEQ ID NO: 11774 - protein, 80 aa, Synthetic construct
QGCQTSRTKMTGSAPPPSPTPNKEMKNKAVLCKPLTMTKATYCKPHMQTKSCQTDDTWRTEYVPVPIPVPVYIPVPMHMY

SEQ ID NO: 11775 - protein, 80 aa, Synthetic construct
TGSAPPPSPTPNKEMKNKAVLCKPLTMTKATYCKPHMQTKSCQTDDTWRTEYVPVPIPVPVYIPVPMHMYSQNIPVPTTV

SEQ ID NO: 11776 - protein, 80 aa, Synthetic construct
PNKEMKNKAVLCKPLTMTKATYCKPHMQTKSCQTDDTWRTEYVPVPIPVPVYIPVPMHMYSQNIPVPTTVPVPVPVPVFL

SEQ ID NO: 11777 - protein, 80 aa, Synthetic construct
LCKPLTMTKATYCKPHMQTKSCQTDDTWRTEYVPVPIPVPVYIPVPMHMYSQNIPVPTTVPVPVPVPVFLPAPLDSSEKI

SEQ ID NO: 11778 - protein, 80 aa, Synthetic construct
LSHTTAELNYGLAHFVNEIRRPNGENYAPDSIYYLCLGIQEYLCGSNRKDNIFIDPGYQTFEQELNKILRSWQPSILPDG

SEQ ID NO: 11779 - protein, 80 aa, Synthetic construct
GLAHFVNEIRRPNGENYAPDSIYYLCLGIQEYLCGSNRKDNIFIDPGYQTFEQELNKILRSWQPSILPDGSIFSRVEEDY

SEQ ID NO: 11780 - protein, 80 aa, Synthetic construct
PFRPRRSPRMSLRSSVSQRAGRSAVGTKMTCAHCRTPLQKGQTAYQRKGLPQLFCSSSCLTTFSKKPSGKKTCTFCKKEI

SEQ ID NO: 11781 - protein, 80 aa, Synthetic construct; identical to SEQ ID NO: 5679

SEQ ID NO: 11782 - protein, 80 aa, Synthetic construct
GPPRPCSFCRRSLSDPCYYNKVDRTVYQFCSPSCWTKFQRTSPEGGIHLSCHYCHSLFSGKPEVLDWQDQVFQFCCRDCC

SEQ ID NO: 11783 - protein, 80 aa, Synthetic construct
RSLSDPCYYNKVDRTVYQFCSPSCWTKFQRTSPEGGIHLSCHYCHSLFSGKPEVLDWQDQVFQFCCRDCCEDFKRLRGVV

SEQ ID NO: 11784 - protein, 80 aa, Synthetic construct
KVDRTVYQFCSPSCWTKFQRTSPEGGIHLSCHYCHSLFSGKPEVLDWQDQVFQFCCRDCCEDFKRLRGVVSQCEHCRQEK

SEQ ID NO: 11785 - protein, 80 aa, Synthetic construct; identical to SEQ ID NO: 5681

SEQ ID NO: 11786 - protein, 80 aa, Synthetic construct; identical to SEQ ID NO: 2079

SEQ ID NO: 11787 - protein, 80 aa, Synthetic construct; identical to SEQ ID NO: 1687

SEQ ID NO: 11788 - protein, 80 aa, Synthetic construct
FCSEDCKSKYLLWYCKAARCHACKRQGKLLETIHWRGQIRHFCNQQCLLRFYSQQNQPNLDTQSGPESLLNSQSPESKPQ

SEQ ID NO: 11789 - protein, 80 aa, Synthetic construct; identical to SEQ ID NO: 2080

SEQ ID NO: 11790 - protein, 80 aa, Synthetic construct; identical to SEQ ID NO: 1688

SEQ ID NO: 11791 - protein, 80 aa, Synthetic construct; identical to SEQ ID NO: 5684

SEQ ID NO: 11792 - protein, 80 aa, Synthetic construct
VRQRKGRDTGPGKRKREDEAPILEQRENRMNPLRCPVKFYEFYLSKCPESLRTRNDVFYLQPERSCIAESPLWYSVIPMD

SEQ ID NO: 11793 - protein, 80 aa, Synthetic construct
DSRLKSSFFDKAANQVEETLHTHLPQTPETNFRDSSYPFANKESIGSELGNSFASNIRIKEEPLDDEYDKAMAPQQGLLD

SEQ ID NO: 11794 - protein, 80 aa, Synthetic construct; identical to SEQ ID NO: 2286

SEQ ID NO: 11795 - protein, 80 aa, Synthetic construct
HTHLPQTPETNFRDSSYPFANKESIGSELGNSFASNIRIKEEPLDDEYDKAMAPQQGLLDKIKDEPDNAQEYSHGQQQKT

SEQ ID NO: 11796 - protein, 80 aa, Synthetic construct
NFRDSSYPFANKESIGSELGNSFASNIRIKEEPLDDEYDKAMAPQQGLLDKIKDEPDNAQEYSHGQQQKTQEGELKISAV

SEQ ID NO: 11797 - protein, 80 aa, Synthetic construct; identical to SEQ ID NO: 2287

SEQ ID NO: 11798 - protein, 80 aa, Synthetic construct; identical to SEQ ID NO: 1689

SEQ ID NO: 11799 - protein, 80 aa, Synthetic construct; identical to SEQ ID NO: 1690

SEQ ID NO: 11800 - protein, 80 aa, Synthetic construct; identical to SEQ ID NO: 1691

SEQ ID NO: 11801 - protein, 80 aa, Synthetic construct; identical to SEQ ID NO: 1692

SEQ ID NO: 11802 - protein, 80 aa, Synthetic construct; identical to SEQ ID NO: 5687

SEQ ID NO: 11803 - protein, 80 aa, Synthetic construct
TTSKDFCSQSCLSTYELKKKPIVTINTNSISTKCSMCQKNAVIRHEVNYQNVVHKLCSDACFSKFRSANNLTMNCCENCG

SEQ ID NO: 11804 - protein, 80 aa, Synthetic construct
CLSTYELKKKPIVTINTNSISTKCSMCQKNAVIRHEVNYQNVVHKLCSDACFSKFRSANNLTMNCCENCGGYCYSGSGQC

SEQ ID NO: 11805 - protein, 80 aa, Synthetic construct; identical to SEQ ID NO: 2288

SEQ ID NO: 11806 - protein, 80 aa, Synthetic construct
YCKIEKIVKETVRFSGADKSFCSEGCKLLYKHDLAKRWGNHCKMCSYCLQTSPKLVQNNLGGKVEEFCCEECMSKYTVLF

SEQ ID NO: 11807 - protein, 80 aa, Synthetic construct
TVRFSGADKSFCSEGCKLLYKHDLAKRWGNHCKMCSYCLQTSPKLVQNNLGGKVEEFCCEECMSKYTVLFYQMAKCDACK

SEQ ID NO: 11808 - protein, 80 aa, Synthetic construct
FCSEGCKLLYKHDLAKRWGNHCKMCSYCLQTSPKLVQNNLGGKVEEFCCEECMSKYTVLFYQMAKCDACKRQGKLSESLK

SEQ ID NO: 11809 - protein, 80 aa, Synthetic construct; identical to SEQ ID NO: 1693

SEQ ID NO: 11810 - protein, 80 aa, Synthetic construct; identical to SEQ ID NO: 2289

SEQ ID NO: 11811 - protein, 80 aa, Synthetic construct
GDASTQTDALKLPPSQPPRLLKNKALLCKPITQTKATSCKPHTQNKECQTEDTPSQPQIIVVPVPVPVFVPIPLHLYTQY

SEQ ID NO: 11812 - protein, 80 aa, Synthetic construct; identical to SEQ ID NO: 2290

SEQ ID NO: 11813 - protein, 80 aa, Synthetic construct; identical to SEQ ID NO: 1694

SEQ ID NO: 11814 - protein, 80 aa, Synthetic construct; identical to SEQ ID NO: 1695

SEQ ID NO: 11815 - protein, 80 aa, Synthetic construct; identical to SEQ ID NO: 1696

SEQ ID NO: 11816 - protein, 80 aa, Synthetic construct
MKEPLDGECGKAVVPQQELLDKIKEEPDNAQEYGCVQQPKTQESKLKIGGVSSVNERPIAQQLNPGFQLSFASSGPSVLL

SEQ ID NO: 11817 - protein, 80 aa, Synthetic construct
KAVVPQQELLDKIKEEPDNAQEYGCVQQPKTQESKLKIGGVSSVNERPIAQQLNPGFQLSFASSGPSVLLPSVPAVAIKV

SEQ ID NO: 11818 - protein, 80 aa, Synthetic construct; identical to SEQ ID NO: 1761

SEQ ID NO: 11819 - protein, 80 aa, Synthetic construct
PPYALGKSLRPSAEMIETTNDSGKTELFCSINCLSAYRVKTVTSSGVQVSCHSCKTSAIPQYHLAMSNGTIYSFCSSSCV

SEQ ID NO: 11820 - protein, 80 aa, Synthetic construct
PSAEMIETTNDSGKTELFCSINCLSAYRVKTVTSSGVQVSCHSCKTSAIPQYHLAMSNGTIYSFCSSSCVVAFQNVFSKP

SEQ ID NO: 11821 - protein, 80 aa, Synthetic construct; identical to SEQ ID NO: 5694

SEQ ID NO: 11822 - protein, 80 aa, Synthetic construct
PLAEQSQQVALTHTVVKLKCQHCNHLFATKPELLFYKGKMFLFCGKNCSDEYKKKNKVVAMCDYCKLQKIIKETVRFSGV

SEQ ID NO: 11823 - protein, 80 aa, Synthetic construct
LTHTVVKLKCQHCNHLFATKPELLFYKGKMFLFCGKNCSDEYKKKNKVVAMCDYCKLQKIIKETVRFSGVDKPFCSEVCK

SEQ ID NO: 11824 - protein, 80 aa, Synthetic construct
QHCNHLFATKPELLFYKGKMFLFCGKNCSDEYKKKNKVVAMCDYCKLQKIIKETVRFSGVDKPFCSEVCKFLSARDFGER

SEQ ID NO: 11825 - protein, 80 aa, Synthetic construct
PELLFYKGKMFLFCGKNCSDEYKKKNKVVAMCDYCKLQKIIKETVRFSGVDKPFCSEVCKFLSARDFGERWGNYCKMCSY

SEQ ID NO: 11826 - protein, 80 aa, Synthetic construct; identical to SEQ ID NO: 5696

SEQ ID NO: 11827 - protein, 80 aa, Synthetic construct
CSQTSPNLVENRLEGKLEEFCCEDCMSKFTVLFYQMAKCDGCKRQGKLSESIKWRGNIKHFCNLFCVLEFCHQQIMNDCL

SEQ ID NO: 11828 - protein, 80 aa, Synthetic construct
CCEDCMSKFTVLFYQMAKCDGCKRQGKLSESIKWRGNIKHFCNLFCVLEFCHQQIMNDCLPQNKVNISKAKTAVTELPSA

SEQ ID NO: 11829 - protein, 80 aa, Synthetic construct
GCKRQGKLSESIKWRGNIKHFCNLFCVLEFCHQQIMNDCLPQNKVNISKAKTAVTELPSARTDTTPVITSVMSLAKIPAT

SEQ ID NO: 11830 - protein, 80 aa, Synthetic construct
SIKWRGNIKHFCNLFCVLEFCHQQIMNDCLPQNKVNISKAKTAVTELPSARTDTTPVITSVMSLAKIPATLSTGNTNSVL

SEQ ID NO: 11831 - protein, 80 aa, Synthetic construct
FCNLFCVLEFCHQQIMNDCLPQNKVNISKAKTAVTELPSARTDTTPVITSVMSLAKIPATLSTGNTNSVLKGAVTKEAAK

SEQ ID NO: 11832 - protein, 80 aa, Synthetic construct; identical to SEQ ID NO: 1762

SEQ ID NO: 11833 - protein, 80 aa, Synthetic construct
PQNKVNISKAKTAVTELPSARTDTTPVITSVMSLAKIPATLSTGNTNSVLKGAVTKEAAKIIQDESTQEDAMKFPSSQSS

SEQ ID NO: 11834 - protein, 80 aa, Synthetic construct; identical to SEQ ID NO: 1763

SEQ ID NO: 11835 - protein, 80 aa, Synthetic construct
ATSCKPHTQHKECQTDLPMPNEKNDAELDSPPSKKKRLGFFQTYDTEYLKVGFIICPGSKESSPRPQCVICGEILSSENM

SEQ ID NO: 11836 - protein, 80 aa, Synthetic construct
KECQTDLPMPNEKNDAELDSPPSKKKRLGFFQTYDTEYLKVGFIICPGSKESSPRPQCVICGEILSSENMKPANLSHHLK

SEQ ID NO: 11837 - protein, 80 aa, Synthetic construct
KDGLIVETLTVGCKGSKAGIEQEGYWLPGDEIDWETENHDWYCFECHLPGEVLICDLCFRVYHSKCLSDEFRLRDSSSPW

SEQ ID NO: 11838 - protein, 80 aa, Synthetic construct
VGCKGSKAGIEQEGYWLPGDEIDWETENHDWYCFECHLPGEVLICDLCFRVYHSKCLSDEFRLRDSSSPWQCPVCRSIKK

SEQ ID NO: 11839 - protein, 80 aa, Synthetic construct
EQEGYWLPGDEIDWETENHDWYCFECHLPGEVLICDLCFRVYHSKCLSDEFRLRDSSSPWQCPVCRSIKKKNTNKQEMGT

SEQ ID NO: 11840 - protein, 80 aa, Synthetic construct
EIDWETENHDWYCFECHLPGEVLICDLCFRVYHSKCLSDEFRLRDSSSPWQCPVCRSIKKKNTNKQEMGTYLRFIVSRMK

SEQ ID NO: 11841 - protein, 80 aa, Synthetic construct; identical to SEQ ID NO: 5701

SEQ ID NO: 11842 - protein, 80 aa, Synthetic construct
MGWKKACDELELHQRFLREGRFWKSKNEDRGEEEAESSISSTSNEQLKVTQEPRAKKGRRNQSVEPKKEEPEPETEAVSS

SEQ ID NO: 11843 - protein, 80 aa, Synthetic construct
ELHQRFLREGRFWKSKNEDRGEEEAESSISSTSNEQLKVTQEPRAKKGRRNQSVEPKKEEPEPETEAVSSSQEIPTMPQP

SEQ ID NO: 11844 - protein, 80 aa, Synthetic construct
RFWKSKNEDRGEEEAESSISSTSNEQLKVTQEPRAKKGRRNQSVEPKKEEPEPETEAVSSSQEIPTMPQPIEKVSVSTQT

SEQ ID NO: 11845 - protein, 80 aa, Synthetic construct
GEEEAESSISSTSNEQLKVTQEPRAKKGRRNQSVEPKKEEPEPETEAVSSSQEIPTMPQPIEKVSVSTQTKKLSASSPRM

SEQ ID NO: 11846 - protein, 80 aa, Synthetic construct
STSNEQLKVTQEPRAKKGRRNQSVEPKKEEPEPETEAVSSSQEIPTMPQPIEKVSVSTQTKKLSASSPRMLHRSTQTTND

SEQ ID NO: 11847 - protein, 80 aa, Synthetic construct
QEPRAKKGRRNQSVEPKKEEPEPETEAVSSSQEIPTMPQPIEKVSVSTQTKKLSASSPRMLHRSTQTTNDGVCQSMCHDK

SEQ ID NO: 11848 - protein, 80 aa, Synthetic construct
NQSVEPKKEEPEPETEAVSSSQEIPTMPQPIEKVSVSTQTKKLSASSPRMLHRSTQTTNDGVCQSMCHDKYTKIFNDFKD

SEQ ID NO: 11849 - protein, 80 aa, Synthetic construct
QAVNKAVANMQGEMDRKCKQVKEKCKEEFVEEIKKLATQHKQLISQTKKKQWCYNCEEEAMYHCCWNTSYCSIKCQQEHW

SEQ ID NO: 11850 - protein, 80 aa, Synthetic construct; identical to SEQ ID NO: 2037

SEQ ID NO: 11851 - protein, 80 aa, Synthetic construct; identical to SEQ ID NO: 5705

SEQ ID NO: 11852 - protein, 80 aa, Synthetic construct; identical to SEQ ID NO: 5706

SEQ ID NO: 11853 - protein, 80 aa, Synthetic construct; identical to SEQ ID NO: 5707

SEQ ID NO: 11854 - protein, 80 aa, Synthetic construct
IKTEQEVVEGMDISTRSKDPGSAERTAQKRKFPSPPHSSNGHSPQDTSTSPIKKKKKPGLLNSNNKEQSELRHGPFYYMK

SEQ ID NO: 11855 - protein, 80 aa, Synthetic construct
NAKKKMYGCTEAFLADAKWILHNCIIYNGGNHKLTQIAKVVIKICEHEMNEIEVCPECYLAACQKRDNWFCEPCSNPHPL

SEQ ID NO: 11856 - protein, 80 aa, Synthetic construct
LHNCIIYNGGNHKLTQIAKVVIKICEHEMNEIEVCPECYLAACQKRDNWFCEPCSNPHPLVWAKLKGFPFWPAKALRDKD

SEQ ID NO: 11857 - protein, 80 aa, Synthetic construct
NHKLTQIAKVVIKICEHEMNEIEVCPECYLAACQKRDNWFCEPCSNPHPLVWAKLKGFPFWPAKALRDKDGQVDARFFGQ

SEQ ID NO: 11858 - protein, 80 aa, Synthetic construct; identical to SEQ ID NO: 2047

SEQ ID NO: 11859 - protein, 80 aa, Synthetic construct
EIEVCPECYLAACQKRDNWFCEPCSNPHPLVWAKLKGFPFWPAKALRDKDGQVDARFFGQHDRAWVPINNCYLMSKEIPF

SEQ ID NO: 11860 - protein, 80 aa, Synthetic construct; identical to SEQ ID NO: 5713

SEQ ID NO: 11861 - protein, 80 aa, Synthetic construct; identical to SEQ ID NO: 2048

SEQ ID NO: 11862 - protein, 80 aa, Synthetic construct
TSSGSMSTLVSSVNADLPIATASADVAADIAKYTSKMMDAIKGTMTEIYNDLSKNTTGSTIAEIRRLRIEIEKLQWLHQQ

SEQ ID NO: 11863 - protein, 80 aa, Synthetic construct; identical to SEQ ID NO: 2049

SEQ ID NO: 11864 - protein, 80 aa, Synthetic construct
AKYTSKMMDAIKGTMTEIYNDLSKNTTGSTIAEIRRLRIEIEKLQWLHQQELSEMKHNLELTMAEMRQSLEQERDRLIAE

SEQ ID NO: 11865 - protein, 80 aa, Synthetic construct
IKGTMTEIYNDLSKNTTGSTIAEIRRLRIEIEKLQWLHQQELSEMKHNLELTMAEMRQSLEQERDRLIAEVKKQLELEKQ

SEQ ID NO: 11866 - protein, 80 aa, Synthetic construct
DLSKNTTGSTIAEIRRLRIEIEKLQWLHQQELSEMKHNLELTMAEMRQSLEQERDRLIAEVKKQLELEKQQAVDETKKKQ

SEQ ID NO: 11867 - protein, 80 aa, Synthetic construct; identical to SEQ ID NO: 2050

SEQ ID NO: 11868 - protein, 80 aa, Synthetic construct
SGGGLHSVAEGVRLSPEPGREGVRDLAGAEEFGGGEEGTGLTGIKEIGDGEEGSGQRPEEIPMDLTVVKQEIIDWPGTEG

SEQ ID NO: 11869 - protein, 80 aa, Synthetic construct
GVRLSPEPGREGVRDLAGAEEFGGGEEGTGLTGIKEIGDGEEGSGQRPEEIPMDLTVVKQEIIDWPGTEGRLAGQWVEQE

SEQ ID NO: 11870 - protein, 80 aa, Synthetic construct
EGVRDLAGAEEFGGGEEGTGLTGIKEIGDGEEGSGQRPEEIPMDLTVVKQEIIDWPGTEGRLAGQWVEQEVEDRPEVKDE

SEQ ID NO: 11871 - protein, 80 aa, Synthetic construct
EFGGGEEGTGLTGIKEIGDGEEGSGQRPEEIPMDLTVVKQEIIDWPGTEGRLAGQWVEQEVEDRPEVKDENAGVLEVKQE

SEQ ID NO: 11872 - protein, 80 aa, Synthetic construct
LTGIKEIGDGEEGSGQRPEEIPMDLTVVKQEIIDWPGTEGRLAGQWVEQEVEDRPEVKDENAGVLEVKQETDSSLVVKEA

SEQ ID NO: 11873 - protein, 80 aa, Synthetic construct; identical to SEQ ID NO: 1697

SEQ ID NO: 11874 - protein, 80 aa, Synthetic construct; identical to SEQ ID NO: 1698

SEQ ID NO: 11875 - protein, 80 aa, Synthetic construct; identical to SEQ ID NO: 1699

SEQ ID NO: 11876 - protein, 80 aa, Synthetic construct; identical to SEQ ID NO: 1700

SEQ ID NO: 11877 - protein, 80 aa, Synthetic construct; identical to SEQ ID NO: 1701

SEQ ID NO: 11878 - protein, 80 aa, Synthetic construct; identical to SEQ ID NO: 1702

SEQ ID NO: 11879 - protein, 80 aa, Synthetic construct; identical to SEQ ID NO: 1703

SEQ ID NO: 11880 - protein, 80 aa, Synthetic construct; identical to SEQ ID NO: 1890

SEQ ID NO: 11881 - protein, 80 aa, Synthetic construct
CVKEEKDFLKKEIVDDTKVKEEPPINHPVGCKRKLAMSRCETCGTEEAKYRCPRCMRYSCSLPCVKKHKAELTCNGVRDK

SEQ ID NO: 11882 - protein, 80 aa, Synthetic construct; identical to SEQ ID NO: 6059

SEQ ID NO: 11883 - protein, 80 aa, Synthetic construct; identical to SEQ ID NO: 6060

SEQ ID NO: 11884 - protein, 80 aa, Synthetic construct; identical to SEQ ID NO: 6061

SEQ ID NO: 11885 - protein, 80 aa, Synthetic construct; identical to SEQ ID NO: 658

SEQ ID NO: 11886 - protein, 80 aa, Synthetic construct; identical to SEQ ID NO: 1

SEQ ID NO: 11887 - protein, 80 aa, Synthetic construct; identical to SEQ ID NO: 637

SEQ ID NO: 11888 - protein, 80 aa, Synthetic construct; identical to SEQ ID NO: 2

SEQ ID NO: 11889 - protein, 80 aa, Synthetic construct; identical to SEQ ID NO: 3

SEQ ID NO: 11890 - protein, 80 aa, Synthetic construct; identical to SEQ ID NO: 4

SEQ ID NO: 11891 - protein, 80 aa, Synthetic construct; identical to SEQ ID NO: 5

SEQ ID NO: 11892 - protein, 80 aa, Synthetic construct; identical to SEQ ID NO: 6

SEQ ID NO: 11893 - protein, 80 aa, Synthetic construct; identical to SEQ ID NO: 7

SEQ ID NO: 11894 - protein, 80 aa, Synthetic construct; identical to SEQ ID NO: 556

SEQ ID NO: 11895 - protein, 80 aa, Synthetic construct; identical to SEQ ID NO: 8

SEQ ID NO: 11896 - protein, 80 aa, Synthetic construct; identical to SEQ ID NO: 9

SEQ ID NO: 11897 - protein, 80 aa, Synthetic construct; identical to SEQ ID NO: 555

SEQ ID NO: 11898 - protein, 80 aa, Synthetic construct; identical to SEQ ID NO: 10

SEQ ID NO: 11899 - protein, 80 aa, Synthetic construct; identical to SEQ ID NO: 11

SEQ ID NO: 11900 - protein, 80 aa, Synthetic construct; identical to SEQ ID NO: 621

SEQ ID NO: 11901 - protein, 80 aa, Synthetic construct; identical to SEQ ID NO: 12

SEQ ID NO: 11902 - protein, 80 aa, Synthetic construct; identical to SEQ ID NO: 13

SEQ ID NO: 11903 - protein, 80 aa, Synthetic construct; identical to SEQ ID NO: 14

SEQ ID NO: 11904 - protein, 80 aa, Synthetic construct; identical to SEQ ID NO: 728

SEQ ID NO: 11905 - protein, 80 aa, Synthetic construct; identical to SEQ ID NO: 729

SEQ ID NO: 11906 - protein, 80 aa, Synthetic construct; identical to SEQ ID NO: 15

SEQ ID NO: 11907 - protein, 80 aa, Synthetic construct; identical to SEQ ID NO: 16

SEQ ID NO: 11908 - protein, 80 aa, Synthetic construct; identical to SEQ ID NO: 491

SEQ ID NO: 11909 - protein, 80 aa, Synthetic construct; identical to SEQ ID NO: 492

SEQ ID NO: 11910 - protein, 80 aa, Synthetic construct; identical to SEQ ID NO: 17

SEQ ID NO: 11911 - protein, 80 aa, Synthetic construct; identical to SEQ ID NO: 18

SEQ ID NO: 11912 - protein, 80 aa, Synthetic construct; identical to SEQ ID NO: 19

SEQ ID NO: 11913 - protein, 80 aa, Synthetic construct; identical to SEQ ID NO: 20

SEQ ID NO: 11914 - protein, 80 aa, Synthetic construct; identical to SEQ ID NO: 558

SEQ ID NO: 11915 - protein, 80 aa, Synthetic construct; identical to SEQ ID NO: 21

SEQ ID NO: 11916 - protein, 80 aa, Synthetic construct; identical to SEQ ID NO: 523

SEQ ID NO: 11917 - protein, 80 aa, Synthetic construct; identical to SEQ ID NO: 22

SEQ ID NO: 11918 - protein, 80 aa, Synthetic construct; identical to SEQ ID NO: 23

SEQ ID NO: 11919 - protein, 80 aa, Synthetic construct; identical to SEQ ID NO: 24

SEQ ID NO: 11920 - protein, 80 aa, Synthetic construct; identical to SEQ ID NO: 25

SEQ ID NO: 11921 - protein, 80 aa, Synthetic construct; identical to SEQ ID NO: 26

SEQ ID NO: 11922 - protein, 80 aa, Synthetic construct; identical to SEQ ID NO: 601

SEQ ID NO: 11923 - protein, 80 aa, Synthetic construct; identical to SEQ ID NO: 27

SEQ ID NO: 11924 - protein, 80 aa, Synthetic construct; identical to SEQ ID NO: 28

SEQ ID NO: 11925 - protein, 80 aa, Synthetic construct; identical to SEQ ID NO: 29

SEQ ID NO: 11926 - protein, 80 aa, Synthetic construct; identical to SEQ ID NO: 602

SEQ ID NO: 11927 - protein, 80 aa, Synthetic construct; identical to SEQ ID NO: 30

SEQ ID NO: 11928 - protein, 80 aa, Synthetic construct; identical to SEQ ID NO: 31

SEQ ID NO: 11929 - protein, 80 aa, Synthetic construct; identical to SEQ ID NO: 680

SEQ ID NO: 11930 - protein, 80 aa, Synthetic construct; identical to SEQ ID NO: 32

SEQ ID NO: 11931 - protein, 80 aa, Synthetic construct; identical to SEQ ID NO: 33

SEQ ID NO: 11932 - protein, 80 aa, Synthetic construct; identical to SEQ ID NO: 557

SEQ ID NO: 11933 - protein, 80 aa, Synthetic construct; identical to SEQ ID NO: 639

SEQ ID NO: 11934 - protein, 80 aa, Synthetic construct; identical to SEQ ID NO: 34

SEQ ID NO: 11935 - protein, 80 aa, Synthetic construct; identical to SEQ ID NO: 640

SEQ ID NO: 11936 - protein, 80 aa, Synthetic construct; identical to SEQ ID NO: 668

SEQ ID NO: 11937 - protein, 80 aa, Synthetic construct; identical to SEQ ID NO: 35

SEQ ID NO: 11938 - protein, 80 aa, Synthetic construct; identical to SEQ ID NO: 549

SEQ ID NO: 11939 - protein, 80 aa, Synthetic construct; identical to SEQ ID NO: 36

SEQ ID NO: 11940 - protein, 80 aa, Synthetic construct; identical to SEQ ID NO: 472

SEQ ID NO: 11941 - protein, 80 aa, Synthetic construct; identical to SEQ ID NO: 37

SEQ ID NO: 11942 - protein, 80 aa, Synthetic construct; identical to SEQ ID NO: 770

SEQ ID NO: 11943 - protein, 80 aa, Synthetic construct; identical to SEQ ID NO: 39

SEQ ID NO: 11944 - protein, 80 aa, Synthetic construct; identical to SEQ ID NO: 679

SEQ ID NO: 11945 - protein, 80 aa, Synthetic construct; identical to SEQ ID NO: 41

SEQ ID NO: 11946 - protein, 80 aa, Synthetic construct; identical to SEQ ID NO: 43

SEQ ID NO: 11947 - protein, 80 aa, Synthetic construct; identical to SEQ ID NO: 581

SEQ ID NO: 11948 - protein, 80 aa, Synthetic construct; identical to SEQ ID NO: 600

SEQ ID NO: 11949 - protein, 80 aa, Synthetic construct; identical to SEQ ID NO: 44

SEQ ID NO: 11950 - protein, 80 aa, Synthetic construct; identical to SEQ ID NO: 733

SEQ ID NO: 11951 - protein, 80 aa, Synthetic construct; identical to SEQ ID NO: 45

SEQ ID NO: 11952 - protein, 80 aa, Synthetic construct; identical to SEQ ID NO: 46

SEQ ID NO: 11953 - protein, 80 aa, Synthetic construct; identical to SEQ ID NO: 734

SEQ ID NO: 11954 - protein, 80 aa, Synthetic construct; identical to SEQ ID NO: 47

SEQ ID NO: 11955 - protein, 80 aa, Synthetic construct; identical to SEQ ID NO: 768

SEQ ID NO: 11956 - protein, 80 aa, Synthetic construct; identical to SEQ ID NO: 48

SEQ ID NO: 11957 - protein, 80 aa, Synthetic construct; identical to SEQ ID NO: 703

SEQ ID NO: 11958 - protein, 80 aa, Synthetic construct; identical to SEQ ID NO: 49

SEQ ID NO: 11959 - protein, 80 aa, Synthetic construct; identical to SEQ ID NO: 50

SEQ ID NO: 11960 - protein, 80 aa, Synthetic construct; identical to SEQ ID NO: 51

SEQ ID NO: 11961 - protein, 80 aa, Synthetic construct; identical to SEQ ID NO: 52

SEQ ID NO: 11962 - protein, 80 aa, Synthetic construct; identical to SEQ ID NO: 642

SEQ ID NO: 11963 - protein, 80 aa, Synthetic construct; identical to SEQ ID NO: 53

SEQ ID NO: 11964 - protein, 80 aa, Synthetic construct; identical to SEQ ID NO: 54

SEQ ID NO: 11965 - protein, 80 aa, Synthetic construct; identical to SEQ ID NO: 58

SEQ ID NO: 11966 - protein, 80 aa, Synthetic construct; identical to SEQ ID NO: 645

SEQ ID NO: 11967 - protein, 80 aa, Synthetic construct; identical to SEQ ID NO: 59

SEQ ID NO: 11968 - protein, 80 aa, Synthetic construct; identical to SEQ ID NO: 692

SEQ ID NO: 11969 - protein, 80 aa, Synthetic construct; identical to SEQ ID NO: 60

SEQ ID NO: 11970 - protein, 80 aa, Synthetic construct; identical to SEQ ID NO: 61

SEQ ID NO: 11971 - protein, 80 aa, Synthetic construct; identical to SEQ ID NO: 537

SEQ ID NO: 11972 - protein, 80 aa, Synthetic construct; identical to SEQ ID NO: 62

SEQ ID NO: 11973 - protein, 80 aa, Synthetic construct; identical to SEQ ID NO: 63

SEQ ID NO: 11974 - protein, 80 aa, Synthetic construct; identical to SEQ ID NO: 64

SEQ ID NO: 11975 - protein, 80 aa, Synthetic construct; identical to SEQ ID NO: 65

SEQ ID NO: 11976 - protein, 80 aa, Synthetic construct; identical to SEQ ID NO: 538

SEQ ID NO: 11977 - protein, 80 aa, Synthetic construct; identical to SEQ ID NO: 66

SEQ ID NO: 11978 - protein, 80 aa, Synthetic construct; identical to SEQ ID NO: 67

SEQ ID NO: 11979 - protein, 80 aa, Synthetic construct; identical to SEQ ID NO: 672

SEQ ID NO: 11980 - protein, 80 aa, Synthetic construct; identical to SEQ ID NO: 68

SEQ ID NO: 11981 - protein, 80 aa, Synthetic construct; identical to SEQ ID NO: 69

SEQ ID NO: 11982 - protein, 80 aa, Synthetic construct; identical to SEQ ID NO: 511

SEQ ID NO: 11983 - protein, 80 aa, Synthetic construct; identical to SEQ ID NO: 71

SEQ ID NO: 11984 - protein, 80 aa, Synthetic construct; identical to SEQ ID NO: 72

SEQ ID NO: 11985 - protein, 80 aa, Synthetic construct; identical to SEQ ID NO: 565

SEQ ID NO: 11986 - protein, 80 aa, Synthetic construct; identical to SEQ ID NO: 618

SEQ ID NO: 11987 - protein, 80 aa, Synthetic construct; identical to SEQ ID NO: 73

SEQ ID NO: 11988 - protein, 80 aa, Synthetic construct; identical to SEQ ID NO: 74

SEQ ID NO: 11989 - protein, 80 aa, Synthetic construct; identical to SEQ ID NO: 748

SEQ ID NO: 11990 - protein, 80 aa, Synthetic construct; identical to SEQ ID NO: 563

SEQ ID NO: 11991 - protein, 80 aa, Synthetic construct; identical to SEQ ID NO: 759

SEQ ID NO: 11992 - protein, 80 aa, Synthetic construct; identical to SEQ ID NO: 76

SEQ ID NO: 11993 - protein, 80 aa, Synthetic construct; identical to SEQ ID NO: 77

SEQ ID NO: 11994 - protein, 80 aa, Synthetic construct; identical to SEQ ID NO: 744

SEQ ID NO: 11995 - protein, 80 aa, Synthetic construct; identical to SEQ ID NO: 564

SEQ ID NO: 11996 - protein, 80 aa, Synthetic construct; identical to SEQ ID NO: 78

SEQ ID NO: 11997 - protein, 80 aa, Synthetic construct; identical to SEQ ID NO: 79

SEQ ID NO: 11998 - protein, 80 aa, Synthetic construct; identical to SEQ ID NO: 568

SEQ ID NO: 11999 - protein, 80 aa, Synthetic construct; identical to SEQ ID NO: 80

SEQ ID NO: 12000 - protein, 80 aa, Synthetic construct; identical to SEQ ID NO: 535

SEQ ID NO: 12001 - protein, 80 aa, Synthetic construct; identical to SEQ ID NO: 81

SEQ ID NO: 12002 - protein, 80 aa, Synthetic construct; identical to SEQ ID NO: 82

SEQ ID NO: 12003 - protein, 80 aa, Synthetic construct; identical to SEQ ID NO: 721

SEQ ID NO: 12004 - protein, 80 aa, Synthetic construct; identical to SEQ ID NO: 83

SEQ ID NO: 12005 - protein, 80 aa, Synthetic construct; identical to SEQ ID NO: 84

SEQ ID NO: 12006 - protein, 80 aa, Synthetic construct; identical to SEQ ID NO: 85

SEQ ID NO: 12007 - protein, 80 aa, Synthetic construct; identical to SEQ ID NO: 86

SEQ ID NO: 12008 - protein, 80 aa, Synthetic construct; identical to SEQ ID NO: 87

SEQ ID NO: 12009 - protein, 80 aa, Synthetic construct; identical to SEQ ID NO: 88

SEQ ID NO: 12010 - protein, 80 aa, Synthetic construct; identical to SEQ ID NO: 89

SEQ ID NO: 12011 - protein, 80 aa, Synthetic construct; identical to SEQ ID NO: 90

SEQ ID NO: 12012 - protein, 80 aa, Synthetic construct; identical to SEQ ID NO: 91

SEQ ID NO: 12013 - protein, 80 aa, Synthetic construct; identical to SEQ ID NO: 700

SEQ ID NO: 12014 - protein, 80 aa, Synthetic construct; identical to SEQ ID NO: 92

SEQ ID NO: 12015 - protein, 80 aa, Synthetic construct; identical to SEQ ID NO: 93

SEQ ID NO: 12016 - protein, 80 aa, Synthetic construct; identical to SEQ ID NO: 494

SEQ ID NO: 12017 - protein, 80 aa, Synthetic construct; identical to SEQ ID NO: 94

SEQ ID NO: 12018 - protein, 80 aa, Synthetic construct; identical to SEQ ID NO: 656

SEQ ID NO: 12019 - protein, 80 aa, Synthetic construct; identical to SEQ ID NO: 512

SEQ ID NO: 12020 - protein, 80 aa, Synthetic construct; identical to SEQ ID NO: 513

SEQ ID NO: 12021 - protein, 80 aa, Synthetic construct; identical to SEQ ID NO: 705

SEQ ID NO: 12022 - protein, 80 aa, Synthetic construct; identical to SEQ ID NO: 95

SEQ ID NO: 12023 - protein, 80 aa, Synthetic construct; identical to SEQ ID NO: 96

SEQ ID NO: 12024 - protein, 80 aa, Synthetic construct; identical to SEQ ID NO: 670

SEQ ID NO: 12025 - protein, 80 aa, Synthetic construct; identical to SEQ ID NO: 97

SEQ ID NO: 12026 - protein, 80 aa, Synthetic construct; identical to SEQ ID NO: 98

SEQ ID NO: 12027 - protein, 80 aa, Synthetic construct; identical to SEQ ID NO: 99

SEQ ID NO: 12028 - protein, 80 aa, Synthetic construct; identical to SEQ ID NO: 675

SEQ ID NO: 12029 - protein, 80 aa, Synthetic construct; identical to SEQ ID NO: 100

SEQ ID NO: 12030 - protein, 80 aa, Synthetic construct; identical to SEQ ID NO: 583

SEQ ID NO: 12031 - protein, 80 aa, Synthetic construct; identical to SEQ ID NO: 101

SEQ ID NO: 12032 - protein, 80 aa, Synthetic construct; identical to SEQ ID NO: 102

SEQ ID NO: 12033 - protein, 80 aa, Synthetic construct; identical to SEQ ID NO: 663

SEQ ID NO: 12034 - protein, 80 aa, Synthetic construct; identical to SEQ ID NO: 103

SEQ ID NO: 12035 - protein, 80 aa, Synthetic construct; identical to SEQ ID NO: 701

SEQ ID NO: 12036 - protein, 80 aa, Synthetic construct; identical to SEQ ID NO: 107

SEQ ID NO: 12037 - protein, 80 aa, Synthetic construct; identical to SEQ ID NO: 108

SEQ ID NO: 12038 - protein, 80 aa, Synthetic construct; identical to SEQ ID NO: 594

SEQ ID NO: 12039 - protein, 80 aa, Synthetic construct; identical to SEQ ID NO: 684

SEQ ID NO: 12040 - protein, 80 aa, Synthetic construct; identical to SEQ ID NO: 584

SEQ ID NO: 12041 - protein, 80 aa, Synthetic construct; identical to SEQ ID NO: 585

SEQ ID NO: 12042 - protein, 80 aa, Synthetic construct; identical to SEQ ID NO: 586

SEQ ID NO: 12043 - protein, 80 aa, Synthetic construct; identical to SEQ ID NO: 110

SEQ ID NO: 12044 - protein, 80 aa, Synthetic construct; identical to SEQ ID NO: 772

SEQ ID NO: 12045 - protein, 80 aa, Synthetic construct; identical to SEQ ID NO: 773

SEQ ID NO: 12046 - protein, 80 aa, Synthetic construct; identical to SEQ ID NO: 111

SEQ ID NO: 12047 - protein, 80 aa, Synthetic construct; identical to SEQ ID NO: 636

SEQ ID NO: 12048 - protein, 80 aa, Synthetic construct; identical to SEQ ID NO: 112

SEQ ID NO: 12049 - protein, 80 aa, Synthetic construct; identical to SEQ ID NO: 740

SEQ ID NO: 12050 - protein, 80 aa, Synthetic construct; identical to SEQ ID NO: 622

SEQ ID NO: 12051 - protein, 80 aa, Synthetic construct; identical to SEQ ID NO: 113

SEQ ID NO: 12052 - protein, 80 aa, Synthetic construct; identical to SEQ ID NO: 478

SEQ ID NO: 12053 - protein, 80 aa, Synthetic construct; identical to SEQ ID NO: 114

SEQ ID NO: 12054 - protein, 80 aa, Synthetic construct; identical to SEQ ID NO: 479

SEQ ID NO: 12055 - protein, 80 aa, Synthetic construct; identical to SEQ ID NO: 115

SEQ ID NO: 12056 - protein, 80 aa, Synthetic construct; identical to SEQ ID NO: 116

SEQ ID NO: 12057 - protein, 80 aa, Synthetic construct; identical to SEQ ID NO: 117

SEQ ID NO: 12058 - protein, 80 aa, Synthetic construct; identical to SEQ ID NO: 471

SEQ ID NO: 12059 - protein, 80 aa, Synthetic construct; identical to SEQ ID NO: 659

SEQ ID NO: 12060 - protein, 80 aa, Synthetic construct; identical to SEQ ID NO: 118

SEQ ID NO: 12061 - protein, 80 aa, Synthetic construct; identical to SEQ ID NO: 119

SEQ ID NO: 12062 - protein, 80 aa, Synthetic construct; identical to SEQ ID NO: 120

SEQ ID NO: 12063 - protein, 80 aa, Synthetic construct; identical to SEQ ID NO: 660

SEQ ID NO: 12064 - protein, 80 aa, Synthetic construct; identical to SEQ ID NO: 121

SEQ ID NO: 12065 - protein, 80 aa, Synthetic construct; identical to SEQ ID NO: 122

SEQ ID NO: 12066 - protein, 80 aa, Synthetic construct; identical to SEQ ID NO: 123

SEQ ID NO: 12067 - protein, 80 aa, Synthetic construct; identical to SEQ ID NO: 124

SEQ ID NO: 12068 - protein, 80 aa, Synthetic construct; identical to SEQ ID NO: 661

SEQ ID NO: 12069 - protein, 80 aa, Synthetic construct; identical to SEQ ID NO: 125

SEQ ID NO: 12070 - protein, 80 aa, Synthetic construct; identical to SEQ ID NO: 126

SEQ ID NO: 12071 - protein, 80 aa, Synthetic construct; identical to SEQ ID NO: 739

SEQ ID NO: 12072 - protein, 80 aa, Synthetic construct; identical to SEQ ID NO: 652

SEQ ID NO: 12073 - protein, 80 aa, Synthetic construct; identical to SEQ ID NO: 128

SEQ ID NO: 12074 - protein, 80 aa, Synthetic construct; identical to SEQ ID NO: 559

SEQ ID NO: 12075 - protein, 80 aa, Synthetic construct; identical to SEQ ID NO: 130

SEQ ID NO: 12076 - protein, 80 aa, Synthetic construct; identical to SEQ ID NO: 131

SEQ ID NO: 12077 - protein, 80 aa, Synthetic construct; identical to SEQ ID NO: 591

SEQ ID NO: 12078 - protein, 80 aa, Synthetic construct; identical to SEQ ID NO: 617

SEQ ID NO: 12079 - protein, 80 aa, Synthetic construct; identical to SEQ ID NO: 735

SEQ ID NO: 12080 - protein, 80 aa, Synthetic construct; identical to SEQ ID NO: 132

SEQ ID NO: 12081 - protein, 80 aa, Synthetic construct; identical to SEQ ID NO: 536

SEQ ID NO: 12082 - protein, 80 aa, Synthetic construct
ADNQQLRRENAALRRRLEALLAENSELKLGSGNRKVVCIMVFLLFIAFNFGPVSISEPPSAPISPRMNKGEPQPRRHLLG

SEQ ID NO: 12083 - protein, 80 aa, Synthetic construct; identical to SEQ ID NO: 648

SEQ ID NO: 12084 - protein, 80 aa, Synthetic construct; identical to SEQ ID NO: 577

SEQ ID NO: 12085 - protein, 80 aa, Synthetic construct; identical to SEQ ID NO: 135

SEQ ID NO: 12086 - protein, 80 aa, Synthetic construct; identical to SEQ ID NO: 578

SEQ ID NO: 12087 - protein, 80 aa, Synthetic construct; identical to SEQ ID NO: 630

SEQ ID NO: 12088 - protein, 80 aa, Synthetic construct; identical to SEQ ID NO: 136

SEQ ID NO: 12089 - protein, 80 aa, Synthetic construct; identical to SEQ ID NO: 137

SEQ ID NO: 12090 - protein, 80 aa, Synthetic construct; identical to SEQ ID NO: 631

SEQ ID NO: 12091 - protein, 80 aa, Synthetic construct; identical to SEQ ID NO: 138

SEQ ID NO: 12092 - protein, 80 aa, Synthetic construct; identical to SEQ ID NO: 139

SEQ ID NO: 12093 - protein, 80 aa, Synthetic construct; identical to SEQ ID NO: 140

SEQ ID NO: 12094 - protein, 80 aa, Synthetic construct; identical to SEQ ID NO: 614

SEQ ID NO: 12095 - protein, 80 aa, Synthetic construct; identical to SEQ ID NO: 143

SEQ ID NO: 12096 - protein, 80 aa, Synthetic construct; identical to SEQ ID NO: 502

SEQ ID NO: 12097 - protein, 80 aa, Synthetic construct; identical to SEQ ID NO: 761

SEQ ID NO: 12098 - protein, 80 aa, Synthetic construct; identical to SEQ ID NO: 634

SEQ ID NO: 12099 - protein, 80 aa, Synthetic construct; identical to SEQ ID NO: 620

SEQ ID NO: 12100 - protein, 80 aa, Synthetic construct; identical to SEQ ID NO: 146

SEQ ID NO: 12101 - protein, 80 aa, Synthetic construct; identical to SEQ ID NO: 147

SEQ ID NO: 12102 - protein, 80 aa, Synthetic construct; identical to SEQ ID NO: 676

SEQ ID NO: 12103 - protein, 80 aa, Synthetic construct; identical to SEQ ID NO: 148

SEQ ID NO: 12104 - protein, 80 aa, Synthetic construct; identical to SEQ ID NO: 149

SEQ ID NO: 12105 - protein, 80 aa, Synthetic construct; identical to SEQ ID NO: 150

SEQ ID NO: 12106 - protein, 80 aa, Synthetic construct; identical to SEQ ID NO: 774

SEQ ID NO: 12107 - protein, 80 aa, Synthetic construct; identical to SEQ ID NO: 533

SEQ ID NO: 12108 - protein, 80 aa, Synthetic construct; identical to SEQ ID NO: 720

SEQ ID NO: 12109 - protein, 80 aa, Synthetic construct; identical to SEQ ID NO: 151

SEQ ID NO: 12110 - protein, 80 aa, Synthetic construct; identical to SEQ ID NO: 152

SEQ ID NO: 12111 - protein, 80 aa, Synthetic construct; identical to SEQ ID NO: 722

SEQ ID NO: 12112 - protein, 80 aa, Synthetic construct; identical to SEQ ID NO: 153

SEQ ID NO: 12113 - protein, 80 aa, Synthetic construct; identical to SEQ ID NO: 154

SEQ ID NO: 12114 - protein, 80 aa, Synthetic construct; identical to SEQ ID NO: 155

SEQ ID NO: 12115 - protein, 80 aa, Synthetic construct; identical to SEQ ID NO: 156

SEQ ID NO: 12116 - protein, 80 aa, Synthetic construct; identical to SEQ ID NO: 157

SEQ ID NO: 12117 - protein, 80 aa, Synthetic construct; identical to SEQ ID NO: 158

SEQ ID NO: 12118 - protein, 80 aa, Synthetic construct; identical to SEQ ID NO: 497

SEQ ID NO: 12119 - protein, 80 aa, Synthetic construct; identical to SEQ ID NO: 159

SEQ ID NO: 12120 - protein, 80 aa, Synthetic construct; identical to SEQ ID NO: 160

SEQ ID NO: 12121 - protein, 80 aa, Synthetic construct; identical to SEQ ID NO: 161

SEQ ID NO: 12122 - protein, 80 aa, Synthetic construct; identical to SEQ ID NO: 162

SEQ ID NO: 12123 - protein, 80 aa, Synthetic construct; identical to SEQ ID NO: 163

SEQ ID NO: 12124 - protein, 80 aa, Synthetic construct; identical to SEQ ID NO: 164

SEQ ID NO: 12125 - protein, 80 aa, Synthetic construct; identical to SEQ ID NO: 165

SEQ ID NO: 12126 - protein, 80 aa, Synthetic construct; identical to SEQ ID NO: 765

SEQ ID NO: 12127 - protein, 80 aa, Synthetic construct; identical to SEQ ID NO: 169

SEQ ID NO: 12128 - protein, 80 aa, Synthetic construct; identical to SEQ ID NO: 170

SEQ ID NO: 12129 - protein, 80 aa, Synthetic construct; identical to SEQ ID NO: 752

SEQ ID NO: 12130 - protein, 80 aa, Synthetic construct; identical to SEQ ID NO: 171

SEQ ID NO: 12131 - protein, 80 aa, Synthetic construct; identical to SEQ ID NO: 763

SEQ ID NO: 12132 - protein, 80 aa, Synthetic construct; identical to SEQ ID NO: 172

SEQ ID NO: 12133 - protein, 80 aa, Synthetic construct; identical to SEQ ID NO: 173

SEQ ID NO: 12134 - protein, 80 aa, Synthetic construct; identical to SEQ ID NO: 174

SEQ ID NO: 12135 - protein, 80 aa, Synthetic construct; identical to SEQ ID NO: 175

SEQ ID NO: 12136 - protein, 80 aa, Synthetic construct [sequence omitted]

SEQ ID NO: 12137 - protein, 80 aa, Synthetic construct; identical to SEQ ID NO: 176

SEQ ID NO: 12138 - protein, 80 aa, Synthetic construct; identical to SEQ ID NO: 177

SEQ ID NO: 12139 - protein, 80 aa, Synthetic construct; identical to SEQ ID NO: 178

SEQ ID NO: 12140 - protein, 80 aa, Synthetic construct; identical to SEQ ID NO: 544

SEQ ID NO: 12141 - protein, 80 aa, Synthetic construct; identical to SEQ ID NO: 179

SEQ ID NO: 12142 - protein, 80 aa, Synthetic construct; identical to SEQ ID NO: 545

SEQ ID NO: 12143 - protein, 80 aa, Synthetic construct; identical to SEQ ID NO: 487

SEQ ID NO: 12144 - protein, 80 aa, Synthetic construct; identical to SEQ ID NO: 181

SEQ ID NO: 12145 - protein, 80 aa, Synthetic construct; identical to SEQ ID NO: 182

SEQ ID NO: 12146 - protein, 80 aa, Synthetic construct; identical to SEQ ID NO: 641

SEQ ID NO: 12147 - protein, 80 aa, Synthetic construct; identical to SEQ ID NO: 183

SEQ ID NO: 12148 - protein, 80 aa, Synthetic construct; identical to SEQ ID NO: 184

SEQ ID NO: 12149 - protein, 80 aa, Synthetic construct; identical to SEQ ID NO: 693

SEQ ID NO: 12150 - protein, 80 aa, Synthetic construct; identical to SEQ ID NO: 185

SEQ ID NO: 12151 - protein, 80 aa, Synthetic construct; identical to SEQ ID NO: 186

SEQ ID NO: 12152 - protein, 80 aa, Synthetic construct; identical to SEQ ID NO: 187

SEQ ID NO: 12153 - protein, 80 aa, Synthetic construct; identical to SEQ ID NO: 188

SEQ ID NO: 12154 - protein, 80 aa, Synthetic construct; identical to SEQ ID NO: 189

SEQ ID NO: 12155 - protein, 80 aa, Synthetic construct; identical to SEQ ID NO: 633

SEQ ID NO: 12156 - protein, 80 aa, Synthetic construct; identical to SEQ ID NO: 190

SEQ ID NO: 12157 - protein, 80 aa, Synthetic construct; identical to SEQ ID NO: 191

SEQ ID NO: 12158 - protein, 80 aa, Synthetic construct; identical to SEQ ID NO: 192

SEQ ID NO: 12159 - protein, 80 aa, Synthetic construct; identical to SEQ ID NO: 193

SEQ ID NO: 12160 - protein, 80 aa, Synthetic construct; identical to SEQ ID NO: 519

SEQ ID NO: 12161 - protein, 80 aa, Synthetic construct; identical to SEQ ID NO: 194

SEQ ID NO: 12162 - protein, 80 aa, Synthetic construct; identical to SEQ ID NO: 195

SEQ ID NO: 12163 - protein, 80 aa, Synthetic construct; identical to SEQ ID NO: 196

SEQ ID NO: 12164 - protein, 80 aa, Synthetic construct; identical to SEQ ID NO: 197

SEQ ID NO: 12165 - protein, 80 aa, Synthetic construct; identical to SEQ ID NO: 520

SEQ ID NO: 12166 - protein, 80 aa, Synthetic construct; identical to SEQ ID NO: 198

SEQ ID NO: 12167 - protein, 80 aa, Synthetic construct; identical to SEQ ID NO: 199

SEQ ID NO: 12168 - protein, 80 aa, Synthetic construct; identical to SEQ ID NO: 200

SEQ ID NO: 12169 - protein, 80 aa, Synthetic construct; identical to SEQ ID NO: 725

SEQ ID NO: 12170 - protein, 80 aa, Synthetic construct; identical to SEQ ID NO: 596

SEQ ID NO: 12171 - protein, 80 aa, Synthetic construct; identical to SEQ ID NO: 597

SEQ ID NO: 12172 - protein, 80 aa, Synthetic construct; identical to SEQ ID NO: 709

SEQ ID NO: 12173 - protein, 80 aa, Synthetic construct; identical to SEQ ID NO: 710

SEQ ID NO: 12174 - protein, 80 aa, Synthetic construct; identical to SEQ ID NO: 201

SEQ ID NO: 12175 - protein, 80 aa, Synthetic construct; identical to SEQ ID NO: 202

SEQ ID NO: 12176 - protein, 80 aa, Synthetic construct; identical to SEQ ID NO: 682

SEQ ID NO: 12177 - protein, 80 aa, Synthetic construct; identical to SEQ ID NO: 203

SEQ ID NO: 12178 - protein, 80 aa, Synthetic construct; identical to SEQ ID NO: 204

SEQ ID NO: 12179 - protein, 80 aa, Synthetic construct; identical to SEQ ID NO: 205

SEQ ID NO: 12180 - protein, 80 aa, Synthetic construct; identical to SEQ ID NO: 206

SEQ ID NO: 12181 - protein, 80 aa, Synthetic construct; identical to SEQ ID NO: 507

SEQ ID NO: 12182 - protein, 80 aa, Synthetic construct; identical to SEQ ID NO: 207

SEQ ID NO: 12183 - protein, 80 aa, Synthetic construct; identical to SEQ ID NO: 208

SEQ ID NO: 12184 - protein, 80 aa, Synthetic construct; identical to SEQ ID NO: 209

SEQ ID NO: 12185 - protein, 80 aa, Synthetic construct; identical to SEQ ID NO: 210

SEQ ID NO: 12186 - protein, 80 aa, Synthetic construct; identical to SEQ ID NO: 211

SEQ ID NO: 12187 - protein, 80 aa, Synthetic construct; identical to SEQ ID NO: 212

SEQ ID NO: 12188 - protein, 80 aa, Synthetic construct; identical to SEQ ID NO: 213

SEQ ID NO: 12189 - protein, 80 aa, Synthetic construct; identical to SEQ ID NO: 569

SEQ ID NO: 12190 - protein, 80 aa, Synthetic construct; identical to SEQ ID NO: 598

SEQ ID NO: 12191 - protein, 80 aa, Synthetic construct; identical to SEQ ID NO: 214

SEQ ID NO: 12192 - protein, 80 aa, Synthetic construct; identical to SEQ ID NO: 771

SEQ ID NO: 12193 - protein, 80 aa, Synthetic construct; identical to SEQ ID NO: 215

SEQ ID NO: 12194 - protein, 80 aa, Synthetic construct; identical to SEQ ID NO: 216

SEQ ID NO: 12195 - protein, 80 aa, Synthetic construct; identical to SEQ ID NO: 750

SEQ ID NO: 12196 - protein, 80 aa, Synthetic construct; identical to SEQ ID NO: 218

SEQ ID NO: 12197 - protein, 80 aa, Synthetic construct; identical to SEQ ID NO: 219

SEQ ID NO: 12198 - protein, 80 aa, Synthetic construct; identical to SEQ ID NO: 554

SEQ ID NO: 12199 - protein, 80 aa, Synthetic construct; identical to SEQ ID NO: 522

SEQ ID NO: 12200 - protein, 80 aa, Synthetic construct; identical to SEQ ID NO: 220

SEQ ID NO: 12201 - protein, 80 aa, Synthetic construct; identical to SEQ ID NO: 736

SEQ ID NO: 12202 - protein, 80 aa, Synthetic construct; identical to SEQ ID NO: 737

SEQ ID NO: 12203 - protein, 80 aa, Synthetic construct; identical to SEQ ID NO: 221

SEQ ID NO: 12204 - protein, 80 aa, Synthetic construct; identical to SEQ ID NO: 222

SEQ ID NO: 12205 - protein, 80 aa, Synthetic construct; identical to SEQ ID NO: 649

SEQ ID NO: 12206 - protein, 80 aa, Synthetic construct; identical to SEQ ID NO: 223

SEQ ID NO: 12207 - protein, 80 aa, Synthetic construct; identical to SEQ ID NO: 224

SEQ ID NO: 12208 - protein, 80 aa, Synthetic construct; identical to SEQ ID NO: 225

SEQ ID NO: 12209 - protein, 80 aa, Synthetic construct; identical to SEQ ID NO: 510

SEQ ID NO: 12210 - protein, 80 aa, Synthetic construct; identical to SEQ ID NO: 226

SEQ ID NO: 12211 - protein, 80 aa, Synthetic construct; identical to SEQ ID NO: 228

SEQ ID NO: 12212 - protein, 80 aa, Synthetic construct; identical to SEQ ID NO: 229

SEQ ID NO: 12213 - protein, 80 aa, Synthetic construct; identical to SEQ ID NO: 230

SEQ ID NO: 12214 - protein, 80 aa, Synthetic construct; identical to SEQ ID NO: 657

SEQ ID NO: 12215 - protein, 80 aa, Synthetic construct; identical to SEQ ID NO: 231

SEQ ID NO: 12216 - protein, 80 aa, Synthetic construct; identical to SEQ ID NO: 232

SEQ ID NO: 12217 - protein, 80 aa, Synthetic construct; identical to SEQ ID NO: 742

SEQ ID NO: 12218 - protein, 80 aa, Synthetic construct; identical to SEQ ID NO: 233

SEQ ID NO: 12219 - protein, 80 aa, Synthetic construct; identical to SEQ ID NO: 481

SEQ ID NO: 12220 - protein, 80 aa, Synthetic construct; identical to SEQ ID NO: 627

SEQ ID NO: 12221 - protein, 80 aa, Synthetic construct; identical to SEQ ID NO: 732

SEQ ID NO: 12222 - protein, 80 aa, Synthetic construct; identical to SEQ ID NO: 236

SEQ ID NO: 12223 - protein, 80 aa, Synthetic construct; identical to SEQ ID NO: 242

SEQ ID NO: 12224 - protein, 80 aa, Synthetic construct; identical to SEQ ID NO: 628

SEQ ID NO: 12225 - protein, 80 aa, Synthetic construct; identical to SEQ ID NO: 629

SEQ ID NO: 12226 - protein, 80 aa, Synthetic construct; identical to SEQ ID NO: 567

SEQ ID NO: 12227 - protein, 80 aa, Synthetic construct; identical to SEQ ID NO: 677

SEQ ID NO: 12228 - protein, 80 aa, Synthetic construct; identical to SEQ ID NO: 243

SEQ ID NO: 12229 - protein, 80 aa, Synthetic construct; identical to SEQ ID NO: 762

SEQ ID NO: 12230 - protein, 80 aa, Synthetic construct; identical to SEQ ID NO: 244

SEQ ID NO: 12231 - protein, 80 aa, Synthetic construct; identical to SEQ ID NO: 245

SEQ ID NO: 12232 - protein, 80 aa, Synthetic construct; identical to SEQ ID NO: 246

SEQ ID NO: 12233 - protein, 80 aa, Synthetic construct; identical to SEQ ID NO: 247

SEQ ID NO: 12234 - protein, 80 aa, Synthetic construct; identical to SEQ ID NO: 741

SEQ ID NO: 12235 - protein, 80 aa, Synthetic construct; identical to SEQ ID NO: 248

SEQ ID NO: 12236 - protein, 80 aa, Synthetic construct; identical to SEQ ID NO: 553

SEQ ID NO: 12237 - protein, 80 aa, Synthetic construct; identical to SEQ ID NO: 249

SEQ ID NO: 12238 - protein, 80 aa, Synthetic construct; identical to SEQ ID NO: 599

SEQ ID NO: 12239 - protein, 80 aa, Synthetic construct; identical to SEQ ID NO: 251

SEQ ID NO: 12240 - protein, 80 aa, Synthetic construct; identical to SEQ ID NO: 745

SEQ ID NO: 12241 - protein, 80 aa, Synthetic construct; identical to SEQ ID NO: 252

SEQ ID NO: 12242 - protein, 80 aa, Synthetic construct; identical to SEQ ID NO: 524

SEQ ID NO: 12243 - protein, 80 aa, Synthetic construct; identical to SEQ ID NO: 685

SEQ ID NO: 12244 - protein, 80 aa, Synthetic construct; identical to SEQ ID NO: 253

SEQ ID NO: 12245 - protein, 80 aa, Synthetic construct; identical to SEQ ID NO: 254

SEQ ID NO: 12246 - protein, 80 aa, Synthetic construct; identical to SEQ ID NO: 255

SEQ ID NO: 12247 - protein, 80 aa, Synthetic construct; identical to SEQ ID NO: 256

SEQ ID NO: 12248 - protein, 80 aa, Synthetic construct; identical to SEQ ID NO: 257

SEQ ID NO: 12249 - protein, 80 aa, Synthetic construct; identical to SEQ ID NO: 258

SEQ ID NO: 12250 - protein, 80 aa, Synthetic construct; identical to SEQ ID NO: 529

SEQ ID NO: 12251 - protein, 80 aa, Synthetic construct; identical to SEQ ID NO: 259

SEQ ID NO: 12252 - protein, 80 aa, Synthetic construct; identical to SEQ ID NO: 260

SEQ ID NO: 12253 - protein, 80 aa, Synthetic construct; identical to SEQ ID NO: 261

SEQ ID NO: 12254 - protein, 80 aa, Synthetic construct; identical to SEQ ID NO: 262

SEQ ID NO: 12255 - protein, 80 aa, Synthetic construct; identical to SEQ ID NO: 263

SEQ ID NO: 12256 - protein, 80 aa, Synthetic construct; identical to SEQ ID NO: 264

SEQ ID NO: 12257 - protein, 80 aa, Synthetic construct; identical to SEQ ID NO: 669

SEQ ID NO: 12258 - protein, 80 aa, Synthetic construct; identical to SEQ ID NO: 265

SEQ ID NO: 12259 - protein, 80 aa, Synthetic construct; identical to SEQ ID NO: 266

SEQ ID NO: 12260 - protein, 80 aa, Synthetic construct; identical to SEQ ID NO: 267

SEQ ID NO: 12261 - protein, 80 aa, Synthetic construct; identical to SEQ ID NO: 268

SEQ ID NO: 12262 - protein, 80 aa, Synthetic construct; identical to SEQ ID NO: 573

SEQ ID NO: 12263 - protein, 80 aa, Synthetic construct; identical to SEQ ID NO: 574

SEQ ID NO: 12264 - protein, 80 aa, Synthetic construct; identical to SEQ ID NO: 270

SEQ ID NO: 12265 - protein, 80 aa, Synthetic construct; identical to SEQ ID NO: 484

SEQ ID NO: 12266 - protein, 80 aa, Synthetic construct; identical to SEQ ID NO: 274

SEQ ID NO: 12267 - protein, 80 aa, Synthetic construct; identical to SEQ ID NO: 275

SEQ ID NO: 12268 - protein, 80 aa, Synthetic construct; identical to SEQ ID NO: 276

SEQ ID NO: 12269 - protein, 80 aa, Synthetic construct; identical to SEQ ID NO: 277

SEQ ID NO: 12270 - protein, 80 aa, Synthetic construct; identical to SEQ ID NO: 278

SEQ ID NO: 12271 - protein, 80 aa, Synthetic construct; identical to SEQ ID NO: 550

SEQ ID NO: 12272 - protein, 80 aa, Synthetic construct; identical to SEQ ID NO: 279

SEQ ID NO: 12273 - protein, 80 aa, Synthetic construct; identical to SEQ ID NO: 284

SEQ ID NO: 12274 - protein, 80 aa, Synthetic construct; identical to SEQ ID NO: 285

SEQ ID NO: 12275 - protein, 80 aa, Synthetic construct; identical to SEQ ID NO: 286

SEQ ID NO: 12276 - protein, 80 aa, Synthetic construct; identical to SEQ ID NO: 505

SEQ ID NO: 12277 - protein, 80 aa, Synthetic construct; identical to SEQ ID NO: 287

SEQ ID NO: 12278 - protein, 80 aa, Synthetic construct; identical to SEQ ID NO: 288

SEQ ID NO: 12279 - protein, 80 aa, Synthetic construct; identical to SEQ ID NO: 290

SEQ ID NO: 12280 - protein, 80 aa, Synthetic construct; identical to SEQ ID NO: 486

SEQ ID NO: 12281 - protein, 80 aa, Synthetic construct; identical to SEQ ID NO: 291

SEQ ID NO: 12282 - protein, 80 aa, Synthetic construct; identical to SEQ ID NO: 292

SEQ ID NO: 12283 - protein, 80 aa, Synthetic construct; identical to SEQ ID NO: 474

SEQ ID NO: 12284 - protein, 80 aa, Synthetic construct; identical to SEQ ID NO: 662

SEQ ID NO: 12285 - protein, 80 aa, Synthetic construct; identical to SEQ ID NO: 293

SEQ ID NO: 12286 - protein, 80 aa, Synthetic construct; identical to SEQ ID NO: 294

SEQ ID NO: 12287 - protein, 80 aa, Synthetic construct; identical to SEQ ID NO: 295

SEQ ID NO: 12288 - protein, 80 aa, Synthetic construct; identical to SEQ ID NO: 296

SEQ ID NO: 12289 - protein, 80 aa, Synthetic construct; identical to SEQ ID NO: 297

SEQ ID NO: 12290 - protein, 80 aa, Synthetic construct; identical to SEQ ID NO: 495

SEQ ID NO: 12291 - protein, 80 aa, Synthetic construct; identical to SEQ ID NO: 298

SEQ ID NO: 12292 - protein, 80 aa, Synthetic construct; identical to SEQ ID NO: 691

SEQ ID NO: 12293 - protein, 80 aa, Synthetic construct; identical to SEQ ID NO: 489

SEQ ID NO: 12294 - protein, 80 aa, Synthetic construct; identical to SEQ ID NO: 300

SEQ ID NO: 12295 - protein, 80 aa, Synthetic construct; identical to SEQ ID NO: 301

SEQ ID NO: 12296 - protein, 80 aa, Synthetic construct; identical to SEQ ID NO: 613

SEQ ID NO: 12297 - protein, 80 aa, Synthetic construct; identical to SEQ ID NO: 611

SEQ ID NO: 12298 - protein, 80 aa, Synthetic construct; identical to SEQ ID NO: 576

SEQ ID NO: 12299 - protein, 80 aa, Synthetic construct; identical to SEQ ID NO: 304

SEQ ID NO: 12300 - protein, 80 aa, Synthetic construct; identical to SEQ ID NO: 305

SEQ ID NO: 12301 - protein, 80 aa, Synthetic construct; identical to SEQ ID NO: 306

SEQ ID NO: 12302 - protein, 80 aa, Synthetic construct; identical to SEQ ID NO: 307

SEQ ID NO: 12303 - protein, 80 aa, Synthetic construct; identical to SEQ ID NO: 308

SEQ ID NO: 12304 - protein, 80 aa, Synthetic construct; identical to SEQ ID NO: 309

SEQ ID NO: 12305 - protein, 80 aa, Synthetic construct; identical to SEQ ID NO: 632

SEQ ID NO: 12306 - protein, 80 aa, Synthetic construct; identical to SEQ ID NO: 310

SEQ ID NO: 12307 - protein, 80 aa, Synthetic construct; identical to SEQ ID NO: 311

SEQ ID NO: 12308 - protein, 80 aa, Synthetic construct; identical to SEQ ID NO: 754

SEQ ID NO: 12309 - protein, 80 aa, Synthetic construct; identical to SEQ ID NO: 312

SEQ ID NO: 12310 - protein, 80 aa, Synthetic construct; identical to SEQ ID NO: 755

SEQ ID NO: 12311 - protein, 80 aa, Synthetic construct; identical to SEQ ID NO: 313

SEQ ID NO: 12312 - protein, 80 aa, Synthetic construct; identical to SEQ ID NO: 314

SEQ ID NO: 12313 - protein, 80 aa, Synthetic construct; identical to SEQ ID NO: 315

SEQ ID NO: 12314 - protein, 80 aa, Synthetic construct; identical to SEQ ID NO: 316

SEQ ID NO: 12315 - protein, 80 aa, Synthetic construct; identical to SEQ ID NO: 317

SEQ ID NO: 12316 - protein, 80 aa, Synthetic construct; identical to SEQ ID NO: 690

SEQ ID NO: 12317 - protein, 80 aa, Synthetic construct; identical to SEQ ID NO: 318

SEQ ID NO: 12318 - protein, 80 aa, Synthetic construct; identical to SEQ ID NO: 319

SEQ ID NO: 12319 - protein, 80 aa, Synthetic construct; identical to SEQ ID NO: 320

SEQ ID NO: 12320 - protein, 80 aa, Synthetic construct; identical to SEQ ID NO: 548

SEQ ID NO: 12321 - protein, 80 aa, Synthetic construct; identical to SEQ ID NO: 683

SEQ ID NO: 12322 - protein, 80 aa, Synthetic construct; identical to SEQ ID NO: 321

SEQ ID NO: 12323 - protein, 80 aa, Synthetic construct; identical to SEQ ID NO: 546

SEQ ID NO: 12324 - protein, 80 aa, Synthetic construct; identical to SEQ ID NO: 726

SEQ ID NO: 12325 - protein, 80 aa, Synthetic construct; identical to SEQ ID NO: 521

SEQ ID NO: 12326 - protein, 80 aa, Synthetic construct; identical to SEQ ID NO: 328

SEQ ID NO: 12327 - protein, 80 aa, Synthetic construct; identical to SEQ ID NO: 329

SEQ ID NO: 12328 - protein, 80 aa, Synthetic construct; identical to SEQ ID NO: 330

SEQ ID NO: 12329 - protein, 80 aa, Synthetic construct; identical to SEQ ID NO: 331

SEQ ID NO: 12330 - protein, 80 aa, Synthetic construct; identical to SEQ ID NO: 332

SEQ ID NO: 12331 - protein, 80 aa, Synthetic construct; identical to SEQ ID NO: 333

SEQ ID NO: 12332 - protein, 80 aa, Synthetic construct; identical to SEQ ID NO: 616

SEQ ID NO: 12333 - protein, 80 aa, Synthetic construct; identical to SEQ ID NO: 334

SEQ ID NO: 12334 - protein, 80 aa, Synthetic construct; identical to SEQ ID NO: 335

SEQ ID NO: 12335 - protein, 80 aa, Synthetic construct; identical to SEQ ID NO: 336

SEQ ID NO: 12336 - protein, 80 aa, Synthetic construct; identical to SEQ ID NO: 551

SEQ ID NO: 12337 - protein, 80 aa, Synthetic construct; identical to SEQ ID NO: 707

SEQ ID NO: 12338 - protein, 80 aa, Synthetic construct; identical to SEQ ID NO: 626

SEQ ID NO: 12339 - protein, 80 aa, Synthetic construct; identical to SEQ ID NO: 337

SEQ ID NO: 12340 - protein, 80 aa, Synthetic construct; identical to SEQ ID NO: 338

SEQ ID NO: 12341 - protein, 80 aa, Synthetic construct; identical to SEQ ID NO: 339

SEQ ID NO: 12342 - protein, 80 aa, Synthetic construct; identical to SEQ ID NO: 340

SEQ ID NO: 12343 - protein, 80 aa, Synthetic construct; identical to SEQ ID NO: 758

SEQ ID NO: 12344 - protein, 80 aa, Synthetic construct; identical to SEQ ID NO: 341

SEQ ID NO: 12345 - protein, 80 aa, Synthetic construct; identical to SEQ ID NO: 480

SEQ ID NO: 12346 - protein, 80 aa, Synthetic construct; identical to SEQ ID NO: 344

SEQ ID NO: 12347 - protein, 80 aa, Synthetic construct; identical to SEQ ID NO: 345

SEQ ID NO: 12348 - protein, 80 aa, Synthetic construct; identical to SEQ ID NO: 346

SEQ ID NO: 12349 - protein, 80 aa, Synthetic construct; identical to SEQ ID NO: 347

SEQ ID NO: 12350 - protein, 80 aa, Synthetic construct; identical to SEQ ID NO: 580

SEQ ID NO: 12351 - protein, 80 aa, Synthetic construct; identical to SEQ ID NO: 708

SEQ ID NO: 12352 - protein, 80 aa, Synthetic construct; identical to SEQ ID NO: 625

SEQ ID NO: 12353 - protein, 80 aa, Synthetic construct; identical to SEQ ID NO: 527

SEQ ID NO: 12354 - protein, 80 aa, Synthetic construct; identical to SEQ ID NO: 560

SEQ ID NO: 12355 - protein, 80 aa, Synthetic construct; identical to SEQ ID NO: 482

SEQ ID NO: 12356 - protein, 80 aa, Synthetic construct; identical to SEQ ID NO: 348

SEQ ID NO: 12357 - protein, 80 aa, Synthetic construct; identical to SEQ ID NO: 697

SEQ ID NO: 12358 - protein, 80 aa, Synthetic construct; identical to SEQ ID NO: 654

SEQ ID NO: 12359 - protein, 80 aa, Synthetic construct; identical to SEQ ID NO: 582

SEQ ID NO: 12360 - protein, 80 aa, Synthetic construct; identical to SEQ ID NO: 349

SEQ ID NO: 12361 - protein, 80 aa, Synthetic construct; identical to SEQ ID NO: 674

SEQ ID NO: 12362 - protein, 80 aa, Synthetic construct; identical to SEQ ID NO: 769

SEQ ID NO: 12363 - protein, 80 aa, Synthetic construct; identical to SEQ ID NO: 350

SEQ ID NO: 12364 - protein, 80 aa, Synthetic construct; identical to SEQ ID NO: 351

SEQ ID NO: 12365 - protein, 80 aa, Synthetic construct; identical to SEQ ID NO: 665

SEQ ID NO: 12366 - protein, 80 aa, Synthetic construct; identical to SEQ ID NO: 352

SEQ ID NO: 12367 - protein, 80 aa, Synthetic construct; identical to SEQ ID NO: 666

SEQ ID NO: 12368 - protein, 80 aa, Synthetic construct; identical to SEQ ID NO: 476

SEQ ID NO: 12369 - protein, 80 aa, Synthetic construct; identical to SEQ ID NO: 592

SEQ ID NO: 12370 - protein, 80 aa, Synthetic construct; identical to SEQ ID NO: 473

SEQ ID NO: 12371 - protein, 80 aa, Synthetic construct; identical to SEQ ID NO: 353

SEQ ID NO: 12372 - protein, 80 aa, Synthetic construct; identical to SEQ ID NO: 354

SEQ ID NO: 12373 - protein, 80 aa, Synthetic construct; identical to SEQ ID NO: 612

SEQ ID NO: 12374 - protein, 80 aa, Synthetic construct; identical to SEQ ID NO: 355

SEQ ID NO: 12375 - protein, 80 aa, Synthetic construct; identical to SEQ ID NO: 356

SEQ ID NO: 12376 - protein, 80 aa, Synthetic construct; identical to SEQ ID NO: 357

SEQ ID NO: 12377 - protein, 80 aa, Synthetic construct; identical to SEQ ID NO: 358

SEQ ID NO: 12378 - protein, 80 aa, Synthetic construct; identical to SEQ ID NO: 359

SEQ ID NO: 12379 - protein, 80 aa, Synthetic construct; identical to SEQ ID NO: 715

SEQ ID NO: 12380 - protein, 80 aa, Synthetic construct; identical to SEQ ID NO: 717

SEQ ID NO: 12381 - protein, 80 aa, Synthetic construct; identical to SEQ ID NO: 570

SEQ ID NO: 12382 - protein, 80 aa, Synthetic construct; identical to SEQ ID NO: 360

SEQ ID NO: 12383 - protein, 80 aa, Synthetic construct; identical to SEQ ID NO: 714

SEQ ID NO: 12384 - protein, 80 aa, Synthetic construct; identical to SEQ ID NO: 655

SEQ ID NO: 12385 - protein, 80 aa, Synthetic construct; identical to SEQ ID NO: 361

SEQ ID NO: 12386 - protein, 80 aa, Synthetic construct; identical to SEQ ID NO: 731

SEQ ID NO: 12387 - protein, 80 aa, Synthetic construct; identical to SEQ ID NO: 503

SEQ ID NO: 12388 - protein, 80 aa, Synthetic construct; identical to SEQ ID NO: 362

SEQ ID NO: 12389 - protein, 80 aa, Synthetic construct; identical to SEQ ID NO: 504

SEQ ID NO: 12390 - protein, 80 aa, Synthetic construct; identical to SEQ ID NO: 363

SEQ ID NO: 12391 - protein, 80 aa, Synthetic construct; identical to SEQ ID NO: 364

SEQ ID NO: 12392 - protein, 80 aa, Synthetic construct; identical to SEQ ID NO: 365

SEQ ID NO: 12393 - protein, 80 aa, Synthetic construct; identical to SEQ ID NO: 653

SEQ ID NO: 12394 - protein, 80 aa, Synthetic construct; identical to SEQ ID NO: 366

SEQ ID NO: 12395 - protein, 80 aa, Synthetic construct; identical to SEQ ID NO: 605

SEQ ID NO: 12396 - protein, 80 aa, Synthetic construct; identical to SEQ ID NO: 367

SEQ ID NO: 12397 - protein, 80 aa, Synthetic construct; identical to SEQ ID NO: 643

SEQ ID NO: 12398 - protein, 80 aa, Synthetic construct; identical to SEQ ID NO: 368

SEQ ID NO: 12399 - protein, 80 aa, Synthetic construct; identical to SEQ ID NO: 644

SEQ ID NO: 12400 - protein, 80 aa, Synthetic construct; identical to SEQ ID NO: 664

SEQ ID NO: 12401 - protein, 80 aa, Synthetic construct; identical to SEQ ID NO: 369

SEQ ID NO: 12402 - protein, 80 aa, Synthetic construct; identical to SEQ ID NO: 575

SEQ ID NO: 12403 - protein, 80 aa, Synthetic construct; identical to SEQ ID NO: 696

SEQ ID NO: 12404 - protein, 80 aa, Synthetic construct; identical to SEQ ID NO: 547

SEQ ID NO: 12405 - protein, 80 aa, Synthetic construct; identical to SEQ ID NO: 370

SEQ ID NO: 12406 - protein, 80 aa, Synthetic construct; identical to SEQ ID NO: 493

SEQ ID NO: 12407 - protein, 80 aa, Synthetic construct; identical to SEQ ID NO: 372

SEQ ID NO: 12408 - protein, 80 aa, Synthetic construct; identical to SEQ ID NO: 588

SEQ ID NO: 12409 - protein, 80 aa, Synthetic construct; identical to SEQ ID NO: 373

SEQ ID NO: 12410 - protein, 80 aa, Synthetic construct; identical to SEQ ID NO: 374

SEQ ID NO: 12411 - protein, 80 aa, Synthetic construct; identical to SEQ ID NO: 375

SEQ ID NO: 12412 - protein, 80 aa, Synthetic construct; identical to SEQ ID NO: 650

SEQ ID NO: 12413 - protein, 80 aa, Synthetic construct; identical to SEQ ID NO: 376

SEQ ID NO: 12414 - protein, 80 aa, Synthetic construct; identical to SEQ ID NO: 379

SEQ ID NO: 12415 - protein, 80 aa, Synthetic construct; identical to SEQ ID NO: 615

SEQ ID NO: 12416 - protein, 80 aa, Synthetic construct; identical to SEQ ID NO: 380

SEQ ID NO: 12417 - protein, 80 aa, Synthetic construct; identical to SEQ ID NO: 381

SEQ ID NO: 12418 - protein, 80 aa, Synthetic construct; identical to SEQ ID NO: 382

SEQ ID NO: 12419 - protein, 80 aa, Synthetic construct; identical to SEQ ID NO: 383

SEQ ID NO: 12420 - protein, 80 aa, Synthetic construct; identical to SEQ ID NO: 718

SEQ ID NO: 12421 - protein, 80 aa, Synthetic construct; identical to SEQ ID NO: 695

SEQ ID NO: 12422 - protein, 80 aa, Synthetic construct; identical to SEQ ID NO: 514

SEQ ID NO: 12423 - protein, 80 aa, Synthetic construct; identical to SEQ ID NO: 526

SEQ ID NO: 12424 - protein, 80 aa, Synthetic construct; identical to SEQ ID NO: 572

SEQ ID NO: 12425 - protein, 80 aa, Synthetic construct; identical to SEQ ID NO: 699

SEQ ID NO: 12426 - protein, 80 aa, Synthetic construct; identical to SEQ ID NO: 623

SEQ ID NO: 12427 - protein, 80 aa, Synthetic construct; identical to SEQ ID NO: 566

SEQ ID NO: 12428 - protein, 80 aa, Synthetic construct; identical to SEQ ID NO: 651

SEQ ID NO: 12429 - protein, 80 aa, Synthetic construct; identical to SEQ ID NO: 747

SEQ ID NO: 12430 - protein, 80 aa, Synthetic construct; identical to SEQ ID NO: 730

SEQ ID NO: 12431 - protein, 80 aa, Synthetic construct; identical to SEQ ID NO: 384

SEQ ID NO: 12432 - protein, 80 aa, Synthetic construct; identical to SEQ ID NO: 385

SEQ ID NO: 12433 - protein, 80 aa, Synthetic construct; identical to SEQ ID NO: 608

SEQ ID NO: 12434 - protein, 80 aa, Synthetic construct; identical to SEQ ID NO: 386

SEQ ID NO: 12435 - protein, 80 aa, Synthetic construct; identical to SEQ ID NO: 534

SEQ ID NO: 12436 - protein, 80 aa, Synthetic construct; identical to SEQ ID NO: 387

SEQ ID NO: 12437 - protein, 80 aa, Synthetic construct; identical to SEQ ID NO: 388

SEQ ID NO: 12438 - protein, 80 aa, Synthetic construct; identical to SEQ ID NO: 751

SEQ ID NO: 12439 - protein, 80 aa, Synthetic construct; identical to SEQ ID NO: 389

SEQ ID NO: 12440 - protein, 80 aa, Synthetic construct; identical to SEQ ID NO: 390

SEQ ID NO: 12441 - protein, 80 aa, Synthetic construct; identical to SEQ ID NO: 391

SEQ ID NO: 12442 - protein, 80 aa, Synthetic construct; identical to SEQ ID NO: 499

SEQ ID NO: 12443 - protein, 80 aa, Synthetic construct; identical to SEQ ID NO: 392

SEQ ID NO: 12444 - protein, 80 aa, Synthetic construct; identical to SEQ ID NO: 723

SEQ ID NO: 12445 - protein, 80 aa, Synthetic construct; identical to SEQ ID NO: 543

SEQ ID NO: 12446 - protein, 80 aa, Synthetic construct; identical to SEQ ID NO: 393

SEQ ID NO: 12447 - protein, 80 aa, Synthetic construct; identical to SEQ ID NO: 394

SEQ ID NO: 12448 - protein, 80 aa, Synthetic construct; identical to SEQ ID NO: 395

SEQ ID NO: 12449 - protein, 80 aa, Synthetic construct; identical to SEQ ID NO: 396

SEQ ID NO: 12450 - protein, 80 aa, Synthetic construct; identical to SEQ ID NO: 397

SEQ ID NO: 12451 - protein, 80 aa, Synthetic construct; identical to SEQ ID NO: 398

SEQ ID NO: 12452 - protein, 80 aa, Synthetic construct; identical to SEQ ID NO: 399

SEQ ID NO: 12453 - protein, 80 aa, Synthetic construct; identical to SEQ ID NO: 402

SEQ ID NO: 12454 - protein, 80 aa, Synthetic construct; identical to SEQ ID NO: 404

SEQ ID NO: 12455 - protein, 80 aa, Synthetic construct; identical to SEQ ID NO: 688

SEQ ID NO: 12456 - protein, 80 aa, Synthetic construct; identical to SEQ ID NO: 406

SEQ ID NO: 12457 - protein, 80 aa, Synthetic construct; identical to SEQ ID NO: 407

SEQ ID NO: 12458 - protein, 80 aa, Synthetic construct; identical to SEQ ID NO: 689

SEQ ID NO: 12459 - protein, 80 aa, Synthetic construct; identical to SEQ ID NO: 595

SEQ ID NO: 12460 - protein, 80 aa, Synthetic construct; identical to SEQ ID NO: 517

SEQ ID NO: 12461 - protein, 80 aa, Synthetic construct; identical to SEQ ID NO: 673

SEQ ID NO: 12462 - protein, 80 aa, Synthetic construct; identical to SEQ ID NO: 408

SEQ ID NO: 12463 - protein, 80 aa, Synthetic construct; identical to SEQ ID NO: 409

SEQ ID NO: 12464 - protein, 80 aa, Synthetic construct; identical to SEQ ID NO: 749

SEQ ID NO: 12465 - protein, 80 aa, Synthetic construct; identical to SEQ ID NO: 410

SEQ ID NO: 12466 - protein, 80 aa, Synthetic construct; identical to SEQ ID NO: 515

SEQ ID NO: 12467 - protein, 80 aa, Synthetic construct; identical to SEQ ID NO: 603

SEQ ID NO: 12468 - protein, 80 aa, Synthetic construct; identical to SEQ ID NO: 412

SEQ ID NO: 12469 - protein, 80 aa, Synthetic construct; identical to SEQ ID NO: 413

SEQ ID NO: 12470 - protein, 80 aa, Synthetic construct; identical to SEQ ID NO: 604

SEQ ID NO: 12471 - protein, 80 aa, Synthetic construct; identical to SEQ ID NO: 414

SEQ ID NO: 12472 - protein, 80 aa, Synthetic construct; identical to SEQ ID NO: 719

SEQ ID NO: 12473 - protein, 80 aa, Synthetic construct; identical to SEQ ID NO: 415

SEQ ID NO: 12474 - protein, 80 aa, Synthetic construct; identical to SEQ ID NO: 760

SEQ ID NO: 12475 - protein, 80 aa, Synthetic construct; identical to SEQ ID NO: 590

SEQ ID NO: 12476 - protein, 80 aa, Synthetic construct; identical to SEQ ID NO: 635

SEQ ID NO: 12477 - protein, 80 aa, Synthetic construct; identical to SEQ ID NO: 530

SEQ ID NO: 12478 - protein, 80 aa, Synthetic construct; identical to SEQ ID NO: 416

SEQ ID NO: 12479 - protein, 80 aa, Synthetic construct; identical to SEQ ID NO: 539

SEQ ID NO: 12480 - protein, 80 aa, Synthetic construct; identical to SEQ ID NO: 624

SEQ ID NO: 12481 - protein, 80 aa, Synthetic construct; identical to SEQ ID NO: 686

SEQ ID NO: 12482 - protein, 80 aa, Synthetic construct; identical to SEQ ID NO: 488

SEQ ID NO: 12483 - protein, 80 aa, Synthetic construct; identical to SEQ ID NO: 667

SEQ ID NO: 12484 - protein, 80 aa, Synthetic construct; identical to SEQ ID NO: 417

SEQ ID NO: 12485 - protein, 80 aa, Synthetic construct; identical to SEQ ID NO: 418

SEQ ID NO: 12486 - protein, 80 aa, Synthetic construct; identical to SEQ ID NO: 419

SEQ ID NO: 12487 - protein, 80 aa, Synthetic construct; identical to SEQ ID NO: 420

SEQ ID NO: 12488 - protein, 80 aa, Synthetic construct; identical to SEQ ID NO: 542

SEQ ID NO: 12489 - protein, 80 aa, Synthetic construct; identical to SEQ ID NO: 712

SEQ ID NO: 12490 - protein, 80 aa, Synthetic construct; identical to SEQ ID NO: 421

SEQ ID NO: 12491 - protein, 80 aa, Synthetic construct; identical to SEQ ID NO: 422

SEQ ID NO: 12492 - protein, 80 aa, Synthetic construct; identical to SEQ ID NO: 424

SEQ ID NO: 12493 - protein, 80 aa, Synthetic construct; identical to SEQ ID NO: 425

SEQ ID NO: 12494 - protein, 80 aa, Synthetic construct; identical to SEQ ID NO: 426

SEQ ID NO: 12495 - protein, 80 aa, Synthetic construct; identical to SEQ ID NO: 713

SEQ ID NO: 12496 - protein, 80 aa, Synthetic construct; identical to SEQ ID NO: 427

SEQ ID NO: 12497 - protein, 80 aa, Synthetic construct; identical to SEQ ID NO: 606

SEQ ID NO: 12498 - protein, 80 aa, Synthetic construct; identical to SEQ ID NO: 428

SEQ ID NO: 12499 - protein, 80 aa, Synthetic construct; identical to SEQ ID NO: 429

SEQ ID NO: 12500 - protein, 80 aa, Synthetic construct; identical to SEQ ID NO: 430

SEQ ID NO: 12501 - protein, 80 aa, Synthetic construct; identical to SEQ ID NO: 607

SEQ ID NO: 12502 - protein, 80 aa, Synthetic construct; identical to SEQ ID NO: 619

SEQ ID NO: 12503 - protein, 80 aa, Synthetic construct; identical to SEQ ID NO: 432

SEQ ID NO: 12504 - protein, 80 aa, Synthetic construct; identical to SEQ ID NO: 490

SEQ ID NO: 12505 - protein, 80 aa, Synthetic construct; identical to SEQ ID NO: 746

SEQ ID NO: 12506 - protein, 80 aa, Synthetic construct; identical to SEQ ID NO: 753

SEQ ID NO: 12507 - protein, 80 aa, Synthetic construct; identical to SEQ ID NO: 724

SEQ ID NO: 12508 - protein, 80 aa, Synthetic construct; identical to SEQ ID NO: 433

SEQ ID NO: 12509 - protein, 80 aa, Synthetic construct; identical to SEQ ID NO: 434

SEQ ID NO: 12510 - protein, 80 aa, Synthetic construct; identical to SEQ ID NO: 435

SEQ ID NO: 12511 - protein, 80 aa, Synthetic construct; identical to SEQ ID NO: 436

SEQ ID NO: 12512 - protein, 80 aa, Synthetic construct; identical to SEQ ID NO: 587

SEQ ID NO: 12513 - protein, 80 aa, Synthetic construct; identical to SEQ ID NO: 437

SEQ ID NO: 12514 - protein, 80 aa, Synthetic construct; identical to SEQ ID NO: 647

SEQ ID NO: 12515 - protein, 80 aa, Synthetic construct; identical to SEQ ID NO: 508

SEQ ID NO: 12516 - protein, 80 aa, Synthetic construct; identical to SEQ ID NO: 438

SEQ ID NO: 12517 - protein, 80 aa, Synthetic construct; identical to SEQ ID NO: 509

SEQ ID NO: 12518 - protein, 80 aa, Synthetic construct; identical to SEQ ID NO: 525

SEQ ID NO: 12519 - protein, 80 aa, Synthetic construct; identical to SEQ ID NO: 439

SEQ ID NO: 12520 - protein, 80 aa, Synthetic construct; identical to SEQ ID NO: 702

SEQ ID NO: 12521 - protein, 80 aa, Synthetic construct; identical to SEQ ID NO: 571

SEQ ID NO: 12522 - protein, 80 aa, Synthetic construct; identical to SEQ ID NO: 681

SEQ ID NO: 12523 - protein, 80 aa, Synthetic construct; identical to SEQ ID NO: 518

SEQ ID NO: 12524 - protein, 80 aa, Synthetic construct; identical to SEQ ID NO: 440

SEQ ID NO: 12525 - protein, 80 aa, Synthetic construct; identical to SEQ ID NO: 442

SEQ ID NO: 12526 - protein, 80 aa, Synthetic construct; identical to SEQ ID NO: 443

SEQ ID NO: 12527 - protein, 80 aa, Synthetic construct; identical to SEQ ID NO: 531

SEQ ID NO: 12528 - protein, 80 aa, Synthetic construct; identical to SEQ ID NO: 444

SEQ ID NO: 12529 - protein, 80 aa, Synthetic construct; identical to SEQ ID NO: 445

SEQ ID NO: 12530 - protein, 80 aa, Synthetic construct; identical to SEQ ID NO: 532

SEQ ID NO: 12531 - protein, 80 aa, Synthetic construct; identical to SEQ ID NO: 446

SEQ ID NO: 12532 - protein, 80 aa, Synthetic construct; identical to SEQ ID NO: 501

SEQ ID NO: 12533 - protein, 80 aa, Synthetic construct; identical to SEQ ID NO: 593

SEQ ID NO: 12534 - protein, 80 aa, Synthetic construct; identical to SEQ ID NO: 447

SEQ ID NO: 12535 - protein, 80 aa, Synthetic construct; identical to SEQ ID NO: 448

SEQ ID NO: 12536 - protein, 80 aa, Synthetic construct; identical to SEQ ID NO: 449

SEQ ID NO: 12537 - protein, 80 aa, Synthetic construct; identical to SEQ ID NO: 516

SEQ ID NO: 12538 - protein, 80 aa, Synthetic construct; identical to SEQ ID NO: 579

SEQ ID NO: 12539 - protein, 80 aa, Synthetic construct; identical to SEQ ID NO: 506

SEQ ID NO: 12540 - protein, 80 aa, Synthetic construct; identical to SEQ ID NO: 450

SEQ ID NO: 12541 - protein, 80 aa, Synthetic construct; identical to SEQ ID NO: 451

SEQ ID NO: 12542 - protein, 80 aa, Synthetic construct; identical to SEQ ID NO: 452

SEQ ID NO: 12543 - protein, 80 aa, Synthetic construct; identical to SEQ ID NO: 454

SEQ ID NO: 12544 - protein, 80 aa, Synthetic construct; identical to SEQ ID NO: 727

SEQ ID NO: 12545 - protein, 80 aa, Synthetic construct; identical to SEQ ID NO: 455

SEQ ID NO: 12546 - protein, 80 aa, Synthetic construct; identical to SEQ ID NO: 456

SEQ ID NO: 12547 - protein, 80 aa, Synthetic construct; identical to SEQ ID NO: 743

SEQ ID NO: 12548 - protein, 80 aa, Synthetic construct; identical to SEQ ID NO: 687

SEQ ID NO: 12549 - protein, 80 aa, Synthetic construct; identical to SEQ ID NO: 552

SEQ ID NO: 12550 - protein, 80 aa, Synthetic construct; identical to SEQ ID NO: 458

SEQ ID NO: 12551 - protein, 80 aa, Synthetic construct; identical to SEQ ID NO: 459

SEQ ID NO: 12552 - protein, 80 aa, Synthetic construct; identical to SEQ ID NO: 540

SEQ ID NO: 12553 - protein, 80 aa, Synthetic construct; identical to SEQ ID NO: 460

SEQ ID NO: 12554 - protein, 80 aa, Synthetic construct; identical to SEQ ID NO: 461

SEQ ID NO: 12555 - protein, 80 aa, Synthetic construct; identical to SEQ ID NO: 462

SEQ ID NO: 12556 - protein, 80 aa, Synthetic construct; identical to SEQ ID NO: 463

SEQ ID NO: 12557 - protein, 80 aa, Synthetic construct; identical to SEQ ID NO: 561

SEQ ID NO: 12558 - protein, 80 aa, Synthetic construct; identical to SEQ ID NO: 464

SEQ ID NO: 12559 - protein, 80 aa, Synthetic construct; identical to SEQ ID NO: 500

SEQ ID NO: 12560 - protein, 80 aa, Synthetic construct; identical to SEQ ID NO: 465

SEQ ID NO: 12561 - protein, 80 aa, Synthetic construct; identical to SEQ ID NO: 466

SEQ ID NO: 12562 - protein, 80 aa, Synthetic construct; identical to SEQ ID NO: 767

SEQ ID NO: 12563 - protein, 80 aa, Synthetic construct; identical to SEQ ID NO: 467

SEQ ID NO: 12564 - protein, 80 aa, Synthetic construct; identical to SEQ ID NO: 468

SEQ ID NO: 12565 - protein, 80 aa, Synthetic construct; identical to SEQ ID NO: 469

SEQ ID NO: 12566 - protein, 80 aa, Synthetic construct; identical to SEQ ID NO: 609

SEQ ID NO: 12567 - protein, 80 aa, Synthetic construct; identical to SEQ ID NO: 470

SEQ ID NO: 12568 - protein, 80 aa, Synthetic construct
AELMLLSEIADPTRFFTDNLLSPEDWGLQNSTLYCPEQDVPFDGSSLDVGMDVSPSEPPWELLPIFPDLQVKSEPSSPCS

SEQ ID NO: 12569 - protein, 80 aa, Synthetic construct
AELMLLSEIADPTRFFTDNLLSPEDWGLQNSTLYSGEQDVPFDGSSLDVGMDVSPSEPPWELLPIFPDLQVKSEPSSPCS

SEQ ID NO: 12570 - protein, 80 aa, Synthetic construct
AELMLLSEIADPTRFFTDNLLSPEDWGLQNSTLYSGLDEVPFDGSSLDVGMDVSPSEPPWELLPIFPDLQVKSEPSSPCS

SEQ ID NO: 12571 - protein, 80 aa, Synthetic construct
AELMLLSEIADPTRFFTDNLLSPEDWGLQNSTLYSGLDEVAEEQTQLFRCMDVSPSEPPWELLPIFPDLQVKSEPSSPCS

SEQ ID NO: 12572 - protein, 80 aa, Synthetic construct
AELMLLSEIADPTRFFTDNLLSPEDWGLQNSTLYSGLDEVAEEQTQLFRCPEVSPSEPPWELLPIFPDLQVKSEPSSPCS

SEQ ID NO: 12573 - protein, 80 aa, Synthetic construct
AELMLLSEIADPTRFFTDNLLSPEDWGLQNSTLYSGLDEVAEEQTQLFRCPEQDPSEPPWELLPIFPDLQVKSEPSSPCS

SEQ ID NO: 12574 - protein, 80 aa, Synthetic construct
AELMLLSEIADPTRFFTDNLLSPEDWGLQNSTLYSGLDEVAEEQTQLFRCPEQDVPEPPWELLPIFPDLQVKSEPSSPCS

SEQ ID NO: 12575 - protein, 80 aa, Synthetic construct
AELMLLSEIADPTRFFTDNLLSPEDWGLQNSTLYSGLDEVAEEQTQLFRCPEQDVPFDPWELLPIFPDLQVKSEPSSPCS

SEQ ID NO: 12576 - protein, 80 aa, Synthetic construct
AELMLLSEIADPTRFFTDNLLSPEDWGLQNSTLYSGLDEVAEEQTQLFRCPEQDVPFDGSSLDVGMDVSPSESEPSSPCS

SEQ ID NO: 12577 - protein, 80 aa, Synthetic construct
AELMLLSEIADPTRFFTDNLLSPEDWGLQNSTLYSGLDEVAEEQTQLFRCPEQDVPFDGSSLDVGMDVSPSEPPPSSPCS

SEQ ID NO: 12578 - protein, 80 aa, Synthetic construct
AELMLLSEIADPTRFFTDNLLSPEDWGLQNSTLYSGLDEVAEEQTQLFRCPEQDVPFDGSSLDVGMDVSPSEPPWESPCS

SEQ ID NO: 12579 - protein, 80 aa, Synthetic construct
AELMLLSEIADPTRFFTDNLLSPEDWGLQNSTLYSGLDEVAEEQTQLFRCPEQDVPFDGSSLDVGMDVSPSEPPWELLCS

SEQ ID NO: 12580 - protein, 80 aa, Synthetic construct; identical to SEQ ID NO: 536

SEQ ID NO: 12581 - protein, 80 aa, Synthetic construct
SSFLDLGDLNESDFLNNAHFPEHLDHFTENMEDFSNDLFSSFFDDPVLDEKSPLLDMELDSPTPGIQAEHSYSLSGDSAP

SEQ ID NO: 12582 - protein, 80 aa, Synthetic construct
DAFLDLGDLNESDFLNNAHFPEHLDHFTENMEDFSNDLFSSFFDDPVLDEKSPLLDMELDSPTPGIQAEHSYSLSGDSAP

SEQ ID NO: 12583 - protein, 80 aa, Synthetic construct
DAVLDLGDLNESDFLNNAHFPEHLDHFTENMEDFSNDLFSSFFDDPVLDEKSPLLDMELDSPTPGIQAEHSYSLSGDSAP

SEQ ID NO: 12584 - protein, 80 aa, Synthetic construct
DAVLEPGDLNESDFLNNAHFPEHLDHFTENMEDFSNDLFSSFFDDPVLDEKSPLLDMELDSPTPGIQAEHSYSLSGDSAP

SEQ ID NO: 12585 - protein, 80 aa, Synthetic construct
DAVLEPFPLNESDFLNNAHFPEHLDHFTENMEDFSNDLFSSFFDDPVLDEKSPLLDMELDSPTPGIQAEHSYSLSGDSAP

SEQ ID NO: 12586 - protein, 80 aa, Synthetic construct
DAVLEPFPADESDFLNNAHFPEHLDHFTENMEDFSNDLFSSFFDDPVLDEKSPLLDMELDSPTPGIQAEHSYSLSGDSAP

SEQ ID NO: 12587 - protein, 80 aa, Synthetic construct
DAVLEPFPADRLDFLNNAHFPEHLDHFTENMEDFSNDLFSSFFDDPVLDEKSPLLDMELDSPTPGIQAEHSYSLSGDSAP

SEQ ID NO: 12588 - protein, 80 aa, Synthetic construct
DAVLEPFPADRLFPLNNAHFPEHLDHFTENMEDFSNDLFSSFFDDPVLDEKSPLLDMELDSPTPGIQAEHSYSLSGDSAP

SEQ ID NO: 12589 - protein, 80 aa, Synthetic construct
DAVLEPFPADRLFPGSNAHFPEHLDHFTENMEDFSNDLFSSFFDDPVLDEKSPLLDMELDSPTPGIQAEHSYSLSGDSAP

SEQ ID NO: 12590 - protein, 80 aa, Synthetic construct
DAVLEPFPADRLFPGSSFHFPEHLDHFTENMEDFSNDLFSSFFDDPVLDEKSPLLDMELDSPTPGIQAEHSYSLSGDSAP

SEQ ID NO: 12591 - protein, 80 aa, Synthetic construct
DAVLEPFPADRLFPGSSFLDPEHLDHFTENMEDFSNDLFSSFFDDPVLDEKSPLLDMELDSPTPGIQAEHSYSLSGDSAP

SEQ ID NO: 12592 - protein, 80 aa, Synthetic construct
DAVLEPFPADRLFPGSSFLDLGHLDHFTENMEDFSNDLFSSFFDDPVLDEKSPLLDMELDSPTPGIQAEHSYSLSGDSAP

SEQ ID NO: 12593 - protein, 80 aa, Synthetic construct
DAVLEPFPADRLFPGSSFLDLGDLDHFTENMEDFSNDLFSSFFDDPVLDEKSPLLDMELDSPTPGIQAEHSYSLSGDSAP

SEQ ID NO: 12594 - protein, 80 aa, Synthetic construct
DAVLEPFPADRLFPGSSFLDLGDLNEFTENMEDFSNDLFSSFFDDPVLDEKSPLLDMELDSPTPGIQAEHSYSLSGDSAP

SEQ ID NO: 12595 - protein, 80 aa, Synthetic construct
DAVLEPFPADRLFPGSSFLDLGDLNESDENMEDFSNDLFSSFFDDPVLDEKSPLLDMELDSPTPGIQAEHSYSLSGDSAP

SEQ ID NO: 12596 - protein, 80 aa, Synthetic construct
DAVLEPFPADRLFPGSSFLDLGDLNESDFLMEDFSNDLFSSFFDDPVLDEKSPLLDMELDSPTPGIQAEHSYSLSGDSAP

SEQ ID NO: 12597 - protein, 80 aa, Synthetic construct
DAVLEPFPADRLFPGSSFLDLGDLNESDFLNNDFSNDLFSSFFDDPVLDEKSPLLDMELDSPTPGIQAEHSYSLSGDSAP

SEQ ID NO: 12598 - protein, 80 aa, Synthetic construct
DAVLEPFPADRLFPGSSFLDLGDLNESDFLNNAHSNDLFSSFFDDPVLDEKSPLLDMELDSPTPGIQAEHSYSLSGDSAP

SEQ ID NO: 12599 - protein, 80 aa, Synthetic construct
DAVLEPFPADRLFPGSSFLDLGDLNESDFLNNAHFPDLFSSFFDDPVLDEKSPLLDMELDSPTPGIQAEHSYSLSGDSAP

SEQ ID NO: 12600 - protein, 80 aa, Synthetic construct
DAVLEPFPADRLFPGSSFLDLGDLNESDFLNNAHFPEHFSSFFDDPVLDEKSPLLDMELDSPTPGIQAEHSYSLSGDSAP

SEQ ID NO: 12601 - protein, 80 aa, Synthetic construct
DAVLEPFPADRLFPGSSFLDLGDLNESDFLNNAHFPEHLDSFFDDPVLDEKSPLLDMELDSPTPGIQAEHSYSLSGDSAP

SEQ ID NO: 12602 - protein, 80 aa, Synthetic construct
DAVLEPFPADRLFPGSSFLDLGDLNESDFLNNAHFPEHLDHFFDDPVLDEKSPLLDMELDSPTPGIQAEHSYSLSGDSAP

SEQ ID NO: 12603 - protein, 80 aa, Synthetic construct
DAVLEPFPADRLFPGSSFLDLGDLNESDFLNNAHFPEHLDHFTEDPVLDEKSPLLDMELDSPTPGIQAEHSYSLSGDSAP

SEQ ID NO: 12604 - protein, 80 aa, Synthetic construct
DAVLEPFPADRLFPGSSFLDLGDLNESDFLNNAHFPEHLDHFTENMVLDEKSPLLDMELDSPTPGIQAEHSYSLSGDSAP

SEQ ID NO: 12605 - protein, 80 aa, Synthetic construct
DAVLEPFPADRLFPGSSFLDLGDLNESDFLNNAHFPEHLDHFTENMEDDEKSPLLDMELDSPTPGIQAEHSYSLSGDSAP

SEQ ID NO: 12606 - protein, 80 aa, Synthetic construct
DAVLEPFPADRLFPGSSFLDLGDLNESDFLNNAHFPEHLDHFTENMEDFSKSPLLDMELDSPTPGIQAEHSYSLSGDSAP

SEQ ID NO: 12607 - protein, 80 aa, Synthetic construct
DAVLEPFPADRLFPGSSFLDLGDLNESDFLNNAHFPEHLDHFTENMEDFSNDPLLDMELDSPTPGIQAEHSYSLSGDSAP

SEQ ID NO: 12608 - protein, 80 aa, Synthetic construct
DAVLEPFPADRLFPGSSFLDLGDLNESDFLNNAHFPEHLDHFTENMEDFSNDLFLDMELDSPTPGIQAEHSYSLSGDSAP

SEQ ID NO: 12609 - protein, 80 aa, Synthetic construct
DAVLEPFPADRLFPGSSFLDLGDLNESDFLNNAHFPEHLDHFTENMEDFSNDLFSSMELDSPTPGIQAEHSYSLSGDSAP

SEQ ID NO: 12610 - protein, 80 aa, Synthetic construct
DAVLEPFPADRLFPGSSFLDLGDLNESDFLNNAHFPEHLDHFTENMEDFSNDLFSSFFLDSPTPGIQAEHSYSLSGDSAP

SEQ ID NO: 12611 - protein, 80 aa, Synthetic construct
DAVLEPFPADRLFPGSSFLDLGDLNESDFLNNAHFPEHLDHFTENMEDFSNDLFSSFFDDSPTPGIQAEHSYSLSGDSAP

SEQ ID NO: 12612 - protein, 80 aa, Synthetic construct
DAVLEPFPADRLFPGSSFLDLGDLNESDFLNNAHFPEHLDHFTENMEDFSNDLFSSFFDDPVTPGIQAEHSYSLSGDSAP

SEQ ID NO: 12613 - protein, 80 aa, Synthetic construct
DAVLEPFPADRLFPGSSFLDLGDLNESDFLNNAHFPEHLDHFTENMEDFSNDLFSSFFDDPVLDGIQAEHSYSLSGDSAP

SEQ ID NO: 12614 - protein, 80 aa, Synthetic construct
DAVLEPFPADRLFPGSSFLDLGDLNESDFLNNAHFPEHLDHFTENMEDFSNDLFSSFFDDPVLDEKQAEHSYSLSGDSAP

SEQ ID NO: 12615 - protein, 80 aa, Synthetic construct
DAVLEPFPADRLFPGSSFLDLGDLNESDFLNNAHFPEHLDHFTENMEDFSNDLFSSFFDDPVLDEKSPEHSYSLSGDSAP

SEQ ID NO: 12616 - protein, 80 aa, Synthetic construct
DAVLEPFPADRLFPGSSFLDLGDLNESDFLNNAHFPEHLDHFTENMEDFSNDLFSSFFDDPVLDEKSPLLSYSLSGDSAP

SEQ ID NO: 12617 - protein, 80 aa, Synthetic construct
DAVLEPFPADRLFPGSSFLDLGDLNESDFLNNAHFPEHLDHFTENMEDFSNDLFSSFFDDPVLDEKSPLLDMSLSGDSAP

SEQ ID NO: 12618 - protein, 80 aa, Synthetic construct
DAVLEPFPADRLFPGSSFLDLGDLNESDFLNNAHFPEHLDHFTENMEDFSNDLFSSFFDDPVLDEKSPLLDMELSGDSAP

SEQ ID NO: 12619 - protein, 80 aa, Synthetic construct
DAVLEPFPADRLFPGSSFLDLGDLNESDFLNNAHFPEHLDHFTENMEDFSNDLFSSFFDDPVLDEKSPLLDMELDSDSAP

SEQ ID NO: 12620 - protein, 80 aa, Synthetic construct
DAVLEPFPADRLFPGSSFLDLGDLNESDFLNNAHFPEHLDHFTENMEDFSNDLFSSFFDDPVLDEKSPLLDMELDSPTAP

SEQ ID NO: 12621 - protein, 80 aa, Synthetic construct; identical to SEQ ID NO: 756

SEQ ID NO: 12622 - protein, 80 aa, Synthetic construct
ELELDAGDQDLLAFLLEESGDLGTLSEVPSDWEVDDLLCSLLSPPASLNILSSSNPCLVHHDHTYSLPRETVSMDLESES

SEQ ID NO: 12623 - protein, 80 aa, Synthetic construct
ELELDAGDQDLLAFLLEESGDLGTAPDEAVDWEVDDLLCSLLSPPASLNILSSSNPCLVHHDHTYSLPRETVSMDLESES

SEQ ID NO: 12624 - protein, 80 aa, Synthetic construct
ELELDAGDQDLLAFLLEESGDLGTAPDEAVRAPLDWALPLSEVPSDWEVDDLLCSLLSPPHDHTYSLPRETVSMDLESES

SEQ ID NO: 12625 - protein, 80 aa, Synthetic construct
ELELDAGDQDLLAFLLEESGDLGTAPDEAVRAPLDWALPLSEVPSDWEVDDLLCSLLSPPASHTYSLPRETVSMDLESES

SEQ ID NO: 12626 - protein, 80 aa, Synthetic construct
ELELDAGDQDLLAFLLEESGDLGTAPDEAVRAPLDWALPLSEVPSDWEVDDLLCSLLSPPASLNYSLPRETVSMDLESES

SEQ ID NO: 12627 - protein, 80 aa, Synthetic construct
ELELDAGDQDLLAFLLEESGDLGTAPDEAVRAPLDWALPLSEVPSDWEVDDLLCSLLSPPASLNILLPRETVSMDLESES

SEQ ID NO: 12628 - protein, 80 aa, Synthetic construct
ELELDAGDQDLLAFLLEESGDLGTAPDEAVRAPLDWALPLSEVPSDWEVDDLLCSLLSPPASLNILSSRETVSMDLESES

SEQ ID NO: 12629 - protein, 80 aa, Synthetic construct
ELELDAGDQDLLAFLLEESGDLGTAPDEAVRAPLDWALPLSEVPSDWEVDDLLCSLLSPPASLNILSSSNTVSMDLESES

SEQ ID NO: 12630 - protein, 80 aa, Synthetic construct
ELELDAGDQDLLAFLLEESGDLGTAPDEAVRAPLDWALPLSEVPSDWEVDDLLCSLLSPPASLNILSSSNPCLVDLESES

SEQ ID NO: 12631 - protein, 80 aa, Synthetic construct
ELELDAGDQDLLAFLLEESGDLGTAPDEAVRAPLDWALPLSEVPSDWEVDDLLCSLLSPPASLNILSSSNPCLVHHESES

SEQ ID NO: 12632 - protein, 80 aa, Synthetic construct
ELELDAGDQDLLAFLLEESGDLGTAPDEAVRAPLDWALPLSEVPSDWEVDDLLCSLLSPPASLNILSSSNPCLVHHDHES

SEQ ID NO: 12633 - protein, 80 aa, Synthetic construct; identical to SEQ ID NO: 584

SEQ ID NO: 12634 - protein, 80 aa, Synthetic construct
PLLSRMGSLRAPVDEDRLSPLVAADSLLEHVREDFSGLLPEEFISLSPPHEALDYHFGLEEGEGIRDLFDCDFGDLTPLD

SEQ ID NO: 12635 - protein, 80 aa, Synthetic construct
LTLSRMGSLRAPVDEDRLSPLVAADSLLEHVREDFSGLLPEEFISLSPPHEALDYHFGLEEGEGIRDLFDCDFGDLTPLD

SEQ ID NO: 12636 - protein, 80 aa, Synthetic construct
LTTDRMGSLRAPVDEDRLSPLVAADSLLEHVREDFSGLLPEEFISLSPPHEALDYHFGLEEGEGIRDLFDCDFGDLTPLD

SEQ ID NO: 12637 - protein, 80 aa, Synthetic construct
LTTDPSGSLRAPVDEDRLSPLVAADSLLEHVREDFSGLLPEEFISLSPPHEALDYHFGLEEGEGIRDLFDCDFGDLTPLD

SEQ ID NO: 12638 - protein, 80 aa, Synthetic construct
LTTDPSQSLRAPVDEDRLSPLVAADSLLEHVREDFSGLLPEEFISLSPPHEALDYHFGLEEGEGIRDLFDCDFGDLTPLD

SEQ ID NO: 12639 - protein, 80 aa, Synthetic construct
LTTDPSQSLLAPVDEDRLSPLVAADSLLEHVREDFSGLLPEEFISLSPPHEALDYHFGLEEGEGIRDLFDCDFGDLTPLD

SEQ ID NO: 12640 - protein, 80 aa, Synthetic construct
LTTDPSQSLLSLVDEDRLSPLVAADSLLEHVREDFSGLLPEEFISLSPPHEALDYHFGLEEGEGIRDLFDCDFGDLTPLD

SEQ ID NO: 12641 - protein, 80 aa, Synthetic construct
LTTDPSQSLLSLEQEDRLSPLVAADSLLEHVREDFSGLLPEEFISLSPPHEALDYHFGLEEGEGIRDLFDCDFGDLTPLD

SEQ ID NO: 12642 - protein, 80 aa, Synthetic construct
LTTDPSQSLLSLEQEPRLSPLVAADSLLEHVREDFSGLLPEEFISLSPPHEALDYHFGLEEGEGIRDLFDCDFGDLTPLD

SEQ ID NO: 12643 - protein, 80 aa, Synthetic construct
LTTDPSQSLLSLEQEPLLSPLVAADSLLEHVREDFSGLLPEEFISLSPPHEALDYHFGLEEGEGIRDLFDCDFGDLTPLD

SEQ ID NO: 12644 - protein, 80 aa, Synthetic construct
LTTDPSQSLLSLEQEPLLSRLVAADSLLEHVREDFSGLLPEEFISLSPPHEALDYHFGLEEGEGIRDLFDCDFGDLTPLD

SEQ ID NO: 12645 - protein, 80 aa, Synthetic construct
LTTDPSQSLLSLEQEPLLSRMGAADSLLEHVREDFSGLLPEEFISLSPPHEALDYHFGLEEGEGIRDLFDCDFGDLTPLD

SEQ ID NO: 12646 - protein, 80 aa, Synthetic construct
LTTDPSQSLLSLEQEPLLSRMGSLDSLLEHVREDFSGLLPEEFISLSPPHEALDYHFGLEEGEGIRDLFDCDFGDLTPLD

SEQ ID NO: 12647 - protein, 80 aa, Synthetic construct
LTTDPSQSLLSLEQEPLLSRMGSLRALLEHVREDFSGLLPEEFISLSPPHEALDYHFGLEEGEGIRDLFDCDFGDLTPLD

SEQ ID NO: 12648 - protein, 80 aa, Synthetic construct
LTTDPSQSLLSLEQEPLLSRMGSLRAPVEHVREDFSGLLPEEFISLSPPHEALDYHFGLEEGEGIRDLFDCDFGDLTPLD

SEQ ID NO: 12649 - protein, 80 aa, Synthetic construct
LTTDPSQSLLSLEQEPLLSRMGSLRAPVDEVREDFSGLLPEEFISLSPPHEALDYHFGLEEGEGIRDLFDCDFGDLTPLD

SEQ ID NO: 12650 - protein, 80 aa, Synthetic construct
LTTDPSQSLLSLEQEPLLSRMGSLRAPVDEDREDFSGLLPEEFISLSPPHEALDYHFGLEEGEGIRDLFDCDFGDLTPLD

SEQ ID NO: 12651 - protein, 80 aa, Synthetic construct
LTTDPSQSLLSLEQEPLLSRMGSLRAPVDEDRLSFSGLLPEEFISLSPPHEALDYHFGLEEGEGIRDLFDCDFGDLTPLD

SEQ ID NO: 12652 - protein, 80 aa, Synthetic construct
LTTDPSQSLLSLEQEPLLSRMGSLRAPVDEDRLSPLGLLPEEFISLSPPHEALDYHFGLEEGEGIRDLFDCDFGDLTPLD

SEQ ID NO: 12653 - protein, 80 aa, Synthetic construct
LTTDPSQSLLSLEQEPLLSRMGSLRAPVDEDRLSPLVAADEEFISLSPPHEALDYHFGLEEGEGIRDLFDCDFGDLTPLD

SEQ ID NO: 12654 - protein, 80 aa, Synthetic construct
LTTDPSQSLLSLEQEPLLSRMGSLRAPVDEDRLSPLVAADSLFISLSPPHEALDYHFGLEEGEGIRDLFDCDFGDLTPLD

SEQ ID NO: 12655 - protein, 80 aa, Synthetic construct
LTTDPSQSLLSLEQEPLLSRMGSLRAPVDEDRLSPLVAADSLLESLSPPHEALDYHFGLEEGEGIRDLFDCDFGDLTPLD

SEQ ID NO: 12656 - protein, 80 aa, Synthetic construct
LTTDPSQSLLSLEQEPLLSRMGSLRAPVDEDRLSPLVAADSLLEHVSPPHEALDYHFGLEEGEGIRDLFDCDFGDLTPLD

SEQ ID NO: 12657 - protein, 80 aa, Synthetic construct
LTTDPSQSLLSLEQEPLLSRMGSLRAPVDEDRLSPLVAADSLLEHVREPHEALDYHFGLEEGEGIRDLFDCDFGDLTPLD

SEQ ID NO: 12658 - protein, 80 aa, Synthetic construct
LTTDPSQSLLSLEQEPLLSRMGSLRAPVDEDRLSPLVAADSLLEHVREDFSGLDYHFGLEEGEGIRDLFDCDFGDLTPLD

SEQ ID NO: 12659 - protein, 80 aa, Synthetic construct
LTTDPSQSLLSLEQEPLLSRMGSLRAPVDEDRLSPLVAADSLLEHVREDFSGLLYHFGLEEGEGIRDLFDCDFGDLTPLD

SEQ ID NO: 12660 - protein, 80 aa, Synthetic construct
LTTDPSQSLLSLEQEPLLSRMGSLRAPVDEDRLSPLVAADSLLEHVREDFSGLLPEFGLEEGEGIRDLFDCDFGDLTPLD

SEQ ID NO: 12661 - protein, 80 aa, Synthetic construct
LTTDPSQSLLSLEQEPLLSRMGSLRAPVDEDRLSPLVAADSLLEHVREDFSGLLPEEFLEEGEGIRDLFDCDFGDLTPLD

SEQ ID NO: 12662 - protein, 80 aa, Synthetic construct
LTTDPSQSLLSLEQEPLLSRMGSLRAPVDEDRLSPLVAADSLLEHVREDFSGLLPEEFISEGEGIRDLFDCDFGDLTPLD

SEQ ID NO: 12663 - protein, 80 aa, Synthetic construct
LTTDPSQSLLSLEQEPLLSRMGSLRAPVDEDRLSPLVAADSLLEHVREDFSGLLPEEFISLSEGIRDLFDCDFGDLTPLD

SEQ ID NO: 12664 - protein, 80 aa, Synthetic construct
LTTDPSQSLLSLEQEPLLSRMGSLRAPVDEDRLSPLVAADSLLEHVREDFSGLLPEEFISLSPPIRDLFDCDFGDLTPLD

SEQ ID NO: 12665 - protein, 80 aa, Synthetic construct
LTTDPSQSLLSLEQEPLLSRMGSLRAPVDEDRLSPLVAADSLLEHVREDFSGLLPEEFISLSPPHEDLFDCDFGDLTPLD

SEQ ID NO: 12666 - protein, 80 aa, Synthetic construct
LTTDPSQSLLSLEQEPLLSRMGSLRAPVDEDRLSPLVAADSLLEHVREDFSGLLPEEFISLSPPHEALFDCDFGDLTPLD

SEQ ID NO: 12667 - protein, 80 aa, Synthetic construct
LTTDPSQSLLSLEQEPLLSRMGSLRAPVDEDRLSPLVAADSLLEHVREDFSGLLPEEFISLSPPHEALDYCDFGDLTPLD

SEQ ID NO: 12668 - protein, 80 aa, Synthetic construct
LTTDPSQSLLSLEQEPLLSRMGSLRAPVDEDRLSPLVAADSLLEHVREDFSGLLPEEFISLSPPHEALDYHFFGDLTPLD

SEQ ID NO: 12669 - protein, 80 aa, Synthetic construct
LTTDPSQSLLSLEQEPLLSRMGSLRAPVDEDRLSPLVAADSLLEHVREDFSGLLPEEFISLSPPHEALDYHFGLDLTPLD

SEQ ID NO: 12670 - protein, 80 aa, Synthetic construct
LTTDPSQSLLSLEQEPLLSRMGSLRAPVDEDRLSPLVAADSLLEHVREDFSGLLPEEFISLSPPHEALDYHFGLEETPLD

SEQ ID NO: 12671 - protein, 80 aa, Synthetic construct
LTTDPSQSLLSLEQEPLLSRMGSLRAPVDEDRLSPLVAADSLLEHVREDFSGLLPEEFISLSPPHEALDYHFGLEEGELD

SEQ ID NO: 12672 - protein, 80 aa, Synthetic construct; identical to SEQ ID NO: 101

SEQ ID NO: 12673 - protein, 80 aa, Synthetic construct
MEAPPPPSLVPLEATDSLLELPHPLLQQTEDQFLSPTLACSSPLISFSPSLDQDDYLWGLEAGEGISDLFDSYDLGDLLI

SEQ ID NO: 12674 - protein, 80 aa, Synthetic construct
MEPTASSVPAPAPTPQQAPPPPSLVPLEATDSLLELPHPLLQQTEDQFLSPTLACSSPLISFGEGISDLFDSYDLGDLLI

SEQ ID NO: 12675 - protein, 80 aa, Synthetic construct
MEPTASSVPAPAPTPQQAPPPPSLVPLEATDSLLELPHPLLQQTEDQFLSPTLACSSPLISFSPGISDLFDSYDLGDLLI

SEQ ID NO: 12676 - protein, 80 aa, Synthetic construct
MEPTASSVPAPAPTPQQAPPPPSLVPLEATDSLLELPHPLLQQTEDQFLSPTLACSSPLISFSPSLSDLFDSYDLGDLLI

SEQ ID NO: 12677 - protein, 80 aa, Synthetic construct
MEPTASSVPAPAPTPQQAPPPPSLVPLEATDSLLELPHPLLQQTEDQFLSPTLACSSPLISFSPSLDQDDYLYDLGDLLI

SEQ ID NO: 12678 - protein, 80 aa, Synthetic construct
MEPTASSVPAPAPTPQQAPPPPSLVPLEATDSLLELPHPLLQQTEDQFLSPTLACSSPLISFSPSLDQDDYLWGLGDLLI

SEQ ID NO: 12679 - protein, 80 aa, Synthetic construct
MEPTASSVPAPAPTPQQAPPPPSLVPLEATDSLLELPHPLLQQTEDQFLSPTLACSSPLISFSPSLDQDDYLWGLEDLLI

SEQ ID NO: 12680 - protein, 80 aa, Synthetic construct
SGHSDCSVSMGNLSPLASPANLLQQTEDQIPSNLEGPFVNLLPPLLQEDYLLSLGEEEGISDLFDAYDLEKLPLVEDFMC

SEQ ID NO: 12681 - protein, 80 aa, Synthetic construct
GNHSDCSVSMGNLSPLASPANLLQQTEDQIPSNLEGPFVNLLPPLLQEDYLLSLGEEEGISDLFDAYDLEKLPLVEDFMC

SEQ ID NO: 12682 - protein, 80 aa, Synthetic construct
GNIPDCSVSMGNLSPLASPANLLQQTEDQIPSNLEGPFVNLLPPLLQEDYLLSLGEEEGISDLFDAYDLEKLPLVEDFMC

SEQ ID NO: 12683 - protein, 80 aa, Synthetic construct
GNIPKPSVSMGNLSPLASPANLLQQTEDQIPSNLEGPFVNLLPPLLQEDYLLSLGEEEGISDLFDAYDLEKLPLVEDFMC

SEQ ID NO: 12684 - protein, 80 aa, Synthetic construct
GNIPKPASSMGNLSPLASPANLLQQTEDQIPSNLEGPFVNLLPPLLQEDYLLSLGEEEGISDLFDAYDLEKLPLVEDFMC

SEQ ID NO: 12685 - protein, 80 aa, Synthetic construct
GNIPKPASKDGNLSPLASPANLLQQTEDQIPSNLEGPFVNLLPPLLQEDYLLSLGEEEGISDLFDAYDLEKLPLVEDFMC

SEQ ID NO: 12686 - protein, 80 aa, Synthetic construct
GNIPKPASKDLALSPLASPANLLQQTEDQIPSNLEGPFVNLLPPLLQEDYLLSLGEEEGISDLFDAYDLEKLPLVEDFMC

SEQ ID NO: 12687 - protein, 80 aa, Synthetic construct
GNIPKPASKDLASTPLASPANLLQQTEDQIPSNLEGPFVNLLPPLLQEDYLLSLGEEEGISDLFDAYDLEKLPLVEDFMC

SEQ ID NO: 12688 - protein, 80 aa, Synthetic construct
GNIPKPASKDLASTNSASPANLLQQTEDQIPSNLEGPFVNLLPPLLQEDYLLSLGEEEGISDLFDAYDLEKLPLVEDFMC

SEQ ID NO: 12689 - protein, 80 aa, Synthetic construct
GNIPKPASKDLASTNSGHPANLLQQTEDQIPSNLEGPFVNLLPPLLQEDYLLSLGEEEGISDLFDAYDLEKLPLVEDFMC

SEQ ID NO: 12690 - protein, 80 aa, Synthetic construct
GNIPKPASKDLASTNSGHSDNLLQQTEDQIPSNLEGPFVNLLPPLLQEDYLLSLGEEEGISDLFDAYDLEKLPLVEDFMC

SEQ ID NO: 12691 - protein, 80 aa, Synthetic construct
GNIPKPASKDLASTNSGHSDCSLQQTEDQIPSNLEGPFVNLLPPLLQEDYLLSLGEEEGISDLFDAYDLEKLPLVEDFMC

SEQ ID NO: 12692 - protein, 80 aa, Synthetic construct
GNIPKPASKDLASTNSGHSDCSVSQTEDQIPSNLEGPFVNLLPPLLQEDYLLSLGEEEGISDLFDAYDLEKLPLVEDFMC

SEQ ID NO: 12693 - protein, 80 aa, Synthetic construct
GNIPKPASKDLASTNSGHSDCSVSMGEDQIPSNLEGPFVNLLPPLLQEDYLLSLGEEEGISDLFDAYDLEKLPLVEDFMC

SEQ ID NO: 12694 - protein, 80 aa, Synthetic construct
GNIPKPASKDLASTNSGHSDCSVSMGNLQIPSNLEGPFVNLLPPLLQEDYLLSLGEEEGISDLFDAYDLEKLPLVEDFMC

SEQ ID NO: 12695 - protein, 80 aa, Synthetic construct
GNIPKPASKDLASTNSGHSDCSVSMGNLSPPSNLEGPFVNLLPPLLQEDYLLSLGEEEGISDLFDAYDLEKLPLVEDFMC

SEQ ID NO: 12696 - protein, 80 aa, Synthetic construct
GNIPKPASKDLASTNSGHSDCSVSMGNLSPLANLEGPFVNLLPPLLQEDYLLSLGEEEGISDLFDAYDLEKLPLVEDFMC

SEQ ID NO: 12697 - protein, 80 aa, Synthetic construct
GNIPKPASKDLASTNSGHSDCSVSMGNLSPLASPEGPFVNLLPPLLQEDYLLSLGEEEGISDLFDAYDLEKLPLVEDFMC

SEQ ID NO: 12698 - protein, 80 aa, Synthetic construct
GNIPKPASKDLASTNSGHSDCSVSMGNLSPLASPANPFVNLLPPLLQEDYLLSLGEEEGISDLFDAYDLEKLPLVEDFMC

SEQ ID NO: 12699 - protein, 80 aa, Synthetic construct
GNIPKPASKDLASTNSGHSDCSVSMGNLSPLASPANLLVNLLPPLLQEDYLLSLGEEEGISDLFDAYDLEKLPLVEDFMC

SEQ ID NO: 12700 - protein, 80 aa, Synthetic construct
GNIPKPASKDLASTNSGHSDCSVSMGNLSPLASPANLLQQLLPPLLQEDYLLSLGEEEGISDLFDAYDLEKLPLVEDFMC

SEQ ID NO: 12701 - protein, 80 aa, Synthetic construct
GNIPKPASKDLASTNSGHSDCSVSMGNLSPLASPANLLQQTEPPLLQEDYLLSLGEEEGISDLFDAYDLEKLPLVEDFMC

SEQ ID NO: 12702 - protein, 80 aa, Synthetic construct
GNIPKPASKDLASTNSGHSDCSVSMGNLSPLASPANLLQQTEDQLLQEDYLLSLGEEEGISDLFDAYDLEKLPLVEDFMC

SEQ ID NO: 12703 - protein, 80 aa, Synthetic construct
GNIPKPASKDLASTNSGHSDCSVSMGNLSPLASPANLLQQTEDQIPQEDYLLSLGEEEGISDLFDAYDLEKLPLVEDFMC

SEQ ID NO: 12704 - protein, 80 aa, Synthetic construct
GNIPKPASKDLASTNSGHSDCSVSMGNLSPLASPANLLQQTEDQIPSNDYLLSLGEEEGISDLFDAYDLEKLPLVEDFMC

SEQ ID NO: 12705 - protein, 80 aa, Synthetic construct
GNIPKPASKDLASTNSGHSDCSVSMGNLSPLASPANLLQQTEDQIPSNLEGPSLGEEEGISDLFDAYDLEKLPLVEDFMC

SEQ ID NO: 12706 - protein, 80 aa, Synthetic construct
GNIPKPASKDLASTNSGHSDCSVSMGNLSPLASPANLLQQTEDQIPSNLEGPFVGEEEGISDLFDAYDLEKLPLVEDFMC

SEQ ID NO: 12707 - protein, 80 aa, Synthetic construct
GNIPKPASKDLASTNSGHSDCSVSMGNLSPLASPANLLQQTEDQIPSNLEGPFVNLEEGISDLFDAYDLEKLPLVEDFMC

SEQ ID NO: 12708 - protein, 80 aa, Synthetic construct
GNIPKPASKDLASTNSGHSDCSVSMGNLSPLASPANLLQQTEDQIPSNLEGPFVNLLPGISDLFDAYDLEKLPLVEDFMC

SEQ ID NO: 12709 - protein, 80 aa, Synthetic construct
GNIPKPASKDLASTNSGHSDCSVSMGNLSPLASPANLLQQTEDQIPSNLEGPFVNLLPPLSDLFDAYDLEKLPLVEDFMC

SEQ ID NO: 12710 - protein, 80 aa, Synthetic construct
GNIPKPASKDLASTNSGHSDCSVSMGNLSPLASPANLLQQTEDQIPSNLEGPFVNLLPPLLQLFDAYDLEKLPLVEDFMC

SEQ ID NO: 12711 - protein, 80 aa, Synthetic construct
GNIPKPASKDLASTNSGHSDCSVSMGNLSPLASPANLLQQTEDQIPSNLEGPFVNLLPPLLQEDDAYDLEKLPLVEDFMC

SEQ ID NO: 12712 - protein, 80 aa, Synthetic construct
GNIPKPASKDLASTNSGHSDCSVSMGNLSPLASPANLLQQTEDQIPSNLEGPFVNLLPPLLQEDYLYDLEKLPLVEDFMC

SEQ ID NO: 12713 - protein, 80 aa, Synthetic construct
GNIPKPASKDLASTNSGHSDCSVSMGNLSPLASPANLLQQTEDQIPSNLEGPFVNLLPPLLQEDYLLSLEKLPLVEDFMC

SEQ ID NO: 12714 - protein, 80 aa, Synthetic construct
GNIPKPASKDLASTNSGHSDCSVSMGNLSPLASPANLLQQTEDQIPSNLEGPFVNLLPPLLQEDYLLSLGKLPLVEDFMC

SEQ ID NO: 12715 - protein, 80 aa, Synthetic construct
GNIPKPASKDLASTNSGHSDCSVSMGNLSPLASPANLLQQTEDQIPSNLEGPFVNLLPPLLQEDYLLSLGEEPLVEDFMC

SEQ ID NO: 12716 - protein, 80 aa, Synthetic construct
GNIPKPASKDLASTNSGHSDCSVSMGNLSPLASPANLLQQTEDQIPSNLEGPFVNLLPPLLQEDYLLSLGEEEGVEDFMC

SEQ ID NO: 12717 - protein, 80 aa, Synthetic construct
GNIPKPASKDLASTNSGHSDCSVSMGNLSPLASPANLLQQTEDQIPSNLEGPFVNLLPPLLQEDYLLSLGEEEGISDFMC

SEQ ID NO: 12718 - protein, 80 aa, Synthetic construct
GNIPKPASKDLASTNSGHSDCSVSMGNLSPLASPANLLQQTEDQIPSNLEGPFVNLLPPLLQEDYLLSLGEEEGISDLMC

SEQ ID NO: 12719 - protein, 80 aa, Synthetic construct
GNIPKPASKDLASTNSGHSDCSVSMGNLSPLASPANLLQQTEDQIPSNLEGPFVNLLPPLLQEDYLLSLGEEEGISDLFD

SEQ ID NO: 12720 - protein, 80 aa, Synthetic construct
TSFEPIKADPTGVLELPKELSEIFDPTRECMSSELLEELMSSEVFAPLLRLSPPPGDHDYIYNLDESEGVCDLFDVPVLN

SEQ ID NO: 12721 - protein, 80 aa, Synthetic construct
SSFEPIKADPTGVLELPKELSEIFDPTRECMSSELLEELMSSEVFAPLLRLSPPPGDHDYIYNLDESEGVCDLFDVPVLN

SEQ ID NO: 12722 - protein, 80 aa, Synthetic construct
SSNSPIKADPTGVLELPKELSEIFDPTRECMSSELLEELMSSEVFAPLLRLSPPPGDHDYIYNLDESEGVCDLFDVPVLN

SEQ ID NO: 12723 - protein, 80 aa, Synthetic construct
SSNSNSKADPTGVLELPKELSEIFDPTRECMSSELLEELMSSEVFAPLLRLSPPPGDHDYIYNLDESEGVCDLFDVPVLN

SEQ ID NO: 12724 - protein, 80 aa, Synthetic construct
SSNSNSSSDPTGVLELPKELSEIFDPTRECMSSELLEELMSSEVFAPLLRLSPPPGDHDYIYNLDESEGVCDLFDVPVLN

SEQ ID NO: 12725 - protein, 80 aa, Synthetic construct
SSNSNSSSSSTGVLELPKELSEIFDPTRECMSSELLEELMSSEVFAPLLRLSPPPGDHDYIYNLDESEGVCDLFDVPVLN

SEQ ID NO: 12726 - protein, 80 aa, Synthetic construct
SSNSNSSSSSGPVLELPKELSEIFDPTRECMSSELLEELMSSEVFAPLLRLSPPPGDHDYIYNLDESEGVCDLFDVPVLN

SEQ ID NO: 12727 - protein, 80 aa, Synthetic construct
SSNSNSSSSSGPNPELPKELSEIFDPTRECMSSELLEELMSSEVFAPLLRLSPPPGDHDYIYNLDESEGVCDLFDVPVLN

SEQ ID NO: 12728 - protein, 80 aa, Synthetic construct
SSNSNSSSSSGPNPSTPKELSEIFDPTRECMSSELLEELMSSEVFAPLLRLSPPPGDHDYIYNLDESEGVCDLFDVPVLN

SEQ ID NO: 12729 - protein, 80 aa, Synthetic construct
SSNSNSSSSSGPNPSTSFELSEIFDPTRECMSSELLEELMSSEVFAPLLRLSPPPGDHDYIYNLDESEGVCDLFDVPVLN

SEQ ID NO: 12730 - protein, 80 aa, Synthetic construct
SSNSNSSSSSGPNPSTSFEPSEIFDPTRECMSSELLEELMSSEVFAPLLRLSPPPGDHDYIYNLDESEGVCDLFDVPVLN

SEQ ID NO: 12731 - protein, 80 aa, Synthetic construct
SSNSNSSSSSGPNPSTSFEPIKIFDPTRECMSSELLEELMSSEVFAPLLRLSPPPGDHDYIYNLDESEGVCDLFDVPVLN

SEQ ID NO: 12732 - protein, 80 aa, Synthetic construct
SSNSNSSSSSGPNPSTSFEPIKADDPTRECMSSELLEELMSSEVFAPLLRLSPPPGDHDYIYNLDESEGVCDLFDVPVLN

SEQ ID NO: 12733 - protein, 80 aa, Synthetic construct
SSNSNSSSSSGPNPSTSFEPIKADPTTRECMSSELLEELMSSEVFAPLLRLSPPPGDHDYIYNLDESEGVCDLFDVPVLN

SEQ ID NO: 12734 - protein, 80 aa, Synthetic construct
SSNSNSSSSSGPNPSTSFEPIKADPTGVECMSSELLEELMSSEVFAPLLRLSPPPGDHDYIYNLDESEGVCDLFDVPVLN

SEQ ID NO: 12735 - protein, 80 aa, Synthetic construct
SSNSNSSSSSGPNPSTSFEPIKADPTGVLEMSSELLEELMSSEVFAPLLRLSPPPGDHDYIYNLDESEGVCDLFDVPVLN

SEQ ID NO: 12736 - protein, 80 aa, Synthetic construct
SSNSNSSSSSGPNPSTSFEPIKADPTGVLELPSELLEELMSSEVFAPLLRLSPPPGDHDYIYNLDESEGVCDLFDVPVLN

SEQ ID NO: 12737 - protein, 80 aa, Synthetic construct
SSNSNSSSSSGPNPSTSFEPIKADPTGVLELPKELLEELMSSEVFAPLLRLSPPPGDHDYIYNLDESEGVCDLFDVPVLN

SEQ ID NO: 12738 - protein, 80 aa, Synthetic construct
SSNSNSSSSSGPNPSTSFEPIKADPTGVLELPKELSEELMSSEVFAPLLRLSPPPGDHDYIYNLDESEGVCDLFDVPVLN

SEQ ID NO: 12739 - protein, 80 aa, Synthetic construct
SSNSNSSSSSGPNPSTSFEPIKADPTGVLELPKELSEILMSSEVFAPLLRLSPPPGDHDYIYNLDESEGVCDLFDVPVLN

SEQ ID NO: 12740 - protein, 80 aa, Synthetic construct
SSNSNSSSSSGPNPSTSFEPIKADPTGVLELPKELSEIFDSSEVFAPLLRLSPPPGDHDYIYNLDESEGVCDLFDVPVLN

SEQ ID NO: 12741 - protein, 80 aa, Synthetic construct
SSNSNSSSSSGPNPSTSFEPIKADPTGVLELPKELSEIFDPTEVFAPLLRLSPPPGDHDYIYNLDESEGVCDLFDVPVLN

SEQ ID NO: 12742 - protein, 80 aa, Synthetic construct
SSNSNSSSSSGPNPSTSFEPIKADPTGVLELPKELSEIFDPTREFAPLLRLSPPPGDHDYIYNLDESEGVCDLFDVPVLN

SEQ ID NO: 12743 - protein, 80 aa, Synthetic construct
SSNSNSSSSSGPNPSTSFEPIKADPTGVLELPKELSEIFDPTRECMPLLRLSPPPGDHDYIYNLDESEGVCDLFDVPVLN

SEQ ID NO: 12744 - protein, 80 aa, Synthetic construct
SSNSNSSSSSGPNPSTSFEPIKADPTGVLELPKELSEIFDPTRECMSSLRLSPPPGDHDYIYNLDESEGVCDLFDVPVLN

SEQ ID NO: 12745 - protein, 80 aa, Synthetic construct
SSNSNSSSSSGPNPSTSFEPIKADPTGVLELPKELSEIFDPTRECMSSELLSPPPGDHDYIYNLDESEGVCDLFDVPVLN

SEQ ID NO: 12746 - protein, 80 aa, Synthetic construct
SSNSNSSSSSGPNPSTSFEPIKADPTGVLELPKELSEIFDPTRECMSSELLEPPPGDHDYIYNLDESEGVCDLFDVPVLN

SEQ ID NO: 12747 - protein, 80 aa, Synthetic construct
SSNSNSSSSSGPNPSTSFEPIKADPTGVLELPKELSEIFDPTRECMSSELLEELPGDHDYIYNLDESEGVCDLFDVPVLN

SEQ ID NO: 12748 - protein, 80 aa, Synthetic construct
SSNSNSSSSSGPNPSTSFEPIKADPTGVLELPKELSEIFDPTRECMSSELLEELMSDHDYIYNLDESEGVCDLFDVPVLN

SEQ ID NO: 12749 - protein, 80 aa, Synthetic construct
SSNSNSSSSSGPNPSTSFEPIKADPTGVLELPKELSEIFDPTRECMSSELLEELMSSEDYIYNLDESEGVCDLFDVPVLN

SEQ ID NO: 12750 - protein, 80 aa, Synthetic construct
SSNSNSSSSSGPNPSTSFEPIKADPTGVLELPKELSEIFDPTRECMSSELLEELMSSEVFIYNLDESEGVCDLFDVPVLN

SEQ ID NO: 12751 - protein, 80 aa, Synthetic construct
SSNSNSSSSSGPNPSTSFEPIKADPTGVLELPKELSEIFDPTRECMSSELLEELMSSEVFAPNLDESEGVCDLFDVPVLN

SEQ ID NO: 12752 - protein, 80 aa, Synthetic construct
SSNSNSSSSSGPNPSTSFEPIKADPTGVLELPKELSEIFDPTRECMSSELLEELMSSEVFAPLLDESEGVCDLFDVPVLN

SEQ ID NO: 12753 - protein, 80 aa, Synthetic construct
SSNSNSSSSSGPNPSTSFEPIKADPTGVLELPKELSEIFDPTRECMSSELLEELMSSEVFAPLLRLSEGVCDLFDVPVLN

SEQ ID NO: 12754 - protein, 80 aa, Synthetic construct
SSNSNSSSSSGPNPSTSFEPIKADPTGVLELPKELSEIFDPTRECMSSELLEELMSSEVFAPLLRLSPGVCDLFDVPVLN

SEQ ID NO: 12755 - protein, 80 aa, Synthetic construct
SSNSNSSSSSGPNPSTSFEPIKADPTGVLELPKELSEIFDPTRECMSSELLEELMSSEVFAPLLRLSPPPCDLFDVPVLN

SEQ ID NO: 12756 - protein, 80 aa, Synthetic construct
SSNSNSSSSSGPNPSTSFEPIKADPTGVLELPKELSEIFDPTRECMSSELLEELMSSEVFAPLLRLSPPPGDLFDVPVLN

SEQ ID NO: 12757 - protein, 80 aa, Synthetic construct
SSNSNSSSSSGPNPSTSFEPIKADPTGVLELPKELSEIFDPTRECMSSELLEELMSSEVFAPLLRLSPPPGDHDDVPVLN

SEQ ID NO: 12758 - protein, 80 aa, Synthetic construct
SSNSNSSSSSGPNPSTSFEPIKADPTGVLELPKELSEIFDPTRECMSSELLEELMSSEVFAPLLRLSPPPGDHDYIPVLN

SEQ ID NO: 12759 - protein, 80 aa, Synthetic construct
SSNSNSSSSSGPNPSTSFEPIKADPTGVLELPKELSEIFDPTRECMSSELLEELMSSEVFAPLLRLSPPPGDHDYIYNLN

SEQ ID NO: 12760 - protein, 80 aa, Synthetic construct
SSNSNSSSSSGPNPSTSFEPIKADPTGVLELPKELSEIFDPTRECMSSELLEELMSSEVFAPLLRLSPPPGDHDYIYNLD

SEQ ID NO: 12761 - protein, 80 aa, Synthetic construct
SMATQNLPEQHVSERSQALQQTSATDISSAGSISGDIIDELMSSDVFPLLRLSPTPADDYNFNLDDNEGVCDLFDVQILN

SEQ ID NO: 12762 - protein, 80 aa, Synthetic construct
QPATQNLPEQHVSERSQALQQTSATDISSAGSISGDIIDELMSSDVFPLLRLSPTPADDYNFNLDDNEGVCDLFDVQILN

SEQ ID NO: 12763 - protein, 80 aa, Synthetic construct
QPSSQNLPEQHVSERSQALQQTSATDISSAGSISGDIIDELMSSDVFPLLRLSPTPADDYNFNLDDNEGVCDLFDVQILN

SEQ ID NO: 12764 - protein, 80 aa, Synthetic construct
QPSSQSLPEQHVSERSQALQQTSATDISSAGSISGDIIDELMSSDVFPLLRLSPTPADDYNFNLDDNEGVCDLFDVQILN

SEQ ID NO: 12765 - protein, 80 aa, Synthetic construct
QPSSQSLTEQHVSERSQALQQTSATDISSAGSISGDIIDELMSSDVFPLLRLSPTPADDYNFNLDDNEGVCDLFDVQILN

SEQ ID NO: 12766 - protein, 80 aa, Synthetic construct
QPSSQSLTPVHVSERSQALQQTSATDISSAGSISGDIIDELMSSDVFPLLRLSPTPADDYNFNLDDNEGVCDLFDVQILN

SEQ ID NO: 12767 - protein, 80 aa, Synthetic construct
QPSSQSLTPVTPSERSQALQQTSATDISSAGSISGDIIDELMSSDVFPLLRLSPTPADDYNFNLDDNEGVCDLFDVQILN

SEQ ID NO: 12768 - protein, 80 aa, Synthetic construct
QPSSQSLTPVTPQKRSQALQQTSATDISSAGSISGDIIDELMSSDVFPLLRLSPTPADDYNFNLDDNEGVCDLFDVQILN

SEQ ID NO: 12769 - protein, 80 aa, Synthetic construct
QPSSQSLTPVTPQKSSQALQQTSATDISSAGSISGDIIDELMSSDVFPLLRLSPTPADDYNFNLDDNEGVCDLFDVQILN

SEQ ID NO: 12770 - protein, 80 aa, Synthetic construct
QPSSQSLTPVTPQKSSMALQQTSATDISSAGSISGDIIDELMSSDVFPLLRLSPTPADDYNFNLDDNEGVCDLFDVQILN

SEQ ID NO: 12771 - protein, 80 aa, Synthetic construct
QPSSQSLTPVTPQKSSMATQQTSATDISSAGSISGDIIDELMSSDVFPLLRLSPTPADDYNFNLDDNEGVCDLFDVQILN

SEQ ID NO: 12772 - protein, 80 aa, Synthetic construct
QPSSQSLTPVTPQKSSMATQNLSATDISSAGSISGDIIDELMSSDVFPLLRLSPTPADDYNFNLDDNEGVCDLFDVQILN

SEQ ID NO: 12773 - protein, 80 aa, Synthetic construct
QPSSQSLTPVTPQKSSMATQNLPETDISSAGSISGDIIDELMSSDVFPLLRLSPTPADDYNFNLDDNEGVCDLFDVQILN

SEQ ID NO: 12774 - protein, 80 aa, Synthetic construct
QPSSQSLTPVTPQKSSMATQNLPEQHISSAGSISGDIIDELMSSDVFPLLRLSPTPADDYNFNLDDNEGVCDLFDVQILN

SEQ ID NO: 12775 - protein, 80 aa, Synthetic construct
QPSSQSLTPVTPQKSSMATQNLPEQHVSSAGSISGDIIDELMSSDVFPLLRLSPTPADDYNFNLDDNEGVCDLFDVQILN

SEQ ID NO: 12776 - protein, 80 aa, Synthetic construct
QPSSQSLTPVTPQKSSMATQNLPEQHVSERGSISGDIIDELMSSDVFPLLRLSPTPADDYNFNLDDNEGVCDLFDVQILN

SEQ ID NO: 12777 - protein, 80 aa, Synthetic construct
QPSSQSLTPVTPQKSSMATQNLPEQHVSERSQISGDIIDELMSSDVFPLLRLSPTPADDYNFNLDDNEGVCDLFDVQILN

SEQ ID NO: 12778 - protein, 80 aa, Synthetic construct
QPSSQSLTPVTPQKSSMATQNLPEQHVSERSQALGDIIDELMSSDVFPLLRLSPTPADDYNFNLDDNEGVCDLFDVQILN

SEQ ID NO: 12779 - protein, 80 aa, Synthetic construct
QPSSQSLTPVTPQKSSMATQNLPEQHVSERSQALQQIIDELMSSDVFPLLRLSPTPADDYNFNLDDNEGVCDLFDVQILN

SEQ ID NO: 12780 - protein, 80 aa, Synthetic construct
QPSSQSLTPVTPQKSSMATQNLPEQHVSERSQALQQTSDELMSSDVFPLLRLSPTPADDYNFNLDDNEGVCDLFDVQILN

SEQ ID NO: 12781 - protein, 80 aa, Synthetic construct
QPSSQSLTPVTPQKSSMATQNLPEQHVSERSQALQQTSATLMSSDVFPLLRLSPTPADDYNFNLDDNEGVCDLFDVQILN

SEQ ID NO: 12782 - protein, 80 aa, Synthetic construct
QPSSQSLTPVTPQKSSMATQNLPEQHVSERSQALQQTSATDISSAGSISGDIIDELMSDYNFNLDDNEGVCDLFDVQILN

SEQ ID NO: 12783 - protein, 80 aa, Synthetic construct
QPSSQSLTPVTPQKSSMATQNLPEQHVSERSQALQQTSATDISSAGSISGDIIDELMSSDVFNLDDNEGVCDLFDVQILN

SEQ ID NO: 12784 - protein, 80 aa, Synthetic construct
QPSSQSLTPVTPQKSSMATQNLPEQHVSERSQALQQTSATDISSAGSISGDIIDELMSSDVFPLDDNEGVCDLFDVQILN

SEQ ID NO: 12785 - protein, 80 aa, Synthetic construct
QPSSQSLTPVTPQKSSMATQNLPEQHVSERSQALQQTSATDISSAGSISGDIIDELMSSDVFPLLRLSGVCDLFDVQILN

SEQ ID NO: 12786 - protein, 80 aa, Synthetic construct
QPSSQSLTPVTPQKSSMATQNLPEQHVSERSQALQQTSATDISSAGSISGDIIDELMSSDVFPLLRLSPTCDLFDVQILN

SEQ ID NO: 12787 - protein, 80 aa, Synthetic construct
ESSESMKAFISKVSTHKGAELPREPSEAPITFDADSFLNYFDKILGPRPNESDSDDLDDEDFECLDSDDDLDFETHEPGE

SEQ ID NO: 12788 - protein, 80 aa, Synthetic construct
ESVSKEEKEQNYDLTEVSESMKAFISKVPITFDADSFLNYFDKILGPRPNESDSDDLDDEDFECLDSDDDLDFETHEPGE

SEQ ID NO: 12789 - protein, 80 aa, Synthetic construct
ESVSKEEKEQNYDLTEVSESMKAFISKVSTHKGAELPREPSEAPITPRPNESDSDDLDDEDFECLDSDDDLDFETHEPGE

SEQ ID NO: 12790 - protein, 80 aa, Synthetic construct
ESVSKEEKEQNYDLTEVSESMKAFISKVSTHKGAELPREPSEAPITFDADSFLNYFLDDEDFECLDSDDDLDFETHEPGE

SEQ ID NO: 12791 - protein, 80 aa, Synthetic construct
ESVSKEEKEQNYDLTEVSESMKAFISKVSTHKGAELPREPSEAPITFDADSFLNYFDKDEDFECLDSDDDLDFETHEPGE

SEQ ID NO: 12792 - protein, 80 aa, Synthetic construct
ESVSKEEKEQNYDLTEVSESMKAFISKVSTHKGAELPREPSEAPITFDADSFLNYFDKILGPECLDSDDDLDFETHEPGE

SEQ ID NO: 12793 - protein, 80 aa, Synthetic construct
ESVSKEEKEQNYDLTEVSESMKAFISKVSTHKGAELPREPSEAPITFDADSFLNYFDKILGPRPLDSDDDLDFETHEPGE

SEQ ID NO: 12794 - protein, 80 aa, Synthetic construct
ESVSKEEKEQNYDLTEVSESMKAFISKVSTHKGAELPREPSEAPITFDADSFLNYFDKILGPRPNESDDDLDFETHEPGE

SEQ ID NO: 12795 - protein, 80 aa, Synthetic construct
QARYSVSSPNSLGVVPYLGGEQSYYRAAAAAAGGGYTAMPAPMSVYSHGPYTPQPQPKDMVKPPYSYIALITMAIQNAPD

SEQ ID NO: 12796 - protein, 80 aa, Synthetic construct
QARYSVSSPNSLGVVPYLGGEQSYYRAAAAAAGGGYTAMPAPMSVYSHPAHAPQPQPKDMVKPPYSYIALITMAIQNAPD

SEQ ID NO: 12797 - protein, 80 aa, Synthetic construct
SPLDGSKSTNASTSTAKPMVGQLIFDKFIKTEEDPIIKQDTPSNLDFDFALPQTATAPDAKTVLPIPELDDAVVESFFSS

SEQ ID NO: 12798 - protein, 80 aa, Synthetic construct
SEYQGSKSTNASTSTAKPMVGQLIFDKFIKTEEDPIIKQDTPSNLDFDFALPQTATAPDAKTVLPIPELDDAVVESFFSS

SEQ ID NO: 12799 - protein, 80 aa, Synthetic construct
MSEYQPSLFALNPMGFSPLDGQLIFDKFIKTEEDPIIKQDTPSNLDFDFALPQTATAPDAKTVLPIPELDDAVVESFFSS

SEQ ID NO: 12800 - protein, 80 aa, Synthetic construct
MSEYQPSLFALNPMGFSPLDASTSTAKPMVGQLIFDKFIKTPSNLDFDFALPQTATAPDAKTVLPIPELDDAVVESFFSS

SEQ ID NO: 12801 - protein, 80 aa, Synthetic construct
LVDDSPTPGSPGSPPSGFLLNSKFPEKVEGRFSAAPLVDLSLSPPSGLDSPNGSSSLSSDFQPLRYLDGVPSSFQFFLPL

SEQ ID NO: 12802 - protein, 80 aa, Synthetic construct
EALYPQRRSYTSEDEAWKSFLENPLTAATKAMMSINGDEDSAAALGLLYDYYKVPRERRSSTAKPEVEHPEPDHSKRNSI

SEQ ID NO: 12803 - protein, 80 aa, Synthetic construct
TQLYPQRRSYTSEDEAWKSFLENPLTAATKAMMSINGDEDSAAALGLLYDYYKVPRERRSSTAKPEVEHPEPDHSKRNSI

SEQ ID NO: 12804 - protein, 80 aa, Synthetic construct
TQEYPQRRSYTSEDEAWKSFLENPLTAATKAMMSINGDEDSAAALGLLYDYYKVPRERRSSTAKPEVEHPEPDHSKRNSI

SEQ ID NO: 12805 - protein, 80 aa, Synthetic construct
TQEYDNRRSYTSEDEAWKSFLENPLTAATKAMMSINGDEDSAAALGLLYDYYKVPRERRSSTAKPEVEHPEPDHSKRNSI

SEQ ID NO: 12806 - protein, 80 aa, Synthetic construct
TQEYDNKRSYTSEDEAWKSFLENPLTAATKAMMSINGDEDSAAALGLLYDYYKVPRERRSSTAKPEVEHPEPDHSKRNSI

SEQ ID NO: 12807 - protein, 80 aa, Synthetic construct
TQEYDNKRPVLVLQNEALYPQRRSYTAATKAMMSINGDEDSAAALGLLYDYYKVPRERRSSTAKPEVEHPEPDHSKRNSI

SEQ ID NO: 12808 - protein, 80 aa, Synthetic construct
TQEYDNKRPVLVLQNEALYPQRRSYTSEDEAWMSINGDEDSAAALGLLYDYYKVPRERRSSTAKPEVEHPEPDHSKRNSI

SEQ ID NO: 12809 - protein, 80 aa, Synthetic construct
TQEYDNKRPVLVLQNEALYPQRRSYTSEDEAWKSFLENPLTAATKAMMSINGDEDSAAALGLLYDYYKHPEPDHSKRNSI

SEQ ID NO: 12810 - protein, 80 aa, Synthetic construct
TQEYDNKRPVLVLQNEALYPQRRSYTSEDEAWKSFLENPLTAATKAMMSINGDEDSAAALGLLYDYYKVPEPDHSKRNSI

SEQ ID NO: 12811 - protein, 80 aa, Synthetic construct
TQEYDNKRPVLVLQNEALYPQRRSYTSEDEAWKSFLENPLTAATKAMMSINGDEDSAAALGLLYDYYKVPREDHSKRNSI

SEQ ID NO: 12812 - protein, 80 aa, Synthetic construct
TQEYDNKRPVLVLQNEALYPQRRSYTSEDEAWKSFLENPLTAATKAMMSINGDEDSAAALGLLYDYYKVPRERRSKRNSI

SEQ ID NO: 12813 - protein, 80 aa, Synthetic construct
TQEYDNKRPVLVLQNEALYPQRRSYTSEDEAWKSFLENPLTAATKAMMSINGDEDSAAALGLLYDYYKVPRERRSSRNSI

SEQ ID NO: 12814 - protein, 80 aa, Synthetic construct
TQEYDNKRPVLVLQNEALYPQRRSYTSEDEAWKSFLENPLTAATKAMMSINGDEDSAAALGLLYDYYKVPRERRSSTASI

SEQ ID NO: 12815 - protein, 80 aa, Synthetic construct; identical to SEQ ID NO: 564

SEQ ID NO: 12816 - protein, 80 aa, Synthetic construct
MPSDPPFNTRRAYTSEDEAWKSYLENPLTAATKAMMSINGDEDSAAALGLLYDYYKVPRDKRLLSVSKASDSQEDQEKRN

SEQ ID NO: 12817 - protein, 80 aa, Synthetic construct
SQSDPPFNTRRAYTSEDEAWKSYLENPLTAATKAMMSINGDEDSAAALGLLYDYYKVPRDKRLLSVSKASDSQEDQEKRN

SEQ ID NO: 12818 - protein, 80 aa, Synthetic construct
SQESDNFNTRRAYTSEDEAWKSYLENPLTAATKAMMSINGDEDSAAALGLLYDYYKVPRDKRLLSVSKASDSQEDQEKRN

SEQ ID NO: 12819 - protein, 80 aa, Synthetic construct
SQESDNNKTRRAYTSEDEAWKSYLENPLTAATKAMMSINGDEDSAAALGLLYDYYKVPRDKRLLSVSKASDSQEDQEKRN

SEQ ID NO: 12820 - protein, 80 aa, Synthetic construct
SQESDNNKRLRAYTSEDEAWKSYLENPLTAATKAMMSINGDEDSAAALGLLYDYYKVPRDKRLLSVSKASDSQEDQEKRN

SEQ ID NO: 12821 - protein, 80 aa, Synthetic construct
SQESDNNKRLVAYTSEDEAWKSYLENPLTAATKAMMSINGDEDSAAALGLLYDYYKVPRDKRLLSVSKASDSQEDQEKRN

SEQ ID NO: 12822 - protein, 80 aa, Synthetic construct
SQESDNNKRLVALVPMDEAWKSYLENPLTAATKAMMSINGDEDSAAALGLLYDYYKVPRDKRLLSVSKASDSQEDQEKRN

SEQ ID NO: 12823 - protein, 80 aa, Synthetic construct
SQESDNNKRLVALVPMPSDPPFNTRRAYTSEDEAWKSYLENPLTAATKAMMSINGDEDSAAALGLLYDYYKVQEDQEKRN

SEQ ID NO: 12824 - protein, 80 aa, Synthetic construct
SQESDNNKRLVALVPMPSDPPFNTRRAYTSEDEAWKSYLENPLTAATKAMMSINGDEDSAAALGLLYDYYKVPRDQEKRN

SEQ ID NO: 12825 - protein, 80 aa, Synthetic construct
SQESDNNKRLVALVPMPSDPPFNTRRAYTSEDEAWKSYLENPLTAATKAMMSINGDEDSAAALGLLYDYYKVPRDKEKRN

SEQ ID NO: 12826 - protein, 80 aa, Synthetic construct
SQESDNNKRLVALVPMPSDPPFNTRRAYTSEDEAWKSYLENPLTAATKAMMSINGDEDSAAALGLLYDYYKVPRDKRLRN

SEQ ID NO: 12827 - protein, 80 aa, Synthetic construct; identical to SEQ ID NO: 720

SEQ ID NO: 12828 - protein, 80 aa, Synthetic construct
VNLQKFSYTSEDEAWKTYLENPLTAATKAMMRVNGDDDSVAALSFLYDYYMGPKEKRILSSSTGGRNDQGKRYYHGMEYE

SEQ ID NO: 12829 - protein, 80 aa, Synthetic construct
NELQKFSYTSEDEAWKTYLENPLTAATKAMMRVNGDDDSVAALSFLYDYYMGPKEKRILSSSTGGRNDQGKRYYHGMEYE

SEQ ID NO: 12830 - protein, 80 aa, Synthetic construct
NELDKFSYTSEDEAWKTYLENPLTAATKAMMRVNGDDDSVAALSFLYDYYMGPKEKRILSSSTGGRNDQGKRYYHGMEYE

SEQ ID NO: 12831 - protein, 80 aa, Synthetic construct
NELDFRSYTSEDEAWKTYLENPLTAATKAMMRVNGDDDSVAALSFLYDYYMGPKEKRILSSSTGGRNDQGKRYYHGMEYE

SEQ ID NO: 12832 - protein, 80 aa, Synthetic construct
NELDFRSVTSEDEAWKTYLENPLTAATKAMMRVNGDDDSVAALSFLYDYYMGPKEKRILSSSTGGRNDQGKRYYHGMEYE

SEQ ID NO: 12833 - protein, 80 aa, Synthetic construct
NELDFRSVRLLKNDPVNLQKNPLTAATKAMMRVNGDDDSVAALSFLYDYYMGPKEKRILSSSTGGRNDQGKRYYHGMEYE

SEQ ID NO: 12834 - protein, 80 aa, Synthetic construct
NELDFRSVRLLKNDPVNLQKFSYTSEDEAWKTYLENPLTAAALSFLYDYYMGPKEKRILSSSTGGRNDQGKRYYHGMEYE

SEQ ID NO: 12835 - protein, 80 aa, Synthetic construct
NELDFRSVRLLKNDPVNLQKFSYTSEDEAWKTYLENPLTAATKAMMRVNGDDDSVAALSFLYDYYMNDQGKRYYHGMEYE

SEQ ID NO: 12836 - protein, 80 aa, Synthetic construct
NELDFRSVRLLKNDPVNLQKFSYTSEDEAWKTYLENPLTAATKAMMRVNGDDDSVAALSFLYDYYMGPQGKRYYHGMEYE

SEQ ID NO: 12837 - protein, 80 aa, Synthetic construct
NELDFRSVRLLKNDPVNLQKFSYTSEDEAWKTYLENPLTAATKAMMRVNGDDDSVAALSFLYDYYMGPKEKRYYHGMEYE

SEQ ID NO: 12838 - protein, 80 aa, Synthetic construct
NELDFRSVRLLKNDPVNLQKFSYTSEDEAWKTYLENPLTAATKAMMRVNGDDDSVAALSFLYDYYMGPKEKRILHGMEYE

SEQ ID NO: 12839 - protein, 80 aa, Synthetic construct
NELDFRSVRLLKNDPVNLQKFSYTSEDEAWKTYLENPLTAATKAMMRVNGDDDSVAALSFLYDYYMGPKEKRILSSMEYE

SEQ ID NO: 12840 - protein, 80 aa, Synthetic construct
NELDFRSVRLLKNDPVNLQKFSYTSEDEAWKTYLENPLTAATKAMMRVNGDDDSVAALSFLYDYYMGPKEKRILSSSTYE

SEQ ID NO: 12841 - protein, 80 aa, Synthetic construct
NELDFRSVRLLKNDPVNLQKFSYTSEDEAWKTYLENPLTAATKAMMRVNGDDDSVAALSFLYDYYMGPKEKRILSSSTGG

SEQ ID NO: 12842 - protein, 80 aa, Synthetic construct
YRCDFENCTFSARSLCSIKSHYRKDKCFTRGNNLTVHLRKKHQFKWPSGHPRFRYKEHEDGYMRLQLVRYESVELTQQLL

SEQ ID NO: 12843 - protein, 80 aa, Synthetic construct
YRCDFENCTFSARSLCSIKSHYRKVHEGDSEPRYKCHVCDKCFTRGNNLTVHLRKKHQFKWPSGHPLVRYESVELTQQLL

SEQ ID NO: 12844 - protein, 80 aa, Synthetic construct
HSRASCMQMDDVIDDIISLESSYNEEILGLMDPALQMANTLPVSGNLIDLYGNQGLPPPGLTISNSCPANLPNIKRELTA

SEQ ID NO: 12845 - protein, 80 aa, Synthetic construct
EERASCMQMDDVIDDIISLESSYNEEILGLMDPALQMANTLPVSGNLIDLYGNQGLPPPGLTISNSCPANLPNIKRELTA

SEQ ID NO: 12846 - protein, 80 aa, Synthetic construct
EEQNSCMQMDDVIDDIISLESSYNEEILGLMDPALQMANTLPVSGNLIDLYGNQGLPPPGLTISNSCPANLPNIKRELTA

SEQ ID NO: 12847 - protein, 80 aa, Synthetic construct
EEQNRAMQMDDVIDDIISLESSYNEEILGLMDPALQMANTLPVSGNLIDLYGNQGLPPPGLTISNSCPANLPNIKRELTA

SEQ ID NO: 12848 - protein, 80 aa, Synthetic construct
EEQNRAESMDDVIDDIISLESSYNEEILGLMDPALQMANTLPVSGNLIDLYGNQGLPPPGLTISNSCPANLPNIKRELTA

SEQ ID NO: 12849 - protein, 80 aa, Synthetic construct
EEQNRAESECDVIDDIISLESSYNEEILGLMDPALQMANTLPVSGNLIDLYGNQGLPPPGLTISNSCPANLPNIKRELTA

SEQ ID NO: 12850 - protein, 80 aa, Synthetic construct
EEQNRAESECPGMNTHSRASCMQMDDVIDDIISLESSYNEEILGLMLIDLYGNQGLPPPGLTISNSCPANLPNIKRELTA

SEQ ID NO: 12851 - protein, 80 aa, Synthetic construct
EEQNRAESECPGMNTHSRASCMQMDDVIDDIISLESSYNEEILGLMDPALYGNQGLPPPGLTISNSCPANLPNIKRELTA

SEQ ID NO: 12852 - protein, 80 aa, Synthetic construct
EEQNRAESECPGMNTHSRASCMQMDDVIDDIISLESSYNEEILGLMDPALQMANTLPVSGNLIDLYCPANLPNIKRELTA

SEQ ID NO: 12853 - protein, 80 aa, Synthetic construct
EEQNRAESECPGMNTHSRASCMQMDDVIDDIISLESSYNEEILGLMDPALQMANTLPVSGNLIDLYGNANLPNIKRELTA

SEQ ID NO: 12854 - protein, 80 aa, Synthetic construct
EEQNRAESECPGMNTHSRASCMQMDDVIDDIISLESSYNEEILGLMDPALQMANTLPVSGNLIDLYGNQGLPNIKRELTA

SEQ ID NO: 12855 - protein, 80 aa, Synthetic construct
EEQNRAESECPGMNTHSRASCMQMDDVIDDIISLESSYNEEILGLMDPALQMANTLPVSGNLIDLYGNQGLPPPKRELTA

SEQ ID NO: 12856 - protein, 80 aa, Synthetic construct
EEQNRAESECPGMNTHSRASCMQMDDVIDDIISLESSYNEEILGLMDPALQMANTLPVSGNLIDLYGNQGLPPPGLELTA

SEQ ID NO: 12857 - protein, 80 aa, Synthetic construct
EEQNRAESECPGMNTHSRASCMQMDDVIDDIISLESSYNEEILGLMDPALQMANTLPVSGNLIDLYGNQGLPPPGLTITA

SEQ ID NO: 12858 - protein, 80 aa, Synthetic construct
EEQNRAESECPGMNTHSRASCMQMDDVIDDIISLESSYNEEILGLMDPALQMANTLPVSGNLIDLYGNQGLPPPGLTISN

SEQ ID NO: 12859 - protein, 80 aa, Synthetic construct
YHISEAQNVSSHVPYPVALHVNIVNVPQPAAAAIQRHYNDEDPEKEKRIKELELLLMSTENELKGQQVLPTQNHTCSYPG

SEQ ID NO: 12860 - protein, 80 aa, Synthetic construct
LPISEAQNVSSHVPYPVALHVNIVNVPQPAAAAIQRHYNDEDPEKEKRIKELELLLMSTENELKGQQVLPTQNHTCSYPG

SEQ ID NO: 12861 - protein, 80 aa, Synthetic construct
LPATEAQNVSSHVPYPVALHVNIVNVPQPAAAAIQRHYNDEDPEKEKRIKELELLLMSTENELKGQQVLPTQNHTCSYPG

SEQ ID NO: 12862 - protein, 80 aa, Synthetic construct
LPATGQQNVSSHVPYPVALHVNIVNVPQPAAAAIQRHYNDEDPEKEKRIKELELLLMSTENELKGQQVLPTQNHTCSYPG

SEQ ID NO: 12863 - protein, 80 aa, Synthetic construct
LPATGQPTVSSHVPYPVALHVNIVNVPQPAAAAIQRHYNDEDPEKEKRIKELELLLMSTENELKGQQVLPTQNHTCSYPG

SEQ ID NO: 12864 - protein, 80 aa, Synthetic construct
LPATGQPTVNSHVPYPVALHVNIVNVPQPAAAAIQRHYNDEDPEKEKRIKELELLLMSTENELKGQQVLPTQNHTCSYPG

SEQ ID NO: 12865 - protein, 80 aa, Synthetic construct
LPATGQPTVNNDVPYPVALHVNIVNVPQPAAAAIQRHYNDEDPEKEKRIKELELLLMSTENELKGQQVLPTQNHTCSYPG

SEQ ID NO: 12866 - protein, 80 aa, Synthetic construct
LPATGQPTVNNDYSYPVALHVNIVNVPQPAAAAIQRHYNDEDPEKEKRIKELELLLMSTENELKGQQVLPTQNHTCSYPG

SEQ ID NO: 12867 - protein, 80 aa, Synthetic construct
LPATGQPTVNNDYSYYVALHVNIVNVPQPAAAAIQRHYNDEDPEKEKRIKELELLLMSTENELKGQQVLPTQNHTCSYPG

SEQ ID NO: 12868 - protein, 80 aa, Synthetic construct
LPATGQPTVNNDYSYYHILHVNIVNVPQPAAAAIQRHYNDEDPEKEKRIKELELLLMSTENELKGQQVLPTQNHTCSYPG

SEQ ID NO: 12869 - protein, 80 aa, Synthetic construct
LPATGQPTVNNDYSYYHISEVNIVNVPQPAAAAIQRHYNDEDPEKEKRIKELELLLMSTENELKGQQVLPTQNHTCSYPG

SEQ ID NO: 12870 - protein, 80 aa, Synthetic construct
LPATGQPTVNNDYSYYHISEAQIVNVPQPAAAAIQRHYNDEDPEKEKRIKELELLLMSTENELKGQQVLPTQNHTCSYPG

SEQ ID NO: 12871 - protein, 80 aa, Synthetic construct
LPATGQPTVNNDYSYYHISEAQNVNVPQPAAAAIQRHYNDEDPEKEKRIKELELLLMSTENELKGQQVLPTQNHTCSYPG

SEQ ID NO: 12872 - protein, 80 aa, Synthetic construct
LPATGQPTVNNDYSYYHISEAQNVSSPQPAAAAIQRHYNDEDPEKEKRIKELELLLMSTENELKGQQVLPTQNHTCSYPG

SEQ ID NO: 12873 - protein, 80 aa, Synthetic construct
LPATGQPTVNNDYSYYHISEAQNVSSHVPAAAAIQRHYNDEDPEKEKRIKELELLLMSTENELKGQQVLPTQNHTCSYPG

SEQ ID NO: 12874 - protein, 80 aa, Synthetic construct
LPATGQPTVNNDYSYYHISEAQNVSSHVPYAAAIQRHYNDEDPEKEKRIKELELLLMSTENELKGQQVLPTQNHTCSYPG

SEQ ID NO: 12875 - protein, 80 aa, Synthetic construct
LPATGQPTVNNDYSYYHISEAQNVSSHVPYPVAIQRHYNDEDPEKEKRIKELELLLMSTENELKGQQVLPTQNHTCSYPG

SEQ ID NO: 12876 - protein, 80 aa, Synthetic construct
LPATGQPTVNNDYSYYHISEAQNVSSHVPYPVALQRHYNDEDPEKEKRIKELELLLMSTENELKGQQVLPTQNHTCSYPG

SEQ ID NO: 12877 - protein, 80 aa, Synthetic construct
LPATGQPTVNNDYSYYHISEAQNVSSHVPYPVALHVHYNDEDPEKEKRIKELELLLMSTENELKGQQVLPTQNHTCSYPG

SEQ ID NO: 12878 - protein, 80 aa, Synthetic construct
LPATGQPTVNNDYSYYHISEAQNVSSHVPYPVALHVNINDEDPEKEKRIKELELLLMSTENELKGQQVLPTQNHTCSYPG

SEQ ID NO: 12879 - protein, 80 aa, Synthetic construct
LPATGQPTVNNDYSYYHISEAQNVSSHVPYPVALHVNIVNEDPEKEKRIKELELLLMSTENELKGQQVLPTQNHTCSYPG

SEQ ID NO: 12880 - protein, 80 aa, Synthetic construct
LPATGQPTVNNDYSYYHISEAQNVSSHVPYPVALHVNIVNVPQPAAAAIQRHYNDEDPEKEKRIKELELLLMSTTCSYPG

SEQ ID NO: 12881 - protein, 80 aa, Synthetic construct
LPATGQPTVNNDYSYYHISEAQNVSSHVPYPVALHVNIVNVPQPAAAAIQRHYNDEDPEKEKRIKELELLLMSTENSYPG

SEQ ID NO: 12882 - protein, 80 aa, Synthetic construct
LPATGQPTVNNDYSYYHISEAQNVSSHVPYPVALHVNIVNVPQPAAAAIQRHYNDEDPEKEKRIKELELLLMSTENELPG

SEQ ID NO: 12883 - protein, 80 aa, Synthetic construct; identical to SEQ ID NO: 95

SEQ ID NO: 12884 - protein, 80 aa, Synthetic construct
MDHMQTQNQFYIPVQIPGYQYVSPEGNCIEHVQPTSAFIQQPFIDEDPDKEKKIKELEMLLMSAENEVRRKRIPSQPGSF

SEQ ID NO: 12885 - protein, 80 aa, Synthetic construct
SEHMQTQNQFYIPVQIPGYQYVSPEGNCIEHVQPTSAFIQQPFIDEDPDKEKKIKELEMLLMSAENEVRRKRIPSQPGSF

SEQ ID NO: 12886 - protein, 80 aa, Synthetic construct
SERSQTQNQFYIPVQIPGYQYVSPEGNCIEHVQPTSAFIQQPFIDEDPDKEKKIKELEMLLMSAENEVRRKRIPSQPGSF

SEQ ID NO: 12887 - protein, 80 aa, Synthetic construct
SERSSSQNQFYIPVQIPGYQYVSPEGNCIEHVQPTSAFIQQPFIDEDPDKEKKIKELEMLLMSAENEVRRKRIPSQPGSF

SEQ ID NO: 12888 - protein, 80 aa, Synthetic construct
SERSSSKLQFYIPVQIPGYQYVSPEGNCIEHVQPTSAFIQQPFIDEDPDKEKKIKELEMLLMSAENEVRRKRIPSQPGSF

SEQ ID NO: 12889 - protein, 80 aa, Synthetic construct
SERSSSKLQHYIPVQIPGYQYVSPEGNCIEHVQPTSAFIQQPFIDEDPDKEKKIKELEMLLMSAENEVRRKRIPSQPGSF

SEQ ID NO: 12890 - protein, 80 aa, Synthetic construct
SERSSSKLQHKPPVQIPGYQYVSPEGNCIEHVQPTSAFIQQPFIDEDPDKEKKIKELEMLLMSAENEVRRKRIPSQPGSF

SEQ ID NO: 12891 - protein, 80 aa, Synthetic construct
SERSSSKLQHKPCAQIPGYQYVSPEGNCIEHVQPTSAFIQQPFIDEDPDKEKKIKELEMLLMSAENEVRRKRIPSQPGSF

SEQ ID NO: 12892 - protein, 80 aa, Synthetic construct
SERSSSKLQHKPCAAMDHYQYVSPEGNCIEHVQPTSAFIQQPFIDEDPDKEKKIKELEMLLMSAENEVRRKRIPSQPGSF

SEQ ID NO: 12893 - protein, 80 aa, Synthetic construct
SERSSSKLQHKPCAAMDHMQYVSPEGNCIEHVQPTSAFIQQPFIDEDPDKEKKIKELEMLLMSAENEVRRKRIPSQPGSF

SEQ ID NO: 12894 - protein, 80 aa, Synthetic construct
SERSSSKLQHKPCAAMDHMQTQSPEGNCIEHVQPTSAFIQQPFIDEDPDKEKKIKELEMLLMSAENEVRRKRIPSQPGSF

SEQ ID NO: 12895 - protein, 80 aa, Synthetic construct
SERSSSKLQHKPCAAMDHMQTQNQEGNCIEHVQPTSAFIQQPFIDEDPDKEKKIKELEMLLMSAENEVRRKRIPSQPGSF

SEQ ID NO: 12896 - protein, 80 aa, Synthetic construct
SERSSSKLQHKPCAAMDHMQTQNQFYNCIEHVQPTSAFIQQPFIDEDPDKEKKIKELEMLLMSAENEVRRKRIPSQPGSF

SEQ ID NO: 12897 - protein, 80 aa, Synthetic construct
SERSSSKLQHKPCAAMDHMQTQNQFYIPIEHVQPTSAFIQQPFIDEDPDKEKKIKELEMLLMSAENEVRRKRIPSQPGSF

SEQ ID NO: 12898 - protein, 80 aa, Synthetic construct
SERSSSKLQHKPCAAMDHMQTQNQFYIPVQHVQPTSAFIQQPFIDEDPDKEKKIKELEMLLMSAENEVRRKRIPSQPGSF

SEQ ID NO: 12899 - protein, 80 aa, Synthetic construct
SERSSSKLQHKPCAAMDHMQTQNQFYIPVQIPQPTSAFIQQPFIDEDPDKEKKIKELEMLLMSAENEVRRKRIPSQPGSF

SEQ ID NO: 12900 - protein, 80 aa, Synthetic construct
SERSSSKLQHKPCAAMDHMQTQNQFYIPVQIPGYTSAFIQQPFIDEDPDKEKKIKELEMLLMSAENEVRRKRIPSQPGSF

SEQ ID NO: 12901 - protein, 80 aa, Synthetic construct
SERSSSKLQHKPCAAMDHMQTQNQFYIPVQIPGYQYAFIQQPFIDEDPDKEKKIKELEMLLMSAENEVRRKRIPSQPGSF

SEQ ID NO: 12902 - protein, 80 aa, Synthetic construct
SERSSSKLQHKPCAAMDHMQTQNQFYIPVQIPGYQYVSPEQPFIDEDPDKEKKIKELEMLLMSAENEVRRKRIPSQPGSF

SEQ ID NO: 12903 - protein, 80 aa, Synthetic construct
SERSSSKLQHKPCAAMDHMQTQNQFYIPVQIPGYQYVSPEGNFIDEDPDKEKKIKELEMLLMSAENEVRRKRIPSQPGSF

SEQ ID NO: 12904 - protein, 80 aa, Synthetic construct
SERSSSKLQHKPCAAMDHMQTQNQFYIPVQIPGYQYVSPEGNCIDEDPDKEKKIKELEMLLMSAENEVRRKRIPSQPGSF

SEQ ID NO: 12905 - protein, 80 aa, Synthetic construct
SERSSSKLQHKPCAAMDHMQTQNQFYIPVQIPGYQYVSPEGNCIEHDPDKEKKIKELEMLLMSAENEVRRKRIPSQPGSF

SEQ ID NO: 12906 - protein, 80 aa, Synthetic construct
SERSSSKLQHKPCAAMDHMQTQNQFYIPVQIPGYQYVSPEGNCIEHVQDKEKKIKELEMLLMSAENEVRRKRIPSQPGSF

SEQ ID NO: 12907 - protein, 80 aa, Synthetic construct
SERSSSKLQHKPCAAMDHMQTQNQFYIPVQIPGYQYVSPEGNCIEHVQPTSAFIQQPFIDEDPDENEVRRKRIPSQPGSF

SEQ ID NO: 12908 - protein, 80 aa, Synthetic construct
SERSSSKLQHKPCAAMDHMQTQNQFYIPVQIPGYQYVSPEGNCIEHVQPTSAFIQQPFIDEDPDKEKKIKELEMLLPGSF

SEQ ID NO: 12909 - protein, 80 aa, Synthetic construct
SERSSSKLQHKPCAAMDHMQTQNQFYIPVQIPGYQYVSPEGNCIEHVQPTSAFIQQPFIDEDPDKEKKIKELEMLLMSSF

SEQ ID NO: 12910 - protein, 80 aa, Synthetic construct
SERSSSKLQHKPCAAMDHMQTQNQFYIPVQIPGYQYVSPEGNCIEHVQPTSAFIQQPFIDEDPDKEKKIKELEMLLMSAE

SEQ ID NO: 12911 - protein, 80 aa, Synthetic construct
SNILNLSYKQVKTWFQNQRMKSKRWQKNNWLKNSNGVTQGCLVNSTWSNQTQNIQSWSNHSWNTQTWCTQSWNNQAWNSP

SEQ ID NO: 12912 - protein, 80 aa, Synthetic construct
SNILNLSYKQVKTWFQNQRMKSKRWQKNNWLKNSNGVTQGCLVNPTGNLPTQNIQSWSNHSWNTQTWCTQSWNNQAWNSP

SEQ ID NO: 12913 - protein, 80 aa, Synthetic construct
SNILNLSYKQVKTWFQNQRMKSKRWQKNNWLKNSNGVTQGCLVNPTGNLPMWNIQSWSNHSWNTQTWCTQSWNNQAWNSP

SEQ ID NO: 12914 - protein, 80 aa, Synthetic construct
TWCTQSWNNQAWNSPFYNCGEESLQSCMQFQPNSPASDLQAALEAAGEGLNVIQQTTRYFNTPQTMDLFLNYSMNMQPED

SEQ ID NO: 12915 - protein, 80 aa, Synthetic construct
TQCTQSWNNQAWNSPFYNCGEESLQSCMQFQPNSPASDLQAALEAAGEGLNVIQQTTRYFNTPQTMDLFLNYSMNMQPED

SEQ ID NO: 12916 - protein, 80 aa, Synthetic construct
TQNIQSWNNQAWNSPFYNCGEESLQSCMQFQPNSPASDLQAALEAAGEGLNVIQQTTRYFNTPQTMDLFLNYSMNMQPED

SEQ ID NO: 12917 - protein, 80 aa, Synthetic construct
TQNIQSWSNQAWNSPFYNCGEESLQSCMQFQPNSPASDLQAALEAAGEGLNVIQQTTRYFNTPQTMDLFLNYSMNMQPED

SEQ ID NO: 12918 - protein, 80 aa, Synthetic construct
TQNIQSWSNHAWNSPFYNCGEESLQSCMQFQPNSPASDLQAALEAAGEGLNVIQQTTRYFNTPQTMDLFLNYSMNMQPED

SEQ ID NO: 12919 - protein, 80 aa, Synthetic construct
TQNIQSWSNHSWNSPFYNCGEESLQSCMQFQPNSPASDLQAALEAAGEGLNVIQQTTRYFNTPQTMDLFLNYSMNMQPED

SEQ ID NO: 12920 - protein, 80 aa, Synthetic construct
TQNIQSWSNHSWNTPFYNCGEESLQSCMQFQPNSPASDLQAALEAAGEGLNVIQQTTRYFNTPQTMDLFLNYSMNMQPED

SEQ ID NO: 12921 - protein, 80 aa, Synthetic construct
TQNIQSWSNHSWNTQTYNCGEESLQSCMQFQPNSPASDLQAALEAAGEGLNVIQQTTRYFNTPQTMDLFLNYSMNMQPED

SEQ ID NO: 12922 - protein, 80 aa, Synthetic construct
TQNIQSWSNHSWNTQTWCCGEESLQSCMQFQPNSPASDLQAALEAAGEGLNVIQQTTRYFNTPQTMDLFLNYSMNMQPED

SEQ ID NO: 12923 - protein, 80 aa, Synthetic construct
TQNIQSWSNHSWNTQTWCTQEESLQSCMQFQPNSPASDLQAALEAAGEGLNVIQQTTRYFNTPQTMDLFLNYSMNMQPED

SEQ ID NO: 12924 - protein, 80 aa, Synthetic construct
TQNIQSWSNHSWNTQTWCTQSWSLQSCMQFQPNSPASDLQAALEAAGEGLNVIQQTTRYFNTPQTMDLFLNYSMNMQPED

SEQ ID NO: 12925 - protein, 80 aa, Synthetic construct
TQNIQSWSNHSWNTQTWCTQSWNNQSCMQFQPNSPASDLQAALEAAGEGLNVIQQTTRYFNTPQTMDLFLNYSMNMQPED

SEQ ID NO: 12926 - protein, 80 aa, Synthetic construct
TQNIQSWSNHSWNTQTWCTQSWNNQACMQFQPNSPASDLQAALEAAGEGLNVIQQTTRYFNTPQTMDLFLNYSMNMQPED

SEQ ID NO: 12927 - protein, 80 aa, Synthetic construct
TQNIQSWSNHSWNTQTWCTQSWNNQAWNQFQPNSPASDLQAALEAAGEGLNVIQQTTRYFNTPQTMDLFLNYSMNMQPED

SEQ ID NO: 12928 - protein, 80 aa, Synthetic construct
TQNIQSWSNHSWNTQTWCTQSWNNQAWNSPQPNSPASDLQAALEAAGEGLNVIQQTTRYFNTPQTMDLFLNYSMNMQPED

SEQ ID NO: 12929 - protein, 80 aa, Synthetic construct
TQNIQSWSNHSWNTQTWCTQSWNNQAWNSPFYNSPASDLQAALEAAGEGLNVIQQTTRYFNTPQTMDLFLNYSMNMQPED

SEQ ID NO: 12930 - protein, 80 aa, Synthetic construct
TQNIQSWSNHSWNTQTWCTQSWNNQAWNSPFYNCPASDLQAALEAAGEGLNVIQQTTRYFNTPQTMDLFLNYSMNMQPED

SEQ ID NO: 12931 - protein, 80 aa, Synthetic construct
TQNIQSWSNHSWNTQTWCTQSWNNQAWNSPFYNCGESDLQAALEAAGEGLNVIQQTTRYFNTPQTMDLFLNYSMNMQPED

SEQ ID NO: 12932 - protein, 80 aa, Synthetic construct
TQNIQSWSNHSWNTQTWCTQSWNNQAWNSPFYNCGEESLQAALEAAGEGLNVIQQTTRYFNTPQTMDLFLNYSMNMQPED

SEQ ID NO: 12933 - protein, 80 aa, Synthetic construct
TQNIQSWSNHSWNTQTWCTQSWNNQAWNSPFYNCGEESLQSCLEAAGEGLNVIQQTTRYFNTPQTMDLFLNYSMNMQPED

SEQ ID NO: 12934 - protein, 80 aa, Synthetic construct
TQNIQSWSNHSWNTQTWCTQSWNNQAWNSPFYNCGEESLQSCMQAAGEGLNVIQQTTRYFNTPQTMDLFLNYSMNMQPED

SEQ ID NO: 12935 - protein, 80 aa, Synthetic construct
TQNIQSWSNHSWNTQTWCTQSWNNQAWNSPFYNCGEESLQSCMQFQGEGLNVIQQTTRYFNTPQTMDLFLNYSMNMQPED

SEQ ID NO: 12936 - protein, 80 aa, Synthetic construct
TQNIQSWSNHSWNTQTWCTQSWNNQAWNSPFYNCGEESLQSCMQFQPNGLNVIQQTTRYFNTPQTMDLFLNYSMNMQPED

SEQ ID NO: 12937 - protein, 80 aa, Synthetic construct
TQNIQSWSNHSWNTQTWCTQSWNNQAWNSPFYNCGEESLQSCMQFQPNSPNVIQQTTRYFNTPQTMDLFLNYSMNMQPED

SEQ ID NO: 12938 - protein, 80 aa, Synthetic construct
TQNIQSWSNHSWNTQTWCTQSWNNQAWNSPFYNCGEESLQSCMQFQPNSPASIQQTTRYFNTPQTMDLFLNYSMNMQPED

SEQ ID NO: 12939 - protein, 80 aa, Synthetic construct
TQNIQSWSNHSWNTQTWCTQSWNNQAWNSPFYNCGEESLQSCMQFQPNSPASDLQTTRYFNTPQTMDLFLNYSMNMQPED

SEQ ID NO: 12940 - protein, 80 aa, Synthetic construct
TQNIQSWSNHSWNTQTWCTQSWNNQAWNSPFYNCGEESLQSCMQFQPNSPASDLQATRYFNTPQTMDLFLNYSMNMQPED

SEQ ID NO: 12941 - protein, 80 aa, Synthetic construct
TQNIQSWSNHSWNTQTWCTQSWNNQAWNSPFYNCGEESLQSCMQFQPNSPASDLQAALYFNTPQTMDLFLNYSMNMQPED

SEQ ID NO: 12942 - protein, 80 aa, Synthetic construct
TQNIQSWSNHSWNTQTWCTQSWNNQAWNSPFYNCGEESLQSCMQFQPNSPASDLQAALEANTPQTMDLFLNYSMNMQPED

SEQ ID NO: 12943 - protein, 80 aa, Synthetic construct
TQNIQSWSNHSWNTQTWCTQSWNNQAWNSPFYNCGEESLQSCMQFQPNSPASDLQAALEAAGPQTMDLFLNYSMNMQPED

SEQ ID NO: 12944 - protein, 80 aa, Synthetic construct
TQNIQSWSNHSWNTQTWCTQSWNNQAWNSPFYNCGEESLQSCMQFQPNSPASDLQAALEAAGEGTMDLFLNYSMNMQPED

SEQ ID NO: 12945 - protein, 80 aa, Synthetic construct
TQNIQSWSNHSWNTQTWCTQSWNNQAWNSPFYNCGEESLQSCMQFQPNSPASDLQAALEAAGEGLNDLFLNYSMNMQPED

SEQ ID NO: 12946 - protein, 80 aa, Synthetic construct
TQNIQSWSNHSWNTQTWCTQSWNNQAWNSPFYNCGEESLQSCMQFQPNSPASDLQAALEAAGEGLNVIFLNYSMNMQPED

SEQ ID NO: 12947 - protein, 80 aa, Synthetic construct
TQNIQSWSNHSWNTQTWCTQSWNNQAWNSPFYNCGEESLQSCMQFQPNSPASDLQAALEAAGEGLNVIQQNYSMNMQPED

SEQ ID NO: 12948 - protein, 80 aa, Synthetic construct
TQNIQSWSNHSWNTQTWCTQSWNNQAWNSPFYNCGEESLQSCMQFQPNSPASDLQAALEAAGEGLNVIQQTTSMNMQPED

SEQ ID NO: 12949 - protein, 80 aa, Synthetic construct
TQNIQSWSNHSWNTQTWCTQSWNNQAWNSPFYNCGEESLQSCMQFQPNSPASDLQAALEAAGEGLNVIQQTTRYNMQPED

SEQ ID NO: 12950 - protein, 80 aa, Synthetic construct
TQNIQSWSNHSWNTQTWCTQSWNNQAWNSPFYNCGEESLQSCMQFQPNSPASDLQAALEAAGEGLNVIQQTTRYFNQPED

SEQ ID NO: 12951 - protein, 80 aa, Synthetic construct
TQNIQSWSNHSWNTQTWCTQSWNNQAWNSPFYNCGEESLQSCMQFQPNSPASDLQAALEAAGEGLNVIQQTTRYFNTPED

SEQ ID NO: 12952 - protein, 80 aa, Synthetic construct
TQNIQSWSNHSWNTQTWCTQSWNNQAWNSPFYNCGEESLQSCMQFQPNSPASDLQAALEAAGEGLNVIQQTTRYFNTPQT

SEQ ID NO: 12953 - protein, 80 aa, Synthetic construct
TWCTQSWNNQAWNSPFYNCGEESLQSCMQFQPNSPASDLEAALEAAGEGLNVIQQTTRYFSTPQTMDLFLNYSMNMQPED

SEQ ID NO: 12954 - protein, 80 aa, Synthetic construct
TQCTQSWNNQAWNSPFYNCGEESLQSCMQFQPNSPASDLEAALEAAGEGLNVIQQTTRYFSTPQTMDLFLNYSMNMQPED

SEQ ID NO: 12955 - protein, 80 aa, Synthetic construct
TQNIQSWNNQAWNSPFYNCGEESLQSCMQFQPNSPASDLEAALEAAGEGLNVIQQTTRYFSTPQTMDLFLNYSMNMQPED

SEQ ID NO: 12956 - protein, 80 aa, Synthetic construct
TQNIQSWSNQAWNSPFYNCGEESLQSCMQFQPNSPASDLEAALEAAGEGLNVIQQTTRYFSTPQTMDLFLNYSMNMQPED

SEQ ID NO: 12957 - protein, 80 aa, Synthetic construct
TQNIQSWSNHAWNSPFYNCGEESLQSCMQFQPNSPASDLEAALEAAGEGLNVIQQTTRYFSTPQTMDLFLNYSMNMQPED

SEQ ID NO: 12958 - protein, 80 aa, Synthetic construct
TQNIQSWSNHSWNSPFYNCGEESLQSCMQFQPNSPASDLEAALEAAGEGLNVIQQTTRYFSTPQTMDLFLNYSMNMQPED

SEQ ID NO: 12959 - protein, 80 aa, Synthetic construct
TQNIQSWSNHSWNTPFYNCGEESLQSCMQFQPNSPASDLEAALEAAGEGLNVIQQTTRYFSTPQTMDLFLNYSMNMQPED

SEQ ID NO: 12960 - protein, 80 aa, Synthetic construct
TQNIQSWSNHSWNTQTYNCGEESLQSCMQFQPNSPASDLEAALEAAGEGLNVIQQTTRYFSTPQTMDLFLNYSMNMQPED

SEQ ID NO: 12961 - protein, 80 aa, Synthetic construct
TQNIQSWSNHSWNTQTWCCGEESLQSCMQFQPNSPASDLEAALEAAGEGLNVIQQTTRYFSTPQTMDLFLNYSMNMQPED

SEQ ID NO: 12962 - protein, 80 aa, Synthetic construct
TQNIQSWSNHSWNTQTWCTQEESLQSCMQFQPNSPASDLEAALEAAGEGLNVIQQTTRYFSTPQTMDLFLNYSMNMQPED

SEQ ID NO: 12963 - protein, 80 aa, Synthetic construct
TQNIQSWSNHSWNTQTWCTQSWSLQSCMQFQPNSPASDLEAALEAAGEGLNVIQQTTRYFSTPQTMDLFLNYSMNMQPED

SEQ ID NO: 12964 - protein, 80 aa, Synthetic construct
TQNIQSWSNHSWNTQTWCTQSWNNQSCMQFQPNSPASDLEAALEAAGEGLNVIQQTTRYFSTPQTMDLFLNYSMNMQPED

SEQ ID NO: 12965 - protein, 80 aa, Synthetic construct
TQNIQSWSNHSWNTQTWCTQSWNNQACMQFQPNSPASDLEAALEAAGEGLNVIQQTTRYFSTPQTMDLFLNYSMNMQPED

SEQ ID NO: 12966 - protein, 80 aa, Synthetic construct
TQNIQSWSNHSWNTQTWCTQSWNNQAWNQFQPNSPASDLEAALEAAGEGLNVIQQTTRYFSTPQTMDLFLNYSMNMQPED

SEQ ID NO: 12967 - protein, 80 aa, Synthetic construct
TQNIQSWSNHSWNTQTWCTQSWNNQAWNSPFYNCGEESLQSCMQAAGEGLNVIQQTTRYFSTPQTMDLFLNYSMNMQPED

SEQ ID NO: 12968 - protein, 80 aa, Synthetic construct
TQNIQSWSNHSWNTQTWCTQSWNNQAWNSPFYNCGEESLQSCMQFQGEGLNVIQQTTRYFSTPQTMDLFLNYSMNMQPED

SEQ ID NO: 12969 - protein, 80 aa, Synthetic construct
TQNIQSWSNHSWNTQTWCTQSWNNQAWNSPFYNCGEESLQSCMQFQPNGLNVIQQTTRYFSTPQTMDLFLNYSMNMQPED

SEQ ID NO: 12970 - protein, 80 aa, Synthetic construct
TQNIQSWSNHSWNTQTWCTQSWNNQAWNSPFYNCGEESLQSCMQFQPNSPASIQQTTRYFSTPQTMDLFLNYSMNMQPED

SEQ ID NO: 12971 - protein, 80 aa, Synthetic construct
TQNIQSWSNHSWNTQTWCTQSWNNQAWNSPFYNCGEESLQSCMQFQPNSPASDLQTTRYFSTPQTMDLFLNYSMNMQPED

SEQ ID NO: 12972 - protein, 80 aa, Synthetic construct
TQNIQSWSNHSWNTQTWCTQSWNNQAWNSPFYNCGEESLQSCMQFQPNSPASDLEAALYFSTPQTMDLFLNYSMNMQPED

SEQ ID NO: 12973 - protein, 80 aa, Synthetic construct
TQNIQSWSNHSWNTQTWCTQSWNNQAWNSPFYNCGEESLQSCMQFQPNSPASDLEAALEASTPQTMDLFLNYSMNMQPED

SEQ ID NO: 12974 - protein, 80 aa, Synthetic construct
TQNIQSWSNHSWNTQTWCTQSWNNQAWNSPFYNCGEESLQSCMQFQPNSPASDLEAALEAAGPQTMDLFLNYSMNMQPED

SEQ ID NO: 12975 - protein, 80 aa, Synthetic construct
TQNIQSWSNHSWNTQTWCTQSWNNQAWNSPFYNCGEESLQSCMQFQPNSPASDLEAALEAAGEGTMDLFLNYSMNMQPED

SEQ ID NO: 12976 - protein, 80 aa, Synthetic construct
TQNIQSWSNHSWNTQTWCTQSWNNQAWNSPFYNCGEESLQSCMQFQPNSPASDLEAALEAAGEGLNDLFLNYSMNMQPED

SEQ ID NO: 12977 - protein, 80 aa, Synthetic construct
TQNIQSWSNHSWNTQTWCTQSWNNQAWNSPFYNCGEESLQSCMQFQPNSPASDLEAALEAAGEGLNVIFLNYSMNMQPED

SEQ ID NO: 12978 - protein, 80 aa, Synthetic construct
TQNIQSWSNHSWNTQTWCTQSWNNQAWNSPFYNCGEESLQSCMQFQPNSPASDLEAALEAAGEGLNVIQQNYSMNMQPED

SEQ ID NO: 12979 - protein, 80 aa, Synthetic construct
TQNIQSWSNHSWNTQTWCTQSWNNQAWNSPFYNCGEESLQSCMQFQPNSPASDLEAALEAAGEGLNVIQQTTSMNMQPED

SEQ ID NO: 12980 - protein, 80 aa, Synthetic construct
TQNIQSWSNHSWNTQTWCTQSWNNQAWNSPFYNCGEESLQSCMQFQPNSPASDLEAALEAAGEGLNVIQQTTRYNMQPED

SEQ ID NO: 12981 - protein, 80 aa, Synthetic construct
TQNIQSWSNHSWNTQTWCTQSWNNQAWNSPFYNCGEESLQSCMQFQPNSPASDLEAALEAAGEGLNVIQQTTRYFSQPED

SEQ ID NO: 12982 - protein, 80 aa, Synthetic construct
TQNIQSWSNHSWNTQTWCTQSWNNQAWNSPFYNCGEESLQSCMQFQPNSPASDLEAALEAAGEGLNVIQQTTRYFSTPED

SEQ ID NO: 12983 - protein, 80 aa, Synthetic construct
TQNIQSWSNHSWNTQTWCTQSWNNQAWNSPFYNCGEESLQSCMQFQPNSPASDLEAALEAAGEGLNVIQQTTRYFSTPQT

SEQ ID NO: 12984 - protein, 80 aa, Synthetic construct
TSCLGLYHNNNQFFHDVEVEDVPSLEAYRDPSCLSPASSLSSRSCNSEASSYESNYSYPYASPQTSPWQSPCVSPKTTDP

SEQ ID NO: 12985 - protein, 80 aa, Synthetic construct
LPPSPLAMEYVNDFDLMKFESLGSTPYSSVPPSPTFSEPGMVGATEGTRPGLEELYWLATLQQQLGAGEALGLSPEEAME

SEQ ID NO: 12986 - protein, 80 aa, Synthetic construct
LPPSPLAMEYVNDFDLMKFEVKGSTPYSSVPPSPTFSEPGMVGATEGTRPGLEELYWLATLQQQLGAGEALGLSPEEAME

SEQ ID NO: 12987 - protein, 80 aa, Synthetic construct
ETFSDLWKLLPENNVLSPLPSQAMDDLMLSPDDIEQWFTEDPGPDEAPRMPEAAPPVAPAPAAPTPAAPAPAPSWPLSSS

SEQ ID NO: 12988 - protein, 80 aa, Synthetic construct
EEFSDLWKLLPENNVLSPLPSQAMDDLMLSPDDIEQWFTEDPGPDEAPRMPEAAPPVAPAPAAPTPAAPAPAPSWPLSSS

SEQ ID NO: 12989 - protein, 80 aa, Synthetic construct
EEPQDLWKLLPENNVLSPLPSQAMDDLMLSPDDIEQWFTEDPGPDEAPRMPEAAPPVAPAPAAPTPAAPAPAPSWPLSSS

SEQ ID NO: 12990 - protein, 80 aa, Synthetic construct
EEPQSDPSVEPPLSQETFSDLWAMDDLMLSPDDIEQWFTEDPGPDEAPRMPEAAPPVAPAPAAPTPAAPAPAPSWPLSSS

SEQ ID NO: 12991 - protein, 80 aa, Synthetic construct
EEPQSDPSVEPPLSQETFSDLWKLDDLMLSPDDIEQWFTEDPGPDEAPRMPEAAPPVAPAPAAPTPAAPAPAPSWPLSSS

SEQ ID NO: 12992 - protein, 80 aa, Synthetic construct
EEPQSDPSVEPPLSQETFSDLWKLLPLMLSPDDIEQWFTEDPGPDEAPRMPEAAPPVAPAPAAPTPAAPAPAPSWPLSSS

SEQ ID NO: 12993 - protein, 80 aa, Synthetic construct
EEPQSDPSVEPPLSQETFSDLWKLLPENLSPDDIEQWFTEDPGPDEAPRMPEAAPPVAPAPAAPTPAAPAPAPSWPLSSS

SEQ ID NO: 12994 - protein, 80 aa, Synthetic construct
EEPQSDPSVEPPLSQETFSDLWKLLPENNVPDDIEQWFTEDPGPDEAPRMPEAAPPVAPAPAAPTPAAPAPAPSWPLSSS

SEQ ID NO: 12995 - protein, 80 aa, Synthetic construct
EEPQSDPSVEPPLSQETFSDLWKLLPENNVLSDIEQWFTEDPGPDEAPRMPEAAPPVAPAPAAPTPAAPAPAPSWPLSSS

SEQ ID NO: 12996 - protein, 80 aa, Synthetic construct
EEPQSDPSVEPPLSQETFSDLWKLLPENNVLSPLEQWFTEDPGPDEAPRMPEAAPPVAPAPAAPTPAAPAPAPSWPLSSS

SEQ ID NO: 12997 - protein, 80 aa, Synthetic construct
EEPQSDPSVEPPLSQETFSDLWKLLPENNVLSPLPSWFTEDPGPDEAPRMPEAAPPVAPAPAAPTPAAPAPAPSWPLSSS

SEQ ID NO: 12998 - protein, 80 aa, Synthetic construct
EEPQSDPSVEPPLSQETFSDLWKLLPENNVLSPLPSQAMDDLMLSPDDIEQWAAPPVAPAPAAPTPAAPAPAPSWPLSSS

SEQ ID NO: 12999 - protein, 80 aa, Synthetic construct
EEPQSDPSVEPPLSQETFSDLWKLLPENNVLSPLPSQAMDDLMLSPDDIEQWFTPPVAPAPAAPTPAAPAPAPSWPLSSS

SEQ ID NO: 13000 - protein, 80 aa, Synthetic construct
EEPQSDPSVEPPLSQETFSDLWKLLPENNVLSPLPSQAMDDLMLSPDDIEQWFTEDVAPAPAAPTPAAPAPAPSWPLSSS

SEQ ID NO: 13001 - protein, 80 aa, Synthetic construct
EEPQSDPSVEPPLSQETFSDLWKLLPENNVLSPLPSQAMDDLMLSPDDIEQWFTEDPGPAPAAPTPAAPAPAPSWPLSSS

SEQ ID NO: 13002 - protein, 80 aa, Synthetic construct
EEPQSDPSVEPPLSQETFSDLWKLLPENNVLSPLPSQAMDDLMLSPDDIEQWFTEDPGPDPAAPTPAAPAPAPSWPLSSS

SEQ ID NO: 13003 - protein, 80 aa, Synthetic construct
EEPQSDPSVEPPLSQETFSDLWKLLPENNVLSPLPSQAMDDLMLSPDDIEQWFTEDPGPDEAAPTPAAPAPAPSWPLSSS

SEQ ID NO: 13004 - protein, 80 aa, Synthetic construct
EEPQSDPSVEPPLSQETFSDLWKLLPENNVLSPLPSQAMDDLMLSPDDIEQWFTEDPGPDEAPRTPAAPAPAPSWPLSSS

SEQ ID NO: 13005 - protein, 80 aa, Synthetic construct
EEPQSDPSVEPPLSQETFSDLWKLLPENNVLSPLPSQAMDDLMLSPDDIEQWFTEDPGPDEAPRMPAAPAPAPSWPLSSS

SEQ ID NO: 13006 - protein, 80 aa, Synthetic construct
EEPQSDPSVEPPLSQETFSDLWKLLPENNVLSPLPSQAMDDLMLSPDDIEQWFTEDPGPDEAPRMPEAPAPAPSWPLSSS

SEQ ID NO: 13007 - protein, 80 aa, Synthetic construct
EEPQSDPSVEPPLSQETFSDLWKLLPENNVLSPLPSQAMDDLMLSPDDIEQWFTEDPGPDEAPRMPEAAPPAPSWPLSSS

SEQ ID NO: 13008 - protein, 80 aa, Synthetic construct
EEPQSDPSVEPPLSQETFSDLWKLLPENNVLSPLPSQAMDDLMLSPDDIEQWFTEDPGPDEAPRMPEAAPPVPSWPLSSS

SEQ ID NO: 13009 - protein, 80 aa, Synthetic construct
EEPQSDPSVEPPLSQETFSDLWKLLPENNVLSPLPSQAMDDLMLSPDDIEQWFTEDPGPDEAPRMPEAAPPVAPWPLSSS

SEQ ID NO: 13010 - protein, 80 aa, Synthetic construct
EEPQSDPSVEPPLSQETFSDLWKLLPENNVLSPLPSQAMDDLMLSPDDIEQWFTEDPGPDEAPRMPEAAPPVAPAPLSSS

SEQ ID NO: 13011 - protein, 80 aa, Synthetic construct
EEPQSDPSVEPPLSQETFSDLWKLLPENNVLSPLPSQAMDDLMLSPDDIEQWFTEDPGPDEAPRMPEAAPPVAPAPAASS

SEQ ID NO: 13012 - protein, 80 aa, Synthetic construct; identical to SEQ ID NO: 225

SEQ ID NO: 13013 - protein, 80 aa, Synthetic construct
AQSTATSPDGGTTFEHLWSSLEPDSTYFTDSSMDVFHLEGMTTSVMAQFNLLSSTMDQMSSRAASASPYTPEHAASVPTH

SEQ ID NO: 13014 - protein, 80 aa, Synthetic construct
AQSTATSPDGGTTFEHLWSSLEPDSTYFDLSSMDVFHLEGMTTSVMAQFNLLSSTMDQMSSRAASASPYTPEHAASVPTH

SEQ ID NO: 13015 - protein, 80 aa, Synthetic construct
AQSTATSPDGGTTFEHLWSSLEPDSTYFDLPQMDVFHLEGMTTSVMAQFNLLSSTMDQMSSRAASASPYTPEHAASVPTH

SEQ ID NO: 13016 - protein, 80 aa, Synthetic construct
AQSTATSPDGGTTFEHLWSSLEPDSTYFDLPQSSVFHLEGMTTSVMAQFNLLSSTMDQMSSRAASASPYTPEHAASVPTH

SEQ ID NO: 13017 - protein, 80 aa, Synthetic construct
AQSTATSPDGGTTFEHLWSSLEPDSTYFDLPQSSRGNNEVVGGTDSSMDVFHLEGMTTSVMAQFNLLSYTPEHAASVPTH

SEQ ID NO: 13018 - protein, 80 aa, Synthetic construct
AQSTATSPDGGTTFEHLWSSLEPDSTYFDLPQSSRGNNEVVGGTDSSMDVFHLEGMTTSVMAQFNLLSSTMDHAASVPTH

SEQ ID NO: 13019 - protein, 80 aa, Synthetic construct
AQSTATSPDGGTTFEHLWSSLEPDSTYFDLPQSSRGNNEVVGGTDSSMDVFHLEGMTTSVMAQFNLLSSTMDQMASVPTH

SEQ ID NO: 13020 - protein, 80 aa, Synthetic construct
AQSTATSPDGGTTFEHLWSSLEPDSTYFDLPQSSRGNNEVVGGTDSSMDVFHLEGMTTSVMAQFNLLSSTMDQMSSVPTH

SEQ ID NO: 13021 - protein, 80 aa, Synthetic construct
AQSTATSPDGGTTFEHLWSSLEPDSTYFDLPQSSRGNNEVVGGTDSSMDVFHLEGMTTSVMAQFNLLSSTMDQMSSRAAS

SEQ ID NO: 13022 - protein, 80 aa, Synthetic construct
LMFDLSLNFSQSAHSASEQQLGGGAAAGNLSLSLVDKDLDSFSEGSLGSHFEFPDYCTPELSEMIAGDWLEANFSDLVFT

SEQ ID NO: 13023 - protein, 80 aa, Synthetic construct
SSFDLSLNFSQSAHSASEQQLGGGAAAGNLSLSLVDKDLDSFSEGSLGSHFEFPDYCTPELSEMIAGDWLEANFSDLVFT

SEQ ID NO: 13024 - protein, 80 aa, Synthetic construct
SSGSLSLNFSQSAHSASEQQLGGGAAAGNLSLSLVDKDLDSFSEGSLGSHFEFPDYCTPELSEMIAGDWLEANFSDLVFT

SEQ ID NO: 13025 - protein, 80 aa, Synthetic construct
SSGSSSLNFSQSAHSASEQQLGGGAAAGNLSLSLVDKDLDSFSEGSLGSHFEFPDYCTPELSEMIAGDWLEANFSDLVFT

SEQ ID NO: 13026 - protein, 80 aa, Synthetic construct
SSGSSSGSFSQSAHSASEQQLGGGAAAGNLSLSLVDKDLDSFSEGSLGSHFEFPDYCTPELSEMIAGDWLEANFSDLVFT

SEQ ID NO: 13027 - protein, 80 aa, Synthetic construct
SSGSSSGSSGQSAHSASEQQLGGGAAAGNLSLSLVDKDLDSFSEGSLGSHFEFPDYCTPELSEMIAGDWLEANFSDLVFT

SEQ ID NO: 13028 - protein, 80 aa, Synthetic construct
SSGSSSGSSGEDAHSASEQQLGGGAAAGNLSLSLVDKDLDSFSEGSLGSHFEFPDYCTPELSEMIAGDWLEANFSDLVFT

SEQ ID NO: 13029 - protein, 80 aa, Synthetic construct
SSGSSSGSSGEDADSASEQQLGGGAAAGNLSLSLVDKDLDSFSEGSLGSHFEFPDYCTPELSEMIAGDWLEANFSDLVFT

SEQ ID NO: 13030 - protein, 80 aa, Synthetic construct
SSGSSSGSSGEDADDLSEQQLGGGAAAGNLSLSLVDKDLDSFSEGSLGSHFEFPDYCTPELSEMIAGDWLEANFSDLVFT

SEQ ID NO: 13031 - protein, 80 aa, Synthetic construct
SSGSSSGSSGEDADDLMFQQLGGGAAAGNLSLSLVDKDLDSFSEGSLGSHFEFPDYCTPELSEMIAGDWLEANFSDLVFT

SEQ ID NO: 13032 - protein, 80 aa, Synthetic construct
SSGSSSGSSGEDADDLMFDLLGGGAAAGNLSLSLVDKDLDSFSEGSLGSHFEFPDYCTPELSEMIAGDWLEANFSDLVFT

SEQ ID NO: 13033 - protein, 80 aa, Synthetic construct
SSGSSSGSSGEDADDLMFDLSLGGAAAGNLSLSLVDKDLDSFSEGSLGSHFEFPDYCTPELSEMIAGDWLEANFSDLVFT

SEQ ID NO: 13034 - protein, 80 aa, Synthetic construct
SSGSSSGSSGEDADDLMFDLSLNFAAAGNLSLSLVDKDLDSFSEGSLGSHFEFPDYCTPELSEMIAGDWLEANFSDLVFT

SEQ ID NO: 13035 - protein, 80 aa, Synthetic construct
SSGSSSGSSGEDADDLMFDLSLNFSQAGNLSLSLVDKDLDSFSEGSLGSHFEFPDYCTPELSEMIAGDWLEANFSDLVFT

SEQ ID NO: 13036 - protein, 80 aa, Synthetic construct
SSGSSSGSSGEDADDLMFDLSLNFSQSANLSLSLVDKDLDSFSEGSLGSHFEFPDYCTPELSEMIAGDWLEANFSDLVFT

SEQ ID NO: 13037 - protein, 80 aa, Synthetic construct
SSGSSSGSSGEDADDLMFDLSLNFSQSAHSSLSLVDKDLDSFSEGSLGSHFEFPDYCTPELSEMIAGDWLEANFSDLVFT

SEQ ID NO: 13038 - protein, 80 aa, Synthetic construct
SSGSSSGSSGEDADDLMFDLSLNFSQSAHSASSLVDKDLDSFSEGSLGSHFEFPDYCTPELSEMIAGDWLEANFSDLVFT

SEQ ID NO: 13039 - protein, 80 aa, Synthetic construct
SSGSSSGSSGEDADDLMFDLSLNFSQSAHSASEQVDKDLDSFSEGSLGSHFEFPDYCTPELSEMIAGDWLEANFSDLVFT

SEQ ID NO: 13040 - protein, 80 aa, Synthetic construct
SSGSSSGSSGEDADDLMFDLSLNFSQSAHSASEQQLKDLDSFSEGSLGSHFEFPDYCTPELSEMIAGDWLEANFSDLVFT

SEQ ID NO: 13041 - protein, 80 aa, Synthetic construct
SSGSSSGSSGEDADDLMFDLSLNFSQSAHSASEQQLGGLDSFSEGSLGSHFEFPDYCTPELSEMIAGDWLEANFSDLVFT

SEQ ID NO: 13042 - protein, 80 aa, Synthetic construct
SSGSSSGSSGEDADDLMFDLSLNFSQSAHSASEQQLGGGASFSEGSLGSHFEFPDYCTPELSEMIAGDWLEANFSDLVFT

SEQ ID NO: 13043 - protein, 80 aa, Synthetic construct
SSGSSSGSSGEDADDLMFDLSLNFSQSAHSASEQQLGGGAAASEGSLGSHFEFPDYCTPELSEMIAGDWLEANFSDLVFT

SEQ ID NO: 13044 - protein, 80 aa, Synthetic construct
SSGSSSGSSGEDADDLMFDLSLNFSQSAHSASEQQLGGGAAAGNGSLGSHFEFPDYCTPELSEMIAGDWLEANFSDLVFT

SEQ ID NO: 13045 - protein, 80 aa, Synthetic construct
SSGSSSGSSGEDADDLMFDLSLNFSQSAHSASEQQLGGGAAAGNLSLGSHFEFPDYCTPELSEMIAGDWLEANFSDLVFT

SEQ ID NO: 13046 - protein, 80 aa, Synthetic construct
SSGSSSGSSGEDADDLMFDLSLNFSQSAHSASEQQLGGGAAAGNLSLSSHFEFPDYCTPELSEMIAGDWLEANFSDLVFT

SEQ ID NO: 13047 - protein, 80 aa, Synthetic construct
SSGSSSGSSGEDADDLMFDLSLNFSQSAHSASEQQLGGGAAAGNLSLSLVDKFPDYCTPELSEMIAGDWLEANFSDLVFT

SEQ ID NO: 13048 - protein, 80 aa, Synthetic construct
SSGSSSGSSGEDADDLMFDLSLNFSQSAHSASEQQLGGGAAAGNLSLSLVDKDLDYCTPELSEMIAGDWLEANFSDLVFT

SEQ ID NO: 13049 - protein, 80 aa, Synthetic construct
SSGSSSGSSGEDADDLMFDLSLNFSQSAHSASEQQLGGGAAAGNLSLSLVDKDLDSCTPELSEMIAGDWLEANFSDLVFT

SEQ ID NO: 13050 - protein, 80 aa, Synthetic construct
SSGSSSGSSGEDADDLMFDLSLNFSQSAHSASEQQLGGGAAAGNLSLSLVDKDLDSFSPELSEMIAGDWLEANFSDLVFT

SEQ ID NO: 13051 - protein, 80 aa, Synthetic construct
SSGSSSGSSGEDADDLMFDLSLNFSQSAHSASEQQLGGGAAAGNLSLSLVDKDLDSFSEGLSEMIAGDWLEANFSDLVFT

SEQ ID NO: 13052 - protein, 80 aa, Synthetic construct
SSGSSSGSSGEDADDLMFDLSLNFSQSAHSASEQQLGGGAAAGNLSLSLVDKDLDSFSEGSLEMIAGDWLEANFSDLVFT

SEQ ID NO: 13053 - protein, 80 aa, Synthetic construct
SSGSSSGSSGEDADDLMFDLSLNFSQSAHSASEQQLGGGAAAGNLSLSLVDKDLDSFSEGSLGSIAGDWLEANFSDLVFT

SEQ ID NO: 13054 - protein, 80 aa, Synthetic construct
SSGSSSGSSGEDADDLMFDLSLNFSQSAHSASEQQLGGGAAAGNLSLSLVDKDLDSFSEGSLGSHFGDWLEANFSDLVFT

SEQ ID NO: 13055 - protein, 80 aa, Synthetic construct
SSGSSSGSSGEDADDLMFDLSLNFSQSAHSASEQQLGGGAAAGNLSLSLVDKDLDSFSEGSLGSHFEFWLEANFSDLVFT

SEQ ID NO: 13056 - protein, 80 aa, Synthetic construct
SSGSSSGSSGEDADDLMFDLSLNFSQSAHSASEQQLGGGAAAGNLSLSLVDKDLDSFSEGSLGSHFEFPDEANFSDLVFT

SEQ ID NO: 13057 - protein, 80 aa, Synthetic construct
SSGSSSGSSGEDADDLMFDLSLNFSQSAHSASEQQLGGGAAAGNLSLSLVDKDLDSFSEGSLGSHFEFPDYCNFSDLVFT

SEQ ID NO: 13058 - protein, 80 aa, Synthetic construct
SSGSSSGSSGEDADDLMFDLSLNFSQSAHSASEQQLGGGAAAGNLSLSLVDKDLDSFSEGSLGSHFEFPDYCTPSDLVFT

SEQ ID NO: 13059 - protein, 80 aa, Synthetic construct
SSGSSSGSSGEDADDLMFDLSLNFSQSAHSASEQQLGGGAAAGNLSLSLVDKDLDSFSEGSLGSHFEFPDYCTPELLVFT

SEQ ID NO: 13060 - protein, 80 aa, Synthetic construct
SSGSSSGSSGEDADDLMFDLSLNFSQSAHSASEQQLGGGAAAGNLSLSLVDKDLDSFSEGSLGSHFEFPDYCTPELSEFT

SEQ ID NO: 13061 - protein, 80 aa, Synthetic construct
SSGSSSGSSGEDADDLMFDLSLNFSQSAHSASEQQLGGGAAAGNLSLSLVDKDLDSFSEGSLGSHFEFPDYCTPELSEMI

SEQ ID NO: 13062 - protein, 80 aa, Synthetic construct
AAAEEGEEETVASGEESLGFLSRLPPGPAGLDCSALDRDPDLQPPSGTSHFEFPDYCTPEVTEMIAGDWRPSSIADLVFT

SEQ ID NO: 13063 - protein, 80 aa, Synthetic construct
TPAEEGEEETVASGEESLGFLSRLPPGPAGLDCSALDRDPDLQPPSGTSHFEFPDYCTPEVTEMIAGDWRPSSIADLVFT

SEQ ID NO: 13064 - protein, 80 aa, Synthetic construct
TPSEEGEEETVASGEESLGFLSRLPPGPAGLDCSALDRDPDLQPPSGTSHFEFPDYCTPEVTEMIAGDWRPSSIADLVFT

SEQ ID NO: 13065 - protein, 80 aa, Synthetic construct
TPSEDEEEETVASGEESLGFLSRLPPGPAGLDCSALDRDPDLQPPSGTSHFEFPDYCTPEVTEMIAGDWRPSSIADLVFT

SEQ ID NO: 13066 - protein, 80 aa, Synthetic construct
TPSEDEEPETVASGEESLGFLSRLPPGPAGLDCSALDRDPDLQPPSGTSHFEFPDYCTPEVTEMIAGDWRPSSIADLVFT

SEQ ID NO: 13067 - protein, 80 aa, Synthetic construct
TPSEDEEPEEVASGEESLGFLSRLPPGPAGLDCSALDRDPDLQPPSGTSHFEFPDYCTPEVTEMIAGDWRPSSIADLVFT

SEQ ID NO: 13068 - protein, 80 aa, Synthetic construct
TPSEDEEPEEEESGEESLGFLSRLPPGPAGLDCSALDRDPDLQPPSGTSHFEFPDYCTPEVTEMIAGDWRPSSIADLVFT

SEQ ID NO: 13069 - protein, 80 aa, Synthetic construct
TPSEDEEPEEEEEEEESLGFLSRLPPGPAGLDCSALDRDPDLQPPSGTSHFEFPDYCTPEVTEMIAGDWRPSSIADLVFT

SEQ ID NO: 13070 - protein, 80 aa, Synthetic construct
TPSEDEEPEEEEEEAASLGFLSRLPPGPAGLDCSALDRDPDLQPPSGTSHFEFPDYCTPEVTEMIAGDWRPSSIADLVFT

SEQ ID NO: 13071 - protein, 80 aa, Synthetic construct
TPSEDEEPEEEEEEAAAAGFLSRLPPGPAGLDCSALDRDPDLQPPSGTSHFEFPDYCTPEVTEMIAGDWRPSSIADLVFT

SEQ ID NO: 13072 - protein, 80 aa, Synthetic construct
TPSEDEEPEEEEEEAAAAEELSRLPPGPAGLDCSALDRDPDLQPPSGTSHFEFPDYCTPEVTEMIAGDWRPSSIADLVFT

SEQ ID NO: 13073 - protein, 80 aa, Synthetic construct
TPSEDEEPEEEEEEAAAAEEGERLPPGPAGLDCSALDRDPDLQPPSGTSHFEFPDYCTPEVTEMIAGDWRPSSIADLVFT

SEQ ID NO: 13074 - protein, 80 aa, Synthetic construct
TPSEDEEPEEEEEEAAAAEEGEEEPPGPAGLDCSALDRDPDLQPPSGTSHFEFPDYCTPEVTEMIAGDWRPSSIADLVFT

SEQ ID NO: 13075 - protein, 80 aa, Synthetic construct
TPSEDEEPEEEEEEAAAAEEGEEETVGPAGLDCSALDRDPDLQPPSGTSHFEFPDYCTPEVTEMIAGDWRPSSIADLVFT

SEQ ID NO: 13076 - protein, 80 aa, Synthetic construct
TPSEDEEPEEEEEEAAAAEEGEEETVASGEESCSALDRDPDLQPPSGTSHFEFPDYCTPEVTEMIAGDWRPSSIADLVFT

SEQ ID NO: 13077 - protein, 80 aa, Synthetic construct
TPSEDEEPEEEEEEAAAAEEGEEETVASGEESLGFLDRDPDLQPPSGTSHFEFPDYCTPEVTEMIAGDWRPSSIADLVFT

SEQ ID NO: 13078 - protein, 80 aa, Synthetic construct
TPSEDEEPEEEEEEAAAAEEGEEETVASGEESLGFLSRDPDLQPPSGTSHFEFPDYCTPEVTEMIAGDWRPSSIADLVFT

SEQ ID NO: 13079 - protein, 80 aa, Synthetic construct
TPSEDEEPEEEEEEAAAAEEGEEETVASGEESLGFLSRLPDLQPPSGTSHFEFPDYCTPEVTEMIAGDWRPSSIADLVFT

SEQ ID NO: 13080 - protein, 80 aa, Synthetic construct
TPSEDEEPEEEEEEAAAAEEGEEETVASGEESLGFLSRLPPGQPPSGTSHFEFPDYCTPEVTEMIAGDWRPSSIADLVFT

SEQ ID NO: 13081 - protein, 80 aa, Synthetic construct
TPSEDEEPEEEEEEAAAAEEGEEETVASGEESLGFLSRLPPGPAPSGTSHFEFPDYCTPEVTEMIAGDWRPSSIADLVFT

SEQ ID NO: 13082 - protein, 80 aa, Synthetic construct
TPSEDEEPEEEEEEAAAAEEGEEETVASGEESLGFLSRLPPGPAGLGTSHFEFPDYCTPEVTEMIAGDWRPSSIADLVFT

SEQ ID NO: 13083 - protein, 80 aa, Synthetic construct
TPSEDEEPEEEEEEAAAAEEGEEETVASGEESLGFLSRLPPGPAGLDCSAFEFPDYCTPEVTEMIAGDWRPSSIADLVFT

SEQ ID NO: 13084 - protein, 80 aa, Synthetic construct
TPSEDEEPEEEEEEAAAAEEGEEETVASGEESLGFLSRLPPGPAGLDCSALDRDPDLQPPSGTSHFEFPDYCSIADLVFT

SEQ ID NO: 13085 - protein, 80 aa, Synthetic construct
EPCDLDAALLTDIEDMLQLINNQDSDFPGLFDPPYAGSGAGGTDPASPDTSSPGSLSPPPATLSSSLEAFLSGPQAAPSP

SEQ ID NO: 13086 - protein, 80 aa, Synthetic construct
DECDLDAALLTDIEDMLQLINNQDSDFPGLFDPPYAGSGAGGTDPASPDTSSPGSLSPPPATLSSSLEAFLSGPQAAPSP

SEQ ID NO: 13087 - protein, 80 aa, Synthetic construct
DEPPLDAALLTDIEDMLQLINNQDSDFPGLFDPPYAGSGAGGTDPASPDTSSPGSLSPPPATLSSSLEAFLSGPQAAPSP

SEQ ID NO: 13088 - protein, 80 aa, Synthetic construct
DEPPFSAALLTDIEDMLQLINNQDSDFPGLFDPPYAGSGAGGTDPASPDTSSPGSLSPPPATLSSSLEAFLSGPQAAPSP

SEQ ID NO: 13089 - protein, 80 aa, Synthetic construct
DEPPFSEALLTDIEDMLQLINNQDSDFPGLFDPPYAGSGAGGTDPASPDTSSPGSLSPPPATLSSSLEAFLSGPQAAPSP

SEQ ID NO: 13090 - protein, 80 aa, Synthetic construct
DEPPFSEAALTDIEDMLQLINNQDSDFPGLFDPPYAGSGAGGTDPASPDTSSPGSLSPPPATLSSSLEAFLSGPQAAPSP

SEQ ID NO: 13091 - protein, 80 aa, Synthetic construct
DEPPFSEAALEQIEDMLQLINNQDSDFPGLFDPPYAGSGAGGTDPASPDTSSPGSLSPPPATLSSSLEAFLSGPQAAPSP

SEQ ID NO: 13092 - protein, 80 aa, Synthetic construct
DEPPFSEAALEQALGEPCDLDAALLTDIEDMLQLYAGSGAGGTDPASPDTSSPGSLSPPPATLSSSLEAFLSGPQAAPSP

SEQ ID NO: 13093 - protein, 80 aa, Synthetic construct
DEPPFSEAALEQALGEPCDLDAALLTDIEDMLQLINGSGAGGTDPASPDTSSPGSLSPPPATLSSSLEAFLSGPQAAPSP

SEQ ID NO: 13094 - protein, 80 aa, Synthetic construct
DEPPFSEAALEQALGEPCDLDAALLTDIEDMLQLINNQGAGGTDPASPDTSSPGSLSPPPATLSSSLEAFLSGPQAAPSP

SEQ ID NO: 13095 - protein, 80 aa, Synthetic construct
DEPPFSEAALEQALGEPCDLDAALLTDIEDMLQLINNQDSDFTDPASPDTSSPGSLSPPPATLSSSLEAFLSGPQAAPSP

SEQ ID NO: 13096 - protein, 80 aa, Synthetic construct
DEPPFSEAALEQALGEPCDLDAALLTDIEDMLQLINNQDSDFPGPASPDTSSPGSLSPPPATLSSSLEAFLSGPQAAPSP

SEQ ID NO: 13097 - protein, 80 aa, Synthetic construct
DEPPFSEAALEQALGEPCDLDAALLTDIEDMLQLINNQDSDFPGLFSPDTSSPGSLSPPPATLSSSLEAFLSGPQAAPSP

SEQ ID NO: 13098 - protein, 80 aa, Synthetic construct
DEPPFSEAALEQALGEPCDLDAALLTDIEDMLQLINNQDSDFPGLFDPDTSSPGSLSPPPATLSSSLEAFLSGPQAAPSP

SEQ ID NO: 13099 - protein, 80 aa, Synthetic construct
DEPPFSEAALEQALGEPCDLDAALLTDIEDMLQLINNQDSDFPGLFDPPYSSPGSLSPPPATLSSSLEAFLSGPQAAPSP

SEQ ID NO: 13100 - protein, 80 aa, Synthetic construct
DEPPFSEAALEQALGEPCDLDAALLTDIEDMLQLINNQDSDFPGLFDPPYAGPGSLSPPPATLSSSLEAFLSGPQAAPSP

SEQ ID NO: 13101 - protein, 80 aa, Synthetic construct
DEPPFSEAALEQALGEPCDLDAALLTDIEDMLQLINNQDSDFPGLFDPPYAGSGSLSPPPATLSSSLEAFLSGPQAAPSP

SEQ ID NO: 13102 - protein, 80 aa, Synthetic construct
DEPPFSEAALEQALGEPCDLDAALLTDIEDMLQLINNQDSDFPGLFDPPYAGSGAGSPPPATLSSSLEAFLSGPQAAPSP

SEQ ID NO: 13103 - protein, 80 aa, Synthetic construct
DEPPFSEAALEQALGEPCDLDAALLTDIEDMLQLINNQDSDFPGLFDPPYAGSGAGGTPPATLSSSLEAFLSGPQAAPSP

SEQ ID NO: 13104 - protein, 80 aa, Synthetic construct
DEPPFSEAALEQALGEPCDLDAALLTDIEDMLQLINNQDSDFPGLFDPPYAGSGAGGTDPATLSSSLEAFLSGPQAAPSP

SEQ ID NO: 13105 - protein, 80 aa, Synthetic construct
DEPPFSEAALEQALGEPCDLDAALLTDIEDMLQLINNQDSDFPGLFDPPYAGSGAGGTDPASLSSSLEAFLSGPQAAPSP

SEQ ID NO: 13106 - protein, 80 aa, Synthetic construct
DEPPFSEAALEQALGEPCDLDAALLTDIEDMLQLINNQDSDFPGLFDPPYAGSGAGGTDPASPDSSLEAFLSGPQAAPSP

SEQ ID NO: 13107 - protein, 80 aa, Synthetic construct
DEPPFSEAALEQALGEPCDLDAALLTDIEDMLQLINNQDSDFPGLFDPPYAGSGAGGTDPASPDTSLEAFLSGPQAAPSP

SEQ ID NO: 13108 - protein, 80 aa, Synthetic construct
DEPPFSEAALEQALGEPCDLDAALLTDIEDMLQLINNQDSDFPGLFDPPYAGSGAGGTDPASPDTSSPAFLSGPQAAPSP

SEQ ID NO: 13109 - protein, 80 aa, Synthetic construct
DEPPFSEAALEQALGEPCDLDAALLTDIEDMLQLINNQDSDFPGLFDPPYAGSGAGGTDPASPDTSSPGSLSGPQAAPSP

SEQ ID NO: 13110 - protein, 80 aa, Synthetic construct
DEPPFSEAALEQALGEPCDLDAALLTDIEDMLQLINNQDSDFPGLFDPPYAGSGAGGTDPASPDTSSPGSLSPPQAAPSP

SEQ ID NO: 13111 - protein, 80 aa, Synthetic construct
DEPPFSEAALEQALGEPCDLDAALLTDIEDMLQLINNQDSDFPGLFDPPYAGSGAGGTDPASPDTSSPGSLSPPPAAPSP

SEQ ID NO: 13112 - protein, 80 aa, Synthetic construct
DEPPFSEAALEQALGEPCDLDAALLTDIEDMLQLINNQDSDFPGLFDPPYAGSGAGGTDPASPDTSSPGSLSPPPATLSP

SEQ ID NO: 13113 - protein, 80 aa, Synthetic construct; identical to SEQ ID NO: 243

SEQ ID NO: 13114 - protein, 80 aa, Synthetic construct
TELGDELTLGDIDEMLQFVSNQVGEFPDLFSEQLCSSFPGSGGSGSSSGSSGSSSSSSNGRGSSSGAVDPSVQRSFTQVT

SEQ ID NO: 13115 - protein, 80 aa, Synthetic construct
DDLGDELTLGDIDEMLQFVSNQVGEFPDLFSEQLCSSFPGSGGSGSSSGSSGSSSSSSNGRGSSSGAVDPSVQRSFTQVT

SEQ ID NO: 13116 - protein, 80 aa, Synthetic construct
DDSGDELTLGDIDEMLQFVSNQVGEFPDLFSEQLCSSFPGSGGSGSSSGSSGSSSSSSNGRGSSSGAVDPSVQRSFTQVT

SEQ ID NO: 13117 - protein, 80 aa, Synthetic construct
DDSGELLTLGDIDEMLQFVSNQVGEFPDLFSEQLCSSFPGSGGSGSSSGSSGSSSSSSNGRGSSSGAVDPSVQRSFTQVT

SEQ ID NO: 13118 - protein, 80 aa, Synthetic construct
DDSGELGGLGDIDEMLQFVSNQVGEFPDLFSEQLCSSFPGSGGSGSSSGSSGSSSSSSNGRGSSSGAVDPSVQRSFTQVT

SEQ ID NO: 13119 - protein, 80 aa, Synthetic construct
DDSGELGGLEDIDEMLQFVSNQVGEFPDLFSEQLCSSFPGSGGSGSSSGSSGSSSSSSNGRGSSSGAVDPSVQRSFTQVT

SEQ ID NO: 13120 - protein, 80 aa, Synthetic construct
DDSGELGGLETMETLTELGDELTLGDIDEMLQQLCSSFPGSGGSGSSSGSSGSSSSSSNGRGSSSGAVDPSVQRSFTQVT

SEQ ID NO: 13121 - protein, 80 aa, Synthetic construct
DDSGELGGLETMETLTELGDELTLGDIDEMLQFVSNSFPGSGGSGSSSGSSGSSSSSSNGRGSSSGAVDPSVQRSFTQVT

SEQ ID NO: 13122 - protein, 80 aa, Synthetic construct
DDSGELGGLETMETLTELGDELTLGDIDEMLQFVSNQVGESGGSGSSSGSSGSSSSSSNGRGSSSGAVDPSVQRSFTQVT

SEQ ID NO: 13123 - protein, 80 aa, Synthetic construct
DDSGELGGLETMETLTELGDELTLGDIDEMLQFVSNQVGEFPGSGSSSGSSGSSSSSSNGRGSSSGAVDPSVQRSFTQVT

SEQ ID NO: 13124 - protein, 80 aa, Synthetic construct
DDSGELGGLETMETLTELGDELTLGDIDEMLQFVSNQVGEFPDLGSSSGSSGSSSSSSNGRGSSSGAVDPSVQRSFTQVT

SEQ ID NO: 13125 - protein, 80 aa, Synthetic construct
DDSGELGGLETMETLTELGDELTLGDIDEMLQFVSNQVGEFPDLFSSSGSSGSSSSSSNGRGSSSGAVDPSVQRSFTQVT

SEQ ID NO: 13126 - protein, 80 aa, Synthetic construct
DDSGELGGLETMETLTELGDELTLGDIDEMLQFVSNQVGEFPDLFSEQGSSGSSSSSSNGRGSSSGAVDPSVQRSFTQVT

SEQ ID NO: 13127 - protein, 80 aa, Synthetic construct
DDSGELGGLETMETLTELGDELTLGDIDEMLQFVSNQVGEFPDLFSEQLCSGSSSSSSNGRGSSSGAVDPSVQRSFTQVT

SEQ ID NO: 13128 - protein, 80 aa, Synthetic construct
DDSGELGGLETMETLTELGDELTLGDIDEMLQFVSNQVGEFPDLFSEQLCSSSSSSSSNGRGSSSGAVDPSVQRSFTQVT

SEQ ID NO: 13129 - protein, 80 aa, Synthetic construct
DDSGELGGLETMETLTELGDELTLGDIDEMLQFVSNQVGEFPDLFSEQLCSSFPSSSSNGRGSSSGAVDPSVQRSFTQVT

SEQ ID NO: 13130 - protein, 80 aa, Synthetic construct
DDSGELGGLETMETLTELGDELTLGDIDEMLQFVSNQVGEFPDLFSEQLCSSFPGSGGNGRGSSSGAVDPSVQRSFTQVT

SEQ ID NO: 13131 - protein, 80 aa, Synthetic construct
DDSGELGGLETMETLTELGDELTLGDIDEMLQFVSNQVGEFPDLFSEQLCSSFPGSGGSGRGSSSGAVDPSVQRSFTQVT

SEQ ID NO: 13132 - protein, 80 aa, Synthetic construct
DDSGELGGLETMETLTELGDELTLGDIDEMLQFVSNQVGEFPDLFSEQLCSSFPGSGGSGSSSSSGAVDPSVQRSFTQVT

SEQ ID NO: 13133 - protein, 80 aa, Synthetic construct
DDSGELGGLETMETLTELGDELTLGDIDEMLQFVSNQVGEFPDLFSEQLCSSFPGSGGSGSSSGSGAVDPSVQRSFTQVT

SEQ ID NO: 13134 - protein, 80 aa, Synthetic construct
DDSGELGGLETMETLTELGDELTLGDIDEMLQFVSNQVGEFPDLFSEQLCSSFPGSGGSGSSSGSSAVDPSVQRSFTQVT

SEQ ID NO: 13135 - protein, 80 aa, Synthetic construct
DDSGELGGLETMETLTELGDELTLGDIDEMLQFVSNQVGEFPDLFSEQLCSSFPGSGGSGSSSGSSGSDPSVQRSFTQVT

SEQ ID NO: 13136 - protein, 80 aa, Synthetic construct
DDSGELGGLETMETLTELGDELTLGDIDEMLQFVSNQVGEFPDLFSEQLCSSFPGSGGSGSSSGSSGSSSSVQRSFTQVT

SEQ ID NO: 13137 - protein, 80 aa, Synthetic construct
DDSGELGGLETMETLTELGDELTLGDIDEMLQFVSNQVGEFPDLFSEQLCSSFPGSGGSGSSSGSSGSSSSSQRSFTQVT

SEQ ID NO: 13138 - protein, 80 aa, Synthetic construct
DDSGELGGLETMETLTELGDELTLGDIDEMLQFVSNQVGEFPDLFSEQLCSSFPGSGGSGSSSGSSGSSSSSSNSFTQVT

SEQ ID NO: 13139 - protein, 80 aa, Synthetic construct
DDSGELGGLETMETLTELGDELTLGDIDEMLQFVSNQVGEFPDLFSEQLCSSFPGSGGSGSSSGSSGSSSSSSNGRTQVT

SEQ ID NO: 13140 - protein, 80 aa, Synthetic construct
DDSGELGGLETMETLTELGDELTLGDIDEMLQFVSNQVGEFPDLFSEQLCSSFPGSGGSGSSSGSSGSSSSSSNGRGSVT

SEQ ID NO: 13141 - protein, 80 aa, Synthetic construct; identical to SEQ ID NO: 289

SEQ ID NO: 13142 - protein, 80 aa, Synthetic construct
ITTSTGFLTDLTLDDILFADIDTSMYDFDPCTSSSGTASKMAPVSADDLLKTLAPYSSQPVTPSQPFKMDLTELDHIMEV

SEQ ID NO: 13143 - protein, 80 aa, Synthetic construct
ADTSTGFLTDLTLDDILFADIDTSMYDFDPCTSSSGTASKMAPVSADDLLKTLAPYSSQPVTPSQPFKMDLTELDHIMEV

SEQ ID NO: 13144 - protein, 80 aa, Synthetic construct
ADDSTGFLTDLTLDDILFADIDTSMYDFDPCTSSSGTASKMAPVSADDLLKTLAPYSSQPVTPSQPFKMDLTELDHIMEV

SEQ ID NO: 13145 - protein, 80 aa, Synthetic construct
ADDSKLFLTDLTLDDILFADIDTSMYDFDPCTSSSGTASKMAPVSADDLLKTLAPYSSQPVTPSQPFKMDLTELDHIMEV

SEQ ID NO: 13146 - protein, 80 aa, Synthetic construct
ADDSKLMDTDLTLDDILFADIDTSMYDFDPCTSSSGTASKMAPVSADDLLKTLAPYSSQPVTPSQPFKMDLTELDHIMEV

SEQ ID NO: 13147 - protein, 80 aa, Synthetic construct
ADDSKLMDSLLTLDDILFADIDTSMYDFDPCTSSSGTASKMAPVSADDLLKTLAPYSSQPVTPSQPFKMDLTELDHIMEV

SEQ ID NO: 13148 - protein, 80 aa, Synthetic construct
ADDSKLMDSLPGLDDILFADIDTSMYDFDPCTSSSGTASKMAPVSADDLLKTLAPYSSQPVTPSQPFKMDLTELDHIMEV

SEQ ID NO: 13149 - protein, 80 aa, Synthetic construct
ADDSKLMDSLPGNFDILFADIDTSMYDFDPCTSSSGTASKMAPVSADDLLKTLAPYSSQPVTPSQPFKMDLTELDHIMEV

SEQ ID NO: 13150 - protein, 80 aa, Synthetic construct
ADDSKLMDSLPGNFEILFADIDTSMYDFDPCTSSSGTASKMAPVSADDLLKTLAPYSSQPVTPSQPFKMDLTELDHIMEV

SEQ ID NO: 13151 - protein, 80 aa, Synthetic construct
ADDSKLMDSLPGNFEITTSTGFLTDLTLDDILSSSGTASKMAPVSADDLLKTLAPYSSQPVTPSQPFKMDLTELDHIMEV

SEQ ID NO: 13152 - protein, 80 aa, Synthetic construct
ADDSKLMDSLPGNFEITTSTGFLTDLTLDDILFASGTASKMAPVSADDLLKTLAPYSSQPVTPSQPFKMDLTELDHIMEV

SEQ ID NO: 13153 - protein, 80 aa, Synthetic construct
ADDSKLMDSLPGNFEITTSTGFLTDLTLDDILFADITASKMAPVSADDLLKTLAPYSSQPVTPSQPFKMDLTELDHIMEV

SEQ ID NO: 13154 - protein, 80 aa, Synthetic construct
ADDSKLMDSLPGNFEITTSTGFLTDLTLDDILFADIDTSKMAPVSADDLLKTLAPYSSQPVTPSQPFKMDLTELDHIMEV

SEQ ID NO: 13155 - protein, 80 aa, Synthetic construct
ADDSKLMDSLPGNFEITTSTGFLTDLTLDDILFADIDTSMMAPVSADDLLKTLAPYSSQPVTPSQPFKMDLTELDHIMEV

SEQ ID NO: 13156 - protein, 80 aa, Synthetic construct
ADDSKLMDSLPGNFEITTSTGFLTDLTLDDILFADIDTSMYDPVSADDLLKTLAPYSSQPVTPSQPFKMDLTELDHIMEV

SEQ ID NO: 13157 - protein, 80 aa, Synthetic construct
ADDSKLMDSLPGNFEITTSTGFLTDLTLDDILFADIDTSMYDFDSADDLLKTLAPYSSQPVTPSQPFKMDLTELDHIMEV

SEQ ID NO: 13158 - protein, 80 aa, Synthetic construct
ADDSKLMDSLPGNFEITTSTGFLTDLTLDDILFADIDTSMYDFDPCDDLLKTLAPYSSQPVTPSQPFKMDLTELDHIMEV

SEQ ID NO: 13159 - protein, 80 aa, Synthetic construct
ADDSKLMDSLPGNFEITTSTGFLTDLTLDDILFADIDTSMYDFDPCTSLLKTLAPYSSQPVTPSQPFKMDLTELDHIMEV

SEQ ID NO: 13160 - protein, 80 aa, Synthetic construct
ADDSKLMDSLPGNFEITTSTGFLTDLTLDDILFADIDTSMYDFDPCTSSSKTLAPYSSQPVTPSQPFKMDLTELDHIMEV

SEQ ID NO: 13161 - protein, 80 aa, Synthetic construct
ADDSKLMDSLPGNFEITTSTGFLTDLTLDDILFADIDTSMYDFDPCTSSSGTLAPYSSQPVTPSQPFKMDLTELDHIMEV

SEQ ID NO: 13162 - protein, 80 aa, Synthetic construct
ADDSKLMDSLPGNFEITTSTGFLTDLTLDDILFADIDTSMYDFDPCTSSSGTASPYSSQPVTPSQPFKMDLTELDHIMEV

SEQ ID NO: 13163 - protein, 80 aa, Synthetic construct
ADDSKLMDSLPGNFEITTSTGFLTDLTLDDILFADIDTSMYDFDPCTSSSGTASKMSSQPVTPSQPFKMDLTELDHIMEV

SEQ ID NO: 13164 - protein, 80 aa, Synthetic construct
ADDSKLMDSLPGNFEITTSTGFLTDLTLDDILFADIDTSMYDFDPCTSSSGTASKMAPQPVTPSQPFKMDLTELDHIMEV

SEQ ID NO: 13165 - protein, 80 aa, Synthetic construct
ADDSKLMDSLPGNFEITTSTGFLTDLTLDDILFADIDTSMYDFDPCTSSSGTASKMAPVSVTPSQPFKMDLTELDHIMEV

SEQ ID NO: 13166 - protein, 80 aa, Synthetic construct
ADDSKLMDSLPGNFEITTSTGFLTDLTLDDILFADIDTSMYDFDPCTSSSGTASKMAPVSADPSQPFKMDLTELDHIMEV

SEQ ID NO: 13167 - protein, 80 aa, Synthetic construct
ADDSKLMDSLPGNFEITTSTGFLTDLTLDDILFADIDTSMYDFDPCTSSSGTASKMAPVSADDLQPFKMDLTELDHIMEV

SEQ ID NO: 13168 - protein, 80 aa, Synthetic construct
ADDSKLMDSLPGNFEITTSTGFLTDLTLDDILFADIDTSMYDFDPCTSSSGTASKMAPVSADDLLKFKMDLTELDHIMEV

SEQ ID NO: 13169 - protein, 80 aa, Synthetic construct
ADDSKLMDSLPGNFEITTSTGFLTDLTLDDILFADIDTSMYDFDPCTSSSGTASKMAPVSADDLLKTLMDLTELDHIMEV

SEQ ID NO: 13170 - protein, 80 aa, Synthetic construct
ADDSKLMDSLPGNFEITTSTGFLTDLTLDDILFADIDTSMYDFDPCTSSSGTASKMAPVSADDLLKTLAPLTELDHIMEV

SEQ ID NO: 13171 - protein, 80 aa, Synthetic construct
ADDSKLMDSLPGNFEITTSTGFLTDLTLDDILFADIDTSMYDFDPCTSSSGTASKMAPVSADDLLKTLAPYSELDHIMEV

SEQ ID NO: 13172 - protein, 80 aa, Synthetic construct
ADDSKLMDSLPGNFEITTSTGFLTDLTLDDILFADIDTSMYDFDPCTSSSGTASKMAPVSADDLLKTLAPYSSQDHIMEV

SEQ ID NO: 13173 - protein, 80 aa, Synthetic construct
ADDSKLMDSLPGNFEITTSTGFLTDLTLDDILFADIDTSMYDFDPCTSSSGTASKMAPVSADDLLKTLAPYSSQPVIMEV

SEQ ID NO: 13174 - protein, 80 aa, Synthetic construct
ADDSKLMDSLPGNFEITTSTGFLTDLTLDDILFADIDTSMYDFDPCTSSSGTASKMAPVSADDLLKTLAPYSSQPVTPEV

SEQ ID NO: 13175 - protein, 80 aa, Synthetic construct
ADDSKLMDSLPGNFEITTSTGFLTDLTLDDILFADIDTSMYDFDPCTSSSGTASKMAPVSADDLLKTLAPYSSQPVTPSQ

SEQ ID NO: 13176 - protein, 80 aa, Synthetic construct
DRHRIEEKRKRTYETFKSIMKKSPFSGPTDPRPPPRRIQPYPFTSSLSTINYDEFPTMVFPSGQISQASALAPAPPQVLP

SEQ ID NO: 13177 - protein, 80 aa, Synthetic construct
DRHRIEEKRKRTYETFKSIMKKSPFSGPTDPRPPPRRIAVPSRSSASVTINYDEFPTMVFPSGQISQASALAPAPPQVLP

SEQ ID NO: 13178 - protein, 80 aa, Synthetic construct
DRHRIEEKRKRTYETFKSIMKKSPFSGPTDPRPPPRRIAVPSRSSASVPKPAPQPYPFTSSLSTISQASALAPAPPQVLP

SEQ ID NO: 13179 - protein, 80 aa, Synthetic construct
DRHRIEEKRKRTYETFKSIMKKSPFSGPTDPRPPPRRIAVPSRSSASVPKPAPQPYPFTSSLSTINYDEFLAPAPPQVLP

SEQ ID NO: 13180 - protein, 80 aa, Synthetic construct
NSEFQQLLNQGIPVAPHTTEPMLMEYPEAITRLVTGAQRPPDPAPAPLGAPGLPNGLLSGDEDFSSIADMDFSALLSQIS

SEQ ID NO: 13181 - protein, 80 aa, Synthetic construct
NSTDQQLLNQGIPVAPHTTEPMLMEYPEAITRLVTGAQRPPDPAPAPLGAPGLPNGLLSGDEDFSSIADMDFSALLSQIS

SEQ ID NO: 13182 - protein, 80 aa, Synthetic construct
NSTDPALLNQGIPVAPHTTEPMLMEYPEAITRLVTGAQRPPDPAPAPLGAPGLPNGLLSGDEDFSSIADMDFSALLSQIS

SEQ ID NO: 13183 - protein, 80 aa, Synthetic construct
NSTDPAVFNQGIPVAPHTTEPMLMEYPEAITRLVTGAQRPPDPAPAPLGAPGLPNGLLSGDEDFSSIADMDFSALLSQIS

SEQ ID NO: 13184 - protein, 80 aa, Synthetic construct
NSTDPAVFTDGIPVAPHTTEPMLMEYPEAITRLVTGAQRPPDPAPAPLGAPGLPNGLLSGDEDFSSIADMDFSALLSQIS

SEQ ID NO: 13185 - protein, 80 aa, Synthetic construct
NSTDPAVFTDLAPVAPHTTEPMLMEYPEAITRLVTGAQRPPDPAPAPLGAPGLPNGLLSGDEDFSSIADMDFSALLSQIS

SEQ ID NO: 13186 - protein, 80 aa, Synthetic construct
NSTDPAVFTDLASVAPHTTEPMLMEYPEAITRLVTGAQRPPDPAPAPLGAPGLPNGLLSGDEDFSSIADMDFSALLSQIS

SEQ ID NO: 13187 - protein, 80 aa, Synthetic construct
NSTDPAVFTDLASVDNHTTEPMLMEYPEAITRLVTGAQRPPDPAPAPLGAPGLPNGLLSGDEDFSSIADMDFSALLSQIS

SEQ ID NO: 13188 - protein, 80 aa, Synthetic construct
NSTDPAVFTDLASVDNSETEPMLMEYPEAITRLVTGAQRPPDPAPAPLGAPGLPNGLLSGDEDFSSIADMDFSALLSQIS

SEQ ID NO: 13189 - protein, 80 aa, Synthetic construct
NSTDPAVFTDLASVDNSEFQPMLMEYPEAITRLVTGAQRPPDPAPAPLGAPGLPNGLLSGDEDFSSIADMDFSALLSQIS

SEQ ID NO: 13190 - protein, 80 aa, Synthetic construct
NSTDPAVFTDLASVDNSEFQQLLMEYPEAITRLVTGAQRPPDPAPAPLGAPGLPNGLLSGDEDFSSIADMDFSALLSQIS

SEQ ID NO: 13191 - protein, 80 aa, Synthetic construct
NSTDPAVFTDLASVDNSEFQQLLNEYPEAITRLVTGAQRPPDPAPAPLGAPGLPNGLLSGDEDFSSIADMDFSALLSQIS

SEQ ID NO: 13192 - protein, 80 aa, Synthetic construct
NSTDPAVFTDLASVDNSEFQQLLNQGPEAITRLVTGAQRPPDPAPAPLGAPGLPNGLLSGDEDFSSIADMDFSALLSQIS

SEQ ID NO: 13193 - protein, 80 aa, Synthetic construct
NSTDPAVFTDLASVDNSEFQQLLNQGIPAITRLVTGAQRPPDPAPAPLGAPGLPNGLLSGDEDFSSIADMDFSALLSQIS

SEQ ID NO: 13194 - protein, 80 aa, Synthetic construct
NSTDPAVFTDLASVDNSEFQQLLNQGIPVATRLVTGAQRPPDPAPAPLGAPGLPNGLLSGDEDFSSIADMDFSALLSQIS

SEQ ID NO: 13195 - protein, 80 aa, Synthetic construct
NSTDPAVFTDLASVDNSEFQQLLNQGIPVAPHLVTGAQRPPDPAPAPLGAPGLPNGLLSGDEDFSSIADMDFSALLSQIS

SEQ ID NO: 13196 - protein, 80 aa, Synthetic construct
NSTDPAVFTDLASVDNSEFQQLLNQGIPVAPHTTTGAQRPPDPAPAPLGAPGLPNGLLSGDEDFSSIADMDFSALLSQIS

SEQ ID NO: 13197 - protein, 80 aa, Synthetic construct
NSTDPAVFTDLASVDNSEFQQLLNQGIPVAPHTTEPAQRPPDPAPAPLGAPGLPNGLLSGDEDFSSIADMDFSALLSQIS

SEQ ID NO: 13198 - protein, 80 aa, Synthetic construct
NSTDPAVFTDLASVDNSEFQQLLNQGIPVAPHTTEPMLRPPDPAPAPLGAPGLPNGLLSGDEDFSSIADMDFSALLSQIS

SEQ ID NO: 13199 - protein, 80 aa, Synthetic construct
NSTDPAVFTDLASVDNSEFQQLLNQGIPVAPHTTEPMLMEPDPAPAPLGAPGLPNGLLSGDEDFSSIADMDFSALLSQIS

SEQ ID NO: 13200 - protein, 80 aa, Synthetic construct
NSTDPAVFTDLASVDNSEFQQLLNQGIPVAPHTTEPMLMEYPPAPAPLGAPGLPNGLLSGDEDFSSIADMDFSALLSQIS

SEQ ID NO: 13201 - protein, 80 aa, Synthetic construct
NSTDPAVFTDLASVDNSEFQQLLNQGIPVAPHTTEPMLMEYPEAPAPLGAPGLPNGLLSGDEDFSSIADMDFSALLSQIS

SEQ ID NO: 13202 - protein, 80 aa, Synthetic construct
NSTDPAVFTDLASVDNSEFQQLLNQGIPVAPHTTEPMLMEYPEAITPLGAPGLPNGLLSGDEDFSSIADMDFSALLSQIS

SEQ ID NO: 13203 - protein, 80 aa, Synthetic construct
NSTDPAVFTDLASVDNSEFQQLLNQGIPVAPHTTEPMLMEYPEAITRLGAPGLPNGLLSGDEDFSSIADMDFSALLSQIS

SEQ ID NO: 13204 - protein, 80 aa, Synthetic construct
NSTDPAVFTDLASVDNSEFQQLLNQGIPVAPHTTEPMLMEYPEAITRLVTPGLPNGLLSGDEDFSSIADMDFSALLSQIS

SEQ ID NO: 13205 - protein, 80 aa, Synthetic construct
NSTDPAVFTDLASVDNSEFQQLLNQGIPVAPHTTEPMLMEYPEAITRLVTGALPNGLLSGDEDFSSIADMDFSALLSQIS

SEQ ID NO: 13206 - protein, 80 aa, Synthetic construct
NSTDPAVFTDLASVDNSEFQQLLNQGIPVAPHTTEPMLMEYPEAITRLVTGAQRNGLLSGDEDFSSIADMDFSALLSQIS

SEQ ID NO: 13207 - protein, 80 aa, Synthetic construct
NSTDPAVFTDLASVDNSEFQQLLNQGIPVAPHTTEPMLMEYPEAITRLVTGAQRPPLLSGDEDFSSIADMDFSALLSQIS

SEQ ID NO: 13208 - protein, 80 aa, Synthetic construct
NSTDPAVFTDLASVDNSEFQQLLNQGIPVAPHTTEPMLMEYPEAITRLVTGAQRPPDPSGDEDFSSIADMDFSALLSQIS

SEQ ID NO: 13209 - protein, 80 aa, Synthetic construct
NSTDPAVFTDLASVDNSEFQQLLNQGIPVAPHTTEPMLMEYPEAITRLVTGAQRPPDPAPDEDFSSIADMDFSALLSQIS

SEQ ID NO: 13210 - protein, 80 aa, Synthetic construct
NSTDPAVFTDLASVDNSEFQQLLNQGIPVAPHTTEPMLMEYPEAITRLVTGAQRPPDPAPAPDFSSIADMDFSALLSQIS

SEQ ID NO: 13211 - protein, 80 aa, Synthetic construct
NSTDPAVFTDLASVDNSEFQQLLNQGIPVAPHTTEPMLMEYPEAITRLVTGAQRPPDPAPAPLGSSIADMDFSALLSQIS

SEQ ID NO: 13212 - protein, 80 aa, Synthetic construct
NSTDPAVFTDLASVDNSEFQQLLNQGIPVAPHTTEPMLMEYPEAITRLVTGAQRPPDPAPAPLGAPGLDMDFSALLSQIS

SEQ ID NO: 13213 - protein, 80 aa, Synthetic construct
SHPEQNSVDYDQAIAFSDPLSYFTDLSFSAALKEEQRLDGMLLDDTISPFGTDPLLSATSPAVSKESSRRSSFSSDDGDE

SEQ ID NO: 13214 - protein, 80 aa, Synthetic construct
SHPEQNSVDYCQAIAFSDPLSYFTDLSFSAALKEEQRLDGMLLDDTISPFGTDPLLSATSPAVSKESSRRSSFSSDDGDE

SEQ ID NO: 13215 - protein, 80 aa, Synthetic construct
SHPEQNSVDYCQQLTVSQGPSPELCDQAIAFSDPLSYFDGMLLDDTISPFGTDPLLSATSPAVSKESSRRSSFSSDDGDE

SEQ ID NO: 13216 - protein, 80 aa, Synthetic construct
SHPEQNSVDYCQQLTVSQGPSPELCDQAIAFSDPLSYFTDMLLDDTISPFGTDPLLSATSPAVSKESSRRSSFSSDDGDE

SEQ ID NO: 13217 - protein, 80 aa, Synthetic construct
SHPEQNSVDYCQQLTVSQGPSPELCDQAIAFSDPLSYFTDLSFSDTISPFGTDPLLSATSPAVSKESSRRSSFSSDDGDE

SEQ ID NO: 13218 - protein, 80 aa, Synthetic construct
SHPEQNSVDYCQQLTVSQGPSPELCDQAIAFSDPLSYFTDLSFSAAISPFGTDPLLSATSPAVSKESSRRSSFSSDDGDE

SEQ ID NO: 13219 - protein, 80 aa, Synthetic construct
SHPEQNSVDYCQQLTVSQGPSPELCDQAIAFSDPLSYFTDLSFSAALKPFGTDPLLSATSPAVSKESSRRSSFSSDDGDE

SEQ ID NO: 13220 - protein, 80 aa, Synthetic construct
SHPEQNSVDYCQQLTVSQGPSPELCDQAIAFSDPLSYFTDLSFSAALKEEQRLDGMLLDDTISPFGTDRRSSFSSDDGDE

SEQ ID NO: 13221 - protein, 80 aa, Synthetic construct
SHPEQNSVDYCQQLTVSQGPSPELCDQAIAFSDPLSYFTDLSFSAALKEEQRLDGMLLDDTISPFGTDPLSSFSSDDGDE

SEQ ID NO: 13222 - protein, 80 aa, Synthetic construct
SHPEQNSVDYCQQLTVSQGPSPELCDQAIAFSDPLSYFTDLSFSAALKEEQRLDGMLLDDTISPFGTDPLLSFSSDDGDE

SEQ ID NO: 13223 - protein, 80 aa, Synthetic construct
SHPEQNSVDYCQQLTVSQGPSPELCDQAIAFSDPLSYFTDLSFSAALKEEQRLDGMLLDDTISPFGTDPLLSATSDDGDE

SEQ ID NO: 13224 - protein, 80 aa, Synthetic construct
SHPEQNSVDYCQQLTVSQGPSPELCDQAIAFSDPLSYFTDLSFSAALKEEQRLDGMLLDDTISPFGTDPLLSATSPDGDE

SEQ ID NO: 13225 - protein, 80 aa, Synthetic construct
SHPEQNSVDYCQQLTVSQGPSPELCDQAIAFSDPLSYFTDLSFSAALKEEQRLDGMLLDDTISPFGTDPLLSATSPAVDE

SEQ ID NO: 13226 - protein, 80 aa, Synthetic construct; identical to SEQ ID NO: 246

SEQ ID NO: 13227 - protein, 80 aa, Synthetic construct
FSDINVEPLPMEDIPTESVQYEDVDGNWIYGGHNHPPLMVLQPLFTNTGYGDHDQEMLMLQTQEEVVGYCDSDNQLGNDL

SEQ ID NO: 13228 - protein, 80 aa, Synthetic construct
FSITNVEPLPMEDIPTESVQYEDVDGNWIYGGHNHPPLMVLQPLFTNTGYGDHDQEMLMLQTQEEVVGYCDSDNQLGNDL

SEQ ID NO: 13229 - protein, 80 aa, Synthetic construct
FSITQDEPLPMEDIPTESVQYEDVDGNWIYGGHNHPPLMVLQPLFTNTGYGDHDQEMLMLQTQEEVVGYCDSDNQLGNDL

SEQ ID NO: 13230 - protein, 80 aa, Synthetic construct
FSITQDLEIPMEDIPTESVQYEDVDGNWIYGGHNHPPLMVLQPLFTNTGYGDHDQEMLMLQTQEEVVGYCDSDNQLGNDL

SEQ ID NO: 13231 - protein, 80 aa, Synthetic construct
FSITQDLEIPADDIPTESVQYEDVDGNWIYGGHNHPPLMVLQPLFTNTGYGDHDQEMLMLQTQEEVVGYCDSDNQLGNDL

SEQ ID NO: 13232 - protein, 80 aa, Synthetic construct
FSITQDLEIPADIVPTESVQYEDVDGNWIYGGHNHPPLMVLQPLFTNTGYGDHDQEMLMLQTQEEVVGYCDSDNQLGNDL

SEQ ID NO: 13233 - protein, 80 aa, Synthetic construct
FSITQDLEIPADIVELESVQYEDVDGNWIYGGHNHPPLMVLQPLFTNTGYGDHDQEMLMLQTQEEVVGYCDSDNQLGNDL

SEQ ID NO: 13234 - protein, 80 aa, Synthetic construct
FSITQDLEIPADIVELHDVQYEDVDGNWIYGGHNHPPLMVLQPLFTNTGYGDHDQEMLMLQTQEEVVGYCDSDNQLGNDL

SEQ ID NO: 13235 - protein, 80 aa, Synthetic construct
FSITQDLEIPADIVELHDINYEDVDGNWIYGGHNHPPLMVLQPLFTNTGYGDHDQEMLMLQTQEEVVGYCDSDNQLGNDL

SEQ ID NO: 13236 - protein, 80 aa, Synthetic construct
FSITQDLEIPADIVELHDINVEDVDGNWIYGGHNHPPLMVLQPLFTNTGYGDHDQEMLMLQTQEEVVGYCDSDNQLGNDL

SEQ ID NO: 13237 - protein, 80 aa, Synthetic construct
FSITQDLEIPADIVELHDINVEPLDGNWIYGGHNHPPLMVLQPLFTNTGYGDHDQEMLMLQTQEEVVGYCDSDNQLGNDL

SEQ ID NO: 13238 - protein, 80 aa, Synthetic construct
FSITQDLEIPADIVELHDINVEPLPMEDIYGGHNHPPLMVLQPLFTNTGYGDHDQEMLMLQTQEEVVGYCDSDNQLGNDL

SEQ ID NO: 13239 - protein, 80 aa, Synthetic construct
FSITQDLEIPADIVELHDINVEPLPMEDIPTEHNHPPLMVLQPLFTNTGYGDHDQEMLMLQTQEEVVGYCDSDNQLGNDL

SEQ ID NO: 13240 - protein, 80 aa, Synthetic construct
FSITQDLEIPADIVELHDINVEPLPMEDIPTESVHPPLMVLQPLFTNTGYGDHDQEMLMLQTQEEVVGYCDSDNQLGNDL

SEQ ID NO: 13241 - protein, 80 aa, Synthetic construct
FSITQDLEIPADIVELHDINVEPLPMEDIPTESVQYPLMVLQPLFTNTGYGDHDQEMLMLQTQEEVVGYCDSDNQLGNDL

SEQ ID NO: 13242 - protein, 80 aa, Synthetic construct
FSITQDLEIPADIVELHDINVEPLPMEDIPTESVQYEDMVLQPLFTNTGYGDHDQEMLMLQTQEEVVGYCDSDNQLGNDL

SEQ ID NO: 13243 - protein, 80 aa, Synthetic construct
FSITQDLEIPADIVELHDINVEPLPMEDIPTESVQYEDVDLQPLFTNTGYGDHDQEMLMLQTQEEVVGYCDSDNQLGNDL

SEQ ID NO: 13244 - protein, 80 aa, Synthetic construct
FSITQDLEIPADIVELHDINVEPLPMEDIPTESVQYEDVDGNPLFTNTGYGDHDQEMLMLQTQEEVVGYCDSDNQLGNDL

SEQ ID NO: 13245 - protein, 80 aa, Synthetic construct
FSITQDLEIPADIVELHDINVEPLPMEDIPTESVQYEDVDGNWIFTNTGYGDHDQEMLMLQTQEEVVGYCDSDNQLGNDL

SEQ ID NO: 13246 - protein, 80 aa, Synthetic construct
FSITQDLEIPADIVELHDINVEPLPMEDIPTESVQYEDVDGNWIYGNTGYGDHDQEMLMLQTQEEVVGYCDSDNQLGNDL

SEQ ID NO: 13247 - protein, 80 aa, Synthetic construct
FSITQDLEIPADIVELHDINVEPLPMEDIPTESVQYEDVDGNWIYGGHGYGDHDQEMLMLQTQEEVVGYCDSDNQLGNDL

SEQ ID NO: 13248 - protein, 80 aa, Synthetic construct
FSITQDLEIPADIVELHDINVEPLPMEDIPTESVQYEDVDGNWIYGGHNHGDHDQEMLMLQTQEEVVGYCDSDNQLGNDL

SEQ ID NO: 13249 - protein, 80 aa, Synthetic construct
FSITQDLEIPADIVELHDINVEPLPMEDIPTESVQYEDVDGNWIYGGHNHPPHDQEMLMLQTQEEVVGYCDSDNQLGNDL

SEQ ID NO: 13250 - protein, 80 aa, Synthetic construct
FSITQDLEIPADIVELHDINVEPLPMEDIPTESVQYEDVDGNWIYGGHNHPPLMQEMLMLQTQEEVVGYCDSDNQLGNDL

SEQ ID NO: 13251 - protein, 80 aa, Synthetic construct
FSITQDLEIPADIVELHDINVEPLPMEDIPTESVQYEDVDGNWIYGGHNHPPLMVLQPMLQTQEEVVGYCDSDNQLGNDL

SEQ ID NO: 13252 - protein, 80 aa, Synthetic construct
FSITQDLEIPADIVELHDINVEPLPMEDIPTESVQYEDVDGNWIYGGHNHPPLMVLQPLFQTQEEVVGYCDSDNQLGNDL

SEQ ID NO: 13253 - protein, 80 aa, Synthetic construct
FSITQDLEIPADIVELHDINVEPLPMEDIPTESVQYEDVDGNWIYGGHNHPPLMVLQPLFTNQEEVVGYCDSDNQLGNDL

SEQ ID NO: 13254 - protein, 80 aa, Synthetic construct
FSITQDLEIPADIVELHDINVEPLPMEDIPTESVQYEDVDGNWIYGGHNHPPLMVLQPLFTNTGEVVGYCDSDNQLGNDL

SEQ ID NO: 13255 - protein, 80 aa, Synthetic construct
FSITQDLEIPADIVELHDINVEPLPMEDIPTESVQYEDVDGNWIYGGHNHPPLMVLQPLFTNTGYGVGYCDSDNQLGNDL

SEQ ID NO: 13256 - protein, 80 aa, Synthetic construct
FSITQDLEIPADIVELHDINVEPLPMEDIPTESVQYEDVDGNWIYGGHNHPPLMVLQPLFTNTGYGDHYCDSDNQLGNDL

SEQ ID NO: 13257 - protein, 80 aa, Synthetic construct
FSITQDLEIPADIVELHDINVEPLPMEDIPTESVQYEDVDGNWIYGGHNHPPLMVLQPLFTNTGYGDHDQDSDNQLGNDL

SEQ ID NO: 13258 - protein, 80 aa, Synthetic construct
FSITQDLEIPADIVELHDINVEPLPMEDIPTESVQYEDVDGNWIYGGHNHPPLMVLQPLFTNTGYGDHDQEMDNQLGNDL

SEQ ID NO: 13259 - protein, 80 aa, Synthetic construct
FSITQDLEIPADIVELHDINVEPLPMEDIPTESVQYEDVDGNWIYGGHNHPPLMVLQPLFTNTGYGDHDQEMLMQLGNDL

SEQ ID NO: 13260 - protein, 80 aa, Synthetic construct
FSITQDLEIPADIVELHDINVEPLPMEDIPTESVQYEDVDGNWIYGGHNHPPLMVLQPLFTNTGYGDHDQEMLMLQGNDL

SEQ ID NO: 13261 - protein, 80 aa, Synthetic construct
FSITQDLEIPADIVELHDINVEPLPMEDIPTESVQYEDVDGNWIYGGHNHPPLMVLQPLFTNTGYGDHDQEMLMLQTQDL

SEQ ID NO: 13262 - protein, 80 aa, Synthetic construct
FSITQDLEIPADIVELHDINVEPLPMEDIPTESVQYEDVDGNWIYGGHNHPPLMVLQPLFTNTGYGDHDQEMLMLQTQEE

SEQ ID NO: 13263 - protein, 80 aa, Synthetic construct
TYTGDGSEHEGDTPELEAEPPRMLSSVSEDTVLWNPEHDESWDSMPSSSRGMLLGPPFLQEDSFSNLLCSTEMDSLLRPH

SEQ ID NO: 13264 - protein, 80 aa, Synthetic construct
VPDPQDSEHEGDTPELEAEPPRMLSSVSEDTVLWNPEHDESWDSMPSSSRGMLLGPPFLQEDSFSNLLCSTEMDSLLRPH

SEQ ID NO: 13265 - protein, 80 aa, Synthetic construct
VPDPQDLEHEGDTPELEAEPPRMLSSVSEDTVLWNPEHDESWDSMPSSSRGMLLGPPFLQEDSFSNLLCSTEMDSLLRPH

SEQ ID NO: 13266 - protein, 80 aa, Synthetic construct
VPDPQDLEERGDTPELEAEPPRMLSSVSEDTVLWNPEHDESWDSMPSSSRGMLLGPPFLQEDSFSNLLCSTEMDSLLRPH

SEQ ID NO: 13267 - protein, 80 aa, Synthetic construct
VPDPQDLEERDITPELEAEPPRMLSSVSEDTVLWNPEHDESWDSMPSSSRGMLLGPPFLQEDSFSNLLCSTEMDSLLRPH

SEQ ID NO: 13268 - protein, 80 aa, Synthetic construct
VPDPQDLEERDILRELEAEPPRMLSSVSEDTVLWNPEHDESWDSMPSSSRGMLLGPPFLQEDSFSNLLCSTEMDSLLRPH

SEQ ID NO: 13269 - protein, 80 aa, Synthetic construct
VPDPQDLEERDILRVTEAEPPRMLSSVSEDTVLWNPEHDESWDSMPSSSRGMLLGPPFLQEDSFSNLLCSTEMDSLLRPH

SEQ ID NO: 13270 - protein, 80 aa, Synthetic construct
VPDPQDLEERDILRVTYTEPPRMLSSVSEDTVLWNPEHDESWDSMPSSSRGMLLGPPFLQEDSFSNLLCSTEMDSLLRPH

SEQ ID NO: 13271 - protein, 80 aa, Synthetic construct
VPDPQDLEERDILRVTYTGDPRMLSSVSEDTVLWNPEHDESWDSMPSSSRGMLLGPPFLQEDSFSNLLCSTEMDSLLRPH

SEQ ID NO: 13272 - protein, 80 aa, Synthetic construct
VPDPQDLEERDILRVTYTGDGSMLSSVSEDTVLWNPEHDESWDSMPSSSRGMLLGPPFLQEDSFSNLLCSTEMDSLLRPH

SEQ ID NO: 13273 - protein, 80 aa, Synthetic construct
VPDPQDLEERDILRVTYTGDGSEHEGVSEDTVLWNPEHDESWDSMPSSSRGMLLGPPFLQEDSFSNLLCSTEMDSLLRPH

SEQ ID NO: 13274 - protein, 80 aa, Synthetic construct
TARKKMILATKQICKAFQALLSQARSPLGSSRPTPILALAIQRHLTHFSLITHGFGTPAICAALSTFQTVLSAMLNYLAK

SEQ ID NO: 13275 - protein, 80 aa, Synthetic construct
KKKKAYIAGLATRMSACTAQNQALQRKVLHLAKQNLSLLAQLKKLQAIVVQSTSKSAQTGTCVAVLLLSFALIILPSISP

SEQ ID NO: 13276 - protein, 80 aa, Synthetic construct
PGPLAAFAAIPVAVAAAAAFLPGFSAAAWCNGLPYPSQAHGPQVLGSAVKVKPPVLASGAGMFCYQPPLQHMYCSSQPPF

SEQ ID NO: 13277 - protein, 80 aa, Synthetic construct
PCIQAQYGTPAPSPGPRAHLASAPLTPAFIKPTMALASPAAAPAAPTALPSFSTFMAGYTGAFATFLYQLPGTVQPCSSA

SEQ ID NO: 13278 - protein, 80 aa, Synthetic construct
KPTMALASPAAAPAAPTALPSFSTFMAGYTGAFATFLYQLPGTVQPCSSASSSASSTSSSSATSPASASFKFAAFQVYGC

SEQ ID NO: 13279 - protein, 80 aa, Synthetic construct
CYSNYPFPLTSWPCSFSPSQNSSAPFYQQLPLAPPAAKTGCPPLWPNPAGNLYAAKVHVAFNSYVQSPAYHSPQAAPFLF

SEQ ID NO: 13280 - protein, 80 aa, Synthetic construct
QSTQTNAFLSPAVFQHIWAFLAQPICSVQPIALNFVAAPSAAGATNKIAISMACIRMQASALSAPMWPQYTNLGLLNSMA

SEQ ID NO: 13281 - protein, 80 aa, Synthetic construct
PAVFQHIWAFLAQPICSVQPIALNFVAAPSAAGATNKIAISMACIRMQASALSAPMWPQYTNLGLLNSMAQQIQNGSSST

SEQ ID NO: 13282 - protein, 80 aa, Synthetic construct
ATNGVIRSAGGVPILPGNVVQGLYPVAQPSLGNASNMALSLAHFAISFSNQFSALINAFISVAGGSSTIYGHQLVSGAST

SEQ ID NO: 13283 - protein, 80 aa, Synthetic construct
GSSGAAAAALMFALSLNFSQSAHSASAQQLGGGAAAGNLSLSLVAKALASFSAGSLGSHFAFPAYCTPALSAMIAGAWLA

SEQ ID NO: 13284 - protein, 80 aa, Synthetic construct
LAPLKGNFAWAAIFAAGTLGGALGALAALALSPPLSPASHVAVALTIHGRHIACPATWGPSVAQAAASLAFAATFLATSF

SEQ ID NO: 13285 - protein, 80 aa, Synthetic construct
TTNSSAAHRVRLALGLWAKFSALATKCIIKIVAFAKRLPGFTGLTIAAQITLLKAACLAILILRICTRYTPAQATMTFSA

SEQ ID NO: 13286 - protein, 80 aa, Synthetic construct
LVGALMSPFAQSGLGAAASLGLLAAYLAVAKHFKPHGFSSAKAKAGSSAWLAVAGLVSPSNNSKAAAFSGTAWMLAKMAL

SEQ ID NO: 13287 - protein, 80 aa, Synthetic construct
SLAQAPLLSRMGSLRAPVAAARLSPLVAAASLLAHVRAAFSGLLPAAFISLSPPHAALAYHFGLAAGAGIRALFACAFGA

SEQ ID NO: 13288 - protein, 80 aa, Synthetic construct
SQAFLLFSPAVASLPVASSSTLLPLAPSNSTSLNSTFGSTNLTGLFFPPQLNGTANATAGPALPAPLGGLLAAAMLAAIS

SEQ ID NO: 13289 - protein, 80 aa, Synthetic construct
VGLCPKPLAAPGPSSLVPTLSMIAPPPVMASAPIPKALGTPVLTPPTAAASQARMPQALALAMYMANLACAMANIISALM

SEQ ID NO: 13290 - protein, 80 aa, Synthetic construct
PGPSSLVPTLSMIAPPPVMASAPIPKALGTPVLTPPTAAASQARMPQALALAMYMANLACAMANIISALMAAGAGLAFNF

SEQ ID NO: 13291 - protein, 80 aa, Synthetic construct
KGRKPRALALPLSPSLLGGPGPARTPGSGSGSGLQAPGPALTPSLLPTHTLTPVLLTPSSLPPSIHFWSTLSPIAPRSPA

SEQ ID NO: 13292 - protein, 80 aa, Synthetic construct
PLSPSLLGGPGPARTPGSGSGSGLQAPGPALTPSLLPTHTLTPVLLTPSSLPPSIHFWSTLSPIAPRSPAKLSFQFPSSG

SEQ ID NO: 13293 - protein, 80 aa, Synthetic construct
GPALTPSLLPTHTLTPVLLTPSSLPPSIHFWSTLSPIAPRSPAKLSFQFPSSGSAQVHIPSISVAGLSTPVVLSPGPQKP

SEQ ID NO: 13294 - protein, 80 aa, Synthetic construct
GGYSSVSSCNGYGRMGLLHQAKLPSALAGMFIARLACAMASIIRNALMAGATLAFNFANVLPNQSFPHSVKTTTHSWVSG

SEQ ID NO: 13295 - protein, 80 aa, Synthetic construct
GQTGTNGGNVKLYTTAQSTFAILQALAFSSGSPGKATNASPWRSALLIAANCLLSPLAGAAASFLLAGNSNAACKPLILP

SEQ ID NO: 13296 - protein, 80 aa, Synthetic construct
MPCVQAQYSPSPPGSSYAAQTYSSAYTTAIMNPAYTKLTMALGSTAITATATTSLPSISTFVAGYSSNYALKPSCVYQMQ

SEQ ID NO: 13297 - protein, 80 aa, Synthetic construct
WAAKIPGFTALPKAAQTLLIASAFLALFVLRLSIRSNTAAAKFVFCNGLVLHRLQCLRGFGAWLASIKAFSLNLQSLNLA

SEQ ID NO: 13298 - protein, 80 aa, Synthetic construct
AAVTALLQSHAKTLTAAALFLMAAQRKWFLAMASTPGAAAVNIVAMTTKALAYYINLVAKAAAGFARIASNFARSSTVGK

SEQ ID NO: 13299 - protein, 80 aa, Synthetic construct
LKSRVATFCKGAALKSICCIIHPASLCAQKLKMAHVMAVVVKSVNWICSRGLNHSAFTTLLYALASQYGSLLYYTAIKWL

SEQ ID NO: 13300 - protein, 80 aa, Synthetic construct
LGGICAHATSIAISAYIAPAAFNAAFLAALFQHSRQQAKAKAAVGPTGGGGGGAFAYPGAPAGPGGAVMPGGAHGPPPGY

SEQ ID NO: 13301 - protein, 80 aa, Synthetic construct
SSHTSAIYGSTSPMNFYSTSSQAAGSYLNSSNPMNPYPGLLNQNTQYPSYQCNGNLSVANCSPYLGSYSPQSQPMALYRY

SEQ ID NO: 13302 - protein, 80 aa, Synthetic construct
SQAAGSYLNSSNPMNPYPGLLNQNTQYPSYQCNGNLSVANCSPYLGSYSPQSQPMALYRYPSQAPLSKLSLPPIHTLYQP

SEQ ID NO: 13303 - protein, 80 aa, Synthetic construct
SNPMNPYPGLLNQNTQYPSYQCNGNLSVANCSPYLGSYSPQSQPMALYRYPSQAPLSKLSLPPIHTLYQPRFGNSQSFTS

SEQ ID NO: 13304 - protein, 80 aa, Synthetic construct
LNQNTQYPSYQCNGNLSVANCSPYLGSYSPQSQPMALYRYPSQAPLSKLSLPPIHTLYQPRFGNSQSFTSKYLGYGNQNM

SEQ ID NO: 13305 - protein, 80 aa, Synthetic construct
QCNGNLSVANCSPYLGSYSPQSQPMALYRYPSQAPLSKLSLPPIHTLYQPRFGNSQSFTSKYLGYGNQNMQGAGFSSCTI

SEQ ID NO: 13306 - protein, 80 aa, Synthetic construct
QSQPMALYRYPSQAPLSKLSLPPIHTLYQPRFGNSQSFTSKYLGYGNQNMQGAGFSSCTIRPNVHHVGKLPPYPTHAMAG

SEQ ID NO: 13307 - protein, 80 aa, Synthetic construct
LPPIHTLYQPRFGNSQSFTSKYLGYGNQNMQGAGFSSCTIRPNVHHVGKLPPYPTHAMAGHFMGATSRLPPNLSNPNMAY

SEQ ID NO: 13308 - protein, 80 aa, Synthetic construct
CAAMAHMQTQNQFYIPVQIPGYQYVSPAGNCIAHVQPTSAFIQQPFIAAAPAKAKKIKALAMLLMSAANAVRRKRIPSQP

SEQ ID NO: 13309 - protein, 80 aa, Synthetic construct
FIQQPFIAAAPAKAKKIKALAMLLMSAANAVRRKRIPSQPGSFSSWSGSFLMAANMSNTLNSLAAHTSAFYSMAANQPVS

SEQ ID NO: 13310 - protein, 80 aa, Synthetic construct
QLQFAAAALGALLGNSTAPAVFTALASVANSAFQQLLNQGIPVAPHTTAPMLMAYPAAITRLVTGAQRPPAPAPAPLGAP

SEQ ID NO: 13311 - protein, 80 aa, Synthetic construct
VHISQHCPSPGAPPLASVAVRQIYAKFPAKKGGLRALYARGPPHAFFLVKFWAALNWGPSGAAAGAGGSISSGGFYGVSS

SEQ ID NO: 13312 - protein, 80 aa, Synthetic construct
GLAPPGHAAAFGGPPGGLLLAALPGPYAAAAAGPLGAAPARFPAALALAMFSGSLACAVASIILNAFMASAAMAFNFASA

SEQ ID NO: 13313 - protein, 80 aa, Synthetic construct
SSYFVNSTFPVTLASGQASFLGQLPLYSSGYAAPLRHYPAPYGPGPGQAKGFATSSYYPPAGGGYGRAAPCAYGPAPAFY

SEQ ID NO: 13314 - protein, 80 aa, Synthetic construct
PTYPSLYSSYHQGCLVNPTGNLPMWSNQTWNNSTWSNQTQNIQSWSNHSWNTQTWCTQSWNNQAWNSPFYNCGAASLQSC

SEQ ID NO: 13315 - protein, 80 aa, Synthetic construct
HQGCLVNPTGNLPMWSNQTWNNSTWSNQTQNIQSWSNHSWNTQTWCTQSWNNQAWNSPFYNCGAASLQSCMQFQPNSPAS

SEQ ID NO: 13316 - protein, 80 aa, Synthetic construct
NLPMWSNQTWNNSTWSNQTQNIQSWSNHSWNTQTWCTQSWNNQAWNSPFYNCGAASLQSCMQFQPNSPASALAAALAAAG

SEQ ID NO: 13317 - protein, 80 aa, Synthetic construct
NNSTWSNQTQNIQSWSNHSWNTQTWCTQSWNNQAWNSPFYNCGAASLQSCMQFQPNSPASALAAALAAAGAGLNVIQQTT

SEQ ID NO: 13318 - protein, 80 aa, Synthetic construct
RLVASVPALYSAAYAIFQIIALYNLPAANAISSSSFHCLYQYLSPTKYQVGGQGSSLSIFAGPAVGLSPAQTWPNMTSQA

SEQ ID NO: 13319 - protein, 80 aa, Synthetic construct
TMATLTALGAALTLGAIAAMLQFVSNQVGAFPALFSAQLCSSFPGSGGSGSSSGSSGSSSSSSNGRGSSSGAVAPSVQRS

SEQ ID NO: 13320 - protein, 80 aa, Synthetic construct
LSKIIPACSMASTKSGQSKGGILSKACAYIQALRQSNHRLSAALQGLAQLQLANAVLRQQVAALKNKNLLLRAQLRHHGL

SEQ ID NO: 13321 - protein, 80 aa, Synthetic construct
LAKNYILMQAQALAAMRRLVAFLNQGQGLAAPVNAAPLTPFGQATVCPFSAGAALGPCPAKCAAFSGTPSALCKHCHAKP

SEQ ID NO: 13322 - protein, 80 aa, Synthetic construct
PSAITTANIRPVSPGISAANAHALRAPSGIKNPGGASASARVSSWASQSYAIAQICLGASNPPWASTLFAIAAFVKIYAL

SEQ ID NO: 13323 - protein, 80 aa, Synthetic construct
QTAPWPASILPIAQASFASQNRQPFGSSPAALLCPHPAAASPSAAGALLAQLYLALRNFAGLAAIARALGIPALVSQSQA

SEQ ID NO: 13324 - protein, 80 aa, Synthetic construct
ALLCPHPAAASPSAAGALLAQLYLALRNFAGLAAIARALGIPALVSQSQAVAPAQFSSQASNIMLAQKAPVFPQQYASQA

SEQ ID NO: 13325 - protein, 80 aa, Synthetic construct
PAASLFMFPCGPSGGTSQGYCPGASSGQILMQPPAGNIGTASWSAPCLPALPFPGPFCPQALGHPPGGAGYFPALFPTPC

SEQ ID NO: 13326 - protein, 80 aa, Synthetic construct; identical to SEQ ID NO: 13314

SEQ ID NO: 13327 - protein, 80 aa, Synthetic construct
HQGCLVNPTGNLPMWSNQTWNNSTWSNQTQNIQSWSNHSWNTQTWCTQSWNNQAWNSPFYNCGAASLQSCMHFQPNSPAS

SEQ ID NO: 13328 - protein, 80 aa, Synthetic construct
NLPMWSNQTWNNSTWSNQTQNIQSWSNHSWNTQTWCTQSWNNQAWNSPFYNCGAASLQSCMHFQPNSPASALAAALAAAG

SEQ ID NO: 13329 - protein, 80 aa, Synthetic construct
NNSTWSNQTQNIQSWSNHSWNTQTWCTQSWNNQAWNSPFYNCGAASLQSCMHFQPNSPASALAAALAAAGAGLNVIQQTT

SEQ ID NO: 13330 - protein, 80 aa, Synthetic construct
SPSRGFAAHSSAPPSWVTAMLLANALWGSPAAAAAFGLGGLGGLTPNPVILQACMWSGFSARAKLARAVSAKLQHGRGPP

SEQ ID NO: 13331 - protein, 80 aa, Synthetic construct
LLGFLPLNLPPCNPPGATGGLVMGYSQAAAQPLLTTLQAQPQASPGAGGPLNFGPLHSLPPVFTSGLSSTTLPRFHQAFQ

SEQ ID NO: 13332 - protein, 80 aa, Synthetic construct
LFNFIPLNGPPYNPLSVGSLGMSYSQAAAHSSVSQLPPQTQALQAPANTIGLGSLHSLSAAFTSSLSTSTTLPRFHQAFQ

SEQ ID NO: 13333 - protein, 80 aa, Synthetic construct
LGFWQLPPPATQNTFGNSTLALGPGASLPHRLSCLGQQQQAPPLAMGTVSLGQLPLPPIPHVFSAGTGSAILPHFHHAFR

SEQ ID NO: 13334 - protein, 80 aa, Synthetic construct
CNVQFNLLAPLKYHMKHCCPAMITKFLGVIVKSARPCAAAKTASATGKLIMLVNAFYYGRHAGVTAKAPKTYTTFKCFSC

SEQ ID NO: 13335 - protein, 80 aa, Synthetic construct
SYTGFVQGSATTLQSTYSATSAQPTCAYGYGTWNSGTNRGYAGYGYGYGYGQANTTNYGYGMATSHSWAMPSSATNANTS

SEQ ID NO: 13336 - protein, 80 aa, Synthetic construct
IMKAVSSSLQNRVHPRPLVKLLPKGVQKAQATVSLYLKANPAALVVFAALNVFHCQAACVSLAPTQQLTSAKAAASSVGA

SEQ ID NO: 13337 - protein, 80 aa, Synthetic construct
LRTGFLPSLAATPFPLPASALAMAAAAKLASLITAALNGMAYQSANPAIASSFIAVFAAAAPSGPRGPSSGHPLKSKAGV

SEQ ID NO: 13338 - protein, 80 aa, Synthetic construct
RWAIMSRAAAIITLQQFLRFGATKSIVALMAIQAKAGQAVAVPSSKTASAIRTFIASNNRTRSPSLLAHLANSNPSSIHH

SEQ ID NO: 13339 - protein, 80 aa, Synthetic construct
FHPSQVSPRARFPVSITSPNRTGARTLAAIKAKAQLVKAQRAAAAAAAAAAAAASVGGTIPGPGPGGGQGPGAGGAGQTA

SEQ ID NO: 13340 - protein, 80 aa, Synthetic construct
RFPVSITSPNRTGARTLAAIKAKAQLVKAQRAAAAAAAAAAAAASVGGTIPGPGPGGGQGPGAGGAGQTARGGSPGSARV

SEQ ID NO: 13341 - protein, 80 aa, Synthetic construct
SKARAKGNNPATKKSIPCPPKTTAGKKCSALVSHCLNSLSAFMANMSFLAALLTAVRAQNKYGRNAFSWTNGKVTSGLCA

SEQ ID NO: 13342 - protein, 80 aa, Synthetic construct
AFMANMSFLAALLTAVRAQNKYGRNAFSWTNGKVTSGLCAAFSLASNAGWTSQSSGALKAAAAALSFTKCSSAISKALAT

SEQ ID NO: 13343 - protein, 80 aa, Synthetic construct
NMIIAGGHFTLGAQKPAAAAALQLSAILKFGLAKLLASAGSTMAAIALASILGATKAGQWVSAALPAAAGGSRAQAAGKN

SEQ ID NO: 13344 - protein, 80 aa, Synthetic construct
LANNSGRSNSNPFNKAALTAILKFGAAALFKALAGAASAPQAMAIAAILRLAATRANAVSTSATAALLSQFKVANFATMA

SEQ ID NO: 13345 - protein, 80 aa, Synthetic construct
AAILGAAAAKAFAGSPARALAVPLPAIAYMAIPVAWWAAAAAKSLLIGVFKHGYARYNAMRAAPALCFLAKVGMPAAKSL

SEQ ID NO: 13346 - protein, 80 aa, Synthetic construct
SKVTALAAKFALLVAANAVILARVGILLAAASGVNKNQQPVLPAGLQVPKTVVSSWNRKAAAYGKKAKSATFRLLHAKNI

SEQ ID NO: 13347 - protein, 80 aa, Synthetic construct
GLSQSQSPGQTGFLSYGTSFSTPQPGQAPYSYQMQGSSFTTSSGIYTGNNSLTNSSGFNSSQQAYPSYPSFGQGQYAQYY

SEQ ID NO: 13348 - protein, 80 aa, Synthetic construct
TGFLSYGTSFSTPQPGQAPYSYQMQGSSFTTSSGIYTGNNSLTNSSGFNSSQQAYPSYPSFGQGQYAQYYNSSPYPAHYM

SEQ ID NO: 13349 - protein, 80 aa, Synthetic construct
PGQSGFLSYGSSFSTSPTGQSPYTYQMHGTTGFYQGGNGLGNAAGFGSVHQAYPSYPGFPQSQYPQYYGSSYNPPYVPAS

SEQ ID NO: 13350 - protein, 80 aa, Synthetic construct
SPYTYQMHGTTGFYQGGNGLGNAAGFGSVHQAYPSYPGFPQSQYPQYYGSSYNPPYVPASSICPSPLSTSTYVLQAASHN

SEQ ID NO: 13351 - protein, 80 aa, Synthetic construct
TGFYQGGNGLGNAAGFGSVHQAYPSYPGFPQSQYPQYYGSSYNPPYVPASSICPSPLSTSTYVLQAASHNVPNQSSASLA

SEQ ID NO: 13352 - protein, 80 aa, Synthetic construct
AAIMTCTAYIPRSSNAYTSQMYSAKPYAHILSVPVSATAYPGQTQYQTLQQTQPYAVYPQATQTYGLPPFGALWPGMKPA

SEQ ID NO: 13353 - protein, 80 aa, Synthetic construct
PRSSNAYTSQMYSAKPYAHILSVPVSATAYPGQTQYQTLQQTQPYAVYPQATQTYGLPPFGALWPGMKPASGLIQTPSPS

SEQ ID NO: 13354 - protein, 80 aa, Synthetic construct
MYSAKPYAHILSVPVSATAYPGQTQYQTLQQTQPYAVYPQATQTYGLPPFGALWPGMKPASGLIQTPSPSQHSVLTCTTG

SEQ ID NO: 13355 - protein, 80 aa, Synthetic construct
TQSPLQSGCLSYSPGFSTPQPGQTPYSYQMPGSSFAPSSTIYANNSVSNSTNFSGSQQAYPSYTAFGQNQYAQYYSASTY

SEQ ID NO: 13356 - protein, 80 aa, Synthetic construct
SYSPGFSTPQPGQTPYSYQMPGSSFAPSSTIYANNSVSNSTNFSGSQQAYPSYTAFGQNQYAQYYSASTYGAYMTSNNTA

SEQ ID NO: 13357 - protein, 80 aa, Synthetic construct
ALAAAALANLNLATAAGKVVALATLANLATNAPNLAALLRSGAFAIIAYTAPALAMGAKKSMFNAALALPIAAKLANQCV

SEQ ID NO: 13358 - protein, 80 aa, Synthetic construct
PALAAAFAAHKALAAAAALAHLGLGVAVAKGAAALGTLANLATNAPHLAALLNGAAFALLAYTAPALATGAKKAIFNAHL

SEQ ID NO: 13359 - protein, 80 aa, Synthetic construct
TASLALLQLQQKLLWLLYALGHLARYPMALGNLAALAALAPTPGRPAPLTLYHKGIASAKTYYRAAHIYPYMYLAGYHCR

SEQ ID NO: 13360 - protein, 80 aa, Synthetic construct
NPLLVTKLVKNYRSHAALLMLPSRLFYHRALAVCAAPTVVTSLLGWAKLPKKGFPLIFHGVRGSAARAGKSPSWFNPAAA

SEQ ID NO: 13361 - protein, 80 aa, Synthetic construct
YGQASPSCYIPLRRLQALASMINVAYLNGSAAGSASFQAPAKSASRAQTPIVCTSLSPGGPTALAMKQAPSCNNSPALQV

SEQ ID NO: 13362 - protein, 80 aa, Synthetic construct
GRCVATIVSAIKANFQFKKAGHCLKAIYLVAVSAKTVAAFAAAVKTVFKATLPATAAPPGLPPAAAGPGKTSWAKGSLVS

SEQ ID NO: 13363 - protein, 80 aa, Synthetic construct
KKTLAKVQARTIVTKIAQQMNCKMGGALWKVATAVQRTMFVGIACFHAIVNRQKSIAGFVASTNAALTKWYSQCVIQKTG

SEQ ID NO: 13364 - protein, 80 aa, Synthetic construct
PALPALALSALAVNALATASFLGGLKWCSAQSAIISNQYNNAPSNIFAKIAAANAANLLAVLTATLASLPVAAAGLPSFA

SEQ ID NO: 13365 - protein, 80 aa, Synthetic construct
SNVCSIGAHVAQALFQGSALGMAAAAARPGAKAGQHSPLRAAHVTCVQSILAAFLQTYGSLIPLSTAAVVAKLAAIFQQA

SEQ ID NO: 13366 - protein, 80 aa, Synthetic construct
PHALTANQKNRRFAVSSSLILRNHNAPFLARIVTCAAKWILYANRRRSAQWLAQAAAPKHFPKPILHPKKVMVTIWWSAA

SEQ ID NO: 13367 - protein, 80 aa, Synthetic construct
TGGTKAYIVVGSASGRIVILAYQPSKNMFAKIHQATFGKSGCRRIVPGQFLAVAPKGRAVMISAIAKQKLVYILNRAAAA

SEQ ID NO: 13368 - protein, 80 aa, Synthetic construct
MSPHPSPLGAPAHVSSPMSGGGPTPPQMPPSQPGALIPGAPQAMSQPNRGPSPFSPVQLHQLRAQILAYKMLARGQPLPA

SEQ ID NO: 13369 - protein, 80 aa, Synthetic construct
PAHVSSPMSGGGPTPPQMPPSQPGALIPGAPQAMSQPNRGPSPFSPVQLHQLRAQILAYKMLARGQPLPATLQLAVQGKR

SEQ ID NO: 13370 - protein, 80 aa, Synthetic construct
GGPTPPQMPPSQPGALIPGAPQAMSQPNRGPSPFSPVQLHQLRAQILAYKMLARGQPLPATLQLAVQGKRTLPGLQQQQQ

SEQ ID NO: 13371 - protein, 80 aa, Synthetic construct
PQAMSQPNRGPSPFSPVQLHQLRAQILAYKMLARGQPLPATLQLAVQGKRTLPGLQQQQQQQQQQQQQQQQQQQQQQQPQ

SEQ ID NO: 13372 - protein, 80 aa, Synthetic construct
PSPFSPVQLHQLRAQILAYKMLARGQPLPATLQLAVQGKRTLPGLQQQQQQQQQQQQQQQQQQQQQQQPQQQPPQPQTQQ

SEQ ID NO: 13373 - protein, 80 aa, Synthetic construct
PSPLGGSAHASSPVPASGPSSGPQMSSGPGGAPLAGAAPQALGQQNRGPTPFNQNQLHQLRAQIMAYKMLARGQPLPAHL

SEQ ID NO: 13374 - protein, 80 aa, Synthetic construct
SSPVPASGPSSGPQMSSGPGGAPLAGAAPQALGQQNRGPTPFNQNQLHQLRAQIMAYKMLARGQPLPAHLQMAVQGKRPM

SEQ ID NO: 13375 - protein, 80 aa, Synthetic construct
SGPQMSSGPGGAPLAGAAPQALGQQNRGPTPFNQNQLHQLRAQIMAYKMLARGQPLPAHLQMAVQGKRPMPGMQQQMPTL

SEQ ID NO: 13376 - protein, 80 aa, Synthetic construct
PFNQNQLHQLRAQIMAYKMLARGQPLPAHLQMAVQGKRPMPGMQQQMPTLPPPSVSATGPGPGPGPGPGPGPGPAPPNYS

SEQ ID NO: 13377 - protein, 80 aa, Synthetic construct
LAKSKGASAGRAWTAQATLLLLAALAMYKAAWNKVSAHVGSRTQAACILHFLRLPIAAPYLANSAASLGPLAYQPVPFSQ

SEQ ID NO: 13378 - protein, 80 aa, Synthetic construct
FAGNRYSRKGFLFKSFAMSAVITAGVKPTLSALAKFAAQPAGIALAVVTASTGKARAHNFQPGANVAVCAGALINLQGKI

SEQ ID NO: 13379 - protein, 80 aa, Synthetic construct
CLAPFAAFAKQRYFRAQVLYVSGNSAAVFFVAYGNKSHVALHLLMAIPCQFLALPFQALAFKICKMRPSAKSLVCGKHWS

SEQ ID NO: 13380 - protein, 80 aa, Synthetic construct
KFQKAKAAQKKRAAAHKPVAVPSAAAQGLRALAGASAPLLSLFGSTSANALLQAATAMASLTALALAHLLSASPAGSPFR

SEQ ID NO: 13381 - protein, 80 aa, Synthetic construct
VPSAAAQGLRALAGASAPLLSLFGSTSANALLQAATAMASLTALALAHLLSASPAGSPFRAMAAGSASLGVGLAQAFRQP

SEQ ID NO: 13382 - protein, 80 aa, Synthetic construct
AKKNSVVAASAAAYKAAFAISKAQMQPTHPIRLGLALNFSVFYYAIQNAPAQACLLAKQAFAAAIAALATLNAASYKAST

SEQ ID NO: 13383 - protein, 80 aa, Synthetic construct
RQGQMQGIPAPSQAAQEPAPASAAPCGAAADEAAASPEAAQQAQPAAETEAPGEAEASEEAASAEAPASEEEARAAAEEA

SEQ ID NO: 13384 - protein, 80 aa, Synthetic construct
ATTFPGLVHDAEIRHDGANAYRLMQLGCLEAVANATVAYAAAAPLTYATTGTEFAAPYFATNHQYTPLHHQAFHYEFQHA

SEQ ID NO: 13385 - protein, 80 aa, Synthetic construct
YRLMQLGCLEAVANATVAYAAAAPLTYATTGTEFAAPYFATNHQYTPLHHQAFHYEFQHAHPAVTPDAYALNALHHAQQY

SEQ ID NO: 13386 - protein, 80 aa, Synthetic construct
TGFLAPVDNHMRNLTAQDLLYDLDINIFDEINLMALATEDNFDPIDVAQLFDEPDADAGLALDAAHNNTAVIKANAAHAV

SEQ ID NO: 13387 - protein, 80 aa, Synthetic construct
MRNLTAQDLLYDLDINIFDEINLMALATEDNFDPIDVAQLFDEPDADAGLALDAAHNNTAVIKANAAHAVCDEGAIGYCT

SEQ ID NO: 13388 - protein, 80 aa, Synthetic construct
AAACAMDPIDAFELLDLLFDRQDGILRHVELGEGWGHVKDQQVLPNPDADDFLAAILGAGDALPAAPLWAPEGADAGIAE

SEQ ID NO: 13389 - protein, 80 aa, Synthetic construct
AFELLDLLFDRQDGILRHVELGEGWGHVKDQQVLPNPDADDFLAAILGAGDALPAAPLWAPEGADAGIAEDLPADPQDTP

SEQ ID NO: 13390 - protein, 80 aa, Synthetic construct
AEAAAGAGPVVTPPEHLPMDAGGIDAADAEADILLGILDNLDPVMFFKCPAPEPAALEELPEVYPEGPAALPAALALAVG

SEQ ID NO: 13391 - protein, 80 aa, Synthetic construct
VTPPEHLPMDAGGIDAADAEADILLGILDNLDPVMFFKCPAPEPAALEELPEVYPEGPAALPAALALAVGTAAAKLEAIN

SEQ ID NO: 13392 - protein, 80 aa, Synthetic construct
SLSLAVSRSTDELEIIDEYIKENGFGLDGGQAGAGEGLARLVSRGAASLSTVTLGAVAAAATAAAWGCALGRLVSAAAGA

SEQ ID NO: 13393 - protein, 80 aa, Synthetic construct
LQAVQADPTQAGMYQLAADVAHQEYPRAAWNQNTADIPETTYRENEVDWLTELANIATAPQAPLMQCAFYNRAAPVHIIA

SEQ ID NO: 13394 - protein, 80 aa, Synthetic construct
DEANAPTVPQAAFLGPTLWDKTLPYDGDTFQLEYMDLEEFLAENGIPPAPAQHDHAPHPPGLQPAAAAAPAVMDLAARAA

SEQ ID NO: 13395 - protein, 80 aa, Synthetic construct
SAFLGATLWDKTLAYDGDTFQLEYMDLEEFLSENGIAASASQHDHSAHAAGLQAASSAAASVMDLSSRASAALHAGIASA

SEQ ID NO: 13396 - protein, 80 aa, Synthetic construct
KTLAYDGDTFQLEYMDLEEFLSENGIAASASQHDHSAHAAGLQAASSAAASVMDLSSRASAALHAGIASANCMQSAIRAG

SEQ ID NO: 13397 - protein, 80 aa, Synthetic construct
ARTMHDTLLADGDLGTDLDAINASLTDFDFQGNLWEQLKDDSLALDALVLVTSSATSSSMAAAQAAAHCFAAGACLTETG

SEQ ID NO: 13398 - protein, 80 aa, Synthetic construct
DGDLGTDLDAINASLTDFDFQGNLWEQLKDDSLALDALVLVTSSATSSSMAAAQAAAHCFAAGACLTETGSGAGDLAAAG

SEQ ID NO: 13399 - protein, 80 aa, Synthetic construct
KPTMDLAAPEAAPAAPTALPAFATFMDGYTGEFDTFLYQLPGTVQPCAAAAAAAAATAAAAATAPAAAAFKFEDFQVYGC

SEQ ID NO: 13400 - protein, 80 aa, Synthetic construct
AAPAAPTALPAFATFMDGYTGEFDTFLYQLPGTVQPCAAAAAAAAATAAAAATAPAAAAFKFEDFQVYGCYPGPLAGPVD

SEQ ID NO: 13401 - protein, 80 aa, Synthetic construct
AFATFMDGYTGEFDTFLYQLPGTVQPCAAAAAAAAATAAAAATAPAAAAFKFEDFQVYGCYPGPLAGPVDEALAAAGADY

SEQ ID NO: 13402 - protein, 80 aa, Synthetic construct
KFEDFQVYGCYPGPLAGPVDEALAAAGADYYGAPCAAPAPATPAFQPPQLAPWDGAFGHFAPAQTYEGLRAWTEQLPKAA

SEQ ID NO: 13403 - protein, 80 aa, Synthetic construct
AGAAAADDEFEDDLLDLNPAANFEAMALGAFAAAAALDRDLDFNFEPGAGAHFEFPDYCTPEVAEMIAGDWLEAAIANLV

SEQ ID NO: 13404 - protein, 80 aa, Synthetic construct
AAADDEFEDDLLDLNPAANFEAMALGAFAAAAALDRDLDFNFEPGAGAHFEFPDYCTPEVAEMIAGDWLEAAIANLVFTY

SEQ ID NO: 13405 - protein, 80 aa, Synthetic construct
IWDKTIPYDGEAFHLEYMDLDEFLLENGIPAAPTHLAHNLLLPVAELEGKEAAAAATAAPPAAATAIFQPAETVAATEAA

SEQ ID NO: 13406 - protein, 80 aa, Synthetic construct
EAFHLEYMDLDEFLLENGIPAAPTHLAHNLLLPVAELEGKEAAAAATAAPPAAATAIFQPAETVAATEAALEKERETPAP

SEQ ID NO: 13407 - protein, 80 aa, Synthetic construct; identical to SEQ ID NO: 581

SEQ ID NO: 13408 - protein, 80 aa, Synthetic construct
AVPPAMDAGRAAAVDLALAACDAFELLQALPDYALGPHYTAQKVADALDNIEAPHFPLPGLAPPGDAAACFLEALMGFAE

SEQ ID NO: 13409 - protein, 80 aa, Synthetic construct
AAAVDLALAACDAFELLQALPDYALGPHYTAQKVADALDNIEAPHFPLPGLAPPGDAAACFLEALMGFAEPAAEALDPFI

SEQ ID NO: 13410 - protein, 80 aa, Synthetic construct
FLFPAAARPAGAETARAVPDMDLAGAFYAADWEPLHAGALGMGPMATELEPLCTPVVTCTPACTAYTAAFVFTYPEADAF

SEQ ID NO: 13411 - protein, 80 aa, Synthetic construct
GVPILPGNVVQGLYPVAQPALGNAANMELALDHFDIAFANQFADLINDFIAVEGGAATIYGHQLVAGDATALAQAEDGAR

SEQ ID NO: 13412 - protein, 80 aa, Synthetic construct
QGLYPVAQPALGNAANMELALDHFDIAFANQFADLINDFIAVEGGAATIYGHQLVAGDATALAQAEDGARAPFTQAEMCL

SEQ ID NO: 13413 - protein, 80 aa, Synthetic construct
LGNAANMELALDHFDIAFANQFADLINDFIAVEGGAATIYGHQLVAGDATALAQAEDGARAPFTQAEMCLPCCAPQQGAL

SEQ ID NO: 13414 - protein, 80 aa, Synthetic construct
LDHFDIAFANQFADLINDFIAVEGGAATIYGHQLVAGDATALAQAEDGARAPFTQAEMCLPCCAPQQGALQLAAAEGGAA

SEQ ID NO: 13415 - protein, 80 aa, Synthetic construct
LGQSAGVSMMSAVAGCAASAAYYSAATYHALHSNLQAHLGQLSAAAEHAGFDALDQLSQVELLGDMDRNEFDQYLNTAGH

SEQ ID NO: 13416 - protein, 80 aa, Synthetic construct
SAVAGCAASAAYYSAATYHALHSNLQAHLGQLSAAAEHAGFDALDQLSQVELLGDMDRNEFDQYLNTAGHADSATGAMAL

SEQ ID NO: 13417 - protein, 80 aa, Synthetic construct
SSFDLAAASAARCSAQFASIGQEAAEMNLYYENFFHAQGVASAQRASFEGGGEYGATANAYLWFNGATMTAAAYLAGANA

SEQ ID NO: 13418 - protein, 80 aa, Synthetic construct
ARCSAQFASIGQEAAEMNLYYENFFHAQGVASAQRASFEGGGEYGATANAYLWFNGATMTAAAYLAGANASAFLAQAYGV

SEQ ID NO: 13419 - protein, 80 aa, Synthetic construct
GAAGEDADDLMFDLALNFAQAAHAAAEQQLGGGAAAGNLALALVDKDLDAFAEGALGAHFEFPDYCTPELAEMIAGDWLE

SEQ ID NO: 13420 - protein, 80 aa, Synthetic construct
MFDLALNFAQAAHAAAEQQLGGGAAAGNLALALVDKDLDAFAEGALGAHFEFPDYCTPELAEMIAGDWLEANFADLVFTY

SEQ ID NO: 13421 - protein, 80 aa, Synthetic construct
YHTHFAELLDEFAQNVLGQLLNDPFLAEKAVAMEVEPAPTAPAPLIQAEHAYALCEEPRAQAPFTHITTADAFNDDEVEA

SEQ ID NO: 13422 - protein, 80 aa, Synthetic construct
GLLAAYLEVAKHFKPHGFSSAKAKAGSSEWLAVAGLVSPSNNSKEAAFSGTAWMLEKMALKEFALAALLGIAALETMPAA

SEQ ID NO: 13423 - protein, 80 aa, Synthetic construct
PCVQAQYGAAPQGAAPAAQAYAYHAAGEYAADFLTPEFVKFAMDLTNTEITATTALPAFATFMDNYATGYDVKPPCLYQM

SEQ ID NO: 13424 - protein, 80 aa, Synthetic construct
PQGAAPAAQAYAYHAAGEYAADFLTPEFVKFAMDLTNTEITATTALPAFATFMDNYATGYDVKPPCLYQMPLAGQQAAIK

SEQ ID NO: 13425 - protein, 80 aa, Synthetic construct
AAALGAAKHQQQAPVAQAMQTLADALAGAALYATAANLPVMGHEKFPADLDLDMFNGALECDMEAIIRAELMDADGLDFN

SEQ ID NO: 13426 - protein, 80 aa, Synthetic construct
QQAPVAQAMQTLADALAGAALYATAANLPVMGHEKFPADLDLDMFNGALECDMEAIIRAELMDADGLDFNFDALIATQNV

SEQ ID NO: 13427 - protein, 80 aa, Synthetic construct
TLADALAGAALYATAANLPVMGHEKFPADLDLDMFNGALECDMEAIIRAELMDADGLDFNFDALIATQNVVGLNVGNFTG

SEQ ID NO: 13428 - protein, 80 aa, Synthetic construct
AADELAWIIELLEKDGMAFQEALDPGPFDQGAPFAQELLDDGQQAAPYHPGACGAGAPAPGAADVATAGTGAARAAHAAD

SEQ ID NO: 13429 - protein, 80 aa, Synthetic construct
QQWQDLMAIMEMQAMEVNTAAAEILYAAPPGDPLATNYALAPNTPINQNVALHQAALGGCAQDFLLFAPEVEALPVAAAA

SEQ ID NO: 13430 - protein, 80 aa, Synthetic construct
NAAERQAQADGGDAAGHEAGGSAQDELDFSILFDYEYLNANEEEANAHKVASAASGAAYADDVLDYGLKAYSALASLSGE

SEQ ID NO: 13431 - protein, 80 aa, Synthetic construct
GGDAAGHEAGGSAQDELDFSILFDYEYLNANEEEANAHKVASAASGAAYADDVLDYGLKAYSALASLSGEAAGRFGEADR

SEQ ID NO: 13432 - protein, 80 aa, Synthetic construct
GSAQDELDFSILFDYEYLNANEEEANAHKVASAASGAAYADDVLDYGLKAYSALASLSGEAAGRFGEADRVGAQKFLSAA

SEQ ID NO: 13433 - protein, 80 aa, Synthetic construct
AAAAAAAGGAGAERTAGAGAGAGAQAAGAAATAAAAATHTATAVAATAAAAAAAIHFWATAAAIAARAAAKAAFQFAAAG

SEQ ID NO: 13434 - protein, 80 aa, Synthetic construct
GTTFEHLWAALEPDATYFDLPQAARGNNEVVGGTDAAMDVFHLEGMTTAVMAQFNLLAATMDQMAARAAAAAPYTPEHAA

SEQ ID NO: 13435 - protein, 80 aa, Synthetic construct
AALLDAAAAAAAAAAAAANANAAAAAGPNPATAFEPIKADPTGVLELPKELAEIFDPTRECMAAELLEELMAAEVFAPLL

SEQ ID NO: 13436 - protein, 80 aa, Synthetic construct
AAAAAAAANANAAAAAGPNPATAFEPIKADPTGVLELPKELAEIFDPTRECMAAELLEELMAAEVFAPLLRLAPPPGDHD

SEQ ID NO: 13437 - protein, 80 aa, Synthetic construct
NAAAAAGPNPATAFEPIKADPTGVLELPKELAEIFDPTRECMAAELLEELMAAEVFAPLLRLAPPPGDHDYIYNLDEAEG

SEQ ID NO: 13438 - protein, 80 aa, Synthetic construct
TATIKNEVDATVNIIVVGQAHLDANIENQEIVTNPPDICQVVEVTTEADEQPVAMAELYPLQIAPVAAYAEAETTDAVPA

SEQ ID NO: 13439 - protein, 80 aa, Synthetic construct
MPCVQAQYAPAPPGAAYAAQTYAAEYTTEIMNPDYTKLTMDLGATEITATATTALPAIATFVEGYAANYELKPACVYQMQ

SEQ ID NO: 13440 - protein, 80 aa, Synthetic construct
GETLGDAPIDPEADAFTDTLAANIAQEMTMVDTEMPFWPTNFGIAAVDLAVMEDHAHAFDIKPFTTVDFAAIATPHYEDI

SEQ ID NO: 13441 - protein, 80 aa, Synthetic construct
EVDNYHFYAAIPAMEKEVGNCAPHFLNAFEDAFAAILATEDPNQLTVNALNADATVNTDFGDEFYAAFIAEPAIANAMPA

SEQ ID NO: 13442 - protein, 80 aa, Synthetic construct
IPAMEKEVGNCAPHFLNAFEDAFAAILATEDPNQLTVNALNADATVNTDFGDEFYAAFIAEPAIANAMPAPATLAHALAE

SEQ ID NO: 13443 - protein, 80 aa, Synthetic construct
CAPHFLNAFEDAFAAILATEDPNQLTVNALNADATVNTDFGDEFYAAFIAEPAIANAMPAPATLAHALAELLNGPIDVAD

SEQ ID NO: 13444 - protein, 80 aa, Synthetic construct
DAFAAILATEDPNQLTVNALNADATVNTDFGDEFYAAFIAEPAIANAMPAPATLAHALAELLNGPIDVADLALCKAFNQN

SEQ ID NO: 13445 - protein, 80 aa, Synthetic construct
DPNQLTVNALNADATVNTDFGDEFYAAFIAEPAIANAMPAPATLAHALAELLNGPIDVADLALCKAFNQNHPEATAEFND

SEQ ID NO: 13446 - protein, 80 aa, Synthetic construct
NADATVNTDFGDEFYAAFIAEPAIANAMPAPATLAHALAELLNGPIDVADLALCKAFNQNHPEATAEFNDADAGIALNTA

SEQ ID NO: 13447 - protein, 80 aa, Synthetic construct; identical to SEQ ID NO: 169

SEQ ID NO: 13448 - protein, 80 aa, Synthetic construct; identical to SEQ ID NO: 763

SEQ ID NO: 13449 - protein, 80 aa, Synthetic construct; identical to SEQ ID NO: 172

SEQ ID NO: 13450 - protein, 80 aa, Synthetic construct; identical to SEQ ID NO: 173

SEQ ID NO: 13451 - protein, 80 aa, Synthetic construct; identical to SEQ ID NO: 174

SEQ ID NO: 13452 - protein, 80 aa, Synthetic construct
SAAAAAAADAAWAAEAAWVDALTWLSFQAAAAAAAIAAAVAAASEVWAIAACAAAYELCAAMAYCAAQVAVALVAQAALE

SEQ ID NO: 13453 - protein, 80 aa, Synthetic construct
LAAICEHETSIDISAYIDPAAFNDEFLADLFQHSRQQEKAKAAVAPTAAAAAADFDYPAAPAAPAAAVMPAAAHAPPPAY

SEQ ID NO: 13454 - protein, 80 aa, Synthetic construct
IDISAYIDPAAFNDEFLADLFQHSRQQEKAKAAVAPTAAAAAADFDYPAAPAAPAAAVMPAAAHAPPPAYACAAAAYLDA

SEQ ID NO: 13455 - protein, 80 aa, Synthetic construct
AAHTADIYGATAPMNFYATAAQAAGAYLNAANPMNPYPGLLNQNTQYPAYQCNGNLAVDNCAPYLGAYAPQAQPMDLYRY

SEQ ID NO: 13456 - protein, 80 aa, Synthetic construct
AQAAGAYLNAANPMNPYPGLLNQNTQYPAYQCNGNLAVDNCAPYLGAYAPQAQPMDLYRYPAQDPLAKLALPPIHTLYQP

SEQ ID NO: 13457 - protein, 80 aa, Synthetic construct
ANPMNPYPGLLNQNTQYPAYQCNGNLAVDNCAPYLGAYAPQAQPMDLYRYPAQDPLAKLALPPIHTLYQPRFGNAQAFTA

SEQ ID NO: 13458 - protein, 80 aa, Synthetic construct
QCNGNLAVDNCAPYLGAYAPQAQPMDLYRYPAQDPLAKLALPPIHTLYQPRFGNAQAFTAKYLGYGNQNMQGDGFAACTI

SEQ ID NO: 13459 - protein, 80 aa, Synthetic construct
AAHLASDFAFSAAAAAAADAAAAAEAAWVDARTWLSFQAAAAAAAIAAAVAAASEVWAIAACAAAYEFCAAMAYCAAQVA

SEQ ID NO: 13460 - protein, 80 aa, Synthetic construct
SAAAAAAADAAAAAEAAWVDARTWLSFQAAAAAAAIAAAVAAASEVWAIAACAAAYEFCAAMAYCAAQVAVALVAQAALE

SEQ ID NO: 13461 - protein, 80 aa, Synthetic construct
PDKEKKIKELEMLLMAAENEVRRKRIPAQPGAFAAWAGAFLMDDNMANTLNALDEHTAEFYAMDENQPVAAQQNAPTKFL

SEQ ID NO: 13462 - protein, 80 aa, Synthetic construct
GAFAAWAGAFLMDDNMANTLNALDEHTAEFYAMDENQPVAAQQNAPTKFLAVEANAVLAALQTIPEFAETLELIEADPVA

SEQ ID NO: 13463 - protein, 80 aa, Synthetic construct
NALDEHTAEFYAMDENQPVAAQQNAPTKFLAVEANAVLAALQTIPEFAETLELIEADPVAWADVTAFDIADAAAAPIKAT

SEQ ID NO: 13464 - protein, 80 aa, Synthetic construct
ELEAARASRAAVAVRAPSPEEMEEEAIASLPAEETEDMDFLSALELADLLDPRQPDWHLDPALSSPAPLSSSAAASDSAA

SEQ ID NO: 13465 - protein, 80 aa, Synthetic construct
NCHAVARVKTQGQDALEAQLAALEAARRVHTATPADKNLLDTYNTELLKADADNNNADDCGNILPADIMDFVLKNTPAMQ

SEQ ID NO: 13466 - protein, 80 aa, Synthetic construct
QGQDALEAQLAALEAARRVHTATPADKNLLDTYNTELLKADADNNNADDCGNILPADIMDFVLKNTPAMQALGEAPEAAA

SEQ ID NO: 13467 - protein, 80 aa, Synthetic construct
AALEAARRVHTATPADKNLLDTYNTELLKADADNNNADDCGNILPADIMDFVLKNTPAMQALGEAPEAAAAELLNLGEGL

SEQ ID NO: 13468 - protein, 80 aa, Synthetic construct
TATPADKNLLDTYNTELLKADADNNNADDCGNILPADIMDFVLKNTPAMQALGEAPEAAAAELLNLGEGLGLDANREKDM

SEQ ID NO: 13469 - protein, 80 aa, Synthetic construct
DADNNNADDCGNILPADIMDFVLKNTPAMQALGEAPEAAAAELLNLGEGLGLDANREKDMGLFEVFAQQLPTTEPVDAAV

SEQ ID NO: 13470 - protein, 80 aa, Synthetic construct
GNILPADIMDFVLKNTPAMQALGEAPEAAAAELLNLGEGLGLDANREKDMGLFEVFAQQLPTTEPVDAAVAAAIAAEEQF

SEQ ID NO: 13471 - protein, 80 aa, Synthetic construct
SACAAQQSRNRVIQLSTSELGEMELTWQEIMSITELQGLNAASEASFEAQAAAAYLGAAAATTYCACSIHADSGFALAAA

SEQ ID NO: 13472 - protein, 80 aa, Synthetic construct
RVIQLSTSELGEMELTWQEIMSITELQGLNAASEASFEAQAAAAYLGAAAATTYCACSIHADSGFALAAAAYELAASTSH

SEQ ID NO: 13473 - protein, 80 aa, Synthetic construct
GEMELTWQEIMSITELQGLNAASEASFEAQAAAAYLGAAAATTYCACSIHADSGFALAAAAYELAASTSHVADAAYSYGN

SEQ ID NO: 13474 - protein, 80 aa, Synthetic construct
TQAAADAAPPEVAGPAAAQMAMKTRRLAAAATGKPPLAVEDDFEKLIWEIAGGKLEAEIDLDPGKDEDDLLLELAEMIDA

SEQ ID NO: 13475 - protein, 80 aa, Synthetic construct
KEFEPAVAQTNEAYFPFDDELTQDAIVEELVLMEQQMAMNNAHAYGNCLGMTLQAQAVTPGAPMAAHTAATHFYHPIHAN

SEQ ID NO: 13476 - protein, 80 aa, Synthetic construct
DLTNTAADFAADIRLAAELAGAINDLNTLDPNLLFDPGRQQGQDDEATLEELKNDPLFQQICAEAMNAMTAAGFEWIEAK

SEQ ID NO: 13477 - protein, 80 aa, Synthetic construct
EEAQSDASVEAALSQETFSDLWKLLAENNVLSALASQAMDDLMLSADDIEQWFTEDAGADEAARMAEAAAAVAAAAAAAT

SEQ ID NO: 13478 - protein, 80 aa, Synthetic construct; identical to SEQ ID NO: 229

SEQ ID NO: 13479 - protein, 80 aa, Synthetic construct; identical to SEQ ID NO: 230

SEQ ID NO: 13480 - protein, 80 aa, Synthetic construct
DALAGAYAAAAAGALGAAADRFAADLDLDMFSGSLECDVESIILNDFMDSDEMDFNFDSALAAAAAGLAGAAAANQSWVA

SEQ ID NO: 13481 - protein, 80 aa, Synthetic construct
AMTYAPAAAFCAAPAAYGAPAAYFAGLDPYLAPMVPQLGGPALAPLAGPAVGPALAQAPTALAGQAYGAYAPVDALEFKD

SEQ ID NO: 13482 - protein, 80 aa, Synthetic construct
CAAPAAYGAPAAYFAGLDPYLAPMVPQLGGPALAPLAGPAVGPALAQAPTALAGQAYGAYAPVDALEFKDPTGTWKFTYN

SEQ ID NO: 13483 - protein, 80 aa, Synthetic construct
PTVPNCLATMGQNCGAGLNNDAPEALEVPALQDFAVFATDACLQLADAVAPALPGALDAPVDIAADALDFFTDTLTTIDL

SEQ ID NO: 13484 - protein, 80 aa, Synthetic construct
CLATMGQNCGAGLNNDAPEALEVPALQDFAVFATDACLQLADAVAPALPGALDAPVDIAADALDFFTDTLTTIDLQHLNY

SEQ ID NO: 13485 - protein, 80 aa, Synthetic construct
ALPMWSAQTWAASTWSAQTQAIQSWSAHSWATQTWCTQSWAAQAWASPFYACGEESLQSCMQFQPASPASDLEAALEAAG

SEQ ID NO: 13486 - protein, 80 aa, Synthetic construct
DIRHMANEKFFRNDFSGEVDFRDIDLTDEILTYVADSLSKSPFIPSDYAAAASLALNSSCMVAEHLHLEAAAAHHAKAVV

SEQ ID NO: 13487 - protein, 80 aa, Synthetic construct
FRNDFSGEVDFRDIDLTDEILTYVADSLSKSPFIPSDYAAAASLALNSSCMVAEHLHLEAAAAHHAKAVVVEPAAALCAK

SEQ ID NO: 13488 - protein, 80 aa, Synthetic construct
CQQLTVAQGPAPELCDQAIAFADPLAYFTDLAFAAALKEEQRLDGMLLDDTIAPFGTDPLLAATAPAVAKEAARRAAFAA

SEQ ID NO: 13489 - protein, 80 aa, Synthetic construct; identical to SEQ ID NO: 524

SEQ ID NO: 13490 - protein, 80 aa, Synthetic construct
LLDLNCFLSDISDTLFTMTQSGASALQLAAEDAYVGNADMIQADLTALQASLDDFMDISDFFTNSRLAQAAMASNFAEAA

SEQ ID NO: 13491 - protein, 80 aa, Synthetic construct
ISDTLFTMTQSGASALQLAAEDAYVGNADMIQADLTALQASLDDFMDISDFFTNSRLAQAAMASNFAEAASFSAVVDSLF

SEQ ID NO: 13492 - protein, 80 aa, Synthetic construct
SGASALQLAAEDAYVGNADMIQADLTALQASLDDFMDISDFFTNSRLAQAAMASNFAEAASFSAVVDSLFSSGTLGAEVA

SEQ ID NO: 13493 - protein, 80 aa, Synthetic construct
EDAYVGNADMIQADLTALQASLDDFMDISDFFTNSRLAQAAMASNFAEAASFSAVVDSLFSSGTLGAEVAAASSAMTHLS

SEQ ID NO: 13494 - protein, 80 aa, Synthetic construct
ALDDFMDIADFFTNARLAQAAMAANFAEAAAFAAVVDALFAAGTLGAEVAAAAAAMTHLAGHARLQARNACAGALDAAAF

SEQ ID NO: 13495 - protein, 80 aa, Synthetic construct
TIGAAAEKEIDDVIDEIIALEAAYNDEMLAYLPGGTTGLQLPATLPVAGNLLDVYAAQGVATPAITVANACPAELPNIKR

SEQ ID NO: 13496 - protein, 80 aa, Synthetic construct
TMETLTELGDELTLGDIDEMLQFVANQVGEFPDLFAEQLCAAFPGAGGAGAAAGAAGAAAAAANGRGAAAGAVDPAVQRA

SEQ ID NO: 13497 - protein, 80 aa, Synthetic construct
ELTLGDIDEMLQFVANQVGEFPDLFAEQLCAAFPGAGGAGAAAGAAGAAAAAANGRGAAAGAVDPAVQRAFTQVTLPAFA

SEQ ID NO: 13498 - protein, 80 aa, Synthetic construct; identical to SEQ ID NO: 662

SEQ ID NO: 13499 - protein, 80 aa, Synthetic construct
TGGGGAAMAAANFAAAAAFAHYMGYAHMAAMDAHWAALGVWGAAYAAAREDWAVYAGAAATMGTVAVNDVTAAAAAFCAT

SEQ ID NO: 13500 - protein, 80 aa, Synthetic construct; identical to SEQ ID NO: 489

SEQ ID NO: 13501 - protein, 80 aa, Synthetic construct
PVAPGIADANDHDLREPAGIKNPGGAAAAARVAAWDAQAYDIEQICLGAANPPWAATLFEIDEFVKIYDLPGEDDTAALN

SEQ ID NO: 13502 - protein, 80 aa, Synthetic construct
DYDSYQHYFYDYDCGEDFYRSTAASEDIWKKFELVASAATSAAWGLGAGAGDAAAGIGAAEAWAGGCTGDEAESRGHSKG

SEQ ID NO: 13503 - protein, 80 aa, Synthetic construct
GGTPDIPAAGLLAGQAQENPGYPYADAAAILGENPHIGIDMIDNDQGAAAPANDEAAMAVIMALLEADAGLGGPVDFADL

SEQ ID NO: 13504 - protein, 80 aa, Synthetic construct
DIPAAGLLAGQAQENPGYPYADAAAILGENPHIGIDMIDNDQGAAAPANDEAAMAVIMALLEADAGLGGPVDFADLPWPL

SEQ ID NO: 13505 - protein, 80 aa, Synthetic construct
AGAFDRKLAAILTDIAAALACHAGAKDAPTLPEAAVTDLGYYAAPQHDYYAGQPYGQTVNPYTYHHQFNLNGLAGTGAYA

SEQ ID NO: 13506 - protein, 80 aa, Synthetic construct
ALYLALRNFDGLEEIDRALGIPELVSASAAVDPEAFSSADSNIMLEAKAPVFPAAYASAAAMAAGSYSPMADPNFHTMGA

SEQ ID NO: 13507 - protein, 80 aa, Synthetic construct
CGSWGTSITLAAACSYLEELEAQDYQQSNQAGAFQFSQAAQAALFQSAQAKLAYLATFAFSMASSLTLAAAEDSLFMFAC

SEQ ID NO: 13508 - protein, 80 aa, Synthetic construct
KLAYLATFAFSMASSLTLAAAEDSLFMFACGASGGTSQGYCAGASSGQILMQAAAGNIGTASWSDACLAELAFAGAFCAQ

SEQ ID NO: 13509 - protein, 80 aa, Synthetic construct
HELNSAAALAVYAAPYAASQAYANYVTYASEASAFYSLNSFDSKDASASAHAALAPAAAAYYPYEPALAQYPYDRYATMD

SEQ ID NO: 13510 - protein, 80 aa, Synthetic construct
RQGQMQGIPAPSQAAQAPAPWSAAPCGAAADAAAASPAFAQQAQPAAATAAPGAAAASAAAASAAAPASAAAYRAAAAAA

SEQ ID NO: 13511 - protein, 80 aa, Synthetic construct
FRSARRMRALVDRLEAGELIANGAFSFYGDYQSEYYGAGGNYDFFAQGAASSQAQTAVDLAFVASSGASGTALGGLEHAL

SEQ ID NO: 13512 - protein, 80 aa, Synthetic construct
VDRLEAGELIANGAFSFYGDYQSEYYGAGGNYDFFAQGAASSQAQTAVDLAFVASSGASGTALGGLEHALAGHHASSEAQ

SEQ ID NO: 13513 - protein, 80 aa, Synthetic construct
ANGAFSFYGDYQSEYYGAGGNYDFFAQGAASSQAQTAVDLAFVASSGASGTALGGLEHALAGHHASSEAQRFTDILAHAA

SEQ ID NO: 13514 - protein, 80 aa, Synthetic construct
HQGCLVAPTGALPMWSAQTWAASTWSAQTQAIQSWSAHSWATQTWCTQSWAAQAWASPFYACGEESLQSCMHFQPASPAS

SEQ ID NO: 13515 - protein, 80 aa, Synthetic construct
ALPMWSAQTWAASTWSAQTQAIQSWSAHSWATQTWCTQSWAAQAWASPFYACGEESLQSCMHFQPASPASDLEAALEAAG

SEQ ID NO: 13516 - protein, 80 aa, Synthetic construct
DQAYAAYAAWSAAPANTQAAYATAVASWQAYENYNYYAAQNTSVTTAATYSYAPASWEAAKANDAALAAAAPAMHMASYA

SEQ ID NO: 13517 - protein, 80 aa, Synthetic construct
LAEFALGDADDVARAFQATLEEIEEFLEENMEAGVKEVAEGNSKDLDACSQLSAGAHKSHLHAGSSGRERCSAAAGGASA

SEQ ID NO: 13518 - protein, 80 aa, Synthetic construct
LKGEIEAYLMELQGGVPAAAQDAQAAAAAKLGLDPQIGALDDGAGDLALAKAAIAIADPLNTPALDFAQLFNFIPLNGPP

SEQ ID NO: 13519 - protein, 80 aa, Synthetic construct
QDAQAAAAAKLGLDPQIGALDDGAGDLALAKAAIAIADPLNTPALDFAQLFNFIPLNGPPYNPLAVGALGMAYAQEEAHA

SEQ ID NO: 13520 - protein, 80 aa, Synthetic construct
LGLDPQIGALDDGAGDLALAKAAIAIADPLNTPALDFAQLFNFIPLNGPPYNPLAVGALGMAYAQEEAHAAVAQLPPQTQ

SEQ ID NO: 13521 - protein, 80 aa, Synthetic construct
DDGAGDLALAKAAIAIADPLNTPALDFAQLFNFIPLNGPPYNPLAVGALGMAYAQEEAHAAVAQLPPQTQDLQDPANTIG

SEQ ID NO: 13522 - protein, 80 aa, Synthetic construct
KAAIAIADPLNTPALDFAQLFNFIPLNGPPYNPLAVGALGMAYAQEEAHAAVAQLPPQTQDLQDPANTIGLGALHALAAA

SEQ ID NO: 13523 - protein, 80 aa, Synthetic construct
LFNFIPLNGPPYNPLAVGALGMAYAQEEAHAAVAQLPPQTQDLQDPANTIGLGALHALAAAFTAALATATTLPRFHQAFQ

SEQ ID NO: 13524 - protein, 80 aa, Synthetic construct
AHPYEAWYKAGFHATLAAGEVTNGAAAAWWDVHAAPGAWLEVQNPAGGLQAALHAGAPQAALHAQLGTYNPDFAALTHAA

SEQ ID NO: 13525 - protein, 80 aa, Synthetic construct
LDMEDDAKLDSLITEALNGMEYQSDNAEIDSSFIDVFADEEASGARGASSGHALKSKAGVTAESKAAAALAAATADAQTA

SEQ ID NO: 13526 - protein, 80 aa, Synthetic construct
DAAWATLAQGAPAYGAPEDTDAFWNPNAFETDADLPAGWMRVQDTAGTYYWHIPTGTTQWEPPGRAAPAQGAAPQEEAQL

SEQ ID NO: 13527 - protein, 80 aa, Synthetic construct; identical to SEQ ID NO: 643

SEQ ID NO: 13528 - protein, 80 aa, Synthetic construct
FHPSQVSPRARFPVSITSPNRTAARTLADIKAKAQLVKAQRAAAAAAAAAAAAASVAATIPAPAPAAAQAPAEAAEAQTA

SEQ ID NO: 13529 - protein, 80 aa, Synthetic construct
RFPVSITSPNRTAARTLADIKAKAQLVKAQRAAAAAAAAAAAAASVAATIPAPAPAAAQAPAEAAEAQTARAASPASDRV

SEQ ID NO: 13530 - protein, 80 aa, Synthetic construct; identical to SEQ ID NO: 664

SEQ ID NO: 13531 - protein, 80 aa, Synthetic construct
RFAKMPDEPVEAPALPAPAAPMVAKGAEAARAAEEAAADAGAADAEEERATRLAELQEQLKAVHEQLAALAQAPVNKPKK

SEQ ID NO: 13532 - protein, 80 aa, Synthetic construct
EMRFAKMPDEPEEPVVAVAAPAVPPPTKVVAPPAAADAAADAAADADAATDDAEEERAQRLAELQEQLKAVHEQLAALAQ

SEQ ID NO: 13533 - protein, 80 aa, Synthetic construct
PEEPVVAVAAPAVPPPTKVVAPPAAADAAADAAADADAATDDAEEERAQRLAELQEQLKAVHEQLAALAQPQQNKPKKKE

SEQ ID NO: 13534 - protein, 80 aa, Synthetic construct
AFSANDSTDFASLFDLENDLPDELIPNAAELALLNSANLVPDAASKHKQLSELLRAASASSINPAIANVSASSPVQQALA

SEQ ID NO: 13535 - protein, 80 aa, Synthetic construct
GLAQAQAPGQTGFLAYGTAFATPQPGQAPYAYQMQGAAFTTAAGIYTGNNALTNAAGFNAAQQDYPAYPAFGQGQYAQYY

SEQ ID NO: 13536 - protein, 80 aa, Synthetic construct
TGFLAYGTAFATPQPGQAPYAYQMQGAAFTTAAGIYTGNNALTNAAGFNAAQQDYPAYPAFGQGQYAQYYNAAPYPAHYM

SEQ ID NO: 13537 - protein, 80 aa, Synthetic construct
AAFATAPTGQAPYTYQMHGTTGFYQGGNGLGNAAGFGAVHQDYPAYPGFPQAQYPQYYGAAYNPPYVPAAAICPAPLATA

SEQ ID NO: 13538 - protein, 80 aa, Synthetic construct
TGFYQGGNGLGNAAGFGAVHQDYPAYPGFPQAQYPQYYGAAYNPPYVPAAAICPAPLATATYVLQEAAHNVPNQAAEALA

SEQ ID NO: 13539 - protein, 80 aa, Synthetic construct
TQAPLQAGCLAYAPGFATPQPGQTPYAYQMPGAAFAPAATIYANNAVANATNFAGAQQDYPAYTAFGQNQYAQYYAAATY

SEQ ID NO: 13540 - protein, 80 aa, Synthetic construct
AYAPGFATPQPGQTPYAYQMPGAAFAPAATIYANNAVANATNFAGAQQDYPAYTAFGQNQYAQYYAAATYGAYMTANNTA

SEQ ID NO: 13541 - protein, 80 aa, Synthetic construct
PGQTPYAYQMPGAAFAPAATIYANNAVANATNFAGAQQDYPAYTAFGQNQYAQYYAAATYGAYMTANNTADGTPAATATY

SEQ ID NO: 13542 - protein, 80 aa, Synthetic construct
YDLNDMDAAWLALTNAAFKAMGMPALDAYTMARVLAAFAQRCYDNMNHAIATAAGLGIAYDADVVCDVCQSPDGADGNAM

SEQ ID NO: 13543 - protein, 80 aa, Synthetic construct
VKFIARGRRPDVILEKGEVIDFAALAAADRTPLTAPAPAPALDFAAPGTPAAHAATPALLAEADLIPDVMPPQALFHDDD

SEQ ID NO: 13544 - protein, 80 aa, Synthetic construct
TGELRDADFANEQFAKLPMFINAGLAMDGLFDDAEDEADKLAYPWDGTQAYALFNVAPACAAFNAPCRDAVAPPKALFAQ

SEQ ID NO: 13545 - protein, 80 aa, Synthetic construct
MSAHASALGAAEHVSSAMSGGGATAAQMAASQAGALIAGDAQAMSQANRGASAFSAVQLHQLRAQILAYKMLARGQALAE

SEQ ID NO: 13546 - protein, 80 aa, Synthetic construct
AEHVSSAMSGGGATAAQMAASQAGALIAGDAQAMSQANRGASAFSAVQLHQLRAQILAYKMLARGQALAETLQLAVQGKR

SEQ ID NO: 13547 - protein, 80 aa, Synthetic construct
ASALGGSEHASSAVAASGASSGAQMSSGAGGAALDGADAQALGQQNRGATAFNQNQLHQLRAQIMAYKMLARGQALADHL

SEQ ID NO: 13548 - protein, 80 aa, Synthetic construct
AFNQNQLHQLRAQIMAYKMLARGQALADHLQMAVQGKRAMAGMQQQMATLAAASVSATGAGAGAGAGAGAGAGAAAANYS

SEQ ID NO: 13549 - protein, 80 aa, Synthetic construct
KMKAQAAEPNRAAPAARACRRLDDLPWDSLLFQESSSAAAAEPSFASALPLPPAAAAPEDPSLSVTLADIYRELYAFFAD

SEQ ID NO: 13550 - protein, 80 aa, Synthetic construct
LFQESSSGGGAEASFGSGLALAAGGAGAEDASLSVTLADIYRELYAFFGDSLATRFGTGQAAATAARAAGDKKEAAAAAD

SEQ ID NO: 13551 - protein, 80 aa, Synthetic construct
DAGKTELFCAINCLAAYRVKTVTAAGVQVACHACKTAAIPQYHLAMANGTIYAFCAAACVVAFQNVFAKPKGTNAAAVPL

SEQ ID NO: 13552 - protein, 80 aa, Synthetic construct
KHFKPHGFSSDKAKAGSSEWLAVDGLVSPSNNSKEDAFSGTDWMLEKMDLKEFAAAAAAAIDDLETMPDDLLTTLDDTCD

SEQ ID NO: 13553 - protein, 80 aa, Synthetic construct
DKAKAGSSEWLAVDGLVSPSNNSKEDAFSGTDWMLEKMDLKEFAAAAAAAIDDLETMPDDLLTTLDDTCDLFAPLVQETN

SEQ ID NO: 13554 - protein, 80 aa, Synthetic construct
LAVDGLVSPSNNSKEDAFSGTDWMLEKMDLKEFAAAAAAAIDDLETMPDDLLTTLDDTCDLFAPLVQETNKQPPQTVNPI

SEQ ID NO: 13555 - protein, 80 aa, Synthetic construct
TDWMLEKMDLKEFAAAAAAAIDDLETMPDDLLTTLDDTCDLFAPLVQETNKQPPQTVNPIGHLPESLTKPDQVAPFTFLQ

SEQ ID NO: 13556 - protein, 80 aa, Synthetic construct
ELELDAGDQDAAAAAAAESGDLGTAPDEAVRAPLDWALPLSEVPSDWEVDDLLCSLLSPPASLNILSSSNPCLVHHDHTY

SEQ ID NO: 13557 - protein, 80 aa, Synthetic construct
CSPHFLNAFEDSFSSILSTEDPNQLTVNSLNSDATVNTDFGDEFYSAFIAEPSISNSMPSPATLSHAAAAAAAGPIDVSD

SEQ ID NO: 13558 - protein, 80 aa, Synthetic construct
RQGQMQGIPAPSQALQEPAPWSALPCGLAAAAAAASPEFLQQAQPLLETEAPGELEASEEAASLEAPLSEEEYRALLEEL

SEQ ID NO: 13559 - protein, 80 aa, Synthetic construct
PSAKRPKLSSPALSASASDGTDFGSLFDLEHDLPDELINSTELGLTNGGDINQLQTSLGMVQDAASKHKAAAAAAASGSS

SEQ ID NO: 13560 - protein, 80 aa, Synthetic construct
TDSLELLQLQQAAAAAAADLGHLERYPMALGNLADLEELEPTPGRPDPLTLYHKGIASAKTYYRDEHIYPYMYLAGYHCR

SEQ ID NO: 13561 - protein, 80 aa, Synthetic construct
SSFDLPAPSPPRCSPQFPSIGQEPPEMNLYYENFFHPQGVPSPQRPSFEGGGEYGATPNPYLWFNGPTMTAAAALPGPNA

SEQ ID NO: 13562 - protein, 80 aa, Synthetic construct
PRCSPQFPSIGQEPPEMNLYYENFFHPQGVPSPQRPSFEGGGEYGATPNPYLWFNGPTMTAAAALPGPNASPFLPQAYGV

SEQ ID NO: 13563 - protein, 80 aa, Synthetic construct
GQEPPEMNLYYENFFHPQGVPSPQRPSFEGGGEYGATPNPYLWFNGPTMTAAAALPGPNASPFLPQAYGVQRPLLPSVSG

SEQ ID NO: 13564 - protein, 80 aa, Synthetic construct
YENFFHPQGVPSPQRPSFEGGGEYGATPNPYLWFNGPTMTAAAALPGPNASPFLPQAYGVQRPLLPSVSGLGGSDLGWLP

SEQ ID NO: 13565 - protein, 80 aa, Synthetic construct
QADLKNWSLDQVQFADLCSSLNQFFTQTGLIHSQSNVQQNVCHGAMHPTKPSQHIGTGNLYIDSRQNLPPSVMPAAAAPH

SEQ ID NO: 13566 - protein, 80 aa, Synthetic construct
AGHLASDFAFSPPPGGGGDGPWGAEPGWVDPLTWLSFQGPPGGPGIGPGVGPGSEVWGIPPCAAAAELCGGMAYCGPQVG

SEQ ID NO: 13567 - protein, 80 aa, Synthetic construct
SPPPGGGGDGPWGAEPGWVDPLTWLSFQGPPGGPGIGPGVGPGSEVWGIPPCAAAAELCGGMAYCGPQVGVGLVPQGGLE

SEQ ID NO: 13568 - protein, 80 aa, Synthetic construct
PWGAEPGWVDPLTWLSFQGPPGGPGIGPGVGPGSEVWGIPPCAAAAELCGGMAYCGPQVGVGLVPQGGLETSQPESEAGV

SEQ ID NO: 13569 - protein, 80 aa, Synthetic construct
LGGICEHETSIDISAYIDPAAFNDEFLADLFQHSRQQEKAKAAVGPTGGGGGGDFDYPGAPAGPGGAVMPGGAHGPAAAA

SEQ ID NO: 13570 - protein, 80 aa, Synthetic construct
IDISAYIDPAAFNDEFLADLFQHSRQQEKAKAAVGPTGGGGGGDFDYPGAPAGPGGAVMPGGAHGPAAAAGCAAAGYLDG

SEQ ID NO: 13571 - protein, 80 aa, Synthetic construct
AGHLASDFAFSPPPGGGGDGPGGPEPGWVDPRTWLSFQGPPGGPGIGPGVGPGSEVWGIPPCAAAAEFCGGMAYCGPQVG

SEQ ID NO: 13572 - protein, 80 aa, Synthetic construct
RVIQLSTSELGEMELTWQEIMSITELQGLNAPSEPSFEPQAPAPYLGPPPPTTYCPCSIHPDSGFPLPAAAAELPASTSH

SEQ ID NO: 13573 - protein, 80 aa, Synthetic construct
GEMELTWQEIMSITELQGLNAPSEPSFEPQAPAPYLGPPPPTTYCPCSIHPDSGFPLPAAAAELPASTSHVPDPPYSYGN

SEQ ID NO: 13574 - protein, 80 aa, Synthetic construct
LQLQQRQGSMQIPQYYQPQPMMQHLQEQQQQQMHLQAAAAHRDPHQYTPEQAHTVQLIPLGSMSQYYYQEPQQPYSHPLY

SEQ ID NO: 13575 - protein, 80 aa, Synthetic construct
QIPQYYQPQPMMQHLQEQQQQQMHLQAAAAHRDPHQYTPEQAHTVQLIPLGSMSQYYYQEPQQPYSHPLYQQSHLSQHQQ

SEQ ID NO: 13576 - protein, 80 aa, Synthetic construct
PFNQNQLHQLRAQIMAYKMLARGQPLPDHLQMAVQGKRPMPGMQQQMPTLPPPSVSATGPGPGPGPGPGPGPGPAAAAAS

SEQ ID NO: 13577 - protein, 70 aa, Synthetic construct
PVDDAEVDELVLQTKRSSRRQSLELVKYRFSWPFREPVTRDEAEDYYDVITHPMDFQTVQNKCSCGSYRS

SEQ ID NO: 13578 - protein, 70 aa, Synthetic construct
PVDDAEVDELVLQTKRSSRRQSLELQKCEEILHKIVKYRFSWPFREPVTRDEAEDYYDVITHPMDFQTVQ

SEQ ID NO: 13579 - protein, 70 aa, Synthetic construct
INCLSAYRVKTVTSSGVQVSCHSCKTSAIPQYHLAMSNGTIYSFCSSSCVVAFQNVFSKPKGTNSSAVPL

SEQ ID NO: 13580 - protein, 70 aa, Synthetic construct
DSGKTELFCSINCLSAYRVKTVTSSGVQVSCHSCKMSNGTIYSFCSSSCVVAFQNVFSKPKGTNSSAVPL

SEQ ID NO: 13581 - protein, 70 aa, Synthetic construct
FWAGCYKLLIHMRVHSGEKPNKCMFEGCSKAFSRLENLKIHLRSHTGEKPYLCQHPGCQKAFSNSSDRAK

SEQ ID NO: 13582 - protein, 70 aa, Synthetic construct
FWAGCVRRYKPFNARYKLLIHMRVHSGEKPNKCMFEGCSKAFSRLTGEKPYLCQHPGCQKAFSNSSDRAK

SEQ ID NO: 13583 - protein, 70 aa, Synthetic construct
FWAGCVRRYKPFNARYKLLIHMRVHSGEKPNKCMFEGCSKAFSRLENLKIYLCQHPGCQKAFSNSSDRAK

SEQ ID NO: 13584 - protein, 70 aa, Synthetic construct
FWAGCVRRYKPFNARYKLLIHMRVHSGEKPNKCMFEGCSKAFSRLENLKIHLRSHTGEKPYLCQHSDRAK

SEQ ID NO: 13585 - protein, 70 aa, Synthetic construct
YCSEVSGPEIAGVSGVDDLPPPPLSCNMWTSVSPYTSYSVQTMETVPYQPFPTHFTATTMMPRLPTLSAQ

SEQ ID NO: 13586 - protein, 70 aa, Synthetic construct
YCSEVTPREACMYSGVDDLPPPPLSCNMWTSVSPYTSYSVQTMETVPYQPFPTHFTATTMMPRLPTLSAQ

SEQ ID NO: 13587 - protein, 70 aa, Synthetic construct
YCSEVTPREACMYSGSGPEIPPPLSCNMWTSVSPYTSYSVQTMETVPYQPFPTHFTATTMMPRLPTLSAQ

SEQ ID NO: 13588 - protein, 70 aa, Synthetic construct
YCSEVTPREACMYSGSGPEIAGVSGCNMWTSVSPYTSYSVQTMETVPYQPFPTHFTATTMMPRLPTLSAQ

SEQ ID NO: 13589 - protein, 70 aa, Synthetic construct
YCSEVTPREACMYSGSGPEIAGVSGVDDLPPPPLSCNMWTSVSPYVPYQPFPTHFTATTMMPRLPTLSAQ

SEQ ID NO: 13590 - protein, 70 aa, Synthetic construct
YCSEVTPREACMYSGSGPEIAGVSGVDDLPPPPLSCNMWTSVSPYTSYSVQTMETVPYQPFPTHFTLSAQ

SEQ ID NO: 13591 - protein, 70 aa, Synthetic construct
YCSEVTPREACMYSGSGPEIAGVSGVDDLPPPPLSCNMWTSVSPYTSYSVQTMETVPYQPFPTHFTATTM

SEQ ID NO: 13592 - protein, 70 aa, Synthetic construct
GRIREDEGAVASSTVKEPPEATATPEPLSDEDLPLDPDLYQDFCAGAFDDHGLPWMSDTEESPFLDPALR

SEQ ID NO: 13593 - protein, 70 aa, Synthetic construct
QQQPQDEGAVASSTVKEPPEATATPEPLSDEDLPLDPDLYQDFCAGAFDDHGLPWMSDTEESPFLDPALR

SEQ ID NO: 13594 - protein, 70 aa, Synthetic construct
QQQPQPSQKLASSTVKEPPEATATPEPLSDEDLPLDPDLYQDFCAGAFDDHGLPWMSDTEESPFLDPALR

SEQ ID NO: 13595 - protein, 70 aa, Synthetic construct
QQQPQPSQKLGRIREKEPPEATATPEPLSDEDLPLDPDLYQDFCAGAFDDHGLPWMSDTEESPFLDPALR

SEQ ID NO: 13596 - protein, 70 aa, Synthetic construct
QQQPQPSQKLGRIREDEGAVATATPEPLSDEDLPLDPDLYQDFCAGAFDDHGLPWMSDTEESPFLDPALR

SEQ ID NO: 13597 - protein, 70 aa, Synthetic construct
QQQPQPSQKLGRIREDEGAVASSTVEPLSDEDLPLDPDLYQDFCAGAFDDHGLPWMSDTEESPFLDPALR

SEQ ID NO: 13598 - protein, 70 aa, Synthetic construct
CLSRVRPMRNEQYRGKNPLLVPLLYDFRRMTARRRVNRKMGFHVIYKTPCGLCLRTMQEIERYLFETGCD

SEQ ID NO: 13599 - protein, 70 aa, Synthetic construct
FYLPHVCSYTCLSRVRPMRNVPLLYDFRRMTARRRVNRKMGFHVIYKTPCGLCLRTMQEIERYLFETGCD

SEQ ID NO: 13600 - protein, 70 aa, Synthetic construct
FYLPHVCSYTCLSRVRPMRNEQYRGKNPLLTARRRVNRKMGFHVIYKTPCGLCLRTMQEIERYLFETGCD

SEQ ID NO: 13601 - protein, 70 aa, Synthetic construct
FYLPHVCSYTCLSRVRPMRNEQYRGKNPLLVPLLYDFRRMTARRRVNRKMGLCLRTMQEIERYLFETGCD

SEQ ID NO: 13602 - protein, 70 aa, Synthetic construct
FYLPHVCSYTCLSRVRPMRNEQYRGKNPLLVPLLYDFRRMTARRRVNRKMGFHVITMQEIERYLFETGCD

SEQ ID NO: 13603 - protein, 70 aa, Synthetic construct
IIRDLNSLFTPDYELLTENDGFSGAFEDRDPTQFEERHLKFLQQLGKGNFGSVEMCRYDPLQDNTGEVVA

SEQ ID NO: 13604 - protein, 70 aa, Synthetic construct
IIRDLNSLFTPDYELLTENDMLPNMFEDRDPTQFEERHLKFLQQLGKGNFGSVEMCRYDPLQDNTGEVVA

SEQ ID NO: 13605 - protein, 70 aa, Synthetic construct
IIRDLNSLFTPDYELLTENDMLPNMRIGALGFSGAFEDRDFLQQLGKGNFGSVEMCRYDPLQDNTGEVVA

SEQ ID NO: 13606 - protein, 70 aa, Synthetic construct
IIRDLNSLFTPDYELLTENDMLPNMRIGALGFSGAFEDRDPTQFEGKGNFGSVEMCRYDPLQDNTGEVVA

SEQ ID NO: 13607 - protein, 70 aa, Synthetic construct
IIRDLNSLFTPDYELLTENDMLPNMRIGALGFSGAFEDRDPTQFEERHLKFLQQLCRYDPLQDNTGEVVA

SEQ ID NO: 13608 - protein, 70 aa, Synthetic construct
IIRDLNSLFTPDYELLTENDMLPNMRIGALGFSGAFEDRDPTQFEERHLKFLQQLGKGNFLQDNTGEVVA

SEQ ID NO: 13609 - protein, 70 aa, Synthetic construct
IIRDLNSLFTPDYELLTENDMLPNMRIGALGFSGAFEDRDPTQFEERHLKFLQQLGKGNFGSVEMGEVVA

SEQ ID NO: 13610 - protein, 70 aa, Synthetic construct
IIRDLNSLFTPDYELLTENDMLPNMRIGALGFSGAFEDRDPTQFEERHLKFLQQLGKGNFGSVEMCRYDP

SEQ ID NO: 13611 - protein, 70 aa, Synthetic construct
SAQPQISSDNCFLQWWNSSQSTSSSSQENNSAQSSLLPSMNEQSQKTQNISSFDSELFLEELDELPPLSP

SEQ ID NO: 13612 - protein, 70 aa, Synthetic construct
SAQPQISSDNCFLQWGFKTYRTSSLWNSSQSAQSSLLPSMNEQSQKTQNISSFDSELFLEELDELPPLSP

SEQ ID NO: 13613 - protein, 70 aa, Synthetic construct
SAQPQISSDNCFLQWGFKTYRTSSLWNSSQSTSSSSQENNSAQSSLLPSMSSFDSELFLEELDELPPLSP

SEQ ID NO: 13614 - protein, 70 aa, Synthetic construct
SAQPQISSDNCFLQWGFKTYRTSSLWNSSQSTSSSSQENNSAQSSLLPSMNEQSQELFLEELDELPPLSP

SEQ ID NO: 13615 - protein, 70 aa, Synthetic construct
NEQSQKTQNISSFDSELFLEELDELPPLSPMQPISEEEAIQIIADPPLPPASFTLRDYVDHSETLQKLVL

SEQ ID NO: 13616 - protein, 70 aa, Synthetic construct
SAQSSKTQNISSFDSELFLEELDELPPLSPMQPISEEEAIQIIADPPLPPASFTLRDYVDHSETLQKLVL

SEQ ID NO: 13617 - protein, 70 aa, Synthetic construct
SAQSSLLPSMSSFDSELFLEELDELPPLSPMQPISEEEAIQIIADPPLPPASFTLRDYVDHSETLQKLVL

SEQ ID NO: 13618 - protein, 70 aa, Synthetic construct
SAQSSLLPSMNEQSQELFLEELDELPPLSPMQPISEEEAIQIIADPPLPPASFTLRDYVDHSETLQKLVL

SEQ ID NO: 13619 - protein, 70 aa, Synthetic construct
SAQSSLLPSMNEQSQKTQNISSFDSELFLEELDELEEEAIQIIADPPLPPASFTLRDYVDHSETLQKLVL

SEQ ID NO: 13620 - protein, 70 aa, Synthetic construct
SAQSSLLPSMNEQSQKTQNISSFDSELFLEELDELPPLSPQIIADPPLPPASFTLRDYVDHSETLQKLVL

SEQ ID NO: 13621 - protein, 70 aa, Synthetic construct
SAQSSLLPSMNEQSQKTQNISSFDSELFLEELDELPPLSPMQPISPPLPPASFTLRDYVDHSETLQKLVL

SEQ ID NO: 13622 - protein, 70 aa, Synthetic construct
SAQSSLLPSMNEQSQKTQNISSFDSELFLEELDELPPLSPMQPISEEEAIASFTLRDYVDHSETLQKLVL

SEQ ID NO: 13623 - protein, 70 aa, Synthetic construct
SAQSSLLPSMNEQSQKTQNISSFDSELFLEELDELPPLSPMQPISEEEAIQIIADPPLPPASFTLQKLVL

SEQ ID NO: 13624 - protein, 70 aa, Synthetic construct
CCHPQAVRGEFLPLQTSLQKKCGTECEEAHRQLVCALNGLAGIHIIKGEYALAAELYREVLRSSEEHKGK

SEQ ID NO: 13625 - protein, 70 aa, Synthetic construct
CCHPQAVRGEFLPLQKSTMTMEELLCEEAHRQLVCALNGLAGIHIIKGEYALAAELYREVLRSSEEHKGK

SEQ ID NO: 13626 - protein, 70 aa, Synthetic construct
CCHPQAVRGEFLPLQKSTMTMEELLTSLQKKCGTECEEAHAGIHIIKGEYALAAELYREVLRSSEEHKGK

SEQ ID NO: 13627 - protein, 70 aa, Synthetic construct
CCHPQAVRGEFLPLQKSTMTMEELLTSLQKKCGTECEEAHRQLVCALNGLAGIHIIKGEYALAAEEHKGK

SEQ ID NO: 13628 - protein, 70 aa, Synthetic construct
DAALLTDIEDMLQLINNQDSDFPGLFDPPYAGSGAGGTDPASPDTSSPGSLSPPPATLSSSLEAFLSGPQ

SEQ ID NO: 13629 - protein, 70 aa, Synthetic construct
EQALGTDIEDMLQLINNQDSDFPGLFDPPYAGSGAGGTDPASPDTSSPGSLSPPPATLSSSLEAFLSGPQ

SEQ ID NO: 13630 - protein, 70 aa, Synthetic construct
EQALGEPCDLDAALLTDIEDMLQLIFDPPYAGSGAGGTDPASPDTSSPGSLSPPPATLSSSLEAFLSGPQ

SEQ ID NO: 13631 - protein, 70 aa, Synthetic construct
EQALGEPCDLDAALLTDIEDMLQLINNQDSAGSGAGGTDPASPDTSSPGSLSPPPATLSSSLEAFLSGPQ

SEQ ID NO: 13632 - protein, 70 aa, Synthetic construct
EQALGEPCDLDAALLTDIEDMLQLINNQDSDFPGLGGTDPASPDTSSPGSLSPPPATLSSSLEAFLSGPQ

SEQ ID NO: 13633 - protein, 70 aa, Synthetic construct
EQALGEPCDLDAALLTDIEDMLQLINNQDSDFPGLFDPPYASPDTSSPGSLSPPPATLSSSLEAFLSGPQ

SEQ ID NO: 13634 - protein, 70 aa, Synthetic construct
EQALGEPCDLDAALLTDIEDMLQLINNQDSDFPGLFDPPYAGSGASSPGSLSPPPATLSSSLEAFLSGPQ

SEQ ID NO: 13635 - protein, 70 aa, Synthetic construct
EQALGEPCDLDAALLTDIEDMLQLINNQDSDFPGLFDPPYAGSGAGGTDPLSPPPATLSSSLEAFLSGPQ

SEQ ID NO: 13636 - protein, 70 aa, Synthetic construct
EQALGEPCDLDAALLTDIEDMLQLINNQDSDFPGLFDPPYAGSGAGGTDPASPDTATLSSSLEAFLSGPQ

SEQ ID NO: 13637 - protein, 70 aa, Synthetic construct
EQALGEPCDLDAALLTDIEDMLQLINNQDSDFPGLFDPPYAGSGAGGTDPASPDTSSPGSSLEAFLSGPQ

SEQ ID NO: 13638 - protein, 70 aa, Synthetic construct
EQALGEPCDLDAALLTDIEDMLQLINNQDSDFPGLFDPPYAGSGAGGTDPASPDTSSPGSLSPPPLSGPQ

SEQ ID NO: 13639 - protein, 70 aa, Synthetic construct
EQALGEPCDLDAALLTDIEDMLQLINNQDSDFPGLFDPPYAGSGAGGTDPASPDTSSPGSLSPPPATLSS

SEQ ID NO: 13640 - protein, 70 aa, Synthetic construct
ALLDQLHTLLSNTDATGLEEIDRALALEPKQDAFQGQEAAVMMDQKAGLYGQTYPAQGPPMQGGFHLQGQ

SEQ ID NO: 13641 - protein, 70 aa, Synthetic construct
ALLDQLHTLLSNTDATGLEEIDRALGIPELQDAFQGQEAAVMMDQKAGLYGQTYPAQGPPMQGGFHLQGQ

SEQ ID NO: 13642 - protein, 70 aa, Synthetic construct
ALLDQLHTLLSNTDATGLEEIDRALGIPELVNQGQGQEAAVMMDQKAGLYGQTYPAQGPPMQGGFHLQGQ

SEQ ID NO: 13643 - protein, 70 aa, Synthetic construct
ALLDQLHTLLSNTDATGLEEIDRALGIPELVNQGQALEPKVMMDQKAGLYGQTYPAQGPPMQGGFHLQGQ

SEQ ID NO: 13644 - protein, 70 aa, Synthetic construct
ALLDQLHTLLSNTDATGLEEIDRALGIPELVNQGQALEPKQDAFQKAGLYGQTYPAQGPPMQGGFHLQGQ

SEQ ID NO: 13645 - protein, 70 aa, Synthetic construct
ALLDQLHTLLSNTDATGLEEIDRALGIPELVNQGQALEPKQDAFQGQEAAGQTYPAQGPPMQGGFHLQGQ

SEQ ID NO: 13646 - protein, 70 aa, Synthetic construct
ALLDQLHTLLSNTDATGLEEIDRALGIPELVNQGQALEPKQDAFQGQEAAVMMDQAQGPPMQGGFHLQGQ

SEQ ID NO: 13647 - protein, 70 aa, Synthetic construct
ALLDQLHTLLSNTDATGLEEIDRALGIPELVNQGQALEPKQDAFQGQEAAVMMDQKAGLYMQGGFHLQGQ

SEQ ID NO: 13648 - protein, 70 aa, Synthetic construct
ALLDQLHTLLSNTDATGLEEIDRALGIPELVNQGQALEPKQDAFQGQEAAVMMDQKAGLYGQTYPHLQGQ

SEQ ID NO: 13649 - protein, 70 aa, Synthetic construct
ALLDQLHTLLSNTDATGLEEIDRALGIPELVNQGQALEPKQDAFQGQEAAVMMDQKAGLYGQTYPAQGPP

SEQ ID NO: 13650 - protein, 70 aa, Synthetic construct
LQPLAHLSPAAFSSFYAAPPPPVTCFPHPYSHALPSQPSTGGAFALSHQSEDWYPTLHPAPAGHLPCPPP

SEQ ID NO: 13651 - protein, 70 aa, Synthetic construct
LQPLAHLSPAAFSSFLPESTACPYSFPHPYSHALPSQPSTGGAFALSHQSEDWYPTLHPAPAGHLPCPPP

SEQ ID NO: 13652 - protein, 70 aa, Synthetic construct
LQPLAHLSPAAFSSFLPESTACPYSYAAPPPPVTCFPHPYGGAFALSHQSEDWYPTLHPAPAGHLPCPPP

SEQ ID NO: 13653 - protein, 70 aa, Synthetic construct
LQPLAHLSPAAFSSFLPESTACPYSYAAPPPPVTCFPHPYSHALPLSHQSEDWYPTLHPAPAGHLPCPPP

SEQ ID NO: 13654 - protein, 70 aa, Synthetic construct
LQPLAHLSPAAFSSFLPESTACPYSYAAPPPPVTCFPHPYSHALPSQPSTEDWYPTLHPAPAGHLPCPPP

SEQ ID NO: 13655 - protein, 70 aa, Synthetic construct
LQPLAHLSPAAFSSFLPESTACPYSYAAPPPPVTCFPHPYSHALPSQPSTGGAFALSHQSEDWYPPCPPP

SEQ ID NO: 13656 - protein, 70 aa, Synthetic construct
LQPLAHLSPAAFSSFLPESTACPYSYAAPPPPVTCFPHPYSHALPSQPSTGGAFALSHQSEDWYPTLHPA

SEQ ID NO: 13657 - protein, 70 aa, Synthetic construct
MFDLSLNFSQSAHSASEQQLGGGAAAGNLSLSLVDKDLDSFSEGSLGSHFEFPDYCTPELSEMIAGDWLE

SEQ ID NO: 13658 - protein, 70 aa, Synthetic construct
GSSGELNFSQSAHSASEQQLGGGAAAGNLSLSLVDKDLDSFSEGSLGSHFEFPDYCTPELSEMIAGDWLE

SEQ ID NO: 13659 - protein, 70 aa, Synthetic construct
GSSGEDADDLSAHSASEQQLGGGAAAGNLSLSLVDKDLDSFSEGSLGSHFEFPDYCTPELSEMIAGDWLE

SEQ ID NO: 13660 - protein, 70 aa, Synthetic construct
GSSGEDADDLMFDLSSEQQLGGGAAAGNLSLSLVDKDLDSFSEGSLGSHFEFPDYCTPELSEMIAGDWLE

SEQ ID NO: 13661 - protein, 70 aa, Synthetic construct
GSSGEDADDLMFDLSLNFSQGGGAAAGNLSLSLVDKDLDSFSEGSLGSHFEFPDYCTPELSEMIAGDWLE

SEQ ID NO: 13662 - protein, 70 aa, Synthetic construct
GSSGEDADDLMFDLSLNFSQSAHSAAGNLSLSLVDKDLDSFSEGSLGSHFEFPDYCTPELSEMIAGDWLE

SEQ ID NO: 13663 - protein, 70 aa, Synthetic construct
GSSGEDADDLMFDLSLNFSQSAHSASEQQLLSLVDKDLDSFSEGSLGSHFEFPDYCTPELSEMIAGDWLE

SEQ ID NO: 13664 - protein, 70 aa, Synthetic construct
GSSGEDADDLMFDLSLNFSQSAHSASEQQLGGGAAKDLDSFSEGSLGSHFEFPDYCTPELSEMIAGDWLE

SEQ ID NO: 13665 - protein, 70 aa, Synthetic construct
GSSGEDADDLMFDLSLNFSQSAHSASEQQLGGGAAAGNLSFSEGSLGSHFEFPDYCTPELSEMIAGDWLE

SEQ ID NO: 13666 - protein, 70 aa, Synthetic construct
GSSGEDADDLMFDLSLNFSQSAHSASEQQLGGGAAAGNLSLSLVDLGSHFEFPDYCTPELSEMIAGDWLE

SEQ ID NO: 13667 - protein, 70 aa, Synthetic construct
GSSGEDADDLMFDLSLNFSQSAHSASEQQLGGGAAAGNLSLSLVDKDLDSEFPDYCTPELSEMIAGDWLE

SEQ ID NO: 13668 - protein, 70 aa, Synthetic construct
GSSGEDADDLMFDLSLNFSQSAHSASEQQLGGGAAAGNLSLSLVDKDLDSFSEGSLGSHFSEMIAGDWLE

SEQ ID NO: 13669 - protein, 70 aa, Synthetic construct
GSSGEDADDLMFDLSLNFSQSAHSASEQQLGGGAAAGNLSLSLVDKDLDSFSEGSLGSHFEFPDYGDWLE

SEQ ID NO: 13670 - protein, 70 aa, Synthetic construct
GSSGEDADDLMFDLSLNFSQSAHSASEQQLGGGAAAGNLSLSLVDKDLDSFSEGSLGSHFEFPDYCTPEL

SEQ ID NO: 13671 - protein, 70 aa, Synthetic construct
DPGCFWVIIKGCSPFNSAMNDFYNSTCQDIEIKPLTLEEGQVCVVYCEELKCWCRAIVKSITSSADQYLA

SEQ ID NO: 13672 - protein, 70 aa, Synthetic construct
DPGCFWVIIKGCSPFLDHDVDYQKLTCQDIEIKPLTLEEGQVCVVYCEELKCWCRAIVKSITSSADQYLA

SEQ ID NO: 13673 - protein, 70 aa, Synthetic construct
DPGCFWVIIKGCSPFLDHDVDYQKLNSAMNDFYNSTCQDIEIKPLTLEEGKCWCRAIVKSITSSADQYLA

SEQ ID NO: 13674 - protein, 70 aa, Synthetic construct
DPGCFWVIIKGCSPFLDHDVDYQKLNSAMNDFYNSTCQDIEIKPLTLEEGQVCVVAIVKSITSSADQYLA

SEQ ID NO: 13675 - protein, 70 aa, Synthetic construct
DPGCFWVIIKGCSPFLDHDVDYQKLNSAMNDFYNSTCQDIEIKPLTLEEGQVCVVYCEELKCWCRDQYLA

SEQ ID NO: 13676 - protein, 70 aa, Synthetic construct
GLQVVFGTMLVWSELITPHAIRVQTPPRHIPGVVEVTLSYKSKQFCKGAPGRFVYTALNEPTIDYGFQRL

SEQ ID NO: 13677 - protein, 70 aa, Synthetic construct
VIIIGDNFFDGLQVVFGTMLVWSELITPHAPGVVEVTLSYKSKQFCKGAPGRFVYTALNEPTIDYGFQRL

SEQ ID NO: 13678 - protein, 70 aa, Synthetic construct
VIIIGDNFFDGLQVVFGTMLVWSELITPHAIRVQTPPRHIPGVVEVTLSYKSKQFTALNEPTIDYGFQRL

SEQ ID NO: 13679 - protein, 70 aa, Synthetic construct
VIIIGDNFFDGLQVVFGTMLVWSELITPHAIRVQTPPRHIPGVVEVTLSYKSKQFCKGAPPTIDYGFQRL

SEQ ID NO: 13680 - protein, 70 aa, Synthetic construct
CKANQMRLAGTLCDVVIMVDSQEFHAHRTVLACTSKMFEILFHRNSQHYTLDFLSPKTFQQILEYAYTAT

SEQ ID NO: 13681 - protein, 70 aa, Synthetic construct
QNPSHMRLAGTLCDVVIMVDSQEFHAHRTVLACTSKMFEILFHRNSQHYTLDFLSPKTFQQILEYAYTAT

SEQ ID NO: 13682 - protein, 70 aa, Synthetic construct
QNPSHPTGLLTLCDVVIMVDSQEFHAHRTVLACTSKMFEILFHRNSQHYTLDFLSPKTFQQILEYAYTAT

SEQ ID NO: 13683 - protein, 70 aa, Synthetic construct
QNPSHPTGLLCKANQMRLAGTLCDVAHRTVLACTSKMFEILFHRNSQHYTLDFLSPKTFQQILEYAYTAT

SEQ ID NO: 13684 - protein, 70 aa, Synthetic construct
QNPSHPTGLLCKANQMRLAGTLCDVVIMVDSQEFHKMFEILFHRNSQHYTLDFLSPKTFQQILEYAYTAT

SEQ ID NO: 13685 - protein, 70 aa, Synthetic construct
QNPSHPTGLLCKANQMRLAGTLCDVVIMVDSQEFHAHRTVLACTSKMFEILDFLSPKTFQQILEYAYTAT

SEQ ID NO: 13686 - protein, 70 aa, Synthetic construct
QNPSHPTGLLCKANQMRLAGTLCDVVIMVDSQEFHAHRTVLACTSKMFEILFHRNSQHYTQILEYAYTAT

SEQ ID NO: 13687 - protein, 70 aa, Synthetic construct
QNPSHPTGLLCKANQMRLAGTLCDVVIMVDSQEFHAHRTVLACTSKMFEILFHRNSQHYTLDFLSAYTAT

SEQ ID NO: 13688 - protein, 70 aa, Synthetic construct
YSYHSSGEYSSDFLTPEFVKFSMDLTNTEITATTSLPSFSTFMDNYSTGYDVKPPCLYQMPLSGQQSSIK

SEQ ID NO: 13689 - protein, 70 aa, Synthetic construct
PQGASSGEYSSDFLTPEFVKFSMDLTNTEITATTSLPSFSTFMDNYSTGYDVKPPCLYQMPLSGQQSSIK

SEQ ID NO: 13690 - protein, 70 aa, Synthetic construct
PQGASPASQSSDFLTPEFVKFSMDLTNTEITATTSLPSFSTFMDNYSTGYDVKPPCLYQMPLSGQQSSIK

SEQ ID NO: 13691 - protein, 70 aa, Synthetic construct
PQGASPASQSYSYHSSGEYSSDFLTPEFVKFSMDLLPSFSTFMDNYSTGYDVKPPCLYQMPLSGQQSSIK

SEQ ID NO: 13692 - protein, 70 aa, Synthetic construct
PQGASPASQSYSYHSSGEYSSDFLTPEFVKFSMDLTNTEITFMDNYSTGYDVKPPCLYQMPLSGQQSSIK

SEQ ID NO: 13693 - protein, 70 aa, Synthetic construct
PQGASPASQSYSYHSSGEYSSDFLTPEFVKFSMDLTNTEITATTSLPSFSTFMDNCLYQMPLSGQQSSIK

SEQ ID NO: 13694 - protein, 70 aa, Synthetic construct
PQGASPASQSYSYHSSGEYSSDFLTPEFVKFSMDLTNTEITATTSLPSFSTFMDNYSTGYPLSGQQSSIK

SEQ ID NO: 13695 - protein, 70 aa, Synthetic construct
PQGASPASQSYSYHSSGEYSSDFLTPEFVKFSMDLTNTEITATTSLPSFSTFMDNYSTGYDVKPPQSSIK

SEQ ID NO: 13696 - protein, 70 aa, Synthetic construct
PQGASPASQSYSYHSSGEYSSDFLTPEFVKFSMDLTNTEITATTSLPSFSTFMDNYSTGYDVKPPCLYQM

SEQ ID NO: 13697 - protein, 70 aa, Synthetic construct
LDSEEWGEYLEETGASAAPHTSFKHVEISIQSNFQPGMKLEVANKNNPDTYWVATIITTCGQLLLLRYCG

SEQ ID NO: 13698 - protein, 70 aa, Synthetic construct
LDSEEGSSLEEETGASAAPHTSFKHVEISIQSNFQPGMKLEVANKNNPDTYWVATIITTCGQLLLLRYCG

SEQ ID NO: 13699 - protein, 70 aa, Synthetic construct
LDSEEGSSLEETGFNWGEYLEETGASAAPHQSNFQPGMKLEVANKNNPDTYWVATIITTCGQLLLLRYCG

SEQ ID NO: 13700 - protein, 70 aa, Synthetic construct
LDSEEGSSLEETGFNWGEYLEETGASAAPHTSFKHVEISIEVANKNNPDTYWVATIITTCGQLLLLRYCG

SEQ ID NO: 13701 - protein, 70 aa, Synthetic construct
LDSEEGSSLEETGFNWGEYLEETGASAAPHTSFKHVEISIQSNFQNNPDTYWVATIITTCGQLLLLRYCG

SEQ ID NO: 13702 - protein, 70 aa, Synthetic construct
LDSEEGSSLEETGFNWGEYLEETGASAAPHTSFKHVEISIQSNFQPGMKLEVANKIITTCGQLLLLRYCG

SEQ ID NO: 13703 - protein, 70 aa, Synthetic construct
DELEIIDEYIKENGFGLDGGQPGPGEGLPRLVSRGAASLSTVTLGPVAPPATPPPWGCPLGRLVSPAPGP

SEQ ID NO: 13704 - protein, 70 aa, Synthetic construct
SLSLAVSRSTDELEIIDEYIKENGFEGLPRLVSRGAASLSTVTLGPVAPPATPPPWGCPLGRLVSPAPGP

SEQ ID NO: 13705 - protein, 70 aa, Synthetic construct
SLSLAVSRSTDELEIIDEYIKENGFGLDGGLVSRGAASLSTVTLGPVAPPATPPPWGCPLGRLVSPAPGP

SEQ ID NO: 13706 - protein, 70 aa, Synthetic construct
SLSLAVSRSTDELEIIDEYIKENGFGLDGGQPGPGAASLSTVTLGPVAPPATPPPWGCPLGRLVSPAPGP

SEQ ID NO: 13707 - protein, 70 aa, Synthetic construct
SLSLAVSRSTDELEIIDEYIKENGFGLDGGQPGPGEGLPRTVTLGPVAPPATPPPWGCPLGRLVSPAPGP

SEQ ID NO: 13708 - protein, 70 aa, Synthetic construct
SLSLAVSRSTDELEIIDEYIKENGFGLDGGQPGPGEGLPRLVSRGPVAPPATPPPWGCPLGRLVSPAPGP

SEQ ID NO: 13709 - protein, 70 aa, Synthetic construct
SLSLAVSRSTDELEIIDEYIKENGFGLDGGQPGPGEGLPRLVSRGAASLSATPPPWGCPLGRLVSPAPGP

SEQ ID NO: 13710 - protein, 70 aa, Synthetic construct
SLSLAVSRSTDELEIIDEYIKENGFGLDGGQPGPGEGLPRLVSRGAASLSTVTLGWGCPLGRLVSPAPGP

SEQ ID NO: 13711 - protein, 70 aa, Synthetic construct
SLSLAVSRSTDELEIIDEYIKENGFGLDGGQPGPGEGLPRLVSRGAASLSTVTLGPVAPPGRLVSPAPGP

SEQ ID NO: 13712 - protein, 70 aa, Synthetic construct
SLSLAVSRSTDELEIIDEYIKENGFGLDGGQPGPGEGLPRLVSRGAASLSTVTLGPVAPPATPPPPAPGP

SEQ ID NO: 13713 - protein, 70 aa, Synthetic construct
SLSLAVSRSTDELEIIDEYIKENGFGLDGGQPGPGEGLPRLVSRGAASLSTVTLGPVAPPATPPPWGCPL

SEQ ID NO: 13714 - protein, 70 aa, Synthetic construct
LDHFLPNHGSGPFLPPSALLPDPDFFSGTVSLPGLEPPGGPDLLDDGFAYDPTAPTLFTMLDLLPPAPPH

SEQ ID NO: 13715 - protein, 70 aa, Synthetic construct
SKRRKPNHGSGPFLPPSALLPDPDFFSGTVSLPGLEPPGGPDLLDDGFAYDPTAPTLFTMLDLLPPAPPH

SEQ ID NO: 13716 - protein, 70 aa, Synthetic construct
SKRRKKKPAIGPFLPPSALLPDPDFFSGTVSLPGLEPPGGPDLLDDGFAYDPTAPTLFTMLDLLPPAPPH

SEQ ID NO: 13717 - protein, 70 aa, Synthetic construct
SKRRKKKPAILDHFLPSALLPDPDFFSGTVSLPGLEPPGGPDLLDDGFAYDPTAPTLFTMLDLLPPAPPH

SEQ ID NO: 13718 - protein, 70 aa, Synthetic construct
SKRRKKKPAILDHFLPNHGSPDPDFFSGTVSLPGLEPPGGPDLLDDGFAYDPTAPTLFTMLDLLPPAPPH

SEQ ID NO: 13719 - protein, 70 aa, Synthetic construct
SKRRKKKPAILDHFLPNHGSGPFLPFSGTVSLPGLEPPGGPDLLDDGFAYDPTAPTLFTMLDLLPPAPPH

SEQ ID NO: 13720 - protein, 70 aa, Synthetic construct
SKRRKKKPAILDHFLPNHGSGPFLPPSALLSLPGLEPPGGPDLLDDGFAYDPTAPTLFTMLDLLPPAPPH

SEQ ID NO: 13721 - protein, 70 aa, Synthetic construct
SKRRKKKPAILDHFLPNHGSGPFLPPSALLPDPDFEPPGGPDLLDDGFAYDPTAPTLFTMLDLLPPAPPH

SEQ ID NO: 13722 - protein, 70 aa, Synthetic construct
SKRRKKKPAILDHFLPNHGSGPFLPPSALLPDPDFFSGTVPDLLDDGFAYDPTAPTLFTMLDLLPPAPPH

SEQ ID NO: 13723 - protein, 70 aa, Synthetic construct
SKRRKKKPAILDHFLPNHGSGPFLPPSALLPDPDFFSGTVSLPGLDGFAYDPTAPTLFTMLDLLPPAPPH

SEQ ID NO: 13724 - protein, 70 aa, Synthetic construct
SKRRKKKPAILDHFLPNHGSGPFLPPSALLPDPDFFSGTVSLPGLEPPGGPDLLDTLFTMLDLLPPAPPH

SEQ ID NO: 13725 - protein, 70 aa, Synthetic construct
SKRRKKKPAILDHFLPNHGSGPFLPPSALLPDPDFFSGTVSLPGLEPPGGPDLLDDGFAYLDLLPPAPPH

SEQ ID NO: 13726 - protein, 70 aa, Synthetic construct
ELQLVHDTGYFSALPSLEETWQQTCLELERYLQTEPRRISETFGEDLDCFLHASPPPCIEESFRRLDPLL

SEQ ID NO: 13727 - protein, 70 aa, Synthetic construct
DVLASHDTGYFSALPSLEETWQQTCLELERYLQTEPRRISETFGEDLDCFLHASPPPCIEESFRRLDPLL

SEQ ID NO: 13728 - protein, 70 aa, Synthetic construct
DVLASYSIFQFSALPSLEETWQQTCLELERYLQTEPRRISETFGEDLDCFLHASPPPCIEESFRRLDPLL

SEQ ID NO: 13729 - protein, 70 aa, Synthetic construct
DVLASYSIFQELQLVSLEETWQQTCLELERYLQTEPRRISETFGEDLDCFLHASPPPCIEESFRRLDPLL

SEQ ID NO: 13730 - protein, 70 aa, Synthetic construct
DVLASYSIFQELQLVHDTGYWQQTCLELERYLQTEPRRISETFGEDLDCFLHASPPPCIEESFRRLDPLL

SEQ ID NO: 13731 - protein, 70 aa, Synthetic construct
DVLASYSIFQELQLVHDTGYFSALPLELERYLQTEPRRISETFGEDLDCFLHASPPPCIEESFRRLDPLL

SEQ ID NO: 13732 - protein, 70 aa, Synthetic construct
DVLASYSIFQELQLVHDTGYFSALPSLEETYLQTEPRRISETFGEDLDCFLHASPPPCIEESFRRLDPLL

SEQ ID NO: 13733 - protein, 70 aa, Synthetic construct
DVLASYSIFQELQLVHDTGYFSALPSLEETWQQTCPRRISETFGEDLDCFLHASPPPCIEESFRRLDPLL

SEQ ID NO: 13734 - protein, 70 aa, Synthetic construct
DVLASYSIFQELQLVHDTGYFSALPSLEETWQQTCLELERETFGEDLDCFLHASPPPCIEESFRRLDPLL

SEQ ID NO: 13735 - protein, 70 aa, Synthetic construct
DVLASYSIFQELQLVHDTGYFSALPSLEETWQQTCLELERYLQTEDLDCFLHASPPPCIEESFRRLDPLL

SEQ ID NO: 13736 - protein, 70 aa, Synthetic construct
DVLASYSIFQELQLVHDTGYFSALPSLEETWQQTCLELERYLQTEPRRISLHASPPPCIEESFRRLDPLL

SEQ ID NO: 13737 - protein, 70 aa, Synthetic construct
DVLASYSIFQELQLVHDTGYFSALPSLEETWQQTCLELERYLQTEPRRISETFGEPPCIEESFRRLDPLL

SEQ ID NO: 13738 - protein, 70 aa, Synthetic construct
DVLASYSIFQELQLVHDTGYFSALPSLEETWQQTCLELERYLQTEPRRISETFGEDLDCFESFRRLDPLL

SEQ ID NO: 13739 - protein, 70 aa, Synthetic construct
DVLASYSIFQELQLVHDTGYFSALPSLEETWQQTCLELERYLQTEPRRISETFGEDLDCFLHASPLDPLL

SEQ ID NO: 13740 - protein, 70 aa, Synthetic construct
DVLASYSIFQELQLVHDTGYFSALPSLEETWQQTCLELERYLQTEPRRISETFGEDLDCFLHASPPPCIE

SEQ ID NO: 13741 - protein, 70 aa, Synthetic construct
GSPQDELDFSILFDYEYLNPASPPSGPAYPDDVLDYGLKPYSPLASLSGEPPGRFGEPDRVGPQKFLSAA

SEQ ID NO: 13742 - protein, 70 aa, Synthetic construct
GSPQDELDFSILFDYEYLNPNEEEPGPAYPDDVLDYGLKPYSPLASLSGEPPGRFGEPDRVGPQKFLSAA

SEQ ID NO: 13743 - protein, 70 aa, Synthetic construct
GSPQDELDFSILFDYEYLNPNEEEPNAHKVDDVLDYGLKPYSPLASLSGEPPGRFGEPDRVGPQKFLSAA

SEQ ID NO: 13744 - protein, 70 aa, Synthetic construct
GSPQDELDFSILFDYEYLNPNEEEPNAHKVASPPSYGLKPYSPLASLSGEPPGRFGEPDRVGPQKFLSAA

SEQ ID NO: 13745 - protein, 70 aa, Synthetic construct
GSPQDELDFSILFDYEYLNPNEEEPNAHKVASPPSGPAYPDDVLDYGLKPPPGRFGEPDRVGPQKFLSAA

SEQ ID NO: 13746 - protein, 70 aa, Synthetic construct
GSPQDELDFSILFDYEYLNPNEEEPNAHKVASPPSGPAYPDDVLDYGLKPYSPLASLSGEVGPQKFLSAA

SEQ ID NO: 13747 - protein, 70 aa, Synthetic construct
GSPQDELDFSILFDYEYLNPNEEEPNAHKVASPPSGPAYPDDVLDYGLKPYSPLASLSGEPPGRFFLSAA

SEQ ID NO: 13748 - protein, 70 aa, Synthetic construct
GSPQDELDFSILFDYEYLNPNEEEPNAHKVASPPSGPAYPDDVLDYGLKPYSPLASLSGEPPGRFGEPDR

SEQ ID NO: 13749 - protein, 70 aa, Synthetic construct
LDMEDDAKLDSLITEALNGMEYQSDNPEIDSSFIDVFADEEPSGPSKAGVTPESKAPPPLPAATPDPQTP

SEQ ID NO: 13750 - protein, 70 aa, Synthetic construct
LDMEDDAKLDSLITEALNGMEYQSDNPEIDSSFIDVFADEEPSGPRGPSSTPESKAPPPLPAATPDPQTP

SEQ ID NO: 13751 - protein, 70 aa, Synthetic construct
LDMEDDAKLDSLITEALNGMEYQSDNPEIDSSFIDVFADEEPSGPRGPSSGHPLKAPPPLPAATPDPQTP

SEQ ID NO: 13752 - protein, 70 aa, Synthetic construct
LDMEDDAKLDSLITEALNGMEYQSDNPEIDSSFIDVFADEEPSGPRGPSSGHPLKSKAGVPAATPDPQTP

SEQ ID NO: 13753 - protein, 70 aa, Synthetic construct
LDMEDDAKLDSLITEALNGMEYQSDNPEIDSSFIDVFADEEPSGPRGPSSGHPLKSKAGVTPESKDPQTP

SEQ ID NO: 13754 - protein, 70 aa, Synthetic construct
LDMEDDAKLDSLITEALNGMEYQSDNPEIDSSFIDVFADEEPSGPRGPSSGHPLKSKAGVTPESKAPPPL

SEQ ID NO: 13755 - protein, 70 aa, Synthetic construct
TLGPARLPTDLSDSSSLCLCHEDPWEDEDPAGLPESFLLDGFLNSRVPGIDPWAPGLSLWALEPSREAGA

SEQ ID NO: 13756 - protein, 70 aa, Synthetic construct
QPSFERLPTDLSDSSSLCLCHEDPWEDEDPAGLPESFLLDGFLNSRVPGIDPWAPGLSLWALEPSREAGA

SEQ ID NO: 13757 - protein, 70 aa, Synthetic construct
QPSFEEGGDPLSDSSSLCLCHEDPWEDEDPAGLPESFLLDGFLNSRVPGIDPWAPGLSLWALEPSREAGA

SEQ ID NO: 13758 - protein, 70 aa, Synthetic construct
QPSFEEGGDPTLGPASLCLCHEDPWEDEDPAGLPESFLLDGFLNSRVPGIDPWAPGLSLWALEPSREAGA

SEQ ID NO: 13759 - protein, 70 aa, Synthetic construct
QPSFEEGGDPTLGPARLPTDHEDPWEDEDPAGLPESFLLDGFLNSRVPGIDPWAPGLSLWALEPSREAGA

SEQ ID NO: 13760 - protein, 70 aa, Synthetic construct
QPSFEEGGDPTLGPARLPTDLSDSSEDEDPAGLPESFLLDGFLNSRVPGIDPWAPGLSLWALEPSREAGA

SEQ ID NO: 13761 - protein, 70 aa, Synthetic construct
QPSFEEGGDPTLGPARLPTDLSDSSSLCLCAGLPESFLLDGFLNSRVPGIDPWAPGLSLWALEPSREAGA

SEQ ID NO: 13762 - protein, 70 aa, Synthetic construct
QPSFEEGGDPTLGPARLPTDLSDSSSLCLCHEDPWSFLLDGFLNSRVPGIDPWAPGLSLWALEPSREAGA

SEQ ID NO: 13763 - protein, 70 aa, Synthetic construct
QPSFEEGGDPTLGPARLPTDLSDSSSLCLCHEDPWEDEDPGFLNSRVPGIDPWAPGLSLWALEPSREAGA

SEQ ID NO: 13764 - protein, 70 aa, Synthetic construct
QPSFEEGGDPTLGPARLPTDLSDSSSLCLCHEDPWEDEDPAGLPESFLLDDPWAPGLSLWALEPSREAGA

SEQ ID NO: 13765 - protein, 70 aa, Synthetic construct
QPSFEEGGDPTLGPARLPTDLSDSSSLCLCHEDPWEDEDPAGLPESFLLDGFLNSGLSLWALEPSREAGA

SEQ ID NO: 13766 - protein, 70 aa, Synthetic construct
QPSFEEGGDPTLGPARLPTDLSDSSSLCLCHEDPWEDEDPAGLPESFLLDGFLNSRVPGIDPWAPREAGA

SEQ ID NO: 13767 - protein, 70 aa, Synthetic construct
QPSFEEGGDPTLGPARLPTDLSDSSSLCLCHEDPWEDEDPAGLPESFLLDGFLNSRVPGIDPWAPGLSLW

SEQ ID NO: 13768 - protein, 70 aa, Synthetic construct
SLGDVSPEPPSLERERCDGGLPGNTHLLPLRATDFEVLSTKFEMQDLCFLGPFEDPVGLPGPSFLDFEGT

SEQ ID NO: 13769 - protein, 70 aa, Synthetic construct
MPAPASPEPPSLERERCDGGLPGNTHLLPLRATDFEVLSTKFEMQDLCFLGPFEDPVGLPGPSFLDFEGT

SEQ ID NO: 13770 - protein, 70 aa, Synthetic construct
MPAPADDSSSSLERERCDGGLPGNTHLLPLRATDFEVLSTKFEMQDLCFLGPFEDPVGLPGPSFLDFEGT

SEQ ID NO: 13771 - protein, 70 aa, Synthetic construct
MPAPADDSSSSLGDVRCDGGLPGNTHLLPLRATDFEVLSTKFEMQDLCFLGPFEDPVGLPGPSFLDFEGT

SEQ ID NO: 13772 - protein, 70 aa, Synthetic construct
MPAPADDSSSSLGDVSPEPPLPGNTHLLPLRATDFEVLSTKFEMQDLCFLGPFEDPVGLPGPSFLDFEGT

SEQ ID NO: 13773 - protein, 70 aa, Synthetic construct
MPAPADDSSSSLGDVSPEPPSLEREHLLPLRATDFEVLSTKFEMQDLCFLGPFEDPVGLPGPSFLDFEGT

SEQ ID NO: 13774 - protein, 70 aa, Synthetic construct
MPAPADDSSSSLGDVSPEPPSLERERCDGGLPGNTHLLPLRATDFDLCFLGPFEDPVGLPGPSFLDFEGT

SEQ ID NO: 13775 - protein, 70 aa, Synthetic construct
QIPQYYQPQPQQMHLQPPSYHRDPHQYTPEQAHTVQLIPLGSMSQYYYQEPQQPYSHPLYQQSHLSQHQQ

SEQ ID NO: 13776 - protein, 70 aa, Synthetic construct
QIPQYYQPQPMMQHLQPPSYHRDPHQYTPEQAHTVQLIPLGSMSQYYYQEPQQPYSHPLYQQSHLSQHQQ

SEQ ID NO: 13777 - protein, 70 aa, Synthetic construct
QIPQYYQPQPMMQHLQEQQQHRDPHQYTPEQAHTVQLIPLGSMSQYYYQEPQQPYSHPLYQQSHLSQHQQ

SEQ ID NO: 13778 - protein, 70 aa, Synthetic construct
QIPQYYQPQPMMQHLQEQQQQQMHLQYTPEQAHTVQLIPLGSMSQYYYQEPQQPYSHPLYQQSHLSQHQQ

SEQ ID NO: 13779 - protein, 70 aa, Synthetic construct
QIPQYYQPQPMMQHLQEQQQQQMHLQPPSYQAHTVQLIPLGSMSQYYYQEPQQPYSHPLYQQSHLSQHQQ

SEQ ID NO: 13780 - protein, 70 aa, Synthetic construct
QIPQYYQPQPMMQHLQEQQQQQMHLQPPSYHRDPHQLIPLGSMSQYYYQEPQQPYSHPLYQQSHLSQHQQ

SEQ ID NO: 13781 - protein, 70 aa, Synthetic construct
QIPQYYQPQPMMQHLQEQQQQQMHLQPPSYHRDPHQYTPEQAHTVYYYQEPQQPYSHPLYQQSHLSQHQQ

SEQ ID NO: 13782 - protein, 70 aa, Synthetic construct
QIPQYYQPQPMMQHLQEQQQQQMHLQPPSYHRDPHQYTPEQAHTVQLIPLGSMSQYYYQEQQSHLSQHQQ

SEQ ID NO: 13783 - protein, 70 aa, Synthetic construct
QIPQYYQPQPMMQHLQEQQQQQMHLQPPSYHRDPHQYTPEQAHTVQLIPLGSMSQYYYQEPQQPYSHPLY

SEQ ID NO: 13784 - protein, 70 aa, Synthetic construct
AEPSFGSGLPLPPGGAGPEDPSLSVTLADIYRELYAFFGDSLATRFGTGQPAPTAPRPPGDKKEPAAAPD

SEQ ID NO: 13785 - protein, 70 aa, Synthetic construct
LFQESGSGLPLPPGGAGPEDPSLSVTLADIYRELYAFFGDSLATRFGTGQPAPTAPRPPGDKKEPAAAPD

SEQ ID NO: 13786 - protein, 70 aa, Synthetic construct
LFQESSSGGGLPPGGAGPEDPSLSVTLADIYRELYAFFGDSLATRFGTGQPAPTAPRPPGDKKEPAAAPD

SEQ ID NO: 13787 - protein, 70 aa, Synthetic construct
LFQESSSGGGAEPSFAGPEDPSLSVTLADIYRELYAFFGDSLATRFGTGQPAPTAPRPPGDKKEPAAAPD

SEQ ID NO: 13788 - protein, 70 aa, Synthetic construct
LFQESSSGGGAEPSFGSGLPPSLSVTLADIYRELYAFFGDSLATRFGTGQPAPTAPRPPGDKKEPAAAPD

SEQ ID NO: 13789 - protein, 70 aa, Synthetic construct
LFQESSSGGGAEPSFGSGLPLPPGGAGPEDPSLSVTLADIYRELYAFFGDPAPTAPRPPGDKKEPAAAPD

SEQ ID NO: 13790 - protein, 70 aa, Synthetic construct
LFQESSSGGGAEPSFGSGLPLPPGGAGPEDPSLSVTLADIYRELYAFFGDSLATRPRPPGDKKEPAAAPD

SEQ ID NO: 13791 - protein, 70 aa, Synthetic construct
LFQESSSGGGAEPSFGSGLPLPPGGAGPEDPSLSVTLADIYRELYAFFGDSLATRFGTGQDKKEPAAAPD

SEQ ID NO: 13792 - protein, 70 aa, Synthetic construct
LFQESSSGGGAEPSFGSGLPLPPGGAGPEDPSLSVTLADIYRELYAFFGDSLATRFGTGQPAPTAAAAPD

SEQ ID NO: 13793 - protein, 70 aa, Synthetic construct
LFQESSSGGGAEPSFGSGLPLPPGGAGPEDPSLSVTLADIYRELYAFFGDSLATRFGTGQPAPTAPRPPG

SEQ ID NO: 13794 - protein, 70 aa, Synthetic construct
PDFVGDILWEHLEQMQYEENSHLTSVPHWINSNTLGFGTEQAPYGMQTQNYPKGGLLDSMCPASTPSVLS

SEQ ID NO: 13795 - protein, 70 aa, Synthetic construct
PDFVGDILWEHLEQMIKENQSHLTSVPHWINSNTLGFGTEQAPYGMQTQNYPKGGLLDSMCPASTPSVLS

SEQ ID NO: 13796 - protein, 70 aa, Synthetic construct
PDFVGDILWEHLEQMIKENQEKTEDVPHWINSNTLGFGTEQAPYGMQTQNYPKGGLLDSMCPASTPSVLS

SEQ ID NO: 13797 - protein, 70 aa, Synthetic construct
PDFVGDILWEHLEQMIKENQEKTEDQYEENNSNTLGFGTEQAPYGMQTQNYPKGGLLDSMCPASTPSVLS

SEQ ID NO: 13798 - protein, 70 aa, Synthetic construct
PDFVGDILWEHLEQMIKENQEKTEDQYEENSHLTSGFGTEQAPYGMQTQNYPKGGLLDSMCPASTPSVLS

SEQ ID NO: 13799 - protein, 70 aa, Synthetic construct
PDFVGDILWEHLEQMIKENQEKTEDQYEENSHLTSVPHWIQAPYGMQTQNYPKGGLLDSMCPASTPSVLS

SEQ ID NO: 13800 - protein, 70 aa, Synthetic construct
PDFVGDILWEHLEQMIKENQEKTEDQYEENSHLTSVPHWINSNTLMQTQNYPKGGLLDSMCPASTPSVLS

SEQ ID NO: 13801 - protein, 70 aa, Synthetic construct
PDFVGDILWEHLEQMIKENQEKTEDQYEENSHLTSVPHWINSNTLGFGTEYPKGGLLDSMCPASTPSVLS

SEQ ID NO: 13802 - protein, 70 aa, Synthetic construct
PDFVGDILWEHLEQMIKENQEKTEDQYEENSHLTSVPHWINSNTLGFGTEQAPYGLLDSMCPASTPSVLS

SEQ ID NO: 13803 - protein, 70 aa, Synthetic construct
PDFVGDILWEHLEQMIKENQEKTEDQYEENSHLTSVPHWINSNTLGFGTEQAPYGMQTQNCPASTPSVLS

SEQ ID NO: 13804 - protein, 70 aa, Synthetic construct
PDFVGDILWEHLEQMIKENQEKTEDQYEENSHLTSVPHWINSNTLGFGTEQAPYGMQTQNYPKGGPSVLS

SEQ ID NO: 13805 - protein, 70 aa, Synthetic construct
PDFVGDILWEHLEQMIKENQEKTEDQYEENSHLTSVPHWINSNTLGFGTEQAPYGMQTQNYPKGGLLDSM

SEQ ID NO: 13806 - protein, 70 aa, Synthetic construct
DLEIPADIVELHDINVEPLPMEDIPTESVQYEDVDGNWIYGGHNHPPLMVLQPLFTNTGYGDHDQEMLML

SEQ ID NO: 13807 - protein, 70 aa, Synthetic construct
ASNEDADIVELHDINVEPLPMEDIPTESVQYEDVDGNWIYGGHNHPPLMVLQPLFTNTGYGDHDQEMLML

SEQ ID NO: 13808 - protein, 70 aa, Synthetic construct
ASNEDFSITQLHDINVEPLPMEDIPTESVQYEDVDGNWIYGGHNHPPLMVLQPLFTNTGYGDHDQEMLML

SEQ ID NO: 13809 - protein, 70 aa, Synthetic construct
ASNEDFSITQDLEIPVEPLPMEDIPTESVQYEDVDGNWIYGGHNHPPLMVLQPLFTNTGYGDHDQEMLML

SEQ ID NO: 13810 - protein, 70 aa, Synthetic construct
ASNEDFSITQDLEIPADIVEMEDIPTESVQYEDVDGNWIYGGHNHPPLMVLQPLFTNTGYGDHDQEMLML

SEQ ID NO: 13811 - protein, 70 aa, Synthetic construct
ASNEDFSITQDLEIPADIVELHDINTESVQYEDVDGNWIYGGHNHPPLMVLQPLFTNTGYGDHDQEMLML

SEQ ID NO: 13812 - protein, 70 aa, Synthetic construct
ASNEDFSITQDLEIPADIVELHDINVEPLPYEDVDGNWIYGGHNHPPLMVLQPLFTNTGYGDHDQEMLML

SEQ ID NO: 13813 - protein, 70 aa, Synthetic construct
ASNEDFSITQDLEIPADIVELHDINVEPLPMEDIPGNWIYGGHNHPPLMVLQPLFTNTGYGDHDQEMLML

SEQ ID NO: 13814 - protein, 70 aa, Synthetic construct
ASNEDFSITQDLEIPADIVELHDINVEPLPMEDIPTESVQGGHNHPPLMVLQPLFTNTGYGDHDQEMLML

SEQ ID NO: 13815 - protein, 70 aa, Synthetic construct
ASNEDFSITQDLEIPADIVELHDINVEPLPMEDIPTESVQYEDVDPPLMVLQPLFTNTGYGDHDQEMLML

SEQ ID NO: 13816 - protein, 70 aa, Synthetic construct
ASNEDFSITQDLEIPADIVELHDINVEPLPMEDIPTESVQYEDVDGNWIYLQPLFTNTGYGDHDQEMLML

SEQ ID NO: 13817 - protein, 70 aa, Synthetic construct
ASNEDFSITQDLEIPADIVELHDINVEPLPMEDIPTESVQYEDVDGNWIYGGHNHTNTGYGDHDQEMLML

SEQ ID NO: 13818 - protein, 70 aa, Synthetic construct
ASNEDFSITQDLEIPADIVELHDINVEPLPMEDIPTESVQYEDVDGNWIYGGHNHPPLMVGDHDQEMLML

SEQ ID NO: 13819 - protein, 70 aa, Synthetic construct
ASNEDFSITQDLEIPADIVELHDINVEPLPMEDIPTESVQYEDVDGNWIYGGHNHPPLMVLQPLFEMLML

SEQ ID NO: 13820 - protein, 70 aa, Synthetic construct
ASNEDFSITQDLEIPADIVELHDINVEPLPMEDIPTESVQYEDVDGNWIYGGHNHPPLMVLQPLFTNTGY

SEQ ID NO: 13821 - protein, 70 aa, Synthetic construct
NPSRCPVKMFECYLSDVFYLQPECSSSTDSPVWYTSTSLDRNTLENMLVRVLLVKDIYDKDNYELDEDTD

SEQ ID NO: 13822 - protein, 70 aa, Synthetic construct
NPSRCPVKMFECYLSKSPQNLNQRMDVFYLQPECSSSTDSPVWYTNMLVRVLLVKDIYDKDNYELDEDTD

SEQ ID NO: 13823 - protein, 70 aa, Synthetic construct
VDLSGENLSDVDFLDDSSTESLLLSGDEYNQDFDSTNFEESQDEDDALNEIVRCICEMDEENGFMIQCEE

SEQ ID NO: 13824 - protein, 70 aa, Synthetic construct
TYQYPENLSDVDFLDDSSTESLLLSGDEYNQDFDSTNFEESQDEDDALNEIVRCICEMDEENGFMIQCEE

SEQ ID NO: 13825 - protein, 70 aa, Synthetic construct
TYQYPRAILSVDFLDDSSTESLLLSGDEYNQDFDSTNFEESQDEDDALNEIVRCICEMDEENGFMIQCEE

SEQ ID NO: 13826 - protein, 70 aa, Synthetic construct
TYQYPRAILSVDLSGDSSTESLLLSGDEYNQDFDSTNFEESQDEDDALNEIVRCICEMDEENGFMIQCEE

SEQ ID NO: 13827 - protein, 70 aa, Synthetic construct
TYQYPRAILSVDLSGENLSDSLLLSGDEYNQDFDSTNFEESQDEDDALNEIVRCICEMDEENGFMIQCEE

SEQ ID NO: 13828 - protein, 70 aa, Synthetic construct
TYQYPRAILSVDLSGENLSDVDFLDGDEYNQDFDSTNFEESQDEDDALNEIVRCICEMDEENGFMIQCEE

SEQ ID NO: 13829 - protein, 70 aa, Synthetic construct
TYQYPRAILSVDLSGENLSDVDFLDDSSTEQDFDSTNFEESQDEDDALNEIVRCICEMDEENGFMIQCEE

SEQ ID NO: 13830 - protein, 70 aa, Synthetic construct
TYQYPRAILSVDLSGENLSDVDFLDDSSTESLLLSTNFEESQDEDDALNEIVRCICEMDEENGFMIQCEE

SEQ ID NO: 13831 - protein, 70 aa, Synthetic construct
TYQYPRAILSVDLSGENLSDVDFLDDSSTESLLLSGDEYNSQDEDDALNEIVRCICEMDEENGFMIQCEE

SEQ ID NO: 13832 - protein, 70 aa, Synthetic construct
TYQYPRAILSVDLSGENLSDVDFLDDSSTESLLLSGDEYNQDFDSDALNEIVRCICEMDEENGFMIQCEE

SEQ ID NO: 13833 - protein, 70 aa, Synthetic construct
TYQYPRAILSVDLSGENLSDVDFLDDSSTESLLLSGDEYNQDFDSTNFEEIVRCICEMDEENGFMIQCEE

SEQ ID NO: 13834 - protein, 70 aa, Synthetic construct
GNTVFVYNDKKGTEDPGDSHLQWQLNLLTHIENVQNEVTSRMDLIEKEVDVLESWLDFTGELEPPDPLAR

SEQ ID NO: 13835 - protein, 70 aa, Synthetic construct
HGMPEVYNDKKGTEDPGDSHLQWQLNLLTHIENVQNEVTSRMDLIEKEVDVLESWLDFTGELEPPDPLAR

SEQ ID NO: 13836 - protein, 70 aa, Synthetic construct
HGMPEKNPAEKGTEDPGDSHLQWQLNLLTHIENVQNEVTSRMDLIEKEVDVLESWLDFTGELEPPDPLAR

SEQ ID NO: 13837 - protein, 70 aa, Synthetic construct
HGMPEKNPAEGNTVFPGDSHLQWQLNLLTHIENVQNEVTSRMDLIEKEVDVLESWLDFTGELEPPDPLAR

SEQ ID NO: 13838 - protein, 70 aa, Synthetic construct
HGMPEKNPAEGNTVFVYNDKLQWQLNLLTHIENVQNEVTSRMDLIEKEVDVLESWLDFTGELEPPDPLAR

SEQ ID NO: 13839 - protein, 70 aa, Synthetic construct
HGMPEKNPAEGNTVFVYNDKKGTEDPGDSHLQWQLNEVTSRMDLIEKEVDVLESWLDFTGELEPPDPLAR

SEQ ID NO: 13840 - protein, 70 aa, Synthetic construct
HGMPEKNPAEGNTVFVYNDKKGTEDPGDSHLQWQLNLLTHRMDLIEKEVDVLESWLDFTGELEPPDPLAR

SEQ ID NO: 13841 - protein, 70 aa, Synthetic construct
HLVCISSSAGLSGVNGLADYCASKFAAFGFAESVFIKTTIVCPFFIKTGMFEGCTTGCPSLLPILEPKYA

SEQ ID NO: 13842 - protein, 70 aa, Synthetic construct
HLVCISSSAGLSGVNGLADYCASKFAAFGFAESVFVETFVQKQKGIKTTIVCPFFTGCPSLLPILEPKYA

SEQ ID NO: 13843 - protein, 70 aa, Synthetic construct
HLVCISSSAGLSGVNGLADYCASKFAAFGFAESVFVETFVQKQKGIKTTIVCPFFIKTGMFEGCTTGCPS

SEQ ID NO: 13844 - protein, 70 aa, Synthetic construct
LLKNDPVNLQKFSYTSEDEAWKTYLENPLTAATKAMMRVNGDDDSVAALSFLYDYYMGPKEKRILSSSTG

SEQ ID NO: 13845 - protein, 70 aa, Synthetic construct
SNELDPVNLQKFSYTSEDEAWKTYLENPLTAATKAMMRVNGDDDSVAALSFLYDYYMGPKEKRILSSSTG

SEQ ID NO: 13846 - protein, 70 aa, Synthetic construct
SNELDFRSVRKFSYTSEDEAWKTYLENPLTAATKAMMRVNGDDDSVAALSFLYDYYMGPKEKRILSSSTG

SEQ ID NO: 13847 - protein, 70 aa, Synthetic construct
SNELDFRSVRLLKNDSEDEAWKTYLENPLTAATKAMMRVNGDDDSVAALSFLYDYYMGPKEKRILSSSTG

SEQ ID NO: 13848 - protein, 70 aa, Synthetic construct
SNELDFRSVRLLKNDPVNLQKFSYTSEDEAAATKAMMRVNGDDDSVAALSFLYDYYMGPKEKRILSSSTG

SEQ ID NO: 13849 - protein, 70 aa, Synthetic construct
SNELDFRSVRLLKNDPVNLQKFSYTSEDEAWKTYLENPLTGDDDSVAALSFLYDYYMGPKEKRILSSSTG

SEQ ID NO: 13850 - protein, 70 aa, Synthetic construct
SNELDFRSVRLLKNDPVNLQKFSYTSEDEAWKTYLENPLTAATKAMMRVNGDDDSVAALSFLYDYSSSTG

SEQ ID NO: 13851 - protein, 70 aa, Synthetic construct
SNELDFRSVRLLKNDPVNLQKFSYTSEDEAWKTYLENPLTAATKAMMRVNGDDDSVAALSFLYDYYMGPK

SEQ ID NO: 13852 - protein, 70 aa, Synthetic construct
SYLLPTTDMYDNGSLNSLFEWQPDSTFKDDPQESMLFPDILKTSPEPPCPEDYPSLKSDFEYTLGSPKAI

SEQ ID NO: 13853 - protein, 70 aa, Synthetic construct
SYLLPTTDMYDNGSLNSLFESIHGVTFKDDPQESMLFPDILKTSPEPPCPEDYPSLKSDFEYTLGSPKAI

SEQ ID NO: 13854 - protein, 70 aa, Synthetic construct
SYLLPTTDMYDNGSLNSLFESIHGVPPTQRWQPDSLFPDILKTSPEPPCPEDYPSLKSDFEYTLGSPKAI

SEQ ID NO: 13855 - protein, 70 aa, Synthetic construct
SYLLPTTDMYDNGSLNSLFESIHGVPPTQRWQPDSTFKDDPQESMLFPDIEDYPSLKSDFEYTLGSPKAI

SEQ ID NO: 13856 - protein, 70 aa, Synthetic construct
SWPCSFYQQLPLEPPAAKTGCPPLWPNPAGNLYEEKVHVDFNSYVQSPAYHSPQEDPFLFTYASHPHQQY

SEQ ID NO: 13857 - protein, 70 aa, Synthetic construct
SWPCSFSPSQNSSEPFYQQLCPPLWPNPAGNLYEEKVHVDFNSYVQSPAYHSPQEDPFLFTYASHPHQQY

SEQ ID NO: 13858 - protein, 70 aa, Synthetic construct
SWPCSFSPSQNSSEPFYQQLPLEPPPNPAGNLYEEKVHVDFNSYVQSPAYHSPQEDPFLFTYASHPHQQY

SEQ ID NO: 13859 - protein, 70 aa, Synthetic construct
SWPCSFSPSQNSSEPFYQQLPLEPPAAKTGNLYEEKVHVDFNSYVQSPAYHSPQEDPFLFTYASHPHQQY

SEQ ID NO: 13860 - protein, 70 aa, Synthetic construct
SWPCSFSPSQNSSEPFYQQLPLEPPAAKTGCPPLWKVHVDFNSYVQSPAYHSPQEDPFLFTYASHPHQQY

SEQ ID NO: 13861 - protein, 70 aa, Synthetic construct
SWPCSFSPSQNSSEPFYQQLPLEPPAAKTGCPPLWPNPAGFNSYVQSPAYHSPQEDPFLFTYASHPHQQY

SEQ ID NO: 13862 - protein, 70 aa, Synthetic construct
SWPCSFSPSQNSSEPFYQQLPLEPPAAKTGCPPLWPNPAGNLYEEQSPAYHSPQEDPFLFTYASHPHQQY

SEQ ID NO: 13863 - protein, 70 aa, Synthetic construct
SWPCSFSPSQNSSEPFYQQLPLEPPAAKTGCPPLWPNPAGNLYEEKVHVDFNSYVDPFLFTYASHPHQQY

SEQ ID NO: 13864 - protein, 70 aa, Synthetic construct
SWPCSFSPSQNSSEPFYQQLPLEPPAAKTGCPPLWPNPAGNLYEEKVHVDFNSYVQSPAYHSPQEDPFLF

SEQ ID NO: 13865 - protein, 70 aa, Synthetic construct
KVHVDFNSYVQSPAYHSPQEDPFLFTYASHPHQQYSLPSKSSKWDFEEEMTYLGLDHCNNDMLLNLCPLR

SEQ ID NO: 13866 - protein, 70 aa, Synthetic construct
PNPAGFNSYVQSPAYHSPQEDPFLFTYASHPHQQYSLPSKSSKWDFEEEMTYLGLDHCNNDMLLNLCPLR

SEQ ID NO: 13867 - protein, 70 aa, Synthetic construct
PNPAGNLYEEQSPAYHSPQEDPFLFTYASHPHQQYSLPSKSSKWDFEEEMTYLGLDHCNNDMLLNLCPLR

SEQ ID NO: 13868 - protein, 70 aa, Synthetic construct
PNPAGNLYEEKVHVDFNSYVQSPAYHSPQEDPFLFSLPSKSSKWDFEEEMTYLGLDHCNNDMLLNLCPLR

SEQ ID NO: 13869 - protein, 70 aa, Synthetic construct
PNPAGNLYEEKVHVDFNSYVQSPAYHSPQEDPFLFTYASHSSKWDFEEEMTYLGLDHCNNDMLLNLCPLR

SEQ ID NO: 13870 - protein, 70 aa, Synthetic construct
PNPAGNLYEEKVHVDFNSYVQSPAYHSPQEDPFLFTYASHPHQQYFEEEMTYLGLDHCNNDMLLNLCPLR

SEQ ID NO: 13871 - protein, 70 aa, Synthetic construct
PNPAGNLYEEKVHVDFNSYVQSPAYHSPQEDPFLFTYASHPHQQYSLPSKTYLGLDHCNNDMLLNLCPLR

SEQ ID NO: 13872 - protein, 70 aa, Synthetic construct
PNPAGNLYEEKVHVDFNSYVQSPAYHSPQEDPFLFTYASHPHQQYSLPSKSSKWDFEEEMTYLGLLCPLR

SEQ ID NO: 13873 - protein, 70 aa, Synthetic construct
YSNYTPSAQYSQAYYTHMDALSSCVTPTASSYAHCNYFQNPSMQSSYPVEFLPSNWPCSTTDENTKTEVN

SEQ ID NO: 13874 - protein, 70 aa, Synthetic construct
YSNYTPSAQYSQAYYPTAVLQCCSPTHMDASYAHCNYFQNPSMQSSYPVEFLPSNWPCSTTDENTKTEVN

SEQ ID NO: 13875 - protein, 70 aa, Synthetic construct
YSNYTPSAQYSQAYYPTAVLQCCSPTHMDALSSCVNYFQNPSMQSSYPVEFLPSNWPCSTTDENTKTEVN

SEQ ID NO: 13876 - protein, 70 aa, Synthetic construct
YSNYTPSAQYSQAYYPTAVLQCCSPTHMDALSSCVTPTASSYAHCNYFQNFLPSNWPCSTTDENTKTEVN

SEQ ID NO: 13877 - protein, 70 aa, Synthetic construct
YSNYTPSAQYSQAYYPTAVLQCCSPTHMDALSSCVTPTASSYAHCNYFQNPSMQSSYPVEFLPSNWPCST

SEQ ID NO: 13878 - protein, 70 aa, Synthetic construct
DNQTQTIDLLSDLENILSSNLPAQTLDHRSLLSDTNPGPDTQLPSGPAQNPGIDFDIEEFFSASNIQTQT

SEQ ID NO: 13879 - protein, 70 aa, Synthetic construct
NSMLPTIDLLSDLENILSSNLPAQTLDHRSLLSDTNPGPDTQLPSGPAQNPGIDFDIEEFFSASNIQTQT

SEQ ID NO: 13880 - protein, 70 aa, Synthetic construct
NSMLPSQNMTDNQTQTIDLLSDLENILSSNLLSDTNPGPDTQLPSGPAQNPGIDFDIEEFFSASNIQTQT

SEQ ID NO: 13881 - protein, 70 aa, Synthetic construct
NSMLPSQNMTDNQTQTIDLLSDLENILSSNLPAQTNPGPDTQLPSGPAQNPGIDFDIEEFFSASNIQTQT

SEQ ID NO: 13882 - protein, 70 aa, Synthetic construct
NSMLPSQNMTDNQTQTIDLLSDLENILSSNLPAQTLDHRSTQLPSGPAQNPGIDFDIEEFFSASNIQTQT

SEQ ID NO: 13883 - protein, 70 aa, Synthetic construct
NSMLPSQNMTDNQTQTIDLLSDLENILSSNLPAQTLDHRSLLSDTGPAQNPGIDFDIEEFFSASNIQTQT

SEQ ID NO: 13884 - protein, 70 aa, Synthetic construct
NSMLPSQNMTDNQTQTIDLLSDLENILSSNLPAQTLDHRSLLSDTNPGPDPGIDFDIEEFFSASNIQTQT

SEQ ID NO: 13885 - protein, 70 aa, Synthetic construct
PGIDFDIEEFFSASNIQTQTEESELSTMTTEPVLESLDIETQTDFLLADTSAQSYGCRGNSNFLGLEMFD

SEQ ID NO: 13886 - protein, 70 aa, Synthetic construct
TQLPSGPAQNPGIDFDIEEFFSASNSTMTTEPVLESLDIETQTDFLLADTSAQSYGCRGNSNFLGLEMFD

SEQ ID NO: 13887 - protein, 70 aa, Synthetic construct
TQLPSGPAQNPGIDFDIEEFFSASNIQTQTEPVLESLDIETQTDFLLADTSAQSYGCRGNSNFLGLEMFD

SEQ ID NO: 13888 - protein, 70 aa, Synthetic construct
TQLPSGPAQNPGIDFDIEEFFSASNIQTQTEESELSLDIETQTDFLLADTSAQSYGCRGNSNFLGLEMFD

SEQ ID NO: 13889 - protein, 70 aa, Synthetic construct
TQLPSGPAQNPGIDFDIEEFFSASNIQTQTEESELSTMTTTQTDFLLADTSAQSYGCRGNSNFLGLEMFD

SEQ ID NO: 13890 - protein, 70 aa, Synthetic construct
TQLPSGPAQNPGIDFDIEEFFSASNIQTQTEESELSTMTTEPVLELLADTSAQSYGCRGNSNFLGLEMFD

SEQ ID NO: 13891 - protein, 70 aa, Synthetic construct
TQLPSGPAQNPGIDFDIEEFFSASNIQTQTEESELSTMTTEPVLESLDIESAQSYGCRGNSNFLGLEMFD

SEQ ID NO: 13892 - protein, 70 aa, Synthetic construct
TQLPSGPAQNPGIDFDIEEFFSASNIQTQTEESELSTMTTEPVLESLDIETQTDFGCRGNSNFLGLEMFD

SEQ ID NO: 13893 - protein, 70 aa, Synthetic construct
TQLPSGPAQNPGIDFDIEEFFSASNIQTQTEESELSTMTTEPVLESLDIETQTDFLLADTSNFLGLEMFD

SEQ ID NO: 13894 - protein, 70 aa, Synthetic construct
TQLPSGPAQNPGIDFDIEEFFSASNIQTQTEESELSTMTTEPVLESLDIETQTDFLLADTSAQSYLEMFD

SEQ ID NO: 13895 - protein, 70 aa, Synthetic construct
VYGGPYGGSQGYGNYVTYGSEASAFYSLNSFDSKDGSGSAHGGLAPAAAAYYPYEPALGQYPYDRYGTMD

SEQ ID NO: 13896 - protein, 70 aa, Synthetic construct
HELNSYGGSQGYGNYVTYGSEASAFYSLNSFDSKDGSGSAHGGLAPAAAAYYPYEPALGQYPYDRYGTMD

SEQ ID NO: 13897 - protein, 70 aa, Synthetic construct
HELNSAAALGGYGNYVTYGSEASAFYSLNSFDSKDGSGSAHGGLAPAAAAYYPYEPALGQYPYDRYGTMD

SEQ ID NO: 13898 - protein, 70 aa, Synthetic construct
HELNSAAALGVYGGPVTYGSEASAFYSLNSFDSKDGSGSAHGGLAPAAAAYYPYEPALGQYPYDRYGTMD

SEQ ID NO: 13899 - protein, 70 aa, Synthetic construct
HELNSAAALGVYGGPYGGSQGYGNYYSLNSFDSKDGSGSAHGGLAPAAAAYYPYEPALGQYPYDRYGTMD

SEQ ID NO: 13900 - protein, 70 aa, Synthetic construct
HELNSAAALGVYGGPYGGSQGYGNYVTYGSFDSKDGSGSAHGGLAPAAAAYYPYEPALGQYPYDRYGTMD

SEQ ID NO: 13901 - protein, 70 aa, Synthetic construct
HELNSAAALGVYGGPYGGSQGYGNYVTYGSEASAFGSGSAHGGLAPAAAAYYPYEPALGQYPYDRYGTMD

SEQ ID NO: 13902 - protein, 70 aa, Synthetic construct
HELNSAAALGVYGGPYGGSQGYGNYVTYGSEASAFYSLNSHGGLAPAAAAYYPYEPALGQYPYDRYGTMD

SEQ ID NO: 13903 - protein, 70 aa, Synthetic construct
HELNSAAALGVYGGPYGGSQGYGNYVTYGSEASAFYSLNSFDSKDPAAAAYYPYEPALGQYPYDRYGTMD

SEQ ID NO: 13904 - protein, 70 aa, Synthetic construct
HELNSAAALGVYGGPYGGSQGYGNYVTYGSEASAFYSLNSFDSKDGSGSAYYPYEPALGQYPYDRYGTMD

SEQ ID NO: 13905 - protein, 70 aa, Synthetic construct
HELNSAAALGVYGGPYGGSQGYGNYVTYGSEASAFYSLNSFDSKDGSGSAHGGLAPAAAAYYPYEYGTMD

SEQ ID NO: 13906 - protein, 70 aa, Synthetic construct
HELNSAAALGVYGGPYGGSQGYGNYVTYGSEASAFYSLNSFDSKDGSGSAHGGLAPAAAAYYPYEPALGQ

SEQ ID NO: 13907 - protein, 70 aa, Synthetic construct
KPWYSIFPIDNEDLVYGRWEDNIIWDAQAMPRLLEPPVLALDPNDENLILEIPDEKEEATSNSPSKESKK

SEQ ID NO: 13908 - protein, 70 aa, Synthetic construct
QGFAPIFPIDNEDLVYGRWEDNIIWDAQAMPRLLEPPVLALDPNDENLILEIPDEKEEATSNSPSKESKK

SEQ ID NO: 13909 - protein, 70 aa, Synthetic construct
QGFAPTLDDDKPWYSIFPIDDNIIWDAQAMPRLLEPPVLALDPNDENLILEIPDEKEEATSNSPSKESKK

SEQ ID NO: 13910 - protein, 70 aa, Synthetic construct
QGFAPTLDDDKPWYSIFPIDNEDLVYGRWEPRLLEPPVLALDPNDENLILEIPDEKEEATSNSPSKESKK

SEQ ID NO: 13911 - protein, 70 aa, Synthetic construct
QGFAPTLDDDKPWYSIFPIDNEDLVYGRWEDNIIWPPVLALDPNDENLILEIPDEKEEATSNSPSKESKK

SEQ ID NO: 13912 - protein, 70 aa, Synthetic construct
QGFAPTLDDDKPWYSIFPIDNEDLVYGRWEDNIIWDAQAMLDPNDENLILEIPDEKEEATSNSPSKESKK

SEQ ID NO: 13913 - protein, 70 aa, Synthetic construct
QGFAPTLDDDKPWYSIFPIDNEDLVYGRWEDNIIWDAQAMPRLLEENLILEIPDEKEEATSNSPSKESKK

SEQ ID NO: 13914 - protein, 70 aa, Synthetic construct
QGFAPTLDDDKPWYSIFPIDNEDLVYGRWEDNIIWDAQAMPRLLEPPVLAEIPDEKEEATSNSPSKESKK

SEQ ID NO: 13915 - protein, 70 aa, Synthetic construct
QGFAPTLDDDKPWYSIFPIDNEDLVYGRWEDNIIWDAQAMPRLLEPPVLALDPNDKEEATSNSPSKESKK

SEQ ID NO: 13916 - protein, 70 aa, Synthetic construct
QGFAPTLDDDKPWYSIFPIDNEDLVYGRWEDNIIWDAQAMPRLLEPPVLALDPNDENLILSNSPSKESKK

SEQ ID NO: 13917 - protein, 70 aa, Synthetic construct
QGFAPTLDDDKPWYSIFPIDNEDLVYGRWEDNIIWDAQAMPRLLEPPVLALDPNDENLILEIPDEKESKK

SEQ ID NO: 13918 - protein, 70 aa, Synthetic construct
QGFAPTLDDDKPWYSIFPIDNEDLVYGRWEDNIIWDAQAMPRLLEPPVLALDPNDENLILEIPDEKEEAT

SEQ ID NO: 13919 - protein, 70 aa, Synthetic construct
YYFPKQQGLRGTFGGNIIQHSIPAMELWQPFFPTHMGPIKIRQFHRPPLKKYSFGALSQPHIKKKAKMRE

SEQ ID NO: 13920 - protein, 70 aa, Synthetic construct
NYYKRKPGKDPGAPDCKYGETVYCHTSPFLGSLHPGQLLQALENNLFRAPVYLHKMPETDFLIIRTRQGY

SEQ ID NO: 13921 - protein, 70 aa, Synthetic construct
MQVGMKPGKDPGAPDCKYGETVYCHTSPFLGSLHPGQLLQALENNLFRAPVYLHKMPETDFLIIRTRQGY

SEQ ID NO: 13922 - protein, 70 aa, Synthetic construct
QALDEMRRLVAFLNQGQGLAAPVNAAPLTPFGQATVCPFSAGAALGPCPDKCAAFSGTPSALCKHCHEKP

SEQ ID NO: 13923 - protein, 70 aa, Synthetic construct
LAKNYILMQAQALDEMRRLVAPVNAAPLTPFGQATVCPFSAGAALGPCPDKCAAFSGTPSALCKHCHEKP

SEQ ID NO: 13924 - protein, 70 aa, Synthetic construct
LAKNYILMQAQALDEMRRLVAFLNQAPLTPFGQATVCPFSAGAALGPCPDKCAAFSGTPSALCKHCHEKP

SEQ ID NO: 13925 - protein, 70 aa, Synthetic construct
LAKNYILMQAQALDEMRRLVAFLNQGQGLAFGQATVCPFSAGAALGPCPDKCAAFSGTPSALCKHCHEKP

SEQ ID NO: 13926 - protein, 70 aa, Synthetic construct
LAKNYILMQAQALDEMRRLVAFLNQGQGLAAPVNAVCPFSAGAALGPCPDKCAAFSGTPSALCKHCHEKP

SEQ ID NO: 13927 - protein, 70 aa, Synthetic construct
LAKNYILMQAQALDEMRRLVAFLNQGQGLAAPVNAAPLTPAGAALGPCPDKCAAFSGTPSALCKHCHEKP

SEQ ID NO: 13928 - protein, 70 aa, Synthetic construct
LAKNYILMQAQALDEMRRLVAFLNQGQGLAAPVNAAPLTPFGQATGPCPDKCAAFSGTPSALCKHCHEKP

SEQ ID NO: 13929 - protein, 70 aa, Synthetic construct
LAKNYILMQAQALDEMRRLVAFLNQGQGLAAPVNAAPLTPFGQATVCPFSKCAAFSGTPSALCKHCHEKP

SEQ ID NO: 13930 - protein, 70 aa, Synthetic construct
LAKNYILMQAQALDEMRRLVAFLNQGQGLAAPVNAAPLTPFGQATVCPFSAGAALSGTPSALCKHCHEKP

SEQ ID NO: 13931 - protein, 70 aa, Synthetic construct
LAKNYILMQAQALDEMRRLVAFLNQGQGLAAPVNAAPLTPFGQATVCPFSAGAALGPCPDALCKHCHEKP

SEQ ID NO: 13932 - protein, 70 aa, Synthetic construct
LAKNYILMQAQALDEMRRLVAFLNQGQGLAAPVNAAPLTPFGQATVCPFSAGAALGPCPDKCAAFCHEKP

SEQ ID NO: 13933 - protein, 70 aa, Synthetic construct
LAKNYILMQAQALDEMRRLVAFLNQGQGLAAPVNAAPLTPFGQATVCPFSAGAALGPCPDKCAAFSGTPS

SEQ ID NO: 13934 - protein, 70 aa, Synthetic construct
INLEELETLESNLLAQQERIAATVTGQMFLESQELLRLFGIPYIQAPMEAEAQCAILDLTDQTSGTITDD

SEQ ID NO: 13935 - protein, 70 aa, Synthetic construct
INLEELETLESNLLAQQNSLAATVTGQMFLESQELLRLFGIPYIQAPMEAEAQCAILDLTDQTSGTITDD

SEQ ID NO: 13936 - protein, 70 aa, Synthetic construct
INLEELETLESNLLAQQNSLKAQKQQQERIAATVTGQMFLESQELLRLFGIPYIQAPMEAEAQCATITDD

SEQ ID NO: 13937 - protein, 70 aa, Synthetic construct
REAKTIDQLLYVEKCIHLNRDILKTELGLVEQDIIEIPQLFCLEKLTNIPSDQQPKRSFARPYFPDLLRM

SEQ ID NO: 13938 - protein, 70 aa, Synthetic construct
REAKTIDQLLADESLKKQNEYVEKCIHLNRDILKTELGLVEQDIIEIPQLFCLEKKRSFARPYFPDLLRM

SEQ ID NO: 13939 - protein, 70 aa, Synthetic construct
LQQAFEKSTNFVSLSSPLHNHTLFPEKQIYTTSPLECGFGQSVTSVLPSSLPKPPFGMLFGSQPGLYLSA

SEQ ID NO: 13940 - protein, 70 aa, Synthetic construct
LQQAFEKSTNASFTLGHGFQFVSLSSPLHNHTLFPEKQIYTTSPLECGFGQSVTSFGMLFGSQPGLYLSA

SEQ ID NO: 13941 - protein, 70 aa, Synthetic construct
MATQNQALQQTSATDISSAGSISGDIIDELMSSDVFPLLRLSPTPADDYNFNLDDNEGVCDLFDVQILNY

SEQ ID NO: 13942 - protein, 70 aa, Synthetic construct
MATQNLPEQHTSATDISSAGSISGDIIDELMSSDVFPLLRLSPTPADDYNFNLDDNEGVCDLFDVQILNY

SEQ ID NO: 13943 - protein, 70 aa, Synthetic construct
MATQNLPEQHVSERSISSAGSISGDIIDELMSSDVFPLLRLSPTPADDYNFNLDDNEGVCDLFDVQILNY

SEQ ID NO: 13944 - protein, 70 aa, Synthetic construct
MATQNLPEQHVSERSQALQQSISGDIIDELMSSDVFPLLRLSPTPADDYNFNLDDNEGVCDLFDVQILNY

SEQ ID NO: 13945 - protein, 70 aa, Synthetic construct
MATQNLPEQHVSERSQALQQTSATDIIDELMSSDVFPLLRLSPTPADDYNFNLDDNEGVCDLFDVQILNY

SEQ ID NO: 13946 - protein, 70 aa, Synthetic construct
MATQNLPEQHVSERSQALQQTSATDISSAGMSSDVFPLLRLSPTPADDYNFNLDDNEGVCDLFDVQILNY

SEQ ID NO: 13947 - protein, 70 aa, Synthetic construct
MATQNLPEQHVSERSQALQQTSATDISSAGSISGDFPLLRLSPTPADDYNFNLDDNEGVCDLFDVQILNY

SEQ ID NO: 13948 - protein, 70 aa, Synthetic construct
MATQNLPEQHVSERSQALQQTSATDISSAGSISGDIIDELLSPTPADDYNFNLDDNEGVCDLFDVQILNY

SEQ ID NO: 13949 - protein, 70 aa, Synthetic construct
MATQNLPEQHVSERSQALQQTSATDISSAGSISGDIIDELMSSDVADDYNFNLDDNEGVCDLFDVQILNY

SEQ ID NO: 13950 - protein, 70 aa, Synthetic construct
MATQNLPEQHVSERSQALQQTSATDISSAGSISGDIIDELMSSDVFPLLRFNLDDNEGVCDLFDVQILNY

SEQ ID NO: 13951 - protein, 70 aa, Synthetic construct
MATQNLPEQHVSERSQALQQTSATDISSAGSISGDIIDELMSSDVFPLLRLSPTPNEGVCDLFDVQILNY

SEQ ID NO: 13952 - protein, 70 aa, Synthetic construct
MATQNLPEQHVSERSQALQQTSATDISSAGSISGDIIDELMSSDVFPLLRLSPTPADDYNDLFDVQILNY

SEQ ID NO: 13953 - protein, 70 aa, Synthetic construct
MATQNLPEQHVSERSQALQQTSATDISSAGSISGDIIDELMSSDVFPLLRLSPTPADDYNFNLDDQILNY

SEQ ID NO: 13954 - protein, 70 aa, Synthetic construct
PHELTSSSLILRNHNEPFLDRIVTCDEKWILYDNRRRSAQWLDQEEAPKHFPKPILHPKKVMVTIWWSAA

SEQ ID NO: 13955 - protein, 70 aa, Synthetic construct
PHELTENQKNRRFEVSSSLILRNHNDEKWILYDNRRRSAQWLDQEEAPKHFPKPILHPKKVMVTIWWSAA

SEQ ID NO: 13956 - protein, 70 aa, Synthetic construct
PHELTENQKNRRFEVSSSLILRNHNEPFLDRIVTCDEKWILYDNREAPKHFPKPILHPKKVMVTIWWSAA

SEQ ID NO: 13957 - protein, 70 aa, Synthetic construct
THEYYSDHYWDFHPHHVHSEFESFAENNFTELQSVQPPQLQQLYRHMELEQMHVLDTPMVPPHPSLGHQV

SEQ ID NO: 13958 - protein, 70 aa, Synthetic construct
THEYYPYLSSDFHPHHVHSEFESFAENNFTELQSVQPPQLQQLYRHMELEQMHVLDTPMVPPHPSLGHQV

SEQ ID NO: 13959 - protein, 70 aa, Synthetic construct
THEYYPYLSSDGESHHVHSEFESFAENNFTELQSVQPPQLQQLYRHMELEQMHVLDTPMVPPHPSLGHQV

SEQ ID NO: 13960 - protein, 70 aa, Synthetic construct
THEYYPYLSSDGESHSDHYWFESFAENNFTELQSVQPPQLQQLYRHMELEQMHVLDTPMVPPHPSLGHQV

SEQ ID NO: 13961 - protein, 70 aa, Synthetic construct
THEYYPYLSSDGESHSDHYWDFHPHENNFTELQSVQPPQLQQLYRHMELEQMHVLDTPMVPPHPSLGHQV

SEQ ID NO: 13962 - protein, 70 aa, Synthetic construct
THEYYPYLSSDGESHSDHYWDFHPHHVHSEELQSVQPPQLQQLYRHMELEQMHVLDTPMVPPHPSLGHQV

SEQ ID NO: 13963 - protein, 70 aa, Synthetic construct
THEYYPYLSSDGESHSDHYWDFHPHHVHSEFESFAQPPQLQQLYRHMELEQMHVLDTPMVPPHPSLGHQV

SEQ ID NO: 13964 - protein, 70 aa, Synthetic construct
THEYYPYLSSDGESHSDHYWDFHPHHVHSEFESFAENNFTELQSVHMELEQMHVLDTPMVPPHPSLGHQV

SEQ ID NO: 13965 - protein, 70 aa, Synthetic construct
THEYYPYLSSDGESHSDHYWDFHPHHVHSEFESFAENNFTELQSVQPPQLQMHVLDTPMVPPHPSLGHQV

SEQ ID NO: 13966 - protein, 70 aa, Synthetic construct
THEYYPYLSSDGESHSDHYWDFHPHHVHSEFESFAENNFTELQSVQPPQLQQLYRDTPMVPPHPSLGHQV

SEQ ID NO: 13967 - protein, 70 aa, Synthetic construct
THEYYPYLSSDGESHSDHYWDFHPHHVHSEFESFAENNFTELQSVQPPQLQQLYRHMELEPPHPSLGHQV

SEQ ID NO: 13968 - protein, 70 aa, Synthetic construct
THEYYPYLSSDGESHSDHYWDFHPHHVHSEFESFAENNFTELQSVQPPQLQQLYRHMELEQMHVLLGHQV

SEQ ID NO: 13969 - protein, 70 aa, Synthetic construct
THEYYPYLSSDGESHSDHYWDFHPHHVHSEFESFAENNFTELQSVQPPQLQQLYRHMELEQMHVLDTPMV

SEQ ID NO: 13970 - protein, 70 aa, Synthetic construct
PLLYGCRGGPEKVRRLQLRWVDVAHLVLYHLSVCCKKKYFDFDREILPFTSENWDSLLLGELSDTPKGER

SEQ ID NO: 13971 - protein, 70 aa, Synthetic construct
PLLYGDRFYEFECCVCRGGPVDVAHLVLYHLSVCCKKKYFDFDREILPFTSENWDSLLLGELSDTPKGER

SEQ ID NO: 13972 - protein, 70 aa, Synthetic construct
PLLYGDRFYEFECCVCRGGPEKVRRLQLRWLSVCCKKKYFDFDREILPFTSENWDSLLLGELSDTPKGER

SEQ ID NO: 13973 - protein, 70 aa, Synthetic construct
PLLYGDRFYEFECCVCRGGPEKVRRLQLRWVDVAHLVLYHDFDREILPFTSENWDSLLLGELSDTPKGER

SEQ ID NO: 13974 - protein, 70 aa, Synthetic construct
PLLYGDRFYEFECCVCRGGPEKVRRLQLRWVDVAHLVLYHLSVCCKKKYFDFDRESLLLGELSDTPKGER

SEQ ID NO: 13975 - protein, 70 aa, Synthetic construct
PLLYGDRFYEFECCVCRGGPEKVRRLQLRWVDVAHLVLYHLSVCCKKKYFDFDREILPFTELSDTPKGER

SEQ ID NO: 13976 - protein, 70 aa, Synthetic construct
GAELKSICCIIHPESLCAQKLKMDHVMDVVVKSVNWICSRGLNHSEFTTLLYELDSQYGSLLYYTEIKWL

SEQ ID NO: 13977 - protein, 70 aa, Synthetic construct
LKSRVATFCKGAELKLCAQKLKMDHVMDVVVKSVNWICSRGLNHSEFTTLLYELDSQYGSLLYYTEIKWL

SEQ ID NO: 13978 - protein, 70 aa, Synthetic construct
LKSRVATFCKGAELKSICCILKMDHVMDVVVKSVNWICSRGLNHSEFTTLLYELDSQYGSLLYYTEIKWL

SEQ ID NO: 13979 - protein, 70 aa, Synthetic construct
LKSRVATFCKGAELKSICCIIHPESLCAQKLKMDHWICSRGLNHSEFTTLLYELDSQYGSLLYYTEIKWL

SEQ ID NO: 13980 - protein, 70 aa, Synthetic construct
LKSRVATFCKGAELKSICCIIHPESLCAQKLKMDHVMDVVGLNHSEFTTLLYELDSQYGSLLYYTEIKWL

SEQ ID NO: 13981 - protein, 70 aa, Synthetic construct
LKSRVATFCKGAELKSICCIIHPESLCAQKLKMDHVMDVVVKSVNEFTTLLYELDSQYGSLLYYTEIKWL

SEQ ID NO: 13982 - protein, 70 aa, Synthetic construct
LKSRVATFCKGAELKSICCIIHPESLCAQKLKMDHVMDVVVKSVNWICSRGLNHSEFTTLLLYYTEIKWL

SEQ ID NO: 13983 - protein, 70 aa, Synthetic construct
LKSRVATFCKGAELKSICCIIHPESLCAQKLKMDHVMDVVVKSVNWICSRGLNHSEFTTLLYELDEIKWL

SEQ ID NO: 13984 - protein, 70 aa, Synthetic construct
LKSRVATFCKGAELKSICCIIHPESLCAQKLKMDHVMDVVVKSVNWICSRGLNHSEFTTLLYELDSQYGS

SEQ ID NO: 13985 - protein, 70 aa, Synthetic construct
NHPGTNSNYQMHLLKWMEQISGKGFSGTFQLCFPYYPSPGVLFPKKEPDDSRDEDEDEDESSEEDSEDEE

SEQ ID NO: 13986 - protein, 70 aa, Synthetic construct
NHPGTNSNYQMHLLKKTLQKCEKNGWMEQILCFPYYPSPGVLFPKKEPDDSRDEDEDEDESSEEDSEDEE

SEQ ID NO: 13987 - protein, 70 aa, Synthetic construct
NHPGTNSNYQMHLLKKTLQKCEKNGWMEQISGKGFSGTFQVLFPKKEPDDSRDEDEDEDESSEEDSEDEE

SEQ ID NO: 13988 - protein, 70 aa, Synthetic construct
GKQRDDARHAIKKITKDILKVLNRKGTAETDQLAPIVPLNPGDLTRRNRPEAFPTAEDIFAKFQHLSHYD

SEQ ID NO: 13989 - protein, 70 aa, Synthetic construct
STSFEPIKADPTGVLELPKELSEIFDPTRECMSSELLEELMSSEVFAPLLRLSPPPGDHDYIYNLDESEG

SEQ ID NO: 13990 - protein, 70 aa, Synthetic construct
NSSSSPIKADPTGVLELPKELSEIFDPTRECMSSELLEELMSSEVFAPLLRLSPPPGDHDYIYNLDESEG

SEQ ID NO: 13991 - protein, 70 aa, Synthetic construct
NSSSSSGPNPPTGVLELPKELSEIFDPTRECMSSELLEELMSSEVFAPLLRLSPPPGDHDYIYNLDESEG

SEQ ID NO: 13992 - protein, 70 aa, Synthetic construct
NSSSSSGPNPSTSFEELPKELSEIFDPTRECMSSELLEELMSSEVFAPLLRLSPPPGDHDYIYNLDESEG

SEQ ID NO: 13993 - protein, 70 aa, Synthetic construct
NSSSSSGPNPSTSFEPIKADLSEIFDPTRECMSSELLEELMSSEVFAPLLRLSPPPGDHDYIYNLDESEG

SEQ ID NO: 13994 - protein, 70 aa, Synthetic construct
NSSSSSGPNPSTSFEPIKADPTGVLDPTRECMSSELLEELMSSEVFAPLLRLSPPPGDHDYIYNLDESEG

SEQ ID NO: 13995 - protein, 70 aa, Synthetic construct
NSSSSSGPNPSTSFEPIKADPTGVLELPKECMSSELLEELMSSEVFAPLLRLSPPPGDHDYIYNLDESEG

SEQ ID NO: 13996 - protein, 70 aa, Synthetic construct
NSSSSSGPNPSTSFEPIKADPTGVLELPKELSEIFLLEELMSSEVFAPLLRLSPPPGDHDYIYNLDESEG

SEQ ID NO: 13997 - protein, 70 aa, Synthetic construct
NSSSSSGPNPSTSFEPIKADPTGVLELPKELSEIFDPTRECMSSELLEELMSSEVPGDHDYIYNLDESEG

SEQ ID NO: 13998 - protein, 70 aa, Synthetic construct
NSSSSSGPNPSTSFEPIKADPTGVLELPKELSEIFDPTRECMSSELLEELMSSEVFAPLLYIYNLDESEG

SEQ ID NO: 13999 - protein, 70 aa, Synthetic construct
NSSSSSGPNPSTSFEPIKADPTGVLELPKELSEIFDPTRECMSSELLEELMSSEVFAPLLRLSPPDESEG

SEQ ID NO: 14000 - protein, 70 aa, Synthetic construct
NSSSSSGPNPSTSFEPIKADPTGVLELPKELSEIFDPTRECMSSELLEELMSSEVFAPLLRLSPPPGDHD

SEQ ID NO: 14001 - protein, 70 aa, Synthetic construct
SRYTSDYFISYGIEHAQCVPPSEFSEPSFITESYQTLHPISSEELLSLKYENDYPSVILRDPLQTDTLQN

SEQ ID NO: 14002 - protein, 70 aa, Synthetic construct
VNGVNDYFISYGIEHAQCVPPSEFSEPSFITESYQTLHPISSEELLSLKYENDYPSVILRDPLQTDTLQN

SEQ ID NO: 14003 - protein, 70 aa, Synthetic construct
VNGVNPAYPESRYTSDYFISYGIEHEPSFITESYQTLHPISSEELLSLKYENDYPSVILRDPLQTDTLQN

SEQ ID NO: 14004 - protein, 70 aa, Synthetic construct
VNGVNPAYPESRYTSDYFISYGIEHAQCVPPSEFSEPSFITESYQTLHPIENDYPSVILRDPLQTDTLQN

SEQ ID NO: 14005 - protein, 70 aa, Synthetic construct
VNGVNPAYPESRYTSDYFISYGIEHAQCVPPSEFSEPSFITESYQTLHPISSEELSVILRDPLQTDTLQN

SEQ ID NO: 14006 - protein, 70 aa, Synthetic construct
VNGVNPAYPESRYTSDYFISYGIEHAQCVPPSEFSEPSFITESYQTLHPISSEELLSLKYDPLQTDTLQN

SEQ ID NO: 14007 - protein, 70 aa, Synthetic construct
VNGVNPAYPESRYTSDYFISYGIEHAQCVPPSEFSEPSFITESYQTLHPISSEELLSLKYENDYPDTLQN

SEQ ID NO: 14008 - protein, 70 aa, Synthetic construct
CHAERCFLSWFCDDILSPNTNYEVTWYTSWSPCPECAGEVAEFLARHSNVNLTIFTARLCYFWDTDYQEG

SEQ ID NO: 14009 - protein, 70 aa, Synthetic construct
FRNQVDPETHFCDDILSPNTNYEVTWYTSWSPCPECAGEVAEFLARHSNVNLTIFTARLCYFWDTDYQEG

SEQ ID NO: 14010 - protein, 70 aa, Synthetic construct
FRNQVDPETHCHAERLSPNTNYEVTWYTSWSPCPECAGEVAEFLARHSNVNLTIFTARLCYFWDTDYQEG

SEQ ID NO: 14011 - protein, 70 aa, Synthetic construct
FRNQVDPETHCHAERCFLSWNYEVTWYTSWSPCPECAGEVAEFLARHSNVNLTIFTARLCYFWDTDYQEG

SEQ ID NO: 14012 - protein, 70 aa, Synthetic construct
FRNQVDPETHCHAERCFLSWFCDDIWYTSWSPCPECAGEVAEFLARHSNVNLTIFTARLCYFWDTDYQEG

SEQ ID NO: 14013 - protein, 70 aa, Synthetic construct
FRNQVDPETHCHAERCFLSWFCDDILSPNTSPCPECAGEVAEFLARHSNVNLTIFTARLCYFWDTDYQEG

SEQ ID NO: 14014 - protein, 70 aa, Synthetic construct
FRNQVDPETHCHAERCFLSWFCDDILSPNTNYEVTWYTSWSPCPERHSNVNLTIFTARLCYFWDTDYQEG

SEQ ID NO: 14015 - protein, 70 aa, Synthetic construct
EALFNFPGPEAAASRSPLDAPFPAGSDALLPGPPDLYSPDLGAAPFPEAFWEASPCAGAPSQCLYEPQLS

SEQ ID NO: 14016 - protein, 70 aa, Synthetic construct
EALFNLMSGIAAASRSPLDAPFPAGSDALLPGPPDLYSPDLGAAPFPEAFWEASPCAGAPSQCLYEPQLS

SEQ ID NO: 14017 - protein, 70 aa, Synthetic construct
EALFNLMSGILGLAPSPLDAPFPAGSDALLPGPPDLYSPDLGAAPFPEAFWEASPCAGAPSQCLYEPQLS

SEQ ID NO: 14018 - protein, 70 aa, Synthetic construct
EALFNLMSGILGLAPFPGPEPFPAGSDALLPGPPDLYSPDLGAAPFPEAFWEASPCAGAPSQCLYEPQLS

SEQ ID NO: 14019 - protein, 70 aa, Synthetic construct
EALFNLMSGILGLAPFPGPEAAASRSDALLPGPPDLYSPDLGAAPFPEAFWEASPCAGAPSQCLYEPQLS

SEQ ID NO: 14020 - protein, 70 aa, Synthetic construct
EALFNLMSGILGLAPFPGPEAAASRSPLDAPGPPDLYSPDLGAAPFPEAFWEASPCAGAPSQCLYEPQLS

SEQ ID NO: 14021 - protein, 70 aa, Synthetic construct
EALFNLMSGILGLAPFPGPEAAASRSPLDAPFPAGLYSPDLGAAPFPEAFWEASPCAGAPSQCLYEPQLS

SEQ ID NO: 14022 - protein, 70 aa, Synthetic construct
EALFNLMSGILGLAPFPGPEAAASRSPLDAPFPAGSDALLLGAAPFPEAFWEASPCAGAPSQCLYEPQLS

SEQ ID NO: 14023 - protein, 70 aa, Synthetic construct
EALFNLMSGILGLAPFPGPEAAASRSPLDAPFPAGSDALLPGPPDFPEAFWEASPCAGAPSQCLYEPQLS

SEQ ID NO: 14024 - protein, 70 aa, Synthetic construct
EALFNLMSGILGLAPFPGPEAAASRSPLDAPFPAGSDALLPGPPDLYSPDWEASPCAGAPSQCLYEPQLS

SEQ ID NO: 14025 - protein, 70 aa, Synthetic construct
EALFNLMSGILGLAPFPGPEAAASRSPLDAPFPAGSDALLPGPPDLYSPDLGAAPCAGAPSQCLYEPQLS

SEQ ID NO: 14026 - protein, 70 aa, Synthetic construct
EALFNLMSGILGLAPFPGPEAAASRSPLDAPFPAGSDALLPGPPDLYSPDLGAAPFPEAFSQCLYEPQLS

SEQ ID NO: 14027 - protein, 70 aa, Synthetic construct
EALFNLMSGILGLAPFPGPEAAASRSPLDAPFPAGSDALLPGPPDLYSPDLGAAPFPEAFWEASPEPQLS

SEQ ID NO: 14028 - protein, 70 aa, Synthetic construct
EALFNLMSGILGLAPFPGPEAAASRSPLDAPFPAGSDALLPGPPDLYSPDLGAAPFPEAFWEASPCAGAP

SEQ ID NO: 14029 - protein, 70 aa, Synthetic construct
TCVEQDKLGQAFEDAFEVLRPDYRNYLALINHRPHVKGNSSCYGVLPTEEPVYNWRTVINSAADFYFEGN

SEQ ID NO: 14030 - protein, 70 aa, Synthetic construct
TCVEQDKLGQAFEDAFEVLRQHSTGYLALINHRPHVKGNSSCYGVLPTEEPVYNWRTVINSAADFYFEGN

SEQ ID NO: 14031 - protein, 70 aa, Synthetic construct
TCVEQDKLGQAFEDAFEVLRQHSTGDLQYSNHRPHVKGNSSCYGVLPTEEPVYNWRTVINSAADFYFEGN

SEQ ID NO: 14032 - protein, 70 aa, Synthetic construct
TCVEQDKLGQAFEDAFEVLRQHSTGDLQYSPDYRNVKGNSSCYGVLPTEEPVYNWRTVINSAADFYFEGN

SEQ ID NO: 14033 - protein, 70 aa, Synthetic construct
TCVEQDKLGQAFEDAFEVLRQHSTGDLQYSPDYRNYLALISCYGVLPTEEPVYNWRTVINSAADFYFEGN

SEQ ID NO: 14034 - protein, 70 aa, Synthetic construct
TCVEQDKLGQAFEDAFEVLRQHSTGDLQYSPDYRNYLALINHRPHLPTEEPVYNWRTVINSAADFYFEGN

SEQ ID NO: 14035 - protein, 70 aa, Synthetic construct
TCVEQDKLGQAFEDAFEVLRQHSTGDLQYSPDYRNYLALINHRPHVKGNSPVYNWRTVINSAADFYFEGN

SEQ ID NO: 14036 - protein, 70 aa, Synthetic construct
TCVEQDKLGQAFEDAFEVLRQHSTGDLQYSPDYRNYLALINHRPHVKGNSSCYGVRTVINSAADFYFEGN

SEQ ID NO: 14037 - protein, 70 aa, Synthetic construct
TCVEQDKLGQAFEDAFEVLRQHSTGDLQYSPDYRNYLALINHRPHVKGNSSCYGVLPTEESAADFYFEGN

SEQ ID NO: 14038 - protein, 70 aa, Synthetic construct
TCVEQDKLGQAFEDAFEVLRQHSTGDLQYSPDYRNYLALINHRPHVKGNSSCYGVLPTEEPVYNWYFEGN

SEQ ID NO: 14039 - protein, 70 aa, Synthetic construct
TCVEQDKLGQAFEDAFEVLRQHSTGDLQYSPDYRNYLALINHRPHVKGNSSCYGVLPTEEPVYNWRTVIN

SEQ ID NO: 14040 - protein, 70 aa, Synthetic construct
RLFEDVRSWMFRRGPLNSDRSDYFAAWGARVFSFGKHYWELDVDNSCDWALGVCNNSWIRKNSTMVNSED

SEQ ID NO: 14041 - protein, 70 aa, Synthetic construct
FHFEVTNHNIFRRGPLNSDRSDYFAAWGARVFSFGKHYWELDVDNSCDWALGVCNNSWIRKNSTMVNSED

SEQ ID NO: 14042 - protein, 70 aa, Synthetic construct
FHFEVTNHNIRLFEDVRSWMFRRGPLNSDRSDYFAAWGARLDVDNSCDWALGVCNNSWIRKNSTMVNSED

SEQ ID NO: 14043 - protein, 70 aa, Synthetic construct
LKVDNHFNLLTTSPVFPHYIEKPLGRVGVFLDFESGSVSFLNVTKSSLIWSYPAGSLTFPVRPFFYTGHR

SEQ ID NO: 14044 - protein, 70 aa, Synthetic construct
NSEDIHFNLLTTSPVFPHYIEKPLGRVGVFLDFESGSVSFLNVTKSSLIWSYPAGSLTFPVRPFFYTGHR

SEQ ID NO: 14045 - protein, 70 aa, Synthetic construct
NSEDIFLLLCTTSPVFPHYIEKPLGRVGVFLDFESGSVSFLNVTKSSLIWSYPAGSLTFPVRPFFYTGHR

SEQ ID NO: 14046 - protein, 70 aa, Synthetic construct
NSEDIFLLLCLKVDNHFNLLTTSPVRVGVFLDFESGSVSFLNVTKSSLIWSYPAGSLTFPVRPFFYTGHR

SEQ ID NO: 14047 - protein, 70 aa, Synthetic construct
NSEDIFLLLCLKVDNHFNLLTTSPVFPHYILDFESGSVSFLNVTKSSLIWSYPAGSLTFPVRPFFYTGHR

SEQ ID NO: 14048 - protein, 70 aa, Synthetic construct
NSEDIFLLLCLKVDNHFNLLTTSPVFPHYIEKPLGRVGVFLNVTKSSLIWSYPAGSLTFPVRPFFYTGHR

SEQ ID NO: 14049 - protein, 70 aa, Synthetic construct
NSEDIFLLLCLKVDNHFNLLTTSPVFPHYIEKPLGRVGVFLDFESGSVSFLNVTKSSLIWSYPAGSLTFP

SEQ ID NO: 14050 - protein, 70 aa, Synthetic construct
SGERRNHHWRSYKLMIDPALKKGHHKLYRYDGQHFSLAMSSNRPVEIVEDPRVVGIWTKNKELELSVPKF

SEQ ID NO: 14051 - protein, 70 aa, Synthetic construct
HQQPPNHHWRSYKLMIDPALKKGHHKLYRYDGQHFSLAMSSNRPVEIVEDPRVVGIWTKNKELELSVPKF

SEQ ID NO: 14052 - protein, 70 aa, Synthetic construct
LLGFLGATGGLVMGYSQAEAQPLLTTLQAQPQDSPGAGGPLNFGPLHSLPPVFTSGLSSTTLPRFHQAFQ

SEQ ID NO: 14053 - protein, 70 aa, Synthetic construct
LLGFLPLNLPLVMGYSQAEAQPLLTTLQAQPQDSPGAGGPLNFGPLHSLPPVFTSGLSSTTLPRFHQAFQ

SEQ ID NO: 14054 - protein, 70 aa, Synthetic construct
LLGFLPLNLPPCNPPSQAEAQPLLTTLQAQPQDSPGAGGPLNFGPLHSLPPVFTSGLSSTTLPRFHQAFQ

SEQ ID NO: 14055 - protein, 70 aa, Synthetic construct
LLGFLPLNLPPCNPPGATGGQPLLTTLQAQPQDSPGAGGPLNFGPLHSLPPVFTSGLSSTTLPRFHQAFQ

SEQ ID NO: 14056 - protein, 70 aa, Synthetic construct
LLGFLPLNLPPCNPPGATGGLVMGYTLQAQPQDSPGAGGPLNFGPLHSLPPVFTSGLSSTTLPRFHQAFQ

SEQ ID NO: 14057 - protein, 70 aa, Synthetic construct
LLGFLPLNLPPCNPPGATGGLVMGYSQAEAPQDSPGAGGPLNFGPLHSLPPVFTSGLSSTTLPRFHQAFQ

SEQ ID NO: 14058 - protein, 70 aa, Synthetic construct
LLGFLPLNLPPCNPPGATGGLVMGYSQAEAQPLLTGAGGPLNFGPLHSLPPVFTSGLSSTTLPRFHQAFQ

SEQ ID NO: 14059 - protein, 70 aa, Synthetic construct
LLGFLPLNLPPCNPPGATGGLVMGYSQAEAQPLLTTLQAQLNFGPLHSLPPVFTSGLSSTTLPRFHQAFQ

SEQ ID NO: 14060 - protein, 70 aa, Synthetic construct
LLGFLPLNLPPCNPPGATGGLVMGYSQAEAQPLLTTLQAQPQDSPLHSLPPVFTSGLSSTTLPRFHQAFQ

SEQ ID NO: 14061 - protein, 70 aa, Synthetic construct
LLGFLPLNLPPCNPPGATGGLVMGYSQAEAQPLLTTLQAQPQDSPGAGGPPVFTSGLSSTTLPRFHQAFQ

SEQ ID NO: 14062 - protein, 70 aa, Synthetic construct
LLGFLPLNLPPCNPPGATGGLVMGYSQAEAQPLLTTLQAQPQDSPGAGGPLNFGPGLSSTTLPRFHQAFQ

SEQ ID NO: 14063 - protein, 70 aa, Synthetic construct
LLGFLPLNLPPCNPPGATGGLVMGYSQAEAQPLLTTLQAQPQDSPGAGGPLNFGPLHSLPTLPRFHQAFQ

SEQ ID NO: 14064 - protein, 70 aa, Synthetic construct
DALPGPYAAAAAGPLGAAPDRFPADLDLDMFSGSLECDVESIILNDFMDSDEMDFNFDSALPPPPPGLAG

SEQ ID NO: 14065 - protein, 70 aa, Synthetic construct
FGGPPPYAAAAAGPLGAAPDRFPADLDLDMFSGSLECDVESIILNDFMDSDEMDFNFDSALPPPPPGLAG

SEQ ID NO: 14066 - protein, 70 aa, Synthetic construct
FGGPPGGLLLAAGPLGAAPDRFPADLDLDMFSGSLECDVESIILNDFMDSDEMDFNFDSALPPPPPGLAG

SEQ ID NO: 14067 - protein, 70 aa, Synthetic construct
FGGPPGGLLLDALPGGAAPDRFPADLDLDMFSGSLECDVESIILNDFMDSDEMDFNFDSALPPPPPGLAG

SEQ ID NO: 14068 - protein, 70 aa, Synthetic construct
FGGPPGGLLLDALPGPYAAARFPADLDLDMFSGSLECDVESIILNDFMDSDEMDFNFDSALPPPPPGLAG

SEQ ID NO: 14069 - protein, 70 aa, Synthetic construct
FGGPPGGLLLDALPGPYAAAAAGPLLDLDMFSGSLECDVESIILNDFMDSDEMDFNFDSALPPPPPGLAG

SEQ ID NO: 14070 - protein, 70 aa, Synthetic construct
FGGPPGGLLLDALPGPYAAAAAGPLGAAPDFSGSLECDVESIILNDFMDSDEMDFNFDSALPPPPPGLAG

SEQ ID NO: 14071 - protein, 70 aa, Synthetic construct
FGGPPGGLLLDALPGPYAAAAAGPLGAAPDRFPADECDVESIILNDFMDSDEMDFNFDSALPPPPPGLAG

SEQ ID NO: 14072 - protein, 70 aa, Synthetic construct
FGGPPGGLLLDALPGPYAAAAAGPLGAAPDRFPADLDLDMSIILNDFMDSDEMDFNFDSALPPPPPGLAG

SEQ ID NO: 14073 - protein, 70 aa, Synthetic construct
FGGPPGGLLLDALPGPYAAAAAGPLGAAPDRFPADLDLDMFSGSLDFMDSDEMDFNFDSALPPPPPGLAG

SEQ ID NO: 14074 - protein, 70 aa, Synthetic construct
FGGPPGGLLLDALPGPYAAAAAGPLGAAPDRFPADLDLDMFSGSLECDVEDEMDFNFDSALPPPPPGLAG

SEQ ID NO: 14075 - protein, 70 aa, Synthetic construct
FGGPPGGLLLDALPGPYAAAAAGPLGAAPDRFPADLDLDMFSGSLECDVESIILNNFDSALPPPPPGLAG

SEQ ID NO: 14076 - protein, 70 aa, Synthetic construct
FGGPPGGLLLDALPGPYAAAAAGPLGAAPDRFPADLDLDMFSGSLECDVESIILNDFMDSLPPPPPGLAG

SEQ ID NO: 14077 - protein, 70 aa, Synthetic construct
FGGPPGGLLLDALPGPYAAAAAGPLGAAPDRFPADLDLDMFSGSLECDVESIILNDFMDSDEMDFPGLAG

SEQ ID NO: 14078 - protein, 70 aa, Synthetic construct
FGGPPGGLLLDALPGPYAAAAAGPLGAAPDRFPADLDLDMFSGSLECDVESIILNDFMDSDEMDFNFDSA

SEQ ID NO: 14079 - protein, 70 aa, Synthetic construct
AKRKQLLRSELDTEKVPLSPLPGPKVMAGDFKEKVADLLVKYTSGLWASALPKAFEEMYKVKFPEDALKN

SEQ ID NO: 14080 - protein, 70 aa, Synthetic construct
AKRKQLLRSELDTEKVPLSPLPGPKQTPPLKGCPTVMAGDFKEKVADLLVKYTSGLWASAVKFPEDALKN

SEQ ID NO: 14081 - protein, 70 aa, Synthetic construct
AKRKQLLRSELDTEKVPLSPLPGPKQTPPLKGCPTVMAGDFKEKVADLLVKYTSGLWASALPKAFDALKN

SEQ ID NO: 14082 - protein, 70 aa, Synthetic construct
APFYEPGRAGKPGRGAEPGALGEPGAAAPAMYDDESAIDFSAYIDSMAAVPTLELCHDELFADLFNSNHK

SEQ ID NO: 14083 - protein, 70 aa, Synthetic construct
ARGAPPGRAGKPGRGAEPGALGEPGAAAPAMYDDESAIDFSAYIDSMAAVPTLELCHDELFADLFNSNHK

SEQ ID NO: 14084 - protein, 70 aa, Synthetic construct
ARGAPWPAEPKPGRGAEPGALGEPGAAAPAMYDDESAIDFSAYIDSMAAVPTLELCHDELFADLFNSNHK

SEQ ID NO: 14085 - protein, 70 aa, Synthetic construct
ARGAPWPAEPAPFYEAEPGALGEPGAAAPAMYDDESAIDFSAYIDSMAAVPTLELCHDELFADLFNSNHK

SEQ ID NO: 14086 - protein, 70 aa, Synthetic construct
ARGAPWPAEPAPFYEPGRAGLGEPGAAAPAMYDDESAIDFSAYIDSMAAVPTLELCHDELFADLFNSNHK

SEQ ID NO: 14087 - protein, 70 aa, Synthetic construct
ARGAPWPAEPAPFYEPGRAGKPGRGAAAPAMYDDESAIDFSAYIDSMAAVPTLELCHDELFADLFNSNHK

SEQ ID NO: 14088 - protein, 70 aa, Synthetic construct
ARGAPWPAEPAPFYEPGRAGKPGRGAEPGAMYDDESAIDFSAYIDSMAAVPTLELCHDELFADLFNSNHK

SEQ ID NO: 14089 - protein, 70 aa, Synthetic construct
ARGAPWPAEPAPFYEPGRAGKPGRGAEPGALGEPGSAIDFSAYIDSMAAVPTLELCHDELFADLFNSNHK

SEQ ID NO: 14090 - protein, 70 aa, Synthetic construct
ARGAPWPAEPAPFYEPGRAGKPGRGAEPGALGEPGAAAPAMYDDESAIDFPTLELCHDELFADLFNSNHK

SEQ ID NO: 14091 - protein, 70 aa, Synthetic construct
ARGAPWPAEPAPFYEPGRAGKPGRGAEPGALGEPGAAAPAMYDDESAIDFSAYIDCHDELFADLFNSNHK

SEQ ID NO: 14092 - protein, 70 aa, Synthetic construct
YAATDETQLSFLRGEKILILRQTTADWWWGERAGCCGYIPANHVGKHVDEYDPEDTWQDEEYFGSYGTLK

SEQ ID NO: 14093 - protein, 70 aa, Synthetic construct
QPEEFVAIADFLRGEKILILRQTTADWWWGERAGCCGYIPANHVGKHVDEYDPEDTWQDEEYFGSYGTLK

SEQ ID NO: 14094 - protein, 70 aa, Synthetic construct
QPEEFVAIADYAATDETQLSFLRGEDWWWGERAGCCGYIPANHVGKHVDEYDPEDTWQDEEYFGSYGTLK

SEQ ID NO: 14095 - protein, 70 aa, Synthetic construct
QPEEFVAIADYAATDETQLSFLRGEKILILRQTTADWWWGERAGCCGYIPYDPEDTWQDEEYFGSYGTLK

SEQ ID NO: 14096 - protein, 70 aa, Synthetic construct
QPEEFVAIADYAATDETQLSFLRGEKILILRQTTADWWWGERAGCCGYIPANHVGTWQDEEYFGSYGTLK

SEQ ID NO: 14097 - protein, 70 aa, Synthetic construct
QPEEFVAIADYAATDETQLSFLRGEKILILRQTTADWWWGERAGCCGYIPANHVGKHVDEEYFGSYGTLK

SEQ ID NO: 14098 - protein, 70 aa, Synthetic construct
QPEEFVAIADYAATDETQLSFLRGEKILILRQTTADWWWGERAGCCGYIPANHVGKHVDEYDPEDYGTLK

SEQ ID NO: 14099 - protein, 70 aa, Synthetic construct
QPEEFVAIADYAATDETQLSFLRGEKILILRQTTADWWWGERAGCCGYIPANHVGKHVDEYDPEDTWQDE

SEQ ID NO: 14100 - protein, 70 aa, Synthetic construct
LQINQTFEELRLVTQDTENELKKLQQTQEYFIIQYQESLRIQAQFGPLAQLSPQERLSRETALQQKQVSL

SEQ ID NO: 14101 - protein, 70 aa, Synthetic construct
SLADAMSQKHLQINQTFEELRLVTQDTENELKKLQQESLRIQAQFGPLAQLSPQERLSRETALQQKQVSL

SEQ ID NO: 14102 - protein, 70 aa, Synthetic construct
SLADAMSQKHLQINQTFEELRLVTQDTENELKKLQQTQEYIQAQFGPLAQLSPQERLSRETALQQKQVSL

SEQ ID NO: 14103 - protein, 70 aa, Synthetic construct
SLADAMSQKHLQINQTFEELRLVTQDTENELKKLQQTQEYFIIQYGPLAQLSPQERLSRETALQQKQVSL

SEQ ID NO: 14104 - protein, 70 aa, Synthetic construct
SLADAMSQKHLQINQTFEELRLVTQDTENELKKLQQTQEYFIIQYQESLRIQAQFGPLAQTALQQKQVSL

SEQ ID NO: 14105 - protein, 70 aa, Synthetic construct
SLADAMSQKHLQINQTFEELRLVTQDTENELKKLQQTQEYFIIQYQESLRIQAQFGPLAQLSPQEKQVSL

SEQ ID NO: 14106 - protein, 70 aa, Synthetic construct
KRIKRSDRRGAESVTEEKFTILFESFQVKTLSLPVVVIVHGSQDNNATATVLWDNAFAEPGRVPFAVPDK

SEQ ID NO: 14107 - protein, 70 aa, Synthetic construct
KRIKRSDRRGAESVTEEKFTILFESQFSVGGNELVFQVKTLSLPVVVIVHVLWDNAFAEPGRVPFAVPDK

SEQ ID NO: 14108 - protein, 70 aa, Synthetic construct
DLDEKHRFTDKVITKKSKDSRNADFMVGECQFAVPVPKPLCLLVPPLNLSGRQEDTILNTWMNDFRFLGK

SEQ ID NO: 14109 - protein, 70 aa, Synthetic construct
VHLSWNMARNIKVSDPKLFEMIKYCLLRTLKQCQTLREALIAAGKEIIWHGRTKEEPAHYCSICEVEVFD

SEQ ID NO: 14110 - protein, 70 aa, Synthetic construct
LQSVKSIVPMVHLSWNMARNIKVSDLLRTLKQCQTLREALIAAGKEIIWHGRTKEEPAHYCSICEVEVFD

SEQ ID NO: 14111 - protein, 70 aa, Synthetic construct
LQSVKSIVPMVHLSWNMARNIKVSDPKLFEMIKYCLREALIAAGKEIIWHGRTKEEPAHYCSICEVEVFD

SEQ ID NO: 14112 - protein, 70 aa, Synthetic construct
LQSVKSIVPMVHLSWNMARNIKVSDPKLFEMIKYCLLRTLKQCQTLREALGRTKEEPAHYCSICEVEVFD

SEQ ID NO: 14113 - protein, 70 aa, Synthetic construct
RLPAREREMDVIRNFGSLYLSGAPGTGKTACLSRILQDLKKELKGFKTIMLNCMSLRTAQAVFPAIAQEI

SEQ ID NO: 14114 - protein, 70 aa, Synthetic construct
RLPAREREMDVIRNFLREHICGKKATGKTACLSRILQDLKKELKGFKTIMLNCMSLRTAQAVFPAIAQEI

SEQ ID NO: 14115 - protein, 70 aa, Synthetic construct
RLPAREREMDVIRNFLREHICGKKAGSLYLCLSRILQDLKKELKGFKTIMLNCMSLRTAQAVFPAIAQEI

SEQ ID NO: 14116 - protein, 70 aa, Synthetic construct
RLPAREREMDVIRNFLREHICGKKAGSLYLSGAPGLQDLKKELKGFKTIMLNCMSLRTAQAVFPAIAQEI

SEQ ID NO: 14117 - protein, 70 aa, Synthetic construct
RLFPGSSFLDLGDLNESDFLNNAHFPEHLDHFTENMEDFSNDLFSSFFDDPVLDEKSPLLDMELDSPTPG

SEQ ID NO: 14118 - protein, 70 aa, Synthetic construct
DAVLESSFLDLGDLNESDFLNNAHFPEHLDHFTENMEDFSNDLFSSFFDDPVLDEKSPLLDMELDSPTPG

SEQ ID NO: 14119 - protein, 70 aa, Synthetic construct
DAVLEPFPADLGDLNESDFLNNAHFPEHLDHFTENMEDFSNDLFSSFFDDPVLDEKSPLLDMELDSPTPG

SEQ ID NO: 14120 - protein, 70 aa, Synthetic construct
DAVLEPFPADRLFPGESDFLNNAHFPEHLDHFTENMEDFSNDLFSSFFDDPVLDEKSPLLDMELDSPTPG

SEQ ID NO: 14121 - protein, 70 aa, Synthetic construct
DAVLEPFPADRLFPGSSFLDNNAHFPEHLDHFTENMEDFSNDLFSSFFDDPVLDEKSPLLDMELDSPTPG

SEQ ID NO: 14122 - protein, 70 aa, Synthetic construct
DAVLEPFPADRLFPGSSFLDLGDLNPEHLDHFTENMEDFSNDLFSSFFDDPVLDEKSPLLDMELDSPTPG

SEQ ID NO: 14123 - protein, 70 aa, Synthetic construct
DAVLEPFPADRLFPGSSFLDLGDLNESDFLHFTENMEDFSNDLFSSFFDDPVLDEKSPLLDMELDSPTPG

SEQ ID NO: 14124 - protein, 70 aa, Synthetic construct
DAVLEPFPADRLFPGSSFLDLGDLNESDFLNNAHFMEDFSNDLFSSFFDDPVLDEKSPLLDMELDSPTPG

SEQ ID NO: 14125 - protein, 70 aa, Synthetic construct
DAVLEPFPADRLFPGSSFLDLGDLNESDFLNNAHFPEHLDNDLFSSFFDDPVLDEKSPLLDMELDSPTPG

SEQ ID NO: 14126 - protein, 70 aa, Synthetic construct
DAVLEPFPADRLFPGSSFLDLGDLNESDFLNNAHFPEHLDHFTENSFFDDPVLDEKSPLLDMELDSPTPG

SEQ ID NO: 14127 - protein, 70 aa, Synthetic construct
DAVLEPFPADRLFPGSSFLDLGDLNESDFLNNAHFPEHLDHFTENMEDFSPVLDEKSPLLDMELDSPTPG

SEQ ID NO: 14128 - protein, 70 aa, Synthetic construct
DAVLEPFPADRLFPGSSFLDLGDLNESDFLNNAHFPEHLDHFTENMEDFSNDLFSKSPLLDMELDSPTPG

SEQ ID NO: 14129 - protein, 70 aa, Synthetic construct
DAVLEPFPADRLFPGSSFLDLGDLNESDFLNNAHFPEHLDHFTENMEDFSNDLFSSFFDDDMELDSPTPG

SEQ ID NO: 14130 - protein, 70 aa, Synthetic construct
DAVLEPFPADRLFPGSSFLDLGDLNESDFLNNAHFPEHLDHFTENMEDFSNDLFSSFFDDPVLDESPTPG

SEQ ID NO: 14131 - protein, 70 aa, Synthetic construct
DAVLEPFPADRLFPGSSFLDLGDLNESDFLNNAHFPEHLDHFTENMEDFSNDLFSSFFDDPVLDEKSPLL

SEQ ID NO: 14132 - protein, 70 aa, Synthetic construct
NHCNCIIDQIFTGGLQSDVTCQVCHGVSTTIDPFWDISLDLPGSSTPFWPLSPGSEGNVVNGESHVSGTT

SEQ ID NO: 14133 - protein, 70 aa, Synthetic construct
DDNGKIIDQIFTGGLQSDVTCQVCHGVSTTIDPFWDISLDLPGSSTPFWPLSPGSEGNVVNGESHVSGTT

SEQ ID NO: 14134 - protein, 70 aa, Synthetic construct
DDNGKKANNPFTGGLQSDVTCQVCHGVSTTIDPFWDISLDLPGSSTPFWPLSPGSEGNVVNGESHVSGTT

SEQ ID NO: 14135 - protein, 70 aa, Synthetic construct
DDNGKKANNPNHCNCQSDVTCQVCHGVSTTIDPFWDISLDLPGSSTPFWPLSPGSEGNVVNGESHVSGTT

SEQ ID NO: 14136 - protein, 70 aa, Synthetic construct
DDNGKKANNPNHCNCIIDQICQVCHGVSTTIDPFWDISLDLPGSSTPFWPLSPGSEGNVVNGESHVSGTT

SEQ ID NO: 14137 - protein, 70 aa, Synthetic construct
DDNGKKANNPNHCNCIIDQIFTGGLGVSTTIDPFWDISLDLPGSSTPFWPLSPGSEGNVVNGESHVSGTT

SEQ ID NO: 14138 - protein, 70 aa, Synthetic construct
DDNGKKANNPNHCNCIIDQIFTGGLQSDVTIDPFWDISLDLPGSSTPFWPLSPGSEGNVVNGESHVSGTT

SEQ ID NO: 14139 - protein, 70 aa, Synthetic construct
DDNGKKANNPNHCNCIIDQIFTGGLQSDVTCQVCHGVSTTIDPFWTPFWPLSPGSEGNVVNGESHVSGTT

SEQ ID NO: 14140 - protein, 70 aa, Synthetic construct
DDNGKKANNPNHCNCIIDQIFTGGLQSDVTCQVCHGVSTTIDPFWDISLDLSPGSEGNVVNGESHVSGTT

SEQ ID NO: 14141 - protein, 70 aa, Synthetic construct
DDNGKKANNPNHCNCIIDQIFTGGLQSDVTCQVCHGVSTTIDPFWDISLDLPGSSEGNVVNGESHVSGTT

SEQ ID NO: 14142 - protein, 70 aa, Synthetic construct
DDNGKKANNPNHCNCIIDQIFTGGLQSDVTCQVCHGVSTTIDPFWDISLDLPGSSTPFWPNGESHVSGTT

SEQ ID NO: 14143 - protein, 70 aa, Synthetic construct
DDNGKKANNPNHCNCIIDQIFTGGLQSDVTCQVCHGVSTTIDPFWDISLDLPGSSTPFWPLSPGSVSGTT

SEQ ID NO: 14144 - protein, 70 aa, Synthetic construct
DDNGKKANNPNHCNCIIDQIFTGGLQSDVTCQVCHGVSTTIDPFWDISLDLPGSSTPFWPLSPGSEGNVV

SEQ ID NO: 14145 - protein, 70 aa, Synthetic construct
LEPLKGNFDWGELGALEALELSPPLSPASHVDVDLTIHGRHIDCPATWGPSVEQAADSLDFDETFLATSF

SEQ ID NO: 14146 - protein, 70 aa, Synthetic construct
LEPLKGNFDWEAIFDLEALELSPPLSPASHVDVDLTIHGRHIDCPATWGPSVEQAADSLDFDETFLATSF

SEQ ID NO: 14147 - protein, 70 aa, Synthetic construct
LEPLKGNFDWEAIFDAGTLGLSPPLSPASHVDVDLTIHGRHIDCPATWGPSVEQAADSLDFDETFLATSF

SEQ ID NO: 14148 - protein, 70 aa, Synthetic construct
LEPLKGNFDWEAIFDAGTLGGELGASPASHVDVDLTIHGRHIDCPATWGPSVEQAADSLDFDETFLATSF

SEQ ID NO: 14149 - protein, 70 aa, Synthetic construct
LEPLKGNFDWEAIFDAGTLGGELGALEALEVDVDLTIHGRHIDCPATWGPSVEQAADSLDFDETFLATSF

SEQ ID NO: 14150 - protein, 70 aa, Synthetic construct
LEPLKGNFDWEAIFDAGTLGGELGALEALELSPPLTIHGRHIDCPATWGPSVEQAADSLDFDETFLATSF

SEQ ID NO: 14151 - protein, 70 aa, Synthetic construct
LEPLKGNFDWEAIFDAGTLGGELGALEALELSPPLSPASHHIDCPATWGPSVEQAADSLDFDETFLATSF

SEQ ID NO: 14152 - protein, 70 aa, Synthetic construct
LEPLKGNFDWEAIFDAGTLGGELGALEALELSPPLSPASHVDVDLATWGPSVEQAADSLDFDETFLATSF

SEQ ID NO: 14153 - protein, 70 aa, Synthetic construct
LEPLKGNFDWEAIFDAGTLGGELGALEALELSPPLSPASHVDVDLTIHGRSVEQAADSLDFDETFLATSF

SEQ ID NO: 14154 - protein, 70 aa, Synthetic construct
LEPLKGNFDWEAIFDAGTLGGELGALEALELSPPLSPASHVDVDLTIHGRHIDCPADSLDFDETFLATSF

SEQ ID NO: 14155 - protein, 70 aa, Synthetic construct
LEPLKGNFDWEAIFDAGTLGGELGALEALELSPPLSPASHVDVDLTIHGRHIDCPATWGPFDETFLATSF

SEQ ID NO: 14156 - protein, 70 aa, Synthetic construct
LEPLKGNFDWEAIFDAGTLGGELGALEALELSPPLSPASHVDVDLTIHGRHIDCPATWGPSVEQALATSF

SEQ ID NO: 14157 - protein, 70 aa, Synthetic construct
LEPLKGNFDWEAIFDAGTLGGELGALEALELSPPLSPASHVDVDLTIHGRHIDCPATWGPSVEQAADSLD

SEQ ID NO: 14158 - protein, 70 aa, Synthetic construct
PAGIYNLDDLKALGRRQGWCPYFLARYSILHANVVVYSYHYLLDPKIADLVSKELARKAVVVFDEAHNID

SEQ ID NO: 14159 - protein, 70 aa, Synthetic construct
FDAHGNLDDLKALGRRQGWCPYFLARYSILHANVVVYSYHYLLDPKIADLVSKELARKAVVVFDEAHNID

SEQ ID NO: 14160 - protein, 70 aa, Synthetic construct
FDAHGREVPLKALGRRQGWCPYFLARYSILHANVVVYSYHYLLDPKIADLVSKELARKAVVVFDEAHNID

SEQ ID NO: 14161 - protein, 70 aa, Synthetic construct
FDAHGREVPLPAGIYNLDDLPYFLARYSILHANVVVYSYHYLLDPKIADLVSKELARKAVVVFDEAHNID

SEQ ID NO: 14162 - protein, 70 aa, Synthetic construct
FDAHGREVPLPAGIYNLDDLKALGRRYSILHANVVVYSYHYLLDPKIADLVSKELARKAVVVFDEAHNID

SEQ ID NO: 14163 - protein, 70 aa, Synthetic construct
FDAHGREVPLPAGIYNLDDLKALGRRQGWCHANVVVYSYHYLLDPKIADLVSKELARKAVVVFDEAHNID

SEQ ID NO: 14164 - protein, 70 aa, Synthetic construct
FDAHGREVPLPAGIYNLDDLKALGRRQGWCPYFLARYSILHANVVKIADLVSKELARKAVVVFDEAHNID

SEQ ID NO: 14165 - protein, 70 aa, Synthetic construct
FDAHGREVPLPAGIYNLDDLKALGRRQGWCPYFLARYSILHANVVVYSYHYLLDPARKAVVVFDEAHNID

SEQ ID NO: 14166 - protein, 70 aa, Synthetic construct
FDAHGREVPLPAGIYNLDDLKALGRRQGWCPYFLARYSILHANVVVYSYHYLLDPKIADLVVFDEAHNID

SEQ ID NO: 14167 - protein, 70 aa, Synthetic construct
FDAHGREVPLPAGIYNLDDLKALGRRQGWCPYFLARYSILHANVVVYSYHYLLDPKIADLVSKELARKAV

SEQ ID NO: 14168 - protein, 70 aa, Synthetic construct
WLEPPEDIFSTGSVLELGLHCPPPEVPVTRLQEQGLQGWKSGGDRGCGLQESEPEDFLKLFIDPNEVYCS

SEQ ID NO: 14169 - protein, 70 aa, Synthetic construct
DLGIPEDIFSTGSVLELGLHCPPPEVPVTRLQEQGLQGWKSGGDRGCGLQESEPEDFLKLFIDPNEVYCS

SEQ ID NO: 14170 - protein, 70 aa, Synthetic construct
DLGIPDLLDATGSVLELGLHCPPPEVPVTRLQEQGLQGWKSGGDRGCGLQESEPEDFLKLFIDPNEVYCS

SEQ ID NO: 14171 - protein, 70 aa, Synthetic construct
DLGIPDLLDAWLEPPELGLHCPPPEVPVTRLQEQGLQGWKSGGDRGCGLQESEPEDFLKLFIDPNEVYCS

SEQ ID NO: 14172 - protein, 70 aa, Synthetic construct
DLGIPDLLDAWLEPPEDIFSCPPPEVPVTRLQEQGLQGWKSGGDRGCGLQESEPEDFLKLFIDPNEVYCS

SEQ ID NO: 14173 - protein, 70 aa, Synthetic construct
DLGIPDLLDAWLEPPEDIFSTGSVLVPVTRLQEQGLQGWKSGGDRGCGLQESEPEDFLKLFIDPNEVYCS

SEQ ID NO: 14174 - protein, 70 aa, Synthetic construct
DLGIPDLLDAWLEPPEDIFSTGSVLELGLHLQEQGLQGWKSGGDRGCGLQESEPEDFLKLFIDPNEVYCS

SEQ ID NO: 14175 - protein, 70 aa, Synthetic construct
DLGIPDLLDAWLEPPEDIFSTGSVLELGLHCPPPELQGWKSGGDRGCGLQESEPEDFLKLFIDPNEVYCS

SEQ ID NO: 14176 - protein, 70 aa, Synthetic construct
DLGIPDLLDAWLEPPEDIFSTGSVLELGLHCPPPEVPVTRSGGDRGCGLQESEPEDFLKLFIDPNEVYCS

SEQ ID NO: 14177 - protein, 70 aa, Synthetic construct
DLGIPDLLDAWLEPPEDIFSTGSVLELGLHCPPPEVPVTRLQEQGGCGLQESEPEDFLKLFIDPNEVYCS

SEQ ID NO: 14178 - protein, 70 aa, Synthetic construct
DLGIPDLLDAWLEPPEDIFSTGSVLELGLHCPPPEVPVTRLQEQGLQGWKESEPEDFLKLFIDPNEVYCS

SEQ ID NO: 14179 - protein, 70 aa, Synthetic construct
DLGIPDLLDAWLEPPEDIFSTGSVLELGLHCPPPEVPVTRLQEQGLQGWKSGGDRDFLKLFIDPNEVYCS

SEQ ID NO: 14180 - protein, 70 aa, Synthetic construct
DLGIPDLLDAWLEPPEDIFSTGSVLELGLHCPPPEVPVTRLQEQGLQGWKSGGDRGCGLQFIDPNEVYCS

SEQ ID NO: 14181 - protein, 70 aa, Synthetic construct
DLGIPDLLDAWLEPPEDIFSTGSVLELGLHCPPPEVPVTRLQEQGLQGWKSGGDRGCGLQESEPEEVYCS

SEQ ID NO: 14182 - protein, 70 aa, Synthetic construct
DLGIPDLLDAWLEPPEDIFSTGSVLELGLHCPPPEVPVTRLQEQGLQGWKSGGDRGCGLQESEPEDFLKL

SEQ ID NO: 14183 - protein, 70 aa, Synthetic construct
SPVPGCPPSPAYYSPATYHPLHSNLQAHLGQLSPPPEHPGFDALDQLSQVELLGDMDRNEFDQYLNTPGH

SEQ ID NO: 14184 - protein, 70 aa, Synthetic construct
LGQSPCPPSPAYYSPATYHPLHSNLQAHLGQLSPPPEHPGFDALDQLSQVELLGDMDRNEFDQYLNTPGH

SEQ ID NO: 14185 - protein, 70 aa, Synthetic construct
LGQSPGVSMMAYYSPATYHPLHSNLQAHLGQLSPPPEHPGFDALDQLSQVELLGDMDRNEFDQYLNTPGH

SEQ ID NO: 14186 - protein, 70 aa, Synthetic construct
LGQSPGVSMMSPVPGATYHPLHSNLQAHLGQLSPPPEHPGFDALDQLSQVELLGDMDRNEFDQYLNTPGH

SEQ ID NO: 14187 - protein, 70 aa, Synthetic construct
LGQSPGVSMMSPVPGCPPSPAYYSPQAHLGQLSPPPEHPGFDALDQLSQVELLGDMDRNEFDQYLNTPGH

SEQ ID NO: 14188 - protein, 70 aa, Synthetic construct
LGQSPGVSMMSPVPGCPPSPAYYSPATYHPQLSPPPEHPGFDALDQLSQVELLGDMDRNEFDQYLNTPGH

SEQ ID NO: 14189 - protein, 70 aa, Synthetic construct
LGQSPGVSMMSPVPGCPPSPAYYSPATYHPLHSNLPEHPGFDALDQLSQVELLGDMDRNEFDQYLNTPGH

SEQ ID NO: 14190 - protein, 70 aa, Synthetic construct
LGQSPGVSMMSPVPGCPPSPAYYSPATYHPLHSNLQAHLGFDALDQLSQVELLGDMDRNEFDQYLNTPGH

SEQ ID NO: 14191 - protein, 70 aa, Synthetic construct
LGQSPGVSMMSPVPGCPPSPAYYSPATYHPLHSNLQAHLGQLSPPPEHPGFDALDMDRNEFDQYLNTPGH

SEQ ID NO: 14192 - protein, 70 aa, Synthetic construct
LGQSPGVSMMSPVPGCPPSPAYYSPATYHPLHSNLQAHLGQLSPPPEHPGFDALDQLSQVFDQYLNTPGH

SEQ ID NO: 14193 - protein, 70 aa, Synthetic construct
QQSTLEQWAAWLDNVMMQALKAARQFLLKWSFYSSMVIRDLTLRSAASFGSFHLIRLLYDEYMFYLVEHR

SEQ ID NO: 14194 - protein, 70 aa, Synthetic construct
QQSTLEQWAAWLDNVMMQALKPYEGRPSFPKAARQFLLKWLTLRSAASFGSFHLIRLLYDEYMFYLVEHR

SEQ ID NO: 14195 - protein, 70 aa, Synthetic construct
QQSTLEQWAAWLDNVMMQALKPYEGRPSFPKAARQFLLKWSFYSSAASFGSFHLIRLLYDEYMFYLVEHR

SEQ ID NO: 14196 - protein, 70 aa, Synthetic construct
QQSTLEQWAAWLDNVMMQALKPYEGRPSFPKAARQFLLKWSFYSSMVIRDSFHLIRLLYDEYMFYLVEHR

SEQ ID NO: 14197 - protein, 70 aa, Synthetic construct
QQSTLEQWAAWLDNVMMQALKPYEGRPSFPKAARQFLLKWSFYSSMVIRDLTLRSAASFGSFHLIRLLYD

SEQ ID NO: 14198 - protein, 70 aa, Synthetic construct
RMVIQDIPAVTSRGHVENTPDLVSDSTYYSSFYQPSLFPYYNNLYNCPQYSMALAADSASGEVGNPLGGS

SEQ ID NO: 14199 - protein, 70 aa, Synthetic construct
SVPTTDIPAVTSRGHVENTPDLVSDSTYYSSFYQPSLFPYYNNLYNCPQYSMALAADSASGEVGNPLGGS

SEQ ID NO: 14200 - protein, 70 aa, Synthetic construct
SVPTTAASEGTSRGHVENTPDLVSDSTYYSSFYQPSLFPYYNNLYNCPQYSMALAADSASGEVGNPLGGS

SEQ ID NO: 14201 - protein, 70 aa, Synthetic construct
SVPTTAASEGRMVIQVENTPDLVSDSTYYSSFYQPSLFPYYNNLYNCPQYSMALAADSASGEVGNPLGGS

SEQ ID NO: 14202 - protein, 70 aa, Synthetic construct
SVPTTAASEGRMVIQDIPAVDLVSDSTYYSSFYQPSLFPYYNNLYNCPQYSMALAADSASGEVGNPLGGS

SEQ ID NO: 14203 - protein, 70 aa, Synthetic construct
SVPTTAASEGRMVIQDIPAVTSRGHVENTPDLVSDSTYYSSFYQPSLFPYYNNLYNCPQYGEVGNPLGGS

SEQ ID NO: 14204 - protein, 70 aa, Synthetic construct
SVPTTAASEGRMVIQDIPAVTSRGHVENTPDLVSDSTYYSSFYQPSLFPYYNNLYNCPQYSMALAADSAS

SEQ ID NO: 14205 - protein, 70 aa, Synthetic construct
SSEDVRWDTFDPAELMLENYDTMYLLDQPVLEQRLEPSTCKTDTLGLSCGVGSGNCSNSSSSNFEGLLWS

SEQ ID NO: 14206 - protein, 70 aa, Synthetic construct
SSEDVRWDTFPLGRMMLENYDTMYLLDQPVLEQRLEPSTCKTDTLGLSCGVGSGNCSNSSSSNFEGLLWS

SEQ ID NO: 14207 - protein, 70 aa, Synthetic construct
SSEDVRWDTFPLGRMPGQTEDPAELMLENYDTMYLLDQPVKTDTLGLSCGVGSGNCSNSSSSNFEGLLWS

SEQ ID NO: 14208 - protein, 70 aa, Synthetic construct
SSEDVRWDTFPLGRMPGQTEDPAELMLENYDTMYLLDQPVLEQRLGLSCGVGSGNCSNSSSSNFEGLLWS

SEQ ID NO: 14209 - protein, 70 aa, Synthetic construct
SSEDVRWDTFPLGRMPGQTEDPAELMLENYDTMYLLDQPVLEQRLEPSTCVGSGNCSNSSSSNFEGLLWS

SEQ ID NO: 14210 - protein, 70 aa, Synthetic construct
SSEDVRWDTFPLGRMPGQTEDPAELMLENYDTMYLLDQPVLEQRLEPSTCKTDTLCSNSSSSNFEGLLWS

SEQ ID NO: 14211 - protein, 70 aa, Synthetic construct
SSEDVRWDTFPLGRMPGQTEDPAELMLENYDTMYLLDQPVLEQRLEPSTCKTDTLGLSCGSSNFEGLLWS

SEQ ID NO: 14212 - protein, 70 aa, Synthetic construct
SSEDVRWDTFPLGRMPGQTEDPAELMLENYDTMYLLDQPVLEQRLEPSTCKTDTLGLSCGVGSGNGLLWS

SEQ ID NO: 14213 - protein, 70 aa, Synthetic construct
SSMSSDRIRCCTHCKDTLLKREQQIDEKEHTPDIVKLYEKLRLCMEKVDQKAPEYIRMAASLNAGETTYS

SEQ ID NO: 14214 - protein, 70 aa, Synthetic construct
SVNMNMNTLNAMNGYYHSNHGYMNQTPQYPMQMQMGMMGTQPYAQQPMQTPPHGNMMYTAPGHHGYMNTG

SEQ ID NO: 14215 - protein, 70 aa, Synthetic construct
SVNMNMNTLNAMNGYSMSQPMMNSGYHSNHGYMNQTPQYPMQMQMQPMQTPPHGNMMYTAPGHHGYMNTG

SEQ ID NO: 14216 - protein, 70 aa, Synthetic construct
SVNMNMNTLNAMNGYSMSQPMMNSGYHSNHGYMNQTPQYPMQMQMGMMGTQPYAQMMYTAPGHHGYMNTG

SEQ ID NO: 14217 - protein, 70 aa, Synthetic construct
SVNMNMNTLNAMNGYSMSQPMMNSGYHSNHGYMNQTPQYPMQMQMGMMGTQPYAQQPMQTPPHGNMMYTA

SEQ ID NO: 14218 - protein, 70 aa, Synthetic construct
LVYPLAQVIIGCIKLIPTARFYPLRMHCIRALTLLSGSSGAFIPVLPFILEMFQQVDFNRKPGRMSSKPI

SEQ ID NO: 14219 - protein, 70 aa, Synthetic construct
TAGPSEALQPLVYPLAQVIIGCIKLIPTARALTLLSGSSGAFIPVLPFILEMFQQVDFNRKPGRMSSKPI

SEQ ID NO: 14220 - protein, 70 aa, Synthetic construct
TAGPSEALQPLVYPLAQVIIGCIKLIPTARFYPLRMHCIRALTLLLPFILEMFQQVDFNRKPGRMSSKPI

SEQ ID NO: 14221 - protein, 70 aa, Synthetic construct
TAGPSEALQPLVYPLAQVIIGCIKLIPTARFYPLRMHCIRALTLLSGSSGAFIPVVDFNRKPGRMSSKPI

SEQ ID NO: 14222 - protein, 70 aa, Synthetic construct
TAGPSEALQPLVYPLAQVIIGCIKLIPTARFYPLRMHCIRALTLLSGSSGAFIPVLPFILEMFQQSSKPI

SEQ ID NO: 14223 - protein, 70 aa, Synthetic construct
TAGPSEALQPLVYPLAQVIIGCIKLIPTARFYPLRMHCIRALTLLSGSSGAFIPVLPFILEMFQQVDFNR

SEQ ID NO: 14224 - protein, 70 aa, Synthetic construct
SPGNGSLREALIGPLGKLMDPGSLPPLDSEDLFQDLSHFQETWLAEAQVPDSDEQFVPDFHSENLAFHSP

SEQ ID NO: 14225 - protein, 70 aa, Synthetic construct
QQVPYSLREALIGPLGKLMDPGSLPPLDSEDLFQDLSHFQETWLAEAQVPDSDEQFVPDFHSENLAFHSP

SEQ ID NO: 14226 - protein, 70 aa, Synthetic construct
QQVPYTFSSKLIGPLGKLMDPGSLPPLDSEDLFQDLSHFQETWLAEAQVPDSDEQFVPDFHSENLAFHSP

SEQ ID NO: 14227 - protein, 70 aa, Synthetic construct
QQVPYTFSSKSPGNGGKLMDPGSLPPLDSEDLFQDLSHFQETWLAEAQVPDSDEQFVPDFHSENLAFHSP

SEQ ID NO: 14228 - protein, 70 aa, Synthetic construct
QQVPYTFSSKSPGNGSLREAPGSLPPLDSEDLFQDLSHFQETWLAEAQVPDSDEQFVPDFHSENLAFHSP

SEQ ID NO: 14229 - protein, 70 aa, Synthetic construct
QQVPYTFSSKSPGNGSLREALIGPLPLDSEDLFQDLSHFQETWLAEAQVPDSDEQFVPDFHSENLAFHSP

SEQ ID NO: 14230 - protein, 70 aa, Synthetic construct
QQVPYTFSSKSPGNGSLREALIGPLGKLMDDLFQDLSHFQETWLAEAQVPDSDEQFVPDFHSENLAFHSP

SEQ ID NO: 14231 - protein, 70 aa, Synthetic construct
QQVPYTFSSKSPGNGSLREALIGPLGKLMDPGSLPPLDSEDLFQDLSHFQDSDEQFVPDFHSENLAFHSP

SEQ ID NO: 14232 - protein, 70 aa, Synthetic construct
QQVPYTFSSKSPGNGSLREALIGPLGKLMDPGSLPPLDSEDLFQDLSHFQETWLAFVPDFHSENLAFHSP

SEQ ID NO: 14233 - protein, 70 aa, Synthetic construct
QQVPYTFSSKSPGNGSLREALIGPLGKLMDPGSLPPLDSEDLFQDLSHFQETWLAEAQVPHSENLAFHSP

SEQ ID NO: 14234 - protein, 70 aa, Synthetic construct
QQVPYTFSSKSPGNGSLREALIGPLGKLMDPGSLPPLDSEDLFQDLSHFQETWLAEAQVPDSDEQAFHSP

SEQ ID NO: 14235 - protein, 70 aa, Synthetic construct
QQVPYTFSSKSPGNGSLREALIGPLGKLMDPGSLPPLDSEDLFQDLSHFQETWLAEAQVPDSDEQFVPDF

SEQ ID NO: 14236 - protein, 70 aa, Synthetic construct
PLQSVMIPTLPSILGTHANHASHEPFPGHWAYIAGFDDMVEILASLQKPKKISLKCKPKDDLRKDCRLME

SEQ ID NO: 14237 - protein, 70 aa, Synthetic construct
PLQSVMIPTLPSILGTHANHASHEPFPGHWAYIAGFDDMVEILASLQKPKKISLKGSDGKFYIMMCKPKD

SEQ ID NO: 14238 - protein, 70 aa, Synthetic construct
QYCPDPYIQRFVETPAHFSWKESYYRSTMSQSTQTNEFLSPEVFQHIWDFLEQPICSVQPIDLNFVDEPS

SEQ ID NO: 14239 - protein, 70 aa, Synthetic construct
NFETSPYIQRFVETPAHFSWKESYYRSTMSQSTQTNEFLSPEVFQHIWDFLEQPICSVQPIDLNFVDEPS

SEQ ID NO: 14240 - protein, 70 aa, Synthetic construct
NFETSRCATLFVETPAHFSWKESYYRSTMSQSTQTNEFLSPEVFQHIWDFLEQPICSVQPIDLNFVDEPS

SEQ ID NO: 14241 - protein, 70 aa, Synthetic construct
NFETSRCATLQYCPDAHFSWKESYYRSTMSQSTQTNEFLSPEVFQHIWDFLEQPICSVQPIDLNFVDEPS

SEQ ID NO: 14242 - protein, 70 aa, Synthetic construct
NFETSRCATLQYCPDPYIQRKESYYRSTMSQSTQTNEFLSPEVFQHIWDFLEQPICSVQPIDLNFVDEPS

SEQ ID NO: 14243 - protein, 70 aa, Synthetic construct
NFETSRCATLQYCPDPYIQRFVETPRSTMSQSTQTNEFLSPEVFQHIWDFLEQPICSVQPIDLNFVDEPS

SEQ ID NO: 14244 - protein, 70 aa, Synthetic construct
NFETSRCATLQYCPDPYIQRFVETPAHFSWQSTQTNEFLSPEVFQHIWDFLEQPICSVQPIDLNFVDEPS

SEQ ID NO: 14245 - protein, 70 aa, Synthetic construct
NFETSRCATLQYCPDPYIQRFVETPAHFSWKESYYNEFLSPEVFQHIWDFLEQPICSVQPIDLNFVDEPS

SEQ ID NO: 14246 - protein, 70 aa, Synthetic construct
NFETSRCATLQYCPDPYIQRFVETPAHFSWKESYYRSTMSPEVFQHIWDFLEQPICSVQPIDLNFVDEPS

SEQ ID NO: 14247 - protein, 70 aa, Synthetic construct
NFETSRCATLQYCPDPYIQRFVETPAHFSWKESYYRSTMSQSTQTNEFLSPEVFQHIWDFIDLNFVDEPS

SEQ ID NO: 14248 - protein, 70 aa, Synthetic construct
NFETSRCATLQYCPDPYIQRFVETPAHFSWKESYYRSTMSQSTQTNEFLSPEVFQHIWDFLEQPIVDEPS

SEQ ID NO: 14249 - protein, 70 aa, Synthetic construct
NFETSRCATLQYCPDPYIQRFVETPAHFSWKESYYRSTMSQSTQTNEFLSPEVFQHIWDFLEQPICSVQP

SEQ ID NO: 14250 - protein, 70 aa, Synthetic construct
PEVFQHIWDFIDLNFVDEPSEDGATNKIEISMDCIRMQDSDLSDPMWPQYTNLGLLNSMDQQIQNGSSST

SEQ ID NO: 14251 - protein, 70 aa, Synthetic construct
PEVFQHIWDFLEQPIVDEPSEDGATNKIEISMDCIRMQDSDLSDPMWPQYTNLGLLNSMDQQIQNGSSST

SEQ ID NO: 14252 - protein, 70 aa, Synthetic construct
PEVFQHIWDFLEQPICSVQPEDGATNKIEISMDCIRMQDSDLSDPMWPQYTNLGLLNSMDQQIQNGSSST

SEQ ID NO: 14253 - protein, 70 aa, Synthetic construct
PEVFQHIWDFLEQPICSVQPIDLNFNKIEISMDCIRMQDSDLSDPMWPQYTNLGLLNSMDQQIQNGSSST

SEQ ID NO: 14254 - protein, 70 aa, Synthetic construct
PEVFQHIWDFLEQPICSVQPIDLNFVDEPSSMDCIRMQDSDLSDPMWPQYTNLGLLNSMDQQIQNGSSST

SEQ ID NO: 14255 - protein, 70 aa, Synthetic construct
PEVFQHIWDFLEQPICSVQPIDLNFVDEPSEDGATRMQDSDLSDPMWPQYTNLGLLNSMDQQIQNGSSST

SEQ ID NO: 14256 - protein, 70 aa, Synthetic construct
PEVFQHIWDFLEQPICSVQPIDLNFVDEPSEDGATNKIEIDLSDPMWPQYTNLGLLNSMDQQIQNGSSST

SEQ ID NO: 14257 - protein, 70 aa, Synthetic construct
PEVFQHIWDFLEQPICSVQPIDLNFVDEPSEDGATNKIEISMDCIMWPQYTNLGLLNSMDQQIQNGSSST

SEQ ID NO: 14258 - protein, 70 aa, Synthetic construct
PEVFQHIWDFLEQPICSVQPIDLNFVDEPSEDGATNKIEISMDCIRMQDSTNLGLLNSMDQQIQNGSSST

SEQ ID NO: 14259 - protein, 70 aa, Synthetic construct
PEVFQHIWDFLEQPICSVQPIDLNFVDEPSEDGATNKIEISMDCIRMQDSDLSDPLNSMDQQIQNGSSST

SEQ ID NO: 14260 - protein, 70 aa, Synthetic construct
PEVFQHIWDFLEQPICSVQPIDLNFVDEPSEDGATNKIEISMDCIRMQDSDLSDPMWPQYQQIQNGSSST

SEQ ID NO: 14261 - protein, 70 aa, Synthetic construct
PEVFQHIWDFLEQPICSVQPIDLNFVDEPSEDGATNKIEISMDCIRMQDSDLSDPMWPQYTNLGLGSSST

SEQ ID NO: 14262 - protein, 70 aa, Synthetic construct
PEVFQHIWDFLEQPICSVQPIDLNFVDEPSEDGATNKIEISMDCIRMQDSDLSDPMWPQYTNLGLLNSMD

SEQ ID NO: 14263 - protein, 70 aa, Synthetic construct
RKDLCSLKVSLQLRGPADSGGKEIFSLLPHMADMSTYMFKGIISFAKVISYFRDLPIEDQISLLKGAAFE

SEQ ID NO: 14264 - protein, 70 aa, Synthetic construct
RKDLCSLKVSLQLRGEDGSVWNYKPPADSGGKEIFTYMFKGIISFAKVISYFRDLPIEDQISLLKGAAFE

SEQ ID NO: 14265 - protein, 70 aa, Synthetic construct
RKDLCSLKVSLQLRGEDGSVWNYKPPADSGGKEIFSLLPHGIISFAKVISYFRDLPIEDQISLLKGAAFE

SEQ ID NO: 14266 - protein, 70 aa, Synthetic construct
RKDLCSLKVSLQLRGEDGSVWNYKPPADSGGKEIFSLLPHMADMSTYMFKGIISFPIEDQISLLKGAAFE

SEQ ID NO: 14267 - protein, 70 aa, Synthetic construct
RKDLCSLKVSLQLRGEDGSVWNYKPPADSGGKEIFSLLPHMADMSTYMFKGIISFAKVISYFRDLPIEDQ

SEQ ID NO: 14268 - protein, 70 aa, Synthetic construct
IHQQRTQQVEQDMFAHPYQYELNHFTPADAVLQKPQPQLYRPIEETPCHFISSLDELVELNEKLLNCQEF

SEQ ID NO: 14269 - protein, 70 aa, Synthetic construct
LDVPPTQQVEQDMFAHPYQYELNHFTPADAVLQKPQPQLYRPIEETPCHFISSLDELVELNEKLLNCQEF

SEQ ID NO: 14270 - protein, 70 aa, Synthetic construct
LDVPPALADFQDMFAHPYQYELNHFTPADAVLQKPQPQLYRPIEETPCHFISSLDELVELNEKLLNCQEF

SEQ ID NO: 14271 - protein, 70 aa, Synthetic construct
LDVPPALADFIHQQRHPYQYELNHFTPADAVLQKPQPQLYRPIEETPCHFISSLDELVELNEKLLNCQEF

SEQ ID NO: 14272 - protein, 70 aa, Synthetic construct
LDVPPALADFIHQQRTQQVEQDMFATPADAVLQKPQPQLYRPIEETPCHFISSLDELVELNEKLLNCQEF

SEQ ID NO: 14273 - protein, 70 aa, Synthetic construct
LDVPPALADFIHQQRTQQVEQDMFAHPYQYVLQKPQPQLYRPIEETPCHFISSLDELVELNEKLLNCQEF

SEQ ID NO: 14274 - protein, 70 aa, Synthetic construct
LDVPPALADFIHQQRTQQVEQDMFAHPYQYELNHFQPQLYRPIEETPCHFISSLDELVELNEKLLNCQEF

SEQ ID NO: 14275 - protein, 70 aa, Synthetic construct
LDVPPALADFIHQQRTQQVEQDMFAHPYQYELNHFTPADARPIEETPCHFISSLDELVELNEKLLNCQEF

SEQ ID NO: 14276 - protein, 70 aa, Synthetic construct
LDVPPALADFIHQQRTQQVEQDMFAHPYQYELNHFTPADAVLQKPTPCHFISSLDELVELNEKLLNCQEF

SEQ ID NO: 14277 - protein, 70 aa, Synthetic construct
LDVPPALADFIHQQRTQQVEQDMFAHPYQYELNHFTPADAVLQKPQPQLYISSLDELVELNEKLLNCQEF

SEQ ID NO: 14278 - protein, 70 aa, Synthetic construct
LDVPPALADFIHQQRTQQVEQDMFAHPYQYELNHFTPADAVLQKPQPQLYRPIEETPCHFISSLDELVEL

SEQ ID NO: 14279 - protein, 70 aa, Synthetic construct
KGETDIGRKNTRVRLVFRVHIPQPSGKVLSLQIASIPVECSQRSAQELPHIEKYSINSCSVNGGHEMVVT

SEQ ID NO: 14280 - protein, 70 aa, Synthetic construct
PRENRGSFHKSLDQIFETLETKNPSCMEELFSDVDSPYYDLDTVLTGMMGGARPGPCEGLEGLAPATPGP

SEQ ID NO: 14281 - protein, 70 aa, Synthetic construct
LQSSAGSFHKSLDQIFETLETKNPSCMEELFSDVDSPYYDLDTVLTGMMGGARPGPCEGLEGLAPATPGP

SEQ ID NO: 14282 - protein, 70 aa, Synthetic construct
LQSSAWEMDGSLDQIFETLETKNPSCMEELFSDVDSPYYDLDTVLTGMMGGARPGPCEGLEGLAPATPGP

SEQ ID NO: 14283 - protein, 70 aa, Synthetic construct
LQSSAWEMDGPRENRFETLETKNPSCMEELFSDVDSPYYDLDTVLTGMMGGARPGPCEGLEGLAPATPGP

SEQ ID NO: 14284 - protein, 70 aa, Synthetic construct
LQSSAWEMDGPRENRGSFHKTKNPSCMEELFSDVDSPYYDLDTVLTGMMGGARPGPCEGLEGLAPATPGP

SEQ ID NO: 14285 - protein, 70 aa, Synthetic construct
LQSSAWEMDGPRENRGSFHKSLDQICMEELFSDVDSPYYDLDTVLTGMMGGARPGPCEGLEGLAPATPGP

SEQ ID NO: 14286 - protein, 70 aa, Synthetic construct
LQSSAWEMDGPRENRGSFHKSLDQIFETLEFSDVDSPYYDLDTVLTGMMGGARPGPCEGLEGLAPATPGP

SEQ ID NO: 14287 - protein, 70 aa, Synthetic construct
LQSSAWEMDGPRENRGSFHKSLDQIFETLETKNPSCMEELFSDVDSPYYDGARPGPCEGLEGLAPATPGP

SEQ ID NO: 14288 - protein, 70 aa, Synthetic construct
LQSSAWEMDGPRENRGSFHKSLDQIFETLETKNPSCMEELFSDVDSPYYDLDTVLPCEGLEGLAPATPGP

SEQ ID NO: 14289 - protein, 70 aa, Synthetic construct
LQSSAWEMDGPRENRGSFHKSLDQIFETLETKNPSCMEELFSDVDSPYYDLDTVLTGMMGEGLAPATPGP

SEQ ID NO: 14290 - protein, 70 aa, Synthetic construct
LQSSAWEMDGPRENRGSFHKSLDQIFETLETKNPSCMEELFSDVDSPYYDLDTVLTGMMGGARPGATPGP

SEQ ID NO: 14291 - protein, 70 aa, Synthetic construct
LQSSAWEMDGPRENRGSFHKSLDQIFETLETKNPSCMEELFSDVDSPYYDLDTVLTGMMGGARPGPCEGL

SEQ ID NO: 14292 - protein, 70 aa, Synthetic construct
IRTLADSVCRYDLNDMDAAWLELTNEEFKEMGMPELDEYTMERVLEEFEQRCYDNMNHAIETEEGLGIEY

SEQ ID NO: 14293 - protein, 70 aa, Synthetic construct
SEPPEDSVCRYDLNDMDAAWLELTNEEFKEMGMPELDEYTMERVLEEFEQRCYDNMNHAIETEEGLGIEY

SEQ ID NO: 14294 - protein, 70 aa, Synthetic construct
SEPPELGYVDYDLNDMDAAWLELTNEEFKEMGMPELDEYTMERVLEEFEQRCYDNMNHAIETEEGLGIEY

SEQ ID NO: 14295 - protein, 70 aa, Synthetic construct
SEPPELGYVDIRTLAMDAAWLELTNEEFKEMGMPELDEYTMERVLEEFEQRCYDNMNHAIETEEGLGIEY

SEQ ID NO: 14296 - protein, 70 aa, Synthetic construct
SEPPELGYVDIRTLADSVCRLELTNEEFKEMGMPELDEYTMERVLEEFEQRCYDNMNHAIETEEGLGIEY

SEQ ID NO: 14297 - protein, 70 aa, Synthetic construct
SEPPELGYVDIRTLADSVCRYDLNDEEFKEMGMPELDEYTMERVLEEFEQRCYDNMNHAIETEEGLGIEY

SEQ ID NO: 14298 - protein, 70 aa, Synthetic construct
SEPPELGYVDIRTLADSVCRYDLNDMDAAWMGMPELDEYTMERVLEEFEQRCYDNMNHAIETEEGLGIEY

SEQ ID NO: 14299 - protein, 70 aa, Synthetic construct
SEPPELGYVDIRTLADSVCRYDLNDMDAAWLELTNEEFKEMERVLEEFEQRCYDNMNHAIETEEGLGIEY

SEQ ID NO: 14300 - protein, 70 aa, Synthetic construct
SEPPELGYVDIRTLADSVCRYDLNDMDAAWLELTNEEFKEMGMPEEEFEQRCYDNMNHAIETEEGLGIEY

SEQ ID NO: 14301 - protein, 70 aa, Synthetic construct
SEPPELGYVDIRTLADSVCRYDLNDMDAAWLELTNEEFKEMGMPELDEYTRCYDNMNHAIETEEGLGIEY

SEQ ID NO: 14302 - protein, 70 aa, Synthetic construct
SEPPELGYVDIRTLADSVCRYDLNDMDAAWLELTNEEFKEMGMPELDEYTMERVLMNHAIETEEGLGIEY

SEQ ID NO: 14303 - protein, 70 aa, Synthetic construct
SEPPELGYVDIRTLADSVCRYDLNDMDAAWLELTNEEFKEMGMPELDEYTMERVLEEFEQETEEGLGIEY

SEQ ID NO: 14304 - protein, 70 aa, Synthetic construct
SEPPELGYVDIRTLADSVCRYDLNDMDAAWLELTNEEFKEMGMPELDEYTMERVLEEFEQRCYDNLGIEY

SEQ ID NO: 14305 - protein, 70 aa, Synthetic construct
SEPPELGYVDIRTLADSVCRYDLNDMDAAWLELTNEEFKEMGMPELDEYTMERVLEEFEQRCYDNMNHAI

SEQ ID NO: 14306 - protein, 70 aa, Synthetic construct
EVSGPSSSQMSMKTRRLSSASTGKPPLSVEDDFEKLIWEISGGKLEAEIDLDPGKDEDDLLLELSEMIDS

SEQ ID NO: 14307 - protein, 70 aa, Synthetic construct
TQSSSSSSQMSMKTRRLSSASTGKPPLSVEDDFEKLIWEISGGKLEAEIDLDPGKDEDDLLLELSEMIDS

SEQ ID NO: 14308 - protein, 70 aa, Synthetic construct
TQSSSDSSPPSMKTRRLSSASTGKPPLSVEDDFEKLIWEISGGKLEAEIDLDPGKDEDDLLLELSEMIDS

SEQ ID NO: 14309 - protein, 70 aa, Synthetic construct
TQSSSDSSPPEVSGPRLSSASTGKPPLSVEDDFEKLIWEISGGKLEAEIDLDPGKDEDDLLLELSEMIDS

SEQ ID NO: 14310 - protein, 70 aa, Synthetic construct
TQSSSDSSPPEVSGPSSSQMSTGKPPLSVEDDFEKLIWEISGGKLEAEIDLDPGKDEDDLLLELSEMIDS

SEQ ID NO: 14311 - protein, 70 aa, Synthetic construct
TQSSSDSSPPEVSGPSSSQMSMKTRPLSVEDDFEKLIWEISGGKLEAEIDLDPGKDEDDLLLELSEMIDS

SEQ ID NO: 14312 - protein, 70 aa, Synthetic construct
TQSSSDSSPPEVSGPSSSQMSMKTRRLSSADDFEKLIWEISGGKLEAEIDLDPGKDEDDLLLELSEMIDS

SEQ ID NO: 14313 - protein, 70 aa, Synthetic construct
TQSSSDSSPPEVSGPSSSQMSMKTRRLSSASTGKPPLSVEDDFEKLIWEILDPGKDEDDLLLELSEMIDS

SEQ ID NO: 14314 - protein, 70 aa, Synthetic construct
TQSSSDSSPPEVSGPSSSQMSMKTRRLSSASTGKPPLSVEDDFEKLIWEISGGKLDEDDLLLELSEMIDS

SEQ ID NO: 14315 - protein, 70 aa, Synthetic construct
TQSSSDSSPPEVSGPSSSQMSMKTRRLSSASTGKPPLSVEDDFEKLIWEISGGKLEAEIDLLELSEMIDS

SEQ ID NO: 14316 - protein, 70 aa, Synthetic construct
IVDKYLLKVNDLCWHVRCLSCSVCRIKDKDIFCKLDYFRRYGTRCSRCGRHIHSTDWVRRAKGNVYHLAC

SEQ ID NO: 14317 - protein, 70 aa, Synthetic construct
IVDKYLLKVNDLCWHVRCLSCSVCRTSLGRIFCKLDYFRRYGTRCSRCGRHIHSTDWVRRAKGNVYHLAC

SEQ ID NO: 14318 - protein, 70 aa, Synthetic construct
IVDKYLLKVNDLCWHVRCLSCSVCRTSLGRHTSCYIKDKDIFCKLSRCGRHIHSTDWVRRAKGNVYHLAC

SEQ ID NO: 14319 - protein, 70 aa, Synthetic construct
IVDKYLLKVNDLCWHVRCLSCSVCRTSLGRHTSCYIKDKDIFCKLDYFRRHIHSTDWVRRAKGNVYHLAC

SEQ ID NO: 14320 - protein, 70 aa, Synthetic construct
IVDKYLLKVNDLCWHVRCLSCSVCRTSLGRHTSCYIKDKDIFCKLDYFRRYGTRCSRCGRAKGNVYHLAC

SEQ ID NO: 14321 - protein, 70 aa, Synthetic construct
IVDKYLLKVNDLCWHVRCLSCSVCRTSLGRHTSCYIKDKDIFCKLDYFRRYGTRCSRCGRHIHSTDWVRR

SEQ ID NO: 14322 - protein, 70 aa, Synthetic construct
GDMKTPDFDDLLAAFIHSGPEENEGPGGPGKPEPGVGSESEDTAAASAGDGPGVPAQASDHGLPPPDISV

SEQ ID NO: 14323 - protein, 70 aa, Synthetic construct
GDMKTPDFDDLLAAFDIPDIEENEGPGGPGKPEPGVGSESEDTAAASAGDGPGVPAQASDHGLPPPDISV

SEQ ID NO: 14324 - protein, 70 aa, Synthetic construct
GDMKTPDFDDLLAAFDIPDIDANEAPGGPGKPEPGVGSESEDTAAASAGDGPGVPAQASDHGLPPPDISV

SEQ ID NO: 14325 - protein, 70 aa, Synthetic construct
GDMKTPDFDDLLAAFDIPDIDANEAIHSGPKPEPGVGSESEDTAAASAGDGPGVPAQASDHGLPPPDISV

SEQ ID NO: 14326 - protein, 70 aa, Synthetic construct
GDMKTPDFDDLLAAFDIPDIDANEAIHSGPEENEGVGSESEDTAAASAGDGPGVPAQASDHGLPPPDISV

SEQ ID NO: 14327 - protein, 70 aa, Synthetic construct
GDMKTPDFDDLLAAFDIPDIDANEAIHSGPEENEGPGGPGEDTAAASAGDGPGVPAQASDHGLPPPDISV

SEQ ID NO: 14328 - protein, 70 aa, Synthetic construct
GDMKTPDFDDLLAAFDIPDIDANEAIHSGPEENEGPGGPGKPEPGASAGDGPGVPAQASDHGLPPPDISV

SEQ ID NO: 14329 - protein, 70 aa, Synthetic construct
GDMKTPDFDDLLAAFDIPDIDANEAIHSGPEENEGPGGPGKPEPGVGSESGPGVPAQASDHGLPPPDISV

SEQ ID NO: 14330 - protein, 70 aa, Synthetic construct
GDMKTPDFDDLLAAFDIPDIDANEAIHSGPEENEGPGGPGKPEPGVGSESEDTAAAQASDHGLPPPDISV

SEQ ID NO: 14331 - protein, 70 aa, Synthetic construct
GDMKTPDFDDLLAAFDIPDIDANEAIHSGPEENEGPGGPGKPEPGVGSESEDTAAASAGDHGLPPPDISV

SEQ ID NO: 14332 - protein, 70 aa, Synthetic construct
GDMKTPDFDDLLAAFDIPDIDANEAIHSGPEENEGPGGPGKPEPGVGSESEDTAAASAGDGPGVPPDISV

SEQ ID NO: 14333 - protein, 70 aa, Synthetic construct
GDMKTPDFDDLLAAFDIPDIDANEAIHSGPEENEGPGGPGKPEPGVGSESEDTAAASAGDGPGVPAQASD

SEQ ID NO: 14334 - protein, 70 aa, Synthetic construct
YSQALIQYVCGLGPRKGTHLLKILKQLVTMCHMGPKVFMNCAGFLKIDTASLGDSTDSYIEVLDGSRVHP

SEQ ID NO: 14335 - protein, 70 aa, Synthetic construct
YSQALIQYVCGLGPRKGTHLLKILKQNNTRLESRTKVFMNCAGFLKIDTASLGDSTDSYIEVLDGSRVHP

SEQ ID NO: 14336 - protein, 70 aa, Synthetic construct
YSQALIQYVCGLGPRKGTHLLKILKQNNTRLESRTQLVTMCHMGPKVFMNCAGFLTDSYIEVLDGSRVHP

SEQ ID NO: 14337 - protein, 70 aa, Synthetic construct
PSDFISLLSADLDLEVYDLLPKELQLPPSRETSVASMSQTSGGEAGSPPPAVVAADASSAPSSSSMGGAC

SEQ ID NO: 14338 - protein, 70 aa, Synthetic construct
PSDFISLLSADLDLESPKSLYSRESVYDLLPKELQSMSQTSGGEAGSPPPAVVAADASSAPSSSSMGGAC

SEQ ID NO: 14339 - protein, 70 aa, Synthetic construct
PSDFISLLSADLDLESPKSLYSRESVYDLLPKELQLPPSRSGGEAGSPPPAVVAADASSAPSSSSMGGAC

SEQ ID NO: 14340 - protein, 70 aa, Synthetic construct
PSDFISLLSADLDLESPKSLYSRESVYDLLPKELQLPPSRETSVAGSPPPAVVAADASSAPSSSSMGGAC

SEQ ID NO: 14341 - protein, 70 aa, Synthetic construct
PSDFISLLSADLDLESPKSLYSRESVYDLLPKELQLPPSRETSVASMSQTAVVAADASSAPSSSSMGGAC

SEQ ID NO: 14342 - protein, 70 aa, Synthetic construct
PSDFISLLSADLDLESPKSLYSRESVYDLLPKELQLPPSRETSVASMSQTSGGEADASSAPSSSSMGGAC

SEQ ID NO: 14343 - protein, 70 aa, Synthetic construct
PSDFISLLSADLDLESPKSLYSRESVYDLLPKELQLPPSRETSVASMSQTSGGEAGSPPPPSSSSMGGAC

SEQ ID NO: 14344 - protein, 70 aa, Synthetic construct
PSDFISLLSADLDLESPKSLYSRESVYDLLPKELQLPPSRETSVASMSQTSGGEAGSPPPAVVAAMGGAC

SEQ ID NO: 14345 - protein, 70 aa, Synthetic construct
PSDFISLLSADLDLESPKSLYSRESVYDLLPKELQLPPSRETSVASMSQTSGGEAGSPPPAVVAADASSA

SEQ ID NO: 14346 - protein, 70 aa, Synthetic construct
FQTTVPYMVERISKNYALQIVANSFLANPTTSALFATILVEYLLDLSNLYLKLFKLVFGSVSLFAAENEQ

SEQ ID NO: 14347 - protein, 70 aa, Synthetic construct
FQTTVPYMVERISKNYALQIVANSFLANPTTSALFATILVEYLLDRLPEMGSNVELSNLYVSLFAAENEQ

SEQ ID NO: 14348 - protein, 70 aa, Synthetic construct
FQTTVPYMVERISKNYALQIVANSFLANPTTSALFATILVEYLLDRLPEMGSNVELSNLYLKLFKLVFGS

SEQ ID NO: 14349 - protein, 70 aa, Synthetic construct
VEIDIELAPGDQTSTPKTKELSEKDIGNQLHMLTNRHDKFLDTLREVKTGALLSAFVQLCHISTTLAEKT

SEQ ID NO: 14350 - protein, 70 aa, Synthetic construct
RENSESKEEDDQTSTPKTKELSEKDIGNQLHMLTNRHDKFLDTLREVKTGALLSAFVQLCHISTTLAEKT

SEQ ID NO: 14351 - protein, 70 aa, Synthetic construct
RENSESKEEDVEIDIPKTKELSEKDIGNQLHMLTNRHDKFLDTLREVKTGALLSAFVQLCHISTTLAEKT

SEQ ID NO: 14352 - protein, 70 aa, Synthetic construct
RENSESKEEDVEIDIELAPGDQTSTPKTKEHMLTNRHDKFLDTLREVKTGALLSAFVQLCHISTTLAEKT

SEQ ID NO: 14353 - protein, 70 aa, Synthetic construct
RENSESKEEDVEIDIELAPGDQTSTPKTKELSEKDIGNQLHMLTNRHDKFALLSAFVQLCHISTTLAEKT

SEQ ID NO: 14354 - protein, 70 aa, Synthetic construct
AELYSLLQEEDMWAGTATAIAYEQHGFFEQAQESYEKAMDKAKKEHERSNASPAIFPEYQLWEDHWIRCS

SEQ ID NO: 14355 - protein, 70 aa, Synthetic construct
AELYSLLQEEDMWAGLWQKRAYEQHGFFEQAQESYEKAMDKAKKEHERSNASPAIFPEYQLWEDHWIRCS

SEQ ID NO: 14356 - protein, 70 aa, Synthetic construct
AELYSLLQEEDMWAGLWQKRCKYSEGFFEQAQESYEKAMDKAKKEHERSNASPAIFPEYQLWEDHWIRCS

SEQ ID NO: 14357 - protein, 70 aa, Synthetic construct
AELYSLLQEEDMWAGLWQKRCKYSETATAIAQESYEKAMDKAKKEHERSNASPAIFPEYQLWEDHWIRCS

SEQ ID NO: 14358 - protein, 70 aa, Synthetic construct
AELYSLLQEEDMWAGLWQKRCKYSETATAIAYEQHEKAMDKAKKEHERSNASPAIFPEYQLWEDHWIRCS

SEQ ID NO: 14359 - protein, 70 aa, Synthetic construct
AELYSLLQEEDMWAGLWQKRCKYSETATAIAYEQHGFFEQKAKKEHERSNASPAIFPEYQLWEDHWIRCS

SEQ ID NO: 14360 - protein, 70 aa, Synthetic construct
AELYSLLQEEDMWAGLWQKRCKYSETATAIAYEQHGFFEQAQESYHERSNASPAIFPEYQLWEDHWIRCS

SEQ ID NO: 14361 - protein, 70 aa, Synthetic construct
AELYSLLQEEDMWAGLWQKRCKYSETATAIAYEQHGFFEQAQESYEKAMDASPAIFPEYQLWEDHWIRCS

SEQ ID NO: 14362 - protein, 70 aa, Synthetic construct
AELYSLLQEEDMWAGLWQKRCKYSETATAIAYEQHGFFEQAQESYEKAMDKAKKEFPEYQLWEDHWIRCS

SEQ ID NO: 14363 - protein, 70 aa, Synthetic construct
SKARDIPCPPKTTAGKKCSALVSHCLNSLSEFMDNMSFLDALLTDVREQNKYGRNDFSWTNGKVTSGLCD

SEQ ID NO: 14364 - protein, 70 aa, Synthetic construct
SKARDKGNNPETKKSIPCPPKTTAGKKCSALVSHCLNSLSEFMDNMSFLDKYGRNDFSWTNGKVTSGLCD

SEQ ID NO: 14365 - protein, 70 aa, Synthetic construct
SKARDKGNNPETKKSIPCPPKTTAGKKCSALVSHCLNSLSEFMDNMSFLDALLTDDFSWTNGKVTSGLCD

SEQ ID NO: 14366 - protein, 70 aa, Synthetic construct
SKARDKGNNPETKKSIPCPPKTTAGKKCSALVSHCLNSLSEFMDNMSFLDALLTDVREQNKYGRNSGLCD

SEQ ID NO: 14367 - protein, 70 aa, Synthetic construct
EFMDNMSFLDALLTDDFSWTNGKVTSGLCDEFSLESNDGWTSQSSGELKAAAEALSFTKCSSAISKALET

SEQ ID NO: 14368 - protein, 70 aa, Synthetic construct
EFMDNMSFLDALLTDVREQNNGKVTSGLCDEFSLESNDGWTSQSSGELKAAAEALSFTKCSSAISKALET

SEQ ID NO: 14369 - protein, 70 aa, Synthetic construct
EFMDNMSFLDALLTDVREQNKYGRNSGLCDEFSLESNDGWTSQSSGELKAAAEALSFTKCSSAISKALET

SEQ ID NO: 14370 - protein, 70 aa, Synthetic construct
EFMDNMSFLDALLTDVREQNKYGRNDFSWTEFSLESNDGWTSQSSGELKAAAEALSFTKCSSAISKALET

SEQ ID NO: 14371 - protein, 70 aa, Synthetic construct
EFMDNMSFLDALLTDVREQNKYGRNDFSWTNGKVTSGLCDEFSLEGELKAAAEALSFTKCSSAISKALET

SEQ ID NO: 14372 - protein, 70 aa, Synthetic construct
EFMDNMSFLDALLTDVREQNKYGRNDFSWTNGKVTSGLCDEFSLESNDGWAAEALSFTKCSSAISKALET

SEQ ID NO: 14373 - protein, 70 aa, Synthetic construct
EFMDNMSFLDALLTDVREQNKYGRNDFSWTNGKVTSGLCDEFSLESNDGWTSQSSSFTKCSSAISKALET

SEQ ID NO: 14374 - protein, 70 aa, Synthetic construct
EFMDNMSFLDALLTDVREQNKYGRNDFSWTNGKVTSGLCDEFSLESNDGWTSQSSGELKASSAISKALET

SEQ ID NO: 14375 - protein, 70 aa, Synthetic construct
EFMDNMSFLDALLTDVREQNKYGRNDFSWTNGKVTSGLCDEFSLESNDGWTSQSSGELKAAAEALKALET

SEQ ID NO: 14376 - protein, 70 aa, Synthetic construct
EFMDNMSFLDALLTDVREQNKYGRNDFSWTNGKVTSGLCDEFSLESNDGWTSQSSGELKAAAEALSFTKC

SEQ ID NO: 14377 - protein, 70 aa, Synthetic construct
CIVYEDGAVIGKDLKGIQLSHVTWSADSKVLLFGMANGEIHIYDNQGNFMIKMKLSCLVNVTGAISIAGI

SEQ ID NO: 14378 - protein, 70 aa, Synthetic construct
CIVYEDGAVIVGSVDGNRIWGKDLKADSKVLLFGMANGEIHIYDNQGNFMIKMKLSCLVNVTGAISIAGI

SEQ ID NO: 14379 - protein, 70 aa, Synthetic construct
CIVYEDGAVIVGSVDGNRIWGKDLKGIQLSLLFGMANGEIHIYDNQGNFMIKMKLSCLVNVTGAISIAGI

SEQ ID NO: 14380 - protein, 70 aa, Synthetic construct
CIVYEDGAVIVGSVDGNRIWGKDLKGIQLSHVTWSADSKVLLFGMANGEIIKMKLSCLVNVTGAISIAGI

SEQ ID NO: 14381 - protein, 70 aa, Synthetic construct
CIVYEDGAVIVGSVDGNRIWGKDLKGIQLSHVTWSADSKVLLFGMANGEIHIYDNSCLVNVTGAISIAGI

SEQ ID NO: 14382 - protein, 70 aa, Synthetic construct
CIVYEDGAVIVGSVDGNRIWGKDLKGIQLSHVTWSADSKVLLFGMANGEIHIYDNQGNFMVTGAISIAGI

SEQ ID NO: 14383 - protein, 70 aa, Synthetic construct
DPTRFFTDNLLSPEDWGLQNSTLYSGLDEVAEEQTQLFRCPEQDVPFDGSSLDVGMDVSPSEPPWELLPI

SEQ ID NO: 14384 - protein, 70 aa, Synthetic construct
AELMLFTDNLLSPEDWGLQNSTLYSGLDEVAEEQTQLFRCPEQDVPFDGSSLDVGMDVSPSEPPWELLPI

SEQ ID NO: 14385 - protein, 70 aa, Synthetic construct
AELMLLSEIALSPEDWGLQNSTLYSGLDEVAEEQTQLFRCPEQDVPFDGSSLDVGMDVSPSEPPWELLPI

SEQ ID NO: 14386 - protein, 70 aa, Synthetic construct
AELMLLSEIADPTRFWGLQNSTLYSGLDEVAEEQTQLFRCPEQDVPFDGSSLDVGMDVSPSEPPWELLPI

SEQ ID NO: 14387 - protein, 70 aa, Synthetic construct
AELMLLSEIADPTRFFTDNLSTLYSGLDEVAEEQTQLFRCPEQDVPFDGSSLDVGMDVSPSEPPWELLPI

SEQ ID NO: 14388 - protein, 70 aa, Synthetic construct
AELMLLSEIADPTRFFTDNLLSPEDGLDEVAEEQTQLFRCPEQDVPFDGSSLDVGMDVSPSEPPWELLPI

SEQ ID NO: 14389 - protein, 70 aa, Synthetic construct
AELMLLSEIADPTRFFTDNLLSPEDWGLQNAEEQTQLFRCPEQDVPFDGSSLDVGMDVSPSEPPWELLPI

SEQ ID NO: 14390 - protein, 70 aa, Synthetic construct
AELMLLSEIADPTRFFTDNLLSPEDWGLQNSTLYSQLFRCPEQDVPFDGSSLDVGMDVSPSEPPWELLPI

SEQ ID NO: 14391 - protein, 70 aa, Synthetic construct
AELMLLSEIADPTRFFTDNLLSPEDWGLQNSTLYSGLDEVPEQDVPFDGSSLDVGMDVSPSEPPWELLPI

SEQ ID NO: 14392 - protein, 70 aa, Synthetic construct
AELMLLSEIADPTRFFTDNLLSPEDWGLQNSTLYSGLDEVAEEQTPFDGSSLDVGMDVSPSEPPWELLPI

SEQ ID NO: 14393 - protein, 70 aa, Synthetic construct
AELMLLSEIADPTRFFTDNLLSPEDWGLQNSTLYSGLDEVAEEQTQLFRCSLDVGMDVSPSEPPWELLPI

SEQ ID NO: 14394 - protein, 70 aa, Synthetic construct
AELMLLSEIADPTRFFTDNLLSPEDWGLQNSTLYSGLDEVAEEQTQLFRCPEQDVMDVSPSEPPWELLPI

SEQ ID NO: 14395 - protein, 70 aa, Synthetic construct
AELMLLSEIADPTRFFTDNLLSPEDWGLQNSTLYSGLDEVAEEQTQLFRCPEQDVPFDGSSEPPWELLPI

SEQ ID NO: 14396 - protein, 70 aa, Synthetic construct
AELMLLSEIADPTRFFTDNLLSPEDWGLQNSTLYSGLDEVAEEQTQLFRCPEQDVPFDGSSLDVGELLPI

SEQ ID NO: 14397 - protein, 70 aa, Synthetic construct
AELMLLSEIADPTRFFTDNLLSPEDWGLQNSTLYSGLDEVAEEQTQLFRCPEQDVPFDGSSLDVGMDVSP

SEQ ID NO: 14398 - protein, 70 aa, Synthetic construct
PLFARPGMYPDPHSPFAVSPIPGRGGVLNVPISPALSLTPTIFSYSPSPGLSPFTSSSCFSFNPEEMKHY

SEQ ID NO: 14399 - protein, 70 aa, Synthetic construct
HQKRKPGMYPDPHSPFAVSPIPGRGGVLNVPISPALSLTPTIFSYSPSPGLSPFTSSSCFSFNPEEMKHY

SEQ ID NO: 14400 - protein, 70 aa, Synthetic construct
HQKRKPDIMLDPHSPFAVSPIPGRGGVLNVPISPALSLTPTIFSYSPSPGLSPFTSSSCFSFNPEEMKHY

SEQ ID NO: 14401 - protein, 70 aa, Synthetic construct
HQKRKPDIMLPLFARPGMYPIPGRGGVLNVPISPALSLTPTIFSYSPSPGLSPFTSSSCFSFNPEEMKHY

SEQ ID NO: 14402 - protein, 70 aa, Synthetic construct
HQKRKPDIMLPLFARPGMYPDPHSPGVLNVPISPALSLTPTIFSYSPSPGLSPFTSSSCFSFNPEEMKHY

SEQ ID NO: 14403 - protein, 70 aa, Synthetic construct
HQKRKPDIMLPLFARPGMYPDPHSPFAVSPPISPALSLTPTIFSYSPSPGLSPFTSSSCFSFNPEEMKHY

SEQ ID NO: 14404 - protein, 70 aa, Synthetic construct
HQKRKPDIMLPLFARPGMYPDPHSPFAVSPIPGRGLSLTPTIFSYSPSPGLSPFTSSSCFSFNPEEMKHY

SEQ ID NO: 14405 - protein, 70 aa, Synthetic construct
LLITDLLPDNRKLRIFSQRPFDKLEQLSSGNKDSRDRRLILWYFEHQLKHLVAEFVQVLETLSHDTLVTT

SEQ ID NO: 14406 - protein, 70 aa, Synthetic construct
CLMALDTFKELLITDLLPDNRKLRIQLSSGNKDSRDRRLILWYFEHQLKHLVAEFVQVLETLSHDTLVTT

SEQ ID NO: 14407 - protein, 70 aa, Synthetic construct
CLMALDTFKELLITDLLPDNRKLRIFSQRPFDKLEQLSSGLWYFEHQLKHLVAEFVQVLETLSHDTLVTT

SEQ ID NO: 14408 - protein, 70 aa, Synthetic construct
CLMALDTFKELLITDLLPDNRKLRIFSQRPFDKLEQLSSGNKDSRHQLKHLVAEFVQVLETLSHDTLVTT

SEQ ID NO: 14409 - protein, 70 aa, Synthetic construct
CLMALDTFKELLITDLLPDNRKLRIFSQRPFDKLEQLSSGNKDSRDRRLILWYFEVQVLETLSHDTLVTT

SEQ ID NO: 14410 - protein, 70 aa, Synthetic construct
CLMALDTFKELLITDLLPDNRKLRIFSQRPFDKLEQLSSGNKDSRDRRLILWYFEHQLKHLVAEFTLVTT

SEQ ID NO: 14411 - protein, 70 aa, Synthetic construct
SPKVKEYVSKKALPEEAPARLSSQHQWQFNLLTHVESLQDEVTHRMDSIEKELDVLESWLDYTGELEPPE

SEQ ID NO: 14412 - protein, 70 aa, Synthetic construct
SDAYDIFQIIELYNLPDENEISSSSFHCLYQYLSPTKYQVGGQGSSLSIFAGPAVGLSPAQTWPNMTSQA

SEQ ID NO: 14413 - protein, 70 aa, Synthetic construct
RLVASIFQIIELYNLPDENEISSSSFHCLYQYLSPTKYQVGGQGSSLSIFAGPAVGLSPAQTWPNMTSQA

SEQ ID NO: 14414 - protein, 70 aa, Synthetic construct
RLVASVPALYELYNLPDENEISSSSFHCLYQYLSPTKYQVGGQGSSLSIFAGPAVGLSPAQTWPNMTSQA

SEQ ID NO: 14415 - protein, 70 aa, Synthetic construct
RLVASVPALYSDAYDPDENEISSSSFHCLYQYLSPTKYQVGGQGSSLSIFAGPAVGLSPAQTWPNMTSQA

SEQ ID NO: 14416 - protein, 70 aa, Synthetic construct
RLVASVPALYSDAYDIFQIIELYNLPDENEQYLSPTKYQVGGQGSSLSIFAGPAVGLSPAQTWPNMTSQA

SEQ ID NO: 14417 - protein, 70 aa, Synthetic construct
RLVASVPALYSDAYDIFQIIELYNLPDENEISSSSTKYQVGGQGSSLSIFAGPAVGLSPAQTWPNMTSQA

SEQ ID NO: 14418 - protein, 70 aa, Synthetic construct
RLVASVPALYSDAYDIFQIIELYNLPDENEISSSSFHCLYGGQGSSLSIFAGPAVGLSPAQTWPNMTSQA

SEQ ID NO: 14419 - protein, 70 aa, Synthetic construct
RLVASVPALYSDAYDIFQIIELYNLPDENEISSSSFHCLYQYLSPSLSIFAGPAVGLSPAQTWPNMTSQA

SEQ ID NO: 14420 - protein, 70 aa, Synthetic construct
RLVASVPALYSDAYDIFQIIELYNLPDENEISSSSFHCLYQYLSPTKYQVAGPAVGLSPAQTWPNMTSQA

SEQ ID NO: 14421 - protein, 70 aa, Synthetic construct
RLVASVPALYSDAYDIFQIIELYNLPDENEISSSSFHCLYQYLSPTKYQVGGQGSGLSPAQTWPNMTSQA

SEQ ID NO: 14422 - protein, 70 aa, Synthetic construct
RLVASVPALYSDAYDIFQIIELYNLPDENEISSSSFHCLYQYLSPTKYQVGGQGSSLSIFQTWPNMTSQA

SEQ ID NO: 14423 - protein, 70 aa, Synthetic construct
RLVASVPALYSDAYDIFQIIELYNLPDENEISSSSFHCLYQYLSPTKYQVGGQGSSLSIFAGPAVMTSQA

SEQ ID NO: 14424 - protein, 70 aa, Synthetic construct
RLVASVPALYSDAYDIFQIIELYNLPDENEISSSSFHCLYQYLSPTKYQVGGQGSSLSIFAGPAVGLSPA

SEQ ID NO: 14425 - protein, 70 aa, Synthetic construct
RLDLGLWDKFSELATKCIIKIVEFAKRLPGFTGLTIADQITLLKAACLDILILRICTRYTPEQDTMTFSD

SEQ ID NO: 14426 - protein, 70 aa, Synthetic construct
TTNSSLWDKFSELATKCIIKIVEFAKRLPGFTGLTIADQITLLKAACLDILILRICTRYTPEQDTMTFSD

SEQ ID NO: 14427 - protein, 70 aa, Synthetic construct
TTNSSADHRVRLDLGLWDKFIVEFAKRLPGFTGLTIADQITLLKAACLDILILRICTRYTPEQDTMTFSD

SEQ ID NO: 14428 - protein, 70 aa, Synthetic construct
TTNSSADHRVRLDLGLWDKFSELATKCIIKFTGLTIADQITLLKAACLDILILRICTRYTPEQDTMTFSD

SEQ ID NO: 14429 - protein, 70 aa, Synthetic construct
TTNSSADHRVRLDLGLWDKFSELATKCIIKIVEFAKRLPGFTGLTACLDILILRICTRYTPEQDTMTFSD

SEQ ID NO: 14430 - protein, 70 aa, Synthetic construct
TTNSSADHRVRLDLGLWDKFSELATKCIIKIVEFAKRLPGFTGLTIADQILILRICTRYTPEQDTMTFSD

SEQ ID NO: 14431 - protein, 70 aa, Synthetic construct
TTNSSADHRVRLDLGLWDKFSELATKCIIKIVEFAKRLPGFTGLTIADQITLLKACTRYTPEQDTMTFSD

SEQ ID NO: 14432 - protein, 70 aa, Synthetic construct
TTNSSADHRVRLDLGLWDKFSELATKCIIKIVEFAKRLPGFTGLTIADQITLLKAACLDIPEQDTMTFSD

SEQ ID NO: 14433 - protein, 70 aa, Synthetic construct
TTNSSADHRVRLDLGLWDKFSELATKCIIKIVEFAKRLPGFTGLTIADQITLLKAACLDILILRICTRYT

SEQ ID NO: 14434 - protein, 70 aa, Synthetic construct
PVPWEKEEYLKPVLEDDLLLQFDVEDLYEPVSVPFSYPNGLSENTSVVEKLKHMEARALSAEAALARARE

SEQ ID NO: 14435 - protein, 70 aa, Synthetic construct
TVEYMNSIYNKPVLEDDLLLQFDVEDLYEPVSVPFSYPNGLSENTSVVEKLKHMEARALSAEAALARARE

SEQ ID NO: 14436 - protein, 70 aa, Synthetic construct
TVEYMNSIYNPVPWEDDLLLQFDVEDLYEPVSVPFSYPNGLSENTSVVEKLKHMEARALSAEAALARARE

SEQ ID NO: 14437 - protein, 70 aa, Synthetic construct
TVEYMNSIYNPVPWEKEEYLQFDVEDLYEPVSVPFSYPNGLSENTSVVEKLKHMEARALSAEAALARARE

SEQ ID NO: 14438 - protein, 70 aa, Synthetic construct
TVEYMNSIYNPVPWEKEEYLKPVLEDDLLLQFDVEDLYEPLSENTSVVEKLKHMEARALSAEAALARARE

SEQ ID NO: 14439 - protein, 70 aa, Synthetic construct
TVEYMNSIYNPVPWEKEEYLKPVLEDDLLLQFDVEDLYEPVSVPFSVVEKLKHMEARALSAEAALARARE

SEQ ID NO: 14440 - protein, 70 aa, Synthetic construct
TVEYMNSIYNPVPWEKEEYLKPVLEDDLLLQFDVEDLYEPVSVPFSYPNGLKHMEARALSAEAALARARE

SEQ ID NO: 14441 - protein, 70 aa, Synthetic construct
TVEYMNSIYNPVPWEKEEYLKPVLEDDLLLQFDVEDLYEPVSVPFSYPNGLSENTARALSAEAALARARE

SEQ ID NO: 14442 - protein, 70 aa, Synthetic construct
TVEYMNSIYNPVPWEKEEYLKPVLEDDLLLQFDVEDLYEPVSVPFSYPNGLSENTSVVEKAEAALARARE

SEQ ID NO: 14443 - protein, 70 aa, Synthetic construct
TVEYMNSIYNPVPWEKEEYLKPVLEDDLLLQFDVEDLYEPVSVPFSYPNGLSENTSVVEKLKHMEARARE

SEQ ID NO: 14444 - protein, 70 aa, Synthetic construct
TVEYMNSIYNPVPWEKEEYLKPVLEDDLLLQFDVEDLYEPVSVPFSYPNGLSENTSVVEKLKHMEARALS

SEQ ID NO: 14445 - protein, 70 aa, Synthetic construct
HPYQLAQGTDTILADEMGLGKTVQTIVFLYSLYKEGHSKGPYLVSAPLSTIINWEREFEMWAPDFYVVTY

SEQ ID NO: 14446 - protein, 70 aa, Synthetic construct
HPYQLEGLNWLRFSWAQGTDTILADEMGLGSLYKEGHSKGPYLVSAPLSTIINWEREFEMWAPDFYVVTY

SEQ ID NO: 14447 - protein, 70 aa, Synthetic construct
HPYQLEGLNWLRFSWAQGTDTILADEMGLGKTVQTIVFLYSLYKEGHSKGIINWEREFEMWAPDFYVVTY

SEQ ID NO: 14448 - protein, 70 aa, Synthetic construct
HPYQLEGLNWLRFSWAQGTDTILADEMGLGKTVQTIVFLYSLYKEGHSKGPYLVSREFEMWAPDFYVVTY

SEQ ID NO: 14449 - protein, 70 aa, Synthetic construct
HPYQLEGLNWLRFSWAQGTDTILADEMGLGKTVQTIVFLYSLYKEGHSKGPYLVSAPLSTIINWEYVVTY

SEQ ID NO: 14450 - protein, 70 aa, Synthetic construct
HPYQLEGLNWLRFSWAQGTDTILADEMGLGKTVQTIVFLYSLYKEGHSKGPYLVSAPLSTIINWEREFEM

SEQ ID NO: 14451 - protein, 70 aa, Synthetic construct
QLQFDDEDLGALLGNSTDPAVFTDLASVDNSEFQQLLNQGMLMEYPEAITRLVTGAQRPPDPAPAPLGAP

SEQ ID NO: 14452 - protein, 70 aa, Synthetic construct
QLQFDDEDLGALLGNSTDPAVFTDLASVDNSEFQQLLNQGIPVAPPEAITRLVTGAQRPPDPAPAPLGAP

SEQ ID NO: 14453 - protein, 70 aa, Synthetic construct
QLQFDDEDLGALLGNSTDPAVFTDLASVDNSEFQQLLNQGIPVAPHTTEPMLMEYAQRPPDPAPAPLGAP

SEQ ID NO: 14454 - protein, 70 aa, Synthetic construct
QLQFDDEDLGALLGNSTDPAVFTDLASVDNSEFQQLLNQGIPVAPHTTEPMLMEYPEAITDPAPAPLGAP

SEQ ID NO: 14455 - protein, 70 aa, Synthetic construct
QLQFDDEDLGALLGNSTDPAVFTDLASVDNSEFQQLLNQGIPVAPHTTEPMLMEYPEAITRLVTGPLGAP

SEQ ID NO: 14456 - protein, 70 aa, Synthetic construct
QLQFDDEDLGALLGNSTDPAVFTDLASVDNSEFQQLLNQGIPVAPHTTEPMLMEYPEAITRLVTGAQRPP

SEQ ID NO: 14457 - protein, 70 aa, Synthetic construct
IPVAPHTTEPMLMEYPEAITRLVTGAQRPPDPAPAPLGAPGLPNGLLSGDEDFSSIADMDFSALLSQISS

SEQ ID NO: 14458 - protein, 70 aa, Synthetic construct
SEFQQHTTEPMLMEYPEAITRLVTGAQRPPDPAPAPLGAPGLPNGLLSGDEDFSSIADMDFSALLSQISS

SEQ ID NO: 14459 - protein, 70 aa, Synthetic construct
SEFQQLLNQGMLMEYPEAITRLVTGAQRPPDPAPAPLGAPGLPNGLLSGDEDFSSIADMDFSALLSQISS

SEQ ID NO: 14460 - protein, 70 aa, Synthetic construct
SEFQQLLNQGIPVAPPEAITRLVTGAQRPPDPAPAPLGAPGLPNGLLSGDEDFSSIADMDFSALLSQISS

SEQ ID NO: 14461 - protein, 70 aa, Synthetic construct
SEFQQLLNQGIPVAPHTTEPRLVTGAQRPPDPAPAPLGAPGLPNGLLSGDEDFSSIADMDFSALLSQISS

SEQ ID NO: 14462 - protein, 70 aa, Synthetic construct
SEFQQLLNQGIPVAPHTTEPMLMEYAQRPPDPAPAPLGAPGLPNGLLSGDEDFSSIADMDFSALLSQISS

SEQ ID NO: 14463 - protein, 70 aa, Synthetic construct
SEFQQLLNQGIPVAPHTTEPMLMEYPEAITDPAPAPLGAPGLPNGLLSGDEDFSSIADMDFSALLSQISS

SEQ ID NO: 14464 - protein, 70 aa, Synthetic construct
SEFQQLLNQGIPVAPHTTEPMLMEYPEAITRLVTGPLGAPGLPNGLLSGDEDFSSIADMDFSALLSQISS

SEQ ID NO: 14465 - protein, 70 aa, Synthetic construct
SEFQQLLNQGIPVAPHTTEPMLMEYPEAITRLVTGAQRPPGLPNGLLSGDEDFSSIADMDFSALLSQISS

SEQ ID NO: 14466 - protein, 70 aa, Synthetic construct
SEFQQLLNQGIPVAPHTTEPMLMEYPEAITRLVTGAQRPPDPAPAPLGAPEDFSSIADMDFSALLSQISS

SEQ ID NO: 14467 - protein, 70 aa, Synthetic construct
QAIAFSDPLSYFTDLSFSAALKEEQRLDGMLLDDTISPFGTDPLLSATSPAVSKESSRRSSFSSDDGDEL

SEQ ID NO: 14468 - protein, 70 aa, Synthetic construct
SQGPSPELCDYFTDLSFSAALKEEQRLDGMLLDDTISPFGTDPLLSATSPAVSKESSRRSSFSSDDGDEL

SEQ ID NO: 14469 - protein, 70 aa, Synthetic construct
SQGPSPELCDQAIAFSDPLSYFTDLRLDGMLLDDTISPFGTDPLLSATSPAVSKESSRRSSFSSDDGDEL

SEQ ID NO: 14470 - protein, 70 aa, Synthetic construct
SQGPSPELCDQAIAFSDPLSYFTDLSFSAALLDDTISPFGTDPLLSATSPAVSKESSRRSSFSSDDGDEL

SEQ ID NO: 14471 - protein, 70 aa, Synthetic construct
SQGPSPELCDQAIAFSDPLSYFTDLSFSAALKEEQRLDGMLLDDTISPFGTDPLLSSRRSSFSSDDGDEL

SEQ ID NO: 14472 - protein, 70 aa, Synthetic construct
SQGPSPELCDQAIAFSDPLSYFTDLSFSAALKEEQRLDGMLLDDTISPFGTDPLLSATSPSFSSDDGDEL

SEQ ID NO: 14473 - protein, 70 aa, Synthetic construct
SQGPSPELCDQAIAFSDPLSYFTDLSFSAALKEEQRLDGMLLDDTISPFGTDPLLSATSPAVSKEDGDEL

SEQ ID NO: 14474 - protein, 70 aa, Synthetic construct
SQGPSPELCDQAIAFSDPLSYFTDLSFSAALKEEQRLDGMLLDDTISPFGTDPLLSATSPAVSKESSRRS

SEQ ID NO: 14475 - protein, 70 aa, Synthetic construct
STYGEDSDLPSDFSIHEFLATCQDYPYVMADSLLDVLTKGGHSRTLQEMEMSLPEDEGHTRTLDTAKEME

SEQ ID NO: 14476 - protein, 70 aa, Synthetic construct
ISKDDSDLIYSDFSIHEFLATCQDYPYVMADSLLDVLTKGGHSRTLQEMEMSLPEDEGHTRTLDTAKEME

SEQ ID NO: 14477 - protein, 70 aa, Synthetic construct
ISKDDSDLIYSTYGEDSDLPSDFSIHEFLATCQDYVLTKGGHSRTLQEMEMSLPEDEGHTRTLDTAKEME

SEQ ID NO: 14478 - protein, 70 aa, Synthetic construct
ISKDDSDLIYSTYGEDSDLPSDFSIHEFLATCQDYPYVMAGHSRTLQEMEMSLPEDEGHTRTLDTAKEME

SEQ ID NO: 14479 - protein, 70 aa, Synthetic construct
ISKDDSDLIYSTYGEDSDLPSDFSIHEFLATCQDYPYVMADSLLDLQEMEMSLPEDEGHTRTLDTAKEME

SEQ ID NO: 14480 - protein, 70 aa, Synthetic construct
ISKDDSDLIYSTYGEDSDLPSDFSIHEFLATCQDYPYVMADSLLDVLTKGMSLPEDEGHTRTLDTAKEME

SEQ ID NO: 14481 - protein, 70 aa, Synthetic construct
ISKDDSDLIYSTYGEDSDLPSDFSIHEFLATCQDYPYVMADSLLDVLTKGGHSRTDEGHTRTLDTAKEME

SEQ ID NO: 14482 - protein, 70 aa, Synthetic construct
ISKDDSDLIYSTYGEDSDLPSDFSIHEFLATCQDYPYVMADSLLDVLTKGGHSRTLQEMERTLDTAKEME

SEQ ID NO: 14483 - protein, 70 aa, Synthetic construct
ISKDDSDLIYSTYGEDSDLPSDFSIHEFLATCQDYPYVMADSLLDVLTKGGHSRTLQEMEMSLPEAKEME

SEQ ID NO: 14484 - protein, 70 aa, Synthetic construct
ISKDDSDLIYSTYGEDSDLPSDFSIHEFLATCQDYPYVMADSLLDVLTKGGHSRTLQEMEMSLPEDEGHT

SEQ ID NO: 14485 - protein, 70 aa, Synthetic construct
LQTPINDRSRSHSGKVEMKANNFPINHKTRFRLSTSWRVPFINSHEIRSMILHLLCDRYFSQAAGCQNTM

SEQ ID NO: 14486 - protein, 70 aa, Synthetic construct
LQTPIPRKLVSHKPLVEMKANNFPINHKTRFRLSTSWRVPFINSHEIRSMILHLLCDRYFSQAAGCQNTM

SEQ ID NO: 14487 - protein, 70 aa, Synthetic construct
YIGESASRLLFLSMHWALSIPSFQALGQENSISLVKAYWNELFTLGLAQCWQVMNVATILATFVNCLHNS

SEQ ID NO: 14488 - protein, 70 aa, Synthetic construct
SPMPEYLNVHFLSMHWALSIPSFQALGQENSISLVKAYWNELFTLGLAQCWQVMNVATILATFVNCLHNS

SEQ ID NO: 14489 - protein, 70 aa, Synthetic construct
SPMPEYLNVHYIGESASRLLFLSMHWALSIPSFQAKAYWNELFTLGLAQCWQVMNVATILATFVNCLHNS

SEQ ID NO: 14490 - protein, 70 aa, Synthetic construct
SPMPEYLNVHYIGESASRLLFLSMHWALSIPSFQALGQENSISLVKAYWNELFTLGLAQCWQVMNVATIL

SEQ ID NO: 14491 - protein, 70 aa, Synthetic construct
SLYALEPPAPHCGELGSPGGSPGDWGSLYSPVSQAGSLSPAASLEERPGLLGATFSACLSPGSLAFSDFL

SEQ ID NO: 14492 - protein, 70 aa, Synthetic construct
LTQTLEPPAPHCGELGSPGGSPGDWGSLYSPVSQAGSLSPAASLEERPGLLGATFSACLSPGSLAFSDFL

SEQ ID NO: 14493 - protein, 70 aa, Synthetic construct
LTQTLRIADHHCGELGSPGGSPGDWGSLYSPVSQAGSLSPAASLEERPGLLGATFSACLSPGSLAFSDFL

SEQ ID NO: 14494 - protein, 70 aa, Synthetic construct
LTQTLRIADHSLYALGSPGGSPGDWGSLYSPVSQAGSLSPAASLEERPGLLGATFSACLSPGSLAFSDFL

SEQ ID NO: 14495 - protein, 70 aa, Synthetic construct
LTQTLRIADHSLYALEPPAPSPGDWGSLYSPVSQAGSLSPAASLEERPGLLGATFSACLSPGSLAFSDFL

SEQ ID NO: 14496 - protein, 70 aa, Synthetic construct
LTQTLRIADHSLYALEPPAPHCGELGSLYSPVSQAGSLSPAASLEERPGLLGATFSACLSPGSLAFSDFL

SEQ ID NO: 14497 - protein, 70 aa, Synthetic construct
LTQTLRIADHSLYALEPPAPHCGELGSPGGSPGDWGSLSPAASLEERPGLLGATFSACLSPGSLAFSDFL

SEQ ID NO: 14498 - protein, 70 aa, Synthetic construct
LTQTLRIADHSLYALEPPAPHCGELGSPGGSPGDWGSLYSAASLEERPGLLGATFSACLSPGSLAFSDFL

SEQ ID NO: 14499 - protein, 70 aa, Synthetic construct
LTQTLRIADHSLYALEPPAPHCGELGSPGGSPGDWGSLYSPVSQAERPGLLGATFSACLSPGSLAFSDFL

SEQ ID NO: 14500 - protein, 70 aa, Synthetic construct
LTQTLRIADHSLYALEPPAPHCGELGSPGGSPGDWGSLYSPVSQAGSLSPLGATFSACLSPGSLAFSDFL

SEQ ID NO: 14501 - protein, 70 aa, Synthetic construct
GDGVTIGSCIKHIPIAGRDITYFIQQLLRDREVGIPPEQSLETAKAVKERYSYVCPDLVKEFNKYDTDGS

SEQ ID NO: 14502 - protein, 70 aa, Synthetic construct
GDGVTHVIPVKHIPIAGRDITYFIQQLLRDREVGIPPEQSLETAKAVKERYSYVCPDLVKEFNKYDTDGS

SEQ ID NO: 14503 - protein, 70 aa, Synthetic construct
GDGVTHVIPVAEGYVIGSCIKHIPIAGRDITYFIQQLLRDLETAKAVKERYSYVCPDLVKEFNKYDTDGS

SEQ ID NO: 14504 - protein, 70 aa, Synthetic construct
GDGVTHVIPVAEGYVIGSCIKHIPIAGRDITYFIQQLLRDREVGIAVKERYSYVCPDLVKEFNKYDTDGS

SEQ ID NO: 14505 - protein, 70 aa, Synthetic construct
GDGVTHVIPVAEGYVIGSCIKHIPIAGRDITYFIQQLLRDREVGIPPEQSYSYVCPDLVKEFNKYDTDGS

SEQ ID NO: 14506 - protein, 70 aa, Synthetic construct
GDGVTHVIPVAEGYVIGSCIKHIPIAGRDITYFIQQLLRDREVGIPPEQSLETAKAVKERYSYVCPDLVK

SEQ ID NO: 14507 - protein, 70 aa, Synthetic construct
TTLQSTYSDTSAQPTCDYGYGTWNSGTNRGYEGYGYGYGYGQDNTTNYGYGMATSHSWEMPSSDTNANTS

SEQ ID NO: 14508 - protein, 70 aa, Synthetic construct
SYTGFTYSDTSAQPTCDYGYGTWNSGTNRGYEGYGYGYGYGQDNTTNYGYGMATSHSWEMPSSDTNANTS

SEQ ID NO: 14509 - protein, 70 aa, Synthetic construct
SYTGFVQGSESAQPTCDYGYGTWNSGTNRGYEGYGYGYGYGQDNTTNYGYGMATSHSWEMPSSDTNANTS

SEQ ID NO: 14510 - protein, 70 aa, Synthetic construct
SYTGFVQGSETTLQSCDYGYGTWNSGTNRGYEGYGYGYGYGQDNTTNYGYGMATSHSWEMPSSDTNANTS

SEQ ID NO: 14511 - protein, 70 aa, Synthetic construct
SYTGFVQGSETTLQSTYSDTGTWNSGTNRGYEGYGYGYGYGQDNTTNYGYGMATSHSWEMPSSDTNANTS

SEQ ID NO: 14512 - protein, 70 aa, Synthetic construct
SYTGFVQGSETTLQSTYSDTSAQPTCDYGYYEGYGYGYGYGQDNTTNYGYGMATSHSWEMPSSDTNANTS

SEQ ID NO: 14513 - protein, 70 aa, Synthetic construct
SYTGFVQGSETTLQSTYSDTSAQPTCDYGYGTWNSYGYGYGQDNTTNYGYGMATSHSWEMPSSDTNANTS

SEQ ID NO: 14514 - protein, 70 aa, Synthetic construct
SYTGFVQGSETTLQSTYSDTSAQPTCDYGYGTWNSGTNRGYEGYGYGYGYGMATSHSWEMPSSDTNANTS

SEQ ID NO: 14515 - protein, 70 aa, Synthetic construct
SYTGFVQGSETTLQSTYSDTSAQPTCDYGYGTWNSGTNRGYEGYGYGYGYGQDNTHSWEMPSSDTNANTS

SEQ ID NO: 14516 - protein, 70 aa, Synthetic construct
SYTGFVQGSETTLQSTYSDTSAQPTCDYGYGTWNSGTNRGYEGYGYGYGYGQDNTTNYGYGMATSNANTS

SEQ ID NO: 14517 - protein, 70 aa, Synthetic construct
SYTGFVQGSETTLQSTYSDTSAQPTCDYGYGTWNSGTNRGYEGYGYGYGYGQDNTTNYGYGMATSHSWEM

SEQ ID NO: 14518 - protein, 70 aa, Synthetic construct
YGQFTVGPTLPGYPPHIPTSGQGSYASSAIAGMVAGSEYSGNAYGHTPYSSYSEAWRFPNSSLLSSPYYY

SEQ ID NO: 14519 - protein, 70 aa, Synthetic construct
YGQFTGQALLPGYPPHIPTSGQGSYASSAIAGMVAGSEYSGNAYGHTPYSSYSEAWRFPNSSLLSSPYYY

SEQ ID NO: 14520 - protein, 70 aa, Synthetic construct
YGQFTGQALLSGREMVGPTLGQGSYASSAIAGMVAGSEYSGNAYGHTPYSSYSEAWRFPNSSLLSSPYYY

SEQ ID NO: 14521 - protein, 70 aa, Synthetic construct
YGQFTGQALLSGREMVGPTLPGYPPASSAIAGMVAGSEYSGNAYGHTPYSSYSEAWRFPNSSLLSSPYYY

SEQ ID NO: 14522 - protein, 70 aa, Synthetic construct
YGQFTGQALLSGREMVGPTLPGYPPHIPTSAGMVAGSEYSGNAYGHTPYSSYSEAWRFPNSSLLSSPYYY

SEQ ID NO: 14523 - protein, 70 aa, Synthetic construct
YGQFTGQALLSGREMVGPTLPGYPPHIPTSGQGSYASSAIGNAYGHTPYSSYSEAWRFPNSSLLSSPYYY

SEQ ID NO: 14524 - protein, 70 aa, Synthetic construct
YGQFTGQALLSGREMVGPTLPGYPPHIPTSGQGSYASSAIAGMVAHTPYSSYSEAWRFPNSSLLSSPYYY

SEQ ID NO: 14525 - protein, 70 aa, Synthetic construct
YGQFTGQALLSGREMVGPTLPGYPPHIPTSGQGSYASSAIAGMVAGSEYSSYSEAWRFPNSSLLSSPYYY

SEQ ID NO: 14526 - protein, 70 aa, Synthetic construct
MANDLSSEYFQALVNNMSFVRYKEVYAAAAEVLGLILRYVMERKNILEESLCELVAKQLKQHQNTMEDKF

SEQ ID NO: 14527 - protein, 70 aa, Synthetic construct
MANDLPPYDPQCGIQNMSFVRYKEVYAAAAEVLGLILRYVMERKNILEESLCELVAKQLKQHQNTMEDKF

SEQ ID NO: 14528 - protein, 70 aa, Synthetic construct
MANDLPPYDPQCGIQSSEYFQALVNYAAAAEVLGLILRYVMERKNILEESLCELVAKQLKQHQNTMEDKF

SEQ ID NO: 14529 - protein, 70 aa, Synthetic construct
MANDLPPYDPQCGIQSSEYFQALVNNMSFVRYKEVYAAAAEVLGLILRYVLCELVAKQLKQHQNTMEDKF

SEQ ID NO: 14530 - protein, 70 aa, Synthetic construct
FLLEMTSMSPLSECEFQEYTIDSDWRFRSTVLTPMFVETQASQGTLQTRTQEGSLSARWPVAGQIRATQQ

SEQ ID NO: 14531 - protein, 70 aa, Synthetic construct
FLLEMTSMSPDYPNPFQEYTIDSDWRFRSTVLTPMFVETQASQGTLQTRTQEGSLSARWPVAGQIRATQQ

SEQ ID NO: 14532 - protein, 70 aa, Synthetic construct
FLLEMTSMSPDYPNPMFEHPLSECEFQEYTVLTPMFVETQASQGTLQTRTQEGSLSARWPVAGQIRATQQ

SEQ ID NO: 14533 - protein, 70 aa, Synthetic construct
FLLEMTSMSPDYPNPMFEHPLSECEFQEYTIDSDWFVETQASQGTLQTRTQEGSLSARWPVAGQIRATQQ

SEQ ID NO: 14534 - protein, 70 aa, Synthetic construct
FLLEMTSMSPDYPNPMFEHPLSECEFQEYTIDSDWRFRSTVLTPMLQTRTQEGSLSARWPVAGQIRATQQ

SEQ ID NO: 14535 - protein, 70 aa, Synthetic construct
FLLEMTSMSPDYPNPMFEHPLSECEFQEYTIDSDWRFRSTVLTPMFVETQQEGSLSARWPVAGQIRATQQ

SEQ ID NO: 14536 - protein, 70 aa, Synthetic construct
FLLEMTSMSPDYPNPMFEHPLSECEFQEYTIDSDWRFRSTVLTPMFVETQASQGTSARWPVAGQIRATQQ

SEQ ID NO: 14537 - protein, 70 aa, Synthetic construct
FLLEMTSMSPDYPNPMFEHPLSECEFQEYTIDSDWRFRSTVLTPMFVETQASQGTLQTRTVAGQIRATQQ

SEQ ID NO: 14538 - protein, 70 aa, Synthetic construct
FLLEMTSMSPDYPNPMFEHPLSECEFQEYTIDSDWRFRSTVLTPMFVETQASQGTLQTRTQEGSLRATQQ

SEQ ID NO: 14539 - protein, 70 aa, Synthetic construct
FLLEMTSMSPDYPNPMFEHPLSECEFQEYTIDSDWRFRSTVLTPMFVETQASQGTLQTRTQEGSLSARWP

SEQ ID NO: 14540 - protein, 70 aa, Synthetic construct
QYDEALNKQDWVDGEPTEAEKDFWELASLDCYNHLAEWKSLEYCSTASIDSENPPDLNKIWSEPFYQETY

SEQ ID NO: 14541 - protein, 70 aa, Synthetic construct
ARSDYLNKQDWVDGEPTEAEKDFWELASLDCYNHLAEWKSLEYCSTASIDSENPPDLNKIWSEPFYQETY

SEQ ID NO: 14542 - protein, 70 aa, Synthetic construct
ARSDYSEAAKWVDGEPTEAEKDFWELASLDCYNHLAEWKSLEYCSTASIDSENPPDLNKIWSEPFYQETY

SEQ ID NO: 14543 - protein, 70 aa, Synthetic construct
ARSDYSEAAKQYDEAPTEAEKDFWELASLDCYNHLAEWKSLEYCSTASIDSENPPDLNKIWSEPFYQETY

SEQ ID NO: 14544 - protein, 70 aa, Synthetic construct
ARSDYSEAAKQYDEALNKQDKDFWELASLDCYNHLAEWKSLEYCSTASIDSENPPDLNKIWSEPFYQETY

SEQ ID NO: 14545 - protein, 70 aa, Synthetic construct
ARSDYSEAAKQYDEALNKQDWVDGELASLDCYNHLAEWKSLEYCSTASIDSENPPDLNKIWSEPFYQETY

SEQ ID NO: 14546 - protein, 70 aa, Synthetic construct
ARSDYSEAAKQYDEALNKQDWVDGEPTEAEKDFWEAEWKSLEYCSTASIDSENPPDLNKIWSEPFYQETY

SEQ ID NO: 14547 - protein, 70 aa, Synthetic construct
ARSDYSEAAKQYDEALNKQDWVDGEPTEAEKDFWELASLDLEYCSTASIDSENPPDLNKIWSEPFYQETY

SEQ ID NO: 14548 - protein, 70 aa, Synthetic construct
ARSDYSEAAKQYDEALNKQDWVDGEPTEAEKDFWELASLDCYNHLTASIDSENPPDLNKIWSEPFYQETY

SEQ ID NO: 14549 - protein, 70 aa, Synthetic construct
ARSDYSEAAKQYDEALNKQDWVDGEPTEAEKDFWELASLDCYNHLAEWKSSENPPDLNKIWSEPFYQETY

SEQ ID NO: 14550 - protein, 70 aa, Synthetic construct
ARSDYSEAAKQYDEALNKQDWVDGEPTEAEKDFWELASLDCYNHLAEWKSLEYCSDLNKIWSEPFYQETY

SEQ ID NO: 14551 - protein, 70 aa, Synthetic construct
ARSDYSEAAKQYDEALNKQDWVDGEPTEAEKDFWELASLDCYNHLAEWKSLEYCSTASIDWSEPFYQETY

SEQ ID NO: 14552 - protein, 70 aa, Synthetic construct
ARSDYSEAAKQYDEALNKQDWVDGEPTEAEKDFWELASLDCYNHLAEWKSLEYCSTASIDSENPPYQETY

SEQ ID NO: 14553 - protein, 70 aa, Synthetic construct
DANLFGETLEGLSDDAFVQPGPVSLVDELNLGAEFEPLHIDSLNHVQGTPTHQKMTDFEQLNQFDSIKFH

SEQ ID NO: 14554 - protein, 70 aa, Synthetic construct
MTDPMMDFFDGLSDDAFVQPGPVSLVDELNLGAEFEPLHIDSLNHVQGTPTHQKMTDFEQLNQFDSIKFH

SEQ ID NO: 14555 - protein, 70 aa, Synthetic construct
MTDPMMDFFDDANLFAFVQPGPVSLVDELNLGAEFEPLHIDSLNHVQGTPTHQKMTDFEQLNQFDSIKFH

SEQ ID NO: 14556 - protein, 70 aa, Synthetic construct
MTDPMMDFFDDANLFGETLEGPVSLVDELNLGAEFEPLHIDSLNHVQGTPTHQKMTDFEQLNQFDSIKFH

SEQ ID NO: 14557 - protein, 70 aa, Synthetic construct
MTDPMMDFFDDANLFGETLEGLSDDVDELNLGAEFEPLHIDSLNHVQGTPTHQKMTDFEQLNQFDSIKFH

SEQ ID NO: 14558 - protein, 70 aa, Synthetic construct
MTDPMMDFFDDANLFGETLEGLSDDAFVQPLGAEFEPLHIDSLNHVQGTPTHQKMTDFEQLNQFDSIKFH

SEQ ID NO: 14559 - protein, 70 aa, Synthetic construct
MTDPMMDFFDDANLFGETLEGLSDDAFVQPGPVSLEPLHIDSLNHVQGTPTHQKMTDFEQLNQFDSIKFH

SEQ ID NO: 14560 - protein, 70 aa, Synthetic construct
MTDPMMDFFDDANLFGETLEGLSDDAFVQPGPVSLVDELNDSLNHVQGTPTHQKMTDFEQLNQFDSIKFH

SEQ ID NO: 14561 - protein, 70 aa, Synthetic construct
MTDPMMDFFDDANLFGETLEGLSDDAFVQPGPVSLVDELNLGAEFVQGTPTHQKMTDFEQLNQFDSIKFH

SEQ ID NO: 14562 - protein, 70 aa, Synthetic construct
MTDPMMDFFDDANLFGETLEGLSDDAFVQPGPVSLVDELNLGAEFEPLHITHQKMTDFEQLNQFDSIKFH

SEQ ID NO: 14563 - protein, 70 aa, Synthetic construct
MTDPMMDFFDDANLFGETLEGLSDDAFVQPGPVSLVDELNLGAEFEPLHIDSLNHTDFEQLNQFDSIKFH

SEQ ID NO: 14564 - protein, 70 aa, Synthetic construct
MTDPMMDFFDDANLFGETLEGLSDDAFVQPGPVSLVDELNLGAEFEPLHIDSLNHVQGTPLNQFDSIKFH

SEQ ID NO: 14565 - protein, 70 aa, Synthetic construct
MTDPMMDFFDDANLFGETLEGLSDDAFVQPGPVSLVDELNLGAEFEPLHIDSLNHVQGTPTHQKMSIKFH

SEQ ID NO: 14566 - protein, 70 aa, Synthetic construct
MTDPMMDFFDDANLFGETLEGLSDDAFVQPGPVSLVDELNLGAEFEPLHIDSLNHVQGTPTHQKMTDFEQ

SEQ ID NO: 14567 - protein, 70 aa, Synthetic construct
REEADFYRVVSTFGVWTKFRAMARLHKKTDDSLEKYLYAFMSMCRRVCRLPSKEELVDPNIFIQPITEER

SEQ ID NO: 14568 - protein, 70 aa, Synthetic construct
REEADFYRVVSTFGVVFDPDAMARLHKKTDDSLEKYLYAFMSMCRRVCRLPSKEELVDPNIFIQPITEER

SEQ ID NO: 14569 - protein, 70 aa, Synthetic construct
REEADFYRVVSTFGVVFDPDRGQFDWTKFRAMARLYLYAFMSMCRRVCRLPSKEELVDPNIFIQPITEER

SEQ ID NO: 14570 - protein, 70 aa, Synthetic construct
REEADFYRVVSTFGVVFDPDRGQFDWTKFRAMARLHKKTDDSLEKYLYAFMSMCRRVCRLIFIQPITEER

SEQ ID NO: 14571 - protein, 70 aa, Synthetic construct
AHPYESWYKSVTNGAASSWWDVHSSPGSWLEVQNPAGGLQSSLHSGAPQASLHSQLGTYNPDFSSLTHSA

SEQ ID NO: 14572 - protein, 70 aa, Synthetic construct
AHPYESWYKSGFHSTASSWWDVHSSPGSWLEVQNPAGGLQSSLHSGAPQASLHSQLGTYNPDFSSLTHSA

SEQ ID NO: 14573 - protein, 70 aa, Synthetic construct
AHPYESWYKSGFHSTLAAGEVTNGAASSWWDVHSSPGSWLSSLHSGAPQASLHSQLGTYNPDFSSLTHSA

SEQ ID NO: 14574 - protein, 70 aa, Synthetic construct
AHPYESWYKSGFHSTLAAGEVTNGAASSWWDVHSSPGSWLEVQNPGAPQASLHSQLGTYNPDFSSLTHSA

SEQ ID NO: 14575 - protein, 70 aa, Synthetic construct
AHPYESWYKSGFHSTLAAGEVTNGAASSWWDVHSSPGSWLEVQNPAGGLQSLHSQLGTYNPDFSSLTHSA

SEQ ID NO: 14576 - protein, 70 aa, Synthetic construct
AHPYESWYKSGFHSTLAAGEVTNGAASSWWDVHSSPGSWLEVQNPAGGLQSSLHSLGTYNPDFSSLTHSA

SEQ ID NO: 14577 - protein, 70 aa, Synthetic construct
SLPEAVDAARPKATLVDSESADDELTNLNWLHESTNLLTNFSLGSEGLPIVSPLYDIEGDDVPSFGPACY

SEQ ID NO: 14578 - protein, 70 aa, Synthetic construct
AGLSQVDAARPKATLVDSESADDELTNLNWLHESTNLLTNFSLGSEGLPIVSPLYDIEGDDVPSFGPACY

SEQ ID NO: 14579 - protein, 70 aa, Synthetic construct
AGLSQIYKMGPKATLVDSESADDELTNLNWLHESTNLLTNFSLGSEGLPIVSPLYDIEGDDVPSFGPACY

SEQ ID NO: 14580 - protein, 70 aa, Synthetic construct
AGLSQIYKMGSLPEAVDSESADDELTNLNWLHESTNLLTNFSLGSEGLPIVSPLYDIEGDDVPSFGPACY

SEQ ID NO: 14581 - protein, 70 aa, Synthetic construct
AGLSQIYKMGSLPEAVDAARADDELTNLNWLHESTNLLTNFSLGSEGLPIVSPLYDIEGDDVPSFGPACY

SEQ ID NO: 14582 - protein, 70 aa, Synthetic construct
AGLSQIYKMGSLPEAVDAARPKATLTNLNWLHESTNLLTNFSLGSEGLPIVSPLYDIEGDDVPSFGPACY

SEQ ID NO: 14583 - protein, 70 aa, Synthetic construct
AGLSQIYKMGSLPEAVDAARPKATLVDSESADDELTNLNWFSLGSEGLPIVSPLYDIEGDDVPSFGPACY

SEQ ID NO: 14584 - protein, 70 aa, Synthetic construct
AGLSQIYKMGSLPEAVDAARPKATLVDSESADDELTNLNWLHESTNLLTNFSLGSDIEGDDVPSFGPACY

SEQ ID NO: 14585 - protein, 70 aa, Synthetic construct
AGLSQIYKMGSLPEAVDAARPKATLVDSESADDELTNLNWLHESTNLLTNFSLGSEGLPIVSPLYGPACY

SEQ ID NO: 14586 - protein, 70 aa, Synthetic construct
QLDWGSALLHPEVPWGAEPDSQALPWSGDWTDMACTAWDSWSGASQTLGPAPLGPGPIPAAGSEGAAGQN

SEQ ID NO: 14587 - protein, 70 aa, Synthetic construct
GTSSSSALLHPEVPWGAEPDSQALPWSGDWTDMACTAWDSWSGASQTLGPAPLGPGPIPAAGSEGAAGQN

SEQ ID NO: 14588 - protein, 70 aa, Synthetic construct
GTSSSLASFPPEVPWGAEPDSQALPWSGDWTDMACTAWDSWSGASQTLGPAPLGPGPIPAAGSEGAAGQN

SEQ ID NO: 14589 - protein, 70 aa, Synthetic construct
GTSSSLASFPQLDWGGAEPDSQALPWSGDWTDMACTAWDSWSGASQTLGPAPLGPGPIPAAGSEGAAGQN

SEQ ID NO: 14590 - protein, 70 aa, Synthetic construct
GTSSSLASFPQLDWGSALLHSQALPWSGDWTDMACTAWDSWSGASQTLGPAPLGPGPIPAAGSEGAAGQN

SEQ ID NO: 14591 - protein, 70 aa, Synthetic construct
GTSSSLASFPQLDWGSALLHPEVPWWSGDWTDMACTAWDSWSGASQTLGPAPLGPGPIPAAGSEGAAGQN

SEQ ID NO: 14592 - protein, 70 aa, Synthetic construct
GTSSSLASFPQLDWGSALLHPEVPWGAEPDTDMACTAWDSWSGASQTLGPAPLGPGPIPAAGSEGAAGQN

SEQ ID NO: 14593 - protein, 70 aa, Synthetic construct
GTSSSLASFPQLDWGSALLHPEVPWGAEPDSQALPWSGDWWSGASQTLGPAPLGPGPIPAAGSEGAAGQN

SEQ ID NO: 14594 - protein, 70 aa, Synthetic construct
GTSSSLASFPQLDWGSALLHPEVPWGAEPDSQALPWSGDWTDMACQTLGPAPLGPGPIPAAGSEGAAGQN

SEQ ID NO: 14595 - protein, 70 aa, Synthetic construct
GTSSSLASFPQLDWGSALLHPEVPWGAEPDSQALPWSGDWTDMACTAWDSAPLGPGPIPAAGSEGAAGQN

SEQ ID NO: 14596 - protein, 70 aa, Synthetic construct
GTSSSLASFPQLDWGSALLHPEVPWGAEPDSQALPWSGDWTDMACTAWDSWSGASGPIPAAGSEGAAGQN

SEQ ID NO: 14597 - protein, 70 aa, Synthetic construct
GTSSSLASFPQLDWGSALLHPEVPWGAEPDSQALPWSGDWTDMACTAWDSWSGASQTLGPAGSEGAAGQN

SEQ ID NO: 14598 - protein, 70 aa, Synthetic construct
GTSSSLASFPQLDWGSALLHPEVPWGAEPDSQALPWSGDWTDMACTAWDSWSGASQTLGPAPLGPAAGQN

SEQ ID NO: 14599 - protein, 70 aa, Synthetic construct
GTSSSLASFPQLDWGSALLHPEVPWGAEPDSQALPWSGDWTDMACTAWDSWSGASQTLGPAPLGPGPIPA

SEQ ID NO: 14600 - protein, 70 aa, Synthetic construct
MPCVQSYAAQTYSSEYTTEIMNPDYTKLTMDLGSTEITATATTSLPSISTFVEGYSSNYELKPSCVYQMQ

SEQ ID NO: 14601 - protein, 70 aa, Synthetic construct
MPCVQAQYSPTYSSEYTTEIMNPDYTKLTMDLGSTEITATATTSLPSISTFVEGYSSNYELKPSCVYQMQ

SEQ ID NO: 14602 - protein, 70 aa, Synthetic construct
MPCVQAQYSPSPPGSYTTEIMNPDYTKLTMDLGSTEITATATTSLPSISTFVEGYSSNYELKPSCVYQMQ

SEQ ID NO: 14603 - protein, 70 aa, Synthetic construct
MPCVQAQYSPSPPGSSYAAQMNPDYTKLTMDLGSTEITATATTSLPSISTFVEGYSSNYELKPSCVYQMQ

SEQ ID NO: 14604 - protein, 70 aa, Synthetic construct
MPCVQAQYSPSPPGSSYAAQTYSSEYTTEIDLGSTEITATATTSLPSISTFVEGYSSNYELKPSCVYQMQ

SEQ ID NO: 14605 - protein, 70 aa, Synthetic construct
MPCVQAQYSPSPPGSSYAAQTYSSEYTTEIMNPDYEITATATTSLPSISTFVEGYSSNYELKPSCVYQMQ

SEQ ID NO: 14606 - protein, 70 aa, Synthetic construct
MPCVQAQYSPSPPGSSYAAQTYSSEYTTEIMNPDYTKLTMATTSLPSISTFVEGYSSNYELKPSCVYQMQ

SEQ ID NO: 14607 - protein, 70 aa, Synthetic construct
MPCVQAQYSPSPPGSSYAAQTYSSEYTTEIMNPDYTKLTMDLGSTEITATATTSLPSISTFVEGYVYQMQ

SEQ ID NO: 14608 - protein, 70 aa, Synthetic construct
WAEKIQTLLIESAFLELFVLRLSIRSNTAEDKFVFCNGLVLHRLQCLRGFGEWLDSIKDFSLNLQSLNLD

SEQ ID NO: 14609 - protein, 70 aa, Synthetic construct
WAEKIPGFTDLPKEDQTLLIRLSIRSNTAEDKFVFCNGLVLHRLQCLRGFGEWLDSIKDFSLNLQSLNLD

SEQ ID NO: 14610 - protein, 70 aa, Synthetic construct
WAEKIPGFTDLPKEDQTLLIESAFLELFVLDKFVFCNGLVLHRLQCLRGFGEWLDSIKDFSLNLQSLNLD

SEQ ID NO: 14611 - protein, 70 aa, Synthetic construct
WAEKIPGFTDLPKEDQTLLIESAFLELFVLRLSIRSNTAELHRLQCLRGFGEWLDSIKDFSLNLQSLNLD

SEQ ID NO: 14612 - protein, 70 aa, Synthetic construct
WAEKIPGFTDLPKEDQTLLIESAFLELFVLRLSIRSNTAEDKFVFCNGLVLHRLQCLRGFGEWLDSLNLD

SEQ ID NO: 14613 - protein, 70 aa, Synthetic construct
WAEKIPGFTDLPKEDQTLLIESAFLELFVLRLSIRSNTAEDKFVFCNGLVLHRLQCLRGFGEWLDSIKDF

SEQ ID NO: 14614 - protein, 70 aa, Synthetic construct
LDTLVEFVIQPQNESNPELYKYDLIAVSNHYGGMRDGHYTTFACNKDSGQWHYFDDNSVSPVNENQIESK

SEQ ID NO: 14615 - protein, 70 aa, Synthetic construct
LDTLVEFPIRDLDFSEFVIQPQNESNPELYYGGMRDGHYTTFACNKDSGQWHYFDDNSVSPVNENQIESK

SEQ ID NO: 14616 - protein, 70 aa, Synthetic construct
LDTLVEFPIRDLDFSEFVIQPQNESNPELYKYDLIDGHYTTFACNKDSGQWHYFDDNSVSPVNENQIESK

SEQ ID NO: 14617 - protein, 70 aa, Synthetic construct
LDTLVEFPIRDLDFSEFVIQPQNESNPELYKYDLIAVSNHTFACNKDSGQWHYFDDNSVSPVNENQIESK

SEQ ID NO: 14618 - protein, 70 aa, Synthetic construct
LDTLVEFPIRDLDFSEFVIQPQNESNPELYKYDLIAVSNHYGGMRDGHYTWHYFDDNSVSPVNENQIESK

SEQ ID NO: 14619 - protein, 70 aa, Synthetic construct
LDTLVEFPIRDLDFSEFVIQPQNESNPELYKYDLIAVSNHYGGMRDGHYTTFACNKDSGQWHYFDQIESK

SEQ ID NO: 14620 - protein, 70 aa, Synthetic construct
LDTLVEFPIRDLDFSEFVIQPQNESNPELYKYDLIAVSNHYGGMRDGHYTTFACNKDSGQWHYFDDNSVS

SEQ ID NO: 14621 - protein, 70 aa, Synthetic construct
TDSLELLQLQQKLLWYPMALGNLADLEELEPTPGRPDPLTLYHKGIASAKTYYRDEHIYPYMYLAGYHCR

SEQ ID NO: 14622 - protein, 70 aa, Synthetic construct
TDSLELLQLQQKLLWLLYDLGHLERLEELEPTPGRPDPLTLYHKGIASAKTYYRDEHIYPYMYLAGYHCR

SEQ ID NO: 14623 - protein, 70 aa, Synthetic construct
TDSLELLQLQQKLLWLLYDLGHLERYPMALPTPGRPDPLTLYHKGIASAKTYYRDEHIYPYMYLAGYHCR

SEQ ID NO: 14624 - protein, 70 aa, Synthetic construct
TDSLELLQLQQKLLWLLYDLGHLERYPMALGNLADLEELELYHKGIASAKTYYRDEHIYPYMYLAGYHCR

SEQ ID NO: 14625 - protein, 70 aa, Synthetic construct
TDSLELLQLQQKLLWLLYDLGHLERYPMALGNLADLEELEPTPGRPDPLTTYYRDEHIYPYMYLAGYHCR

SEQ ID NO: 14626 - protein, 70 aa, Synthetic construct
TDSLELLQLQQKLLWLLYDLGHLERYPMALGNLADLEELEPTPGRPDPLTLYHKGEHIYPYMYLAGYHCR

SEQ ID NO: 14627 - protein, 70 aa, Synthetic construct
TDSLELLQLQQKLLWLLYDLGHLERYPMALGNLADLEELEPTPGRPDPLTLYHKGIASAKYMYLAGYHCR

SEQ ID NO: 14628 - protein, 70 aa, Synthetic construct
TDSLELLQLQQKLLWLLYDLGHLERYPMALGNLADLEELEPTPGRPDPLTLYHKGIASAKTYYRDEHIYP

SEQ ID NO: 14629 - protein, 70 aa, Synthetic construct
WADTAEDEEIYKEFFEVANDVIPNLLKEAASLLEAGEERPGEQSQGTQSQGSALQDPECFAHLLRFYDGI

SEQ ID NO: 14630 - protein, 70 aa, Synthetic construct
WADTATVIQDYKEFFEVANDVIPNLLKEAASLLEAGEERPGEQSQGTQSQGSALQDPECFAHLLRFYDGI

SEQ ID NO: 14631 - protein, 70 aa, Synthetic construct
WADTATVIQDYNYCREVANDVIPNLLKEAASLLEAGEERPGEQSQGTQSQGSALQDPECFAHLLRFYDGI

SEQ ID NO: 14632 - protein, 70 aa, Synthetic construct
WADTATVIQDYNYCREDEEIYKEFFLKEAASLLEAGEERPGEQSQGTQSQGSALQDPECFAHLLRFYDGI

SEQ ID NO: 14633 - protein, 70 aa, Synthetic construct
WADTATVIQDYNYCREDEEIYKEFFEVANDSLLEAGEERPGEQSQGTQSQGSALQDPECFAHLLRFYDGI

SEQ ID NO: 14634 - protein, 70 aa, Synthetic construct
WADTATVIQDYNYCREDEEIYKEFFEVANDVIPNLGEERPGEQSQGTQSQGSALQDPECFAHLLRFYDGI

SEQ ID NO: 14635 - protein, 70 aa, Synthetic construct
WADTATVIQDYNYCREDEEIYKEFFEVANDVIPNLLKEAAGEQSQGTQSQGSALQDPECFAHLLRFYDGI

SEQ ID NO: 14636 - protein, 70 aa, Synthetic construct
WADTATVIQDYNYCREDEEIYKEFFEVANDVIPNLLKEAASLLEAGTQSQGSALQDPECFAHLLRFYDGI

SEQ ID NO: 14637 - protein, 70 aa, Synthetic construct
WADTATVIQDYNYCREDEEIYKEFFEVANDVIPNLLKEAASLLEAGEERPGEQSQDPECFAHLLRFYDGI

SEQ ID NO: 14638 - protein, 70 aa, Synthetic construct
WADTATVIQDYNYCREDEEIYKEFFEVANDVIPNLLKEAASLLEAGEERPGEQSQGTQSQAHLLRFYDGI

SEQ ID NO: 14639 - protein, 70 aa, Synthetic construct
WADTATVIQDYNYCREDEEIYKEFFEVANDVIPNLLKEAASLLEAGEERPGEQSQGTQSQGSALQFYDGI

SEQ ID NO: 14640 - protein, 70 aa, Synthetic construct
WADTATVIQDYNYCREDEEIYKEFFEVANDVIPNLLKEAASLLEAGEERPGEQSQGTQSQGSALQDPECF

SEQ ID NO: 14641 - protein, 70 aa, Synthetic construct
DIAVSYTGEELDFETVGDIIAIIEDKVDDHPEVLDVAAVEAALSFCEENDDPQSLPGPWEHPIQQERDKP

SEQ ID NO: 14642 - protein, 70 aa, Synthetic construct
KEELDYTGEELDFETVGDIIAIIEDKVDDHPEVLDVAAVEAALSFCEENDDPQSLPGPWEHPIQQERDKP

SEQ ID NO: 14643 - protein, 70 aa, Synthetic construct
KEELDLAEKMLDFETVGDIIAIIEDKVDDHPEVLDVAAVEAALSFCEENDDPQSLPGPWEHPIQQERDKP

SEQ ID NO: 14644 - protein, 70 aa, Synthetic construct
KEELDLAEKMDIAVSYTGEELDFETVGDIIPEVLDVAAVEAALSFCEENDDPQSLPGPWEHPIQQERDKP

SEQ ID NO: 14645 - protein, 70 aa, Synthetic construct
KEELDLAEKMDIAVSYTGEELDFETVGDIIAIIEDVAAVEAALSFCEENDDPQSLPGPWEHPIQQERDKP

SEQ ID NO: 14646 - protein, 70 aa, Synthetic construct
KEELDLAEKMDIAVSYTGEELDFETVGDIIAIIEDKVDDHAALSFCEENDDPQSLPGPWEHPIQQERDKP

SEQ ID NO: 14647 - protein, 70 aa, Synthetic construct
KEELDLAEKMDIAVSYTGEELDFETVGDIIAIIEDKVDDHPEVLDVAAVEAALSFPGPWEHPIQQERDKP

SEQ ID NO: 14648 - protein, 70 aa, Synthetic construct
KEELDLAEKMDIAVSYTGEELDFETVGDIIAIIEDKVDDHPEVLDVAAVEAALSFCEENDDPQSLPGPWE

SEQ ID NO: 14649 - protein, 70 aa, Synthetic construct
NYRSHEALLMLPSRLFYHRELEVCADPTVVTSLLGWEKLPKKGFPLIFHGVRGSEAREGKSPSWFNPAEA

SEQ ID NO: 14650 - protein, 70 aa, Synthetic construct
NPLLVEALLMLPSRLFYHRELEVCADPTVVTSLLGWEKLPKKGFPLIFHGVRGSEAREGKSPSWFNPAEA

SEQ ID NO: 14651 - protein, 70 aa, Synthetic construct
NPLLVTKLVKNYRSHEALLMLPSRLFYHRETSLLGWEKLPKKGFPLIFHGVRGSEAREGKSPSWFNPAEA

SEQ ID NO: 14652 - protein, 70 aa, Synthetic construct
NPLLVTKLVKNYRSHEALLMLPSRLFYHRELEVCADPTVVKKGFPLIFHGVRGSEAREGKSPSWFNPAEA

SEQ ID NO: 14653 - protein, 70 aa, Synthetic construct
NPLLVTKLVKNYRSHEALLMLPSRLFYHRELEVCADPTVVTSLLGLIFHGVRGSEAREGKSPSWFNPAEA

SEQ ID NO: 14654 - protein, 70 aa, Synthetic construct
GVNQRMDSYAHMNGWSNGSYSMMQDQLGYPQHPGLMHRYDVSALQYNSMTSSQTYMNGSPTYSMSYSQQG

SEQ ID NO: 14655 - protein, 70 aa, Synthetic construct
GVNQRMDSYAHMNGWSNGSYSMMQDQLGYPQHPGLNAHGAAQMQPMHRYDVSALQYNSMTTYSMSYSQQG

SEQ ID NO: 14656 - protein, 70 aa, Synthetic construct
LSGARVSLSSPTSAEYIPLTPAAADVNGSPATITIETCEDPGDWTAAIGDDTFTFWRGLKDAGLLDEVIQ

SEQ ID NO: 14657 - protein, 70 aa, Synthetic construct
SNTCRVSLSSPTSAEYIPLTPAAADVNGSPATITIETCEDPGDWTAAIGDDTFTFWRGLKDAGLLDEVIQ

SEQ ID NO: 14658 - protein, 70 aa, Synthetic construct
SNTCRSTKIDPTSAEYIPLTPAAADVNGSPATITIETCEDPGDWTAAIGDDTFTFWRGLKDAGLLDEVIQ

SEQ ID NO: 14659 - protein, 70 aa, Synthetic construct
SNTCRSTKIDLSGARYIPLTPAAADVNGSPATITIETCEDPGDWTAAIGDDTFTFWRGLKDAGLLDEVIQ

SEQ ID NO: 14660 - protein, 70 aa, Synthetic construct
SNTCRSTKIDLSGARVSLSSPAAADVNGSPATITIETCEDPGDWTAAIGDDTFTFWRGLKDAGLLDEVIQ

SEQ ID NO: 14661 - protein, 70 aa, Synthetic construct
SNTCRSTKIDLSGARVSLSSPTSAEVNGSPATITIETCEDPGDWTAAIGDDTFTFWRGLKDAGLLDEVIQ

SEQ ID NO: 14662 - protein, 70 aa, Synthetic construct
SNTCRSTKIDLSGARVSLSSPTSAEYIPLTPAAADETCEDPGDWTAAIGDDTFTFWRGLKDAGLLDEVIQ

SEQ ID NO: 14663 - protein, 70 aa, Synthetic construct
FVKIPVKLFADSAHYKLLETELLQEISEIEKRYDICSKVSEKGQKTCILFESKDRQVDLSVHAYASFIDA

SEQ ID NO: 14664 - protein, 70 aa, Synthetic construct
FVKIPVKLFAANYMMNVIEVDSAHYISEIEKRYDICSKVSEKGQKTCILFESKDRQVDLSVHAYASFIDA

SEQ ID NO: 14665 - protein, 70 aa, Synthetic construct
FVKIPVKLFAANYMMNVIEVDSAHYKLLETELLQEISEIEKRYDICSKVSEKGQKQVDLSVHAYASFIDA

SEQ ID NO: 14666 - protein, 70 aa, Synthetic construct
FVKIPVKLFAANYMMNVIEVDSAHYKLLETELLQEISEIEKRYDICSKVSEKGQKTCILFVHAYASFIDA

SEQ ID NO: 14667 - protein, 70 aa, Synthetic construct
NKQHKAELKPLRADYLIARVVTVLEKLIKEFQDKGPNSVLPLYYRYWVHSGQQVHLGSAEGPKVSIVGLD

SEQ ID NO: 14668 - protein, 70 aa, Synthetic construct
ICINDAELKPLRADYLIARVVTVLEKLIKEFQDKGPNSVLPLYYRYWVHSGQQVHLGSAEGPKVSIVGLD

SEQ ID NO: 14669 - protein, 70 aa, Synthetic construct
ICINDLITEYNKQHKAELKPLRADYLIARVVTVLEPNSVLPLYYRYWVHSGQQVHLGSAEGPKVSIVGLD

SEQ ID NO: 14670 - protein, 70 aa, Synthetic construct
ICINDLITEYNKQHKAELKPLRADYLIARVVTVLEKLIKEFQDKGPNSVLPLYYRYWVHSGPKVSIVGLD

SEQ ID NO: 14671 - protein, 70 aa, Synthetic construct
ICINDLITEYNKQHKAELKPLRADYLIARVVTVLEKLIKEFQDKGPNSVLPLYYRYWVHSGQQVHIVGLD

SEQ ID NO: 14672 - protein, 70 aa, Synthetic construct
PSQKVKETLVIMKDVSSSLQNRVHPRPLVKLLPKGVQKEQETVSLYLKANPEELVVFEDLNVFHCQEECV

SEQ ID NO: 14673 - protein, 70 aa, Synthetic construct
TFLPKKETLVIMKDVSSSLQNRVHPRPLVKLLPKGVQKEQETVSLYLKANPEELVVFEDLNVFHCQEECV

SEQ ID NO: 14674 - protein, 70 aa, Synthetic construct
TFLPKPSLVQIMKDVSSSLQNRVHPRPLVKLLPKGVQKEQETVSLYLKANPEELVVFEDLNVFHCQEECV

SEQ ID NO: 14675 - protein, 70 aa, Synthetic construct
TFLPKPSLVQPSQKVSSSLQNRVHPRPLVKLLPKGVQKEQETVSLYLKANPEELVVFEDLNVFHCQEECV

SEQ ID NO: 14676 - protein, 70 aa, Synthetic construct
TFLPKPSLVQPSQKVKETLVNRVHPRPLVKLLPKGVQKEQETVSLYLKANPEELVVFEDLNVFHCQEECV

SEQ ID NO: 14677 - protein, 70 aa, Synthetic construct
TFLPKPSLVQPSQKVKETLVIMKDVRPLVKLLPKGVQKEQETVSLYLKANPEELVVFEDLNVFHCQEECV

SEQ ID NO: 14678 - protein, 70 aa, Synthetic construct
TFLPKPSLVQPSQKVKETLVIMKDVSSSLQLLPKGVQKEQETVSLYLKANPEELVVFEDLNVFHCQEECV

SEQ ID NO: 14679 - protein, 70 aa, Synthetic construct
TFLPKPSLVQPSQKVKETLVIMKDVSSSLQNRVHPVQKEQETVSLYLKANPEELVVFEDLNVFHCQEECV

SEQ ID NO: 14680 - protein, 70 aa, Synthetic construct
TFLPKPSLVQPSQKVKETLVIMKDVSSSLQNRVHPRPLVKETVSLYLKANPEELVVFEDLNVFHCQEECV

SEQ ID NO: 14681 - protein, 70 aa, Synthetic construct
TFLPKPSLVQPSQKVKETLVIMKDVSSSLQNRVHPRPLVKLLPKGYLKANPEELVVFEDLNVFHCQEECV

SEQ ID NO: 14682 - protein, 70 aa, Synthetic construct
TFLPKPSLVQPSQKVKETLVIMKDVSSSLQNRVHPRPLVKLLPKGVQKEQPEELVVFEDLNVFHCQEECV

SEQ ID NO: 14683 - protein, 70 aa, Synthetic construct
TFLPKPSLVQPSQKVKETLVIMKDVSSSLQNRVHPRPLVKLLPKGVQKEQETVSLVFEDLNVFHCQEECV

SEQ ID NO: 14684 - protein, 70 aa, Synthetic construct
QMKLEAAGGPSALNFDSPSSLFESLISPIKTETFFKEFWEQKPLLYYGSLFKLTDLKSLCSRGMYYGRDV

SEQ ID NO: 14685 - protein, 70 aa, Synthetic construct
SYKHDTKLLISVKSRLNQSQREELGLIEQAYDNPHEALSRIKRHLLTQRAFKEVGIEFMDLYSHLVPVYD

SEQ ID NO: 14686 - protein, 70 aa, Synthetic construct
SYKHDTKLLILALERLKEAYSVKSRLNQSQREELGLIEQAYDNPHEALSRFKEVGIEFMDLYSHLVPVYD

SEQ ID NO: 14687 - protein, 70 aa, Synthetic construct
TKDQLVGLGRKHIDAAMVLEECAQDYEEAVLLLLEGAAWEEALRLVYKYNRLDIIETNVKPSILEAQKNY

SEQ ID NO: 14688 - protein, 70 aa, Synthetic construct
TKDQLVGLGRTLAGKLVEQRKHIDAAMVLEECAQDYEEAVLLLLEGAAWEEALRLETNVKPSILEAQKNY

SEQ ID NO: 14689 - protein, 70 aa, Synthetic construct
DLTAPDGSLCSFATTDDFYDDPCFDSPDLRFFEDLDPRLMHVGALLKPEEHSHFPAAVHPAPGAREDEHV

SEQ ID NO: 14690 - protein, 70 aa, Synthetic construct
ELLSPDGSLCSFATTDDFYDDPCFDSPDLRFFEDLDPRLMHVGALLKPEEHSHFPAAVHPAPGAREDEHV

SEQ ID NO: 14691 - protein, 70 aa, Synthetic construct
ELLSPPLRDVSFATTDDFYDDPCFDSPDLRFFEDLDPRLMHVGALLKPEEHSHFPAAVHPAPGAREDEHV

SEQ ID NO: 14692 - protein, 70 aa, Synthetic construct
ELLSPPLRDVDLTAPDDFYDDPCFDSPDLRFFEDLDPRLMHVGALLKPEEHSHFPAAVHPAPGAREDEHV

SEQ ID NO: 14693 - protein, 70 aa, Synthetic construct
ELLSPPLRDVDLTAPDGSLCSFATTDDFYDFFEDLDPRLMHVGALLKPEEHSHFPAAVHPAPGAREDEHV

SEQ ID NO: 14694 - protein, 70 aa, Synthetic construct
ELLSPPLRDVDLTAPDGSLCSFATTDDFYDDPCFDSPDLRFFEDLLKPEEHSHFPAAVHPAPGAREDEHV

SEQ ID NO: 14695 - protein, 70 aa, Synthetic construct
ELLSPPLRDVDLTAPDGSLCSFATTDDFYDDPCFDSPDLRFFEDLDPRLMHSHFPAAVHPAPGAREDEHV

SEQ ID NO: 14696 - protein, 70 aa, Synthetic construct
ELLSPPLRDVDLTAPDGSLCSFATTDDFYDDPCFDSPDLRFFEDLDPRLMHVGALAAVHPAPGAREDEHV

SEQ ID NO: 14697 - protein, 70 aa, Synthetic construct
ELLSPPLRDVDLTAPDGSLCSFATTDDFYDDPCFDSPDLRFFEDLDPRLMHVGALLKPEEAPGAREDEHV

SEQ ID NO: 14698 - protein, 70 aa, Synthetic construct
ELLSPPLRDVDLTAPDGSLCSFATTDDFYDDPCFDSPDLRFFEDLDPRLMHVGALLKPEEHSHFPEDEHV

SEQ ID NO: 14699 - protein, 70 aa, Synthetic construct
ELLSPPLRDVDLTAPDGSLCSFATTDDFYDDPCFDSPDLRFFEDLDPRLMHVGALLKPEEHSHFPAAVHP

SEQ ID NO: 14700 - protein, 70 aa, Synthetic construct
TKTLPDILTFNLDIVAYKGHHYPGPGNHFWKCLFMSGLSEVQLNHMDDHTLPGKYGIGFTNMVERTTPGS

SEQ ID NO: 14701 - protein, 70 aa, Synthetic construct
TKTLPDILTFNLDIVIIGINHYPGPGNHFWKCLFMSGLSEVQLNHMDDHTLPGKYGIGFTNMVERTTPGS

SEQ ID NO: 14702 - protein, 70 aa, Synthetic construct
TKTLPDILTFNLDIVIIGINPGLMAAYKGHHYPGPSGLSEVQLNHMDDHTLPGKYGIGFTNMVERTTPGS

SEQ ID NO: 14703 - protein, 70 aa, Synthetic construct
TKTLPDILTFNLDIVIIGINPGLMAAYKGHHYPGPGNHFWKCLFMSGLSEVQLNHGIGFTNMVERTTPGS

SEQ ID NO: 14704 - protein, 70 aa, Synthetic construct
PGGNLSSWEDLLLFTDLDQARGAKLSPFAPEQPEEMYQTLAALSSQGPAAYDGAPGGFVHSAAAAAAAAA

SEQ ID NO: 14705 - protein, 70 aa, Synthetic construct
PGGNLSSWEDLLLFTDLDQAATASKSPFAPEQPEEMYQTLAALSSQGPAAYDGAPGGFVHSAAAAAAAAA

SEQ ID NO: 14706 - protein, 70 aa, Synthetic construct
PGGNLSSWEDLLLFTDLDQAATASKLLWSSEQPEEMYQTLAALSSQGPAAYDGAPGGFVHSAAAAAAAAA

SEQ ID NO: 14707 - protein, 70 aa, Synthetic construct
PGGNLSSWEDLLLFTDLDQAATASKLLWSSRGAKLSPFAPAALSSQGPAAYDGAPGGFVHSAAAAAAAAA

SEQ ID NO: 14708 - protein, 70 aa, Synthetic construct
PGGNLSSWEDLLLFTDLDQAATASKLLWSSRGAKLSPFAPEQPEEQGPAAYDGAPGGFVHSAAAAAAAAA

SEQ ID NO: 14709 - protein, 70 aa, Synthetic construct
PGGNLSSWEDLLLFTDLDQAATASKLLWSSRGAKLSPFAPEQPEEMYQTLYDGAPGGFVHSAAAAAAAAA

SEQ ID NO: 14710 - protein, 70 aa, Synthetic construct
PGGNLSSWEDLLLFTDLDQAATASKLLWSSRGAKLSPFAPEQPEEMYQTLAALSSGGFVHSAAAAAAAAA

SEQ ID NO: 14711 - protein, 70 aa, Synthetic construct
PGGNLSSWEDLLLFTDLDQAATASKLLWSSRGAKLSPFAPEQPEEMYQTLAALSSQGPAASAAAAAAAAA

SEQ ID NO: 14712 - protein, 70 aa, Synthetic construct
PGGNLSSWEDLLLFTDLDQAATASKLLWSSRGAKLSPFAPEQPEEMYQTLAALSSQGPAAYDGAPAAAAA

SEQ ID NO: 14713 - protein, 70 aa, Synthetic construct
PGGNLSSWEDLLLFTDLDQAATASKLLWSSRGAKLSPFAPEQPEEMYQTLAALSSQGPAAYDGAPGGFVH

SEQ ID NO: 14714 - protein, 70 aa, Synthetic construct
LDWDMRNELFLPCTTDQCSLGVMKPPEMPQKRRPSPDGDGPPCEPNLWMWVDPNILCPLGSQEAPKPSGK

SEQ ID NO: 14715 - protein, 70 aa, Synthetic construct
LDWDMRNELFLPCTTDQCSLAEQILPEMPQKRRPSPDGDGPPCEPNLWMWVDPNILCPLGSQEAPKPSGK

SEQ ID NO: 14716 - protein, 70 aa, Synthetic construct
LDWDMRNELFLPCTTDQCSLAEQILAKYRVKRRPSPDGDGPPCEPNLWMWVDPNILCPLGSQEAPKPSGK

SEQ ID NO: 14717 - protein, 70 aa, Synthetic construct
LDWDMRNELFLPCTTDQCSLAEQILAKYRVGVMKPPDGDGPPCEPNLWMWVDPNILCPLGSQEAPKPSGK

SEQ ID NO: 14718 - protein, 70 aa, Synthetic construct
LDWDMRNELFLPCTTDQCSLAEQILAKYRVGVMKPPEMPQPPCEPNLWMWVDPNILCPLGSQEAPKPSGK

SEQ ID NO: 14719 - protein, 70 aa, Synthetic construct
LDWDMRNELFLPCTTDQCSLAEQILAKYRVGVMKPPEMPQKRRPSNLWMWVDPNILCPLGSQEAPKPSGK

SEQ ID NO: 14720 - protein, 70 aa, Synthetic construct
LDWDMRNELFLPCTTDQCSLAEQILAKYRVGVMKPPEMPQKRRPSPDGDGPPCEPNLWMWVDPNILCPLG

SEQ ID NO: 14721 - protein, 70 aa, Synthetic construct
ILVGTPGRIKDHIQNGKLDLTKLKHVVLDEVDQMLDMGFADQVEEILSVAYKKDSEDNPQTLLFSATCPH

SEQ ID NO: 14722 - protein, 70 aa, Synthetic construct
QFERMRNGIDILVGTPGRIKDHIQNGKLDLTKLKHVVLDEVDQMLDMGFADQVEEEDNPQTLLFSATCPH

SEQ ID NO: 14723 - protein, 70 aa, Synthetic construct
CIFCRIKTIQERCPELMRQMLPEEQLKCEFLLLKVYCDSKSCFFASEPYYNREGSQGPQKPMWLNKVKTS

SEQ ID NO: 14724 - protein, 70 aa, Synthetic construct
CIFCRIKTIQERCPESQSGHQESEVLMRQMLLLKVYCDSKSCFFASEPYYNREGSQGPQKPMWLNKVKTS

SEQ ID NO: 14725 - protein, 70 aa, Synthetic construct
CIFCRIKTIQERCPESQSGHQESEVLMRQMLPEEQLKCEFLLLKVSEPYYNREGSQGPQKPMWLNKVKTS

SEQ ID NO: 14726 - protein, 70 aa, Synthetic construct
CIFCRIKTIQERCPESQSGHQESEVLMRQMLPEEQLKCEFLLLKVYCDSKNREGSQGPQKPMWLNKVKTS

SEQ ID NO: 14727 - protein, 70 aa, Synthetic construct
CIFCRIKTIQERCPESQSGHQESEVLMRQMLPEEQLKCEFLLLKVYCDSKSCFFASEPYYNREGSQGPQK

SEQ ID NO: 14728 - protein, 70 aa, Synthetic construct
KVLHRDLKPQNLLINGLARAKSIPTKTYSNEVVTLWYRPPDILLGSTDYSTQIDMWGVGCIFYEMATGRP

SEQ ID NO: 14729 - protein, 70 aa, Synthetic construct
RKTSLYFSSKRKAFKKWTPPRSPFNLVQETLFHDPWKLLIATIFLNRTSGKMAIPVLWKFLEKYPSAEVA

SEQ ID NO: 14730 - protein, 70 aa, Synthetic construct
RKTSLYFSSKYNKEAKWTPPRSPFNLVQETLFHDPWKLLIATIFLNRTSGKMAIPVLWKFLEKYPSAEVA

SEQ ID NO: 14731 - protein, 70 aa, Synthetic construct
RKTSLYFSSKYNKEALSPPRRSPFNLVQETLFHDPWKLLIATIFLNRTSGKMAIPVLWKFLEKYPSAEVA

SEQ ID NO: 14732 - protein, 70 aa, Synthetic construct
RKTSLYFSSKYNKEALSPPRRKAFKKWTPPRSPFNLVQETLFHDPWKLLIKMAIPVLWKFLEKYPSAEVA

SEQ ID NO: 14733 - protein, 70 aa, Synthetic construct
LWKLLPENNVLSPLPSQAMDDLMLSPDDIEQWFTEDPGPDEAPRMPEAAPPVAPAPAAPTPAAPAPAPSW

SEQ ID NO: 14734 - protein, 70 aa, Synthetic construct
PPLSQETFSDLSPLPSQAMDDLMLSPDDIEQWFTEDPGPDEAPRMPEAAPPVAPAPAAPTPAAPAPAPSW

SEQ ID NO: 14735 - protein, 70 aa, Synthetic construct
PPLSQETFSDLWKLLSQAMDDLMLSPDDIEQWFTEDPGPDEAPRMPEAAPPVAPAPAAPTPAAPAPAPSW

SEQ ID NO: 14736 - protein, 70 aa, Synthetic construct
PPLSQETFSDLWKLLPENNVDLMLSPDDIEQWFTEDPGPDEAPRMPEAAPPVAPAPAAPTPAAPAPAPSW

SEQ ID NO: 14737 - protein, 70 aa, Synthetic construct
PPLSQETFSDLWKLLPENNVLSPLPPDDIEQWFTEDPGPDEAPRMPEAAPPVAPAPAAPTPAAPAPAPSW

SEQ ID NO: 14738 - protein, 70 aa, Synthetic construct
PPLSQETFSDLWKLLPENNVLSPLPSQAMDQWFTEDPGPDEAPRMPEAAPPVAPAPAAPTPAAPAPAPSW

SEQ ID NO: 14739 - protein, 70 aa, Synthetic construct
PPLSQETFSDLWKLLPENNVLSPLPSQAMDDLMLSDPGPDEAPRMPEAAPPVAPAPAAPTPAAPAPAPSW

SEQ ID NO: 14740 - protein, 70 aa, Synthetic construct
PPLSQETFSDLWKLLPENNVLSPLPSQAMDDLMLSPDDIEEAPRMPEAAPPVAPAPAAPTPAAPAPAPSW

SEQ ID NO: 14741 - protein, 70 aa, Synthetic construct
PPLSQETFSDLWKLLPENNVLSPLPSQAMDDLMLSPDDIEQWFTEPEAAPPVAPAPAAPTPAAPAPAPSW

SEQ ID NO: 14742 - protein, 70 aa, Synthetic construct
PPLSQETFSDLWKLLPENNVLSPLPSQAMDDLMLSPDDIEQWFTEDPGPDPVAPAPAAPTPAAPAPAPSW

SEQ ID NO: 14743 - protein, 70 aa, Synthetic construct
PPLSQETFSDLWKLLPENNVLSPLPSQAMDDLMLSPDDIEQWFTEDPGPDEAPRMPAAPTPAAPAPAPSW

SEQ ID NO: 14744 - protein, 70 aa, Synthetic construct
PPLSQETFSDLWKLLPENNVLSPLPSQAMDDLMLSPDDIEQWFTEDPGPDEAPRMPEAAPPAAPAPAPSW

SEQ ID NO: 14745 - protein, 70 aa, Synthetic construct
PPLSQETFSDLWKLLPENNVLSPLPSQAMDDLMLSPDDIEQWFTEDPGPDEAPRMPEAAPPVAPAPAPSW

SEQ ID NO: 14746 - protein, 70 aa, Synthetic construct
PPLSQETFSDLWKLLPENNVLSPLPSQAMDDLMLSPDDIEQWFTEDPGPDEAPRMPEAAPPVAPAPAAPT

SEQ ID NO: 14747 - protein, 70 aa, Synthetic construct
MKLDEDVKMISAEAPVLFAKAAQIFITELTLRAWIHTEDNKRRTLQRNDIAMAITKFDQFDFLIDIVPRD

SEQ ID NO: 14748 - protein, 70 aa, Synthetic construct
ELPLADVKMISAEAPVLFAKAAQIFITELTLRAWIHTEDNKRRTLQRNDIAMAITKFDQFDFLIDIVPRD

SEQ ID NO: 14749 - protein, 70 aa, Synthetic construct
ELPLARIKKIMKLDEDVKMIAAQIFITELTLRAWIHTEDNKRRTLQRNDIAMAITKFDQFDFLIDIVPRD

SEQ ID NO: 14750 - protein, 70 aa, Synthetic construct
ELPLARIKKIMKLDEDVKMISAEAPVLFAKAAQIFITELTLRAWIQRNDIAMAITKFDQFDFLIDIVPRD

SEQ ID NO: 14751 - protein, 70 aa, Synthetic construct
ELPLARIKKIMKLDEDVKMISAEAPVLFAKAAQIFITELTLRAWIHTEDNKRRTLKFDQFDFLIDIVPRD

SEQ ID NO: 14752 - protein, 70 aa, Synthetic construct
TDKESIAESKSPEMSMQEDCISDIAPMQTDEQTNKEQFVPGPNEKPLYTAEPVTLEDLQLLADLFYLPYE

SEQ ID NO: 14753 - protein, 70 aa, Synthetic construct
KMAEEIAESKSPEMSMQEDCISDIAPMQTDEQTNKEQFVPGPNEKPLYTAEPVTLEDLQLLADLFYLPYE

SEQ ID NO: 14754 - protein, 70 aa, Synthetic construct
KMAEELKPMDSPEMSMQEDCISDIAPMQTDEQTNKEQFVPGPNEKPLYTAEPVTLEDLQLLADLFYLPYE

SEQ ID NO: 14755 - protein, 70 aa, Synthetic construct
KMAEELKPMDTDKESMQEDCISDIAPMQTDEQTNKEQFVPGPNEKPLYTAEPVTLEDLQLLADLFYLPYE

SEQ ID NO: 14756 - protein, 70 aa, Synthetic construct
KMAEELKPMDTDKESIAESKISDIAPMQTDEQTNKEQFVPGPNEKPLYTAEPVTLEDLQLLADLFYLPYE

SEQ ID NO: 14757 - protein, 70 aa, Synthetic construct
KMAEELKPMDTDKESIAESKSPEMSPMQTDEQTNKEQFVPGPNEKPLYTAEPVTLEDLQLLADLFYLPYE

SEQ ID NO: 14758 - protein, 70 aa, Synthetic construct
KMAEELKPMDTDKESIAESKSPEMSMQEDCEQTNKEQFVPGPNEKPLYTAEPVTLEDLQLLADLFYLPYE

SEQ ID NO: 14759 - protein, 70 aa, Synthetic construct
KMAEELKPMDTDKESIAESKSPEMSMQEDCISDIAEQFVPGPNEKPLYTAEPVTLEDLQLLADLFYLPYE

SEQ ID NO: 14760 - protein, 70 aa, Synthetic construct
KMAEELKPMDTDKESIAESKSPEMSMQEDCISDIAPMQTDGPNEKPLYTAEPVTLEDLQLLADLFYLPYE

SEQ ID NO: 14761 - protein, 70 aa, Synthetic construct
KMAEELKPMDTDKESIAESKSPEMSMQEDCISDIAPMQTDEQTNKPLYTAEPVTLEDLQLLADLFYLPYE

SEQ ID NO: 14762 - protein, 70 aa, Synthetic construct
KMAEELKPMDTDKESIAESKSPEMSMQEDCISDIAPMQTDEQTNKEQFVPEPVTLEDLQLLADLFYLPYE

SEQ ID NO: 14763 - protein, 70 aa, Synthetic construct
SPAFDPDRFLNSPQRGQTYGGGQGVSPDFPALEPAAALEPQAAARGPPPQSVAGGRRGNCFFIQDDDSGE

SEQ ID NO: 14764 - protein, 70 aa, Synthetic construct
SPAFDPDRFLNSPQRGQTYGGGQGVSPDFPEAEAAHTPCSALEPAAALEPSVAGGRRGNCFFIQDDDSGE

SEQ ID NO: 14765 - protein, 70 aa, Synthetic construct
SPAFDPDRFLNSPQRGQTYGGGQGVSPDFPEAEAAHTPCSALEPAAALEPQAAARRRGNCFFIQDDDSGE

SEQ ID NO: 14766 - protein, 70 aa, Synthetic construct
SPAFDPDRFLNSPQRGQTYGGGQGVSPDFPEAEAAHTPCSALEPAAALEPQAAARGPPPQFFIQDDDSGE

SEQ ID NO: 14767 - protein, 70 aa, Synthetic construct
SPAFDPDRFLNSPQRGQTYGGGQGVSPDFPEAEAAHTPCSALEPAAALEPQAAARGPPPQSVAGGDDSGE

SEQ ID NO: 14768 - protein, 70 aa, Synthetic construct
SPAFDPDRFLNSPQRGQTYGGGQGVSPDFPEAEAAHTPCSALEPAAALEPQAAARGPPPQSVAGGRRGNC

SEQ ID NO: 14769 - protein, 70 aa, Synthetic construct
PVGASELEPFSLSSFPDLMGELISDEAPSIPAPTPQLSPALSTITDFSPEWSYPEGGVKVLITGPWTEAA

SEQ ID NO: 14770 - protein, 70 aa, Synthetic construct
VGRGEELEPFSLSSFPDLMGELISDEAPSIPAPTPQLSPALSTITDFSPEWSYPEGGVKVLITGPWTEAA

SEQ ID NO: 14771 - protein, 70 aa, Synthetic construct
VGRGEALFGGSLSSFPDLMGELISDEAPSIPAPTPQLSPALSTITDFSPEWSYPEGGVKVLITGPWTEAA

SEQ ID NO: 14772 - protein, 70 aa, Synthetic construct
VGRGEALFGGPVGASPDLMGELISDEAPSIPAPTPQLSPALSTITDFSPEWSYPEGGVKVLITGPWTEAA

SEQ ID NO: 14773 - protein, 70 aa, Synthetic construct
VGRGEALFGGPVGASELEPFSLSSFPDLMGPAPTPQLSPALSTITDFSPEWSYPEGGVKVLITGPWTEAA

SEQ ID NO: 14774 - protein, 70 aa, Synthetic construct
VGRGEALFGGPVGASELEPFSLSSFPDLMGELISDQLSPALSTITDFSPEWSYPEGGVKVLITGPWTEAA

SEQ ID NO: 14775 - protein, 70 aa, Synthetic construct
VGRGEALFGGPVGASELEPFSLSSFPDLMGELISDEAPSILSTITDFSPEWSYPEGGVKVLITGPWTEAA

SEQ ID NO: 14776 - protein, 70 aa, Synthetic construct
VGRGEALFGGPVGASELEPFSLSSFPDLMGELISDEAPSIPAPTPDFSPEWSYPEGGVKVLITGPWTEAA

SEQ ID NO: 14777 - protein, 70 aa, Synthetic construct
VGRGEALFGGPVGASELEPFSLSSFPDLMGELISDEAPSIPAPTPQLSPAWSYPEGGVKVLITGPWTEAA

SEQ ID NO: 14778 - protein, 70 aa, Synthetic construct
VGRGEALFGGPVGASELEPFSLSSFPDLMGELISDEAPSIPAPTPQLSPALSTITDFSPELITGPWTEAA

SEQ ID NO: 14779 - protein, 70 aa, Synthetic construct
VGRGEALFGGPVGASELEPFSLSSFPDLMGELISDEAPSIPAPTPQLSPALSTITDFSPEWSYPEWTEAA

SEQ ID NO: 14780 - protein, 70 aa, Synthetic construct
VGRGEALFGGPVGASELEPFSLSSFPDLMGELISDEAPSIPAPTPQLSPALSTITDFSPEWSYPEGGVKV

SEQ ID NO: 14781 - protein, 70 aa, Synthetic construct
HVPGYIDMVSTFGSGEPRHEAYISMEGYQSWTLANGWNSQVYCTKDQPQGSHFWKSSFPGDVALNQPDMC

SEQ ID NO: 14782 - protein, 70 aa, Synthetic construct
FYQGYIDMVSTFGSGEPRHEAYISMEGYQSWTLANGWNSQVYCTKDQPQGSHFWKSSFPGDVALNQPDMC

SEQ ID NO: 14783 - protein, 70 aa, Synthetic construct
FYQGYTSPYQTFGSGEPRHEAYISMEGYQSWTLANGWNSQVYCTKDQPQGSHFWKSSFPGDVALNQPDMC

SEQ ID NO: 14784 - protein, 70 aa, Synthetic construct
FYQGYTSPYQHVPGYEPRHEAYISMEGYQSWTLANGWNSQVYCTKDQPQGSHFWKSSFPGDVALNQPDMC

SEQ ID NO: 14785 - protein, 70 aa, Synthetic construct
FYQGYTSPYQHVPGYIDMVSTFGSGEGYQSWTLANGWNSQVYCTKDQPQGSHFWKSSFPGDVALNQPDMC

SEQ ID NO: 14786 - protein, 70 aa, Synthetic construct
FYQGYTSPYQHVPGYIDMVSTFGSGEPRHEWTLANGWNSQVYCTKDQPQGSHFWKSSFPGDVALNQPDMC

SEQ ID NO: 14787 - protein, 70 aa, Synthetic construct
FYQGYTSPYQHVPGYIDMVSTFGSGEPRHEAYISMGWNSQVYCTKDQPQGSHFWKSSFPGDVALNQPDMC

SEQ ID NO: 14788 - protein, 70 aa, Synthetic construct
FYQGYTSPYQHVPGYIDMVSTFGSGEPRHEAYISMEGYQSVYCTKDQPQGSHFWKSSFPGDVALNQPDMC

SEQ ID NO: 14789 - protein, 70 aa, Synthetic construct
FYQGYTSPYQHVPGYIDMVSTFGSGEPRHEAYISMEGYQSWTLANDQPQGSHFWKSSFPGDVALNQPDMC

SEQ ID NO: 14790 - protein, 70 aa, Synthetic construct
FYQGYTSPYQHVPGYIDMVSTFGSGEPRHEAYISMEGYQSWTLANGWNSQSHFWKSSFPGDVALNQPDMC

SEQ ID NO: 14791 - protein, 70 aa, Synthetic construct
FYQGYTSPYQHVPGYIDMVSTFGSGEPRHEAYISMEGYQSWTLANGWNSQVYCTKSSFPGDVALNQPDMC

SEQ ID NO: 14792 - protein, 70 aa, Synthetic construct
FYQGYTSPYQHVPGYIDMVSTFGSGEPRHEAYISMEGYQSWTLANGWNSQVYCTKDQPQGDVALNQPDMC

SEQ ID NO: 14793 - protein, 70 aa, Synthetic construct
FYQGYTSPYQHVPGYIDMVSTFGSGEPRHEAYISMEGYQSWTLANGWNSQVYCTKDQPQGSHFWKQPDMC

SEQ ID NO: 14794 - protein, 70 aa, Synthetic construct
FAWSQGHCIVKLIPWPLEEQRSSKNETKGRGSPKEKTLDCGQIVWGLAFSPWPSPPSRKLWARHHPQVPD

SEQ ID NO: 14795 - protein, 70 aa, Synthetic construct
FAWSQGHCIVKLIPWPLEEQFIPKGFEAKSGSPKEKTLDCGQIVWGLAFSPWPSPPSRKLWARHHPQVPD

SEQ ID NO: 14796 - protein, 70 aa, Synthetic construct
FAWSQGHCIVKLIPWPLEEQFIPKGFEAKSRSSKNETKGRGQIVWGLAFSPWPSPPSRKLWARHHPQVPD

SEQ ID NO: 14797 - protein, 70 aa, Synthetic construct
FAWSQGHCIVKLIPWPLEEQFIPKGFEAKSRSSKNETKGRGSPKEKTLDCGQIVWGLAFSWARHHPQVPD

SEQ ID NO: 14798 - protein, 70 aa, Synthetic construct
EAEWQEEPLPSYLFKDKQVIGIHTFSVNMKLEAVDPWSPFGISPATVVKVFDEKYFLVEMDDLRPENHAR

SEQ ID NO: 14799 - protein, 70 aa, Synthetic construct
EAEWQEILAKSYLFKDKQVIGIHTFSVNMKLEAVDPWSPFGISPATVVKVFDEKYFLVEMDDLRPENHAR

SEQ ID NO: 14800 - protein, 70 aa, Synthetic construct
QEQTTTVVNALGKRVKPYLPQICGTVLWRLNNKSAKVRQQAADLISRTAVVMKTCQEEKLMGHLGVVLYE

SEQ ID NO: 14801 - protein, 70 aa, Synthetic construct
QEQTTEDSVMLNGFGTVVNAQICGTVLWRLNNKSAKVRQQAADLISRTAVVMKTCQEEKLMGHLGVVLYE

SEQ ID NO: 14802 - protein, 70 aa, Synthetic construct
QEQTTEDSVMLNGFGTVVNALGKRVKPYLPQICGTVLWRLAADLISRTAVVMKTCQEEKLMGHLGVVLYE

SEQ ID NO: 14803 - protein, 70 aa, Synthetic construct
QEQTTEDSVMLNGFGTVVNALGKRVKPYLPQICGTVLWRLNNKSAKVRQQAADLISRTAVVMKTCVVLYE

SEQ ID NO: 14804 - protein, 70 aa, Synthetic construct
NCYKKLCEYIEAVDCSSDILALLNDGSLFCEETEKPSDSSFTLCLTHSPLPSTSEPTTDPQASLSPMSES

SEQ ID NO: 14805 - protein, 70 aa, Synthetic construct
NCYKKLCEYITQTTLSSDILALLNDGSLFCEETEKPSDSSFTLCLTHSPLPSTSEPTTDPQASLSPMSES

SEQ ID NO: 14806 - protein, 70 aa, Synthetic construct
NCYKKLCEYITQTTLARDIIEAVDCSSDILALLNDPSDSSFTLCLTHSPLPSTSEPTTDPQASLSPMSES

SEQ ID NO: 14807 - protein, 70 aa, Synthetic construct
NCYKKLCEYITQTTLARDIIEAVDCSSDILALLNDGSLFCEETEKTHSPLPSTSEPTTDPQASLSPMSES

SEQ ID NO: 14808 - protein, 70 aa, Synthetic construct
NCYKKLCEYITQTTLARDIIEAVDCSSDILALLNDGSLFCEETEKPSDSSFTLCLPTTDPQASLSPMSES

SEQ ID NO: 14809 - protein, 70 aa, Synthetic construct
NCYKKLCEYITQTTLARDIIEAVDCSSDILALLNDGSLFCEETEKPSDSSFTLCLTHSPLQASLSPMSES

SEQ ID NO: 14810 - protein, 70 aa, Synthetic construct
NCYKKLCEYITQTTLARDIIEAVDCSSDILALLNDGSLFCEETEKPSDSSFTLCLTHSPLPSTSEPMSES

SEQ ID NO: 14811 - protein, 70 aa, Synthetic construct
GSETARSVPDMDLSGSFYAADWEPLHSGSLGMGPMATELEPLCTPVVTCTPSCTAYTSSFVFTYPEADSF

SEQ ID NO: 14812 - protein, 70 aa, Synthetic construct
FLFPARSVPDMDLSGSFYAADWEPLHSGSLGMGPMATELEPLCTPVVTCTPSCTAYTSSFVFTYPEADSF

SEQ ID NO: 14813 - protein, 70 aa, Synthetic construct
FLFPASSRPSMDLSGSFYAADWEPLHSGSLGMGPMATELEPLCTPVVTCTPSCTAYTSSFVFTYPEADSF

SEQ ID NO: 14814 - protein, 70 aa, Synthetic construct
FLFPASSRPSGSETASFYAADWEPLHSGSLGMGPMATELEPLCTPVVTCTPSCTAYTSSFVFTYPEADSF

SEQ ID NO: 14815 - protein, 70 aa, Synthetic construct
FLFPASSRPSGSETARSVPDDWEPLHSGSLGMGPMATELEPLCTPVVTCTPSCTAYTSSFVFTYPEADSF

SEQ ID NO: 14816 - protein, 70 aa, Synthetic construct
FLFPASSRPSGSETARSVPDMDLSGSFYAADWEPLATELEPLCTPVVTCTPSCTAYTSSFVFTYPEADSF

SEQ ID NO: 14817 - protein, 70 aa, Synthetic construct
FLFPASSRPSGSETARSVPDMDLSGSFYAADWEPLHSGSLPLCTPVVTCTPSCTAYTSSFVFTYPEADSF

SEQ ID NO: 14818 - protein, 70 aa, Synthetic construct
FLFPASSRPSGSETARSVPDMDLSGSFYAADWEPLHSGSLGMGPMVVTCTPSCTAYTSSFVFTYPEADSF

SEQ ID NO: 14819 - protein, 70 aa, Synthetic construct
FLFPASSRPSGSETARSVPDMDLSGSFYAADWEPLHSGSLGMGPMATELEPSCTAYTSSFVFTYPEADSF

SEQ ID NO: 14820 - protein, 70 aa, Synthetic construct
FLFPASSRPSGSETARSVPDMDLSGSFYAADWEPLHSGSLGMGPMATELEPLCTPYTSSFVFTYPEADSF

SEQ ID NO: 14821 - protein, 70 aa, Synthetic construct
FLFPASSRPSGSETARSVPDMDLSGSFYAADWEPLHSGSLGMGPMATELEPLCTPVVTCTVFTYPEADSF

SEQ ID NO: 14822 - protein, 70 aa, Synthetic construct
RLEERRGIIEFHVIGVLLWLVGLQNVFSHQLPRMPKEYIARLVFDPKHKTLALIKDGRVIGGICFRMFPT

SEQ ID NO: 14823 - protein, 70 aa, Synthetic construct
RLEERRGIIEFHVIGNSLTPKANRRVLLWLVGLQNVFSHQRLVFDPKHKTLALIKDGRVIGGICFRMFPT

SEQ ID NO: 14824 - protein, 70 aa, Synthetic construct
RLEERRGIIEFHVIGNSLTPKANRRVLLWLVGLQNVFSHQLPRMPKEYIARLVFDDGRVIGGICFRMFPT

SEQ ID NO: 14825 - protein, 70 aa, Synthetic construct
RLEERRGIIEFHVIGNSLTPKANRRVLLWLVGLQNVFSHQLPRMPKEYIARLVFDPKHKTLALIKRMFPT

SEQ ID NO: 14826 - protein, 70 aa, Synthetic construct
RLEERRGIIEFHVIGNSLTPKANRRVLLWLVGLQNVFSHQLPRMPKEYIARLVFDPKHKTLALIKDGRVI

SEQ ID NO: 14827 - protein, 70 aa, Synthetic construct
EMEEEAIASLPGEETEDMDFLSGLELADLLDPRQPDWHLDPGLSSPGPLSSSGGGSDSGGLWRGDDDDEA

SEQ ID NO: 14828 - protein, 70 aa, Synthetic construct
GVAVRAIASLPGEETEDMDFLSGLELADLLDPRQPDWHLDPGLSSPGPLSSSGGGSDSGGLWRGDDDDEA

SEQ ID NO: 14829 - protein, 70 aa, Synthetic construct
GVAVRAPSPEPGEETEDMDFLSGLELADLLDPRQPDWHLDPGLSSPGPLSSSGGGSDSGGLWRGDDDDEA

SEQ ID NO: 14830 - protein, 70 aa, Synthetic construct
GVAVRAPSPEEMEEEEDMDFLSGLELADLLDPRQPDWHLDPGLSSPGPLSSSGGGSDSGGLWRGDDDDEA

SEQ ID NO: 14831 - protein, 70 aa, Synthetic construct
GVAVRAPSPEEMEEEAIASLPGEETEDMDFLSGLELADLLPGLSSPGPLSSSGGGSDSGGLWRGDDDDEA

SEQ ID NO: 14832 - protein, 70 aa, Synthetic construct
GVAVRAPSPEEMEEEAIASLPGEETEDMDFLSGLELADLLDPRQPPGPLSSSGGGSDSGGLWRGDDDDEA

SEQ ID NO: 14833 - protein, 70 aa, Synthetic construct
GVAVRAPSPEEMEEEAIASLPGEETEDMDFLSGLELADLLDPRQPDWHLDSSGGGSDSGGLWRGDDDDEA

SEQ ID NO: 14834 - protein, 70 aa, Synthetic construct
GVAVRAPSPEEMEEEAIASLPGEETEDMDFLSGLELADLLDPRQPDWHLDPGLSSSDSGGLWRGDDDDEA

SEQ ID NO: 14835 - protein, 70 aa, Synthetic construct
GVAVRAPSPEEMEEEAIASLPGEETEDMDFLSGLELADLLDPRQPDWHLDPGLSSPGPLSLWRGDDDDEA

SEQ ID NO: 14836 - protein, 70 aa, Synthetic construct
GVAVRAPSPEEMEEEAIASLPGEETEDMDFLSGLELADLLDPRQPDWHLDPGLSSPGPLSSSGGGDDDEA

SEQ ID NO: 14837 - protein, 70 aa, Synthetic construct
GVAVRAPSPEEMEEEAIASLPGEETEDMDFLSGLELADLLDPRQPDWHLDPGLSSPGPLSSSGGGSDSGG

SEQ ID NO: 14838 - protein, 70 aa, Synthetic construct
PLELGPCGDGHGTRIMEDCLLGGTRVSLPEDLLEDPEIFFDVVSLSTWQEVLSDSQREHLQQFLPQFPED

SEQ ID NO: 14839 - protein, 70 aa, Synthetic construct
MDSLDPCGDGHGTRIMEDCLLGGTRVSLPEDLLEDPEIFFDVVSLSTWQEVLSDSQREHLQQFLPQFPED

SEQ ID NO: 14840 - protein, 70 aa, Synthetic construct
MDSLDHMLTDHGTRIMEDCLLGGTRVSLPEDLLEDPEIFFDVVSLSTWQEVLSDSQREHLQQFLPQFPED

SEQ ID NO: 14841 - protein, 70 aa, Synthetic construct
MDSLDHMLTDPLELGMEDCLLGGTRVSLPEDLLEDPEIFFDVVSLSTWQEVLSDSQREHLQQFLPQFPED

SEQ ID NO: 14842 - protein, 70 aa, Synthetic construct
MDSLDHMLTDPLELGPCGDGLGGTRVSLPEDLLEDPEIFFDVVSLSTWQEVLSDSQREHLQQFLPQFPED

SEQ ID NO: 14843 - protein, 70 aa, Synthetic construct
MDSLDHMLTDPLELGPCGDGHGTRIVSLPEDLLEDPEIFFDVVSLSTWQEVLSDSQREHLQQFLPQFPED

SEQ ID NO: 14844 - protein, 70 aa, Synthetic construct
MDSLDHMLTDPLELGPCGDGHGTRIMEDCLDLLEDPEIFFDVVSLSTWQEVLSDSQREHLQQFLPQFPED

SEQ ID NO: 14845 - protein, 70 aa, Synthetic construct
MDSLDHMLTDPLELGPCGDGHGTRIMEDCLLGGTRPEIFFDVVSLSTWQEVLSDSQREHLQQFLPQFPED

SEQ ID NO: 14846 - protein, 70 aa, Synthetic construct
MDSLDHMLTDPLELGPCGDGHGTRIMEDCLLGGTRVSLPEDLLEDSTWQEVLSDSQREHLQQFLPQFPED

SEQ ID NO: 14847 - protein, 70 aa, Synthetic construct
MDSLDHMLTDPLELGPCGDGHGTRIMEDCLLGGTRVSLPEDLLEDPEIFFVLSDSQREHLQQFLPQFPED

SEQ ID NO: 14848 - protein, 70 aa, Synthetic construct
MDSLDHMLTDPLELGPCGDGHGTRIMEDCLLGGTRVSLPEDLLEDPEIFFDVVSLQREHLQQFLPQFPED

SEQ ID NO: 14849 - protein, 70 aa, Synthetic construct
MDSLDHMLTDPLELGPCGDGHGTRIMEDCLLGGTRVSLPEDLLEDPEIFFDVVSLSTWQEQQFLPQFPED

SEQ ID NO: 14850 - protein, 70 aa, Synthetic construct
MDSLDHMLTDPLELGPCGDGHGTRIMEDCLLGGTRVSLPEDLLEDPEIFFDVVSLSTWQEVLSDSQFPED

SEQ ID NO: 14851 - protein, 70 aa, Synthetic construct [sequence omitted]

SEQ ID NO: 14852 - protein, 70 aa, Synthetic construct
VTLASGQESFLGQLPLYSSGYADPLRHYPAPYGPGPGQDKGFATSSYYPPAGGGYGRAAPCDYGPAPAFY

SEQ ID NO: 14853 - protein, 70 aa, Synthetic construct
SSYFVGQESFLGQLPLYSSGYADPLRHYPAPYGPGPGQDKGFATSSYYPPAGGGYGRAAPCDYGPAPAFY

SEQ ID NO: 14854 - protein, 70 aa, Synthetic construct
SSYFVNSTFPLGQLPLYSSGYADPLRHYPAPYGPGPGQDKGFATSSYYPPAGGGYGRAAPCDYGPAPAFY

SEQ ID NO: 14855 - protein, 70 aa, Synthetic construct
SSYFVNSTFPVTLASLYSSGYADPLRHYPAPYGPGPGQDKGFATSSYYPPAGGGYGRAAPCDYGPAPAFY

SEQ ID NO: 14856 - protein, 70 aa, Synthetic construct
SSYFVNSTFPVTLASGQESFYADPLRHYPAPYGPGPGQDKGFATSSYYPPAGGGYGRAAPCDYGPAPAFY

SEQ ID NO: 14857 - protein, 70 aa, Synthetic construct
SSYFVNSTFPVTLASGQESFLGQLPLYSSGPYGPGPGQDKGFATSSYYPPAGGGYGRAAPCDYGPAPAFY

SEQ ID NO: 14858 - protein, 70 aa, Synthetic construct
SSYFVNSTFPVTLASGQESFLGQLPLYSSGYADPLPGQDKGFATSSYYPPAGGGYGRAAPCDYGPAPAFY

SEQ ID NO: 14859 - protein, 70 aa, Synthetic construct
SSYFVNSTFPVTLASGQESFLGQLPLYSSGYADPLRHYPAGFATSSYYPPAGGGYGRAAPCDYGPAPAFY

SEQ ID NO: 14860 - protein, 70 aa, Synthetic construct
SSYFVNSTFPVTLASGQESFLGQLPLYSSGYADPLRHYPAPYGPGSYYPPAGGGYGRAAPCDYGPAPAFY

SEQ ID NO: 14861 - protein, 70 aa, Synthetic construct
SSYFVNSTFPVTLASGQESFLGQLPLYSSGYADPLRHYPAPYGPGPGQDKAGGGYGRAAPCDYGPAPAFY

SEQ ID NO: 14862 - protein, 70 aa, Synthetic construct
SSYFVNSTFPVTLASGQESFLGQLPLYSSGYADPLRHYPAPYGPGPGQDKGFATSGRAAPCDYGPAPAFY

SEQ ID NO: 14863 - protein, 70 aa, Synthetic construct
SSYFVNSTFPVTLASGQESFLGQLPLYSSGYADPLRHYPAPYGPGPGQDKGFATSSYYPPCDYGPAPAFY

SEQ ID NO: 14864 - protein, 70 aa, Synthetic construct
SSYFVNSTFPVTLASGQESFLGQLPLYSSGYADPLRHYPAPYGPGPGQDKGFATSSYYPPAGGGYAPAFY

SEQ ID NO: 14865 - protein, 70 aa, Synthetic construct
KAVAAPVELFSKDQSFPEHENGFQIGMRLEGIDPRHPSVFCVLSVAEVCGYRLRLHFDGYLSCYDFWTNA

SEQ ID NO: 14866 - protein, 70 aa, Synthetic construct
WSWEWPVELFSKDQSFPEHENGFQIGMRLEGIDPRHPSVFCVLSVAEVCGYRLRLHFDGYLSCYDFWTNA

SEQ ID NO: 14867 - protein, 70 aa, Synthetic construct
WSWEWYLKEQSKDQSFPEHENGFQIGMRLEGIDPRHPSVFCVLSVAEVCGYRLRLHFDGYLSCYDFWTNA

SEQ ID NO: 14868 - protein, 70 aa, Synthetic construct
WSWEWYLKEQKAVAAFPEHENGFQIGMRLEGIDPRHPSVFCVLSVAEVCGYRLRLHFDGYLSCYDFWTNA

SEQ ID NO: 14869 - protein, 70 aa, Synthetic construct
WSWEWYLKEQKAVAAPVELFNGFQIGMRLEGIDPRHPSVFCVLSVAEVCGYRLRLHFDGYLSCYDFWTNA

SEQ ID NO: 14870 - protein, 70 aa, Synthetic construct
EYSVEQAQQVLHQSVSMSTVSAHPFRDLPLGREQHCKLLPGVADIRASQVARWTVDEVAEFVQSLLGCEE

SEQ ID NO: 14871 - protein, 70 aa, Synthetic construct
EDIDLQAQQVLHQSVSMSTVSAHPFRDLPLGREQHCKLLPGVADIRASQVARWTVDEVAEFVQSLLGCEE

SEQ ID NO: 14872 - protein, 70 aa, Synthetic construct
EDIDLDNLFRLHQSVSMSTVSAHPFRDLPLGREQHCKLLPGVADIRASQVARWTVDEVAEFVQSLLGCEE

SEQ ID NO: 14873 - protein, 70 aa, Synthetic construct
EDIDLDNLFREYSVESMSTVSAHPFRDLPLGREQHCKLLPGVADIRASQVARWTVDEVAEFVQSLLGCEE

SEQ ID NO: 14874 - protein, 70 aa, Synthetic construct
EDIDLDNLFREYSVEQAQQVSAHPFRDLPLGREQHCKLLPGVADIRASQVARWTVDEVAEFVQSLLGCEE

SEQ ID NO: 14875 - protein, 70 aa, Synthetic construct
EDIDLDNLFREYSVEQAQQVLHQSVRDLPLGREQHCKLLPGVADIRASQVARWTVDEVAEFVQSLLGCEE

SEQ ID NO: 14876 - protein, 70 aa, Synthetic construct
EDIDLDNLFREYSVEQAQQVLHQSVSMSTVGREQHCKLLPGVADIRASQVARWTVDEVAEFVQSLLGCEE

SEQ ID NO: 14877 - protein, 70 aa, Synthetic construct
EDIDLDNLFREYSVEQAQQVLHQSVSMSTVSAHPFCKLLPGVADIRASQVARWTVDEVAEFVQSLLGCEE

SEQ ID NO: 14878 - protein, 70 aa, Synthetic construct
EDIDLDNLFREYSVEQAQQVLHQSVSMSTVSAHPFRDLPLGVADIRASQVARWTVDEVAEFVQSLLGCEE

SEQ ID NO: 14879 - protein, 70 aa, Synthetic construct
EDIDLDNLFREYSVEQAQQVLHQSVSMSTVSAHPFRDLPLGREQHRASQVARWTVDEVAEFVQSLLGCEE

SEQ ID NO: 14880 - protein, 70 aa, Synthetic construct
EDIDLDNLFREYSVEQAQQVLHQSVSMSTVSAHPFRDLPLGREQHCKLLPARWTVDEVAEFVQSLLGCEE

SEQ ID NO: 14881 - protein, 70 aa, Synthetic construct
EDIDLDNLFREYSVEQAQQVLHQSVSMSTVSAHPFRDLPLGREQHCKLLPGVADIDEVAEFVQSLLGCEE

SEQ ID NO: 14882 - protein, 70 aa, Synthetic construct
EDIDLDNLFREYSVEQAQQVLHQSVSMSTVSAHPFRDLPLGREQHCKLLPGVADIRASQVFVQSLLGCEE

SEQ ID NO: 14883 - protein, 70 aa, Synthetic construct
PPPVMASAPIPKALGTPVLTPPTEAASQDRMPQDLDLDMYMENLECDMDNIISDLMDEGEGLDFNFEPDP

SEQ ID NO: 14884 - protein, 70 aa, Synthetic construct
SLVPTASAPIPKALGTPVLTPPTEAASQDRMPQDLDLDMYMENLECDMDNIISDLMDEGEGLDFNFEPDP

SEQ ID NO: 14885 - protein, 70 aa, Synthetic construct
SLVPTLSMIAPKALGTPVLTPPTEAASQDRMPQDLDLDMYMENLECDMDNIISDLMDEGEGLDFNFEPDP

SEQ ID NO: 14886 - protein, 70 aa, Synthetic construct
SLVPTLSMIAPPPVMTPVLTPPTEAASQDRMPQDLDLDMYMENLECDMDNIISDLMDEGEGLDFNFEPDP

SEQ ID NO: 14887 - protein, 70 aa, Synthetic construct
SLVPTLSMIAPPPVMASAPIPPTEAASQDRMPQDLDLDMYMENLECDMDNIISDLMDEGEGLDFNFEPDP

SEQ ID NO: 14888 - protein, 70 aa, Synthetic construct
SLVPTLSMIAPPPVMASAPIPKALGASQDRMPQDLDLDMYMENLECDMDNIISDLMDEGEGLDFNFEPDP

SEQ ID NO: 14889 - protein, 70 aa, Synthetic construct
SLVPTLSMIAPPPVMASAPIPKALGTPVLTMPQDLDLDMYMENLECDMDNIISDLMDEGEGLDFNFEPDP

SEQ ID NO: 14890 - protein, 70 aa, Synthetic construct
SLVPTLSMIAPPPVMASAPIPKALGTPVLTPPTEADLDMYMENLECDMDNIISDLMDEGEGLDFNFEPDP

SEQ ID NO: 14891 - protein, 70 aa, Synthetic construct
SLVPTLSMIAPPPVMASAPIPKALGTPVLTPPTEAASQDRMPQDLDLDMYIISDLMDEGEGLDFNFEPDP

SEQ ID NO: 14892 - protein, 70 aa, Synthetic construct
SLVPTLSMIAPPPVMASAPIPKALGTPVLTPPTEAASQDRMPQDLDLDMYMENLECDMDNIISDLFEPDP

SEQ ID NO: 14893 - protein, 70 aa, Synthetic construct
SLVPTLSMIAPPPVMASAPIPKALGTPVLTPPTEAASQDRMPQDLDLDMYMENLECDMDNIISDLMDEGE

SEQ ID NO: 14894 - protein, 70 aa, Synthetic construct
PLSPSLLGGPGPERTPGSGSGSGLQAPGPALTPSLLPTHTLTPVLLTPSSLPPSIHFWSTLSPIAPRSPA

SEQ ID NO: 14895 - protein, 70 aa, Synthetic construct
KGRKPLLGGPGPERTPGSGSGSGLQAPGPALTPSLLPTHTLTPVLLTPSSLPPSIHFWSTLSPIAPRSPA

SEQ ID NO: 14896 - protein, 70 aa, Synthetic construct
KGRKPRDLELGPERTPGSGSGSGLQAPGPALTPSLLPTHTLTPVLLTPSSLPPSIHFWSTLSPIAPRSPA

SEQ ID NO: 14897 - protein, 70 aa, Synthetic construct
KGRKPRDLELPLSPSPGSGSGSGLQAPGPALTPSLLPTHTLTPVLLTPSSLPPSIHFWSTLSPIAPRSPA

SEQ ID NO: 14898 - protein, 70 aa, Synthetic construct
KGRKPRDLELPLSPSLLGGPGSGLQAPGPALTPSLLPTHTLTPVLLTPSSLPPSIHFWSTLSPIAPRSPA

SEQ ID NO: 14899 - protein, 70 aa, Synthetic construct
KGRKPRDLELPLSPSLLGGPGPERTAPGPALTPSLLPTHTLTPVLLTPSSLPPSIHFWSTLSPIAPRSPA

SEQ ID NO: 14900 - protein, 70 aa, Synthetic construct
KGRKPRDLELPLSPSLLGGPGPERTPGSGSLTPSLLPTHTLTPVLLTPSSLPPSIHFWSTLSPIAPRSPA

SEQ ID NO: 14901 - protein, 70 aa, Synthetic construct
KGRKPRDLELPLSPSLLGGPGPERTPGSGSGSGLQLPTHTLTPVLLTPSSLPPSIHFWSTLSPIAPRSPA

SEQ ID NO: 14902 - protein, 70 aa, Synthetic construct
KGRKPRDLELPLSPSLLGGPGPERTPGSGSGSGLQAPGPALTPVLLTPSSLPPSIHFWSTLSPIAPRSPA

SEQ ID NO: 14903 - protein, 70 aa, Synthetic construct
KGRKPRDLELPLSPSLLGGPGPERTPGSGSGSGLQAPGPALTPSLLTPSSLPPSIHFWSTLSPIAPRSPA

SEQ ID NO: 14904 - protein, 70 aa, Synthetic construct
KGRKPRDLELPLSPSLLGGPGPERTPGSGSGSGLQAPGPALTPSLLPTHTLPPSIHFWSTLSPIAPRSPA

SEQ ID NO: 14905 - protein, 70 aa, Synthetic construct
KGRKPRDLELPLSPSLLGGPGPERTPGSGSGSGLQAPGPALTPSLLPTHTLTPVLHFWSTLSPIAPRSPA

SEQ ID NO: 14906 - protein, 70 aa, Synthetic construct
THTLTPVLLTPSSLPPSIHFWSTLSPIAPRSPAKLSFQFPSSGSAQVHIPSISVDGLSTPVVLSPGPQKP

SEQ ID NO: 14907 - protein, 70 aa, Synthetic construct
GPALTPVLLTPSSLPPSIHFWSTLSPIAPRSPAKLSFQFPSSGSAQVHIPSISVDGLSTPVVLSPGPQKP

SEQ ID NO: 14908 - protein, 70 aa, Synthetic construct
GPALTPSLLPPSSLPPSIHFWSTLSPIAPRSPAKLSFQFPSSGSAQVHIPSISVDGLSTPVVLSPGPQKP

SEQ ID NO: 14909 - protein, 70 aa, Synthetic construct
GPALTPSLLPTHTLTPSIHFWSTLSPIAPRSPAKLSFQFPSSGSAQVHIPSISVDGLSTPVVLSPGPQKP

SEQ ID NO: 14910 - protein, 70 aa, Synthetic construct
GPALTPSLLPTHTLTPVLLTPSSLPPSIHFWSTLSSFQFPSSGSAQVHIPSISVDGLSTPVVLSPGPQKP

SEQ ID NO: 14911 - protein, 70 aa, Synthetic construct
GPALTPSLLPTHTLTPVLLTPSSLPPSIHFWSTLSPIAPRSSGSAQVHIPSISVDGLSTPVVLSPGPQKP

SEQ ID NO: 14912 - protein, 70 aa, Synthetic construct
GPALTPSLLPTHTLTPVLLTPSSLPPSIHFWSTLSPIAPRSPAKLQVHIPSISVDGLSTPVVLSPGPQKP

SEQ ID NO: 14913 - protein, 70 aa, Synthetic construct
GPALTPSLLPTHTLTPVLLTPSSLPPSIHFWSTLSPIAPRSPAKLSFQFPSISVDGLSTPVVLSPGPQKP

SEQ ID NO: 14914 - protein, 70 aa, Synthetic construct
GPALTPSLLPTHTLTPVLLTPSSLPPSIHFWSTLSPIAPRSPAKLSFQFPSSGSAGLSTPVVLSPGPQKP

SEQ ID NO: 14915 - protein, 70 aa, Synthetic construct
GPALTPSLLPTHTLTPVLLTPSSLPPSIHFWSTLSPIAPRSPAKLSFQFPSSGSAQVHIPVVLSPGPQKP

SEQ ID NO: 14916 - protein, 70 aa, Synthetic construct
GPALTPSLLPTHTLTPVLLTPSSLPPSIHFWSTLSPIAPRSPAKLSFQFPSSGSAQVHIPSISVDGPQKP

SEQ ID NO: 14917 - protein, 70 aa, Synthetic construct
GPALTPSLLPTHTLTPVLLTPSSLPPSIHFWSTLSPIAPRSPAKLSFQFPSSGSAQVHIPSISVDGLSTP

SEQ ID NO: 14918 - protein, 70 aa, Synthetic construct
QDTEKDDNNNDEYDNYDELVAKSLLNLGKIAEDAAYRARTESEMNSNTSNSLEDDSDKNENLGRKSELSL

SEQ ID NO: 14919 - protein, 70 aa, Synthetic construct
QMNCHDDNNNDEYDNYDELVAKSLLNLGKIAEDAAYRARTESEMNSNTSNSLEDDSDKNENLGRKSELSL

SEQ ID NO: 14920 - protein, 70 aa, Synthetic construct
QMNCHNTRIMDEYDNYDELVAKSLLNLGKIAEDAAYRARTESEMNSNTSNSLEDDSDKNENLGRKSELSL

SEQ ID NO: 14921 - protein, 70 aa, Synthetic construct
QMNCHNTRIMQDTEKDDNNNDEYDNYDELVAKSLLNLGKIAEDAAYRARTESEMNSDKNENLGRKSELSL

SEQ ID NO: 14922 - protein, 70 aa, Synthetic construct
QMNCHNTRIMQDTEKDDNNNDEYDNYDELVAKSLLNLGKIAEDAAYRARTESEMNSNTSNNLGRKSELSL

SEQ ID NO: 14923 - protein, 70 aa, Synthetic construct
QMNCHNTRIMQDTEKDDNNNDEYDNYDELVAKSLLNLGKIAEDAAYRARTESEMNSNTSNSLEDDSELSL

SEQ ID NO: 14924 - protein, 70 aa, Synthetic construct
QMNCHNTRIMQDTEKDDNNNDEYDNYDELVAKSLLNLGKIAEDAAYRARTESEMNSNTSNSLEDDSDKNE

SEQ ID NO: 14925 - protein, 70 aa, Synthetic construct
VCLSSLECLRNQCFDLARKLSETNPQERNPQQNMNIRQHVRPEEDFPGRTPDRNYSDMLNLMRLEEQLSP

SEQ ID NO: 14926 - protein, 70 aa, Synthetic construct
EKMVEESDEEVCLSSLECLRNQCFDLARKLQQNMNIRQHVRPEEDFPGRTPDRNYSDMLNLMRLEEQLSP

SEQ ID NO: 14927 - protein, 70 aa, Synthetic construct
EKMVEESDEEVCLSSLECLRNQCFDLARKLSETNPIRQHVRPEEDFPGRTPDRNYSDMLNLMRLEEQLSP

SEQ ID NO: 14928 - protein, 70 aa, Synthetic construct
EKMVEESDEEVCLSSLECLRNQCFDLARKLSETNPQERNPRPEEDFPGRTPDRNYSDMLNLMRLEEQLSP

SEQ ID NO: 14929 - protein, 70 aa, Synthetic construct
EKMVEESDEEVCLSSLECLRNQCFDLARKLSETNPQERNPQQNMNFPGRTPDRNYSDMLNLMRLEEQLSP

SEQ ID NO: 14930 - protein, 70 aa, Synthetic construct
EKMVEESDEEVCLSSLECLRNQCFDLARKLSETNPQERNPQQNMNIRQHVPDRNYSDMLNLMRLEEQLSP

SEQ ID NO: 14931 - protein, 70 aa, Synthetic construct
EKMVEESDEEVCLSSLECLRNQCFDLARKLSETNPQERNPQQNMNIRQHVRPEEDSDMLNLMRLEEQLSP

SEQ ID NO: 14932 - protein, 70 aa, Synthetic construct
EKMVEESDEEVCLSSLECLRNQCFDLARKLSETNPQERNPQQNMNIRQHVRPEEDFPGRTPDRNYEQLSP

SEQ ID NO: 14933 - protein, 70 aa, Synthetic construct
CFSCCSDGNIAVWDLGHTDGASCIDISHDGTKLWTGGLDNTVRSWDLREGRQLQQHDFTSQIFSLGYCPT

SEQ ID NO: 14934 - protein, 70 aa, Synthetic construct
CFSCCSDGNIAVWDLHNQTLASCIDISHDGTKLWTGGLDNTVRSWDLREGRQLQQHDFTSQIFSLGYCPT

SEQ ID NO: 14935 - protein, 70 aa, Synthetic construct
PRCSPQFPSIGQEPPEMNLYYENFFHPQGVPSPQRPSFEGGGEYGATPNPYLWFNGPTMTPPPYLPGPNA

SEQ ID NO: 14936 - protein, 70 aa, Synthetic construct
SSFDLQFPSIGQEPPEMNLYYENFFHPQGVPSPQRPSFEGGGEYGATPNPYLWFNGPTMTPPPYLPGPNA

SEQ ID NO: 14937 - protein, 70 aa, Synthetic construct
SSFDLPAPSPGQEPPEMNLYYENFFHPQGVPSPQRPSFEGGGEYGATPNPYLWFNGPTMTPPPYLPGPNA

SEQ ID NO: 14938 - protein, 70 aa, Synthetic construct
SSFDLPAPSPPRCSPEMNLYYENFFHPQGVPSPQRPSFEGGGEYGATPNPYLWFNGPTMTPPPYLPGPNA

SEQ ID NO: 14939 - protein, 70 aa, Synthetic construct
SSFDLPAPSPPRCSPQFPSIYENFFHPQGVPSPQRPSFEGGGEYGATPNPYLWFNGPTMTPPPYLPGPNA

SEQ ID NO: 14940 - protein, 70 aa, Synthetic construct
SSFDLPAPSPPRCSPQFPSIGQEPPEMNLYYENFFPSFEGGGEYGATPNPYLWFNGPTMTPPPYLPGPNA

SEQ ID NO: 14941 - protein, 70 aa, Synthetic construct
SSFDLPAPSPPRCSPQFPSIGQEPPEMNLYYENFFHPQGVGGEYGATPNPYLWFNGPTMTPPPYLPGPNA

SEQ ID NO: 14942 - protein, 70 aa, Synthetic construct
SSFDLPAPSPPRCSPQFPSIGQEPPEMNLYYENFFHPQGVPSPQRATPNPYLWFNGPTMTPPPYLPGPNA

SEQ ID NO: 14943 - protein, 70 aa, Synthetic construct
SSFDLPAPSPPRCSPQFPSIGQEPPEMNLYYENFFHPQGVPSPQRPSFEGYLWFNGPTMTPPPYLPGPNA

SEQ ID NO: 14944 - protein, 70 aa, Synthetic construct
SSFDLPAPSPPRCSPQFPSIGQEPPEMNLYYENFFHPQGVPSPQRPSFEGGGEYGATPNPYLWFNPGPNA

SEQ ID NO: 14945 - protein, 70 aa, Synthetic construct
SSFDLPAPSPPRCSPQFPSIGQEPPEMNLYYENFFHPQGVPSPQRPSFEGGGEYGATPNPYLWFNGPTMT

SEQ ID NO: 14946 - protein, 70 aa, Synthetic construct
SSGGPEDIVLTELGYPSQQHYFNEDRKISPQSKESELRILDEIPTGMPCLESVTIGDDIWDENWLPLQAK

SEQ ID NO: 14947 - protein, 70 aa, Synthetic construct
ELNPLEDIVLTELGYPSQQHYFNEDRKISPQSKESELRILDEIPTGMPCLESVTIGDDIWDENWLPLQAK

SEQ ID NO: 14948 - protein, 70 aa, Synthetic construct
ELNPLALYTTTELGYPSQQHYFNEDRKISPQSKESELRILDEIPTGMPCLESVTIGDDIWDENWLPLQAK

SEQ ID NO: 14949 - protein, 70 aa, Synthetic construct
ELNPLALYTTSSGGPEDIVLYFNEDRKISPQSKESELRILDEIPTGMPCLESVTIGDDIWDENWLPLQAK

SEQ ID NO: 14950 - protein, 70 aa, Synthetic construct
ELNPLALYTTSSGGPEDIVLTELGYRKISPQSKESELRILDEIPTGMPCLESVTIGDDIWDENWLPLQAK

SEQ ID NO: 14951 - protein, 70 aa, Synthetic construct
ELNPLALYTTSSGGPEDIVLTELGYPSQQHQSKESELRILDEIPTGMPCLESVTIGDDIWDENWLPLQAK

SEQ ID NO: 14952 - protein, 70 aa, Synthetic construct
ELNPLALYTTSSGGPEDIVLTELGYPSQQHYFNEDELRILDEIPTGMPCLESVTIGDDIWDENWLPLQAK

SEQ ID NO: 14953 - protein, 70 aa, Synthetic construct
ELNPLALYTTSSGGPEDIVLTELGYPSQQHYFNEDRKISPDEIPTGMPCLESVTIGDDIWDENWLPLQAK

SEQ ID NO: 14954 - protein, 70 aa, Synthetic construct
ELNPLALYTTSSGGPEDIVLTELGYPSQQHYFNEDRKISPQSKESELRILESVTIGDDIWDENWLPLQAK

SEQ ID NO: 14955 - protein, 70 aa, Synthetic construct
WDLHNTDGASCIDISNDGTKLWTGGLDNTVRSWDLREGRQLQQHDFTSQIFSLGYCPTGEWLAVGMESSN

SEQ ID NO: 14956 - protein, 70 aa, Synthetic construct
WDLHNQTLVRQFQGHNDGTKLWTGGLDNTVRSWDLREGRQLQQHDFTSQIFSLGYCPTGEWLAVGMESSN

SEQ ID NO: 14957 - protein, 70 aa, Synthetic construct
WDLHNQTLVRQFQGHTDGASLWTGGLDNTVRSWDLREGRQLQQHDFTSQIFSLGYCPTGEWLAVGMESSN

SEQ ID NO: 14958 - protein, 70 aa, Synthetic construct
WDLHNQTLVRQFQGHTDGASCIDISLDNTVRSWDLREGRQLQQHDFTSQIFSLGYCPTGEWLAVGMESSN

SEQ ID NO: 14959 - protein, 70 aa, Synthetic construct
WDLHNQTLVRQFQGHTDGASCIDISNDGTKRSWDLREGRQLQQHDFTSQIFSLGYCPTGEWLAVGMESSN

SEQ ID NO: 14960 - protein, 70 aa, Synthetic construct
WDLHNQTLVRQFQGHTDGASCIDISNDGTKLWTGGLDNTVLQQHDFTSQIFSLGYCPTGEWLAVGMESSN

SEQ ID NO: 14961 - protein, 70 aa, Synthetic construct
WDLHNQTLVRQFQGHTDGASCIDISNDGTKLWTGGLDNTVRSWDLFTSQIFSLGYCPTGEWLAVGMESSN

SEQ ID NO: 14962 - protein, 70 aa, Synthetic construct
WDLHNQTLVRQFQGHTDGASCIDISNDGTKLWTGGLDNTVRSWDLREGRQFSLGYCPTGEWLAVGMESSN

SEQ ID NO: 14963 - protein, 70 aa, Synthetic construct
TVSVSINNLYRSMMFEPGLTKGMLEVFVAPTHHPHCSADDQSTKAIDIQNAYLNGVGDFSVWEFSGNPVY

SEQ ID NO: 14964 - protein, 70 aa, Synthetic construct
TVSVSINNLYPGCENVSVRSRSMMFEPGLTKGMLECSADDQSTKAIDIQNAYLNGVGDFSVWEFSGNPVY

SEQ ID NO: 14965 - protein, 70 aa, Synthetic construct
TVSVSINNLYPGCENVSVRSRSMMFEPGLTKGMLEVFVAPTHHPHCSADDAYLNGVGDFSVWEFSGNPVY

SEQ ID NO: 14966 - protein, 70 aa, Synthetic construct
LETEKIKCCLLLDSVCSTIENVMATYLSPQQLREHHEPVMIYQPRDFFRAQTLKETSLTNTMGGYKESFS

SEQ ID NO: 14967 - protein, 70 aa, Synthetic construct
LETEKIKCCLLLDSVCSTIENVMATTLPGLLTVKHYLSPQQLREHHEPVMQTLKETSLTNTMGGYKESFS

SEQ ID NO: 14968 - protein, 70 aa, Synthetic construct
LETEKIKCCLLLDSVCSTIENVMATTLPGLLTVKHYLSPQQLREHHEPVMIYQPRDFFRAQTLKEKESFS

SEQ ID NO: 14969 - protein, 70 aa, Synthetic construct
YSQASLGMDIHASDLNLLTRRKLSRLLDPPDPLGKDWCLLAMNLGLPDLVAKYNTSNGAPKDFLPSPLHA

SEQ ID NO: 14970 - protein, 70 aa, Synthetic construct
SIMCFGCHDVYSQASLGMDIRKLSRLLDPPDPLGKDWCLLAMNLGLPDLVAKYNTSNGAPKDFLPSPLHA

SEQ ID NO: 14971 - protein, 70 aa, Synthetic construct
SIMCFGCHDVYSQASLGMDIHASDLLLDPPDPLGKDWCLLAMNLGLPDLVAKYNTSNGAPKDFLPSPLHA

SEQ ID NO: 14972 - protein, 70 aa, Synthetic construct
SIMCFGCHDVYSQASLGMDIHASDLNLLTRRKLSRDWCLLAMNLGLPDLVAKYNTSNGAPKDFLPSPLHA

SEQ ID NO: 14973 - protein, 70 aa, Synthetic construct
SIMCFGCHDVYSQASLGMDIHASDLNLLTRRKLSRLLDPPDPLGKDWCLLAMNLGLPDLVAKYNTSPLHA

SEQ ID NO: 14974 - protein, 70 aa, Synthetic construct
EAKNLLCGFYGRHAELRFLDLVPSLQLDPAQIYRVTWFISWSPCFSWGCAGEVRAFLQENTHVRLRIFAA

SEQ ID NO: 14975 - protein, 70 aa, Synthetic construct
MDQHMLCGFYGRHAELRFLDLVPSLQLDPAQIYRVTWFISWSPCFSWGCAGEVRAFLQENTHVRLRIFAA

SEQ ID NO: 14976 - protein, 70 aa, Synthetic construct
MDQHMGFLCNEAKNLLRFLDLVPSLQLDPAQIYRVTWFISWSPCFSWGCAGEVRAFLQENTHVRLRIFAA

SEQ ID NO: 14977 - protein, 70 aa, Synthetic construct
MDQHMGFLCNEAKNLLCGFYLVPSLQLDPAQIYRVTWFISWSPCFSWGCAGEVRAFLQENTHVRLRIFAA

SEQ ID NO: 14978 - protein, 70 aa, Synthetic construct
MDQHMGFLCNEAKNLLCGFYGRHAEQLDPAQIYRVTWFISWSPCFSWGCAGEVRAFLQENTHVRLRIFAA

SEQ ID NO: 14979 - protein, 70 aa, Synthetic construct
MDQHMGFLCNEAKNLLCGFYGRHAELRFLDQIYRVTWFISWSPCFSWGCAGEVRAFLQENTHVRLRIFAA

SEQ ID NO: 14980 - protein, 70 aa, Synthetic construct
MDQHMGFLCNEAKNLLCGFYGRHAELRFLDLVPSLQLDPAWSPCFSWGCAGEVRAFLQENTHVRLRIFAA

SEQ ID NO: 14981 - protein, 70 aa, Synthetic construct
MDQHMGFLCNEAKNLLCGFYGRHAELRFLDLVPSLQLDPAQIYRVSWGCAGEVRAFLQENTHVRLRIFAA

SEQ ID NO: 14982 - protein, 70 aa, Synthetic construct
MDQHMGFLCNEAKNLLCGFYGRHAELRFLDLVPSLQLDPAQIYRVTWFISWSPCFFLQENTHVRLRIFAA

SEQ ID NO: 14983 - protein, 70 aa, Synthetic construct
MDQHMGFLCNEAKNLLCGFYGRHAELRFLDLVPSLQLDPAQIYRVTWFISWSPCFSWGCATHVRLRIFAA

SEQ ID NO: 14984 - protein, 70 aa, Synthetic construct
MDQHMGFLCNEAKNLLCGFYGRHAELRFLDLVPSLQLDPAQIYRVTWFISWSPCFSWGCAGEVRARIFAA

SEQ ID NO: 14985 - protein, 70 aa, Synthetic construct
MDQHMGFLCNEAKNLLCGFYGRHAELRFLDLVPSLQLDPAQIYRVTWFISWSPCFSWGCAGEVRAFLQEN

SEQ ID NO: 14986 - protein, 70 aa, Synthetic construct
ESPFSPGLFHRLDEDWDSALFAELGYFTDTDELQLEAANETYENNFDNLDFDLDLMPWESDIWDINNQIC

SEQ ID NO: 14987 - protein, 70 aa, Synthetic construct
GEPAGPGLFHRLDEDWDSALFAELGYFTDTDELQLEAANETYENNFDNLDFDLDLMPWESDIWDINNQIC

SEQ ID NO: 14988 - protein, 70 aa, Synthetic construct
GEPAGVAGTMRLDEDWDSALFAELGYFTDTDELQLEAANETYENNFDNLDFDLDLMPWESDIWDINNQIC

SEQ ID NO: 14989 - protein, 70 aa, Synthetic construct
GEPAGVAGTMESPFSWDSALFAELGYFTDTDELQLEAANETYENNFDNLDFDLDLMPWESDIWDINNQIC

SEQ ID NO: 14990 - protein, 70 aa, Synthetic construct
GEPAGVAGTMESPFSPGLFHFAELGYFTDTDELQLEAANETYENNFDNLDFDLDLMPWESDIWDINNQIC

SEQ ID NO: 14991 - protein, 70 aa, Synthetic construct
GEPAGVAGTMESPFSPGLFHRLDEDYFTDTDELQLEAANETYENNFDNLDFDLDLMPWESDIWDINNQIC

SEQ ID NO: 14992 - protein, 70 aa, Synthetic construct
GEPAGVAGTMESPFSPGLFHRLDEDWDSALDELQLEAANETYENNFDNLDFDLDLMPWESDIWDINNQIC

SEQ ID NO: 14993 - protein, 70 aa, Synthetic construct
GEPAGVAGTMESPFSPGLFHRLDEDWDSALFAELGEAANETYENNFDNLDFDLDLMPWESDIWDINNQIC

SEQ ID NO: 14994 - protein, 70 aa, Synthetic construct
GEPAGVAGTMESPFSPGLFHRLDEDWDSALFAELGYFTDTTYENNFDNLDFDLDLMPWESDIWDINNQIC

SEQ ID NO: 14995 - protein, 70 aa, Synthetic construct
GEPAGVAGTMESPFSPGLFHRLDEDWDSALFAELGYFTDTDELQLFDNLDFDLDLMPWESDIWDINNQIC

SEQ ID NO: 14996 - protein, 70 aa, Synthetic construct
GEPAGVAGTMESPFSPGLFHRLDEDWDSALFAELGYFTDTDELQLEAANEFDLDLMPWESDIWDINNQIC

SEQ ID NO: 14997 - protein, 70 aa, Synthetic construct
GEPAGVAGTMESPFSPGLFHRLDEDWDSALFAELGYFTDTDELQLEAANETYENNMPWESDIWDINNQIC

SEQ ID NO: 14998 - protein, 70 aa, Synthetic construct
GEPAGVAGTMESPFSPGLFHRLDEDWDSALFAELGYFTDTDELQLEAANETYENNFDNLDDIWDINNQIC

SEQ ID NO: 14999 - protein, 70 aa, Synthetic construct
GEPAGVAGTMESPFSPGLFHRLDEDWDSALFAELGYFTDTDELQLEAANETYENNFDNLDFDLDLNNQIC

SEQ ID NO: 15000 - protein, 70 aa, Synthetic construct
GEPAGVAGTMESPFSPGLFHRLDEDWDSALFAELGYFTDTDELQLEAANETYENNFDNLDFDLDLMPWES

SEQ ID NO: 15001 - protein, 70 aa, Synthetic construct
DELQLFDNLDFDLDLMPWESDIWDINNQICTVKDIKAEPQPLSPASSSYSVSSPRSVDSYSSTQHVPEEL

SEQ ID NO: 15002 - protein, 70 aa, Synthetic construct
DELQLEAANETYENNFDNLDFDLDLMPWESDIWDIKAEPQPLSPASSSYSVSSPRSVDSYSSTQHVPEEL

SEQ ID NO: 15003 - protein, 70 aa, Synthetic construct
DELQLEAANETYENNFDNLDFDLDLMPWESDIWDINNQICPLSPASSSYSVSSPRSVDSYSSTQHVPEEL

SEQ ID NO: 15004 - protein, 70 aa, Synthetic construct
DELQLEAANETYENNFDNLDFDLDLMPWESDIWDINNQICTVKDISSSYSVSSPRSVDSYSSTQHVPEEL

SEQ ID NO: 15005 - protein, 70 aa, Synthetic construct
DELQLEAANETYENNFDNLDFDLDLMPWESDIWDINNQICTVKDIKAEPQVSSPRSVDSYSSTQHVPEEL

SEQ ID NO: 15006 - protein, 70 aa, Synthetic construct
DELQLEAANETYENNFDNLDFDLDLMPWESDIWDINNQICTVKDIKAEPQPLSPASVDSYSSTQHVPEEL

SEQ ID NO: 15007 - protein, 70 aa, Synthetic construct
DELQLEAANETYENNFDNLDFDLDLMPWESDIWDINNQICTVKDIKAEPQPLSPASSSYSSSTQHVPEEL

SEQ ID NO: 15008 - protein, 70 aa, Synthetic construct
DELQLEAANETYENNFDNLDFDLDLMPWESDIWDINNQICTVKDIKAEPQPLSPASSSYSVSSPRVPEEL

SEQ ID NO: 15009 - protein, 70 aa, Synthetic construct
DELQLEAANETYENNFDNLDFDLDLMPWESDIWDINNQICTVKDIKAEPQPLSPASSSYSVSSPRSVDSY

SEQ ID NO: 15010 - protein, 70 aa, Synthetic construct
LVLQNEALYPQRRSYTSEDEAWKSFLENPLTAATKAMMSINGDEDSAAALGLLYDYYKVPRERRSSTAKP

SEQ ID NO: 15011 - protein, 70 aa, Synthetic construct
TQEYDEALYPQRRSYTSEDEAWKSFLENPLTAATKAMMSINGDEDSAAALGLLYDYYKVPRERRSSTAKP

SEQ ID NO: 15012 - protein, 70 aa, Synthetic construct
TQEYDNKRPVQRRSYTSEDEAWKSFLENPLTAATKAMMSINGDEDSAAALGLLYDYYKVPRERRSSTAKP

SEQ ID NO: 15013 - protein, 70 aa, Synthetic construct
TQEYDNKRPVLVLQNTSEDEAWKSFLENPLTAATKAMMSINGDEDSAAALGLLYDYYKVPRERRSSTAKP

SEQ ID NO: 15014 - protein, 70 aa, Synthetic construct
TQEYDNKRPVLVLQNEALYPQRRSYTSEDEAWKSFAMMSINGDEDSAAALGLLYDYYKVPRERRSSTAKP

SEQ ID NO: 15015 - protein, 70 aa, Synthetic construct
TQEYDNKRPVLVLQNEALYPQRRSYTSEDEAWKSFLENPLTAATKAMMSINGDEDSAAALGLLYDYYKVP

SEQ ID NO: 15016 - protein, 70 aa, Synthetic construct
GEMELTWQEIMSITELQGLNAPSEPSFEPQAPAPYLGPPPPTTYCPCSIHPDSGFPLPPPPYELPASTSH

SEQ ID NO: 15017 - protein, 70 aa, Synthetic construct
RVIQLTWQEIMSITELQGLNAPSEPSFEPQAPAPYLGPPPPTTYCPCSIHPDSGFPLPPPPYELPASTSH

SEQ ID NO: 15018 - protein, 70 aa, Synthetic construct
RVIQLSTSELGEMELTWQEIMSITESFEPQAPAPYLGPPPPTTYCPCSIHPDSGFPLPPPPYELPASTSH

SEQ ID NO: 15019 - protein, 70 aa, Synthetic construct
RVIQLSTSELGEMELTWQEIMSITELQGLNAPAPYLGPPPPTTYCPCSIHPDSGFPLPPPPYELPASTSH

SEQ ID NO: 15020 - protein, 70 aa, Synthetic construct
RVIQLSTSELGEMELTWQEIMSITELQGLNAPSEPLGPPPPTTYCPCSIHPDSGFPLPPPPYELPASTSH

SEQ ID NO: 15021 - protein, 70 aa, Synthetic construct
RVIQLSTSELGEMELTWQEIMSITELQGLNAPSEPSFEPQPTTYCPCSIHPDSGFPLPPPPYELPASTSH

SEQ ID NO: 15022 - protein, 70 aa, Synthetic construct
RVIQLSTSELGEMELTWQEIMSITELQGLNAPSEPSFEPQAPAPYPCSIHPDSGFPLPPPPYELPASTSH

SEQ ID NO: 15023 - protein, 70 aa, Synthetic construct
RVIQLSTSELGEMELTWQEIMSITELQGLNAPSEPSFEPQAPAPYLGPPPPDSGFPLPPPPYELPASTSH

SEQ ID NO: 15024 - protein, 70 aa, Synthetic construct
RVIQLSTSELGEMELTWQEIMSITELQGLNAPSEPSFEPQAPAPYLGPPPPTTYCPLPPPPYELPASTSH

SEQ ID NO: 15025 - protein, 70 aa, Synthetic construct
RVIQLSTSELGEMELTWQEIMSITELQGLNAPSEPSFEPQAPAPYLGPPPPTTYCPCSIHPYELPASTSH

SEQ ID NO: 15026 - protein, 70 aa, Synthetic construct
RVIQLSTSELGEMELTWQEIMSITELQGLNAPSEPSFEPQAPAPYLGPPPPTTYCPCSIHPDSGFASTSH

SEQ ID NO: 15027 - protein, 70 aa, Synthetic construct
RVIQLSTSELGEMELTWQEIMSITELQGLNAPSEPSFEPQAPAPYLGPPPPTTYCPCSIHPDSGFPLPPP

SEQ ID NO: 15028 - protein, 70 aa, Synthetic construct
SDSDLEFYCHLLRGSYIKFVGNFRSYNNVPSPSCNGFDNTLSRPCRVPLGKEVCFIATVRLATPQFLKEM

SEQ ID NO: 15029 - protein, 70 aa, Synthetic construct
SDSDLEFYCHLLRGSLNPKEGNFRSYNNVPSPSCNGFDNTLSRPCRVPLGKEVCFIATVRLATPQFLKEM

SEQ ID NO: 15030 - protein, 70 aa, Synthetic construct
SDSDLEFYCHLLRGSLNPKEFPTYEYIKFVSPSCNGFDNTLSRPCRVPLGKEVCFIATVRLATPQFLKEM

SEQ ID NO: 15031 - protein, 70 aa, Synthetic construct
SDSDLEFYCHLLRGSLNPKEFPTYEYIKFVGNFRSGFDNTLSRPCRVPLGKEVCFIATVRLATPQFLKEM

SEQ ID NO: 15032 - protein, 70 aa, Synthetic construct
SDSDLEFYCHLLRGSLNPKEFPTYEYIKFVGNFRSYNNVPLSRPCRVPLGKEVCFIATVRLATPQFLKEM

SEQ ID NO: 15033 - protein, 70 aa, Synthetic construct
SDSDLEFYCHLLRGSLNPKEFPTYEYIKFVGNFRSYNNVPSPSCNGFDNTLSRPCRVPLGLATPQFLKEM

SEQ ID NO: 15034 - protein, 70 aa, Synthetic construct
TDSDLPAGWMRVQDTSGTYYWHIPTGTTQWEPPGRASPSQGSSPQEESQLTWTGFAHGEGFEDGEFWKDE

SEQ ID NO: 15035 - protein, 70 aa, Synthetic construct
DSFWNPAGWMRVQDTSGTYYWHIPTGTTQWEPPGRASPSQGSSPQEESQLTWTGFAHGEGFEDGEFWKDE

SEQ ID NO: 15036 - protein, 70 aa, Synthetic construct
DSFWNPNAFERVQDTSGTYYWHIPTGTTQWEPPGRASPSQGSSPQEESQLTWTGFAHGEGFEDGEFWKDE

SEQ ID NO: 15037 - protein, 70 aa, Synthetic construct
DSFWNPNAFETDSDLSGTYYWHIPTGTTQWEPPGRASPSQGSSPQEESQLTWTGFAHGEGFEDGEFWKDE

SEQ ID NO: 15038 - protein, 70 aa, Synthetic construct
DSFWNPNAFETDSDLPAGWMWHIPTGTTQWEPPGRASPSQGSSPQEESQLTWTGFAHGEGFEDGEFWKDE

SEQ ID NO: 15039 - protein, 70 aa, Synthetic construct
DSFWNPNAFETDSDLPAGWMRVQDTSGTYYWHIPTASPSQGSSPQEESQLTWTGFAHGEGFEDGEFWKDE

SEQ ID NO: 15040 - protein, 70 aa, Synthetic construct
DSFWNPNAFETDSDLPAGWMRVQDTSGTYYWHIPTGTTQWGSSPQEESQLTWTGFAHGEGFEDGEFWKDE

SEQ ID NO: 15041 - protein, 70 aa, Synthetic construct
DSFWNPNAFETDSDLPAGWMRVQDTSGTYYWHIPTGTTQWEPPGREESQLTWTGFAHGEGFEDGEFWKDE

SEQ ID NO: 15042 - protein, 70 aa, Synthetic construct
DSFWNPNAFETDSDLPAGWMRVQDTSGTYYWHIPTGTTQWEPPGRASPSQTWTGFAHGEGFEDGEFWKDE

SEQ ID NO: 15043 - protein, 70 aa, Synthetic construct
DSFWNPNAFETDSDLPAGWMRVQDTSGTYYWHIPTGTTQWEPPGRASPSQGSSPQAHGEGFEDGEFWKDE

SEQ ID NO: 15044 - protein, 70 aa, Synthetic construct
DSFWNPNAFETDSDLPAGWMRVQDTSGTYYWHIPTGTTQWEPPGRASPSQGSSPQEESQLFEDGEFWKDE

SEQ ID NO: 15045 - protein, 70 aa, Synthetic construct
DSFWNPNAFETDSDLPAGWMRVQDTSGTYYWHIPTGTTQWEPPGRASPSQGSSPQEESQLTWTGFFWKDE

SEQ ID NO: 15046 - protein, 70 aa, Synthetic construct
DSFWNPNAFETDSDLPAGWMRVQDTSGTYYWHIPTGTTQWEPPGRASPSQGSSPQEESQLTWTGFAHGEG

SEQ ID NO: 15047 - protein, 70 aa, Synthetic construct
ASVRREESPMDVDQPSPSAQDTQSIASDGTPQGEKEKEERPPELPLLSEQLSLDELWDMLGECLKELEES

SEQ ID NO: 15048 - protein, 70 aa, Synthetic construct
AATSEEESPMDVDQPSPSAQDTQSIASDGTPQGEKEKEERPPELPLLSEQLSLDELWDMLGECLKELEES

SEQ ID NO: 15049 - protein, 70 aa, Synthetic construct
AATSESSQSEDVDQPSPSAQDTQSIASDGTPQGEKEKEERPPELPLLSEQLSLDELWDMLGECLKELEES

SEQ ID NO: 15050 - protein, 70 aa, Synthetic construct
AATSESSQSEASVRRSPSAQDTQSIASDGTPQGEKEKEERPPELPLLSEQLSLDELWDMLGECLKELEES

SEQ ID NO: 15051 - protein, 70 aa, Synthetic construct
AATSESSQSEASVRREESPMDTQSIASDGTPQGEKEKEERPPELPLLSEQLSLDELWDMLGECLKELEES

SEQ ID NO: 15052 - protein, 70 aa, Synthetic construct
AATSESSQSEASVRREESPMDVDQPASDGTPQGEKEKEERPPELPLLSEQLSLDELWDMLGECLKELEES

SEQ ID NO: 15053 - protein, 70 aa, Synthetic construct
AATSESSQSEASVRREESPMDVDQPSPSAQPQGEKEKEERPPELPLLSEQLSLDELWDMLGECLKELEES

SEQ ID NO: 15054 - protein, 70 aa, Synthetic construct
AATSESSQSEASVRREESPMDVDQPSPSAQDTQSIEKEERPPELPLLSEQLSLDELWDMLGECLKELEES

SEQ ID NO: 15055 - protein, 70 aa, Synthetic construct
AATSESSQSEASVRREESPMDVDQPSPSAQDTQSIASDGTPPELPLLSEQLSLDELWDMLGECLKELEES

SEQ ID NO: 15056 - protein, 70 aa, Synthetic construct
AATSESSQSEASVRREESPMDVDQPSPSAQDTQSIASDGTPQGEKLLSEQLSLDELWDMLGECLKELEES

SEQ ID NO: 15057 - protein, 70 aa, Synthetic construct
AATSESSQSEASVRREESPMDVDQPSPSAQDTQSIASDGTPQGEKEKEERLSLDELWDMLGECLKELEES

SEQ ID NO: 15058 - protein, 70 aa, Synthetic construct
AATSESSQSEASVRREESPMDVDQPSPSAQDTQSIASDGTPQGEKEKEERPPELPLLSEQLSLDELWDML

SEQ ID NO: 15059 - protein, 70 aa, Synthetic construct
TCAQVIREAKRTAPSIVYVPHIHVWWEIVGPTLKATFTTLLLLATSDKPHSALPEEVQELFIRDYGEIFN

SEQ ID NO: 15060 - protein, 70 aa, Synthetic construct
TCAQVIREAKRTAPSIVYVPHIHVWWEIVGPTLKATFTTLLQNIPSFAPVLLLATSDKPHFIRDYGEIFN

SEQ ID NO: 15061 - protein, 70 aa, Synthetic construct
DLQLSEILKFSTMDEIDLESILGETKDGQWVSDALPAAEGGSRDQEEGKNHMYLFEGKDYSKEPSKEDRK

SEQ ID NO: 15062 - protein, 70 aa, Synthetic construct
DLQLSEILKFGLDKLIDLESILGETKDGQWVSDALPAAEGGSRDQEEGKNHMYLFEGKDYSKEPSKEDRK

SEQ ID NO: 15063 - protein, 70 aa, Synthetic construct
DLQLSEILKFGLDKLLASEGSTMDEIDLESVSDALPAAEGGSRDQEEGKNHMYLFEGKDYSKEPSKEDRK

SEQ ID NO: 15064 - protein, 70 aa, Synthetic construct
DLQLSEILKFGLDKLLASEGSTMDEIDLESILGETPAAEGGSRDQEEGKNHMYLFEGKDYSKEPSKEDRK

SEQ ID NO: 15065 - protein, 70 aa, Synthetic construct
DLQLSEILKFGLDKLLASEGSTMDEIDLESILGETKDGQWGSRDQEEGKNHMYLFEGKDYSKEPSKEDRK

SEQ ID NO: 15066 - protein, 70 aa, Synthetic construct
DLQLSEILKFGLDKLLASEGSTMDEIDLESILGETKDGQWVSDALEEGKNHMYLFEGKDYSKEPSKEDRK

SEQ ID NO: 15067 - protein, 70 aa, Synthetic construct
DLQLSEILKFGLDKLLASEGSTMDEIDLESILGETKDGQWVSDALPAAEGHMYLFEGKDYSKEPSKEDRK

SEQ ID NO: 15068 - protein, 70 aa, Synthetic construct
DLQLSEILKFGLDKLLASEGSTMDEIDLESILGETKDGQWVSDALPAAEGGSRDQEGKDYSKEPSKEDRK

SEQ ID NO: 15069 - protein, 70 aa, Synthetic construct
DLQLSEILKFGLDKLLASEGSTMDEIDLESILGETKDGQWVSDALPAAEGGSRDQEEGKNSKEPSKEDRK

SEQ ID NO: 15070 - protein, 70 aa, Synthetic construct
DLQLSEILKFGLDKLLASEGSTMDEIDLESILGETKDGQWVSDALPAAEGGSRDQEEGKNHMYLFKEDRK

SEQ ID NO: 15071 - protein, 70 aa, Synthetic construct
DLQLSEILKFGLDKLLASEGSTMDEIDLESILGETKDGQWVSDALPAAEGGSRDQEEGKNHMYLFEGKDY

SEQ ID NO: 15072 - protein, 70 aa, Synthetic construct
VTDEGQLYAFGSDYYPEVLEPMQLNFFLSNPVEQVSCGDNHVVVLTRNKEVYSWGCGEYGRLGLDSEEDY

SEQ ID NO: 15073 - protein, 70 aa, Synthetic construct
VTDEGQLYAFGSDYYGCMGVDKVAGPEVLEPMQLNSCGDNHVVVLTRNKEVYSWGCGEYGRLGLDSEEDY

SEQ ID NO: 15074 - protein, 70 aa, Synthetic construct
VTDEGQLYAFGSDYYGCMGVDKVAGPEVLEPMQLNFFLSNPVEQVTRNKEVYSWGCGEYGRLGLDSEEDY

SEQ ID NO: 15075 - protein, 70 aa, Synthetic construct
VTDEGQLYAFGSDYYGCMGVDKVAGPEVLEPMQLNFFLSNPVEQVSCGDNVYSWGCGEYGRLGLDSEEDY

SEQ ID NO: 15076 - protein, 70 aa, Synthetic construct
VTDEGQLYAFGSDYYGCMGVDKVAGPEVLEPMQLNFFLSNPVEQVSCGDNHVVVLTRNKEVYSWGSEEDY

SEQ ID NO: 15077 - protein, 70 aa, Synthetic construct
VTDEGQLYAFGSDYYGCMGVDKVAGPEVLEPMQLNFFLSNPVEQVSCGDNHVVVLTRNKEVYSWGCGEYG

SEQ ID NO: 15078 - protein, 70 aa, Synthetic construct
PEHVSSPMSGGGPTPPQMPPSQPGALIPGDPQAMSQPNRGPSPFSPVQLHQLRAQILAYKMLARGQPLPE

SEQ ID NO: 15079 - protein, 70 aa, Synthetic construct
MSPHPSPMSGGGPTPPQMPPSQPGALIPGDPQAMSQPNRGPSPFSPVQLHQLRAQILAYKMLARGQPLPE

SEQ ID NO: 15080 - protein, 70 aa, Synthetic construct
MSPHPSPLGAGGPTPPQMPPSQPGALIPGDPQAMSQPNRGPSPFSPVQLHQLRAQILAYKMLARGQPLPE

SEQ ID NO: 15081 - protein, 70 aa, Synthetic construct
MSPHPSPLGAPEHVSPQMPPSQPGALIPGDPQAMSQPNRGPSPFSPVQLHQLRAQILAYKMLARGQPLPE

SEQ ID NO: 15082 - protein, 70 aa, Synthetic construct
MSPHPSPLGAPEHVSSPMSGSQPGALIPGDPQAMSQPNRGPSPFSPVQLHQLRAQILAYKMLARGQPLPE

SEQ ID NO: 15083 - protein, 70 aa, Synthetic construct
MSPHPSPLGAPEHVSSPMSGGGPTPLIPGDPQAMSQPNRGPSPFSPVQLHQLRAQILAYKMLARGQPLPE

SEQ ID NO: 15084 - protein, 70 aa, Synthetic construct
MSPHPSPLGAPEHVSSPMSGGGPTPPQMPPPQAMSQPNRGPSPFSPVQLHQLRAQILAYKMLARGQPLPE

SEQ ID NO: 15085 - protein, 70 aa, Synthetic construct
MSPHPSPLGAPEHVSSPMSGGGPTPPQMPPSQPGAQPNRGPSPFSPVQLHQLRAQILAYKMLARGQPLPE

SEQ ID NO: 15086 - protein, 70 aa, Synthetic construct
MSPHPSPLGAPEHVSSPMSGGGPTPPQMPPSQPGALIPGDPSPFSPVQLHQLRAQILAYKMLARGQPLPE

SEQ ID NO: 15087 - protein, 70 aa, Synthetic construct
MSPHPSPLGAPEHVSSPMSGGGPTPPQMPPSQPGALIPGDPQAMSPVQLHQLRAQILAYKMLARGQPLPE

SEQ ID NO: 15088 - protein, 70 aa, Synthetic construct
KFNEPGSQYFIFLLSTRAGGLGLNLQAADTVVIFDSDWNPHQDLQQNEVRVLRLCTVNSVEEKILAAAKY

SEQ ID NO: 15089 - protein, 70 aa, Synthetic construct
KFNEPGSQYFIFLLSTRAGGLGLNLQAADTVVIFDSDWNPHQDLQAQDRAHRIGQTVNSVEEKILAAAKY

SEQ ID NO: 15090 - protein, 70 aa, Synthetic construct
KFNEPGSQYFIFLLSTRAGGLGLNLQAADTVVIFDSDWNPHQDLQAQDRAHRIGQQNEVRVLRLCTVNSV

SEQ ID NO: 15091 - protein, 70 aa, Synthetic construct
PEFWGLSLINSGKRSTADYSLDNEPAQALTWRDSRAWEEQYQWDVEDMKVSGVHWGYEETKTFLAILSES

SEQ ID NO: 15092 - protein, 70 aa, Synthetic construct
PSNTSLSLINSGKRSTADYSLDNEPAQALTWRDSRAWEEQYQWDVEDMKVSGVHWGYEETKTFLAILSES

SEQ ID NO: 15093 - protein, 70 aa, Synthetic construct
PSNTSEKEQGPEFWGTADYSLDNEPAQALTWRDSRAWEEQYQWDVEDMKVSGVHWGYEETKTFLAILSES

SEQ ID NO: 15094 - protein, 70 aa, Synthetic construct
PSNTSEKEQGPEFWGLSLINLDNEPAQALTWRDSRAWEEQYQWDVEDMKVSGVHWGYEETKTFLAILSES

SEQ ID NO: 15095 - protein, 70 aa, Synthetic construct
PSNTSEKEQGPEFWGLSLINSGKRSAQALTWRDSRAWEEQYQWDVEDMKVSGVHWGYEETKTFLAILSES

SEQ ID NO: 15096 - protein, 70 aa, Synthetic construct
PSNTSEKEQGPEFWGLSLINSGKRSTADYSLDNEPAWEEQYQWDVEDMKVSGVHWGYEETKTFLAILSES

SEQ ID NO: 15097 - protein, 70 aa, Synthetic construct
PSNTSEKEQGPEFWGLSLINSGKRSTADYSLDNEPAQALTYQWDVEDMKVSGVHWGYEETKTFLAILSES

SEQ ID NO: 15098 - protein, 70 aa, Synthetic construct
PSNTSEKEQGPEFWGLSLINSGKRSTADYSLDNEPAQALTWRDSRAWEEQYQWDVGYEETKTFLAILSES

SEQ ID NO: 15099 - protein, 70 aa, Synthetic construct
LLEQLVSFLSGKDETELAELDRALGIDKLVQGGGLDVLSERFPPQQATPPLIMEERPNLYSQPYSSPSPT

SEQ ID NO: 15100 - protein, 70 aa, Synthetic construct
TVEGRNDEKALLEQLVSFLSGKDETELAELQGGGLDVLSERFPPQQATPPLIMEERPNLYSQPYSSPSPT

SEQ ID NO: 15101 - protein, 70 aa, Synthetic construct
TVEGRNDEKALLEQLVSFLSGKDETELAELDRALGIDKLVRFPPQQATPPLIMEERPNLYSQPYSSPSPT

SEQ ID NO: 15102 - protein, 70 aa, Synthetic construct
TVEGRNDEKALLEQLVSFLSGKDETELAELDRALGIDKLVQGGGLQATPPLIMEERPNLYSQPYSSPSPT

SEQ ID NO: 15103 - protein, 70 aa, Synthetic construct
TVEGRNDEKALLEQLVSFLSGKDETELAELDRALGIDKLVQGGGLDVLSELIMEERPNLYSQPYSSPSPT

SEQ ID NO: 15104 - protein, 70 aa, Synthetic construct
TVEGRNDEKALLEQLVSFLSGKDETELAELDRALGIDKLVQGGGLDVLSERFPPQRPNLYSQPYSSPSPT

SEQ ID NO: 15105 - protein, 70 aa, Synthetic construct
TVEGRNDEKALLEQLVSFLSGKDETELAELDRALGIDKLVQGGGLDVLSERFPPQQATPPSQPYSSPSPT

SEQ ID NO: 15106 - protein, 70 aa, Synthetic construct
TVEGRNDEKALLEQLVSFLSGKDETELAELDRALGIDKLVQGGGLDVLSERFPPQQATPPLIMEESPSPT

SEQ ID NO: 15107 - protein, 70 aa, Synthetic construct
TVEGRNDEKALLEQLVSFLSGKDETELAELDRALGIDKLVQGGGLDVLSERFPPQQATPPLIMEERPNLY

SEQ ID NO: 15108 - protein, 70 aa, Synthetic construct
SPSDEGALLDQLYLALRNFDIPELVSQSQAVDPEQFSSQDSNIMLEQKAPVFPQQYASQAQMAQGSYSPM

SEQ ID NO: 15109 - protein, 70 aa, Synthetic construct
SPSDEGALLDQLYLALRNFDGLEEISQSQAVDPEQFSSQDSNIMLEQKAPVFPQQYASQAQMAQGSYSPM

SEQ ID NO: 15110 - protein, 70 aa, Synthetic construct
SPSDEGALLDQLYLALRNFDGLEEIDRALGVDPEQFSSQDSNIMLEQKAPVFPQQYASQAQMAQGSYSPM

SEQ ID NO: 15111 - protein, 70 aa, Synthetic construct
SPSDEGALLDQLYLALRNFDGLEEIDRALGIPELVFSSQDSNIMLEQKAPVFPQQYASQAQMAQGSYSPM

SEQ ID NO: 15112 - protein, 70 aa, Synthetic construct
SPSDEGALLDQLYLALRNFDGLEEIDRALGIPELVSQSQASNIMLEQKAPVFPQQYASQAQMAQGSYSPM

SEQ ID NO: 15113 - protein, 70 aa, Synthetic construct
SPSDEGALLDQLYLALRNFDGLEEIDRALGIPELVSQSQAVDPEQEQKAPVFPQQYASQAQMAQGSYSPM

SEQ ID NO: 15114 - protein, 70 aa, Synthetic construct
SPSDEGALLDQLYLALRNFDGLEEIDRALGIPELVSQSQAVDPEQFSSQDVFPQQYASQAQMAQGSYSPM

SEQ ID NO: 15115 - protein, 70 aa, Synthetic construct
SPSDEGALLDQLYLALRNFDGLEEIDRALGIPELVSQSQAVDPEQFSSQDSNIMLYASQAQMAQGSYSPM

SEQ ID NO: 15116 - protein, 70 aa, Synthetic construct
SPSDEGALLDQLYLALRNFDGLEEIDRALGIPELVSQSQAVDPEQFSSQDSNIMLEQKAPQMAQGSYSPM

SEQ ID NO: 15117 - protein, 70 aa, Synthetic construct
SPSDEGALLDQLYLALRNFDGLEEIDRALGIPELVSQSQAVDPEQFSSQDSNIMLEQKAPVFPQQSYSPM

SEQ ID NO: 15118 - protein, 70 aa, Synthetic construct
SPSDEGALLDQLYLALRNFDGLEEIDRALGIPELVSQSQAVDPEQFSSQDSNIMLEQKAPVFPQQYASQA

SEQ ID NO: 15119 - protein, 70 aa, Synthetic construct
LENWQFEEWGSQVTVVSSDMREWVAPEKADIIVSELLGSFADNELSPECLDGAQHFLKDDGVSIPGEYTS

SEQ ID NO: 15120 - protein, 70 aa, Synthetic construct
VEKNPNAVVTLENWQFEEWGREWVAPEKADIIVSELLGSFADNELSPECLDGAQHFLKDDGVSIPGEYTS

SEQ ID NO: 15121 - protein, 70 aa, Synthetic construct
VEKNPNAVVTLENWQFEEWGSQVTVPEKADIIVSELLGSFADNELSPECLDGAQHFLKDDGVSIPGEYTS

SEQ ID NO: 15122 - protein, 70 aa, Synthetic construct
VEKNPNAVVTLENWQFEEWGSQVTVVSSDMIIVSELLGSFADNELSPECLDGAQHFLKDDGVSIPGEYTS

SEQ ID NO: 15123 - protein, 70 aa, Synthetic construct
VEKNPNAVVTLENWQFEEWGSQVTVVSSDMREWVAPEKADIIVSELLGSFDGAQHFLKDDGVSIPGEYTS

SEQ ID NO: 15124 - protein, 70 aa, Synthetic construct
VEKNPNAVVTLENWQFEEWGSQVTVVSSDMREWVAPEKADIIVSELLGSFADNELFLKDDGVSIPGEYTS

SEQ ID NO: 15125 - protein, 70 aa, Synthetic construct
VEKNPNAVVTLENWQFEEWGSQVTVVSSDMREWVAPEKADIIVSELLGSFADNELSPECLGVSIPGEYTS

SEQ ID NO: 15126 - protein, 70 aa, Synthetic construct
VEKNPNAVVTLENWQFEEWGSQVTVVSSDMREWVAPEKADIIVSELLGSFADNELSPECLDGAQHGEYTS

SEQ ID NO: 15127 - protein, 70 aa, Synthetic construct
VEKNPNAVVTLENWQFEEWGSQVTVVSSDMREWVAPEKADIIVSELLGSFADNELSPECLDGAQHFLKDD

SEQ ID NO: 15128 - protein, 70 aa, Synthetic construct
DYDSYQHYFYDYDCGEDIWKKFELVPSPPTSPPWGLGPGAGDPAPGIGPPEPWPGGCTGDEAESRGHSKG

SEQ ID NO: 15129 - protein, 70 aa, Synthetic construct
DYDSYQHYFYDYDCGEDFYRKFELVPSPPTSPPWGLGPGAGDPAPGIGPPEPWPGGCTGDEAESRGHSKG

SEQ ID NO: 15130 - protein, 70 aa, Synthetic construct
DYDSYQHYFYDYDCGEDFYRSTAPSEDIWKSPPWGLGPGAGDPAPGIGPPEPWPGGCTGDEAESRGHSKG

SEQ ID NO: 15131 - protein, 70 aa, Synthetic construct
DYDSYQHYFYDYDCGEDFYRSTAPSEDIWKKFELVLGPGAGDPAPGIGPPEPWPGGCTGDEAESRGHSKG

SEQ ID NO: 15132 - protein, 70 aa, Synthetic construct
DYDSYQHYFYDYDCGEDFYRSTAPSEDIWKKFELVPSPPTGDPAPGIGPPEPWPGGCTGDEAESRGHSKG

SEQ ID NO: 15133 - protein, 70 aa, Synthetic construct
DYDSYQHYFYDYDCGEDFYRSTAPSEDIWKKFELVPSPPTSPPWGGIGPPEPWPGGCTGDEAESRGHSKG

SEQ ID NO: 15134 - protein, 70 aa, Synthetic construct
DYDSYQHYFYDYDCGEDFYRSTAPSEDIWKKFELVPSPPTSPPWGLGPGAEPWPGGCTGDEAESRGHSKG

SEQ ID NO: 15135 - protein, 70 aa, Synthetic construct
DYDSYQHYFYDYDCGEDFYRSTAPSEDIWKKFELVPSPPTSPPWGLGPGAGDPAPGCTGDEAESRGHSKG

SEQ ID NO: 15136 - protein, 70 aa, Synthetic construct
DYDSYQHYFYDYDCGEDFYRSTAPSEDIWKKFELVPSPPTSPPWGLGPGAGDPAPGIGPPEAESRGHSKG

SEQ ID NO: 15137 - protein, 70 aa, Synthetic construct
DYDSYQHYFYDYDCGEDFYRSTAPSEDIWKKFELVPSPPTSPPWGLGPGAGDPAPGIGPPEPWPGGHSKG

SEQ ID NO: 15138 - protein, 70 aa, Synthetic construct
DYDSYQHYFYDYDCGEDFYRSTAPSEDIWKKFELVPSPPTSPPWGLGPGAGDPAPGIGPPEPWPGGCTGD

SEQ ID NO: 15139 - protein, 70 aa, Synthetic construct
HCWRNFVNYPPGDEAHWPQYPPLWMMLYALELHCIILSLPPCLKISRRWQNHLTFFRLHLQNCHYQTIPP

SEQ ID NO: 15140 - protein, 70 aa, Synthetic construct
IQIMRFVNYPPGDEAHWPQYPPLWMMLYALELHCIILSLPPCLKISRRWQNHLTFFRLHLQNCHYQTIPP

SEQ ID NO: 15141 - protein, 70 aa, Synthetic construct
IQIMRASEYYHCWRNFVNYPPPLWMMLYALELHCIILSLPPCLKISRRWQNHLTFFRLHLQNCHYQTIPP

SEQ ID NO: 15142 - protein, 70 aa, Synthetic construct
IQIMRASEYYHCWRNFVNYPPGDEAHWPQYPPLWMMLYALELHCISRRWQNHLTFFRLHLQNCHYQTIPP

SEQ ID NO: 15143 - protein, 70 aa, Synthetic construct
IQIMRASEYYHCWRNFVNYPPGDEAHWPQYPPLWMMLYALELHCIILSLPPCLKIFRLHLQNCHYQTIPP

SEQ ID NO: 15144 - protein, 70 aa, Synthetic construct
IQIMRASEYYHCWRNFVNYPPGDEAHWPQYPPLWMMLYALELHCIILSLPPCLKISRRWQQNCHYQTIPP

SEQ ID NO: 15145 - protein, 70 aa, Synthetic construct
QLLLHNTVIFYGADSKDTCHELDELQLCKNCFYLSNARPDNWFCYPCIPNHELVWAKMKGFGFWPAKVMQ

SEQ ID NO: 15146 - protein, 70 aa, Synthetic construct
QLLLHNTVIFYGADSEQADIARMLYKDTCHELDELNARPDNWFCYPCIPNHELVWAKMKGFGFWPAKVMQ

SEQ ID NO: 15147 - protein, 70 aa, Synthetic construct
QLLLHNTVIFYGADSEQADIARMLYKDTCHELDELQLCKNNWFCYPCIPNHELVWAKMKGFGFWPAKVMQ

SEQ ID NO: 15148 - protein, 70 aa, Synthetic construct
FQQPQFLFPFYIPGTEFSLGPDLGLMTGMAGSLLEDLKQQIQTQHHVGQTQLQILQQQAQQYQATQPQLQ

SEQ ID NO: 15149 - protein, 70 aa, Synthetic construct
FQQPQFLFPFYIPGTEFSLGPDLGLPGSATGSLLEDLKQQIQTQHHVGQTQLQILQQQAQQYQATQPQLQ

SEQ ID NO: 15150 - protein, 70 aa, Synthetic construct
FQQPQFLFPFYIPGTEFSLGPDLGLPGSATFGMPGDLKQQIQTQHHVGQTQLQILQQQAQQYQATQPQLQ

SEQ ID NO: 15151 - protein, 70 aa, Synthetic construct
FQQPQFLFPFYIPGTEFSLGPDLGLPGSATFGMPGMTGMAIQTQHHVGQTQLQILQQQAQQYQATQPQLQ

SEQ ID NO: 15152 - protein, 70 aa, Synthetic construct
FQQPQFLFPFYIPGTEFSLGPDLGLPGSATFGMPGMTGMAGSLLEHVGQTQLQILQQQAQQYQATQPQLQ

SEQ ID NO: 15153 - protein, 70 aa, Synthetic construct
FQQPQFLFPFYIPGTEFSLGPDLGLPGSATFGMPGMTGMAGSLLEDLKQQQLQILQQQAQQYQATQPQLQ

SEQ ID NO: 15154 - protein, 70 aa, Synthetic construct
FQQPQFLFPFYIPGTEFSLGPDLGLPGSATFGMPGMTGMAGSLLEDLKQQIQTQHQQQAQQYQATQPQLQ

SEQ ID NO: 15155 - protein, 70 aa, Synthetic construct
FQQPQFLFPFYIPGTEFSLGPDLGLPGSATFGMPGMTGMAGSLLEDLKQQIQTQHHVGQTQYQATQPQLQ

SEQ ID NO: 15156 - protein, 70 aa, Synthetic construct
FQQPQFLFPFYIPGTEFSLGPDLGLPGSATFGMPGMTGMAGSLLEDLKQQIQTQHHVGQTQLQILQPQLQ

SEQ ID NO: 15157 - protein, 70 aa, Synthetic construct
FQQPQFLFPFYIPGTEFSLGPDLGLPGSATFGMPGMTGMAGSLLEDLKQQIQTQHHVGQTQLQILQQQAQ

SEQ ID NO: 15158 - protein, 70 aa, Synthetic construct
SSPLQISMTSLQNSLPPQLLQYQCDQCTVAFPTLELWQEHQHMHFLAAQNQFLHSPFLERPMDMPYMIFD

SEQ ID NO: 15159 - protein, 70 aa, Synthetic construct
PPSASISMTSLQNSLPPQLLQYQCDQCTVAFPTLELWQEHQHMHFLAAQNQFLHSPFLERPMDMPYMIFD

SEQ ID NO: 15160 - protein, 70 aa, Synthetic construct
PPSASQTPVPLQNSLPPQLLQYQCDQCTVAFPTLELWQEHQHMHFLAAQNQFLHSPFLERPMDMPYMIFD

SEQ ID NO: 15161 - protein, 70 aa, Synthetic construct
PPSASQTPVPSSPLQPPQLLQYQCDQCTVAFPTLELWQEHQHMHFLAAQNQFLHSPFLERPMDMPYMIFD

SEQ ID NO: 15162 - protein, 70 aa, Synthetic construct
PPSASQTPVPSSPLQISMTSLQNSLPPQLLQYQCDQCTVAFPTLELAAQNQFLHSPFLERPMDMPYMIFD

SEQ ID NO: 15163 - protein, 70 aa, Synthetic construct
PPSASQTPVPSSPLQISMTSLQNSLPPQLLQYQCDQCTVAFPTLELWQEHQFLHSPFLERPMDMPYMIFD

SEQ ID NO: 15164 - protein, 70 aa, Synthetic construct
PPSASQTPVPSSPLQISMTSLQNSLPPQLLQYQCDQCTVAFPTLELWQEHQHMHFPFLERPMDMPYMIFD

SEQ ID NO: 15165 - protein, 70 aa, Synthetic construct
PPSASQTPVPSSPLQISMTSLQNSLPPQLLQYQCDQCTVAFPTLELWQEHQHMHFLAAQNQFLHSYMIFD

SEQ ID NO: 15166 - protein, 70 aa, Synthetic construct
YVSYLLDKDVGGLNLAPQNFVSPPQYPDYGGYHVAAAAAAAANLDSAQSPGPSWPAAYGAPLREDWNGYA

SEQ ID NO: 15167 - protein, 70 aa, Synthetic construct
YVSYLLDKDVSMYPSAPQNFVSPPQYPDYGGYHVAAAAAAAANLDSAQSPGPSWPAAYGAPLREDWNGYA

SEQ ID NO: 15168 - protein, 70 aa, Synthetic construct
YVSYLLDKDVSMYPSSVRHSGGLNLYPDYGGYHVAAAAAAAANLDSAQSPGPSWPAAYGAPLREDWNGYA

SEQ ID NO: 15169 - protein, 70 aa, Synthetic construct
YVSYLLDKDVSMYPSSVRHSGGLNLAPQNFVSPPQYPDYGAANLDSAQSPGPSWPAAYGAPLREDWNGYA

SEQ ID NO: 15170 - protein, 70 aa, Synthetic construct
YVSYLLDKDVSMYPSSVRHSGGLNLAPQNFVSPPQYPDYGGYHVASAQSPGPSWPAAYGAPLREDWNGYA

SEQ ID NO: 15171 - protein, 70 aa, Synthetic construct
YVSYLLDKDVSMYPSSVRHSGGLNLAPQNFVSPPQYPDYGGYHVAAAAAAGPSWPAAYGAPLREDWNGYA

SEQ ID NO: 15172 - protein, 70 aa, Synthetic construct
YVSYLLDKDVSMYPSSVRHSGGLNLAPQNFVSPPQYPDYGGYHVAAAAAAAANLDAAYGAPLREDWNGYA

SEQ ID NO: 15173 - protein, 70 aa, Synthetic construct
YVSYLLDKDVSMYPSSVRHSGGLNLAPQNFVSPPQYPDYGGYHVAAAAAAAANLDSAQSPGPSWPWNGYA

SEQ ID NO: 15174 - protein, 70 aa, Synthetic construct
LLSPDSDGHKFAFPTTGSSESLSMLPTNVSEELVLSTTLDGGRKIPETTMNFDPDCFLNNPKQGQTYGGG

SEQ ID NO: 15175 - protein, 70 aa, Synthetic construct
LLSPDASQGLFAFPTTGSSESLSMLPTNVSEELVLSTTLDGGRKIPETTMNFDPDCFLNNPKQGQTYGGG

SEQ ID NO: 15176 - protein, 70 aa, Synthetic construct
LLSPDASQGLVLAVSTGSSESLSMLPTNVSEELVLSTTLDGGRKIPETTMNFDPDCFLNNPKQGQTYGGG

SEQ ID NO: 15177 - protein, 70 aa, Synthetic construct
LLSPDASQGLVLAVSSDGHKFAFPTTGSSEEELVLSTTLDGGRKIPETTMNFDPDCFLNNPKQGQTYGGG

SEQ ID NO: 15178 - protein, 70 aa, Synthetic construct
LLSPDASQGLVLAVSSDGHKFAFPTTGSSESLSMLPTNVSEELVLPETTMNFDPDCFLNNPKQGQTYGGG

SEQ ID NO: 15179 - protein, 70 aa, Synthetic construct
LLSPDASQGLVLAVSSDGHKFAFPTTGSSESLSMLPTNVSEELVLSTTLDNFDPDCFLNNPKQGQTYGGG

SEQ ID NO: 15180 - protein, 70 aa, Synthetic construct
LGNASNMELSLDHFDISFSNQFSDLINDFISVEGGSSTIYGHQLVSGDSTALSQSEDGARAPFTQAEMCL

SEQ ID NO: 15181 - protein, 70 aa, Synthetic construct
QGLYPNMELSLDHFDISFSNQFSDLINDFISVEGGSSTIYGHQLVSGDSTALSQSEDGARAPFTQAEMCL

SEQ ID NO: 15182 - protein, 70 aa, Synthetic construct
QGLYPVAQPSLDHFDISFSNQFSDLINDFISVEGGSSTIYGHQLVSGDSTALSQSEDGARAPFTQAEMCL

SEQ ID NO: 15183 - protein, 70 aa, Synthetic construct
QGLYPVAQPSLGNASNMELSLDHFDISFSNQFSDLINDFIGHQLVSGDSTALSQSEDGARAPFTQAEMCL

SEQ ID NO: 15184 - protein, 70 aa, Synthetic construct
QGLYPVAQPSLGNASNMELSLDHFDISFSNQFSDLINDFISVEGGSGDSTALSQSEDGARAPFTQAEMCL

SEQ ID NO: 15185 - protein, 70 aa, Synthetic construct
QGLYPVAQPSLGNASNMELSLDHFDISFSNQFSDLINDFISVEGGSSTIYALSQSEDGARAPFTQAEMCL

SEQ ID NO: 15186 - protein, 70 aa, Synthetic construct
QGLYPVAQPSLGNASNMELSLDHFDISFSNQFSDLINDFISVEGGSSTIYGHQLVEDGARAPFTQAEMCL

SEQ ID NO: 15187 - protein, 70 aa, Synthetic construct
QGLYPVAQPSLGNASNMELSLDHFDISFSNQFSDLINDFISVEGGSSTIYGHQLVSGDSTAPFTQAEMCL

SEQ ID NO: 15188 - protein, 70 aa, Synthetic construct
QGLYPVAQPSLGNASNMELSLDHFDISFSNQFSDLINDFISVEGGSSTIYGHQLVSGDSTALSQSAEMCL

SEQ ID NO: 15189 - protein, 70 aa, Synthetic construct
QGLYPVAQPSLGNASNMELSLDHFDISFSNQFSDLINDFISVEGGSSTIYGHQLVSGDSTALSQSEDGAR

SEQ ID NO: 15190 - protein, 70 aa, Synthetic construct
IAFEKPNLPSAADWSEFLSASTSEKVENEFAQLTLAARLVQTAFRKYKGRPLREQQEVAAAVIQRCYRKY

SEQ ID NO: 15191 - protein, 70 aa, Synthetic construct
IAFEKPNLPSAADWSEFLSASTSEKVENEFAQLTLSDHEQRELYEAARLVQTAFRQEVAAAVIQRCYRKY

SEQ ID NO: 15192 - protein, 70 aa, Synthetic construct
SNPMNPYPGLLNQNTQYPSYQCNGNLSVDNCSPYLGSYSPQSQPMDLYRYPSQDPLSKLSLPPIHTLYQP

SEQ ID NO: 15193 - protein, 70 aa, Synthetic construct
SQAAGPYPGLLNQNTQYPSYQCNGNLSVDNCSPYLGSYSPQSQPMDLYRYPSQDPLSKLSLPPIHTLYQP

SEQ ID NO: 15194 - protein, 70 aa, Synthetic construct
SQAAGSYLNSLNQNTQYPSYQCNGNLSVDNCSPYLGSYSPQSQPMDLYRYPSQDPLSKLSLPPIHTLYQP

SEQ ID NO: 15195 - protein, 70 aa, Synthetic construct
SQAAGSYLNSSNPMNQYPSYQCNGNLSVDNCSPYLGSYSPQSQPMDLYRYPSQDPLSKLSLPPIHTLYQP

SEQ ID NO: 15196 - protein, 70 aa, Synthetic construct
SQAAGSYLNSSNPMNPYPGLQCNGNLSVDNCSPYLGSYSPQSQPMDLYRYPSQDPLSKLSLPPIHTLYQP

SEQ ID NO: 15197 - protein, 70 aa, Synthetic construct
SQAAGSYLNSSNPMNPYPGLLNQNTLSVDNCSPYLGSYSPQSQPMDLYRYPSQDPLSKLSLPPIHTLYQP

SEQ ID NO: 15198 - protein, 70 aa, Synthetic construct
SQAAGSYLNSSNPMNPYPGLLNQNTQYPSYCSPYLGSYSPQSQPMDLYRYPSQDPLSKLSLPPIHTLYQP

SEQ ID NO: 15199 - protein, 70 aa, Synthetic construct
SQAAGSYLNSSNPMNPYPGLLNQNTQYPSYQCNGNGSYSPQSQPMDLYRYPSQDPLSKLSLPPIHTLYQP

SEQ ID NO: 15200 - protein, 70 aa, Synthetic construct
SQAAGSYLNSSNPMNPYPGLLNQNTQYPSYQCNGNLSVDNQSQPMDLYRYPSQDPLSKLSLPPIHTLYQP

SEQ ID NO: 15201 - protein, 70 aa, Synthetic construct
SQAAGSYLNSSNPMNPYPGLLNQNTQYPSYQCNGNLSVDNCSPYLDLYRYPSQDPLSKLSLPPIHTLYQP

SEQ ID NO: 15202 - protein, 70 aa, Synthetic construct
SQAAGSYLNSSNPMNPYPGLLNQNTQYPSYQCNGNLSVDNCSPYLGSYSPPSQDPLSKLSLPPIHTLYQP

SEQ ID NO: 15203 - protein, 70 aa, Synthetic construct
SQAAGSYLNSSNPMNPYPGLLNQNTQYPSYQCNGNLSVDNCSPYLGSYSPQSQPMLSKLSLPPIHTLYQP

SEQ ID NO: 15204 - protein, 70 aa, Synthetic construct
SQAAGSYLNSSNPMNPYPGLLNQNTQYPSYQCNGNLSVDNCSPYLGSYSPQSQPMDLYRYLPPIHTLYQP

SEQ ID NO: 15205 - protein, 70 aa, Synthetic construct
TMGDMKTPDFDDLLAAFDIPDMVDPHESHMKQNAHGEDDSHAPSSSDVGVSVIVKNVRNIDSSEGGEKDG

SEQ ID NO: 15206 - protein, 70 aa, Synthetic construct
TMGDMKTPDFDDLLAAFDIPDMVDPKAAIEKQNAHGEDDSHAPSSSDVGVSVIVKNVRNIDSSEGGEKDG

SEQ ID NO: 15207 - protein, 70 aa, Synthetic construct
TMGDMKTPDFDDLLAAFDIPDMVDPKAAIESGHDDGEDDSHAPSSSDVGVSVIVKNVRNIDSSEGGEKDG

SEQ ID NO: 15208 - protein, 70 aa, Synthetic construct
TMGDMKTPDFDDLLAAFDIPDMVDPKAAIESGHDDHESHMHAPSSSDVGVSVIVKNVRNIDSSEGGEKDG

SEQ ID NO: 15209 - protein, 70 aa, Synthetic construct
TMGDMKTPDFDDLLAAFDIPDMVDPKAAIESGHDDHESHMKQNAHSDVGVSVIVKNVRNIDSSEGGEKDG

SEQ ID NO: 15210 - protein, 70 aa, Synthetic construct
TMGDMKTPDFDDLLAAFDIPDMVDPKAAIESGHDDHESHMKQNAHGEDDSSVIVKNVRNIDSSEGGEKDG

SEQ ID NO: 15211 - protein, 70 aa, Synthetic construct
TMGDMKTPDFDDLLAAFDIPDMVDPKAAIESGHDDHESHMKQNAHGEDDSHAPSSNVRNIDSSEGGEKDG

SEQ ID NO: 15212 - protein, 70 aa, Synthetic construct
TMGDMKTPDFDDLLAAFDIPDMVDPKAAIESGHDDHESHMKQNAHGEDDSHAPSSSDVGVDSSEGGEKDG

SEQ ID NO: 15213 - protein, 70 aa, Synthetic construct
TMGDMKTPDFDDLLAAFDIPDMVDPKAAIESGHDDHESHMKQNAHGEDDSHAPSSSDVGVSVIVKGEKDG

SEQ ID NO: 15214 - protein, 70 aa, Synthetic construct
TMGDMKTPDFDDLLAAFDIPDMVDPKAAIESGHDDHESHMKQNAHGEDDSHAPSSSDVGVSVIVKNVRNI

SEQ ID NO: 15215 - protein, 70 aa, Synthetic construct
SEPGDGEALMYHTHFSELLDEFSQNVLGQLLNDPFLSEKSVSMEVEPSPTSPAPLIQAEHSYSLCEEPRA

SEQ ID NO: 15216 - protein, 70 aa, Synthetic construct
LQWDRGEALMYHTHFSELLDEFSQNVLGQLLNDPFLSEKSVSMEVEPSPTSPAPLIQAEHSYSLCEEPRA

SEQ ID NO: 15217 - protein, 70 aa, Synthetic construct
LQWDRKLSELYHTHFSELLDEFSQNVLGQLLNDPFLSEKSVSMEVEPSPTSPAPLIQAEHSYSLCEEPRA

SEQ ID NO: 15218 - protein, 70 aa, Synthetic construct
LQWDRKLSELSEPGDGEALMYHTHFSELLDEFSQNVLGQLVSMEVEPSPTSPAPLIQAEHSYSLCEEPRA

SEQ ID NO: 15219 - protein, 70 aa, Synthetic construct
LQWDRKLSELSEPGDGEALMYHTHFSELLDEFSQNVLGQLLNDPFEPSPTSPAPLIQAEHSYSLCEEPRA

SEQ ID NO: 15220 - protein, 70 aa, Synthetic construct
LQWDRKLSELSEPGDGEALMYHTHFSELLDEFSQNVLGQLLNDPFLSEKSSPAPLIQAEHSYSLCEEPRA

SEQ ID NO: 15221 - protein, 70 aa, Synthetic construct
LQWDRKLSELSEPGDGEALMYHTHFSELLDEFSQNVLGQLLNDPFLSEKSVSMEVIQAEHSYSLCEEPRA

SEQ ID NO: 15222 - protein, 70 aa, Synthetic construct
LQWDRKLSELSEPGDGEALMYHTHFSELLDEFSQNVLGQLLNDPFLSEKSVSMEVEPSPTSYSLCEEPRA

SEQ ID NO: 15223 - protein, 70 aa, Synthetic construct
LQWDRKLSELSEPGDGEALMYHTHFSELLDEFSQNVLGQLLNDPFLSEKSVSMEVEPSPTSPAPLEEPRA

SEQ ID NO: 15224 - protein, 70 aa, Synthetic construct
LQWDRKLSELSEPGDGEALMYHTHFSELLDEFSQNVLGQLLNDPFLSEKSVSMEVEPSPTSPAPLIQAEH

SEQ ID NO: 15225 - protein, 70 aa, Synthetic construct
TGGTKDYIVVGSDSGRIVILEYQPSKNMFEGCRRIVPGQFLAVDPKGRAVMISAIEKQKLVYILNRDAAA

SEQ ID NO: 15226 - protein, 70 aa, Synthetic construct
TGGTKDYIVVGSDSGRIVILEYQPSKNMFEKIHQEVPGQFLAVDPKGRAVMISAIEKQKLVYILNRDAAA

SEQ ID NO: 15227 - protein, 70 aa, Synthetic construct
TGGTKDYIVVGSDSGRIVILEYQPSKNMFEKIHQETFGKSGCRRIVPGQFLAVDPKGRAVMISAIRDAAA

SEQ ID NO: 15228 - protein, 70 aa, Synthetic construct
SGLCSPSYVAVTPFSLRGDNDGGGGSFSTADQLEMVTELLGGDMVNQSFICDPDDETFIKNIIIQDCMWS

SEQ ID NO: 15229 - protein, 70 aa, Synthetic construct
PTPPLPSYVAVTPFSLRGDNDGGGGSFSTADQLEMVTELLGGDMVNQSFICDPDDETFIKNIIIQDCMWS

SEQ ID NO: 15230 - protein, 70 aa, Synthetic construct
PTPPLSPSRRVTPFSLRGDNDGGGGSFSTADQLEMVTELLGGDMVNQSFICDPDDETFIKNIIIQDCMWS

SEQ ID NO: 15231 - protein, 70 aa, Synthetic construct
PTPPLSPSRRSGLCSLRGDNDGGGGSFSTADQLEMVTELLGGDMVNQSFICDPDDETFIKNIIIQDCMWS

SEQ ID NO: 15232 - protein, 70 aa, Synthetic construct
PTPPLSPSRRSGLCSPSYVADGGGGSFSTADQLEMVTELLGGDMVNQSFICDPDDETFIKNIIIQDCMWS

SEQ ID NO: 15233 - protein, 70 aa, Synthetic construct
PTPPLSPSRRSGLCSPSYVAVTPFSSFSTADQLEMVTELLGGDMVNQSFICDPDDETFIKNIIIQDCMWS

SEQ ID NO: 15234 - protein, 70 aa, Synthetic construct
PTPPLSPSRRSGLCSPSYVAVTPFSLRGDNDQLEMVTELLGGDMVNQSFICDPDDETFIKNIIIQDCMWS

SEQ ID NO: 15235 - protein, 70 aa, Synthetic construct
PTPPLSPSRRSGLCSPSYVAVTPFSLRGDNDGGGGVTELLGGDMVNQSFICDPDDETFIKNIIIQDCMWS

SEQ ID NO: 15236 - protein, 70 aa, Synthetic construct
PTPPLSPSRRSGLCSPSYVAVTPFSLRGDNDGGGGSFSTADQLEMNQSFICDPDDETFIKNIIIQDCMWS

SEQ ID NO: 15237 - protein, 70 aa, Synthetic construct
PTPPLSPSRRSGLCSPSYVAVTPFSLRGDNDGGGGSFSTADQLEMVTELLCDPDDETFIKNIIIQDCMWS

SEQ ID NO: 15238 - protein, 70 aa, Synthetic construct
PTPPLSPSRRSGLCSPSYVAVTPFSLRGDNDGGGGSFSTADQLEMVTELLGGDMVETFIKNIIIQDCMWS

SEQ ID NO: 15239 - protein, 70 aa, Synthetic construct
PTPPLSPSRRSGLCSPSYVAVTPFSLRGDNDGGGGSFSTADQLEMVTELLGGDMVNQSFICDPDDDCMWS

SEQ ID NO: 15240 - protein, 70 aa, Synthetic construct
CLSQPVTAFPQGTWIGEDIFPPLLPPTEQDLTKLLLEGQGESGGGSLGAQPLLQPSHYGQSGISMSHMDL

SEQ ID NO: 15241 - protein, 70 aa, Synthetic construct
CSDVTVTAFPQGTWIGEDIFPPLLPPTEQDLTKLLLEGQGESGGGSLGAQPLLQPSHYGQSGISMSHMDL

SEQ ID NO: 15242 - protein, 70 aa, Synthetic construct
CSDVTMVEDSQGTWIGEDIFPPLLPPTEQDLTKLLLEGQGESGGGSLGAQPLLQPSHYGQSGISMSHMDL

SEQ ID NO: 15243 - protein, 70 aa, Synthetic construct
CSDVTMVEDSCLSQPVTAFPQGTWIGEDIFLTKLLLEGQGESGGGSLGAQPLLQPSHYGQSGISMSHMDL

SEQ ID NO: 15244 - protein, 70 aa, Synthetic construct
CSDVTMVEDSCLSQPVTAFPQGTWIGEDIFPPLLPPTEQDLTKLLSLGAQPLLQPSHYGQSGISMSHMDL

SEQ ID NO: 15245 - protein, 70 aa, Synthetic construct
CSDVTMVEDSCLSQPVTAFPQGTWIGEDIFPPLLPPTEQDLTKLLLEGQGPLLQPSHYGQSGISMSHMDL

SEQ ID NO: 15246 - protein, 70 aa, Synthetic construct
CSDVTMVEDSCLSQPVTAFPQGTWIGEDIFPPLLPPTEQDLTKLLLEGQGESGGGSHYGQSGISMSHMDL

SEQ ID NO: 15247 - protein, 70 aa, Synthetic construct
CSDVTMVEDSCLSQPVTAFPQGTWIGEDIFPPLLPPTEQDLTKLLLEGQGESGGGSLGAQSGISMSHMDL

SEQ ID NO: 15248 - protein, 70 aa, Synthetic construct
CSDVTMVEDSCLSQPVTAFPQGTWIGEDIFPPLLPPTEQDLTKLLLEGQGESGGGSLGAQPLLQPSHMDL

SEQ ID NO: 15249 - protein, 70 aa, Synthetic construct
CSDVTMVEDSCLSQPVTAFPQGTWIGEDIFPPLLPPTEQDLTKLLLEGQGESGGGSLGAQPLLQPSHYGQ

SEQ ID NO: 15250 - protein, 70 aa, Synthetic construct
VALVPMPSDPPFNTRRAYTSEDEAWKSYLENPLTAATKAMMSINGDEDSAAALGLLYDYYKVPRDKRLLS

SEQ ID NO: 15251 - protein, 70 aa, Synthetic construct
SQESDMPSDPPFNTRRAYTSEDEAWKSYLENPLTAATKAMMSINGDEDSAAALGLLYDYYKVPRDKRLLS

SEQ ID NO: 15252 - protein, 70 aa, Synthetic construct
SQESDNNKRLPFNTRRAYTSEDEAWKSYLENPLTAATKAMMSINGDEDSAAALGLLYDYYKVPRDKRLLS

SEQ ID NO: 15253 - protein, 70 aa, Synthetic construct
SQESDNNKRLVALVPRAYTSEDEAWKSYLENPLTAATKAMMSINGDEDSAAALGLLYDYYKVPRDKRLLS

SEQ ID NO: 15254 - protein, 70 aa, Synthetic construct
SQESDNNKRLVALVPMPSDPEDEAWKSYLENPLTAATKAMMSINGDEDSAAALGLLYDYYKVPRDKRLLS

SEQ ID NO: 15255 - protein, 70 aa, Synthetic construct
SAACSMDPIDSFELLDLLFDRQDGILRHVELGEGWGHVKDQQVLPNPDSDDFLSSILGSGDSLPSSPLWS

SEQ ID NO: 15256 - protein, 70 aa, Synthetic construct
NTDLAMDPIDSFELLDLLFDRQDGILRHVELGEGWGHVKDQQVLPNPDSDDFLSSILGSGDSLPSSPLWS

SEQ ID NO: 15257 - protein, 70 aa, Synthetic construct
NTDLAAGKMASFELLDLLFDRQDGILRHVELGEGWGHVKDQQVLPNPDSDDFLSSILGSGDSLPSSPLWS

SEQ ID NO: 15258 - protein, 70 aa, Synthetic construct
NTDLAAGKMASAACSDLLFDRQDGILRHVELGEGWGHVKDQQVLPNPDSDDFLSSILGSGDSLPSSPLWS

SEQ ID NO: 15259 - protein, 70 aa, Synthetic construct
NTDLAAGKMASAACSMDPIDRQDGILRHVELGEGWGHVKDQQVLPNPDSDDFLSSILGSGDSLPSSPLWS

SEQ ID NO: 15260 - protein, 70 aa, Synthetic construct
NTDLAAGKMASAACSMDPIDSFELLLRHVELGEGWGHVKDQQVLPNPDSDDFLSSILGSGDSLPSSPLWS

SEQ ID NO: 15261 - protein, 70 aa, Synthetic construct
NTDLAAGKMASAACSMDPIDSFELLDLLFDLGEGWGHVKDQQVLPNPDSDDFLSSILGSGDSLPSSPLWS

SEQ ID NO: 15262 - protein, 70 aa, Synthetic construct
NTDLAAGKMASAACSMDPIDSFELLDLLFDRQDGIGHVKDQQVLPNPDSDDFLSSILGSGDSLPSSPLWS

SEQ ID NO: 15263 - protein, 70 aa, Synthetic construct
NTDLAAGKMASAACSMDPIDSFELLDLLFDRQDGILRHVEQQVLPNPDSDDFLSSILGSGDSLPSSPLWS

SEQ ID NO: 15264 - protein, 70 aa, Synthetic construct
NTDLAAGKMASAACSMDPIDSFELLDLLFDRQDGILRHVELGEGWNPDSDDFLSSILGSGDSLPSSPLWS

SEQ ID NO: 15265 - protein, 70 aa, Synthetic construct
NTDLAAGKMASAACSMDPIDSFELLDLLFDRQDGILRHVELGEGWGHVKDDFLSSILGSGDSLPSSPLWS

SEQ ID NO: 15266 - protein, 70 aa, Synthetic construct
NTDLAAGKMASAACSMDPIDSFELLDLLFDRQDGILRHVELGEGWGHVKDQQVLPILGSGDSLPSSPLWS

SEQ ID NO: 15267 - protein, 70 aa, Synthetic construct
NTDLAAGKMASAACSMDPIDSFELLDLLFDRQDGILRHVELGEGWGHVKDQQVLPNPDSDDSLPSSPLWS

SEQ ID NO: 15268 - protein, 70 aa, Synthetic construct
NTDLAAGKMASAACSMDPIDSFELLDLLFDRQDGILRHVELGEGWGHVKDQQVLPNPDSDDFLSSSPLWS

SEQ ID NO: 15269 - protein, 70 aa, Synthetic construct
NTDLAAGKMASAACSMDPIDSFELLDLLFDRQDGILRHVELGEGWGHVKDQQVLPNPDSDDFLSSILGSG

SEQ ID NO: 15270 - protein, 70 aa, Synthetic construct
KKKKEYIDGLNQELQRKVLHLEKQNLSLLEQLKKLQAIVVQSTSKSAQTGTCVAVLLLSFALIILPSISP

SEQ ID NO: 15271 - protein, 70 aa, Synthetic construct
KKKKEYIDGLETRMSACTAQNQELQLSLLEQLKKLQAIVVQSTSKSAQTGTCVAVLLLSFALIILPSISP

SEQ ID NO: 15272 - protein, 70 aa, Synthetic construct
KKKKEYIDGLETRMSACTAQNQELQRKVLHLEKQNQAIVVQSTSKSAQTGTCVAVLLLSFALIILPSISP

SEQ ID NO: 15273 - protein, 70 aa, Synthetic construct
KKKKEYIDGLETRMSACTAQNQELQRKVLHLEKQNLSLLEQSTSKSAQTGTCVAVLLLSFALIILPSISP

SEQ ID NO: 15274 - protein, 70 aa, Synthetic construct
LQLEYPDSLFDTEKMSPWDMELIPNNAVFPEELGTSVPLTDGECRSLIYKPLDGEWGTNPRDEECERIVA

SEQ ID NO: 15275 - protein, 70 aa, Synthetic construct
LQLEYPDSLFQCYNVSPWDMELIPNNAVFPEELGTSVPLTDGECRSLIYKPLDGEWGTNPRDEECERIVA

SEQ ID NO: 15276 - protein, 70 aa, Synthetic construct
LQLEYPDSLFQCYNVCWDNGELIPNNAVFPEELGTSVPLTDGECRSLIYKPLDGEWGTNPRDEECERIVA

SEQ ID NO: 15277 - protein, 70 aa, Synthetic construct
LQLEYPDSLFQCYNVCWDNGDTEKMNAVFPEELGTSVPLTDGECRSLIYKPLDGEWGTNPRDEECERIVA

SEQ ID NO: 15278 - protein, 70 aa, Synthetic construct
LQLEYPDSLFQCYNVCWDNGDTEKMSPWDMEELGTSVPLTDGECRSLIYKPLDGEWGTNPRDEECERIVA

SEQ ID NO: 15279 - protein, 70 aa, Synthetic construct
LQLEYPDSLFQCYNVCWDNGDTEKMSPWDMELIPNSVPLTDGECRSLIYKPLDGEWGTNPRDEECERIVA

SEQ ID NO: 15280 - protein, 70 aa, Synthetic construct
LQLEYPDSLFQCYNVCWDNGDTEKMSPWDMELIPNNAVFPDGECRSLIYKPLDGEWGTNPRDEECERIVA

SEQ ID NO: 15281 - protein, 70 aa, Synthetic construct
LQLEYPDSLFQCYNVCWDNGDTEKMSPWDMELIPNNAVFPEELGTSLIYKPLDGEWGTNPRDEECERIVA

SEQ ID NO: 15282 - protein, 70 aa, Synthetic construct
LQLEYPDSLFQCYNVCWDNGDTEKMSPWDMELIPNNAVFPEELGTSVPLTPLDGEWGTNPRDEECERIVA

SEQ ID NO: 15283 - protein, 70 aa, Synthetic construct
LQLEYPDSLFQCYNVCWDNGDTEKMSPWDMELIPNNAVFPEELGTSVPLTDGECRWGTNPRDEECERIVA

SEQ ID NO: 15284 - protein, 70 aa, Synthetic construct
LQLEYPDSLFQCYNVCWDNGDTEKMSPWDMELIPNNAVFPEELGTSVPLTDGECRSLIYKPLDGEERIVA

SEQ ID NO: 15285 - protein, 70 aa, Synthetic construct
LQLEYPDSLFQCYNVCWDNGDTEKMSPWDMELIPNNAVFPEELGTSVPLTDGECRSLIYKPLDGEWGTNP

SEQ ID NO: 15286 - protein, 70 aa, Synthetic construct
TVNIIVVGQSHLDSNIENQEIVTNPPDICQVVEVTTESDEQPVSMSELYPLQISPVSSYAESETTDSVPS

SEQ ID NO: 15287 - protein, 70 aa, Synthetic construct
TSTIKVVGQSHLDSNIENQEIVTNPPDICQVVEVTTESDEQPVSMSELYPLQISPVSSYAESETTDSVPS

SEQ ID NO: 15288 - protein, 70 aa, Synthetic construct
TSTIKNEVDSTVNIIIENQEIVTNPPDICQVVEVTTESDEQPVSMSELYPLQISPVSSYAESETTDSVPS

SEQ ID NO: 15289 - protein, 70 aa, Synthetic construct
TSTIKNEVDSTVNIIVVGQSIVTNPPDICQVVEVTTESDEQPVSMSELYPLQISPVSSYAESETTDSVPS

SEQ ID NO: 15290 - protein, 70 aa, Synthetic construct
TSTIKNEVDSTVNIIVVGQSHLDSNIENQEIVTNPPDICQVVEVTTESDELQISPVSSYAESETTDSVPS

SEQ ID NO: 15291 - protein, 70 aa, Synthetic construct
TSTIKNEVDSTVNIIVVGQSHLDSNIENQEIVTNPPDICQVVEVTTESDEQPVSMSELYPESETTDSVPS

SEQ ID NO: 15292 - protein, 70 aa, Synthetic construct
TSTIKNEVDSTVNIIVVGQSHLDSNIENQEIVTNPPDICQVVEVTTESDEQPVSMSELYPLQISPDSVPS

SEQ ID NO: 15293 - protein, 70 aa, Synthetic construct
TSTIKNEVDSTVNIIVVGQSHLDSNIENQEIVTNPPDICQVVEVTTESDEQPVSMSELYPLQISPVSSYA

SEQ ID NO: 15294 - protein, 70 aa, Synthetic construct
KRLPPVLPGRPYDLAAATVATDLESGGAGAACGGSNLAPLPRRETEEFNDLLDLDFILSNSLTHPPESVA

SEQ ID NO: 15295 - protein, 70 aa, Synthetic construct
NRWREVLPGRPYDLAAATVATDLESGGAGAACGGSNLAPLPRRETEEFNDLLDLDFILSNSLTHPPESVA

SEQ ID NO: 15296 - protein, 70 aa, Synthetic construct
NRWREELSHMPYDLAAATVATDLESGGAGAACGGSNLAPLPRRETEEFNDLLDLDFILSNSLTHPPESVA

SEQ ID NO: 15297 - protein, 70 aa, Synthetic construct
NRWREELSHMKRLPPAATVATDLESGGAGAACGGSNLAPLPRRETEEFNDLLDLDFILSNSLTHPPESVA

SEQ ID NO: 15298 - protein, 70 aa, Synthetic construct
NRWREELSHMKRLPPVLPGRTDLESGGAGAACGGSNLAPLPRRETEEFNDLLDLDFILSNSLTHPPESVA

SEQ ID NO: 15299 - protein, 70 aa, Synthetic construct
NRWREELSHMKRLPPVLPGRPYDLAGGAGAACGGSNLAPLPRRETEEFNDLLDLDFILSNSLTHPPESVA

SEQ ID NO: 15300 - protein, 70 aa, Synthetic construct
NRWREELSHMKRLPPVLPGRPYDLAAATVAACGGSNLAPLPRRETEEFNDLLDLDFILSNSLTHPPESVA

SEQ ID NO: 15301 - protein, 70 aa, Synthetic construct
NRWREELSHMKRLPPVLPGRPYDLAAATVATDLESNLAPLPRRETEEFNDLLDLDFILSNSLTHPPESVA

SEQ ID NO: 15302 - protein, 70 aa, Synthetic construct
NRWREELSHMKRLPPVLPGRPYDLAAATVATDLESGGAGAPRRETEEFNDLLDLDFILSNSLTHPPESVA

SEQ ID NO: 15303 - protein, 70 aa, Synthetic construct
NRWREELSHMKRLPPVLPGRPYDLAAATVATDLESGGAGAACGGSEEFNDLLDLDFILSNSLTHPPESVA

SEQ ID NO: 15304 - protein, 70 aa, Synthetic construct
NRWREELSHMKRLPPVLPGRPYDLAAATVATDLESGGAGAACGGSNLAPLLLDLDFILSNSLTHPPESVA

SEQ ID NO: 15305 - protein, 70 aa, Synthetic construct
NRWREELSHMKRLPPVLPGRPYDLAAATVATDLESGGAGAACGGSNLAPLPRRETEEFNDLLDLDFILSN

SEQ ID NO: 15306 - protein, 70 aa, Synthetic construct
VENVSRLSESSSSSSSSSESESSSSDLSSSDSSDSESEMFPKFTEVKPNDSPSKENVKKMKNECIPPEGR

SEQ ID NO: 15307 - protein, 70 aa, Synthetic construct
KSDKTRLSESSSSSSSSSESESSSSDLSSSDSSDSESEMFPKFTEVKPNDSPSKENVKKMKNECIPPEGR

SEQ ID NO: 15308 - protein, 70 aa, Synthetic construct
PGENATLSYDQNDGFNNFLHEIHDPQHLETADASLSKHSSVFHWTDLSLEKKSCPYCPATFETGVGLSNH

SEQ ID NO: 15309 - protein, 70 aa, Synthetic construct
PGENATLSYDQNDGFYFEYYEIHDPQHLETADASLSKHSSVFHWTDLSLEKKSCPYCPATFETGVGLSNH

SEQ ID NO: 15310 - protein, 70 aa, Synthetic construct
PGENATLSYDQNDGFYFEYYEDTGSNNFLHEIHDPSKHSSVFHWTDLSLEKKSCPYCPATFETGVGLSNH

SEQ ID NO: 15311 - protein, 70 aa, Synthetic construct
PGENATLSYDQNDGFYFEYYEDTGSNNFLHEIHDPQHLETVFHWTDLSLEKKSCPYCPATFETGVGLSNH

SEQ ID NO: 15312 - protein, 70 aa, Synthetic construct
PGENATLSYDQNDGFYFEYYEDTGSNNFLHEIHDPQHLETADASLSKHSSVFHWTYCPATFETGVGLSNH

SEQ ID NO: 15313 - protein, 70 aa, Synthetic construct
PGENATLSYDQNDGFYFEYYEDTGSNNFLHEIHDPQHLETADASLSKHSSVFHWTDLSLEKKSCPYCPAT

SEQ ID NO: 15314 - protein, 70 aa, Synthetic construct
NESYFPFDDELTQDSIVEELVLMEQQMSMNNSHSYGNCLGGAPMSSHTSSTHFYHPIHSNGTPIHTPTPT

SEQ ID NO: 15315 - protein, 70 aa, Synthetic construct
NESYFPFDDELTQDSIVEELVLMEQQMSMNNSHSYGNCLGMTLQSSHTSSTHFYHPIHSNGTPIHTPTPT

SEQ ID NO: 15316 - protein, 70 aa, Synthetic construct
NESYFPFDDELTQDSIVEELVLMEQQMSMNNSHSYGNCLGMTLQSQSVTPTHFYHPIHSNGTPIHTPTPT

SEQ ID NO: 15317 - protein, 70 aa, Synthetic construct
NESYFPFDDELTQDSIVEELVLMEQQMSMNNSHSYGNCLGMTLQSQSVTPGAPMSSHTSSGTPIHTPTPT

SEQ ID NO: 15318 - protein, 70 aa, Synthetic construct
NESYFPFDDELTQDSIVEELVLMEQQMSMNNSHSYGNCLGMTLQSQSVTPGAPMSSHTSSTHFYHTPTPT

SEQ ID NO: 15319 - protein, 70 aa, Synthetic construct
NESYFPFDDELTQDSIVEELVLMEQQMSMNNSHSYGNCLGMTLQSQSVTPGAPMSSHTSSTHFYHPIHSN

SEQ ID NO: 15320 - protein, 70 aa, Synthetic construct
SDIRLSSELSGSINDLNTLDPNLLFDPGRQQGQDDEATLEELKNDPLFQQICSESMNSMTSSGFEWIESK

SEQ ID NO: 15321 - protein, 70 aa, Synthetic construct
DLTNTASDFSSDIRLLNTLDPNLLFDPGRQQGQDDEATLEELKNDPLFQQICSESMNSMTSSGFEWIESK

SEQ ID NO: 15322 - protein, 70 aa, Synthetic construct
DLTNTASDFSSDIRLSSELSPNLLFDPGRQQGQDDEATLEELKNDPLFQQICSESMNSMTSSGFEWIESK

SEQ ID NO: 15323 - protein, 70 aa, Synthetic construct
DLTNTASDFSSDIRLSSELSGSINDLNTLDPNLLFDPGRQQGQDDPLFQQICSESMNSMTSSGFEWIESK

SEQ ID NO: 15324 - protein, 70 aa, Synthetic construct
DLTNTASDFSSDIRLSSELSGSINDLNTLDPNLLFDPGRQQGQDDEATLEELKNDPLFQQICSESWIESK

SEQ ID NO: 15325 - protein, 70 aa, Synthetic construct
ILNEQRIRGILCDVTHSNVLAASSLYFKNIFWSHTICISSHVLELDDLKAEVFTEILNYIYSSTVVVKRQ

SEQ ID NO: 15326 - protein, 70 aa, Synthetic construct
TLETDQSTSGCRSSRERIIIMCCANATGLHKLNLCVVGKAKKPRAVTYYSQKGAWIEQSVFRQWFEKYFV

SEQ ID NO: 15327 - protein, 70 aa, Synthetic construct
IKISQGLGLQDFDLIVLLVRLKKNDQIYAMKVVKKELVHDDEDIDWVQTEKHVFEQASSNPFLVGLHSCF

SEQ ID NO: 15328 - protein, 70 aa, Synthetic construct
IDWDLLEKKQALPPFQPQITDDYGLDNFDTQFTSEPVQLTPDDEDAIKRIDQSEFEGFEYINPLLLSTEE

SEQ ID NO: 15329 - protein, 70 aa, Synthetic construct
DIKSHAFFRSIDWDLQPQITDDYGLDNFDTQFTSEPVQLTPDDEDAIKRIDQSEFEGFEYINPLLLSTEE

SEQ ID NO: 15330 - protein, 70 aa, Synthetic construct
DIKSHAFFRSIDWDLLEKKQALPPFQPQITDDYGLDNFDTQFTSEAIKRIDQSEFEGFEYINPLLLSTEE

SEQ ID NO: 15331 - protein, 70 aa, Synthetic construct
DIKSHAFFRSIDWDLLEKKQALPPFQPQITDDYGLDNFDTQFTSEPVQLTDQSEFEGFEYINPLLLSTEE

SEQ ID NO: 15332 - protein, 70 aa, Synthetic construct
DIKSHAFFRSIDWDLLEKKQALPPFQPQITDDYGLDNFDTQFTSEPVQLTPDDEDEGFEYINPLLLSTEE

SEQ ID NO: 15333 - protein, 70 aa, Synthetic construct
GFSANDSTDFGSLFDLENDLLGLLNSGNLVPDAASKHKQLSELLRGGSGSSINPGIGNVSASSPVQQGLG

SEQ ID NO: 15334 - protein, 70 aa, Synthetic construct
GFSANDSTDFGSLFDLENDLPDELISGNLVPDAASKHKQLSELLRGGSGSSINPGIGNVSASSPVQQGLG

SEQ ID NO: 15335 - protein, 70 aa, Synthetic construct
GFSANDSTDFGSLFDLENDLPDELIPNGGELGLLNKHKQLSELLRGGSGSSINPGIGNVSASSPVQQGLG

SEQ ID NO: 15336 - protein, 70 aa, Synthetic construct
GFSANDSTDFGSLFDLENDLPDELIPNGGELGLLNSGNLVSELLRGGSGSSINPGIGNVSASSPVQQGLG

SEQ ID NO: 15337 - protein, 70 aa, Synthetic construct
GFSANDSTDFGSLFDLENDLPDELIPNGGELGLLNSGNLVPDAASGGSGSSINPGIGNVSASSPVQQGLG

SEQ ID NO: 15338 - protein, 70 aa, Synthetic construct
GFSANDSTDFGSLFDLENDLPDELIPNGGELGLLNSGNLVPDAASKHKQLSINPGIGNVSASSPVQQGLG

SEQ ID NO: 15339 - protein, 70 aa, Synthetic construct
GFSANDSTDFGSLFDLENDLPDELIPNGGELGLLNSGNLVPDAASKHKQLSELLRIGNVSASSPVQQGLG

SEQ ID NO: 15340 - protein, 70 aa, Synthetic construct
GFSANDSTDFGSLFDLENDLPDELIPNGGELGLLNSGNLVPDAASKHKQLSELLRGGSGSASSPVQQGLG

SEQ ID NO: 15341 - protein, 70 aa, Synthetic construct
GFSANDSTDFGSLFDLENDLPDELIPNGGELGLLNSGNLVPDAASKHKQLSELLRGGSGSSINPGQQGLG

SEQ ID NO: 15342 - protein, 70 aa, Synthetic construct
GFSANDSTDFGSLFDLENDLPDELIPNGGELGLLNSGNLVPDAASKHKQLSELLRGGSGSSINPGIGNVS

SEQ ID NO: 15343 - protein, 70 aa, Synthetic construct
PNVSNDLSQKLYATMEKHKEVFFVIHLHAGPVINTLPPIVDPDPLLSCDLMDGRDAFLTLARDKHWEFSS

SEQ ID NO: 15344 - protein, 70 aa, Synthetic construct
SRANKDLSQKLYATMEKHKEVFFVIHLHAGPVINTLPPIVDPDPLLSCDLMDGRDAFLTLARDKHWEFSS

SEQ ID NO: 15345 - protein, 70 aa, Synthetic construct
SRANKKKPSMLYATMEKHKEVFFVIHLHAGPVINTLPPIVDPDPLLSCDLMDGRDAFLTLARDKHWEFSS

SEQ ID NO: 15346 - protein, 70 aa, Synthetic construct
SRANKKKPSMPNVSNDLSQKVFFVIHLHAGPVINTLPPIVDPDPLLSCDLMDGRDAFLTLARDKHWEFSS

SEQ ID NO: 15347 - protein, 70 aa, Synthetic construct
SRANKKKPSMPNVSNDLSQKLYATMEKHKEVFFVIHLHAGDPDPLLSCDLMDGRDAFLTLARDKHWEFSS

SEQ ID NO: 15348 - protein, 70 aa, Synthetic construct
SRANKKKPSMPNVSNDLSQKLYATMEKHKEVFFVIHLHAGPVINTLPPIVDPDPLAFLTLARDKHWEFSS

SEQ ID NO: 15349 - protein, 70 aa, Synthetic construct
SRANKKKPSMPNVSNDLSQKLYATMEKHKEVFFVIHLHAGPVINTLPPIVDPDPLLSCDLARDKHWEFSS

SEQ ID NO: 15350 - protein, 70 aa, Synthetic construct
IDCSISNDKFEYLFNFDNTFEIHDDIEVLKRMGMAEDLKMARSLVPKALEPYVTEMAQGTVGGVFITTAG

SEQ ID NO: 15351 - protein, 70 aa, Synthetic construct
IDCSISNDKFEYLFNFDNTFEIHDDIEVLKRMGMACGLESARSLVPKALEPYVTEMAQGTVGGVFITTAG

SEQ ID NO: 15352 - protein, 70 aa, Synthetic construct
IDCSISNDKFEYLFNFDNTFEIHDDIEVLKRMGMACGLESGSCSAPKALEPYVTEMAQGTVGGVFITTAG

SEQ ID NO: 15353 - protein, 70 aa, Synthetic construct
IDCSISNDKFEYLFNFDNTFEIHDDIEVLKRMGMACGLESGSCSAEDLKMPYVTEMAQGTVGGVFITTAG

SEQ ID NO: 15354 - protein, 70 aa, Synthetic construct
IDCSISNDKFEYLFNFDNTFEIHDDIEVLKRMGMACGLESGSCSAEDLKMARSLVMAQGTVGGVFITTAG

SEQ ID NO: 15355 - protein, 70 aa, Synthetic construct
IDCSISNDKFEYLFNFDNTFEIHDDIEVLKRMGMACGLESGSCSAEDLKMARSLVPKALEPYVTEITTAG

SEQ ID NO: 15356 - protein, 70 aa, Synthetic construct
QNRAESECPGMNTHSRASCMQMDDVIDDIISLESSYNEEILGLMDPALQMANTLPVSGNLIDLYGNQGLP

SEQ ID NO: 15357 - protein, 70 aa, Synthetic construct
EKEGFSECPGMNTHSRASCMQMDDVIDDIISLESSYNEEILGLMDPALQMANTLPVSGNLIDLYGNQGLP

SEQ ID NO: 15358 - protein, 70 aa, Synthetic construct
EKEGFYKFEEMNTHSRASCMQMDDVIDDIISLESSYNEEILGLMDPALQMANTLPVSGNLIDLYGNQGLP

SEQ ID NO: 15359 - protein, 70 aa, Synthetic construct
EKEGFYKFEEQNRAERASCMQMDDVIDDIISLESSYNEEILGLMDPALQMANTLPVSGNLIDLYGNQGLP

SEQ ID NO: 15360 - protein, 70 aa, Synthetic construct
EKEGFYKFEEQNRAESECPGQMDDVIDDIISLESSYNEEILGLMDPALQMANTLPVSGNLIDLYGNQGLP

SEQ ID NO: 15361 - protein, 70 aa, Synthetic construct
EKEGFYKFEEQNRAESECPGMNTHSRASCMQMDDVYNEEILGLMDPALQMANTLPVSGNLIDLYGNQGLP

SEQ ID NO: 15362 - protein, 70 aa, Synthetic construct
EKEGFYKFEEQNRAESECPGMNTHSRASCMQMDDVIDDIILGLMDPALQMANTLPVSGNLIDLYGNQGLP

SEQ ID NO: 15363 - protein, 70 aa, Synthetic construct
EKEGFYKFEEQNRAESECPGMNTHSRASCMQMDDVIDDIISLESSYNEEILGLMDVSGNLIDLYGNQGLP

SEQ ID NO: 15364 - protein, 70 aa, Synthetic construct
EKEGFYKFEEQNRAESECPGMNTHSRASCMQMDDVIDDIISLESSYNEEILGLMDPALQMIDLYGNQGLP

SEQ ID NO: 15365 - protein, 70 aa, Synthetic construct
GPPGYSGYPGGHSGPGPAGFPVPNQPVYNQPVYNQPVGAAGVPWMPAPQPPLNCPPGLEYLSQIDQILIH

SEQ ID NO: 15366 - protein, 70 aa, Synthetic construct
GPPGYSGYPGPQVSYGPAGFPVPNQPVYNQPVYNQPVGAAGVPWMPAPQPPLNCPPGLEYLSQIDQILIH

SEQ ID NO: 15367 - protein, 70 aa, Synthetic construct
GPPGYSGYPGPQVSYPPPPAPVPNQPVYNQPVYNQPVGAAGVPWMPAPQPPLNCPPGLEYLSQIDQILIH

SEQ ID NO: 15368 - protein, 70 aa, Synthetic construct
GPPGYSGYPGPQVSYPPPPAGHSGPPVYNQPVYNQPVGAAGVPWMPAPQPPLNCPPGLEYLSQIDQILIH

SEQ ID NO: 15369 - protein, 70 aa, Synthetic construct
GPPGYSGYPGPQVSYPPPPAGHSGPGPAGFPVYNQPVGAAGVPWMPAPQPPLNCPPGLEYLSQIDQILIH

SEQ ID NO: 15370 - protein, 70 aa, Synthetic construct
GPPGYSGYPGPQVSYPPPPAGHSGPGPAGFPVPNQPVYNQGVPWMPAPQPPLNCPPGLEYLSQIDQILIH

SEQ ID NO: 15371 - protein, 70 aa, Synthetic construct
GPPGYSGYPGPQVSYPPPPAGHSGPGPAGFPVPNQPVYNQPVYNQPVGAAGVPWMPGLEYLSQIDQILIH

SEQ ID NO: 15372 - protein, 70 aa, Synthetic construct
EQGIRRDFMRGPHARYNMNDAIFSVACAWNAVPSHVFRRAWRKLWPSVAFAEGSSSEEELEAECFPVKPH

SEQ ID NO: 15373 - protein, 70 aa, Synthetic construct
EQGIRRDFMRNFINPYNMNDAIFSVACAWNAVPSHVFRRAWRKLWPSVAFAEGSSSEEELEAECFPVKPH

SEQ ID NO: 15374 - protein, 70 aa, Synthetic construct
TLMTVNEFISKYIVNEPRDVGYLAQHQLFDQIPELKQDISIPDYCSLGDGEEEEITINAWFGPQGTISPL

SEQ ID NO: 15375 - protein, 70 aa, Synthetic construct
SRYTDNEFISKYIVNEPRDVGYLAQHQLFDQIPELKQDISIPDYCSLGDGEEEEITINAWFGPQGTISPL

SEQ ID NO: 15376 - protein, 70 aa, Synthetic construct
SRYTDEEWSQKYIVNEPRDVGYLAQHQLFDQIPELKQDISIPDYCSLGDGEEEEITINAWFGPQGTISPL

SEQ ID NO: 15377 - protein, 70 aa, Synthetic construct
SRYTDEEWSQTLMTVEPRDVGYLAQHQLFDQIPELKQDISIPDYCSLGDGEEEEITINAWFGPQGTISPL

SEQ ID NO: 15378 - protein, 70 aa, Synthetic construct
SRYTDEEWSQTLMTVNEFISGYLAQHQLFDQIPELKQDISIPDYCSLGDGEEEEITINAWFGPQGTISPL

SEQ ID NO: 15379 - protein, 70 aa, Synthetic construct
SRYTDEEWSQTLMTVNEFISKYIVNHQLFDQIPELKQDISIPDYCSLGDGEEEEITINAWFGPQGTISPL

SEQ ID NO: 15380 - protein, 70 aa, Synthetic construct
SRYTDEEWSQTLMTVNEFISKYIVNEPRDVQIPELKQDISIPDYCSLGDGEEEEITINAWFGPQGTISPL

SEQ ID NO: 15381 - protein, 70 aa, Synthetic construct
SRYTDEEWSQTLMTVNEFISKYIVNEPRDVGYLAQKQDISIPDYCSLGDGEEEEITINAWFGPQGTISPL

SEQ ID NO: 15382 - protein, 70 aa, Synthetic construct
SRYTDEEWSQTLMTVNEFISKYIVNEPRDVGYLAQHQLFDIPDYCSLGDGEEEEITINAWFGPQGTISPL

SEQ ID NO: 15383 - protein, 70 aa, Synthetic construct
SRYTDEEWSQTLMTVNEFISKYIVNEPRDVGYLAQHQLFDQIPELSLGDGEEEEITINAWFGPQGTISPL

SEQ ID NO: 15384 - protein, 70 aa, Synthetic construct
SRYTDEEWSQTLMTVNEFISKYIVNEPRDVGYLAQHQLFDQIPELKQDISEEEEITINAWFGPQGTISPL

SEQ ID NO: 15385 - protein, 70 aa, Synthetic construct
SRYTDEEWSQTLMTVNEFISKYIVNEPRDVGYLAQHQLFDQIPELKQDISIPDYCTINAWFGPQGTISPL

SEQ ID NO: 15386 - protein, 70 aa, Synthetic construct
SRYTDEEWSQTLMTVNEFISKYIVNEPRDVGYLAQHQLFDQIPELKQDISIPDYCSLGDGFGPQGTISPL

SEQ ID NO: 15387 - protein, 70 aa, Synthetic construct
SRYTDEEWSQTLMTVNEFISKYIVNEPRDVGYLAQHQLFDQIPELKQDISIPDYCSLGDGEEEEITISPL

SEQ ID NO: 15388 - protein, 70 aa, Synthetic construct
SRYTDEEWSQTLMTVNEFISKYIVNEPRDVGYLAQHQLFDQIPELKQDISIPDYCSLGDGEEEEITINAW

SEQ ID NO: 15389 - protein, 70 aa, Synthetic construct
PWGAEPGWVDPLTWLIGPGVGPGSEVWGIPPCPPPYELCGGMAYCGPQVGVGLVPQGGLETSQPESEAGV

SEQ ID NO: 15390 - protein, 70 aa, Synthetic construct
PWGAEPGWVDPLTWLSFQGPGPGSEVWGIPPCPPPYELCGGMAYCGPQVGVGLVPQGGLETSQPESEAGV

SEQ ID NO: 15391 - protein, 70 aa, Synthetic construct
PWGAEPGWVDPLTWLSFQGPPGGPGVWGIPPCPPPYELCGGMAYCGPQVGVGLVPQGGLETSQPESEAGV

SEQ ID NO: 15392 - protein, 70 aa, Synthetic construct
PWGAEPGWVDPLTWLSFQGPPGGPGIGPGVPCPPPYELCGGMAYCGPQVGVGLVPQGGLETSQPESEAGV

SEQ ID NO: 15393 - protein, 70 aa, Synthetic construct
PWGAEPGWVDPLTWLSFQGPPGGPGIGPGVGPGSEYELCGGMAYCGPQVGVGLVPQGGLETSQPESEAGV

SEQ ID NO: 15394 - protein, 70 aa, Synthetic construct
PWGAEPGWVDPLTWLSFQGPPGGPGIGPGVGPGSEVWGIPGMAYCGPQVGVGLVPQGGLETSQPESEAGV

SEQ ID NO: 15395 - protein, 70 aa, Synthetic construct
PWGAEPGWVDPLTWLSFQGPPGGPGIGPGVGPGSEVWGIPPCPPPGPQVGVGLVPQGGLETSQPESEAGV

SEQ ID NO: 15396 - protein, 70 aa, Synthetic construct
PWGAEPGWVDPLTWLSFQGPPGGPGIGPGVGPGSEVWGIPPCPPPYELCGVGLVPQGGLETSQPESEAGV

SEQ ID NO: 15397 - protein, 70 aa, Synthetic construct
PWGAEPGWVDPLTWLSFQGPPGGPGIGPGVGPGSEVWGIPPCPPPYELCGGMAYCQGGLETSQPESEAGV

SEQ ID NO: 15398 - protein, 70 aa, Synthetic construct
PWGAEPGWVDPLTWLSFQGPPGGPGIGPGVGPGSEVWGIPPCPPPYELCGGMAYCGPQVGTSQPESEAGV

SEQ ID NO: 15399 - protein, 70 aa, Synthetic construct
PWGAEPGWVDPLTWLSFQGPPGGPGIGPGVGPGSEVWGIPPCPPPYELCGGMAYCGPQVGVGLVPSEAGV

SEQ ID NO: 15400 - protein, 70 aa, Synthetic construct
PWGAEPGWVDPLTWLSFQGPPGGPGIGPGVGPGSEVWGIPPCPPPYELCGGMAYCGPQVGVGLVPQGGLE

SEQ ID NO: 15401 - protein, 70 aa, Synthetic construct
HPHHHHSVPHQPDNLAASNTQSEGSDSVILPSSTFFQAELWIKELTSVYDSRARERLRQIEEQKALALQL

SEQ ID NO: 15402 - protein, 70 aa, Synthetic construct
LPEFPLGDPDDVPRPFQPTLEEIEEFLEENMEPGVKEVPEGNSKDLDACSQLSAGPHKSHLHPGSSGRER

SEQ ID NO: 15403 - protein, 70 aa, Synthetic construct
AAPVKLGDPDDVPRPFQPTLEEIEEFLEENMEPGVKEVPEGNSKDLDACSQLSAGPHKSHLHPGSSGRER

SEQ ID NO: 15404 - protein, 70 aa, Synthetic construct
AAPVKGEHFCDVPRPFQPTLEEIEEFLEENMEPGVKEVPEGNSKDLDACSQLSAGPHKSHLHPGSSGRER

SEQ ID NO: 15405 - protein, 70 aa, Synthetic construct
AAPVKGEHFCLPEFPFQPTLEEIEEFLEENMEPGVKEVPEGNSKDLDACSQLSAGPHKSHLHPGSSGRER

SEQ ID NO: 15406 - protein, 70 aa, Synthetic construct
AAPVKGEHFCLPEFPLGDPDDVPRPFQPTLEEIEEFLEENGNSKDLDACSQLSAGPHKSHLHPGSSGRER

SEQ ID NO: 15407 - protein, 70 aa, Synthetic construct
AAPVKGEHFCLPEFPLGDPDDVPRPFQPTLEEIEEFLEENMEPGVLDACSQLSAGPHKSHLHPGSSGRER

SEQ ID NO: 15408 - protein, 70 aa, Synthetic construct
AAPVKGEHFCLPEFPLGDPDDVPRPFQPTLEEIEEFLEENMEPGVKEVPEQLSAGPHKSHLHPGSSGRER

SEQ ID NO: 15409 - protein, 70 aa, Synthetic construct
AAPVKGEHFCLPEFPLGDPDDVPRPFQPTLEEIEEFLEENMEPGVKEVPEGNSKDPHKSHLHPGSSGRER

SEQ ID NO: 15410 - protein, 70 aa, Synthetic construct
AAPVKGEHFCLPEFPLGDPDDVPRPFQPTLEEIEEFLEENMEPGVKEVPEGNSKDLDACSLHPGSSGRER

SEQ ID NO: 15411 - protein, 70 aa, Synthetic construct
AAPVKGEHFCLPEFPLGDPDDVPRPFQPTLEEIEEFLEENMEPGVKEVPEGNSKDLDACSQLSAGSGRER

SEQ ID NO: 15412 - protein, 70 aa, Synthetic construct
AAPVKGEHFCLPEFPLGDPDDVPRPFQPTLEEIEEFLEENMEPGVKEVPEGNSKDLDACSQLSAGPHKSH

SEQ ID NO: 15413 - protein, 70 aa, Synthetic construct
EEYTKNKTEYEEAQDAIVKEPMQTLNDVLAQLDAVVSFAHVSNGAPVPYVRPAILEKGQGRIILKASRHA

SEQ ID NO: 15414 - protein, 70 aa, Synthetic construct
EEYTKNKTEYEEAQDAIVKEIVNISSGYVEPMQTLNDVLAQLDAVVSFAHVSNGAPVPYVRIILKASRHA

SEQ ID NO: 15415 - protein, 70 aa, Synthetic construct
GLAWAISEYIATKIGAFCMFATHFHELTALANQIPTVNNLHVTALTTEETLTMLYQVKKGVCDQSFGIHV

SEQ ID NO: 15416 - protein, 70 aa, Synthetic construct
GRGTSTYDGFGLAWAISEYIATKIGELTALANQIPTVNNLHVTALTTEETLTMLYQVKKGVCDQSFGIHV

SEQ ID NO: 15417 - protein, 70 aa, Synthetic construct
GRGTSTYDGFGLAWAISEYIATKIGAFCMFANQIPTVNNLHVTALTTEETLTMLYQVKKGVCDQSFGIHV

SEQ ID NO: 15418 - protein, 70 aa, Synthetic construct
GRGTSTYDGFGLAWAISEYIATKIGAFCMFATHFHELTALANQIPTVNNLHVTALTTEETLTMLYFGIHV

SEQ ID NO: 15419 - protein, 70 aa, Synthetic construct
GRGTSTYDGFGLAWAISEYIATKIGAFCMFATHFHELTALANQIPTVNNLHVTALTTEETLTMLYQVKKG

SEQ ID NO: 15420 - protein, 70 aa, Synthetic construct
TDMNTEVDALDPSIMDFALQGNLWEEMKDEGFSLDTLGAFADSPLGCDLGASGLTPASGGSDQSFPDLQV

SEQ ID NO: 15421 - protein, 70 aa, Synthetic construct
RAPVDEVDALDPSIMDFALQGNLWEEMKDEGFSLDTLGAFADSPLGCDLGASGLTPASGGSDQSFPDLQV

SEQ ID NO: 15422 - protein, 70 aa, Synthetic construct
RAPVDFINISDPSIMDFALQGNLWEEMKDEGFSLDTLGAFADSPLGCDLGASGLTPASGGSDQSFPDLQV

SEQ ID NO: 15423 - protein, 70 aa, Synthetic construct
RAPVDFINISTDMNTDFALQGNLWEEMKDEGFSLDTLGAFADSPLGCDLGASGLTPASGGSDQSFPDLQV

SEQ ID NO: 15424 - protein, 70 aa, Synthetic construct
RAPVDFINISTDMNTEVDALGNLWEEMKDEGFSLDTLGAFADSPLGCDLGASGLTPASGGSDQSFPDLQV

SEQ ID NO: 15425 - protein, 70 aa, Synthetic construct
RAPVDFINISTDMNTEVDALDPSIMDFALQGFSLDTLGAFADSPLGCDLGASGLTPASGGSDQSFPDLQV

SEQ ID NO: 15426 - protein, 70 aa, Synthetic construct
RAPVDFINISTDMNTEVDALDPSIMDFALQGNLWETLGAFADSPLGCDLGASGLTPASGGSDQSFPDLQV

SEQ ID NO: 15427 - protein, 70 aa, Synthetic construct
RAPVDFINISTDMNTEVDALDPSIMDFALQGNLWEEMKDEADSPLGCDLGASGLTPASGGSDQSFPDLQV

SEQ ID NO: 15428 - protein, 70 aa, Synthetic construct
RAPVDFINISTDMNTEVDALDPSIMDFALQGNLWEEMKDEGFSLDGCDLGASGLTPASGGSDQSFPDLQV

SEQ ID NO: 15429 - protein, 70 aa, Synthetic construct
RAPVDFINISTDMNTEVDALDPSIMDFALQGNLWEEMKDEGFSLDTLGAFASGLTPASGGSDQSFPDLQV

SEQ ID NO: 15430 - protein, 70 aa, Synthetic construct
RAPVDFINISTDMNTEVDALDPSIMDFALQGNLWEEMKDEGFSLDTLGAFADSPLPASGGSDQSFPDLQV

SEQ ID NO: 15431 - protein, 70 aa, Synthetic construct
RAPVDFINISTDMNTEVDALDPSIMDFALQGNLWEEMKDEGFSLDTLGAFADSPLGCDLGSDQSFPDLQV

SEQ ID NO: 15432 - protein, 70 aa, Synthetic construct
RAPVDFINISTDMNTEVDALDPSIMDFALQGNLWEEMKDEGFSLDTLGAFADSPLGCDLGASGLTPDLQV

SEQ ID NO: 15433 - protein, 70 aa, Synthetic construct
RAPVDFINISTDMNTEVDALDPSIMDFALQGNLWEEMKDEGFSLDTLGAFADSPLGCDLGASGLTPASGG

SEQ ID NO: 15434 - protein, 70 aa, Synthetic construct
IRNAFQNFQSIQFINGIAHWQHLVELVALEEQELSNLKNHVLKVNSATQLFSESVASALEYLLSLDLPPF

SEQ ID NO: 15435 - protein, 70 aa, Synthetic construct
IRNAFQNFQSIQFINGIAHWQHLVELVALEEQELSNMERIPSTLASATQLFSESVASALEYLLSLDLPPF

SEQ ID NO: 15436 - protein, 70 aa, Synthetic construct
LKSIEYLEEDAQKSAQEGVLGPHTDALSSDSENMPCDEEPSQLEELADFMEQLTPIEKYALNYLELFHTS

SEQ ID NO: 15437 - protein, 70 aa, Synthetic construct
PKIARPFIEAAQKSAQEGVLGPHTDALSSDSENMPCDEEPSQLEELADFMEQLTPIEKYALNYLELFHTS

SEQ ID NO: 15438 - protein, 70 aa, Synthetic construct
PKIARPFIEALKSIEQEGVLGPHTDALSSDSENMPCDEEPSQLEELADFMEQLTPIEKYALNYLELFHTS

SEQ ID NO: 15439 - protein, 70 aa, Synthetic construct
PKIARPFIEALKSIEYLEEDGPHTDALSSDSENMPCDEEPSQLEELADFMEQLTPIEKYALNYLELFHTS

SEQ ID NO: 15440 - protein, 70 aa, Synthetic construct
PKIARPFIEALKSIEYLEEDAQKSAALSSDSENMPCDEEPSQLEELADFMEQLTPIEKYALNYLELFHTS

SEQ ID NO: 15441 - protein, 70 aa, Synthetic construct
PKIARPFIEALKSIEYLEEDAQKSAQEGVLSENMPCDEEPSQLEELADFMEQLTPIEKYALNYLELFHTS

SEQ ID NO: 15442 - protein, 70 aa, Synthetic construct
PKIARPFIEALKSIEYLEEDAQKSAQEGVLGPHTDALSSDSENMPCDEEPSQLEELADFMLNYLELFHTS

SEQ ID NO: 15443 - protein, 70 aa, Synthetic construct
ILTKIFPNYRRSRLEGILRFQVLNGKEHKPDNRNLANSEELENTAFQRASSFSLAGIGFGTLGNKSAFSP

SEQ ID NO: 15444 - protein, 70 aa, Synthetic construct
ILTKIFPNYRRSRLEGILRFCKGDVVQAIEQVLNGANSEELENTAFQRASSFSLAGIGFGTLGNKSAFSP

SEQ ID NO: 15445 - protein, 70 aa, Synthetic construct
SANISQEMTMVDTEMPFWPTNFGISSVDLSVMEDHSHSFDIKPFTTVDFSSISTPHYEDIPFTRTDPVVA

SEQ ID NO: 15446 - protein, 70 aa, Synthetic construct
PESDSQEMTMVDTEMPFWPTNFGISSVDLSVMEDHSHSFDIKPFTTVDFSSISTPHYEDIPFTRTDPVVA

SEQ ID NO: 15447 - protein, 70 aa, Synthetic construct
PESDSFTDTLVDTEMPFWPTNFGISSVDLSVMEDHSHSFDIKPFTTVDFSSISTPHYEDIPFTRTDPVVA

SEQ ID NO: 15448 - protein, 70 aa, Synthetic construct
PESDSFTDTLSANISPFWPTNFGISSVDLSVMEDHSHSFDIKPFTTVDFSSISTPHYEDIPFTRTDPVVA

SEQ ID NO: 15449 - protein, 70 aa, Synthetic construct
PESDSFTDTLSANISQEMTMVDTEMPFWPTVMEDHSHSFDIKPFTTVDFSSISTPHYEDIPFTRTDPVVA

SEQ ID NO: 15450 - protein, 70 aa, Synthetic construct
PESDSFTDTLSANISQEMTMVDTEMPFWPTNFGISSHSFDIKPFTTVDFSSISTPHYEDIPFTRTDPVVA

SEQ ID NO: 15451 - protein, 70 aa, Synthetic construct
PESDSFTDTLSANISQEMTMVDTEMPFWPTNFGISSVDLSIKPFTTVDFSSISTPHYEDIPFTRTDPVVA

SEQ ID NO: 15452 - protein, 70 aa, Synthetic construct
PESDSFTDTLSANISQEMTMVDTEMPFWPTNFGISSVDLSVMEDHTVDFSSISTPHYEDIPFTRTDPVVA

SEQ ID NO: 15453 - protein, 70 aa, Synthetic construct
PESDSFTDTLSANISQEMTMVDTEMPFWPTNFGISSVDLSVMEDHSHSFDSISTPHYEDIPFTRTDPVVA

SEQ ID NO: 15454 - protein, 70 aa, Synthetic construct
PESDSFTDTLSANISQEMTMVDTEMPFWPTNFGISSVDLSVMEDHSHSFDIKPFTHYEDIPFTRTDPVVA

SEQ ID NO: 15455 - protein, 70 aa, Synthetic construct
PESDSFTDTLSANISQEMTMVDTEMPFWPTNFGISSVDLSVMEDHSHSFDIKPFTTVDFSPFTRTDPVVA

SEQ ID NO: 15456 - protein, 70 aa, Synthetic construct
PESDSFTDTLSANISQEMTMVDTEMPFWPTNFGISSVDLSVMEDHSHSFDIKPFTTVDFSSISTPDPVVA

SEQ ID NO: 15457 - protein, 70 aa, Synthetic construct
PESDSFTDTLSANISQEMTMVDTEMPFWPTNFGISSVDLSVMEDHSHSFDIKPFTTVDFSSISTPHYEDI

SEQ ID NO: 15458 - protein, 70 aa, Synthetic construct
FHHGFHPTTVCKIPSSCSLKIFNNQEFAQLAVYELTKMCTIRMSFVKGWGAEYHRQDVTSTPCWIEIHLH

SEQ ID NO: 15459 - protein, 70 aa, Synthetic construct
FHHGFHPTTVCKIPSSCSLKIFNNQEFAQLLAQSVTKMCTIRMSFVKGWGAEYHRQDVTSTPCWIEIHLH

SEQ ID NO: 15460 - protein, 70 aa, Synthetic construct
FHHGFHPTTVCKIPSSCSLKIFNNQEFAQLLAQSVNHGFEIRMSFVKGWGAEYHRQDVTSTPCWIEIHLH

SEQ ID NO: 15461 - protein, 70 aa, Synthetic construct
FHHGFHPTTVCKIPSSCSLKIFNNQEFAQLLAQSVNHGFEAVYELTKMCTIRMSFVKGWGAEYHREIHLH

SEQ ID NO: 15462 - protein, 70 aa, Synthetic construct
FHHGFHPTTVCKIPSSCSLKIFNNQEFAQLLAQSVNHGFEAVYELTKMCTIRMSFVKGWGAEYHRQDVTS

SEQ ID NO: 15463 - protein, 70 aa, Synthetic construct
AMADTFLEHMCRLDIDSPPITARNTRSVETLKEMIKSGMNVARLNFSHGTHEYHAETIKNVRTATESFAS

SEQ ID NO: 15464 - protein, 70 aa, Synthetic construct
AMADTFLEHMCRLDIDSPPITARNTGIICTLKEMIKSGMNVARLNFSHGTHEYHAETIKNVRTATESFAS

SEQ ID NO: 15465 - protein, 70 aa, Synthetic construct
AMADTFLEHMCRLDIDSPPITARNTGIICTIGPASKSGMNVARLNFSHGTHEYHAETIKNVRTATESFAS

SEQ ID NO: 15466 - protein, 70 aa, Synthetic construct
AMADTFLEHMCRLDIDSPPITARNTGIICTIGPASRSVETLKEMIKSGMNHEYHAETIKNVRTATESFAS

SEQ ID NO: 15467 - protein, 70 aa, Synthetic construct
AMADTFLEHMCRLDIDSPPITARNTGIICTIGPASRSVETLKEMIKSGMNVARLNFSHGTVRTATESFAS

SEQ ID NO: 15468 - protein, 70 aa, Synthetic construct
VPQAPIQPFYSSPELWISSLPMTDLYGQTMTVSNPQGCRLFYGDLGPMPDQEELFGPVSLEQVKFPGPEH

SEQ ID NO: 15469 - protein, 70 aa, Synthetic construct
VPQAPIQPFYSSPELWISSLPMTDLDIKFQTVSNPQGCRLFYGDLGPMPDQEELFGPVSLEQVKFPGPEH

SEQ ID NO: 15470 - protein, 70 aa, Synthetic construct
VPQAPIQPFYSSPELWISSLPMTDLDIKFQYRGKEYGQTMFYGDLGPMPDQEELFGPVSLEQVKFPGPEH

SEQ ID NO: 15471 - protein, 70 aa, Synthetic construct
VAPNLIERQKKVKLFCLETFLSDLIAHQKGQIEKQPPFEIYLCFGEEWPDGKPLERKLILVQVIPVVARM

SEQ ID NO: 15472 - protein, 70 aa, Synthetic construct
YWSGPCAPSLKVKLFCLETFLSDLIAHQKGQIEKQPPFEIYLCFGEEWPDGKPLERKLILVQVIPVVARM

SEQ ID NO: 15473 - protein, 70 aa, Synthetic construct
YWSGPCAPSLVAPNLCLETFLSDLIAHQKGQIEKQPPFEIYLCFGEEWPDGKPLERKLILVQVIPVVARM

SEQ ID NO: 15474 - protein, 70 aa, Synthetic construct
YWSGPCAPSLVAPNLIERQKKVKLFAHQKGQIEKQPPFEIYLCFGEEWPDGKPLERKLILVQVIPVVARM

SEQ ID NO: 15475 - protein, 70 aa, Synthetic construct
YWSGPCAPSLVAPNLIERQKKVKLFCLETFQIEKQPPFEIYLCFGEEWPDGKPLERKLILVQVIPVVARM

SEQ ID NO: 15476 - protein, 70 aa, Synthetic construct
YWSGPCAPSLVAPNLIERQKKVKLFCLETFLSDLIPPFEIYLCFGEEWPDGKPLERKLILVQVIPVVARM

SEQ ID NO: 15477 - protein, 70 aa, Synthetic construct
YWSGPCAPSLVAPNLIERQKKVKLFCLETFLSDLIAHQKGYLCFGEEWPDGKPLERKLILVQVIPVVARM

SEQ ID NO: 15478 - protein, 70 aa, Synthetic construct
YWSGPCAPSLVAPNLIERQKKVKLFCLETFLSDLIAHQKGQIEKQPPFEIGKPLERKLILVQVIPVVARM

SEQ ID NO: 15479 - protein, 70 aa, Synthetic construct
YWSGPCAPSLVAPNLIERQKKVKLFCLETFLSDLIAHQKGQIEKQPPFEIYLCFGEEWPDGKPLEVVARM

SEQ ID NO: 15480 - protein, 70 aa, Synthetic construct
GAPPLESVDVRQIYDKFPEKKGGLRELYDRGPPHAFFLVKFWADLNWGPSGEEAGAGGSISSGGFYGVSS

SEQ ID NO: 15481 - protein, 70 aa, Synthetic construct
VHISQESVDVRQIYDKFPEKKGGLRELYDRGPPHAFFLVKFWADLNWGPSGEEAGAGGSISSGGFYGVSS

SEQ ID NO: 15482 - protein, 70 aa, Synthetic construct
VHISQHCPSPRQIYDKFPEKKGGLRELYDRGPPHAFFLVKFWADLNWGPSGEEAGAGGSISSGGFYGVSS

SEQ ID NO: 15483 - protein, 70 aa, Synthetic construct
VHISQHCPSPGAPPLESVDVRQIYDKFPEKKGGLRELYDRGPPHAFFLVKFWADLNWGPSSSGGFYGVSS

SEQ ID NO: 15484 - protein, 70 aa, Synthetic construct
QFFEAQGANGTLENPALDTSLLEEFLGNDFDLGALQRQLPDTPPYSASDSCSPPQVKGACYPTLRPTAGR

SEQ ID NO: 15485 - protein, 70 aa, Synthetic construct
DVVGENEALQTLENPALDTSLLEEFLGNDFDLGALQRQLPDTPPYSASDSCSPPQVKGACYPTLRPTAGR

SEQ ID NO: 15486 - protein, 70 aa, Synthetic construct
DVVGENEALQQFFEAALDTSLLEEFLGNDFDLGALQRQLPDTPPYSASDSCSPPQVKGACYPTLRPTAGR

SEQ ID NO: 15487 - protein, 70 aa, Synthetic construct
DVVGENEALQQFFEAQGANGLLEEFLGNDFDLGALQRQLPDTPPYSASDSCSPPQVKGACYPTLRPTAGR

SEQ ID NO: 15488 - protein, 70 aa, Synthetic construct
DVVGENEALQQFFEAQGANGTLENPALDTSLLEEFLGNDFDTPPYSASDSCSPPQVKGACYPTLRPTAGR

SEQ ID NO: 15489 - protein, 70 aa, Synthetic construct
DVVGENEALQQFFEAQGANGTLENPALDTSLLEEFLGNDFDLGALSASDSCSPPQVKGACYPTLRPTAGR

SEQ ID NO: 15490 - protein, 70 aa, Synthetic construct
DVVGENEALQQFFEAQGANGTLENPALDTSLLEEFLGNDFDLGALQRQLPCSPPQVKGACYPTLRPTAGR

SEQ ID NO: 15491 - protein, 70 aa, Synthetic construct
DVVGENEALQQFFEAQGANGTLENPALDTSLLEEFLGNDFDLGALQRQLPDTPPYVKGACYPTLRPTAGR

SEQ ID NO: 15492 - protein, 70 aa, Synthetic construct
DVVGENEALQQFFEAQGANGTLENPALDTSLLEEFLGNDFDLGALQRQLPDTPPYSASDSYPTLRPTAGR

SEQ ID NO: 15493 - protein, 70 aa, Synthetic construct
DVVGENEALQQFFEAQGANGTLENPALDTSLLEEFLGNDFDLGALQRQLPDTPPYSASDSCSPPQPTAGR

SEQ ID NO: 15494 - protein, 70 aa, Synthetic construct
DVVGENEALQQFFEAQGANGTLENPALDTSLLEEFLGNDFDLGALQRQLPDTPPYSASDSCSPPQVKGAC

SEQ ID NO: 15495 - protein, 70 aa, Synthetic construct
APSPGPRDHLASDPLTPEFIKPTMDLASPEAAPAAPTALPSFSTFMDGYTGEFDTFLYQLPGTVQPCSSA

SEQ ID NO: 15496 - protein, 70 aa, Synthetic construct
PCIQAPRDHLASDPLTPEFIKPTMDLASPEAAPAAPTALPSFSTFMDGYTGEFDTFLYQLPGTVQPCSSA

SEQ ID NO: 15497 - protein, 70 aa, Synthetic construct
PCIQAQYGTPASDPLTPEFIKPTMDLASPEAAPAAPTALPSFSTFMDGYTGEFDTFLYQLPGTVQPCSSA

SEQ ID NO: 15498 - protein, 70 aa, Synthetic construct
PCIQAQYGTPAPSPGTPEFIKPTMDLASPEAAPAAPTALPSFSTFMDGYTGEFDTFLYQLPGTVQPCSSA

SEQ ID NO: 15499 - protein, 70 aa, Synthetic construct
PCIQAQYGTPAPSPGPRDHLKPTMDLASPEAAPAAPTALPSFSTFMDGYTGEFDTFLYQLPGTVQPCSSA

SEQ ID NO: 15500 - protein, 70 aa, Synthetic construct
PCIQAQYGTPAPSPGPRDHLASDPLLASPEAAPAAPTALPSFSTFMDGYTGEFDTFLYQLPGTVQPCSSA

SEQ ID NO: 15501 - protein, 70 aa, Synthetic construct
PCIQAQYGTPAPSPGPRDHLASDPLTPEFIAAPAAPTALPSFSTFMDGYTGEFDTFLYQLPGTVQPCSSA

SEQ ID NO: 15502 - protein, 70 aa, Synthetic construct
PCIQAQYGTPAPSPGPRDHLASDPLTPEFIKPTMDPTALPSFSTFMDGYTGEFDTFLYQLPGTVQPCSSA

SEQ ID NO: 15503 - protein, 70 aa, Synthetic construct
PCIQAQYGTPAPSPGPRDHLASDPLTPEFIKPTMDLASPESFSTFMDGYTGEFDTFLYQLPGTVQPCSSA

SEQ ID NO: 15504 - protein, 70 aa, Synthetic construct
PCIQAQYGTPAPSPGPRDHLASDPLTPEFIKPTMDLASPEAAPAAPTALPSFSTFFLYQLPGTVQPCSSA

SEQ ID NO: 15505 - protein, 70 aa, Synthetic construct
PCIQAQYGTPAPSPGPRDHLASDPLTPEFIKPTMDLASPEAAPAAPTALPSFSTFMDGYTGEFDTFLYQL

SEQ ID NO: 15506 - protein, 70 aa, Synthetic construct
AAPAAPTALPSFSTFFLYQLPGTVQPCSSASSSASSTSSSSATSPASASFKFEDFQVYGCYPGPLSGPVD

SEQ ID NO: 15507 - protein, 70 aa, Synthetic construct
AAPAAPTALPSFSTFMDGYTGEFDTFLYQLSSSASSTSSSSATSPASASFKFEDFQVYGCYPGPLSGPVD

SEQ ID NO: 15508 - protein, 70 aa, Synthetic construct
AAPAAPTALPSFSTFMDGYTGEFDTFLYQLPGTVQSTSSSSATSPASASFKFEDFQVYGCYPGPLSGPVD

SEQ ID NO: 15509 - protein, 70 aa, Synthetic construct
AAPAAPTALPSFSTFMDGYTGEFDTFLYQLPGTVQPCSSASATSPASASFKFEDFQVYGCYPGPLSGPVD

SEQ ID NO: 15510 - protein, 70 aa, Synthetic construct
AAPAAPTALPSFSTFMDGYTGEFDTFLYQLPGTVQPCSSASSSASASASFKFEDFQVYGCYPGPLSGPVD

SEQ ID NO: 15511 - protein, 70 aa, Synthetic construct
AAPAAPTALPSFSTFMDGYTGEFDTFLYQLPGTVQPCSSASSSASSTSSSKFEDFQVYGCYPGPLSGPVD

SEQ ID NO: 15512 - protein, 70 aa, Synthetic construct
AAPAAPTALPSFSTFMDGYTGEFDTFLYQLPGTVQPCSSASSSASSTSSSSATSPQVYGCYPGPLSGPVD

SEQ ID NO: 15513 - protein, 70 aa, Synthetic construct
AAPAAPTALPSFSTFMDGYTGEFDTFLYQLPGTVQPCSSASSSASSTSSSSATSPASASFYPGPLSGPVD

SEQ ID NO: 15514 - protein, 70 aa, Synthetic construct
AAPAAPTALPSFSTFMDGYTGEFDTFLYQLPGTVQPCSSASSSASSTSSSSATSPASASFKFEDFSGPVD

SEQ ID NO: 15515 - protein, 70 aa, Synthetic construct
AAPAAPTALPSFSTFMDGYTGEFDTFLYQLPGTVQPCSSASSSASSTSSSSATSPASASFKFEDFQVYGC

SEQ ID NO: 15516 - protein, 70 aa, Synthetic construct
KFEDFQVYGCEALSSSGSDYYGSPCSAPSPSTPSFQPPQLSPWDGSFGHFSPSQTYEGLRAWTEQLPKAS

SEQ ID NO: 15517 - protein, 70 aa, Synthetic construct
KFEDFQVYGCYPGPLSGSDYYGSPCSAPSPSTPSFQPPQLSPWDGSFGHFSPSQTYEGLRAWTEQLPKAS

SEQ ID NO: 15518 - protein, 70 aa, Synthetic construct
KFEDFQVYGCYPGPLSGPVDYGSPCSAPSPSTPSFQPPQLSPWDGSFGHFSPSQTYEGLRAWTEQLPKAS

SEQ ID NO: 15519 - protein, 70 aa, Synthetic construct
KFEDFQVYGCYPGPLSGPVDEALSSSAPSPSTPSFQPPQLSPWDGSFGHFSPSQTYEGLRAWTEQLPKAS

SEQ ID NO: 15520 - protein, 70 aa, Synthetic construct
KFEDFQVYGCYPGPLSGPVDEALSSSGSDYSTPSFQPPQLSPWDGSFGHFSPSQTYEGLRAWTEQLPKAS

SEQ ID NO: 15521 - protein, 70 aa, Synthetic construct
KFEDFQVYGCYPGPLSGPVDEALSSSGSDYYGSPCQPPQLSPWDGSFGHFSPSQTYEGLRAWTEQLPKAS

SEQ ID NO: 15522 - protein, 70 aa, Synthetic construct
IGFAKMIPGFRDLTSEDQIVLLKSSAIEVIMLRSNESFTMDDMSWTCGNQDYKYRVSDVTKAGHSLELIE

SEQ ID NO: 15523 - protein, 70 aa, Synthetic construct
DLVSYSIQKVIGFAKMIPGFRDLTSEDQIVLLKSSAIEVIMLRSNESFTMDDMSWTCGNQKAGHSLELIE

SEQ ID NO: 15524 - protein, 70 aa, Synthetic construct
DLVSYSIQKVIGFAKMIPGFRDLTSEDQIVLLKSSAIEVIMLRSNESFTMDDMSWTCGNQDYKYRVSDVT

SEQ ID NO: 15525 - protein, 70 aa, Synthetic construct
PPPCSYLEELEPQDYQQSNQPGPFQFSQAPQPPLFQSPQPKLPYLPTFPFSMPSSLTLPPPEDSLFMFPC

SEQ ID NO: 15526 - protein, 70 aa, Synthetic construct
CGSWGYLEELEPQDYQQSNQPGPFQFSQAPQPPLFQSPQPKLPYLPTFPFSMPSSLTLPPPEDSLFMFPC

SEQ ID NO: 15527 - protein, 70 aa, Synthetic construct
CGSWGTSITLEPQDYQQSNQPGPFQFSQAPQPPLFQSPQPKLPYLPTFPFSMPSSLTLPPPEDSLFMFPC

SEQ ID NO: 15528 - protein, 70 aa, Synthetic construct
CGSWGTSITLPPPCSQQSNQPGPFQFSQAPQPPLFQSPQPKLPYLPTFPFSMPSSLTLPPPEDSLFMFPC

SEQ ID NO: 15529 - protein, 70 aa, Synthetic construct
CGSWGTSITLPPPCSYLEELPGPFQFSQAPQPPLFQSPQPKLPYLPTFPFSMPSSLTLPPPEDSLFMFPC

SEQ ID NO: 15530 - protein, 70 aa, Synthetic construct
CGSWGTSITLPPPCSYLEELEPQDYFSQAPQPPLFQSPQPKLPYLPTFPFSMPSSLTLPPPEDSLFMFPC

SEQ ID NO: 15531 - protein, 70 aa, Synthetic construct
CGSWGTSITLPPPCSYLEELEPQDYQQSNQQPPLFQSPQPKLPYLPTFPFSMPSSLTLPPPEDSLFMFPC

SEQ ID NO: 15532 - protein, 70 aa, Synthetic construct
CGSWGTSITLPPPCSYLEELEPQDYQQSNQPGPFQQSPQPKLPYLPTFPFSMPSSLTLPPPEDSLFMFPC

SEQ ID NO: 15533 - protein, 70 aa, Synthetic construct
CGSWGTSITLPPPCSYLEELEPQDYQQSNQPGPFQFSQAPKLPYLPTFPFSMPSSLTLPPPEDSLFMFPC

SEQ ID NO: 15534 - protein, 70 aa, Synthetic construct
CGSWGTSITLPPPCSYLEELEPQDYQQSNQPGPFQFSQAPQPPLFPTFPFSMPSSLTLPPPEDSLFMFPC

SEQ ID NO: 15535 - protein, 70 aa, Synthetic construct
CGSWGTSITLPPPCSYLEELEPQDYQQSNQPGPFQFSQAPQPPLFQSPQPSMPSSLTLPPPEDSLFMFPC

SEQ ID NO: 15536 - protein, 70 aa, Synthetic construct
CGSWGTSITLPPPCSYLEELEPQDYQQSNQPGPFQFSQAPQPPLFQSPQPKLPYLLTLPPPEDSLFMFPC

SEQ ID NO: 15537 - protein, 70 aa, Synthetic construct
CGSWGTSITLPPPCSYLEELEPQDYQQSNQPGPFQFSQAPQPPLFQSPQPKLPYLPTFPFPEDSLFMFPC

SEQ ID NO: 15538 - protein, 70 aa, Synthetic construct
CGSWGTSITLPPPCSYLEELEPQDYQQSNQPGPFQFSQAPQPPLFQSPQPKLPYLPTFPFSMPSSFMFPC

SEQ ID NO: 15539 - protein, 70 aa, Synthetic construct
CGSWGTSITLPPPCSYLEELEPQDYQQSNQPGPFQFSQAPQPPLFQSPQPKLPYLPTFPFSMPSSLTLPP

SEQ ID NO: 15540 - protein, 70 aa, Synthetic construct
KLPYLLTLPPPEDSLFMFPCGPSGGTSQGYCPGASSGQILMQPPAGNIGTASWSDPCLPELPFPGPFCPQ

SEQ ID NO: 15541 - protein, 70 aa, Synthetic construct
KLPYLPTFPFPEDSLFMFPCGPSGGTSQGYCPGASSGQILMQPPAGNIGTASWSDPCLPELPFPGPFCPQ

SEQ ID NO: 15542 - protein, 70 aa, Synthetic construct
KLPYLPTFPFSMPSSFMFPCGPSGGTSQGYCPGASSGQILMQPPAGNIGTASWSDPCLPELPFPGPFCPQ

SEQ ID NO: 15543 - protein, 70 aa, Synthetic construct
KLPYLPTFPFSMPSSLTLPPPEDSLFMFPCCPGASSGQILMQPPAGNIGTASWSDPCLPELPFPGPFCPQ

SEQ ID NO: 15544 - protein, 70 aa, Synthetic construct
KLPYLPTFPFSMPSSLTLPPPEDSLFMFPCGPSGGSGQILMQPPAGNIGTASWSDPCLPELPFPGPFCPQ

SEQ ID NO: 15545 - protein, 70 aa, Synthetic construct
KLPYLPTFPFSMPSSLTLPPPEDSLFMFPCGPSGGTSQGYMQPPAGNIGTASWSDPCLPELPFPGPFCPQ

SEQ ID NO: 15546 - protein, 70 aa, Synthetic construct
KLPYLPTFPFSMPSSLTLPPPEDSLFMFPCGPSGGTSQGYCPGASGNIGTASWSDPCLPELPFPGPFCPQ

SEQ ID NO: 15547 - protein, 70 aa, Synthetic construct
KLPYLPTFPFSMPSSLTLPPPEDSLFMFPCGPSGGTSQGYCPGASSGQILASWSDPCLPELPFPGPFCPQ

SEQ ID NO: 15548 - protein, 70 aa, Synthetic construct
KLPYLPTFPFSMPSSLTLPPPEDSLFMFPCGPSGGTSQGYCPGASSGQILMQPPAPCLPELPFPGPFCPQ

SEQ ID NO: 15549 - protein, 70 aa, Synthetic construct
KLPYLPTFPFSMPSSLTLPPPEDSLFMFPCGPSGGTSQGYCPGASSGQILMQPPAGNIGTASWSDPFCPQ

SEQ ID NO: 15550 - protein, 70 aa, Synthetic construct
EQSVYSSDPFGDHMHPYGAEPLFHDLDSDDTSLSNLGDCFLATSEAGPLQSRVGNPIDHLYSMQNSYFTS

SEQ ID NO: 15551 - protein, 70 aa, Synthetic construct
EQSVYSSDPFRQGLTPYGAEPLFHDLDSDDTSLSNLGDCFLATSEAGPLQSRVGNPIDHLYSMQNSYFTS

SEQ ID NO: 15552 - protein, 70 aa, Synthetic construct
EQSVYSSDPFRQGLTPPQMPGDHMHPYGAEPLFHDLGDCFLATSEAGPLQSRVGNPIDHLYSMQNSYFTS

SEQ ID NO: 15553 - protein, 70 aa, Synthetic construct
EQSVYSSDPFRQGLTPPQMPGDHMHPYGAEPLFHDLDSDDTSLSNLGDCFSRVGNPIDHLYSMQNSYFTS

SEQ ID NO: 15554 - protein, 70 aa, Synthetic construct
EQSVYSSDPFRQGLTPPQMPGDHMHPYGAEPLFHDLDSDDTSLSNLGDCFLATSEPIDHLYSMQNSYFTS

SEQ ID NO: 15555 - protein, 70 aa, Synthetic construct
EQSVYSSDPFRQGLTPPQMPGDHMHPYGAEPLFHDLDSDDTSLSNLGDCFLATSEAGPLQYSMQNSYFTS

SEQ ID NO: 15556 - protein, 70 aa, Synthetic construct
YNYPEGAAYEVYGQTGLPYGPGSEAAAFGSNGLGGFPPLNSVSPSPLMLLHPPPQLSPFLQPHGQQVPYY

SEQ ID NO: 15557 - protein, 70 aa, Synthetic construct
YNYPEGAAYEFNAAAGLPYGPGSEAAAFGSNGLGGFPPLNSVSPSPLMLLHPPPQLSPFLQPHGQQVPYY

SEQ ID NO: 15558 - protein, 70 aa, Synthetic construct
YNYPEGAAYEFNAAAAANAQVYGQTAAFGSNGLGGFPPLNSVSPSPLMLLHPPPQLSPFLQPHGQQVPYY

SEQ ID NO: 15559 - protein, 70 aa, Synthetic construct
YNYPEGAAYEFNAAAAANAQVYGQTGLPYGNGLGGFPPLNSVSPSPLMLLHPPPQLSPFLQPHGQQVPYY

SEQ ID NO: 15560 - protein, 70 aa, Synthetic construct
YNYPEGAAYEFNAAAAANAQVYGQTGLPYGPGSEAFPPLNSVSPSPLMLLHPPPQLSPFLQPHGQQVPYY

SEQ ID NO: 15561 - protein, 70 aa, Synthetic construct
YNYPEGAAYEFNAAAAANAQVYGQTGLPYGPGSEAAAFGSSVSPSPLMLLHPPPQLSPFLQPHGQQVPYY

SEQ ID NO: 15562 - protein, 70 aa, Synthetic construct
YNYPEGAAYEFNAAAAANAQVYGQTGLPYGPGSEAAAFGSNGLGGPLMLLHPPPQLSPFLQPHGQQVPYY

SEQ ID NO: 15563 - protein, 70 aa, Synthetic construct
YNYPEGAAYEFNAAAAANAQVYGQTGLPYGPGSEAAAFGSNGLGGFPPLNSVSPSLSPFLQPHGQQVPYY

SEQ ID NO: 15564 - protein, 70 aa, Synthetic construct
FMLALSLQNEGQASSVAEQDFWRAVCEADQSHGGPRSLSDIKGAADEIMLPCEFCEELYPEELLIDHQTS

SEQ ID NO: 15565 - protein, 70 aa, Synthetic construct
EGGEESANLDFMLALVAEQDFWRAVCEADQSHGGPRSLSDIKGAADEIMLPCEFCEELYPEELLIDHQTS

SEQ ID NO: 15566 - protein, 70 aa, Synthetic construct
EGGEESANLDFMLALSLQNEGQASSVAEQDFWRAVRSLSDIKGAADEIMLPCEFCEELYPEELLIDHQTS

SEQ ID NO: 15567 - protein, 70 aa, Synthetic construct
EGGEESANLDFMLALSLQNEGQASSVAEQDFWRAVCEADQIKGAADEIMLPCEFCEELYPEELLIDHQTS

SEQ ID NO: 15568 - protein, 70 aa, Synthetic construct
EGGEESANLDFMLALSLQNEGQASSVAEQDFWRAVCEADQSHGGPDEIMLPCEFCEELYPEELLIDHQTS

SEQ ID NO: 15569 - protein, 70 aa, Synthetic construct
EGGEESANLDFMLALSLQNEGQASSVAEQDFWRAVCEADQSHGGPRSLSDPCEFCEELYPEELLIDHQTS

SEQ ID NO: 15570 - protein, 70 aa, Synthetic construct
EGGEESANLDFMLALSLQNEGQASSVAEQDFWRAVCEADQSHGGPRSLSDIKGAADEIMLEELLIDHQTS

SEQ ID NO: 15571 - protein, 70 aa, Synthetic construct
EGGEESANLDFMLALSLQNEGQASSVAEQDFWRAVCEADQSHGGPRSLSDIKGAADEIMLPCEFCEELYP

SEQ ID NO: 15572 - protein, 70 aa, Synthetic construct
KTAEKSDFEAVEALMSMSCSWKSDFPVSDLSEEENLLPGTPDFHTIPAFCLTPPYSPSDFEPSQVSNLMA

SEQ ID NO: 15573 - protein, 70 aa, Synthetic construct
FRDALVQLIEDYGEGDIEERRGGDDDPLELKRFYFDVGSNKYGIFLKVSEVRPPYRNTITVPFKAWTRFG

SEQ ID NO: 15574 - protein, 70 aa, Synthetic construct
FRDALVQLIEDYGEGDIEERRGGDDDPLELPEGTSFRVDNKYGIFLKVSEVRPPYRNTITVPFKAWTRFG

SEQ ID NO: 15575 - protein, 70 aa, Synthetic construct
MQRFNVGEDCPVFDGLFEFCQLSTGGSVASAVKLNKQQTDIAVNWAGGLHHAKKSEASGFCYVNDIVLAI

SEQ ID NO: 15576 - protein, 70 aa, Synthetic construct
PDNMSEYSKQMQRFNVGEDCPVFDGLFEFCQLSTGGSVASAVKLNAGGLHHAKKSEASGFCYVNDIVLAI

SEQ ID NO: 15577 - protein, 70 aa, Synthetic construct
PDNMSEYSKQMQRFNVGEDCPVFDGLFEFCQLSTGGSVASAVKLNKQQTDIAVNWEASGFCYVNDIVLAI

SEQ ID NO: 15578 - protein, 70 aa, Synthetic construct
PDNMSEYSKQMQRFNVGEDCPVFDGLFEFCQLSTGGSVASAVKLNKQQTDIAVNWAGGLHCYVNDIVLAI

SEQ ID NO: 15579 - protein, 70 aa, Synthetic construct
IAVNWAGGLHHAKKSEASGFCYVNDIVLAILYIDIDIHHGDGVEEAFYTTDRVMTVSFHKYGEYFPGTGD

SEQ ID NO: 15580 - protein, 70 aa, Synthetic construct
IAVNWAGGLHHAKKSEASGFCYVNDIVLAILELLKDIHHGDGVEEAFYTTDRVMTVSFHKYGEYFPGTGD

SEQ ID NO: 15581 - protein, 70 aa, Synthetic construct
IAVNWAGGLHHAKKSEASGFCYVNDIVLAILELLKYHQRVLYIDIDIHHGDRVMTVSFHKYGEYFPGTGD

SEQ ID NO: 15582 - protein, 70 aa, Synthetic construct
IAVNWAGGLHHAKKSEASGFCYVNDIVLAILELLKYHQRVLYIDIDIHHGDGVEEAFYTTDRVMTPGTGD

SEQ ID NO: 15583 - protein, 70 aa, Synthetic construct
TFSGRYFHILKSPAMSRYYLELFQCPTCMKGAWSLVEVLIRSCLFNESFCHQISENIGSKVLHLTLLKFF

SEQ ID NO: 15584 - protein, 70 aa, Synthetic construct
TFSGRYFHILSALLHSRYYLELFQCPTCMKGAWSLVEVLIRSCLFNESFCHQISENIGSKVLHLTLLKFF

SEQ ID NO: 15585 - protein, 70 aa, Synthetic construct
TFSGRYFHILSALLHLHPPWKSPAMPTCMKGAWSLVEVLIRSCLFNESFCHQISENIGSKVLHLTLLKFF

SEQ ID NO: 15586 - protein, 70 aa, Synthetic construct
TFSGRYFHILSALLHLHPPWKSPAMSRYYLGAWSLVEVLIRSCLFNESFCHQISENIGSKVLHLTLLKFF

SEQ ID NO: 15587 - protein, 70 aa, Synthetic construct
DSLQPCFYPDEDDFYFGGPDSTPPGEDIWKKFELLPTPPLSPSRGFAEHSSEPPSWVTEMLLENELWGSP

SEQ ID NO: 15588 - protein, 70 aa, Synthetic construct
MICKNCFYPDEDDFYFGGPDSTPPGEDIWKKFELLPTPPLSPSRGFAEHSSEPPSWVTEMLLENELWGSP

SEQ ID NO: 15589 - protein, 70 aa, Synthetic construct
MICKNPDLEFEDDFYFGGPDSTPPGEDIWKKFELLPTPPLSPSRGFAEHSSEPPSWVTEMLLENELWGSP

SEQ ID NO: 15590 - protein, 70 aa, Synthetic construct
MICKNPDLEFDSLQPFGGPDSTPPGEDIWKKFELLPTPPLSPSRGFAEHSSEPPSWVTEMLLENELWGSP

SEQ ID NO: 15591 - protein, 70 aa, Synthetic construct
MICKNPDLEFDSLQPCFYPDSTPPGEDIWKKFELLPTPPLSPSRGFAEHSSEPPSWVTEMLLENELWGSP

SEQ ID NO: 15592 - protein, 70 aa, Synthetic construct
MICKNPDLEFDSLQPCFYPDEDDFYEDIWKKFELLPTPPLSPSRGFAEHSSEPPSWVTEMLLENELWGSP

SEQ ID NO: 15593 - protein, 70 aa, Synthetic construct
MICKNPDLEFDSLQPCFYPDEDDFYFGGPDKFELLPTPPLSPSRGFAEHSSEPPSWVTEMLLENELWGSP

SEQ ID NO: 15594 - protein, 70 aa, Synthetic construct
MICKNPDLEFDSLQPCFYPDEDDFYFGGPDSTPPGPTPPLSPSRGFAEHSSEPPSWVTEMLLENELWGSP

SEQ ID NO: 15595 - protein, 70 aa, Synthetic construct
MICKNPDLEFDSLQPCFYPDEDDFYFGGPDSTPPGEDIWKSPSRGFAEHSSEPPSWVTEMLLENELWGSP

SEQ ID NO: 15596 - protein, 70 aa, Synthetic construct
MICKNPDLEFDSLQPCFYPDEDDFYFGGPDSTPPGEDIWKKFELLFAEHSSEPPSWVTEMLLENELWGSP

SEQ ID NO: 15597 - protein, 70 aa, Synthetic construct
MICKNPDLEFDSLQPCFYPDEDDFYFGGPDSTPPGEDIWKKFELLPTPPLSEPPSWVTEMLLENELWGSP

SEQ ID NO: 15598 - protein, 70 aa, Synthetic construct
MICKNPDLEFDSLQPCFYPDEDDFYFGGPDSTPPGEDIWKKFELLPTPPLSPSRGWVTEMLLENELWGSP

SEQ ID NO: 15599 - protein, 70 aa, Synthetic construct
MICKNPDLEFDSLQPCFYPDEDDFYFGGPDSTPPGEDIWKKFELLPTPPLSPSRGFAEHSLLENELWGSP

SEQ ID NO: 15600 - protein, 70 aa, Synthetic construct
MICKNPDLEFDSLQPCFYPDEDDFYFGGPDSTPPGEDIWKKFELLPTPPLSPSRGFAEHSSEPPSLWGSP

SEQ ID NO: 15601 - protein, 70 aa, Synthetic construct
MICKNPDLEFDSLQPCFYPDEDDFYFGGPDSTPPGEDIWKKFELLPTPPLSPSRGFAEHSSEPPSWVTEM

SEQ ID NO: 15602 - protein, 70 aa, Synthetic construct
MVTNSQRGRNCNEKPTNVRKRKFINRDLAHDSEELFQDLSQLQETWLAEAQVPDNDEQFVPDYQAESLAF

SEQ ID NO: 15603 - protein, 70 aa, Synthetic construct
DGFYDQRGRNCNEKPTNVRKRKFINRDLAHDSEELFQDLSQLQETWLAEAQVPDNDEQFVPDYQAESLAF

SEQ ID NO: 15604 - protein, 70 aa, Synthetic construct
DGFYDQQVPYCNEKPTNVRKRKFINRDLAHDSEELFQDLSQLQETWLAEAQVPDNDEQFVPDYQAESLAF

SEQ ID NO: 15605 - protein, 70 aa, Synthetic construct
DGFYDQQVPYMVTNSTNVRKRKFINRDLAHDSEELFQDLSQLQETWLAEAQVPDNDEQFVPDYQAESLAF

SEQ ID NO: 15606 - protein, 70 aa, Synthetic construct
DGFYDQQVPYMVTNSQRGRNRKFINRDLAHDSEELFQDLSQLQETWLAEAQVPDNDEQFVPDYQAESLAF

SEQ ID NO: 15607 - protein, 70 aa, Synthetic construct
DGFYDQQVPYMVTNSQRGRNCNEKPRDLAHDSEELFQDLSQLQETWLAEAQVPDNDEQFVPDYQAESLAF

SEQ ID NO: 15608 - protein, 70 aa, Synthetic construct
DGFYDQQVPYMVTNSQRGRNCNEKPTNVRKDSEELFQDLSQLQETWLAEAQVPDNDEQFVPDYQAESLAF

SEQ ID NO: 15609 - protein, 70 aa, Synthetic construct
DGFYDQQVPYMVTNSQRGRNCNEKPTNVRKRKFINRDLAHDSEELFQDLSQLQETWLAEAPDYQAESLAF

SEQ ID NO: 15610 - protein, 70 aa, Synthetic construct
DGFYDQQVPYMVTNSQRGRNCNEKPTNVRKRKFINRDLAHDSEELFQDLSQLQETWLAEAQVPDNESLAF

SEQ ID NO: 15611 - protein, 70 aa, Synthetic construct
DGFYDQQVPYMVTNSQRGRNCNEKPTNVRKRKFINRDLAHDSEELFQDLSQLQETWLAEAQVPDNDEQFV

SEQ ID NO: 15612 - protein, 70 aa, Synthetic construct
PKQRGMLILNGFRGHATDSVKNSMESMNTDMVIIPGGLTSQLQVLDVVVYYSNWLLAGNLALSPTGNAKK

SEQ ID NO: 15613 - protein, 70 aa, Synthetic construct
LKGEIESYLMELQGGSSSSKLGLDPQIGSLDDGAGDLSLSKSSISISDPLNTPALDFSQLFNFIPLNGPP

SEQ ID NO: 15614 - protein, 70 aa, Synthetic construct
LKGEIESYLMELQGGVPSSSLGLDPQIGSLDDGAGDLSLSKSSISISDPLNTPALDFSQLFNFIPLNGPP

SEQ ID NO: 15615 - protein, 70 aa, Synthetic construct
LKGEIESYLMELQGGVPSSSQDSQAQIGSLDDGAGDLSLSKSSISISDPLNTPALDFSQLFNFIPLNGPP

SEQ ID NO: 15616 - protein, 70 aa, Synthetic construct
LKGEIESYLMELQGGVPSSSQDSQASSSSKLGLDPDLSLSKSSISISDPLNTPALDFSQLFNFIPLNGPP

SEQ ID NO: 15617 - protein, 70 aa, Synthetic construct
LKGEIESYLMELQGGVPSSSQDSQASSSSKLGLDPQIGSLKSSISISDPLNTPALDFSQLFNFIPLNGPP

SEQ ID NO: 15618 - protein, 70 aa, Synthetic construct
LKGEIESYLMELQGGVPSSSQDSQASSSSKLGLDPQIGSLDDGAGISDPLNTPALDFSQLFNFIPLNGPP

SEQ ID NO: 15619 - protein, 70 aa, Synthetic construct
LKGEIESYLMELQGGVPSSSQDSQASSSSKLGLDPQIGSLDDGAGDLSLSNTPALDFSQLFNFIPLNGPP

SEQ ID NO: 15620 - protein, 70 aa, Synthetic construct
IRDLAALNISLQGHSQIVTQMYDLIRAFLAKLCLWETHLTRNNLAHFPTLKLASRNESDGLNYIPKIAEL

SEQ ID NO: 15621 - protein, 70 aa, Synthetic construct
IRDLAFLVDMLQGHSQIVTQMYDLIRAFLAKLCLWETHLTRNNLAHFPTLKLASRNESDGLNYIPKIAEL

SEQ ID NO: 15622 - protein, 70 aa, Synthetic construct
IRDLAFLVDMTMHLNQIVTQMYDLIRAFLAKLCLWETHLTRNNLAHFPTLKLASRNESDGLNYIPKIAEL

SEQ ID NO: 15623 - protein, 70 aa, Synthetic construct
IRDLAFLVDMTMHLNALNISLQGHSRAFLAKLCLWETHLTRNNLAHFPTLKLASRNESDGLNYIPKIAEL

SEQ ID NO: 15624 - protein, 70 aa, Synthetic construct
IRDLAFLVDMTMHLNALNISLQGHSQIVTQKLCLWETHLTRNNLAHFPTLKLASRNESDGLNYIPKIAEL

SEQ ID NO: 15625 - protein, 70 aa, Synthetic construct
IRDLAFLVDMTMHLNALNISLQGHSQIVTQMYDLIRAFLAKLCLWETHLTRNNLAHFPTLLNYIPKIAEL

SEQ ID NO: 15626 - protein, 70 aa, Synthetic construct
IRDLAFLVDMTMHLNALNISLQGHSQIVTQMYDLIRAFLAKLCLWETHLTRNNLAHFPTLKLASRNESDG

SEQ ID NO: 15627 - protein, 70 aa, Synthetic construct
PCGLHGPYIFKPRILSLGDFFFVRCTPKDPICIAELQLLWEERTSRQLLSSSKLYFLPEDTPQGRNSDHG

SEQ ID NO: 15628 - protein, 70 aa, Synthetic construct
PCGLHGPYIFYKAFQFHLEGFFVRCTPKDPICIAELQLLWEERTSRQLLSSSKLYFLPEDTPQGRNSDHG

SEQ ID NO: 15629 - protein, 70 aa, Synthetic construct
PCGLHGPYIFYKAFQFHLEGKPRILSLGDFICIAELQLLWEERTSRQLLSSSKLYFLPEDTPQGRNSDHG

SEQ ID NO: 15630 - protein, 70 aa, Synthetic construct
PCGLHGPYIFYKAFQFHLEGKPRILSLGDFFFVRCTPKDPICIAERQLLSSSKLYFLPEDTPQGRNSDHG

SEQ ID NO: 15631 - protein, 70 aa, Synthetic construct
PCGLHGPYIFYKAFQFHLEGKPRILSLGDFFFVRCTPKDPICIAELQLLWEERTSFLPEDTPQGRNSDHG

SEQ ID NO: 15632 - protein, 70 aa, Synthetic construct
LLNAMPLHSWEAMSLKGHLQSVTAPMGITMKPAEMIEVDGDANSYIDTLRKYTRPTLQMGMSCLLVFKVI

SEQ ID NO: 15633 - protein, 70 aa, Synthetic construct
LLNAMPLHSWLILYSRSSHRSVTAPMGITMKPAEMIEVDGDANSYIDTLRKYTRPTLQMGMSCLLVFKVI

SEQ ID NO: 15634 - protein, 70 aa, Synthetic construct
LLNAMPLHSWLILYSRSSHREAMSLKGHLQKPAEMIEVDGDANSYIDTLRKYTRPTLQMGMSCLLVFKVI

SEQ ID NO: 15635 - protein, 70 aa, Synthetic construct
LLNAMPLHSWLILYSRSSHREAMSLKGHLQSVTAPMGITMKPAEMIDTLRKYTRPTLQMGMSCLLVFKVI

SEQ ID NO: 15636 - protein, 70 aa, Synthetic construct
LLNAMPLHSWLILYSRSSHREAMSLKGHLQSVTAPMGITMKPAEMIEVDGDANSYTLQMGMSCLLVFKVI

SEQ ID NO: 15637 - protein, 70 aa, Synthetic construct
TIVTKIAQQMNCKMGGALWKVETDVQRTMFVGIDCFHDIVNRQKSIAGFVASTNAELTKWYSQCVIQKTG

SEQ ID NO: 15638 - protein, 70 aa, Synthetic construct
SEARFSSKNIKDLRLASDNVSIDQFLRKRHEPESVSSDVSEQGSIHLEPLTPSEVLEYEATEILQKGSGD

SEQ ID NO: 15639 - protein, 70 aa, Synthetic construct
LSDQISSKNIKDLRLASDNVSIDQFLRKRHEPESVSSDVSEQGSIHLEPLTPSEVLEYEATEILQKGSGD

SEQ ID NO: 15640 - protein, 70 aa, Synthetic construct
LSDQIKDHNSKDLRLASDNVSIDQFLRKRHEPESVSSDVSEQGSIHLEPLTPSEVLEYEATEILQKGSGD

SEQ ID NO: 15641 - protein, 70 aa, Synthetic construct
LSDQIKDHNSSEARFASDNVSIDQFLRKRHEPESVSSDVSEQGSIHLEPLTPSEVLEYEATEILQKGSGD

SEQ ID NO: 15642 - protein, 70 aa, Synthetic construct
LSDQIKDHNSSEARFSSKNISIDQFLRKRHEPESVSSDVSEQGSIHLEPLTPSEVLEYEATEILQKGSGD

SEQ ID NO: 15643 - protein, 70 aa, Synthetic construct
LSDQIKDHNSSEARFSSKNIKDLRLASDNVSIDQFLRKRHEQGSIHLEPLTPSEVLEYEATEILQKGSGD

SEQ ID NO: 15644 - protein, 70 aa, Synthetic construct
LSDQIKDHNSSEARFSSKNIKDLRLASDNVSIDQFLRKRHEPESVHLEPLTPSEVLEYEATEILQKGSGD

SEQ ID NO: 15645 - protein, 70 aa, Synthetic construct
PKCPENGFWVVQLSKGTKYLSTFSALTPVMLMEPPSHMGIFLDFEAGEVSFYSVSDGSHLHTYSQATFPG

SEQ ID NO: 15646 - protein, 70 aa, Synthetic construct
RDNVSNGFWVVQLSKGTKYLSTFSALTPVMLMEPPSHMGIFLDFEAGEVSFYSVSDGSHLHTYSQATFPG

SEQ ID NO: 15647 - protein, 70 aa, Synthetic construct
RDNVSRKDRVPKCPENGFWVSTFSALTPVMLMEPPSHMGIFLDFEAGEVSFYSVSDGSHLHTYSQATFPG

SEQ ID NO: 15648 - protein, 70 aa, Synthetic construct
SSPVPASGPSSGPQMSSGPGGAPLDGADPQALGQQNRGPTPFNQNQLHQLRAQIMAYKMLARGQPLPDHL

SEQ ID NO: 15649 - protein, 70 aa, Synthetic construct
PSPLGASGPSSGPQMSSGPGGAPLDGADPQALGQQNRGPTPFNQNQLHQLRAQIMAYKMLARGQPLPDHL

SEQ ID NO: 15650 - protein, 70 aa, Synthetic construct
PSPLGGSEHASGPQMSSGPGGAPLDGADPQALGQQNRGPTPFNQNQLHQLRAQIMAYKMLARGQPLPDHL

SEQ ID NO: 15651 - protein, 70 aa, Synthetic construct
PSPLGGSEHASSPVPSSGPGGAPLDGADPQALGQQNRGPTPFNQNQLHQLRAQIMAYKMLARGQPLPDHL

SEQ ID NO: 15652 - protein, 70 aa, Synthetic construct
PSPLGGSEHASSPVPASGPSGAPLDGADPQALGQQNRGPTPFNQNQLHQLRAQIMAYKMLARGQPLPDHL

SEQ ID NO: 15653 - protein, 70 aa, Synthetic construct
PSPLGGSEHASSPVPASGPSSGPQMGADPQALGQQNRGPTPFNQNQLHQLRAQIMAYKMLARGQPLPDHL

SEQ ID NO: 15654 - protein, 70 aa, Synthetic construct
PSPLGGSEHASSPVPASGPSSGPQMSSGPGALGQQNRGPTPFNQNQLHQLRAQIMAYKMLARGQPLPDHL

SEQ ID NO: 15655 - protein, 70 aa, Synthetic construct
PSPLGGSEHASSPVPASGPSSGPQMSSGPGGAPLDNRGPTPFNQNQLHQLRAQIMAYKMLARGQPLPDHL

SEQ ID NO: 15656 - protein, 70 aa, Synthetic construct
PSPLGGSEHASSPVPASGPSSGPQMSSGPGGAPLDGADPQPFNQNQLHQLRAQIMAYKMLARGQPLPDHL

SEQ ID NO: 15657 - protein, 70 aa, Synthetic construct
PFNQNQLHQLRAQIMAYKMLQMAVQGKRPMPGMQQQMPTLPPPSVSATGPGPGPGPGPGPGPGPAPPNYS

SEQ ID NO: 15658 - protein, 70 aa, Synthetic construct
PFNQNQLHQLRAQIMAYKMLARGQPGKRPMPGMQQQMPTLPPPSVSATGPGPGPGPGPGPGPGPAPPNYS

SEQ ID NO: 15659 - protein, 70 aa, Synthetic construct
PFNQNQLHQLRAQIMAYKMLARGQPLPDHLPGMQQQMPTLPPPSVSATGPGPGPGPGPGPGPGPAPPNYS

SEQ ID NO: 15660 - protein, 70 aa, Synthetic construct
PFNQNQLHQLRAQIMAYKMLARGQPLPDHLQMAVQQMPTLPPPSVSATGPGPGPGPGPGPGPGPAPPNYS

SEQ ID NO: 15661 - protein, 70 aa, Synthetic construct
PFNQNQLHQLRAQIMAYKMLARGQPLPDHLQMAVQGKRPMPPPSVSATGPGPGPGPGPGPGPGPAPPNYS

SEQ ID NO: 15662 - protein, 70 aa, Synthetic construct
PFNQNQLHQLRAQIMAYKMLARGQPLPDHLQMAVQGKRPMPGMQQSATGPGPGPGPGPGPGPGPAPPNYS

SEQ ID NO: 15663 - protein, 70 aa, Synthetic construct
PFNQNQLHQLRAQIMAYKMLARGQPLPDHLQMAVQGKRPMPGMQQQMPTLGPGPGPGPGPGPGPAPPNYS

SEQ ID NO: 15664 - protein, 70 aa, Synthetic construct
PFNQNQLHQLRAQIMAYKMLARGQPLPDHLQMAVQGKRPMPGMQQQMPTLPPPSVPGPGPGPGPAPPNYS

SEQ ID NO: 15665 - protein, 70 aa, Synthetic construct
PFNQNQLHQLRAQIMAYKMLARGQPLPDHLQMAVQGKRPMPGMQQQMPTLPPPSVSATGPGPGPAPPNYS

SEQ ID NO: 15666 - protein, 70 aa, Synthetic construct
PFNQNQLHQLRAQIMAYKMLARGQPLPDHLQMAVQGKRPMPGMQQQMPTLPPPSVSATGPGPGPGPPNYS

SEQ ID NO: 15667 - protein, 70 aa, Synthetic construct
PFNQNQLHQLRAQIMAYKMLARGQPLPDHLQMAVQGKRPMPGMQQQMPTLPPPSVSATGPGPGPGPGPGP

SEQ ID NO: 15668 - protein, 70 aa, Synthetic construct
LWALLNFLLPQWFNAPFAMTGEKVDLNEEETILIIRRLHKVLRPFLLRRLKKEVEAQLPEKVEYVIKCDM

SEQ ID NO: 15669 - protein, 70 aa, Synthetic construct
LWALLNFLLPTIFKSCSTFEQWFNAPFAMTTILIIRRLHKVLRPFLLRRLKKEVEAQLPEKVEYVIKCDM

SEQ ID NO: 15670 - protein, 70 aa, Synthetic construct
LWALLNFLLPTIFKSCSTFEQWFNAPFAMTGEKVDRRLHKVLRPFLLRRLKKEVEAQLPEKVEYVIKCDM

SEQ ID NO: 15671 - protein, 70 aa, Synthetic construct
LWALLNFLLPTIFKSCSTFEQWFNAPFAMTGEKVDLNEEEVLRPFLLRRLKKEVEAQLPEKVEYVIKCDM

SEQ ID NO: 15672 - protein, 70 aa, Synthetic construct
LWALLNFLLPTIFKSCSTFEQWFNAPFAMTGEKVDLNEEETILIIRRLHKKKEVEAQLPEKVEYVIKCDM

SEQ ID NO: 15673 - protein, 70 aa, Synthetic construct
LWALLNFLLPTIFKSCSTFEQWFNAPFAMTGEKVDLNEEETILIIRRLHKVLRPFLLRRLKKEVEIKCDM

SEQ ID NO: 15674 - protein, 70 aa, Synthetic construct
RPLELAGCASCLTVQDNWTLELESSQDIQDVLDANKSLPESSLTDLLSDNFTDSLVSFSAEILSRTLCEP

SEQ ID NO: 15675 - protein, 70 aa, Synthetic construct
EKDGSAGCASCLTVQDNWTLELESSQDIQDVLDANKSLPESSLTDLLSDNFTDSLVSFSAEILSRTLCEP

SEQ ID NO: 15676 - protein, 70 aa, Synthetic construct
EKDGSSCISRCLTVQDNWTLELESSQDIQDVLDANKSLPESSLTDLLSDNFTDSLVSFSAEILSRTLCEP

SEQ ID NO: 15677 - protein, 70 aa, Synthetic construct
EKDGSSCISRRPLELDNWTLELESSQDIQDVLDANKSLPESSLTDLLSDNFTDSLVSFSAEILSRTLCEP

SEQ ID NO: 15678 - protein, 70 aa, Synthetic construct
EKDGSSCISRRPLELAGCASELESSQDIQDVLDANKSLPESSLTDLLSDNFTDSLVSFSAEILSRTLCEP

SEQ ID NO: 15679 - protein, 70 aa, Synthetic construct
EKDGSSCISRRPLELAGCASCLTVQDNWTLVLDANKSLPESSLTDLLSDNFTDSLVSFSAEILSRTLCEP

SEQ ID NO: 15680 - protein, 70 aa, Synthetic construct
EKDGSSCISRRPLELAGCASCLTVQDNWTLELESSKSLPESSLTDLLSDNFTDSLVSFSAEILSRTLCEP

SEQ ID NO: 15681 - protein, 70 aa, Synthetic construct
EKDGSSCISRRPLELAGCASCLTVQDNWTLELESSQDIQDSSLTDLLSDNFTDSLVSFSAEILSRTLCEP

SEQ ID NO: 15682 - protein, 70 aa, Synthetic construct
EKDGSSCISRRPLELAGCASCLTVQDNWTLELESSQDIQDVLDANLLSDNFTDSLVSFSAEILSRTLCEP

SEQ ID NO: 15683 - protein, 70 aa, Synthetic construct
EKDGSSCISRRPLELAGCASCLTVQDNWTLELESSQDIQDVLDANKSLPESSLTDLLSDNEILSRTLCEP

SEQ ID NO: 15684 - protein, 70 aa, Synthetic construct
LRNRSPEEVTELVLDNCLCVFKELEFLSMANVELSSLARLPSLNKLRKLELSDNIISGGLEVLAEKCPNL

SEQ ID NO: 15685 - protein, 70 aa, Synthetic construct
LRNRSPEEVTELVLDNCLCVNGEIEGLNDTFKELEFLSMANVELSSLARLLSDNIISGGLEVLAEKCPNL

SEQ ID NO: 15686 - protein, 70 aa, Synthetic construct
LRNRSPEEVTELVLDNCLCVNGEIEGLNDTFKELEFLSMANVELSSLARLPSLNKLRKLELSDNIKCPNL

SEQ ID NO: 15687 - protein, 70 aa, Synthetic construct
GYEVAAQMGSEFGNWALGLWTEEGFDIFEDFPDLNSVLWGAEERKWVPYRVPNNNLPIPERYLSPDATVS

SEQ ID NO: 15688 - protein, 70 aa, Synthetic construct
IHLVPAQMGSEFGNWALGLWTEEGFDIFEDFPDLNSVLWGAEERKWVPYRVPNNNLPIPERYLSPDATVS

SEQ ID NO: 15689 - protein, 70 aa, Synthetic construct
IHLVPSLNPDEFGNWALGLWTEEGFDIFEDFPDLNSVLWGAEERKWVPYRVPNNNLPIPERYLSPDATVS

SEQ ID NO: 15690 - protein, 70 aa, Synthetic construct
IHLVPSLNPDGYEVAALGLWTEEGFDIFEDFPDLNSVLWGAEERKWVPYRVPNNNLPIPERYLSPDATVS

SEQ ID NO: 15691 - protein, 70 aa, Synthetic construct
IHLVPSLNPDGYEVAAQMGSTEEGFDIFEDFPDLNSVLWGAEERKWVPYRVPNNNLPIPERYLSPDATVS

SEQ ID NO: 15692 - protein, 70 aa, Synthetic construct
IHLVPSLNPDGYEVAAQMGSEFGNWDIFEDFPDLNSVLWGAEERKWVPYRVPNNNLPIPERYLSPDATVS

SEQ ID NO: 15693 - protein, 70 aa, Synthetic construct
IHLVPSLNPDGYEVAAQMGSEFGNWALGLWTEEGFDIFEDAEERKWVPYRVPNNNLPIPERYLSPDATVS

SEQ ID NO: 15694 - protein, 70 aa, Synthetic construct
IHLVPSLNPDGYEVAAQMGSEFGNWALGLWTEEGFDIFEDFPDLNWVPYRVPNNNLPIPERYLSPDATVS

SEQ ID NO: 15695 - protein, 70 aa, Synthetic construct
IHLVPSLNPDGYEVAAQMGSEFGNWALGLWTEEGFDIFEDFPDLNSVLWGVPNNNLPIPERYLSPDATVS

SEQ ID NO: 15696 - protein, 70 aa, Synthetic construct
IHLVPSLNPDGYEVAAQMGSEFGNWALGLWTEEGFDIFEDFPDLNSVLWGAEERKLPIPERYLSPDATVS

SEQ ID NO: 15697 - protein, 70 aa, Synthetic construct
IHLVPSLNPDGYEVAAQMGSEFGNWALGLWTEEGFDIFEDFPDLNSVLWGAEERKWVPYRRYLSPDATVS

SEQ ID NO: 15698 - protein, 70 aa, Synthetic construct
IHLVPSLNPDGYEVAAQMGSEFGNWALGLWTEEGFDIFEDFPDLNSVLWGAEERKWVPYRVPNNNDATVS

SEQ ID NO: 15699 - protein, 70 aa, Synthetic construct
IHLVPSLNPDGYEVAAQMGSEFGNWALGLWTEEGFDIFEDFPDLNSVLWGAEERKWVPYRVPNNNLPIPE

SEQ ID NO: 15700 - protein, 70 aa, Synthetic construct
GGRQPPIDFRDVDIGELSSDVISNIETFDVNEFDQPATHGQVTYTGSYGISSTAATPASAGHVWMSKQQA

SEQ ID NO: 15701 - protein, 70 aa, Synthetic construct
GGRQPPIDFRDVDIGELSSDVISNIETFDVNEFDQYLPPNQVTYTGSYGISSTAATPASAGHVWMSKQQA

SEQ ID NO: 15702 - protein, 70 aa, Synthetic construct
GGRQPPIDFRDVDIGELSSDVISNIETFDVNEFDQYLPPNGHPGVGSYGISSTAATPASAGHVWMSKQQA

SEQ ID NO: 15703 - protein, 70 aa, Synthetic construct
GGRQPPIDFRDVDIGELSSDVISNIETFDVNEFDQYLPPNGHPGVPATHGQVTYTTPASAGHVWMSKQQA

SEQ ID NO: 15704 - protein, 70 aa, Synthetic construct
GGRQPPIDFRDVDIGELSSDVISNIETFDVNEFDQYLPPNGHPGVPATHGQVTYTGSYGIGHVWMSKQQA

SEQ ID NO: 15705 - protein, 70 aa, Synthetic construct
GGRQPPIDFRDVDIGELSSDVISNIETFDVNEFDQYLPPNGHPGVPATHGQVTYTGSYGISSTAASKQQA

SEQ ID NO: 15706 - protein, 70 aa, Synthetic construct
GGRQPPIDFRDVDIGELSSDVISNIETFDVNEFDQYLPPNGHPGVPATHGQVTYTGSYGISSTAATPASA

SEQ ID NO: 15707 - protein, 70 aa, Synthetic construct
DAIPSSDFTSAWSTNHHLASIFDFTLDEIQSLKSASSGQTFFSDVDSTDAASTSGSASTSLSYDSRWTVG

SEQ ID NO: 15708 - protein, 70 aa, Synthetic construct
RRKRSKFLLEDAIPSSDFTSAWSTNHHLASIFDFTLDEIQFFSDVDSTDAASTSGSASTSLSYDSRWTVG

SEQ ID NO: 15709 - protein, 70 aa, Synthetic construct
RRKRSKFLLEDAIPSSDFTSAWSTNHHLASIFDFTLDEIQSLKSASSGQTFFSDVSASTSLSYDSRWTVG

SEQ ID NO: 15710 - protein, 70 aa, Synthetic construct
RRKRSKFLLEDAIPSSDFTSAWSTNHHLASIFDFTLDEIQSLKSASSGQTFFSDVDSTDALSYDSRWTVG

SEQ ID NO: 15711 - protein, 70 aa, Synthetic construct
PHNFVVDQTSCVRACGLKMCEPCGGLCPKACEGTGSGSRFQTVDSSNIDGFVNCTKILGNLDFLITGLNG

SEQ ID NO: 15712 - protein, 70 aa, Synthetic construct
EDDLLDLNPSSNFESMSLGSFSSSSALDRDLDFNFEPGSGSHFEFPDYCTPEVSEMISGDWLESSISNLV

SEQ ID NO: 15713 - protein, 70 aa, Synthetic construct
SGSSSDLNPSSNFESMSLGSFSSSSALDRDLDFNFEPGSGSHFEFPDYCTPEVSEMISGDWLESSISNLV

SEQ ID NO: 15714 - protein, 70 aa, Synthetic construct
SGSSSSDDEFSNFESMSLGSFSSSSALDRDLDFNFEPGSGSHFEFPDYCTPEVSEMISGDWLESSISNLV

SEQ ID NO: 15715 - protein, 70 aa, Synthetic construct
SGSSSSDDEFEDDLLMSLGSFSSSSALDRDLDFNFEPGSGSHFEFPDYCTPEVSEMISGDWLESSISNLV

SEQ ID NO: 15716 - protein, 70 aa, Synthetic construct
SGSSSSDDEFEDDLLDLNPSFSSSSALDRDLDFNFEPGSGSHFEFPDYCTPEVSEMISGDWLESSISNLV

SEQ ID NO: 15717 - protein, 70 aa, Synthetic construct
SGSSSSDDEFEDDLLDLNPSSNFESALDRDLDFNFEPGSGSHFEFPDYCTPEVSEMISGDWLESSISNLV

SEQ ID NO: 15718 - protein, 70 aa, Synthetic construct
SGSSSSDDEFEDDLLDLNPSSNFESMSLGSLDFNFEPGSGSHFEFPDYCTPEVSEMISGDWLESSISNLV

SEQ ID NO: 15719 - protein, 70 aa, Synthetic construct
SGSSSSDDEFEDDLLDLNPSSNFESMSLGSFSSSSEPGSGSHFEFPDYCTPEVSEMISGDWLESSISNLV

SEQ ID NO: 15720 - protein, 70 aa, Synthetic construct
SGSSSSDDEFEDDLLDLNPSSNFESMSLGSFSSSSALDRDSHFEFPDYCTPEVSEMISGDWLESSISNLV

SEQ ID NO: 15721 - protein, 70 aa, Synthetic construct
SGSSSSDDEFEDDLLDLNPSSNFESMSLGSFSSSSALDRDLDFNFPDYCTPEVSEMISGDWLESSISNLV

SEQ ID NO: 15722 - protein, 70 aa, Synthetic construct
SGSSSSDDEFEDDLLDLNPSSNFESMSLGSFSSSSALDRDLDFNFEPGSGPEVSEMISGDWLESSISNLV

SEQ ID NO: 15723 - protein, 70 aa, Synthetic construct
SGSSSSDDEFEDDLLDLNPSSNFESMSLGSFSSSSALDRDLDFNFEPGSGSHFEFMISGDWLESSISNLV

SEQ ID NO: 15724 - protein, 70 aa, Synthetic construct
SGSSSSDDEFEDDLLDLNPSSNFESMSLGSFSSSSALDRDLDFNFEPGSGSHFEFPDYCTWLESSISNLV

SEQ ID NO: 15725 - protein, 70 aa, Synthetic construct
SGSSSSDDEFEDDLLDLNPSSNFESMSLGSFSSSSALDRDLDFNFEPGSGSHFEFPDYCTPEVSEISNLV

SEQ ID NO: 15726 - protein, 70 aa, Synthetic construct
SGSSSSDDEFEDDLLDLNPSSNFESMSLGSFSSSSALDRDLDFNFEPGSGSHFEFPDYCTPEVSEMISGD

SEQ ID NO: 15727 - protein, 70 aa, Synthetic construct
LQSLPLGPEVDFSQGYELPGASSRVTCEDLESDSPLAPGPFSKLLQPDMSHHYESWFRPTHPGAEDGSWW

SEQ ID NO: 15728 - protein, 70 aa, Synthetic construct
DYPSPLGPEVDFSQGYELPGASSRVTCEDLESDSPLAPGPFSKLLQPDMSHHYESWFRPTHPGAEDGSWW

SEQ ID NO: 15729 - protein, 70 aa, Synthetic construct
DYPSPLQPGEDFSQGYELPGASSRVTCEDLESDSPLAPGPFSKLLQPDMSHHYESWFRPTHPGAEDGSWW

SEQ ID NO: 15730 - protein, 70 aa, Synthetic construct
DYPSPLQPGELQSLPYELPGASSRVTCEDLESDSPLAPGPFSKLLQPDMSHHYESWFRPTHPGAEDGSWW

SEQ ID NO: 15731 - protein, 70 aa, Synthetic construct
DYPSPLQPGELQSLPLGPEVDFSQGTCEDLESDSPLAPGPFSKLLQPDMSHHYESWFRPTHPGAEDGSWW

SEQ ID NO: 15732 - protein, 70 aa, Synthetic construct
DYPSPLQPGELQSLPLGPEVDFSQGYELPGESDSPLAPGPFSKLLQPDMSHHYESWFRPTHPGAEDGSWW

SEQ ID NO: 15733 - protein, 70 aa, Synthetic construct
DYPSPLQPGELQSLPLGPEVDFSQGYELPGASSRVLAPGPFSKLLQPDMSHHYESWFRPTHPGAEDGSWW

SEQ ID NO: 15734 - protein, 70 aa, Synthetic construct
DYPSPLQPGELQSLPLGPEVDFSQGYELPGASSRVTCEDLFSKLLQPDMSHHYESWFRPTHPGAEDGSWW

SEQ ID NO: 15735 - protein, 70 aa, Synthetic construct
DYPSPLQPGELQSLPLGPEVDFSQGYELPGASSRVTCEDLESDSPLAPGPHHYESWFRPTHPGAEDGSWW

SEQ ID NO: 15736 - protein, 70 aa, Synthetic construct
DYPSPLQPGELQSLPLGPEVDFSQGYELPGASSRVTCEDLESDSPLAPGPFSKLLWFRPTHPGAEDGSWW

SEQ ID NO: 15737 - protein, 70 aa, Synthetic construct
HHYESWFRPTHPGAEDGSWWDLHPGTSWMDLPHTQGALTSPGHPGALQAGLGGYVGDHQLCAPPPHPHAH

SEQ ID NO: 15738 - protein, 70 aa, Synthetic construct
FSKLLWFRPTHPGAEDGSWWDLHPGTSWMDLPHTQGALTSPGHPGALQAGLGGYVGDHQLCAPPPHPHAH

SEQ ID NO: 15739 - protein, 70 aa, Synthetic construct
FSKLLQPDMSHHYESDGSWWDLHPGTSWMDLPHTQGALTSPGHPGALQAGLGGYVGDHQLCAPPPHPHAH

SEQ ID NO: 15740 - protein, 70 aa, Synthetic construct
FSKLLQPDMSHHYESWFRPTHPGAEDGSWWLPHTQGALTSPGHPGALQAGLGGYVGDHQLCAPPPHPHAH

SEQ ID NO: 15741 - protein, 70 aa, Synthetic construct
FSKLLQPDMSHHYESWFRPTHPGAEDGSWWDLHPGGALTSPGHPGALQAGLGGYVGDHQLCAPPPHPHAH

SEQ ID NO: 15742 - protein, 70 aa, Synthetic construct
FSKLLQPDMSHHYESWFRPTHPGAEDGSWWDLHPGTSWMDPGHPGALQAGLGGYVGDHQLCAPPPHPHAH

SEQ ID NO: 15743 - protein, 70 aa, Synthetic construct
FSKLLQPDMSHHYESWFRPTHPGAEDGSWWDLHPGTSWMDLPHTQALQAGLGGYVGDHQLCAPPPHPHAH

SEQ ID NO: 15744 - protein, 70 aa, Synthetic construct
FSKLLQPDMSHHYESWFRPTHPGAEDGSWWDLHPGTSWMDLPHTQGALTSLGGYVGDHQLCAPPPHPHAH

SEQ ID NO: 15745 - protein, 70 aa, Synthetic construct
FSKLLQPDMSHHYESWFRPTHPGAEDGSWWDLHPGTSWMDLPHTQGALTSPGHPGGDHQLCAPPPHPHAH

SEQ ID NO: 15746 - protein, 70 aa, Synthetic construct
FSKLLQPDMSHHYESWFRPTHPGAEDGSWWDLHPGTSWMDLPHTQGALTSPGHPGALQAGCAPPPHPHAH

SEQ ID NO: 15747 - protein, 70 aa, Synthetic construct
FSKLLQPDMSHHYESWFRPTHPGAEDGSWWDLHPGTSWMDLPHTQGALTSPGHPGALQAGLGGYVHPHAH

SEQ ID NO: 15748 - protein, 70 aa, Synthetic construct
FSKLLQPDMSHHYESWFRPTHPGAEDGSWWDLHPGTSWMDLPHTQGALTSPGHPGALQAGLGGYVGDHQL

SEQ ID NO: 15749 - protein, 70 aa, Synthetic construct
PVDEDRLSPLVAADSLLEHVREDFSGLLPEEFISLSPPHEALDYHFGLEEGEGIRDLFDCDFGDLTPLDF

SEQ ID NO: 15750 - protein, 70 aa, Synthetic construct
LLSRMRLSPLVAADSLLEHVREDFSGLLPEEFISLSPPHEALDYHFGLEEGEGIRDLFDCDFGDLTPLDF

SEQ ID NO: 15751 - protein, 70 aa, Synthetic construct
LLSRMGSLRAVAADSLLEHVREDFSGLLPEEFISLSPPHEALDYHFGLEEGEGIRDLFDCDFGDLTPLDF

SEQ ID NO: 15752 - protein, 70 aa, Synthetic construct
LLSRMGSLRAPVDEDLLEHVREDFSGLLPEEFISLSPPHEALDYHFGLEEGEGIRDLFDCDFGDLTPLDF

SEQ ID NO: 15753 - protein, 70 aa, Synthetic construct
LLSRMGSLRAPVDEDRLSPLREDFSGLLPEEFISLSPPHEALDYHFGLEEGEGIRDLFDCDFGDLTPLDF

SEQ ID NO: 15754 - protein, 70 aa, Synthetic construct
LLSRMGSLRAPVDEDRLSPLVAADSGLLPEEFISLSPPHEALDYHFGLEEGEGIRDLFDCDFGDLTPLDF

SEQ ID NO: 15755 - protein, 70 aa, Synthetic construct
LLSRMGSLRAPVDEDRLSPLVAADSLLEHVEFISLSPPHEALDYHFGLEEGEGIRDLFDCDFGDLTPLDF

SEQ ID NO: 15756 - protein, 70 aa, Synthetic construct
LLSRMGSLRAPVDEDRLSPLVAADSLLEHVREDFSSPPHEALDYHFGLEEGEGIRDLFDCDFGDLTPLDF

SEQ ID NO: 15757 - protein, 70 aa, Synthetic construct
LLSRMGSLRAPVDEDRLSPLVAADSLLEHVREDFSGLLPEALDYHFGLEEGEGIRDLFDCDFGDLTPLDF

SEQ ID NO: 15758 - protein, 70 aa, Synthetic construct
LLSRMGSLRAPVDEDRLSPLVAADSLLEHVREDFSGLLPEEFISLFGLEEGEGIRDLFDCDFGDLTPLDF

SEQ ID NO: 15759 - protein, 70 aa, Synthetic construct
LLSRMGSLRAPVDEDRLSPLVAADSLLEHVREDFSGLLPEEFISLSPPHEGEGIRDLFDCDFGDLTPLDF

SEQ ID NO: 15760 - protein, 70 aa, Synthetic construct
LLSRMGSLRAPVDEDRLSPLVAADSLLEHVREDFSGLLPEEFISLSPPHEALDYHDLFDCDFGDLTPLDF

SEQ ID NO: 15761 - protein, 70 aa, Synthetic construct
LLSRMGSLRAPVDEDRLSPLVAADSLLEHVREDFSGLLPEEFISLSPPHEALDYHFGLEEDFGDLTPLDF

SEQ ID NO: 15762 - protein, 70 aa, Synthetic construct
LLSRMGSLRAPVDEDRLSPLVAADSLLEHVREDFSGLLPEEFISLSPPHEALDYHFGLEEGEGIRTPLDF

SEQ ID NO: 15763 - protein, 70 aa, Synthetic construct
LLSRMGSLRAPVDEDRLSPLVAADSLLEHVREDFSGLLPEEFISLSPPHEALDYHFGLEEGEGIRDLFDC

SEQ ID NO: 15764 - protein, 70 aa, Synthetic construct
NIQSWSNHSWNTQTWCTQSWNNQAWNSPFYNCGEESLQSCMHFQPNSPASDLEAALEAAGEGLNVIQQTT

SEQ ID NO: 15765 - protein, 70 aa, Synthetic construct
NNSTWSNHSWNTQTWCTQSWNNQAWNSPFYNCGEESLQSCMHFQPNSPASDLEAALEAAGEGLNVIQQTT

SEQ ID NO: 15766 - protein, 70 aa, Synthetic construct
NNSTWSNQTQNIQSWCTQSWNNQAWNSPFYNCGEESLQSCMHFQPNSPASDLEAALEAAGEGLNVIQQTT

SEQ ID NO: 15767 - protein, 70 aa, Synthetic construct
NNSTWSNQTQNIQSWSNHSWNNQAWNSPFYNCGEESLQSCMHFQPNSPASDLEAALEAAGEGLNVIQQTT

SEQ ID NO: 15768 - protein, 70 aa, Synthetic construct
NNSTWSNQTQNIQSWSNHSWNTQTWCTQSWNNQAWSLQSCMHFQPNSPASDLEAALEAAGEGLNVIQQTT

SEQ ID NO: 15769 - protein, 70 aa, Synthetic construct
NNSTWSNQTQNIQSWSNHSWNTQTWCTQSWNNQAWNSPFYMHFQPNSPASDLEAALEAAGEGLNVIQQTT

SEQ ID NO: 15770 - protein, 70 aa, Synthetic construct
NNSTWSNQTQNIQSWSNHSWNTQTWCTQSWNNQAWNSPFYNCGEENSPASDLEAALEAAGEGLNVIQQTT

SEQ ID NO: 15771 - protein, 70 aa, Synthetic construct
NNSTWSNQTQNIQSWSNHSWNTQTWCTQSWNNQAWNSPFYNCGEESLQSCDLEAALEAAGEGLNVIQQTT

SEQ ID NO: 15772 - protein, 70 aa, Synthetic construct
NNSTWSNQTQNIQSWSNHSWNTQTWCTQSWNNQAWNSPFYNCGEESLQSCMHFQPLEAAGEGLNVIQQTT

SEQ ID NO: 15773 - protein, 70 aa, Synthetic construct
NNSTWSNQTQNIQSWSNHSWNTQTWCTQSWNNQAWNSPFYNCGEESLQSCMHFQPNSPASEGLNVIQQTT

SEQ ID NO: 15774 - protein, 70 aa, Synthetic construct
NNSTWSNQTQNIQSWSNHSWNTQTWCTQSWNNQAWNSPFYNCGEESLQSCMHFQPNSPASDLEAAIQQTT

SEQ ID NO: 15775 - protein, 70 aa, Synthetic construct
NNSTWSNQTQNIQSWSNHSWNTQTWCTQSWNNQAWNSPFYNCGEESLQSCMHFQPNSPASDLEAALEAAG

SEQ ID NO: 15776 - protein, 70 aa, Synthetic construct
TGFADIQGHPFFRNVDWDMMPNISGEFGLDNFDSQFTNEPVQLTPDDDDIVRKIDQSEFEGFEYINPLLM

SEQ ID NO: 15777 - protein, 70 aa, Synthetic construct
TGFADIQGHPFFRNVDWDMMEQKQVEFGLDNFDSQFTNEPVQLTPDDDDIVRKIDQSEFEGFEYINPLLM

SEQ ID NO: 15778 - protein, 70 aa, Synthetic construct
TGFADIQGHPFFRNVDWDMMEQKQVVPPFKPNISGEFGLDNFDSQFTNEPVQLTPQSEFEGFEYINPLLM

SEQ ID NO: 15779 - protein, 70 aa, Synthetic construct
TGFADIQGHPFFRNVDWDMMEQKQVVPPFKPNISGEFGLDNFDSQFTNEPVQLTPDDDDIGFEYINPLLM

SEQ ID NO: 15780 - protein, 70 aa, Synthetic construct
MYTKKNVPSKSKAAASATREWTEQETLLLLEALEMYKDDWNKVSEHVGSRTQDECILHFLRLPIEDPYLE

SEQ ID NO: 15781 - protein, 70 aa, Synthetic construct
DMQNFNVPSKSKAAASATREWTEQETLLLLEALEMYKDDWNKVSEHVGSRTQDECILHFLRLPIEDPYLE

SEQ ID NO: 15782 - protein, 70 aa, Synthetic construct
DMQNFGLRTDSKAAASATREWTEQETLLLLEALEMYKDDWNKVSEHVGSRTQDECILHFLRLPIEDPYLE

SEQ ID NO: 15783 - protein, 70 aa, Synthetic construct
DMQNFGLRTDMYTKKSATREWTEQETLLLLEALEMYKDDWNKVSEHVGSRTQDECILHFLRLPIEDPYLE

SEQ ID NO: 15784 - protein, 70 aa, Synthetic construct
DMQNFGLRTDMYTKKNVPSKWTEQETLLLLEALEMYKDDWNKVSEHVGSRTQDECILHFLRLPIEDPYLE

SEQ ID NO: 15785 - protein, 70 aa, Synthetic construct
DMQNFGLRTDMYTKKNVPSKSKAAASATREWTEQETLLLLNKVSEHVGSRTQDECILHFLRLPIEDPYLE

SEQ ID NO: 15786 - protein, 70 aa, Synthetic construct
DMQNFGLRTDMYTKKNVPSKSKAAASATREWTEQETLLLLEALEMYKDDWNKVSEILHFLRLPIEDPYLE

SEQ ID NO: 15787 - protein, 70 aa, Synthetic construct
DMQNFGLRTDMYTKKNVPSKSKAAASATREWTEQETLLLLEALEMYKDDWNKVSEHVGSRTQDECDPYLE

SEQ ID NO: 15788 - protein, 70 aa, Synthetic construct
NIDGKELCKMTKDDFQRLTPSYNADILLSHLHYLRETPLPHLTSDDVDKALQNSPRLMHARNTGGAAFIF

SEQ ID NO: 15789 - protein, 70 aa, Synthetic construct
LPDVNELCKMTKDDFQRLTPSYNADILLSHLHYLRETPLPHLTSDDVDKALQNSPRLMHARNTGGAAFIF

SEQ ID NO: 15790 - protein, 70 aa, Synthetic construct
LPDVNILLFQTKDDFQRLTPSYNADILLSHLHYLRETPLPHLTSDDVDKALQNSPRLMHARNTGGAAFIF

SEQ ID NO: 15791 - protein, 70 aa, Synthetic construct
LPDVNILLFQNIDGKQRLTPSYNADILLSHLHYLRETPLPHLTSDDVDKALQNSPRLMHARNTGGAAFIF

SEQ ID NO: 15792 - protein, 70 aa, Synthetic construct
LPDVNILLFQNIDGKELCKMSYNADILLSHLHYLRETPLPHLTSDDVDKALQNSPRLMHARNTGGAAFIF

SEQ ID NO: 15793 - protein, 70 aa, Synthetic construct
LPDVNILLFQNIDGKELCKMTKDDFILLSHLHYLRETPLPHLTSDDVDKALQNSPRLMHARNTGGAAFIF

SEQ ID NO: 15794 - protein, 70 aa, Synthetic construct
LPDVNILLFQNIDGKELCKMTKDDFQRLTPLHYLRETPLPHLTSDDVDKALQNSPRLMHARNTGGAAFIF

SEQ ID NO: 15795 - protein, 70 aa, Synthetic construct
LPDVNILLFQNIDGKELCKMTKDDFQRLTPSYNADILLSHLHYLRETPLPLQNSPRLMHARNTGGAAFIF

SEQ ID NO: 15796 - protein, 70 aa, Synthetic construct
LPDVNILLFQNIDGKELCKMTKDDFQRLTPSYNADILLSHLHYLRETPLPHLTSDDVDKALQNSPAAFIF

SEQ ID NO: 15797 - protein, 70 aa, Synthetic construct
LPDVNILLFQNIDGKELCKMTKDDFQRLTPSYNADILLSHLHYLRETPLPHLTSDDVDKALQNSPRLMHA

SEQ ID NO: 15798 - protein, 70 aa, Synthetic construct
LFTDENDNLEIKIIDNQPLKTPCFTLHYAAPELLNQNGYDESCDLWSLGVILYTMLSGQVPFQSHDRSLT

SEQ ID NO: 15799 - protein, 70 aa, Synthetic construct
LFTDENDNLEIKIIDFGFARTPCFTLHYAAPELLNQNGYDESCDLWSLGVILYTMLSGQVPFQSHDRSLT

SEQ ID NO: 15800 - protein, 70 aa, Synthetic construct
LFTDENDNLEIKIIDFGFARLKPPDNQPLKTPCFTQNGYDESCDLWSLGVILYTMLSGQVPFQSHDRSLT

SEQ ID NO: 15801 - protein, 70 aa, Synthetic construct
LFTDENDNLEIKIIDFGFARLKPPDNQPLKTPCFTLHYAAPELLNWSLGVILYTMLSGQVPFQSHDRSLT

SEQ ID NO: 15802 - protein, 70 aa, Synthetic construct
LFTDENDNLEIKIIDFGFARLKPPDNQPLKTPCFTLHYAAPELLNQNGYDESCDLWSLGVPFQSHDRSLT

SEQ ID NO: 15803 - protein, 70 aa, Synthetic construct
LFTDENDNLEIKIIDFGFARLKPPDNQPLKTPCFTLHYAAPELLNQNGYDESCDLWSLGVILYTMLSGQV

SEQ ID NO: 15804 - protein, 70 aa, Synthetic construct
TECNHTKGDFILVGDLMRSVLLLAYKPMEGNFEEIARDFNPNWMSAVEILDDDNFLGAENAFNLFVCQKD

SEQ ID NO: 15805 - protein, 70 aa, Synthetic construct
TECNHYNNIMALYLKLMRSVLLLAYKPMEGNFEEIARDFNPNWMSAVEILDDDNFLGAENAFNLFVCQKD

SEQ ID NO: 15806 - protein, 70 aa, Synthetic construct
TECNHYNNIMALYLKTKGDFLLLAYKPMEGNFEEIARDFNPNWMSAVEILDDDNFLGAENAFNLFVCQKD

SEQ ID NO: 15807 - protein, 70 aa, Synthetic construct
TECNHYNNIMALYLKTKGDFILVGDKPMEGNFEEIARDFNPNWMSAVEILDDDNFLGAENAFNLFVCQKD

SEQ ID NO: 15808 - protein, 70 aa, Synthetic construct
TECNHYNNIMALYLKTKGDFILVGDLMRSVNFEEIARDFNPNWMSAVEILDDDNFLGAENAFNLFVCQKD

SEQ ID NO: 15809 - protein, 70 aa, Synthetic construct
TECNHYNNIMALYLKTKGDFILVGDLMRSVLLLAYKPMEGPNWMSAVEILDDDNFLGAENAFNLFVCQKD

SEQ ID NO: 15810 - protein, 70 aa, Synthetic construct
TECNHYNNIMALYLKTKGDFILVGDLMRSVLLLAYKPMEGNFEEIARDFNDDDNFLGAENAFNLFVCQKD

SEQ ID NO: 15811 - protein, 70 aa, Synthetic construct
PGQTPYSYQMPGSSFAPSSTIYANNSVSNSTNFSGSQQDYPSYTAFGQNQYAQYYSASTYGAYMTSNNTA

SEQ ID NO: 15812 - protein, 70 aa, Synthetic construct
SYSPGYSYQMPGSSFAPSSTIYANNSVSNSTNFSGSQQDYPSYTAFGQNQYAQYYSASTYGAYMTSNNTA

SEQ ID NO: 15813 - protein, 70 aa, Synthetic construct
SYSPGFSTPQPGQTPYSYQMIYANNSVSNSTNFSGSQQDYPSYTAFGQNQYAQYYSASTYGAYMTSNNTA

SEQ ID NO: 15814 - protein, 70 aa, Synthetic construct
SYSPGFSTPQPGQTPYSYQMPGSSFSVSNSTNFSGSQQDYPSYTAFGQNQYAQYYSASTYGAYMTSNNTA

SEQ ID NO: 15815 - protein, 70 aa, Synthetic construct
SYSPGFSTPQPGQTPYSYQMPGSSFAPSSTTNFSGSQQDYPSYTAFGQNQYAQYYSASTYGAYMTSNNTA

SEQ ID NO: 15816 - protein, 70 aa, Synthetic construct
SYSPGFSTPQPGQTPYSYQMPGSSFAPSSTIYANNSQQDYPSYTAFGQNQYAQYYSASTYGAYMTSNNTA

SEQ ID NO: 15817 - protein, 70 aa, Synthetic construct
SYSPGFSTPQPGQTPYSYQMPGSSFAPSSTIYANNSVSNSTNFSGFGQNQYAQYYSASTYGAYMTSNNTA

SEQ ID NO: 15818 - protein, 70 aa, Synthetic construct
SYSPGFSTPQPGQTPYSYQMPGSSFAPSSTIYANNSVSNSTNFSGSQQDYYAQYYSASTYGAYMTSNNTA

SEQ ID NO: 15819 - protein, 70 aa, Synthetic construct
SYSPGFSTPQPGQTPYSYQMPGSSFAPSSTIYANNSVSNSTNFSGSQQDYPSYTAFGQNQYAQYYSASTY

SEQ ID NO: 15820 - protein, 70 aa, Synthetic construct
GYGRMGLLHQEKLPSDLDGMFIERLDCDMESIIRNDLMDGDTLDFNFDNVLPNQSFPHSVKTTTHSWVSG

SEQ ID NO: 15821 - protein, 70 aa, Synthetic construct
GGYSSGLLHQEKLPSDLDGMFIERLDCDMESIIRNDLMDGDTLDFNFDNVLPNQSFPHSVKTTTHSWVSG

SEQ ID NO: 15822 - protein, 70 aa, Synthetic construct
GGYSSVSSCNEKLPSDLDGMFIERLDCDMESIIRNDLMDGDTLDFNFDNVLPNQSFPHSVKTTTHSWVSG

SEQ ID NO: 15823 - protein, 70 aa, Synthetic construct
GGYSSVSSCNGYGRMDLDGMFIERLDCDMESIIRNDLMDGDTLDFNFDNVLPNQSFPHSVKTTTHSWVSG

SEQ ID NO: 15824 - protein, 70 aa, Synthetic construct
GGYSSVSSCNGYGRMGLLHQFIERLDCDMESIIRNDLMDGDTLDFNFDNVLPNQSFPHSVKTTTHSWVSG

SEQ ID NO: 15825 - protein, 70 aa, Synthetic construct
GGYSSVSSCNGYGRMGLLHQEKLPSDLDGMFIERLDLMDGDTLDFNFDNVLPNQSFPHSVKTTTHSWVSG

SEQ ID NO: 15826 - protein, 70 aa, Synthetic construct
GGYSSVSSCNGYGRMGLLHQEKLPSDLDGMFIERLDCDMESIIRNDLMDGDTLDFFPHSVKTTTHSWVSG

SEQ ID NO: 15827 - protein, 70 aa, Synthetic construct
GGYSSVSSCNGYGRMGLLHQEKLPSDLDGMFIERLDCDMESIIRNDLMDGDTLDFNFDNVKTTTHSWVSG

SEQ ID NO: 15828 - protein, 70 aa, Synthetic construct
GGYSSVSSCNGYGRMGLLHQEKLPSDLDGMFIERLDCDMESIIRNDLMDGDTLDFNFDNVLPNQSSWVSG

SEQ ID NO: 15829 - protein, 70 aa, Synthetic construct
GGYSSVSSCNGYGRMGLLHQEKLPSDLDGMFIERLDCDMESIIRNDLMDGDTLDFNFDNVLPNQSFPHSV

SEQ ID NO: 15830 - protein, 70 aa, Synthetic construct
LSMPASVSLPVEASHIRSPSTPELSADELPDDIANEITDIPHDLELNQEDFSDVLPRLPDDLQDFDFFEG

SEQ ID NO: 15831 - protein, 70 aa, Synthetic construct
PIPPASVSLPVEASHIRSPSTPELSADELPDDIANEITDIPHDLELNQEDFSDVLPRLPDDLQDFDFFEG

SEQ ID NO: 15832 - protein, 70 aa, Synthetic construct
PIPPAVPQGNVEASHIRSPSTPELSADELPDDIANEITDIPHDLELNQEDFSDVLPRLPDDLQDFDFFEG

SEQ ID NO: 15833 - protein, 70 aa, Synthetic construct
PIPPAVPQGNLSMPAIRSPSTPELSADELPDDIANEITDIPHDLELNQEDFSDVLPRLPDDLQDFDFFEG

SEQ ID NO: 15834 - protein, 70 aa, Synthetic construct
PIPPAVPQGNLSMPASVSLPTPELSADELPDDIANEITDIPHDLELNQEDFSDVLPRLPDDLQDFDFFEG

SEQ ID NO: 15835 - protein, 70 aa, Synthetic construct
PIPPAVPQGNLSMPASVSLPVEASHADELPDDIANEITDIPHDLELNQEDFSDVLPRLPDDLQDFDFFEG

SEQ ID NO: 15836 - protein, 70 aa, Synthetic construct
PIPPAVPQGNLSMPASVSLPVEASHIRSPSDDIANEITDIPHDLELNQEDFSDVLPRLPDDLQDFDFFEG

SEQ ID NO: 15837 - protein, 70 aa, Synthetic construct
PIPPAVPQGNLSMPASVSLPVEASHIRSPSTPELSEITDIPHDLELNQEDFSDVLPRLPDDLQDFDFFEG

SEQ ID NO: 15838 - protein, 70 aa, Synthetic construct
PIPPAVPQGNLSMPASVSLPVEASHIRSPSTPELSADELPDDIANLNQEDFSDVLPRLPDDLQDFDFFEG

SEQ ID NO: 15839 - protein, 70 aa, Synthetic construct
PIPPAVPQGNLSMPASVSLPVEASHIRSPSTPELSADELPDDIANEITDIFSDVLPRLPDDLQDFDFFEG

SEQ ID NO: 15840 - protein, 70 aa, Synthetic construct
PIPPAVPQGNLSMPASVSLPVEASHIRSPSTPELSADELPDDIANEITDIPHDLELNQEDFSDVLDFFEG

SEQ ID NO: 15841 - protein, 70 aa, Synthetic construct
AFEGSPARELDVPLPDIDYMEIPVDWWDAEADKSLLIGVFKHGYERYNAMRADPALCFLEKVGMPDEKSL

SEQ ID NO: 15842 - protein, 70 aa, Synthetic construct
AEILGPARELDVPLPDIDYMEIPVDWWDAEADKSLLIGVFKHGYERYNAMRADPALCFLEKVGMPDEKSL

SEQ ID NO: 15843 - protein, 70 aa, Synthetic construct
AEILGEAAEKDVPLPDIDYMEIPVDWWDAEADKSLLIGVFKHGYERYNAMRADPALCFLEKVGMPDEKSL

SEQ ID NO: 15844 - protein, 70 aa, Synthetic construct
AEILGEAAEKAFEGSDIDYMEIPVDWWDAEADKSLLIGVFKHGYERYNAMRADPALCFLEKVGMPDEKSL

SEQ ID NO: 15845 - protein, 70 aa, Synthetic construct
AEILGEAAEKAFEGSPARELDVPLPDIDYMEIPVDWWDAEADKSLRYNAMRADPALCFLEKVGMPDEKSL

SEQ ID NO: 15846 - protein, 70 aa, Synthetic construct
AEILGEAAEKAFEGSPARELDVPLPDIDYMEIPVDWWDAEADKSLLIGVFRADPALCFLEKVGMPDEKSL

SEQ ID NO: 15847 - protein, 70 aa, Synthetic construct
AEILGEAAEKAFEGSPARELDVPLPDIDYMEIPVDWWDAEADKSLLIGVFKHGYERYNAMKVGMPDEKSL

SEQ ID NO: 15848 - protein, 70 aa, Synthetic construct
AEILGEAAEKAFEGSPARELDVPLPDIDYMEIPVDWWDAEADKSLLIGVFKHGYERYNAMRADPADEKSL

SEQ ID NO: 15849 - protein, 70 aa, Synthetic construct
AEILGEAAEKAFEGSPARELDVPLPDIDYMEIPVDWWDAEADKSLLIGVFKHGYERYNAMRADPALCFLE

SEQ ID NO: 15850 - protein, 70 aa, Synthetic construct
FRNDFSGEVDFRDIDLTDEILTYVQDSLSKQQSLALNSSCMVQEHLHLEQQQQHHQKQVVVEPQQQLCQK

SEQ ID NO: 15851 - protein, 70 aa, Synthetic construct
FRNDFSGEVDFRDIDLTDEILTYVQDSLSKSPFIPLNSSCMVQEHLHLEQQQQHHQKQVVVEPQQQLCQK

SEQ ID NO: 15852 - protein, 70 aa, Synthetic construct
FRNDFSGEVDFRDIDLTDEILTYVQDSLSKSPFIPSDYQQMVQEHLHLEQQQQHHQKQVVVEPQQQLCQK

SEQ ID NO: 15853 - protein, 70 aa, Synthetic construct
FRNDFSGEVDFRDIDLTDEILTYVQDSLSKSPFIPSDYQQQQSLALHLEQQQQHHQKQVVVEPQQQLCQK

SEQ ID NO: 15854 - protein, 70 aa, Synthetic construct
FRNDFSGEVDFRDIDLTDEILTYVQDSLSKSPFIPSDYQQQQSLALNSSCQQQHHQKQVVVEPQQQLCQK

SEQ ID NO: 15855 - protein, 70 aa, Synthetic construct
FRNDFSGEVDFRDIDLTDEILTYVQDSLSKSPFIPSDYQQQQSLALNSSCMVQEHQKQVVVEPQQQLCQK

SEQ ID NO: 15856 - protein, 70 aa, Synthetic construct
FRNDFSGEVDFRDIDLTDEILTYVQDSLSKSPFIPSDYQQQQSLALNSSCMVQEHLHLEQVEPQQQLCQK

SEQ ID NO: 15857 - protein, 70 aa, Synthetic construct
FRNDFSGEVDFRDIDLTDEILTYVQDSLSKSPFIPSDYQQQQSLALNSSCMVQEHLHLEQQQQHHQLCQK

SEQ ID NO: 15858 - protein, 70 aa, Synthetic construct
FRNDFSGEVDFRDIDLTDEILTYVQDSLSKSPFIPSDYQQQQSLALNSSCMVQEHLHLEQQQQHHQKQVV

SEQ ID NO: 15859 - protein, 70 aa, Synthetic construct
MKHMQVNGMFENWNSNQFVPFNCPQQDPQQYNVFTDLHGIDSMPYTQNFISCNQPVLPQHSKCTELDYPM

SEQ ID NO: 15860 - protein, 70 aa, Synthetic construct
MKHMQVNGMFENWNSNQFVPFNCPQQDPQQYNVFTDLHGISQEFPTQNFISCNQPVLPQHSKCTELDYPM

SEQ ID NO: 15861 - protein, 70 aa, Synthetic construct
MKHMQVNGMFENWNSNQFVPFNCPQQDPQQYNVFTDLHGISQEFPYKSEMDSMPYTQNFISKCTELDYPM

SEQ ID NO: 15862 - protein, 70 aa, Synthetic construct
MKHMQVNGMFENWNSNQFVPFNCPQQDPQQYNVFTDLHGISQEFPYKSEMDSMPYTQNFISCNQPLDYPM

SEQ ID NO: 15863 - protein, 70 aa, Synthetic construct
VQPYEHGYPVSGGFAMPPVSLNHNLTTPFTSQAGENSLFMGSTPSYYQLSNLLADARLVFPVTTDPLVPA

SEQ ID NO: 15864 - protein, 70 aa, Synthetic construct
RSRKGHLPAPVQPYEHGYPVSGGFATTPFTSQAGENSLFMGSTPSYYQLSNLLADARLVFPVTTDPLVPA

SEQ ID NO: 15865 - protein, 70 aa, Synthetic construct
RSRKGHLPAPVQPYEHGYPVSGGFAMPPVSLNHNLNSLFMGSTPSYYQLSNLLADARLVFPVTTDPLVPA

SEQ ID NO: 15866 - protein, 70 aa, Synthetic construct
RSRKGHLPAPVQPYEHGYPVSGGFAMPPVSLNHNLTTPFTSQAGENSLFMGSTPSYYQLSNLLADARLVF

SEQ ID NO: 15867 - protein, 70 aa, Synthetic construct
SQAGENSLFMGSTPSYYQLSNLLADARLVFGPVSSSSTATSVTASNPSFMLNPSVPGILPSYSLPFSQPL

SEQ ID NO: 15868 - protein, 70 aa, Synthetic construct
SQAGENSLFMGSTPSYYQLSNLLADARLVFPVTTDSSTATSVTASNPSFMLNPSVPGILPSYSLPFSQPL

SEQ ID NO: 15869 - protein, 70 aa, Synthetic construct
SQAGENSLFMGSTPSYYQLSNLLADARLVFPVTTDPLVPASVTASNPSFMLNPSVPGILPSYSLPFSQPL

SEQ ID NO: 15870 - protein, 70 aa, Synthetic construct
SQAGENSLFMGSTPSYYQLSNLLADARLVFPVTTDPLVPAGPVSSNPSFMLNPSVPGILPSYSLPFSQPL

SEQ ID NO: 15871 - protein, 70 aa, Synthetic construct
SQAGENSLFMGSTPSYYQLSNLLADARLVFPVTTDPLVPAGPVSSSSTATLNPSVPGILPSYSLPFSQPL

SEQ ID NO: 15872 - protein, 70 aa, Synthetic construct
SQAGENSLFMGSTPSYYQLSNLLADARLVFPVTTDPLVPAGPVSSSSTATSVTASNPSFMSYSLPFSQPL

SEQ ID NO: 15873 - protein, 70 aa, Synthetic construct
ELTLGDIDEMFPDLFSEQLCSSFPGSGGSGSSSGSSGSSSSSSNGRGSSSGAVDPSVQRSFTQVTLPSFS

SEQ ID NO: 15874 - protein, 70 aa, Synthetic construct
ELTLGDIDEMLQFVSNQVGEFPDLFSGGSGSSSGSSGSSSSSSNGRGSSSGAVDPSVQRSFTQVTLPSFS

SEQ ID NO: 15875 - protein, 70 aa, Synthetic construct
ELTLGDIDEMLQFVSNQVGEFPDLFSEQLCSSSGSSGSSSSSSNGRGSSSGAVDPSVQRSFTQVTLPSFS

SEQ ID NO: 15876 - protein, 70 aa, Synthetic construct
ELTLGDIDEMLQFVSNQVGEFPDLFSEQLCSSFPGSGSSSSSSNGRGSSSGAVDPSVQRSFTQVTLPSFS

SEQ ID NO: 15877 - protein, 70 aa, Synthetic construct
ELTLGDIDEMLQFVSNQVGEFPDLFSEQLCSSFPGSGGSGSSSNGRGSSSGAVDPSVQRSFTQVTLPSFS

SEQ ID NO: 15878 - protein, 70 aa, Synthetic construct
ELTLGDIDEMLQFVSNQVGEFPDLFSEQLCSSFPGSGGSGSSSGSRGSSSGAVDPSVQRSFTQVTLPSFS

SEQ ID NO: 15879 - protein, 70 aa, Synthetic construct
ELTLGDIDEMLQFVSNQVGEFPDLFSEQLCSSFPGSGGSGSSSGSSGSSSGAVDPSVQRSFTQVTLPSFS

SEQ ID NO: 15880 - protein, 70 aa, Synthetic construct
ELTLGDIDEMLQFVSNQVGEFPDLFSEQLCSSFPGSGGSGSSSGSSGSSSSSSNGSVQRSFTQVTLPSFS

SEQ ID NO: 15881 - protein, 70 aa, Synthetic construct
ELTLGDIDEMLQFVSNQVGEFPDLFSEQLCSSFPGSGGSGSSSGSSGSSSSSSNGRGSSSFTQVTLPSFS

SEQ ID NO: 15882 - protein, 70 aa, Synthetic construct
ELTLGDIDEMLQFVSNQVGEFPDLFSEQLCSSFPGSGGSGSSSGSSGSSSSSSNGRGSSSGAVDPLPSFS

SEQ ID NO: 15883 - protein, 70 aa, Synthetic construct
ELTLGDIDEMLQFVSNQVGEFPDLFSEQLCSSFPGSGGSGSSSGSSGSSSSSSNGRGSSSGAVDPSVQRS

SEQ ID NO: 15884 - protein, 70 aa, Synthetic construct
GTTFEHLWSSLEPDSTYFDLVGGTDSSMDVFHLEGMTTSVMAQFNLLSSTMDQMSSRAASASPYTPEHAA

SEQ ID NO: 15885 - protein, 70 aa, Synthetic construct
GTTFEHLWSSLEPDSTYFDLPQSSRSSMDVFHLEGMTTSVMAQFNLLSSTMDQMSSRAASASPYTPEHAA

SEQ ID NO: 15886 - protein, 70 aa, Synthetic construct
GTTFEHLWSSLEPDSTYFDLPQSSRGNNEVFHLEGMTTSVMAQFNLLSSTMDQMSSRAASASPYTPEHAA

SEQ ID NO: 15887 - protein, 70 aa, Synthetic construct
GTTFEHLWSSLEPDSTYFDLPQSSRGNNEVVGGTDSSMDVFHLEGLLSSTMDQMSSRAASASPYTPEHAA

SEQ ID NO: 15888 - protein, 70 aa, Synthetic construct
GTTFEHLWSSLEPDSTYFDLPQSSRGNNEVVGGTDSSMDVFHLEGMTTSVMAQFNLLSSTASPYTPEHAA

SEQ ID NO: 15889 - protein, 70 aa, Synthetic construct
GTTFEHLWSSLEPDSTYFDLPQSSRGNNEVVGGTDSSMDVFHLEGMTTSVMAQFNLLSSTMDQMSPEHAA

SEQ ID NO: 15890 - protein, 70 aa, Synthetic construct
GTTFEHLWSSLEPDSTYFDLPQSSRGNNEVVGGTDSSMDVFHLEGMTTSVMAQFNLLSSTMDQMSSRAAS

SEQ ID NO: 15891 - protein, 70 aa, Synthetic construct
CIEHVQPTSAFIQQPFIDEDPDKEKKIKELEMLLMSAENEVRRKRIPSQPGSFSSWSGSFLMDDNMSNTL

SEQ ID NO: 15892 - protein, 70 aa, Synthetic construct
GYQYVQPTSAFIQQPFIDEDPDKEKKIKELEMLLMSAENEVRRKRIPSQPGSFSSWSGSFLMDDNMSNTL

SEQ ID NO: 15893 - protein, 70 aa, Synthetic construct
GYQYVSPEGNFIQQPFIDEDPDKEKKIKELEMLLMSAENEVRRKRIPSQPGSFSSWSGSFLMDDNMSNTL

SEQ ID NO: 15894 - protein, 70 aa, Synthetic construct
GYQYVSPEGNCIEHVFIDEDPDKEKKIKELEMLLMSAENEVRRKRIPSQPGSFSSWSGSFLMDDNMSNTL

SEQ ID NO: 15895 - protein, 70 aa, Synthetic construct
GYQYVSPEGNCIEHVQPTSAPDKEKKIKELEMLLMSAENEVRRKRIPSQPGSFSSWSGSFLMDDNMSNTL

SEQ ID NO: 15896 - protein, 70 aa, Synthetic construct
GYQYVSPEGNCIEHVQPTSAFIQQPFIDEDPDKEKKIKELEMLLMIPSQPGSFSSWSGSFLMDDNMSNTL

SEQ ID NO: 15897 - protein, 70 aa, Synthetic construct
GYQYVSPEGNCIEHVQPTSAFIQQPFIDEDPDKEKKIKELEMLLMSAENEGSFSSWSGSFLMDDNMSNTL

SEQ ID NO: 15898 - protein, 70 aa, Synthetic construct
GYQYVSPEGNCIEHVQPTSAFIQQPFIDEDPDKEKKIKELEMLLMSAENEVRRKRWSGSFLMDDNMSNTL

SEQ ID NO: 15899 - protein, 70 aa, Synthetic construct
GYQYVSPEGNCIEHVQPTSAFIQQPFIDEDPDKEKKIKELEMLLMSAENEVRRKRIPSQPLMDDNMSNTL

SEQ ID NO: 15900 - protein, 70 aa, Synthetic construct
GYQYVSPEGNCIEHVQPTSAFIQQPFIDEDPDKEKKIKELEMLLMSAENEVRRKRIPSQPGSFSSMSNTL

SEQ ID NO: 15901 - protein, 70 aa, Synthetic construct
GYQYVSPEGNCIEHVQPTSAFIQQPFIDEDPDKEKKIKELEMLLMSAENEVRRKRIPSQPGSFSSWSGSF

SEQ ID NO: 15902 - protein, 70 aa, Synthetic construct
NSLDEHTSEFYSMDENQPVSAQQNSPTKFLAVEANAVLSSLQTIPEFAETLELIESDPVAWSDVTSFDIS

SEQ ID NO: 15903 - protein, 70 aa, Synthetic construct
LMDDNHTSEFYSMDENQPVSAQQNSPTKFLAVEANAVLSSLQTIPEFAETLELIESDPVAWSDVTSFDIS

SEQ ID NO: 15904 - protein, 70 aa, Synthetic construct
LMDDNMSNTLYSMDENQPVSAQQNSPTKFLAVEANAVLSSLQTIPEFAETLELIESDPVAWSDVTSFDIS

SEQ ID NO: 15905 - protein, 70 aa, Synthetic construct
LMDDNMSNTLNSLDENQPVSAQQNSPTKFLAVEANAVLSSLQTIPEFAETLELIESDPVAWSDVTSFDIS

SEQ ID NO: 15906 - protein, 70 aa, Synthetic construct
LMDDNMSNTLNSLDEHTSEFAQQNSPTKFLAVEANAVLSSLQTIPEFAETLELIESDPVAWSDVTSFDIS

SEQ ID NO: 15907 - protein, 70 aa, Synthetic construct
LMDDNMSNTLNSLDEHTSEFYSMDEPTKFLAVEANAVLSSLQTIPEFAETLELIESDPVAWSDVTSFDIS

SEQ ID NO: 15908 - protein, 70 aa, Synthetic construct
LMDDNMSNTLNSLDEHTSEFYSMDENQPVSAVEANAVLSSLQTIPEFAETLELIESDPVAWSDVTSFDIS

SEQ ID NO: 15909 - protein, 70 aa, Synthetic construct
LMDDNMSNTLNSLDEHTSEFYSMDENQPVSAQQNSAVLSSLQTIPEFAETLELIESDPVAWSDVTSFDIS

SEQ ID NO: 15910 - protein, 70 aa, Synthetic construct
LMDDNMSNTLNSLDEHTSEFYSMDENQPVSAQQNSPTKFLLQTIPEFAETLELIESDPVAWSDVTSFDIS

SEQ ID NO: 15911 - protein, 70 aa, Synthetic construct
LMDDNMSNTLNSLDEHTSEFYSMDENQPVSAQQNSPTKFLAVEANAVLSSLQTIPEFAETLELIESFDIS

SEQ ID NO: 15912 - protein, 70 aa, Synthetic construct
GSLPSGQDSFLGQLPLYQAGYDALRPFPASYGASSLPDKTYTSPCFYQQSNSVLACNRASYEYGASCFYS

SEQ ID NO: 15913 - protein, 70 aa, Synthetic construct
SSYFVGQDSFLGQLPLYQAGYDALRPFPASYGASSLPDKTYTSPCFYQQSNSVLACNRASYEYGASCFYS

SEQ ID NO: 15914 - protein, 70 aa, Synthetic construct
SSYFVNPTFPGSLPSGQDSFYDALRPFPASYGASSLPDKTYTSPCFYQQSNSVLACNRASYEYGASCFYS

SEQ ID NO: 15915 - protein, 70 aa, Synthetic construct
SSYFVNPTFPGSLPSGQDSFLGQLPPFPASYGASSLPDKTYTSPCFYQQSNSVLACNRASYEYGASCFYS

SEQ ID NO: 15916 - protein, 70 aa, Synthetic construct
SSYFVNPTFPGSLPSGQDSFLGQLPLYQAGYGASSLPDKTYTSPCFYQQSNSVLACNRASYEYGASCFYS

SEQ ID NO: 15917 - protein, 70 aa, Synthetic construct
SSYFVNPTFPGSLPSGQDSFLGQLPLYQAGYDALRLPDKTYTSPCFYQQSNSVLACNRASYEYGASCFYS

SEQ ID NO: 15918 - protein, 70 aa, Synthetic construct
SSYFVNPTFPGSLPSGQDSFLGQLPLYQAGYDALRPFPASYTSPCFYQQSNSVLACNRASYEYGASCFYS

SEQ ID NO: 15919 - protein, 70 aa, Synthetic construct
SSYFVNPTFPGSLPSGQDSFLGQLPLYQAGYDALRPFPASYGASSFYQQSNSVLACNRASYEYGASCFYS

SEQ ID NO: 15920 - protein, 70 aa, Synthetic construct
SSYFVNPTFPGSLPSGQDSFLGQLPLYQAGYDALRPFPASYGASSLPDKTNSVLACNRASYEYGASCFYS

SEQ ID NO: 15921 - protein, 70 aa, Synthetic construct
SSYFVNPTFPGSLPSGQDSFLGQLPLYQAGYDALRPFPASYGASSLPDKTYTSPCCNRASYEYGASCFYS

SEQ ID NO: 15922 - protein, 70 aa, Synthetic construct
SSYFVNPTFPGSLPSGQDSFLGQLPLYQAGYDALRPFPASYGASSLPDKTYTSPCFYQQSYEYGASCFYS

SEQ ID NO: 15923 - protein, 70 aa, Synthetic construct
SSYFVNPTFPGSLPSGQDSFLGQLPLYQAGYDALRPFPASYGASSLPDKTYTSPCFYQQSNSVLASCFYS

SEQ ID NO: 15924 - protein, 70 aa, Synthetic construct
PPFIIKSQPVSKPESRASTSTSVSGGRNTGARTLADIKARAQQARAQREAAAAAAVAAAASIVSGAMGSP

SEQ ID NO: 15925 - protein, 70 aa, Synthetic construct
PLKIQKSQPVSKPESRASTSTSVSGGRNTGARTLADIKARAQQARAQREAAAAAAVAAAASIVSGAMGSP

SEQ ID NO: 15926 - protein, 70 aa, Synthetic construct
PLKIQLSKIGSKPESRASTSTSVSGGRNTGARTLADIKARAQQARAQREAAAAAAVAAAASIVSGAMGSP

SEQ ID NO: 15927 - protein, 70 aa, Synthetic construct
PLKIQLSKIGPPFIIKSQPVTSVSGGRNTGARTLADIKARAQQARAQREAAAAAAVAAAASIVSGAMGSP

SEQ ID NO: 15928 - protein, 70 aa, Synthetic construct
PLKIQLSKIGPPFIIKSQPVSKPESRASTSARTLADIKARAQQARAQREAAAAAAVAAAASIVSGAMGSP

SEQ ID NO: 15929 - protein, 70 aa, Synthetic construct
PLKIQLSKIGPPFIIKSQPVSKPESRASTSTSVSGGRNTGARTLADIKARAQQARAQREAAAAAAAMGSP

SEQ ID NO: 15930 - protein, 70 aa, Synthetic construct
PLKIQLSKIGPPFIIKSQPVSKPESRASTSTSVSGGRNTGARTLADIKARAQQARAQREAAAAAAVAAAA

SEQ ID NO: 15931 - protein, 70 aa, Synthetic construct
PVSGDLTKEDIDLIDILWRQDIDLGAGREVFDYSHRQKEQDVEKELRDGGEQDTWAGEGAEALARNLLVD

SEQ ID NO: 15932 - protein, 70 aa, Synthetic construct
DLEDLLTKEDIDLIDILWRQDIDLGAGREVFDYSHRQKEQDVEKELRDGGEQDTWAGEGAEALARNLLVD

SEQ ID NO: 15933 - protein, 70 aa, Synthetic construct
DLEDLGAVAPIDLIDILWRQDIDLGAGREVFDYSHRQKEQDVEKELRDGGEQDTWAGEGAEALARNLLVD

SEQ ID NO: 15934 - protein, 70 aa, Synthetic construct
DLEDLGAVAPPVSGDLTKEDIDLIDILWRQFDYSHRQKEQDVEKELRDGGEQDTWAGEGAEALARNLLVD

SEQ ID NO: 15935 - protein, 70 aa, Synthetic construct
DLEDLGAVAPPVSGDLTKEDIDLIDILWRQDIDLGRQKEQDVEKELRDGGEQDTWAGEGAEALARNLLVD

SEQ ID NO: 15936 - protein, 70 aa, Synthetic construct
DLEDLGAVAPPVSGDLTKEDIDLIDILWRQDIDLGAGREVDVEKELRDGGEQDTWAGEGAEALARNLLVD

SEQ ID NO: 15937 - protein, 70 aa, Synthetic construct
DLEDLGAVAPPVSGDLTKEDIDLIDILWRQDIDLGAGREVFDYSHLRDGGEQDTWAGEGAEALARNLLVD

SEQ ID NO: 15938 - protein, 70 aa, Synthetic construct
DLEDLGAVAPPVSGDLTKEDIDLIDILWRQDIDLGAGREVFDYSHRQKEQEQDTWAGEGAEALARNLLVD

SEQ ID NO: 15939 - protein, 70 aa, Synthetic construct
DLEDLGAVAPPVSGDLTKEDIDLIDILWRQDIDLGAGREVFDYSHRQKEQDVEKELRDGGEALARNLLVD

SEQ ID NO: 15940 - protein, 70 aa, Synthetic construct
DLEDLGAVAPPVSGDLTKEDIDLIDILWRQDIDLGAGREVFDYSHRQKEQDVEKELRDGGEQDTWNLLVD

SEQ ID NO: 15941 - protein, 70 aa, Synthetic construct
DLEDLGAVAPPVSGDLTKEDIDLIDILWRQDIDLGAGREVFDYSHRQKEQDVEKELRDGGEQDTWAGEGA

SEQ ID NO: 15942 - protein, 70 aa, Synthetic construct
LQNNLLSPLLTGTESPFDLEQQWQDLMSIMEMQAMEVNTSASEILYSAPPGDPLSTNYSLAPNTPINQNV

SEQ ID NO: 15943 - protein, 70 aa, Synthetic construct
AVPSELSPLLTGTESPFDLEQQWQDLMSIMEMQAMEVNTSASEILYSAPPGDPLSTNYSLAPNTPINQNV

SEQ ID NO: 15944 - protein, 70 aa, Synthetic construct
AVPSESEPPATGTESPFDLEQQWQDLMSIMEMQAMEVNTSASEILYSAPPGDPLSTNYSLAPNTPINQNV

SEQ ID NO: 15945 - protein, 70 aa, Synthetic construct
AVPSESEPPALQNNLPFDLEQQWQDLMSIMEMQAMEVNTSASEILYSAPPGDPLSTNYSLAPNTPINQNV

SEQ ID NO: 15946 - protein, 70 aa, Synthetic construct
AVPSESEPPALQNNLLSPLLQQWQDLMSIMEMQAMEVNTSASEILYSAPPGDPLSTNYSLAPNTPINQNV

SEQ ID NO: 15947 - protein, 70 aa, Synthetic construct
AVPSESEPPALQNNLLSPLLTGTESPFDLEQQWQDLMSIMASEILYSAPPGDPLSTNYSLAPNTPINQNV

SEQ ID NO: 15948 - protein, 70 aa, Synthetic construct
AVPSESEPPALQNNLLSPLLTGTESPFDLEQQWQDLMSIMEMQAMYSAPPGDPLSTNYSLAPNTPINQNV

SEQ ID NO: 15949 - protein, 70 aa, Synthetic construct
AVPSESEPPALQNNLLSPLLTGTESPFDLEQQWQDLMSIMEMQAMEVNTSGDPLSTNYSLAPNTPINQNV

SEQ ID NO: 15950 - protein, 70 aa, Synthetic construct
AVPSESEPPALQNNLLSPLLTGTESPFDLEQQWQDLMSIMEMQAMEVNTSASEILTNYSLAPNTPINQNV

SEQ ID NO: 15951 - protein, 70 aa, Synthetic construct
AVPSESEPPALQNNLLSPLLTGTESPFDLEQQWQDLMSIMEMQAMEVNTSASEILYSAPPAPNTPINQNV

SEQ ID NO: 15952 - protein, 70 aa, Synthetic construct
AVPSESEPPALQNNLLSPLLTGTESPFDLEQQWQDLMSIMEMQAMEVNTSASEILYSAPPGDPLSINQNV

SEQ ID NO: 15953 - protein, 70 aa, Synthetic construct
AVPSESEPPALQNNLLSPLLTGTESPFDLEQQWQDLMSIMEMQAMEVNTSASEILYSAPPGDPLSTNYSL

SEQ ID NO: 15954 - protein, 70 aa, Synthetic construct
TLLPLAPSNSTSLNSTFGSTNLTGLFFPPQLNGTANDTAGPELPDPLGGLLDEAMLDEISLMDLAIEEGF

SEQ ID NO: 15955 - protein, 70 aa, Synthetic construct
VESLPAPSNSTSLNSTFGSTNLTGLFFPPQLNGTANDTAGPELPDPLGGLLDEAMLDEISLMDLAIEEGF

SEQ ID NO: 15956 - protein, 70 aa, Synthetic construct
VESLPVASSSTSLNSTFGSTNLTGLFFPPQLNGTANDTAGPELPDPLGGLLDEAMLDEISLMDLAIEEGF

SEQ ID NO: 15957 - protein, 70 aa, Synthetic construct
VESLPVASSSTLLPLTFGSTNLTGLFFPPQLNGTANDTAGPELPDPLGGLLDEAMLDEISLMDLAIEEGF

SEQ ID NO: 15958 - protein, 70 aa, Synthetic construct
VESLPVASSSTLLPLAPSNSNLTGLFFPPQLNGTANDTAGPELPDPLGGLLDEAMLDEISLMDLAIEEGF

SEQ ID NO: 15959 - protein, 70 aa, Synthetic construct
VESLPVASSSTLLPLAPSNSTSLNSFFPPQLNGTANDTAGPELPDPLGGLLDEAMLDEISLMDLAIEEGF

SEQ ID NO: 15960 - protein, 70 aa, Synthetic construct
VESLPVASSSTLLPLAPSNSTSLNSTFGSTLNGTANDTAGPELPDPLGGLLDEAMLDEISLMDLAIEEGF

SEQ ID NO: 15961 - protein, 70 aa, Synthetic construct
VESLPVASSSTLLPLAPSNSTSLNSTFGSTNLTGLNDTAGPELPDPLGGLLDEAMLDEISLMDLAIEEGF

SEQ ID NO: 15962 - protein, 70 aa, Synthetic construct
VESLPVASSSTLLPLAPSNSTSLNSTFGSTNLTGLFFPPQPELPDPLGGLLDEAMLDEISLMDLAIEEGF

SEQ ID NO: 15963 - protein, 70 aa, Synthetic construct
VESLPVASSSTLLPLAPSNSTSLNSTFGSTNLTGLFFPPQLNGTAPLGGLLDEAMLDEISLMDLAIEEGF

SEQ ID NO: 15964 - protein, 70 aa, Synthetic construct
VESLPVASSSTLLPLAPSNSTSLNSTFGSTNLTGLFFPPQLNGTANDTAGLDEAMLDEISLMDLAIEEGF

SEQ ID NO: 15965 - protein, 70 aa, Synthetic construct
VESLPVASSSTLLPLAPSNSTSLNSTFGSTNLTGLFFPPQLNGTANDTAGPELPDLDEISLMDLAIEEGF

SEQ ID NO: 15966 - protein, 70 aa, Synthetic construct
VESLPVASSSTLLPLAPSNSTSLNSTFGSTNLTGLFFPPQLNGTANDTAGPELPDPLGGLLMDLAIEEGF

SEQ ID NO: 15967 - protein, 70 aa, Synthetic construct
PEDLVQTRCEMEKYLTPQLPPVPIIPEHKKYRRDSASVVDQFFTDTEGLPYSINMNVFLPDITHLRTGLY

SEQ ID NO: 15968 - protein, 70 aa, Synthetic construct
QPPATGPRLPMEKYLTPQLPPVPIIPEHKKYRRDSASVVDQFFTDTEGLPYSINMNVFLPDITHLRTGLY

SEQ ID NO: 15969 - protein, 70 aa, Synthetic construct
QPPATGPRLPPEDLVQTRCEMEKYLTPQLPPVPIIASVVDQFFTDTEGLPYSINMNVFLPDITHLRTGLY

SEQ ID NO: 15970 - protein, 70 aa, Synthetic construct
QPPATGPRLPPEDLVQTRCEMEKYLTPQLPPVPIIPEHKKYRRDSTEGLPYSINMNVFLPDITHLRTGLY

SEQ ID NO: 15971 - protein, 70 aa, Synthetic construct
SIEGVRHVFSRACTIHLPKKPMVHMLWAAFEEQQGNINEARNILKTFEECVLGLAMVRLRRVSLERRHGN

SEQ ID NO: 15972 - protein, 70 aa, Synthetic construct
IKYAKYMENHSIEGVRHVFSRACTIHLPKKPMVHMNINEARNILKTFEECVLGLAMVRLRRVSLERRHGN

SEQ ID NO: 15973 - protein, 70 aa, Synthetic construct
NLSPLASPANLLQQTEDQIPSNLEGPFVNLLPPLLQEDYLLSLGEEEGISDLFDAYDLEKLPLVEDFMCS

SEQ ID NO: 15974 - protein, 70 aa, Synthetic construct
GHSDCASPANLLQQTEDQIPSNLEGPFVNLLPPLLQEDYLLSLGEEEGISDLFDAYDLEKLPLVEDFMCS

SEQ ID NO: 15975 - protein, 70 aa, Synthetic construct
GHSDCSVSMGLLQQTEDQIPSNLEGPFVNLLPPLLQEDYLLSLGEEEGISDLFDAYDLEKLPLVEDFMCS

SEQ ID NO: 15976 - protein, 70 aa, Synthetic construct
GHSDCSVSMGNLSPLEDQIPSNLEGPFVNLLPPLLQEDYLLSLGEEEGISDLFDAYDLEKLPLVEDFMCS

SEQ ID NO: 15977 - protein, 70 aa, Synthetic construct
GHSDCSVSMGNLSPLASPANSNLEGPFVNLLPPLLQEDYLLSLGEEEGISDLFDAYDLEKLPLVEDFMCS

SEQ ID NO: 15978 - protein, 70 aa, Synthetic construct
GHSDCSVSMGNLSPLASPANLLQQTPFVNLLPPLLQEDYLLSLGEEEGISDLFDAYDLEKLPLVEDFMCS

SEQ ID NO: 15979 - protein, 70 aa, Synthetic construct
GHSDCSVSMGNLSPLASPANLLQQTEDQIPLPPLLQEDYLLSLGEEEGISDLFDAYDLEKLPLVEDFMCS

SEQ ID NO: 15980 - protein, 70 aa, Synthetic construct
GHSDCSVSMGNLSPLASPANLLQQTEDQIPSNLEGQEDYLLSLGEEEGISDLFDAYDLEKLPLVEDFMCS

SEQ ID NO: 15981 - protein, 70 aa, Synthetic construct
GHSDCSVSMGNLSPLASPANLLQQTEDQIPSNLEGPFVNLLSLGEEEGISDLFDAYDLEKLPLVEDFMCS

SEQ ID NO: 15982 - protein, 70 aa, Synthetic construct
GHSDCSVSMGNLSPLASPANLLQQTEDQIPSNLEGPFVNLLPPLLEEGISDLFDAYDLEKLPLVEDFMCS

SEQ ID NO: 15983 - protein, 70 aa, Synthetic construct
GHSDCSVSMGNLSPLASPANLLQQTEDQIPSNLEGPFVNLLPPLLQEDYLDLFDAYDLEKLPLVEDFMCS

SEQ ID NO: 15984 - protein, 70 aa, Synthetic construct
GHSDCSVSMGNLSPLASPANLLQQTEDQIPSNLEGPFVNLLPPLLQEDYLLSLGEYDLEKLPLVEDFMCS

SEQ ID NO: 15985 - protein, 70 aa, Synthetic construct
GHSDCSVSMGNLSPLASPANLLQQTEDQIPSNLEGPFVNLLPPLLQEDYLLSLGEEEGISLPLVEDFMCS

SEQ ID NO: 15986 - protein, 70 aa, Synthetic construct
GHSDCSVSMGNLSPLASPANLLQQTEDQIPSNLEGPFVNLLPPLLQEDYLLSLGEEEGISDLFDADFMCS

SEQ ID NO: 15987 - protein, 70 aa, Synthetic construct
GHSDCSVSMGNLSPLASPANLLQQTEDQIPSNLEGPFVNLLPPLLQEDYLLSLGEEEGISDLFDAYDLEK

SEQ ID NO: 15988 - protein, 70 aa, Synthetic construct
SRPTEFAFYPGYPGTYQPMASYLDVSVVQTLGAPGEPRHDSLLPVDSYQSWALAGGWNSQMCCQGEQNPP

SEQ ID NO: 15989 - protein, 70 aa, Synthetic construct
ETPTAFAFYPGYPGTYQPMASYLDVSVVQTLGAPGEPRHDSLLPVDSYQSWALAGGWNSQMCCQGEQNPP

SEQ ID NO: 15990 - protein, 70 aa, Synthetic construct
ETPTAGEEYPSRPTEFAFYPSYLDVSVVQTLGAPGEPRHDSLLPVDSYQSWALAGGWNSQMCCQGEQNPP

SEQ ID NO: 15991 - protein, 70 aa, Synthetic construct
ETPTAGEEYPSRPTEFAFYPGYPGTYQPMALGAPGEPRHDSLLPVDSYQSWALAGGWNSQMCCQGEQNPP

SEQ ID NO: 15992 - protein, 70 aa, Synthetic construct
ETPTAGEEYPSRPTEFAFYPGYPGTYQPMASYLDVEPRHDSLLPVDSYQSWALAGGWNSQMCCQGEQNPP

SEQ ID NO: 15993 - protein, 70 aa, Synthetic construct
ETPTAGEEYPSRPTEFAFYPGYPGTYQPMASYLDVSVVQTSLLPVDSYQSWALAGGWNSQMCCQGEQNPP

SEQ ID NO: 15994 - protein, 70 aa, Synthetic construct
ETPTAGEEYPSRPTEFAFYPGYPGTYQPMASYLDVSVVQTLGAPGDSYQSWALAGGWNSQMCCQGEQNPP

SEQ ID NO: 15995 - protein, 70 aa, Synthetic construct
ETPTAGEEYPSRPTEFAFYPGYPGTYQPMASYLDVSVVQTLGAPGEPRHDSLLPVDSYQSWALAGGWNSQ

SEQ ID NO: 15996 - protein, 70 aa, Synthetic construct
LLAFLLEESGDLGTAPDEAVRAPLDWALPLSEVPSDWEVDDLLCSLLSPPASLNILSSSNPCLVHHDHTY

SEQ ID NO: 15997 - protein, 70 aa, Synthetic construct
ELELDLEESGDLGTAPDEAVRAPLDWALPLSEVPSDWEVDDLLCSLLSPPASLNILSSSNPCLVHHDHTY

SEQ ID NO: 15998 - protein, 70 aa, Synthetic construct
ELELDAGDQDDLGTAPDEAVRAPLDWALPLSEVPSDWEVDDLLCSLLSPPASLNILSSSNPCLVHHDHTY

SEQ ID NO: 15999 - protein, 70 aa, Synthetic construct
ELELDAGDQDLLAFLPDEAVRAPLDWALPLSEVPSDWEVDDLLCSLLSPPASLNILSSSNPCLVHHDHTY

SEQ ID NO: 16000 - protein, 70 aa, Synthetic construct
ELELDAGDQDLLAFLLEESGRAPLDWALPLSEVPSDWEVDDLLCSLLSPPASLNILSSSNPCLVHHDHTY

SEQ ID NO: 16001 - protein, 70 aa, Synthetic construct
ELELDAGDQDLLAFLLEESGDLGTAWALPLSEVPSDWEVDDLLCSLLSPPASLNILSSSNPCLVHHDHTY

SEQ ID NO: 16002 - protein, 70 aa, Synthetic construct
ELELDAGDQDLLAFLLEESGDLGTAPDEAVSEVPSDWEVDDLLCSLLSPPASLNILSSSNPCLVHHDHTY

SEQ ID NO: 16003 - protein, 70 aa, Synthetic construct
ELELDAGDQDLLAFLLEESGDLGTAPDEAVRAPLDDWEVDDLLCSLLSPPASLNILSSSNPCLVHHDHTY

SEQ ID NO: 16004 - protein, 70 aa, Synthetic construct
ELELDAGDQDLLAFLLEESGDLGTAPDEAVRAPLDWALPLDLLCSLLSPPASLNILSSSNPCLVHHDHTY

SEQ ID NO: 16005 - protein, 70 aa, Synthetic construct
ELELDAGDQDLLAFLLEESGDLGTAPDEAVRAPLDWALPLSEVPSLLSPPASLNILSSSNPCLVHHDHTY

SEQ ID NO: 16006 - protein, 70 aa, Synthetic construct
ELELDAGDQDLLAFLLEESGDLGTAPDEAVRAPLDWALPLSEVPSDWEVDASLNILSSSNPCLVHHDHTY

SEQ ID NO: 16007 - protein, 70 aa, Synthetic construct
ELELDAGDQDLLAFLLEESGDLGTAPDEAVRAPLDWALPLSEVPSDWEVDDLLCSLSSSNPCLVHHDHTY

SEQ ID NO: 16008 - protein, 70 aa, Synthetic construct
ELELDAGDQDLLAFLLEESGDLGTAPDEAVRAPLDWALPLSEVPSDWEVDDLLCSLLSPPPCLVHHDHTY

SEQ ID NO: 16009 - protein, 70 aa, Synthetic construct
ELELDAGDQDLLAFLLEESGDLGTAPDEAVRAPLDWALPLSEVPSDWEVDDLLCSLLSPPASLNIHDHTY

SEQ ID NO: 16010 - protein, 70 aa, Synthetic construct
ELELDAGDQDLLAFLLEESGDLGTAPDEAVRAPLDWALPLSEVPSDWEVDDLLCSLLSPPASLNILSSSN

SEQ ID NO: 16011 - protein, 70 aa, Synthetic construct
LQNKVQLLEEQNLSLLDQLRKLQAMVIEISNKTSSSSTCILVLLVSFCLLLVPAMYSSDTRGSLPAEHGV

SEQ ID NO: 16012 - protein, 70 aa, Synthetic construct
VLKYTQLLEEQNLSLLDQLRKLQAMVIEISNKTSSSSTCILVLLVSFCLLLVPAMYSSDTRGSLPAEHGV

SEQ ID NO: 16013 - protein, 70 aa, Synthetic construct
VLKYTAQNMEQNLSLLDQLRKLQAMVIEISNKTSSSSTCILVLLVSFCLLLVPAMYSSDTRGSLPAEHGV

SEQ ID NO: 16014 - protein, 70 aa, Synthetic construct
VLKYTAQNMELQNKVQLLEEKLQAMVIEISNKTSSSSTCILVLLVSFCLLLVPAMYSSDTRGSLPAEHGV

SEQ ID NO: 16015 - protein, 70 aa, Synthetic construct
VLKYTAQNMELQNKVQLLEEQNLSLVIEISNKTSSSSTCILVLLVSFCLLLVPAMYSSDTRGSLPAEHGV

SEQ ID NO: 16016 - protein, 70 aa, Synthetic construct
VLKYTAQNMELQNKVQLLEEQNLSLLDQLRNKTSSSSTCILVLLVSFCLLLVPAMYSSDTRGSLPAEHGV

SEQ ID NO: 16017 - protein, 70 aa, Synthetic construct
VLKYTAQNMELQNKVQLLEEQNLSLLDQLRKLQAMVIEISLVLLVSFCLLLVPAMYSSDTRGSLPAEHGV

SEQ ID NO: 16018 - protein, 70 aa, Synthetic construct
VLKYTAQNMELQNKVQLLEEQNLSLLDQLRKLQAMVIEISNKTSSSSTCILVLLVYSSDTRGSLPAEHGV

SEQ ID NO: 16019 - protein, 70 aa, Synthetic construct
VLKYTAQNMELQNKVQLLEEQNLSLLDQLRKLQAMVIEISNKTSSSSTCILVLLVSFCLLLVPAMAEHGV

SEQ ID NO: 16020 - protein, 70 aa, Synthetic construct
VLKYTAQNMELQNKVQLLEEQNLSLLDQLRKLQAMVIEISNKTSSSSTCILVLLVSFCLLLVPAMYSSDT

SEQ ID NO: 16021 - protein, 70 aa, Synthetic construct
EDPYQLELPALQSEVPKDSTHQWLDGSDCVLQAPGNTSCLLHYMPQAPSAEPPLEWPFPDLFSEPLCRGP

SEQ ID NO: 16022 - protein, 70 aa, Synthetic construct
LSRQLLELPALQSEVPKDSTHQWLDGSDCVLQAPGNTSCLLHYMPQAPSAEPPLEWPFPDLFSEPLCRGP

SEQ ID NO: 16023 - protein, 70 aa, Synthetic construct
LSRQLRALPSLQSEVPKDSTHQWLDGSDCVLQAPGNTSCLLHYMPQAPSAEPPLEWPFPDLFSEPLCRGP

SEQ ID NO: 16024 - protein, 70 aa, Synthetic construct
LSRQLRALPSEDPYQPKDSTHQWLDGSDCVLQAPGNTSCLLHYMPQAPSAEPPLEWPFPDLFSEPLCRGP

SEQ ID NO: 16025 - protein, 70 aa, Synthetic construct
LSRQLRALPSEDPYQLELPAHQWLDGSDCVLQAPGNTSCLLHYMPQAPSAEPPLEWPFPDLFSEPLCRGP

SEQ ID NO: 16026 - protein, 70 aa, Synthetic construct
LSRQLRALPSEDPYQLELPALQSEVGSDCVLQAPGNTSCLLHYMPQAPSAEPPLEWPFPDLFSEPLCRGP

SEQ ID NO: 16027 - protein, 70 aa, Synthetic construct
LSRQLRALPSEDPYQLELPALQSEVPKDSTLQAPGNTSCLLHYMPQAPSAEPPLEWPFPDLFSEPLCRGP

SEQ ID NO: 16028 - protein, 70 aa, Synthetic construct
LSRQLRALPSEDPYQLELPALQSEVPKDSTHQWLDNTSCLLHYMPQAPSAEPPLEWPFPDLFSEPLCRGP

SEQ ID NO: 16029 - protein, 70 aa, Synthetic construct
LSRQLRALPSEDPYQLELPALQSEVPKDSTHQWLDGSDCVLHYMPQAPSAEPPLEWPFPDLFSEPLCRGP

SEQ ID NO: 16030 - protein, 70 aa, Synthetic construct
LSRQLRALPSEDPYQLELPALQSEVPKDSTHQWLDGSDCVLQAPGQAPSAEPPLEWPFPDLFSEPLCRGP

SEQ ID NO: 16031 - protein, 70 aa, Synthetic construct
LSRQLRALPSEDPYQLELPALQSEVPKDSTHQWLDGSDCVLQAPGNTSCLEPPLEWPFPDLFSEPLCRGP

SEQ ID NO: 16032 - protein, 70 aa, Synthetic construct
LSRQLRALPSEDPYQLELPALQSEVPKDSTHQWLDGSDCVLQAPGNTSCLLHYMPWPFPDLFSEPLCRGP

SEQ ID NO: 16033 - protein, 70 aa, Synthetic construct
TLSDSLSGSSLYSTSANLPVMGHEKFPSDLDLDMFNGSLECDMESIIRSELMDADGLDFNFDSLISTQNV

SEQ ID NO: 16034 - protein, 70 aa, Synthetic construct
QQSPVLSGSSLYSTSANLPVMGHEKFPSDLDLDMFNGSLECDMESIIRSELMDADGLDFNFDSLISTQNV

SEQ ID NO: 16035 - protein, 70 aa, Synthetic construct
QQSPVSQSMQLYSTSANLPVMGHEKFPSDLDLDMFNGSLECDMESIIRSELMDADGLDFNFDSLISTQNV

SEQ ID NO: 16036 - protein, 70 aa, Synthetic construct
QQSPVSQSMQTLSDSANLPVMGHEKFPSDLDLDMFNGSLECDMESIIRSELMDADGLDFNFDSLISTQNV

SEQ ID NO: 16037 - protein, 70 aa, Synthetic construct
QQSPVSQSMQTLSDSLSGSSMGHEKFPSDLDLDMFNGSLECDMESIIRSELMDADGLDFNFDSLISTQNV

SEQ ID NO: 16038 - protein, 70 aa, Synthetic construct
QQSPVSQSMQTLSDSLSGSSLYSTSFPSDLDLDMFNGSLECDMESIIRSELMDADGLDFNFDSLISTQNV

SEQ ID NO: 16039 - protein, 70 aa, Synthetic construct
QQSPVSQSMQTLSDSLSGSSLYSTSANLPVDLDMFNGSLECDMESIIRSELMDADGLDFNFDSLISTQNV

SEQ ID NO: 16040 - protein, 70 aa, Synthetic construct
QQSPVSQSMQTLSDSLSGSSLYSTSANLPVMGHEKFPSDLCDMESIIRSELMDADGLDFNFDSLISTQNV

SEQ ID NO: 16041 - protein, 70 aa, Synthetic construct
QQSPVSQSMQTLSDSLSGSSLYSTSANLPVMGHEKFPSDLDLDMFNGSLELMDADGLDFNFDSLISTQNV

SEQ ID NO: 16042 - protein, 70 aa, Synthetic construct
QQSPVSQSMQTLSDSLSGSSLYSTSANLPVMGHEKFPSDLDLDMFNGSLECDMESGLDFNFDSLISTQNV

SEQ ID NO: 16043 - protein, 70 aa, Synthetic construct
QQSPVSQSMQTLSDSLSGSSLYSTSANLPVMGHEKFPSDLDLDMFNGSLECDMESIIRSEFDSLISTQNV

SEQ ID NO: 16044 - protein, 70 aa, Synthetic construct
QQSPVSQSMQTLSDSLSGSSLYSTSANLPVMGHEKFPSDLDLDMFNGSLECDMESIIRSELMDADGLDFN

SEQ ID NO: 16045 - protein, 70 aa, Synthetic construct
EKKNSVVEASEAAYKQPTHPIRLGLALNFSVFYYEIQNAPEQACLLAKQAFDDAIAELDTLNEDSYKDST

SEQ ID NO: 16046 - protein, 70 aa, Synthetic construct
EKKNSVVEASEAAYKEAFEISKEQMQPTHPIRLGLALNFSVFYYELAKQAFDDAIAELDTLNEDSYKDST

SEQ ID NO: 16047 - protein, 70 aa, Synthetic construct
PVALHVNIVNVPQPAAAAIQRHYNDEDPEKEKRIKELELLLMSTENELKGQQVLPTQNHTCSYPGWHSTT

SEQ ID NO: 16048 - protein, 70 aa, Synthetic construct
AQNVSVNIVNVPQPAAAAIQRHYNDEDPEKEKRIKELELLLMSTENELKGQQVLPTQNHTCSYPGWHSTT

SEQ ID NO: 16049 - protein, 70 aa, Synthetic construct
AQNVSSHVPYVPQPAAAAIQRHYNDEDPEKEKRIKELELLLMSTENELKGQQVLPTQNHTCSYPGWHSTT

SEQ ID NO: 16050 - protein, 70 aa, Synthetic construct
AQNVSSHVPYPVALHAAAIQRHYNDEDPEKEKRIKELELLLMSTENELKGQQVLPTQNHTCSYPGWHSTT

SEQ ID NO: 16051 - protein, 70 aa, Synthetic construct
AQNVSSHVPYPVALHVNIVNRHYNDEDPEKEKRIKELELLLMSTENELKGQQVLPTQNHTCSYPGWHSTT

SEQ ID NO: 16052 - protein, 70 aa, Synthetic construct
AQNVSSHVPYPVALHVNIVNVPQPAEDPEKEKRIKELELLLMSTENELKGQQVLPTQNHTCSYPGWHSTT

SEQ ID NO: 16053 - protein, 70 aa, Synthetic construct
AQNVSSHVPYPVALHVNIVNVPQPAAAAIQEKRIKELELLLMSTENELKGQQVLPTQNHTCSYPGWHSTT

SEQ ID NO: 16054 - protein, 70 aa, Synthetic construct
AQNVSSHVPYPVALHVNIVNVPQPAAAAIQRHYNDEDPEKEKRIKELELLLMSTETQNHTCSYPGWHSTT

SEQ ID NO: 16055 - protein, 70 aa, Synthetic construct
AQNVSSHVPYPVALHVNIVNVPQPAAAAIQRHYNDEDPEKEKRIKELELLLMSTENELKGCSYPGWHSTT

SEQ ID NO: 16056 - protein, 70 aa, Synthetic construct
AQNVSSHVPYPVALHVNIVNVPQPAAAAIQRHYNDEDPEKEKRIKELELLLMSTENELKGQQVLPWHSTT

SEQ ID NO: 16057 - protein, 70 aa, Synthetic construct
AQNVSSHVPYPVALHVNIVNVPQPAAAAIQRHYNDEDPEKEKRIKELELLLMSTENELKGQQVLPTQNHT

SEQ ID NO: 16058 - protein, 70 aa, Synthetic construct
SVANSTVAYSSSSPLTYSTTGTEFASPYFSTNHQYTPLHHQSFHYEFQHSHPAVTPDAYSLNSLHHSQQY

SEQ ID NO: 16059 - protein, 70 aa, Synthetic construct
YRLMQTVAYSSSSPLTYSTTGTEFASPYFSTNHQYTPLHHQSFHYEFQHSHPAVTPDAYSLNSLHHSQQY

SEQ ID NO: 16060 - protein, 70 aa, Synthetic construct
YRLMQLGCLESSSPLTYSTTGTEFASPYFSTNHQYTPLHHQSFHYEFQHSHPAVTPDAYSLNSLHHSQQY

SEQ ID NO: 16061 - protein, 70 aa, Synthetic construct
YRLMQLGCLESVANSTYSTTGTEFASPYFSTNHQYTPLHHQSFHYEFQHSHPAVTPDAYSLNSLHHSQQY

SEQ ID NO: 16062 - protein, 70 aa, Synthetic construct
YRLMQLGCLESVANSTVAYSGTEFASPYFSTNHQYTPLHHQSFHYEFQHSHPAVTPDAYSLNSLHHSQQY

SEQ ID NO: 16063 - protein, 70 aa, Synthetic construct
YRLMQLGCLESVANSTVAYSSSSPLSPYFSTNHQYTPLHHQSFHYEFQHSHPAVTPDAYSLNSLHHSQQY

SEQ ID NO: 16064 - protein, 70 aa, Synthetic construct
YRLMQLGCLESVANSTVAYSSSSPLTYSTTTNHQYTPLHHQSFHYEFQHSHPAVTPDAYSLNSLHHSQQY

SEQ ID NO: 16065 - protein, 70 aa, Synthetic construct
YRLMQLGCLESVANSTVAYSSSSPLTYSTTGTEFASPYFSQSFHYEFQHSHPAVTPDAYSLNSLHHSQQY

SEQ ID NO: 16066 - protein, 70 aa, Synthetic construct
YRLMQLGCLESVANSTVAYSSSSPLTYSTTGTEFASPYFSTNHQYEFQHSHPAVTPDAYSLNSLHHSQQY

SEQ ID NO: 16067 - protein, 70 aa, Synthetic construct
YRLMQLGCLESVANSTVAYSSSSPLTYSTTGTEFASPYFSTNHQYTPLHHHPAVTPDAYSLNSLHHSQQY

SEQ ID NO: 16068 - protein, 70 aa, Synthetic construct
YRLMQLGCLESVANSTVAYSSSSPLTYSTTGTEFASPYFSTNHQYTPLHHQSFHYPDAYSLNSLHHSQQY

SEQ ID NO: 16069 - protein, 70 aa, Synthetic construct
YRLMQLGCLESVANSTVAYSSSSPLTYSTTGTEFASPYFSTNHQYTPLHHQSFHYEFQHSLNSLHHSQQY

SEQ ID NO: 16070 - protein, 70 aa, Synthetic construct
YRLMQLGCLESVANSTVAYSSSSPLTYSTTGTEFASPYFSTNHQYTPLHHQSFHYEFQHSHPAVTHSQQY

SEQ ID NO: 16071 - protein, 70 aa, Synthetic construct
YRLMQLGCLESVANSTVAYSSSSPLTYSTTGTEFASPYFSTNHQYTPLHHQSFHYEFQHSHPAVTPDAYS

SEQ ID NO: 16072 - protein, 70 aa, Synthetic construct
TARKKMILATKQICKEFQDLLSQDRSPLGSIQRHLTHFSLITHGFGTPAICAALSTFQTVLSEMLNYLEK

SEQ ID NO: 16073 - protein, 70 aa, Synthetic construct
TARKKMILATKQICKEFQDLLSQDRSPLGSSRPTPILDLDIQRHLTHFSLCAALSTFQTVLSEMLNYLEK

SEQ ID NO: 16074 - protein, 70 aa, Synthetic construct
TARKKMILATKQICKEFQDLLSQDRSPLGSSRPTPILDLDIQRHLTHFSLITHGFGTPAICAALSNYLEK

SEQ ID NO: 16075 - protein, 70 aa, Synthetic construct
SFSLPDDWDNTGRSCIPLHGVSPEVNELLMEAQLLQVSLPEIQELYQTLLAKPSPAQQTDRSSPVRPSSE

SEQ ID NO: 16076 - protein, 70 aa, Synthetic construct
SFSLPDDWDNRTSYLHSPFSVSPEVNELLMEAQLLQVSLPEIQELYQTLLAKPSPAQQTDRSSPVRPSSE

SEQ ID NO: 16077 - protein, 70 aa, Synthetic construct
SFSLPDDWDNRTSYLHSPFSTGRSCIPLHGVSPEVNELLMEIQELYQTLLAKPSPAQQTDRSSPVRPSSE

SEQ ID NO: 16078 - protein, 70 aa, Synthetic construct
SFSLPDDWDNRTSYLHSPFSTGRSCIPLHGVSPEVNELLMEAQLLQVSLPEIQELYQTLLRSSPVRPSSE

SEQ ID NO: 16079 - protein, 70 aa, Synthetic construct
SFSLPDDWDNRTSYLHSPFSTGRSCIPLHGVSPEVNELLMEAQLLQVSLPEIQELYQTLLAKPSPAQQTD

SEQ ID NO: 16080 - protein, 70 aa, Synthetic construct
QDIEQVWEELLSIPELQCLNIENDKLVETTMVPSPEAKLTEVDNYHFYSSIPSMEKEVGNCSPHFLNAFE

SEQ ID NO: 16081 - protein, 70 aa, Synthetic construct
VAPVDVWEELLSIPELQCLNIENDKLVETTMVPSPEAKLTEVDNYHFYSSIPSMEKEVGNCSPHFLNAFE

SEQ ID NO: 16082 - protein, 70 aa, Synthetic construct
VAPVDLDGMQQDIEQVWEELLSIPELVETTMVPSPEAKLTEVDNYHFYSSIPSMEKEVGNCSPHFLNAFE

SEQ ID NO: 16083 - protein, 70 aa, Synthetic construct
VAPVDLDGMQQDIEQVWEELLSIPELQCLNMVPSPEAKLTEVDNYHFYSSIPSMEKEVGNCSPHFLNAFE

SEQ ID NO: 16084 - protein, 70 aa, Synthetic construct
VAPVDLDGMQQDIEQVWEELLSIPELQCLNIENDKEAKLTEVDNYHFYSSIPSMEKEVGNCSPHFLNAFE

SEQ ID NO: 16085 - protein, 70 aa, Synthetic construct
VAPVDLDGMQQDIEQVWEELLSIPELQCLNIENDKLVETTEVDNYHFYSSIPSMEKEVGNCSPHFLNAFE

SEQ ID NO: 16086 - protein, 70 aa, Synthetic construct
VAPVDLDGMQQDIEQVWEELLSIPELQCLNIENDKLVETTMVPSPHFYSSIPSMEKEVGNCSPHFLNAFE

SEQ ID NO: 16087 - protein, 70 aa, Synthetic construct
VAPVDLDGMQQDIEQVWEELLSIPELQCLNIENDKLVETTMVPSPEAKLTIPSMEKEVGNCSPHFLNAFE

SEQ ID NO: 16088 - protein, 70 aa, Synthetic construct
VAPVDLDGMQQDIEQVWEELLSIPELQCLNIENDKLVETTMVPSPEAKLTEVDNYKEVGNCSPHFLNAFE

SEQ ID NO: 16089 - protein, 70 aa, Synthetic construct
VAPVDLDGMQQDIEQVWEELLSIPELQCLNIENDKLVETTMVPSPEAKLTEVDNYHFYSSCSPHFLNAFE

SEQ ID NO: 16090 - protein, 70 aa, Synthetic construct
VAPVDLDGMQQDIEQVWEELLSIPELQCLNIENDKLVETTMVPSPEAKLTEVDNYHFYSSIPSMELNAFE

SEQ ID NO: 16091 - protein, 70 aa, Synthetic construct
VAPVDLDGMQQDIEQVWEELLSIPELQCLNIENDKLVETTMVPSPEAKLTEVDNYHFYSSIPSMEKEVGN

SEQ ID NO: 16092 - protein, 70 aa, Synthetic construct
EVDNYHFYSSIPSMEKEVGNCSPHFLNAFEDSFSSILSTEDPNQLTVNSLNSDATVNTDFGDEFYSAFIA

SEQ ID NO: 16093 - protein, 70 aa, Synthetic construct
MVPSPHFYSSIPSMEKEVGNCSPHFLNAFEDSFSSILSTEDPNQLTVNSLNSDATVNTDFGDEFYSAFIA

SEQ ID NO: 16094 - protein, 70 aa, Synthetic construct
MVPSPEAKLTIPSMEKEVGNCSPHFLNAFEDSFSSILSTEDPNQLTVNSLNSDATVNTDFGDEFYSAFIA

SEQ ID NO: 16095 - protein, 70 aa, Synthetic construct
MVPSPEAKLTEVDNYKEVGNCSPHFLNAFEDSFSSILSTEDPNQLTVNSLNSDATVNTDFGDEFYSAFIA

SEQ ID NO: 16096 - protein, 70 aa, Synthetic construct
MVPSPEAKLTEVDNYHFYSSCSPHFLNAFEDSFSSILSTEDPNQLTVNSLNSDATVNTDFGDEFYSAFIA

SEQ ID NO: 16097 - protein, 70 aa, Synthetic construct
MVPSPEAKLTEVDNYHFYSSIPSMELNAFEDSFSSILSTEDPNQLTVNSLNSDATVNTDFGDEFYSAFIA

SEQ ID NO: 16098 - protein, 70 aa, Synthetic construct
MVPSPEAKLTEVDNYHFYSSIPSMEKEVGNCSPHFLNAFEDPNQLTVNSLNSDATVNTDFGDEFYSAFIA

SEQ ID NO: 16099 - protein, 70 aa, Synthetic construct
MVPSPEAKLTEVDNYHFYSSIPSMEKEVGNCSPHFLNAFEDSFSSTVNSLNSDATVNTDFGDEFYSAFIA

SEQ ID NO: 16100 - protein, 70 aa, Synthetic construct
MVPSPEAKLTEVDNYHFYSSIPSMEKEVGNCSPHFLNAFEDSFSSILSTENSDATVNTDFGDEFYSAFIA

SEQ ID NO: 16101 - protein, 70 aa, Synthetic construct
MVPSPEAKLTEVDNYHFYSSIPSMEKEVGNCSPHFLNAFEDSFSSILSTEDPNQLVNTDFGDEFYSAFIA

SEQ ID NO: 16102 - protein, 70 aa, Synthetic construct
MVPSPEAKLTEVDNYHFYSSIPSMEKEVGNCSPHFLNAFEDSFSSILSTEDPNQLTVNSLGDEFYSAFIA

SEQ ID NO: 16103 - protein, 70 aa, Synthetic construct
PAVPPPTKVVAPPSSSDSSSDSSSDSDSSTDDSEEERAQRLAELQEQLKAVHEQLAALSQPQQNKPKKKE

SEQ ID NO: 16104 - protein, 70 aa, Synthetic construct
PEEPVPTKVVAPPSSSDSSSDSSSDSDSSTDDSEEERAQRLAELQEQLKAVHEQLAALSQPQQNKPKKKE

SEQ ID NO: 16105 - protein, 70 aa, Synthetic construct
PEEPVVAVSSAPPSSSDSSSDSSSDSDSSTDDSEEERAQRLAELQEQLKAVHEQLAALSQPQQNKPKKKE

SEQ ID NO: 16106 - protein, 70 aa, Synthetic construct
PEEPVVAVSSPAVPPSDSSSDSSSDSDSSTDDSEEERAQRLAELQEQLKAVHEQLAALSQPQQNKPKKKE

SEQ ID NO: 16107 - protein, 70 aa, Synthetic construct
PEEPVVAVSSPAVPPPTKVVDSSSDSDSSTDDSEEERAQRLAELQEQLKAVHEQLAALSQPQQNKPKKKE

SEQ ID NO: 16108 - protein, 70 aa, Synthetic construct
PEEPVVAVSSPAVPPPTKVVAPPSSSDSSSDSSSDSDSSTLAELQEQLKAVHEQLAALSQPQQNKPKKKE

SEQ ID NO: 16109 - protein, 70 aa, Synthetic construct
PEEPVVAVSSPAVPPPTKVVAPPSSSDSSSDSSSDSDSSTDDSEEERAQRLAELQEQLKAVHEQLAALSQ

SEQ ID NO: 16110 - protein, 70 aa, Synthetic construct
LTLEDLVGPQMFMDCSPQALPIASEDTTGQHDHHFLDPNCHICKDWEPSNELLGSFEAAKSCGDNIFQKA

SEQ ID NO: 16111 - protein, 70 aa, Synthetic construct
VEIQRDMDQTLTLEDLVGPQMFMDCDTTGQHDHHFLDPNCHICKDWEPSNELLGSFEAAKSCGDNIFQKA

SEQ ID NO: 16112 - protein, 70 aa, Synthetic construct
VEIQRDMDQTLTLEDLVGPQMFMDCSPQALHDHHFLDPNCHICKDWEPSNELLGSFEAAKSCGDNIFQKA

SEQ ID NO: 16113 - protein, 70 aa, Synthetic construct
VEIQRDMDQTLTLEDLVGPQMFMDCSPQALPIASEDTTGQHDHHFWEPSNELLGSFEAAKSCGDNIFQKA

SEQ ID NO: 16114 - protein, 70 aa, Synthetic construct
VEIQRDMDQTLTLEDLVGPQMFMDCSPQALPIASEDTTGQHDHHFLDPNCHICKDWEPSNELLGSIFQKA

SEQ ID NO: 16115 - protein, 70 aa, Synthetic construct
VEIQRDMDQTLTLEDLVGPQMFMDCSPQALPIASEDTTGQHDHHFLDPNCHICKDWEPSNELLGSFEAAK

SEQ ID NO: 16116 - protein, 70 aa, Synthetic construct
LQEHFSNQDLVFLLLTPSIITESCSPQKGLFHRVPLVVANLGMSEQLGYKTVSGSCMSTGFSRAVQTHSS

SEQ ID NO: 16117 - protein, 70 aa, Synthetic construct
AGADPLVENFEPLYDLDDSWENAGEDEGVVPGTTPLDMATSWQVFDILNGKPYEPEFTSDDLLAQGDMKQ

SEQ ID NO: 16118 - protein, 70 aa, Synthetic construct
STRLALVENFEPLYDLDDSWENAGEDEGVVPGTTPLDMATSWQVFDILNGKPYEPEFTSDDLLAQGDMKQ

SEQ ID NO: 16119 - protein, 70 aa, Synthetic construct
STRLAALLKAAGADPLVENFENAGEDEGVVPGTTPLDMATSWQVFDILNGKPYEPEFTSDDLLAQGDMKQ

SEQ ID NO: 16120 - protein, 70 aa, Synthetic construct
STRLAALLKAAGADPLVENFEPLYDLDDSWPGTTPLDMATSWQVFDILNGKPYEPEFTSDDLLAQGDMKQ

SEQ ID NO: 16121 - protein, 70 aa, Synthetic construct
STRLAALLKAAGADPLVENFEPLYDLDDSWENAGELDMATSWQVFDILNGKPYEPEFTSDDLLAQGDMKQ

SEQ ID NO: 16122 - protein, 70 aa, Synthetic construct
STRLAALLKAAGADPLVENFEPLYDLDDSWENAGEDEGVVSWQVFDILNGKPYEPEFTSDDLLAQGDMKQ

SEQ ID NO: 16123 - protein, 70 aa, Synthetic construct
STRLAALLKAAGADPLVENFEPLYDLDDSWENAGEDEGVVPGTTPDILNGKPYEPEFTSDDLLAQGDMKQ

SEQ ID NO: 16124 - protein, 70 aa, Synthetic construct
STRLAALLKAAGADPLVENFEPLYDLDDSWENAGEDEGVVPGTTPLDMATSWQVFEFTSDDLLAQGDMKQ

SEQ ID NO: 16125 - protein, 70 aa, Synthetic construct
STRLAALLKAAGADPLVENFEPLYDLDDSWENAGEDEGVVPGTTPLDMATSWQVFDILNGDLLAQGDMKQ

SEQ ID NO: 16126 - protein, 70 aa, Synthetic construct
STRLAALLKAAGADPLVENFEPLYDLDDSWENAGEDEGVVPGTTPLDMATSWQVFDILNGKPYEPGDMKQ

SEQ ID NO: 16127 - protein, 70 aa, Synthetic construct
STRLAALLKAAGADPLVENFEPLYDLDDSWENAGEDEGVVPGTTPLDMATSWQVFDILNGKPYEPEFTSD

SEQ ID NO: 16128 - protein, 70 aa, Synthetic construct
YLADTQGGGSGEEQLYADFPELDLSQLDASDFDSATCFGELQWCPENSETEPNQYSPDDSELFQIDSENE

SEQ ID NO: 16129 - protein, 70 aa, Synthetic construct
DEELSQGGGSGEEQLYADFPELDLSQLDASDFDSATCFGELQWCPENSETEPNQYSPDDSELFQIDSENE

SEQ ID NO: 16130 - protein, 70 aa, Synthetic construct
DEELSSFFLNGEEQLYADFPELDLSQLDASDFDSATCFGELQWCPENSETEPNQYSPDDSELFQIDSENE

SEQ ID NO: 16131 - protein, 70 aa, Synthetic construct
DEELSSFFLNYLADTYADFPELDLSQLDASDFDSATCFGELQWCPENSETEPNQYSPDDSELFQIDSENE

SEQ ID NO: 16132 - protein, 70 aa, Synthetic construct
DEELSSFFLNYLADTQGGGSELDLSQLDASDFDSATCFGELQWCPENSETEPNQYSPDDSELFQIDSENE

SEQ ID NO: 16133 - protein, 70 aa, Synthetic construct
DEELSSFFLNYLADTQGGGSGEEQLQLDASDFDSATCFGELQWCPENSETEPNQYSPDDSELFQIDSENE

SEQ ID NO: 16134 - protein, 70 aa, Synthetic construct
DEELSSFFLNYLADTQGGGSGEEQLYADFPDFDSATCFGELQWCPENSETEPNQYSPDDSELFQIDSENE

SEQ ID NO: 16135 - protein, 70 aa, Synthetic construct
DEELSSFFLNYLADTQGGGSGEEQLYADFPELDLSTCFGELQWCPENSETEPNQYSPDDSELFQIDSENE

SEQ ID NO: 16136 - protein, 70 aa, Synthetic construct
DEELSSFFLNYLADTQGGGSGEEQLYADFPELDLSQLDASLQWCPENSETEPNQYSPDDSELFQIDSENE

SEQ ID NO: 16137 - protein, 70 aa, Synthetic construct
DEELSSFFLNYLADTQGGGSGEEQLYADFPELDLSQLDASDFDSAENSETEPNQYSPDDSELFQIDSENE

SEQ ID NO: 16138 - protein, 70 aa, Synthetic construct
DEELSSFFLNYLADTQGGGSGEEQLYADFPELDLSQLDASDFDSATCFGEEPNQYSPDDSELFQIDSENE

SEQ ID NO: 16139 - protein, 70 aa, Synthetic construct
DEELSSFFLNYLADTQGGGSGEEQLYADFPELDLSQLDASDFDSATCFGELQWCPSPDDSELFQIDSENE

SEQ ID NO: 16140 - protein, 70 aa, Synthetic construct
DEELSSFFLNYLADTQGGGSGEEQLYADFPELDLSQLDASDFDSATCFGELQWCPENSETELFQIDSENE

SEQ ID NO: 16141 - protein, 70 aa, Synthetic construct
DEELSSFFLNYLADTQGGGSGEEQLYADFPELDLSQLDASDFDSATCFGELQWCPENSETEPNQYDSENE

SEQ ID NO: 16142 - protein, 70 aa, Synthetic construct
DEELSSFFLNYLADTQGGGSGEEQLYADFPELDLSQLDASDFDSATCFGELQWCPENSETEPNQYSPDDS

SEQ ID NO: 16143 - protein, 70 aa, Synthetic construct
ELFQIDSENEALLAELTKTLDDIPELDGGDALSCTSASPAPSSAPPSPAPEKPSAPAPEVDELSLLQKLL

SEQ ID NO: 16144 - protein, 70 aa, Synthetic construct
ELFQIDSENEALLAELTKTLDDIPEDDVGLALSCTSASPAPSSAPPSPAPEKPSAPAPEVDELSLLQKLL

SEQ ID NO: 16145 - protein, 70 aa, Synthetic construct
ELFQIDSENEALLAELTKTLDDIPEDDVGLAAFPASASPAPSSAPPSPAPEKPSAPAPEVDELSLLQKLL

SEQ ID NO: 16146 - protein, 70 aa, Synthetic construct
ELFQIDSENEALLAELTKTLDDIPEDDVGLAAFPALDGGDPSSAPPSPAPEKPSAPAPEVDELSLLQKLL

SEQ ID NO: 16147 - protein, 70 aa, Synthetic construct
ELFQIDSENEALLAELTKTLDDIPEDDVGLAAFPALDGGDALSCTPSPAPEKPSAPAPEVDELSLLQKLL

SEQ ID NO: 16148 - protein, 70 aa, Synthetic construct
ELFQIDSENEALLAELTKTLDDIPEDDVGLAAFPALDGGDALSCTSASPAEKPSAPAPEVDELSLLQKLL

SEQ ID NO: 16149 - protein, 70 aa, Synthetic construct
ELFQIDSENEALLAELTKTLDDIPEDDVGLAAFPALDGGDALSCTSASPAPSSAPPAPEVDELSLLQKLL

SEQ ID NO: 16150 - protein, 70 aa, Synthetic construct
ELFQIDSENEALLAELTKTLDDIPEDDVGLAAFPALDGGDALSCTSASPAPSSAPPSPAPDELSLLQKLL

SEQ ID NO: 16151 - protein, 70 aa, Synthetic construct
QEMEEKENCHLEQRQVKVEESVSERPPYSYMAMIQFAINSTERKRMTLKDIYTWIEDHFPYFKHIAKPGW

SEQ ID NO: 16152 - protein, 70 aa, Synthetic construct
QEMEEKENCHLEQRQVKVEEPSRPSASWQNSVSERFAINSTERKRMTLKDIYTWIEDHFPYFKHIAKPGW

SEQ ID NO: 16153 - protein, 70 aa, Synthetic construct
QEMEEKENCHLEQRQVKVEEPSRPSASWQNSVSERPPYSYMAMIQFAINSIYTWIEDHFPYFKHIAKPGW

SEQ ID NO: 16154 - protein, 70 aa, Synthetic construct
PSDIDVPKPGSPEPQVSGLAANRSLTEGLVLDTMNDSLSKILLDISFPGLDEDPLGPDNINWSQFIPELQ

SEQ ID NO: 16155 - protein, 70 aa, Synthetic construct
LISVPVPKPGSPEPQVSGLAANRSLTEGLVLDTMNDSLSKILLDISFPGLDEDPLGPDNINWSQFIPELQ

SEQ ID NO: 16156 - protein, 70 aa, Synthetic construct
LISVPFGNSSSPEPQVSGLAANRSLTEGLVLDTMNDSLSKILLDISFPGLDEDPLGPDNINWSQFIPELQ

SEQ ID NO: 16157 - protein, 70 aa, Synthetic construct
LISVPFGNSSPSDIDVSGLAANRSLTEGLVLDTMNDSLSKILLDISFPGLDEDPLGPDNINWSQFIPELQ

SEQ ID NO: 16158 - protein, 70 aa, Synthetic construct
LISVPFGNSSPSDIDVPKPGANRSLTEGLVLDTMNDSLSKILLDISFPGLDEDPLGPDNINWSQFIPELQ

SEQ ID NO: 16159 - protein, 70 aa, Synthetic construct
LISVPFGNSSPSDIDVPKPGSPEPQTEGLVLDTMNDSLSKILLDISFPGLDEDPLGPDNINWSQFIPELQ

SEQ ID NO: 16160 - protein, 70 aa, Synthetic construct
LISVPFGNSSPSDIDVPKPGSPEPQVSGLALDTMNDSLSKILLDISFPGLDEDPLGPDNINWSQFIPELQ

SEQ ID NO: 16161 - protein, 70 aa, Synthetic construct
LISVPFGNSSPSDIDVPKPGSPEPQVSGLAANRSLDSLSKILLDISFPGLDEDPLGPDNINWSQFIPELQ

SEQ ID NO: 16162 - protein, 70 aa, Synthetic construct
LISVPFGNSSPSDIDVPKPGSPEPQVSGLAANRSLTEGLVILLDISFPGLDEDPLGPDNINWSQFIPELQ

SEQ ID NO: 16163 - protein, 70 aa, Synthetic construct
LISVPFGNSSPSDIDVPKPGSPEPQVSGLAANRSLTEGLVLDTMNDSLSKILLDISFPGLNWSQFIPELQ

SEQ ID NO: 16164 - protein, 70 aa, Synthetic construct
LISVPFGNSSPSDIDVPKPGSPEPQVSGLAANRSLTEGLVLDTMNDSLSKILLDISFPGLDEDPLIPELQ

SEQ ID NO: 16165 - protein, 70 aa, Synthetic construct
LISVPFGNSSPSDIDVPKPGSPEPQVSGLAANRSLTEGLVLDTMNDSLSKILLDISFPGLDEDPLGPDNI

SEQ ID NO: 16166 - protein, 70 aa, Synthetic construct
TQNTFGNSTLALGPGESLPHRLSCLGQQQQEPPLAMGTVSLGQLPLPPIPHVFSAGTGSAILPHFHHAFR

SEQ ID NO: 16167 - protein, 70 aa, Synthetic construct
LGFWQGNSTLALGPGESLPHRLSCLGQQQQEPPLAMGTVSLGQLPLPPIPHVFSAGTGSAILPHFHHAFR

SEQ ID NO: 16168 - protein, 70 aa, Synthetic construct
LGFWQLPPPAALGPGESLPHRLSCLGQQQQEPPLAMGTVSLGQLPLPPIPHVFSAGTGSAILPHFHHAFR

SEQ ID NO: 16169 - protein, 70 aa, Synthetic construct
LGFWQLPPPATQNTFESLPHRLSCLGQQQQEPPLAMGTVSLGQLPLPPIPHVFSAGTGSAILPHFHHAFR

SEQ ID NO: 16170 - protein, 70 aa, Synthetic construct
LGFWQLPPPATQNTFGNSTLRLSCLGQQQQEPPLAMGTVSLGQLPLPPIPHVFSAGTGSAILPHFHHAFR

SEQ ID NO: 16171 - protein, 70 aa, Synthetic construct
LGFWQLPPPATQNTFGNSTLALGPGGQQQQEPPLAMGTVSLGQLPLPPIPHVFSAGTGSAILPHFHHAFR

SEQ ID NO: 16172 - protein, 70 aa, Synthetic construct
LGFWQLPPPATQNTFGNSTLALGPGESLPHEPPLAMGTVSLGQLPLPPIPHVFSAGTGSAILPHFHHAFR

SEQ ID NO: 16173 - protein, 70 aa, Synthetic construct
LGFWQLPPPATQNTFGNSTLALGPGESLPHRLSCLMGTVSLGQLPLPPIPHVFSAGTGSAILPHFHHAFR

SEQ ID NO: 16174 - protein, 70 aa, Synthetic construct
LGFWQLPPPATQNTFGNSTLALGPGESLPHRLSCLGQQQQLGQLPLPPIPHVFSAGTGSAILPHFHHAFR

SEQ ID NO: 16175 - protein, 70 aa, Synthetic construct
LGFWQLPPPATQNTFGNSTLALGPGESLPHRLSCLGQQQQEPPLALPPIPHVFSAGTGSAILPHFHHAFR

SEQ ID NO: 16176 - protein, 70 aa, Synthetic construct
LGFWQLPPPATQNTFGNSTLALGPGESLPHRLSCLGQQQQEPPLAMGTVSHVFSAGTGSAILPHFHHAFR

SEQ ID NO: 16177 - protein, 70 aa, Synthetic construct
LGFWQLPPPATQNTFGNSTLALGPGESLPHRLSCLGQQQQEPPLAMGTVSLGQLPGTGSAILPHFHHAFR

SEQ ID NO: 16178 - protein, 70 aa, Synthetic construct
LGFWQLPPPATQNTFGNSTLALGPGESLPHRLSCLGQQQQEPPLAMGTVSLGQLPLPPIPILPHFHHAFR

SEQ ID NO: 16179 - protein, 70 aa, Synthetic construct
PSAKRPKLSSPALSASASDGTDFGSLFDLEHDLPDELINSINQLQTSLGMVQDAASKHKQLSELLRSGSS

SEQ ID NO: 16180 - protein, 70 aa, Synthetic construct
PSAKRPKLSSPALSASASDGTDFGSLFDLEHDLPDELINSTELGLTSLGMVQDAASKHKQLSELLRSGSS

SEQ ID NO: 16181 - protein, 70 aa, Synthetic construct
PSAKRPKLSSPALSASASDGTDFGSLFDLEHDLPDELINSTELGLTNGGDINQLQTSLGMLSELLRSGSS

SEQ ID NO: 16182 - protein, 70 aa, Synthetic construct
PSAKRPKLSSPALSASASDGTDFGSLFDLEHDLPDELINSTELGLTNGGDINQLQTSLGMVQDAARSGSS

SEQ ID NO: 16183 - protein, 70 aa, Synthetic construct
SGMYQLSSDVSHQEYPRSSWNQNTSDIPETTYRENEVDWLTELANIATSPQSPLMQCSFYNRSSPVHIIA

SEQ ID NO: 16184 - protein, 70 aa, Synthetic construct
LQAVQLSSDVSHQEYPRSSWNQNTSDIPETTYRENEVDWLTELANIATSPQSPLMQCSFYNRSSPVHIIA

SEQ ID NO: 16185 - protein, 70 aa, Synthetic construct
LQAVQSDPTQSHQEYPRSSWNQNTSDIPETTYRENEVDWLTELANIATSPQSPLMQCSFYNRSSPVHIIA

SEQ ID NO: 16186 - protein, 70 aa, Synthetic construct
LQAVQSDPTQSGMYQPRSSWNQNTSDIPETTYRENEVDWLTELANIATSPQSPLMQCSFYNRSSPVHIIA

SEQ ID NO: 16187 - protein, 70 aa, Synthetic construct
LQAVQSDPTQSGMYQLSSDVNQNTSDIPETTYRENEVDWLTELANIATSPQSPLMQCSFYNRSSPVHIIA

SEQ ID NO: 16188 - protein, 70 aa, Synthetic construct
LQAVQSDPTQSGMYQLSSDVSHQEYDIPETTYRENEVDWLTELANIATSPQSPLMQCSFYNRSSPVHIIA

SEQ ID NO: 16189 - protein, 70 aa, Synthetic construct
LQAVQSDPTQSGMYQLSSDVSHQEYPRSSWTYRENEVDWLTELANIATSPQSPLMQCSFYNRSSPVHIIA

SEQ ID NO: 16190 - protein, 70 aa, Synthetic construct
LQAVQSDPTQSGMYQLSSDVSHQEYPRSSWNQNTSEVDWLTELANIATSPQSPLMQCSFYNRSSPVHIIA

SEQ ID NO: 16191 - protein, 70 aa, Synthetic construct
LQAVQSDPTQSGMYQLSSDVSHQEYPRSSWNQNTSDIPETTYRENEVDWLTELANQCSFYNRSSPVHIIA

SEQ ID NO: 16192 - protein, 70 aa, Synthetic construct
LQAVQSDPTQSGMYQLSSDVSHQEYPRSSWNQNTSDIPETTYRENEVDWLTELANIATSPNRSSPVHIIA

SEQ ID NO: 16193 - protein, 70 aa, Synthetic construct
LQAVQSDPTQSGMYQLSSDVSHQEYPRSSWNQNTSDIPETTYRENEVDWLTELANIATSPQSPLMVHIIA

SEQ ID NO: 16194 - protein, 70 aa, Synthetic construct
LQAVQSDPTQSGMYQLSSDVSHQEYPRSSWNQNTSDIPETTYRENEVDWLTELANIATSPQSPLMQCSFY

SEQ ID NO: 16195 - protein, 70 aa, Synthetic construct
LNRLLMIECSSRCPNRKQHADVEVILTEKKGWGLRAAKDLPSNTFVLEYCGEVLDHKEFKARVKEYARNK

SEQ ID NO: 16196 - protein, 70 aa, Synthetic construct
APGPVQGQNYSVWDSYSPAQSQATIYYQGQTCPTVYGVTSPYSQTTPPIVQSYAQPSLQYIQGQQIFTAH

SEQ ID NO: 16197 - protein, 70 aa, Synthetic construct
APGPVQGQNYSVWDSNQQSVSVQQQYSPAQSQATIYYQGQTCPTVYGVTSPYSQTPSLQYIQGQQIFTAH

SEQ ID NO: 16198 - protein, 70 aa, Synthetic construct
PPSPSHNFFKMGMKLEAVDRKNPHFICPATIGEVRGSEVLVTFDGWRGAFDYWCRFDSRDIFPVGWCSLT

SEQ ID NO: 16199 - protein, 70 aa, Synthetic construct
MAPIRIFHKEPPSPSEAVDRKNPHFICPATIGEVRGSEVLVTFDGWRGAFDYWCRFDSRDIFPVGWCSLT

SEQ ID NO: 16200 - protein, 70 aa, Synthetic construct
MAPIRIFHKEPPSPSHNFFKMGMKLEAVDRKNPHFICPATIGEVRGSEVLVTFDGFDSRDIFPVGWCSLT

SEQ ID NO: 16201 - protein, 70 aa, Synthetic construct
MAPIRIFHKEPPSPSHNFFKMGMKLEAVDRKNPHFICPATIGEVRGSEVLVTFDGWRGAFIFPVGWCSLT

SEQ ID NO: 16202 - protein, 70 aa, Synthetic construct
CSTKMRVLCEQRYCAVCREELRQVVFGKKLPAFATIPIHQLQHEKKYDIYFADGKVYALYRQLLQHECPR

SEQ ID NO: 16203 - protein, 70 aa, Synthetic construct
LSKIIPDCSMESTKSGQSKGQELRQSNHRLSEELQGLDQLQLDNDVLRQQVEDLKNKNLLLRAQLRHHGL

SEQ ID NO: 16204 - protein, 70 aa, Synthetic construct
LSKIIPDCSMESTKSGQSKGGILSKACDYIQELRQSNHRLSEELQGLDQLQLDNDVLRQQVEDLKRHHGL

SEQ ID NO: 16205 - protein, 70 aa, Synthetic construct
NLPYDVTSPALCDTHLHPRNQLAGPPLEITQEAGEMVFVPSGWHHQVHNLDDTISINHNWVNGFNLANMW

SEQ ID NO: 16206 - protein, 70 aa, Synthetic construct
QEEALVTSPALCDTHLHPRNQLAGPPLEITQEAGEMVFVPSGWHHQVHNLDDTISINHNWVNGFNLANMW

SEQ ID NO: 16207 - protein, 70 aa, Synthetic construct
QEEALRDRHGLCDTHLHPRNQLAGPPLEITQEAGEMVFVPSGWHHQVHNLDDTISINHNWVNGFNLANMW

SEQ ID NO: 16208 - protein, 70 aa, Synthetic construct
QEEALRDRHGNLPYDLHPRNQLAGPPLEITQEAGEMVFVPSGWHHQVHNLDDTISINHNWVNGFNLANMW

SEQ ID NO: 16209 - protein, 70 aa, Synthetic construct
QEEALRDRHGNLPYDVTSPAQLAGPPLEITQEAGEMVFVPSGWHHQVHNLDDTISINHNWVNGFNLANMW

SEQ ID NO: 16210 - protein, 70 aa, Synthetic construct
QEEALRDRHGNLPYDVTSPALCDTHPLEITQEAGEMVFVPSGWHHQVHNLDDTISINHNWVNGFNLANMW

SEQ ID NO: 16211 - protein, 70 aa, Synthetic construct
QEEALRDRHGNLPYDVTSPALCDTHLHPRNQEAGEMVFVPSGWHHQVHNLDDTISINHNWVNGFNLANMW

SEQ ID NO: 16212 - protein, 70 aa, Synthetic construct
QEEALRDRHGNLPYDVTSPALCDTHLHPRNQLAGPPLEITSGWHHQVHNLDDTISINHNWVNGFNLANMW

SEQ ID NO: 16213 - protein, 70 aa, Synthetic construct
QEEALRDRHGNLPYDVTSPALCDTHLHPRNQLAGPPLEITQEAGEMVFVPDDTISINHNWVNGFNLANMW

SEQ ID NO: 16214 - protein, 70 aa, Synthetic construct
QEEALRDRHGNLPYDVTSPALCDTHLHPRNQLAGPPLEITQEAGEMVFVPSGWHHINHNWVNGFNLANMW

SEQ ID NO: 16215 - protein, 70 aa, Synthetic construct
IQVRKVPPLKIPVSRISPMPFHPSQVSPRARFPVSITSPNRTGARTLADIKAKAQLVKAQRAAAAAAAAA

SEQ ID NO: 16216 - protein, 70 aa, Synthetic construct
PQPFLVPPLKIPVSRISPMPFHPSQVSPRARFPVSITSPNRTGARTLADIKAKAQLVKAQRAAAAAAAAA

SEQ ID NO: 16217 - protein, 70 aa, Synthetic construct
PQPFLNRGDRIPVSRISPMPFHPSQVSPRARFPVSITSPNRTGARTLADIKAKAQLVKAQRAAAAAAAAA

SEQ ID NO: 16218 - protein, 70 aa, Synthetic construct
PQPFLNRGDRIQVRKISPMPFHPSQVSPRARFPVSITSPNRTGARTLADIKAKAQLVKAQRAAAAAAAAA

SEQ ID NO: 16219 - protein, 70 aa, Synthetic construct
PQPFLNRGDRIQVRKVPPLKFHPSQVSPRARFPVSITSPNRTGARTLADIKAKAQLVKAQRAAAAAAAAA

SEQ ID NO: 16220 - protein, 70 aa, Synthetic construct
PQPFLNRGDRIQVRKVPPLKIPVSRVSPRARFPVSITSPNRTGARTLADIKAKAQLVKAQRAAAAAAAAA

SEQ ID NO: 16221 - protein, 70 aa, Synthetic construct
PQPFLNRGDRIQVRKVPPLKIPVSRISPMPRFPVSITSPNRTGARTLADIKAKAQLVKAQRAAAAAAAAA

SEQ ID NO: 16222 - protein, 70 aa, Synthetic construct
PQPFLNRGDRIQVRKVPPLKIPVSRISPMPFHPSQITSPNRTGARTLADIKAKAQLVKAQRAAAAAAAAA

SEQ ID NO: 16223 - protein, 70 aa, Synthetic construct
PQPFLNRGDRIQVRKVPPLKIPVSRISPMPFHPSQVSPRARTGARTLADIKAKAQLVKAQRAAAAAAAAA

SEQ ID NO: 16224 - protein, 70 aa, Synthetic construct
RTGARTLADIKAKAQLVKAQRAAAAAAAAAAAAASVGGTIPGPGPGGGQGPGEGGEGQTARGGSPGSDRV

SEQ ID NO: 16225 - protein, 70 aa, Synthetic construct
RFPVSITSPNRTGARTLADIKAKAQLVKAQRAAAAVGGTIPGPGPGGGQGPGEGGEGQTARGGSPGSDRV

SEQ ID NO: 16226 - protein, 70 aa, Synthetic construct
RFPVSITSPNRTGARTLADIKAKAQLVKAQRAAAAAAAAAPGPGPGGGQGPGEGGEGQTARGGSPGSDRV

SEQ ID NO: 16227 - protein, 70 aa, Synthetic construct
RFPVSITSPNRTGARTLADIKAKAQLVKAQRAAAAAAAAAAAAASGGGQGPGEGGEGQTARGGSPGSDRV

SEQ ID NO: 16228 - protein, 70 aa, Synthetic construct
RFPVSITSPNRTGARTLADIKAKAQLVKAQRAAAAAAAAAAAAASVGGTIPGEGGEGQTARGGSPGSDRV

SEQ ID NO: 16229 - protein, 70 aa, Synthetic construct
RFPVSITSPNRTGARTLADIKAKAQLVKAQRAAAAAAAAAAAAASVGGTIPGPGPEGQTARGGSPGSDRV

SEQ ID NO: 16230 - protein, 70 aa, Synthetic construct
RFPVSITSPNRTGARTLADIKAKAQLVKAQRAAAAAAAAAAAAASVGGTIPGPGPGGGQGRGGSPGSDRV

SEQ ID NO: 16231 - protein, 70 aa, Synthetic construct
RFPVSITSPNRTGARTLADIKAKAQLVKAQRAAAAAAAAAAAAASVGGTIPGPGPGGGQGPGEGGGSDRV

SEQ ID NO: 16232 - protein, 70 aa, Synthetic construct
RFPVSITSPNRTGARTLADIKAKAQLVKAQRAAAAAAAAAAAAASVGGTIPGPGPGGGQGPGEGGEGQTA

SEQ ID NO: 16233 - protein, 70 aa, Synthetic construct
GRCVETIVSAGHCLKEIYLVDVSEKTVEAFAEAVKTVFKATLPDTAAPPGLPPAAAGPGKTSWEKGSLVS

SEQ ID NO: 16234 - protein, 70 aa, Synthetic construct
GRCVETIVSAIKENFQFKKDGHCLKEIYLVDVSEKTVEAFAEAVKTVFKATLPDTAAPPGLPPAAGSLVS

SEQ ID NO: 16235 - protein, 70 aa, Synthetic construct
PRSSNDYTSQMYSAKPYAHILSVPVSETAYPGQTQYQTLQQTQPYAVYPQATQTYGLPPFGALWPGMKPE

SEQ ID NO: 16236 - protein, 70 aa, Synthetic construct
EEIMTDYTSQMYSAKPYAHILSVPVSETAYPGQTQYQTLQQTQPYAVYPQATQTYGLPPFGALWPGMKPE

SEQ ID NO: 16237 - protein, 70 aa, Synthetic construct
EEIMTCTDYIMYSAKPYAHILSVPVSETAYPGQTQYQTLQQTQPYAVYPQATQTYGLPPFGALWPGMKPE

SEQ ID NO: 16238 - protein, 70 aa, Synthetic construct
EEIMTCTDYIPRSSNPYAHILSVPVSETAYPGQTQYQTLQQTQPYAVYPQATQTYGLPPFGALWPGMKPE

SEQ ID NO: 16239 - protein, 70 aa, Synthetic construct
EEIMTCTDYIPRSSNDYTSQLSVPVSETAYPGQTQYQTLQQTQPYAVYPQATQTYGLPPFGALWPGMKPE

SEQ ID NO: 16240 - protein, 70 aa, Synthetic construct
EEIMTCTDYIPRSSNDYTSQMYSAKSETAYPGQTQYQTLQQTQPYAVYPQATQTYGLPPFGALWPGMKPE

SEQ ID NO: 16241 - protein, 70 aa, Synthetic construct
EEIMTCTDYIPRSSNDYTSQMYSAKPYAHIPGQTQYQTLQQTQPYAVYPQATQTYGLPPFGALWPGMKPE

SEQ ID NO: 16242 - protein, 70 aa, Synthetic construct
EEIMTCTDYIPRSSNDYTSQMYSAKPYAHILSVPVYQTLQQTQPYAVYPQATQTYGLPPFGALWPGMKPE

SEQ ID NO: 16243 - protein, 70 aa, Synthetic construct
EEIMTCTDYIPRSSNDYTSQMYSAKPYAHILSVPVSETAYQTQPYAVYPQATQTYGLPPFGALWPGMKPE

SEQ ID NO: 16244 - protein, 70 aa, Synthetic construct
EEIMTCTDYIPRSSNDYTSQMYSAKPYAHILSVPVSETAYPGQTQAVYPQATQTYGLPPFGALWPGMKPE

SEQ ID NO: 16245 - protein, 70 aa, Synthetic construct
EEIMTCTDYIPRSSNDYTSQMYSAKPYAHILSVPVSETAYPGQTQYQTLQATQTYGLPPFGALWPGMKPE

SEQ ID NO: 16246 - protein, 70 aa, Synthetic construct
EEIMTCTDYIPRSSNDYTSQMYSAKPYAHILSVPVSETAYPGQTQYQTLQQTQPYGLPPFGALWPGMKPE

SEQ ID NO: 16247 - protein, 70 aa, Synthetic construct
SGPSPLQLPPEDAYVGNADMIQPDLTPLQPSLDDFMDISDFFTNSRLPQPPMPSNFPEPPSFSPVVDSLF

SEQ ID NO: 16248 - protein, 70 aa, Synthetic construct
ISDTLLQLPPEDAYVGNADMIQPDLTPLQPSLDDFMDISDFFTNSRLPQPPMPSNFPEPPSFSPVVDSLF

SEQ ID NO: 16249 - protein, 70 aa, Synthetic construct
ISDTLFTMTQEDAYVGNADMIQPDLTPLQPSLDDFMDISDFFTNSRLPQPPMPSNFPEPPSFSPVVDSLF

SEQ ID NO: 16250 - protein, 70 aa, Synthetic construct
ISDTLFTMTQSGPSPGNADMIQPDLTPLQPSLDDFMDISDFFTNSRLPQPPMPSNFPEPPSFSPVVDSLF

SEQ ID NO: 16251 - protein, 70 aa, Synthetic construct
ISDTLFTMTQSGPSPLQLPPIQPDLTPLQPSLDDFMDISDFFTNSRLPQPPMPSNFPEPPSFSPVVDSLF

SEQ ID NO: 16252 - protein, 70 aa, Synthetic construct
ISDTLFTMTQSGPSPLQLPPEDAYVTPLQPSLDDFMDISDFFTNSRLPQPPMPSNFPEPPSFSPVVDSLF

SEQ ID NO: 16253 - protein, 70 aa, Synthetic construct
ISDTLFTMTQSGPSPLQLPPEDAYVGNADMSLDDFMDISDFFTNSRLPQPPMPSNFPEPPSFSPVVDSLF

SEQ ID NO: 16254 - protein, 70 aa, Synthetic construct
ISDTLFTMTQSGPSPLQLPPEDAYVGNADMIQPDLMDISDFFTNSRLPQPPMPSNFPEPPSFSPVVDSLF

SEQ ID NO: 16255 - protein, 70 aa, Synthetic construct
ISDTLFTMTQSGPSPLQLPPEDAYVGNADMIQPDLTPLQPSLDDFMDISDPMPSNFPEPPSFSPVVDSLF

SEQ ID NO: 16256 - protein, 70 aa, Synthetic construct
ISDTLFTMTQSGPSPLQLPPEDAYVGNADMIQPDLTPLQPSLDDFMDISDFFTNSFPEPPSFSPVVDSLF

SEQ ID NO: 16257 - protein, 70 aa, Synthetic construct
ISDTLFTMTQSGPSPLQLPPEDAYVGNADMIQPDLTPLQPSLDDFMDISDFFTNSRLPQPSFSPVVDSLF

SEQ ID NO: 16258 - protein, 70 aa, Synthetic construct
ISDTLFTMTQSGPSPLQLPPEDAYVGNADMIQPDLTPLQPSLDDFMDISDFFTNSRLPQPPMPSNVDSLF

SEQ ID NO: 16259 - protein, 70 aa, Synthetic construct
ISDTLFTMTQSGPSPLQLPPEDAYVGNADMIQPDLTPLQPSLDDFMDISDFFTNSRLPQPPMPSNFPEPP

SEQ ID NO: 16260 - protein, 70 aa, Synthetic construct
KAPSFQWRNYKLIVDPALDPALRRPSQKVYRYDGVHFSVNDSKYIPVEDLQDPRCHVRSKNRDFSLPVPK

SEQ ID NO: 16261 - protein, 70 aa, Synthetic construct
EEDEAAAASTMAVSASLMPPIWDKTIPYDGESFHLEYMDLDEFLLENGIPASPTHLAHNLLLPVAELEGK

SEQ ID NO: 16262 - protein, 70 aa, Synthetic construct
LDKEKAAASTMAVSASLMPPIWDKTIPYDGESFHLEYMDLDEFLLENGIPASPTHLAHNLLLPVAELEGK

SEQ ID NO: 16263 - protein, 70 aa, Synthetic construct
LDKEKGKEKLMAVSASLMPPIWDKTIPYDGESFHLEYMDLDEFLLENGIPASPTHLAHNLLLPVAELEGK

SEQ ID NO: 16264 - protein, 70 aa, Synthetic construct
LDKEKGKEKLEEDEASLMPPIWDKTIPYDGESFHLEYMDLDEFLLENGIPASPTHLAHNLLLPVAELEGK

SEQ ID NO: 16265 - protein, 70 aa, Synthetic construct
LDKEKGKEKLEEDEAAAASTIWDKTIPYDGESFHLEYMDLDEFLLENGIPASPTHLAHNLLLPVAELEGK

SEQ ID NO: 16266 - protein, 70 aa, Synthetic construct
LDKEKGKEKLEEDEAAAASTMAVSAIPYDGESFHLEYMDLDEFLLENGIPASPTHLAHNLLLPVAELEGK

SEQ ID NO: 16267 - protein, 70 aa, Synthetic construct
LDKEKGKEKLEEDEAAAASTMAVSASLMPPESFHLEYMDLDEFLLENGIPASPTHLAHNLLLPVAELEGK

SEQ ID NO: 16268 - protein, 70 aa, Synthetic construct
LDKEKGKEKLEEDEAAAASTMAVSASLMPPIWDKTIPYDGESFHLEYMDLDEFLLENGIPLLPVAELEGK

SEQ ID NO: 16269 - protein, 70 aa, Synthetic construct
LDKEKGKEKLEEDEAAAASTMAVSASLMPPIWDKTIPYDGESFHLEYMDLDEFLLENGIPASPTHELEGK

SEQ ID NO: 16270 - protein, 70 aa, Synthetic construct
LDKEKGKEKLEEDEAAAASTMAVSASLMPPIWDKTIPYDGESFHLEYMDLDEFLLENGIPASPTHLAHNL

SEQ ID NO: 16271 - protein, 70 aa, Synthetic construct
TGIAAASFFSNTCRFGGCGLHFPTLADLIEHIEDNHIDTDPRVLEKQELQQPTYVALSYINRFMTKKKIQ

SEQ ID NO: 16272 - protein, 70 aa, Synthetic construct
TGIAAASFFSNTCRFGGCGLHFPTLADLIEHIEDNHIDTDPRVLEKQELQQPTYVALSYINRFMTDAARR

SEQ ID NO: 16273 - protein, 70 aa, Synthetic construct
RALDRLQEVPHEGPMCDLLWSDPDDRGGWGISPRGAGYTFGQDISETFNHANGLTLVSRAHQLVMEGYNW

SEQ ID NO: 16274 - protein, 70 aa, Synthetic construct
SPSIDLQEVPHEGPMCDLLWSDPDDRGGWGISPRGAGYTFGQDISETFNHANGLTLVSRAHQLVMEGYNW

SEQ ID NO: 16275 - protein, 70 aa, Synthetic construct
SPSIDTLDHIHEGPMCDLLWSDPDDRGGWGISPRGAGYTFGQDISETFNHANGLTLVSRAHQLVMEGYNW

SEQ ID NO: 16276 - protein, 70 aa, Synthetic construct
SPSIDTLDHIRALDRCDLLWSDPDDRGGWGISPRGAGYTFGQDISETFNHANGLTLVSRAHQLVMEGYNW

SEQ ID NO: 16277 - protein, 70 aa, Synthetic construct
SPSIDTLDHIRALDRLQEVPHEGPMCDLLWISPRGAGYTFGQDISETFNHANGLTLVSRAHQLVMEGYNW

SEQ ID NO: 16278 - protein, 70 aa, Synthetic construct
SPSIDTLDHIRALDRLQEVPHEGPMCDLLWSDPDDAGYTFGQDISETFNHANGLTLVSRAHQLVMEGYNW

SEQ ID NO: 16279 - protein, 70 aa, Synthetic construct
SPSIDTLDHIRALDRLQEVPHEGPMCDLLWSDPDDRGGWGGQDISETFNHANGLTLVSRAHQLVMEGYNW

SEQ ID NO: 16280 - protein, 70 aa, Synthetic construct
SPSIDTLDHIRALDRLQEVPHEGPMCDLLWSDPDDRGGWGISPRGETFNHANGLTLVSRAHQLVMEGYNW

SEQ ID NO: 16281 - protein, 70 aa, Synthetic construct
SPSIDTLDHIRALDRLQEVPHEGPMCDLLWSDPDDRGGWGISPRGAGYTFGQDISLVSRAHQLVMEGYNW

SEQ ID NO: 16282 - protein, 70 aa, Synthetic construct
SPSIDTLDHIRALDRLQEVPHEGPMCDLLWSDPDDRGGWGISPRGAGYTFGQDISETFNHHQLVMEGYNW

SEQ ID NO: 16283 - protein, 70 aa, Synthetic construct
SPSIDTLDHIRALDRLQEVPHEGPMCDLLWSDPDDRGGWGISPRGAGYTFGQDISETFNHANGLTEGYNW

SEQ ID NO: 16284 - protein, 70 aa, Synthetic construct
SPSIDTLDHIRALDRLQEVPHEGPMCDLLWSDPDDRGGWGISPRGAGYTFGQDISETFNHANGLTLVSRA

SEQ ID NO: 16285 - protein, 70 aa, Synthetic construct
GFCSAGVQTEAGVADLTWVGERGILVASDSGAVELWELDENETLIVSKFCKYEHDDIVSTVSVLSSGTQA

SEQ ID NO: 16286 - protein, 70 aa, Synthetic construct
FKDPCGVQTEAGVADLTWVGERGILVASDSGAVELWELDENETLIVSKFCKYEHDDIVSTVSVLSSGTQA

SEQ ID NO: 16287 - protein, 70 aa, Synthetic construct
FKDPCAAPNEAGVADLTWVGERGILVASDSGAVELWELDENETLIVSKFCKYEHDDIVSTVSVLSSGTQA

SEQ ID NO: 16288 - protein, 70 aa, Synthetic construct
FKDPCAAPNEGFCSALTWVGERGILVASDSGAVELWELDENETLIVSKFCKYEHDDIVSTVSVLSSGTQA

SEQ ID NO: 16289 - protein, 70 aa, Synthetic construct
FKDPCAAPNEGFCSAGVQTEAGVADLTWVGERGILVASDSGAVELWELDENETLIVSKFCKYEHDDIVST

SEQ ID NO: 16290 - protein, 70 aa, Synthetic construct
FSPHSCSLAVLDSSLSELFRSQAHRDFVRDATWSPLNHSLLTTVGWDHQVVHHVVPTEPLPAPGPASVTE

SEQ ID NO: 16291 - protein, 70 aa, Synthetic construct
FSPHSVPFLALDSSLSELFRSQAHRDFVRDATWSPLNHSLLTTVGWDHQVVHHVVPTEPLPAPGPASVTE

SEQ ID NO: 16292 - protein, 70 aa, Synthetic construct
FSPHSVPFLASLSEDCSLAVLDSSLDFVRDATWSPLNHSLLTTVGWDHQVVHHVVPTEPLPAPGPASVTE

SEQ ID NO: 16293 - protein, 70 aa, Synthetic construct
FSPHSVPFLASLSEDCSLAVLDSSLSELFRATWSPLNHSLLTTVGWDHQVVHHVVPTEPLPAPGPASVTE

SEQ ID NO: 16294 - protein, 70 aa, Synthetic construct
FSPHSVPFLASLSEDCSLAVLDSSLSELFRSQAHRLNHSLLTTVGWDHQVVHHVVPTEPLPAPGPASVTE

SEQ ID NO: 16295 - protein, 70 aa, Synthetic construct
FSPHSVPFLASLSEDCSLAVLDSSLSELFRSQAHRDFVRDLTTVGWDHQVVHHVVPTEPLPAPGPASVTE

SEQ ID NO: 16296 - protein, 70 aa, Synthetic construct
FSPHSVPFLASLSEDCSLAVLDSSLSELFRSQAHRDFVRDATWSPWDHQVVHHVVPTEPLPAPGPASVTE

SEQ ID NO: 16297 - protein, 70 aa, Synthetic construct
FSPHSVPFLASLSEDCSLAVLDSSLSELFRSQAHRDFVRDATWSPLNHSLVHHVVPTEPLPAPGPASVTE

SEQ ID NO: 16298 - protein, 70 aa, Synthetic construct
FSPHSVPFLASLSEDCSLAVLDSSLSELFRSQAHRDFVRDATWSPLNHSLLTTVGPTEPLPAPGPASVTE

SEQ ID NO: 16299 - protein, 70 aa, Synthetic construct
FSPHSVPFLASLSEDCSLAVLDSSLSELFRSQAHRDFVRDATWSPLNHSLLTTVGWDHQVPAPGPASVTE

SEQ ID NO: 16300 - protein, 70 aa, Synthetic construct
FSPHSVPFLASLSEDCSLAVLDSSLSELFRSQAHRDFVRDATWSPLNHSLLTTVGWDHQVVHHVVASVTE

SEQ ID NO: 16301 - protein, 70 aa, Synthetic construct
FSPHSVPFLASLSEDCSLAVLDSSLSELFRSQAHRDFVRDATWSPLNHSLLTTVGWDHQVVHHVVPTEPL

SEQ ID NO: 16302 - protein, 70 aa, Synthetic construct
DSNLDNLQTMLSSHGFSVDTSALLDLFSPSVTVPDMSLPDLDSSLASIQELLSPQEPPRPPEAENSSPDS

SEQ ID NO: 16303 - protein, 70 aa, Synthetic construct
NELSDNLQTMLSSHGFSVDTSALLDLFSPSVTVPDMSLPDLDSSLASIQELLSPQEPPRPPEAENSSPDS

SEQ ID NO: 16304 - protein, 70 aa, Synthetic construct
NELSDHLDAMLSSHGFSVDTSALLDLFSPSVTVPDMSLPDLDSSLASIQELLSPQEPPRPPEAENSSPDS

SEQ ID NO: 16305 - protein, 70 aa, Synthetic construct
NELSDHLDAMDSNLDFSVDTSALLDLFSPSVTVPDMSLPDLDSSLASIQELLSPQEPPRPPEAENSSPDS

SEQ ID NO: 16306 - protein, 70 aa, Synthetic construct
NELSDHLDAMDSNLDNLQTMSALLDLFSPSVTVPDMSLPDLDSSLASIQELLSPQEPPRPPEAENSSPDS

SEQ ID NO: 16307 - protein, 70 aa, Synthetic construct
NELSDHLDAMDSNLDNLQTMLSSHGFSVDTSALLDMSLPDLDSSLASIQELLSPQEPPRPPEAENSSPDS

SEQ ID NO: 16308 - protein, 70 aa, Synthetic construct
NELSDHLDAMDSNLDNLQTMLSSHGFSVDTSALLDLFSPSLDSSLASIQELLSPQEPPRPPEAENSSPDS

SEQ ID NO: 16309 - protein, 70 aa, Synthetic construct
NELSDHLDAMDSNLDNLQTMLSSHGFSVDTSALLDLFSPSVTVPDASIQELLSPQEPPRPPEAENSSPDS

SEQ ID NO: 16310 - protein, 70 aa, Synthetic construct
NELSDHLDAMDSNLDNLQTMLSSHGFSVDTSALLDLFSPSVTVPDMSLPDLLSPQEPPRPPEAENSSPDS

SEQ ID NO: 16311 - protein, 70 aa, Synthetic construct
NELSDHLDAMDSNLDNLQTMLSSHGFSVDTSALLDLFSPSVTVPDMSLPDLDSSLEPPRPPEAENSSPDS

SEQ ID NO: 16312 - protein, 70 aa, Synthetic construct
NELSDHLDAMDSNLDNLQTMLSSHGFSVDTSALLDLFSPSVTVPDMSLPDLDSSLASIQEPEAENSSPDS

SEQ ID NO: 16313 - protein, 70 aa, Synthetic construct
NELSDHLDAMDSNLDNLQTMLSSHGFSVDTSALLDLFSPSVTVPDMSLPDLDSSLASIQELLSPQSSPDS

SEQ ID NO: 16314 - protein, 70 aa, Synthetic construct
NELSDHLDAMDSNLDNLQTMLSSHGFSVDTSALLDLFSPSVTVPDMSLPDLDSSLASIQELLSPQEPPRP

SEQ ID NO: 16315 - protein, 70 aa, Synthetic construct
VDSGRQNIDFSNVDISELSSEVMGTMDAFDVHEFDQYLPLGGPAPPEPGQAYGGAYFHAGASPVWAHKSA

SEQ ID NO: 16316 - protein, 70 aa, Synthetic construct
PELKLQNIDFSNVDISELSSEVMGTMDAFDVHEFDQYLPLGGPAPPEPGQAYGGAYFHAGASPVWAHKSA

SEQ ID NO: 16317 - protein, 70 aa, Synthetic construct
PELKLEGRRPVDSGRQNIDFSNVDISELSSEVMGTMDAFDVHEFDQYLPLAYGGAYFHAGASPVWAHKSA

SEQ ID NO: 16318 - protein, 70 aa, Synthetic construct
PELKLEGRRPVDSGRQNIDFSNVDISELSSEVMGTMDAFDVHEFDQYLPLGGPAPYFHAGASPVWAHKSA

SEQ ID NO: 16319 - protein, 70 aa, Synthetic construct
PELKLEGRRPVDSGRQNIDFSNVDISELSSEVMGTMDAFDVHEFDQYLPLGGPAPPEPGQASPVWAHKSA

SEQ ID NO: 16320 - protein, 70 aa, Synthetic construct
PELKLEGRRPVDSGRQNIDFSNVDISELSSEVMGTMDAFDVHEFDQYLPLGGPAPPEPGQAYGGAYFHAG

SEQ ID NO: 16321 - protein, 70 aa, Synthetic construct
PGPLEAFEEILPGFSAEAWCNGLPYPSQEHGPQVLGSEVKVKPPVLESGAGMFCYQPPLQHMYCSSQPPF

SEQ ID NO: 16322 - protein, 70 aa, Synthetic construct
PGPLEAFEEIPVDVAEAEAFLPGFSAEAWCNGLPYGSEVKVKPPVLESGAGMFCYQPPLQHMYCSSQPPF

SEQ ID NO: 16323 - protein, 70 aa, Synthetic construct
PGPLEAFEEIPVDVAEAEAFLPGFSAEAWCNGLPYPSQEHVKPPVLESGAGMFCYQPPLQHMYCSSQPPF

SEQ ID NO: 16324 - protein, 70 aa, Synthetic construct
PGPLEAFEEIPVDVAEAEAFLPGFSAEAWCNGLPYPSQEHGPQVLLESGAGMFCYQPPLQHMYCSSQPPF

SEQ ID NO: 16325 - protein, 70 aa, Synthetic construct
PGPLEAFEEIPVDVAEAEAFLPGFSAEAWCNGLPYPSQEHGPQVLGSEVKGMFCYQPPLQHMYCSSQPPF

SEQ ID NO: 16326 - protein, 70 aa, Synthetic construct
DGDLGTDLDAINPSLTDFDFQGNLWEQLKDDSLALDPLVLVTSSPTSSSMPPPQPPPHCFPPGPCLTETG

SEQ ID NO: 16327 - protein, 70 aa, Synthetic construct
ARTMHTDLDAINPSLTDFDFQGNLWEQLKDDSLALDPLVLVTSSPTSSSMPPPQPPPHCFPPGPCLTETG

SEQ ID NO: 16328 - protein, 70 aa, Synthetic construct
ARTMHDTLLPDGDLGTDLDAINPSLTDFDFDSLALDPLVLVTSSPTSSSMPPPQPPPHCFPPGPCLTETG

SEQ ID NO: 16329 - protein, 70 aa, Synthetic construct
ARTMHDTLLPDGDLGTDLDAINPSLTDFDFQGNLWDPLVLVTSSPTSSSMPPPQPPPHCFPPGPCLTETG

SEQ ID NO: 16330 - protein, 70 aa, Synthetic construct
ARTMHDTLLPDGDLGTDLDAINPSLTDFDFQGNLWEQLKDVTSSPTSSSMPPPQPPPHCFPPGPCLTETG

SEQ ID NO: 16331 - protein, 70 aa, Synthetic construct
ARTMHDTLLPDGDLGTDLDAINPSLTDFDFQGNLWEQLKDDSLALTSSSMPPPQPPPHCFPPGPCLTETG

SEQ ID NO: 16332 - protein, 70 aa, Synthetic construct
ARTMHDTLLPDGDLGTDLDAINPSLTDFDFQGNLWEQLKDDSLALDPLVLPPPQPPPHCFPPGPCLTETG

SEQ ID NO: 16333 - protein, 70 aa, Synthetic construct
ARTMHDTLLPDGDLGTDLDAINPSLTDFDFQGNLWEQLKDDSLALDPLVLVTSSPPPHCFPPGPCLTETG

SEQ ID NO: 16334 - protein, 70 aa, Synthetic construct
ARTMHDTLLPDGDLGTDLDAINPSLTDFDFQGNLWEQLKDDSLALDPLVLVTSSPTSSSMPPGPCLTETG

SEQ ID NO: 16335 - protein, 70 aa, Synthetic construct
ARTMHDTLLPDGDLGTDLDAINPSLTDFDFQGNLWEQLKDDSLALDPLVLVTSSPTSSSMPPPQPLTETG

SEQ ID NO: 16336 - protein, 70 aa, Synthetic construct
ARTMHDTLLPDGDLGTDLDAINPSLTDFDFQGNLWEQLKDDSLALDPLVLVTSSPTSSSMPPPQPPPHCF

SEQ ID NO: 16337 - protein, 70 aa, Synthetic construct
SMEQEETYLELYLDQCAAQDGLAPPRSPLFSPVVPYDMYILNASNPDTAFNSNPEVKETSGDFSSVDLSF

SEQ ID NO: 16338 - protein, 70 aa, Synthetic construct
PPPPPETYLELYLDQCAAQDGLAPPRSPLFSPVVPYDMYILNASNPDTAFNSNPEVKETSGDFSSVDLSF

SEQ ID NO: 16339 - protein, 70 aa, Synthetic construct
PPPPPTVGLRSMEQEETYLELYLDQRSPLFSPVVPYDMYILNASNPDTAFNSNPEVKETSGDFSSVDLSF

SEQ ID NO: 16340 - protein, 70 aa, Synthetic construct
PPPPPTVGLRSMEQEETYLELYLDQCAAQDGLAPPRSPLFSPVVPYDMYILNASNVKETSGDFSSVDLSF

SEQ ID NO: 16341 - protein, 70 aa, Synthetic construct
PPPPPTVGLRSMEQEETYLELYLDQCAAQDGLAPPRSPLFSPVVPYDMYILNASNPDTAFGDFSSVDLSF

SEQ ID NO: 16342 - protein, 70 aa, Synthetic construct
PPPPPTVGLRSMEQEETYLELYLDQCAAQDGLAPPRSPLFSPVVPYDMYILNASNPDTAFNSNPEVDLSF

SEQ ID NO: 16343 - protein, 70 aa, Synthetic construct
PPPPPTVGLRSMEQEETYLELYLDQCAAQDGLAPPRSPLFSPVVPYDMYILNASNPDTAFNSNPEVKETS

SEQ ID NO: 16344 - protein, 70 aa, Synthetic construct
EDVTELLQSHDKTLTDEELFLMDAQRKWFLEMESTPGEDAVNIVEMTTKDLEYYINLVDKAAAGFERIDS

SEQ ID NO: 16345 - protein, 70 aa, Synthetic construct
AKELELLQSHDKTLTDEELFLMDAQRKWFLEMESTPGEDAVNIVEMTTKDLEYYINLVDKAAAGFERIDS

SEQ ID NO: 16346 - protein, 70 aa, Synthetic construct
AKELELEVEPDKTLTDEELFLMDAQRKWFLEMESTPGEDAVNIVEMTTKDLEYYINLVDKAAAGFERIDS

SEQ ID NO: 16347 - protein, 70 aa, Synthetic construct
AKELELEVEPEDVTEDEELFLMDAQRKWFLEMESTPGEDAVNIVEMTTKDLEYYINLVDKAAAGFERIDS

SEQ ID NO: 16348 - protein, 70 aa, Synthetic construct
AKELELEVEPEDVTELLQSHLMDAQRKWFLEMESTPGEDAVNIVEMTTKDLEYYINLVDKAAAGFERIDS

SEQ ID NO: 16349 - protein, 70 aa, Synthetic construct
AKELELEVEPEDVTELLQSHDKTLTRKWFLEMESTPGEDAVNIVEMTTKDLEYYINLVDKAAAGFERIDS

SEQ ID NO: 16350 - protein, 70 aa, Synthetic construct
AKELELEVEPEDVTELLQSHDKTLTDEELFEMESTPGEDAVNIVEMTTKDLEYYINLVDKAAAGFERIDS

SEQ ID NO: 16351 - protein, 70 aa, Synthetic construct
AKELELEVEPEDVTELLQSHDKTLTDEELFLMDAQPGEDAVNIVEMTTKDLEYYINLVDKAAAGFERIDS

SEQ ID NO: 16352 - protein, 70 aa, Synthetic construct
AKELELEVEPEDVTELLQSHDKTLTDEELFLMDAQRKWFLEMESTMTTKDLEYYINLVDKAAAGFERIDS

SEQ ID NO: 16353 - protein, 70 aa, Synthetic construct
AKELELEVEPEDVTELLQSHDKTLTDEELFLMDAQRKWFLEMESTPGEDALEYYINLVDKAAAGFERIDS

SEQ ID NO: 16354 - protein, 70 aa, Synthetic construct
AKELELEVEPEDVTELLQSHDKTLTDEELFLMDAQRKWFLEMESTPGEDAVNIVEMTTKDLEYYIERIDS

SEQ ID NO: 16355 - protein, 70 aa, Synthetic construct
AKELELEVEPEDVTELLQSHDKTLTDEELFLMDAQRKWFLEMESTPGEDAVNIVEMTTKDLEYYINLVDK

SEQ ID NO: 16356 - protein, 70 aa, Synthetic construct
GCVPFFGDTPEELFGQVISDEIVWPQDLTSKLLHQNPLERLGTGSAYEVKQHPFFTGLDWTGLLRQKAEF

SEQ ID NO: 16357 - protein, 70 aa, Synthetic construct
GCVPFFGDTPEELFGQVISDEIVWPEGDEAKLLHQNPLERLGTGSAYEVKQHPFFTGLDWTGLLRQKAEF

SEQ ID NO: 16358 - protein, 70 aa, Synthetic construct
GCVPFFGDTPEELFGQVISDEIVWPEGDEALPPDANPLERLGTGSAYEVKQHPFFTGLDWTGLLRQKAEF

SEQ ID NO: 16359 - protein, 70 aa, Synthetic construct
GCVPFFGDTPEELFGQVISDEIVWPEGDEALPPDAQDLTSLGTGSAYEVKQHPFFTGLDWTGLLRQKAEF

SEQ ID NO: 16360 - protein, 70 aa, Synthetic construct
GCVPFFGDTPEELFGQVISDEIVWPEGDEALPPDAQDLTSKLLHQAYEVKQHPFFTGLDWTGLLRQKAEF

SEQ ID NO: 16361 - protein, 70 aa, Synthetic construct
GCVPFFGDTPEELFGQVISDEIVWPEGDEALPPDAQDLTSKLLHQNPLERQHPFFTGLDWTGLLRQKAEF

SEQ ID NO: 16362 - protein, 70 aa, Synthetic construct
GCVPFFGDTPEELFGQVISDEIVWPEGDEALPPDAQDLTSKLLHQNPLERLGTGSTGLDWTGLLRQKAEF

SEQ ID NO: 16363 - protein, 70 aa, Synthetic construct
GCVPFFGDTPEELFGQVISDEIVWPEGDEALPPDAQDLTSKLLHQNPLERLGTGSAYEVKQHPFFTGLDW

SEQ ID NO: 16364 - protein, 70 aa, Synthetic construct
HQPVAWPNPREIAHLGNADMIQPGLIPLQPNLDFMDTFEPFQDLFSSSRSIFGSMLPASASAPVPDPNNP

SEQ ID NO: 16365 - protein, 70 aa, Synthetic construct
SDTLFWPNPREIAHLGNADMIQPGLIPLQPNLDFMDTFEPFQDLFSSSRSIFGSMLPASASAPVPDPNNP

SEQ ID NO: 16366 - protein, 70 aa, Synthetic construct
SDTLFSTLSSEIAHLGNADMIQPGLIPLQPNLDFMDTFEPFQDLFSSSRSIFGSMLPASASAPVPDPNNP

SEQ ID NO: 16367 - protein, 70 aa, Synthetic construct
SDTLFSTLSSHQPVAGNADMIQPGLIPLQPNLDFMDTFEPFQDLFSSSRSIFGSMLPASASAPVPDPNNP

SEQ ID NO: 16368 - protein, 70 aa, Synthetic construct
SDTLFSTLSSHQPVAWPNPRIQPGLIPLQPNLDFMDTFEPFQDLFSSSRSIFGSMLPASASAPVPDPNNP

SEQ ID NO: 16369 - protein, 70 aa, Synthetic construct
SDTLFSTLSSHQPVAWPNPREIAHLIPLQPNLDFMDTFEPFQDLFSSSRSIFGSMLPASASAPVPDPNNP

SEQ ID NO: 16370 - protein, 70 aa, Synthetic construct
SDTLFSTLSSHQPVAWPNPREIAHLGNADMNLDFMDTFEPFQDLFSSSRSIFGSMLPASASAPVPDPNNP

SEQ ID NO: 16371 - protein, 70 aa, Synthetic construct
SDTLFSTLSSHQPVAWPNPREIAHLGNADMIQPGLIPLQPNLDFMDTFEPIFGSMLPASASAPVPDPNNP

SEQ ID NO: 16372 - protein, 70 aa, Synthetic construct
SDTLFSTLSSHQPVAWPNPREIAHLGNADMIQPGLIPLQPNLDFMDTFEPFQDLFLPASASAPVPDPNNP

SEQ ID NO: 16373 - protein, 70 aa, Synthetic construct
SDTLFSTLSSHQPVAWPNPREIAHLGNADMIQPGLIPLQPNLDFMDTFEPFQDLFSSSRSSAPVPDPNNP

SEQ ID NO: 16374 - protein, 70 aa, Synthetic construct
SDTLFSTLSSHQPVAWPNPREIAHLGNADMIQPGLIPLQPNLDFMDTFEPFQDLFSSSRSIFGSMDPNNP

SEQ ID NO: 16375 - protein, 70 aa, Synthetic construct
SDTLFSTLSSHQPVAWPNPREIAHLGNADMIQPGLIPLQPNLDFMDTFEPFQDLFSSSRSIFGSMLPASA

SEQ ID NO: 16376 - protein, 70 aa, Synthetic construct
KEFDLTMPDDLLTTLDDTCDLFAPLVQETNKQPPQTVNPIGHLPESLTKPDQVAPFTFLQPLPLSPGVLS

SEQ ID NO: 16377 - protein, 70 aa, Synthetic construct
KEFDLDALLGLLTTLDDTCDLFAPLVQETNKQPPQTVNPIGHLPESLTKPDQVAPFTFLQPLPLSPGVLS

SEQ ID NO: 16378 - protein, 70 aa, Synthetic construct
KEFDLDALLGIDDLEDDTCDLFAPLVQETNKQPPQTVNPIGHLPESLTKPDQVAPFTFLQPLPLSPGVLS

SEQ ID NO: 16379 - protein, 70 aa, Synthetic construct
KEFDLDALLGIDDLETMPDDLFAPLVQETNKQPPQTVNPIGHLPESLTKPDQVAPFTFLQPLPLSPGVLS

SEQ ID NO: 16380 - protein, 70 aa, Synthetic construct
KEFDLDALLGIDDLETMPDDLLTTLVQETNKQPPQTVNPIGHLPESLTKPDQVAPFTFLQPLPLSPGVLS

SEQ ID NO: 16381 - protein, 70 aa, Synthetic construct
KEFDLDALLGIDDLETMPDDLLTTLDDTCDKQPPQTVNPIGHLPESLTKPDQVAPFTFLQPLPLSPGVLS

SEQ ID NO: 16382 - protein, 70 aa, Synthetic construct
KEFDLDALLGIDDLETMPDDLLTTLDDTCDLFAPLTVNPIGHLPESLTKPDQVAPFTFLQPLPLSPGVLS

SEQ ID NO: 16383 - protein, 70 aa, Synthetic construct
KEFDLDALLGIDDLETMPDDLLTTLDDTCDLFAPLVQETNGHLPESLTKPDQVAPFTFLQPLPLSPGVLS

SEQ ID NO: 16384 - protein, 70 aa, Synthetic construct
KEFDLDALLGIDDLETMPDDLLTTLDDTCDLFAPLVQETNKQPPQSLTKPDQVAPFTFLQPLPLSPGVLS

SEQ ID NO: 16385 - protein, 70 aa, Synthetic construct
KEFDLDALLGIDDLETMPDDLLTTLDDTCDLFAPLVQETNKQPPQTVNPIDQVAPFTFLQPLPLSPGVLS

SEQ ID NO: 16386 - protein, 70 aa, Synthetic construct
KEFDLDALLGIDDLETMPDDLLTTLDDTCDLFAPLVQETNKQPPQTVNPIGHLPEFTFLQPLPLSPGVLS

SEQ ID NO: 16387 - protein, 70 aa, Synthetic construct
KEFDLDALLGIDDLETMPDDLLTTLDDTCDLFAPLVQETNKQPPQTVNPIGHLPESLTKPPLPLSPGVLS

SEQ ID NO: 16388 - protein, 70 aa, Synthetic construct
KEFDLDALLGIDDLETMPDDLLTTLDDTCDLFAPLVQETNKQPPQTVNPIGHLPESLTKPDQVAPPGVLS

SEQ ID NO: 16389 - protein, 70 aa, Synthetic construct
KEFDLDALLGIDDLETMPDDLLTTLDDTCDLFAPLVQETNKQPPQTVNPIGHLPESLTKPDQVAPFTFLQ

SEQ ID NO: 16390 - protein, 70 aa, Synthetic construct
WCAVHVQIAWEMQLDPHKLEVGAKLDLFGRPPAPGVFAGFHYPQDLARPLFPSTGAAHPASNPFGPSAHP

SEQ ID NO: 16391 - protein, 70 aa, Synthetic construct
WCAVHVQIAWQIYRHPHKLEVGAKLDLFGRPPAPGVFAGFHYPQDLARPLFPSTGAAHPASNPFGPSAHP

SEQ ID NO: 16392 - protein, 70 aa, Synthetic construct
LILTHFPKFLSMLEEEVYSQNSPIWDQDFLIQTVINPPPVAGTISYNSTSSSLEQPNAGSSSPACKASSG

SEQ ID NO: 16393 - protein, 70 aa, Synthetic construct
LILTHFPKFLSMLEEEVYSQNSPIWDQDFLSASSRNPPPVAGTISYNSTSSSLEQPNAGSSSPACKASSG

SEQ ID NO: 16394 - protein, 70 aa, Synthetic construct
LILTHFPKFLSMLEEEVYSQNSPIWDQDFLSASSRTSQLGAGTISYNSTSSSLEQPNAGSSSPACKASSG

SEQ ID NO: 16395 - protein, 70 aa, Synthetic construct
LILTHFPKFLSMLEEEVYSQNSPIWDQDFLSASSRTSQLGIQTVIYNSTSSSLEQPNAGSSSPACKASSG

SEQ ID NO: 16396 - protein, 70 aa, Synthetic construct
LILTHFPKFLSMLEEEVYSQNSPIWDQDFLSASSRTSQLGIQTVINPPPVAGTISYNSTSSSPACKASSG

SEQ ID NO: 16397 - protein, 70 aa, Synthetic construct
LILTHFPKFLSMLEEEVYSQNSPIWDQDFLSASSRTSQLGIQTVINPPPVAGTISYNSTSSSLEQKASSG

SEQ ID NO: 16398 - protein, 70 aa, Synthetic construct
LILTHFPKFLSMLEEEVYSQNSPIWDQDFLSASSRTSQLGIQTVINPPPVAGTISYNSTSSSLEQPNAGS

SEQ ID NO: 16399 - protein, 70 aa, Synthetic construct
AQELFQGSDLGMAEEAERPGEKAGQHSPLREEHVTCVQSILDEFLQTYGSLIPLSTDEVVEKLEDIFQQE

SEQ ID NO: 16400 - protein, 70 aa, Synthetic construct
SNVCSQGSDLGMAEEAERPGEKAGQHSPLREEHVTCVQSILDEFLQTYGSLIPLSTDEVVEKLEDIFQQE

SEQ ID NO: 16401 - protein, 70 aa, Synthetic construct
SNVCSIGDHVGMAEEAERPGEKAGQHSPLREEHVTCVQSILDEFLQTYGSLIPLSTDEVVEKLEDIFQQE

SEQ ID NO: 16402 - protein, 70 aa, Synthetic construct
SNVCSIGDHVAQELFAERPGEKAGQHSPLREEHVTCVQSILDEFLQTYGSLIPLSTDEVVEKLEDIFQQE

SEQ ID NO: 16403 - protein, 70 aa, Synthetic construct
SNVCSIGDHVAQELFQGSDLEKAGQHSPLREEHVTCVQSILDEFLQTYGSLIPLSTDEVVEKLEDIFQQE

SEQ ID NO: 16404 - protein, 70 aa, Synthetic construct
SNVCSIGDHVAQELFQGSDLGMAEEHSPLREEHVTCVQSILDEFLQTYGSLIPLSTDEVVEKLEDIFQQE

SEQ ID NO: 16405 - protein, 70 aa, Synthetic construct
SNVCSIGDHVAQELFQGSDLGMAEEAERPGEEHVTCVQSILDEFLQTYGSLIPLSTDEVVEKLEDIFQQE

SEQ ID NO: 16406 - protein, 70 aa, Synthetic construct
SNVCSIGDHVAQELFQGSDLGMAEEAERPGEKAGQCVQSILDEFLQTYGSLIPLSTDEVVEKLEDIFQQE

SEQ ID NO: 16407 - protein, 70 aa, Synthetic construct
SNVCSIGDHVAQELFQGSDLGMAEEAERPGEKAGQHSPLRLDEFLQTYGSLIPLSTDEVVEKLEDIFQQE

SEQ ID NO: 16408 - protein, 70 aa, Synthetic construct
SNVCSIGDHVAQELFQGSDLGMAEEAERPGEKAGQHSPLREEHVTCVQSILDEFLTDEVVEKLEDIFQQE

SEQ ID NO: 16409 - protein, 70 aa, Synthetic construct
SNVCSIGDHVAQELFQGSDLGMAEEAERPGEKAGQHSPLREEHVTCVQSILDEFLQTYGSEKLEDIFQQE

SEQ ID NO: 16410 - protein, 70 aa, Synthetic construct
SNVCSIGDHVAQELFQGSDLGMAEEAERPGEKAGQHSPLREEHVTCVQSILDEFLQTYGSLIPLSIFQQE

SEQ ID NO: 16411 - protein, 70 aa, Synthetic construct
SNVCSIGDHVAQELFQGSDLGMAEEAERPGEKAGQHSPLREEHVTCVQSILDEFLQTYGSLIPLSTDEVV

SEQ ID NO: 16412 - protein, 70 aa, Synthetic construct
TIGSSSEKEIDDVIDEIISLESSYNDEMLSYLPGGTTGLQLLDVYSSQGVATPAITVSNSCPAELPNIKR

SEQ ID NO: 16413 - protein, 70 aa, Synthetic construct
TIGSSSEKEIDDVIDEIISLESSYNDEMLSYLPGGTTGLQLPSTLPVSGNLLDVYTVSNSCPAELPNIKR

SEQ ID NO: 16414 - protein, 70 aa, Synthetic construct
TIGSSSEKEIDDVIDEIISLESSYNDEMLSYLPGGTTGLQLPSTLPVSGNLLDVYSSQGVCPAELPNIKR

SEQ ID NO: 16415 - protein, 70 aa, Synthetic construct
TIGSSSEKEIDDVIDEIISLESSYNDEMLSYLPGGTTGLQLPSTLPVSGNLLDVYSSQGVATPAIPNIKR

SEQ ID NO: 16416 - protein, 70 aa, Synthetic construct
TIGSSSEKEIDDVIDEIISLESSYNDEMLSYLPGGTTGLQLPSTLPVSGNLLDVYSSQGVATPAITVSNS

SEQ ID NO: 16417 - protein, 70 aa, Synthetic construct
PSDALLDLHFPFHLGLEDILMEEEEGVVGGLSGGALSPLRAASDPLLSSVSPAVSKASSRRSSFSMEEES

SEQ ID NO: 16418 - protein, 70 aa, Synthetic construct
PSDALLDLHFPSDHLGDLGDPFHLGLEDILLSGGALSPLRAASDPLLSSVSPAVSKASSRRSSFSMEEES

SEQ ID NO: 16419 - protein, 70 aa, Synthetic construct
PSDALLDLHFPSDHLGDLGDPFHLGLEDILMEEEELSPLRAASDPLLSSVSPAVSKASSRRSSFSMEEES

SEQ ID NO: 16420 - protein, 70 aa, Synthetic construct
PSDALLDLHFPSDHLGDLGDPFHLGLEDILMEEEEGVVGGAASDPLLSSVSPAVSKASSRRSSFSMEEES

SEQ ID NO: 16421 - protein, 70 aa, Synthetic construct
PSDALLDLHFPSDHLGDLGDPFHLGLEDILMEEEEGVVGGLSGGALLSSVSPAVSKASSRRSSFSMEEES

SEQ ID NO: 16422 - protein, 70 aa, Synthetic construct
PSDALLDLHFPSDHLGDLGDPFHLGLEDILMEEEEGVVGGLSGGALSPLRSPAVSKASSRRSSFSMEEES

SEQ ID NO: 16423 - protein, 70 aa, Synthetic construct
PSDALLDLHFPSDHLGDLGDPFHLGLEDILMEEEEGVVGGLSGGALSPLRAASDPKASSRRSSFSMEEES

SEQ ID NO: 16424 - protein, 70 aa, Synthetic construct
PSDALLDLHFPSDHLGDLGDPFHLGLEDILMEEEEGVVGGLSGGALSPLRAASDPLLSSVRSSFSMEEES

SEQ ID NO: 16425 - protein, 70 aa, Synthetic construct
PSDALLDLHFPSDHLGDLGDPFHLGLEDILMEEEEGVVGGLSGGALSPLRAASDPLLSSVSPAVSMEEES

SEQ ID NO: 16426 - protein, 70 aa, Synthetic construct
PSDALLDLHFPSDHLGDLGDPFHLGLEDILMEEEEGVVGGLSGGALSPLRAASDPLLSSVSPAVSKASSR

SEQ ID NO: 16427 - protein, 70 aa, Synthetic construct
EEMMDIENILDNLEDMDFTAFGDDDEIPQELLLGKHQLNELGSESAKIKAMGIMDKLSTDKTVKVLNILE

SEQ ID NO: 16428 - protein, 70 aa, Synthetic construct
EEMMDSSTFKRFTASIENILDNLEDMDFTAFGDDDHQLNELGSESAKIKAMGIMDKLSTDKTVKVLNILE

SEQ ID NO: 16429 - protein, 70 aa, Synthetic construct
EEMMDSSTFKRFTASIENILDNLEDMDFTAFGDDDEIPQELGSESAKIKAMGIMDKLSTDKTVKVLNILE

SEQ ID NO: 16430 - protein, 70 aa, Synthetic construct
EEMMDSSTFKRFTASIENILDNLEDMDFTAFGDDDEIPQELLLGKAKIKAMGIMDKLSTDKTVKVLNILE

SEQ ID NO: 16431 - protein, 70 aa, Synthetic construct
EEMMDSSTFKRFTASIENILDNLEDMDFTAFGDDDEIPQELLLGKHQLNEMGIMDKLSTDKTVKVLNILE

SEQ ID NO: 16432 - protein, 70 aa, Synthetic construct
EEMMDSSTFKRFTASIENILDNLEDMDFTAFGDDDEIPQELLLGKHQLNELGSESKLSTDKTVKVLNILE

SEQ ID NO: 16433 - protein, 70 aa, Synthetic construct
EEMMDSSTFKRFTASIENILDNLEDMDFTAFGDDDEIPQELLLGKHQLNELGSESAKIKAKTVKVLNILE

SEQ ID NO: 16434 - protein, 70 aa, Synthetic construct
EEMMDSSTFKRFTASIENILDNLEDMDFTAFGDDDEIPQELLLGKHQLNELGSESAKIKAMGIMDLNILE

SEQ ID NO: 16435 - protein, 70 aa, Synthetic construct
EEMMDSSTFKRFTASIENILDNLEDMDFTAFGDDDEIPQELLLGKHQLNELGSESAKIKAMGIMDKLSTD

SEQ ID NO: 16436 - protein, 70 aa, Synthetic construct
SEDMSIRYWDLGSFTNTVLYQGHAYPVWDLDISPYSLYFASGSHDRTARLWSFDRTYPLRIYAGHPNSNY

SEQ ID NO: 16437 - protein, 70 aa, Synthetic construct
TDNITSLTFSPDSGLRVWDIRNTYCSAPADGSSSELVGVYTGQMSNVLSVQFMACNLLLVTGITQENQEH

SEQ ID NO: 16438 - protein, 70 aa, Synthetic construct
TDNITSLTFSPDSGLIASASMDNSVRVWDIRNTYCSAPADGSSSELVGVYQFMACNLLLVTGITQENQEH

SEQ ID NO: 16439 - protein, 70 aa, Synthetic construct
QPVFNLAAYHQLFVGTERIRAPEIIFQPSLIGEEQAGIAETLQYILDRYPKDIQEMLVQNVFLTGGNTMY

SEQ ID NO: 16440 - protein, 70 aa, Synthetic construct
PGVEKPVTTVQPVFNTERIRAPEIIFQPSLIGEEQAGIAETLQYILDRYPKDIQEMLVQNVFLTGGNTMY

SEQ ID NO: 16441 - protein, 70 aa, Synthetic construct
PGVEKPVTTVQPVFNLAAYHQLFVGTERIRIGEEQAGIAETLQYILDRYPKDIQEMLVQNVFLTGGNTMY

SEQ ID NO: 16442 - protein, 70 aa, Synthetic construct
PGVEKPVTTVQPVFNLAAYHQLFVGTERIRAPEIIAGIAETLQYILDRYPKDIQEMLVQNVFLTGGNTMY

SEQ ID NO: 16443 - protein, 70 aa, Synthetic construct
PGVEKPVTTVQPVFNLAAYHQLFVGTERIRAPEIIFQPSLIGEEQLDRYPKDIQEMLVQNVFLTGGNTMY

SEQ ID NO: 16444 - protein, 70 aa, Synthetic construct
PGVEKPVTTVQPVFNLAAYHQLFVGTERIRAPEIIFQPSLIGEEQAGIAEKDIQEMLVQNVFLTGGNTMY

SEQ ID NO: 16445 - protein, 70 aa, Synthetic construct
PGVEKPVTTVQPVFNLAAYHQLFVGTERIRAPEIIFQPSLIGEEQAGIAETLQYIMLVQNVFLTGGNTMY

SEQ ID NO: 16446 - protein, 70 aa, Synthetic construct
PGVEKPVTTVQPVFNLAAYHQLFVGTERIRAPEIIFQPSLIGEEQAGIAETLQYILDRYPKDIQEGNTMY

SEQ ID NO: 16447 - protein, 70 aa, Synthetic construct
MVPGKSRSEECRGRPVIDRKRKFLDTDLAHDSEELFQDLSQLQEAWLAEAQVPDDEQFVPDFQSDNLVLH

SEQ ID NO: 16448 - protein, 70 aa, Synthetic construct
DGFYDSRSEECRGRPVIDRKRKFLDTDLAHDSEELFQDLSQLQEAWLAEAQVPDDEQFVPDFQSDNLVLH

SEQ ID NO: 16449 - protein, 70 aa, Synthetic construct
DGFYDQQVPFCRGRPVIDRKRKFLDTDLAHDSEELFQDLSQLQEAWLAEAQVPDDEQFVPDFQSDNLVLH

SEQ ID NO: 16450 - protein, 70 aa, Synthetic construct
DGFYDQQVPFMVPGKVIDRKRKFLDTDLAHDSEELFQDLSQLQEAWLAEAQVPDDEQFVPDFQSDNLVLH

SEQ ID NO: 16451 - protein, 70 aa, Synthetic construct
DGFYDQQVPFMVPGKSRSEERKFLDTDLAHDSEELFQDLSQLQEAWLAEAQVPDDEQFVPDFQSDNLVLH

SEQ ID NO: 16452 - protein, 70 aa, Synthetic construct
DGFYDQQVPFMVPGKSRSEECRGRPTDLAHDSEELFQDLSQLQEAWLAEAQVPDDEQFVPDFQSDNLVLH

SEQ ID NO: 16453 - protein, 70 aa, Synthetic construct
DGFYDQQVPFMVPGKSRSEECRGRPVIDRKDSEELFQDLSQLQEAWLAEAQVPDDEQFVPDFQSDNLVLH

SEQ ID NO: 16454 - protein, 70 aa, Synthetic construct
DGFYDQQVPFMVPGKSRSEECRGRPVIDRKRKFLDTDLAHDSEELFQDLSQLQEAWLAEADFQSDNLVLH

SEQ ID NO: 16455 - protein, 70 aa, Synthetic construct
DGFYDQQVPFMVPGKSRSEECRGRPVIDRKRKFLDTDLAHDSEELFQDLSQLQEAWLAEAQVPDDNLVLH

SEQ ID NO: 16456 - protein, 70 aa, Synthetic construct
DGFYDQQVPFMVPGKSRSEECRGRPVIDRKRKFLDTDLAHDSEELFQDLSQLQEAWLAEAQVPDDEQFVP

SEQ ID NO: 16457 - protein, 70 aa, Synthetic construct
EERNSKKDNSNFTCLVAIGRLQPYIVPQNSGEINVKPTEFITRFAVNGKFVYVDQRATAILGYLPQELLG

SEQ ID NO: 16458 - protein, 70 aa, Synthetic construct
SWPPNIVGMENFTCLVAIGRLQPYIVPQNSGEINVKPTEFITRFAVNGKFVYVDQRATAILGYLPQELLG

SEQ ID NO: 16459 - protein, 70 aa, Synthetic construct
SWPPNIVGMEEERNSKKDNSNFTCLVAIGRLQPYIKPTEFITRFAVNGKFVYVDQRATAILGYLPQELLG

SEQ ID NO: 16460 - protein, 70 aa, Synthetic construct
SWPPNIVGMEEERNSKKDNSNFTCLVAIGRLQPYIVPQNSGEINVVNGKFVYVDQRATAILGYLPQELLG

SEQ ID NO: 16461 - protein, 70 aa, Synthetic construct
SWPPNIVGMEEERNSKKDNSNFTCLVAIGRLQPYIVPQNSGEINVKPTEFVYVDQRATAILGYLPQELLG

SEQ ID NO: 16462 - protein, 70 aa, Synthetic construct
FPPSPSEMGELEATRQNQSTVAVHSHEPLLSDGAQLDFDALCDNDDTAMAAFMNYLEAEGGLGDPGDFSD

SEQ ID NO: 16463 - protein, 70 aa, Synthetic construct
NCRSMSEMGELEATRQNQSTVAVHSHEPLLSDGAQLDFDALCDNDDTAMAAFMNYLEAEGGLGDPGDFSD

SEQ ID NO: 16464 - protein, 70 aa, Synthetic construct
NCRSMSNKELLEATRQNQSTVAVHSHEPLLSDGAQLDFDALCDNDDTAMAAFMNYLEAEGGLGDPGDFSD

SEQ ID NO: 16465 - protein, 70 aa, Synthetic construct
NCRSMSNKELFPPSPQNQSTVAVHSHEPLLSDGAQLDFDALCDNDDTAMAAFMNYLEAEGGLGDPGDFSD

SEQ ID NO: 16466 - protein, 70 aa, Synthetic construct
NCRSMSNKELFPPSPSEMGEVAVHSHEPLLSDGAQLDFDALCDNDDTAMAAFMNYLEAEGGLGDPGDFSD

SEQ ID NO: 16467 - protein, 70 aa, Synthetic construct
NCRSMSNKELFPPSPSEMGELEATRHEPLLSDGAQLDFDALCDNDDTAMAAFMNYLEAEGGLGDPGDFSD

SEQ ID NO: 16468 - protein, 70 aa, Synthetic construct
NCRSMSNKELFPPSPSEMGELEATRQNQSTSDGAQLDFDALCDNDDTAMAAFMNYLEAEGGLGDPGDFSD

SEQ ID NO: 16469 - protein, 70 aa, Synthetic construct
NCRSMSNKELFPPSPSEMGELEATRQNQSTVAVHSLDFDALCDNDDTAMAAFMNYLEAEGGLGDPGDFSD

SEQ ID NO: 16470 - protein, 70 aa, Synthetic construct
NCRSMSNKELFPPSPSEMGELEATRQNQSTVAVHSHEPLLLCDNDDTAMAAFMNYLEAEGGLGDPGDFSD

SEQ ID NO: 16471 - protein, 70 aa, Synthetic construct
NCRSMSNKELFPPSPSEMGELEATRQNQSTVAVHSHEPLLSDGAQLDFDALCDNDDTAMAAFMNYLEAEG

SEQ ID NO: 16472 - protein, 70 aa, Synthetic construct
YLNRGDRWIQDEIEFPVVLDSPRDGNLKDFPVKELLGPDFGYVTREPLFESVTSLDSFGNLEVSPPVTVN

SEQ ID NO: 16473 - protein, 70 aa, Synthetic construct
YLNRGDRWIQDEIEFGYIEASPRDGNLKDFPVKELLGPDFGYVTREPLFESVTSLDSFGNLEVSPPVTVN

SEQ ID NO: 16474 - protein, 70 aa, Synthetic construct
YLNRGDRWIQDEIEFGYIEAPHKGFNLKDFPVKELLGPDFGYVTREPLFESVTSLDSFGNLEVSPPVTVN

SEQ ID NO: 16475 - protein, 70 aa, Synthetic construct
YLNRGDRWIQDEIEFGYIEAPHKGFPVVLDPVKELLGPDFGYVTREPLFESVTSLDSFGNLEVSPPVTVN

SEQ ID NO: 16476 - protein, 70 aa, Synthetic construct
YLNRGDRWIQDEIEFGYIEAPHKGFPVVLDSPRDGLGPDFGYVTREPLFESVTSLDSFGNLEVSPPVTVN

SEQ ID NO: 16477 - protein, 70 aa, Synthetic construct
YLNRGDRWIQDEIEFGYIEAPHKGFPVVLDSPRDGNLKDFPVKELLGPDFGYVTRDSFGNLEVSPPVTVN

SEQ ID NO: 16478 - protein, 70 aa, Synthetic construct
YLNRGDRWIQDEIEFGYIEAPHKGFPVVLDSPRDGNLKDFPVKELLGPDFGYVTREPLFESVTSLDSFGN

SEQ ID NO: 16479 - protein, 70 aa, Synthetic construct
SSLETVSTQELYSIPEDQEPEDQEPEEPTPAPWARLWALQDGFANLECVNDNYWFGRDKSCEYCFDEPLL

SEQ ID NO: 16480 - protein, 70 aa, Synthetic construct
QSSHSVSTQELYSIPEDQEPEDQEPEEPTPAPWARLWALQDGFANLECVNDNYWFGRDKSCEYCFDEPLL

SEQ ID NO: 16481 - protein, 70 aa, Synthetic construct
QSSHSSSGTLLYSIPEDQEPEDQEPEEPTPAPWARLWALQDGFANLECVNDNYWFGRDKSCEYCFDEPLL

SEQ ID NO: 16482 - protein, 70 aa, Synthetic construct
QSSHSSSGTLSSLETVSTQEEDQEPEEPTPAPWARLWALQDGFANLECVNDNYWFGRDKSCEYCFDEPLL

SEQ ID NO: 16483 - protein, 70 aa, Synthetic construct
QSSHSSSGTLSSLETVSTQELYSIPEEPTPAPWARLWALQDGFANLECVNDNYWFGRDKSCEYCFDEPLL

SEQ ID NO: 16484 - protein, 70 aa, Synthetic construct
QSSHSSSGTLSSLETVSTQELYSIPEDQEPAPWARLWALQDGFANLECVNDNYWFGRDKSCEYCFDEPLL

SEQ ID NO: 16485 - protein, 70 aa, Synthetic construct
QSSHSSSGTLSSLETVSTQELYSIPEDQEPEDQEPLWALQDGFANLECVNDNYWFGRDKSCEYCFDEPLL

SEQ ID NO: 16486 - protein, 70 aa, Synthetic construct
QSSHSSSGTLSSLETVSTQELYSIPEDQEPEDQEPEEPTPAPWARLECVNDNYWFGRDKSCEYCFDEPLL

SEQ ID NO: 16487 - protein, 70 aa, Synthetic construct
QSSHSSSGTLSSLETVSTQELYSIPEDQEPEDQEPEEPTPAPWARLWALQDGFANLECVNCEYCFDEPLL

SEQ ID NO: 16488 - protein, 70 aa, Synthetic construct
QSSHSSSGTLSSLETVSTQELYSIPEDQEPEDQEPEEPTPAPWARLWALQDGFANLECVNDNYWFDEPLL

SEQ ID NO: 16489 - protein, 70 aa, Synthetic construct
SPPPGGGGDGPGGPEPGWVDPRTWLSFQGPPGGPGIGPGVGPGSEVWGIPPCPPPYEFCGGMAYCGPQVG

SEQ ID NO: 16490 - protein, 70 aa, Synthetic construct
AGHLAGGGDGPGGPEPGWVDPRTWLSFQGPPGGPGIGPGVGPGSEVWGIPPCPPPYEFCGGMAYCGPQVG

SEQ ID NO: 16491 - protein, 70 aa, Synthetic construct
AGHLASDFAFPGGPEPGWVDPRTWLSFQGPPGGPGIGPGVGPGSEVWGIPPCPPPYEFCGGMAYCGPQVG

SEQ ID NO: 16492 - protein, 70 aa, Synthetic construct
AGHLASDFAFSPPPGPGWVDPRTWLSFQGPPGGPGIGPGVGPGSEVWGIPPCPPPYEFCGGMAYCGPQVG

SEQ ID NO: 16493 - protein, 70 aa, Synthetic construct
AGHLASDFAFSPPPGGGGDGPRTWLSFQGPPGGPGIGPGVGPGSEVWGIPPCPPPYEFCGGMAYCGPQVG

SEQ ID NO: 16494 - protein, 70 aa, Synthetic construct
AGHLASDFAFSPPPGGGGDGPGGPEPGWVDPRTWLIGPGVGPGSEVWGIPPCPPPYEFCGGMAYCGPQVG

SEQ ID NO: 16495 - protein, 70 aa, Synthetic construct
AGHLASDFAFSPPPGGGGDGPGGPEPGWVDPRTWLSFQGPGPGSEVWGIPPCPPPYEFCGGMAYCGPQVG

SEQ ID NO: 16496 - protein, 70 aa, Synthetic construct
AGHLASDFAFSPPPGGGGDGPGGPEPGWVDPRTWLSFQGPPGGPGVWGIPPCPPPYEFCGGMAYCGPQVG

SEQ ID NO: 16497 - protein, 70 aa, Synthetic construct
AGHLASDFAFSPPPGGGGDGPGGPEPGWVDPRTWLSFQGPPGGPGIGPGVPCPPPYEFCGGMAYCGPQVG

SEQ ID NO: 16498 - protein, 70 aa, Synthetic construct
AGHLASDFAFSPPPGGGGDGPGGPEPGWVDPRTWLSFQGPPGGPGIGPGVGPGSEVWGIPGMAYCGPQVG

SEQ ID NO: 16499 - protein, 70 aa, Synthetic construct
AGHLASDFAFSPPPGGGGDGPGGPEPGWVDPRTWLSFQGPPGGPGIGPGVGPGSEVWGIPPCPPPYEFCG

SEQ ID NO: 16500 - protein, 70 aa, Synthetic construct
LQKELEQFAKLLKQKRITLGYTQADVGLTLGVLFGFEALQLSFKNMCKLRPLLQKWVEEADNNENLQEIC

SEQ ID NO: 16501 - protein, 70 aa, Synthetic construct
LQKELEQFAKLLKQKRITLGYTQADVGLTLGVLFGKVFSQTTICRFEALQLSFKNMCKLRPLLQKWVEEA

SEQ ID NO: 16502 - protein, 70 aa, Synthetic construct
DFRYSKSHGPDVIVVGPLLRHYQQLHNIHKRGLCSPEKHLGEITYPFACRKSNCSHCALLLLHLSPGAAG

SEQ ID NO: 16503 - protein, 70 aa, Synthetic construct
CEVSEEEFREGFDSDINNRLVYHDFFRDPLNWSKTEEAFPGGPLGALRAMCKRTDPVPVTIALDSLSWLL

SEQ ID NO: 16504 - protein, 70 aa, Synthetic construct
LCGEQEEFREGFDSDINNRLVYHDFFRDPLNWSKTEEAFPGGPLGALRAMCKRTDPVPVTIALDSLSWLL

SEQ ID NO: 16505 - protein, 70 aa, Synthetic construct
LCGEQVHILGGFDSDINNRLVYHDFFRDPLNWSKTEEAFPGGPLGALRAMCKRTDPVPVTIALDSLSWLL

SEQ ID NO: 16506 - protein, 70 aa, Synthetic construct
LCGEQVHILGCEVSEEEFREGFDSDFRDPLNWSKTEEAFPGGPLGALRAMCKRTDPVPVTIALDSLSWLL

SEQ ID NO: 16507 - protein, 70 aa, Synthetic construct
LCGEQVHILGCEVSEEEFREGFDSDINNRLVYHDFEEAFPGGPLGALRAMCKRTDPVPVTIALDSLSWLL

SEQ ID NO: 16508 - protein, 70 aa, Synthetic construct
LCGEQVHILGCEVSEEEFREGFDSDINNRLVYHDFFRDPLGGPLGALRAMCKRTDPVPVTIALDSLSWLL

SEQ ID NO: 16509 - protein, 70 aa, Synthetic construct
LCGEQVHILGCEVSEEEFREGFDSDINNRLVYHDFFRDPLNWSKTEEAFPCKRTDPVPVTIALDSLSWLL

SEQ ID NO: 16510 - protein, 70 aa, Synthetic construct
LCGEQVHILGCEVSEEEFREGFDSDINNRLVYHDFFRDPLNWSKTEEAFPGGPLGPVPVTIALDSLSWLL

SEQ ID NO: 16511 - protein, 70 aa, Synthetic construct
LCGEQVHILGCEVSEEEFREGFDSDINNRLVYHDFFRDPLNWSKTEEAFPGGPLGALRAMIALDSLSWLL

SEQ ID NO: 16512 - protein, 70 aa, Synthetic construct
NVTTENLEKWEVLTDSEIIRRAQGQADESSENEEEEIELIPEKHINHAAALQWTENLLDYLEQQGDMILP

SEQ ID NO: 16513 - protein, 70 aa, Synthetic construct
NVTTENLEKWLEVDSSEIIRRAQGQADESSENEEEEIELIPEKHINHAAALQWTENLLDYLEQQGDMILP

SEQ ID NO: 16514 - protein, 70 aa, Synthetic construct
NVTTENLEKWLEVDSTEPGYEVLTDADESSENEEEEIELIPEKHINHAAALQWTENLLDYLEQQGDMILP

SEQ ID NO: 16515 - protein, 70 aa, Synthetic construct
NVTTENLEKWLEVDSTEPGYEVLTDSEIIRENEEEEIELIPEKHINHAAALQWTENLLDYLEQQGDMILP

SEQ ID NO: 16516 - protein, 70 aa, Synthetic construct
NVTTENLEKWLEVDSTEPGYEVLTDSEIIRRAQGQEIELIPEKHINHAAALQWTENLLDYLEQQGDMILP

SEQ ID NO: 16517 - protein, 70 aa, Synthetic construct
NVTTENLEKWLEVDSTEPGYEVLTDSEIIRRAQGQADESSPEKHINHAAALQWTENLLDYLEQQGDMILP

SEQ ID NO: 16518 - protein, 70 aa, Synthetic construct
NVTTENLEKWLEVDSTEPGYEVLTDSEIIRRAQGQADESSENEEENHAAALQWTENLLDYLEQQGDMILP

SEQ ID NO: 16519 - protein, 70 aa, Synthetic construct
NVTTENLEKWLEVDSTEPGYEVLTDSEIIRRAQGQADESSENEEEEIELILQWTENLLDYLEQQGDMILP

SEQ ID NO: 16520 - protein, 70 aa, Synthetic construct
PVSPGISDANDHDLREPSGIKNPGGASASARVSSWDSQSYDIEQICLGASNPPWASTLFEIDEFVKIYDL

SEQ ID NO: 16521 - protein, 70 aa, Synthetic construct
PSAITISDANDHDLREPSGIKNPGGASASARVSSWDSQSYDIEQICLGASNPPWASTLFEIDEFVKIYDL

SEQ ID NO: 16522 - protein, 70 aa, Synthetic construct
PSAITTANIRDHDLREPSGIKNPGGASASARVSSWDSQSYDIEQICLGASNPPWASTLFEIDEFVKIYDL

SEQ ID NO: 16523 - protein, 70 aa, Synthetic construct
PSAITTANIRPVSPGEPSGIKNPGGASASARVSSWDSQSYDIEQICLGASNPPWASTLFEIDEFVKIYDL

SEQ ID NO: 16524 - protein, 70 aa, Synthetic construct
PSAITTANIRPVSPGISDANKNPGGASASARVSSWDSQSYDIEQICLGASNPPWASTLFEIDEFVKIYDL

SEQ ID NO: 16525 - protein, 70 aa, Synthetic construct
PSAITTANIRPVSPGISDANDHDLRASASARVSSWDSQSYDIEQICLGASNPPWASTLFEIDEFVKIYDL

SEQ ID NO: 16526 - protein, 70 aa, Synthetic construct
PSAITTANIRPVSPGISDANDHDLREPSGIRVSSWDSQSYDIEQICLGASNPPWASTLFEIDEFVKIYDL

SEQ ID NO: 16527 - protein, 70 aa, Synthetic construct
PSAITTANIRPVSPGISDANDHDLREPSGIKNPGGDSQSYDIEQICLGASNPPWASTLFEIDEFVKIYDL

SEQ ID NO: 16528 - protein, 70 aa, Synthetic construct
PSAITTANIRPVSPGISDANDHDLREPSGIKNPGGASASADIEQICLGASNPPWASTLFEIDEFVKIYDL

SEQ ID NO: 16529 - protein, 70 aa, Synthetic construct
PSAITTANIRPVSPGISDANDHDLREPSGIKNPGGASASARVSSWCLGASNPPWASTLFEIDEFVKIYDL

SEQ ID NO: 16530 - protein, 70 aa, Synthetic construct
PSAITTANIRPVSPGISDANDHDLREPSGIKNPGGASASARVSSWDSQSYNPPWASTLFEIDEFVKIYDL

SEQ ID NO: 16531 - protein, 70 aa, Synthetic construct
PSAITTANIRPVSPGISDANDHDLREPSGIKNPGGASASARVSSWDSQSYDIEQISTLFEIDEFVKIYDL

SEQ ID NO: 16532 - protein, 70 aa, Synthetic construct
WLSFSRTGEEARVSLTEFCQIFGFPYGTTFPQTKHLTFYELKTSSGSLVQKGHASSCTGNYIHPESMLFE

SEQ ID NO: 16533 - protein, 70 aa, Synthetic construct
WLSFSLDCSNARVSLTEFCQIFGFPYGTTFPQTKHLTFYELKTSSGSLVQKGHASSCTGNYIHPESMLFE

SEQ ID NO: 16534 - protein, 70 aa, Synthetic construct
WLSFSLDCSNCPYHITEFCQIFGFPYGTTFPQTKHLTFYELKTSSGSLVQKGHASSCTGNYIHPESMLFE

SEQ ID NO: 16535 - protein, 70 aa, Synthetic construct
WLSFSLDCSNCPYHIRTGEEIFGFPYGTTFPQTKHLTFYELKTSSGSLVQKGHASSCTGNYIHPESMLFE

SEQ ID NO: 16536 - protein, 70 aa, Synthetic construct
WLSFSLDCSNCPYHIRTGEEARVSLTEFCQIFGFPYGTTFPQTKHLTFYEKGHASSCTGNYIHPESMLFE

SEQ ID NO: 16537 - protein, 70 aa, Synthetic construct
WLSFSLDCSNCPYHIRTGEEARVSLTEFCQIFGFPYGTTFPQTKHLTFYELKTSSSCTGNYIHPESMLFE

SEQ ID NO: 16538 - protein, 70 aa, Synthetic construct
WLSFSLDCSNCPYHIRTGEEARVSLTEFCQIFGFPYGTTFPQTKHLTFYELKTSSGSLVQKGHASSMLFE

SEQ ID NO: 16539 - protein, 70 aa, Synthetic construct
QSTDYYAYFEDSPGYSGCDAQAVPSNNIYMEQAWAVNQPYTCSYPGNMFKSKDSDLDMALNQYSQPEYFT

SEQ ID NO: 16540 - protein, 70 aa, Synthetic construct
HPAAGYAYFEDSPGYSGCDAQAVPSNNIYMEQAWAVNQPYTCSYPGNMFKSKDSDLDMALNQYSQPEYFT

SEQ ID NO: 16541 - protein, 70 aa, Synthetic construct
HPAAGSNCYMQSTDYYAYFEQAVPSNNIYMEQAWAVNQPYTCSYPGNMFKSKDSDLDMALNQYSQPEYFT

SEQ ID NO: 16542 - protein, 70 aa, Synthetic construct
HPAAGSNCYMQSTDYYAYFEDSPGYNNIYMEQAWAVNQPYTCSYPGNMFKSKDSDLDMALNQYSQPEYFT

SEQ ID NO: 16543 - protein, 70 aa, Synthetic construct
HPAAGSNCYMQSTDYYAYFEDSPGYSGCDAEQAWAVNQPYTCSYPGNMFKSKDSDLDMALNQYSQPEYFT

SEQ ID NO: 16544 - protein, 70 aa, Synthetic construct
HPAAGSNCYMQSTDYYAYFEDSPGYSGCDAQAVPSVNQPYTCSYPGNMFKSKDSDLDMALNQYSQPEYFT

SEQ ID NO: 16545 - protein, 70 aa, Synthetic construct
HPAAGSNCYMQSTDYYAYFEDSPGYSGCDAQAVPSNNIYMTCSYPGNMFKSKDSDLDMALNQYSQPEYFT

SEQ ID NO: 16546 - protein, 70 aa, Synthetic construct
HPAAGSNCYMQSTDYYAYFEDSPGYSGCDAQAVPSNNIYMEQAWAGNMFKSKDSDLDMALNQYSQPEYFT

SEQ ID NO: 16547 - protein, 70 aa, Synthetic construct
HPAAGSNCYMQSTDYYAYFEDSPGYSGCDAQAVPSNNIYMEQAWAVNQPYSKDSDLDMALNQYSQPEYFT

SEQ ID NO: 16548 - protein, 70 aa, Synthetic construct
HPAAGSNCYMQSTDYYAYFEDSPGYSGCDAQAVPSNNIYMEQAWAVNQPYTCSYPLDMALNQYSQPEYFT

SEQ ID NO: 16549 - protein, 70 aa, Synthetic construct
HPAAGSNCYMQSTDYYAYFEDSPGYSGCDAQAVPSNNIYMEQAWAVNQPYTCSYPGNMFKNQYSQPEYFT

SEQ ID NO: 16550 - protein, 70 aa, Synthetic construct
HPAAGSNCYMQSTDYYAYFEDSPGYSGCDAQAVPSNNIYMEQAWAVNQPYTCSYPGNMFKSKDSDPEYFT

SEQ ID NO: 16551 - protein, 70 aa, Synthetic construct
HPAAGSNCYMQSTDYYAYFEDSPGYSGCDAQAVPSNNIYMEQAWAVNQPYTCSYPGNMFKSKDSDLDMAL

SEQ ID NO: 16552 - protein, 70 aa, Synthetic construct
EAFSHFTKIITPAITRVVDFAKKLPMFCELPCEDQIMSLRAAVRYDPESETLTLNGEMAVTRGQLKNGGL

SEQ ID NO: 16553 - protein, 70 aa, Synthetic construct
EAFSHFTKIITPAITRVVDFAKKLPMFCELPCEDQIILLKAAVRYDPESETLTLNGEMAVTRGQLKNGGL

SEQ ID NO: 16554 - protein, 70 aa, Synthetic construct
EAFSHFTKIITPAITRVVDFAKKLPMFCELPCEDQIILLKGCCMEIMSLRTLTLNGEMAVTRGQLKNGGL

SEQ ID NO: 16555 - protein, 70 aa, Synthetic construct
EAFSHFTKIITPAITRVVDFAKKLPMFCELPCEDQIILLKGCCMEIMSLRAAVRYGEMAVTRGQLKNGGL

SEQ ID NO: 16556 - protein, 70 aa, Synthetic construct
EAFSHFTKIITPAITRVVDFAKKLPMFCELPCEDQIILLKGCCMEIMSLRAAVRYDPESETLTLNGEMAV

SEQ ID NO: 16557 - protein, 70 aa, Synthetic construct
GMSLSSFNLDDTEVALLQAVLLMSSDRPGLACVERIEKYQDSFLLAFEHYINYRKHHVTHFWPKLLMKVT

SEQ ID NO: 16558 - protein, 70 aa, Synthetic construct
GVVSDAIFDLGMSLSLLQAVLLMSSDRPGLACVERIEKYQDSFLLAFEHYINYRKHHVTHFWPKLLMKVT

SEQ ID NO: 16559 - protein, 70 aa, Synthetic construct
GVVSDAIFDLGMSLSSFNLDDTEVADRPGLACVERIEKYQDSFLLAFEHYINYRKHHVTHFWPKLLMKVT

SEQ ID NO: 16560 - protein, 70 aa, Synthetic construct
GVVSDAIFDLGMSLSSFNLDDTEVALLQAVACVERIEKYQDSFLLAFEHYINYRKHHVTHFWPKLLMKVT

SEQ ID NO: 16561 - protein, 70 aa, Synthetic construct
GVVSDAIFDLGMSLSSFNLDDTEVALLQAVLLMSSDRPGLACVERIEKYQDSFLLHHVTHFWPKLLMKVT

SEQ ID NO: 16562 - protein, 70 aa, Synthetic construct
GVVSDAIFDLGMSLSSFNLDDTEVALLQAVLLMSSDRPGLACVERIEKYQDSFLLAFEHYINYRKHHVTH

SEQ ID NO: 16563 - protein, 70 aa, Synthetic construct
LQNRFKLVNSANIRLTAMTLLECKESGRQFCIAVTHLKARTGWERFRSAQGCDLLQNLQNITQGAKIPLI

SEQ ID NO: 16564 - protein, 70 aa, Synthetic construct
LQNRFKLVNSANIRLTAMTLKTNQVAIAQTLECKESGRQFCIAVTFRSAQGCDLLQNLQNITQGAKIPLI

SEQ ID NO: 16565 - protein, 70 aa, Synthetic construct
YGAPLAEALRTAPPAAPLAGLYYGTLGTPGPYPGPLSPPPEAPPLESAEPLGPAADLWADVDLTEFDQYL

SEQ ID NO: 16566 - protein, 70 aa, Synthetic construct
TELSRAEALRTAPPAAPLAGLYYGTLGTPGPYPGPLSPPPEAPPLESAEPLGPAADLWADVDLTEFDQYL

SEQ ID NO: 16567 - protein, 70 aa, Synthetic construct
TELSRDPGGCTAPPAAPLAGLYYGTLGTPGPYPGPLSPPPEAPPLESAEPLGPAADLWADVDLTEFDQYL

SEQ ID NO: 16568 - protein, 70 aa, Synthetic construct
TELSRDPGGCYGAPLAPLAGLYYGTLGTPGPYPGPLSPPPEAPPLESAEPLGPAADLWADVDLTEFDQYL

SEQ ID NO: 16569 - protein, 70 aa, Synthetic construct
TELSRDPGGCYGAPLAEALRLYYGTLGTPGPYPGPLSPPPEAPPLESAEPLGPAADLWADVDLTEFDQYL

SEQ ID NO: 16570 - protein, 70 aa, Synthetic construct
TELSRDPGGCYGAPLAEALRTAPPALGTPGPYPGPLSPPPEAPPLESAEPLGPAADLWADVDLTEFDQYL

SEQ ID NO: 16571 - protein, 70 aa, Synthetic construct
TELSRDPGGCYGAPLAEALRTAPPAAPLAGPYPGPLSPPPEAPPLESAEPLGPAADLWADVDLTEFDQYL

SEQ ID NO: 16572 - protein, 70 aa, Synthetic construct
TELSRDPGGCYGAPLAEALRTAPPAAPLAGLYYGTLSPPPEAPPLESAEPLGPAADLWADVDLTEFDQYL

SEQ ID NO: 16573 - protein, 70 aa, Synthetic construct
TELSRDPGGCYGAPLAEALRTAPPAAPLAGLYYGTLGTPGEAPPLESAEPLGPAADLWADVDLTEFDQYL

SEQ ID NO: 16574 - protein, 70 aa, Synthetic construct
TELSRDPGGCYGAPLAEALRTAPPAAPLAGLYYGTLGTPGPYPGPESAEPLGPAADLWADVDLTEFDQYL

SEQ ID NO: 16575 - protein, 70 aa, Synthetic construct
TELSRDPGGCYGAPLAEALRTAPPAAPLAGLYYGTLGTPGPYPGPLSPPPLGPAADLWADVDLTEFDQYL

SEQ ID NO: 16576 - protein, 70 aa, Synthetic construct
TELSRDPGGCYGAPLAEALRTAPPAAPLAGLYYGTLGTPGPYPGPLSPPPEAPPLDLWADVDLTEFDQYL

SEQ ID NO: 16577 - protein, 70 aa, Synthetic construct
AADLWADVDLTEFDQYLNCSRTRPDAPGLPYHVALAKLGPRAMSCPEESSLISALSDASSAVYYSACISG

SEQ ID NO: 16578 - protein, 70 aa, Synthetic construct
PLESAEPLGPAADLWADVDLTEFDQAPGLPYHVALAKLGPRAMSCPEESSLISALSDASSAVYYSACISG

SEQ ID NO: 16579 - protein, 70 aa, Synthetic construct
PLESAEPLGPAADLWADVDLTEFDQYLNCSYHVALAKLGPRAMSCPEESSLISALSDASSAVYYSACISG

SEQ ID NO: 16580 - protein, 70 aa, Synthetic construct
PLESAEPLGPAADLWADVDLTEFDQYLNCSRTRPDAKLGPRAMSCPEESSLISALSDASSAVYYSACISG

SEQ ID NO: 16581 - protein, 70 aa, Synthetic construct
PLESAEPLGPAADLWADVDLTEFDQYLNCSRTRPDAPGLPRAMSCPEESSLISALSDASSAVYYSACISG

SEQ ID NO: 16582 - protein, 70 aa, Synthetic construct
PLESAEPLGPAADLWADVDLTEFDQYLNCSRTRPDAPGLPYHVALPEESSLISALSDASSAVYYSACISG

SEQ ID NO: 16583 - protein, 70 aa, Synthetic construct
PLESAEPLGPAADLWADVDLTEFDQYLNCSRTRPDAPGLPYHVALAKLGPRAMSCSDASSAVYYSACISG

SEQ ID NO: 16584 - protein, 70 aa, Synthetic construct
PLESAEPLGPAADLWADVDLTEFDQYLNCSRTRPDAPGLPYHVALAKLGPRAMSCPEESSAVYYSACISG

SEQ ID NO: 16585 - protein, 70 aa, Synthetic construct
PLESAEPLGPAADLWADVDLTEFDQYLNCSRTRPDAPGLPYHVALAKLGPRAMSCPEESSLISALACISG

SEQ ID NO: 16586 - protein, 70 aa, Synthetic construct
FQPGVDDDSLARILSFSDSDFGGEEEEEEEGSVGNLDNLSCFHPADIFGTSDPGGLASWTHSYSGCSFTS

SEQ ID NO: 16587 - protein, 70 aa, Synthetic construct
PTHPGDDDSLARILSFSDSDFGGEEEEEEEGSVGNLDNLSCFHPADIFGTSDPGGLASWTHSYSGCSFTS

SEQ ID NO: 16588 - protein, 70 aa, Synthetic construct
PTHPGLPGPGFQPGVDDDSLARILSFSDSDGSVGNLDNLSCFHPADIFGTSDPGGLASWTHSYSGCSFTS

SEQ ID NO: 16589 - protein, 70 aa, Synthetic construct
PTHPGLPGPGFQPGVDDDSLARILSFSDSDFGGEELDNLSCFHPADIFGTSDPGGLASWTHSYSGCSFTS

SEQ ID NO: 16590 - protein, 70 aa, Synthetic construct
PTHPGLPGPGFQPGVDDDSLARILSFSDSDFGGEEEEEEECFHPADIFGTSDPGGLASWTHSYSGCSFTS

SEQ ID NO: 16591 - protein, 70 aa, Synthetic construct
PTHPGLPGPGFQPGVDDDSLARILSFSDSDFGGEEEEEEEGSVGNLDNLSCFHPALASWTHSYSGCSFTS

SEQ ID NO: 16592 - protein, 70 aa, Synthetic construct
PTHPGLPGPGFQPGVDDDSLARILSFSDSDFGGEEEEEEEGSVGNLDNLSCFHPADIFGTHSYSGCSFTS

SEQ ID NO: 16593 - protein, 70 aa, Synthetic construct
PTHPGLPGPGFQPGVDDDSLARILSFSDSDFGGEEEEEEEGSVGNLDNLSCFHPADIFGTSDPGGLASWT

SEQ ID NO: 16594 - protein, 70 aa, Synthetic construct
PDYSLGPHYTSQKVSDSLDNIEAPHFPLPGLSPPGDASSCFLESLMGFSEPAAEALDPFIDSQFEDTVPA

SEQ ID NO: 16595 - protein, 70 aa, Synthetic construct
CDSFEGPHYTSQKVSDSLDNIEAPHFPLPGLSPPGDASSCFLESLMGFSEPAAEALDPFIDSQFEDTVPA

SEQ ID NO: 16596 - protein, 70 aa, Synthetic construct
CDSFELLQALSQKVSDSLDNIEAPHFPLPGLSPPGDASSCFLESLMGFSEPAAEALDPFIDSQFEDTVPA

SEQ ID NO: 16597 - protein, 70 aa, Synthetic construct
CDSFELLQALPDYSLDSLDNIEAPHFPLPGLSPPGDASSCFLESLMGFSEPAAEALDPFIDSQFEDTVPA

SEQ ID NO: 16598 - protein, 70 aa, Synthetic construct
CDSFELLQALPDYSLGPHYTIEAPHFPLPGLSPPGDASSCFLESLMGFSEPAAEALDPFIDSQFEDTVPA

SEQ ID NO: 16599 - protein, 70 aa, Synthetic construct
CDSFELLQALPDYSLGPHYTSQKVSFPLPGLSPPGDASSCFLESLMGFSEPAAEALDPFIDSQFEDTVPA

SEQ ID NO: 16600 - protein, 70 aa, Synthetic construct
CDSFELLQALPDYSLGPHYTSQKVSDSLDNLSPPGDASSCFLESLMGFSEPAAEALDPFIDSQFEDTVPA

SEQ ID NO: 16601 - protein, 70 aa, Synthetic construct
CDSFELLQALPDYSLGPHYTSQKVSDSLDNIEAPHDASSCFLESLMGFSEPAAEALDPFIDSQFEDTVPA

SEQ ID NO: 16602 - protein, 70 aa, Synthetic construct
CDSFELLQALPDYSLGPHYTSQKVSDSLDNIEAPHFPLPGFLESLMGFSEPAAEALDPFIDSQFEDTVPA

SEQ ID NO: 16603 - protein, 70 aa, Synthetic construct
CDSFELLQALPDYSLGPHYTSQKVSDSLDNIEAPHFPLPGLSPPGMGFSEPAAEALDPFIDSQFEDTVPA

SEQ ID NO: 16604 - protein, 70 aa, Synthetic construct
CDSFELLQALPDYSLGPHYTSQKVSDSLDNIEAPHFPLPGLSPPGDASSCFLESLLDPFIDSQFEDTVPA

SEQ ID NO: 16605 - protein, 70 aa, Synthetic construct
CDSFELLQALPDYSLGPHYTSQKVSDSLDNIEAPHFPLPGLSPPGDASSCFLESLMGFSEDSQFEDTVPA

SEQ ID NO: 16606 - protein, 70 aa, Synthetic construct
CDSFELLQALPDYSLGPHYTSQKVSDSLDNIEAPHFPLPGLSPPGDASSCFLESLMGFSEPAAEADTVPA

SEQ ID NO: 16607 - protein, 70 aa, Synthetic construct
CDSFELLQALPDYSLGPHYTSQKVSDSLDNIEAPHFPLPGLSPPGDASSCFLESLMGFSEPAAEALDPFI

SEQ ID NO: 16608 - protein, 70 aa, Synthetic construct
KALEDDEELAHLGLGVDVAKGDDELGTLENLETNDPHLDDLLNGDEFDLLAYTDPELDTGDKKDIFNEHL

SEQ ID NO: 16609 - protein, 70 aa, Synthetic construct
PELDDDEELAHLGLGVDVAKGDDELGTLENLETNDPHLDDLLNGDEFDLLAYTDPELDTGDKKDIFNEHL

SEQ ID NO: 16610 - protein, 70 aa, Synthetic construct
PELDDDFDAHHLGLGVDVAKGDDELGTLENLETNDPHLDDLLNGDEFDLLAYTDPELDTGDKKDIFNEHL

SEQ ID NO: 16611 - protein, 70 aa, Synthetic construct
PELDDDFDAHKALEDVDVAKGDDELGTLENLETNDPHLDDLLNGDEFDLLAYTDPELDTGDKKDIFNEHL

SEQ ID NO: 16612 - protein, 70 aa, Synthetic construct
PELDDDFDAHKALEDDEELAGDDELGTLENLETNDPHLDDLLNGDEFDLLAYTDPELDTGDKKDIFNEHL

SEQ ID NO: 16613 - protein, 70 aa, Synthetic construct
PELDDDFDAHKALEDDEELAHLGLGGTLENLETNDPHLDDLLNGDEFDLLAYTDPELDTGDKKDIFNEHL

SEQ ID NO: 16614 - protein, 70 aa, Synthetic construct
PELDDDFDAHKALEDDEELAHLGLGVDVAKLETNDPHLDDLLNGDEFDLLAYTDPELDTGDKKDIFNEHL

SEQ ID NO: 16615 - protein, 70 aa, Synthetic construct
PELDDDFDAHKALEDDEELAHLGLGVDVAKGDDELPHLDDLLNGDEFDLLAYTDPELDTGDKKDIFNEHL

SEQ ID NO: 16616 - protein, 70 aa, Synthetic construct
PELDDDFDAHKALEDDEELAHLGLGVDVAKGDDELGTLENLLNGDEFDLLAYTDPELDTGDKKDIFNEHL

SEQ ID NO: 16617 - protein, 70 aa, Synthetic construct
PELDDDFDAHKALEDDEELAHLGLGVDVAKGDDELGTLENLETNDEFDLLAYTDPELDTGDKKDIFNEHL

SEQ ID NO: 16618 - protein, 70 aa, Synthetic construct
PELDDDFDAHKALEDDEELAHLGLGVDVAKGDDELGTLENLETNDPHLDDLLNGDEFDLLAYTDPFNEHL

SEQ ID NO: 16619 - protein, 70 aa, Synthetic construct
PELDDDFDAHKALEDDEELAHLGLGVDVAKGDDELGTLENLETNDPHLDDLLNGDEFDLLAYTDPELDTG

SEQ ID NO: 16620 - protein, 70 aa, Synthetic construct
KLPEDIMKLLEQSEWLLNEPGVQPTSVYGDFSCKEEPEIDSPGGDIGLSLQRVFTDLKNMDATWLDSLLT

SEQ ID NO: 16621 - protein, 70 aa, Synthetic construct
KLPEDIMKLLEQSEWQPTNVGVQPTSVYGDFSCKEEPEIDSPGGDIGLSLQRVFTDLKNMDATWLDSLLT

SEQ ID NO: 16622 - protein, 70 aa, Synthetic construct
KLPEDIMKLLEQSEWQPTNVDGKGYSVYGDFSCKEEPEIDSPGGDIGLSLQRVFTDLKNMDATWLDSLLT

SEQ ID NO: 16623 - protein, 70 aa, Synthetic construct
KLPEDIMKLLEQSEWQPTNVDGKGYLLNEPFSCKEEPEIDSPGGDIGLSLQRVFTDLKNMDATWLDSLLT

SEQ ID NO: 16624 - protein, 70 aa, Synthetic construct
KLPEDIMKLLEQSEWQPTNVDGKGYLLNEPGVQPTEPEIDSPGGDIGLSLQRVFTDLKNMDATWLDSLLT

SEQ ID NO: 16625 - protein, 70 aa, Synthetic construct
KLPEDIMKLLEQSEWQPTNVDGKGYLLNEPGVQPTSVYGDSPGGDIGLSLQRVFTDLKNMDATWLDSLLT

SEQ ID NO: 16626 - protein, 70 aa, Synthetic construct
KLPEDIMKLLEQSEWQPTNVDGKGYLLNEPGVQPTSVYGDFSCKEIGLSLQRVFTDLKNMDATWLDSLLT

SEQ ID NO: 16627 - protein, 70 aa, Synthetic construct
KLPEDIMKLLEQSEWQPTNVDGKGYLLNEPGVQPTSVYGDFSCKEEPEIDQRVFTDLKNMDATWLDSLLT

SEQ ID NO: 16628 - protein, 70 aa, Synthetic construct
KLPEDIMKLLEQSEWQPTNVDGKGYLLNEPGVQPTSVYGDFSCKEEPEIDSPGGDIGLSLDATWLDSLLT

SEQ ID NO: 16629 - protein, 70 aa, Synthetic construct
VDRLEPGELIPNGPFSFYGDYQSEYYGPGGNYDFFPQGPPSSQAQTPVDLPFVPSSGPSGTPLGGLEHPL

SEQ ID NO: 16630 - protein, 70 aa, Synthetic construct
FRSPRPGELIPNGPFSFYGDYQSEYYGPGGNYDFFPQGPPSSQAQTPVDLPFVPSSGPSGTPLGGLEHPL

SEQ ID NO: 16631 - protein, 70 aa, Synthetic construct
FRSPRRMRPLVDRLEPGELIPNGPFSFYGDYQSEYYGPGGNYDFFTPVDLPFVPSSGPSGTPLGGLEHPL

SEQ ID NO: 16632 - protein, 70 aa, Synthetic construct
FRSPRRMRPLVDRLEPGELIPNGPFSFYGDYQSEYYGPGGNYDFFPQGPPPFVPSSGPSGTPLGGLEHPL

SEQ ID NO: 16633 - protein, 70 aa, Synthetic construct
FRSPRRMRPLVDRLEPGELIPNGPFSFYGDYQSEYYGPGGNYDFFPQGPPSSQAQTPVDLTPLGGLEHPL

SEQ ID NO: 16634 - protein, 70 aa, Synthetic construct
FRSPRRMRPLVDRLEPGELIPNGPFSFYGDYQSEYYGPGGNYDFFPQGPPSSQAQTPVDLPFVPSLEHPL

SEQ ID NO: 16635 - protein, 70 aa, Synthetic construct
KRNLNLVSSTASIKDLADVDLRIVMCLMCGDPFSADDILFPVLQSQTCKSSHCGSNNSVLLELPIGLHKK

SEQ ID NO: 16636 - protein, 70 aa, Synthetic construct
SQVLKGLLDSKRNLNLVSSTASIKDLADVDLRIVMCLMCGPVLQSQTCKSSHCGSNNSVLLELPIGLHKK

SEQ ID NO: 16637 - protein, 70 aa, Synthetic construct
SQVLKGLLDSKRNLNLVSSTASIKDLADVDLRIVMCLMCGDPFSADDILFPVLQSQTCKSSHCGSGLHKK

SEQ ID NO: 16638 - protein, 70 aa, Synthetic construct
IFDEAMPPPLLKKELYNHLWTNHPLGGSWHLLYPPNKELPQSKQFDLCLLLALIKHLNVFPAPKKGWNME

SEQ ID NO: 16639 - protein, 70 aa, Synthetic construct
IFDEAMPPPLLKKELLIHKNVLESYYNHLWTNHPLNKELPQSKQFDLCLLLALIKHLNVFPAPKKGWNME

SEQ ID NO: 16640 - protein, 70 aa, Synthetic construct
IFDEAMPPPLLKKELLIHKNVLESYYNHLWTNHPLGGSWHQSKQFDLCLLLALIKHLNVFPAPKKGWNME

SEQ ID NO: 16641 - protein, 70 aa, Synthetic construct
IFDEAMPPPLLKKELLIHKNVLESYYNHLWTNHPLGGSWHLLYPPNKELPQSKQFDLCLLLALIKGWNME

SEQ ID NO: 16642 - protein, 70 aa, Synthetic construct
IFDEAMPPPLLKKELLIHKNVLESYYNHLWTNHPLGGSWHLLYPPNKELPQSKQFDLCLLLALIKHLNVF

SEQ ID NO: 16643 - protein, 70 aa, Synthetic construct
CCVLSNPDQKGKMRRIDCLRQADKVWRLDLVMVILFKGIPLESTDGERLVKSPQCSNPGLCVQPHLYLAY

SEQ ID NO: 16644 - protein, 70 aa, Synthetic construct
CCVLSNPDQKGKMRRIDCLRQADKVWRLDLVMVILFKGIPLESTDGERLVKSPQCSNPGLCVQPHHIGVS

SEQ ID NO: 16645 - protein, 70 aa, Synthetic construct
EGISLENIHMMIGSMTIDCLGILNDLSDCEDKLFPIGYQCSRVYWSTTDARKRCVYTCKIVECRPPVVEP

SEQ ID NO: 16646 - protein, 70 aa, Synthetic construct
EGISLRRKFLMIGSMTIDCLGILNDLSDCEDKLFPIGYQCSRVYWSTTDARKRCVYTCKIVECRPPVVEP

SEQ ID NO: 16647 - protein, 70 aa, Synthetic construct
EGISLRRKFLNGLEPENIHMMIGSMTIDCLGILNDIGYQCSRVYWSTTDARKRCVYTCKIVECRPPVVEP

SEQ ID NO: 16648 - protein, 70 aa, Synthetic construct
EGISLRRKFLNGLEPENIHMMIGSMTIDCLGILNDLSDCEDKLFPSTTDARKRCVYTCKIVECRPPVVEP

SEQ ID NO: 16649 - protein, 70 aa, Synthetic construct
EGISLRRKFLNGLEPENIHMMIGSMTIDCLGILNDLSDCEDKLFPIGYQCRKRCVYTCKIVECRPPVVEP

SEQ ID NO: 16650 - protein, 70 aa, Synthetic construct
EGISLRRKFLNGLEPENIHMMIGSMTIDCLGILNDLSDCEDKLFPIGYQCSRVYWSTTDAVECRPPVVEP

SEQ ID NO: 16651 - protein, 70 aa, Synthetic construct
EGISLRRKFLNGLEPENIHMMIGSMTIDCLGILNDLSDCEDKLFPIGYQCSRVYWSTTDARKRCVYTCKI

SEQ ID NO: 16652 - protein, 70 aa, Synthetic construct
GNILPSDIMDFVLKNPESSSSELLNLGEGLGLDSNREKDMGLFEVFSQQLPTTEPVDSSVSSSISAEEQF

SEQ ID NO: 16653 - protein, 70 aa, Synthetic construct
GNILPSDIMDFVLKNTPSMQSELLNLGEGLGLDSNREKDMGLFEVFSQQLPTTEPVDSSVSSSISAEEQF

SEQ ID NO: 16654 - protein, 70 aa, Synthetic construct
GNILPSDIMDFVLKNTPSMQALGESLGEGLGLDSNREKDMGLFEVFSQQLPTTEPVDSSVSSSISAEEQF

SEQ ID NO: 16655 - protein, 70 aa, Synthetic construct
GNILPSDIMDFVLKNTPSMQALGESPESSSGLDSNREKDMGLFEVFSQQLPTTEPVDSSVSSSISAEEQF

SEQ ID NO: 16656 - protein, 70 aa, Synthetic construct
GNILPSDIMDFVLKNTPSMQALGESPESSSSELLNREKDMGLFEVFSQQLPTTEPVDSSVSSSISAEEQF

SEQ ID NO: 16657 - protein, 70 aa, Synthetic construct
GNILPSDIMDFVLKNTPSMQALGESPESSSSELLNLGEGLGLFEVFSQQLPTTEPVDSSVSSSISAEEQF

SEQ ID NO: 16658 - protein, 70 aa, Synthetic construct
GNILPSDIMDFVLKNTPSMQALGESPESSSSELLNLGEGLGLDSNFSQQLPTTEPVDSSVSSSISAEEQF

SEQ ID NO: 16659 - protein, 70 aa, Synthetic construct
GNILPSDIMDFVLKNTPSMQALGESPESSSSELLNLGEGLGLDSNREKDMPTTEPVDSSVSSSISAEEQF

SEQ ID NO: 16660 - protein, 70 aa, Synthetic construct
GNILPSDIMDFVLKNTPSMQALGESPESSSSELLNLGEGLGLDSNREKDMGLFEVVDSSVSSSISAEEQF

SEQ ID NO: 16661 - protein, 70 aa, Synthetic construct
GNILPSDIMDFVLKNTPSMQALGESPESSSSELLNLGEGLGLDSNREKDMGLFEVFSQQLSSSISAEEQF

SEQ ID NO: 16662 - protein, 70 aa, Synthetic construct
GNILPSDIMDFVLKNTPSMQALGESPESSSSELLNLGEGLGLDSNREKDMGLFEVFSQQLPTTEPAEEQF

SEQ ID NO: 16663 - protein, 70 aa, Synthetic construct
GNILPSDIMDFVLKNTPSMQALGESPESSSSELLNLGEGLGLDSNREKDMGLFEVFSQQLPTTEPVDSSV

SEQ ID NO: 16664 - protein, 70 aa, Synthetic construct
LIHNLFVSVMSHQDDEIPAVDPNFPNKPPLTFDIIRKNVENNRYRRLDLFQEHMFEVLERARRMNRTDSE

SEQ ID NO: 16665 - protein, 70 aa, Synthetic construct
LIHNLFVSVMSHQDDEGRCYSDSLAEIPAVDPNFPNKPPLNNRYRRLDLFQEHMFEVLERARRMNRTDSE

SEQ ID NO: 16666 - protein, 70 aa, Synthetic construct
LIHNLFVSVMSHQDDEGRCYSDSLAEIPAVDPNFPNKPPLTFDIIRKNVENNRYREVLERARRMNRTDSE

SEQ ID NO: 16667 - protein, 70 aa, Synthetic construct
LIHNLFVSVMSHQDDEGRCYSDSLAEIPAVDPNFPNKPPLTFDIIRKNVENNRYRRLDLFARRMNRTDSE

SEQ ID NO: 16668 - protein, 70 aa, Synthetic construct
HCCALGWLSMVYEGVPQCQCNSIKNQCSPLDTNSCKQGERTSDRDVTVVQFKSLVNNPKTPPDGKSHFPE

SEQ ID NO: 16669 - protein, 70 aa, Synthetic construct
ASGEESLGFLSRLPPGPAGLDCSALDRDPDLQPPSGTSHFEFPDYCTPEVTEMIAGDWRPSSIADLVFTY

SEQ ID NO: 16670 - protein, 70 aa, Synthetic construct
AAEEGSLGFLSRLPPGPAGLDCSALDRDPDLQPPSGTSHFEFPDYCTPEVTEMIAGDWRPSSIADLVFTY

SEQ ID NO: 16671 - protein, 70 aa, Synthetic construct
AAEEGEEETVSRLPPGPAGLDCSALDRDPDLQPPSGTSHFEFPDYCTPEVTEMIAGDWRPSSIADLVFTY

SEQ ID NO: 16672 - protein, 70 aa, Synthetic construct
AAEEGEEETVASGEEGPAGLDCSALDRDPDLQPPSGTSHFEFPDYCTPEVTEMIAGDWRPSSIADLVFTY

SEQ ID NO: 16673 - protein, 70 aa, Synthetic construct
AAEEGEEETVASGEESLGFLDCSALDRDPDLQPPSGTSHFEFPDYCTPEVTEMIAGDWRPSSIADLVFTY

SEQ ID NO: 16674 - protein, 70 aa, Synthetic construct
AAEEGEEETVASGEESLGFLSRLPPDRDPDLQPPSGTSHFEFPDYCTPEVTEMIAGDWRPSSIADLVFTY

SEQ ID NO: 16675 - protein, 70 aa, Synthetic construct
AAEEGEEETVASGEESLGFLSRLPPGPAGLLQPPSGTSHFEFPDYCTPEVTEMIAGDWRPSSIADLVFTY

SEQ ID NO: 16676 - protein, 70 aa, Synthetic construct
AAEEGEEETVASGEESLGFLSRLPPGPAGLDCSALGTSHFEFPDYCTPEVTEMIAGDWRPSSIADLVFTY

SEQ ID NO: 16677 - protein, 70 aa, Synthetic construct
AAEEGEEETVASGEESLGFLSRLPPGPAGLDCSALDRDPDEFPDYCTPEVTEMIAGDWRPSSIADLVFTY

SEQ ID NO: 16678 - protein, 70 aa, Synthetic construct
AAEEGEEETVASGEESLGFLSRLPPGPAGLDCSALDRDPDLQPPSGTSHFEFPDYGDWRPSSIADLVFTY

SEQ ID NO: 16679 - protein, 70 aa, Synthetic construct
AAEEGEEETVASGEESLGFLSRLPPGPAGLDCSALDRDPDLQPPSGTSHFEFPDYCTPEVSSIADLVFTY

SEQ ID NO: 16680 - protein, 70 aa, Synthetic construct
AAEEGEEETVASGEESLGFLSRLPPGPAGLDCSALDRDPDLQPPSGTSHFEFPDYCTPEVTEMIALVFTY

SEQ ID NO: 16681 - protein, 70 aa, Synthetic construct
AAEEGEEETVASGEESLGFLSRLPPGPAGLDCSALDRDPDLQPPSGTSHFEFPDYCTPEVTEMIAGDWRP

SEQ ID NO: 16682 - protein, 70 aa, Synthetic construct
DYSYLNSYDSCVAAMEASAYGFQYSPLRPAFPAAGPPCPALGSSNCALGALRDHQPAPYSAVPYKFFPEP

SEQ ID NO: 16683 - protein, 70 aa, Synthetic construct
DYSYLNSYDSCVAAMEASAYGDFGACSQPGGFQYSPPCPALGSSNCALGALRDHQPAPYSAVPYKFFPEP

SEQ ID NO: 16684 - protein, 70 aa, Synthetic construct
DYSYLNSYDSCVAAMEASAYGDFGACSQPGGFQYSPLRPALGSSNCALGALRDHQPAPYSAVPYKFFPEP

SEQ ID NO: 16685 - protein, 70 aa, Synthetic construct
DYSYLNSYDSCVAAMEASAYGDFGACSQPGGFQYSPLRPAFPAAGCALGALRDHQPAPYSAVPYKFFPEP

SEQ ID NO: 16686 - protein, 70 aa, Synthetic construct
DYSYLNSYDSCVAAMEASAYGDFGACSQPGGFQYSPLRPAFPAAGPPCPALRDHQPAPYSAVPYKFFPEP

SEQ ID NO: 16687 - protein, 70 aa, Synthetic construct
DYSYLNSYDSCVAAMEASAYGDFGACSQPGGFQYSPLRPAFPAAGPPCPALGSSNPAPYSAVPYKFFPEP

SEQ ID NO: 16688 - protein, 70 aa, Synthetic construct
DYSYLNSYDSCVAAMEASAYGDFGACSQPGGFQYSPLRPAFPAAGPPCPALGSSNCALGAAVPYKFFPEP

SEQ ID NO: 16689 - protein, 70 aa, Synthetic construct
DYSYLNSYDSCVAAMEASAYGDFGACSQPGGFQYSPLRPAFPAAGPPCPALGSSNCALGALRDHQFFPEP

SEQ ID NO: 16690 - protein, 70 aa, Synthetic construct
PPSLVPLEATDSLLELPHPLLQQTEDQFLSPTLACSSPLISFSPSLDQDDYLWGLEAGEGISDLFDSYDL

SEQ ID NO: 16691 - protein, 70 aa, Synthetic construct
PAPTPPLEATDSLLELPHPLLQQTEDQFLSPTLACSSPLISFSPSLDQDDYLWGLEAGEGISDLFDSYDL

SEQ ID NO: 16692 - protein, 70 aa, Synthetic construct
PAPTPQQAPPDSLLELPHPLLQQTEDQFLSPTLACSSPLISFSPSLDQDDYLWGLEAGEGISDLFDSYDL

SEQ ID NO: 16693 - protein, 70 aa, Synthetic construct
PAPTPQQAPPPPSLVLPHPLLQQTEDQFLSPTLACSSPLISFSPSLDQDDYLWGLEAGEGISDLFDSYDL

SEQ ID NO: 16694 - protein, 70 aa, Synthetic construct
PAPTPQQAPPPPSLVPLEATLQQTEDQFLSPTLACSSPLISFSPSLDQDDYLWGLEAGEGISDLFDSYDL

SEQ ID NO: 16695 - protein, 70 aa, Synthetic construct
PAPTPQQAPPPPSLVPLEATDSLLEDQFLSPTLACSSPLISFSPSLDQDDYLWGLEAGEGISDLFDSYDL

SEQ ID NO: 16696 - protein, 70 aa, Synthetic construct
PAPTPQQAPPPPSLVPLEATDSLLELPHPLPTLACSSPLISFSPSLDQDDYLWGLEAGEGISDLFDSYDL

SEQ ID NO: 16697 - protein, 70 aa, Synthetic construct
PAPTPQQAPPPPSLVPLEATDSLLELPHPLLQQTESSPLISFSPSLDQDDYLWGLEAGEGISDLFDSYDL

SEQ ID NO: 16698 - protein, 70 aa, Synthetic construct
PAPTPQQAPPPPSLVPLEATDSLLELPHPLLQQTEDQFLSSFSPSLDQDDYLWGLEAGEGISDLFDSYDL

SEQ ID NO: 16699 - protein, 70 aa, Synthetic construct
PAPTPQQAPPPPSLVPLEATDSLLELPHPLLQQTEDQFLSPTLACLDQDDYLWGLEAGEGISDLFDSYDL

SEQ ID NO: 16700 - protein, 70 aa, Synthetic construct
PAPTPQQAPPPPSLVPLEATDSLLELPHPLLQQTEDQFLSPTLACSSPLIYLWGLEAGEGISDLFDSYDL

SEQ ID NO: 16701 - protein, 70 aa, Synthetic construct
PAPTPQQAPPPPSLVPLEATDSLLELPHPLLQQTEDQFLSPTLACSSPLISFSPSEAGEGISDLFDSYDL

SEQ ID NO: 16702 - protein, 70 aa, Synthetic construct
PAPTPQQAPPPPSLVPLEATDSLLELPHPLLQQTEDQFLSPTLACSSPLISFSPSLDQDDISDLFDSYDL

SEQ ID NO: 16703 - protein, 70 aa, Synthetic construct
PAPTPQQAPPPPSLVPLEATDSLLELPHPLLQQTEDQFLSPTLACSSPLISFSPSLDQDDYLWGLDSYDL

SEQ ID NO: 16704 - protein, 70 aa, Synthetic construct
PAPTPQQAPPPPSLVPLEATDSLLELPHPLLQQTEDQFLSPTLACSSPLISFSPSLDQDDYLWGLEAGEG

SEQ ID NO: 16705 - protein, 70 aa, Synthetic construct
SSRAKEFAFYHQGYAAGPYHHHQPMPGYLDMPVVPGLGGPGESRHEPLGLPMESYQPWALPNGWNGQMYC

SEQ ID NO: 16706 - protein, 70 aa, Synthetic construct
DTAGPEFAFYHQGYAAGPYHHHQPMPGYLDMPVVPGLGGPGESRHEPLGLPMESYQPWALPNGWNGQMYC

SEQ ID NO: 16707 - protein, 70 aa, Synthetic construct
DTAGPAAEEFHQGYAAGPYHHHQPMPGYLDMPVVPGLGGPGESRHEPLGLPMESYQPWALPNGWNGQMYC

SEQ ID NO: 16708 - protein, 70 aa, Synthetic construct
DTAGPAAEEFSSRAKAGPYHHHQPMPGYLDMPVVPGLGGPGESRHEPLGLPMESYQPWALPNGWNGQMYC

SEQ ID NO: 16709 - protein, 70 aa, Synthetic construct
DTAGPAAEEFSSRAKEFAFYHHQPMPGYLDMPVVPGLGGPGESRHEPLGLPMESYQPWALPNGWNGQMYC

SEQ ID NO: 16710 - protein, 70 aa, Synthetic construct
DTAGPAAEEFSSRAKEFAFYHQGYAPGYLDMPVVPGLGGPGESRHEPLGLPMESYQPWALPNGWNGQMYC

SEQ ID NO: 16711 - protein, 70 aa, Synthetic construct
DTAGPAAEEFSSRAKEFAFYHQGYAAGPYHMPVVPGLGGPGESRHEPLGLPMESYQPWALPNGWNGQMYC

SEQ ID NO: 16712 - protein, 70 aa, Synthetic construct
DTAGPAAEEFSSRAKEFAFYHQGYAAGPYHHHQPMPGYLDGESRHEPLGLPMESYQPWALPNGWNGQMYC

SEQ ID NO: 16713 - protein, 70 aa, Synthetic construct
DTAGPAAEEFSSRAKEFAFYHQGYAAGPYHHHQPMPGYLDMPVVPEPLGLPMESYQPWALPNGWNGQMYC

SEQ ID NO: 16714 - protein, 70 aa, Synthetic construct
DTAGPAAEEFSSRAKEFAFYHQGYAAGPYHHHQPMPGYLDMPVVPGLGGPPMESYQPWALPNGWNGQMYC

SEQ ID NO: 16715 - protein, 70 aa, Synthetic construct
DTAGPAAEEFSSRAKEFAFYHQGYAAGPYHHHQPMPGYLDMPVVPGLGGPGESRHQPWALPNGWNGQMYC

SEQ ID NO: 16716 - protein, 70 aa, Synthetic construct
VWSEAENYDLDEIWEKICQVQGKDPSVDITQDLVDESEEERFDDMSSPGLELPSCELSRLEEIAELVASS

SEQ ID NO: 16717 - protein, 70 aa, Synthetic construct
VWSEAENYDLALSFQKICQVQGKDPSVDITQDLVDESEEERFDDMSSPGLELPSCELSRLEEIAELVASS

SEQ ID NO: 16718 - protein, 70 aa, Synthetic construct
VWSEAENYDLALSFQEKAGCDEIWESVDITQDLVDESEEERFDDMSSPGLELPSCELSRLEEIAELVASS

SEQ ID NO: 16719 - protein, 70 aa, Synthetic construct
VWSEAENYDLALSFQEKAGCDEIWEKICQVQDLVDESEEERFDDMSSPGLELPSCELSRLEEIAELVASS

SEQ ID NO: 16720 - protein, 70 aa, Synthetic construct
VWSEAENYDLALSFQEKAGCDEIWEKICQVQGKDPSVDITRFDDMSSPGLELPSCELSRLEEIAELVASS

SEQ ID NO: 16721 - protein, 70 aa, Synthetic construct
VWSEAENYDLALSFQEKAGCDEIWEKICQVQGKDPSVDITQDLVDSSPGLELPSCELSRLEEIAELVASS

SEQ ID NO: 16722 - protein, 70 aa, Synthetic construct
VWSEAENYDLALSFQEKAGCDEIWEKICQVQGKDPSVDITQDLVDESEEERFDDMSSPGLEEIAELVASS

SEQ ID NO: 16723 - protein, 70 aa, Synthetic construct
NNSTWSNQTQNIQSWSNHSWNTQTWCTQSWNNQAWNSPFYNCGEESLQSCMQFQPNSPASDLEAALEAAG

SEQ ID NO: 16724 - protein, 70 aa, Synthetic construct
NLPMWSNQTQNIQSWSNHSWNTQTWCTQSWNNQAWNSPFYNCGEESLQSCMQFQPNSPASDLEAALEAAG

SEQ ID NO: 16725 - protein, 70 aa, Synthetic construct
NLPMWSNQTWNIQSWSNHSWNTQTWCTQSWNNQAWNSPFYNCGEESLQSCMQFQPNSPASDLEAALEAAG

SEQ ID NO: 16726 - protein, 70 aa, Synthetic construct
NLPMWSNQTWNNSTWSNHSWNTQTWCTQSWNNQAWNSPFYNCGEESLQSCMQFQPNSPASDLEAALEAAG

SEQ ID NO: 16727 - protein, 70 aa, Synthetic construct
NLPMWSNQTWNNSTWSNQTQNTQTWCTQSWNNQAWNSPFYNCGEESLQSCMQFQPNSPASDLEAALEAAG

SEQ ID NO: 16728 - protein, 70 aa, Synthetic construct
NLPMWSNQTWNNSTWSNQTQNIQSWCTQSWNNQAWNSPFYNCGEESLQSCMQFQPNSPASDLEAALEAAG

SEQ ID NO: 16729 - protein, 70 aa, Synthetic construct
NLPMWSNQTWNNSTWSNQTQNIQSWSNHSWNNQAWNSPFYNCGEESLQSCMQFQPNSPASDLEAALEAAG

SEQ ID NO: 16730 - protein, 70 aa, Synthetic construct
NLPMWSNQTWNNSTWSNQTQNIQSWSNHSWNTQTWNSPFYNCGEESLQSCMQFQPNSPASDLEAALEAAG

SEQ ID NO: 16731 - protein, 70 aa, Synthetic construct
NLPMWSNQTWNNSTWSNQTQNIQSWSNHSWNTQTWCTQSWNCGEESLQSCMQFQPNSPASDLEAALEAAG

SEQ ID NO: 16732 - protein, 70 aa, Synthetic construct
NLPMWSNQTWNNSTWSNQTQNIQSWSNHSWNTQTWCTQSWNNQAWSLQSCMQFQPNSPASDLEAALEAAG

SEQ ID NO: 16733 - protein, 70 aa, Synthetic construct
NLPMWSNQTWNNSTWSNQTQNIQSWSNHSWNTQTWCTQSWNNQAWNSPFYMQFQPNSPASDLEAALEAAG

SEQ ID NO: 16734 - protein, 70 aa, Synthetic construct
NLPMWSNQTWNNSTWSNQTQNIQSWSNHSWNTQTWCTQSWNNQAWNSPFYNCGEENSPASDLEAALEAAG

SEQ ID NO: 16735 - protein, 70 aa, Synthetic construct
NLPMWSNQTWNNSTWSNQTQNIQSWSNHSWNTQTWCTQSWNNQAWNSPFYNCGEESLQSCDLEAALEAAG

SEQ ID NO: 16736 - protein, 70 aa, Synthetic construct
NLPMWSNQTWNNSTWSNQTQNIQSWSNHSWNTQTWCTQSWNNQAWNSPFYNCGEESLQSCMQFQPLEAAG

SEQ ID NO: 16737 - protein, 70 aa, Synthetic construct
NLPMWSNQTWNNSTWSNQTQNIQSWSNHSWNTQTWCTQSWNNQAWNSPFYNCGEESLQSCMQFQPNSPAS

SEQ ID NO: 16738 - protein, 70 aa, Synthetic construct
GDMKTPDFDDLLAAFKEAIQTPSEENESPLKPPGICMDESVSLSHSGSAPDVPAVSVIVKNTSRQESFEA

SEQ ID NO: 16739 - protein, 70 aa, Synthetic construct
GDMKTPDFDDLLAAFDIPDPTPSEENESPLKPPGICMDESVSLSHSGSAPDVPAVSVIVKNTSRQESFEA

SEQ ID NO: 16740 - protein, 70 aa, Synthetic construct
GDMKTPDFDDLLAAFDIPDPTSLDANESPLKPPGICMDESVSLSHSGSAPDVPAVSVIVKNTSRQESFEA

SEQ ID NO: 16741 - protein, 70 aa, Synthetic construct
GDMKTPDFDDLLAAFDIPDPTSLDAKEAIQKPPGICMDESVSLSHSGSAPDVPAVSVIVKNTSRQESFEA

SEQ ID NO: 16742 - protein, 70 aa, Synthetic construct
GDMKTPDFDDLLAAFDIPDPTSLDAKEAIQTPSEECMDESVSLSHSGSAPDVPAVSVIVKNTSRQESFEA

SEQ ID NO: 16743 - protein, 70 aa, Synthetic construct
GDMKTPDFDDLLAAFDIPDPTSLDAKEAIQTPSEENESPLVSLSHSGSAPDVPAVSVIVKNTSRQESFEA

SEQ ID NO: 16744 - protein, 70 aa, Synthetic construct
GDMKTPDFDDLLAAFDIPDPTSLDAKEAIQTPSEENESPLKPPGISGSAPDVPAVSVIVKNTSRQESFEA

SEQ ID NO: 16745 - protein, 70 aa, Synthetic construct
GDMKTPDFDDLLAAFDIPDPTSLDAKEAIQTPSEENESPLKPPGICMDESDVPAVSVIVKNTSRQESFEA

SEQ ID NO: 16746 - protein, 70 aa, Synthetic construct
GDMKTPDFDDLLAAFDIPDPTSLDAKEAIQTPSEENESPLKPPGICMDESVSLSHSVIVKNTSRQESFEA

SEQ ID NO: 16747 - protein, 70 aa, Synthetic construct
GDMKTPDFDDLLAAFDIPDPTSLDAKEAIQTPSEENESPLKPPGICMDESVSLSHSGSAPNTSRQESFEA

SEQ ID NO: 16748 - protein, 70 aa, Synthetic construct
GDMKTPDFDDLLAAFDIPDPTSLDAKEAIQTPSEENESPLKPPGICMDESVSLSHSGSAPDVPAVESFEA

SEQ ID NO: 16749 - protein, 70 aa, Synthetic construct
GDMKTPDFDDLLAAFDIPDPTSLDAKEAIQTPSEENESPLKPPGICMDESVSLSHSGSAPDVPAVSVIVK

SEQ ID NO: 16750 - protein, 70 aa, Synthetic construct
PLWPQSPDASDFLPDTQLFPHFTELLLPLDTSQYQEGDDSMGKKHSGSQPQEEGGSVNENHSGPRLLLDL

SEQ ID NO: 16751 - protein, 70 aa, Synthetic construct
PLWPQSPDASDFLPDTQLFPHFTELLLPLDPLEGSEGDDSMGKKHSGSQPQEEGGSVNENHSGPRLLLDL

SEQ ID NO: 16752 - protein, 70 aa, Synthetic construct
PLWPQSPDASDFLPDTQLFPHFTELLLPLDPLEGSSVSTMMGKKHSGSQPQEEGGSVNENHSGPRLLLDL

SEQ ID NO: 16753 - protein, 70 aa, Synthetic construct
PLWPQSPDASDFLPDTQLFPHFTELLLPLDPLEGSSVSTMTSQYQSGSQPQEEGGSVNENHSGPRLLLDL

SEQ ID NO: 16754 - protein, 70 aa, Synthetic construct
PLWPQSPDASDFLPDTQLFPHFTELLLPLDPLEGSSVSTMTSQYQEGDDSQEEGGSVNENHSGPRLLLDL

SEQ ID NO: 16755 - protein, 70 aa, Synthetic construct
PLWPQSPDASDFLPDTQLFPHFTELLLPLDPLEGSSVSTMTSQYQEGDDSMGKKHSVNENHSGPRLLLDL

SEQ ID NO: 16756 - protein, 70 aa, Synthetic construct
PLWPQSPDASDFLPDTQLFPHFTELLLPLDPLEGSSVSTMTSQYQEGDDSMGKKHSGSQPHSGPRLLLDL

SEQ ID NO: 16757 - protein, 70 aa, Synthetic construct
PLWPQSPDASDFLPDTQLFPHFTELLLPLDPLEGSSVSTMTSQYQEGDDSMGKKHSGSQPQEEGGLLLDL

SEQ ID NO: 16758 - protein, 70 aa, Synthetic construct
PLWPQSPDASDFLPDTQLFPHFTELLLPLDPLEGSSVSTMTSQYQEGDDSMGKKHSGSQPQEEGGSVNEN

SEQ ID NO: 16759 - protein, 70 aa, Synthetic construct
LIVHLANYFQSSDFLVPDYLNQEQEETLVQYDLGEHGFESNSSVQMPVISQVSSTQNCESTFPLGSLGGL

SEQ ID NO: 16760 - protein, 70 aa, Synthetic construct
LIVHLRSLNHEASELANYFQSSDFLETLVQYDLGEHGFESNSSVQMPVISQVSSTQNCESTFPLGSLGGL

SEQ ID NO: 16761 - protein, 70 aa, Synthetic construct
LIVHLRSLNHEASELANYFQSSDFLVPDYLYDLGEHGFESNSSVQMPVISQVSSTQNCESTFPLGSLGGL

SEQ ID NO: 16762 - protein, 70 aa, Synthetic construct
LIVHLRSLNHEASELANYFQSSDFLVPDYLNQEQEETLVQYDLGEMPVISQVSSTQNCESTFPLGSLGGL

SEQ ID NO: 16763 - protein, 70 aa, Synthetic construct
LIVHLRSLNHEASELANYFQSSDFLVPDYLNQEQEETLVQYDLGEHGFESQVSSTQNCESTFPLGSLGGL

SEQ ID NO: 16764 - protein, 70 aa, Synthetic construct
LIVHLRSLNHEASELANYFQSSDFLVPDYLNQEQEETLVQYDLGEHGFESNSSVQQNCESTFPLGSLGGL

SEQ ID NO: 16765 - protein, 70 aa, Synthetic construct
LIVHLRSLNHEASELANYFQSSDFLVPDYLNQEQEETLVQYDLGEHGFESNSSVQMPVISTFPLGSLGGL

SEQ ID NO: 16766 - protein, 70 aa, Synthetic construct
ALCAGWLSQPTPATLQPLAPWTPYTEYVPHEAVSCPYSADMYVQPVCPSYTVVGPSSVLTYASPPLITNV

SEQ ID NO: 16767 - protein, 70 aa, Synthetic construct
GSVSAWLSQPTPATLQPLAPWTPYTEYVPHEAVSCPYSADMYVQPVCPSYTVVGPSSVLTYASPPLITNV

SEQ ID NO: 16768 - protein, 70 aa, Synthetic construct
GSVSAVTEEAALCAGWLSQPWTPYTEYVPHEAVSCPYSADMYVQPVCPSYTVVGPSSVLTYASPPLITNV

SEQ ID NO: 16769 - protein, 70 aa, Synthetic construct
GSVSAVTEEAALCAGWLSQPTPATLQPLAPWTPYTPYSADMYVQPVCPSYTVVGPSSVLTYASPPLITNV

SEQ ID NO: 16770 - protein, 70 aa, Synthetic construct
GSVSAVTEEAALCAGWLSQPTPATLQPLAPWTPYTEYVPHMYVQPVCPSYTVVGPSSVLTYASPPLITNV

SEQ ID NO: 16771 - protein, 70 aa, Synthetic construct
GSVSAVTEEAALCAGWLSQPTPATLQPLAPWTPYTEYVPHEAVSCVCPSYTVVGPSSVLTYASPPLITNV

SEQ ID NO: 16772 - protein, 70 aa, Synthetic construct
GSVSAVTEEAALCAGWLSQPTPATLQPLAPWTPYTEYVPHEAVSCPYSADMYVQPSSVLTYASPPLITNV

SEQ ID NO: 16773 - protein, 70 aa, Synthetic construct
GSVSAVTEEAALCAGWLSQPTPATLQPLAPWTPYTEYVPHEAVSCPYSADMYVQPVCPSYYASPPLITNV

SEQ ID NO: 16774 - protein, 70 aa, Synthetic construct
GSVSAVTEEAALCAGWLSQPTPATLQPLAPWTPYTEYVPHEAVSCPYSADMYVQPVCPSYTVVGPLITNV

SEQ ID NO: 16775 - protein, 70 aa, Synthetic construct
GSVSAVTEEAALCAGWLSQPTPATLQPLAPWTPYTEYVPHEAVSCPYSADMYVQPVCPSYTVVGPSSVLT

SEQ ID NO: 16776 - protein, 70 aa, Synthetic construct
KREEEHKPVAVPSAEAQGLRELEGASDPLLSLFGSTSDNDLLQAATAMDSLTDLDLEHLLSESPEGSPFR

SEQ ID NO: 16777 - protein, 70 aa, Synthetic construct
KFQKEHKPVAVPSAEAQGLRELEGASDPLLSLFGSTSDNDLLQAATAMDSLTDLDLEHLLSESPEGSPFR

SEQ ID NO: 16778 - protein, 70 aa, Synthetic construct
KFQKEKEAQKVPSAEAQGLRELEGASDPLLSLFGSTSDNDLLQAATAMDSLTDLDLEHLLSESPEGSPFR

SEQ ID NO: 16779 - protein, 70 aa, Synthetic construct
KFQKEKEAQKKREEEAQGLRELEGASDPLLSLFGSTSDNDLLQAATAMDSLTDLDLEHLLSESPEGSPFR

SEQ ID NO: 16780 - protein, 70 aa, Synthetic construct
KFQKEKEAQKKREEEHKPVAELEGASDPLLSLFGSTSDNDLLQAATAMDSLTDLDLEHLLSESPEGSPFR

SEQ ID NO: 16781 - protein, 70 aa, Synthetic construct
KFQKEKEAQKKREEEHKPVAVPSAESDPLLSLFGSTSDNDLLQAATAMDSLTDLDLEHLLSESPEGSPFR

SEQ ID NO: 16782 - protein, 70 aa, Synthetic construct
KFQKEKEAQKKREEEHKPVAVPSAEAQGLRELEGASDPLLSLFGSTAMDSLTDLDLEHLLSESPEGSPFR

SEQ ID NO: 16783 - protein, 70 aa, Synthetic construct
KFQKEKEAQKKREEEHKPVAVPSAEAQGLRELEGASDPLLSLFGSTSDNDLTDLDLEHLLSESPEGSPFR

SEQ ID NO: 16784 - protein, 70 aa, Synthetic construct
KFQKEKEAQKKREEEHKPVAVPSAEAQGLRELEGASDPLLSLFGSTSDNDLLQAALEHLLSESPEGSPFR

SEQ ID NO: 16785 - protein, 70 aa, Synthetic construct
KFQKEKEAQKKREEEHKPVAVPSAEAQGLRELEGASDPLLSLFGSTSDNDLLQAATAMDSLTDLDLEHLL

SEQ ID NO: 16786 - protein, 70 aa, Synthetic construct
CSSPSAYGSPSSYFSGLDPYLSPMVPQLGGPALSPLSGPSSLSGQSYGAYSPVDSLEFKDPTGTWKFTYN

SEQ ID NO: 16787 - protein, 70 aa, Synthetic construct
CSSPSAYGSPSSYFSGLDPYLSPMVPQLGGPALSPLSGPSVGPSLSYGAYSPVDSLEFKDPTGTWKFTYN

SEQ ID NO: 16788 - protein, 70 aa, Synthetic construct
QLDSVRVWLGKHYKKTLAGLVVQLLQFQEDAFGKHVTNPAFTKLPAKCFMDFKAGGALCHILGAAYKYKN

SEQ ID NO: 16789 - protein, 70 aa, Synthetic construct
QLDSVRVWLGKHYKKYVHADAPTNKTLAGLVVQLLVTNPAFTKLPAKCFMDFKAGGALCHILGAAYKYKN

SEQ ID NO: 16790 - protein, 70 aa, Synthetic construct
QLDSVRVWLGKHYKKYVHADAPTNKTLAGLVVQLLQFQEDAFGKHVTNPAFTKLPGALCHILGAAYKYKN

SEQ ID NO: 16791 - protein, 70 aa, Synthetic construct
QLDSVRVWLGKHYKKYVHADAPTNKTLAGLVVQLLQFQEDAFGKHVTNPAFTKLPAKCFMDFKAGGALCH

SEQ ID NO: 16792 - protein, 70 aa, Synthetic construct
LLEALEMYKDDWNKVSEHVGSRTQDECILHFLRLPIEDPYLENSDASLGPLAYQPVPFSQSGNPVMSTVA

SEQ ID NO: 16793 - protein, 70 aa, Synthetic construct
REWTEEMYKDDWNKVSEHVGSRTQDECILHFLRLPIEDPYLENSDASLGPLAYQPVPFSQSGNPVMSTVA

SEQ ID NO: 16794 - protein, 70 aa, Synthetic construct
REWTEQETLLDWNKVSEHVGSRTQDECILHFLRLPIEDPYLENSDASLGPLAYQPVPFSQSGNPVMSTVA

SEQ ID NO: 16795 - protein, 70 aa, Synthetic construct
REWTEQETLLLLEALSEHVGSRTQDECILHFLRLPIEDPYLENSDASLGPLAYQPVPFSQSGNPVMSTVA

SEQ ID NO: 16796 - protein, 70 aa, Synthetic construct
REWTEQETLLLLEALEMYKDSRTQDECILHFLRLPIEDPYLENSDASLGPLAYQPVPFSQSGNPVMSTVA

SEQ ID NO: 16797 - protein, 70 aa, Synthetic construct
REWTEQETLLLLEALEMYKDDWNKVECILHFLRLPIEDPYLENSDASLGPLAYQPVPFSQSGNPVMSTVA

SEQ ID NO: 16798 - protein, 70 aa, Synthetic construct
REWTEQETLLLLEALEMYKDDWNKVSEHVGFLRLPIEDPYLENSDASLGPLAYQPVPFSQSGNPVMSTVA

SEQ ID NO: 16799 - protein, 70 aa, Synthetic construct
REWTEQETLLLLEALEMYKDDWNKVSEHVGSRTQDIEDPYLENSDASLGPLAYQPVPFSQSGNPVMSTVA

SEQ ID NO: 16800 - protein, 70 aa, Synthetic construct
REWTEQETLLLLEALEMYKDDWNKVSEHVGSRTQDECILHFLRLPIEDPYLAYQPVPFSQSGNPVMSTVA

SEQ ID NO: 16801 - protein, 70 aa, Synthetic construct
REWTEQETLLLLEALEMYKDDWNKVSEHVGSRTQDECILHFLRLPIEDPYLENSDVPFSQSGNPVMSTVA

SEQ ID NO: 16802 - protein, 70 aa, Synthetic construct
REWTEQETLLLLEALEMYKDDWNKVSEHVGSRTQDECILHFLRLPIEDPYLENSDASLGPSGNPVMSTVA

SEQ ID NO: 16803 - protein, 70 aa, Synthetic construct
REWTEQETLLLLEALEMYKDDWNKVSEHVGSRTQDECILHFLRLPIEDPYLENSDASLGPLAYQPMSTVA

SEQ ID NO: 16804 - protein, 70 aa, Synthetic construct
REWTEQETLLLLEALEMYKDDWNKVSEHVGSRTQDECILHFLRLPIEDPYLENSDASLGPLAYQPVPFSQ

SEQ ID NO: 16805 - protein, 70 aa, Synthetic construct
HLPTTDEFSFSENLFGVLTEQVAGPLGQNLEVEPYSQYSNVQFPQVQPQISSSSYYSNLGFYPQQPEEWY

SEQ ID NO: 16806 - protein, 70 aa, Synthetic construct
GSKMNDEFSFSENLFGVLTEQVAGPLGQNLEVEPYSQYSNVQFPQVQPQISSSSYYSNLGFYPQQPEEWY

SEQ ID NO: 16807 - protein, 70 aa, Synthetic construct
GSKMNLIEHSSENLFGVLTEQVAGPLGQNLEVEPYSQYSNVQFPQVQPQISSSSYYSNLGFYPQQPEEWY

SEQ ID NO: 16808 - protein, 70 aa, Synthetic construct
GSKMNLIEHSHLPTTDEFSFQVAGPLGQNLEVEPYSQYSNVQFPQVQPQISSSSYYSNLGFYPQQPEEWY

SEQ ID NO: 16809 - protein, 70 aa, Synthetic construct
GSKMNLIEHSHLPTTDEFSFSENLFLGQNLEVEPYSQYSNVQFPQVQPQISSSSYYSNLGFYPQQPEEWY

SEQ ID NO: 16810 - protein, 70 aa, Synthetic construct
GSKMNLIEHSHLPTTDEFSFSENLFGVLTEEVEPYSQYSNVQFPQVQPQISSSSYYSNLGFYPQQPEEWY

SEQ ID NO: 16811 - protein, 70 aa, Synthetic construct
GSKMNLIEHSHLPTTDEFSFSENLFGVLTEQVAGPSQYSNVQFPQVQPQISSSSYYSNLGFYPQQPEEWY

SEQ ID NO: 16812 - protein, 70 aa, Synthetic construct
GSKMNLIEHSHLPTTDEFSFSENLFGVLTEQVAGPLGQNLVQFPQVQPQISSSSYYSNLGFYPQQPEEWY

SEQ ID NO: 16813 - protein, 70 aa, Synthetic construct
GSKMNLIEHSHLPTTDEFSFSENLFGVLTEQVAGPLGQNLEVEPYVQPQISSSSYYSNLGFYPQQPEEWY

SEQ ID NO: 16814 - protein, 70 aa, Synthetic construct
GSKMNLIEHSHLPTTDEFSFSENLFGVLTEQVAGPLGQNLEVEPYSQYSNSSSSYYSNLGFYPQQPEEWY

SEQ ID NO: 16815 - protein, 70 aa, Synthetic construct
GSKMNLIEHSHLPTTDEFSFSENLFGVLTEQVAGPLGQNLEVEPYSQYSNVQFPQYSNLGFYPQQPEEWY

SEQ ID NO: 16816 - protein, 70 aa, Synthetic construct
GSKMNLIEHSHLPTTDEFSFSENLFGVLTEQVAGPLGQNLEVEPYSQYSNVQFPQVQPQIFYPQQPEEWY

SEQ ID NO: 16817 - protein, 70 aa, Synthetic construct
GSKMNLIEHSHLPTTDEFSFSENLFGVLTEQVAGPLGQNLEVEPYSQYSNVQFPQVQPQISSSSYPEEWY

SEQ ID NO: 16818 - protein, 70 aa, Synthetic construct
GSKMNLIEHSHLPTTDEFSFSENLFGVLTEQVAGPLGQNLEVEPYSQYSNVQFPQVQPQISSSSYYSNLG

SEQ ID NO: 16819 - protein, 70 aa, Synthetic construct
PSQALQEPAPWSALPCGLLLDELLASPEFLQQAQPLLETEAPGELEASEEAASLEAPLSEEEYRALLEEL

SEQ ID NO: 16820 - protein, 70 aa, Synthetic construct
RQGQMQEPAPWSALPCGLLLDELLASPEFLQQAQPLLETEAPGELEASEEAASLEAPLSEEEYRALLEEL

SEQ ID NO: 16821 - protein, 70 aa, Synthetic construct
RQGQMQGIPAWSALPCGLLLDELLASPEFLQQAQPLLETEAPGELEASEEAASLEAPLSEEEYRALLEEL

SEQ ID NO: 16822 - protein, 70 aa, Synthetic construct
RQGQMQGIPAPSQALCGLLLDELLASPEFLQQAQPLLETEAPGELEASEEAASLEAPLSEEEYRALLEEL

SEQ ID NO: 16823 - protein, 70 aa, Synthetic construct
RQGQMQGIPAPSQALQEPAPDELLASPEFLQQAQPLLETEAPGELEASEEAASLEAPLSEEEYRALLEEL

SEQ ID NO: 16824 - protein, 70 aa, Synthetic construct
RQGQMQGIPAPSQALQEPAPWSALPSPEFLQQAQPLLETEAPGELEASEEAASLEAPLSEEEYRALLEEL

SEQ ID NO: 16825 - protein, 70 aa, Synthetic construct
RQGQMQGIPAPSQALQEPAPWSALPCGLLLQQAQPLLETEAPGELEASEEAASLEAPLSEEEYRALLEEL

SEQ ID NO: 16826 - protein, 70 aa, Synthetic construct
RQGQMQGIPAPSQALQEPAPWSALPCGLLLDELLALLETEAPGELEASEEAASLEAPLSEEEYRALLEEL

SEQ ID NO: 16827 - protein, 70 aa, Synthetic construct
RQGQMQGIPAPSQALQEPAPWSALPCGLLLDELLASPEFLAPGELEASEEAASLEAPLSEEEYRALLEEL

SEQ ID NO: 16828 - protein, 70 aa, Synthetic construct
RQGQMQGIPAPSQALQEPAPWSALPCGLLLDELLASPEFLQQAQPEASEEAASLEAPLSEEEYRALLEEL

SEQ ID NO: 16829 - protein, 70 aa, Synthetic construct
RQGQMQGIPAPSQALQEPAPWSALPCGLLLDELLASPEFLQQAQPLLETEAASLEAPLSEEEYRALLEEL

SEQ ID NO: 16830 - protein, 70 aa, Synthetic construct
RQGQMQGIPAPSQALQEPAPWSALPCGLLLDELLASPEFLQQAQPLLETEAPGELAPLSEEEYRALLEEL

SEQ ID NO: 16831 - protein, 70 aa, Synthetic construct
RQGQMQGIPAPSQALQEPAPWSALPCGLLLDELLASPEFLQQAQPLLETEAPGELEASEEEEYRALLEEL

SEQ ID NO: 16832 - protein, 70 aa, Synthetic construct
RQGQMQGIPAPSQALQEPAPWSALPCGLLLDELLASPEFLQQAQPLLETEAPGELEASEEAASLELLEEL

SEQ ID NO: 16833 - protein, 70 aa, Synthetic construct
RQGQMQGIPAPSQALQEPAPWSALPCGLLLDELLASPEFLQQAQPLLETEAPGELEASEEAASLEAPLSE

SEQ ID NO: 16834 - protein, 70 aa, Synthetic construct
AWWFGTVESQQPFQPEYPDSSFQCYSVHWDNNEREKMSPWDMEPIPEGTAFPDEVGAGVPVSQEELTALL

SEQ ID NO: 16835 - protein, 70 aa, Synthetic construct
GDRFRSIIDDQPFQPEYPDSSFQCYSVHWDNNEREKMSPWDMEPIPEGTAFPDEVGAGVPVSQEELTALL

SEQ ID NO: 16836 - protein, 70 aa, Synthetic construct
GDRFRSIIDDAWWFGEYPDSSFQCYSVHWDNNEREKMSPWDMEPIPEGTAFPDEVGAGVPVSQEELTALL

SEQ ID NO: 16837 - protein, 70 aa, Synthetic construct
GDRFRSIIDDAWWFGTVESQSFQCYSVHWDNNEREKMSPWDMEPIPEGTAFPDEVGAGVPVSQEELTALL

SEQ ID NO: 16838 - protein, 70 aa, Synthetic construct
GDRFRSIIDDAWWFGTVESQQPFQPSVHWDNNEREKMSPWDMEPIPEGTAFPDEVGAGVPVSQEELTALL

SEQ ID NO: 16839 - protein, 70 aa, Synthetic construct
GDRFRSIIDDAWWFGTVESQQPFQPEYPDSNNEREKMSPWDMEPIPEGTAFPDEVGAGVPVSQEELTALL

SEQ ID NO: 16840 - protein, 70 aa, Synthetic construct
GDRFRSIIDDAWWFGTVESQQPFQPEYPDSSFQCYKMSPWDMEPIPEGTAFPDEVGAGVPVSQEELTALL

SEQ ID NO: 16841 - protein, 70 aa, Synthetic construct
GDRFRSIIDDAWWFGTVESQQPFQPEYPDSSFQCYSVHWDDMEPIPEGTAFPDEVGAGVPVSQEELTALL

SEQ ID NO: 16842 - protein, 70 aa, Synthetic construct
GDRFRSIIDDAWWFGTVESQQPFQPEYPDSSFQCYSVHWDNNEREPEGTAFPDEVGAGVPVSQEELTALL

SEQ ID NO: 16843 - protein, 70 aa, Synthetic construct
GDRFRSIIDDAWWFGTVESQQPFQPEYPDSSFQCYSVHWDNNEREKMSPWFPDEVGAGVPVSQEELTALL

SEQ ID NO: 16844 - protein, 70 aa, Synthetic construct
GDRFRSIIDDAWWFGTVESQQPFQPEYPDSSFQCYSVHWDNNEREKMSPWDMEPIGAGVPVSQEELTALL

SEQ ID NO: 16845 - protein, 70 aa, Synthetic construct
GDRFRSIIDDAWWFGTVESQQPFQPEYPDSSFQCYSVHWDNNEREKMSPWDMEPIPEGTAVSQEELTALL

SEQ ID NO: 16846 - protein, 70 aa, Synthetic construct
GDRFRSIIDDAWWFGTVESQQPFQPEYPDSSFQCYSVHWDNNEREKMSPWDMEPIPEGTAFPDEVLTALL

SEQ ID NO: 16847 - protein, 70 aa, Synthetic construct
GDRFRSIIDDAWWFGTVESQQPFQPEYPDSSFQCYSVHWDNNEREKMSPWDMEPIPEGTAFPDEVGAGVP

SEQ ID NO: 16848 - protein, 70 aa, Synthetic construct
PVGGEPLAGDGFSDWMTERVDFTALLPLEPPLPPGTLPQPSPTPPDLEAMASLLKKELEQMEDFFLDAPP

SEQ ID NO: 16849 - protein, 70 aa, Synthetic construct
VLGGAPLAGDGFSDWMTERVDFTALLPLEPPLPPGTLPQPSPTPPDLEAMASLLKKELEQMEDFFLDAPP

SEQ ID NO: 16850 - protein, 70 aa, Synthetic construct
VLGGALEGGLGFSDWMTERVDFTALLPLEPPLPPGTLPQPSPTPPDLEAMASLLKKELEQMEDFFLDAPP

SEQ ID NO: 16851 - protein, 70 aa, Synthetic construct
VLGGALEGGLPVGGEMTERVDFTALLPLEPPLPPGTLPQPSPTPPDLEAMASLLKKELEQMEDFFLDAPP

SEQ ID NO: 16852 - protein, 70 aa, Synthetic construct
VLGGALEGGLPVGGEPLAGDDFTALLPLEPPLPPGTLPQPSPTPPDLEAMASLLKKELEQMEDFFLDAPP

SEQ ID NO: 16853 - protein, 70 aa, Synthetic construct
VLGGALEGGLPVGGEPLAGDGFSDWLPLEPPLPPGTLPQPSPTPPDLEAMASLLKKELEQMEDFFLDAPP

SEQ ID NO: 16854 - protein, 70 aa, Synthetic construct
VLGGALEGGLPVGGEPLAGDGFSDWMTERVPLPPGTLPQPSPTPPDLEAMASLLKKELEQMEDFFLDAPP

SEQ ID NO: 16855 - protein, 70 aa, Synthetic construct
VLGGALEGGLPVGGEPLAGDGFSDWMTERVDFTALTLPQPSPTPPDLEAMASLLKKELEQMEDFFLDAPP

SEQ ID NO: 16856 - protein, 70 aa, Synthetic construct
VLGGALEGGLPVGGEPLAGDGFSDWMTERVDFTALLPLEPSPTPPDLEAMASLLKKELEQMEDFFLDAPP

SEQ ID NO: 16857 - protein, 70 aa, Synthetic construct
VLGGALEGGLPVGGEPLAGDGFSDWMTERVDFTALLPLEPPLPPGDLEAMASLLKKELEQMEDFFLDAPP

SEQ ID NO: 16858 - protein, 70 aa, Synthetic construct
VLGGALEGGLPVGGEPLAGDGFSDWMTERVDFTALLPLEPPLPPGTLPQPASLLKKELEQMEDFFLDAPP

SEQ ID NO: 16859 - protein, 70 aa, Synthetic construct
VLGGALEGGLPVGGEPLAGDGFSDWMTERVDFTALLPLEPPLPPGTLPQPSPTPPKELEQMEDFFLDAPP

SEQ ID NO: 16860 - protein, 70 aa, Synthetic construct
VLGGALEGGLPVGGEPLAGDGFSDWMTERVDFTALLPLEPPLPPGTLPQPSPTPPDLEAMMEDFFLDAPP

SEQ ID NO: 16861 - protein, 70 aa, Synthetic construct
VLGGALEGGLPVGGEPLAGDGFSDWMTERVDFTALLPLEPPLPPGTLPQPSPTPPDLEAMASLLKLDAPP

SEQ ID NO: 16862 - protein, 70 aa, Synthetic construct
SPTPPDLEAMASLLKKELEQMEDFFLDAPPLPPPSPPPLPPPPLPPAPSLPLSLPSFDLPQPPVLDTLDL

SEQ ID NO: 16863 - protein, 70 aa, Synthetic construct
TVTYLWCQDNIISLMSAGILGVPPASGALSTQTSTASMVQPPQGDVEAMYPALPPYSNCGDLYSEPVSFH

SEQ ID NO: 16864 - protein, 70 aa, Synthetic construct
TVTYLGKFAFDSPSNWCQDNIISLMSGALSTQTSTASMVQPPQGDVEAMYPALPPYSNCGDLYSEPVSFH

SEQ ID NO: 16865 - protein, 70 aa, Synthetic construct
TVTYLGKFAFDSPSNWCQDNIISLMSAGILTQTSTASMVQPPQGDVEAMYPALPPYSNCGDLYSEPVSFH

SEQ ID NO: 16866 - protein, 70 aa, Synthetic construct
TVTYLGKFAFDSPSNWCQDNIISLMSAGILGVPPAASMVQPPQGDVEAMYPALPPYSNCGDLYSEPVSFH

SEQ ID NO: 16867 - protein, 70 aa, Synthetic construct
TVTYLGKFAFDSPSNWCQDNIISLMSAGILGVPPASGALSPPQGDVEAMYPALPPYSNCGDLYSEPVSFH

SEQ ID NO: 16868 - protein, 70 aa, Synthetic construct
TVTYLGKFAFDSPSNWCQDNIISLMSAGILGVPPASGALSTQTSTVEAMYPALPPYSNCGDLYSEPVSFH

SEQ ID NO: 16869 - protein, 70 aa, Synthetic construct
TVTYLGKFAFDSPSNWCQDNIISLMSAGILGVPPASGALSTQTSTASMVQPALPPYSNCGDLYSEPVSFH

SEQ ID NO: 16870 - protein, 70 aa, Synthetic construct
TVTYLGKFAFDSPSNWCQDNIISLMSAGILGVPPASGALSTQTSTASMVQPPQGDYSNCGDLYSEPVSFH

SEQ ID NO: 16871 - protein, 70 aa, Synthetic construct
TVTYLGKFAFDSPSNWCQDNIISLMSAGILGVPPASGALSTQTSTASMVQPPQGDVEAMYDLYSEPVSFH

SEQ ID NO: 16872 - protein, 70 aa, Synthetic construct
TVTYLGKFAFDSPSNWCQDNIISLMSAGILGVPPASGALSTQTSTASMVQPPQGDVEAMYPALPPYSNCG

SEQ ID NO: 16873 - protein, 70 aa, Synthetic construct
DENGHDLAVTFPGPGEDGLNPFLEVKVTDTPKRSRRDFGLDCDEHSTESRCCRYPLTVDFEAFGWDWIIA

SEQ ID NO: 16874 - protein, 70 aa, Synthetic construct
SNLGIDLAVTFPGPGEDGLNPFLEVKVTDTPKRSRRDFGLDCDEHSTESRCCRYPLTVDFEAFGWDWIIA

SEQ ID NO: 16875 - protein, 70 aa, Synthetic construct
SNLGIEIKALFPGPGEDGLNPFLEVKVTDTPKRSRRDFGLDCDEHSTESRCCRYPLTVDFEAFGWDWIIA

SEQ ID NO: 16876 - protein, 70 aa, Synthetic construct
SNLGIEIKALDENGHEDGLNPFLEVKVTDTPKRSRRDFGLDCDEHSTESRCCRYPLTVDFEAFGWDWIIA

SEQ ID NO: 16877 - protein, 70 aa, Synthetic construct
SNLGIEIKALDENGHDLAVTPFLEVKVTDTPKRSRRDFGLDCDEHSTESRCCRYPLTVDFEAFGWDWIIA

SEQ ID NO: 16878 - protein, 70 aa, Synthetic construct
SNLGIEIKALDENGHDLAVTFPGPGKVTDTPKRSRRDFGLDCDEHSTESRCCRYPLTVDFEAFGWDWIIA

SEQ ID NO: 16879 - protein, 70 aa, Synthetic construct
SNLGIEIKALDENGHDLAVTFPGPGEDGLNPKRSRRDFGLDCDEHSTESRCCRYPLTVDFEAFGWDWIIA

SEQ ID NO: 16880 - protein, 70 aa, Synthetic construct
SNLGIEIKALDENGHDLAVTFPGPGEDGLNPFLEVRDFGLDCDEHSTESRCCRYPLTVDFEAFGWDWIIA

SEQ ID NO: 16881 - protein, 70 aa, Synthetic construct
SNLGIEIKALDENGHDLAVTFPGPGEDGLNPFLEVKVTDTDCDEHSTESRCCRYPLTVDFEAFGWDWIIA

SEQ ID NO: 16882 - protein, 70 aa, Synthetic construct
SNLGIEIKALDENGHDLAVTFPGPGEDGLNPFLEVKVTDTPKRSRSTESRCCRYPLTVDFEAFGWDWIIA

SEQ ID NO: 16883 - protein, 70 aa, Synthetic construct
SNLGIEIKALDENGHDLAVTFPGPGEDGLNPFLEVKVTDTPKRSRRDFGLCCRYPLTVDFEAFGWDWIIA

SEQ ID NO: 16884 - protein, 70 aa, Synthetic construct
SNLGIEIKALDENGHDLAVTFPGPGEDGLNPFLEVKVTDTPKRSRRDFGLDCDEHLTVDFEAFGWDWIIA

SEQ ID NO: 16885 - protein, 70 aa, Synthetic construct
KGPTDGGQSLEELSSHFYTVIPHNFGHSQPPPINSPELLQAKKDMLLVLADIELAQALQAVSEQEKTVEE

SEQ ID NO: 16886 - protein, 70 aa, Synthetic construct
EALEAGGQSLEELSSHFYTVIPHNFGHSQPPPINSPELLQAKKDMLLVLADIELAQALQAVSEQEKTVEE

SEQ ID NO: 16887 - protein, 70 aa, Synthetic construct
EALEALEEALEELSSHFYTVIPHNFGHSQPPPINSPELLQAKKDMLLVLADIELAQALQAVSEQEKTVEE

SEQ ID NO: 16888 - protein, 70 aa, Synthetic construct
EALEALEEALKGPTDHFYTVIPHNFGHSQPPPINSPELLQAKKDMLLVLADIELAQALQAVSEQEKTVEE

SEQ ID NO: 16889 - protein, 70 aa, Synthetic construct
EALEALEEALKGPTDGGQSLEELSSHFYTVPPINSPELLQAKKDMLLVLADIELAQALQAVSEQEKTVEE

SEQ ID NO: 16890 - protein, 70 aa, Synthetic construct
EALEALEEALKGPTDGGQSLEELSSHFYTVIPHNFPELLQAKKDMLLVLADIELAQALQAVSEQEKTVEE

SEQ ID NO: 16891 - protein, 70 aa, Synthetic construct
EALEALEEALKGPTDGGQSLEELSSHFYTVIPHNFGHSQPAKKDMLLVLADIELAQALQAVSEQEKTVEE

SEQ ID NO: 16892 - protein, 70 aa, Synthetic construct
EALEALEEALKGPTDGGQSLEELSSHFYTVIPHNFGHSQPPPINSLLVLADIELAQALQAVSEQEKTVEE

SEQ ID NO: 16893 - protein, 70 aa, Synthetic construct
VPSAGGEEPAEEDSEDWCVPCSDEEVELPADGQPWMPPPSEIQRLYELLAAHGTLELQAEILPRRPPTPE

SEQ ID NO: 16894 - protein, 70 aa, Synthetic construct
GSGGEGEEPAEEDSEDWCVPCSDEEVELPADGQPWMPPPSEIQRLYELLAAHGTLELQAEILPRRPPTPE

SEQ ID NO: 16895 - protein, 70 aa, Synthetic construct
GSGGEEAQGEEEDSEDWCVPCSDEEVELPADGQPWMPPPSEIQRLYELLAAHGTLELQAEILPRRPPTPE

SEQ ID NO: 16896 - protein, 70 aa, Synthetic construct
GSGGEEAQGEVPSAGDWCVPCSDEEVELPADGQPWMPPPSEIQRLYELLAAHGTLELQAEILPRRPPTPE

SEQ ID NO: 16897 - protein, 70 aa, Synthetic construct
GSGGEEAQGEVPSAGGEEPACSDEEVELPADGQPWMPPPSEIQRLYELLAAHGTLELQAEILPRRPPTPE

SEQ ID NO: 16898 - protein, 70 aa, Synthetic construct
GSGGEEAQGEVPSAGGEEPAEEDSEDWCVPCSDEEVELPAEIQRLYELLAAHGTLELQAEILPRRPPTPE

SEQ ID NO: 16899 - protein, 70 aa, Synthetic construct
GSGGEEAQGEVPSAGGEEPAEEDSEDWCVPCSDEEVELPADGQPWMPPPSEIQRLYELLAAHGTLPPTPE

SEQ ID NO: 16900 - protein, 70 aa, Synthetic construct
GSGGEEAQGEVPSAGGEEPAEEDSEDWCVPCSDEEVELPADGQPWMPPPSEIQRLYELLAAHGTLELQAE

SEQ ID NO: 16901 - protein, 70 aa, Synthetic construct
DIFMDLSTPDPSEEWGSGDPEAEGPGGAPSPCNNLSPEDHSFLEDLATYETAFETGVSAFPYDGFTDELH

SEQ ID NO: 16902 - protein, 70 aa, Synthetic construct
NMFLELSTPDPSEEWGSGDPEAEGPGGAPSPCNNLSPEDHSFLEDLATYETAFETGVSAFPYDGFTDELH

SEQ ID NO: 16903 - protein, 70 aa, Synthetic construct
NMFLEETPVEPSEEWGSGDPEAEGPGGAPSPCNNLSPEDHSFLEDLATYETAFETGVSAFPYDGFTDELH

SEQ ID NO: 16904 - protein, 70 aa, Synthetic construct
NMFLEETPVEDIFMDGSGDPEAEGPGGAPSPCNNLSPEDHSFLEDLATYETAFETGVSAFPYDGFTDELH

SEQ ID NO: 16905 - protein, 70 aa, Synthetic construct
NMFLEETPVEDIFMDLSTPDEAEGPGGAPSPCNNLSPEDHSFLEDLATYETAFETGVSAFPYDGFTDELH

SEQ ID NO: 16906 - protein, 70 aa, Synthetic construct
NMFLEETPVEDIFMDLSTPDPSEEWGGAPSPCNNLSPEDHSFLEDLATYETAFETGVSAFPYDGFTDELH

SEQ ID NO: 16907 - protein, 70 aa, Synthetic construct
NMFLEETPVEDIFMDLSTPDPSEEWGSGDPPCNNLSPEDHSFLEDLATYETAFETGVSAFPYDGFTDELH

SEQ ID NO: 16908 - protein, 70 aa, Synthetic construct
NMFLEETPVEDIFMDLSTPDPSEEWGSGDPEAEGPSPEDHSFLEDLATYETAFETGVSAFPYDGFTDELH

SEQ ID NO: 16909 - protein, 70 aa, Synthetic construct
NMFLEETPVEDIFMDLSTPDPSEEWGSGDPEAEGPGGAPSSFLEDLATYETAFETGVSAFPYDGFTDELH

SEQ ID NO: 16910 - protein, 70 aa, Synthetic construct
NMFLEETPVEDIFMDLSTPDPSEEWGSGDPEAEGPGGAPSPCNNLLATYETAFETGVSAFPYDGFTDELH

SEQ ID NO: 16911 - protein, 70 aa, Synthetic construct
NMFLEETPVEDIFMDLSTPDPSEEWGSGDPEAEGPGGAPSPCNNLSPEDHSFLEDLATYEPYDGFTDELH

SEQ ID NO: 16912 - protein, 70 aa, Synthetic construct
NMFLEETPVEDIFMDLSTPDPSEEWGSGDPEAEGPGGAPSPCNNLSPEDHSFLEDLATYETAFETTDELH

SEQ ID NO: 16913 - protein, 70 aa, Synthetic construct
ILTDISSSLSCHAGSKDSPTLPESSVTDLGYYSAPQHDYYSGQPYGQTVNPYTYHHQFNLNGLAGTGAYS

SEQ ID NO: 16914 - protein, 70 aa, Synthetic construct
SGSFDRKLSSILTDISSSLSLPESSVTDLGYYSAPQHDYYSGQPYGQTVNPYTYHHQFNLNGLAGTGAYS

SEQ ID NO: 16915 - protein, 70 aa, Synthetic construct
SGSFDRKLSSILTDISSSLSCHAGSVTDLGYYSAPQHDYYSGQPYGQTVNPYTYHHQFNLNGLAGTGAYS

SEQ ID NO: 16916 - protein, 70 aa, Synthetic construct
SGSFDRKLSSILTDISSSLSCHAGSKDSPTYYSAPQHDYYSGQPYGQTVNPYTYHHQFNLNGLAGTGAYS

SEQ ID NO: 16917 - protein, 70 aa, Synthetic construct
EVPPAFWNNAFTLLSAVSLPVKRAELWDTWKVAHLKEHRRVFQAMWLSFLKHKLPLSLYKKVLLIVHDAI

SEQ ID NO: 16918 - protein, 70 aa, Synthetic construct
EVPPAFWNNAFTLLSAVSLPRREPTLWDTWKVAHLKEHRRVFQAMWLSFLKHKLPLSLYKKVLLIVHDAI

SEQ ID NO: 16919 - protein, 70 aa, Synthetic construct
EVPPAFWNNAFTLLSAVSLPRREPTVSSFYKVAHLKEHRRVFQAMWLSFLKHKLPLSLYKKVLLIVHDAI

SEQ ID NO: 16920 - protein, 70 aa, Synthetic construct
EVPPAFWNNAFTLLSAVSLPRREPTVSSFYVKRAELWDTWKVAHLKEHRRVFQAMLSLYKKVLLIVHDAI

SEQ ID NO: 16921 - protein, 70 aa, Synthetic construct
EVPPAFWNNAFTLLSAVSLPRREPTVSSFYVKRAELWDTWKVAHLKEHRRVFQAMWLSFLKVLLIVHDAI

SEQ ID NO: 16922 - protein, 70 aa, Synthetic construct
AESAAGAGPVVTPPEHLPMDSGGIDSSDSESDILLGILDNLDPVMFFKCPSPEPASLEELPEVYPEGPSS

SEQ ID NO: 16923 - protein, 70 aa, Synthetic construct
GNEVRGAGPVVTPPEHLPMDSGGIDSSDSESDILLGILDNLDPVMFFKCPSPEPASLEELPEVYPEGPSS

SEQ ID NO: 16924 - protein, 70 aa, Synthetic construct
GNEVRPVAGSVTPPEHLPMDSGGIDSSDSESDILLGILDNLDPVMFFKCPSPEPASLEELPEVYPEGPSS

SEQ ID NO: 16925 - protein, 70 aa, Synthetic construct
GNEVRPVAGSAESAAHLPMDSGGIDSSDSESDILLGILDNLDPVMFFKCPSPEPASLEELPEVYPEGPSS

SEQ ID NO: 16926 - protein, 70 aa, Synthetic construct
GNEVRPVAGSAESAAGAGPVSGGIDSSDSESDILLGILDNLDPVMFFKCPSPEPASLEELPEVYPEGPSS

SEQ ID NO: 16927 - protein, 70 aa, Synthetic construct
GNEVRPVAGSAESAAGAGPVVTPPESSDSESDILLGILDNLDPVMFFKCPSPEPASLEELPEVYPEGPSS

SEQ ID NO: 16928 - protein, 70 aa, Synthetic construct
GNEVRPVAGSAESAAGAGPVVTPPEHLPMDSDILLGILDNLDPVMFFKCPSPEPASLEELPEVYPEGPSS

SEQ ID NO: 16929 - protein, 70 aa, Synthetic construct
GNEVRPVAGSAESAAGAGPVVTPPEHLPMDSGGIDSSDSESDILLGILDNLDPVMFFKCPPEVYPEGPSS

SEQ ID NO: 16930 - protein, 70 aa, Synthetic construct
GNEVRPVAGSAESAAGAGPVVTPPEHLPMDSGGIDSSDSESDILLGILDNLDPVMFFKCPSPEPAEGPSS

SEQ ID NO: 16931 - protein, 70 aa, Synthetic construct
GNEVRPVAGSAESAAGAGPVVTPPEHLPMDSGGIDSSDSESDILLGILDNLDPVMFFKCPSPEPASLEEL

SEQ ID NO: 16932 - protein, 70 aa, Synthetic construct
AALDSSELLTNMEDEDDTDETLTSLLNEIAFLNQQLNDDSVGLAELPSSMDTEFPGDARRAFISKVPPGS

SEQ ID NO: 16933 - protein, 70 aa, Synthetic construct
LRKVTSELLTNMEDEDDTDETLTSLLNEIAFLNQQLNDDSVGLAELPSSMDTEFPGDARRAFISKVPPGS

SEQ ID NO: 16934 - protein, 70 aa, Synthetic construct
LRKVTSAIEENMEDEDDTDETLTSLLNEIAFLNQQLNDDSVGLAELPSSMDTEFPGDARRAFISKVPPGS

SEQ ID NO: 16935 - protein, 70 aa, Synthetic construct
LRKVTSAIEEAALDSDDTDETLTSLLNEIAFLNQQLNDDSVGLAELPSSMDTEFPGDARRAFISKVPPGS

SEQ ID NO: 16936 - protein, 70 aa, Synthetic construct
LRKVTSAIEEAALDSSELLTNMEDEDDTDETLTSLLNEIAFLNQQLPSSMDTEFPGDARRAFISKVPPGS

SEQ ID NO: 16937 - protein, 70 aa, Synthetic construct
LRKVTSAIEEAALDSSELLTNMEDEDDTDETLTSLLNEIAFLNQQLNDDSDTEFPGDARRAFISKVPPGS

SEQ ID NO: 16938 - protein, 70 aa, Synthetic construct
LRKVTSAIEEAALDSSELLTNMEDEDDTDETLTSLLNEIAFLNQQLNDDSVGLAEGDARRAFISKVPPGS

SEQ ID NO: 16939 - protein, 70 aa, Synthetic construct
LRKVTSAIEEAALDSSELLTNMEDEDDTDETLTSLLNEIAFLNQQLNDDSVGLAELPSSMAFISKVPPGS

SEQ ID NO: 16940 - protein, 70 aa, Synthetic construct
LRKVTSAIEEAALDSSELLTNMEDEDDTDETLTSLLNEIAFLNQQLNDDSVGLAELPSSMDTEFPVPPGS

SEQ ID NO: 16941 - protein, 70 aa, Synthetic construct
LRKVTSAIEEAALDSSELLTNMEDEDDTDETLTSLLNEIAFLNQQLNDDSVGLAELPSSMDTEFPGDARR

SEQ ID NO: 16942 - protein, 70 aa, Synthetic construct
NEIFRHYDDFFERTILCNSLVWSCAVTGRPGLTYQEALESEKKARQNLQSFPEPLIIPVLYLTSLTHRSR

SEQ ID NO: 16943 - protein, 70 aa, Synthetic construct
DEEVFYCKVTFERTILCNSLVWSCAVTGRPGLTYQEALESEKKARQNLQSFPEPLIIPVLYLTSLTHRSR

SEQ ID NO: 16944 - protein, 70 aa, Synthetic construct
DEEVFYCKVTNEIFRHYDDFFERTIVTGRPGLTYQEALESEKKARQNLQSFPEPLIIPVLYLTSLTHRSR

SEQ ID NO: 16945 - protein, 70 aa, Synthetic construct
DEEVFYCKVTNEIFRHYDDFFERTILCNSLVWSCAEALESEKKARQNLQSFPEPLIIPVLYLTSLTHRSR

SEQ ID NO: 16946 - protein, 70 aa, Synthetic construct
DEEVFYCKVTNEIFRHYDDFFERTILCNSLVWSCAVTGRPEKKARQNLQSFPEPLIIPVLYLTSLTHRSR

SEQ ID NO: 16947 - protein, 70 aa, Synthetic construct
DEEVFYCKVTNEIFRHYDDFFERTILCNSLVWSCAVTGRPGLTYQQNLQSFPEPLIIPVLYLTSLTHRSR

SEQ ID NO: 16948 - protein, 70 aa, Synthetic construct
DEEVFYCKVTNEIFRHYDDFFERTILCNSLVWSCAVTGRPGLTYQEALESEKKARIIPVLYLTSLTHRSR

SEQ ID NO: 16949 - protein, 70 aa, Synthetic construct
IKLADFGLARAFGVPLWYRAPEILLGSKFYTTAVDIWSIGCIFAEMVTRKALFPGDSEIDQLFRIFRMLG

SEQ ID NO: 16950 - protein, 70 aa, Synthetic construct
IKLADFGLARAFGVPLRTYTPEILLGSKFYTTAVDIWSIGCIFAEMVTRKALFPGDSEIDQLFRIFRMLG

SEQ ID NO: 16951 - protein, 70 aa, Synthetic construct
IKLADFGLARAFGVPLRTYTHEVVTGSKFYTTAVDIWSIGCIFAEMVTRKALFPGDSEIDQLFRIFRMLG

SEQ ID NO: 16952 - protein, 70 aa, Synthetic construct
IKLADFGLARAFGVPLRTYTHEVVTLWYRAPEILLIWSIGCIFAEMVTRKALFPGDSEIDQLFRIFRMLG

SEQ ID NO: 16953 - protein, 70 aa, Synthetic construct
IKLADFGLARAFGVPLRTYTHEVVTLWYRAPEILLGSKFYCIFAEMVTRKALFPGDSEIDQLFRIFRMLG

SEQ ID NO: 16954 - protein, 70 aa, Synthetic construct
IKLADFGLARAFGVPLRTYTHEVVTLWYRAPEILLGSKFYTTAVDIWSIGALFPGDSEIDQLFRIFRMLG

SEQ ID NO: 16955 - protein, 70 aa, Synthetic construct
IKLADFGLARAFGVPLRTYTHEVVTLWYRAPEILLGSKFYTTAVDIWSIGCIFAEDSEIDQLFRIFRMLG

SEQ ID NO: 16956 - protein, 70 aa, Synthetic construct
IKLADFGLARAFGVPLRTYTHEVVTLWYRAPEILLGSKFYTTAVDIWSIGCIFAEMVTRKQLFRIFRMLG

SEQ ID NO: 16957 - protein, 70 aa, Synthetic construct
IKLADFGLARAFGVPLRTYTHEVVTLWYRAPEILLGSKFYTTAVDIWSIGCIFAEMVTRKALFPGFRMLG

SEQ ID NO: 16958 - protein, 70 aa, Synthetic construct
IKLADFGLARAFGVPLRTYTHEVVTLWYRAPEILLGSKFYTTAVDIWSIGCIFAEMVTRKALFPGDSEID

SEQ ID NO: 16959 - protein, 70 aa, Synthetic construct
YAAQAHLKLGEVSVESENYVQAVEEFQSCLNLQEQYLEAHDRLLAETHYQLGLAYGYNSQYDEAVENRMA

SEQ ID NO: 16960 - protein, 70 aa, Synthetic construct
YAAQAHLKLGEVSVESENYVQAVEEFQSCLNLQEQYLEAHDRLLAETHYQLGLAYGYNSQYDEAVAQFSK

SEQ ID NO: 16961 - protein, 70 aa, Synthetic construct
PDKDGPDYEPNLWMWVNPNIVYPPGKLEVSGRRKREDLTSTLPSSQPPQKEEDASCSEAAGVESLSQSSS

SEQ ID NO: 16962 - protein, 70 aa, Synthetic construct
PKLPLPDYEPNLWMWVNPNIVYPPGKLEVSGRRKREDLTSTLPSSQPPQKEEDASCSEAAGVESLSQSSS

SEQ ID NO: 16963 - protein, 70 aa, Synthetic construct
PKLPLEKKPNNLWMWVNPNIVYPPGKLEVSGRRKREDLTSTLPSSQPPQKEEDASCSEAAGVESLSQSSS

SEQ ID NO: 16964 - protein, 70 aa, Synthetic construct
PKLPLEKKPNPDKDGPDYEPNLWMWVNPNIVYPPGKLEVSTLPSSQPPQKEEDASCSEAAGVESLSQSSS

SEQ ID NO: 16965 - protein, 70 aa, Synthetic construct
PKLPLEKKPNPDKDGPDYEPNLWMWVNPNIVYPPGKLEVSGRRKRQPPQKEEDASCSEAAGVESLSQSSS

SEQ ID NO: 16966 - protein, 70 aa, Synthetic construct
PKLPLEKKPNPDKDGPDYEPNLWMWVNPNIVYPPGKLEVSGRRKREDLTSEEDASCSEAAGVESLSQSSS

SEQ ID NO: 16967 - protein, 70 aa, Synthetic construct
PKLPLEKKPNPDKDGPDYEPNLWMWVNPNIVYPPGKLEVSGRRKREDLTSTLPSSCSEAAGVESLSQSSS

SEQ ID NO: 16968 - protein, 70 aa, Synthetic construct
PKLPLEKKPNPDKDGPDYEPNLWMWVNPNIVYPPGKLEVSGRRKREDLTSTLPSSQPPQKGVESLSQSSS

SEQ ID NO: 16969 - protein, 70 aa, Synthetic construct
PKLPLEKKPNPDKDGPDYEPNLWMWVNPNIVYPPGKLEVSGRRKREDLTSTLPSSQPPQKEEDASSQSSS

SEQ ID NO: 16970 - protein, 70 aa, Synthetic construct
PKLPLEKKPNPDKDGPDYEPNLWMWVNPNIVYPPGKLEVSGRRKREDLTSTLPSSQPPQKEEDASCSEAA

SEQ ID NO: 16971 - protein, 70 aa, Synthetic construct
RWAIMSREEEIITLQIVELMAIQEKEGQAVAVPSSKTDSDIRTFIESNNRTRSPSLLAHLENSNPSSIHH

SEQ ID NO: 16972 - protein, 70 aa, Synthetic construct
GDHSLEVEAGLPPGWRKIHDAAGTYYWHVPSGSTQWQRPTWELGDAEDPGTGTEGIWGLRPPKGRSFSSL

SEQ ID NO: 16973 - protein, 70 aa, Synthetic construct
ILVNCDDDLWLPPGWRKIHDAAGTYYWHVPSGSTQWQRPTWELGDAEDPGTGTEGIWGLRPPKGRSFSSL

SEQ ID NO: 16974 - protein, 70 aa, Synthetic construct
ILVNCDDDLWGDHSLEVEAGLPPGWYWHVPSGSTQWQRPTWELGDAEDPGTGTEGIWGLRPPKGRSFSSL

SEQ ID NO: 16975 - protein, 70 aa, Synthetic construct
ILVNCDDDLWGDHSLEVEAGLPPGWRKIHDAAGTYWQRPTWELGDAEDPGTGTEGIWGLRPPKGRSFSSL

SEQ ID NO: 16976 - protein, 70 aa, Synthetic construct
ILVNCDDDLWGDHSLEVEAGLPPGWRKIHDAAGTYYWHVPWELGDAEDPGTGTEGIWGLRPPKGRSFSSL

SEQ ID NO: 16977 - protein, 70 aa, Synthetic construct
ILVNCDDDLWGDHSLEVEAGLPPGWRKIHDAAGTYYWHVPSGSTQAEDPGTGTEGIWGLRPPKGRSFSSL

SEQ ID NO: 16978 - protein, 70 aa, Synthetic construct
ILVNCDDDLWGDHSLEVEAGLPPGWRKIHDAAGTYYWHVPSGSTQWQRPTTGTEGIWGLRPPKGRSFSSL

SEQ ID NO: 16979 - protein, 70 aa, Synthetic construct
ILVNCDDDLWGDHSLEVEAGLPPGWRKIHDAAGTYYWHVPSGSTQWQRPTWELGDIWGLRPPKGRSFSSL

SEQ ID NO: 16980 - protein, 70 aa, Synthetic construct
ILVNCDDDLWGDHSLEVEAGLPPGWRKIHDAAGTYYWHVPSGSTQWQRPTWELGDAEDPGPPKGRSFSSL

SEQ ID NO: 16981 - protein, 70 aa, Synthetic construct
ILVNCDDDLWGDHSLEVEAGLPPGWRKIHDAAGTYYWHVPSGSTQWQRPTWELGDAEDPGTGTEGSFSSL

SEQ ID NO: 16982 - protein, 70 aa, Synthetic construct
ILVNCDDDLWGDHSLEVEAGLPPGWRKIHDAAGTYYWHVPSGSTQWQRPTWELGDAEDPGTGTEGIWGLR

SEQ ID NO: 16983 - protein, 70 aa, Synthetic construct
DVILEKGEVIDFSSLSSSDRTPLTSPSPSPSLDFSAPGTPASHSATPSLLSEADLIPDVMPPQALFHDDD

SEQ ID NO: 16984 - protein, 70 aa, Synthetic construct
VKFISKGEVIDFSSLSSSDRTPLTSPSPSPSLDFSAPGTPASHSATPSLLSEADLIPDVMPPQALFHDDD

SEQ ID NO: 16985 - protein, 70 aa, Synthetic construct
VKFISRGRRPDFSSLSSSDRTPLTSPSPSPSLDFSAPGTPASHSATPSLLSEADLIPDVMPPQALFHDDD

SEQ ID NO: 16986 - protein, 70 aa, Synthetic construct
VKFISRGRRPDVILESSSDRTPLTSPSPSPSLDFSAPGTPASHSATPSLLSEADLIPDVMPPQALFHDDD

SEQ ID NO: 16987 - protein, 70 aa, Synthetic construct
VKFISRGRRPDVILEKGEVITPLTSPSPSPSLDFSAPGTPASHSATPSLLSEADLIPDVMPPQALFHDDD

SEQ ID NO: 16988 - protein, 70 aa, Synthetic construct
VKFISRGRRPDVILEKGEVIDFSSLPSPSPSLDFSAPGTPASHSATPSLLSEADLIPDVMPPQALFHDDD

SEQ ID NO: 16989 - protein, 70 aa, Synthetic construct
VKFISRGRRPDVILEKGEVIDFSSLSSSDRSLDFSAPGTPASHSATPSLLSEADLIPDVMPPQALFHDDD

SEQ ID NO: 16990 - protein, 70 aa, Synthetic construct
VKFISRGRRPDVILEKGEVIDFSSLSSSDRTPLTSAPGTPASHSATPSLLSEADLIPDVMPPQALFHDDD

SEQ ID NO: 16991 - protein, 70 aa, Synthetic construct
VKFISRGRRPDVILEKGEVIDFSSLSSSDRTPLTSPSPSPASHSATPSLLSEADLIPDVMPPQALFHDDD

SEQ ID NO: 16992 - protein, 70 aa, Synthetic construct
VKFISRGRRPDVILEKGEVIDFSSLSSSDRTPLTSPSPSPSLDFSTPSLLSEADLIPDVMPPQALFHDDD

SEQ ID NO: 16993 - protein, 70 aa, Synthetic construct
ESVWSDIECAALVGEDQPLCPDLPELDLSELDVNDLDTDSFLGGLKWCSDQSEIISNQYNNEPSNIFEKI

SEQ ID NO: 16994 - protein, 70 aa, Synthetic construct
MAWDMDIECAALVGEDQPLCPDLPELDLSELDVNDLDTDSFLGGLKWCSDQSEIISNQYNNEPSNIFEKI

SEQ ID NO: 16995 - protein, 70 aa, Synthetic construct
MAWDMCNQDSALVGEDQPLCPDLPELDLSELDVNDLDTDSFLGGLKWCSDQSEIISNQYNNEPSNIFEKI

SEQ ID NO: 16996 - protein, 70 aa, Synthetic construct
MAWDMCNQDSESVWSDQPLCPDLPELDLSELDVNDLDTDSFLGGLKWCSDQSEIISNQYNNEPSNIFEKI

SEQ ID NO: 16997 - protein, 70 aa, Synthetic construct
MAWDMCNQDSESVWSDIECAPDLPELDLSELDVNDLDTDSFLGGLKWCSDQSEIISNQYNNEPSNIFEKI

SEQ ID NO: 16998 - protein, 70 aa, Synthetic construct
MAWDMCNQDSESVWSDIECAALVGELDLSELDVNDLDTDSFLGGLKWCSDQSEIISNQYNNEPSNIFEKI

SEQ ID NO: 16999 - protein, 70 aa, Synthetic construct
MAWDMCNQDSESVWSDIECAALVGEDQPLCLDVNDLDTDSFLGGLKWCSDQSEIISNQYNNEPSNIFEKI

SEQ ID NO: 17000 - protein, 70 aa, Synthetic construct
MAWDMCNQDSESVWSDIECAALVGEDQPLCPDLPELDTDSFLGGLKWCSDQSEIISNQYNNEPSNIFEKI

SEQ ID NO: 17001 - protein, 70 aa, Synthetic construct
MAWDMCNQDSESVWSDIECAALVGEDQPLCPDLPELDLSEFLGGLKWCSDQSEIISNQYNNEPSNIFEKI

SEQ ID NO: 17002 - protein, 70 aa, Synthetic construct
MAWDMCNQDSESVWSDIECAALVGEDQPLCPDLPELDLSELDVNDKWCSDQSEIISNQYNNEPSNIFEKI

SEQ ID NO: 17003 - protein, 70 aa, Synthetic construct
MAWDMCNQDSESVWSDIECAALVGEDQPLCPDLPELDLSELDVNDLDTDSQSEIISNQYNNEPSNIFEKI

SEQ ID NO: 17004 - protein, 70 aa, Synthetic construct
MAWDMCNQDSESVWSDIECAALVGEDQPLCPDLPELDLSELDVNDLDTDSFLGGLSNQYNNEPSNIFEKI

SEQ ID NO: 17005 - protein, 70 aa, Synthetic construct
MAWDMCNQDSESVWSDIECAALVGEDQPLCPDLPELDLSELDVNDLDTDSFLGGLKWCSDNEPSNIFEKI

SEQ ID NO: 17006 - protein, 70 aa, Synthetic construct
MAWDMCNQDSESVWSDIECAALVGEDQPLCPDLPELDLSELDVNDLDTDSFLGGLKWCSDQSEIIIFEKI

SEQ ID NO: 17007 - protein, 70 aa, Synthetic construct
MAWDMCNQDSESVWSDIECAALVGEDQPLCPDLPELDLSELDVNDLDTDSFLGGLKWCSDQSEIISNQYN

SEQ ID NO: 17008 - protein, 70 aa, Synthetic construct
NEQFSKLPMFINSGLAMDGLFDDSEDESDKLSYPWDGTQSYSLFNVSPSCSSFNSPCRDSVSPPKSLFSQ

SEQ ID NO: 17009 - protein, 70 aa, Synthetic construct
TGELRKLPMFINSGLAMDGLFDDSEDESDKLSYPWDGTQSYSLFNVSPSCSSFNSPCRDSVSPPKSLFSQ

SEQ ID NO: 17010 - protein, 70 aa, Synthetic construct
TGELRDSDFSINSGLAMDGLFDDSEDESDKLSYPWDGTQSYSLFNVSPSCSSFNSPCRDSVSPPKSLFSQ

SEQ ID NO: 17011 - protein, 70 aa, Synthetic construct
TGELRDSDFSNEQFSKLPMFFDDSEDESDKLSYPWDGTQSYSLFNVSPSCSSFNSPCRDSVSPPKSLFSQ

SEQ ID NO: 17012 - protein, 70 aa, Synthetic construct
TGELRDSDFSNEQFSKLPMFINSGLAMDGLLSYPWDGTQSYSLFNVSPSCSSFNSPCRDSVSPPKSLFSQ

SEQ ID NO: 17013 - protein, 70 aa, Synthetic construct
TGELRDSDFSNEQFSKLPMFINSGLAMDGLFDDSEDGTQSYSLFNVSPSCSSFNSPCRDSVSPPKSLFSQ

SEQ ID NO: 17014 - protein, 70 aa, Synthetic construct
TGELRDSDFSNEQFSKLPMFINSGLAMDGLFDDSEDESDKYSLFNVSPSCSSFNSPCRDSVSPPKSLFSQ

SEQ ID NO: 17015 - protein, 70 aa, Synthetic construct
TGELRDSDFSNEQFSKLPMFINSGLAMDGLFDDSEDESDKLSYPWDGTQSYSLFNVSPSCVSPPKSLFSQ

SEQ ID NO: 17016 - protein, 70 aa, Synthetic construct
TGELRDSDFSNEQFSKLPMFINSGLAMDGLFDDSEDESDKLSYPWDGTQSYSLFNVSPSCSSFNSSLFSQ

SEQ ID NO: 17017 - protein, 70 aa, Synthetic construct
TGELRDSDFSNEQFSKLPMFINSGLAMDGLFDDSEDESDKLSYPWDGTQSYSLFNVSPSCSSFNSPCRDS

SEQ ID NO: 17018 - protein, 70 aa, Synthetic construct
AEGLLEDCDLFGPARDDVLAMAVKMANVLDEPGQDLEADFPKNPLDINPSVDFLFDCGLVGPEDVSTEQD

SEQ ID NO: 17019 - protein, 70 aa, Synthetic construct
DLCDLEDCDLFGPARDDVLAMAVKMANVLDEPGQDLEADFPKNPLDINPSVDFLFDCGLVGPEDVSTEQD

SEQ ID NO: 17020 - protein, 70 aa, Synthetic construct
DLCDLVSNQSFGPARDDVLAMAVKMANVLDEPGQDLEADFPKNPLDINPSVDFLFDCGLVGPEDVSTEQD

SEQ ID NO: 17021 - protein, 70 aa, Synthetic construct
DLCDLVSNQSAEGLLDDVLAMAVKMANVLDEPGQDLEADFPKNPLDINPSVDFLFDCGLVGPEDVSTEQD

SEQ ID NO: 17022 - protein, 70 aa, Synthetic construct
DLCDLVSNQSAEGLLEDCDLFGPARANVLDEPGQDLEADFPKNPLDINPSVDFLFDCGLVGPEDVSTEQD

SEQ ID NO: 17023 - protein, 70 aa, Synthetic construct
DLCDLVSNQSAEGLLEDCDLFGPARDDVLAEPGQDLEADFPKNPLDINPSVDFLFDCGLVGPEDVSTEQD

SEQ ID NO: 17024 - protein, 70 aa, Synthetic construct
DLCDLVSNQSAEGLLEDCDLFGPARDDVLAMAVKMLEADFPKNPLDINPSVDFLFDCGLVGPEDVSTEQD

SEQ ID NO: 17025 - protein, 70 aa, Synthetic construct
DLCDLVSNQSAEGLLEDCDLFGPARDDVLAMAVKMANVLDPKNPLDINPSVDFLFDCGLVGPEDVSTEQD

SEQ ID NO: 17026 - protein, 70 aa, Synthetic construct
DLCDLVSNQSAEGLLEDCDLFGPARDDVLAMAVKMANVLDEPGQDDINPSVDFLFDCGLVGPEDVSTEQD

SEQ ID NO: 17027 - protein, 70 aa, Synthetic construct
DLCDLVSNQSAEGLLEDCDLFGPARDDVLAMAVKMANVLDEPGQDLEADFVDFLFDCGLVGPEDVSTEQD

SEQ ID NO: 17028 - protein, 70 aa, Synthetic construct
DLCDLVSNQSAEGLLEDCDLFGPARDDVLAMAVKMANVLDEPGQDLEADFPKNPLDINPSVDFLFSTEQD

SEQ ID NO: 17029 - protein, 70 aa, Synthetic construct
DLCDLVSNQSAEGLLEDCDLFGPARDDVLAMAVKMANVLDEPGQDLEADFPKNPLDINPSVDFLFDCGLV

SEQ ID NO: 17030 - protein, 70 aa, Synthetic construct
AGLNNDSPEALEVPSLQDFSVFSTDSCLQLSDAVSPSLPGSLDSPVDISADSLDFFTDTLTTIDLQHLNY

SEQ ID NO: 17031 - protein, 70 aa, Synthetic construct
CLSTMDSPEALEVPSLQDFSVFSTDSCLQLSDAVSPSLPGSLDSPVDISADSLDFFTDTLTTIDLQHLNY

SEQ ID NO: 17032 - protein, 70 aa, Synthetic construct
CLSTMGQNCGLEVPSLQDFSVFSTDSCLQLSDAVSPSLPGSLDSPVDISADSLDFFTDTLTTIDLQHLNY

SEQ ID NO: 17033 - protein, 70 aa, Synthetic construct
CLSTMGQNCGAGLNNLQDFSVFSTDSCLQLSDAVSPSLPGSLDSPVDISADSLDFFTDTLTTIDLQHLNY

SEQ ID NO: 17034 - protein, 70 aa, Synthetic construct
CLSTMGQNCGAGLNNDSPEAVFSTDSCLQLSDAVSPSLPGSLDSPVDISADSLDFFTDTLTTIDLQHLNY

SEQ ID NO: 17035 - protein, 70 aa, Synthetic construct
CLSTMGQNCGAGLNNDSPEALEVPSSCLQLSDAVSPSLPGSLDSPVDISADSLDFFTDTLTTIDLQHLNY

SEQ ID NO: 17036 - protein, 70 aa, Synthetic construct
CLSTMGQNCGAGLNNDSPEALEVPSLQDFSSDAVSPSLPGSLDSPVDISADSLDFFTDTLTTIDLQHLNY

SEQ ID NO: 17037 - protein, 70 aa, Synthetic construct
CLSTMGQNCGAGLNNDSPEALEVPSLQDFSVFSTDPSLPGSLDSPVDISADSLDFFTDTLTTIDLQHLNY

SEQ ID NO: 17038 - protein, 70 aa, Synthetic construct
CLSTMGQNCGAGLNNDSPEALEVPSLQDFSVFSTDSCLQLSLDSPVDISADSLDFFTDTLTTIDLQHLNY

SEQ ID NO: 17039 - protein, 70 aa, Synthetic construct
CLSTMGQNCGAGLNNDSPEALEVPSLQDFSVFSTDSCLQLSDAVSVDISADSLDFFTDTLTTIDLQHLNY

SEQ ID NO: 17040 - protein, 70 aa, Synthetic construct
CLSTMGQNCGAGLNNDSPEALEVPSLQDFSVFSTDSCLQLSDAVSPSLPGDSLDFFTDTLTTIDLQHLNY

SEQ ID NO: 17041 - protein, 70 aa, Synthetic construct
CLSTMGQNCGAGLNNDSPEALEVPSLQDFSVFSTDSCLQLSDAVSPSLPGSLDSPFTDTLTTIDLQHLNY

SEQ ID NO: 17042 - protein, 70 aa, Synthetic construct
CLSTMGQNCGAGLNNDSPEALEVPSLQDFSVFSTDSCLQLSDAVSPSLPGSLDSPVDISADSLDFFTDTL

SEQ ID NO: 17043 - protein, 70 aa, Synthetic construct
TLSSWELEAWDENGGTYVSPPGNEEEESKIFTTLDPASLAWLTEEEPEPAEVTSTSQSPHSPDSSQSSLA

SEQ ID NO: 17044 - protein, 70 aa, Synthetic construct
TLSSWELEAWYEDLQTYVSPPGNEEEESKIFTTLDPASLAWLTEEEPEPAEVTSTSQSPHSPDSSQSSLA

SEQ ID NO: 17045 - protein, 70 aa, Synthetic construct
TLSSWELEAWYEDLQEVLSSPGNEEEESKIFTTLDPASLAWLTEEEPEPAEVTSTSQSPHSPDSSQSSLA

SEQ ID NO: 17046 - protein, 70 aa, Synthetic construct
TLSSWELEAWYEDLQEVLSSDENGGEESKIFTTLDPASLAWLTEEEPEPAEVTSTSQSPHSPDSSQSSLA

SEQ ID NO: 17047 - protein, 70 aa, Synthetic construct
TLSSWELEAWYEDLQEVLSSDENGGTYVSPFTTLDPASLAWLTEEEPEPAEVTSTSQSPHSPDSSQSSLA

SEQ ID NO: 17048 - protein, 70 aa, Synthetic construct
TLSSWELEAWYEDLQEVLSSDENGGTYVSPPGNEEPASLAWLTEEEPEPAEVTSTSQSPHSPDSSQSSLA

SEQ ID NO: 17049 - protein, 70 aa, Synthetic construct
TLSSWELEAWYEDLQEVLSSDENGGTYVSPPGNEEEESKIWLTEEEPEPAEVTSTSQSPHSPDSSQSSLA

SEQ ID NO: 17050 - protein, 70 aa, Synthetic construct
TLSSWELEAWYEDLQEVLSSDENGGTYVSPPGNEEEESKIFTTLDEPEPAEVTSTSQSPHSPDSSQSSLA

SEQ ID NO: 17051 - protein, 70 aa, Synthetic construct
TLSSWELEAWYEDLQEVLSSDENGGTYVSPPGNEEEESKIFTTLDPASLAEVTSTSQSPHSPDSSQSSLA

SEQ ID NO: 17052 - protein, 70 aa, Synthetic construct
TLSSWELEAWYEDLQEVLSSDENGGTYVSPPGNEEEESKIFTTLDPASLAWLTEESQSPHSPDSSQSSLA

SEQ ID NO: 17053 - protein, 70 aa, Synthetic construct
TLSSWELEAWYEDLQEVLSSDENGGTYVSPPGNEEEESKIFTTLDPASLAWLTEEEPEPASPDSSQSSLA

SEQ ID NO: 17054 - protein, 70 aa, Synthetic construct
TLSSWELEAWYEDLQEVLSSDENGGTYVSPPGNEEEESKIFTTLDPASLAWLTEEEPEPAEVTSTQSSLA

SEQ ID NO: 17055 - protein, 70 aa, Synthetic construct
TLSSWELEAWYEDLQEVLSSDENGGTYVSPPGNEEEESKIFTTLDPASLAWLTEEEPEPAEVTSTSQSPH

SEQ ID NO: 17056 - protein, 70 aa, Synthetic construct
NPLFASTLLNLKQAEEAKTADTAIPFHSTDDPPRPTFDSLLSRDMAGYMPARADFIEEFDNYAEWDLRDI

SEQ ID NO: 17057 - protein, 70 aa, Synthetic construct
EKHYMKHFINNPLFAEAKTADTAIPFHSTDDPPRPTFDSLLSRDMAGYMPARADFIEEFDNYAEWDLRDI

SEQ ID NO: 17058 - protein, 70 aa, Synthetic construct
EKHYMKHFINNPLFASTLLNDTAIPFHSTDDPPRPTFDSLLSRDMAGYMPARADFIEEFDNYAEWDLRDI

SEQ ID NO: 17059 - protein, 70 aa, Synthetic construct
EKHYMKHFINNPLFASTLLNLKQAEFHSTDDPPRPTFDSLLSRDMAGYMPARADFIEEFDNYAEWDLRDI

SEQ ID NO: 17060 - protein, 70 aa, Synthetic construct
EKHYMKHFINNPLFASTLLNLKQAEEAKTADPPRPTFDSLLSRDMAGYMPARADFIEEFDNYAEWDLRDI

SEQ ID NO: 17061 - protein, 70 aa, Synthetic construct
EKHYMKHFINNPLFASTLLNLKQAEEAKTADTAIPTFDSLLSRDMAGYMPARADFIEEFDNYAEWDLRDI

SEQ ID NO: 17062 - protein, 70 aa, Synthetic construct
EKHYMKHFINNPLFASTLLNLKQAEEAKTADTAIPFHSTDDPPRPTFDSLLSRDMIEEFDNYAEWDLRDI

SEQ ID NO: 17063 - protein, 70 aa, Synthetic construct
NYAEWDSDILHALKMAVVDIYHSRLKERQRRKKIIRDHGLINLRKFQLMERRYPKEVQDLYETMRRFARI

SEQ ID NO: 17064 - protein, 70 aa, Synthetic construct
NYAEWDLRDIDFVEDDSDILHALKMAVVDIRKKIIRDHGLINLRKFQLMERRYPKEVQDLYETMRRFARI

SEQ ID NO: 17065 - protein, 70 aa, Synthetic construct
NYAEWDLRDIDFVEDDSDILHALKMAVVDIYHSRLRDHGLINLRKFQLMERRYPKEVQDLYETMRRFARI

SEQ ID NO: 17066 - protein, 70 aa, Synthetic construct
QVQFADLCSSLNQFFTQTGLIHSQSNVQQNVCHGAMHPTKPSQHIGTGNLYIDSRQNLPPSVMPPPGYPH

SEQ ID NO: 17067 - protein, 70 aa, Synthetic construct
QADLKNWSLDQVQFADLCSSLNQFFNVQQNVCHGAMHPTKPSQHIGTGNLYIDSRQNLPPSVMPPPGYPH

SEQ ID NO: 17068 - protein, 70 aa, Synthetic construct
QADLKNWSLDQVQFADLCSSLNQFFTQTGLVCHGAMHPTKPSQHIGTGNLYIDSRQNLPPSVMPPPGYPH

SEQ ID NO: 17069 - protein, 70 aa, Synthetic construct
QADLKNWSLDQVQFADLCSSLNQFFTQTGLIHSQSMHPTKPSQHIGTGNLYIDSRQNLPPSVMPPPGYPH

SEQ ID NO: 17070 - protein, 70 aa, Synthetic construct
QADLKNWSLDQVQFADLCSSLNQFFTQTGLIHSQSNVQQNPSQHIGTGNLYIDSRQNLPPSVMPPPGYPH

SEQ ID NO: 17071 - protein, 70 aa, Synthetic construct
QADLKNWSLDQVQFADLCSSLNQFFTQTGLIHSQSNVQQNVCHGAGTGNLYIDSRQNLPPSVMPPPGYPH

SEQ ID NO: 17072 - protein, 70 aa, Synthetic construct
QADLKNWSLDQVQFADLCSSLNQFFTQTGLIHSQSNVQQNVCHGAMHPTKYIDSRQNLPPSVMPPPGYPH

SEQ ID NO: 17073 - protein, 70 aa, Synthetic construct
QADLKNWSLDQVQFADLCSSLNQFFTQTGLIHSQSNVQQNVCHGAMHPTKPSQHIQNLPPSVMPPPGYPH

SEQ ID NO: 17074 - protein, 70 aa, Synthetic construct
QADLKNWSLDQVQFADLCSSLNQFFTQTGLIHSQSNVQQNVCHGAMHPTKPSQHIGTGNLSVMPPPGYPH

SEQ ID NO: 17075 - protein, 70 aa, Synthetic construct
QADLKNWSLDQVQFADLCSSLNQFFTQTGLIHSQSNVQQNVCHGAMHPTKPSQHIGTGNLYIDSRPGYPH

SEQ ID NO: 17076 - protein, 70 aa, Synthetic construct
QADLKNWSLDQVQFADLCSSLNQFFTQTGLIHSQSNVQQNVCHGAMHPTKPSQHIGTGNLYIDSRQNLPP

SEQ ID NO: 17077 - protein, 70 aa, Synthetic construct
DQGYGGYGAWYGTGVASWQGYENYNYYGAQNTSVTTGATYSYGPASWEAAKANDGGLAAGAPAMHMASYG

SEQ ID NO: 17078 - protein, 70 aa, Synthetic construct
DQGYGGYGAWSAGPAASWQGYENYNYYGAQNTSVTTGATYSYGPASWEAAKANDGGLAAGAPAMHMASYG

SEQ ID NO: 17079 - protein, 70 aa, Synthetic construct
DQGYGGYGAWSAGPANTQGAYGTGVASWQGYENYNTGATYSYGPASWEAAKANDGGLAAGAPAMHMASYG

SEQ ID NO: 17080 - protein, 70 aa, Synthetic construct
DQGYGGYGAWSAGPANTQGAYGTGVASWQGYENYNYYGAQSYGPASWEAAKANDGGLAAGAPAMHMASYG

SEQ ID NO: 17081 - protein, 70 aa, Synthetic construct
DQGYGGYGAWSAGPANTQGAYGTGVASWQGYENYNYYGAQNTSVTSWEAAKANDGGLAAGAPAMHMASYG

SEQ ID NO: 17082 - protein, 70 aa, Synthetic construct
DQGYGGYGAWSAGPANTQGAYGTGVASWQGYENYNYYGAQNTSVTTGATYSYGPAGLAAGAPAMHMASYG

SEQ ID NO: 17083 - protein, 70 aa, Synthetic construct
DQGYGGYGAWSAGPANTQGAYGTGVASWQGYENYNYYGAQNTSVTTGATYSYGPASWEAAAPAMHMASYG

SEQ ID NO: 17084 - protein, 70 aa, Synthetic construct
DQGYGGYGAWSAGPANTQGAYGTGVASWQGYENYNYYGAQNTSVTTGATYSYGPASWEAAKANDGMASYG

SEQ ID NO: 17085 - protein, 70 aa, Synthetic construct
DQGYGGYGAWSAGPANTQGAYGTGVASWQGYENYNYYGAQNTSVTTGATYSYGPASWEAAKANDGGLAAG

SEQ ID NO: 17086 - protein, 70 aa, Synthetic construct
PGPLPEDVFSGRQDSPFLPDLNFFAADSCLQLSGGLSPSLQGSLDSPVPFSEEELDFFTSTLCAIDLQFP

SEQ ID NO: 17087 - protein, 70 aa, Synthetic construct
CALRGEDVFSGRQDSPFLPDLNFFAADSCLQLSGGLSPSLQGSLDSPVPFSEEELDFFTSTLCAIDLQFP

SEQ ID NO: 17088 - protein, 70 aa, Synthetic construct
CALRGAGGLEGRQDSPFLPDLNFFAADSCLQLSGGLSPSLQGSLDSPVPFSEEELDFFTSTLCAIDLQFP

SEQ ID NO: 17089 - protein, 70 aa, Synthetic construct
CALRGAGGLEPGPLPPFLPDLNFFAADSCLQLSGGLSPSLQGSLDSPVPFSEEELDFFTSTLCAIDLQFP

SEQ ID NO: 17090 - protein, 70 aa, Synthetic construct
CALRGAGGLEPGPLPEDVFSLNFFAADSCLQLSGGLSPSLQGSLDSPVPFSEEELDFFTSTLCAIDLQFP

SEQ ID NO: 17091 - protein, 70 aa, Synthetic construct
CALRGAGGLEPGPLPEDVFSGRQDSADSCLQLSGGLSPSLQGSLDSPVPFSEEELDFFTSTLCAIDLQFP

SEQ ID NO: 17092 - protein, 70 aa, Synthetic construct
CALRGAGGLEPGPLPEDVFSGRQDSPFLPDQLSGGLSPSLQGSLDSPVPFSEEELDFFTSTLCAIDLQFP

SEQ ID NO: 17093 - protein, 70 aa, Synthetic construct
CALRGAGGLEPGPLPEDVFSGRQDSPFLPDLNFFALSPSLQGSLDSPVPFSEEELDFFTSTLCAIDLQFP

SEQ ID NO: 17094 - protein, 70 aa, Synthetic construct
CALRGAGGLEPGPLPEDVFSGRQDSPFLPDLNFFAADSCLQGSLDSPVPFSEEELDFFTSTLCAIDLQFP

SEQ ID NO: 17095 - protein, 70 aa, Synthetic construct
CALRGAGGLEPGPLPEDVFSGRQDSPFLPDLNFFAADSCLQLSGGSPVPFSEEELDFFTSTLCAIDLQFP

SEQ ID NO: 17096 - protein, 70 aa, Synthetic construct
CALRGAGGLEPGPLPEDVFSGRQDSPFLPDLNFFAADSCLQLSGGLSPSLSEEELDFFTSTLCAIDLQFP

SEQ ID NO: 17097 - protein, 70 aa, Synthetic construct
CALRGAGGLEPGPLPEDVFSGRQDSPFLPDLNFFAADSCLQLSGGLSPSLQGSLDDFFTSTLCAIDLQFP

SEQ ID NO: 17098 - protein, 70 aa, Synthetic construct
CALRGAGGLEPGPLPEDVFSGRQDSPFLPDLNFFAADSCLQLSGGLSPSLQGSLDSPVPFTLCAIDLQFP

SEQ ID NO: 17099 - protein, 70 aa, Synthetic construct
CALRGAGGLEPGPLPEDVFSGRQDSPFLPDLNFFAADSCLQLSGGLSPSLQGSLDSPVPFSEEELDLQFP

SEQ ID NO: 17100 - protein, 70 aa, Synthetic construct
CALRGAGGLEPGPLPEDVFSGRQDSPFLPDLNFFAADSCLQLSGGLSPSLQGSLDSPVPFSEEELDFFTS

SEQ ID NO: 17101 - protein, 70 aa, Synthetic construct
TGFYQGGNGLGNAAGFGSVHQDYPSYPGFPQSQYPQYYGSSYNPPYVPASSICPSPLSTSTYVLQEASHN

SEQ ID NO: 17102 - protein, 70 aa, Synthetic construct
SPYTYGGNGLGNAAGFGSVHQDYPSYPGFPQSQYPQYYGSSYNPPYVPASSICPSPLSTSTYVLQEASHN

SEQ ID NO: 17103 - protein, 70 aa, Synthetic construct
SPYTYQMHGTGNAAGFGSVHQDYPSYPGFPQSQYPQYYGSSYNPPYVPASSICPSPLSTSTYVLQEASHN

SEQ ID NO: 17104 - protein, 70 aa, Synthetic construct
SPYTYQMHGTTGFYQFGSVHQDYPSYPGFPQSQYPQYYGSSYNPPYVPASSICPSPLSTSTYVLQEASHN

SEQ ID NO: 17105 - protein, 70 aa, Synthetic construct
SPYTYQMHGTTGFYQGGNGLQDYPSYPGFPQSQYPQYYGSSYNPPYVPASSICPSPLSTSTYVLQEASHN

SEQ ID NO: 17106 - protein, 70 aa, Synthetic construct
SPYTYQMHGTTGFYQGGNGLGNAAGYPGFPQSQYPQYYGSSYNPPYVPASSICPSPLSTSTYVLQEASHN

SEQ ID NO: 17107 - protein, 70 aa, Synthetic construct
SPYTYQMHGTTGFYQGGNGLGNAAGFGSVHQDYPSQYYGSSYNPPYVPASSICPSPLSTSTYVLQEASHN

SEQ ID NO: 17108 - protein, 70 aa, Synthetic construct
SPYTYQMHGTTGFYQGGNGLGNAAGFGSVHQDYPSYPGFPSYNPPYVPASSICPSPLSTSTYVLQEASHN

SEQ ID NO: 17109 - protein, 70 aa, Synthetic construct
SPYTYQMHGTTGFYQGGNGLGNAAGFGSVHQDYPSYPGFPQSQYPYVPASSICPSPLSTSTYVLQEASHN

SEQ ID NO: 17110 - protein, 70 aa, Synthetic construct
SPYTYQMHGTTGFYQGGNGLGNAAGFGSVHQDYPSYPGFPQSQYPQYYGSSICPSPLSTSTYVLQEASHN

SEQ ID NO: 17111 - protein, 70 aa, Synthetic construct
SPYTYQMHGTTGFYQGGNGLGNAAGFGSVHQDYPSYPGFPQSQYPQYYGSSYNPPPLSTSTYVLQEASHN

SEQ ID NO: 17112 - protein, 70 aa, Synthetic construct
SPYTYQMHGTTGFYQGGNGLGNAAGFGSVHQDYPSYPGFPQSQYPQYYGSSYNPPYVPASTYVLQEASHN

SEQ ID NO: 17113 - protein, 70 aa, Synthetic construct
SPYTYQMHGTTGFYQGGNGLGNAAGFGSVHQDYPSYPGFPQSQYPQYYGSSYNPPYVPASSICPSEASHN

SEQ ID NO: 17114 - protein, 70 aa, Synthetic construct
SPYTYQMHGTTGFYQGGNGLGNAAGFGSVHQDYPSYPGFPQSQYPQYYGSSYNPPYVPASSICPSPLSTS

SEQ ID NO: 17115 - protein, 70 aa, Synthetic construct
IDISAYIDPAAFNDEFLADLFQHSRQQEKAKAAVGPTGGGGGGDFDYPGAPAGPGGAVMPGGAHGPPPGY

SEQ ID NO: 17116 - protein, 70 aa, Synthetic construct
LGGICEHETSAFNDEFLADLFQHSRQQEKAKAAVGPTGGGGGGDFDYPGAPAGPGGAVMPGGAHGPPPGY

SEQ ID NO: 17117 - protein, 70 aa, Synthetic construct
LGGICEHETSIDISAFLADLFQHSRQQEKAKAAVGPTGGGGGGDFDYPGAPAGPGGAVMPGGAHGPPPGY

SEQ ID NO: 17118 - protein, 70 aa, Synthetic construct
LGGICEHETSIDISAYIDPAAFNDEFLADLFQHSRPTGGGGGGDFDYPGAPAGPGGAVMPGGAHGPPPGY

SEQ ID NO: 17119 - protein, 70 aa, Synthetic construct
LGGICEHETSIDISAYIDPAAFNDEFLADLFQHSRQQEKAGGGDFDYPGAPAGPGGAVMPGGAHGPPPGY

SEQ ID NO: 17120 - protein, 70 aa, Synthetic construct
LGGICEHETSIDISAYIDPAAFNDEFLADLFQHSRQQEKAKAAVGDYPGAPAGPGGAVMPGGAHGPPPGY

SEQ ID NO: 17121 - protein, 70 aa, Synthetic construct
LGGICEHETSIDISAYIDPAAFNDEFLADLFQHSRQQEKAKAAVGPTGGGPAGPGGAVMPGGAHGPPPGY

SEQ ID NO: 17122 - protein, 70 aa, Synthetic construct
LGGICEHETSIDISAYIDPAAFNDEFLADLFQHSRQQEKAKAAVGPTGGGGGGDFGAVMPGGAHGPPPGY

SEQ ID NO: 17123 - protein, 70 aa, Synthetic construct
LGGICEHETSIDISAYIDPAAFNDEFLADLFQHSRQQEKAKAAVGPTGGGGGGDFDYPGAGGAHGPPPGY

SEQ ID NO: 17124 - protein, 70 aa, Synthetic construct
LGGICEHETSIDISAYIDPAAFNDEFLADLFQHSRQQEKAKAAVGPTGGGGGGDFDYPGAPAGPGPPPGY

SEQ ID NO: 17125 - protein, 70 aa, Synthetic construct
LGGICEHETSIDISAYIDPAAFNDEFLADLFQHSRQQEKAKAAVGPTGGGGGGDFDYPGAPAGPGGAVMP

SEQ ID NO: 17126 - protein, 70 aa, Synthetic construct
DILAEYLTIKHYPFQRLDGSIKGEIDGSEDFCFLLSTRAGGLGINLASADTVVIFDSDWNPQNDLQAQAR

SEQ ID NO: 17127 - protein, 70 aa, Synthetic construct
DILAEYLTIKHYPFQRLDGSIKGEIRKQALDHFNADGSEDGLGINLASADTVVIFDSDWNPQNDLQAQAR

SEQ ID NO: 17128 - protein, 70 aa, Synthetic construct
DILAEYLTIKHYPFQRLDGSIKGEIRKQALDHFNADGSEDFCFLLLASADTVVIFDSDWNPQNDLQAQAR

SEQ ID NO: 17129 - protein, 70 aa, Synthetic construct
DILAEYLTIKHYPFQRLDGSIKGEIRKQALDHFNADGSEDFCFLLSTRAGGLGINLASADTVVIFQAQAR

SEQ ID NO: 17130 - protein, 70 aa, Synthetic construct
DILAEYLTIKHYPFQRLDGSIKGEIRKQALDHFNADGSEDFCFLLSTRAGGLGINLASADTVVIFDSDWN

SEQ ID NO: 17131 - protein, 70 aa, Synthetic construct
NPFNKEELTAILKFGAEDLFKELEGEESEPQEMDIDEILRLAETRENEVSTSATDELLSQFKVANFATME

SEQ ID NO: 17132 - protein, 70 aa, Synthetic construct
LENNSEELTAILKFGAEDLFKELEGEESEPQEMDIDEILRLAETRENEVSTSATDELLSQFKVANFATME

SEQ ID NO: 17133 - protein, 70 aa, Synthetic construct
LENNSGRSNSILKFGAEDLFKELEGEESEPQEMDIDEILRLAETRENEVSTSATDELLSQFKVANFATME

SEQ ID NO: 17134 - protein, 70 aa, Synthetic construct
LENNSGRSNSNPFNKEELTAILKFGAEDLFQEMDIDEILRLAETRENEVSTSATDELLSQFKVANFATME

SEQ ID NO: 17135 - protein, 70 aa, Synthetic construct
LENNSGRSNSNPFNKEELTAILKFGAEDLFKELEGEESEPQEMDIDEILRTSATDELLSQFKVANFATME

SEQ ID NO: 17136 - protein, 70 aa, Synthetic construct
LENNSGRSNSNPFNKEELTAILKFGAEDLFKELEGEESEPQEMDIDEILRLAETRELLSQFKVANFATME

SEQ ID NO: 17137 - protein, 70 aa, Synthetic construct
LENNSGRSNSNPFNKEELTAILKFGAEDLFKELEGEESEPQEMDIDEILRLAETRENEVSFKVANFATME

SEQ ID NO: 17138 - protein, 70 aa, Synthetic construct
LENNSGRSNSNPFNKEELTAILKFGAEDLFKELEGEESEPQEMDIDEILRLAETRENEVSTSATDFATME

SEQ ID NO: 17139 - protein, 70 aa, Synthetic construct
LPLHHEDAFSKDKDKEKKLDDESNSPTVPQSAFLGPTLWDKTLPYDGDTFQLEYMDLEEFLSENGIPPSP

SEQ ID NO: 17140 - protein, 70 aa, Synthetic construct
LRSLLEDAFSKDKDKEKKLDDESNSPTVPQSAFLGPTLWDKTLPYDGDTFQLEYMDLEEFLSENGIPPSP

SEQ ID NO: 17141 - protein, 70 aa, Synthetic construct
LRSLLENPLKKDKDKEKKLDDESNSPTVPQSAFLGPTLWDKTLPYDGDTFQLEYMDLEEFLSENGIPPSP

SEQ ID NO: 17142 - protein, 70 aa, Synthetic construct
LRSLLENPLKLPLHHEKKLDDESNSPTVPQSAFLGPTLWDKTLPYDGDTFQLEYMDLEEFLSENGIPPSP

SEQ ID NO: 17143 - protein, 70 aa, Synthetic construct
LRSLLENPLKLPLHHEDAFSDESNSPTVPQSAFLGPTLWDKTLPYDGDTFQLEYMDLEEFLSENGIPPSP

SEQ ID NO: 17144 - protein, 70 aa, Synthetic construct
LRSLLENPLKLPLHHEDAFSKDKDKPTVPQSAFLGPTLWDKTLPYDGDTFQLEYMDLEEFLSENGIPPSP

SEQ ID NO: 17145 - protein, 70 aa, Synthetic construct
LRSLLENPLKLPLHHEDAFSKDKDKEKKLDSAFLGPTLWDKTLPYDGDTFQLEYMDLEEFLSENGIPPSP

SEQ ID NO: 17146 - protein, 70 aa, Synthetic construct
LRSLLENPLKLPLHHEDAFSKDKDKEKKLDDESNSPTLWDKTLPYDGDTFQLEYMDLEEFLSENGIPPSP

SEQ ID NO: 17147 - protein, 70 aa, Synthetic construct
LRSLLENPLKLPLHHEDAFSKDKDKEKKLDDESNSPTVPQKTLPYDGDTFQLEYMDLEEFLSENGIPPSP

SEQ ID NO: 17148 - protein, 70 aa, Synthetic construct
LRSLLENPLKLPLHHEDAFSKDKDKEKKLDDESNSPTVPQSAFLGDGDTFQLEYMDLEEFLSENGIPPSP

SEQ ID NO: 17149 - protein, 70 aa, Synthetic construct
LRSLLENPLKLPLHHEDAFSKDKDKEKKLDDESNSPTVPQSAFLGPTLWDQLEYMDLEEFLSENGIPPSP

SEQ ID NO: 17150 - protein, 70 aa, Synthetic construct
FVLERSSVLVFLPGLGEINYMHELLTSLVHKRLQVYPLHSSVALEEQNNVFLSPVPGYRKIILSTNIAES

SEQ ID NO: 17151 - protein, 70 aa, Synthetic construct
SGNKAWSGAQFVLERSSVLVFLPGLGEINYMHELLTSLVHKRLQVYPLHSSVALEEQNNVIILSTNIAES

SEQ ID NO: 17152 - protein, 70 aa, Synthetic construct
QRYFRAQVLYVSGNSAEVFFVDYGNKSHVDLHLLMEIPCQFLELPFQALEFKICKMRPSAKSLVCGKHWS

SEQ ID NO: 17153 - protein, 70 aa, Synthetic construct
CLAPFAQVLYVSGNSAEVFFVDYGNKSHVDLHLLMEIPCQFLELPFQALEFKICKMRPSAKSLVCGKHWS

SEQ ID NO: 17154 - protein, 70 aa, Synthetic construct
CLAPFADFDKQRYFRAQVLYVSGNSAEVFFLHLLMEIPCQFLELPFQALEFKICKMRPSAKSLVCGKHWS

SEQ ID NO: 17155 - protein, 70 aa, Synthetic construct
CLAPFADFDKQRYFRAQVLYVSGNSAEVFFVDYGNKSHVDFLELPFQALEFKICKMRPSAKSLVCGKHWS

SEQ ID NO: 17156 - protein, 70 aa, Synthetic construct
CLAPFADFDKQRYFRAQVLYVSGNSAEVFFVDYGNKSHVDLHLLMFQALEFKICKMRPSAKSLVCGKHWS

SEQ ID NO: 17157 - protein, 70 aa, Synthetic construct
MEELADALMYIKPENLLLGLKGELKIADFGWSVHAPSLRRKTMCGTLDYLPPEMIEGRMHNEKVDLWCIG

SEQ ID NO: 17158 - protein, 70 aa, Synthetic construct
MEELADALMYCHGKKVIHRDIKPENLLLGLKGELKIADFGWSVHAPSLRRKTMCGTLDYLPPEMILWCIG

SEQ ID NO: 17159 - protein, 70 aa, Synthetic construct
SSEESSSESSSEEEEEEDEEDEEEEESESSDSEEERAHRLAELQEQLRAVHEQLAALSQGPISKPKRKRE

SEQ ID NO: 17160 - protein, 70 aa, Synthetic construct
PGLAKSSESSSEEEEEEDEEDEEEEESESSDSEEERAHRLAELQEQLRAVHEQLAALSQGPISKPKRKRE

SEQ ID NO: 17161 - protein, 70 aa, Synthetic construct
PGLAKSSSESSEEEEEEDEEDEEEEESESSDSEEERAHRLAELQEQLRAVHEQLAALSQGPISKPKRKRE

SEQ ID NO: 17162 - protein, 70 aa, Synthetic construct
PGLAKSSSESSSEESEEDEEDEEEEESESSDSEEERAHRLAELQEQLRAVHEQLAALSQGPISKPKRKRE

SEQ ID NO: 17163 - protein, 70 aa, Synthetic construct
PGLAKSSSESSSEESSSESSDEEEEESESSDSEEERAHRLAELQEQLRAVHEQLAALSQGPISKPKRKRE

SEQ ID NO: 17164 - protein, 70 aa, Synthetic construct
PGLAKSSSESSSEESSSESSSEEEEESESSDSEEERAHRLAELQEQLRAVHEQLAALSQGPISKPKRKRE

SEQ ID NO: 17165 - protein, 70 aa, Synthetic construct
PGLAKSSSESSSEESSSESSSEEEEEEDEEDSEEERAHRLAELQEQLRAVHEQLAALSQGPISKPKRKRE

SEQ ID NO: 17166 - protein, 70 aa, Synthetic construct
PGLAKSSSESSSEESSSESSSEEEEEEDEEDEEEERAHRLAELQEQLRAVHEQLAALSQGPISKPKRKRE

SEQ ID NO: 17167 - protein, 70 aa, Synthetic construct
PGLAKSSSESSSEESSSESSSEEEEEEDEEDEEEEESESSAELQEQLRAVHEQLAALSQGPISKPKRKRE

SEQ ID NO: 17168 - protein, 70 aa, Synthetic construct
PGLAKSSSESSSEESSSESSSEEEEEEDEEDEEEEESESSDSEEERAHRLAELQEQLRAVHEQLAALSQG

SEQ ID NO: 17169 - protein, 70 aa, Synthetic construct
LDVLQSWCEKLAEIIWQNRQQIRRAEHLCQQLPIPGPVEEMLAEVNATITDIISALVTSTFIIEKQPPQV

SEQ ID NO: 17170 - protein, 70 aa, Synthetic construct
AGNGGSWCEKLAEIIWQNRQQIRRAEHLCQQLPIPGPVEEMLAEVNATITDIISALVTSTFIIEKQPPQV

SEQ ID NO: 17171 - protein, 70 aa, Synthetic construct
AGNGGPPEGSLDVLQWQNRQQIRRAEHLCQQLPIPGPVEEMLAEVNATITDIISALVTSTFIIEKQPPQV

SEQ ID NO: 17172 - protein, 70 aa, Synthetic construct
AGNGGPPEGSLDVLQSWCEKLAEIIWQNRQQIRRAGPVEEMLAEVNATITDIISALVTSTFIIEKQPPQV

SEQ ID NO: 17173 - protein, 70 aa, Synthetic construct
ELVSEFSRMARDPQRFVVIQNEDLGPASPLDSTFYRSLLEDDDMGDLVDAEEYLVPQQGFFCPDPAPGAG

SEQ ID NO: 17174 - protein, 70 aa, Synthetic construct
IDSECFSRMARDPQRFVVIQNEDLGPASPLDSTFYRSLLEDDDMGDLVDAEEYLVPQQGFFCPDPAPGAG

SEQ ID NO: 17175 - protein, 70 aa, Synthetic construct
IDSECRPRFRELVSEFVVIQNEDLGPASPLDSTFYRSLLEDDDMGDLVDAEEYLVPQQGFFCPDPAPGAG

SEQ ID NO: 17176 - protein, 70 aa, Synthetic construct
IDSECRPRFRELVSEFSRMANEDLGPASPLDSTFYRSLLEDDDMGDLVDAEEYLVPQQGFFCPDPAPGAG

SEQ ID NO: 17177 - protein, 70 aa, Synthetic construct
IDSECRPRFRELVSEFSRMARDPQRPASPLDSTFYRSLLEDDDMGDLVDAEEYLVPQQGFFCPDPAPGAG

SEQ ID NO: 17178 - protein, 70 aa, Synthetic construct
IDSECRPRFRELVSEFSRMARDPQRFVVIQNEDLGPASPLDSTFYDLVDAEEYLVPQQGFFCPDPAPGAG

SEQ ID NO: 17179 - protein, 70 aa, Synthetic construct
IDSECRPRFRELVSEFSRMARDPQRFVVIQNEDLGPASPLDSTFYRSLLEDDDMGDLVDAEEYLVAPGAG

SEQ ID NO: 17180 - protein, 70 aa, Synthetic construct
IDSECRPRFRELVSEFSRMARDPQRFVVIQNEDLGPASPLDSTFYRSLLEDDDMGDLVDAEEYLVPQQGF

SEQ ID NO: 17181 - protein, 70 aa, Synthetic construct
QVISTPTDFFMVMEYVSGGELFDYICKHGRVEEMEARRLFQQILSAVDYCHRHMVVHRDLKPENVLLDAH

SEQ ID NO: 17182 - protein, 70 aa, Synthetic construct
FRHPHIIKLYQVISTPTDFFMVMEYVSGGELFDYIARRLFQQILSAVDYCHRHMVVHRDLKPENVLLDAH

SEQ ID NO: 17183 - protein, 70 aa, Synthetic construct
FRHPHIIKLYQVISTPTDFFMVMEYVSGGELFDYICKHGRQQILSAVDYCHRHMVVHRDLKPENVLLDAH

SEQ ID NO: 17184 - protein, 70 aa, Synthetic construct
FRHPHIIKLYQVISTPTDFFMVMEYVSGGELFDYICKHGRVEEMEAVDYCHRHMVVHRDLKPENVLLDAH

SEQ ID NO: 17185 - protein, 70 aa, Synthetic construct
FRHPHIIKLYQVISTPTDFFMVMEYVSGGELFDYICKHGRVEEMEARRLFQQILSVHRDLKPENVLLDAH

SEQ ID NO: 17186 - protein, 70 aa, Synthetic construct
TGFLSGQAPYSYQMQGSSFTTSSGIYTGNNSLTNSSGFNSSQQDYPSYPSFGQGQYAQYYNSSPYPAHYM

SEQ ID NO: 17187 - protein, 70 aa, Synthetic construct
TGFLSYGTSFSYQMQGSSFTTSSGIYTGNNSLTNSSGFNSSQQDYPSYPSFGQGQYAQYYNSSPYPAHYM

SEQ ID NO: 17188 - protein, 70 aa, Synthetic construct
TGFLSYGTSFSTPQPGSSFTTSSGIYTGNNSLTNSSGFNSSQQDYPSYPSFGQGQYAQYYNSSPYPAHYM

SEQ ID NO: 17189 - protein, 70 aa, Synthetic construct
TGFLSYGTSFSTPQPGQAPYTSSGIYTGNNSLTNSSGFNSSQQDYPSYPSFGQGQYAQYYNSSPYPAHYM

SEQ ID NO: 17190 - protein, 70 aa, Synthetic construct
TGFLSYGTSFSTPQPGQAPYSYQMQYTGNNSLTNSSGFNSSQQDYPSYPSFGQGQYAQYYNSSPYPAHYM

SEQ ID NO: 17191 - protein, 70 aa, Synthetic construct
TGFLSYGTSFSTPQPGQAPYSYQMQGSSFTSLTNSSGFNSSQQDYPSYPSFGQGQYAQYYNSSPYPAHYM

SEQ ID NO: 17192 - protein, 70 aa, Synthetic construct
TGFLSYGTSFSTPQPGQAPYSYQMQGSSFTTSSGISGFNSSQQDYPSYPSFGQGQYAQYYNSSPYPAHYM

SEQ ID NO: 17193 - protein, 70 aa, Synthetic construct
TGFLSYGTSFSTPQPGQAPYSYQMQGSSFTTSSGIYTGNNSQQDYPSYPSFGQGQYAQYYNSSPYPAHYM

SEQ ID NO: 17194 - protein, 70 aa, Synthetic construct
TGFLSYGTSFSTPQPGQAPYSYQMQGSSFTTSSGIYTGNNSLTNSPSYPSFGQGQYAQYYNSSPYPAHYM

SEQ ID NO: 17195 - protein, 70 aa, Synthetic construct
TGFLSYGTSFSTPQPGQAPYSYQMQGSSFTTSSGIYTGNNSLTNSSGFNSFGQGQYAQYYNSSPYPAHYM

SEQ ID NO: 17196 - protein, 70 aa, Synthetic construct
TGFLSYGTSFSTPQPGQAPYSYQMQGSSFTTSSGIYTGNNSLTNSSGFNSSQQDYYAQYYNSSPYPAHYM

SEQ ID NO: 17197 - protein, 70 aa, Synthetic construct
TGFLSYGTSFSTPQPGQAPYSYQMQGSSFTTSSGIYTGNNSLTNSSGFNSSQQDYPSYPSNSSPYPAHYM

SEQ ID NO: 17198 - protein, 70 aa, Synthetic construct
TGFLSYGTSFSTPQPGQAPYSYQMQGSSFTTSSGIYTGNNSLTNSSGFNSSQQDYPSYPSFGQGQPAHYM

SEQ ID NO: 17199 - protein, 70 aa, Synthetic construct
TGFLSYGTSFSTPQPGQAPYSYQMQGSSFTTSSGIYTGNNSLTNSSGFNSSQQDYPSYPSFGQGQYAQYY

SEQ ID NO: 17200 - protein, 70 aa, Synthetic construct
LQQRVCRQLSLLTKTVYHIFFLIKVINSETEGAGLATCIELCVKALRLESTENTEVKISICKTISCLLPD

SEQ ID NO: 17201 - protein, 70 aa, Synthetic construct
LQQRVEPSIQVYLERVYHIFFLIKVINSETEGAGLATCIELCVKALRLESTENTEVKISICKTISCLLPD

SEQ ID NO: 17202 - protein, 70 aa, Synthetic construct
LQQRVEPSIQVYLERCRQLSLLTKTVYHIFEGAGLATCIELCVKALRLESTENTEVKISICKTISCLLPD

SEQ ID NO: 17203 - protein, 70 aa, Synthetic construct
LQQRVEPSIQVYLERCRQLSLLTKTVYHIFFLIKVINSETLCVKALRLESTENTEVKISICKTISCLLPD

SEQ ID NO: 17204 - protein, 70 aa, Synthetic construct
LQQRVEPSIQVYLERCRQLSLLTKTVYHIFFLIKVINSETEGAGLATCIELCVKALRLESTENTECLLPD

SEQ ID NO: 17205 - protein, 70 aa, Synthetic construct
SLAPLGVTNSKSGSSEDSSDQYLQAPNSTNQMLYGLQSPGNIFLPNSITPEALSCSFHPSYDFYRYNFSM

SEQ ID NO: 17206 - protein, 70 aa, Synthetic construct
SLAPLMMEVPKSGSSEDSSDQYLQAPNSTNQMLYGLQSPGNIFLPNSITPEALSCSFHPSYDFYRYNFSM

SEQ ID NO: 17207 - protein, 70 aa, Synthetic construct
SLAPLMMEVPMLSSLEDSSDQYLQAPNSTNQMLYGLQSPGNIFLPNSITPEALSCSFHPSYDFYRYNFSM

SEQ ID NO: 17208 - protein, 70 aa, Synthetic construct
SLAPLMMEVPMLSSLGVTNSQYLQAPNSTNQMLYGLQSPGNIFLPNSITPEALSCSFHPSYDFYRYNFSM

SEQ ID NO: 17209 - protein, 70 aa, Synthetic construct
SLAPLMMEVPMLSSLGVTNSKSGSSPNSTNQMLYGLQSPGNIFLPNSITPEALSCSFHPSYDFYRYNFSM

SEQ ID NO: 17210 - protein, 70 aa, Synthetic construct
SLAPLMMEVPMLSSLGVTNSKSGSSEDSSDQMLYGLQSPGNIFLPNSITPEALSCSFHPSYDFYRYNFSM

SEQ ID NO: 17211 - protein, 70 aa, Synthetic construct
SLAPLMMEVPMLSSLGVTNSKSGSSEDSSDQYLQALQSPGNIFLPNSITPEALSCSFHPSYDFYRYNFSM

SEQ ID NO: 17212 - protein, 70 aa, Synthetic construct
SLAPLMMEVPMLSSLGVTNSKSGSSEDSSDQYLQAPNSTNQMLYGNSITPEALSCSFHPSYDFYRYNFSM

SEQ ID NO: 17213 - protein, 70 aa, Synthetic construct
SLAPLMMEVPMLSSLGVTNSKSGSSEDSSDQYLQAPNSTNQMLYGLQSPGEALSCSFHPSYDFYRYNFSM

SEQ ID NO: 17214 - protein, 70 aa, Synthetic construct
SLAPLMMEVPMLSSLGVTNSKSGSSEDSSDQYLQAPNSTNQMLYGLQSPGNIFLPSFHPSYDFYRYNFSM

SEQ ID NO: 17215 - protein, 70 aa, Synthetic construct
SLAPLMMEVPMLSSLGVTNSKSGSSEDSSDQYLQAPNSTNQMLYGLQSPGNIFLPNSITPYDFYRYNFSM

SEQ ID NO: 17216 - protein, 70 aa, Synthetic construct
LEDLFQLLSSQPENSLPGSISDGMNSSAHYHVNFSQAISQDVNLHEAILLCPNNTFRRDPTARTSQSQEP

SEQ ID NO: 17217 - protein, 70 aa, Synthetic construct
LEDLFQLLSSQPENSLEGISSDGMNSSAHYHVNFSQAISQDVNLHEAILLCPNNTFRRDPTARTSQSQEP

SEQ ID NO: 17218 - protein, 70 aa, Synthetic construct
LEDLFQLLSSQPENSLEGISLGDIPSSAHYHVNFSQAISQDVNLHEAILLCPNNTFRRDPTARTSQSQEP

SEQ ID NO: 17219 - protein, 70 aa, Synthetic construct
LEDLFQLLSSQPENSLEGISLGDIPLPGSIHVNFSQAISQDVNLHEAILLCPNNTFRRDPTARTSQSQEP

SEQ ID NO: 17220 - protein, 70 aa, Synthetic construct
LEDLFQLLSSQPENSLEGISLGDIPLPGSISDGMNQAISQDVNLHEAILLCPNNTFRRDPTARTSQSQEP

SEQ ID NO: 17221 - protein, 70 aa, Synthetic construct
LEDLFQLLSSQPENSLEGISLGDIPLPGSISDGMNSSAHYDVNLHEAILLCPNNTFRRDPTARTSQSQEP

SEQ ID NO: 17222 - protein, 70 aa, Synthetic construct
LEDLFQLLSSQPENSLEGISLGDIPLPGSISDGMNSSAHYHVNFSEAILLCPNNTFRRDPTARTSQSQEP

SEQ ID NO: 17223 - protein, 70 aa, Synthetic construct
LEDLFQLLSSQPENSLEGISLGDIPLPGSISDGMNSSAHYHVNFSQAISQCPNNTFRRDPTARTSQSQEP

SEQ ID NO: 17224 - protein, 70 aa, Synthetic construct
LEDLFQLLSSQPENSLEGISLGDIPLPGSISDGMNSSAHYHVNFSQAISQDVNLHFRRDPTARTSQSQEP

SEQ ID NO: 17225 - protein, 70 aa, Synthetic construct
LEDLFQLLSSQPENSLEGISLGDIPLPGSISDGMNSSAHYHVNFSQAISQDVNLHEAILLTARTSQSQEP

SEQ ID NO: 17226 - protein, 70 aa, Synthetic construct
LEDLFQLLSSQPENSLEGISLGDIPLPGSISDGMNSSAHYHVNFSQAISQDVNLHEAILLCPNNTQSQEP

SEQ ID NO: 17227 - protein, 70 aa, Synthetic construct
LEDLFQLLSSQPENSLEGISLGDIPLPGSISDGMNSSAHYHVNFSQAISQDVNLHEAILLCPNNTFRRDP

SEQ ID NO: 17228 - protein, 70 aa, Synthetic construct
PEQTLPGTNLTGFLSPVDNHMRNLTSQDLLYDLDINIFDEINLMSLATEDNFDPIDVSQLFDEPDSDSGL

SEQ ID NO: 17229 - protein, 70 aa, Synthetic construct
FLQLNPGTNLTGFLSPVDNHMRNLTSQDLLYDLDINIFDEINLMSLATEDNFDPIDVSQLFDEPDSDSGL

SEQ ID NO: 17230 - protein, 70 aa, Synthetic construct
FLQLNSHTTNTGFLSPVDNHMRNLTSQDLLYDLDINIFDEINLMSLATEDNFDPIDVSQLFDEPDSDSGL

SEQ ID NO: 17231 - protein, 70 aa, Synthetic construct
FLQLNSHTTNPEQTLPVDNHMRNLTSQDLLYDLDINIFDEINLMSLATEDNFDPIDVSQLFDEPDSDSGL

SEQ ID NO: 17232 - protein, 70 aa, Synthetic construct
FLQLNSHTTNPEQTLPGTNLMRNLTSQDLLYDLDINIFDEINLMSLATEDNFDPIDVSQLFDEPDSDSGL

SEQ ID NO: 17233 - protein, 70 aa, Synthetic construct
FLQLNSHTTNPEQTLPGTNLTGFLSSQDLLYDLDINIFDEINLMSLATEDNFDPIDVSQLFDEPDSDSGL

SEQ ID NO: 17234 - protein, 70 aa, Synthetic construct
FLQLNSHTTNPEQTLPGTNLTGFLSPVDNHYDLDINIFDEINLMSLATEDNFDPIDVSQLFDEPDSDSGL

SEQ ID NO: 17235 - protein, 70 aa, Synthetic construct
FLQLNSHTTNPEQTLPGTNLTGFLSPVDNHMRNLTNIFDEINLMSLATEDNFDPIDVSQLFDEPDSDSGL

SEQ ID NO: 17236 - protein, 70 aa, Synthetic construct
FLQLNSHTTNPEQTLPGTNLTGFLSPVDNHMRNLTSQDLLINLMSLATEDNFDPIDVSQLFDEPDSDSGL

SEQ ID NO: 17237 - protein, 70 aa, Synthetic construct
FLQLNSHTTNPEQTLPGTNLTGFLSPVDNHMRNLTSQDLLYDLDILATEDNFDPIDVSQLFDEPDSDSGL

SEQ ID NO: 17238 - protein, 70 aa, Synthetic construct
FLQLNSHTTNPEQTLPGTNLTGFLSPVDNHMRNLTSQDLLYDLDINIFDENFDPIDVSQLFDEPDSDSGL

SEQ ID NO: 17239 - protein, 70 aa, Synthetic construct
FLQLNSHTTNPEQTLPGTNLTGFLSPVDNHMRNLTSQDLLYDLDINIFDEINLMSDVSQLFDEPDSDSGL

SEQ ID NO: 17240 - protein, 70 aa, Synthetic construct
FLQLNSHTTNPEQTLPGTNLTGFLSPVDNHMRNLTSQDLLYDLDINIFDEINLMSLATEDFDEPDSDSGL

SEQ ID NO: 17241 - protein, 70 aa, Synthetic construct
FLQLNSHTTNPEQTLPGTNLTGFLSPVDNHMRNLTSQDLLYDLDINIFDEINLMSLATEDNFDPISDSGL

SEQ ID NO: 17242 - protein, 70 aa, Synthetic construct
FLQLNSHTTNPEQTLPGTNLTGFLSPVDNHMRNLTSQDLLYDLDINIFDEINLMSLATEDNFDPIDVSQL

SEQ ID NO: 17243 - protein, 70 aa, Synthetic construct
YEKMQNSAPRKQRGQRKERSPQQNIVSCVSVSTQTASDDQAGKLWDELSLVGLPDAIDIQALFDSTGTCW

SEQ ID NO: 17244 - protein, 70 aa, Synthetic construct
KDIDDNSAPRKQRGQRKERSPQQNIVSCVSVSTQTASDDQAGKLWDELSLVGLPDAIDIQALFDSTGTCW

SEQ ID NO: 17245 - protein, 70 aa, Synthetic construct
KDIDDNSNGTKQRGQRKERSPQQNIVSCVSVSTQTASDDQAGKLWDELSLVGLPDAIDIQALFDSTGTCW

SEQ ID NO: 17246 - protein, 70 aa, Synthetic construct
KDIDDNSNGTYEKMQRKERSPQQNIVSCVSVSTQTASDDQAGKLWDELSLVGLPDAIDIQALFDSTGTCW

SEQ ID NO: 17247 - protein, 70 aa, Synthetic construct
KDIDDNSNGTYEKMQNSAPRPQQNIVSCVSVSTQTASDDQAGKLWDELSLVGLPDAIDIQALFDSTGTCW

SEQ ID NO: 17248 - protein, 70 aa, Synthetic construct
KDIDDNSNGTYEKMQNSAPRKQRGQVSCVSVSTQTASDDQAGKLWDELSLVGLPDAIDIQALFDSTGTCW

SEQ ID NO: 17249 - protein, 70 aa, Synthetic construct
KDIDDNSNGTYEKMQNSAPRKQRGQRKERSVSTQTASDDQAGKLWDELSLVGLPDAIDIQALFDSTGTCW

SEQ ID NO: 17250 - protein, 70 aa, Synthetic construct
KDIDDNSNGTYEKMQNSAPRKQRGQRKERSPQQNIASDDQAGKLWDELSLVGLPDAIDIQALFDSTGTCW

SEQ ID NO: 17251 - protein, 70 aa, Synthetic construct
KDIDDNSNGTYEKMQNSAPRKQRGQRKERSPQQNIVSCVSVSTQTASDDQAGKLWAIDIQALFDSTGTCW

SEQ ID NO: 17252 - protein, 70 aa, Synthetic construct
NDPNLDDLLRSGEFDIIAYTDPELDMGDKKSMFNEELDLPIDDKLDNQCVSVEPKKKEQENKTLVLSDKH

SEQ ID NO: 17253 - protein, 70 aa, Synthetic construct
ELDTLDDLLRSGEFDIIAYTDPELDMGDKKSMFNEELDLPIDDKLDNQCVSVEPKKKEQENKTLVLSDKH

SEQ ID NO: 17254 - protein, 70 aa, Synthetic construct
ELDTLDNLETNDPNLDDLLRSGEFDIIAYTSMFNEELDLPIDDKLDNQCVSVEPKKKEQENKTLVLSDKH

SEQ ID NO: 17255 - protein, 70 aa, Synthetic construct
ELDTLDNLETNDPNLDDLLRSGEFDIIAYTDPELDELDLPIDDKLDNQCVSVEPKKKEQENKTLVLSDKH

SEQ ID NO: 17256 - protein, 70 aa, Synthetic construct
ELDTLDNLETNDPNLDDLLRSGEFDIIAYTDPELDMGDKKSMFNEELDLPSVEPKKKEQENKTLVLSDKH

SEQ ID NO: 17257 - protein, 70 aa, Synthetic construct
ELDTLDNLETNDPNLDDLLRSGEFDIIAYTDPELDMGDKKSMFNEELDLPIDDKLKKEQENKTLVLSDKH

SEQ ID NO: 17258 - protein, 70 aa, Synthetic construct
ELDTLDNLETNDPNLDDLLRSGEFDIIAYTDPELDMGDKKSMFNEELDLPIDDKLDNQCVNKTLVLSDKH

SEQ ID NO: 17259 - protein, 70 aa, Synthetic construct
ELDTLDNLETNDPNLDDLLRSGEFDIIAYTDPELDMGDKKSMFNEELDLPIDDKLDNQCVSVEPKLSDKH

SEQ ID NO: 17260 - protein, 70 aa, Synthetic construct
ELDTLDNLETNDPNLDDLLRSGEFDIIAYTDPELDMGDKKSMFNEELDLPIDDKLDNQCVSVEPKKKEQE

SEQ ID NO: 17261 - protein, 70 aa, Synthetic construct
HYMGYPHMPSMDPHWPSLGVDWSVYPGPSSTMGTVPVNDVTSSPAAFCSTDYSNLGPVGGGTSGSSLPGQ

SEQ ID NO: 17262 - protein, 70 aa, Synthetic construct
HYMGYPHMPSMDPHWPSLGVWGSPYSPPREDWSVYPVNDVTSSPAAFCSTDYSNLGPVGGGTSGSSLPGQ

SEQ ID NO: 17263 - protein, 70 aa, Synthetic construct
HYMGYPHMPSMDPHWPSLGVWGSPYSPPREDWSVYPGPSSTSSPAAFCSTDYSNLGPVGGGTSGSSLPGQ

SEQ ID NO: 17264 - protein, 70 aa, Synthetic construct
HYMGYPHMPSMDPHWPSLGVWGSPYSPPREDWSVYPGPSSTMGTVAFCSTDYSNLGPVGGGTSGSSLPGQ

SEQ ID NO: 17265 - protein, 70 aa, Synthetic construct
HYMGYPHMPSMDPHWPSLGVWGSPYSPPREDWSVYPGPSSTMGTVPVNDVDYSNLGPVGGGTSGSSLPGQ

SEQ ID NO: 17266 - protein, 70 aa, Synthetic construct
HYMGYPHMPSMDPHWPSLGVWGSPYSPPREDWSVYPGPSSTMGTVPVNDVTSSPAAFCSTGTSGSSLPGQ

SEQ ID NO: 17267 - protein, 70 aa, Synthetic construct
HYMGYPHMPSMDPHWPSLGVWGSPYSPPREDWSVYPGPSSTMGTVPVNDVTSSPAAFCSTDYSNLSLPGQ

SEQ ID NO: 17268 - protein, 70 aa, Synthetic construct
HYMGYPHMPSMDPHWPSLGVWGSPYSPPREDWSVYPGPSSTMGTVPVNDVTSSPAAFCSTDYSNLGPVGG

SEQ ID NO: 17269 - protein, 70 aa, Synthetic construct
EAPALPAPAAPMVSKGAESSRSSEESSSDSGSSDSEEERATRLAELQEQLKAVHEQLAALSQAPVNKPKK

SEQ ID NO: 17270 - protein, 70 aa, Synthetic construct
RFAKMPAPAAPMVSKGAESSRSSEESSSDSGSSDSEEERATRLAELQEQLKAVHEQLAALSQAPVNKPKK

SEQ ID NO: 17271 - protein, 70 aa, Synthetic construct
RFAKMPDEPVPMVSKGAESSRSSEESSSDSGSSDSEEERATRLAELQEQLKAVHEQLAALSQAPVNKPKK

SEQ ID NO: 17272 - protein, 70 aa, Synthetic construct
RFAKMPDEPVEAPALGAESSRSSEESSSDSGSSDSEEERATRLAELQEQLKAVHEQLAALSQAPVNKPKK

SEQ ID NO: 17273 - protein, 70 aa, Synthetic construct
RFAKMPDEPVEAPALPAPAARSSEESSSDSGSSDSEEERATRLAELQEQLKAVHEQLAALSQAPVNKPKK

SEQ ID NO: 17274 - protein, 70 aa, Synthetic construct
RFAKMPDEPVEAPALPAPAAPMVSKSSSDSGSSDSEEERATRLAELQEQLKAVHEQLAALSQAPVNKPKK

SEQ ID NO: 17275 - protein, 70 aa, Synthetic construct
RFAKMPDEPVEAPALPAPAAPMVSKGAESSGSSDSEEERATRLAELQEQLKAVHEQLAALSQAPVNKPKK

SEQ ID NO: 17276 - protein, 70 aa, Synthetic construct
RFAKMPDEPVEAPALPAPAAPMVSKGAESSRSSEEEEERATRLAELQEQLKAVHEQLAALSQAPVNKPKK

SEQ ID NO: 17277 - protein, 70 aa, Synthetic construct
RFAKMPDEPVEAPALPAPAAPMVSKGAESSRSSEESSSDSTRLAELQEQLKAVHEQLAALSQAPVNKPKK

SEQ ID NO: 17278 - protein, 70 aa, Synthetic construct
RFAKMPDEPVEAPALPAPAAPMVSKGAESSRSSEESSSDSGSSDSLQEQLKAVHEQLAALSQAPVNKPKK

SEQ ID NO: 17279 - protein, 70 aa, Synthetic construct
RFAKMPDEPVEAPALPAPAAPMVSKGAESSRSSEESSSDSGSSDSEEERATRLAELQEQLKAVHEQLAAL

SEQ ID NO: 17280 - protein, 70 aa, Synthetic construct
KSYVQGVTWDPLGQYVATLSCDRVLRVYSIKMLSGIGAEGEARSYRMFHDDSMKSFFRRLSFTPDGSLLL

SEQ ID NO: 17281 - protein, 70 aa, Synthetic construct
KSYVQGVTWDPLGQYVATLSCDRVLRVYSIQKKRVAFNVSKMLSGIGAEGEARSYRMFHDSFTPDGSLLL

SEQ ID NO: 17282 - protein, 70 aa, Synthetic construct
KSYVQGVTWDPLGQYVATLSCDRVLRVYSIQKKRVAFNVSKMLSGIGAEGEARSYRMFHDDSMKSGSLLL

SEQ ID NO: 17283 - protein, 70 aa, Synthetic construct
LKYHMKHCCPDMITKFLGVIVKSERPCDEDKTDSETGKLIMLVNEFYYGRHEGVTEKEPKTYTTFKCFSC

SEQ ID NO: 17284 - protein, 70 aa, Synthetic construct
CNVQFNLLDPDMITKFLGVIVKSERPCDEDKTDSETGKLIMLVNEFYYGRHEGVTEKEPKTYTTFKCFSC

SEQ ID NO: 17285 - protein, 70 aa, Synthetic construct
CNVQFNLLDPLKYHMFLGVIVKSERPCDEDKTDSETGKLIMLVNEFYYGRHEGVTEKEPKTYTTFKCFSC

SEQ ID NO: 17286 - protein, 70 aa, Synthetic construct
CNVQFNLLDPLKYHMKHCCPDMITKPCDEDKTDSETGKLIMLVNEFYYGRHEGVTEKEPKTYTTFKCFSC

SEQ ID NO: 17287 - protein, 70 aa, Synthetic construct
CNVQFNLLDPLKYHMKHCCPDMITKFLGVIKTDSETGKLIMLVNEFYYGRHEGVTEKEPKTYTTFKCFSC

SEQ ID NO: 17288 - protein, 70 aa, Synthetic construct
CNVQFNLLDPLKYHMKHCCPDMITKFLGVIVKSERPCDEDKTDSETGKLIMLVNEFYYGRHEGVTKCFSC

SEQ ID NO: 17289 - protein, 70 aa, Synthetic construct
GMPEPDAQRFFHQLMAGVVYLHGIGLLLDERDNLKISDFGLATVFRYNNRERLLNKMCGTLPYVAPELLK

SEQ ID NO: 17290 - protein, 70 aa, Synthetic construct
GMPEPDAQRFFHQLMAGVVYLHGIGITHRDRDNLKISDFGLATVFRYNNRERLLNKMCGTLPYVAPELLK

SEQ ID NO: 17291 - protein, 70 aa, Synthetic construct
GMPEPDAQRFFHQLMAGVVYLHGIGITHRDIKPENLLLDELATVFRYNNRERLLNKMCGTLPYVAPELLK

SEQ ID NO: 17292 - protein, 70 aa, Synthetic construct
PAVGSSLSEALDLIESDPDAWCDLSKFDLPEEPSAEDSINNSLVQLQASHQQQVLPPRQPSALVPSVTEY

SEQ ID NO: 17293 - protein, 70 aa, Synthetic construct
WVVEASLSEALDLIESDPDAWCDLSKFDLPEEPSAEDSINNSLVQLQASHQQQVLPPRQPSALVPSVTEY

SEQ ID NO: 17294 - protein, 70 aa, Synthetic construct
WVVEAANLLILDLIESDPDAWCDLSKFDLPEEPSAEDSINNSLVQLQASHQQQVLPPRQPSALVPSVTEY

SEQ ID NO: 17295 - protein, 70 aa, Synthetic construct
WVVEAANLLIPAVGSSLSEAWCDLSKFDLPEEPSAEDSINNSLVQLQASHQQQVLPPRQPSALVPSVTEY

SEQ ID NO: 17296 - protein, 70 aa, Synthetic construct
WVVEAANLLIPAVGSSLSEALDLIESDPDAWCDLSEDSINNSLVQLQASHQQQVLPPRQPSALVPSVTEY

SEQ ID NO: 17297 - protein, 70 aa, Synthetic construct
WVVEAANLLIPAVGSSLSEALDLIESDPDAWCDLSKFDLPNSLVQLQASHQQQVLPPRQPSALVPSVTEY

SEQ ID NO: 17298 - protein, 70 aa, Synthetic construct
WVVEAANLLIPAVGSSLSEALDLIESDPDAWCDLSKFDLPEEPSALQASHQQQVLPPRQPSALVPSVTEY

SEQ ID NO: 17299 - protein, 70 aa, Synthetic construct
WVVEAANLLIPAVGSSLSEALDLIESDPDAWCDLSKFDLPEEPSAEDSINQQQVLPPRQPSALVPSVTEY

SEQ ID NO: 17300 - protein, 70 aa, Synthetic construct
WVVEAANLLIPAVGSSLSEALDLIESDPDAWCDLSKFDLPEEPSAEDSINNSLVQPPRQPSALVPSVTEY

SEQ ID NO: 17301 - protein, 70 aa, Synthetic construct
WVVEAANLLIPAVGSSLSEALDLIESDPDAWCDLSKFDLPEEPSAEDSINNSLVQLQASHSALVPSVTEY

SEQ ID NO: 17302 - protein, 70 aa, Synthetic construct
WVVEAANLLIPAVGSSLSEALDLIESDPDAWCDLSKFDLPEEPSAEDSINNSLVQLQASHQQQVLSVTEY

SEQ ID NO: 17303 - protein, 70 aa, Synthetic construct
WVVEAANLLIPAVGSSLSEALDLIESDPDAWCDLSKFDLPEEPSAEDSINNSLVQLQASHQQQVLPPRQP

SEQ ID NO: 17304 - protein, 70 aa, Synthetic construct
GIGTPPSVLKRQRKRRVALSPVTENSTSLSFLDSCNSLTPKSTPVKTLPFSPSQFLNFWNKQDTLELESP

SEQ ID NO: 17305 - protein, 70 aa, Synthetic construct
ISPSTPSVLKRQRKRRVALSPVTENSTSLSFLDSCNSLTPKSTPVKTLPFSPSQFLNFWNKQDTLELESP

SEQ ID NO: 17306 - protein, 70 aa, Synthetic construct
ISPSTEVGGSRQRKRRVALSPVTENSTSLSFLDSCNSLTPKSTPVKTLPFSPSQFLNFWNKQDTLELESP

SEQ ID NO: 17307 - protein, 70 aa, Synthetic construct
ISPSTEVGGSGIGTPRVALSPVTENSTSLSFLDSCNSLTPKSTPVKTLPFSPSQFLNFWNKQDTLELESP

SEQ ID NO: 17308 - protein, 70 aa, Synthetic construct
ISPSTEVGGSGIGTPPSVLKPVTENSTSLSFLDSCNSLTPKSTPVKTLPFSPSQFLNFWNKQDTLELESP

SEQ ID NO: 17309 - protein, 70 aa, Synthetic construct
ISPSTEVGGSGIGTPPSVLKRQRKRSTSLSFLDSCNSLTPKSTPVKTLPFSPSQFLNFWNKQDTLELESP

SEQ ID NO: 17310 - protein, 70 aa, Synthetic construct
ISPSTEVGGSGIGTPPSVLKRQRKRRVALSPVTENSTSLSFLDSCNSLTPKSTPVKTLPFSPSQFLNFWN

SEQ ID NO: 17311 - protein, 70 aa, Synthetic construct
SNYFSAMYSSEDSTLASVPPAATFGADDLVLTLSNPQMSLEGTEKASWLGEQPQFWSKTQVLDWISYQVE

SEQ ID NO: 17312 - protein, 70 aa, Synthetic construct
AATCEISNIFEDSTLASVPPAATFGADDLVLTLSNPQMSLEGTEKASWLGEQPQFWSKTQVLDWISYQVE

SEQ ID NO: 17313 - protein, 70 aa, Synthetic construct
AATCEISNIFSNYFSASVPPAATFGADDLVLTLSNPQMSLEGTEKASWLGEQPQFWSKTQVLDWISYQVE

SEQ ID NO: 17314 - protein, 70 aa, Synthetic construct
AATCEISNIFSNYFSAMYSSEDSTLASVPPLTLSNPQMSLEGTEKASWLGEQPQFWSKTQVLDWISYQVE

SEQ ID NO: 17315 - protein, 70 aa, Synthetic construct
AATCEISNIFSNYFSAMYSSEDSTLASVPPAATFGPQMSLEGTEKASWLGEQPQFWSKTQVLDWISYQVE

SEQ ID NO: 17316 - protein, 70 aa, Synthetic construct
AATCEISNIFSNYFSAMYSSEDSTLASVPPAATFGADDLVEGTEKASWLGEQPQFWSKTQVLDWISYQVE

SEQ ID NO: 17317 - protein, 70 aa, Synthetic construct
AATCEISNIFSNYFSAMYSSEDSTLASVPPAATFGADDLVLTLSNPQMSLEQPQFWSKTQVLDWISYQVE

SEQ ID NO: 17318 - protein, 70 aa, Synthetic construct
AATCEISNIFSNYFSAMYSSEDSTLASVPPAATFGADDLVLTLSNPQMSLEGTEKWSKTQVLDWISYQVE

SEQ ID NO: 17319 - protein, 70 aa, Synthetic construct
AATCEISNIFSNYFSAMYSSEDSTLASVPPAATFGADDLVLTLSNPQMSLEGTEKASWLGEQPQFSYQVE

SEQ ID NO: 17320 - protein, 70 aa, Synthetic construct
AATCEISNIFSNYFSAMYSSEDSTLASVPPAATFGADDLVLTLSNPQMSLEGTEKASWLGEQPQFWSKTQ

SEQ ID NO: 17321 - protein, 70 aa, Synthetic construct
HAQLRDLTSSSSDELSWIIELLEKDGMAFQEALDPGPFDQGSPFAQELLDDGQQASPYHPGSCGAGAPSP

SEQ ID NO: 17322 - protein, 70 aa, Synthetic construct
LVFGPDLTSSSSDELSWIIELLEKDGMAFQEALDPGPFDQGSPFAQELLDDGQQASPYHPGSCGAGAPSP

SEQ ID NO: 17323 - protein, 70 aa, Synthetic construct
LVFGPLGDQLSSDELSWIIELLEKDGMAFQEALDPGPFDQGSPFAQELLDDGQQASPYHPGSCGAGAPSP

SEQ ID NO: 17324 - protein, 70 aa, Synthetic construct
LVFGPLGDQLHAQLRSWIIELLEKDGMAFQEALDPGPFDQGSPFAQELLDDGQQASPYHPGSCGAGAPSP

SEQ ID NO: 17325 - protein, 70 aa, Synthetic construct
LVFGPLGDQLHAQLRDLTSSSSDELSWIIEEALDPGPFDQGSPFAQELLDDGQQASPYHPGSCGAGAPSP

SEQ ID NO: 17326 - protein, 70 aa, Synthetic construct
LVFGPLGDQLHAQLRDLTSSSSDELSWIIELLEKDGPFDQGSPFAQELLDDGQQASPYHPGSCGAGAPSP

SEQ ID NO: 17327 - protein, 70 aa, Synthetic construct
LVFGPLGDQLHAQLRDLTSSSSDELSWIIELLEKDGMAFQGSPFAQELLDDGQQASPYHPGSCGAGAPSP

SEQ ID NO: 17328 - protein, 70 aa, Synthetic construct
LVFGPLGDQLHAQLRDLTSSSSDELSWIIELLEKDGMAFQEALDPQELLDDGQQASPYHPGSCGAGAPSP

SEQ ID NO: 17329 - protein, 70 aa, Synthetic construct
LVFGPLGDQLHAQLRDLTSSSSDELSWIIELLEKDGMAFQEALDPGPFDQDGQQASPYHPGSCGAGAPSP

SEQ ID NO: 17330 - protein, 70 aa, Synthetic construct
LVFGPLGDQLHAQLRDLTSSSSDELSWIIELLEKDGMAFQEALDPGPFDQGSPFASPYHPGSCGAGAPSP

SEQ ID NO: 17331 - protein, 70 aa, Synthetic construct
LVFGPLGDQLHAQLRDLTSSSSDELSWIIELLEKDGMAFQEALDPGPFDQGSPFAQELLDGSCGAGAPSP

SEQ ID NO: 17332 - protein, 70 aa, Synthetic construct
LVFGPLGDQLHAQLRDLTSSSSDELSWIIELLEKDGMAFQEALDPGPFDQGSPFAQELLDDGQQAGAPSP

SEQ ID NO: 17333 - protein, 70 aa, Synthetic construct
LVFGPLGDQLHAQLRDLTSSSSDELSWIIELLEKDGMAFQEALDPGPFDQGSPFAQELLDDGQQASPYHP

SEQ ID NO: 17334 - protein, 70 aa, Synthetic construct
IQTLDQIRTIDRKQEVPHDGPMCDLLWSDPEDTTGWGVSPRGAGYLFGSDVVAQFNAANDIDMICRAHQL

SEQ ID NO: 17335 - protein, 70 aa, Synthetic construct
FCVHGQIRTIDRKQEVPHDGPMCDLLWSDPEDTTGWGVSPRGAGYLFGSDVVAQFNAANDIDMICRAHQL

SEQ ID NO: 17336 - protein, 70 aa, Synthetic construct
FCVHGGLSPSDRKQEVPHDGPMCDLLWSDPEDTTGWGVSPRGAGYLFGSDVVAQFNAANDIDMICRAHQL

SEQ ID NO: 17337 - protein, 70 aa, Synthetic construct
FCVHGGLSPSIQTLDVPHDGPMCDLLWSDPEDTTGWGVSPRGAGYLFGSDVVAQFNAANDIDMICRAHQL

SEQ ID NO: 17338 - protein, 70 aa, Synthetic construct
FCVHGGLSPSIQTLDQIRTIPMCDLLWSDPEDTTGWGVSPRGAGYLFGSDVVAQFNAANDIDMICRAHQL

SEQ ID NO: 17339 - protein, 70 aa, Synthetic construct
FCVHGGLSPSIQTLDQIRTIDRKQEVPHDGPMCDLLWSDPEDTTGLFGSDVVAQFNAANDIDMICRAHQL

SEQ ID NO: 17340 - protein, 70 aa, Synthetic construct
FCVHGGLSPSIQTLDQIRTIDRKQEVPHDGPMCDLLWSDPEDTTGWGVSPVVAQFNAANDIDMICRAHQL

SEQ ID NO: 17341 - protein, 70 aa, Synthetic construct
FCVHGGLSPSIQTLDQIRTIDRKQEVPHDGPMCDLLWSDPEDTTGWGVSPRGAGYLFGSDIDMICRAHQL

SEQ ID NO: 17342 - protein, 70 aa, Synthetic construct
VSLSMGLYMGETETKQGQISLSSGETDLKLLEESIANLNRSTSVPENPKSSASTAVSAAPTEKEFPKTHS

SEQ ID NO: 17343 - protein, 70 aa, Synthetic construct
KLYTTDQSTFDILQDLEFSSGSPGKETNESPWRSDLLIDENCLLSPLAGEDDSFLLEGNSNEDCKPLILP

SEQ ID NO: 17344 - protein, 70 aa, Synthetic construct
GQTGTDQSTFDILQDLEFSSGSPGKETNESPWRSDLLIDENCLLSPLAGEDDSFLLEGNSNEDCKPLILP

SEQ ID NO: 17345 - protein, 70 aa, Synthetic construct
GQTGTNGGNVKLYTTDQSTFDILQDLEFSSPWRSDLLIDENCLLSPLAGEDDSFLLEGNSNEDCKPLILP

SEQ ID NO: 17346 - protein, 70 aa, Synthetic construct
GQTGTNGGNVKLYTTDQSTFDILQDLEFSSGSPGKETNESPWRSDLLIDENCLLSPLAGEDDSFLPLILP

SEQ ID NO: 17347 - protein, 70 aa, Synthetic construct
GQTGTNGGNVKLYTTDQSTFDILQDLEFSSGSPGKETNESPWRSDLLIDENCLLSPLAGEDDSFLLEGNS

SEQ ID NO: 17348 - protein, 70 aa, Synthetic construct
WFVGVDSLDLALDLYPYDAGTDSGFTFSSPNFATIPQDTVTEITSSSPSHPANSFYYPRLKALPPIARVT

SEQ ID NO: 17349 - protein, 70 aa, Synthetic construct
WFVGVDSLDLCDGDRWREQAALDLYTFSSPNFATIPQDTVTEITSSSPSHPANSFYYPRLKALPPIARVT

SEQ ID NO: 17350 - protein, 70 aa, Synthetic construct
WFVGVDSLDLCDGDRWREQAALDLYPYDAGNFATIPQDTVTEITSSSPSHPANSFYYPRLKALPPIARVT

SEQ ID NO: 17351 - protein, 70 aa, Synthetic construct
WFVGVDSLDLCDGDRWREQAALDLYPYDAGTDSGFPQDTVTEITSSSPSHPANSFYYPRLKALPPIARVT

SEQ ID NO: 17352 - protein, 70 aa, Synthetic construct
WFVGVDSLDLCDGDRWREQAALDLYPYDAGTDSGFTFSSPTEITSSSPSHPANSFYYPRLKALPPIARVT

SEQ ID NO: 17353 - protein, 70 aa, Synthetic construct
WFVGVDSLDLCDGDRWREQAALDLYPYDAGTDSGFTFSSPNFATISSPSHPANSFYYPRLKALPPIARVT

SEQ ID NO: 17354 - protein, 70 aa, Synthetic construct
WFVGVDSLDLCDGDRWREQAALDLYPYDAGTDSGFTFSSPNFATIPQDTVPANSFYYPRLKALPPIARVT

SEQ ID NO: 17355 - protein, 70 aa, Synthetic construct
WFVGVDSLDLCDGDRWREQAALDLYPYDAGTDSGFTFSSPNFATIPQDTVTEITSYYPRLKALPPIARVT

SEQ ID NO: 17356 - protein, 70 aa, Synthetic construct
WFVGVDSLDLCDGDRWREQAALDLYPYDAGTDSGFTFSSPNFATIPQDTVTEITSSSPSHKALPPIARVT

SEQ ID NO: 17357 - protein, 70 aa, Synthetic construct
WFVGVDSLDLCDGDRWREQAALDLYPYDAGTDSGFTFSSPNFATIPQDTVTEITSSSPSHPANSFIARVT

SEQ ID NO: 17358 - protein, 70 aa, Synthetic construct
WFVGVDSLDLCDGDRWREQAALDLYPYDAGTDSGFTFSSPNFATIPQDTVTEITSSSPSHPANSFYYPRL

SEQ ID NO: 17359 - protein, 70 aa, Synthetic construct
QHSLINSTVESRVAEVPGNQDQGLFCENTEGSYGTVSEIQNLEEGPRGFLHVENYLRHLKMHKLFLCLQC

SEQ ID NO: 17360 - protein, 70 aa, Synthetic construct
QHSLINSTVESRVAEVPGNQDQGLFCENTEGSYGTVSEIQNLEEGYSLRHHVENYLRHLKMHKLFLCLQC

SEQ ID NO: 17361 - protein, 70 aa, Synthetic construct
QHSLINSTVESRVAEVPGNQDQGLFCENTEGSYGTVSEIQNLEEGYSLRHQCPRCPRGFLMHKLFLCLQC

SEQ ID NO: 17362 - protein, 70 aa, Synthetic construct
LLSGQAQENPGYPYSDSSSILGENPHIGIDMIDNDQGSSSPSNDEAAMAVIMSLLEADAGLGGPVDFSDL

SEQ ID NO: 17363 - protein, 70 aa, Synthetic construct
GGTPDAQENPGYPYSDSSSILGENPHIGIDMIDNDQGSSSPSNDEAAMAVIMSLLEADAGLGGPVDFSDL

SEQ ID NO: 17364 - protein, 70 aa, Synthetic construct
GGTPDIPSSGGYPYSDSSSILGENPHIGIDMIDNDQGSSSPSNDEAAMAVIMSLLEADAGLGGPVDFSDL

SEQ ID NO: 17365 - protein, 70 aa, Synthetic construct
GGTPDIPSSGLLSGQDSSSILGENPHIGIDMIDNDQGSSSPSNDEAAMAVIMSLLEADAGLGGPVDFSDL

SEQ ID NO: 17366 - protein, 70 aa, Synthetic construct
GGTPDIPSSGLLSGQAQENPLGENPHIGIDMIDNDQGSSSPSNDEAAMAVIMSLLEADAGLGGPVDFSDL

SEQ ID NO: 17367 - protein, 70 aa, Synthetic construct
GGTPDIPSSGLLSGQAQENPGYPYSHIGIDMIDNDQGSSSPSNDEAAMAVIMSLLEADAGLGGPVDFSDL

SEQ ID NO: 17368 - protein, 70 aa, Synthetic construct
GGTPDIPSSGLLSGQAQENPGYPYSDSSSIMIDNDQGSSSPSNDEAAMAVIMSLLEADAGLGGPVDFSDL

SEQ ID NO: 17369 - protein, 70 aa, Synthetic construct
GGTPDIPSSGLLSGQAQENPGYPYSDSSSILGENPQGSSSPSNDEAAMAVIMSLLEADAGLGGPVDFSDL

SEQ ID NO: 17370 - protein, 70 aa, Synthetic construct
GGTPDIPSSGLLSGQAQENPGYPYSDSSSILGENPHIGIDPSNDEAAMAVIMSLLEADAGLGGPVDFSDL

SEQ ID NO: 17371 - protein, 70 aa, Synthetic construct
GGTPDIPSSGLLSGQAQENPGYPYSDSSSILGENPHIGIDMIDNDAAMAVIMSLLEADAGLGGPVDFSDL

SEQ ID NO: 17372 - protein, 70 aa, Synthetic construct
GGTPDIPSSGLLSGQAQENPGYPYSDSSSILGENPHIGIDMIDNDQGSSSPSNDEAAMAVIMSLLDFSDL

SEQ ID NO: 17373 - protein, 70 aa, Synthetic construct
YMTVYNYYVYPDKTRPFQGQGHGAQLLETVHRYYTEFPTVLDITAEDPSKSYVKLRDFVLVKLCQDLPCF

SEQ ID NO: 17374 - protein, 70 aa, Synthetic construct
YMTVYNYYVYPDKTRPRVSQMLILTLLETVHRYYTEFPTVLDITAEDPSKSYVKLRDFVLVKLCQDLPCF

SEQ ID NO: 17375 - protein, 70 aa, Synthetic construct
YMTVYNYYVYPDKTRPRVSQMLILTPFQGQHRYYTEFPTVLDITAEDPSKSYVKLRDFVLVKLCQDLPCF

SEQ ID NO: 17376 - protein, 70 aa, Synthetic construct
YMTVYNYYVYPDKTRPRVSQMLILTPFQGQGHGAQLLETVHRYYTEFPTVSYVKLRDFVLVKLCQDLPCF

SEQ ID NO: 17377 - protein, 70 aa, Synthetic construct
YMTVYNYYVYPDKTRPRVSQMLILTPFQGQGHGAQLLETVHRYYTEFPTVLDITARDFVLVKLCQDLPCF

SEQ ID NO: 17378 - protein, 70 aa, Synthetic construct
YMTVYNYYVYPDKTRPRVSQMLILTPFQGQGHGAQLLETVHRYYTEFPTVLDITAEDPSKSYVKLRDFVL

SEQ ID NO: 17379 - protein, 70 aa, Synthetic construct
VPAGAEAIPEPVVRILPPLEGPPAQASPSSTMLGEGSQPDWPGGSRYDLDEIDAYWLELINSELKEMERP

SEQ ID NO: 17380 - protein, 70 aa, Synthetic construct
WRQEWEAIPEPVVRILPPLEGPPAQASPSSTMLGEGSQPDWPGGSRYDLDEIDAYWLELINSELKEMERP

SEQ ID NO: 17381 - protein, 70 aa, Synthetic construct
WRQEWEKGVQPVVRILPPLEGPPAQASPSSTMLGEGSQPDWPGGSRYDLDEIDAYWLELINSELKEMERP

SEQ ID NO: 17382 - protein, 70 aa, Synthetic construct
WRQEWEKGVQVPAGALPPLEGPPAQASPSSTMLGEGSQPDWPGGSRYDLDEIDAYWLELINSELKEMERP

SEQ ID NO: 17383 - protein, 70 aa, Synthetic construct
WRQEWEKGVQVPAGAEAIPEGPPAQASPSSTMLGEGSQPDWPGGSRYDLDEIDAYWLELINSELKEMERP

SEQ ID NO: 17384 - protein, 70 aa, Synthetic construct
WRQEWEKGVQVPAGAEAIPEPVVRIASPSSTMLGEGSQPDWPGGSRYDLDEIDAYWLELINSELKEMERP

SEQ ID NO: 17385 - protein, 70 aa, Synthetic construct
WRQEWEKGVQVPAGAEAIPEPVVRILPPLETMLGEGSQPDWPGGSRYDLDEIDAYWLELINSELKEMERP

SEQ ID NO: 17386 - protein, 70 aa, Synthetic construct
WRQEWEKGVQVPAGAEAIPEPVVRILPPLEGPPAQGSQPDWPGGSRYDLDEIDAYWLELINSELKEMERP

SEQ ID NO: 17387 - protein, 70 aa, Synthetic construct
WRQEWEKGVQVPAGAEAIPEPVVRILPPLEGPPAQASPSSWPGGSRYDLDEIDAYWLELINSELKEMERP

SEQ ID NO: 17388 - protein, 70 aa, Synthetic construct
WRQEWEKGVQVPAGAEAIPEPVVRILPPLEGPPAQASPSSTMLGERYDLDEIDAYWLELINSELKEMERP

SEQ ID NO: 17389 - protein, 70 aa, Synthetic construct
WRQEWEKGVQVPAGAEAIPEPVVRILPPLEGPPAQASPSSTMLGEGSQPDEIDAYWLELINSELKEMERP

SEQ ID NO: 17390 - protein, 70 aa, Synthetic construct
WRQEWEKGVQVPAGAEAIPEPVVRILPPLEGPPAQASPSSTMLGEGSQPDWPGGSRYDLDEIDAYWLELI

SEQ ID NO: 17391 - protein, 70 aa, Synthetic construct
TSFPIDGTFFNSWLAQSVQITAENMAMSEWPLNNGHREDPAPGLLSEELLQDEETLLSFMRDPSLRPGDP

SEQ ID NO: 17392 - protein, 70 aa, Synthetic construct
IEQDLDGTFFNSWLAQSVQITAENMAMSEWPLNNGHREDPAPGLLSEELLQDEETLLSFMRDPSLRPGDP

SEQ ID NO: 17393 - protein, 70 aa, Synthetic construct
IEQDLCRGLSTSFPIDGTFFTAENMAMSEWPLNNGHREDPAPGLLSEELLQDEETLLSFMRDPSLRPGDP

SEQ ID NO: 17394 - protein, 70 aa, Synthetic construct
IEQDLCRGLSTSFPIDGTFFNSWLAAMSEWPLNNGHREDPAPGLLSEELLQDEETLLSFMRDPSLRPGDP

SEQ ID NO: 17395 - protein, 70 aa, Synthetic construct
IEQDLCRGLSTSFPIDGTFFNSWLAQSVQIPLNNGHREDPAPGLLSEELLQDEETLLSFMRDPSLRPGDP

SEQ ID NO: 17396 - protein, 70 aa, Synthetic construct
IEQDLCRGLSTSFPIDGTFFNSWLAQSVQITAENMHREDPAPGLLSEELLQDEETLLSFMRDPSLRPGDP

SEQ ID NO: 17397 - protein, 70 aa, Synthetic construct
IEQDLCRGLSTSFPIDGTFFNSWLAQSVQITAENMAMSEWAPGLLSEELLQDEETLLSFMRDPSLRPGDP

SEQ ID NO: 17398 - protein, 70 aa, Synthetic construct
IEQDLCRGLSTSFPIDGTFFNSWLAQSVQITAENMAMSEWPLNNGSEELLQDEETLLSFMRDPSLRPGDP

SEQ ID NO: 17399 - protein, 70 aa, Synthetic construct
IEQDLCRGLSTSFPIDGTFFNSWLAQSVQITAENMAMSEWPLNNGHREDPQDEETLLSFMRDPSLRPGDP

SEQ ID NO: 17400 - protein, 70 aa, Synthetic construct
IEQDLCRGLSTSFPIDGTFFNSWLAQSVQITAENMAMSEWPLNNGHREDPAPGLLSEELLRDPSLRPGDP

SEQ ID NO: 17401 - protein, 70 aa, Synthetic construct
IEQDLCRGLSTSFPIDGTFFNSWLAQSVQITAENMAMSEWPLNNGHREDPAPGLLSEELLQDEETLLSFM

SEQ ID NO: 17402 - protein, 70 aa, Synthetic construct
GFLDTLLQDFPALLNPEDPLPWKAPGTVLSQEEVEGELAELAMGFLGSRKAPPPLAAALAHEAVSQLLQT

SEQ ID NO: 17403 - protein, 70 aa, Synthetic construct
PMASGAEETPGFLDTLLQDFPWKAPGTVLSQEEVEGELAELAMGFLGSRKAPPPLAAALAHEAVSQLLQT

SEQ ID NO: 17404 - protein, 70 aa, Synthetic construct
PMASGAEETPGFLDTLLQDFPALLNGTVLSQEEVEGELAELAMGFLGSRKAPPPLAAALAHEAVSQLLQT

SEQ ID NO: 17405 - protein, 70 aa, Synthetic construct
PMASGAEETPGFLDTLLQDFPALLNPEDPLQEEVEGELAELAMGFLGSRKAPPPLAAALAHEAVSQLLQT

SEQ ID NO: 17406 - protein, 70 aa, Synthetic construct
PMASGAEETPGFLDTLLQDFPALLNPEDPLPWKAPGELAELAMGFLGSRKAPPPLAAALAHEAVSQLLQT

SEQ ID NO: 17407 - protein, 70 aa, Synthetic construct
PMASGAEETPGFLDTLLQDFPALLNPEDPLPWKAPGTVLSQEEVELGSRKAPPPLAAALAHEAVSQLLQT

SEQ ID NO: 17408 - protein, 70 aa, Synthetic construct
PMASGAEETPGFLDTLLQDFPALLNPEDPLPWKAPGTVLSQEEVEGELAEAPPPLAAALAHEAVSQLLQT

SEQ ID NO: 17409 - protein, 70 aa, Synthetic construct
PMASGAEETPGFLDTLLQDFPALLNPEDPLPWKAPGTVLSQEEVEGELAELAMGFAAALAHEAVSQLLQT

SEQ ID NO: 17410 - protein, 70 aa, Synthetic construct
PMASGAEETPGFLDTLLQDFPALLNPEDPLPWKAPGTVLSQEEVEGELAELAMGFLGSRKHEAVSQLLQT

SEQ ID NO: 17411 - protein, 70 aa, Synthetic construct
PMASGAEETPGFLDTLLQDFPALLNPEDPLPWKAPGTVLSQEEVEGELAELAMGFLGSRKAPPPLQLLQT

SEQ ID NO: 17412 - protein, 70 aa, Synthetic construct
PMASGAEETPGFLDTLLQDFPALLNPEDPLPWKAPGTVLSQEEVEGELAELAMGFLGSRKAPPPLAAALA

SEQ ID NO: 17413 - protein, 70 aa, Synthetic construct
ICLPPISEELQLVWTNEHLLKTFSYFPYPSLADIALLCLRYGLQMEKVKTWFMAQRLRCGISWSSEEIEE

SEQ ID NO: 17414 - protein, 70 aa, Synthetic construct
ICLPPISEELQLVWTQAAQTSELDSNEHLLKTFSYFPYPSLADIAEKVKTWFMAQRLRCGISWSSEEIEE

SEQ ID NO: 17415 - protein, 70 aa, Synthetic construct
ICLPPISEELQLVWTQAAQTSELDSNEHLLKTFSYFPYPSLADIALLCLRWFMAQRLRCGISWSSEEIEE

SEQ ID NO: 17416 - protein, 70 aa, Synthetic construct
ICLPPISEELQLVWTQAAQTSELDSNEHLLKTFSYFPYPSLADIALLCLRYGLQMEKVKTISWSSEEIEE

SEQ ID NO: 17417 - protein, 70 aa, Synthetic construct
DFGNVDIGEISHEVMSNMETFDVAELDQYLPPNGHPGHVSSYSAAGYGLGSALAVASGHSAWISKPPGVA

SEQ ID NO: 17418 - protein, 70 aa, Synthetic construct
SMGEGGKPHIDFGNVDIGEIFDVAELDQYLPPNGHPGHVSSYSAAGYGLGSALAVASGHSAWISKPPGVA

SEQ ID NO: 17419 - protein, 70 aa, Synthetic construct
SMGEGGKPHIDFGNVDIGEISHEVMSNMETFDVAELDQYLSYSAAGYGLGSALAVASGHSAWISKPPGVA

SEQ ID NO: 17420 - protein, 70 aa, Synthetic construct
SMGEGGKPHIDFGNVDIGEISHEVMSNMETFDVAELDQYLPPNGHGYGLGSALAVASGHSAWISKPPGVA

SEQ ID NO: 17421 - protein, 70 aa, Synthetic construct
SMGEGGKPHIDFGNVDIGEISHEVMSNMETFDVAELDQYLPPNGHPGHVSSYSAAASGHSAWISKPPGVA

SEQ ID NO: 17422 - protein, 70 aa, Synthetic construct
SMGEGGKPHIDFGNVDIGEISHEVMSNMETFDVAELDQYLPPNGHPGHVSSYSAAGYGLGAWISKPPGVA

SEQ ID NO: 17423 - protein, 70 aa, Synthetic construct
SMGEGGKPHIDFGNVDIGEISHEVMSNMETFDVAELDQYLPPNGHPGHVSSYSAAGYGLGSALAVPPGVA

SEQ ID NO: 17424 - protein, 30 aa, Synthetic construct
FRNDFSGEVDFRDIDLTDEILTYVQDSLSK

SEQ ID NO: 17425 - protein, 40 aa, Synthetic construct
MKHMQVNGMFENWNSNQFVPFNCPQQDPQQYNVFTDLHGI

SEQ ID NO: 17426 - protein, 5 aa, Synthetic construct
TQNFI

SEQ ID NO: 17427 - protein, 10 aa, Synthetic construct
SKCTELDYPM

SEQ ID NO: 17428 - protein, 10 aa, Synthetic construct
DQGYGGYGAW

SEQ ID NO: 17429 - protein, 10 aa, Synthetic construct
ASWQGYENYN

SEQ ID NO: 17430 - protein, 10 aa, Synthetic construct
SYGPASWEAA

SEQ ID NO: 17431 - protein, 10 aa, Synthetic construct
CDYGYGTWNS

SEQ ID NO: 17432 - protein, 5 aa, Synthetic construct
YGYGY

SEQ ID NO: 17433 - protein, 10 aa, Synthetic construct
GMATSHSWEM

SEQ ID NO: 17434 - protein, 5 aa, Synthetic construct
WHIPT

SEQ ID NO: 17435 - protein, 10 aa, Synthetic construct
AAMAVIMSLL

SEQ ID NO: 17436 - protein, 10 aa, Synthetic construct
LGGPVDFSDL

SEQ ID NO: 17437 - protein, 20 aa, Synthetic construct
LCDNDDTAMAAFMNYLEAEG

SEQ ID NO: 17438 - protein, 30 aa, Synthetic construct
RTGARTLADIKAKAQLVKAQRAAAAAAAAA

SEQ ID NO: 17439 - protein, 25 aa, Synthetic construct
RTGARTLADIKAKAQLVKAQRAAAA

SEQ ID NO: 17440 - protein, 10 aa, Synthetic construct
KSQPVSKPES

SEQ ID NO: 17441 - protein, 10 aa, Synthetic construct
RASTSTSVSG

SEQ ID NO: 17442 - protein, 25 aa, Synthetic construct
ARTLADIKARAQQARAQREAAAAAA

SEQ ID NO: 17443 - protein, 15 aa, Synthetic construct
EFMDNMSFLDALLTD

SEQ ID NO: 17444 - protein, 5 aa, Synthetic construct
EFSLE

SEQ ID NO: 17445 - protein, 10 aa, Synthetic construct
KEFDLDALLG

SEQ ID NO: 17446 - protein, 10 aa, Synthetic construct
MEDFFLDAPP

SEQ ID NO: 17447 - protein, 10 aa, Synthetic construct
DELQLEAANE

SEQ ID NO: 17448 - protein, 20 aa, Synthetic construct
FDNLDFDLDLMPWESDIWDI

SEQ ID NO: 17449 - protein, 15 aa, Synthetic construct
TIDLLSDLENILSSN

SEQ ID NO: 17450 - protein, 20 aa, Synthetic construct
PGIDFDIEEFFSASNIQTQT

SEQ ID NO: 17451 - protein, 15 aa, Synthetic construct
PGIDFDIEEFFSASN

SEQ ID NO: 17452 - protein, 10 aa, Synthetic construct
SNFLGLEMFD

SEQ ID NO: 17453 - protein, 15 aa, Synthetic construct
LQEQLKAVHEQLAAL

SEQ ID NO: 17454 - protein, 10 aa, Synthetic construct
DSSSDSDSST

SEQ ID NO: 17455 - protein, 20 aa, Synthetic construct
LAELQEQLKAVHEQLAALSQ

SEQ ID NO: 17456 - protein, 10 aa, Synthetic construct
LDFETVGDII

SEQ ID NO: 17457 - protein, 5 aa, Synthetic construct
AALSF

SEQ ID NO: 17458 - protein, 5 aa, Synthetic construct
PGPWE

SEQ ID NO: 17459 - protein, 10 aa, Synthetic construct
SIIDDAWWFG

SEQ ID NO: 17460 - protein, 10 aa, Synthetic construct
LLSPDASQGL

SEQ ID NO: 17461 - protein, 5 aa, Synthetic construct
TGSSE

SEQ ID NO: 17462 - protein, 5 aa, Synthetic construct
EELVL

SEQ ID NO: 17463 - protein, 20 aa, Synthetic construct
NFDPDCFLNNPKQGQTYGGG

SEQ ID NO: 17464 - protein, 20 aa, Synthetic construct
LDHFDISFSNQFSDLINDFI

SEQ ID NO: 17465 - protein, 30 aa, Synthetic construct
SPAFDPDRFLNSPQRGQTYGGGQGVSPDFP

SEQ ID NO: 17466 - protein, 10 aa, Synthetic construct
ALEPAAALEP

SEQ ID NO: 17467 - protein, 5 aa, Synthetic construct
PDLMG

SEQ ID NO: 17468 - protein, 10 aa, Synthetic construct
DFSPEWSYPE

SEQ ID NO: 17469 - protein, 10 aa, Synthetic construct
FSDVDSPYYD

SEQ ID NO: 17470 - protein, 10 aa, Synthetic construct
YVSYLLDKDV

SEQ ID NO: 17471 - protein, 10 aa, Synthetic construct
GGLNLAPQNF

SEQ ID NO: 17472 - protein, 5 aa, Synthetic construct
YPDYG

SEQ ID NO: 17473 - protein, 10 aa, Synthetic construct
GPSWPAAYGA

SEQ ID NO: 17474 - protein, 10 aa, Synthetic construct
PLREDWNGYA

SEQ ID NO: 17475 - protein, 20 aa, Synthetic construct
HYMGYPHMPSMDPHWPSLGV

SEQ ID NO: 17476 - protein, 5 aa, Synthetic construct
DWSVY

SEQ ID NO: 17477 - protein, 10 aa, Synthetic construct
AFCSTDYSNL

SEQ ID NO: 17478 - protein, 10 aa, Synthetic construct
EHETSIDISA

SEQ ID NO: 17479 - protein, 10 aa, Synthetic construct
FLADLFQHSR

SEQ ID NO: 17480 - protein, 5 aa, Synthetic construct
SAIDF

SEQ ID NO: 17481 - protein, 15 aa, Synthetic construct
CHDELFADLFNSNHK

SEQ ID NO: 17482 - protein, 10 aa, Synthetic construct
DLQLSEILKF

SEQ ID NO: 17483 - protein, 5 aa, Synthetic construct
IDLES

SEQ ID NO: 17484 - protein, 10 aa, Synthetic construct
ILKFGAEDLF

SEQ ID NO: 17485 - protein, 10 aa, Synthetic construct
QEMDIDEILR

SEQ ID NO: 17486 - protein, 10 aa, Synthetic construct
FKVANFATME

SEQ ID NO: 17487 - protein, 20 aa, Synthetic construct
DIDYMEIPVDWWDAEADKSL

SEQ ID NO: 17488 - protein, 10 aa, Synthetic construct
RYNAMRADPA

SEQ ID NO: 17489 - protein, 10 aa, Synthetic construct
MDFFDDANLF

SEQ ID NO: 17490 - protein, 10 aa, Synthetic construct
VSTQELYSIP

SEQ ID NO: 17491 - protein, 10 aa, Synthetic construct
APWARLWALQ

SEQ ID NO: 17492 - protein, 5 aa, Synthetic construct
LECVN

SEQ ID NO: 17493 - protein, 10 aa, Synthetic construct
CEYCFDEPLL

SEQ ID NO: 17494 - protein, 15 aa, Synthetic construct
WPFPDLFSEPLCRGP

SEQ ID NO: 17495 - protein, 20 aa, Synthetic construct
YHTHFSELLDEFSQNVLGQL

SEQ ID NO: 17496 - protein, 20 aa, Synthetic construct
GFSANDSTDFGSLFDLENDL

SEQ ID NO: 17497 - protein, 10 aa, Synthetic construct
LGLLNSGNLV

SEQ ID NO: 17498 - protein, 15 aa, Synthetic construct
EDMDFLSGLELADLL

SEQ ID NO: 17499 - protein, 40 aa, Synthetic construct
CSSPSAYGSPSSYFSGLDPYLSPMVPQLGGPALSPLSGPS

SEQ ID NO: 17500 - protein, 25 aa, Synthetic construct
SYGAYSPVDSLEFKDPTGTWKFTYN

SEQ ID NO: 17501 - protein, 15 aa, Synthetic construct
DDDSLARILSFSDSD

SEQ ID NO: 17502 - protein, 5 aa, Synthetic construct
CFHPA

SEQ ID NO: 17503 - protein, 10 aa, Synthetic construct
LASWTHSYSG

SEQ ID NO: 17504 - protein, 10 aa, Synthetic construct
FLESLMGFSE

SEQ ID NO: 17505 - protein, 10 aa, Synthetic construct
DNWTLELESS

SEQ ID NO: 17506 - protein, 5 aa, Synthetic construct
LLSDN

SEQ ID NO: 17507 - protein, 10 aa, Synthetic construct
EILSRTLCEP

SEQ ID NO: 17508 - protein, 45 aa, Synthetic construct
EPLSDEDLPLDPDLYQDFCAGAFDDHGLPWMSDTEESPFLDPALR

SEQ ID NO: 17509 - protein, 10 aa, Synthetic construct
TLSSWELEAW

SEQ ID NO: 17510 - protein, 30 aa, Synthetic construct
DLVSDSTYYSSFYQPSLFPYYNNLYNCPQY

SEQ ID NO: 17511 - protein, 10 aa, Synthetic construct
ADSASGEVGN

SEQ ID NO: 17512 - protein, 10 aa, Synthetic construct
LLEELMSSEV

SEQ ID NO: 17513 - protein, 10 aa, Synthetic construct
EALFNLMSGI

SEQ ID NO: 17514 - protein, 10 aa, Synthetic construct
ISNIFSNYFS

SEQ ID NO: 17515 - protein, 5 aa, Synthetic construct
ASVPP

SEQ ID NO: 17516 - protein, 10 aa, Synthetic construct
PQMSLEGTEK

SEQ ID NO: 17517 - protein, 10 aa, Synthetic construct
EQPQFWSKTQ

SEQ ID NO: 17518 - protein, 5 aa, Synthetic construct
SWIIE

SEQ ID NO: 17519 - protein, 15 aa, Synthetic construct
HFWSTLSPIAPRSPA

SEQ ID NO: 17520 - protein, 10 aa, Synthetic construct
PSIHFWSTLS

SEQ ID NO: 17521 - protein, 10 aa, Synthetic construct
PFIEALKSIE

SEQ ID NO: 17522 - protein, 20 aa, Synthetic construct
SENMPCDEEPSQLEELADFM

SEQ ID NO: 17523 - protein, 10 aa, Synthetic construct
LNYLELFHTS

SEQ ID NO: 17524 - protein, 10 aa, Synthetic construct
ELVSEFSRMA

SEQ ID NO: 17525 - protein, 10 aa, Synthetic construct
PASPLDSTFY

SEQ ID NO: 17526 - protein, 10 aa, Synthetic construct
DLVDAEEYLV

SEQ ID NO: 17527 - protein, 10 aa, Synthetic construct
YNYPEGAAYE

SEQ ID NO: 17528 - protein, 10 aa, Synthetic construct
VYGQTGLPYG

SEQ ID NO: 17529 - protein, 10 aa, Synthetic construct
SVSPSPLMLL

SEQ ID NO: 17530 - protein, 15 aa, Synthetic construct
LSPFLQPHGQQVPYY

SEQ ID NO: 17531 - protein, 10 aa, Synthetic construct
WSGDWTDMAC

SEQ ID NO: 17532 - protein, 10 aa, Synthetic construct
QDMFAHPYQY

SEQ ID NO: 17533 - protein, 10 aa, Synthetic construct
ISSLDELVEL

SEQ ID NO: 17534 - protein, 10 aa, Synthetic construct
TGFLSYGTSF

SEQ ID NO: 17535 - protein, 10 aa, Synthetic construct
QDYPSYPGFP

SEQ ID NO: 17536 - protein, 15 aa, Synthetic construct
GLPPFGALWPGMKPE

SEQ ID NO: 17537 - protein, 5 aa, Synthetic construct
YSYQM

SEQ ID NO: 17538 - protein, 10 aa, Synthetic construct
TNFSGSQQDY

SEQ ID NO: 17539 - protein, 10 aa, Synthetic construct
YAQYYSASTY

SEQ ID NO: 17540 - protein, 5 aa, Synthetic construct
DWEPL

SEQ ID NO: 17541 - protein, 10 aa, Synthetic construct
VFTYPEADSF

SEQ ID NO: 17542 - protein, 5 aa, Synthetic construct
YENFF

SEQ ID NO: 17543 - protein, 5 aa, Synthetic construct
YLWFN

SEQ ID NO: 17544 - protein, 10 aa, Synthetic construct
ILLDISFPGL

SEQ ID NO: 17545 - protein, 10 aa, Synthetic construct
PGPLEAFEEI

SEQ ID NO: 17546 - protein, 15 aa, Synthetic construct
LPGFSAEAWCNGLPY

SEQ ID NO: 17547 - protein, 20 aa, Synthetic construct
GMFCYQPPLQHMYCSSQPPF

SEQ ID NO: 17548 - protein, 15 aa, Synthetic construct
TDLDAINPSLTDFDF

SEQ ID NO: 17549 - protein, 5 aa, Synthetic construct
TNLNW

SEQ ID NO: 17550 - protein, 5 aa, Synthetic construct
FSLGS

SEQ ID NO: 17551 - protein, 10 aa, Synthetic construct
VSPLYDIEGD

SEQ ID NO: 17552 - protein, 10 aa, Synthetic construct
DVPSFGPACY

SEQ ID NO: 17553 - protein, 10 aa, Synthetic construct
DFALQGNLWE

SEQ ID NO: 17554 - protein, 10 aa, Synthetic construct
FPSDLDLDMF

SEQ ID NO: 17555 - protein, 10 aa, Synthetic construct
NGSLECDMES

SEQ ID NO: 17556 - protein, 10 aa, Synthetic construct
GLDFNFDSLI

SEQ ID NO: 17557 - protein, 5 aa, Synthetic construct
DLDMY

SEQ ID NO: 17558 - protein, 5 aa, Synthetic construct
IISDL

SEQ ID NO: 17559 - protein, 20 aa, Synthetic construct
NLWMWVNPNIVYPPGKLEVS

SEQ ID NO: 17560 - protein, 20 aa, Synthetic construct
PGGNLSSWEDLLLFTDLDQA

SEQ ID NO: 17561 - protein, 10 aa, Synthetic construct
SPFAPEQPEE

SEQ ID NO: 17562 - protein, 10 aa, Synthetic construct
SWPCSFSPSQ

SEQ ID NO: 17563 - protein, 5 aa, Synthetic construct
FYQQL

SEQ ID NO: 17564 - protein, 10 aa, Synthetic construct
FNSYVQSPAY

SEQ ID NO: 17565 - protein, 5 aa, Synthetic construct
DPFLF

SEQ ID NO: 17566 - protein, 10 aa, Synthetic construct
TSEDEAWKSF

SEQ ID NO: 17567 - protein, 25 aa, Synthetic construct
AMMSINGDEDSAAALGLLYDYYKVP

SEQ ID NO: 17568 - protein, 50 aa, Synthetic construct
EDEAWKSYLENPLTAATKAMMSINGDEDSAAALGLLYDYYKVPRDKRLLS

SEQ ID NO: 17569 - protein, 20 aa, Synthetic construct
QLEYMDLEEFLSENGIPPSP

SEQ ID NO: 17570 - protein, 10 aa, Synthetic construct
PGYLDMPVVP

SEQ ID NO: 17571 - protein, 15 aa, Synthetic construct
QPWALPNGWNGQMYC

SEQ ID NO: 17572 - protein, 5 aa, Synthetic construct
FTDTL

SEQ ID NO: 17573 - protein, 5 aa, Synthetic construct
GQDSF

SEQ ID NO: 17574 - protein, 10 aa, Synthetic construct
YEYGASCFYS

SEQ ID NO: 17575 - protein, 5 aa, Synthetic construct
FAFYP

SEQ ID NO: 17576 - protein, 10 aa, Synthetic construct
YQPMASYLDV

SEQ ID NO: 17577 - protein, 15 aa, Synthetic construct
DSYQSWALAGGWNSQ

SEQ ID NO: 17578 - protein, 10 aa, Synthetic construct
LYSSGYADPL

SEQ ID NO: 17579 - protein, 10 aa, Synthetic construct
CDYGPAPAFY

SEQ ID NO: 17580 - protein, 5 aa, Synthetic construct
SALLD

SEQ ID NO: 17581 - protein, 15 aa, Synthetic construct
YSNYTPSAQYSQAYY

SEQ ID NO: 17582 - protein, 5 aa, Synthetic construct
THMDA

SEQ ID NO: 17583 - protein, 5 aa, Synthetic construct
NYFQN

SEQ ID NO: 17584 - protein, 10 aa, Synthetic construct
FLPSNWPCST

SEQ ID NO: 17585 - protein, 10 aa, Synthetic construct
LSLDELWDML

SEQ ID NO: 17586 - protein, 10 aa, Synthetic construct
DDIANEITDI

SEQ ID NO: 17587 - protein, 5 aa, Synthetic construct
FSDVL

SEQ ID NO: 17588 - protein, 10 aa, Synthetic construct
DLQDFDFFEG

SEQ ID NO: 17589 - protein, 10 aa, Synthetic construct
TVNIIVVGQS

SEQ ID NO: 17590 - protein, 20 aa, Synthetic construct
IVTNPPDICQVVEVTTESDE

SEQ ID NO: 17591 - protein, 10 aa, Synthetic construct
SELYPLQISP

SEQ ID NO: 17592 - protein, 10 aa, Synthetic construct
GYGNYVTYGS

SEQ ID NO: 17593 - protein, 5 aa, Synthetic construct
YYPYE

SEQ ID NO: 17594 - protein, 10 aa, Synthetic construct
EIDAYWLELI

SEQ ID NO: 17595 - protein, 20 aa, Synthetic construct
IIRDLNSLFTPDYELLTEND

SEQ ID NO: 17596 - protein, 5 aa, Synthetic construct
FEDRD

SEQ ID NO: 17597 - protein, 10 aa, Synthetic construct
FLQQLGKGNF

SEQ ID NO: 17598 - protein, 65 aa, Synthetic construct
TGIAAASFFSNTCRFGGCGLHFPTLADLIEHIEDNHIDTDPRVLEKQELQQPTYVALSYINRFMT

SEQ ID NO: 17599 - protein, 10 aa, Synthetic construct
PLEITQEAGE

SEQ ID NO: 17600 - protein, 10 aa, Synthetic construct
MVFVPSGWHH

SEQ ID NO: 17601 - protein, 15 aa, Synthetic construct
INHNWVNGFNLANMW

SEQ ID NO: 17602 - protein, 10 aa, Synthetic construct
NVTTENLEKW

SEQ ID NO: 17603 - protein, 10 aa, Synthetic construct
EVLTDSEIIR

SEQ ID NO: 17604 - protein, 20 aa, Synthetic construct
LQWTENLLDYLEQQGDMILP

SEQ ID NO: 17605 - protein, 25 aa, Synthetic construct
TPSLLSEADLIPDVMPPQALFHDDD

SEQ ID NO: 17606 - protein, 15 aa, Synthetic construct
FQPTLEEIEEFLEEN

SEQ ID NO: 17607 - protein, 10 aa, Synthetic construct
LLDLDFILSN

SEQ ID NO: 17608 - protein, 15 aa, Synthetic construct
GNILPSDIMDFVLKN

SEQ ID NO: 17609 - protein, 10 aa, Synthetic construct
ASDDQAGKLW

SEQ ID NO: 17610 - protein, 15 aa, Synthetic construct
AIDIQALFDSTGTCW

SEQ ID NO: 17611 - protein, 10 aa, Synthetic construct
EFDLLAYTDP

SEQ ID NO: 17612 - protein, 10 aa, Synthetic construct
FVQSLLGCEE

SEQ ID NO: 17613 - protein, 10 aa, Synthetic construct
SSEDVRWDTF

SEQ ID NO: 17614 - protein, 15 aa, Synthetic construct
MLENYDTMYLLDQPV

SEQ ID NO: 17615 - protein, 10 aa, Synthetic construct
SSNFEGLLWS

SEQ ID NO: 17616 - protein, 15 aa, Synthetic construct
STLFEIDEFVKIYDL

SEQ ID NO: 17617 - protein, 30 aa, Synthetic construct
PGELIPNGPFSFYGDYQSEYYGPGGNYDFF

SEQ ID NO: 17618 - protein, 10 aa, Synthetic construct
TPVDLPFVPS

SEQ ID NO: 17619 - protein, 10 aa, Synthetic construct
TPLGGLEHPL

SEQ ID NO: 17620 - protein, 10 aa, Synthetic construct
EQSVYSSDPF

SEQ ID NO: 17621 - protein, 10 aa, Synthetic construct
PYGAEPLFHD

SEQ ID NO: 17622 - protein, 5 aa, Synthetic construct
LGDCF

SEQ ID NO: 17623 - protein, 10 aa, Synthetic construct
YSMQNSYFTS

SEQ ID NO: 17624 - protein, 25 aa, Synthetic construct
GCVPFFGDTPEELFGQVISDEIVWP

SEQ ID NO: 17625 - protein, 5 aa, Synthetic construct
TGLDW

SEQ ID NO: 17626 - protein, 20 aa, Synthetic construct
DDTDETLTSLLNEIAFLNQQ

SEQ ID NO: 17627 - protein, 5 aa, Synthetic construct
QMDDV

SEQ ID NO: 17628 - protein, 5 aa, Synthetic construct
LGLMD

SEQ ID NO: 17629 - protein, 10 aa, Synthetic construct
IDLYGNQGLP

SEQ ID NO: 17630 - protein, 10 aa, Synthetic construct
NLDFMDTFEP

SEQ ID NO: 17631 - protein, 5 aa, Synthetic construct
MDISD

SEQ ID NO: 17632 - protein, 15 aa, Synthetic construct
PDKEKKIKELEMLLM

SEQ ID NO: 17633 - protein, 15 aa, Synthetic construct
LQTIPEFAETLELIE

SEQ ID NO: 17634 - protein, 10 aa, Synthetic construct
WSDVTSFDIS

SEQ ID NO: 17635 - protein, 5 aa, Synthetic construct
DDFYD

SEQ ID NO: 17636 - protein, 5 aa, Synthetic construct
FFEDL

SEQ ID NO: 17637 - protein, 10 aa, Synthetic construct
NEALQQFFEA

SEQ ID NO: 17638 - protein, 10 aa, Synthetic construct
LLEEFLGNDF

SEQ ID NO: 17639 - protein, 20 aa, Synthetic construct
VCLSSLECLRNQCFDLARKL

SEQ ID NO: 17640 - protein, 10 aa, Synthetic construct
PDRNYSDMLN

SEQ ID NO: 17641 - protein, 10 aa, Synthetic construct
LMRLEEQLSP

SEQ ID NO: 17642 - protein, 10 aa, Synthetic construct
NIQSWSNHSW

SEQ ID NO: 17643 - protein, 5 aa, Synthetic construct
NNQAW

SEQ ID NO: 17644 - protein, 20 aa, Synthetic construct
LLEQLVSFLSGKDETELAEL

SEQ ID NO: 17645 - protein, 10 aa, Synthetic construct
IDKLVQGGGL

SEQ ID NO: 17646 - protein, 20 aa, Synthetic construct
SPSDEGALLDQLYLALRNFD

SEQ ID NO: 17647 - protein, 25 aa, Synthetic construct
ALLDQLHTLLSNTDATGLEEIDRAL

SEQ ID NO: 17648 - protein, 10 aa, Synthetic construct
SPGDWGSLYS

SEQ ID NO: 17649 - protein, 20 aa, Synthetic construct
LGATFSACLSPGSLAFSDFL

SEQ ID NO: 17650 - protein, 15 aa, Synthetic construct
PSDFISLLSADLDLE

SEQ ID NO: 17651 - protein, 10 aa, Synthetic construct
VYDLLPKELQ

SEQ ID NO: 17652 - protein, 10 aa, Synthetic construct
TWQEIMSITE

SEQ ID NO: 17653 - protein, 10 aa, Synthetic construct
IDLIDILWRQ

SEQ ID NO: 17654 - protein, 10 aa, Synthetic construct
LRDGGEQDTW

SEQ ID NO: 17655 - protein, 10 aa, Synthetic construct
QQWQDLMSIM

SEQ ID NO: 17656 - protein, 10 aa, Synthetic construct
LMDLAIEEGF

SEQ ID NO: 17657 - protein, 5 aa, Synthetic construct
LNAFE

SEQ ID NO: 17658 - protein, 10 aa, Synthetic construct
GDEFYSAFIA

SEQ ID NO: 17659 - protein, 15 aa, Synthetic construct
LEDLFQLLSSQPENS

SEQ ID NO: 17660 - protein, 5 aa, Synthetic construct
LVENF

SEQ ID NO: 17661 - protein, 10 aa, Synthetic construct
LDDSWENAGE

SEQ ID NO: 17662 - protein, 10 aa, Synthetic construct
SWQVFDILNG

SEQ ID NO: 17663 - protein, 10 aa, Synthetic construct
DLLEDPEIFF

SEQ ID NO: 17664 - protein, 10 aa, Synthetic construct
EEMMDSSTFK

SEQ ID NO: 17665 - protein, 20 aa, Synthetic construct
IENILDNLEDMDFTAFGDDD

SEQ ID NO: 17666 - protein, 10 aa, Synthetic construct
KLPYLPTFPF

SEQ ID NO: 17667 - protein, 5 aa, Synthetic construct
FMFPC

SEQ ID NO: 17668 - protein, 10 aa, Synthetic construct
ASWSDPCLPE

SEQ ID NO: 17669 - protein, 10 aa, Synthetic construct
LPFPGPFCPQ

SEQ ID NO: 17670 - protein, 5 aa, Synthetic construct
LATYE

SEQ ID NO: 17671 - protein, 10 aa, Synthetic construct
PYDGFTDELH

SEQ ID NO: 17672 - protein, 15 aa, Synthetic construct
DQSTFDILQDLEFSS

SEQ ID NO: 17673 - protein, 25 aa, Synthetic construct
PWRSDLLIDENCLLSPLAGEDDSFL

SEQ ID NO: 17674 - protein, 5 aa, Synthetic construct
SFSTF

SEQ ID NO: 17675 - protein, 5 aa, Synthetic construct
FLYQL

SEQ ID NO: 17676 - protein, 15 aa, Synthetic construct
AAPAAPTALPSFSTF

SEQ ID NO: 17677 - protein, 15 aa, Synthetic construct
SDFLTPEFVKFSMDL

SEQ ID NO: 17678 - protein, 5 aa, Synthetic construct
TFMDN

SEQ ID NO: 17679 - protein, 10 aa, Synthetic construct
MPCVQAQYSP

SEQ ID NO: 17680 - protein, 10 aa, Synthetic construct
YTTEIMNPDY

SEQ ID NO: 17681 - protein, 15 aa, Synthetic construct
ATTSLPSISTFVEGY

SEQ ID NO: 17682 - protein, 10 aa, Synthetic construct
LKPSCVYQMQ

SEQ ID NO: 17683 - protein, 20 aa, Synthetic construct
EPVTLEDLQLLADLFYLPYE

SEQ ID NO: 17684 - protein, 15 aa, Synthetic construct
YLNRGDRWIQDEIEF

SEQ ID NO: 17685 - protein, 10 aa, Synthetic construct
LGPDFGYVTR

SEQ ID NO: 17686 - protein, 5 aa, Synthetic construct
DSFGN

SEQ ID NO: 17687 - protein, 10 aa, Synthetic construct
CSDEEVELPA

SEQ ID NO: 17688 - protein, 15 aa, Synthetic construct
EIQRLYELLAAHGTL

SEQ ID NO: 17689 - protein, 20 aa, Synthetic construct
DYSYLNSYDSCVAAMEASAY

SEQ ID NO: 17690 - protein, 5 aa, Synthetic construct
GFQYS

SEQ ID NO: 17691 - protein, 10 aa, Synthetic construct
AVPYKFFPEP

SEQ ID NO: 17692 - protein, 15 aa, Synthetic construct
LKGEIESYLMELQGG

SEQ ID NO: 17693 - protein, 10 aa, Synthetic construct
LGLDPQIGSL

SEQ ID NO: 17694 - protein, 20 aa, Synthetic construct
NTPALDFSQLFNFIPLNGPP

SEQ ID NO: 17695 - protein, 10 aa, Synthetic construct
ILPHFHHAFR

SEQ ID NO: 17696 - protein, 10 aa, Synthetic construct
LLGFLPLNLP

SEQ ID NO: 17697 - protein, 10 aa, Synthetic construct
TLPRFHQAFQ

SEQ ID NO: 17698 - protein, 10 aa, Synthetic construct
GPPGYSGYPG

SEQ ID NO: 17699 - protein, 10 aa, Synthetic construct
PVYNQPVYNQ

SEQ ID NO: 17700 - protein, 5 aa, Synthetic construct
GVPWM

SEQ ID NO: 17701 - protein, 15 aa, Synthetic construct
PGLEYLSQIDQILIH

SEQ ID NO: 17702 - protein, 5 aa, Synthetic construct
WLSQP

SEQ ID NO: 17703 - protein, 5 aa, Synthetic construct
WTPYT

SEQ ID NO: 17704 - protein, 10 aa, Synthetic construct
MYVQPVCPSY

SEQ ID NO: 17705 - protein, 5 aa, Synthetic construct
PRTWL

SEQ ID NO: 17706 - protein, 10 aa, Synthetic construct
VWGIPPCPPP

SEQ ID NO: 17707 - protein, 10 aa, Synthetic construct
YEFCGGMAYC

SEQ ID NO: 17708 - protein, 15 aa, Synthetic construct
PWGAEPGWVDPLTWL

SEQ ID NO: 17709 - protein, 5 aa, Synthetic construct
PFWPT

SEQ ID NO: 17710 - protein, 10 aa, Synthetic construct
KLPMFINSGL

SEQ ID NO: 17711 - protein, 10 aa, Synthetic construct
AMDGLFDDSE

SEQ ID NO: 17712 - protein, 10 aa, Synthetic construct
YSLFNVSPSC

SEQ ID NO: 17713 - protein, 25 aa, Synthetic construct
ELFQIDSENEALLAELTKTLDDIPE

SEQ ID NO: 17714 - protein, 10 aa, Synthetic construct
DELSLLQKLL

SEQ ID NO: 17715 - protein, 10 aa, Synthetic construct
GFLDTLLQDF

SEQ ID NO: 17716 - protein, 10 aa, Synthetic construct
QEEVEGELAE

SEQ ID NO: 17717 - protein, 5 aa, Synthetic construct
CDLLW

SEQ ID NO: 17718 - protein, 10 aa, Synthetic construct
GQDISETFNH

SEQ ID NO: 17719 - protein, 15 aa, Synthetic construct
PMCDLLWSDPEDTTG

SEQ ID NO: 17720 - protein, 10 aa, Synthetic construct
LFGSDVVAQF

SEQ ID NO: 17721 - protein, 10 aa, Synthetic construct
IDMICRAHQL

SEQ ID NO: 17722 - protein, 10 aa, Synthetic construct
NSIYNPVPWE

SEQ ID NO: 17723 - protein, 10 aa, Synthetic construct
QFDVEDLYEP

SEQ ID NO: 17724 - protein, 15 aa, Synthetic construct
LQPLAHLSPAAFSSF

SEQ ID NO: 17725 - protein, 10 aa, Synthetic construct
ACPYSYAAPP

SEQ ID NO: 17726 - protein, 5 aa, Synthetic construct
FPHPY

SEQ ID NO: 17727 - protein, 5 aa, Synthetic construct
EDWYP

SEQ ID NO: 17728 - protein, 30 aa, Synthetic construct
SQAGENSLFMGSTPSYYQLSNLLADARLVF

SEQ ID NO: 17729 - protein, 10 aa, Synthetic construct
NPSFMLNPSV

SEQ ID NO: 17730 - protein, 10 aa, Synthetic construct
SYSLPFSQPL

SEQ ID NO: 17731 - protein, 40 aa, Synthetic construct
QLQFDDEDLGALLGNSTDPAVFTDLASVDNSEFQQLLNQG

SEQ ID NO: 17732 - protein, 10 aa, Synthetic construct
MLMEYPEAIT

SEQ ID NO: 17733 - protein, 15 aa, Synthetic construct
DELEIIDEYIKENGF

SEQ ID NO: 17734 - protein, 5 aa, Synthetic construct
SDIRL

SEQ ID NO: 17735 - protein, 15 aa, Synthetic construct
PNLLFDPGRQQGQDD

SEQ ID NO: 17736 - protein, 10 aa, Synthetic construct
PLFQQICSES

SEQ ID NO: 17737 - protein, 10 aa, Synthetic construct
SSGFEWIESK

SEQ ID NO: 17738 - protein, 40 aa, Synthetic construct
NESYFPFDDELTQDSIVEELVLMEQQMSMNNSHSYGNCLG

SEQ ID NO: 17739 - protein, 10 aa, Synthetic construct
SHTSSTHFYH

SEQ ID NO: 17740 - protein, 5 aa, Synthetic construct
LDEFL

SEQ ID NO: 17741 - protein, 25 aa, Synthetic construct
PVQLHQLRAQILAYKMLARGQPLPE

SEQ ID NO: 17742 - protein, 30 aa, Synthetic construct
PFNQNQLHQLRAQIMAYKMLARGQPLPDHL

SEQ ID NO: 17743 - protein, 20 aa, Synthetic construct
PFNQNQLHQLRAQIMAYKML

SEQ ID NO: 17744 - protein, 10 aa, Synthetic construct
WTEQETLLLL

SEQ ID NO: 17745 - protein, 5 aa, Synthetic construct
NKVSE

SEQ ID NO: 17746 - protein, 10 aa, Synthetic construct
TQDECILHFL

SEQ ID NO: 17747 - protein, 10 aa, Synthetic construct
RLPIEDPYLE

SEQ ID NO: 17748 - protein, 10 aa, Synthetic construct
LGSHFEFPDY

SEQ ID NO: 17749 - protein, 5 aa, Synthetic construct
EFPDY

SEQ ID NO: 17750 - protein, 15 aa, Synthetic construct
DLWADVDLTEFDQYL

SEQ ID NO: 17751 - protein, 15 aa, Synthetic construct
AADLWADVDLTEFDQ

SEQ ID NO: 17752 - protein, 10 aa, Synthetic construct
RAMSCPEESS

SEQ ID NO: 17753 - protein, 10 aa, Synthetic construct
AVYYSACISG

SEQ ID NO: 17754 - protein, 35 aa, Synthetic construct
GVNQRMDSYAHMNGWSNGSYSMMQDQLGYPQHPGL

SEQ ID NO: 17755 - protein, 15 aa, Synthetic construct
MHRYDVSALQYNSMT

SEQ ID NO: 17756 - protein, 10 aa, Synthetic construct
TYSMSYSQQG

SEQ ID NO: 17757 - protein, 10 aa, Synthetic construct
AYYSPATYHP

SEQ ID NO: 17758 - protein, 5 aa, Synthetic construct
FDALD

SEQ ID NO: 17759 - protein, 10 aa, Synthetic construct
FDQYLNTPGH

SEQ ID NO: 17760 - protein, 35 aa, Synthetic construct
QNIDFSNVDISELSSEVMGTMDAFDVHEFDQYLPL

SEQ ID NO: 17761 - protein, 10 aa, Synthetic construct
YFHAGASPVW

SEQ ID NO: 17762 - protein, 35 aa, Synthetic construct
GGRQPPIDFRDVDIGELSSDVISNIETFDVNEFDQ

SEQ ID NO: 17763 - protein, 10 aa, Synthetic construct
QVTYTGSYGI

SEQ ID NO: 17764 - protein, 10 aa, Synthetic construct
DFSQGYELPG

SEQ ID NO: 17765 - protein, 10 aa, Synthetic construct
LAPGPFSKLL

SEQ ID NO: 17766 - protein, 15 aa, Synthetic construct
WFRPTHPGAEDGSWW

SEQ ID NO: 17767 - protein, 10 aa, Synthetic construct
HHYESWFRPT

SEQ ID NO: 17768 - protein, 5 aa, Synthetic construct
DGSWW

SEQ ID NO: 17769 - protein, 10 aa, Synthetic construct
AHPYESWYKS

SEQ ID NO: 17770 - protein, 15 aa, Synthetic construct
ASSWWDVHSSPGSWL

SEQ ID NO: 17771 - protein, 15 aa, Synthetic construct
LGTYNPDFSSLTHSA

SEQ ID NO: 17772 - protein, 10 aa, Synthetic construct
THEYYPYLSS

SEQ ID NO: 17773 - protein, 10 aa, Synthetic construct
ELQSVQPPQL

SEQ ID NO: 17774 - protein, 15 aa, Synthetic construct
LTLEDLVGPQMFMDC

SEQ ID NO: 17775 - protein, 5 aa, Synthetic construct
HDHHF

SEQ ID NO: 17776 - protein, 10 aa, Synthetic construct
WEPSNELLGS

SEQ ID NO: 17777 - protein, 10 aa, Synthetic construct
TDIEDMLQLI

SEQ ID NO: 17778 - protein, 10 aa, Synthetic construct
ELTLGDIDEM

SEQ ID NO: 17779 - protein, 5 aa, Synthetic construct
FPDLF

SEQ ID NO: 17780 - protein, 10 aa, Synthetic construct
QGTWIGEDIF

SEQ ID NO: 17781 - protein, 5 aa, Synthetic construct
LTKLL

SEQ ID NO: 17782 - protein, 5 aa, Synthetic construct
NPLFA

SEQ ID NO: 17783 - protein, 10 aa, Synthetic construct
TFDSLLSRDM

SEQ ID NO: 17784 - protein, 15 aa, Synthetic construct
IEEFDNYAEWDLRDI

SEQ ID NO: 17785 - protein, 20 aa, Synthetic construct
PSLSVTLADIYRELYAFFGD

SEQ ID NO: 17786 - protein, 10 aa, Synthetic construct
ETYLELYLDQ

SEQ ID NO: 17787 - protein, 20 aa, Synthetic construct
RSPLFSPVVPYDMYILNASN

SEQ ID NO: 17788 - protein, 10 aa, Synthetic construct
SLAPLMMEVP

SEQ ID NO: 17789 - protein, 10 aa, Synthetic construct
QMLYGLQSPG

SEQ ID NO: 17790 - protein, 10 aa, Synthetic construct
YDFYRYNFSM

SEQ ID NO: 17791 - protein, 10 aa, Synthetic construct
YCSEVTPREA

SEQ ID NO: 17792 - protein, 10 aa, Synthetic construct
CMYSGSGPEI

SEQ ID NO: 17793 - protein, 10 aa, Synthetic construct
CNMWTSVSPY

SEQ ID NO: 17794 - protein, 10 aa, Synthetic construct
VPYQPFPTHF

SEQ ID NO: 17795 - protein, 10 aa, Synthetic construct
EDIVLTELGY

SEQ ID NO: 17796 - protein, 10 aa, Synthetic construct
ELRILDEIPT

SEQ ID NO: 17797 - protein, 20 aa, Synthetic construct
ESVTIGDDIWDENWLPLQAK

SEQ ID NO: 17798 - protein, 10 aa, Synthetic construct
LPPIHTLYQP

SEQ ID NO: 17799 - protein, 10 aa, Synthetic construct
SPYFSTNHQY

SEQ ID NO: 17800 - protein, 35 aa, Synthetic construct
IDCSISNDKFEYLFNFDNTFEIHDDIEVLKRMGMA

SEQ ID NO: 17801 - protein, 10 aa, Synthetic construct
PYVTEMAQGT

SEQ ID NO: 17802 - protein, 10 aa, Synthetic construct
VGGVFITTAG

SEQ ID NO: 17803 - protein, 40 aa, Synthetic construct
TIGSSSEKEIDDVIDEIISLESSYNDEMLSYLPGGTTGLQ

SEQ ID NO: 17804 - protein, 5 aa, Synthetic construct
LLDVY

SEQ ID NO: 17805 - protein, 10 aa, Synthetic construct
PSDALLDLHF

SEQ ID NO: 17806 - protein, 10 aa, Synthetic construct
PFHLGLEDIL

SEQ ID NO: 17807 - protein, 10 aa, Synthetic construct
PELCDQAIAF

SEQ ID NO: 17808 - protein, 5 aa, Synthetic construct
YFTDL

SEQ ID NO: 17809 - protein, 15 aa, Synthetic construct
LLDDTISPFGTDPLL

SEQ ID NO: 17810 - protein, 5 aa, Synthetic construct
YAYFE

SEQ ID NO: 17811 - protein, 10 aa, Synthetic construct
ETFSDLWKLL

SEQ ID NO: 17812 - protein, 20 aa, Synthetic construct
GTTFEHLWSSLEPDSTYFDL

SEQ ID NO: 17813 - protein, 5 aa, Synthetic construct
FHLEG

SEQ ID NO: 17814 - protein, 5 aa, Synthetic construct
LLSST

SEQ ID NO: 17815 - protein, 30 aa, Synthetic construct
PLWPQSPDASDFLPDTQLFPHFTELLLPLD

SEQ ID NO: 17816 - protein, 5 aa, Synthetic construct
FMLAL

SEQ ID NO: 17817 - protein, 10 aa, Synthetic construct
VAEQDFWRAV

SEQ ID NO: 17818 - protein, 10 aa, Synthetic construct
DEIMLPCEFC

SEQ ID NO: 17819 - protein, 10 aa, Synthetic construct
EELYPEELLI

SEQ ID NO: 17820 - protein, 10 aa, Synthetic construct
SDPLLSLFGS

SEQ ID NO: 17821 - protein, 5 aa, Synthetic construct
LEHLL

SEQ ID NO: 17822 - protein, 5 aa, Synthetic construct
IDPFW

SEQ ID NO: 17823 - protein, 10 aa, Synthetic construct
FSPHSVPFLA

SEQ ID NO: 17824 - protein, 5 aa, Synthetic construct
LDSSL

SEQ ID NO: 17825 - protein, 45 aa, Synthetic construct
LTWVGERGILVASDSGAVELWELDENETLIVSKFCKYEHDDIVST

SEQ ID NO: 17826 - protein, 20 aa, Synthetic construct
SDILLGILDNLDPVMFFKCP

SEQ ID NO: 17827 - protein, 10 aa, Synthetic construct
DDFEKLIWEI

SEQ ID NO: 17828 - protein, 10 aa, Synthetic construct
LLELSEMIDS

SEQ ID NO: 17829 - protein, 25 aa, Synthetic construct
FQQPQFLFPFYIPGTEFSLGPDLGL

SEQ ID NO: 17830 - protein, 20 aa, Synthetic construct
PPQLLQYQCDQCTVAFPTLE

SEQ ID NO: 17831 - protein, 10 aa, Synthetic construct
QFLHSPFLER

SEQ ID NO: 17832 - protein, 10 aa, Synthetic construct
PMDMPYMIFD

SEQ ID NO: 17833 - protein, 10 aa, Synthetic construct
FGPARDDVLA

SEQ ID NO: 17834 - protein, 5 aa, Synthetic construct
VDFLF

SEQ ID NO: 17835 - protein, 10 aa, Synthetic construct
SIDQFLRKRH

SEQ ID NO: 17836 - protein, 25 aa, Synthetic construct
HLEPLTPSEVLEYEATEILQKGSGD

SEQ ID NO: 17837 - protein, 10 aa, Synthetic construct
SFLLDGFLNS

SEQ ID NO: 17838 - protein, 10 aa, Synthetic construct
DPWAPGLSLW

SEQ ID NO: 17839 - protein, 45 aa, Synthetic construct
LDMEDDAKLDSLITEALNGMEYQSDNPEIDSSFIDVFADEEPSGP

SEQ ID NO: 17840 - protein, 25 aa, Synthetic construct
TMGDMKTPDFDDLLAAFDIPDMVDP

SEQ ID NO: 17841 - protein, 15 aa, Synthetic construct
GDMKTPDFDDLLAAF

SEQ ID NO: 17842 - protein, 80 aa, Synthetic construct
TEAQANVVVKIEEAPLAPAENDHPEFIVAVKEEPVEDDLVPELGIANLLAAAHCPKPAACLLDAYADCGYGGALAPFADM

SEQ ID NO: 17843 - protein, 80 aa, Synthetic construct
PPTIKAAANSAAALAAATTSKAQAPIGTDLDAVRTPAPLAAFPKRADQAGSPPATSLPYKWVVAAANLLIPAVGSSLSAA

SEQ ID NO: 17844 - protein, 80 aa, Synthetic construct
AAQIKVAAISAGASAAVAVTDISDADAADGAVFKTARAAAAAAKAAAGAAAGASQCMALKLRFKRRWSADCRLAGGGGAA

SEQ ID NO: 17845 - protein, 80 aa, Synthetic construct
EVFKTARAAAAAAKAEAAEAAAASQCMALKLRFKRRWSEDCRLEAAAAAAAAFEDEAEDKKVRAEAAAEAAAALTARRVS

SEQ ID NO: 17846 - protein, 80 aa, Synthetic construct
APPKPEPAEAPAASQCMPLKLRFKRRWSEDCRLEAAAAPAAAFEDEAEDKKVRAEAPAEAAAPLTPRRVSSDLQHATAQL

SEQ ID NO: 17847 - protein, 80 aa, Synthetic construct
AEAPAASQCMPLKLRFKRRWSEDCRLEAAAAPAAAFEDEAEDKKVRAEAPAEAAAPLTPRRVSSDLQHATAQLSLEHRDS

SEQ ID NO: 17848 - protein, 80 aa, Synthetic construct
ALHGRMISVAAAANAPAGAALSDRAACAVAAAALSSVDRHHSVAIAIAATVIAAAAAIAAAAAAAPADIAAAAADQDALA

SEQ ID NO: 17849 - protein, 80 aa, Synthetic construct
LANPNELQAAIDANRREGRRQAFGGALFAYAPGGAHGMLAAPKLPVAALGLAAATNGAAITPAPKIKKEEDAAIPITVPG

SEQ ID NO: 17850 - protein, 80 aa, Synthetic construct
IDANRREGRRQAFGGALFAYAPGGAHGMLAAPKLPVAALGLAAATNGAAITPAPKIKKEEDAAIPITVPGRLPVALAGHP

SEQ ID NO: 17851 - protein, 80 aa, Synthetic construct; identical to SEQ ID NO: 1002

SEQ ID NO: 17852 - protein, 80 aa, Synthetic construct; identical to SEQ ID NO: 1003

SEQ ID NO: 17853 - protein, 80 aa, Synthetic construct; identical to SEQ ID NO: 1004

SEQ ID NO: 17854 - protein, 80 aa, Synthetic construct; identical to SEQ ID NO: 1005

SEQ ID NO: 17855 - protein, 80 aa, Synthetic construct
YQAAALGHAATLFGTAARFSFHHAYFLAGAHYFASSTCAYSRAAFGYGNFASSMAECLSYYEDRYAKHEGIFSTLNRDYS

SEQ ID NO: 17856 - protein, 80 aa, Synthetic construct
AAAAAAAAAAAATAAAAAAAVAAHAAAEAAAAAAAIASAAFNPTAAPHFPMTTETAAAAAAAAHAAFPFYIPSAEFAANP

SEQ ID NO: 17857 - protein, 80 aa, Synthetic construct; identical to SEQ ID NO: 1980

SEQ ID NO: 17858 - protein, 80 aa, Synthetic construct
IAALQQAVVAALGISMAALRHFIDAALAKMDCVQQRKKQLAALATWVIQKASAVAHVDQLFDDASRAVTNCASLVKDFYS

SEQ ID NO: 17859 - protein, 80 aa, Synthetic construct
KKKLLAQVAGAALAAAYPYGAPPPLIAKKKLIARDDLCAALAQTHHGQATDHMAVARPAVIQHVQAFRAKPAEERKTIND

SEQ ID NO: 17860 - protein, 80 aa, Synthetic construct
AALAAAYPYGAPPPLIAKKKLIARDDLCAALAQTHHGQATDHMAVARPAVIQHVQAFRAKPAEERKTINDIFKHEKLARA

SEQ ID NO: 17861 - protein, 80 aa, Synthetic construct
APPPLIAKKKLIARDDLCAALAQTHHGQATDHMAVARPAVIQHVQAFRAKPAEERKTINDIFKHEKLARADPHRCAFAKH

SEQ ID NO: 17862 - protein, 80 aa, Synthetic construct
LIARDDLCAALAQTHHGQATDHMAVARPAVIQHVQAFRAKPAEERKTINDIFKHEKLARADPHRCAFAKHHLNPLADAYV

SEQ ID NO: 17863 - protein, 80 aa, Synthetic construct
AKPDINCFMIGCDNCNEWFHGDCIAITEKMAKAIAEWYCAECAEKDPKLEIAYAHKKSAEADGNEADSSEPADEGGGAKA

SEQ ID NO: 17864 - protein, 80 aa, Synthetic construct
TARTAPTVFAEDQLAKEKVKEEIGAAWIETPPAIKALDANDAGVYTAACKRRRLAPANAANENAPAIKCEDINAEEYAKD

SEQ ID NO: 17865 - protein, 80 aa, Synthetic construct
EDQLAKEKVKEEIGAAWIETPPAIKALDANDAGVYTAACKRRRLAPANAANENAPAIKCEDINAEEYAKDTAKGMGGYYA

SEQ ID NO: 17866 - protein, 80 aa, Synthetic construct
KEKVKEEIGAAWIETPPAIKALDANDAGVYTAACKRRRLAPANAANENAPAIKCEDINAEEYAKDTAKGMGGYYAFYTTP

SEQ ID NO: 17867 - protein, 80 aa, Synthetic construct; identical to SEQ ID NO: 1029

SEQ ID NO: 17868 - protein, 80 aa, Synthetic construct
FVDEHEPAMVAAACIAVIKHAPQAALADVAEVAAVEHTQEAAVQGACRAPENKFQIIKQEPMELEAYTREPRDDRGAYTA

SEQ ID NO: 17869 - protein, 80 aa, Synthetic construct
FAGYAHAPPLLQVNRAAANAPRTAETDDGVVGKAADGEDEQQVPKGPIHAPVELKHVHATVVKVPEVNAAALPHKLRIKA

SEQ ID NO: 17870 - protein, 80 aa, Synthetic construct
LHAGCFAALHAAAAAAAAAAELKAEAGFEAADCKRKEEAGAAGGGAGMAAGFAYALRAYLGYQAVASGSSGSLSTSSSSS

SEQ ID NO: 17871 - protein, 80 aa, Synthetic construct
QIIANAVVFEYKARALPTLPAAQHDWLALDDNQFRMAILERLEQMERRMAEMTGAQQHKQAAGGGAAGGGAGAGNGGAQA

SEQ ID NO: 17872 - protein, 80 aa, Synthetic construct
YKARALPTLPSSQHDWLSLDDNQFRMSILERLEQMERRMAEMTASQQHKQASAAASSAAASASANAASQAQCASATAALA

SEQ ID NO: 17873 - protein, 80 aa, Synthetic construct
LSEACHAFAAQAGVAGDNRASYHRQMSEAIVAAAAAAAQGFKQEYHDALYEHGVAGMAGAAAHGFQSAMGIKQEARDYCV

SEQ ID NO: 17874 - protein, 80 aa, Synthetic construct
QAGVAGDNRASYHRQMSEAIVAAAAAAAQGFKQEYHDALYEHGVAGMAGAAAHGFQSAMGIKQEARDYCVDSEVANCQSS

SEQ ID NO: 17875 - protein, 80 aa, Synthetic construct
SYHRQMSEAIVAAAAAAAQGFKQEYHDALYEHGVAGMAGAAAHGFQSAMGIKQEARDYCVDSEVANCQSSYMRGGYFSSS

SEQ ID NO: 17876 - protein, 80 aa, Synthetic construct
AATLPEMAAGEEAAAADADPDAAAPPATGQNPAVAVQTAQDWKPTRALIEHVFVTDVTANLITVTVKEAPTAVGFFNLRH

SEQ ID NO: 17877 - protein, 80 aa, Synthetic construct
ATLPEMAAGEEAAAADADPDAAAPPATGQNPAVAVQTAQDWKPTRALIEHVFVTDVTANLITVTVKEAPTAVGFFNLRHY

SEQ ID NO: 17878 - protein, 80 aa, Synthetic construct
QDPRPHGPQLPTGIAGNWGRLLAQVGTMALWASQRAKAVLRRARAVAWRARAVAKRARALAAVARAILAMKWKVRAAKAA

SEQ ID NO: 17879 - protein, 80 aa, Synthetic construct
QQSFKQEYHDPLYEQAAQPAVDQAAVNAHRYPAAAVVIKQEQTDFAYDSDVTACASMYLHTEAFSAPSPADAAMAYAYEK

SEQ ID NO: 17880 - protein, 80 aa, Synthetic construct
TLAIVHSYIAYAAAAEEEAQALLAWSSDLAQEREQLEQAVAQLSNSISACMEMANTILARQAEMHSSLEAVAQLIRLIHG

SEQ ID NO: 17881 - protein, 80 aa, Synthetic construct; identical to SEQ ID NO: 1058

SEQ ID NO: 17882 - protein, 80 aa, Synthetic construct; identical to SEQ ID NO: 2241

SEQ ID NO: 17883 - protein, 80 aa, Synthetic construct; identical to SEQ ID NO: 1059

SEQ ID NO: 17884 - protein, 80 aa, Synthetic construct; identical to SEQ ID NO: 1074

SEQ ID NO: 17885 - protein, 80 aa, Synthetic construct; identical to SEQ ID NO: 2151

SEQ ID NO: 17886 - protein, 80 aa, Synthetic construct
VPFPKTEEVEAAIANGVTGQLNIVQYIKPEPDGAFAAACLGGNAKINADAAFAVPIKQEATKHACAGTAFKGNPTVNPFP

SEQ ID NO: 17887 - protein, 80 aa, Synthetic construct
LNIVQYIKPEPDGAFAAACLGGNAKINADAAFAVPIKQEATKHACAGTAFKGNPTVNPFPFMDGAYFAFMDDKDYYALAG

SEQ ID NO: 17888 - protein, 80 aa, Synthetic construct
LLFGEGFAALLAVQTIKEEEIQAGEEMAHLARAIKVEAAALEEWAAAAAAFKEEAAHAWEDAAQAATARAKKAYAGLRAA

SEQ ID NO: 17889 - protein, 80 aa, Synthetic construct
LAVQTIKEEEIQAGEEMAHLARAIKVEAAALEEWAAAAAAFKEEAAHAWEDAAQAATARAKKAYAGLRAATRCVAEMLVI

SEQ ID NO: 17890 - protein, 80 aa, Synthetic construct
TAAAAAPGEGPAAPAAAPPPANAAAAAAPRRPAALQALFGLPEAAGARDARDNPLRKKKAANLNAIIHRLEKAAAREEPI

SEQ ID NO: 17891 - protein, 80 aa, Synthetic construct
SANQIKTEPADYEFKPIAAASGINCSTPLQNGAFTGGGPLQATSSPQGMAQAAALPTAGLASPISINLSDIQNALKAAAD

SEQ ID NO: 17892 - protein, 80 aa, Synthetic construct
AIPSLAAPARAGATANVSAGAKKTAASSQAPQSTCTPAARRHNQRARLNQILLNLLAKIPGKNAIDVTYLLAAGSGRKLR

SEQ ID NO: 17893 - protein, 80 aa, Synthetic construct
AGATANVSAGAKKTAASSQAPQSTCTPAARRHNQRARLNQILLNLLAKIPGKNAIDVTYLLAAGSGRKLRRRTLFIPANS

SEQ ID NO: 17894 - protein, 80 aa, Synthetic construct
YTAKNAATQDPAQPNATKNQALPKAAPVTTAPTAATTQNPVLAKLLMADQDAPLDLTVRKAQAEPAEQDGVLDLATKKAP

SEQ ID NO: 17895 - protein, 80 aa, Synthetic construct
DAPLDLTVRKAQAEPAEQDGVLDLATKKAPCAGATALAHAPGCAATQGNGENATEAKAVDANNQAKAPLEKFMVKLCTHH

SEQ ID NO: 17896 - protein, 80 aa, Synthetic construct
EARVTNLHVKEIAAHLEAANDLLAMIRRSAEVAACAAERAAAAMEGTAAALSVLIAVLRPMIKDFRRYLASNTANPAPAS

SEQ ID NO: 17897 - protein, 80 aa, Synthetic construct
EIAAHLEAANDLLAMIRRSAEVAACAAERAAAAMEGTAAALSVLIAVLRPMIKDFRRYLASNTANPAPASDPGAVAANGA

SEQ ID NO: 17898 - protein, 80 aa, Synthetic construct
CAAIPHAAHAIINHHAAIHNEGDQPKTPENIPAKEPKDGAPVQPALLALMKDRRLTLEQVVAIEALTQLAEAPAENAAPA

SEQ ID NO: 17899 - protein, 80 aa, Synthetic construct
EGDQPKTPENIPAKEPKDGAPVQPALLALMKDRRLTLEQVVAIEALTQLAEAPAENAAPAKAEKDEEAEQRTAALLNACK

SEQ ID NO: 17900 - protein, 80 aa, Synthetic construct
IPAKEPKDGAPVQPALLALMKDRRLTLEQVVAIEALTQLAEAPAENAAPAKAEKDEEAEQRTAALLNACKAILYTVRKDL

SEQ ID NO: 17901 - protein, 80 aa, Synthetic construct
NLSASSSASFLWSDDAYGQDVDVTTNPDAALDGDDRYDFAVVRCICAVQAANDFMIQCAACQCWQHGVCMGLLAANVPAK

SEQ ID NO: 17902 - protein, 80 aa, Synthetic construct; identical to SEQ ID NO: 3221

SEQ ID NO: 17903 - protein, 80 aa, Synthetic construct
WRKRNIEGKQYLANMGTRGAYLLPGMAAFVTANKPDLQVTIKEEANPVPYNAAWPPFQDLPLAAAMTPAAAAARPDRETR

SEQ ID NO: 17904 - protein, 80 aa, Synthetic construct
GAYLLPGMAAFVTANKPDLQVTIKEEANPVPYNAAWPPFQDLPLAAAMTPAAAAARPDRETRAAVIKKTADITQARVKAC

SEQ ID NO: 17905 - protein, 80 aa, Synthetic construct
NYRSKTSQAGALKKMHAAAHHQQMSILQLQLIQMNAVHVAKIQQIARACAMAAAAHRIKMAVLNKKKMYWARKLQTFTKA

SEQ ID NO: 17906 - protein, 80 aa, Synthetic construct
RLQAAGTASAAAQRRARKQLNACRGTERVDAGFEGVTLKFQIKADSSLQIIATYSLACSSRSQESAADAVGGAAAHAGGT

SEQ ID NO: 17907 - protein, 80 aa, Synthetic construct
EAGLAAAATRALLAAEVAQIAAQEGLALAQAALAIAKEKNIALQTAIAIEALTQLAAALAQAAHATAQAACALAEALAAA

SEQ ID NO: 17908 - protein, 80 aa, Synthetic construct
AAQEGLALAQAALAIAKEKNIALQTAIAIEALTQLAAALAQAAHATAQAACALAEALAAAAAFRAAQAYLRAAAWAVVAA

SEQ ID NO: 17909 - protein, 80 aa, Synthetic construct; identical to SEQ ID NO: 1758

SEQ ID NO: 17910 - protein, 80 aa, Synthetic construct; identical to SEQ ID NO: 1132

SEQ ID NO: 17911 - protein, 80 aa, Synthetic construct
GVLGAAGLGAAQTAAYRAGAADAAAAARHLATQFNLLASSSAAAAAAEQSSAQLYNFSGAAAGAAAAERALARQDTVIKH

SEQ ID NO: 17912 - protein, 80 aa, Synthetic construct
HGLALKIKKEAHAACAEIAAACAQEQAFKFAYGEKCLYNVAAYDQKAQVGMRAANAATAAATAVAALHHAAANATHTAKA

SEQ ID NO: 17913 - protein, 80 aa, Synthetic construct
NKVAAARCRNKKKARTAFLQRASARLALMNAALKTQIAALKQARQQLILMLNRHRPTCIVRTDSVKTPASAGNPLLAQLA

SEQ ID NO: 17914 - protein, 80 aa, Synthetic construct
VAAARCRNKKKARTAFLQRASARLALMNAALKTQIAALKQARQQLILMLNRHRPTCIVRTDSVKTPASAGNPLLAQLAKK

SEQ ID NO: 17915 - protein, 80 aa, Synthetic construct
NRPFLGPEAQLGGPGMVTDAERAIVAPAEACGPINVKTEPMEDAGIALKAEAVAVKKEAEDPNYYQYNMQGAHPAATANE

SEQ ID NO: 17916 - protein, 80 aa, Synthetic construct
THAFLHPAYYLYMCDKVVAPNVALTAAVAQAKELTKTEAAKAIARQAEKAHAAGKLQKTVAYPDVALEEQEKMDLKTARE

SEQ ID NO: 17917 - protein, 80 aa, Synthetic construct
VALRGNENEREMAPASVSPRESYRENKRKAKLPAAAAASFAALVSARKEAKREERRALKAALEDMAKALRALAEKFYAIY

SEQ ID NO: 17918 - protein, 80 aa, Synthetic construct
RLEALYERVGAAALRALVIKQEAREEDEAKQLALAGLFAYQAAAAAAASHAHAHAAAAHLAAAHLQFQIAHCGQTTMHLQ

SEQ ID NO: 17919 - protein, 80 aa, Synthetic construct
LHLGAVTGWQQQHLHNMPPAALAQLGACTATHLAQAANLALPATQALNIKAEPVAPPRDRTTTPARYPQHTRHEAGRAPV

SEQ ID NO: 17920 - protein, 80 aa, Synthetic construct
SQLALVADIAAAGKNKVAAQNCAKAKLETIVQLEAELEALTNEAEALLAAAGEADATLEVMAQQLTELYADIFQHLADES

SEQ ID NO: 17921 - protein, 80 aa, Synthetic construct; identical to SEQ ID NO: 1771

SEQ ID NO: 17922 - protein, 80 aa, Synthetic construct; identical to SEQ ID NO: 2840

SEQ ID NO: 17923 - protein, 80 aa, Synthetic construct
DETARDAEAAAVAARGDARPRLVAPADLARFEFDECEAAVMLVALGAARAGTPAFAPVATQAPFAPAPAPAPAPLFGFRP

SEQ ID NO: 17924 - protein, 80 aa, Synthetic construct
RLVAPADLARFEFDECEAAVMLVALGAARAGTPAFAPVATQAPFAPAPAPAPAPLFGFRPANFAPINAAPVIQRTAVRAR

SEQ ID NO: 17925 - protein, 80 aa, Synthetic construct
FEFDECEAAVMLVALGAARAGTPAFAPVATQAPFAPAPAPAPAPLFGFRPANFAPINAAPVIQRTAVRARHLAAATPKAG

SEQ ID NO: 17926 - protein, 80 aa, Synthetic construct; identical to SEQ ID NO: 2094

SEQ ID NO: 17927 - protein, 80 aa, Synthetic construct; identical to SEQ ID NO: 1179

SEQ ID NO: 17928 - protein, 80 aa, Synthetic construct; identical to SEQ ID NO: 1180

SEQ ID NO: 17929 - protein, 80 aa, Synthetic construct
KVLQAAANAATTTAYAPAVPVAFPGLIPATEVKREGIQTVAAQDGGAVVTFTTPVQINQYGIVQIPNAGANAQFLNGAIG

SEQ ID NO: 17930 - protein, 80 aa, Synthetic construct
CKTCKAKSAPTDAAKAATLAEAAALKKINEAFEALKAATVANPNQALPKVEILASAISYIEALQDLLHALDQQEKMQELG

SEQ ID NO: 17931 - protein, 80 aa, Synthetic construct; identical to SEQ ID NO: 1195

SEQ ID NO: 17932 - protein, 80 aa, Synthetic construct; identical to SEQ ID NO: 1947

SEQ ID NO: 17933 - protein, 80 aa, Synthetic construct; identical to SEQ ID NO: 1197

SEQ ID NO: 17934 - protein, 80 aa, Synthetic construct; identical to SEQ ID NO: 1805

SEQ ID NO: 17935 - protein, 80 aa, Synthetic construct; identical to SEQ ID NO: 1198

SEQ ID NO: 17936 - protein, 80 aa, Synthetic construct; identical to SEQ ID NO: 1882

SEQ ID NO: 17937 - protein, 80 aa, Synthetic construct; identical to SEQ ID NO: 1199

SEQ ID NO: 17938 - protein, 80 aa, Synthetic construct; identical to SEQ ID NO: 1200

SEQ ID NO: 17939 - protein, 80 aa, Synthetic construct; identical to SEQ ID NO: 1765

SEQ ID NO: 17940 - protein, 80 aa, Synthetic construct; identical to SEQ ID NO: 1875

SEQ ID NO: 17941 - protein, 80 aa, Synthetic construct
FYIEDILGRGAAAATAAATLASANSSFTSLVSAYRTAVYEATAIHAAFSHHSAAALAAAYGAGGFGGALYAFARTVNDYT

SEQ ID NO: 17942 - protein, 80 aa, Synthetic construct
NVNAAFAELRKLIPTHPPDKKLSKNEILRLAMKYINFLAKLLNDQEEEATQRAKTAKDPVVAAAAAAAAAAAAAPPDDLL

SEQ ID NO: 17943 - protein, 80 aa, Synthetic construct
AQAAAASAAAAACLAALAHHAHLAAHAAAAAAQHLAAAAHQAQAAAQLHRTTNFFIDNILRADFGCKKEQAAAQLLVAAA

SEQ ID NO: 17944 - protein, 80 aa, Synthetic construct
AACLAALAHHAHLAAHAAAAAAQHLAAAAHQAQAAAQLHRTTNFFIDNILRADFGCKKEQAAAQLLVAAAARGGAGGGGR

SEQ ID NO: 17945 - protein, 80 aa, Synthetic construct
AHLAAHAAAAAAQHLAAAAHQAQAAAQLHRTTNFFIDNILRADFGCKKEQAAAQLLVAAAARGGAGGGGRVERDRGQTAA

SEQ ID NO: 17946 - protein, 80 aa, Synthetic construct
EENDPKPAEAAAAVEAQRQPESSPAAASAAAAASSPAEADTARRRALMLPAVLQAPANHQHPHRITNFFIDNILRPEFAR

SEQ ID NO: 17947 - protein, 80 aa, Synthetic construct
AAAVEAQRQPESSPAAASAAAAASSPAEADTARRRALMLPAVLQAPANHQHPHRITNFFIDNILRPEFARRKDAATCCAA

SEQ ID NO: 17948 - protein, 80 aa, Synthetic construct
ESSPAAASAAAAASSPAEADTARRRALMLPAVLQAPANHQHPHRITNFFIDNILRPEFARRKDAATCCAAAAAARAAAAA

SEQ ID NO: 17949 - protein, 80 aa, Synthetic construct
AAASSPAEADTARRRALMLPAVLQAPANHQHPHRITNFFIDNILRPEFARRKDAATCCAAAAAARAAAAAAEAAASAAEA

SEQ ID NO: 17950 - protein, 80 aa, Synthetic construct
TARRRALMLPAVLQAPANHQHPHRITNFFIDNILRPEFARRKDAATCCAAAAAARAAAAAAEAAASAAEAAAAAAASEQL

SEQ ID NO: 17951 - protein, 80 aa, Synthetic construct
AVLQAPANHQHPHRITNFFIDNILRPEFARRKDAATCCAAAAAARAAAAAAEAAASAAEAAAAAAASEQLLASASREPRQ

SEQ ID NO: 17952 - protein, 80 aa, Synthetic construct
HPHRITNFFIDNILRPEFARRKDAATCCAAAAAARAAAAAAEAAASAAEAAAAAAASEQLLASASREPRQNPPCAPAAAA

SEQ ID NO: 17953 - protein, 80 aa, Synthetic construct
EPGAKDLQHLSAEEAAAAAAATAKYATAHATAEAIAVEAFNLAFAELAKLLPTLPPDKKLSKIEILALAICYISYLNHVL

SEQ ID NO: 17954 - protein, 80 aa, Synthetic construct; identical to SEQ ID NO: 2153

SEQ ID NO: 17955 - protein, 80 aa, Synthetic construct; identical to SEQ ID NO: 2086

SEQ ID NO: 17956 - protein, 80 aa, Synthetic construct; identical to SEQ ID NO: 1239

SEQ ID NO: 17957 - protein, 80 aa, Synthetic construct
LACSAAAAPATAETGGGAAAVAAANEAEANAVKLVNLGFQALAQHVPHGGASKKLSKVETLASAVEYIAALQALLAEHDA

SEQ ID NO: 17958 - protein, 80 aa, Synthetic construct; identical to SEQ ID NO: 1241

SEQ ID NO: 17959 - protein, 80 aa, Synthetic construct
VAAANEAEANAVKLVNLGFQALAQHVPHGGASKKLSKVETLASAVEYIAALQALLAEHDAVANALAGGLAPQAVAPSAPA

SEQ ID NO: 17960 - protein, 80 aa, Synthetic construct
NRGFARLKALVPFLPQARKPAKVDILKGATEYIQVLADLLEGAKDAKKQDPDEQAYANNAAEAHTAAARQLARNITQHIA

SEQ ID NO: 17961 - protein, 80 aa, Synthetic construct; identical to SEQ ID NO: 1246

SEQ ID NO: 17962 - protein, 80 aa, Synthetic construct
NPQQQRMAAIGTDKELADLLDFAAMFAPPVNAGKTRPTTLGAAQFAGAGIDERGGTTAWGTAGQPAPAYDAARGFTDAPH

SEQ ID NO: 17963 - protein, 80 aa, Synthetic construct
AAAEAAATTPAAAATGPAGGQAQSASEAEKLAMATLAAALHELAAFLPPSLAPAGQSLTKIETLALAIAYIGHLSAVLGL

SEQ ID NO: 17964 - protein, 80 aa, Synthetic construct
ASGCAAGWQYLPVPLDSAFEPAFLAKANEAEAQAVACVNEGYAALADHLPAELADKALSKVETLAAAIDYIKHLQELLEA

SEQ ID NO: 17965 - protein, 80 aa, Synthetic construct
PAFLAKANEAEAQAVACVNEGYAALADHLPAELADKALSKVETLAAAIDYIKHLQELLEAQAWGLEGAAGAVPQAAAECN

SEQ ID NO: 17966 - protein, 80 aa, Synthetic construct
SPRDKHPANAAAAAAAAAAAAAAAPSASNSLLYTADLEALQRLQAANVVLPLVHRVTATLAATSTAAQRVYTTATIRYAP

SEQ ID NO: 17967 - protein, 80 aa, Synthetic construct
HHQQRMAALGTDKELADLLDFAAMFAPPVAAGKNGPTALAAGHFTGANVEDRAAAGAWGNGGHPAPARNYGDGTPYDHMT

SEQ ID NO: 17968 - protein, 80 aa, Synthetic construct
LSALSAAYHHHHAAAAAAAAAAAAAAAAAAARAGALAAAASGTRVVANAHHSGSAAAASSKDLKFGIDRILSAEFDAKVK

SEQ ID NO: 17969 - protein, 80 aa, Synthetic construct
HHAAAAAAAAAAAAAAAAAAARAGALAAAASGTRVVANAHHSGSAAAASSKDLKFGIDRILSAEFDAKVKEGNTLRDLTS

SEQ ID NO: 17970 - protein, 80 aa, Synthetic construct
QAQQQQAAAAARAGALQAAASGTRVVANAHHSGSAAAASSKDLKFGIDRILSAEFDAKVKEGNTLRDLTSLLTGGRAAGV

SEQ ID NO: 17971 - protein, 80 aa, Synthetic construct
QQAAAAAAAATQSLQALAQQQQALAAQQAAAAAAQQLGSAASAARTSTSSFLIKDILGDSKALAACAAYSTSVSSAHHTA

SEQ ID NO: 17972 - protein, 80 aa, Synthetic construct
GTECAGTCAGAGALESAAAAALAANAAEAAAMQGLNTAFDALAAVVPQWGQDKKLSKYETLQMALSYIMALTAILAEAEA

SEQ ID NO: 17973 - protein, 80 aa, Synthetic construct
MALHSGQGEKAAAAFARGELESAKALVTAGSTLTLLTRAEAGSATGGLFNTAAATAAEQDKEDFSSFQLLVEVALQRAAE

SEQ ID NO: 17974 - protein, 80 aa, Synthetic construct
AAAAFARGELESAKALVTAGSTLTLLTRAEAGSATGGLFNTAAATAAEQDKEDFSSFQLLVEVALQRAAEMELQKQQDAS

SEQ ID NO: 17975 - protein, 80 aa, Synthetic construct
KAENAVIKAGVRPEARAAEDYVAPPKYKAALLNRYLNDALRHVMATNTTMMGKTRQRNHAGAFAANEFEEELVAPAAAET

SEQ ID NO: 17976 - protein, 80 aa, Synthetic construct
VRPEARAAEDYVAPPKYKAALLNRYLNDALRHVMATNTTMMGKTRQRNHAGAFAANEFEEELVAPAAAETEGNFVYRTDT

SEQ ID NO: 17977 - protein, 80 aa, Synthetic construct
YVAPPKYKAALLNRYLNDALRHVMATNTTMMGKTRQRNHAGAFAANEFEEELVAPAAAETEGNFVYRTDTLENGANKGEA

SEQ ID NO: 17978 - protein, 80 aa, Synthetic construct
AAAVASEAELQQLAQAANVAEAAAMQSINDAFEGLASHIPTLPYEKALSKVDTLALAIGYINFLSELVQADLPLAGGGAG

SEQ ID NO: 17979 - protein, 80 aa, Synthetic construct
QQLRQAANVRERRRMQSINDAFEALRSHIPTLPYEKRLSKVDTLRLAIAYINFLSELVQADLPLRAAAAAACAAPAAAAR

SEQ ID NO: 17980 - protein, 80 aa, Synthetic construct
ERRRMQSINDAFEALRSHIPTLPYEKRLSKVDTLRLAIAYINFLSELVQADLPLRAAAAAACAAPAAAARLAADSPASQA

SEQ ID NO: 17981 - protein, 80 aa, Synthetic construct
STMDSAGLGQEAAALFRACTAAVWAAAAAAGGARSAAALLLLAESLAGSSASVAAAQAASSRCAESAGLGLRVWRAWGSA

SEQ ID NO: 17982 - protein, 80 aa, Synthetic construct; identical to SEQ ID NO: 2211

SEQ ID NO: 17983 - protein, 80 aa, Synthetic construct
AGIKNPGGAAAAARVAAWDAQAYDIEQICLGAANPPWAATLFEIDEFVKIYDLPGEDDTAALNQYLFPVCLEYDQLQAAV

SEQ ID NO: 17984 - protein, 80 aa, Synthetic construct
ASARARGSAAAAASGSRVRAARSGRSAAARSATGANTARAAGRFESAFSVEAILARADACAAAASQASGSACVHAAFWTA

SEQ ID NO: 17985 - protein, 80 aa, Synthetic construct
AAASGSRVRAARSGRSAAARSATGANTARAAGRFESAFSVEAILARADACAAAASQASGSACVHAAFWTAASLCATGGLA

SEQ ID NO: 17986 - protein, 80 aa, Synthetic construct; identical to SEQ ID NO: 1305

SEQ ID NO: 17987 - protein, 80 aa, Synthetic construct; identical to SEQ ID NO: 1306

SEQ ID NO: 17988 - protein, 80 aa, Synthetic construct
AASAPQHDAASGQPAGQTVNPATAHHQFNLNGLAGTGAASPKSEATAGASARQAGAAREQPLPAQDPVSVKEEPEAEVRM

SEQ ID NO: 17989 - protein, 80 aa, Synthetic construct
EPLASNIQVLLQAAEFLEAAEAEAEHGYASLCPHASPGPIHAAKKAPPQAPGAQDSGASVHNELEKAAAAQLKACLEALK

SEQ ID NO: 17990 - protein, 80 aa, Synthetic construct
NNNFCRALVDRRALGAASCMQLGVMAAARQAALAAAEALGNVAFLLYAGAAEAAYYDAYAGVFAYVAFAGAFGVYEYAFE

SEQ ID NO: 17991 - protein, 80 aa, Synthetic construct
LGAPGPGARRGGAPPTAFAPAAETTFLKFGVNAILAAGPRTETAPALLQAVPPKTFAFPYFEGAFQPFIRAAYFPAAAAV

SEQ ID NO: 17992 - protein, 80 aa, Synthetic construct; identical to SEQ ID NO: 2015

SEQ ID NO: 17993 - protein, 80 aa, Synthetic construct; identical to SEQ ID NO: 1330

SEQ ID NO: 17994 - protein, 80 aa, Synthetic construct; identical to SEQ ID NO: 1331

SEQ ID NO: 17995 - protein, 80 aa, Synthetic construct
EMENSSSSMQVAVIESYEKAISQKKIKIEAGIEAQRTDYYAEEMSAALMNSVSAAQALLQENHASVIVQAGKRALAVESA

SEQ ID NO: 17996 - protein, 80 aa, Synthetic construct
VAVIESYEKAISQKKIKIEAGIEAQRTDYYAEEMSAALMNSVSAAQALLQENHASVIVQAGKRALAVESADTQRKRRIHR

SEQ ID NO: 17997 - protein, 80 aa, Synthetic construct
NMAAQPINIGALQLVQVPVPVTVPVATTSVAALQGAYANAVSKAGLAASAPMICHTLPLPAGFQVVKVGANGAVATLAQG

SEQ ID NO: 17998 - protein, 80 aa, Synthetic construct
ALQLVQVPVPVTVPVATTSVAALQGAYANAVSKAGLAASAPMICHTLPLPAGFQVVKVGANGAVATLAQGALPPQADPSW

SEQ ID NO: 17999 - protein, 80 aa, Synthetic construct
VTVPVATTSVAALQGAYANAVSKAGLAASAPMICHTLPLPAGFQVVKVGANGAVATLAQGALPPQADPSWQKDPDYQPPA

SEQ ID NO: 18000 - protein, 80 aa, Synthetic construct
LATIYSAYLLAGSSAECDAALLSVYGTQDARHFLAHAGAIAKHLAASAATYDHYRFFQQYASNLAIAYGFYRAESAFSSY

SEQ ID NO: 18001 - protein, 80 aa, Synthetic construct
VKAILAMAKGASAAASGEEQALDLSIGSRARASQNGGGREARKNHVYGERKLGAGEGLAQVCAARMAQQAALHYAKASAF

SEQ ID NO: 18002 - protein, 80 aa, Synthetic construct
AIKALNASNLKIAADMMKLQTQITSMASNLKTIAAANKLIAQNNASLLKALAGLSQALISSLADIQLPQMGPISAQNFAA

SEQ ID NO: 18003 - protein, 80 aa, Synthetic construct
AAACARAGASAATSKTLAFSIERIMAKTSEARAAFEARAGALEADGSQGKKLLNLCSALACMIALQALGYEVASKTLLSY

SEQ ID NO: 18004 - protein, 80 aa, Synthetic construct
GGAQGAGGGATADGAIAVLLQIQAVAVKQESGTGAASAGQAAENVKVAQLLVNIQGQTFALVAQVVASSNLNLASKFVRI

SEQ ID NO: 18005 - protein, 80 aa, Synthetic construct
RDAEVLFVGMIANAKPVVANILNRVTPGANARRKKGHFRQYPAHVAQPANHVTAMAKAIMPVALAEGRATDAPVTMKAAA

SEQ ID NO: 18006 - protein, 80 aa, Synthetic construct
AAGEVAKAAPDAGLMGNAMLVKKEEEEEEAHRRIKKLKTEKVDPLFTVPAPPPPIAAALTPQILPAYFAPAAANIAAPVE

SEQ ID NO: 18007 - protein, 80 aa, Synthetic construct; identical to SEQ ID NO: 2361

SEQ ID NO: 18008 - protein, 80 aa, Synthetic construct
QGAAEAALSATLNTAAAVAMAASAAAGAAAAAEAGAAASVITFAHAAASVIVHGGSSSGGGGSGTASTGGSQAASVITYT

SEQ ID NO: 18009 - protein, 80 aa, Synthetic construct
TLNTAAAVAMAASAAAGAAAAAEAGAAASVITFAHAAASVIVHGGSSSGGGGSGTASTGGSQAASVITYTAAARAAKKRE

SEQ ID NO: 18010 - protein, 80 aa, Synthetic construct
AAEAGAAASVITFAHAAASVIVHGGSSSGGGGSGTASTGGSQAASVITYTAAARAAKKREYAAAAAEAAATATSAATAVS

SEQ ID NO: 18011 - protein, 80 aa, Synthetic construct
ITFAHAAASVIVHGGSSSGGGGSGTASTGGSQAASVITYTAAARAAKKREYAAAAAEAAATATSAATAVSAATAAGAAMA

SEQ ID NO: 18012 - protein, 80 aa, Synthetic construct
GGSGAASAGGSQAASVIAYAAAARAAKKREYAAAAAEAAAAAASAAAAVSAAAAAGAAMAAAAEEAKGRNARAGRALAYA

SEQ ID NO: 18013 - protein, 80 aa, Synthetic construct
ERTNNTNDGPVIAAVFALAAGAENVPEGIKWNAATAKIKAIELLRRKIAQLIEACGKPAALAANAAHRRAVGQAAKGTAK

SEQ ID NO: 18014 - protein, 80 aa, Synthetic construct
AAPEEPTLAAAARHPAVAEVKTEMMQVDEVPSQDSPAAAESSISAAMADKVEERAKEAPATPTRSSVITSARELHYAREE

SEQ ID NO: 18015 - protein, 80 aa, Synthetic construct
FVAIPKKKYTRRLRAQQKTAAGDVGDYRCPQDQSPDRVGTAMAQVSKNAGCQAGAALAALSKKAGPAAAAAAAAADAAGA

SEQ ID NO: 18016 - protein, 80 aa, Synthetic construct
WHIQADHAYQALPAFQIPVAPHIYTAVAWAAAPAAACALAPVRARALAFAEPQQPAPAMKAHLIVTAPPRAQAGARKARG

SEQ ID NO: 18017 - protein, 80 aa, Synthetic construct
FAMAGHENLAHGHTERFDPCRPQLQPGAPALVAEEAPAAIDADKMADLGGRKPPGNVIAVIQHTNALARPNAFERAEAAE

SEQ ID NO: 18018 - protein, 80 aa, Synthetic construct
HGHTERFDPCRPQLQPGAPALVAEEAPAAIDADKMADLGGRKPPGNVIAVIQHTNALARPNAFERAEAAELVACTQDKAP

SEQ ID NO: 18019 - protein, 80 aa, Synthetic construct
RPQLQPGAPALVAEEAPAAIDADKMADLGGRKPPGNVIAVIQHTNALARPNAFERAEAAELVACTQDKAPAPAETCDAEI

SEQ ID NO: 18020 - protein, 80 aa, Synthetic construct
LVAEEAPAAIDADKMADLGGRKPPGNVIAVIQHTNALARPNAFERAEAAELVACTQDKAPAPAETCDAEIAEAPVAPEWA

SEQ ID NO: 18021 - protein, 80 aa, Synthetic construct
DADKMADLGGRKPPGNVIAVIQHTNALARPNAFERAEAAELVACTQDKAPAPAETCDAEIAEAPVAPEWAPPGDGAEAGG

SEQ ID NO: 18022 - protein, 80 aa, Synthetic construct
RKPPGNVIAVIQHTNALARPNAFERAEAAELVACTQDKAPAPAETCDAEIAEAPVAPEWAPPGDGAEAGGKPAPAQQVQQ

SEQ ID NO: 18023 - protein, 80 aa, Synthetic construct
HPNTLLTNQNRTANAKTAAIEECAALPVFPTNDLLLKTVENGLCAAAFPNAGGPAQNFTANAARVAVIAGPQNTRAAHLN

SEQ ID NO: 18024 - protein, 80 aa, Synthetic construct
RTANAKTAAIEECAALPVFPTNDLLLKTVENGLCAAAFPNAGGPAQNFTANAARVAVIAGPQNTRAAHLNKKGNAAAKRR

SEQ ID NO: 18025 - protein, 80 aa, Synthetic construct
ATTDENEDDIQFVAEGPLRPVLEYIDLVAADDEEPATAYTDRMPEAKVPAAENHRPEMCAACNVPLPIGDAAAFAGACAA

SEQ ID NO: 18026 - protein, 80 aa, Synthetic construct
ATKAQFGAPGPADAARNLPLEATKAPAEPAKAVPALEGPTGFQPRTPKPGAGAEAGKERRTTAKEIAVIQHTAAFEKADA

SEQ ID NO: 18027 - protein, 80 aa, Synthetic construct
GFQPRTPKPGAGAEAGKERRTTAKEIAVIQHTAAFEKADALEQPAGLEGEDKPLAQFPAPPPAPHGRAAHALQPKLVRQP

SEQ ID NO: 18028 - protein, 80 aa, Synthetic construct
AGAEAGKERRTTAKEIAVIQHTAAFEKADALEQPAGLEGEDKPLAQFPAPPPAPHGRAAHALQPKLVRQPNIQVPEILVT

SEQ ID NO: 18029 - protein, 80 aa, Synthetic construct
TTSKEISVIQHTSSFEKSDSLEQASGLEGEDKALAQFASAAAAAHGRSAHSLQAKLVRQANIQVAEILVTEEADRADTEA

SEQ ID NO: 18030 - protein, 80 aa, Synthetic construct
FFSTQAMSSAASSAYSMAAAAASAFQAAAAAAQATVAHAGQAHAAQAMAHAANIAFRQAASFAAMAYATSSAASSGFFAA

SEQ ID NO: 18031 - protein, 80 aa, Synthetic construct
DSQPGEQNDQGETGSLPGQQEAEASASPDPAAASFICAACDASFHFYCRLAVHMARCRVAASAQVQCAECSETADSAAEL

SEQ ID NO: 18032 - protein, 80 aa, Synthetic construct
EVTKEHGDPGDTWKDYCTLVTIAKALLDLNKYRPIQTPAVCADALEAPDEDMGADADVTTEAGAAPAHAPEERQDPGAAP

SEQ ID NO: 18033 - protein, 80 aa, Synthetic construct
DTWKDYCTLVTIAKALLDLNKYRPIQTPAVCADALEAPDEDMGADADVTTEAGAAPAHAPEERQDPGAAPAPLALLHPGV

SEQ ID NO: 18034 - protein, 80 aa, Synthetic construct
KTELLEAEQGAPNVHNYPDMEAVPLLLNNVKGEPPEDALAVDHFQTQTEPVDLAINKARTAPTAVAAAPVAMTAAAAAPA

SEQ ID NO: 18035 - protein, 80 aa, Synthetic construct
APNVHNYPDMEAVPLLLNNVKGEPPEDALAVDHFQTQTEPVDLAINKARTAPTAVAAAPVAMTAAAAAPAATATAAAAAA

SEQ ID NO: 18036 - protein, 80 aa, Synthetic construct
EAVPLLLNNVKGEPPEDALAVDHFQTQTEPVDLAINKARTAPTAVAAAPVAMTAAAAAPAATATAAAAAARLAAAPTVIT

SEQ ID NO: 18037 - protein, 80 aa, Synthetic construct
KVYIFKADPGADDLGGTVDIVASAPANDHGVALLDQNSSIRVPRAKMVYMTVNDSQPADADLNVAAIADAVYMAVIVGAA

SEQ ID NO: 18038 - protein, 80 aa, Synthetic construct; identical to SEQ ID NO: 1451

SEQ ID NO: 18039 - protein, 80 aa, Synthetic construct; identical to SEQ ID NO: 2238

SEQ ID NO: 18040 - protein, 80 aa, Synthetic construct
TVNDSQPEDEDLNVAEIADEVYMEVIVGEEDAAAAAAAAAVHEQQMDDNEIKTFMPIAWAAAYGNNSDGIENRNGTASAL

SEQ ID NO: 18041 - protein, 80 aa, Synthetic construct
MEQQIAAAAQDKIELQRHGTGIAVIQHTNALARPNAFDKPEPFERAAPVAFQELNRTGKAGALKVIGIAQEEAHPARDGA

SEQ ID NO: 18042 - protein, 80 aa, Synthetic construct
DKIELQRHGTGIAVIQHTNALARPNAFDKPEPFERAAPVAFQELNRTGKAGALKVIGIAQEEAHPARDGAHPHQLALADA

SEQ ID NO: 18043 - protein, 80 aa, Synthetic construct
RASNGIANDAAIKQLDAAIKALNASNSQMAADMIKLRTQITTMASNLKTIAAANKVIAQQNASLLHALANLSQSLIHSLA

SEQ ID NO: 18044 - protein, 80 aa, Synthetic construct
NSATESCSSKNACILQASGSAAAKSATDAKACNWKKYKFIVLNSLNQNAKAEGAEQAELGRLSARAYTAAAACQAAMEAE

SEQ ID NO: 18045 - protein, 80 aa, Synthetic construct
MMLLAVNGSNPAGADPARAPVANADYRAKSSDDDAMDSSLVSQQPPDNQAKARLNTSIPQKRKMRNLLVTIANDTPLAAL

SEQ ID NO: 18046 - protein, 80 aa, Synthetic construct
PAGADPARAPVANADYRAKSSDDDAMDSSLVSQQPPDNQAKARLNTSIPQKRKMRNLLVTIANDTPLAALSKYVDISIIA

SEQ ID NO: 18047 - protein, 80 aa, Synthetic construct; identical to SEQ ID NO: 1489

SEQ ID NO: 18048 - protein, 80 aa, Synthetic construct; identical to SEQ ID NO: 1906

SEQ ID NO: 18049 - protein, 80 aa, Synthetic construct
VRNRDAAEIEYRSNMTSATLLDANAMENAALFNDIKIEAAEELLASDFSLAQVEAVDLSFHKAKAALQAASMLQAAIRAA

SEQ ID NO: 18050 - protein, 80 aa, Synthetic construct
YRSNMTSATLLDANAMENAALFNDIKIEAAEELLASDFSLAQVEAVDLSFHKAKAALQAASMLQAAIRAAKAQSSAQTLV

SEQ ID NO: 18051 - protein, 80 aa, Synthetic construct
LFNDIKIEAAEELLASDFSLAQVEAVDLSFHKAKAALQAASMLQAAIRAAKAQSSAQTLVVSTSTSDMSTSANIATVLTA

SEQ ID NO: 18052 - protein, 80 aa, Synthetic construct
GTKWGEEALKMDLDNNFYATEVAVAATENAVAADLRAGDVPVLALANAAENAAAVIAYAGAAPAVIVHAAQFAAVIMHAN

SEQ ID NO: 18053 - protein, 80 aa, Synthetic construct
VAADLRAGDVPVLALANAAENAAAVIAYAGAAPAVIVHAAQFAAVIMHANAIAAMTAANHRAFADPAVAQALKDDAKPEP

SEQ ID NO: 18054 - protein, 80 aa, Synthetic construct
PWSAAAAAAAAAADVVLTSAMDFSPANGVFSPLATPSLIPQAALALKQAFRAALQAVAATQGQQQQLRGMVPIVLVAKLG

SEQ ID NO: 18055 - protein, 80 aa, Synthetic construct
VRQAAARVRAVASLVARAAQTSLVKFVGNIYTLKCRFCEVEFQGALSIQEEWVRHLQRHILEMNFSKADAAAEESQAAQA

SEQ ID NO: 18056 - protein, 80 aa, Synthetic construct
EESDQALDLSLKSGARQERVHAACVLQTALCSQRQAGAQALVKDERDSLSEQEESSSSRSAHSAAKAAAVAAAKGLVVGL

SEQ ID NO: 18057 - protein, 80 aa, Synthetic construct
QVKSISGTAQAGNTEPLPPASGAKNLVIQKSKAEAQANGATIMPIITESFSLSAEAYEMKKIIVTASAAAAAAVIFCSEI

SEQ ID NO: 18058 - protein, 80 aa, Synthetic construct
AGNTEPLPPASGAKNLVIQKSKAEAQANGATIMPIITESFSLSAEAYEMKKIIVTASAAAAAAVIFCSEILPTKETLPSN

SEQ ID NO: 18059 - protein, 80 aa, Synthetic construct
TAAGGGGGLILASAKLGATALAAESTAAAAAAAAAAAAAGVGSGHLNIALILEELRVLQQRQIHQMQMTEQICRQVLLLG

SEQ ID NO: 18060 - protein, 80 aa, Synthetic construct
LAAESTAAAAAAAAAAAAAGVGSGHLNIALILEELRVLQQRQIHQMQMTEQICRQVLLLGSLGQTVGAAASASELAGTGT

SEQ ID NO: 18061 - protein, 80 aa, Synthetic construct
DVANEIVDRSAPAPAISGSIHYALANVAIDLPAINIPNEVLLAHEVDAYRALFQSAQQTARASISIATVSCVEECTLLHA

SEQ ID NO: 18062 - protein, 80 aa, Synthetic construct
IPVLNSAAGYNVKCAYKKYLYGFAAYCRSANIAFQMALPAKVVNKQCKACANVKAIKVKAANATAIKAIKMAAARNIIPR

SEQ ID NO: 18063 - protein, 80 aa, Synthetic construct
IKKPAANANLAAKAAATTRVAASLNIKVAAAAAKAKSGAATNKAAAAAAAAAAAAAAAAAAAAAAAAAANNAAAAFACYP

SEQ ID NO: 18064 - protein, 80 aa, Synthetic construct
PKATRRAGRIAATPTTETIRGIDADDVQDNAQLKAATQKAANLAEKHALYTAELITVPFDAEAPIRMKFTRIATPKKAKK

SEQ ID NO: 18065 - protein, 80 aa, Synthetic construct
KLQDVFAFRYAKMPDAPLAPGPLPVATAMPPGLAKAAAAAAAAAAAAAAAAAAAAAADAADAAAAAAAAADAAAARAHRL

SEQ ID NO: 18066 - protein, 80 aa, Synthetic construct
AKMPDAPLAPGPLPVATAMPPGLAKAAAAAAAAAAAAAAAAAAAAAADAADAAAAAAAAADAAAARAHRLAALQAQLRAV

SEQ ID NO: 18067 - protein, 80 aa, Synthetic construct
SKGLGANMSSTAAHEVGRRTSVLFSKKNAKTAGAAKRAGRAAKNRESQMTASHGGSAVGAAQLAIMSSLRQRKRGRSARA

SEQ ID NO: 18068 - protein, 80 aa, Synthetic construct
RWMSDHLSIAPVAQAATPVLTRIAAQARAAAAAARQILLAVQAAAQAQMLAAARARALAAAVAAVADRAARRALRAARAW

SEQ ID NO: 18069 - protein, 80 aa, Synthetic construct
QGGAIILCDTCPRAYHLVCLDPALAKAPAGKWSCPHCAKAGIQWAPKDDDDAAAAGGCAAAADDHMAFCRVCKDGGALLC

SEQ ID NO: 18070 - protein, 80 aa, Synthetic construct
IKTEDALNHAPAQAAFLAYAAAFATAPTAQAPYTYQMHATTAFYQAANALANAAAFAAVHQDYPAYPAFPQAQYPQYYAA

SEQ ID NO: 18071 - protein, 80 aa, Synthetic construct
TLAAALPLDATVICATINKANAVGNGQAAQTAQPNYHTKLKKAWLTRHAEEDKNTNKMENAGNAVAEIIKPCAVNLIAAT

SEQ ID NO: 18072 - protein, 80 aa, Synthetic construct
TVICATINKANAVGNGQAAQTAQPNYHTKLKKAWLTRHAEEDKNTNKMENAGNAVAEIIKPCAVNLIAATAADIQNAVDA

SEQ ID NO: 18073 - protein, 80 aa, Synthetic construct
NAVGNGQAAQTAQPNYHTKLKKAWLTRHAEEDKNTNKMENAGNAVAEIIKPCAVNLIAATAADIQNAVDAKIIVDKYVKD

SEQ ID NO: 18074 - protein, 80 aa, Synthetic construct
APAKAAAPAPAAAPVLSTHHAAAVSLHAWGGCGPHCALAGEALVALGQPPHAAWAPQQDWHWAAAYGLPYVVAVDLAALA

SEQ ID NO: 18075 - protein, 80 aa, Synthetic construct
RRAPVLSTHHAARVSLHRWGGCGPHCRLRGEALVALGQPPHARWAPQQDWHWARRYGLPYVVRVDLRRLAPAPPATPAPA

SEQ ID NO: 18076 - protein, 80 aa, Synthetic construct
AARVSLHRWGGCGAHCRLRGEALVALGQAAHARWAAQQDWHWARRYGLAYVVRVDLRRLAAAAAATAAAAGTAGAILIAK

SEQ ID NO: 18077 - protein, 80 aa, Synthetic construct
VGVVGADNDAAARGAAAFGDSAADGADVFAVAKILDMKTAGGKVLYKVRWKGYTSDDDTWAPAIHLADCKAVLLAFRKKI

SEQ ID NO: 18078 - protein, 80 aa, Synthetic construct
AARGAAAFGDSAADGADVFAVAKILDMKTAGGKVLYKVRWKGYTSDDDTWAPAIHLADCKAVLLAFRKKIAANKAKAVRK

SEQ ID NO: 18079 - protein, 80 aa, Synthetic construct
TDKHALRKRDTITDKTARTAAYKAMEAAAALKAQAATKNLADACKPLKKRNRAATAAAAALGFAKAAAPAAALTENEVAD

SEQ ID NO: 18080 - protein, 80 aa, Synthetic construct
TITDKTARTAAYKAMEAAAALKAQAATKNLADACKPLKKRNRAATAAAAALGFAKAAAPAAALTENEVADAPGDEPAEAP

SEQ ID NO: 18081 - protein, 80 aa, Synthetic construct
AYKAMEAAAALKAQAATKNLADACKPLKKRNRAATAAAAALGFAKAAAPAAALTENEVADAPGDEPAEAPYEAADETQTE

SEQ ID NO: 18082 - protein, 80 aa, Synthetic construct
IRTRAEAEKATEVVPKKKIKKEQVETVPQATVKTGLQKGAAEIADACKPLKKRARAATDVEMTAAAYRDTADADARGLAD

SEQ ID NO: 18083 - protein, 80 aa, Synthetic construct
MADTDLFMECEEEELEPWQKIADVIEDAVVEDYNAVDKTTTVAVAQQPVAAPVPIAAHAAVAGHLATATTVAAAGAQNAD

SEQ ID NO: 18084 - protein, 80 aa, Synthetic construct
PLPKACANPAQQVRARPWARHHAKAAWAEFAILRELLAQDVLCDVAKPYRLATPVYAALTPRARPRPPKDAQAAPGRPAA

SEQ ID NO: 18085 - protein, 80 aa, Synthetic construct
QQVRARPWARHHAKAAWAEFAILRELLAQDVLCDVAKPYRLATPVYAALTPRARPRPPKDAQAAPGRPAAVEEVRIAAAP

SEQ ID NO: 18086 - protein, 80 aa, Synthetic construct
MDLAGDSSAAGQARLCRQALTRALWGARSAKRARLQLAGAASALEKASRRVLAVVLEDVMAVHMVAVVASKQTSIAQHHS

SEQ ID NO: 18087 - protein, 80 aa, Synthetic construct
TRALWGARSAKRARLQLAGAASALEKASRRVLAVVLEDVMAVHMVAVVASKQTSIAQHHSYHQDAVHRQAAASAARQAGW

SEQ ID NO: 18088 - protein, 80 aa, Synthetic construct
KRARLQLAGAASALEKASRRVLAVVLEDVMAVHMVAVVASKQTSIAQHHSYHQDAVHRQAAASAARQAGWSSQARAADAL

SEQ ID NO: 18089 - protein, 80 aa, Synthetic construct
VRTATLVANCIVLIDSTPYRQWYESHYALPLGRAAGAALTPEEEEILNAARSAAIQAAYDERAANAAISSLLEEQFQQGA

SEQ ID NO: 18090 - protein, 80 aa, Synthetic construct
EAPVAQEPERIEFGGNIASSHEITEASTEETEALANDQQAAIPLAAREIALSDDFDSPVAGPLCASVTPTAEFLADEIAQ

SEQ ID NO: 18091 - protein, 80 aa, Synthetic construct
ASAGSGSAKSSAASAAAAAKASAAAILADDDAPCKKCGLPNHPALILLCDSCDSGYHTACLRPPLMIIPDGAWFCPPCQH

SEQ ID NO: 18092 - protein, 80 aa, Synthetic construct
SAASAAAAAKASAAAILADDDAPCKKCGLPNHPALILLCDSCDSGYHTACLRPPLMIIPDGAWFCPPCQHKLLCAKLAAQ

SEQ ID NO: 18093 - protein, 80 aa, Synthetic construct
ASVTVGGSLSSVLGAAVAEIKVKEEVEAMDIMRAVSAVAALATNTVSASLALLANNLSMATSDLAAGASARKKARKQQHV

SEQ ID NO: 18094 - protein, 80 aa, Synthetic construct
AARVLARAAAARGAATAWLAGAELIALTGLLQMAQGEARAAAAAVGAADHTADAAAACGAAAAAQGADLALAQTADTHCA

SEQ ID NO: 18095 - protein, 80 aa, Synthetic construct
MAITADEVNFLVYRYLQEAGFAHAAFTFGIEAHIAQANINGTLVPPAALIAILQKGLQYVEAEIAINKDGTVFDARPIEA

SEQ ID NO: 18096 - protein, 80 aa, Synthetic construct
AGLANAHTPVRPPATAATGARGACGAAGRTAEKTALAFKADQVKVKQEPGTEDEICAFAGGVKQEKTEDGRRAACMLAAP

SEQ ID NO: 18097 - protein, 80 aa, Synthetic construct
RAPRPVSQLVAQQVTQQFVPPTQSAAEAADAVEAEASEAETTSAANSHAATRPRLANVDRSSAQHLEVTVGDLTVIITDF

SEQ ID NO: 18098 - protein, 80 aa, Synthetic construct
AQQVTQQFVPPTQSAAEAADAVEAEASEAETTSAANSHAATRPRLANVDRSSAQHLEVTVGDLTVIITDFAEATASPPAS

SEQ ID NO: 18099 - protein, 80 aa, Synthetic construct
PTQSAAEAADAVEAEASEAETTSAANSHAATRPRLANVDRSSAQHLEVTVGDLTVIITDFAEATASPPASSAASADQHSQ

SEQ ID NO: 18100 - protein, 80 aa, Synthetic construct
KVEKEKAEKETTAKKNAHKKTRPRLKNVDRAAAQHLEVTVGDLTVIITDFKEKTKAPPAAAAAAADQHAQAGAAADNTER

SEQ ID NO: 18101 - protein, 80 aa, Synthetic construct
TTAKKNAHKKTRPRLKNVDRAAAQHLEVTVGDLTVIITDFKEKTKAPPAAAAAAADQHAQAGAAADNTERGMARAAAPRG

SEQ ID NO: 18102 - protein, 80 aa, Synthetic construct
TRPRLKNVDRAAAQHLEVTVGDLTVIITDFKEKTKAPPAAAAAAADQHAQAGAAADNTERGMARAAAPRGEAAALNGEAH

SEQ ID NO: 18103 - protein, 80 aa, Synthetic construct
QGEMDRACAQVAEACAEEFVEEIAALATQHAQLISQTAAAQWCYNCEEEAMYHCCWNTSYCSIACQQEHWHAEHARTCRR

SEQ ID NO: 18104 - protein, 80 aa, Synthetic construct
IDSNRREGRRQSFGGSLFAYSPGGAHGMLSSPKLPVSSLGLAASTNGSSITPAPKIKKEEDSAIPITVPGRLAAAAAGHP

SEQ ID NO: 18105 - protein, 80 aa, Synthetic construct
QSFGGSLFAYSPGGAHGMLSSPKLPVSSLGLAASTNGSSITPAPKIKKEEDSAIPITVPGRLAAAAAGHPVVAAQAAAVQ

SEQ ID NO: 18106 - protein, 80 aa, Synthetic construct
SPGGAHGMLSSPKLPVSSLGLAASTNGSSITPAPKIKKEEDSAIPITVPGRLAAAAAGHPVVAAQAAAVQAAAAQAAVAA

SEQ ID NO: 18107 - protein, 80 aa, Synthetic construct
SPKLPVSSLGLAASTNGSSITPAPKIKKEEDSAIPITVPGRLAAAAAGHPVVAAQAAAVQAAAAQAAVAAQAAALEQLRE

SEQ ID NO: 18108 - protein, 80 aa, Synthetic construct
LAASTNGSSITPAPKIKKEEDSAIPITVPGRLAAAAAGHPVVAAQAAAVQAAAAQAAVAAQAAALEQLREKLESAEPPEK

SEQ ID NO: 18109 - protein, 80 aa, Synthetic construct
TPAPKIKKEEDSAIPITVPGRLAAAAAGHPVVAAQAAAVQAAAAQAAVAAQAAALEQLREKLESAEPPEKKMALVADEQQ

SEQ ID NO: 18110 - protein, 80 aa, Synthetic construct
PPQQEWINQPVRVNVKREYDHMNGSRESPVDCSVSKCSKLVGGGESNPMNYNSYMDEKNGPPAAAAATNERRVIVPADPT

SEQ ID NO: 18111 - protein, 80 aa, Synthetic construct
VGKSSDGEDEQQVPKGPIHSPVELKHVHATVVKVPEVNSSALPHKLRIKAKAMQIKVEAFDNEFEATQKLSSAAAAASKR

SEQ ID NO: 18112 - protein, 80 aa, Synthetic construct
QQVPKGPIHSPVELKHVHATVVKVPEVNSSALPHKLRIKAKAMQIKVEAFDNEFEATQKLSSAAAAASKRHFELEKHSAP

SEQ ID NO: 18113 - protein, 80 aa, Synthetic construct
PVELKHVHATVVKVPEVNSSALPHKLRIKAKAMQIKVEAFDNEFEATQKLSSAAAAASKRHFELEKHSAPSMVHSSLTPF

SEQ ID NO: 18114 - protein, 80 aa, Synthetic construct
VVKVPEVNSSALPHKLRIKAKAMQIKVEAFDNEFEATQKLSSAAAAASKRHFELEKHSAPSMVHSSLTPFSVQVTNIQDW

SEQ ID NO: 18115 - protein, 80 aa, Synthetic construct
ALPHKLRIKAKAMQIKVEAFDNEFEATQKLSSAAAAASKRHFELEKHSAPSMVHSSLTPFSVQVTNIQDWSLKSEHWHQK

SEQ ID NO: 18116 - protein, 80 aa, Synthetic construct
EAELIDEYVCPQCQSTEDAMTVLTPLTEKDYEGLKRVLRSLQAHKMAWPFLEPVDPNDAPDYYGVIKEAAAAATMEERVQ

SEQ ID NO: 18117 - protein, 80 aa, Synthetic construct
LASAIREELNGAMEHTNSNESDSSPGRSPMQAVHPVHVKEEPLDPEEAEGAAAAATTANHSPDFDHDRDYEDEPVNEDME

SEQ ID NO: 18118 - protein, 80 aa, Synthetic construct
VCKSIQMNQAENSLQEEQEGAAAAAVNRMQEQNTQQGDGVLDLSTKKTSIKSEESSICDPSSENSVAGSTVDAKSEEATK

SEQ ID NO: 18119 - protein, 80 aa, Synthetic construct
ENSLQEEQEGAAAAAVNRMQEQNTQQGDGVLDLSTKKTSIKSEESSICDPSSENSVAGSTVDAKSEEATKMEKRKSALNK

SEQ ID NO: 18120 - protein, 80 aa, Synthetic construct
DSTVNLQSPLKMTNSPVLPVGSTTNGSRSSTPSPSAAAAASSRNTQGYLYTAEGAQEEPQVEPLDLSLPKQQGELLERST

SEQ ID NO: 18121 - protein, 80 aa, Synthetic construct
GSTTNGSRSSTPSPSAAAAASSRNTQGYLYTAEGAQEEPQVEPLDLSLPKQQGELLERSTITSVYQNSVYSVQEEPLNLS

SEQ ID NO: 18122 - protein, 80 aa, Synthetic construct
QAPPAAAAAPLEATDSLLELPHPLLQQTEDQFLSPTLACSSPLISFSPSLDQDDYLWGLEAGEGISDLFDSYDLGDLLIN

SEQ ID NO: 18123 - protein, 80 aa, Synthetic construct
ESTAYAAAAALKEEEEEEEIQSRELEDGPADMQKVRICSEGGWVPALFDEVAIYFSDEEWEVLTEQQKALYREVMRMNYE

SEQ ID NO: 18124 - protein, 80 aa, Synthetic construct
PRHLKSPVRGQDSEQPQAQLQPEAQLHAPAQPQPQLQLQLQSHKGFLEQEGSAAAAAQSQHDLSQSAFLSWLSQTQSHSS

SEQ ID NO: 18125 - protein, 80 aa, Synthetic construct
QDSEQPQAQLQPEAQLHAPAQPQPQLQLQLQSHKGFLEQEGSAAAAAQSQHDLSQSAFLSWLSQTQSHSSLLSSSVLTPD

SEQ ID NO: 18126 - protein, 80 aa, Synthetic construct
QPEAQLHAPAQPQPQLQLQLQSHKGFLEQEGSAAAAAQSQHDLSQSAFLSWLSQTQSHSSLLSSSVLTPDSSPGKLDPAP

SEQ ID NO: 18127 - protein, 80 aa, Synthetic construct
QPQPQLQLQLQSHKGFLEQEGSAAAAAQSQHDLSQSAFLSWLSQTQSHSSLLSSSVLTPDSSPGKLDPAPSQPPEEPEPD

SEQ ID NO: 18128 - protein, 80 aa, Synthetic construct
QSHKGFLEQEGSAAAAAQSQHDLSQSAFLSWLSQTQSHSSLLSSSVLTPDSSPGKLDPAPSQPPEEPEPDEAESSPDPQA

SEQ ID NO: 18129 - protein, 80 aa, Synthetic construct
GSAAAAAQSQHDLSQSAFLSWLSQTQSHSSLLSSSVLTPDSSPGKLDPAPSQPPEEPEPDEAESSPDPQALWFNISAQMP

SEQ ID NO: 18130 - protein, 80 aa, Synthetic construct
LPPHFSAVGSDNDIAAAAAIKHSRPGPTANGASKEKTKAPPNVKNEGPLNVVKTEKVDRSTQDELSTKCVHCGIVFLDEV

SEQ ID NO: 18131 - protein, 80 aa, Synthetic construct
QPSGFKHPFAIENIIAREYKMPGGLAFSAMQPVPAAYPLPNQLTTMGSSLGTGWPHVYGSAGMIDSATAAAAASGDYSAY

SEQ ID NO: 18132 - protein, 80 aa, Synthetic construct
PSIAELHNSVTNCDPPLRLTKPSHFTNIKPVEKLDHSRSNTPSAAAAASTSSKNSHSSSYTPNSFSSEELQAEPLDLSLP

SEQ ID NO: 18133 - protein, 80 aa, Synthetic construct
VSQEGKQVQRNAANARERARMRVLSKAFSRLKTTLPWVPPDTKLSKLDTLRLASSYIAHLRQILANDKYENGYIHAAAAA

SEQ ID NO: 18134 - protein, 80 aa, Synthetic construct
NAANARERARMRVLSKAFSRLKTTLPWVPPDTKLSKLDTLRLASSYIAHLRQILANDKYENGYIHAAAAAWPFMVAGKPE

SEQ ID NO: 18135 - protein, 80 aa, Synthetic construct
MRVLSKAFSRLKTTLPWVPPDTKLSKLDTLRLASSYIAHLRQILANDKYENGYIHAAAAAWPFMVAGKPESDLKEVVTAS

SEQ ID NO: 18136 - protein, 80 aa, Synthetic construct
VLSKAFSRLKTSLPWVPPDTKLSKLDTLRLASSYIAHLRQLLQEDRYENGYVHAAAAAWPFVVSGRPDSDTKEVSAANRL

SEQ ID NO: 18137 - protein, 80 aa, Synthetic construct
RLLQDSSSAAAAAKLTAEATGKDLSQESSSTAPGSEVTIKQEPVSPKKKENALLRYLLDKDDTKDIGLPEITPKLERLDS

SEQ ID NO: 18138 - protein, 80 aa, Synthetic construct
LMFDPVPVKQEAMDPVSVSYPSNYMESMKPNKYGVIYSTPLPEKFFQTPEGLSHGIQMEAAAAAVNKRSSPPSAGNSPSS

SEQ ID NO: 18139 - protein, 80 aa, Synthetic construct
EMENSSSSMQVPVIESYEKPISQKKIKIEPGIEPQRTDYYAAAAAPPLMNSVSPPQALLQENHPSVIVQPGKRPLPVESP

SEQ ID NO: 18140 - protein, 80 aa, Synthetic construct
VPVIESYEKPISQKKIKIEPGIEPQRTDYYAAAAAPPLMNSVSPPQALLQENHPSVIVQPGKRPLPVESPDTQRKRRIHR

SEQ ID NO: 18141 - protein, 80 aa, Synthetic construct
ISQKKIKIEPGIEPQRTDYYAAAAAPPLMNSVSPPQALLQENHPSVIVQPGKRPLPVESPDTQRKRRIHRCDYDGCNKVY

SEQ ID NO: 18142 - protein, 80 aa, Synthetic construct
NFPHSLYPFTDRALAHNLLVKAEPKSPRDALKVGGPSAECPFDLTTKPKDVKPILPMPKGPSAPASGEEQAAAAAIGSRA

SEQ ID NO: 18143 - protein, 80 aa, Synthetic construct
RDAEVLFVGMISNSKPVVSNILNRVTPGSNSRRKKGHFRQYPAHVSQPANHVTSMAKAIMAAAAAEGRSTDSPVTMKSSS

SEQ ID NO: 18144 - protein, 80 aa, Synthetic construct
SSPTPESRSQEAAAAALVPDDCRPGTPPSDLIEIQVVKVTDTTLVPEPPEPGSFHCALCPAAFRLVSELLFHEHGHLAGA

SEQ ID NO: 18145 - protein, 80 aa, Synthetic construct
PKIQTSETSPKAFQCFDYSQDAEAAHMAATAILNLSTRCWEMAAAAATKPQDLPSKSVDIEVDENGTLDLSMHKHRKREN

SEQ ID NO: 18146 - protein, 80 aa, Synthetic construct
KAFQCFDYSQDAEAAHMAATAILNLSTRCWEMAAAAATKPQDLPSKSVDIEVDENGTLDLSMHKHRKRENAFPSSSSCSS

SEQ ID NO: 18147 - protein, 80 aa, Synthetic construct
DAEAAHMAATAILNLSTRCWEMAAAAATKPQDLPSKSVDIEVDENGTLDLSMHKHRKRENAFPSSSSCSSSPGVKSPDAS

SEQ ID NO: 18148 - protein, 80 aa, Synthetic construct
NINTFENRMLMLDGMPAVRVKTELLESEQGSPNVHNYPDMEAVPLLLNNVKGEPPEDSLSVDHFQTQTEAAAAAINKART

SEQ ID NO: 18149 - protein, 80 aa, Synthetic construct
MLDGMPAVRVKTELLESEQGSPNVHNYPDMEAVPLLLNNVKGEPPEDSLSVDHFQTQTEAAAAAINKARTSPTAVSSSPV

SEQ ID NO: 18150 - protein, 80 aa, Synthetic construct
KTELLESEQGSPNVHNYPDMEAVPLLLNNVKGEPPEDSLSVDHFQTQTEAAAAAINKARTSPTAVSSSPVSMTASASSPS

SEQ ID NO: 18151 - protein, 80 aa, Synthetic construct
SPNVHNYPDMEAVPLLLNNVKGEPPEDSLSVDHFQTQTEAAAAAINKARTSPTAVSSSPVSMTASASSPSSTSTSSSSSS

SEQ ID NO: 18152 - protein, 80 aa, Synthetic construct
EAVPLLLNNVKGEPPEDSLSVDHFQTQTEAAAAAINKARTSPTAVSSSPVSMTASASSPSSTSTSSSSSSRLASSPTVIT

SEQ ID NO: 18153 - protein, 80 aa, Synthetic construct
FLEPQNGFLHRGPTQPPPPHVSIKLEPASSFAVDFNEPLDFSQKGLALVQVKQENISFLSPSSLVPYDCSMEAAAAAIPK

SEQ ID NO: 18154 - protein, 80 aa, Synthetic construct
RGPTQPPPPHVSIKLEPASSFAVDFNEPLDFSQKGLALVQVKQENISFLSPSSLVPYDCSMEAAAAAIPKNFRKGDKDLA

SEQ ID NO: 18155 - protein, 80 aa, Synthetic construct
FAVDFNEPLDFSQKGLALVQVKQENISFLSPSSLVPYDCSMEAAAAAIPKNFRKGDKDLATPSEAKKPEEEAGSSEQPSP

SEQ ID NO: 18156 - protein, 80 aa, Synthetic construct
FSQKGLALVQVKQENISFLSPSSLVPYDCSMEAAAAAIPKNFRKGDKDLATPSEAKKPEEEAGSSEQPSPCPAPGPSLPV

SEQ ID NO: 18157 - protein, 80 aa, Synthetic construct
QTGHPAEKLSDLHNKEHSGGGKRALAPDLMAAAAAARSTRDDPSNKETASSLQAALVVHPCPYCSHKTYYPEVLWMHKRI

SEQ ID NO: 18158 - protein, 80 aa, Synthetic construct
DRDLRSLPLKMEPQSPGEVKKLQKGSSESPFDLTTKRKDEKPLTPVPSKPPVTPATSQDQAAAAAMGSRSRASGTKLTEP

SEQ ID NO: 18159 - protein, 80 aa, Synthetic construct
VRNRDPPEIEYRSNMTSPTLLDANPMENPALFNDIKIEPPEELLASDFSLPQVEAAAAAFHKPKAPLQPASMLQAPIRPP

SEQ ID NO: 18160 - protein, 80 aa, Synthetic construct
YRSNMTSPTLLDANPMENPALFNDIKIEPPEELLASDFSLPQVEAAAAAFHKPKAPLQPASMLQAPIRPPKPQSSPQTLV

SEQ ID NO: 18161 - protein, 80 aa, Synthetic construct
LFNDIKIEPPEELLASDFSLPQVEAAAAAFHKPKAPLQPASMLQAPIRPPKPQSSPQTLVVSTSTSDMSTSANIPTVLTP

SEQ ID NO: 18162 - protein, 80 aa, Synthetic construct
MDFSPENGVFSPLATPSLIPQAALELKQAFREALQAVEATQGQQQQLRGMVPIVLVAKLGPQVMAAARVPPRLQAAAAAL

SEQ ID NO: 18163 - protein, 80 aa, Synthetic construct
SPLATPSLIPQAALELKQAFREALQAVEATQGQQQQLRGMVPIVLVAKLGPQVMAAARVPPRLQAAAAALAGAHPLDFLL

SEQ ID NO: 18164 - protein, 80 aa, Synthetic construct
QAALELKQAFREALQAVEATQGQQQQLRGMVPIVLVAKLGPQVMAAARVPPRLQAAAAALAGAHPLDFLLLDAPLGGPLG

SEQ ID NO: 18165 - protein, 80 aa, Synthetic construct
MMEEDLQGASQVKEETDIAEQKSEPMEVDEKKPEVKVEVKEEEESSSNGTASQSTSPSQPRKKIFKAAAAAQALMPTLEA

SEQ ID NO: 18166 - protein, 80 aa, Synthetic construct
QVKEETDIAEQKSEPMEVDEKKPEVKVEVKEEEESSSNGTASQSTSPSQPRKKIFKAAAAAQALMPTLEALYRQDPESLP

SEQ ID NO: 18167 - protein, 80 aa, Synthetic construct
QKSEPMEVDEKKPEVKVEVKEEEESSSNGTASQSTSPSQPRKKIFKAAAAAQALMPTLEALYRQDPESLPFRQPVDPQLL

SEQ ID NO: 18168 - protein, 80 aa, Synthetic construct
KKPEVKVEVKEEEESSSNGTASQSTSPSQPRKKIFKAAAAAQALMPTLEALYRQDPESLPFRQPVDPQLLGIPDYFDIVK

SEQ ID NO: 18169 - protein, 80 aa, Synthetic construct
LDPATAAAYYHPSYLAPHPFPHPAFRMDDSYCLSALRSPFYPIPTPGSLPPLHPSAMHLHLSGVRYAAAAAHSSLAALHS

SEQ ID NO: 18170 - protein, 80 aa, Synthetic construct
EEGSGQRPEEIAAAAAVVKQEIIDWPGTEGRLAGQWVEQEVEDRPEVKDENAGVLEVKQETDSSLVVKEAKVGEPEVKEE

SEQ ID NO: 18171 - protein, 80 aa, Synthetic construct
IAAAAAVVKQEIIDWPGTEGRLAGQWVEQEVEDRPEVKDENAGVLEVKQETDSSLVVKEAKVGEPEVKEEKVKEEVMDWS

SEQ ID NO: 18172 - protein, 80 aa, Synthetic construct
HKHGLAALRSTSRNEYIHSGLYSSFTINSLQNPPDAFKAIKTEKLEEPPEDSPPVEEVRTVIRFVTNKTDKHVTRAAAAA

SEQ ID NO: 18173 - protein, 80 aa, Synthetic construct
TSRNEYIHSGLYSSFTINSLQNPPDAFKAIKTEKLEEPPEDSPPVEEVRTVIRFVTNKTDKHVTRAAAAAPSTSEAAAAS

SEQ ID NO: 18174 - protein, 80 aa, Synthetic construct
LYSSFTINSLQNPPDAFKAIKTEKLEEPPEDSPPVEEVRTVIRFVTNKTDKHVTRAAAAAPSTSEAAAASAFLASSVSAK

SEQ ID NO: 18175 - protein, 80 aa, Synthetic construct
QNPPDAFKAIKTEKLEEPPEDSPPVEEVRTVIRFVTNKTDKHVTRAAAAAPSTSEAAAASAFLASSVSAKISSLMLPNAA

SEQ ID NO: 18176 - protein, 80 aa, Synthetic construct
KTEKLEEPPEDSPPVEEVRTVIRFVTNKTDKHVTRAAAAAPSTSEAAAASAFLASSVSAKISSLMLPNAASISSASPFSS

SEQ ID NO: 18177 - protein, 80 aa, Synthetic construct
LSSFAAAAAETMSHYTDEPRFTIEQIDLLQRLRRTGMTKHEILHALETLDRLDQEHSDKFGRRSSYGGSSYGNSTNNVPA

SEQ ID NO: 18178 - protein, 80 aa, Synthetic construct
VHKAANGHSRTKMISTSIKTAAAAKRASGLRINDYDNQCDVVYISQPITECHFENQKSILSSRKTARKSTRGYFFNGDCC

SEQ ID NO: 18179 - protein, 80 aa, Synthetic construct
TKMISTSIKTAAAAKRASGLRINDYDNQCDVVYISQPITECHFENQKSILSSRKTARKSTRGYFFNGDCCELPTVRTLAR

SEQ ID NO: 18180 - protein, 80 aa, Synthetic construct
AAAAKRASGLRINDYDNQCDVVYISQPITECHFENQKSILSSRKTARKSTRGYFFNGDCCELPTVRTLARNLHSQEKASC

SEQ ID NO: 18181 - protein, 80 aa, Synthetic construct
EKQTTLKKDYDVKNEIVDRSAPKPKISGSIHYALKNVKIDLPKINIPNEVLLKHEVDKYRKLFQSKQQTAAAAISIKTVS

SEQ ID NO: 18182 - protein, 80 aa, Synthetic construct
DVKNEIVDRSAPKPKISGSIHYALKNVKIDLPKINIPNEVLLKHEVDKYRKLFQSKQQTAAAAISIKTVSCVEECTLLHK

SEQ ID NO: 18183 - protein, 80 aa, Synthetic construct
HYALKNVKIDLPKINIPNEVLLKHEVDKYRKLFQSKQQTAAAAISIKTVSCVEECTLLHKSERAEEEGVKMSAKILNFSC

SEQ ID NO: 18184 - protein, 80 aa, Synthetic construct
SPPETSLPYKWVVEAANLLIPAVGSSLAAAAAAAAAAPDAWCDLSKFDLPEEPSAEDSINNSLVQLQASHQQQVLPPRQP

SEQ ID NO: 18185 - protein, 80 aa, Synthetic construct
FVDEHEPSMVAAAAAAAAAHSPQSSLSDVSEVSSVEHTQESSVQGSCRSPENKFQIIKQEPMELESYTREPRDDRGSYTA

SEQ ID NO: 18186 - protein, 80 aa, Synthetic construct
AAAAAAAYIAYKAAKEEEKQKLLKWSSDLKQEREQLEQKVKQLSNSISKCMEMKNTILARQKEMHSSLEKVKQLIRLIHG

SEQ ID NO: 18187 - protein, 80 aa, Synthetic construct
MKSERRPPSPAAAAAAANEQPSSPRVNGLTTVALKETSTEALMKSSPEERERMIKQLKEELRLEEAKLVLLKKLRQSQIQ

SEQ ID NO: 18188 - protein, 80 aa, Synthetic construct
LERDVEDLQRDKARLLREKVEFLRSLRQMKQKVQSLYQEVFGRLRDENGRPYSPSQYALQYAGDGAAAAAARTMADQQAR

SEQ ID NO: 18189 - protein, 80 aa, Synthetic construct
DVLYPRAAGMPLAQPLVEHYVPRSLDPNMPVIVNTCSLREEGEGTDDRHSVADGEMYRYSEDEDSEGEEKSDGAAAAAAA

SEQ ID NO: 18190 - protein, 80 aa, Synthetic construct
CSSIPHSSHSIINHHASIHNEGDQPKTPENIPSKEPKDGSPVQPAAAAAAAARRLTLEQVVAIEALTQLSEAPSENSSPS

SEQ ID NO: 18191 - protein, 80 aa, Synthetic construct
EVLQIEHSYCRQDINKEHLWQKVSKLHAAAAAAALKEQQTLGRLKSLEALIRQLKQENWLSEENVKIIENHFTTYEVTMI

SEQ ID NO: 18192 - protein, 80 aa, Synthetic construct
FLEVKLGKRPQPVKSELDEEEERRKRRREKNKVAAARCRNKKKERTEFLQRAAAAAAAAAAELKTQIEELKQERQQLILM

SEQ ID NO: 18193 - protein, 80 aa, Synthetic construct
QPVKSELDEEEERRKRRREKNKVAAARCRNKKKERTEFLQRAAAAAAAAAAELKTQIEELKQERQQLILMLNRHRPTCIV

SEQ ID NO: 18194 - protein, 80 aa, Synthetic construct
EERRKRRREKNKVAAARCRNKKKERTEFLQRAAAAAAAAAAELKTQIEELKQERQQLILMLNRHRPTCIVRTDSVKTPES

SEQ ID NO: 18195 - protein, 80 aa, Synthetic construct
NKVAAARCRNKKKERTEFLQRAAAAAAAAAAELKTQIEELKQERQQLILMLNRHRPTCIVRTDSVKTPESEGNPLLEQLE

SEQ ID NO: 18196 - protein, 80 aa, Synthetic construct
VAAARCRNKKKERTEFLQRAAAAAAAAAAELKTQIEELKQERQQLILMLNRHRPTCIVRTDSVKTPESEGNPLLEQLEKK

SEQ ID NO: 18197 - protein, 80 aa, Synthetic construct
AAAAAAAAIRRRGKNKVAAQNCRKRKLETIVQLERELERLTNERERLLRARGEADRTLEVMRQQLTELYRDIFQHLRDES

SEQ ID NO: 18198 - protein, 80 aa, Synthetic construct
VSHTPTPSTPAGFRAVSPAVPFSRSRQPAAAAAAAPPAGLTSDPGPSVRRVPAVQRDSPVIVRNPDVPLPSKFPGEVGTA

SEQ ID NO: 18199 - protein, 80 aa, Synthetic construct
AGFRAVSPAVPFSRSRQPAAAAAAAPPAGLTSDPGPSVRRVPAVQRDSPVIVRNPDVPLPSKFPGEVGTAGEVRAGGPGR

SEQ ID NO: 18200 - protein, 80 aa, Synthetic construct
QRPGEPGAARFGPPEGCADHRPHRYRSFMIEEILTEPPGPKGAAPAAAAAAAGELLKFGVQALLAARPFHAAAAAAAAEQ

SEQ ID NO: 18201 - protein, 80 aa, Synthetic construct
FGPPEGCADHRPHRYRSFMIEEILTEPPGPKGAAPAAAAAAAGELLKFGVQALLAARPFHAAAAAAAAEQAAVFKFPLAP

SEQ ID NO: 18202 - protein, 80 aa, Synthetic construct
RPHRYRSFMIEEILTEPPGPKGAAPAAAAAAAGELLKFGVQALLAARPFHAAAAAAAAEQAAVFKFPLAPLGCSGLSSAL

SEQ ID NO: 18203 - protein, 80 aa, Synthetic construct
EPGRKDLQHLSREERRRRRRATAKYRTAHATRERIRVEAFNLAFAELRKLLPTLPPDKKLAAAAAAALAICYISYLNHVL

SEQ ID NO: 18204 - protein, 80 aa, Synthetic construct
GGYSSTENLQLVLERRRVANAKERERIKNLNRGFARLKALVPFLPQSRKPAAAAAAAGATEYIQVLSDLLEGAKDSKKQD

SEQ ID NO: 18205 - protein, 80 aa, Synthetic construct
MPLHSGQGEKPAAPFPRGELESPKPLVTPGAAAAAAARAEAGSPTGGLFNTPPPTPPEQDKEDFSSFQLLVEVALQRAAE

SEQ ID NO: 18206 - protein, 80 aa, Synthetic construct
PAAPFPRGELESPKPLVTPGAAAAAAARAEAGSPTGGLFNTPPPTPPEQDKEDFSSFQLLVEVALQRAAEMELQKQQDPS

SEQ ID NO: 18207 - protein, 80 aa, Synthetic construct
ESPKPLVTPGAAAAAAARAEAGSPTGGLFNTPPPTPPEQDKEDFSSFQLLVEVALQRAAEMELQKQQDPSLPLLHTPIPL

SEQ ID NO: 18208 - protein, 80 aa, Synthetic construct
VTPGAAAAAAARAEAGSPTGGLFNTPPPTPPEQDKEDFSSFQLLVEVALQRAAEMELQKQQDPSLPLLHTPIPLVSENPQ

SEQ ID NO: 18209 - protein, 80 aa, Synthetic construct
ISPAAAAAAAGLCKFPEVEGKMTTFKEAVTFKDVAVVFTEEELGLLDPAQRKLYRDVMLENFRNLLSVGNQPFHQDTFHF

SEQ ID NO: 18210 - protein, 80 aa, Synthetic construct
GLCKFPEVEGKMTTFKEAVTFKAAAAAAAAAALGLLDPAQRKLYRDVMLENFRNLLSVGNQPFHQDTFHFLGKEKFWKMK

SEQ ID NO: 18211 - protein, 80 aa, Synthetic construct
REKPLKCPDCEKRFKYASDLQRHRRVHTGEKPYKCPNCDKAFKQREHLNKHQGVHAREQQFKCVWCGERFLAAAAAAAHS

SEQ ID NO: 18212 - protein, 80 aa, Synthetic construct
FEDVAVYFTQNEWASLHPTQRALYREVMLENYANVTSLYPTAGGFPLDTERTEKVPGALSSFLPAAAAAAAAAALLPMSA

SEQ ID NO: 18213 - protein, 80 aa, Synthetic construct
SSPTPESRSQAAAAAAAVPDDCRPGTPPSDLIEIQVVKVTDTTLVPEPPEPGSFHCALCPAAFRLVSELLFHEHGHLAGA

SEQ ID NO: 18214 - protein, 80 aa, Synthetic construct
PNKMTLSEPNEVNLFENKNVAAAAAAPAKEPVQPGMPLTVVAPAELVVPANCLAQLIDVKVVNGTQQLVLKLFPLEENNC

SEQ ID NO: 18215 - protein, 80 aa, Synthetic construct
EVNLFENKNVAAAAAAPAKEPVQPGMPLTVVAPAELVVPANCLAQLIDVKVVNGTQQLVLKLFPLEENNCLEAGRDNGGN

SEQ ID NO: 18216 - protein, 80 aa, Synthetic construct
AAAAAAPAKEPVQPGMPLTVVAPAELVVPANCLAQLIDVKVVNGTQQLVLKLFPLEENNCLEAGRDNGGNSERMVKEKGS

SEQ ID NO: 18217 - protein, 80 aa, Synthetic construct
QHKSEYLHINITGEDRSQQPGDKPLELKNSERTNNTNDGPVISSVFSLSSGSENVPEGIKWNSSTSKIKAAAAAARKIAQ

SEQ ID NO: 18218 - protein, 80 aa, Synthetic construct
ITGEDRSQQPGDKPLELKNSERTNNTNDGPVISSVFSLSSGSENVPEGIKWNSSTSKIKAAAAAARKIAQLIESCGKPSS

SEQ ID NO: 18219 - protein, 80 aa, Synthetic construct
GDKPLELKNSERTNNTNDGPVISSVFSLSSGSENVPEGIKWNSSTSKIKAAAAAARKIAQLIESCGKPSSLASNSAHRRS

SEQ ID NO: 18220 - protein, 80 aa, Synthetic construct
ERTNNTNDGPVISSVFSLSSGSENVPEGIKWNSSTSKIKAAAAAARKIAQLIESCGKPSSLASNSAHRRSVGQASKGTSK

SEQ ID NO: 18221 - protein, 80 aa, Synthetic construct
AAQLLTDEALESVTFRDVTVDFTQEEWQQLEPAQKDLYRDVMLENYRNLVSLDWETRPEMKELDPKNDIAAAAAAAAAAA

SEQ ID NO: 18222 - protein, 80 aa, Synthetic construct
ESVTFRDVTVDFTQEEWQQLEPAQKDLYRDVMLENYRNLVSLDWETRPEMKELDPKNDIAAAAAAAAAAATGGPTRNGAR

SEQ ID NO: 18223 - protein, 80 aa, Synthetic construct
GGGKRPAVPAAVSLLPPADPLRQANRLPIRVLKMLSAHTGHLLHPEYLQPLSSTPVSPIELDAKKAAAAAAAQTCSQIGK

SEQ ID NO: 18224 - protein, 80 aa, Synthetic construct
GPLTFMDVAIEFSLEEWQCLDTAQQNLYRNVMLENYRNLVFLGIAVAAAAAAACLEQGKEPWNMKRHEMAAKPPAMCSHF

SEQ ID NO: 18225 - protein, 80 aa, Synthetic construct
GQVVQEGTRRYRLCNECLAEFGIDSLPIDLEAEQHLMSPSDGDKDSRWHLSEDENRAAAAAAAAGSADLVIQQVDDSEEE

SEQ ID NO: 18226 - protein, 80 aa, Synthetic construct
KVYIFKADPGEDDLGGAAAAAAAAPENDHGVELLDQNSSIRVPREKMVYMTVNDSQPEDEDLNVAEIADEVYMEVIVGEE

SEQ ID NO: 18227 - protein, 80 aa, Synthetic construct
REKFNRMVEAVDRTIEKRIDKLTKELAQKTAELLEVRAAFVQLTQKKQEVQRRERALNRQVDVAVAAAAAAAQRLTESEE

SEQ ID NO: 18228 - protein, 80 aa, Synthetic construct
SDDDEMDSSLVSQQPPDNQEKERLNTSIPQKRKMRNLLVTIENDTPLEELSKYVAAAAAALTRNRRTRRWYTCPLCGKQF

SEQ ID NO: 18229 - protein, 80 aa, Synthetic construct
VSQQPPDNQEKERLNTSIPQKRKMRNLLVTIENDTPLEELSKYVAAAAAALTRNRRTRRWYTCPLCGKQFNESSYLISHQ

SEQ ID NO: 18230 - protein, 80 aa, Synthetic construct
KERLNTSIPQKRKMRNLLVTIENDTPLEELSKYVAAAAAALTRNRRTRRWYTCPLCGKQFNESSYLISHQRTHTGEKPYD

SEQ ID NO: 18231 - protein, 80 aa, Synthetic construct
KRKMRNLLVTIENDTPLEELSKYVAAAAAALTRNRRTRRWYTCPLCGKQFNESSYLISHQRTHTGEKPYDCNHCGKSFNH

SEQ ID NO: 18232 - protein, 80 aa, Synthetic construct
KPDSLLAAAAAAAAKDGTLKAKSEIEEQYVLEKGQNIDGQNLYSNENQNLECATEKSKWEDFSNVDSPMMPRITSVFSLQ

SEQ ID NO: 18233 - protein, 80 aa, Synthetic construct
KATLHRKCKEKAKPEDVRETFGFSRPRLSKDSIRTLRLFPFSSKQLVKCPRRNQPVVVLNHPDADAPAAAAAAAAIAKFN

SEQ ID NO: 18234 - protein, 80 aa, Synthetic construct
KAKPEDVRETFGFSRPRLSKDSIRTLRLFPFSSKQLVKCPRRNQPVVVLNHPDADAPAAAAAAAAIAKFNGHVLKVSLSK

SEQ ID NO: 18235 - protein, 80 aa, Synthetic construct
FGFSRPRLSKDSIRTLRLFPFSSKQLVKCPRRNQPVVVLNHPDADAPAAAAAAAAIAKFNGHVLKVSLSKRTINALLKPV

SEQ ID NO: 18236 - protein, 80 aa, Synthetic construct
DSIRTLRLFPFSSKQLVKCPRRNQPVVVLNHPDADAPAAAAAAAAIAKFNGHVLKVSLSKRTINALLKPVCYNPPKTTYD

SEQ ID NO: 18237 - protein, 80 aa, Synthetic construct
HKYLTVKDYLRAAAAAAANALEYNPDRDPGDRLIRHRACALRDTAYAIIKEELDEDFEQLCEEIQESRKKRGCSSSKYAP

SEQ ID NO: 18238 - protein, 80 aa, Synthetic construct
STNFPVVWHKTVRGRPKLSRKWYRILKQEHPAAAAAAAAVDLQESTGIASDSSSDSSSSSSSSSSDSDSECESGSEGDGT

SEQ ID NO: 18239 - protein, 80 aa, Synthetic construct
QTSARRMGTSLLFQLSVHERAAAAAALDHSYAKPWSAHPDASSARPTRMLFVTPRRQHESTIESDVPIDVETVTSTPMPL

SEQ ID NO: 18240 - protein, 80 aa, Synthetic construct
LLFQLSVHERAAAAAALDHSYAKPWSAHPDASSARPTRMLFVTPRRQHESTIESDVPIDVETVTSTPMPLYDNQKARSVM

SEQ ID NO: 18241 - protein, 80 aa, Synthetic construct
TSTSEGLEEGEVEGAAAAAAAAAAQASVDLSHDQSGDSLNSDEGDVSWMEEQLSYFCDKCQKWIPASQLREQLSYLKGDN

SEQ ID NO: 18242 - protein, 80 aa, Synthetic construct
ELWKHRQAAAAAAHTEPRVAESQELSNWRDDIVLRRAALGLRLLPNLTAQCPTQPVSSGHCYNPKGCGTDAVPGSAFQSS

SEQ ID NO: 18243 - protein, 80 aa, Synthetic construct
PGQRGHEGIMYFVEKCEAGTENWQRVNTELPVKSPRFALFDLAEGKSYCFRVRCSNSAGVGEPSEAAAAAAAAAKLDIPK

SEQ ID NO: 18244 - protein, 80 aa, Synthetic construct
ENWQRVNTELPVKSPRFALFDLAEGKSYCFRVRCSNSAGVGEPSEAAAAAAAAAKLDIPKAPGKIIPSRNTDTSVVVSWE

SEQ ID NO: 18245 - protein, 80 aa, Synthetic construct
PPALAAAAAAAAINSSDEEEEEEEEEEEEEEEEEEEEEDFEEEEEDEEEYFEEEEEEEEEFEEEFEEEEGELEEEEEEED

SEQ ID NO: 18246 - protein, 80 aa, Synthetic construct
DDPSVFSLPDSKLPGDKEFVSWQQDLEDSVKPTQQARPTVIRWSEGGKEVFISGSFNNWSTKIPLIKSHNAAAAAAALPE

SEQ ID NO: 18247 - protein, 80 aa, Synthetic construct
SKLPGDKEFVSWQQDLEDSVKPTQQARPTVIRWSEGGKEVFISGSFNNWSTKIPLIKSHNAAAAAAALPEGEHQYKFFVD

SEQ ID NO: 18248 - protein, 80 aa, Synthetic construct
SWQQDLEDSVKPTQQARPTVIRWSEGGKEVFISGSFNNWSTKIPLIKSHNAAAAAAALPEGEHQYKFFVDGQWVHDPSEP

SEQ ID NO: 18249 - protein, 80 aa, Synthetic construct
KPTQQARPTVIRWSEGGKEVFISGSFNNWSTKIPLIKSHNAAAAAAALPEGEHQYKFFVDGQWVHDPSEPVVTSQLGTIN

SEQ ID NO: 18250 - protein, 80 aa, Synthetic construct
LLLNPAVLSTASLGSSQGSVIHFSHGEYFYSLFSETINTELLKNLAAAAAALMQSSVDNTKMVSAVLNGMLDQSFRERAN

SEQ ID NO: 18251 - protein, 80 aa, Synthetic construct
MSQAVQTNGTQPLSKTWELSLYELQRTPQEAIAAAAAAAAAPRSLHSELMCPICLDMLKNTMTTKECLHRFCADCIITAL

SEQ ID NO: 18252 - protein, 80 aa, Synthetic construct
QPLSKTWELSLYELQRTPQEAIAAAAAAAAAPRSLHSELMCPICLDMLKNTMTTKECLHRFCADCIITALRSGNKECPTC

SEQ ID NO: 18253 - protein, 80 aa, Synthetic construct
LYELQRTPQEAIAAAAAAAAAPRSLHSELMCPICLDMLKNTMTTKECLHRFCADCIITALRSGNKECPTCRKKLVSKRSL

SEQ ID NO: 18254 - protein, 80 aa, Synthetic construct
SAASEEEEEKESEEAILADDDEPCKKCGLPNHPAAAAAAAACDSGYHTACLRPPLMIIPDGEWFCPPCQHKLLCEKLEEQ

SEQ ID NO: 18255 - protein, 80 aa, Synthetic construct
ESEEAILADDDEPCKKCGLPNHPAAAAAAAACDSGYHTACLRPPLMIIPDGEWFCPPCQHKLLCEKLEEQLQDLDVALKK

SEQ ID NO: 18256 - protein, 80 aa, Synthetic construct
PSVTVGGSLSSVLGPPVPEIKVKEEVEPMDIMRPVSAVPPLATNTVSPAAAAAANNLSMPTSDLPPGASPRKKPRKQQHV

SEQ ID NO: 18257 - protein, 80 aa, Synthetic construct
ITKNFSEVGFPDILKAYAAAAAAAAVIQDDPDLFGVSNEGELSFTSEVPKISQEPNVAGEHQSTDSKYMETPVKKEPSDD

SEQ ID NO: 18258 - protein, 80 aa, Synthetic construct
DNLCRKLEDLQQFQKREPENAAAAAAAALSEPVKINIKKEQEEKQEEVKFYLPPTPGSEFIGDVTQKIGITLQPVALHRN

SEQ ID NO: 18259 - protein, 80 aa, Synthetic construct
QQFQKREPENAAAAAAAALSEPVKINIKKEQEEKQEEVKFYLPPTPGSEFIGDVTQKIGITLQPVALHRNVYASVVEDMI

SEQ ID NO: 18260 - protein, 80 aa, Synthetic construct
MEGQSHYFNSSKSITAYKQKPAKPLISVPCKPLKPSDEMIETTSDLGKTELFCSINCFSAYSKAKMAAAAAAAAAVVHDT

SEQ ID NO: 18261 - protein, 80 aa, Synthetic construct
ETTSDLGKTELFCSINCFSAYSKAKMAAAAAAAAAVVHDTSTELLSPKKDTTPVISNIVSLADTDVALPIMNTDVLQDTV

SEQ ID NO: 18262 - protein, 80 aa, Synthetic construct
IPMAAAAAAQEIIDWPGTEGRLAGQWVEQEVEDRPEVKDENAGVLEVKQETDSSLVVKEAKVGEPEVKEEKVKEEVMDWS

SEQ ID NO: 18263 - protein, 70 aa, Synthetic construct
QLPRLALSPPPPAPPLPPPPSPPPPPRPPPTLSASDPSLDFLRAQQETANAIRELAGTLRQGLAKLSEAL

SEQ ID NO: 18264 - protein, 70 aa, Synthetic construct
QLPRLALSPPPPAPPLPPPPPLAQVPRPPPTLSASDPSLDFLRAQQETANAIRELAGTLRQGLAKLSEAL

SEQ ID NO: 18265 - protein, 70 aa, Synthetic construct
QLPRLALSPPPPAPPLPPPPPLAQVAPSPPTLSASDPSLDFLRAQQETANAIRELAGTLRQGLAKLSEAL

SEQ ID NO: 18266 - protein, 70 aa, Synthetic construct
IHGRGHWDEDSVVSSDRYRTEQYQSSPHEPSKIETLIRATQQMIKEEENRLQLRKAPSDQLASINGAGKK

SEQ ID NO: 18267 - protein, 70 aa, Synthetic construct
IHGRGHWDEDSVVSSPDPGSEQYQSSPHEPSKIETLIRATQQMIKEEENRLQLRKAPSDQLASINGAGKK

SEQ ID NO: 18268 - protein, 70 aa, Synthetic construct
IHGRGHWDEDSVVSSPDPGSASESGDRYRTSKIETLIRATQQMIKEEENRLQLRKAPSDQLASINGAGKK

SEQ ID NO: 18269 - protein, 70 aa, Synthetic construct
IHGRGHWDEDSVVSSPDPGSASESGDRYRTEQYQSSPHEPSKIETLIRATQQMIKEEENRLASINGAGKK

SEQ ID NO: 18270 - protein, 70 aa, Synthetic construct
TDVQLMKGKQECMDSKLLAMKHENEALWREVASLRQKHAQQQKVVNKLIQFLISLVQSNRILGVKRKIPL

SEQ ID NO: 18271 - protein, 70 aa, Synthetic construct
IRQDSMKGKQECMDSKLLAMKHENEALWREVASLRQKHAQQQKVVNKLIQFLISLVQSNRILGVKRKIPL

SEQ ID NO: 18272 - protein, 70 aa, Synthetic construct
IRQDSVTKLLECMDSKLLAMKHENEALWREVASLRQKHAQQQKVVNKLIQFLISLVQSNRILGVKRKIPL

SEQ ID NO: 18273 - protein, 70 aa, Synthetic construct
IRQDSVTKLLTDVQLKLLAMKHENEALWREVASLRQKHAQQQKVVNKLIQFLISLVQSNRILGVKRKIPL

SEQ ID NO: 18274 - protein, 70 aa, Synthetic construct
IRQDSVTKLLTDVQLMKGKQKHENEALWREVASLRQKHAQQQKVVNKLIQFLISLVQSNRILGVKRKIPL

SEQ ID NO: 18275 - protein, 70 aa, Synthetic construct
IRQDSVTKLLTDVQLMKGKQECMDSALWREVASLRQKHAQQQKVVNKLIQFLISLVQSNRILGVKRKIPL

SEQ ID NO: 18276 - protein, 70 aa, Synthetic construct
IRQDSVTKLLTDVQLMKGKQECMDSKLLAMVASLRQKHAQQQKVVNKLIQFLISLVQSNRILGVKRKIPL

SEQ ID NO: 18277 - protein, 70 aa, Synthetic construct
IRQDSVTKLLTDVQLMKGKQECMDSKLLAMKHENEQKHAQQQKVVNKLIQFLISLVQSNRILGVKRKIPL

SEQ ID NO: 18278 - protein, 70 aa, Synthetic construct
IRQDSVTKLLTDVQLMKGKQECMDSKLLAMKHENEALWREQQKVVNKLIQFLISLVQSNRILGVKRKIPL

SEQ ID NO: 18279 - protein, 70 aa, Synthetic construct
IRQDSVTKLLTDVQLMKGKQECMDSKLLAMKHENEALWREVASLRNKLIQFLISLVQSNRILGVKRKIPL

SEQ ID NO: 18280 - protein, 70 aa, Synthetic construct
IRQDSVTKLLTDVQLMKGKQECMDSKLLAMKHENEALWREVASLRQKHAQFLISLVQSNRILGVKRKIPL

SEQ ID NO: 18281 - protein, 70 aa, Synthetic construct
IRQDSVTKLLTDVQLMKGKQECMDSKLLAMKHENEALWREVASLRQKHAQQQKVVVQSNRILGVKRKIPL

SEQ ID NO: 18282 - protein, 70 aa, Synthetic construct
IRQDSVTKLLTDVQLMKGKQECMDSKLLAMKHENEALWREVASLRQKHAQQQKVVNKLIQILGVKRKIPL

SEQ ID NO: 18283 - protein, 70 aa, Synthetic construct
IRQDSVTKLLTDVQLMKGKQECMDSKLLAMKHENEALWREVASLRQKHAQQQKVVNKLIQFLISLRKIPL

SEQ ID NO: 18284 - protein, 70 aa, Synthetic construct
IRQDSVTKLLTDVQLMKGKQECMDSKLLAMKHENEALWREVASLRQKHAQQQKVVNKLIQFLISLVQSNR

SEQ ID NO: 18285 - protein, 70 aa, Synthetic construct
PSIAELHNSVTNCDPPLRLTVEKLDHSRSNTPSPLNLSSTSSKNSHSSSYTPNSFSSEELQAEPLDLSLP

SEQ ID NO: 18286 - protein, 70 aa, Synthetic construct
PSIAELHNSVTNCDPPLRLTKPSHFTNIKPVEKLDHSRSNTPSPLNLSSTSSKNSSSEELQAEPLDLSLP

SEQ ID NO: 18287 - protein, 70 aa, Synthetic construct
KLHELKKGLRKYLLGQVFANPSPTQKSPVQPVEDLAGNLWEKLREKIRSFVAYSIAIDEITDINNTTQLA

SEQ ID NO: 18288 - protein, 70 aa, Synthetic construct
KLHELKKGLRKYLLGSSDTEPSPTQKSPVQPVEDLAGNLWEKLREKIRSFVAYSIAIDEITDINNTTQLA

SEQ ID NO: 18289 - protein, 70 aa, Synthetic construct
KLHELKKGLRKYLLGSSDTECPEQKQVFANPSPTQKSPVQPVEDLKIRSFVAYSIAIDEITDINNTTQLA

SEQ ID NO: 18290 - protein, 70 aa, Synthetic construct
KLHELKKGLRKYLLGSSDTECPEQKQVFANPSPTQKSPVQPVEDLAGNLWEKLREAIDEITDINNTTQLA

SEQ ID NO: 18291 - protein, 70 aa, Synthetic construct
IFIRGVDENFDVSEELLDTVPMTGTKSGNEIFLRVEKSLKKFCINWSRLVSVASTGTPAMVDANNGLVTK

SEQ ID NO: 18292 - protein, 70 aa, Synthetic construct
TDINNTTQLAIFIRGVDENFPMTGTKSGNEIFLRVEKSLKKFCINWSRLVSVASTGTPAMVDANNGLVTK

SEQ ID NO: 18293 - protein, 70 aa, Synthetic construct
TDINNTTQLAIFIRGVDENFDVSEEKSGNEIFLRVEKSLKKFCINWSRLVSVASTGTPAMVDANNGLVTK

SEQ ID NO: 18294 - protein, 70 aa, Synthetic construct
TDINNTTQLAIFIRGVDENFDVSEELLDTVIFLRVEKSLKKFCINWSRLVSVASTGTPAMVDANNGLVTK

SEQ ID NO: 18295 - protein, 70 aa, Synthetic construct
TDINNTTQLAIFIRGVDENFDVSEELLDTVPMTGTKSGNEIFLRVEKSLKKFCINGTPAMVDANNGLVTK

SEQ ID NO: 18296 - protein, 70 aa, Synthetic construct
IMRSCSGINFEEFYHFLKVIAEKRLLVLREAAAEDGAGLGFEQAAFDVGRITEVLASLVAAFSPQPKELL

SEQ ID NO: 18297 - protein, 70 aa, Synthetic construct
IMRSCSGINFEEFYHFLKVIAEKRLLVLREAAAEDGAGLGFEQAAFDVGRITEVLASLVAHPDFQPKELL

SEQ ID NO: 18298 - protein, 70 aa, Synthetic construct
IMRSCSGINFEEFYHFLKVIAEKRLLVLREAAAEDGAGLGFEQAAFDVGRITEVLASLVAHPDFQRVDTS

SEQ ID NO: 18299 - protein, 70 aa, Synthetic construct
LQSMKAQPKYESPELESQQEQVLDVETGNEYGNLKQEVSEEMEPHGKTSSKFENDMSKSARCGETREPEE

SEQ ID NO: 18300 - protein, 70 aa, Synthetic construct
LRKEGEPSMSLQSMKAQPKYESPELETGNEYGNLKQEVSEEMEPHGKTSSKFENDMSKSARCGETREPEE

SEQ ID NO: 18301 - protein, 70 aa, Synthetic construct
LRKEGEPSMSLQSMKAQPKYESPELESQQEYGNLKQEVSEEMEPHGKTSSKFENDMSKSARCGETREPEE

SEQ ID NO: 18302 - protein, 70 aa, Synthetic construct
LRKEGEPSMSLQSMKAQPKYESPELESQQEQVLDVETGNEYGNLKQEVSEEMEPHMSKSARCGETREPEE

SEQ ID NO: 18303 - protein, 70 aa, Synthetic construct
LRKEGEPSMSLQSMKAQPKYESPELESQQEQVLDVETGNEYGNLKQEVSEEMEPHGKTSSRCGETREPEE

SEQ ID NO: 18304 - protein, 70 aa, Synthetic construct
LRKEGEPSMSLQSMKAQPKYESPELESQQEQVLDVETGNEYGNLKQEVSEEMEPHGKTSSKFENDREPEE

SEQ ID NO: 18305 - protein, 70 aa, Synthetic construct
LRKEGEPSMSLQSMKAQPKYESPELESQQEQVLDVETGNEYGNLKQEVSEEMEPHGKTSSKFENDMSKSA

SEQ ID NO: 18306 - protein, 70 aa, Synthetic construct
SINASPGVVVDIAHGPPAKKKSTGSSTWPLDPGVEVTLTMKVASGSTGDQKVQISYYGPKTPPVKALLYL

SEQ ID NO: 18307 - protein, 70 aa, Synthetic construct
SSAPEPGVVVDIAHGPPAKKKSTGSSTWPLDPGVEVTLTMKVASGSTGDQKVQISYYGPKTPPVKALLYL

SEQ ID NO: 18308 - protein, 70 aa, Synthetic construct
SSAPEDCTSFDIAHGPPAKKKSTGSSTWPLDPGVEVTLTMKVASGSTGDQKVQISYYGPKTPPVKALLYL

SEQ ID NO: 18309 - protein, 70 aa, Synthetic construct
SSAPEDCTSFSINASPPAKKKSTGSSTWPLDPGVEVTLTMKVASGSTGDQKVQISYYGPKTPPVKALLYL

SEQ ID NO: 18310 - protein, 70 aa, Synthetic construct
SSAPEDCTSFSINASPGVVVDIAHGSTWPLDPGVEVTLTMKVASGSTGDQKVQISYYGPKTPPVKALLYL

SEQ ID NO: 18311 - protein, 70 aa, Synthetic construct
SSAPEDCTSFSINASPGVVVDIAHGPPAKKDPGVEVTLTMKVASGSTGDQKVQISYYGPKTPPVKALLYL

SEQ ID NO: 18312 - protein, 70 aa, Synthetic construct
SSAPEDCTSFSINASPGVVVDIAHGPPAKKKSTGSVTLTMKVASGSTGDQKVQISYYGPKTPPVKALLYL

SEQ ID NO: 18313 - protein, 70 aa, Synthetic construct
SSAPEDCTSFSINASPGVVVDIAHGPPAKKKSTGSSTWPLDPGVEVTLTMKVASGYYGPKTPPVKALLYL

SEQ ID NO: 18314 - protein, 70 aa, Synthetic construct
SSAPEDCTSFSINASPGVVVDIAHGPPAKKKSTGSSTWPLDPGVEVTLTMKVASGSTGDQTPPVKALLYL

SEQ ID NO: 18315 - protein, 70 aa, Synthetic construct
SSAPEDCTSFSINASPGVVVDIAHGPPAKKKSTGSSTWPLDPGVEVTLTMKVASGSTGDQKVQISALLYL

SEQ ID NO: 18316 - protein, 70 aa, Synthetic construct
SSAPEDCTSFSINASPGVVVDIAHGPPAKKKSTGSSTWPLDPGVEVTLTMKVASGSTGDQKVQISYYGPK

SEQ ID NO: 18317 - protein, 70 aa, Synthetic construct
IAHPRHEADEKPFICAQCGKTFNNTTGEKPYKCSECGKSFSRSSNRIRHERIHLEEKHYKCPKCQESFRR

SEQ ID NO: 18318 - protein, 70 aa, Synthetic construct
IAHPRHEADEKPFICAQCGKTFNNTSNLRTHQRIHTGEKPYKCSECGKSFSRSSNRIRHECPKCQESFRR

SEQ ID NO: 18319 - protein, 70 aa, Synthetic construct
IAHPRHEADEKPFICAQCGKTFNNTSNLRTHQRIHTGEKPYKCSECGKSFSRSSNRIRHERIHLEESFRR

SEQ ID NO: 18320 - protein, 70 aa, Synthetic construct
IAHPRHEADEKPFICAQCGKTFNNTSNLRTHQRIHTGEKPYKCSECGKSFSRSSNRIRHERIHLEEKHYK

SEQ ID NO: 18321 - protein, 70 aa, Synthetic construct
GLCKFPEVEGKMTTFKEAVTFKDVAVVFTEEELGLLDPAQRKLYRDVMLENFRNLLSVGNQPFHQDTFHF

SEQ ID NO: 18322 - protein, 70 aa, Synthetic construct
ISPSLPEVEGKMTTFKEAVTFKDVAVVFTEEELGLLDPAQRKLYRDVMLENFRNLLSVGNQPFHQDTFHF

SEQ ID NO: 18323 - protein, 70 aa, Synthetic construct
ISPSLELLHSKMTTFKEAVTFKDVAVVFTEEELGLLDPAQRKLYRDVMLENFRNLLSVGNQPFHQDTFHF

SEQ ID NO: 18324 - protein, 70 aa, Synthetic construct
ISPSLELLHSGLCKFKEAVTFKDVAVVFTEEELGLLDPAQRKLYRDVMLENFRNLLSVGNQPFHQDTFHF

SEQ ID NO: 18325 - protein, 70 aa, Synthetic construct
ISPSLELLHSGLCKFPEVEGFKDVAVVFTEEELGLLDPAQRKLYRDVMLENFRNLLSVGNQPFHQDTFHF

SEQ ID NO: 18326 - protein, 70 aa, Synthetic construct
ISPSLELLHSGLCKFPEVEGKMTTFVVFTEEELGLLDPAQRKLYRDVMLENFRNLLSVGNQPFHQDTFHF

SEQ ID NO: 18327 - protein, 70 aa, Synthetic construct
ISPSLELLHSGLCKFPEVEGKMTTFKEAVTFKDVAVVFTEEELGLLDPAQRKLYRDVMLENFRNLDTFHF

SEQ ID NO: 18328 - protein, 70 aa, Synthetic construct
ISPSLELLHSGLCKFPEVEGKMTTFKEAVTFKDVAVVFTEEELGLLDPAQRKLYRDVMLENFRNLLSVGN

SEQ ID NO: 18329 - protein, 70 aa, Synthetic construct
LASENASMKLELDALRSKYEALQTFARTVARSPVAPARGPLAAGLGPLVPGKVAATSVITIVKSKTDARS

SEQ ID NO: 18330 - protein, 70 aa, Synthetic construct
KAELQASMKLELDALRSKYEALQTFARTVARSPVAPARGPLAAGLGPLVPGKVAATSVITIVKSKTDARS

SEQ ID NO: 18331 - protein, 70 aa, Synthetic construct
KAELQQEVEKLASENRSKYEALQTFARTVARSPVAPARGPLAAGLGPLVPGKVAATSVITIVKSKTDARS

SEQ ID NO: 18332 - protein, 70 aa, Synthetic construct
KAELQQEVEKLASENASMKLALQTFARTVARSPVAPARGPLAAGLGPLVPGKVAATSVITIVKSKTDARS

SEQ ID NO: 18333 - protein, 70 aa, Synthetic construct
KAELQQEVEKLASENASMKLELDALARTVARSPVAPARGPLAAGLGPLVPGKVAATSVITIVKSKTDARS

SEQ ID NO: 18334 - protein, 70 aa, Synthetic construct
KAELQQEVEKLASENASMKLELDALRSKYERSPVAPARGPLAAGLGPLVPGKVAATSVITIVKSKTDARS

SEQ ID NO: 18335 - protein, 70 aa, Synthetic construct
KAELQQEVEKLASENASMKLELDALRSKYEALQTFPARGPLAAGLGPLVPGKVAATSVITIVKSKTDARS

SEQ ID NO: 18336 - protein, 70 aa, Synthetic construct
KAELQQEVEKLASENASMKLELDALRSKYEALQTFARTVARSPVAGPLVPGKVAATSVITIVKSKTDARS

SEQ ID NO: 18337 - protein, 70 aa, Synthetic construct
KAELQQEVEKLASENASMKLELDALRSKYEALQTFARTVARSPVAPARGPGKVAATSVITIVKSKTDARS

SEQ ID NO: 18338 - protein, 70 aa, Synthetic construct
KAELQQEVEKLASENASMKLELDALRSKYEALQTFARTVARSPVAPARGPLAAGLTSVITIVKSKTDARS

SEQ ID NO: 18339 - protein, 70 aa, Synthetic construct
MLATAPARGNMMSTSKPLAFSIERIMARTPEPKALPVPHFLQGALPKGEPKHSLHLNSSIPCMIPFVPVA

SEQ ID NO: 18340 - protein, 70 aa, Synthetic construct
DSSCHPARGNMMSTSKPLAFSIERIMARTPEPKALPVPHFLQGALPKGEPKHSLHLNSSIPCMIPFVPVA

SEQ ID NO: 18341 - protein, 70 aa, Synthetic construct
DSSCHNATTKMMSTSKPLAFSIERIMARTPEPKALPVPHFLQGALPKGEPKHSLHLNSSIPCMIPFVPVA

SEQ ID NO: 18342 - protein, 70 aa, Synthetic construct
DSSCHNATTKMLATAKPLAFSIERIMARTPEPKALPVPHFLQGALPKGEPKHSLHLNSSIPCMIPFVPVA

SEQ ID NO: 18343 - protein, 70 aa, Synthetic construct
DSSCHNATTKMLATAPARGNMMSTSKPLAFSIERIMARTPLQGALPKGEPKHSLHLNSSIPCMIPFVPVA

SEQ ID NO: 18344 - protein, 70 aa, Synthetic construct
DSSCHNATTKMLATAPARGNMMSTSKPLAFSIERIMARTPEPKALPKGEPKHSLHLNSSIPCMIPFVPVA

SEQ ID NO: 18345 - protein, 70 aa, Synthetic construct
DSSCHNATTKMLATAPARGNMMSTSKPLAFSIERIMARTPEPKALPVPHFKHSLHLNSSIPCMIPFVPVA

SEQ ID NO: 18346 - protein, 70 aa, Synthetic construct
DSSCHNATTKMLATAPARGNMMSTSKPLAFSIERIMARTPEPKALPVPHFLQGALLNSSIPCMIPFVPVA

SEQ ID NO: 18347 - protein, 70 aa, Synthetic construct
DSSCHNATTKMLATAPARGNMMSTSKPLAFSIERIMARTPEPKALPVPHFLQGALPKGEPPCMIPFVPVA

SEQ ID NO: 18348 - protein, 70 aa, Synthetic construct
DSSCHNATTKMLATAPARGNMMSTSKPLAFSIERIMARTPEPKALPVPHFLQGALPKGEPKHSLHFVPVA

SEQ ID NO: 18349 - protein, 70 aa, Synthetic construct
DSSCHNATTKMLATAPARGNMMSTSKPLAFSIERIMARTPEPKALPVPHFLQGALPKGEPKHSLHLNSSI

SEQ ID NO: 18350 - protein, 70 aa, Synthetic construct
LINHLHAVATQFLPTPQLLTQQVPLSKGTGAPSAAGSAAAPCLERAGQKLEPLAYCVPVIQRTQPSAELA

SEQ ID NO: 18351 - protein, 70 aa, Synthetic construct
WTPREHAVATQFLPTPQLLTQQVPLSKGTGAPSAAGSAAAPCLERAGQKLEPLAYCVPVIQRTQPSAELA

SEQ ID NO: 18352 - protein, 70 aa, Synthetic construct
WTPREPRCVQQFLPTPQLLTQQVPLSKGTGAPSAAGSAAAPCLERAGQKLEPLAYCVPVIQRTQPSAELA

SEQ ID NO: 18353 - protein, 70 aa, Synthetic construct
WTPREPRCVQLINHLPQLLTQQVPLSKGTGAPSAAGSAAAPCLERAGQKLEPLAYCVPVIQRTQPSAELA

SEQ ID NO: 18354 - protein, 70 aa, Synthetic construct
WTPREPRCVQLINHLHAVATQQVPLSKGTGAPSAAGSAAAPCLERAGQKLEPLAYCVPVIQRTQPSAELA

SEQ ID NO: 18355 - protein, 70 aa, Synthetic construct
WTPREPRCVQLINHLHAVATQFLPTSKGTGAPSAAGSAAAPCLERAGQKLEPLAYCVPVIQRTQPSAELA

SEQ ID NO: 18356 - protein, 70 aa, Synthetic construct
WTPREPRCVQLINHLHAVATQFLPTPQLLTAPSAAGSAAAPCLERAGQKLEPLAYCVPVIQRTQPSAELA

SEQ ID NO: 18357 - protein, 70 aa, Synthetic construct
WTPREPRCVQLINHLHAVATQFLPTPQLLTQQVPLGSAAAPCLERAGQKLEPLAYCVPVIQRTQPSAELA

SEQ ID NO: 18358 - protein, 70 aa, Synthetic construct
WTPREPRCVQLINHLHAVATQFLPTPQLLTQQVPLSKGTGPCLERAGQKLEPLAYCVPVIQRTQPSAELA

SEQ ID NO: 18359 - protein, 70 aa, Synthetic construct
WTPREPRCVQLINHLHAVATQFLPTPQLLTQQVPLSKGTGAPSAAAGQKLEPLAYCVPVIQRTQPSAELA

SEQ ID NO: 18360 - protein, 70 aa, Synthetic construct
WTPREPRCVQLINHLHAVATQFLPTPQLLTQQVPLSKGTGAPSAAGSAAAEPLAYCVPVIQRTQPSAELA

SEQ ID NO: 18361 - protein, 70 aa, Synthetic construct
EPLAYCVPVIQRTQPSAELAAENDTDTDSGYGGEAEARPDREKGKGAGASRVTIKQEPPGEDSPAPKRMK

SEQ ID NO: 18362 - protein, 70 aa, Synthetic construct
PCLERCVPVIQRTQPSAELAAENDTDTDSGYGGEAEARPDREKGKGAGASRVTIKQEPPGEDSPAPKRMK

SEQ ID NO: 18363 - protein, 70 aa, Synthetic construct
PCLERAGQKLQRTQPSAELAAENDTDTDSGYGGEAEARPDREKGKGAGASRVTIKQEPPGEDSPAPKRMK

SEQ ID NO: 18364 - protein, 70 aa, Synthetic construct
PCLERAGQKLEPLAYSAELAAENDTDTDSGYGGEAEARPDREKGKGAGASRVTIKQEPPGEDSPAPKRMK

SEQ ID NO: 18365 - protein, 70 aa, Synthetic construct
PCLERAGQKLEPLAYCVPVIAENDTDTDSGYGGEAEARPDREKGKGAGASRVTIKQEPPGEDSPAPKRMK

SEQ ID NO: 18366 - protein, 70 aa, Synthetic construct
PCLERAGQKLEPLAYCVPVIQRTQPDTDSGYGGEAEARPDREKGKGAGASRVTIKQEPPGEDSPAPKRMK

SEQ ID NO: 18367 - protein, 70 aa, Synthetic construct
PCLERAGQKLEPLAYCVPVIQRTQPSAELAYGGEAEARPDREKGKGAGASRVTIKQEPPGEDSPAPKRMK

SEQ ID NO: 18368 - protein, 70 aa, Synthetic construct
PCLERAGQKLEPLAYCVPVIQRTQPSAELAAENDTEARPDREKGKGAGASRVTIKQEPPGEDSPAPKRMK

SEQ ID NO: 18369 - protein, 70 aa, Synthetic construct
PCLERAGQKLEPLAYCVPVIQRTQPSAELAAENDTDTDSGREKGKGAGASRVTIKQEPPGEDSPAPKRMK

SEQ ID NO: 18370 - protein, 70 aa, Synthetic construct
PCLERAGQKLEPLAYCVPVIQRTQPSAELAAENDTDTDSGYGGEAGAGASRVTIKQEPPGEDSPAPKRMK

SEQ ID NO: 18371 - protein, 70 aa, Synthetic construct
PCLERAGQKLEPLAYCVPVIQRTQPSAELAAENDTDTDSGYGGEAEARPDRVTIKQEPPGEDSPAPKRMK

SEQ ID NO: 18372 - protein, 70 aa, Synthetic construct
PCLERAGQKLEPLAYCVPVIQRTQPSAELAAENDTDTDSGYGGEAEARPDREKGKQEPPGEDSPAPKRMK

SEQ ID NO: 18373 - protein, 70 aa, Synthetic construct
PCLERAGQKLEPLAYCVPVIQRTQPSAELAAENDTDTDSGYGGEAEARPDREKGKGAGASEDSPAPKRMK

SEQ ID NO: 18374 - protein, 70 aa, Synthetic construct
PCLERAGQKLEPLAYCVPVIQRTQPSAELAAENDTDTDSGYGGEAEARPDREKGKGAGASRVTIKPKRMK

SEQ ID NO: 18375 - protein, 70 aa, Synthetic construct
PCLERAGQKLEPLAYCVPVIQRTQPSAELAAENDTDTDSGYGGEAEARPDREKGKGAGASRVTIKQEPPG

SEQ ID NO: 18376 - protein, 70 aa, Synthetic construct
PATSKTLAFSIERIMEPRPGALEADGSQGKKLLNLCSPLPCMIPLQPLGYEVPSKTLLSYSELWKSSLRA

SEQ ID NO: 18377 - protein, 70 aa, Synthetic construct
PATSKTLAFSIERIMAKTSEALEADGSQGKKLLNLCSPLPCMIPLQPLGYEVPSKTLLSYSELWKSSLRA

SEQ ID NO: 18378 - protein, 70 aa, Synthetic construct
PATSKTLAFSIERIMAKTSEPRAPFGSQGKKLLNLCSPLPCMIPLQPLGYEVPSKTLLSYSELWKSSLRA

SEQ ID NO: 18379 - protein, 70 aa, Synthetic construct
PATSKTLAFSIERIMAKTSEPRAPFEPRPGKLLNLCSPLPCMIPLQPLGYEVPSKTLLSYSELWKSSLRA

SEQ ID NO: 18380 - protein, 70 aa, Synthetic construct
PATSKTLAFSIERIMAKTSEPRAPFEPRPGALEADCSPLPCMIPLQPLGYEVPSKTLLSYSELWKSSLRA

SEQ ID NO: 18381 - protein, 70 aa, Synthetic construct
PATSKTLAFSIERIMAKTSEPRAPFEPRPGALEADGSQGKCMIPLQPLGYEVPSKTLLSYSELWKSSLRA

SEQ ID NO: 18382 - protein, 70 aa, Synthetic construct
PATSKTLAFSIERIMAKTSEPRAPFEPRPGALEADGSQGKKLLNLQPLGYEVPSKTLLSYSELWKSSLRA

SEQ ID NO: 18383 - protein, 70 aa, Synthetic construct
PATSKTLAFSIERIMAKTSEPRAPFEPRPGALEADGSQGKKLLNLCSPLPEVPSKTLLSYSELWKSSLRA

SEQ ID NO: 18384 - protein, 70 aa, Synthetic construct
PATSKTLAFSIERIMAKTSEPRAPFEPRPGALEADGSQGKKLLNLCSPLPCMIPLTLLSYSELWKSSLRA

SEQ ID NO: 18385 - protein, 70 aa, Synthetic construct
PATSKTLAFSIERIMAKTSEPRAPFEPRPGALEADGSQGKKLLNLCSPLPCMIPLQPLGYSELWKSSLRA

SEQ ID NO: 18386 - protein, 70 aa, Synthetic construct
PATSKTLAFSIERIMAKTSEPRAPFEPRPGALEADGSQGKKLLNLCSPLPCMIPLQPLGYEVPSKSSLRA

SEQ ID NO: 18387 - protein, 70 aa, Synthetic construct
PATSKTLAFSIERIMAKTSEPRAPFEPRPGALEADGSQGKKLLNLCSPLPCMIPLQPLGYEVPSKTLLSY

SEQ ID NO: 18388 - protein, 70 aa, Synthetic construct
EVEGETLLIVESEDQASVDLSHDQSGDSLNSDEGDVSWMEEQLSYFCDKCQKWIPASQLREQLSYLKGDN

SEQ ID NO: 18389 - protein, 70 aa, Synthetic construct
TSTSETLLIVESEDQASVDLSHDQSGDSLNSDEGDVSWMEEQLSYFCDKCQKWIPASQLREQLSYLKGDN

SEQ ID NO: 18390 - protein, 70 aa, Synthetic construct
TSTSEGLEEGESEDQASVDLSHDQSGDSLNSDEGDVSWMEEQLSYFCDKCQKWIPASQLREQLSYLKGDN

SEQ ID NO: 18391 - protein, 70 aa, Synthetic construct
TSTSEGLEEGEVEGEASVDLSHDQSGDSLNSDEGDVSWMEEQLSYFCDKCQKWIPASQLREQLSYLKGDN

SEQ ID NO: 18392 - protein, 70 aa, Synthetic construct
TSTSEGLEEGEVEGETLLIVSHDQSGDSLNSDEGDVSWMEEQLSYFCDKCQKWIPASQLREQLSYLKGDN

SEQ ID NO: 18393 - protein, 70 aa, Synthetic construct
TSTSEGLEEGEVEGETLLIVESEDQGDSLNSDEGDVSWMEEQLSYFCDKCQKWIPASQLREQLSYLKGDN

SEQ ID NO: 18394 - protein, 70 aa, Synthetic construct
TSTSEGLEEGEVEGETLLIVESEDQASVDLSDEGDVSWMEEQLSYFCDKCQKWIPASQLREQLSYLKGDN

SEQ ID NO: 18395 - protein, 70 aa, Synthetic construct
TSTSEGLEEGEVEGETLLIVESEDQASVDLSHDQSVSWMEEQLSYFCDKCQKWIPASQLREQLSYLKGDN

SEQ ID NO: 18396 - protein, 70 aa, Synthetic construct
TSTSEGLEEGEVEGETLLIVESEDQASVDLSHDQSGDSLNEQLSYFCDKCQKWIPASQLREQLSYLKGDN

SEQ ID NO: 18397 - protein, 70 aa, Synthetic construct
TSTSEGLEEGEVEGETLLIVESEDQASVDLSHDQSGDSLNSDEGDVSWMEEQLSYFCDKCQKWIPLKGDN

SEQ ID NO: 18398 - protein, 70 aa, Synthetic construct
TSTSEGLEEGEVEGETLLIVESEDQASVDLSHDQSGDSLNSDEGDVSWMEEQLSYFCDKCQKWIPASQLR

SEQ ID NO: 18399 - protein, 70 aa, Synthetic construct
RNRMHNLNAALDALREVLPTFPEDAKLTKIETLRFAHNYIWALTETLRLADHCGGGGGGLPGALFSEAVL

SEQ ID NO: 18400 - protein, 70 aa, Synthetic construct
TRRLKNLNAALDALREVLPTFPEDAKLTKIETLRFAHNYIWALTETLRLADHCGGGGGGLPGALFSEAVL

SEQ ID NO: 18401 - protein, 70 aa, Synthetic construct
TRRLKANNRERNRMHNLNAALDALREVLPTFPEDAKLTKIETLRFAHNYIWALTETLRLAPGALFSEAVL

SEQ ID NO: 18402 - protein, 70 aa, Synthetic construct
TRRLKANNRERNRMHNLNAALDALREVLPTFPEDAKLTKIETLRFAHNYIWALTETLRLADHCGGSEAVL

SEQ ID NO: 18403 - protein, 70 aa, Synthetic construct
TRRLKANNRERNRMHNLNAALDALREVLPTFPEDAKLTKIETLRFAHNYIWALTETLRLADHCGGGGGGL

SEQ ID NO: 18404 - protein, 70 aa, Synthetic construct
HKKFRRQAYLSARALAPGFGSERGAPLAFACPLCGAHFPTADIREKHRLWHAVREELLLPALAGAPPETS

SEQ ID NO: 18405 - protein, 70 aa, Synthetic construct
HKKFRRQAYLRKHLSAPGFGSERGAPLAFACPLCGAHFPTADIREKHRLWHAVREELLLPALAGAPPETS

SEQ ID NO: 18406 - protein, 70 aa, Synthetic construct
HKKFRRQAYLRKHLSTHEAGSERGAPLAFACPLCGAHFPTADIREKHRLWHAVREELLLPALAGAPPETS

SEQ ID NO: 18407 - protein, 70 aa, Synthetic construct
HKKFRRQAYLRKHLSTHEAGSARALPLAFACPLCGAHFPTADIREKHRLWHAVREELLLPALAGAPPETS

SEQ ID NO: 18408 - protein, 70 aa, Synthetic construct
HKKFRRQAYLRKHLSTHEAGSARALAPGFGCPLCGAHFPTADIREKHRLWHAVREELLLPALAGAPPETS

SEQ ID NO: 18409 - protein, 70 aa, Synthetic construct
HKKFRRQAYLRKHLSTHEAGSARALAPGFGSERGAAHFPTADIREKHRLWHAVREELLLPALAGAPPETS

SEQ ID NO: 18410 - protein, 70 aa, Synthetic construct
HKKFRRQAYLRKHLSTHEAGSARALAPGFGSERGAPLAFAADIREKHRLWHAVREELLLPALAGAPPETS

SEQ ID NO: 18411 - protein, 70 aa, Synthetic construct
HKKFRRQAYLRKHLSTHEAGSARALAPGFGSERGAPLAFACPLCGKHRLWHAVREELLLPALAGAPPETS

SEQ ID NO: 18412 - protein, 70 aa, Synthetic construct
HKKFRRQAYLRKHLSTHEAGSARALAPGFGSERGAPLAFACPLCGAHFPTHAVREELLLPALAGAPPETS

SEQ ID NO: 18413 - protein, 70 aa, Synthetic construct
HKKFRRQAYLRKHLSTHEAGSARALAPGFGSERGAPLAFACPLCGAHFPTADIREELLLPALAGAPPETS

SEQ ID NO: 18414 - protein, 70 aa, Synthetic construct
HKKFRRQAYLRKHLSTHEAGSARALAPGFGSERGAPLAFACPLCGAHFPTADIREKHRLWALAGAPPETS

SEQ ID NO: 18415 - protein, 70 aa, Synthetic construct
HKKFRRQAYLRKHLSTHEAGSARALAPGFGSERGAPLAFACPLCGAHFPTADIREKHRLWHAVREPPETS

SEQ ID NO: 18416 - protein, 70 aa, Synthetic construct
HKKFRRQAYLRKHLSTHEAGSARALAPGFGSERGAPLAFACPLCGAHFPTADIREKHRLWHAVREELLLP

SEQ ID NO: 18417 - protein, 70 aa, Synthetic construct
QEAVQFLTLHAASDTQMKLLYHFQRPPAAPAAPAKEPKAPGAAPPPALSAKATAAAAAAHQPACGLWRPW

SEQ ID NO: 18418 - protein, 70 aa, Synthetic construct
DYSEGFLTLHAASDTQMKLLYHFQRPPAAPAAPAKEPKAPGAAPPPALSAKATAAAAAAHQPACGLWRPW

SEQ ID NO: 18419 - protein, 70 aa, Synthetic construct
DYSEGYSWCLAASDTQMKLLYHFQRPPAAPAAPAKEPKAPGAAPPPALSAKATAAAAAAHQPACGLWRPW

SEQ ID NO: 18420 - protein, 70 aa, Synthetic construct
DYSEGYSWCLQEAVQQMKLLYHFQRPPAAPAAPAKEPKAPGAAPPPALSAKATAAAAAAHQPACGLWRPW

SEQ ID NO: 18421 - protein, 70 aa, Synthetic construct
DYSEGYSWCLQEAVQFLTLHYHFQRPPAAPAAPAKEPKAPGAAPPPALSAKATAAAAAAHQPACGLWRPW

SEQ ID NO: 18422 - protein, 70 aa, Synthetic construct
DYSEGYSWCLQEAVQFLTLHAASDTPPAAPAAPAKEPKAPGAAPPPALSAKATAAAAAAHQPACGLWRPW

SEQ ID NO: 18423 - protein, 70 aa, Synthetic construct
DYSEGYSWCLQEAVQFLTLHAASDTQMKLLAAPAKEPKAPGAAPPPALSAKATAAAAAAHQPACGLWRPW

SEQ ID NO: 18424 - protein, 70 aa, Synthetic construct
DYSEGYSWCLQEAVQFLTLHAASDTQMKLLYHFQREPKAPGAAPPPALSAKATAAAAAAHQPACGLWRPW

SEQ ID NO: 18425 - protein, 70 aa, Synthetic construct
DYSEGYSWCLQEAVQFLTLHAASDTQMKLLYHFQRPPAAPGAAPPPALSAKATAAAAAAHQPACGLWRPW

SEQ ID NO: 18426 - protein, 70 aa, Synthetic construct
DYSEGYSWCLQEAVQFLTLHAASDTQMKLLYHFQRPPAAPAAPAKPALSAKATAAAAAAHQPACGLWRPW

SEQ ID NO: 18427 - protein, 70 aa, Synthetic construct
DYSEGYSWCLQEAVQFLTLHAASDTQMKLLYHFQRPPAAPAAPAKEPKAPKATAAAAAAHQPACGLWRPW

SEQ ID NO: 18428 - protein, 70 aa, Synthetic construct
DYSEGYSWCLQEAVQFLTLHAASDTQMKLLYHFQRPPAAPAAPAKEPKAPGAAPPAAAAHQPACGLWRPW

SEQ ID NO: 18429 - protein, 70 aa, Synthetic construct
DYSEGYSWCLQEAVQFLTLHAASDTQMKLLYHFQRPPAAPAAPAKEPKAPGAAPPPALSAQPACGLWRPW

SEQ ID NO: 18430 - protein, 70 aa, Synthetic construct
DYSEGYSWCLQEAVQFLTLHAASDTQMKLLYHFQRPPAAPAAPAKEPKAPGAAPPPALSAKATAALWRPW

SEQ ID NO: 18431 - protein, 70 aa, Synthetic construct
EQPCPGSDTSSAHYIILSDSLKEEVAHRDKKRCSKVVSFSKPIEKEETVGIFSPLSVKLNIVISPYHFDN

SEQ ID NO: 18432 - protein, 70 aa, Synthetic construct
NEPIIISDDDSAHYIILSDSLKEEVAHRDKKRCSKVVSFSKPIEKEETVGIFSPLSVKLNIVISPYHFDN

SEQ ID NO: 18433 - protein, 70 aa, Synthetic construct
NEPIIISDDDEQPCPILSDSLKEEVAHRDKKRCSKVVSFSKPIEKEETVGIFSPLSVKLNIVISPYHFDN

SEQ ID NO: 18434 - protein, 70 aa, Synthetic construct
NEPIIISDDDEQPCPGSDTSLKEEVAHRDKKRCSKVVSFSKPIEKEETVGIFSPLSVKLNIVISPYHFDN

SEQ ID NO: 18435 - protein, 70 aa, Synthetic construct
NEPIIISDDDEQPCPGSDTSSAHYIAHRDKKRCSKVVSFSKPIEKEETVGIFSPLSVKLNIVISPYHFDN

SEQ ID NO: 18436 - protein, 70 aa, Synthetic construct
NEPIIISDDDEQPCPGSDTSSAHYIILSDSKRCSKVVSFSKPIEKEETVGIFSPLSVKLNIVISPYHFDN

SEQ ID NO: 18437 - protein, 70 aa, Synthetic construct
NEPIIISDDDEQPCPGSDTSSAHYIILSDSLKEEVVVSFSKPIEKEETVGIFSPLSVKLNIVISPYHFDN

SEQ ID NO: 18438 - protein, 70 aa, Synthetic construct
NEPIIISDDDEQPCPGSDTSSAHYIILSDSLKEEVAHRDKKPIEKEETVGIFSPLSVKLNIVISPYHFDN

SEQ ID NO: 18439 - protein, 70 aa, Synthetic construct
NEPIIISDDDEQPCPGSDTSSAHYIILSDSLKEEVAHRDKKRCSKEETVGIFSPLSVKLNIVISPYHFDN

SEQ ID NO: 18440 - protein, 70 aa, Synthetic construct
NEPIIISDDDEQPCPGSDTSSAHYIILSDSLKEEVAHRDKKRCSKVVSFSKPIEKSVKLNIVISPYHFDN

SEQ ID NO: 18441 - protein, 70 aa, Synthetic construct
GDRPKILMDSPEDADLFHSEEIKAPEKEEFLAWQHDLEVNDKAPAQARPTVFRWTGGGKEVYLSGSFNNW

SEQ ID NO: 18442 - protein, 70 aa, Synthetic construct
RRDSSILMDSPEDADLFHSEEIKAPEKEEFLAWQHDLEVNDKAPAQARPTVFRWTGGGKEVYLSGSFNNW

SEQ ID NO: 18443 - protein, 70 aa, Synthetic construct
RRDSSGGTKDPEDADLFHSEEIKAPEKEEFLAWQHDLEVNDKAPAQARPTVFRWTGGGKEVYLSGSFNNW

SEQ ID NO: 18444 - protein, 70 aa, Synthetic construct
RRDSSGGTKDGDRPKLFHSEEIKAPEKEEFLAWQHDLEVNDKAPAQARPTVFRWTGGGKEVYLSGSFNNW

SEQ ID NO: 18445 - protein, 70 aa, Synthetic construct
RRDSSGGTKDGDRPKILMDSEIKAPEKEEFLAWQHDLEVNDKAPAQARPTVFRWTGGGKEVYLSGSFNNW

SEQ ID NO: 18446 - protein, 70 aa, Synthetic construct
RRDSSGGTKDGDRPKILMDSPEDADEKEEFLAWQHDLEVNDKAPAQARPTVFRWTGGGKEVYLSGSFNNW

SEQ ID NO: 18447 - protein, 70 aa, Synthetic construct
RRDSSGGTKDGDRPKILMDSPEDADLFHSELAWQHDLEVNDKAPAQARPTVFRWTGGGKEVYLSGSFNNW

SEQ ID NO: 18448 - protein, 70 aa, Synthetic construct
RRDSSGGTKDGDRPKILMDSPEDADLFHSEEIKAPDLEVNDKAPAQARPTVFRWTGGGKEVYLSGSFNNW

SEQ ID NO: 18449 - protein, 70 aa, Synthetic construct
RRDSSGGTKDGDRPKILMDSPEDADLFHSEEIKAPEKEEFDKAPAQARPTVFRWTGGGKEVYLSGSFNNW

SEQ ID NO: 18450 - protein, 70 aa, Synthetic construct
RRDSSGGTKDGDRPKILMDSPEDADLFHSEEIKAPEKEEFLAWQHQARPTVFRWTGGGKEVYLSGSFNNW

SEQ ID NO: 18451 - protein, 70 aa, Synthetic construct
RRDSSGGTKDGDRPKILMDSPEDADLFHSEEIKAPEKEEFLAWQHDLEVNDKAPAQARPTVFRWTGGGKE

SEQ ID NO: 18452 - protein, 70 aa, Synthetic construct
KWTETEIEMLRAAVKRFGDDLNHISCVIKERTVAQIKATVKRKVYEDSGIPLPAESPKKGPKKVASGVLS

SEQ ID NO: 18453 - protein, 70 aa, Synthetic construct
PVADSEIEMLRAAVKRFGDDLNHISCVIKERTVAQIKATVKRKVYEDSGIPLPAESPKKGPKKVASGVLS

SEQ ID NO: 18454 - protein, 70 aa, Synthetic construct
PVADSSPAGAKWTETEIEMLRAAVKCVIKERTVAQIKATVKRKVYEDSGIPLPAESPKKGPKKVASGVLS

SEQ ID NO: 18455 - protein, 70 aa, Synthetic construct
PVADSSPAGAKWTETEIEMLRAAVKRFGDDLNHISIKATVKRKVYEDSGIPLPAESPKKGPKKVASGVLS

SEQ ID NO: 18456 - protein, 70 aa, Synthetic construct
PVADSSPAGAKWTETEIEMLRAAVKRFGDDLNHISCVIKEKRKVYEDSGIPLPAESPKKGPKKVASGVLS

SEQ ID NO: 18457 - protein, 70 aa, Synthetic construct
PVADSSPAGAKWTETEIEMLRAAVKRFGDDLNHISCVIKERTVAQIKATVPLPAESPKKGPKKVASGVLS

SEQ ID NO: 18458 - protein, 70 aa, Synthetic construct
PVADSSPAGAKWTETEIEMLRAAVKRFGDDLNHISCVIKERTVAQIKATVKRKVYSPKKGPKKVASGVLS

SEQ ID NO: 18459 - protein, 70 aa, Synthetic construct
PVADSSPAGAKWTETEIEMLRAAVKRFGDDLNHISCVIKERTVAQIKATVKRKVYEDSGIPKKVASGVLS

SEQ ID NO: 18460 - protein, 70 aa, Synthetic construct
PVADSSPAGAKWTETEIEMLRAAVKRFGDDLNHISCVIKERTVAQIKATVKRKVYEDSGIPLPAESGVLS

SEQ ID NO: 18461 - protein, 70 aa, Synthetic construct
EEMRSSYIRELIKAIGLRQKGVVSSLDNLHDLVKQLHLYCLNTFIQSRALSVEFPEMMSEVIAAQLPKIL

SEQ ID NO: 18462 - protein, 70 aa, Synthetic construct
EEMRSSYIRELIKAIGLRQKGVVSSSQRFYQLTKLLDNLHDLVKQLHLYCSVEFPEMMSEVIAAQLPKIL

SEQ ID NO: 18463 - protein, 70 aa, Synthetic construct
EEMRSSYIRELIKAIGLRQKGVVSSSQRFYQLTKLLDNLHDLVKQLHLYCLNTFIQSRALVIAAQLPKIL

SEQ ID NO: 18464 - protein, 70 aa, Synthetic construct
EEMRSSYIRELIKAIGLRQKGVVSSSQRFYQLTKLLDNLHDLVKQLHLYCLNTFIQSRALSVEFPLPKIL

SEQ ID NO: 18465 - protein, 70 aa, Synthetic construct
EEMRSSYIRELIKAIGLRQKGVVSSSQRFYQLTKLLDNLHDLVKQLHLYCLNTFIQSRALSVEFPEMMSE

SEQ ID NO: 18466 - protein, 70 aa, Synthetic construct
VWSPDIEQSFQEALAIYPPCGRRKIILSDEGKMYGRNELIARYIKLRTGKTRTRKQVSSHIQVLARRKAR

SEQ ID NO: 18467 - protein, 70 aa, Synthetic construct
DKPIDNDAEGVWSPDIEQSFQEALAIYPPCGKMYGRNELIARYIKLRTGKTRTRKQVSSHIQVLARRKAR

SEQ ID NO: 18468 - protein, 70 aa, Synthetic construct
GLELEGDKEKKGKIFHIDTNALHVPRDGAEVMSPLKNGMIEDWECFRAILDHTYSKHVKSEPNLHPVLMS

SEQ ID NO: 18469 - protein, 70 aa, Synthetic construct
VGLLAGDKEKKGKIFHIDTNALHVPRDGAEVMSPLKNGMIEDWECFRAILDHTYSKHVKSEPNLHPVLMS

SEQ ID NO: 18470 - protein, 70 aa, Synthetic construct
VGLLAAEEGGKGKIFHIDTNALHVPRDGAEVMSPLKNGMIEDWECFRAILDHTYSKHVKSEPNLHPVLMS

SEQ ID NO: 18471 - protein, 70 aa, Synthetic construct
VGLLAAEEGGGLELEHIDTNALHVPRDGAEVMSPLKNGMIEDWECFRAILDHTYSKHVKSEPNLHPVLMS

SEQ ID NO: 18472 - protein, 70 aa, Synthetic construct
VGLLAAEEGGGLELEGDKEKALHVPRDGAEVMSPLKNGMIEDWECFRAILDHTYSKHVKSEPNLHPVLMS

SEQ ID NO: 18473 - protein, 70 aa, Synthetic construct
VGLLAAEEGGGLELEGDKEKKGKIFRDGAEVMSPLKNGMIEDWECFRAILDHTYSKHVKSEPNLHPVLMS

SEQ ID NO: 18474 - protein, 70 aa, Synthetic construct
VGLLAAEEGGGLELEGDKEKKGKIFHIDTNVMSPLKNGMIEDWECFRAILDHTYSKHVKSEPNLHPVLMS

SEQ ID NO: 18475 - protein, 70 aa, Synthetic construct
VGLLAAEEGGGLELEGDKEKKGKIFHIDTNALHVPKNGMIEDWECFRAILDHTYSKHVKSEPNLHPVLMS

SEQ ID NO: 18476 - protein, 70 aa, Synthetic construct
VGLLAAEEGGGLELEGDKEKKGKIFHIDTNALHVPRDGAEEDWECFRAILDHTYSKHVKSEPNLHPVLMS

SEQ ID NO: 18477 - protein, 70 aa, Synthetic construct
VGLLAAEEGGGLELEGDKEKKGKIFHIDTNALHVPRDGAEVMSPLFRAILDHTYSKHVKSEPNLHPVLMS

SEQ ID NO: 18478 - protein, 70 aa, Synthetic construct
VGLLAAEEGGGLELEGDKEKKGKIFHIDTNALHVPRDGAEVMSPLKNGMIDHTYSKHVKSEPNLHPVLMS

SEQ ID NO: 18479 - protein, 70 aa, Synthetic construct
VGLLAAEEGGGLELEGDKEKKGKIFHIDTNALHVPRDGAEVMSPLKNGMIEDWECKHVKSEPNLHPVLMS

SEQ ID NO: 18480 - protein, 70 aa, Synthetic construct
APGRSGWPAGGAPGSPIPSPPGPGDDLCSDLEEAPEAELSQAPAEGPDLVPAALGSLTTAQIARSVWRPW

SEQ ID NO: 18481 - protein, 70 aa, Synthetic construct
LGDALGWPAGGAPGSPIPSPPGPGDDLCSDLEEAPEAELSQAPAEGPDLVPAALGSLTTAQIARSVWRPW

SEQ ID NO: 18482 - protein, 70 aa, Synthetic construct
LGDALAGPPRGAPGSPIPSPPGPGDDLCSDLEEAPEAELSQAPAEGPDLVPAALGSLTTAQIARSVWRPW

SEQ ID NO: 18483 - protein, 70 aa, Synthetic construct
LGDALAGPPRAPGRSPIPSPPGPGDDLCSDLEEAPEAELSQAPAEGPDLVPAALGSLTTAQIARSVWRPW

SEQ ID NO: 18484 - protein, 70 aa, Synthetic construct
LGDALAGPPRAPGRSGWPAGPGPGDDLCSDLEEAPEAELSQAPAEGPDLVPAALGSLTTAQIARSVWRPW

SEQ ID NO: 18485 - protein, 70 aa, Synthetic construct
LGDALAGPPRAPGRSGWPAGGAPGSDLCSDLEEAPEAELSQAPAEGPDLVPAALGSLTTAQIARSVWRPW

SEQ ID NO: 18486 - protein, 70 aa, Synthetic construct
LGDALAGPPRAPGRSGWPAGGAPGSPIPSPLEEAPEAELSQAPAEGPDLVPAALGSLTTAQIARSVWRPW

SEQ ID NO: 18487 - protein, 70 aa, Synthetic construct
LGDALAGPPRAPGRSGWPAGGAPGSPIPSPPGPGDEAELSQAPAEGPDLVPAALGSLTTAQIARSVWRPW

SEQ ID NO: 18488 - protein, 70 aa, Synthetic construct
LGDALAGPPRAPGRSGWPAGGAPGSPIPSPPGPGDDLCSDQAPAEGPDLVPAALGSLTTAQIARSVWRPW

SEQ ID NO: 18489 - protein, 70 aa, Synthetic construct
LGDALAGPPRAPGRSGWPAGGAPGSPIPSPPGPGDDLCSDLEEAPGPDLVPAALGSLTTAQIARSVWRPW

SEQ ID NO: 18490 - protein, 70 aa, Synthetic construct
LGDALAGPPRAPGRSGWPAGGAPGSPIPSPPGPGDDLCSDLEEAPEAELSPAALGSLTTAQIARSVWRPW

SEQ ID NO: 18491 - protein, 70 aa, Synthetic construct
LGDALAGPPRAPGRSGWPAGGAPGSPIPSPPGPGDDLCSDLEEAPEAELSQAPAESLTTAQIARSVWRPW

SEQ ID NO: 18492 - protein, 70 aa, Synthetic construct
LGDALAGPPRAPGRSGWPAGGAPGSPIPSPPGPGDDLCSDLEEAPEAELSQAPAEGPDLVQIARSVWRPW

SEQ ID NO: 18493 - protein, 70 aa, Synthetic construct
LGDALAGPPRAPGRSGWPAGGAPGSPIPSPPGPGDDLCSDLEEAPEAELSQAPAEGPDLVPAALGVWRPW

SEQ ID NO: 18494 - protein, 70 aa, Synthetic construct
HTHLPQTPETNFRDSSYPFANKESIGSELGNSFASNIRIKEEPLDDEYDKAMAPQQGLLDKIKDEPDNAQ

SEQ ID NO: 18495 - protein, 70 aa, Synthetic construct
KAANQQTPETNFRDSSYPFANKESIGSELGNSFASNIRIKEEPLDDEYDKAMAPQQGLLDKIKDEPDNAQ

SEQ ID NO: 18496 - protein, 70 aa, Synthetic construct
KAANQVEETLNFRDSSYPFANKESIGSELGNSFASNIRIKEEPLDDEYDKAMAPQQGLLDKIKDEPDNAQ

SEQ ID NO: 18497 - protein, 70 aa, Synthetic construct
KAANQVEETLHTHLPSYPFANKESIGSELGNSFASNIRIKEEPLDDEYDKAMAPQQGLLDKIKDEPDNAQ

SEQ ID NO: 18498 - protein, 70 aa, Synthetic construct
KAANQVEETLHTHLPQTPETNKESIGSELGNSFASNIRIKEEPLDDEYDKAMAPQQGLLDKIKDEPDNAQ

SEQ ID NO: 18499 - protein, 70 aa, Synthetic construct
KAANQVEETLHTHLPQTPETNFRDSGSELGNSFASNIRIKEEPLDDEYDKAMAPQQGLLDKIKDEPDNAQ

SEQ ID NO: 18500 - protein, 70 aa, Synthetic construct
KAANQVEETLHTHLPQTPETNFRDSSYPFANSFASNIRIKEEPLDDEYDKAMAPQQGLLDKIKDEPDNAQ

SEQ ID NO: 18501 - protein, 70 aa, Synthetic construct
KAANQVEETLHTHLPQTPETNFRDSSYPFANKESINIRIKEEPLDDEYDKAMAPQQGLLDKIKDEPDNAQ

SEQ ID NO: 18502 - protein, 70 aa, Synthetic construct
KAANQVEETLHTHLPQTPETNFRDSSYPFANKESIGSELGEEPLDDEYDKAMAPQQGLLDKIKDEPDNAQ

SEQ ID NO: 18503 - protein, 70 aa, Synthetic construct
KAANQVEETLHTHLPQTPETNFRDSSYPFANKESIGSELGNSFASDEYDKAMAPQQGLLDKIKDEPDNAQ

SEQ ID NO: 18504 - protein, 70 aa, Synthetic construct
KAANQVEETLHTHLPQTPETNFRDSSYPFANKESIGSELGNSFASNIRIKAMAPQQGLLDKIKDEPDNAQ

SEQ ID NO: 18505 - protein, 70 aa, Synthetic construct
KAANQVEETLHTHLPQTPETNFRDSSYPFANKESIGSELGNSFASNIRIKEEPLDQGLLDKIKDEPDNAQ

SEQ ID NO: 18506 - protein, 70 aa, Synthetic construct
KAANQVEETLHTHLPQTPETNFRDSSYPFANKESIGSELGNSFASNIRIKEEPLDDEYDKKIKDEPDNAQ

SEQ ID NO: 18507 - protein, 70 aa, Synthetic construct
KAANQVEETLHTHLPQTPETNFRDSSYPFANKESIGSELGNSFASNIRIKEEPLDDEYDKAMAPQPDNAQ

SEQ ID NO: 18508 - protein, 70 aa, Synthetic construct
KAANQVEETLHTHLPQTPETNFRDSSYPFANKESIGSELGNSFASNIRIKEEPLDDEYDKAMAPQQGLLD

SEQ ID NO: 18509 - protein, 70 aa, Synthetic construct
NSFASNIRIKEEPLDDEYDKAMAPQQGLLDKIKDEPDNAQEYSHGQQQKTQEGELKISAVFSVSGSPLAP

SEQ ID NO: 18510 - protein, 70 aa, Synthetic construct
NKESINIRIKEEPLDDEYDKAMAPQQGLLDKIKDEPDNAQEYSHGQQQKTQEGELKISAVFSVSGSPLAP

SEQ ID NO: 18511 - protein, 70 aa, Synthetic construct
NKESIGSELGEEPLDDEYDKAMAPQQGLLDKIKDEPDNAQEYSHGQQQKTQEGELKISAVFSVSGSPLAP

SEQ ID NO: 18512 - protein, 70 aa, Synthetic construct
NKESIGSELGNSFASDEYDKAMAPQQGLLDKIKDEPDNAQEYSHGQQQKTQEGELKISAVFSVSGSPLAP

SEQ ID NO: 18513 - protein, 70 aa, Synthetic construct
NKESIGSELGNSFASNIRIKAMAPQQGLLDKIKDEPDNAQEYSHGQQQKTQEGELKISAVFSVSGSPLAP

SEQ ID NO: 18514 - protein, 70 aa, Synthetic construct
NKESIGSELGNSFASNIRIKEEPLDQGLLDKIKDEPDNAQEYSHGQQQKTQEGELKISAVFSVSGSPLAP

SEQ ID NO: 18515 - protein, 70 aa, Synthetic construct
NKESIGSELGNSFASNIRIKEEPLDDEYDKKIKDEPDNAQEYSHGQQQKTQEGELKISAVFSVSGSPLAP

SEQ ID NO: 18516 - protein, 70 aa, Synthetic construct
NKESIGSELGNSFASNIRIKEEPLDDEYDKAMAPQPDNAQEYSHGQQQKTQEGELKISAVFSVSGSPLAP

SEQ ID NO: 18517 - protein, 70 aa, Synthetic construct
NKESIGSELGNSFASNIRIKEEPLDDEYDKAMAPQQGLLDEYSHGQQQKTQEGELKISAVFSVSGSPLAP

SEQ ID NO: 18518 - protein, 70 aa, Synthetic construct
NKESIGSELGNSFASNIRIKEEPLDDEYDKAMAPQQGLLDKIKDEQQQKTQEGELKISAVFSVSGSPLAP

SEQ ID NO: 18519 - protein, 70 aa, Synthetic construct
NKESIGSELGNSFASNIRIKEEPLDDEYDKAMAPQQGLLDKIKDEPDNAQQEGELKISAVFSVSGSPLAP

SEQ ID NO: 18520 - protein, 70 aa, Synthetic construct
NKESIGSELGNSFASNIRIKEEPLDDEYDKAMAPQQGLLDKIKDEPDNAQEYSHGKISAVFSVSGSPLAP

SEQ ID NO: 18521 - protein, 70 aa, Synthetic construct
NKESIGSELGNSFASNIRIKEEPLDDEYDKAMAPQQGLLDKIKDEPDNAQEYSHGQQQKTFSVSGSPLAP

SEQ ID NO: 18522 - protein, 70 aa, Synthetic construct
NKESIGSELGNSFASNIRIKEEPLDDEYDKAMAPQQGLLDKIKDEPDNAQEYSHGQQQKTQEGELSPLAP

SEQ ID NO: 18523 - protein, 70 aa, Synthetic construct
SCKTSAIPQYNFCSYSCVVAFQNLFNKPTGMNSSVVPLSQGQVIVSIPTGSTVSAGGGSTSAVSPTSISS

SEQ ID NO: 18524 - protein, 70 aa, Synthetic construct
SCKTSAIPQYHLAMSDGSIRNFCSYSCVVAFQNLFVPLSQGQVIVSIPTGSTVSAGGGSTSAVSPTSISS

SEQ ID NO: 18525 - protein, 70 aa, Synthetic construct
SCKTSAIPQYHLAMSDGSIRNFCSYSCVVAFQNLFNKPTGGQVIVSIPTGSTVSAGGGSTSAVSPTSISS

SEQ ID NO: 18526 - protein, 70 aa, Synthetic construct
SCKTSAIPQYHLAMSDGSIRNFCSYSCVVAFQNLFNKPTGMNSSVSIPTGSTVSAGGGSTSAVSPTSISS

SEQ ID NO: 18527 - protein, 70 aa, Synthetic construct
SCKTSAIPQYHLAMSDGSIRNFCSYSCVVAFQNLFNKPTGMNSSVVPLSQSTVSAGGGSTSAVSPTSISS

SEQ ID NO: 18528 - protein, 70 aa, Synthetic construct
SCKTSAIPQYHLAMSDGSIRNFCSYSCVVAFQNLFNKPTGMNSSVVPLSQGQVIVGGGSTSAVSPTSISS

SEQ ID NO: 18529 - protein, 70 aa, Synthetic construct
SCKTSAIPQYHLAMSDGSIRNFCSYSCVVAFQNLFNKPTGMNSSVVPLSQGQVIVSIPTGSAVSPTSISS

SEQ ID NO: 18530 - protein, 70 aa, Synthetic construct
SCKTSAIPQYHLAMSDGSIRNFCSYSCVVAFQNLFNKPTGMNSSVVPLSQGQVIVSIPTGSTVSATSISS

SEQ ID NO: 18531 - protein, 70 aa, Synthetic construct
SCKTSAIPQYHLAMSDGSIRNFCSYSCVVAFQNLFNKPTGMNSSVVPLSQGQVIVSIPTGSTVSAGGGST

SEQ ID NO: 18532 - protein, 70 aa, Synthetic construct
GDASTQTDALKLPPSQPPRLLKNKALLCKPITQTKATSCKPHTQNKECQTEDTPSQPQIIVVPVPVPVFV

SEQ ID NO: 18533 - protein, 70 aa, Synthetic construct
AVPTVQTDALKLPPSQPPRLLKNKALLCKPITQTKATSCKPHTQNKECQTEDTPSQPQIIVVPVPVPVFV

SEQ ID NO: 18534 - protein, 70 aa, Synthetic construct
AVPTVTAKIIKLPPSQPPRLLKNKALLCKPITQTKATSCKPHTQNKECQTEDTPSQPQIIVVPVPVPVFV

SEQ ID NO: 18535 - protein, 70 aa, Synthetic construct
AVPTVTAKIIGDASTQPPRLLKNKALLCKPITQTKATSCKPHTQNKECQTEDTPSQPQIIVVPVPVPVFV

SEQ ID NO: 18536 - protein, 70 aa, Synthetic construct
AVPTVTAKIIGDASTQTDALLKNKALLCKPITQTKATSCKPHTQNKECQTEDTPSQPQIIVVPVPVPVFV

SEQ ID NO: 18537 - protein, 70 aa, Synthetic construct
AVPTVTAKIIGDASTQTDALKLPPSQPPRLITQTKATSCKPHTQNKECQTEDTPSQPQIIVVPVPVPVFV

SEQ ID NO: 18538 - protein, 70 aa, Synthetic construct
AVPTVTAKIIGDASTQTDALKLPPSQPPRLLKNKAATSCKPHTQNKECQTEDTPSQPQIIVVPVPVPVFV

SEQ ID NO: 18539 - protein, 70 aa, Synthetic construct
AVPTVTAKIIGDASTQTDALKLPPSQPPRLLKNKALLCKPPHTQNKECQTEDTPSQPQIIVVPVPVPVFV

SEQ ID NO: 18540 - protein, 70 aa, Synthetic construct
AVPTVTAKIIGDASTQTDALKLPPSQPPRLLKNKALLCKPITQTKATSCKEDTPSQPQIIVVPVPVPVFV

SEQ ID NO: 18541 - protein, 70 aa, Synthetic construct
AVPTVTAKIIGDASTQTDALKLPPSQPPRLLKNKALLCKPITQTKATSCKPHTQNQPQIIVVPVPVPVFV

SEQ ID NO: 18542 - protein, 70 aa, Synthetic construct
AVPTVTAKIIGDASTQTDALKLPPSQPPRLLKNKALLCKPITQTKATSCKPHTQNKECQTVVPVPVPVFV

SEQ ID NO: 18543 - protein, 70 aa, Synthetic construct
AVPTVTAKIIGDASTQTDALKLPPSQPPRLLKNKALLCKPITQTKATSCKPHTQNKECQTEDTPSVPVFV

SEQ ID NO: 18544 - protein, 70 aa, Synthetic construct
AVPTVTAKIIGDASTQTDALKLPPSQPPRLLKNKALLCKPITQTKATSCKPHTQNKECQTEDTPSQPQII

SEQ ID NO: 18545 - protein, 70 aa, Synthetic construct
NTLLFFNTKYKLSFAHVMRRTRTLKYSTKMTYLRFFPPLQKQESEPDKLTVGKRKRNEDDEVPVGVEMAE

SEQ ID NO: 18546 - protein, 70 aa, Synthetic construct
NTLLFFNTKYFQLKNVTEHLKLSFAHVMRRTYLRFFPPLQKQESEPDKLTVGKRKRNEDDEVPVGVEMAE

SEQ ID NO: 18547 - protein, 70 aa, Synthetic construct
NTLLFFNTKYFQLKNVTEHLKLSFAHVMRRTRTLKFPPLQKQESEPDKLTVGKRKRNEDDEVPVGVEMAE

SEQ ID NO: 18548 - protein, 70 aa, Synthetic construct
NTLLFFNTKYFQLKNVTEHLKLSFAHVMRRTRTLKYSTKMTYLRFFPPLQVGKRKRNEDDEVPVGVEMAE

SEQ ID NO: 18549 - protein, 70 aa, Synthetic construct
NTLLFFNTKYFQLKNVTEHLKLSFAHVMRRTRTLKYSTKMTYLRFFPPLQKQESEPDKLTEVPVGVEMAE

SEQ ID NO: 18550 - protein, 70 aa, Synthetic construct
NTLLFFNTKYFQLKNVTEHLKLSFAHVMRRTRTLKYSTKMTYLRFFPPLQKQESEPDKLTVGKRKRNEDD

SEQ ID NO: 18551 - protein, 70 aa, Synthetic construct
PHTKVVRRIFTNSRERWRQQNVNGAFAELRKLIPTHPPDKKLSKNEILRLAMKYINFLAKLLNDQEEEGT

SEQ ID NO: 18552 - protein, 70 aa, Synthetic construct
SPYEMVRRIFTNSRERWRQQNVNGAFAELRKLIPTHPPDKKLSKNEILRLAMKYINFLAKLLNDQEEEGT

SEQ ID NO: 18553 - protein, 70 aa, Synthetic construct
SPYEMEITDGTNSRERWRQQNVNGAFAELRKLIPTHPPDKKLSKNEILRLAMKYINFLAKLLNDQEEEGT

SEQ ID NO: 18554 - protein, 70 aa, Synthetic construct
SPYEMEITDGPHTKVRWRQQNVNGAFAELRKLIPTHPPDKKLSKNEILRLAMKYINFLAKLLNDQEEEGT

SEQ ID NO: 18555 - protein, 70 aa, Synthetic construct
SPYEMEITDGPHTKVVRRIFNVNGAFAELRKLIPTHPPDKKLSKNEILRLAMKYINFLAKLLNDQEEEGT

SEQ ID NO: 18556 - protein, 70 aa, Synthetic construct
SPYEMEITDGPHTKVVRRIFTNSREFAELRKLIPTHPPDKKLSKNEILRLAMKYINFLAKLLNDQEEEGT

SEQ ID NO: 18557 - protein, 70 aa, Synthetic construct
SPYEMEITDGPHTKVVRRIFTNSRERWRQQKLIPTHPPDKKLSKNEILRLAMKYINFLAKLLNDQEEEGT

SEQ ID NO: 18558 - protein, 70 aa, Synthetic construct
SPYEMEITDGPHTKVVRRIFTNSRERWRQQNVNGAHPPDKKLSKNEILRLAMKYINFLAKLLNDQEEEGT

SEQ ID NO: 18559 - protein, 70 aa, Synthetic construct
SPYEMEITDGPHTKVVRRIFTNSRERWRQQNVNGAFAELRKLIPTHPPDKKLSKNEILRLAMKYIEEEGT

SEQ ID NO: 18560 - protein, 70 aa, Synthetic construct
FGKNTVKSDATDDSPKPAGVAVKTPTEKVEKMFPHRKNVNKPVGGTNVPEMFIKKEELQELKCADVEDED

SEQ ID NO: 18561 - protein, 70 aa, Synthetic construct
FGKNTVKSDADGTEGKPAGVAVKTPTEKVEKMFPHRKNVNKPVGGTNVPEMFIKKEELQELKCADVEDED

SEQ ID NO: 18562 - protein, 70 aa, Synthetic construct
FGKNTVKSDADGTEGSEIEDTDDSPTEKVEKMFPHRKNVNKPVGGTNVPEMFIKKEELQELKCADVEDED

SEQ ID NO: 18563 - protein, 70 aa, Synthetic construct
FGKNTVKSDADGTEGSEIEDTDDSPKPAGVKMFPHRKNVNKPVGGTNVPEMFIKKEELQELKCADVEDED

SEQ ID NO: 18564 - protein, 70 aa, Synthetic construct
FGKNTVKSDADGTEGSEIEDTDDSPKPAGVAVKTPRKNVNKPVGGTNVPEMFIKKEELQELKCADVEDED

SEQ ID NO: 18565 - protein, 70 aa, Synthetic construct
FGKNTVKSDADGTEGSEIEDTDDSPKPAGVAVKTPTEKVEKPVGGTNVPEMFIKKEELQELKCADVEDED

SEQ ID NO: 18566 - protein, 70 aa, Synthetic construct
FGKNTVKSDADGTEGSEIEDTDDSPKPAGVAVKTPTEKVEKMFPHTNVPEMFIKKEELQELKCADVEDED

SEQ ID NO: 18567 - protein, 70 aa, Synthetic construct
FGKNTVKSDADGTEGSEIEDTDDSPKPAGVAVKTPTEKVEKMFPHRKNVNKPVGGTNVPEMFIKKEELQE

SEQ ID NO: 18568 - protein, 70 aa, Synthetic construct
KVLQSSANSAVSFPGLIPSTEVKREGIQTVASQDGGSVVTFTTPVQINQYGIVQIPNSGANSQFLNGSIG

SEQ ID NO: 18569 - protein, 70 aa, Synthetic construct
KVLQSSANSATTTSYSPSVPVSFPGLIPSTEVKREGSVVTFTTPVQINQYGIVQIPNSGANSQFLNGSIG

SEQ ID NO: 18570 - protein, 70 aa, Synthetic construct
LKSTTKMSLNERFTNNIRASMQQQQQLASARNRRLAQQMENRPSVQAALKLKQSLKQRLGKSNIQARLGR

SEQ ID NO: 18571 - protein, 70 aa, Synthetic construct
LKSTTKMSLNERFTNMLKNKMQQQQQLASARNRRLAQQMENRPSVQAALKLKQSLKQRLGKSNIQARLGR

SEQ ID NO: 18572 - protein, 70 aa, Synthetic construct
LKSTTKMSLNERFTNMLKNKQPTPVQLASARNRRLAQQMENRPSVQAALKLKQSLKQRLGKSNIQARLGR

SEQ ID NO: 18573 - protein, 70 aa, Synthetic construct
LKSTTKMSLNERFTNMLKNKQPTPVNIRASRNRRLAQQMENRPSVQAALKLKQSLKQRLGKSNIQARLGR

SEQ ID NO: 18574 - protein, 70 aa, Synthetic construct
LKSTTKMSLNERFTNMLKNKQPTPVNIRASMQQQQAQQMENRPSVQAALKLKQSLKQRLGKSNIQARLGR

SEQ ID NO: 18575 - protein, 70 aa, Synthetic construct
LKSTTKMSLNERFTNMLKNKQPTPVNIRASMQQQQQLASANRPSVQAALKLKQSLKQRLGKSNIQARLGR

SEQ ID NO: 18576 - protein, 70 aa, Synthetic construct
LKSTTKMSLNERFTNMLKNKQPTPVNIRASMQQQQQLASARNRRLQAALKLKQSLKQRLGKSNIQARLGR

SEQ ID NO: 18577 - protein, 70 aa, Synthetic construct
LKSTTKMSLNERFTNMLKNKQPTPVNIRASMQQQQQLASARNRRLAQQMELKQSLKQRLGKSNIQARLGR

SEQ ID NO: 18578 - protein, 70 aa, Synthetic construct
LKSTTKMSLNERFTNMLKNKQPTPVNIRASMQQQQQLASARNRRLAQQMENRPSVKQRLGKSNIQARLGR

SEQ ID NO: 18579 - protein, 70 aa, Synthetic construct
LKSTTKMSLNERFTNMLKNKQPTPVNIRASMQQQQQLASARNRRLAQQMENRPSVQAALKKSNIQARLGR

SEQ ID NO: 18580 - protein, 70 aa, Synthetic construct
LKSTTKMSLNERFTNMLKNKQPTPVNIRASMQQQQQLASARNRRLAQQMENRPSVQAALKLKQSLARLGR

SEQ ID NO: 18581 - protein, 70 aa, Synthetic construct
LKSTTKMSLNERFTNMLKNKQPTPVNIRASMQQQQQLASARNRRLAQQMENRPSVQAALKLKQSLKQRLG

SEQ ID NO: 18582 - protein, 70 aa, Synthetic construct
KRKTTNADRRLSKVNEAFETLKRCTSSNPNQRLPKVEILRNAIRYIEGLQALLRDQDAAPPGAAAAFYAP

SEQ ID NO: 18583 - protein, 70 aa, Synthetic construct
KRKTTNADRRKAATMRERRRLSKVNEAFETLKRCTSSNPNQRLPKVEILRNAIRYIEGLQALLRDQDAAP

SEQ ID NO: 18584 - protein, 70 aa, Synthetic construct
HKSPICVLNEMMQNEEKYEKILKALVAQKLASSDDFISQNVIPLEAYRNGLKTEALSVSASEEEGLNFLN

SEQ ID NO: 18585 - protein, 70 aa, Synthetic construct
HKSPICVLNEMMQNEEKYEKILKALNSRRIASSDDFISQNVIPLEAYRNGLKTEALSVSASEEEGLNFLN

SEQ ID NO: 18586 - protein, 70 aa, Synthetic construct
HKSPICVLNEMMQNEEKYEKILKALNSRRIIPRPFFISQNVIPLEAYRNGLKTEALSVSASEEEGLNFLN

SEQ ID NO: 18587 - protein, 70 aa, Synthetic construct
HKSPICVLNEMMQNEEKYEKILKALNSRRIIPRPFVAQKLVIPLEAYRNGLKTEALSVSASEEEGLNFLN

SEQ ID NO: 18588 - protein, 70 aa, Synthetic construct
HKSPICVLNEMMQNEEKYEKILKALNSRRIIPRPFVAQKLASSDDAYRNGLKTEALSVSASEEEGLNFLN

SEQ ID NO: 18589 - protein, 70 aa, Synthetic construct
HKSPICVLNEMMQNEEKYEKILKALNSRRIIPRPFVAQKLASSDDFISQNLKTEALSVSASEEEGLNFLN

SEQ ID NO: 18590 - protein, 70 aa, Synthetic construct
HKSPICVLNEMMQNEEKYEKILKALNSRRIIPRPFVAQKLASSDDFISQNVIPLELSVSASEEEGLNFLN

SEQ ID NO: 18591 - protein, 70 aa, Synthetic construct
HKSPICVLNEMMQNEEKYEKILKALNSRRIIPRPFVAQKLASSDDFISQNVIPLEAYRNGSEEEGLNFLN

SEQ ID NO: 18592 - protein, 70 aa, Synthetic construct
HKSPICVLNEMMQNEEKYEKILKALNSRRIIPRPFVAQKLASSDDFISQNVIPLEAYRNGLKTEALNFLN

SEQ ID NO: 18593 - protein, 70 aa, Synthetic construct
HKSPICVLNEMMQNEEKYEKILKALNSRRIIPRPFVAQKLASSDDFISQNVIPLEAYRNGLKTEALSVSA

SEQ ID NO: 18594 - protein, 70 aa, Synthetic construct
DCKQKKSRSRSGSKKKMLTLPHGADEVYILRCRFCGLVFRGPLSVQEDWIKHLQRHIVNANLPRTGAGMV

SEQ ID NO: 18595 - protein, 70 aa, Synthetic construct
KMDLTKSRSRSGSKKKMLTLPHGADEVYILRCRFCGLVFRGPLSVQEDWIKHLQRHIVNANLPRTGAGMV

SEQ ID NO: 18596 - protein, 70 aa, Synthetic construct
KMDLTMHSALSGSKKKMLTLPHGADEVYILRCRFCGLVFRGPLSVQEDWIKHLQRHIVNANLPRTGAGMV

SEQ ID NO: 18597 - protein, 70 aa, Synthetic construct
KMDLTMHSALDCKQKKMLTLPHGADEVYILRCRFCGLVFRGPLSVQEDWIKHLQRHIVNANLPRTGAGMV

SEQ ID NO: 18598 - protein, 70 aa, Synthetic construct
KMDLTMHSALDCKQKKSRSRPHGADEVYILRCRFCGLVFRGPLSVQEDWIKHLQRHIVNANLPRTGAGMV

SEQ ID NO: 18599 - protein, 70 aa, Synthetic construct
KMDLTMHSALDCKQKKSRSRSGSKKEVYILRCRFCGLVFRGPLSVQEDWIKHLQRHIVNANLPRTGAGMV

SEQ ID NO: 18600 - protein, 70 aa, Synthetic construct
KMDLTMHSALDCKQKKSRSRSGSKKKMLTLRCRFCGLVFRGPLSVQEDWIKHLQRHIVNANLPRTGAGMV

SEQ ID NO: 18601 - protein, 70 aa, Synthetic construct
KMDLTMHSALDCKQKKSRSRSGSKKKMLTLPHGADEVYILRCRFCQEDWIKHLQRHIVNANLPRTGAGMV

SEQ ID NO: 18602 - protein, 70 aa, Synthetic construct
KMDLTMHSALDCKQKKSRSRSGSKKKMLTLPHGADEVYILRCRFCGLVFRGPLSVHIVNANLPRTGAGMV

SEQ ID NO: 18603 - protein, 70 aa, Synthetic construct
KMDLTMHSALDCKQKKSRSRSGSKKKMLTLPHGADEVYILRCRFCGLVFRGPLSVQEDWINLPRTGAGMV

SEQ ID NO: 18604 - protein, 70 aa, Synthetic construct
KMDLTMHSALDCKQKKSRSRSGSKKKMLTLPHGADEVYILRCRFCGLVFRGPLSVQEDWIKHLQRHIVNA

SEQ ID NO: 18605 - protein, 70 aa, Synthetic construct
VLPKGLDLDRPKRTRTSFTAEQLYRLEMEFQRCQYVVGRESETQVKVWFQNRRTKQKKDQSRDLEKRASS

SEQ ID NO: 18606 - protein, 70 aa, Synthetic construct
VLPKGLDLDRPKRTRTSFTAEQLYRLEMEFQRCQYVVGRERTELARQLNLSETQVKVWFQNRRTKQKKDQ

SEQ ID NO: 18607 - protein, 70 aa, Synthetic construct
EMAPQSVSPRESYRENKRKQKLPQQQQQSFQQLVSARKEQKREERRQLKQQLEDMQKQLRQLQEKFYQIY

SEQ ID NO: 18608 - protein, 70 aa, Synthetic construct
VALRGSVSPRESYRENKRKQKLPQQQQQSFQQLVSARKEQKREERRQLKQQLEDMQKQLRQLQEKFYQIY

SEQ ID NO: 18609 - protein, 70 aa, Synthetic construct
VALRGNENERESYRENKRKQKLPQQQQQSFQQLVSARKEQKREERRQLKQQLEDMQKQLRQLQEKFYQIY

SEQ ID NO: 18610 - protein, 70 aa, Synthetic construct
VALRGNENEREMAPQNKRKQKLPQQQQQSFQQLVSARKEQKREERRQLKQQLEDMQKQLRQLQEKFYQIY

SEQ ID NO: 18611 - protein, 70 aa, Synthetic construct
VALRGNENEREMAPQSVSPRKLPQQQQQSFQQLVSARKEQKREERRQLKQQLEDMQKQLRQLQEKFYQIY

SEQ ID NO: 18612 - protein, 70 aa, Synthetic construct
VALRGNENEREMAPQSVSPRESYREQQQSFQQLVSARKEQKREERRQLKQQLEDMQKQLRQLQEKFYQIY

SEQ ID NO: 18613 - protein, 70 aa, Synthetic construct
VALRGNENEREMAPQSVSPRESYRENKRKQQQLVSARKEQKREERRQLKQQLEDMQKQLRQLQEKFYQIY

SEQ ID NO: 18614 - protein, 70 aa, Synthetic construct
VALRGNENEREMAPQSVSPRESYRENKRKQKLPQQARKEQKREERRQLKQQLEDMQKQLRQLQEKFYQIY

SEQ ID NO: 18615 - protein, 70 aa, Synthetic construct
VALRGNENEREMAPQSVSPRESYRENKRKQKLPQQQQQSFKREERRQLKQQLEDMQKQLRQLQEKFYQIY

SEQ ID NO: 18616 - protein, 70 aa, Synthetic construct
VALRGNENEREMAPQSVSPRESYRENKRKQKLPQQQQQSFQQLVSRQLKQQLEDMQKQLRQLQEKFYQIY

SEQ ID NO: 18617 - protein, 70 aa, Synthetic construct
EIEVCPECYLAACQKRDNWFCEPCSNPHPLVWAKLKGFPFWPAKALRDKDGQVDARFFGQHDRAWVPINN

SEQ ID NO: 18618 - protein, 70 aa, Synthetic construct
VIKICPECYLAACQKRDNWFCEPCSNPHPLVWAKLKGFPFWPAKALRDKDGQVDARFFGQHDRAWVPINN

SEQ ID NO: 18619 - protein, 70 aa, Synthetic construct
VIKICEHEMNEIEVCPECYLCEPCSNPHPLVWAKLKGFPFWPAKALRDKDGQVDARFFGQHDRAWVPINN

SEQ ID NO: 18620 - protein, 70 aa, Synthetic construct
VIKICEHEMNEIEVCPECYLAACQKNPHPLVWAKLKGFPFWPAKALRDKDGQVDARFFGQHDRAWVPINN

SEQ ID NO: 18621 - protein, 70 aa, Synthetic construct
VIKICEHEMNEIEVCPECYLAACQKRDNWFVWAKLKGFPFWPAKALRDKDGQVDARFFGQHDRAWVPINN

SEQ ID NO: 18622 - protein, 70 aa, Synthetic construct
VIKICEHEMNEIEVCPECYLAACQKRDNWFCEPCSKGFPFWPAKALRDKDGQVDARFFGQHDRAWVPINN

SEQ ID NO: 18623 - protein, 70 aa, Synthetic construct
VIKICEHEMNEIEVCPECYLAACQKRDNWFCEPCSNPHPLWPAKALRDKDGQVDARFFGQHDRAWVPINN

SEQ ID NO: 18624 - protein, 70 aa, Synthetic construct
VIKICEHEMNEIEVCPECYLAACQKRDNWFCEPCSNPHPLVWAKLLRDKDGQVDARFFGQHDRAWVPINN

SEQ ID NO: 18625 - protein, 70 aa, Synthetic construct
VIKICEHEMNEIEVCPECYLAACQKRDNWFCEPCSNPHPLVWAKLKGFPFGQVDARFFGQHDRAWVPINN

SEQ ID NO: 18626 - protein, 70 aa, Synthetic construct
VIKICEHEMNEIEVCPECYLAACQKRDNWFCEPCSNPHPLVWAKLKGFPFWPAKARFFGQHDRAWVPINN

SEQ ID NO: 18627 - protein, 70 aa, Synthetic construct
VIKICEHEMNEIEVCPECYLAACQKRDNWFCEPCSNPHPLVWAKLKGFPFWPAKALRDKDHDRAWVPINN

SEQ ID NO: 18628 - protein, 70 aa, Synthetic construct
VIKICEHEMNEIEVCPECYLAACQKRDNWFCEPCSNPHPLVWAKLKGFPFWPAKALRDKDGQVDAVPINN

SEQ ID NO: 18629 - protein, 70 aa, Synthetic construct
VIKICEHEMNEIEVCPECYLAACQKRDNWFCEPCSNPHPLVWAKLKGFPFWPAKALRDKDGQVDARFFGQ

SEQ ID NO: 18630 - protein, 70 aa, Synthetic construct
TSPASEKADPGAVKDKASPEPEKDFSEKAKPSPHPIKDKLKGKDETDSPTVHLGLDSDSESELVIDLGED

SEQ ID NO: 18631 - protein, 70 aa, Synthetic construct
PVEIKEKADPGAVKDKASPEPEKDFSEKAKPSPHPIKDKLKGKDETDSPTVHLGLDSDSESELVIDLGED

SEQ ID NO: 18632 - protein, 70 aa, Synthetic construct
PVEIKEELKSGAVKDKASPEPEKDFSEKAKPSPHPIKDKLKGKDETDSPTVHLGLDSDSESELVIDLGED

SEQ ID NO: 18633 - protein, 70 aa, Synthetic construct
PVEIKEELKSTSPASKASPEPEKDFSEKAKPSPHPIKDKLKGKDETDSPTVHLGLDSDSESELVIDLGED

SEQ ID NO: 18634 - protein, 70 aa, Synthetic construct
PVEIKEELKSTSPASEKADPPEKDFSEKAKPSPHPIKDKLKGKDETDSPTVHLGLDSDSESELVIDLGED

SEQ ID NO: 18635 - protein, 70 aa, Synthetic construct
PVEIKEELKSTSPASEKADPGAVKDSEKAKPSPHPIKDKLKGKDETDSPTVHLGLDSDSESELVIDLGED

SEQ ID NO: 18636 - protein, 70 aa, Synthetic construct
PVEIKEELKSTSPASEKADPGAVKDKASPEPSPHPIKDKLKGKDETDSPTVHLGLDSDSESELVIDLGED

SEQ ID NO: 18637 - protein, 70 aa, Synthetic construct
PVEIKEELKSTSPASEKADPGAVKDKASPEPEKDFIKDKLKGKDETDSPTVHLGLDSDSESELVIDLGED

SEQ ID NO: 18638 - protein, 70 aa, Synthetic construct
PVEIKEELKSTSPASEKADPGAVKDKASPEPEKDFSEKAKKGKDETDSPTVHLGLDSDSESELVIDLGED

SEQ ID NO: 18639 - protein, 70 aa, Synthetic construct
PVEIKEELKSTSPASEKADPGAVKDKASPEPEKDFSEKAKPSPHPTDSPTVHLGLDSDSESELVIDLGED

SEQ ID NO: 18640 - protein, 70 aa, Synthetic construct
PVEIKEELKSTSPASEKADPGAVKDKASPEPEKDFSEKAKPSPHPIKDKLVHLGLDSDSESELVIDLGED

SEQ ID NO: 18641 - protein, 70 aa, Synthetic construct
PVEIKEELKSTSPASEKADPGAVKDKASPEPEKDFSEKAKPSPHPIKDKLKGKDEDSDSESELVIDLGED

SEQ ID NO: 18642 - protein, 70 aa, Synthetic construct
PVEIKEELKSTSPASEKADPGAVKDKASPEPEKDFSEKAKPSPHPIKDKLKGKDETDSPTVHLGLDLGED

SEQ ID NO: 18643 - protein, 70 aa, Synthetic construct
TASADVAADIAKYTSKMMDAIKGTMTEIYNDLSKNTTGSTIAEIRRLRIEIEKLQWLHQQELSEMKHNLE

SEQ ID NO: 18644 - protein, 70 aa, Synthetic construct
SSVNAVAADIAKYTSKMMDAIKGTMTEIYNDLSKNTTGSTIAEIRRLRIEIEKLQWLHQQELSEMKHNLE

SEQ ID NO: 18645 - protein, 70 aa, Synthetic construct
SSVNADLPIATASADKMMDAIKGTMTEIYNDLSKNTTGSTIAEIRRLRIEIEKLQWLHQQELSEMKHNLE

SEQ ID NO: 18646 - protein, 70 aa, Synthetic construct
SSVNADLPIATASADVAADIAKYTSKMMDAIKGTMTEIYNDLSKNRLRIEIEKLQWLHQQELSEMKHNLE

SEQ ID NO: 18647 - protein, 70 aa, Synthetic construct
SSVNADLPIATASADVAADIAKYTSKMMDAIKGTMTEIYNDLSKNTTGSTIEKLQWLHQQELSEMKHNLE

SEQ ID NO: 18648 - protein, 70 aa, Synthetic construct
SSVNADLPIATASADVAADIAKYTSKMMDAIKGTMTEIYNDLSKNTTGSTIAEIRRLRIEELSEMKHNLE

SEQ ID NO: 18649 - protein, 70 aa, Synthetic construct
SSVNADLPIATASADVAADIAKYTSKMMDAIKGTMTEIYNDLSKNTTGSTIAEIRRLRIEIEKLQKHNLE

SEQ ID NO: 18650 - protein, 70 aa, Synthetic construct
SSVNADLPIATASADVAADIAKYTSKMMDAIKGTMTEIYNDLSKNTTGSTIAEIRRLRIEIEKLQWLHQQ

SEQ ID NO: 18651 - protein, 70 aa, Synthetic construct
IAEIRRLRIEIEKLQKHNLELTMAEMRQSLEQERDRLIAEVKKQLELEKQQAVDETKKKQWCANCKKEAI

SEQ ID NO: 18652 - protein, 70 aa, Synthetic construct
IAEIRRLRIEIEKLQWLHQQLTMAEMRQSLEQERDRLIAEVKKQLELEKQQAVDETKKKQWCANCKKEAI

SEQ ID NO: 18653 - protein, 70 aa, Synthetic construct
IAEIRRLRIEIEKLQWLHQQELSEMMRQSLEQERDRLIAEVKKQLELEKQQAVDETKKKQWCANCKKEAI

SEQ ID NO: 18654 - protein, 70 aa, Synthetic construct
IAEIRRLRIEIEKLQWLHQQELSEMKHNLELTMAERLIAEVKKQLELEKQQAVDETKKKQWCANCKKEAI

SEQ ID NO: 18655 - protein, 70 aa, Synthetic construct
IAEIRRLRIEIEKLQWLHQQELSEMKHNLELTMAEMRQSLEQERDRLIAEQAVDETKKKQWCANCKKEAI

SEQ ID NO: 18656 - protein, 70 aa, Synthetic construct
IAEIRRLRIEIEKLQWLHQQELSEMKHNLELTMAEMRQSLEQERDRLIAEVKKQLTKKKQWCANCKKEAI

SEQ ID NO: 18657 - protein, 70 aa, Synthetic construct
IAEIRRLRIEIEKLQWLHQQELSEMKHNLELTMAEMRQSLEQERDRLIAEVKKQLELEKQWCANCKKEAI

SEQ ID NO: 18658 - protein, 70 aa, Synthetic construct
IAEIRRLRIEIEKLQWLHQQELSEMKHNLELTMAEMRQSLEQERDRLIAEVKKQLELEKQQAVDETKKKQ

SEQ ID NO: 18659 - protein, 70 aa, Synthetic construct
DVKNEIVDRSAPKPKISGSIHYALKNVKIDLPKINIPNEVLLKHEVDKYRKLFQSKQQTARKSISIKTVS

SEQ ID NO: 18660 - protein, 70 aa, Synthetic construct
EKQTTIVDRSAPKPKISGSIHYALKNVKIDLPKINIPNEVLLKHEVDKYRKLFQSKQQTARKSISIKTVS

SEQ ID NO: 18661 - protein, 70 aa, Synthetic construct
EKQTTLKKDYAPKPKISGSIHYALKNVKIDLPKINIPNEVLLKHEVDKYRKLFQSKQQTARKSISIKTVS

SEQ ID NO: 18662 - protein, 70 aa, Synthetic construct
EKQTTLKKDYDVKNEISGSIHYALKNVKIDLPKINIPNEVLLKHEVDKYRKLFQSKQQTARKSISIKTVS

SEQ ID NO: 18663 - protein, 70 aa, Synthetic construct
EKQTTLKKDYDVKNEIVDRSHYALKNVKIDLPKINIPNEVLLKHEVDKYRKLFQSKQQTARKSISIKTVS

SEQ ID NO: 18664 - protein, 70 aa, Synthetic construct
EKQTTLKKDYDVKNEIVDRSAPKPKISGSIHYALKNVKIDLPKINIPNEVLLKHEVDKYRKLFQSKQQTA

SEQ ID NO: 18665 - protein, 70 aa, Synthetic construct
PRITSVFSLQEVNQLLQDVLKIKPDVKQDSSNTPNKGLPLHCDQSFQKHEREGKIVESSKDFKVQGIFPV

SEQ ID NO: 18666 - protein, 70 aa, Synthetic construct
PRITSVFSLQSQQASLQDVLKIKPDVKQDSSNTPNKGLPLHCDQSFQKHEREGKIVESSKDFKVQGIFPV

SEQ ID NO: 18667 - protein, 70 aa, Synthetic construct
PRITSVFSLQSQQASEFLPPKIKPDVKQDSSNTPNKGLPLHCDQSFQKHEREGKIVESSKDFKVQGIFPV

SEQ ID NO: 18668 - protein, 70 aa, Synthetic construct
PRITSVFSLQSQQASEFLPPEVNQLVKQDSSNTPNKGLPLHCDQSFQKHEREGKIVESSKDFKVQGIFPV

SEQ ID NO: 18669 - protein, 70 aa, Synthetic construct
PRITSVFSLQSQQASEFLPPEVNQLLQDVLSNTPNKGLPLHCDQSFQKHEREGKIVESSKDFKVQGIFPV

SEQ ID NO: 18670 - protein, 70 aa, Synthetic construct
PRITSVFSLQSQQASEFLPPEVNQLLQDVLKIKPDKGLPLHCDQSFQKHEREGKIVESSKDFKVQGIFPV

SEQ ID NO: 18671 - protein, 70 aa, Synthetic construct
PRITSVFSLQSQQASEFLPPEVNQLLQDVLKIKPDVKQDSHCDQSFQKHEREGKIVESSKDFKVQGIFPV

SEQ ID NO: 18672 - protein, 70 aa, Synthetic construct
PRITSVFSLQSQQASEFLPPEVNQLLQDVLKIKPDVKQDSSNTPNFQKHEREGKIVESSKDFKVQGIFPV

SEQ ID NO: 18673 - protein, 70 aa, Synthetic construct
PRITSVFSLQSQQASEFLPPEVNQLLQDVLKIKPDVKQDSSNTPNKGLPLREGKIVESSKDFKVQGIFPV

SEQ ID NO: 18674 - protein, 70 aa, Synthetic construct
PRITSVFSLQSQQASEFLPPEVNQLLQDVLKIKPDVKQDSSNTPNKGLPLHCDQSVESSKDFKVQGIFPV

SEQ ID NO: 18675 - protein, 70 aa, Synthetic construct
PRITSVFSLQSQQASEFLPPEVNQLLQDVLKIKPDVKQDSSNTPNKGLPLHCDQSFQKHEDFKVQGIFPV

SEQ ID NO: 18676 - protein, 70 aa, Synthetic construct
PRITSVFSLQSQQASEFLPPEVNQLLQDVLKIKPDVKQDSSNTPNKGLPLHCDQSFQKHEREGKIGIFPV

SEQ ID NO: 18677 - protein, 70 aa, Synthetic construct
PRITSVFSLQSQQASEFLPPEVNQLLQDVLKIKPDVKQDSSNTPNKGLPLHCDQSFQKHEREGKIVESSK

SEQ ID NO: 18678 - protein, 70 aa, Synthetic construct
DSIRTLRLFPFSSKQLVKCPRRNQPVVVLNHPDADIAKFNGHVLKVSLSKRTINALLKPVCYNPPKTTYD

SEQ ID NO: 18679 - protein, 70 aa, Synthetic construct
DSIRTLRLFPFSSKQLVKCPRRNQPVVVLNHPDADAPEVVGHVLKVSLSKRTINALLKPVCYNPPKTTYD

SEQ ID NO: 18680 - protein, 70 aa, Synthetic construct
DSIRTLRLFPFSSKQLVKCPRRNQPVVVLNHPDADAPEVVSVMKTVSLSKRTINALLKPVCYNPPKTTYD

SEQ ID NO: 18681 - protein, 70 aa, Synthetic construct
DSIRTLRLFPFSSKQLVKCPRRNQPVVVLNHPDADAPEVVSVMKTIAKFNRTINALLKPVCYNPPKTTYD

SEQ ID NO: 18682 - protein, 70 aa, Synthetic construct
DSIRTLRLFPFSSKQLVKCPRRNQPVVVLNHPDADAPEVVSVMKTIAKFNGHVLKLLKPVCYNPPKTTYD

SEQ ID NO: 18683 - protein, 70 aa, Synthetic construct
DSIRTLRLFPFSSKQLVKCPRRNQPVVVLNHPDADAPEVVSVMKTIAKFNGHVLKVSLSKCYNPPKTTYD

SEQ ID NO: 18684 - protein, 70 aa, Synthetic construct
DSIRTLRLFPFSSKQLVKCPRRNQPVVVLNHPDADAPEVVSVMKTIAKFNGHVLKVSLSKRTINAKTTYD

SEQ ID NO: 18685 - protein, 70 aa, Synthetic construct
DSIRTLRLFPFSSKQLVKCPRRNQPVVVLNHPDADAPEVVSVMKTIAKFNGHVLKVSLSKRTINALLKPV

SEQ ID NO: 18686 - protein, 70 aa, Synthetic construct
VCKRKSVSVDRRRAATLREKRRLKKVNEAFEALKRSTLLNPNQRLPKVEILRSAIQYIERLQALLSSLNQ

SEQ ID NO: 18687 - protein, 70 aa, Synthetic construct
PGQCLSVSVDRRRAATLREKRRLKKVNEAFEALKRSTLLNPNQRLPKVEILRSAIQYIERLQALLSSLNQ

SEQ ID NO: 18688 - protein, 70 aa, Synthetic construct
PGQCLPWACKVCKRKSVSVDRRRAATLREKEALKRSTLLNPNQRLPKVEILRSAIQYIERLQALLSSLNQ

SEQ ID NO: 18689 - protein, 70 aa, Synthetic construct
PGQCLPWACKVCKRKSVSVDRRRAATLREKRRLKKVNEAFEALKRSTLLNLRSAIQYIERLQALLSSLNQ

SEQ ID NO: 18690 - protein, 70 aa, Synthetic construct
GLIHSPLICTTPKHYIRFGSPFIPERRRRPLLPDGTFSSCKKRWIKQALEEGMTQTSSVPQETRTQHLYQ

SEQ ID NO: 18691 - protein, 70 aa, Synthetic construct
VLATTPLICTTPKHYIRFGSPFIPERRRRPLLPDGTFSSCKKRWIKQALEEGMTQTSSVPQETRTQHLYQ

SEQ ID NO: 18692 - protein, 70 aa, Synthetic construct
VLATTLNMLPTPKHYIRFGSPFIPERRRRPLLPDGTFSSCKKRWIKQALEEGMTQTSSVPQETRTQHLYQ

SEQ ID NO: 18693 - protein, 70 aa, Synthetic construct
VLATTLNMLPGLIHSIRFGSPFIPERRRRPLLPDGTFSSCKKRWIKQALEEGMTQTSSVPQETRTQHLYQ

SEQ ID NO: 18694 - protein, 70 aa, Synthetic construct
VLATTLNMLPGLIHSPLICTPFIPERRRRPLLPDGTFSSCKKRWIKQALEEGMTQTSSVPQETRTQHLYQ

SEQ ID NO: 18695 - protein, 70 aa, Synthetic construct
VLATTLNMLPGLIHSPLICTTPKHYRRRRPLLPDGTFSSCKKRWIKQALEEGMTQTSSVPQETRTQHLYQ

SEQ ID NO: 18696 - protein, 70 aa, Synthetic construct
VLATTLNMLPGLIHSPLICTTPKHYIRFGSLLPDGTFSSCKKRWIKQALEEGMTQTSSVPQETRTQHLYQ

SEQ ID NO: 18697 - protein, 70 aa, Synthetic construct
VLATTLNMLPGLIHSPLICTTPKHYIRFGSPFIPETFSSCKKRWIKQALEEGMTQTSSVPQETRTQHLYQ

SEQ ID NO: 18698 - protein, 70 aa, Synthetic construct
VLATTLNMLPGLIHSPLICTTPKHYIRFGSPFIPERRRRPLLPDGTFSSCKKRWIKQALEQETRTQHLYQ

SEQ ID NO: 18699 - protein, 70 aa, Synthetic construct
VLATTLNMLPGLIHSPLICTTPKHYIRFGSPFIPERRRRPLLPDGTFSSCKKRWIKQALEEGMTQQHLYQ

SEQ ID NO: 18700 - protein, 70 aa, Synthetic construct
VLATTLNMLPGLIHSPLICTTPKHYIRFGSPFIPERRRRPLLPDGTFSSCKKRWIKQALEEGMTQTSSVP

SEQ ID NO: 18701 - protein, 70 aa, Synthetic construct
KKRWIKQALEEGMTQTSSVPQETRTQHLYQSNENSSSSSICKDNADLLSPLKKWKSRYLMEQNVTKLLRP

SEQ ID NO: 18702 - protein, 70 aa, Synthetic construct
LLPDGKQALEEGMTQTSSVPQETRTQHLYQSNENSSSSSICKDNADLLSPLKKWKSRYLMEQNVTKLLRP

SEQ ID NO: 18703 - protein, 70 aa, Synthetic construct
LLPDGTFSSCEGMTQTSSVPQETRTQHLYQSNENSSSSSICKDNADLLSPLKKWKSRYLMEQNVTKLLRP

SEQ ID NO: 18704 - protein, 70 aa, Synthetic construct
LLPDGTFSSCKKRWITSSVPQETRTQHLYQSNENSSSSSICKDNADLLSPLKKWKSRYLMEQNVTKLLRP

SEQ ID NO: 18705 - protein, 70 aa, Synthetic construct
LLPDGTFSSCKKRWIKQALEQETRTQHLYQSNENSSSSSICKDNADLLSPLKKWKSRYLMEQNVTKLLRP

SEQ ID NO: 18706 - protein, 70 aa, Synthetic construct
LLPDGTFSSCKKRWIKQALEEGMTQQHLYQSNENSSSSSICKDNADLLSPLKKWKSRYLMEQNVTKLLRP

SEQ ID NO: 18707 - protein, 70 aa, Synthetic construct
LLPDGTFSSCKKRWIKQALEEGMTQTSSVPSNENSSSSSICKDNADLLSPLKKWKSRYLMEQNVTKLLRP

SEQ ID NO: 18708 - protein, 70 aa, Synthetic construct
LLPDGTFSSCKKRWIKQALEEGMTQTSSVPQETRTSSSSICKDNADLLSPLKKWKSRYLMEQNVTKLLRP

SEQ ID NO: 18709 - protein, 70 aa, Synthetic construct
LLPDGTFSSCKKRWIKQALEEGMTQTSSVPQETRTQHLYQCKDNADLLSPLKKWKSRYLMEQNVTKLLRP

SEQ ID NO: 18710 - protein, 70 aa, Synthetic construct
LLPDGTFSSCKKRWIKQALEEGMTQTSSVPQETRTQHLYQSNENSDLLSPLKKWKSRYLMEQNVTKLLRP

SEQ ID NO: 18711 - protein, 70 aa, Synthetic construct
LLPDGTFSSCKKRWIKQALEEGMTQTSSVPQETRTQHLYQSNENSSSSSILKKWKSRYLMEQNVTKLLRP

SEQ ID NO: 18712 - protein, 70 aa, Synthetic construct
LLPDGTFSSCKKRWIKQALEEGMTQTSSVPQETRTQHLYQSNENSSSSSICKDNASRYLMEQNVTKLLRP

SEQ ID NO: 18713 - protein, 70 aa, Synthetic construct
LLPDGTFSSCKKRWIKQALEEGMTQTSSVPQETRTQHLYQSNENSSSSSICKDNADLLSPEQNVTKLLRP

SEQ ID NO: 18714 - protein, 70 aa, Synthetic construct
LLPDGTFSSCKKRWIKQALEEGMTQTSSVPQETRTQHLYQSNENSSSSSICKDNADLLSPLKKWKKLLRP

SEQ ID NO: 18715 - protein, 70 aa, Synthetic construct
LLPDGTFSSCKKRWIKQALEEGMTQTSSVPQETRTQHLYQSNENSSSSSICKDNADLLSPLKKWKSRYLM

SEQ ID NO: 18716 - protein, 70 aa, Synthetic construct
VKQENISFLSPSSLVPYDCSMEPIDLSIPKNFRKGDKDLATPSEAKKPEEEAGSSEQPSPCPAPGPSLPV

SEQ ID NO: 18717 - protein, 70 aa, Synthetic construct
FSQKGLALVQVKQENPYDCSMEPIDLSIPKNFRKGDKDLATPSEAKKPEEEAGSSEQPSPCPAPGPSLPV

SEQ ID NO: 18718 - protein, 70 aa, Synthetic construct
FSQKGLALVQVKQENISFLSMEPIDLSIPKNFRKGDKDLATPSEAKKPEEEAGSSEQPSPCPAPGPSLPV

SEQ ID NO: 18719 - protein, 70 aa, Synthetic construct
FSQKGLALVQVKQENISFLSPSSLVLSIPKNFRKGDKDLATPSEAKKPEEEAGSSEQPSPCPAPGPSLPV

SEQ ID NO: 18720 - protein, 70 aa, Synthetic construct
FSQKGLALVQVKQENISFLSPSSLVPYDCSNFRKGDKDLATPSEAKKPEEEAGSSEQPSPCPAPGPSLPV

SEQ ID NO: 18721 - protein, 70 aa, Synthetic construct
FSQKGLALVQVKQENISFLSPSSLVPYDCSMEPIDDKDLATPSEAKKPEEEAGSSEQPSPCPAPGPSLPV

SEQ ID NO: 18722 - protein, 70 aa, Synthetic construct
FSQKGLALVQVKQENISFLSPSSLVPYDCSMEPIDLSIPKTPSEAKKPEEEAGSSEQPSPCPAPGPSLPV

SEQ ID NO: 18723 - protein, 70 aa, Synthetic construct
FSQKGLALVQVKQENISFLSPSSLVPYDCSMEPIDLSIPKNFRKGKKPEEEAGSSEQPSPCPAPGPSLPV

SEQ ID NO: 18724 - protein, 70 aa, Synthetic construct
FSQKGLALVQVKQENISFLSPSSLVPYDCSMEPIDLSIPKNFRKGDKDLAEAGSSEQPSPCPAPGPSLPV

SEQ ID NO: 18725 - protein, 70 aa, Synthetic construct
FSQKGLALVQVKQENISFLSPSSLVPYDCSMEPIDLSIPKNFRKGDKDLATPSEAEQPSPCPAPGPSLPV

SEQ ID NO: 18726 - protein, 70 aa, Synthetic construct
FSQKGLALVQVKQENISFLSPSSLVPYDCSMEPIDLSIPKNFRKGDKDLATPSEAKKPEECPAPGPSLPV

SEQ ID NO: 18727 - protein, 70 aa, Synthetic construct
FSQKGLALVQVKQENISFLSPSSLVPYDCSMEPIDLSIPKNFRKGDKDLATPSEAKKPEEEAGSSPSLPV

SEQ ID NO: 18728 - protein, 70 aa, Synthetic construct
FSQKGLALVQVKQENISFLSPSSLVPYDCSMEPIDLSIPKNFRKGDKDLATPSEAKKPEEEAGSSEQPSP

SEQ ID NO: 18729 - protein, 70 aa, Synthetic construct
CVLCMECFLGSIHRDHRYRMTTSGGGGFCDCGDTEAWKEGPYCQKHELNTSEIEEEEDPLVHLSEDVIAR

SEQ ID NO: 18730 - protein, 70 aa, Synthetic construct
SCRDCAVDPTCVLCMECFLGTTSGGGGFCDCGDTEAWKEGPYCQKHELNTSEIEEEEDPLVHLSEDVIAR

SEQ ID NO: 18731 - protein, 70 aa, Synthetic construct
SCRDCAVDPTCVLCMECFLGSIHRDGGFCDCGDTEAWKEGPYCQKHELNTSEIEEEEDPLVHLSEDVIAR

SEQ ID NO: 18732 - protein, 70 aa, Synthetic construct
SCRDCAVDPTCVLCMECFLGSIHRDHRYRMCGDTEAWKEGPYCQKHELNTSEIEEEEDPLVHLSEDVIAR

SEQ ID NO: 18733 - protein, 70 aa, Synthetic construct
SCRDCAVDPTCVLCMECFLGSIHRDHRYRMTTSGGAWKEGPYCQKHELNTSEIEEEEDPLVHLSEDVIAR

SEQ ID NO: 18734 - protein, 70 aa, Synthetic construct
SCRDCAVDPTCVLCMECFLGSIHRDHRYRMTTSGGGGFCDPYCQKHELNTSEIEEEEDPLVHLSEDVIAR

SEQ ID NO: 18735 - protein, 70 aa, Synthetic construct
SCRDCAVDPTCVLCMECFLGSIHRDHRYRMTTSGGGGFCDCGDTEHELNTSEIEEEEDPLVHLSEDVIAR

SEQ ID NO: 18736 - protein, 70 aa, Synthetic construct
SCRDCAVDPTCVLCMECFLGSIHRDHRYRMTTSGGGGFCDCGDTEAWKEGSEIEEEEDPLVHLSEDVIAR

SEQ ID NO: 18737 - protein, 70 aa, Synthetic construct
SCRDCAVDPTCVLCMECFLGSIHRDHRYRMTTSGGGGFCDCGDTEAWKEGPYCQKEEDPLVHLSEDVIAR

SEQ ID NO: 18738 - protein, 70 aa, Synthetic construct
SCRDCAVDPTCVLCMECFLGSIHRDHRYRMTTSGGGGFCDCGDTEAWKEGPYCQKHELNTVHLSEDVIAR

SEQ ID NO: 18739 - protein, 70 aa, Synthetic construct
SCRDCAVDPTCVLCMECFLGSIHRDHRYRMTTSGGGGFCDCGDTEAWKEGPYCQKHELNTSEIEEDVIAR

SEQ ID NO: 18740 - protein, 70 aa, Synthetic construct
SCRDCAVDPTCVLCMECFLGSIHRDHRYRMTTSGGGGFCDCGDTEAWKEGPYCQKHELNTSEIEEEEDPL

SEQ ID NO: 18741 - protein, 70 aa, Synthetic construct
GKKEKPPFLPEEPSSSSEEDDPIPDELLCLICKDIMTDAVVIPCCGNSYCDECIRTALLESDEHTCPTCH

SEQ ID NO: 18742 - protein, 70 aa, Synthetic construct
PTIDAPPFLPEEPSSSSEEDDPIPDELLCLICKDIMTDAVVIPCCGNSYCDECIRTALLESDEHTCPTCH

SEQ ID NO: 18743 - protein, 70 aa, Synthetic construct
PTIDAEAYAIEEPSSSSEEDDPIPDELLCLICKDIMTDAVVIPCCGNSYCDECIRTALLESDEHTCPTCH

SEQ ID NO: 18744 - protein, 70 aa, Synthetic construct
PTIDAEAYAIGKKEKSSEEDDPIPDELLCLICKDIMTDAVVIPCCGNSYCDECIRTALLESDEHTCPTCH

SEQ ID NO: 18745 - protein, 70 aa, Synthetic construct
PTIDAEAYAIGKKEKPPFLPDPIPDELLCLICKDIMTDAVVIPCCGNSYCDECIRTALLESDEHTCPTCH

SEQ ID NO: 18746 - protein, 70 aa, Synthetic construct
PTIDAEAYAIGKKEKPPFLPEEPSSELLCLICKDIMTDAVVIPCCGNSYCDECIRTALLESDEHTCPTCH

SEQ ID NO: 18747 - protein, 70 aa, Synthetic construct
PTIDAEAYAIGKKEKPPFLPEEPSSSSEEDICKDIMTDAVVIPCCGNSYCDECIRTALLESDEHTCPTCH

SEQ ID NO: 18748 - protein, 70 aa, Synthetic construct
PTIDAEAYAIGKKEKPPFLPEEPSSSSEEDDPIPDMTDAVVIPCCGNSYCDECIRTALLESDEHTCPTCH

SEQ ID NO: 18749 - protein, 70 aa, Synthetic construct
PTIDAEAYAIGKKEKPPFLPEEPSSSSEEDDPIPDELLCLVIPCCGNSYCDECIRTALLESDEHTCPTCH

SEQ ID NO: 18750 - protein, 70 aa, Synthetic construct
PTIDAEAYAIGKKEKPPFLPEEPSSSSEEDDPIPDELLCLICKDIGNSYCDECIRTALLESDEHTCPTCH

SEQ ID NO: 18751 - protein, 70 aa, Synthetic construct
PTIDAEAYAIGKKEKPPFLPEEPSSSSEEDDPIPDELLCLICKDIMTDAVVIPCCGNSYCDECIRCPTCH

SEQ ID NO: 18752 - protein, 70 aa, Synthetic construct
PTIDAEAYAIGKKEKPPFLPEEPSSSSEEDDPIPDELLCLICKDIMTDAVVIPCCGNSYCDECIRTALLE

SEQ ID NO: 18753 - protein, 70 aa, Synthetic construct
VIPCCGNSYCDECIRTALLESDEHTCPTCHQNDVSPDALIANKFLRQAVNNFKNETGYTKRLRKQLPPPP

SEQ ID NO: 18754 - protein, 70 aa, Synthetic construct
ICKDIGNSYCDECIRTALLESDEHTCPTCHQNDVSPDALIANKFLRQAVNNFKNETGYTKRLRKQLPPPP

SEQ ID NO: 18755 - protein, 70 aa, Synthetic construct
ICKDIMTDAVVIPCCGNSYCDECIRTALLEQNDVSPDALIANKFLRQAVNNFKNETGYTKRLRKQLPPPP

SEQ ID NO: 18756 - protein, 70 aa, Synthetic construct
ICKDIMTDAVVIPCCGNSYCDECIRTALLESDEHTPDALIANKFLRQAVNNFKNETGYTKRLRKQLPPPP

SEQ ID NO: 18757 - protein, 70 aa, Synthetic construct
ICKDIMTDAVVIPCCGNSYCDECIRTALLESDEHTCPTCHANKFLRQAVNNFKNETGYTKRLRKQLPPPP

SEQ ID NO: 18758 - protein, 70 aa, Synthetic construct
ICKDIMTDAVVIPCCGNSYCDECIRTALLESDEHTCPTCHQNDVSRQAVNNFKNETGYTKRLRKQLPPPP

SEQ ID NO: 18759 - protein, 70 aa, Synthetic construct
ICKDIMTDAVVIPCCGNSYCDECIRTALLESDEHTCPTCHQNDVSPDALINFKNETGYTKRLRKQLPPPP

SEQ ID NO: 18760 - protein, 70 aa, Synthetic construct
ICKDIMTDAVVIPCCGNSYCDECIRTALLESDEHTCPTCHQNDVSPDALIANKFLTGYTKRLRKQLPPPP

SEQ ID NO: 18761 - protein, 70 aa, Synthetic construct
ICKDIMTDAVVIPCCGNSYCDECIRTALLESDEHTCPTCHQNDVSPDALIANKFLRQAVNRLRKQLPPPP

SEQ ID NO: 18762 - protein, 70 aa, Synthetic construct
ICKDIMTDAVVIPCCGNSYCDECIRTALLESDEHTCPTCHQNDVSPDALIANKFLRQAVNNFKNELPPPP

SEQ ID NO: 18763 - protein, 70 aa, Synthetic construct
QQEVEKLARENSSMRLELDALRSKYEALQTFARTVARGPVAPSKVATTSVITIVKSTELSSTSVPFSAAS

SEQ ID NO: 18764 - protein, 70 aa, Synthetic construct
EELERQRVELQQEVEKLARENSSMRLELDALRSKYEALQTFARTVARGPVITIVKSTELSSTSVPFSAAS

SEQ ID NO: 18765 - protein, 70 aa, Synthetic construct
EELERQRVELQQEVEKLARENSSMRLELDALRSKYEALQTFARTVARGPVAPSKVATTSVITIVKFSAAS

SEQ ID NO: 18766 - protein, 70 aa, Synthetic construct
EELERQRVELQQEVEKLARENSSMRLELDALRSKYEALQTFARTVARGPVAPSKVATTSVITIVKSTELS

SEQ ID NO: 18767 - protein, 70 aa, Synthetic construct
YNTPVHHPVIKSENSVIKAGVRPESRASEDYVAPPKYKSSLLNRYLNDSLRHVMATNTTMMGKTRQRNHS

SEQ ID NO: 18768 - protein, 70 aa, Synthetic construct
PPRTHHHPVIKSENSVIKAGVRPESRASEDYVAPPKYKSSLLNRYLNDSLRHVMATNTTMMGKTRQRNHS

SEQ ID NO: 18769 - protein, 70 aa, Synthetic construct
PPRTHMNEGGKSENSVIKAGVRPESRASEDYVAPPKYKSSLLNRYLNDSLRHVMATNTTMMGKTRQRNHS

SEQ ID NO: 18770 - protein, 70 aa, Synthetic construct
PPRTHMNEGGYNTPVVIKAGVRPESRASEDYVAPPKYKSSLLNRYLNDSLRHVMATNTTMMGKTRQRNHS

SEQ ID NO: 18771 - protein, 70 aa, Synthetic construct
PPRTHMNEGGYNTPVHHPVIVRPESRASEDYVAPPKYKSSLLNRYLNDSLRHVMATNTTMMGKTRQRNHS

SEQ ID NO: 18772 - protein, 70 aa, Synthetic construct
PPRTHMNEGGYNTPVHHPVIKSENSRASEDYVAPPKYKSSLLNRYLNDSLRHVMATNTTMMGKTRQRNHS

SEQ ID NO: 18773 - protein, 70 aa, Synthetic construct
PPRTHMNEGGYNTPVHHPVIKSENSVIKAGYVAPPKYKSSLLNRYLNDSLRHVMATNTTMMGKTRQRNHS

SEQ ID NO: 18774 - protein, 70 aa, Synthetic construct
PPRTHMNEGGYNTPVHHPVIKSENSVIKAGVRPESKYKSSLLNRYLNDSLRHVMATNTTMMGKTRQRNHS

SEQ ID NO: 18775 - protein, 70 aa, Synthetic construct
PPRTHMNEGGYNTPVHHPVIKSENSVIKAGVRPESRASEDYVAPPKYKSSLLNRYTNTTMMGKTRQRNHS

SEQ ID NO: 18776 - protein, 70 aa, Synthetic construct
PPRTHMNEGGYNTPVHHPVIKSENSVIKAGVRPESRASEDYVAPPKYKSSLLNRYLNDSLMGKTRQRNHS

SEQ ID NO: 18777 - protein, 70 aa, Synthetic construct
PPRTHMNEGGYNTPVHHPVIKSENSVIKAGVRPESRASEDYVAPPKYKSSLLNRYLNDSLRHVMAQRNHS

SEQ ID NO: 18778 - protein, 70 aa, Synthetic construct
PPRTHMNEGGYNTPVHHPVIKSENSVIKAGVRPESRASEDYVAPPKYKSSLLNRYLNDSLRHVMATNTTM

SEQ ID NO: 18779 - protein, 70 aa, Synthetic construct
LENGSNKGESAANRKGPSKDDTYWKEINAAMALTNLAQGKDKLQGTTSCIIQKSSHIAEVKTVKVPLVQQ

SEQ ID NO: 18780 - protein, 70 aa, Synthetic construct
EGNFVNKGESAANRKGPSKDDTYWKEINAAMALTNLAQGKDKLQGTTSCIIQKSSHIAEVKTVKVPLVQQ

SEQ ID NO: 18781 - protein, 70 aa, Synthetic construct
EGNFVYRTDTAANRKGPSKDDTYWKEINAAMALTNLAQGKDKLQGTTSCIIQKSSHIAEVKTVKVPLVQQ

SEQ ID NO: 18782 - protein, 70 aa, Synthetic construct
EGNFVYRTDTLENGSGPSKDDTYWKEINAAMALTNLAQGKDKLQGTTSCIIQKSSHIAEVKTVKVPLVQQ

SEQ ID NO: 18783 - protein, 70 aa, Synthetic construct
EGNFVYRTDTLENGSNKGESDTYWKEINAAMALTNLAQGKDKLQGTTSCIIQKSSHIAEVKTVKVPLVQQ

SEQ ID NO: 18784 - protein, 70 aa, Synthetic construct
EGNFVYRTDTLENGSNKGESAANRKEINAAMALTNLAQGKDKLQGTTSCIIQKSSHIAEVKTVKVPLVQQ

SEQ ID NO: 18785 - protein, 70 aa, Synthetic construct
EGNFVYRTDTLENGSNKGESAANRKGPSKDMALTNLAQGKDKLQGTTSCIIQKSSHIAEVKTVKVPLVQQ

SEQ ID NO: 18786 - protein, 70 aa, Synthetic construct
EGNFVYRTDTLENGSNKGESAANRKGPSKDDTYWKLAQGKDKLQGTTSCIIQKSSHIAEVKTVKVPLVQQ

SEQ ID NO: 18787 - protein, 70 aa, Synthetic construct
EGNFVYRTDTLENGSNKGESAANRKGPSKDDTYWKEINAADKLQGTTSCIIQKSSHIAEVKTVKVPLVQQ

SEQ ID NO: 18788 - protein, 70 aa, Synthetic construct
EGNFVYRTDTLENGSNKGESAANRKGPSKDDTYWKEINAAMALTNTTSCIIQKSSHIAEVKTVKVPLVQQ

SEQ ID NO: 18789 - protein, 70 aa, Synthetic construct
EGNFVYRTDTLENGSNKGESAANRKGPSKDDTYWKEINAAMALTNLAQGKIQKSSHIAEVKTVKVPLVQQ

SEQ ID NO: 18790 - protein, 70 aa, Synthetic construct
EGNFVYRTDTLENGSNKGESAANRKGPSKDDTYWKEINAAMALTNLAQGKDKLQGHIAEVKTVKVPLVQQ

SEQ ID NO: 18791 - protein, 70 aa, Synthetic construct
EGNFVYRTDTLENGSNKGESAANRKGPSKDDTYWKEINAAMALTNLAQGKDKLQGTTSCIKTVKVPLVQQ

SEQ ID NO: 18792 - protein, 70 aa, Synthetic construct
EGNFVYRTDTLENGSNKGESAANRKGPSKDDTYWKEINAAMALTNLAQGKDKLQGTTSCIIQKSSPLVQQ

SEQ ID NO: 18793 - protein, 70 aa, Synthetic construct
MASQEFEVEAIVDKRQDKNGNTQYLVRWKGYDKQDDTWEPEQHLMNCEKCVHDFNTWTTTSRIFSNNARR

SEQ ID NO: 18794 - protein, 70 aa, Synthetic construct
MASQEFEVEAIVDKRQDKNGNTQYLVRWKGYDKQDDTWEPEQHLMNCEKCVHDFNRRQTESRIFSNNARR

SEQ ID NO: 18795 - protein, 70 aa, Synthetic construct
MASQEFEVEAIVDKRQDKNGNTQYLVRWKGYDKQDDTWEPEQHLMNCEKCVHDFNRRQTEKQKKLNNARR

SEQ ID NO: 18796 - protein, 70 aa, Synthetic construct
MASQEFEVEAIVDKRQDKNGNTQYLVRWKGYDKQDDTWEPEQHLMNCEKCVHDFNRRQTEKQKKLTWTTT

SEQ ID NO: 18797 - protein, 70 aa, Synthetic construct
LIDPLAANGTTDMHTSVPRVKGGQRNITDDSRDQPFIKKMHFTIRLTESASTYRDIVVKKEDGFTQIVLS

SEQ ID NO: 18798 - protein, 70 aa, Synthetic construct
GSATRAANGTTDMHTSVPRVKGGQRNITDDSRDQPFIKKMHFTIRLTESASTYRDIVVKKEDGFTQIVLS

SEQ ID NO: 18799 - protein, 70 aa, Synthetic construct
GSATRKGIVVTDMHTSVPRVKGGQRNITDDSRDQPFIKKMHFTIRLTESASTYRDIVVKKEDGFTQIVLS

SEQ ID NO: 18800 - protein, 70 aa, Synthetic construct
GSATRKGIVVLIDPLSVPRVKGGQRNITDDSRDQPFIKKMHFTIRLTESASTYRDIVVKKEDGFTQIVLS

SEQ ID NO: 18801 - protein, 70 aa, Synthetic construct
GSATRKGIVVLIDPLAANGTKGGQRNITDDSRDQPFIKKMHFTIRLTESASTYRDIVVKKEDGFTQIVLS

SEQ ID NO: 18802 - protein, 70 aa, Synthetic construct
GSATRKGIVVLIDPLAANGTTDMHTNITDDSRDQPFIKKMHFTIRLTESASTYRDIVVKKEDGFTQIVLS

SEQ ID NO: 18803 - protein, 70 aa, Synthetic construct
GSATRKGIVVLIDPLAANGTTDMHTSVPRVSRDQPFIKKMHFTIRLTESASTYRDIVVKKEDGFTQIVLS

SEQ ID NO: 18804 - protein, 70 aa, Synthetic construct
GSATRKGIVVLIDPLAANGTTDMHTSVPRVKGGQRFIKKMHFTIRLTESASTYRDIVVKKEDGFTQIVLS

SEQ ID NO: 18805 - protein, 70 aa, Synthetic construct
GSATRKGIVVLIDPLAANGTTDMHTSVPRVKGGQRNITDDHFTIRLTESASTYRDIVVKKEDGFTQIVLS

SEQ ID NO: 18806 - protein, 70 aa, Synthetic construct
GSATRKGIVVLIDPLAANGTTDMHTSVPRVKGGQRNITDDSRDQPLTESASTYRDIVVKKEDGFTQIVLS

SEQ ID NO: 18807 - protein, 70 aa, Synthetic construct
GSATRKGIVVLIDPLAANGTTDMHTSVPRVKGGQRNITDDSRDQPFIKKMHFTIRIVVKKEDGFTQIVLS

SEQ ID NO: 18808 - protein, 70 aa, Synthetic construct
GSATRKGIVVLIDPLAANGTTDMHTSVPRVKGGQRNITDDSRDQPFIKKMHFTIRLTESASTYRDQIVLS

SEQ ID NO: 18809 - protein, 70 aa, Synthetic construct
GSATRKGIVVLIDPLAANGTTDMHTSVPRVKGGQRNITDDSRDQPFIKKMHFTIRLTESASTYRDIVVKK

SEQ ID NO: 18810 - protein, 70 aa, Synthetic construct
STRKKRCPYTKYQTLELEKEFLFNMYLTRDRRYEVARVLNLTERQVKIWFQNRRMKMKKMNKEKTDKEQS

SEQ ID NO: 18811 - protein, 70 aa, Synthetic construct
NPVANWIHARSTRKKELEKEFLFNMYLTRDRRYEVARVLNLTERQVKIWFQNRRMKMKKMNKEKTDKEQS

SEQ ID NO: 18812 - protein, 70 aa, Synthetic construct
NPVANWIHARSTRKKRCPYTKYQTLELEKEFLFNMYLTRDRRYEVVKIWFQNRRMKMKKMNKEKTDKEQS

SEQ ID NO: 18813 - protein, 70 aa, Synthetic construct
NPVANWIHARSTRKKRCPYTKYQTLELEKEFLFNMYLTRDRRYEVARVLNLTERQVKIWFQNRRMKMKKM

SEQ ID NO: 18814 - protein, 70 aa, Synthetic construct
SDGKRGSPQNLPIEHHFACKECGDTFRLKVLLVQHQRVHSEEKGWECGDCGKVFRGVAEFNEHRKSHVAA

SEQ ID NO: 18815 - protein, 70 aa, Synthetic construct
PSPEFGSPQNLPIEHHFACKECGDTFRLKVLLVQHQRVHSEEKGWECGDCGKVFRGVAEFNEHRKSHVAA

SEQ ID NO: 18816 - protein, 70 aa, Synthetic construct
PSPEFRQHGDLPIEHHFACKECGDTFRLKVLLVQHQRVHSEEKGWECGDCGKVFRGVAEFNEHRKSHVAA

SEQ ID NO: 18817 - protein, 70 aa, Synthetic construct
PSPEFRQHGDSDGKRHFACKECGDTFRLKVLLVQHQRVHSEEKGWECGDCGKVFRGVAEFNEHRKSHVAA

SEQ ID NO: 18818 - protein, 70 aa, Synthetic construct
PSPEFRQHGDSDGKRGSPQNLPIEHHFACKECGDTFRLKVLLVQHECGDCGKVFRGVAEFNEHRKSHVAA

SEQ ID NO: 18819 - protein, 70 aa, Synthetic construct
PSPEFRQHGDSDGKRGSPQNLPIEHHFACKECGDTFRLKVLLVQHQRVHSGKVFRGVAEFNEHRKSHVAA

SEQ ID NO: 18820 - protein, 70 aa, Synthetic construct
PSPEFRQHGDSDGKRGSPQNLPIEHHFACKECGDTFRLKVLLVQHQRVHSEEKGWGVAEFNEHRKSHVAA

SEQ ID NO: 18821 - protein, 70 aa, Synthetic construct
PSPEFRQHGDSDGKRGSPQNLPIEHHFACKECGDTFRLKVLLVQHQRVHSEEKGWECGDCNEHRKSHVAA

SEQ ID NO: 18822 - protein, 70 aa, Synthetic construct
PSPEFRQHGDSDGKRGSPQNLPIEHHFACKECGDTFRLKVLLVQHQRVHSEEKGWECGDCGKVFRSHVAA

SEQ ID NO: 18823 - protein, 70 aa, Synthetic construct
PSPEFRQHGDSDGKRGSPQNLPIEHHFACKECGDTFRLKVLLVQHQRVHSEEKGWECGDCGKVFRGVAEF

SEQ ID NO: 18824 - protein, 70 aa, Synthetic construct
RQDINKEHLWQKVSKLHSKITLLELKEQQTLGRLKSLEALIRQLKQENWLSEENVKIIENHFTTYEVTMI

SEQ ID NO: 18825 - protein, 70 aa, Synthetic construct
EVLQIKEHLWQKVSKLHSKITLLELKEQQTLGRLKSLEALIRQLKQENWLSEENVKIIENHFTTYEVTMI

SEQ ID NO: 18826 - protein, 70 aa, Synthetic construct
EVLQIEHSYCRQDINKEHLWQKVSKLHSKILGRLKSLEALIRQLKQENWLSEENVKIIENHFTTYEVTMI

SEQ ID NO: 18827 - protein, 70 aa, Synthetic construct
EVLQIEHSYCRQDINKEHLWQKVSKLHSKITLLELKEQQTLGRLKSLEALIRQLKQENWLHFTTYEVTMI

SEQ ID NO: 18828 - protein, 70 aa, Synthetic construct
EVLQIEHSYCRQDINKEHLWQKVSKLHSKITLLELKEQQTLGRLKSLEALIRQLKQENWLSEENVKIIEN

SEQ ID NO: 18829 - protein, 70 aa, Synthetic construct
GNGGGGGGGPGTAFSIDSLIGPPPPRSGHLLYTGYPMFMPYRPLVLPQALAPAPLPAGLPPLAPLASFAG

SEQ ID NO: 18830 - protein, 70 aa, Synthetic construct
QRAGGGGGGPGTAFSIDSLIGPPPPRSGHLLYTGYPMFMPYRPLVLPQALAPAPLPAGLPPLAPLASFAG

SEQ ID NO: 18831 - protein, 70 aa, Synthetic construct
QRAGGGSAPGGTAFSIDSLIGPPPPRSGHLLYTGYPMFMPYRPLVLPQALAPAPLPAGLPPLAPLASFAG

SEQ ID NO: 18832 - protein, 70 aa, Synthetic construct
QRAGGGSAPGGNGGGGGGGPGTAFSIDSLIGPPPPRSGHLLYTGYPMFMPYRPLVPAGLPPLAPLASFAG

SEQ ID NO: 18833 - protein, 70 aa, Synthetic construct
QRAGGGSAPGGNGGGGGGGPGTAFSIDSLIGPPPPRSGHLLYTGYPMFMPYRPLVLPQALPLAPLASFAG

SEQ ID NO: 18834 - protein, 70 aa, Synthetic construct
QRAGGGSAPGGNGGGGGGGPGTAFSIDSLIGPPPPRSGHLLYTGYPMFMPYRPLVLPQALAPAPLASFAG

SEQ ID NO: 18835 - protein, 70 aa, Synthetic construct
PPASKPKLWSLAEIATSDLKPGLPAAAAPASTGAPPGGSPYPASPLLGRPLYYTSPFYGNYTNYGNLNAA

SEQ ID NO: 18836 - protein, 70 aa, Synthetic construct
PPASKPKLWSLAEIATSDLKQPSLGAAAPASTGAPPGGSPYPASPLLGRPLYYTSPFYGNYTNYGNLNAA

SEQ ID NO: 18837 - protein, 70 aa, Synthetic construct
PPASKPKLWSLAEIATSDLKQPSLGPGCGPSTGAPPGGSPYPASPLLGRPLYYTSPFYGNYTNYGNLNAA

SEQ ID NO: 18838 - protein, 70 aa, Synthetic construct
PPASKPKLWSLAEIATSDLKQPSLGPGCGPPGLPAPGGSPYPASPLLGRPLYYTSPFYGNYTNYGNLNAA

SEQ ID NO: 18839 - protein, 70 aa, Synthetic construct
PPASKPKLWSLAEIATSDLKQPSLGPGCGPPGLPAAAAPAYPASPLLGRPLYYTSPFYGNYTNYGNLNAA

SEQ ID NO: 18840 - protein, 70 aa, Synthetic construct
PPASKPKLWSLAEIATSDLKQPSLGPGCGPPGLPAAAAPASTGAPLLGRPLYYTSPFYGNYTNYGNLNAA

SEQ ID NO: 18841 - protein, 70 aa, Synthetic construct
MASEELYEVERIVDKRKNKKGKTEYLVRWKGYDSEDDTWEPEQHLNRRHTEKQKESTLTRTNRTSPNNAR

SEQ ID NO: 18842 - protein, 70 aa, Synthetic construct
MASEELYEVERIVDKRKNKKGKTEYLVRWKGYDSEDDTWEPEQHLVNCEEEKQKESTLTRTNRTSPNNAR

SEQ ID NO: 18843 - protein, 70 aa, Synthetic construct
MASEELYEVERIVDKRKNKKGKTEYLVRWKGYDSEDDTWEPEQHLVNCEEYIHDFSTLTRTNRTSPNNAR

SEQ ID NO: 18844 - protein, 70 aa, Synthetic construct
MASEELYEVERIVDKRKNKKGKTEYLVRWKGYDSEDDTWEPEQHLVNCEEYIHDFNRRHTTNRTSPNNAR

SEQ ID NO: 18845 - protein, 70 aa, Synthetic construct
MASEELYEVERIVDKRKNKKGKTEYLVRWKGYDSEDDTWEPEQHLVNCEEYIHDFNRRHTEKQKEPNNAR

SEQ ID NO: 18846 - protein, 70 aa, Synthetic construct
MASEELYEVERIVDKRKNKKGKTEYLVRWKGYDSEDDTWEPEQHLVNCEEYIHDFNRRHTEKQKESTLTR

SEQ ID NO: 18847 - protein, 70 aa, Synthetic construct
ENWQRVNTELPVKSPRFALFDLAEGKSYCFGEPSEATEVTVVGDKLDIPKAPGKIIPSRNTDTSVVVSWE

SEQ ID NO: 18848 - protein, 70 aa, Synthetic construct
ENWQRVNTELPVKSPRFALFDLAEGKSYCFRVRCSATEVTVVGDKLDIPKAPGKIIPSRNTDTSVVVSWE

SEQ ID NO: 18849 - protein, 70 aa, Synthetic construct
ENWQRVNTELPVKSPRFALFDLAEGKSYCFRVRCSNSAGVVVGDKLDIPKAPGKIIPSRNTDTSVVVSWE

SEQ ID NO: 18850 - protein, 70 aa, Synthetic construct
ENWQRVNTELPVKSPRFALFDLAEGKSYCFRVRCSNSAGVGEPSELDIPKAPGKIIPSRNTDTSVVVSWE

SEQ ID NO: 18851 - protein, 70 aa, Synthetic construct
ENWQRVNTELPVKSPRFALFDLAEGKSYCFRVRCSNSAGVGEPSEATEVTAPGKIIPSRNTDTSVVVSWE

SEQ ID NO: 18852 - protein, 70 aa, Synthetic construct
ENWQRVNTELPVKSPRFALFDLAEGKSYCFRVRCSNSAGVGEPSEATEVTVVGDKIPSRNTDTSVVVSWE

SEQ ID NO: 18853 - protein, 70 aa, Synthetic construct
ENWQRVNTELPVKSPRFALFDLAEGKSYCFRVRCSNSAGVGEPSEATEVTVVGDKLDIPKTDTSVVVSWE

SEQ ID NO: 18854 - protein, 70 aa, Synthetic construct
ENWQRVNTELPVKSPRFALFDLAEGKSYCFRVRCSNSAGVGEPSEATEVTVVGDKLDIPKAPGKIVVSWE

SEQ ID NO: 18855 - protein, 70 aa, Synthetic construct
ENWQRVNTELPVKSPRFALFDLAEGKSYCFRVRCSNSAGVGEPSEATEVTVVGDKLDIPKAPGKIIPSRN

SEQ ID NO: 18856 - protein, 70 aa, Synthetic construct
RPPSTSSTGSRGSCGSSGRTAEKTSLSFKSDQVKVKQEPGTEDEICSFSGGVKQEKTEDGRRSACMLSSP

SEQ ID NO: 18857 - protein, 70 aa, Synthetic construct
SGLSNSSTGSRGSCGSSGRTAEKTSLSFKSDQVKVKQEPGTEDEICSFSGGVKQEKTEDGRRSACMLSSP

SEQ ID NO: 18858 - protein, 70 aa, Synthetic construct
SGLSNSHTPVRGSCGSSGRTAEKTSLSFKSDQVKVKQEPGTEDEICSFSGGVKQEKTEDGRRSACMLSSP

SEQ ID NO: 18859 - protein, 70 aa, Synthetic construct
SGLSNSHTPVRPPSTSSGRTAEKTSLSFKSDQVKVKQEPGTEDEICSFSGGVKQEKTEDGRRSACMLSSP

SEQ ID NO: 18860 - protein, 70 aa, Synthetic construct
SGLSNSHTPVRPPSTSSTGSAEKTSLSFKSDQVKVKQEPGTEDEICSFSGGVKQEKTEDGRRSACMLSSP

SEQ ID NO: 18861 - protein, 70 aa, Synthetic construct
SGLSNSHTPVRPPSTSSTGSRGSCGLSFKSDQVKVKQEPGTEDEICSFSGGVKQEKTEDGRRSACMLSSP

SEQ ID NO: 18862 - protein, 70 aa, Synthetic construct
SGLSNSHTPVRPPSTSSTGSRGSCGSSGRTDQVKVKQEPGTEDEICSFSGGVKQEKTEDGRRSACMLSSP

SEQ ID NO: 18863 - protein, 70 aa, Synthetic construct
SGLSNSHTPVRPPSTSSTGSRGSCGSSGRTAEKTSKQEPGTEDEICSFSGGVKQEKTEDGRRSACMLSSP

SEQ ID NO: 18864 - protein, 70 aa, Synthetic construct
SGLSNSHTPVRPPSTSSTGSRGSCGSSGRTAEKTSLSFKSTEDEICSFSGGVKQEKTEDGRRSACMLSSP

SEQ ID NO: 18865 - protein, 70 aa, Synthetic construct
SGLSNSHTPVRPPSTSSTGSRGSCGSSGRTAEKTSLSFKSDQVKVKQEPGGVKQEKTEDGRRSACMLSSP

SEQ ID NO: 18866 - protein, 70 aa, Synthetic construct
SGLSNSHTPVRPPSTSSTGSRGSCGSSGRTAEKTSLSFKSDQVKVKQEPGTEDEIKTEDGRRSACMLSSP

SEQ ID NO: 18867 - protein, 70 aa, Synthetic construct
SGLSNSHTPVRPPSTSSTGSRGSCGSSGRTAEKTSLSFKSDQVKVKQEPGTEDEICSFSGRRSACMLSSP

SEQ ID NO: 18868 - protein, 70 aa, Synthetic construct
SGLSNSHTPVRPPSTSSTGSRGSCGSSGRTAEKTSLSFKSDQVKVKQEPGTEDEICSFSGGVKQEMLSSP

SEQ ID NO: 18869 - protein, 70 aa, Synthetic construct
SGLSNSHTPVRPPSTSSTGSRGSCGSSGRTAEKTSLSFKSDQVKVKQEPGTEDEICSFSGGVKQEKTEDG

SEQ ID NO: 18870 - protein, 70 aa, Synthetic construct
TEDEICSFSGGVKQEKTEDGRRSACMLSSPESSLTPPLSTNLHLESELDALASLENHVKIEPADMNESCK

SEQ ID NO: 18871 - protein, 70 aa, Synthetic construct
DQVKVCSFSGGVKQEKTEDGRRSACMLSSPESSLTPPLSTNLHLESELDALASLENHVKIEPADMNESCK

SEQ ID NO: 18872 - protein, 70 aa, Synthetic construct
DQVKVKQEPGGVKQEKTEDGRRSACMLSSPESSLTPPLSTNLHLESELDALASLENHVKIEPADMNESCK

SEQ ID NO: 18873 - protein, 70 aa, Synthetic construct
DQVKVKQEPGTEDEIKTEDGRRSACMLSSPESSLTPPLSTNLHLESELDALASLENHVKIEPADMNESCK

SEQ ID NO: 18874 - protein, 70 aa, Synthetic construct
DQVKVKQEPGTEDEICSFSGRRSACMLSSPESSLTPPLSTNLHLESELDALASLENHVKIEPADMNESCK

SEQ ID NO: 18875 - protein, 70 aa, Synthetic construct
DQVKVKQEPGTEDEICSFSGGVKQEMLSSPESSLTPPLSTNLHLESELDALASLENHVKIEPADMNESCK

SEQ ID NO: 18876 - protein, 70 aa, Synthetic construct
DQVKVKQEPGTEDEICSFSGGVKQEKTEDGESSLTPPLSTNLHLESELDALASLENHVKIEPADMNESCK

SEQ ID NO: 18877 - protein, 70 aa, Synthetic construct
DQVKVKQEPGTEDEICSFSGGVKQEKTEDGRRSACPPLSTNLHLESELDALASLENHVKIEPADMNESCK

SEQ ID NO: 18878 - protein, 70 aa, Synthetic construct
DQVKVKQEPGTEDEICSFSGGVKQEKTEDGRRSACMLSSPNLHLESELDALASLENHVKIEPADMNESCK

SEQ ID NO: 18879 - protein, 70 aa, Synthetic construct
DQVKVKQEPGTEDEICSFSGGVKQEKTEDGRRSACMLSSPESSLTSELDALASLENHVKIEPADMNESCK

SEQ ID NO: 18880 - protein, 70 aa, Synthetic construct
DQVKVKQEPGTEDEICSFSGGVKQEKTEDGRRSACMLSSPESSLTPPLSTLASLENHVKIEPADMNESCK

SEQ ID NO: 18881 - protein, 70 aa, Synthetic construct
DQVKVKQEPGTEDEICSFSGGVKQEKTEDGRRSACMLSSPESSLTPPLSTNLHLENHVKIEPADMNESCK

SEQ ID NO: 18882 - protein, 70 aa, Synthetic construct
DQVKVKQEPGTEDEICSFSGGVKQEKTEDGRRSACMLSSPESSLTPPLSTNLHLESELDAEPADMNESCK

SEQ ID NO: 18883 - protein, 70 aa, Synthetic construct
DQVKVKQEPGTEDEICSFSGGVKQEKTEDGRRSACMLSSPESSLTPPLSTNLHLESELDALASLENESCK

SEQ ID NO: 18884 - protein, 70 aa, Synthetic construct
DQVKVKQEPGTEDEICSFSGGVKQEKTEDGRRSACMLSSPESSLTPPLSTNLHLESELDALASLENHVKI

SEQ ID NO: 18885 - protein, 70 aa, Synthetic construct
QDIQGRNRDSQNGAIAPGHVSVIRPPQNLYPENIVPSFSPGPSGRYGASGRSEGGRNSRVTPAAANYRSR

SEQ ID NO: 18886 - protein, 70 aa, Synthetic construct
CVPKLRNRDSQNGAIAPGHVSVIRPPQNLYPENIVPSFSPGPSGRYGASGRSEGGRNSRVTPAAANYRSR

SEQ ID NO: 18887 - protein, 70 aa, Synthetic construct
CVPKLSNSDSQNGAIAPGHVSVIRPPQNLYPENIVPSFSPGPSGRYGASGRSEGGRNSRVTPAAANYRSR

SEQ ID NO: 18888 - protein, 70 aa, Synthetic construct
CVPKLSNSDSQDIQGAPGHVSVIRPPQNLYPENIVPSFSPGPSGRYGASGRSEGGRNSRVTPAAANYRSR

SEQ ID NO: 18889 - protein, 70 aa, Synthetic construct
CVPKLSNSDSQDIQGRNRDSQNGAIAPGHVSVIRPPQNLYGPSGRYGASGRSEGGRNSRVTPAAANYRSR

SEQ ID NO: 18890 - protein, 70 aa, Synthetic construct
CVPKLSNSDSQDIQGRNRDSQNGAIAPGHVSVIRPPQNLYPENIVYGASGRSEGGRNSRVTPAAANYRSR

SEQ ID NO: 18891 - protein, 70 aa, Synthetic construct
CVPKLSNSDSQDIQGRNRDSQNGAIAPGHVSVIRPPQNLYPENIVPSFSPRSEGGRNSRVTPAAANYRSR

SEQ ID NO: 18892 - protein, 70 aa, Synthetic construct
CVPKLSNSDSQDIQGRNRDSQNGAIAPGHVSVIRPPQNLYPENIVPSFSPGPSGRRNSRVTPAAANYRSR

SEQ ID NO: 18893 - protein, 70 aa, Synthetic construct
CVPKLSNSDSQDIQGRNRDSQNGAIAPGHVSVIRPPQNLYPENIVPSFSPGPSGRYGASGTPAAANYRSR

SEQ ID NO: 18894 - protein, 70 aa, Synthetic construct
CVPKLSNSDSQDIQGRNRDSQNGAIAPGHVSVIRPPQNLYPENIVPSFSPGPSGRYGASGRSEGGNYRSR

SEQ ID NO: 18895 - protein, 70 aa, Synthetic construct
CVPKLSNSDSQDIQGRNRDSQNGAIAPGHVSVIRPPQNLYPENIVPSFSPGPSGRYGASGRSEGGRNSRV

SEQ ID NO: 18896 - protein, 70 aa, Synthetic construct
LLGHMCPYCSSKFNLKGNLSRHMKVKHGVMDIGLDSQDPMMELTGTDPSELDGQQEMEDFEENAYSYASV

SEQ ID NO: 18897 - protein, 70 aa, Synthetic construct
LLGHMHLHAGSKPFKCPYCSSKFNLKGNLSRHMKVKHGVMDIGLDTDPSELDGQQEMEDFEENAYSYASV

SEQ ID NO: 18898 - protein, 70 aa, Synthetic construct
LLGHMHLHAGSKPFKCPYCSSKFNLKGNLSRHMKVKHGVMDIGLDSQDPMLDGQQEMEDFEENAYSYASV

SEQ ID NO: 18899 - protein, 70 aa, Synthetic construct
LLGHMHLHAGSKPFKCPYCSSKFNLKGNLSRHMKVKHGVMDIGLDSQDPMMELTGEMEDFEENAYSYASV

SEQ ID NO: 18900 - protein, 70 aa, Synthetic construct
LLGHMHLHAGSKPFKCPYCSSKFNLKGNLSRHMKVKHGVMDIGLDSQDPMMELTGTDPSELDGQQSYASV

SEQ ID NO: 18901 - protein, 70 aa, Synthetic construct
EPKDSLGDSGYASQHKKRQHFAKARKVPSDTLPLKKRRTEKPPESDDEEMKEAAGSLLHLAGIRSCLNNI

SEQ ID NO: 18902 - protein, 70 aa, Synthetic construct
EEDDRLGDSGYASQHKKRQHFAKARKVPSDTLPLKKRRTEKPPESDDEEMKEAAGSLLHLAGIRSCLNNI

SEQ ID NO: 18903 - protein, 70 aa, Synthetic construct
EEDDRKHSQKYASQHKKRQHFAKARKVPSDTLPLKKRRTEKPPESDDEEMKEAAGSLLHLAGIRSCLNNI

SEQ ID NO: 18904 - protein, 70 aa, Synthetic construct
EEDDRKHSQKEPKDSKKRQHFAKARKVPSDTLPLKKRRTEKPPESDDEEMKEAAGSLLHLAGIRSCLNNI

SEQ ID NO: 18905 - protein, 70 aa, Synthetic construct
EEDDRKHSQKEPKDSLGDSGFAKARKVPSDTLPLKKRRTEKPPESDDEEMKEAAGSLLHLAGIRSCLNNI

SEQ ID NO: 18906 - protein, 70 aa, Synthetic construct
EEDDRKHSQKEPKDSLGDSGYASQHKVPSDTLPLKKRRTEKPPESDDEEMKEAAGSLLHLAGIRSCLNNI

SEQ ID NO: 18907 - protein, 70 aa, Synthetic construct
EEDDRKHSQKEPKDSLGDSGYASQHKKRQHTLPLKKRRTEKPPESDDEEMKEAAGSLLHLAGIRSCLNNI

SEQ ID NO: 18908 - protein, 70 aa, Synthetic construct
EEDDRKHSQKEPKDSLGDSGYASQHKKRQHFAKARKRRTEKPPESDDEEMKEAAGSLLHLAGIRSCLNNI

SEQ ID NO: 18909 - protein, 70 aa, Synthetic construct
EEDDRKHSQKEPKDSLGDSGYASQHKKRQHFAKARKVPSDKPPESDDEEMKEAAGSLLHLAGIRSCLNNI

SEQ ID NO: 18910 - protein, 70 aa, Synthetic construct
EEDDRKHSQKEPKDSLGDSGYASQHKKRQHFAKARKVPSDTLPLKDDEEMKEAAGSLLHLAGIRSCLNNI

SEQ ID NO: 18911 - protein, 70 aa, Synthetic construct
EEDDRKHSQKEPKDSLGDSGYASQHKKRQHFAKARKVPSDTLPLKKRRTEKEAAGSLLHLAGIRSCLNNI

SEQ ID NO: 18912 - protein, 70 aa, Synthetic construct
EEDDRKHSQKEPKDSLGDSGYASQHKKRQHFAKARKVPSDTLPLKKRRTEKPPESSLLHLAGIRSCLNNI

SEQ ID NO: 18913 - protein, 70 aa, Synthetic construct
ALPSFQIPVSPHIYTSVSWAAAPSAACSLSPVRSRSLSFSEPQQPAPAMKSHLIVTSPPRAQSGARKARG

SEQ ID NO: 18914 - protein, 70 aa, Synthetic construct
WHIQAQIPVSPHIYTSVSWAAAPSAACSLSPVRSRSLSFSEPQQPAPAMKSHLIVTSPPRAQSGARKARG

SEQ ID NO: 18915 - protein, 70 aa, Synthetic construct
WHIQADHAYQALPSFQIPVSPHIYTACSLSPVRSRSLSFSEPQQPAPAMKSHLIVTSPPRAQSGARKARG

SEQ ID NO: 18916 - protein, 70 aa, Synthetic construct
WHIQADHAYQALPSFQIPVSPHIYTSVSWAPVRSRSLSFSEPQQPAPAMKSHLIVTSPPRAQSGARKARG

SEQ ID NO: 18917 - protein, 70 aa, Synthetic construct
WHIQADHAYQALPSFQIPVSPHIYTSVSWAAAPSASLSFSEPQQPAPAMKSHLIVTSPPRAQSGARKARG

SEQ ID NO: 18918 - protein, 70 aa, Synthetic construct
WHIQADHAYQALPSFQIPVSPHIYTSVSWAAAPSAACSLSEPQQPAPAMKSHLIVTSPPRAQSGARKARG

SEQ ID NO: 18919 - protein, 70 aa, Synthetic construct
WHIQADHAYQALPSFQIPVSPHIYTSVSWAAAPSAACSLSPVRSRAPAMKSHLIVTSPPRAQSGARKARG

SEQ ID NO: 18920 - protein, 70 aa, Synthetic construct
WHIQADHAYQALPSFQIPVSPHIYTSVSWAAAPSAACSLSPVRSRSLSFSSHLIVTSPPRAQSGARKARG

SEQ ID NO: 18921 - protein, 70 aa, Synthetic construct
WHIQADHAYQALPSFQIPVSPHIYTSVSWAAAPSAACSLSPVRSRSLSFSEPQQPTSPPRAQSGARKARG

SEQ ID NO: 18922 - protein, 70 aa, Synthetic construct
WHIQADHAYQALPSFQIPVSPHIYTSVSWAAAPSAACSLSPVRSRSLSFSEPQQPAPAMKAQSGARKARG

SEQ ID NO: 18923 - protein, 70 aa, Synthetic construct
WHIQADHAYQALPSFQIPVSPHIYTSVSWAAAPSAACSLSPVRSRSLSFSEPQQPAPAMKSHLIVRKARG

SEQ ID NO: 18924 - protein, 70 aa, Synthetic construct
WHIQADHAYQALPSFQIPVSPHIYTSVSWAAAPSAACSLSPVRSRSLSFSEPQQPAPAMKSHLIVTSPPR

SEQ ID NO: 18925 - protein, 70 aa, Synthetic construct
VLSKAFSRLKTSLPWVPPDTKLSKLDTLRLASSYIAHLRQLLQEDNLTWPFVVSGRPDSDTKEVSAANRL

SEQ ID NO: 18926 - protein, 70 aa, Synthetic construct
VLSKAFSRLKTSLPWVPPDTKLSKLDTLRLASSYIAHLRQLLQEDRYENGFVVSGRPDSDTKEVSAANRL

SEQ ID NO: 18927 - protein, 70 aa, Synthetic construct
VLSKAFSRLKTSLPWVPPDTKLSKLDTLRLASSYIAHLRQLLQEDRYENGYVHPVRPDSDTKEVSAANRL

SEQ ID NO: 18928 - protein, 70 aa, Synthetic construct
VLSKAFSRLKTSLPWVPPDTKLSKLDTLRLASSYIAHLRQLLQEDRYENGYVHPVNLTWPTKEVSAANRL

SEQ ID NO: 18929 - protein, 70 aa, Synthetic construct
VLSKAFSRLKTSLPWVPPDTKLSKLDTLRLASSYIAHLRQLLQEDRYENGYVHPVNLTWPFVVSGAANRL

SEQ ID NO: 18930 - protein, 70 aa, Synthetic construct
VLSKAFSRLKTSLPWVPPDTKLSKLDTLRLASSYIAHLRQLLQEDRYENGYVHPVNLTWPFVVSGRPDSD

SEQ ID NO: 18931 - protein, 70 aa, Synthetic construct
SPSPRITRKSTRQTTITSHFAKGPAKRKPQEESERAKSDESIKEEDKDQDEKRRRVTSRERVARPLPAEE

SEQ ID NO: 18932 - protein, 70 aa, Synthetic construct
KSDGEAKPEPSPSPRITRKSTRQTTITSHFAKGPAAKSDESIKEEDKDQDEKRRRVTSRERVARPLPAEE

SEQ ID NO: 18933 - protein, 70 aa, Synthetic construct
KSDGEAKPEPSPSPRITRKSTRQTTITSHFAKGPAKRKPQSIKEEDKDQDEKRRRVTSRERVARPLPAEE

SEQ ID NO: 18934 - protein, 70 aa, Synthetic construct
KSDGEAKPEPSPSPRITRKSTRQTTITSHFAKGPAKRKPQEESERAKSDESIKEEVTSRERVARPLPAEE

SEQ ID NO: 18935 - protein, 70 aa, Synthetic construct
KSDGEAKPEPSPSPRITRKSTRQTTITSHFAKGPAKRKPQEESERAKSDESIKEEDKDQDRVARPLPAEE

SEQ ID NO: 18936 - protein, 70 aa, Synthetic construct
KSDGEAKPEPSPSPRITRKSTRQTTITSHFAKGPAKRKPQEESERAKSDESIKEEDKDQDEKRRRVTSRE

SEQ ID NO: 18937 - protein, 70 aa, Synthetic construct
GMKVPGKGESGPSALLTPPMARRRRTRCRRCRACVRTECGDCHFCRDMKKFGGPGRMKQSCLLRQCTAPV

SEQ ID NO: 18938 - protein, 70 aa, Synthetic construct
AEGPAVPSPSPQREKLERFKRMCQLLERVPDTSSSSSDSDSDSDSSGTSLSEDEAPGEARNGRRPARGSS

SEQ ID NO: 18939 - protein, 70 aa, Synthetic construct
WEKPKVPSPSPQREKLERFKRMCQLLERVPDTSSSSSDSDSDSDSSGTSLSEDEAPGEARNGRRPARGSS

SEQ ID NO: 18940 - protein, 70 aa, Synthetic construct
WEKPKPPLASPQREKLERFKRMCQLLERVPDTSSSSSDSDSDSDSSGTSLSEDEAPGEARNGRRPARGSS

SEQ ID NO: 18941 - protein, 70 aa, Synthetic construct
WEKPKPPLASAEGPALERFKRMCQLLERVPDTSSSSSDSDSDSDSSGTSLSEDEAPGEARNGRRPARGSS

SEQ ID NO: 18942 - protein, 70 aa, Synthetic construct
WEKPKPPLASAEGPAVPSPSPQREKLERFKRMCQLLERVPDTSSSSSDSDSDSDSSGTSLSEDEAARGSS

SEQ ID NO: 18943 - protein, 70 aa, Synthetic construct
WEKPKPPLASAEGPAVPSPSPQREKLERFKRMCQLLERVPDTSSSSSDSDSDSDSSGTSLSEDEAPGEAR

SEQ ID NO: 18944 - protein, 70 aa, Synthetic construct
KRKMRNLLVTIENDTPLEELSKYVDISIIALTRNRRTRRWYTCPLCGKQFNESSYLISHQRTHTGEKPYD

SEQ ID NO: 18945 - protein, 70 aa, Synthetic construct
KERLNNLLVTIENDTPLEELSKYVDISIIALTRNRRTRRWYTCPLCGKQFNESSYLISHQRTHTGEKPYD

SEQ ID NO: 18946 - protein, 70 aa, Synthetic construct
KERLNTSIPQKRKMRNLLVTSKYVDISIIALTRNRRTRRWYTCPLCGKQFNESSYLISHQRTHTGEKPYD

SEQ ID NO: 18947 - protein, 70 aa, Synthetic construct
KERLNTSIPQKRKMRNLLVTIENDTISIIALTRNRRTRRWYTCPLCGKQFNESSYLISHQRTHTGEKPYD

SEQ ID NO: 18948 - protein, 70 aa, Synthetic construct
KERLNTSIPQKRKMRNLLVTIENDTPLEELLTRNRRTRRWYTCPLCGKQFNESSYLISHQRTHTGEKPYD

SEQ ID NO: 18949 - protein, 70 aa, Synthetic construct
KERLNTSIPQKRKMRNLLVTIENDTPLEELSKYVDISIIAYTCPLCGKQFNESSYLISHQRTHTGEKPYD

SEQ ID NO: 18950 - protein, 70 aa, Synthetic construct
KERLNTSIPQKRKMRNLLVTIENDTPLEELSKYVDISIIALTRNRCGKQFNESSYLISHQRTHTGEKPYD

SEQ ID NO: 18951 - protein, 70 aa, Synthetic construct
KERLNTSIPQKRKMRNLLVTIENDTPLEELSKYVDISIIALTRNRRTRRWNESSYLISHQRTHTGEKPYD

SEQ ID NO: 18952 - protein, 70 aa, Synthetic construct
KERLNTSIPQKRKMRNLLVTIENDTPLEELSKYVDISIIALTRNRRTRRWYTCPLLISHQRTHTGEKPYD

SEQ ID NO: 18953 - protein, 70 aa, Synthetic construct
KERLNTSIPQKRKMRNLLVTIENDTPLEELSKYVDISIIALTRNRRTRRWYTCPLCGKQFRTHTGEKPYD

SEQ ID NO: 18954 - protein, 70 aa, Synthetic construct
KERLNTSIPQKRKMRNLLVTIENDTPLEELSKYVDISIIALTRNRRTRRWYTCPLCGKQFNESSYEKPYD

SEQ ID NO: 18955 - protein, 70 aa, Synthetic construct
KERLNTSIPQKRKMRNLLVTIENDTPLEELSKYVDISIIALTRNRRTRRWYTCPLCGKQFNESSYLISHQ

SEQ ID NO: 18956 - protein, 70 aa, Synthetic construct
KRRSPDDELLYLPVRGRETYEMLLKIKESLELMQYLPQHTIETYRLQKQTSIQSPSSYGNSSPPLNKMNS

SEQ ID NO: 18957 - protein, 70 aa, Synthetic construct
KRRSPDDELLYLPVRGRETYEMLLKIKESLELMQYLPQHTIETYRQQQQQSIQSPSSYGNSSPPLNKMNS

SEQ ID NO: 18958 - protein, 70 aa, Synthetic construct
KRRSPDDELLYLPVRGRETYEMLLKIKESLELMQYLPQHTIETYRQQQQQQHQHLSSYGNSSPPLNKMNS

SEQ ID NO: 18959 - protein, 70 aa, Synthetic construct
KRRSPDDELLYLPVRGRETYEMLLKIKESLELMQYLPQHTIETYRQQQQQQHQHLLQKQTSSPPLNKMNS

SEQ ID NO: 18960 - protein, 70 aa, Synthetic construct
KRRSPDDELLYLPVRGRETYEMLLKIKESLELMQYLPQHTIETYRQQQQQQHQHLLQKQTSIQSPNKMNS

SEQ ID NO: 18961 - protein, 70 aa, Synthetic construct
KRRSPDDELLYLPVRGRETYEMLLKIKESLELMQYLPQHTIETYRQQQQQQHQHLLQKQTSIQSPSSYGN

SEQ ID NO: 18962 - protein, 70 aa, Synthetic construct
QPSGFKHPFAIENIIAREYKQPVPAAYPLPNQLTTMGSSLGTGWPHVYGSAGMIDSATPISMASGDYSAY

SEQ ID NO: 18963 - protein, 70 aa, Synthetic construct
QPSGFKHPFAIENIIAREYKMPGGLAYPLPNQLTTMGSSLGTGWPHVYGSAGMIDSATPISMASGDYSAY

SEQ ID NO: 18964 - protein, 70 aa, Synthetic construct
QPSGFKHPFAIENIIAREYKMPGGLAFSAMNQLTTMGSSLGTGWPHVYGSAGMIDSATPISMASGDYSAY

SEQ ID NO: 18965 - protein, 70 aa, Synthetic construct
QPSGFKHPFAIENIIAREYKMPGGLAFSAMQPVPAMGSSLGTGWPHVYGSAGMIDSATPISMASGDYSAY

SEQ ID NO: 18966 - protein, 70 aa, Synthetic construct
QPSGFKHPFAIENIIAREYKMPGGLAFSAMQPVPAAYPLPGTGWPHVYGSAGMIDSATPISMASGDYSAY

SEQ ID NO: 18967 - protein, 70 aa, Synthetic construct
QPSGFKHPFAIENIIAREYKMPGGLAFSAMQPVPAAYPLPNQLTTHVYGSAGMIDSATPISMASGDYSAY

SEQ ID NO: 18968 - protein, 70 aa, Synthetic construct
QPSGFKHPFAIENIIAREYKMPGGLAFSAMQPVPAAYPLPNQLTTMGSSLAGMIDSATPISMASGDYSAY

SEQ ID NO: 18969 - protein, 70 aa, Synthetic construct
QPSGFKHPFAIENIIAREYKMPGGLAFSAMQPVPAAYPLPNQLTTMGSSLGTGWPSATPISMASGDYSAY

SEQ ID NO: 18970 - protein, 70 aa, Synthetic construct
QPSGFKHPFAIENIIAREYKMPGGLAFSAMQPVPAAYPLPNQLTTMGSSLGTGWPHVYGSSMASGDYSAY

SEQ ID NO: 18971 - protein, 70 aa, Synthetic construct
QPSGFKHPFAIENIIAREYKMPGGLAFSAMQPVPAAYPLPNQLTTMGSSLGTGWPHVYGSAGMIDDYSAY

SEQ ID NO: 18972 - protein, 70 aa, Synthetic construct
QPSGFKHPFAIENIIAREYKMPGGLAFSAMQPVPAAYPLPNQLTTMGSSLGTGWPHVYGSAGMIDSATPI

SEQ ID NO: 18973 - protein, 70 aa, Synthetic construct
GRHPGKGVKSPGEKSRYETSLNLTTKRFLEDLNWAAEVLKVQKRRIYDITNVLEGIQLIAKKSKNHIQWL

SEQ ID NO: 18974 - protein, 70 aa, Synthetic construct
GRHPGKGVKSPGEKSRYETSLNLTTKRFLELLSHSADGVVDLNWAAEVLKNVLEGIQLIAKKSKNHIQWL

SEQ ID NO: 18975 - protein, 70 aa, Synthetic construct
GRHPGKGVKSPGEKSRYETSLNLTTKRFLELLSHSADGVVDLNWAAEVLKVQKRRIYDITNVLEGHIQWL

SEQ ID NO: 18976 - protein, 70 aa, Synthetic construct
DSVSFEDVAVAFTQEEWALLDPSQKNLYRDVMQEIFRNLAIQDDFKNPGRNLSSHVVERLFEIKEGSQYG

SEQ ID NO: 18977 - protein, 70 aa, Synthetic construct
DSVSFEDVAVAFTQEEWALLDPSQKNLYRDVMQEIFRNLASVGNKKNPGRNLSSHVVERLFEIKEGSQYG

SEQ ID NO: 18978 - protein, 70 aa, Synthetic construct
DSVSFEDVAVAFTQEEWALLDPSQKNLYRDVMQEIFRNLASVGNKSEDQNNLSSHVVERLFEIKEGSQYG

SEQ ID NO: 18979 - protein, 70 aa, Synthetic construct
DSVSFEDVAVAFTQEEWALLDPSQKNLYRDVMQEIFRNLASVGNKSEDQNIQDDFVVERLFEIKEGSQYG

SEQ ID NO: 18980 - protein, 70 aa, Synthetic construct
DSVSFEDVAVAFTQEEWALLDPSQKNLYRDVMQEIFRNLASVGNKSEDQNIQDDFKNPGRFEIKEGSQYG

SEQ ID NO: 18981 - protein, 70 aa, Synthetic construct
DSVSFEDVAVAFTQEEWALLDPSQKNLYRDVMQEIFRNLASVGNKSEDQNIQDDFKNPGRNLSSHGSQYG

SEQ ID NO: 18982 - protein, 70 aa, Synthetic construct
DSVSFEDVAVAFTQEEWALLDPSQKNLYRDVMQEIFRNLASVGNKSEDQNIQDDFKNPGRNLSSHVVERL

SEQ ID NO: 18983 - protein, 70 aa, Synthetic construct
ASKVSKWSTDEVSEFIQSLPGCEEHGKVFKDEQIDGEAFLLMTQTDIVKIMSIKLGPALKIFNSILMFKA

SEQ ID NO: 18984 - protein, 70 aa, Synthetic construct
KLLPTVAGIPASKVSKWSTDEVSEFIQSLPGCEEHGKVFKLMTQTDIVKIMSIKLGPALKIFNSILMFKA

SEQ ID NO: 18985 - protein, 70 aa, Synthetic construct
KLLPTVAGIPASKVSKWSTDEVSEFIQSLPGCEEHGKVFKDEQIDGEAFLMSIKLGPALKIFNSILMFKA

SEQ ID NO: 18986 - protein, 70 aa, Synthetic construct
KLLPTVAGIPASKVSKWSTDEVSEFIQSLPGCEEHGKVFKDEQIDGEAFLLMTQTGPALKIFNSILMFKA

SEQ ID NO: 18987 - protein, 70 aa, Synthetic construct
KLLPTVAGIPASKVSKWSTDEVSEFIQSLPGCEEHGKVFKDEQIDGEAFLLMTQTDIVKIIFNSILMFKA

SEQ ID NO: 18988 - protein, 70 aa, Synthetic construct
KLLPTVAGIPASKVSKWSTDEVSEFIQSLPGCEEHGKVFKDEQIDGEAFLLMTQTDIVKIMSIKLGPALK

SEQ ID NO: 18989 - protein, 70 aa, Synthetic construct
MADTDLFMECEEEELEPWQKEDYNSVDKTTTVSVSQQPVSAPVPIAAHASVAGHLSTSTTVSSSGAQNSD

SEQ ID NO: 18990 - protein, 70 aa, Synthetic construct
MADTDLFMECEEEELEPWQKISDVIVDKTTTVSVSQQPVSAPVPIAAHASVAGHLSTSTTVSSSGAQNSD

SEQ ID NO: 18991 - protein, 70 aa, Synthetic construct
MADTDLFMECEEEELEPWQKISDVIEDSVVTVSVSQQPVSAPVPIAAHASVAGHLSTSTTVSSSGAQNSD

SEQ ID NO: 18992 - protein, 70 aa, Synthetic construct
MADTDLFMECEEEELEPWQKISDVIEDSVVEDYNSQQPVSAPVPIAAHASVAGHLSTSTTVSSSGAQNSD

SEQ ID NO: 18993 - protein, 70 aa, Synthetic construct
MADTDLFMECEEEELEPWQKISDVIEDSVVEDYNSVDKTTAPVPIAAHASVAGHLSTSTTVSSSGAQNSD

SEQ ID NO: 18994 - protein, 70 aa, Synthetic construct
MADTDLFMECEEEELEPWQKISDVIEDSVVEDYNSVDKTTTVSVSAAHASVAGHLSTSTTVSSSGAQNSD

SEQ ID NO: 18995 - protein, 70 aa, Synthetic construct
MADTDLFMECEEEELEPWQKISDVIEDSVVEDYNSVDKTTTVSVSQQPVSVAGHLSTSTTVSSSGAQNSD

SEQ ID NO: 18996 - protein, 70 aa, Synthetic construct
MADTDLFMECEEEELEPWQKISDVIEDSVVEDYNSVDKTTTVSVSQQPVSAPVPISTSTTVSSSGAQNSD

SEQ ID NO: 18997 - protein, 70 aa, Synthetic construct
MADTDLFMECEEEELEPWQKISDVIEDSVVEDYNSVDKTTTVSVSQQPVSAPVPIAAHASVSSSGAQNSD

SEQ ID NO: 18998 - protein, 70 aa, Synthetic construct
MADTDLFMECEEEELEPWQKISDVIEDSVVEDYNSVDKTTTVSVSQQPVSAPVPIAAHASVAGHLAQNSD

SEQ ID NO: 18999 - protein, 70 aa, Synthetic construct
MADTDLFMECEEEELEPWQKISDVIEDSVVEDYNSVDKTTTVSVSQQPVSAPVPIAAHASVAGHLSTSTT

SEQ ID NO: 19000 - protein, 70 aa, Synthetic construct
INNHVPRKSPKYLALFKNSVSGIKLACTSCTFVTSVGDAMAKHLVFNPSHRSSSILPRGLTWIAHSRHGQ

SEQ ID NO: 19001 - protein, 70 aa, Synthetic construct
CCSRAPRKSPKYLALFKNSVSGIKLACTSCTFVTSVGDAMAKHLVFNPSHRSSSILPRGLTWIAHSRHGQ

SEQ ID NO: 19002 - protein, 70 aa, Synthetic construct
CCSRAYANHMKYLALFKNSVSGIKLACTSCTFVTSVGDAMAKHLVFNPSHRSSSILPRGLTWIAHSRHGQ

SEQ ID NO: 19003 - protein, 70 aa, Synthetic construct
CCSRAYANHMINNHVFKNSVSGIKLACTSCTFVTSVGDAMAKHLVFNPSHRSSSILPRGLTWIAHSRHGQ

SEQ ID NO: 19004 - protein, 70 aa, Synthetic construct
CCSRAYANHMINNHVPRKSPSGIKLACTSCTFVTSVGDAMAKHLVFNPSHRSSSILPRGLTWIAHSRHGQ

SEQ ID NO: 19005 - protein, 70 aa, Synthetic construct
CCSRAYANHMINNHVPRKSPKYLALACTSCTFVTSVGDAMAKHLVFNPSHRSSSILPRGLTWIAHSRHGQ

SEQ ID NO: 19006 - protein, 70 aa, Synthetic construct
CCSRAYANHMINNHVPRKSPKYLALFKNSVSGIKLACTSCTFVTSVGDAMAKHLVFNPSHRSSSISRHGQ

SEQ ID NO: 19007 - protein, 70 aa, Synthetic construct
CCSRAYANHMINNHVPRKSPKYLALFKNSVSGIKLACTSCTFVTSVGDAMAKHLVFNPSHRSSSILPRGL

SEQ ID NO: 19008 - protein, 70 aa, Synthetic construct
APALRPLVIKQEPREEDEAKQLALAGLFPYQPPPPPPPSHPHPHPPPAHLAAPHLQFQIAHCGQTTMHLQ

SEQ ID NO: 19009 - protein, 70 aa, Synthetic construct
RLEPLPLVIKQEPREEDEAKQLALAGLFPYQPPPPPPPSHPHPHPPPAHLAAPHLQFQIAHCGQTTMHLQ

SEQ ID NO: 19010 - protein, 70 aa, Synthetic construct
RLEPLYERVGAPALRPLVIKQEPREGLFPYQPPPPPPPSHPHPHPPPAHLAAPHLQFQIAHCGQTTMHLQ

SEQ ID NO: 19011 - protein, 70 aa, Synthetic construct
RLEPLYERVGAPALRPLVIKQEPREEDEAKQPPPPPPPSHPHPHPPPAHLAAPHLQFQIAHCGQTTMHLQ

SEQ ID NO: 19012 - protein, 70 aa, Synthetic construct
RLEPLYERVGAPALRPLVIKQEPREEDEAKQLALAPPPSHPHPHPPPAHLAAPHLQFQIAHCGQTTMHLQ

SEQ ID NO: 19013 - protein, 70 aa, Synthetic construct
RLEPLYERVGAPALRPLVIKQEPREEDEAKQLALAGLFPYPHPHPPPAHLAAPHLQFQIAHCGQTTMHLQ

SEQ ID NO: 19014 - protein, 70 aa, Synthetic construct
RLEPLYERVGAPALRPLVIKQEPREEDEAKQLALAGLFPYQPPPPPPAHLAAPHLQFQIAHCGQTTMHLQ

SEQ ID NO: 19015 - protein, 70 aa, Synthetic construct
RLEPLYERVGAPALRPLVIKQEPREEDEAKQLALAGLFPYQPPPPPPPSHAAPHLQFQIAHCGQTTMHLQ

SEQ ID NO: 19016 - protein, 70 aa, Synthetic construct
RLEPLYERVGAPALRPLVIKQEPREEDEAKQLALAGLFPYQPPPPPPPSHPHPHPQFQIAHCGQTTMHLQ

SEQ ID NO: 19017 - protein, 70 aa, Synthetic construct
RLEPLYERVGAPALRPLVIKQEPREEDEAKQLALAGLFPYQPPPPPPPSHPHPHPPPAHLHCGQTTMHLQ

SEQ ID NO: 19018 - protein, 70 aa, Synthetic construct
RLEPLYERVGAPALRPLVIKQEPREEDEAKQLALAGLFPYQPPPPPPPSHPHPHPPPAHLAAPHLTMHLQ

SEQ ID NO: 19019 - protein, 70 aa, Synthetic construct
RLEPLYERVGAPALRPLVIKQEPREEDEAKQLALAGLFPYQPPPPPPPSHPHPHPPPAHLAAPHLQFQIA

SEQ ID NO: 19020 - protein, 70 aa, Synthetic construct
AQTPPYRPGPPDPPPPPRHLPTQFNLLASSSAAAAAAEQSSPQLYNFSGAAPGPPPPERALPRQDTVIKH

SEQ ID NO: 19021 - protein, 70 aa, Synthetic construct
GVLGPYRPGPPDPPPPPRHLPTQFNLLASSSAAAAAAEQSSPQLYNFSGAAPGPPPPERALPRQDTVIKH

SEQ ID NO: 19022 - protein, 70 aa, Synthetic construct
GVLGPAGLGPPDPPPPPRHLPTQFNLLASSSAAAAAAEQSSPQLYNFSGAAPGPPPPERALPRQDTVIKH

SEQ ID NO: 19023 - protein, 70 aa, Synthetic construct
GVLGPAGLGPAQTPPPPRHLPTQFNLLASSSAAAAAAEQSSPQLYNFSGAAPGPPPPERALPRQDTVIKH

SEQ ID NO: 19024 - protein, 70 aa, Synthetic construct
GVLGPAGLGPAQTPPYRPGPPTQFNLLASSSAAAAAAEQSSPQLYNFSGAAPGPPPPERALPRQDTVIKH

SEQ ID NO: 19025 - protein, 70 aa, Synthetic construct
GVLGPAGLGPAQTPPYRPGPPDPPPPPRHLSAAAAAAEQSSPQLYNFSGAAPGPPPPERALPRQDTVIKH

SEQ ID NO: 19026 - protein, 70 aa, Synthetic construct
GVLGPAGLGPAQTPPYRPGPPDPPPPPRHLPTQFNAAEQSSPQLYNFSGAAPGPPPPERALPRQDTVIKH

SEQ ID NO: 19027 - protein, 70 aa, Synthetic construct
GVLGPAGLGPAQTPPYRPGPPDPPPPPRHLPTQFNLLASSSPQLYNFSGAAPGPPPPERALPRQDTVIKH

SEQ ID NO: 19028 - protein, 70 aa, Synthetic construct
GVLGPAGLGPAQTPPYRPGPPDPPPPPRHLPTQFNLLASSSAAAANFSGAAPGPPPPERALPRQDTVIKH

SEQ ID NO: 19029 - protein, 70 aa, Synthetic construct
GVLGPAGLGPAQTPPYRPGPPDPPPPPRHLPTQFNLLASSSAAAAAAEQSAPGPPPPERALPRQDTVIKH

SEQ ID NO: 19030 - protein, 70 aa, Synthetic construct
GVLGPAGLGPAQTPPYRPGPPDPPPPPRHLPTQFNLLASSSAAAAAAEQSSPQLYPPERALPRQDTVIKH

SEQ ID NO: 19031 - protein, 70 aa, Synthetic construct
GVLGPAGLGPAQTPPYRPGPPDPPPPPRHLPTQFNLLASSSAAAAAAEQSSPQLYNFSGALPRQDTVIKH

SEQ ID NO: 19032 - protein, 70 aa, Synthetic construct
NSLDSSLTREKIEAKIKEVEEKQPEMKSGFMASFLDFLKSGKRHPPLYQAGLTPPLSPPKSVPPSVPARG

SEQ ID NO: 19033 - protein, 70 aa, Synthetic construct
SGDAISLTREKIEAKIKEVEEKQPEMKSGFMASFLDFLKSGKRHPPLYQAGLTPPLSPPKSVPPSVPARG

SEQ ID NO: 19034 - protein, 70 aa, Synthetic construct
SGDAISGTDHKIEAKIKEVEEKQPEMKSGFMASFLDFLKSGKRHPPLYQAGLTPPLSPPKSVPPSVPARG

SEQ ID NO: 19035 - protein, 70 aa, Synthetic construct
SGDAISGTDHNSLDSIKEVEEKQPEMKSGFMASFLDFLKSGKRHPPLYQAGLTPPLSPPKSVPPSVPARG

SEQ ID NO: 19036 - protein, 70 aa, Synthetic construct
SGDAISGTDHNSLDSSLTREEKQPEMKSGFMASFLDFLKSGKRHPPLYQAGLTPPLSPPKSVPPSVPARG

SEQ ID NO: 19037 - protein, 70 aa, Synthetic construct
SGDAISGTDHNSLDSSLTREKIEAKMKSGFMASFLDFLKSGKRHPPLYQAGLTPPLSPPKSVPPSVPARG

SEQ ID NO: 19038 - protein, 70 aa, Synthetic construct
SGDAISGTDHNSLDSSLTREKIEAKIKEVEEKQPEMKSGFMASFLDFLKSGLTPPLSPPKSVPPSVPARG

SEQ ID NO: 19039 - protein, 70 aa, Synthetic construct
SGDAISGTDHNSLDSSLTREKIEAKIKEVEEKQPEMKSGFMASFLDFLKSGKRHPLSPPKSVPPSVPARG

SEQ ID NO: 19040 - protein, 70 aa, Synthetic construct
SGDAISGTDHNSLDSSLTREKIEAKIKEVEEKQPEMKSGFMASFLDFLKSGKRHPPLYQASVPPSVPARG

SEQ ID NO: 19041 - protein, 70 aa, Synthetic construct
SGDAISGTDHNSLDSSLTREKIEAKIKEVEEKQPEMKSGFMASFLDFLKSGKRHPPLYQAGLTPPVPARG

SEQ ID NO: 19042 - protein, 70 aa, Synthetic construct
SGDAISGTDHNSLDSSLTREKIEAKIKEVEEKQPEMKSGFMASFLDFLKSGKRHPPLYQAGLTPPLSPPK

SEQ ID NO: 19043 - protein, 70 aa, Synthetic construct
PPAAPKPKREENPQKLAFMVSLGLVTHDHLEEIQSKRQERKRRTTANPVYSGAVFEPERKKSAVTYLNST

SEQ ID NO: 19044 - protein, 70 aa, Synthetic construct
EKQTESRTITPPAAPKPKREENPQKLAFMVSLGLVKRQERKRRTTANPVYSGAVFEPERKKSAVTYLNST

SEQ ID NO: 19045 - protein, 70 aa, Synthetic construct
EKQTESRTITPPAAPKPKREENPQKLAFMVSLGLVTHDHLEEIQSKRQERKRRTTANPVYKSAVTYLNST

SEQ ID NO: 19046 - protein, 70 aa, Synthetic construct
EKQTESRTITPPAAPKPKREENPQKLAFMVSLGLVTHDHLEEIQSKRQERKRRTTANPVYSGAVFYLNST

SEQ ID NO: 19047 - protein, 70 aa, Synthetic construct
EKQTESRTITPPAAPKPKREENPQKLAFMVSLGLVTHDHLEEIQSKRQERKRRTTANPVYSGAVFEPERK

SEQ ID NO: 19048 - protein, 70 aa, Synthetic construct
YKAAKEEEKQKLLKWSSDLKQEREQLEQKVKQLSNSISKCMEMKNTILARQKEMHSSLEKVKQLIRLIHG

SEQ ID NO: 19049 - protein, 70 aa, Synthetic construct
TLAIVEEEKQKLLKWSSDLKQEREQLEQKVKQLSNSISKCMEMKNTILARQKEMHSSLEKVKQLIRLIHG

SEQ ID NO: 19050 - protein, 70 aa, Synthetic construct
TLAIVHSYIAKLLKWSSDLKQEREQLEQKVKQLSNSISKCMEMKNTILARQKEMHSSLEKVKQLIRLIHG

SEQ ID NO: 19051 - protein, 70 aa, Synthetic construct
TLAIVHSYIAYKAAKSSDLKQEREQLEQKVKQLSNSISKCMEMKNTILARQKEMHSSLEKVKQLIRLIHG

SEQ ID NO: 19052 - protein, 70 aa, Synthetic construct
TLAIVHSYIAYKAAKEEEKQKLLKWSSDLKKQLSNSISKCMEMKNTILARQKEMHSSLEKVKQLIRLIHG

SEQ ID NO: 19053 - protein, 70 aa, Synthetic construct
QIAAKNFTDTSLMYPEDTCKSGPSTNTQSGLFNTPPPTPPDLNQDFSGFQLLVDVALKRAAEMELQAKLT

SEQ ID NO: 19054 - protein, 70 aa, Synthetic construct
VGVGQNFTDTSLMYPEDTCKSGPSTNTQSGLFNTPPPTPPDLNQDFSGFQLLVDVALKRAAEMELQAKLT

SEQ ID NO: 19055 - protein, 70 aa, Synthetic construct
VGVGQNTDIQSLMYPEDTCKSGPSTNTQSGLFNTPPPTPPDLNQDFSGFQLLVDVALKRAAEMELQAKLT

SEQ ID NO: 19056 - protein, 70 aa, Synthetic construct
VGVGQNTDIQQIAAKEDTCKSGPSTNTQSGLFNTPPPTPPDLNQDFSGFQLLVDVALKRAAEMELQAKLT

SEQ ID NO: 19057 - protein, 70 aa, Synthetic construct
VGVGQNTDIQQIAAKNFTDTSGPSTNTQSGLFNTPPPTPPDLNQDFSGFQLLVDVALKRAAEMELQAKLT

SEQ ID NO: 19058 - protein, 70 aa, Synthetic construct
VGVGQNTDIQQIAAKNFTDTSLMYPNTQSGLFNTPPPTPPDLNQDFSGFQLLVDVALKRAAEMELQAKLT

SEQ ID NO: 19059 - protein, 70 aa, Synthetic construct
VGVGQNTDIQQIAAKNFTDTSLMYPEDTCKLFNTPPPTPPDLNQDFSGFQLLVDVALKRAAEMELQAKLT

SEQ ID NO: 19060 - protein, 70 aa, Synthetic construct
VGVGQNTDIQQIAAKNFTDTSLMYPEDTCKSGPSTPPTPPDLNQDFSGFQLLVDVALKRAAEMELQAKLT

SEQ ID NO: 19061 - protein, 70 aa, Synthetic construct
VGVGQNTDIQQIAAKNFTDTSLMYPEDTCKSGPSTNTQSGDLNQDFSGFQLLVDVALKRAAEMELQAKLT

SEQ ID NO: 19062 - protein, 70 aa, Synthetic construct
VGVGQNTDIQQIAAKNFTDTSLMYPEDTCKSGPSTNTQSGLFNTPFSGFQLLVDVALKRAAEMELQAKLT

SEQ ID NO: 19063 - protein, 70 aa, Synthetic construct
VGVGQNTDIQQIAAKNFTDTSLMYPEDTCKSGPSTNTQSGLFNTPPPTPPDLNQDFSGFQLLVDVALKRA

SEQ ID NO: 19064 - protein, 70 aa, Synthetic construct
LLTETLLQRNEAEKQKGLQEVQITLAARLGEAEEKIKVLHSALKATQAELLELRRKYDEEAASKADEVGL

SEQ ID NO: 19065 - protein, 70 aa, Synthetic construct
SRLPGLLQRNEAEKQKGLQEVQITLAARLGEAEEKIKVLHSALKATQAELLELRRKYDEEAASKADEVGL

SEQ ID NO: 19066 - protein, 70 aa, Synthetic construct
SRLPGIPGKAEAEKQKGLQEVQITLAARLGEAEEKIKVLHSALKATQAELLELRRKYDEEAASKADEVGL

SEQ ID NO: 19067 - protein, 70 aa, Synthetic construct
SRLPGIPGKALLTETKGLQEVQITLAARLGEAEEKIKVLHSALKATQAELLELRRKYDEEAASKADEVGL

SEQ ID NO: 19068 - protein, 70 aa, Synthetic construct
SRLPGIPGKALLTETLLQRNVQITLAARLGEAEEKIKVLHSALKATQAELLELRRKYDEEAASKADEVGL

SEQ ID NO: 19069 - protein, 70 aa, Synthetic construct
SRLPGIPGKALLTETLLQRNEAEKQKGLQEVQITLAARLGEAEEKIKVLHLELRRKYDEEAASKADEVGL

SEQ ID NO: 19070 - protein, 70 aa, Synthetic construct
SRLPGIPGKALLTETLLQRNEAEKQKGLQEVQITLAARLGEAEEKIKVLHSALKATQAELLELRRKYDEE

SEQ ID NO: 19071 - protein, 70 aa, Synthetic construct
GGPGITPQSPDSETEDQKPTVKELELQEGPEENSTPLTTQDKAQVRIKQEQMEEDAEEEAGSQPQDSGEL

SEQ ID NO: 19072 - protein, 70 aa, Synthetic construct
GGPGILPPGHDSETEDQKPTVKELELQEGPEENSTPLTTQDKAQVRIKQEQMEEDAEEEAGSQPQDSGEL

SEQ ID NO: 19073 - protein, 70 aa, Synthetic construct
GGPGILPPGHSHPDPDQKPTVKELELQEGPEENSTPLTTQDKAQVRIKQEQMEEDAEEEAGSQPQDSGEL

SEQ ID NO: 19074 - protein, 70 aa, Synthetic construct
GGPGILPPGHSHPDPTPQSPVKELELQEGPEENSTPLTTQDKAQVRIKQEQMEEDAEEEAGSQPQDSGEL

SEQ ID NO: 19075 - protein, 70 aa, Synthetic construct
GGPGILPPGHSHPDPTPQSPDSETELQEGPEENSTPLTTQDKAQVRIKQEQMEEDAEEEAGSQPQDSGEL

SEQ ID NO: 19076 - protein, 70 aa, Synthetic construct
GGPGILPPGHSHPDPTPQSPDSETEDQKPTEENSTPLTTQDKAQVRIKQEQMEEDAEEEAGSQPQDSGEL

SEQ ID NO: 19077 - protein, 70 aa, Synthetic construct
GGPGILPPGHSHPDPTPQSPDSETEDQKPTVKELEPLTTQDKAQVRIKQEQMEEDAEEEAGSQPQDSGEL

SEQ ID NO: 19078 - protein, 70 aa, Synthetic construct
GGPGILPPGHSHPDPTPQSPDSETEDQKPTVKELELQEGPDKAQVRIKQEQMEEDAEEEAGSQPQDSGEL

SEQ ID NO: 19079 - protein, 70 aa, Synthetic construct
GGPGILPPGHSHPDPTPQSPDSETEDQKPTVKELELQEGPEENSTRIKQEQMEEDAEEEAGSQPQDSGEL

SEQ ID NO: 19080 - protein, 70 aa, Synthetic construct
GGPGILPPGHSHPDPTPQSPDSETEDQKPTVKELELQEGPEENSTPLTTQQMEEDAEEEAGSQPQDSGEL

SEQ ID NO: 19081 - protein, 70 aa, Synthetic construct
GGPGILPPGHSHPDPTPQSPDSETEDQKPTVKELELQEGPEENSTPLTTQDKAQVRIKQEGSQPQDSGEL

SEQ ID NO: 19082 - protein, 70 aa, Synthetic construct
GGPGILPPGHSHPDPTPQSPDSETEDQKPTVKELELQEGPEENSTPLTTQDKAQVRIKQEQMEEDDSGEL

SEQ ID NO: 19083 - protein, 70 aa, Synthetic construct
GGPGILPPGHSHPDPTPQSPDSETEDQKPTVKELELQEGPEENSTPLTTQDKAQVRIKQEQMEEDAEEEA

SEQ ID NO: 19084 - protein, 70 aa, Synthetic construct
RAGAPPLAASDTVPAAPEGAGAARPAAPLRPTSFSVLDILDPNKFNSRRRRCVLLGPVAPAACAPCASAP

SEQ ID NO: 19085 - protein, 70 aa, Synthetic construct
DGRAEPLAASDTVPAAPEGAGAARPAAPLRPTSFSVLDILDPNKFNSRRRRCVLLGPVAPAACAPCASAP

SEQ ID NO: 19086 - protein, 70 aa, Synthetic construct
DGRAELPAFPDTVPAAPEGAGAARPAAPLRPTSFSVLDILDPNKFNSRRRRCVLLGPVAPAACAPCASAP

SEQ ID NO: 19087 - protein, 70 aa, Synthetic construct
DGRAELPAFPRAGAPAPEGAGAARPAAPLRPTSFSVLDILDPNKFNSRRRRCVLLGPVAPAACAPCASAP

SEQ ID NO: 19088 - protein, 70 aa, Synthetic construct
DGRAELPAFPRAGAPPLAASGAARPAAPLRPTSFSVLDILDPNKFNSRRRRCVLLGPVAPAACAPCASAP

SEQ ID NO: 19089 - protein, 70 aa, Synthetic construct
DGRAELPAFPRAGAPPLAASDTVPAAAPLRPTSFSVLDILDPNKFNSRRRRCVLLGPVAPAACAPCASAP

SEQ ID NO: 19090 - protein, 70 aa, Synthetic construct
DGRAELPAFPRAGAPPLAASDTVPAAPEGAPTSFSVLDILDPNKFNSRRRRCVLLGPVAPAACAPCASAP

SEQ ID NO: 19091 - protein, 70 aa, Synthetic construct
DGRAELPAFPRAGAPPLAASDTVPAAPEGAGAARPAAPLRPTSFSVLDILDPNKFGPVAPAACAPCASAP

SEQ ID NO: 19092 - protein, 70 aa, Synthetic construct
DGRAELPAFPRAGAPPLAASDTVPAAPEGAGAARPAAPLRPTSFSVLDILDPNKFNSRRRAACAPCASAP

SEQ ID NO: 19093 - protein, 70 aa, Synthetic construct
DGRAELPAFPRAGAPPLAASDTVPAAPEGAGAARPAAPLRPTSFSVLDILDPNKFNSRRRRCVLLCASAP

SEQ ID NO: 19094 - protein, 70 aa, Synthetic construct
DGRAELPAFPRAGAPPLAASDTVPAAPEGAGAARPAAPLRPTSFSVLDILDPNKFNSRRRRCVLLGPVAP

SEQ ID NO: 19095 - protein, 70 aa, Synthetic construct
GGRHPGVAEVKTEMMPGAAESSISGGMGDKVEERGKEGPGTPTRSSVITSARELHYGREESAEQVPPPAE

SEQ ID NO: 19096 - protein, 70 aa, Synthetic construct
GGRHPGVAEVKTEMMQVDEVSSISGGMGDKVEERGKEGPGTPTRSSVITSARELHYGREESAEQVPPPAE

SEQ ID NO: 19097 - protein, 70 aa, Synthetic construct
GGRHPGVAEVKTEMMQVDEVPSQDSGMGDKVEERGKEGPGTPTRSSVITSARELHYGREESAEQVPPPAE

SEQ ID NO: 19098 - protein, 70 aa, Synthetic construct
GGRHPGVAEVKTEMMQVDEVPSQDSPGAAEVEERGKEGPGTPTRSSVITSARELHYGREESAEQVPPPAE

SEQ ID NO: 19099 - protein, 70 aa, Synthetic construct
GGRHPGVAEVKTEMMQVDEVPSQDSPGAAESSISGKEGPGTPTRSSVITSARELHYGREESAEQVPPPAE

SEQ ID NO: 19100 - protein, 70 aa, Synthetic construct
GGRHPGVAEVKTEMMQVDEVPSQDSPGAAESSISGGMGDKTPTRSSVITSARELHYGREESAEQVPPPAE

SEQ ID NO: 19101 - protein, 70 aa, Synthetic construct
GGRHPGVAEVKTEMMQVDEVPSQDSPGAAESSISGGMGDKVEERGSVITSARELHYGREESAEQVPPPAE

SEQ ID NO: 19102 - protein, 70 aa, Synthetic construct
GGRHPGVAEVKTEMMQVDEVPSQDSPGAAESSISGGMGDKVEERGKEGPGTPTRSSVITSSAEQVPPPAE

SEQ ID NO: 19103 - protein, 70 aa, Synthetic construct
GGRHPGVAEVKTEMMQVDEVPSQDSPGAAESSISGGMGDKVEERGKEGPGTPTRSSVITSARELHPPPAE

SEQ ID NO: 19104 - protein, 70 aa, Synthetic construct
GGRHPGVAEVKTEMMQVDEVPSQDSPGAAESSISGGMGDKVEERGKEGPGTPTRSSVITSARELHYGREE

SEQ ID NO: 19105 - protein, 70 aa, Synthetic construct
AVGMKSESRTIGEQCSVCGVELPDNEAVEQHRKLHSGMKTYGCELCGKRFLDSLRLRMHLLAHSAGAKAF

SEQ ID NO: 19106 - protein, 70 aa, Synthetic construct
RELFSSESRTIGEQCSVCGVELPDNEAVEQHRKLHSGMKTYGCELCGKRFLDSLRLRMHLLAHSAGAKAF

SEQ ID NO: 19107 - protein, 70 aa, Synthetic construct
RELFSKLGELIGEQCSVCGVELPDNEAVEQHRKLHSGMKTYGCELCGKRFLDSLRLRMHLLAHSAGAKAF

SEQ ID NO: 19108 - protein, 70 aa, Synthetic construct
RELFSKLGELAVGMKSVCGVELPDNEAVEQHRKLHSGMKTYGCELCGKRFLDSLRLRMHLLAHSAGAKAF

SEQ ID NO: 19109 - protein, 70 aa, Synthetic construct
RELFSKLGELAVGMKSESRTELPDNEAVEQHRKLHSGMKTYGCELCGKRFLDSLRLRMHLLAHSAGAKAF

SEQ ID NO: 19110 - protein, 70 aa, Synthetic construct
RELFSKLGELAVGMKSESRTIGEQCEAVEQHRKLHSGMKTYGCELCGKRFLDSLRLRMHLLAHSAGAKAF

SEQ ID NO: 19111 - protein, 70 aa, Synthetic construct
RELFSKLGELAVGMKSESRTIGEQCSVCGVHRKLHSGMKTYGCELCGKRFLDSLRLRMHLLAHSAGAKAF

SEQ ID NO: 19112 - protein, 70 aa, Synthetic construct
RELFSKLGELAVGMKSESRTIGEQCSVCGVELPDNSGMKTYGCELCGKRFLDSLRLRMHLLAHSAGAKAF

SEQ ID NO: 19113 - protein, 70 aa, Synthetic construct
RELFSKLGELAVGMKSESRTIGEQCSVCGVELPDNEAVEQHRKLHCGKRFLDSLRLRMHLLAHSAGAKAF

SEQ ID NO: 19114 - protein, 70 aa, Synthetic construct
TSLVSALDSMCSALSKLNAEVACVAVHDESAFVVGTEKGRMFLNARKELQSDFLRFCRGPPWKDPEAEHP

SEQ ID NO: 19115 - protein, 70 aa, Synthetic construct
SAFTRKDEIITSLVSALDSMCSALSKLNAEVACVATEKGRMFLNARKELQSDFLRFCRGPPWKDPEAEHP

SEQ ID NO: 19116 - protein, 70 aa, Synthetic construct
SAFTRKDEIITSLVSALDSMCSALSKLNAEVACVAVHDESMFLNARKELQSDFLRFCRGPPWKDPEAEHP

SEQ ID NO: 19117 - protein, 70 aa, Synthetic construct
SAFTRKDEIITSLVSALDSMCSALSKLNAEVACVAVHDESAFVVGRKELQSDFLRFCRGPPWKDPEAEHP

SEQ ID NO: 19118 - protein, 70 aa, Synthetic construct
SAFTRKDEIITSLVSALDSMCSALSKLNAEVACVAVHDESAFVVGTEKGRSDFLRFCRGPPWKDPEAEHP

SEQ ID NO: 19119 - protein, 70 aa, Synthetic construct
SAFTRKDEIITSLVSALDSMCSALSKLNAEVACVAVHDESAFVVGTEKGRMFLNAFCRGPPWKDPEAEHP

SEQ ID NO: 19120 - protein, 70 aa, Synthetic construct
SAFTRKDEIITSLVSALDSMCSALSKLNAEVACVAVHDESAFVVGTEKGRMFLNARKELQPWKDPEAEHP

SEQ ID NO: 19121 - protein, 70 aa, Synthetic construct
SAFTRKDEIITSLVSALDSMCSALSKLNAEVACVAVHDESAFVVGTEKGRMFLNARKELQSDFLREAEHP

SEQ ID NO: 19122 - protein, 70 aa, Synthetic construct
SAFTRKDEIITSLVSALDSMCSALSKLNAEVACVAVHDESAFVVGTEKGRMFLNARKELQSDFLRFCRGP

SEQ ID NO: 19123 - protein, 70 aa, Synthetic construct
PITGYMFGKGIYFADMSSKSANYCFASRLKNTGLLLLSEVALGQCNELLEANPKAEGLLQGKHSTKGLGK

SEQ ID NO: 19124 - protein, 70 aa, Synthetic construct
HGLRIMFGKGIYFADMSSKSANYCFASRLKNTGLLLLSEVALGQCNELLEANPKAEGLLQGKHSTKGLGK

SEQ ID NO: 19125 - protein, 70 aa, Synthetic construct
HGLRIAPPEAIYFADMSSKSANYCFASRLKNTGLLLLSEVALGQCNELLEANPKAEGLLQGKHSTKGLGK

SEQ ID NO: 19126 - protein, 70 aa, Synthetic construct
HGLRIAPPEAPITGYMSSKSANYCFASRLKNTGLLLLSEVALGQCNELLEANPKAEGLLQGKHSTKGLGK

SEQ ID NO: 19127 - protein, 70 aa, Synthetic construct
HGLRIAPPEAPITGYMFGKGANYCFASRLKNTGLLLLSEVALGQCNELLEANPKAEGLLQGKHSTKGLGK

SEQ ID NO: 19128 - protein, 70 aa, Synthetic construct
HGLRIAPPEAPITGYMFGKGIYFADASRLKNTGLLLLSEVALGQCNELLEANPKAEGLLQGKHSTKGLGK

SEQ ID NO: 19129 - protein, 70 aa, Synthetic construct
HGLRIAPPEAPITGYMFGKGIYFADMSSKSNTGLLLLSEVALGQCNELLEANPKAEGLLQGKHSTKGLGK

SEQ ID NO: 19130 - protein, 70 aa, Synthetic construct
HGLRIAPPEAPITGYMFGKGIYFADMSSKSANYCFLLSEVALGQCNELLEANPKAEGLLQGKHSTKGLGK

SEQ ID NO: 19131 - protein, 70 aa, Synthetic construct
HGLRIAPPEAPITGYMFGKGIYFADMSSKSANYCFASRLKNTGLLNELLEANPKAEGLLQGKHSTKGLGK

SEQ ID NO: 19132 - protein, 70 aa, Synthetic construct
HGLRIAPPEAPITGYMFGKGIYFADMSSKSANYCFASRLKNTGLLLLSEVALGQCEGLLQGKHSTKGLGK

SEQ ID NO: 19133 - protein, 70 aa, Synthetic construct
HGLRIAPPEAPITGYMFGKGIYFADMSSKSANYCFASRLKNTGLLLLSEVALGQCNELLEGKHSTKGLGK

SEQ ID NO: 19134 - protein, 70 aa, Synthetic construct
HGLRIAPPEAPITGYMFGKGIYFADMSSKSANYCFASRLKNTGLLLLSEVALGQCNELLEANPKAKGLGK

SEQ ID NO: 19135 - protein, 70 aa, Synthetic construct
HGLRIAPPEAPITGYMFGKGIYFADMSSKSANYCFASRLKNTGLLLLSEVALGQCNELLEANPKAEGLLQ

SEQ ID NO: 19136 - protein, 70 aa, Synthetic construct
DGNTEPLPPDSGDKNLVIQKSKDEAQDNGATIMPIITESFSLSAEDYEMKKIIVTDSDDDDDDVIFCSEI

SEQ ID NO: 19137 - protein, 70 aa, Synthetic construct
QVKSIPLPPDSGDKNLVIQKSKDEAQDNGATIMPIITESFSLSAEDYEMKKIIVTDSDDDDDDVIFCSEI

SEQ ID NO: 19138 - protein, 70 aa, Synthetic construct
QVKSISGTAQSGDKNLVIQKSKDEAQDNGATIMPIITESFSLSAEDYEMKKIIVTDSDDDDDDVIFCSEI

SEQ ID NO: 19139 - protein, 70 aa, Synthetic construct
QVKSISGTAQDGNTELVIQKSKDEAQDNGATIMPIITESFSLSAEDYEMKKIIVTDSDDDDDDVIFCSEI

SEQ ID NO: 19140 - protein, 70 aa, Synthetic construct
QVKSISGTAQDGNTEPLPPDSKDEAQDNGATIMPIITESFSLSAEDYEMKKIIVTDSDDDDDDVIFCSEI

SEQ ID NO: 19141 - protein, 70 aa, Synthetic construct
QVKSISGTAQDGNTEPLPPDSGDKNQDNGATIMPIITESFSLSAEDYEMKKIIVTDSDDDDDDVIFCSEI

SEQ ID NO: 19142 - protein, 70 aa, Synthetic construct
QVKSISGTAQDGNTEPLPPDSGDKNLVIQKTIMPIITESFSLSAEDYEMKKIIVTDSDDDDDDVIFCSEI

SEQ ID NO: 19143 - protein, 70 aa, Synthetic construct
QVKSISGTAQDGNTEPLPPDSGDKNLVIQKSKDEAQDNGATIMPIITESFKIIVTDSDDDDDDVIFCSEI

SEQ ID NO: 19144 - protein, 70 aa, Synthetic construct
QVKSISGTAQDGNTEPLPPDSGDKNLVIQKSKDEAQDNGATIMPIITESFSLSAEDSDDDDDDVIFCSEI

SEQ ID NO: 19145 - protein, 70 aa, Synthetic construct
QVKSISGTAQDGNTEPLPPDSGDKNLVIQKSKDEAQDNGATIMPIITESFSLSAEDYEMKDDDVIFCSEI

SEQ ID NO: 19146 - protein, 70 aa, Synthetic construct
QVKSISGTAQDGNTEPLPPDSGDKNLVIQKSKDEAQDNGATIMPIITESFSLSAEDYEMKKIIVTFCSEI

SEQ ID NO: 19147 - protein, 70 aa, Synthetic construct
QVKSISGTAQDGNTEPLPPDSGDKNLVIQKSKDEAQDNGATIMPIITESFSLSAEDYEMKKIIVTDSDDD

SEQ ID NO: 19148 - protein, 70 aa, Synthetic construct
YDIVIPVKDDPDEGESGSEMANKRMKVKHDDHYELIVDGRVYYICIVCKRSYVCLTSLRRHFNIHSWEKK

SEQ ID NO: 19149 - protein, 70 aa, Synthetic construct
YDIVIPVKDDPDEGEARLENANKRMKVKHDDHYELIVDGRVYYICIVCKRSYVCLTSLRRHFNIHSWEKK

SEQ ID NO: 19150 - protein, 70 aa, Synthetic construct
YDIVIPVKDDPDEGEARLENEIPKTKVKHDDHYELIVDGRVYYICIVCKRSYVCLTSLRRHFNIHSWEKK

SEQ ID NO: 19151 - protein, 70 aa, Synthetic construct
YDIVIPVKDDPDEGEARLENEIPKTSGSEMDHYELIVDGRVYYICIVCKRSYVCLTSLRRHFNIHSWEKK

SEQ ID NO: 19152 - protein, 70 aa, Synthetic construct
YDIVIPVKDDPDEGEARLENEIPKTSGSEMANKRMIVDGRVYYICIVCKRSYVCLTSLRRHFNIHSWEKK

SEQ ID NO: 19153 - protein, 70 aa, Synthetic construct
YDIVIPVKDDPDEGEARLENEIPKTSGSEMANKRMKVKHDVYYICIVCKRSYVCLTSLRRHFNIHSWEKK

SEQ ID NO: 19154 - protein, 70 aa, Synthetic construct
YDIVIPVKDDPDEGEARLENEIPKTSGSEMANKRMKVKHDDHYELIVCKRSYVCLTSLRRHFNIHSWEKK

SEQ ID NO: 19155 - protein, 70 aa, Synthetic construct
YDIVIPVKDDPDEGEARLENEIPKTSGSEMANKRMKVKHDDHYELIVDGRVYYICTSLRRHFNIHSWEKK

SEQ ID NO: 19156 - protein, 70 aa, Synthetic construct
YDIVIPVKDDPDEGEARLENEIPKTSGSEMANKRMKVKHDDHYELIVDGRVYYICIVCKRHFNIHSWEKK

SEQ ID NO: 19157 - protein, 70 aa, Synthetic construct
YDIVIPVKDDPDEGEARLENEIPKTSGSEMANKRMKVKHDDHYELIVDGRVYYICIVCKRSYVCLSWEKK

SEQ ID NO: 19158 - protein, 70 aa, Synthetic construct
YDIVIPVKDDPDEGEARLENEIPKTSGSEMANKRMKVKHDDHYELIVDGRVYYICIVCKRSYVCLTSLRR

SEQ ID NO: 19159 - protein, 70 aa, Synthetic construct
HARSSRKKRCPYTKYQTLELEKEFLFNMYLTRDRRHEVARLLNLSERQVKIWFQNRRMKMKKMNKEQGKE

SEQ ID NO: 19160 - protein, 70 aa, Synthetic construct
DQTNPRKKRCPYTKYQTLELEKEFLFNMYLTRDRRHEVARLLNLSERQVKIWFQNRRMKMKKMNKEQGKE

SEQ ID NO: 19161 - protein, 70 aa, Synthetic construct
DQTNPSANWLHARSSRKKRCEKEFLFNMYLTRDRRHEVARLLNLSERQVKIWFQNRRMKMKKMNKEQGKE

SEQ ID NO: 19162 - protein, 70 aa, Synthetic construct
DQTNPSANWLHARSSRKKRCPYTKYFNMYLTRDRRHEVARLLNLSERQVKIWFQNRRMKMKKMNKEQGKE

SEQ ID NO: 19163 - protein, 70 aa, Synthetic construct
DQTNPSANWLHARSSRKKRCPYTKYQTLELEKEFLFNMYLTRDRRERQVKIWFQNRRMKMKKMNKEQGKE

SEQ ID NO: 19164 - protein, 70 aa, Synthetic construct
KQWEAYVQGGDQDSSTFPGCINNATLFQDEINWRLKEGLVEGEDYVLLPAAAWHYLVSWYGLEHGQPPIE

SEQ ID NO: 19165 - protein, 70 aa, Synthetic construct
SWFLVYVQGGDQDSSTFPGCINNATLFQDEINWRLKEGLVEGEDYVLLPAAAWHYLVSWYGLEHGQPPIE

SEQ ID NO: 19166 - protein, 70 aa, Synthetic construct
SWFLVEKHWYDQDSSTFPGCINNATLFQDEINWRLKEGLVEGEDYVLLPAAAWHYLVSWYGLEHGQPPIE

SEQ ID NO: 19167 - protein, 70 aa, Synthetic construct
SWFLVEKHWYKQWEAYVQGGDQDSSTFPGCINNATKEGLVEGEDYVLLPAAAWHYLVSWYGLEHGQPPIE

SEQ ID NO: 19168 - protein, 70 aa, Synthetic construct
SWFLVEKHWYKQWEAYVQGGDQDSSTFPGCINNATLFQDEEGEDYVLLPAAAWHYLVSWYGLEHGQPPIE

SEQ ID NO: 19169 - protein, 70 aa, Synthetic construct
SWFLVEKHWYKQWEAYVQGGDQDSSTFPGCINNATLFQDEINWRLKEGLVEGEDYLVSWYGLEHGQPPIE

SEQ ID NO: 19170 - protein, 70 aa, Synthetic construct
SWFLVEKHWYKQWEAYVQGGDQDSSTFPGCINNATLFQDEINWRLKEGLVEGEDYVLLPAGLEHGQPPIE

SEQ ID NO: 19171 - protein, 70 aa, Synthetic construct
SWFLVEKHWYKQWEAYVQGGDQDSSTFPGCINNATLFQDEINWRLKEGLVEGEDYVLLPAAAWHYQPPIE

SEQ ID NO: 19172 - protein, 70 aa, Synthetic construct
AGEQHQDCEPAAAAVRITLTLFEPDHKRCPEFFYPELVKNIRGKVKGLQPGDKKKDLSDPFNDEEKERHK

SEQ ID NO: 19173 - protein, 70 aa, Synthetic construct
LKKSRQDCEPAAAAVRITLTLFEPDHKRCPEFFYPELVKNIRGKVKGLQPGDKKKDLSDPFNDEEKERHK

SEQ ID NO: 19174 - protein, 70 aa, Synthetic construct
LKKSRKEEAGAAAAVRITLTLFEPDHKRCPEFFYPELVKNIRGKVKGLQPGDKKKDLSDPFNDEEKERHK

SEQ ID NO: 19175 - protein, 70 aa, Synthetic construct
LKKSRKEEAGAGEQHRITLTLFEPDHKRCPEFFYPELVKNIRGKVKGLQPGDKKKDLSDPFNDEEKERHK

SEQ ID NO: 19176 - protein, 70 aa, Synthetic construct
LKKSRKEEAGAGEQHQDCEPAAAAVRITLTLFEPDHKRCPEFFYPELVKNGDKKKDLSDPFNDEEKERHK

SEQ ID NO: 19177 - protein, 70 aa, Synthetic construct
LKKSRKEEAGAGEQHQDCEPAAAAVRITLTLFEPDHKRCPEFFYPELVKNIRGKVDLSDPFNDEEKERHK

SEQ ID NO: 19178 - protein, 70 aa, Synthetic construct
LKKSRKEEAGAGEQHQDCEPAAAAVRITLTLFEPDHKRCPEFFYPELVKNIRGKVKGLQPFNDEEKERHK

SEQ ID NO: 19179 - protein, 70 aa, Synthetic construct
LKKSRKEEAGAGEQHQDCEPAAAAVRITLTLFEPDHKRCPEFFYPELVKNIRGKVKGLQPGDKKKKERHK

SEQ ID NO: 19180 - protein, 70 aa, Synthetic construct
LKKSRKEEAGAGEQHQDCEPAAAAVRITLTLFEPDHKRCPEFFYPELVKNIRGKVKGLQPGDKKKDLSDP

SEQ ID NO: 19181 - protein, 70 aa, Synthetic construct
PRKRKNSMKVMFKCLWKNCGKVLSTAAGIQKHIRTIHLGRVGDSDYSDGEEDFYYTEIKLSLAPVSPSQS

SEQ ID NO: 19182 - protein, 70 aa, Synthetic construct
PRKRKNSMKVMFKCLWKNCGKVLSTAAGIQKHIRTIHLGRVGDSDYSDGEEDFYYTEIKLNTDSVSPSQS

SEQ ID NO: 19183 - protein, 70 aa, Synthetic construct
PRKRKNSMKVMFKCLWKNCGKVLSTAAGIQKHIRTIHLGRVGDSDYSDGEEDFYYTEIKLNTDSVADGLS

SEQ ID NO: 19184 - protein, 70 aa, Synthetic construct
FKLSFSTAELLCMHYDFIILGNGPRLQNSTYQCKHCDSKLQSTAELTSHLNIHNEEFQKRAKRQERRKQL

SEQ ID NO: 19185 - protein, 70 aa, Synthetic construct
FKLSFSTAELLCMHYTDHHSRDLKRDFIILYQCKHCDSKLQSTAELTSHLNIHNEEFQKRAKRQERRKQL

SEQ ID NO: 19186 - protein, 70 aa, Synthetic construct
AGKRGPDRGSPEYRQRRERNNIAVRKSRDKAKRRNQEMQQKLHQRVEQLTRDLAGLRQFFKQLPSPPFLP

SEQ ID NO: 19187 - protein, 70 aa, Synthetic construct
AGKRGPDRGSPEYRQRRERNNIAVRKSRDKAKRRNQEMQQKLVELVEQLTRDLAGLRQFFKQLPSPPFLP

SEQ ID NO: 19188 - protein, 70 aa, Synthetic construct
AGKRGPDRGSPEYRQRRERNNIAVRKSRDKAKRRNQEMQQKLVELSAENEKLHQRVEQLTRDLAGLRQFF

SEQ ID NO: 19189 - protein, 70 aa, Synthetic construct
NRGFARLKALVPFLPQSRKPSKVDILKGATEYIQVLSDLLPDEQSYSNNSSESHTSSARQLSRNITQHIS

SEQ ID NO: 19190 - protein, 70 aa, Synthetic construct
NRGFARLKALVPFLPQSRKPSKVDILKGATEYIQVLSDLLEGAKDYSNNSSESHTSSARQLSRNITQHIS

SEQ ID NO: 19191 - protein, 70 aa, Synthetic construct
NRGFARLKALVPFLPQSRKPSKVDILKGATEYIQVLSDLLEGAKDSKKQDSESHTSSARQLSRNITQHIS

SEQ ID NO: 19192 - protein, 70 aa, Synthetic construct
NRGFARLKALVPFLPQSRKPSKVDILKGATEYIQVLSDLLEGAKDSKKQDPDEQSSSARQLSRNITQHIS

SEQ ID NO: 19193 - protein, 70 aa, Synthetic construct
NRGFARLKALVPFLPQSRKPSKVDILKGATEYIQVLSDLLEGAKDSKKQDPDEQSYSNNSLSRNITQHIS

SEQ ID NO: 19194 - protein, 70 aa, Synthetic construct
NRGFARLKALVPFLPQSRKPSKVDILKGATEYIQVLSDLLEGAKDSKKQDPDEQSYSNNSSESHTTQHIS

SEQ ID NO: 19195 - protein, 70 aa, Synthetic construct
NRGFARLKALVPFLPQSRKPSKVDILKGATEYIQVLSDLLEGAKDSKKQDPDEQSYSNNSSESHTSSARQ

SEQ ID NO: 19196 - protein, 70 aa, Synthetic construct
EPLDLVLVPDDCRPGTPPSDLIEIQVVKVTDTTLVPEPPEPGSFHCALCPAAFRLVSELLFHEHGHLAGA

SEQ ID NO: 19197 - protein, 70 aa, Synthetic construct
SSPTPVLVPDDCRPGTPPSDLIEIQVVKVTDTTLVPEPPEPGSFHCALCPAAFRLVSELLFHEHGHLAGA

SEQ ID NO: 19198 - protein, 70 aa, Synthetic construct
SSPTPESRSQDCRPGTPPSDLIEIQVVKVTDTTLVPEPPEPGSFHCALCPAAFRLVSELLFHEHGHLAGA

SEQ ID NO: 19199 - protein, 70 aa, Synthetic construct
SSPTPESRSQEPLDLTPPSDLIEIQVVKVTDTTLVPEPPEPGSFHCALCPAAFRLVSELLFHEHGHLAGA

SEQ ID NO: 19200 - protein, 70 aa, Synthetic construct
SSPTPESRSQEPLDLVLVPDLIEIQVVKVTDTTLVPEPPEPGSFHCALCPAAFRLVSELLFHEHGHLAGA

SEQ ID NO: 19201 - protein, 70 aa, Synthetic construct
SSPTPESRSQEPLDLVLVPDDCRPGTPPSDLIEIQVVKVTPGSFHCALCPAAFRLVSELLFHEHGHLAGA

SEQ ID NO: 19202 - protein, 70 aa, Synthetic construct
SSPTPESRSQEPLDLVLVPDDCRPGTPPSDLIEIQVVKVTDTTLVPEPPEPGSFHCALCPAAFRLHLAGA

SEQ ID NO: 19203 - protein, 70 aa, Synthetic construct
LFNDIKIEPPPQVEPVDLSFHKPKAPLQPASMLQAPIRPPKPQSSPQTLVVSTSTSDMSTSANIPTVLTP

SEQ ID NO: 19204 - protein, 70 aa, Synthetic construct
LFNDIKIEPPEELLAVDLSFHKPKAPLQPASMLQAPIRPPKPQSSPQTLVVSTSTSDMSTSANIPTVLTP

SEQ ID NO: 19205 - protein, 70 aa, Synthetic construct
LFNDIKIEPPEELLASDFSLHKPKAPLQPASMLQAPIRPPKPQSSPQTLVVSTSTSDMSTSANIPTVLTP

SEQ ID NO: 19206 - protein, 70 aa, Synthetic construct
LFNDIKIEPPEELLASDFSLPQVEPPLQPASMLQAPIRPPKPQSSPQTLVVSTSTSDMSTSANIPTVLTP

SEQ ID NO: 19207 - protein, 70 aa, Synthetic construct
LFNDIKIEPPEELLASDFSLPQVEPVDLSFSMLQAPIRPPKPQSSPQTLVVSTSTSDMSTSANIPTVLTP

SEQ ID NO: 19208 - protein, 70 aa, Synthetic construct
LFNDIKIEPPEELLASDFSLPQVEPVDLSFHKPKAPIRPPKPQSSPQTLVVSTSTSDMSTSANIPTVLTP

SEQ ID NO: 19209 - protein, 70 aa, Synthetic construct
LFNDIKIEPPEELLASDFSLPQVEPVDLSFHKPKAPLQPAKPQSSPQTLVVSTSTSDMSTSANIPTVLTP

SEQ ID NO: 19210 - protein, 70 aa, Synthetic construct
LFNDIKIEPPEELLASDFSLPQVEPVDLSFHKPKAPLQPASMLQAPQTLVVSTSTSDMSTSANIPTVLTP

SEQ ID NO: 19211 - protein, 70 aa, Synthetic construct
LFNDIKIEPPEELLASDFSLPQVEPVDLSFHKPKAPLQPASMLQAPIRPPVSTSTSDMSTSANIPTVLTP

SEQ ID NO: 19212 - protein, 70 aa, Synthetic construct
LFNDIKIEPPEELLASDFSLPQVEPVDLSFHKPKAPLQPASMLQAPIRPPKPQSSSDMSTSANIPTVLTP

SEQ ID NO: 19213 - protein, 70 aa, Synthetic construct
LFNDIKIEPPEELLASDFSLPQVEPVDLSFHKPKAPLQPASMLQAPIRPPKPQSSPQTLVSANIPTVLTP

SEQ ID NO: 19214 - protein, 70 aa, Synthetic construct
LFNDIKIEPPEELLASDFSLPQVEPVDLSFHKPKAPLQPASMLQAPIRPPKPQSSPQTLVVSTSTTVLTP

SEQ ID NO: 19215 - protein, 70 aa, Synthetic construct
LFNDIKIEPPEELLASDFSLPQVEPVDLSFHKPKAPLQPASMLQAPIRPPKPQSSPQTLVVSTSTSDMST

SEQ ID NO: 19216 - protein, 70 aa, Synthetic construct
KSDTPRKKRCPYTKHQTLELEKEFLFNMYLTRERRLEISKSVNLTDRQVKIWFQNRRMKLKKMSRENRIR

SEQ ID NO: 19217 - protein, 70 aa, Synthetic construct
KSDTPTSNWLTAKSGRKKRCPYTKHQTLELEKEFLFNMYLSVNLTDRQVKIWFQNRRMKLKKMSRENRIR

SEQ ID NO: 19218 - protein, 70 aa, Synthetic construct
PLLVPKAERLSPPAPSGSERRLSGDLSSMPGPGTLSVRVSPPQPILSRGRPDSNKTENRRITHISAEQKR

SEQ ID NO: 19219 - protein, 70 aa, Synthetic construct
PGPATLAPSRPLLVPKAERLSPPAPLSSMPGPGTLSVRVSPPQPILSRGRPDSNKTENRRITHISAEQKR

SEQ ID NO: 19220 - protein, 70 aa, Synthetic construct
PGPATLAPSRPLLVPKAERLSPPAPSGSERGPGTLSVRVSPPQPILSRGRPDSNKTENRRITHISAEQKR

SEQ ID NO: 19221 - protein, 70 aa, Synthetic construct
PGPATLAPSRPLLVPKAERLSPPAPSGSERRLSGDSVRVSPPQPILSRGRPDSNKTENRRITHISAEQKR

SEQ ID NO: 19222 - protein, 70 aa, Synthetic construct
PGPATLAPSRPLLVPKAERLSPPAPSGSERRLSGDLSSMPPPQPILSRGRPDSNKTENRRITHISAEQKR

SEQ ID NO: 19223 - protein, 70 aa, Synthetic construct
PGPATLAPSRPLLVPKAERLSPPAPSGSERRLSGDLSSMPGPGTLLSRGRPDSNKTENRRITHISAEQKR

SEQ ID NO: 19224 - protein, 70 aa, Synthetic construct
PGPATLAPSRPLLVPKAERLSPPAPSGSERRLSGDLSSMPGPGTLSVRVSPDSNKTENRRITHISAEQKR

SEQ ID NO: 19225 - protein, 70 aa, Synthetic construct
PGPATLAPSRPLLVPKAERLSPPAPSGSERRLSGDLSSMPGPGTLSVRVSPPQPITENRRITHISAEQKR

SEQ ID NO: 19226 - protein, 70 aa, Synthetic construct
PGPATLAPSRPLLVPKAERLSPPAPSGSERRLSGDLSSMPGPGTLSVRVSPPQPILSRGRITHISAEQKR

SEQ ID NO: 19227 - protein, 70 aa, Synthetic construct
PGPATLAPSRPLLVPKAERLSPPAPSGSERRLSGDLSSMPGPGTLSVRVSPPQPILSRGRPDSNKAEQKR

SEQ ID NO: 19228 - protein, 70 aa, Synthetic construct
PGPATLAPSRPLLVPKAERLSPPAPSGSERRLSGDLSSMPGPGTLSVRVSPPQPILSRGRPDSNKTENRR

SEQ ID NO: 19229 - protein, 70 aa, Synthetic construct
GVCLDCYRLRKSRPRSETEEMGDEEVFSWLKCAKGQSHEPENLMPTQIIPGTALYNIGDMVHAARGKWGI

SEQ ID NO: 19230 - protein, 70 aa, Synthetic construct
IHWVCRKCGFGVCLDCYRLRMGDEEVFSWLKCAKGQSHEPENLMPTQIIPGTALYNIGDMVHAARGKWGI

SEQ ID NO: 19231 - protein, 70 aa, Synthetic construct
IHWVCRKCGFGVCLDCYRLRKSRPRVFSWLKCAKGQSHEPENLMPTQIIPGTALYNIGDMVHAARGKWGI

SEQ ID NO: 19232 - protein, 70 aa, Synthetic construct
IHWVCRKCGFGVCLDCYRLRKSRPRSETEEKCAKGQSHEPENLMPTQIIPGTALYNIGDMVHAARGKWGI

SEQ ID NO: 19233 - protein, 70 aa, Synthetic construct
IHWVCRKCGFGVCLDCYRLRKSRPRSETEEMGDEEQSHEPENLMPTQIIPGTALYNIGDMVHAARGKWGI

SEQ ID NO: 19234 - protein, 70 aa, Synthetic construct
IHWVCRKCGFGVCLDCYRLRKSRPRSETEEMGDEEVFSWLENLMPTQIIPGTALYNIGDMVHAARGKWGI

SEQ ID NO: 19235 - protein, 70 aa, Synthetic construct
IHWVCRKCGFGVCLDCYRLRKSRPRSETEEMGDEEVFSWLKCAKGTQIIPGTALYNIGDMVHAARGKWGI

SEQ ID NO: 19236 - protein, 70 aa, Synthetic construct
IHWVCRKCGFGVCLDCYRLRKSRPRSETEEMGDEEVFSWLKCAKGQSHEPGTALYNIGDMVHAARGKWGI

SEQ ID NO: 19237 - protein, 70 aa, Synthetic construct
IHWVCRKCGFGVCLDCYRLRKSRPRSETEEMGDEEVFSWLKCAKGQSHEPENLMPNIGDMVHAARGKWGI

SEQ ID NO: 19238 - protein, 70 aa, Synthetic construct
IHWVCRKCGFGVCLDCYRLRKSRPRSETEEMGDEEVFSWLKCAKGQSHEPENLMPTQIIPVHAARGKWGI

SEQ ID NO: 19239 - protein, 70 aa, Synthetic construct
IHWVCRKCGFGVCLDCYRLRKSRPRSETEEMGDEEVFSWLKCAKGQSHEPENLMPTQIIPGTALYGKWGI

SEQ ID NO: 19240 - protein, 70 aa, Synthetic construct
IHWVCRKCGFGVCLDCYRLRKSRPRSETEEMGDEEVFSWLKCAKGQSHEPENLMPTQIIPGTALYNIGDM

SEQ ID NO: 19241 - protein, 70 aa, Synthetic construct
PCPDTAPPSSALHWLADLATQKAKEETKEAGSLRSVLNKESHSPFGLDSFNSTAKVSPLTPKLFNSLLLG

SEQ ID NO: 19242 - protein, 70 aa, Synthetic construct
SNSELAPPSSALHWLADLATQKAKEETKEAGSLRSVLNKESHSPFGLDSFNSTAKVSPLTPKLFNSLLLG

SEQ ID NO: 19243 - protein, 70 aa, Synthetic construct
SNSELKAIRPPCPDTAPPSSALHWLADLATQKAKEETKEASHSPFGLDSFNSTAKVSPLTPKLFNSLLLG

SEQ ID NO: 19244 - protein, 70 aa, Synthetic construct
SNSELKAIRPPCPDTAPPSSALHWLADLATQKAKEETKEAGSLRSGLDSFNSTAKVSPLTPKLFNSLLLG

SEQ ID NO: 19245 - protein, 70 aa, Synthetic construct
SNSELKAIRPPCPDTAPPSSALHWLADLATQKAKEETKEAGSLRSVLNKESHSPFVSPLTPKLFNSLLLG

SEQ ID NO: 19246 - protein, 70 aa, Synthetic construct
SNSELKAIRPPCPDTAPPSSALHWLADLATQKAKEETKEAGSLRSVLNKESHSPFGLDSFNSTAKSLLLG

SEQ ID NO: 19247 - protein, 70 aa, Synthetic construct
SNSELKAIRPPCPDTAPPSSALHWLADLATQKAKEETKEAGSLRSVLNKESHSPFGLDSFNSTAKVSPLT

SEQ ID NO: 19248 - protein, 70 aa, Synthetic construct
VKKRKVQSCHLQKKQLRLLEAMVEEQRRLSRAVEETCREVRRVLDQQHILQVQSLQLQERMMSLLERIIT

SEQ ID NO: 19249 - protein, 70 aa, Synthetic construct
SLKFRVQSCHLQKKQLRLLEAMVEEQRRLSRAVEETCREVRRVLDQQHILQVQSLQLQERMMSLLERIIT

SEQ ID NO: 19250 - protein, 70 aa, Synthetic construct
SLKFRSEERPLQKKQLRLLEAMVEEQRRLSRAVEETCREVRRVLDQQHILQVQSLQLQERMMSLLERIIT

SEQ ID NO: 19251 - protein, 70 aa, Synthetic construct
SLKFRSEERPVKKRKLRLLEAMVEEQRRLSRAVEETCREVRRVLDQQHILQVQSLQLQERMMSLLERIIT

SEQ ID NO: 19252 - protein, 70 aa, Synthetic construct
SLKFRSEERPVKKRKVQSCHAMVEEQRRLSRAVEETCREVRRVLDQQHILQVQSLQLQERMMSLLERIIT

SEQ ID NO: 19253 - protein, 70 aa, Synthetic construct
SLKFRSEERPVKKRKVQSCHLQKKQQRRLSRAVEETCREVRRVLDQQHILQVQSLQLQERMMSLLERIIT

SEQ ID NO: 19254 - protein, 70 aa, Synthetic construct
SLKFRSEERPVKKRKVQSCHLQKKQLRLLERAVEETCREVRRVLDQQHILQVQSLQLQERMMSLLERIIT

SEQ ID NO: 19255 - protein, 70 aa, Synthetic construct
SLKFRSEERPVKKRKVQSCHLQKKQLRLLEAMVEETCREVRRVLDQQHILQVQSLQLQERMMSLLERIIT

SEQ ID NO: 19256 - protein, 70 aa, Synthetic construct
SLKFRSEERPVKKRKVQSCHLQKKQLRLLEAMVEEQRRLSRRVLDQQHILQVQSLQLQERMMSLLERIIT

SEQ ID NO: 19257 - protein, 70 aa, Synthetic construct
SLKFRSEERPVKKRKVQSCHLQKKQLRLLEAMVEEQRRLSRAVEEQQHILQVQSLQLQERMMSLLERIIT

SEQ ID NO: 19258 - protein, 70 aa, Synthetic construct
SLKFRSEERPVKKRKVQSCHLQKKQLRLLEAMVEEQRRLSRAVEETCREVQVQSLQLQERMMSLLERIIT

SEQ ID NO: 19259 - protein, 70 aa, Synthetic construct
SLKFRSEERPVKKRKVQSCHLQKKQLRLLEAMVEEQRRLSRAVEETCREVRRVLDQLQERMMSLLERIIT

SEQ ID NO: 19260 - protein, 70 aa, Synthetic construct
SLKFRSEERPVKKRKVQSCHLQKKQLRLLEAMVEEQRRLSRAVEETCREVRRVLDQQHILMMSLLERIIT

SEQ ID NO: 19261 - protein, 70 aa, Synthetic construct
SLKFRSEERPVKKRKVQSCHLQKKQLRLLEAMVEEQRRLSRAVEETCREVRRVLDQQHILQVQSLERIIT

SEQ ID NO: 19262 - protein, 70 aa, Synthetic construct
SLKFRSEERPVKKRKVQSCHLQKKQLRLLEAMVEEQRRLSRAVEETCREVRRVLDQQHILQVQSLQLQER

SEQ ID NO: 19263 - protein, 70 aa, Synthetic construct
PKSTRRSGRIGIDSDDVQDNSQLKASTQKAANLSEKHSLYTAELITVPFDSESPIRMKFTRISTPKKSKK

SEQ ID NO: 19264 - protein, 70 aa, Synthetic construct
PKSTRRSGRISSTPTTETIRGIDSDSTQKAANLSEKHSLYTAELITVPFDSESPIRMKFTRISTPKKSKK

SEQ ID NO: 19265 - protein, 70 aa, Synthetic construct
PKSTRRSGRISSTPTTETIRGIDSDDVQDNSQLKASTQKAANLSEKHSLYTAELITVPFDSESPIRMKFT

SEQ ID NO: 19266 - protein, 70 aa, Synthetic construct
QPSQEVKMEAKMEVDQPEPADTQPEDISESKVEDCKMESTETEERSTELKTEIKEEEDQPSTSATQSSPA

SEQ ID NO: 19267 - protein, 70 aa, Synthetic construct
EVNSQVKMEAKMEVDQPEPADTQPEDISESKVEDCKMESTETEERSTELKTEIKEEEDQPSTSATQSSPA

SEQ ID NO: 19268 - protein, 70 aa, Synthetic construct
EVNSQAIAEKKMEVDQPEPADTQPEDISESKVEDCKMESTETEERSTELKTEIKEEEDQPSTSATQSSPA

SEQ ID NO: 19269 - protein, 70 aa, Synthetic construct
EVNSQAIAEKQPSQEQPEPADTQPEDISESKVEDCKMESTETEERSTELKTEIKEEEDQPSTSATQSSPA

SEQ ID NO: 19270 - protein, 70 aa, Synthetic construct
EVNSQAIAEKQPSQEVKMEAKMEVDDISESKVEDCKMESTETEERSTELKTEIKEEEDQPSTSATQSSPA

SEQ ID NO: 19271 - protein, 70 aa, Synthetic construct
EVNSQAIAEKQPSQEVKMEAKMEVDQPEPAKVEDCKMESTETEERSTELKTEIKEEEDQPSTSATQSSPA

SEQ ID NO: 19272 - protein, 70 aa, Synthetic construct
EVNSQAIAEKQPSQEVKMEAKMEVDQPEPADTQPEKMESTETEERSTELKTEIKEEEDQPSTSATQSSPA

SEQ ID NO: 19273 - protein, 70 aa, Synthetic construct
EVNSQAIAEKQPSQEVKMEAKMEVDQPEPADTQPEDISESETEERSTELKTEIKEEEDQPSTSATQSSPA

SEQ ID NO: 19274 - protein, 70 aa, Synthetic construct
EVNSQAIAEKQPSQEVKMEAKMEVDQPEPADTQPEDISESKVEDCSTELKTEIKEEEDQPSTSATQSSPA

SEQ ID NO: 19275 - protein, 70 aa, Synthetic construct
EVNSQAIAEKQPSQEVKMEAKMEVDQPEPADTQPEDISESKVEDCKMESTTEIKEEEDQPSTSATQSSPA

SEQ ID NO: 19276 - protein, 70 aa, Synthetic construct
EVNSQAIAEKQPSQEVKMEAKMEVDQPEPADTQPEDISESKVEDCKMESTETEERSTELKTEIKEQSSPA

SEQ ID NO: 19277 - protein, 70 aa, Synthetic construct
EVNSQAIAEKQPSQEVKMEAKMEVDQPEPADTQPEDISESKVEDCKMESTETEERSTELKTEIKEEEDQP

SEQ ID NO: 19278 - protein, 70 aa, Synthetic construct
HHEIIWPAGFVCDGCLKKSARTRKENKFSAKRLPSTRLGTFLENRVNDFLRRQNHPESGEVTVRVVHASD

SEQ ID NO: 19279 - protein, 70 aa, Synthetic construct
GRKMHWPAGFVCDGCLKKSARTRKENKFSAKRLPSTRLGTFLENRVNDFLRRQNHPESGEVTVRVVHASD

SEQ ID NO: 19280 - protein, 70 aa, Synthetic construct
GRKMHQICVLVCDGCLKKSARTRKENKFSAKRLPSTRLGTFLENRVNDFLRRQNHPESGEVTVRVVHASD

SEQ ID NO: 19281 - protein, 70 aa, Synthetic construct
GRKMHQICVLHHEIIWPAGFVCDGCLKKSAKRLPSTRLGTFLENRVNDFLRRQNHPESGEVTVRVVHASD

SEQ ID NO: 19282 - protein, 70 aa, Synthetic construct
GRKMHQICVLHHEIIWPAGFVCDGCLKKSARTRKETRLGTFLENRVNDFLRRQNHPESGEVTVRVVHASD

SEQ ID NO: 19283 - protein, 70 aa, Synthetic construct
GRKMHQICVLHHEIIWPAGFVCDGCLKKSARTRKENKFSAFLENRVNDFLRRQNHPESGEVTVRVVHASD

SEQ ID NO: 19284 - protein, 70 aa, Synthetic construct
GRKMHQICVLHHEIIWPAGFVCDGCLKKSARTRKENKFSAKRLPSVNDFLRRQNHPESGEVTVRVVHASD

SEQ ID NO: 19285 - protein, 70 aa, Synthetic construct
GRKMHQICVLHHEIIWPAGFVCDGCLKKSARTRKENKFSAKRLPSTRLGTRRQNHPESGEVTVRVVHASD

SEQ ID NO: 19286 - protein, 70 aa, Synthetic construct
GRKMHQICVLHHEIIWPAGFVCDGCLKKSARTRKENKFSAKRLPSTRLGTFLENRPESGEVTVRVVHASD

SEQ ID NO: 19287 - protein, 70 aa, Synthetic construct
GRKMHQICVLHHEIIWPAGFVCDGCLKKSARTRKENKFSAKRLPSTRLGTFLENRVNDFLVTVRVVHASD

SEQ ID NO: 19288 - protein, 70 aa, Synthetic construct
GRKMHQICVLHHEIIWPAGFVCDGCLKKSARTRKENKFSAKRLPSTRLGTFLENRVNDFLRRQNHVHASD

SEQ ID NO: 19289 - protein, 70 aa, Synthetic construct
GRKMHQICVLHHEIIWPAGFVCDGCLKKSARTRKENKFSAKRLPSTRLGTFLENRVNDFLRRQNHPESGE

SEQ ID NO: 19290 - protein, 70 aa, Synthetic construct
TVRGRPKLSRKWYRILKQEHPELAVLADSVDLQESTGIASDSSSDSSSSSSSSSSDSDSECESGSEGDGT

SEQ ID NO: 19291 - protein, 70 aa, Synthetic construct
STNFPPKLSRKWYRILKQEHPELAVLADSVDLQESTGIASDSSSDSSSSSSSSSSDSDSECESGSEGDGT

SEQ ID NO: 19292 - protein, 70 aa, Synthetic construct
STNFPVVWHKKWYRILKQEHPELAVLADSVDLQESTGIASDSSSDSSSSSSSSSSDSDSECESGSEGDGT

SEQ ID NO: 19293 - protein, 70 aa, Synthetic construct
STNFPVVWHKTVRGRPKLSRKWYRILADSVDLQESTGIASDSSSDSSSSSSSSSSDSDSECESGSEGDGT

SEQ ID NO: 19294 - protein, 70 aa, Synthetic construct
STNFPVVWHKTVRGRPKLSRKWYRILKQEHDLQESTGIASDSSSDSSSSSSSSSSDSDSECESGSEGDGT

SEQ ID NO: 19295 - protein, 70 aa, Synthetic construct
STNFPVVWHKTVRGRPKLSRKWYRILKQEHPELAVTGIASDSSSDSSSSSSSSSSDSDSECESGSEGDGT

SEQ ID NO: 19296 - protein, 70 aa, Synthetic construct
STNFPVVWHKTVRGRPKLSRKWYRILKQEHPELAVLADSVDSSSDSSSSSSSSSSDSDSECESGSEGDGT

SEQ ID NO: 19297 - protein, 70 aa, Synthetic construct
STNFPVVWHKTVRGRPKLSRKWYRILKQEHPELAVLADSVDLQESSSSSSSSSSSDSDSECESGSEGDGT

SEQ ID NO: 19298 - protein, 70 aa, Synthetic construct
STNFPVVWHKTVRGRPKLSRKWYRILKQEHPELAVLADSVDLQESTGIASDSSSDSSSSSSSSSSDSDSE

SEQ ID NO: 19299 - protein, 70 aa, Synthetic construct
LPLSERPSKKGKKPKTEKEDKVKHIKQEPVESSLGLSNGVSDLSPEYAVLTSTIKNEVDSTVNIIVVGQS

SEQ ID NO: 19300 - protein, 70 aa, Synthetic construct
GNNAFRPSKKGKKPKTEKEDKVKHIKQEPVESSLGLSNGVSDLSPEYAVLTSTIKNEVDSTVNIIVVGQS

SEQ ID NO: 19301 - protein, 70 aa, Synthetic construct
GNNAFRVYRMGKKPKTEKEDKVKHIKQEPVESSLGLSNGVSDLSPEYAVLTSTIKNEVDSTVNIIVVGQS

SEQ ID NO: 19302 - protein, 70 aa, Synthetic construct
GNNAFRVYRMLPLSETEKEDKVKHIKQEPVESSLGLSNGVSDLSPEYAVLTSTIKNEVDSTVNIIVVGQS

SEQ ID NO: 19303 - protein, 70 aa, Synthetic construct
GNNAFRVYRMLPLSERPSKKKVKHIKQEPVESSLGLSNGVSDLSPEYAVLTSTIKNEVDSTVNIIVVGQS

SEQ ID NO: 19304 - protein, 70 aa, Synthetic construct
GNNAFRVYRMLPLSERPSKKGKKPKKQEPVESSLGLSNGVSDLSPEYAVLTSTIKNEVDSTVNIIVVGQS

SEQ ID NO: 19305 - protein, 70 aa, Synthetic construct
GNNAFRVYRMLPLSERPSKKGKKPKTEKEDESSLGLSNGVSDLSPEYAVLTSTIKNEVDSTVNIIVVGQS

SEQ ID NO: 19306 - protein, 70 aa, Synthetic construct
GNNAFRVYRMLPLSERPSKKGKKPKTEKEDKVKHILSNGVSDLSPEYAVLTSTIKNEVDSTVNIIVVGQS

SEQ ID NO: 19307 - protein, 70 aa, Synthetic construct
GNNAFRVYRMLPLSERPSKKGKKPKTEKEDKVKHIKQEPVSDLSPEYAVLTSTIKNEVDSTVNIIVVGQS

SEQ ID NO: 19308 - protein, 70 aa, Synthetic construct
GNNAFRVYRMLPLSERPSKKGKKPKTEKEDKVKHIKQEPVESSLGEYAVLTSTIKNEVDSTVNIIVVGQS

SEQ ID NO: 19309 - protein, 70 aa, Synthetic construct
GNNAFRVYRMLPLSERPSKKGKKPKTEKEDKVKHIKQEPVESSLGLSNGVTSTIKNEVDSTVNIIVVGQS

SEQ ID NO: 19310 - protein, 70 aa, Synthetic construct
GNNAFRVYRMLPLSERPSKKGKKPKTEKEDKVKHIKQEPVESSLGLSNGVSDLSPNEVDSTVNIIVVGQS

SEQ ID NO: 19311 - protein, 70 aa, Synthetic construct
GNNAFRVYRMLPLSERPSKKGKKPKTEKEDKVKHIKQEPVESSLGLSNGVSDLSPEYAVLTVNIIVVGQS

SEQ ID NO: 19312 - protein, 70 aa, Synthetic construct
GNNAFRVYRMLPLSERPSKKGKKPKTEKEDKVKHIKQEPVESSLGLSNGVSDLSPEYAVLTSTIKVVGQS

SEQ ID NO: 19313 - protein, 70 aa, Synthetic construct
GNNAFRVYRMLPLSERPSKKGKKPKTEKEDKVKHIKQEPVESSLGLSNGVSDLSPEYAVLTSTIKNEVDS

SEQ ID NO: 19314 - protein, 70 aa, Synthetic construct
FVTSNKPDLQVTIKEESNPVPYNSSWPPFQDLPLSSSMTPASSSSRPDRETRASVIKKTSDITQARVKSC

SEQ ID NO: 19315 - protein, 70 aa, Synthetic construct
GSYLLKPDLQVTIKEESNPVPYNSSWPPFQDLPLSSSMTPASSSSRPDRETRASVIKKTSDITQARVKSC

SEQ ID NO: 19316 - protein, 70 aa, Synthetic construct
GSYLLPGMASVTIKEESNPVPYNSSWPPFQDLPLSSSMTPASSSSRPDRETRASVIKKTSDITQARVKSC

SEQ ID NO: 19317 - protein, 70 aa, Synthetic construct
GSYLLPGMASFVTSNESNPVPYNSSWPPFQDLPLSSSMTPASSSSRPDRETRASVIKKTSDITQARVKSC

SEQ ID NO: 19318 - protein, 70 aa, Synthetic construct
GSYLLPGMASFVTSNKPDLQPYNSSWPPFQDLPLSSSMTPASSSSRPDRETRASVIKKTSDITQARVKSC

SEQ ID NO: 19319 - protein, 70 aa, Synthetic construct
GSYLLPGMASFVTSNKPDLQVTIKEWPPFQDLPLSSSMTPASSSSRPDRETRASVIKKTSDITQARVKSC

SEQ ID NO: 19320 - protein, 70 aa, Synthetic construct
GSYLLPGMASFVTSNKPDLQVTIKEESNPVDLPLSSSMTPASSSSRPDRETRASVIKKTSDITQARVKSC

SEQ ID NO: 19321 - protein, 70 aa, Synthetic construct
GSYLLPGMASFVTSNKPDLQVTIKEESNPVPYNSSSSMTPASSSSRPDRETRASVIKKTSDITQARVKSC

SEQ ID NO: 19322 - protein, 70 aa, Synthetic construct
GSYLLPGMASFVTSNKPDLQVTIKEESNPVPYNSSWPPFQASSSSRPDRETRASVIKKTSDITQARVKSC

SEQ ID NO: 19323 - protein, 70 aa, Synthetic construct
GSYLLPGMASFVTSNKPDLQVTIKEESNPVPYNSSWPPFQDLPLSRPDRETRASVIKKTSDITQARVKSC

SEQ ID NO: 19324 - protein, 70 aa, Synthetic construct
GSYLLPGMASFVTSNKPDLQVTIKEESNPVPYNSSWPPFQDLPLSSSMTPTRASVIKKTSDITQARVKSC

SEQ ID NO: 19325 - protein, 70 aa, Synthetic construct
GSYLLPGMASFVTSNKPDLQVTIKEESNPVPYNSSWPPFQDLPLSSSMTPASSSSIKKTSDITQARVKSC

SEQ ID NO: 19326 - protein, 70 aa, Synthetic construct
GSYLLPGMASFVTSNKPDLQVTIKEESNPVPYNSSWPPFQDLPLSSSMTPASSSSRPDREDITQARVKSC

SEQ ID NO: 19327 - protein, 70 aa, Synthetic construct
GSYLLPGMASFVTSNKPDLQVTIKEESNPVPYNSSWPPFQDLPLSSSMTPASSSSRPDRETRASVRVKSC

SEQ ID NO: 19328 - protein, 70 aa, Synthetic construct
GSYLLPGMASFVTSNKPDLQVTIKEESNPVPYNSSWPPFQDLPLSSSMTPASSSSRPDRETRASVIKKTS

SEQ ID NO: 19329 - protein, 70 aa, Synthetic construct
LNTSNREVKVYVCKSHMYLDEEIRLDTSSEASHWKQAAVVLDNPIQVEMGEELVLSIQHHKSNVSITVKQ

SEQ ID NO: 19330 - protein, 70 aa, Synthetic construct
LNTSNREVKVYVCKSGRLTAEEIRLDTSSEASHWKQAAVVLDNPIQVEMGEELVLSIQHHKSNVSITVKQ

SEQ ID NO: 19331 - protein, 70 aa, Synthetic construct
LNTSNREVKVYVCKSGRLTAIPFWYDTSSEASHWKQAAVVLDNPIQVEMGEELVLSIQHHKSNVSITVKQ

SEQ ID NO: 19332 - protein, 70 aa, Synthetic construct
AEDWLDCPALGPGWKRREVFRKSGATCGRSDTYYQSPTGDRIRSKVELTRYLGPACDLTLFDFKQGILCY

SEQ ID NO: 19333 - protein, 70 aa, Synthetic construct
GDGTQRQRLKTLCKDCRAQRKRVGCGECAACQVTEDCGACSTCLLQLPHDVASGLFCKCERRRCLRIVER

SEQ ID NO: 19334 - protein, 70 aa, Synthetic construct
GDGTQRQRLKTLCKDCRAQRIAFNRGECAACQVTEDCGACSTCLLQLPHDVASGLFCKCERRRCLRIVER

SEQ ID NO: 19335 - protein, 70 aa, Synthetic construct
GDGTQRQRLKTLCKDCRAQRIAFNREQRMFCQVTEDCGACSTCLLQLPHDVASGLFCKCERRRCLRIVER

SEQ ID NO: 19336 - protein, 70 aa, Synthetic construct
GDGTQRQRLKTLCKDCRAQRIAFNREQRMFKRVGCDCGACSTCLLQLPHDVASGLFCKCERRRCLRIVER

SEQ ID NO: 19337 - protein, 70 aa, Synthetic construct
GDGTQRQRLKTLCKDCRAQRIAFNREQRMFKRVGCGECAASTCLLQLPHDVASGLFCKCERRRCLRIVER

SEQ ID NO: 19338 - protein, 70 aa, Synthetic construct
GDGTQRQRLKTLCKDCRAQRIAFNREQRMFKRVGCGECAACQVTEQLPHDVASGLFCKCERRRCLRIVER

SEQ ID NO: 19339 - protein, 70 aa, Synthetic construct
GDGTQRQRLKTLCKDCRAQRIAFNREQRMFKRVGCGECAACQVTEDCGACVASGLFCKCERRRCLRIVER

SEQ ID NO: 19340 - protein, 70 aa, Synthetic construct
GDGTQRQRLKTLCKDCRAQRIAFNREQRMFKRVGCGECAACQVTEDCGACSTCLLFCKCERRRCLRIVER

SEQ ID NO: 19341 - protein, 70 aa, Synthetic construct
GDGTQRQRLKTLCKDCRAQRIAFNREQRMFKRVGCGECAACQVTEDCGACSTCLLQLPHDRRRCLRIVER

SEQ ID NO: 19342 - protein, 70 aa, Synthetic construct
GDGTQRQRLKTLCKDCRAQRIAFNREQRMFKRVGCGECAACQVTEDCGACSTCLLQLPHDVASGLRIVER

SEQ ID NO: 19343 - protein, 70 aa, Synthetic construct
GDGTQRQRLKTLCKDCRAQRIAFNREQRMFKRVGCGECAACQVTEDCGACSTCLLQLPHDVASGLFCKCE

SEQ ID NO: 19344 - protein, 70 aa, Synthetic construct
RRQNRKCGACAACLRRMDCGRCDFCCDKPKFGGSNQKRQKCRWRQCLQFAMKRLLPSVWSPYRRRKRPSS

SEQ ID NO: 19345 - protein, 70 aa, Synthetic construct
RRQNRKCGACAACLRRMDCGRCDFCCDKPKFGGSNQKRQKCRWRQCLQFAMKRLLPSVWSESEDGKRPSS

SEQ ID NO: 19346 - protein, 70 aa, Synthetic construct
RRQNRKCGACAACLRRMDCGRCDFCCDKPKFGGSNQKRQKCRWRQCLQFAMKRLLPSVWSESEDGAGSPP

SEQ ID NO: 19347 - protein, 70 aa, Synthetic construct
VPGCPSKAVDPGLPSVKQEPPDPEEDKEENKDDSASKLAPEEEAGGAGTPVITEIFSLGGTRFRDTAVWL

SEQ ID NO: 19348 - protein, 70 aa, Synthetic construct
GTAVLSKAVDPGLPSVKQEPPDPEEDKEENKDDSASKLAPEEEAGGAGTPVITEIFSLGGTRFRDTAVWL

SEQ ID NO: 19349 - protein, 70 aa, Synthetic construct
GTAVLTSPVLPGLPSVKQEPPDPEEDKEENKDDSASKLAPEEEAGGAGTPVITEIFSLGGTRFRDTAVWL

SEQ ID NO: 19350 - protein, 70 aa, Synthetic construct
GTAVLTSPVLVPGCPVKQEPPDPEEDKEENKDDSASKLAPEEEAGGAGTPVITEIFSLGGTRFRDTAVWL

SEQ ID NO: 19351 - protein, 70 aa, Synthetic construct
GTAVLTSPVLVPGCPSKAVDPDPEEDKEENKDDSASKLAPEEEAGGAGTPVITEIFSLGGTRFRDTAVWL

SEQ ID NO: 19352 - protein, 70 aa, Synthetic construct
GTAVLTSPVLVPGCPSKAVDPGLPSDKEENKDDSASKLAPEEEAGGAGTPVITEIFSLGGTRFRDTAVWL

SEQ ID NO: 19353 - protein, 70 aa, Synthetic construct
GTAVLTSPVLVPGCPSKAVDPGLPSVKQEPKDDSASKLAPEEEAGGAGTPVITEIFSLGGTRFRDTAVWL

SEQ ID NO: 19354 - protein, 70 aa, Synthetic construct
GTAVLTSPVLVPGCPSKAVDPGLPSVKQEPPDPEESKLAPEEEAGGAGTPVITEIFSLGGTRFRDTAVWL

SEQ ID NO: 19355 - protein, 70 aa, Synthetic construct
GTAVLTSPVLVPGCPSKAVDPGLPSVKQEPPDPEEDKEENEEEAGGAGTPVITEIFSLGGTRFRDTAVWL

SEQ ID NO: 19356 - protein, 70 aa, Synthetic construct
GTAVLTSPVLVPGCPSKAVDPGLPSVKQEPPDPEEDKEENKDDSAGAGTPVITEIFSLGGTRFRDTAVWL

SEQ ID NO: 19357 - protein, 70 aa, Synthetic construct
GTAVLTSPVLVPGCPSKAVDPGLPSVKQEPPDPEEDKEENKDDSASKLAPVITEIFSLGGTRFRDTAVWL

SEQ ID NO: 19358 - protein, 70 aa, Synthetic construct
GTAVLTSPVLVPGCPSKAVDPGLPSVKQEPPDPEEDKEENKDDSASKLAPEEEAGFSLGGTRFRDTAVWL

SEQ ID NO: 19359 - protein, 70 aa, Synthetic construct
GTAVLTSPVLVPGCPSKAVDPGLPSVKQEPPDPEEDKEENKDDSASKLAPEEEAGGAGTPTRFRDTAVWL

SEQ ID NO: 19360 - protein, 70 aa, Synthetic construct
GTAVLTSPVLVPGCPSKAVDPGLPSVKQEPPDPEEDKEENKDDSASKLAPEEEAGGAGTPVITEITAVWL

SEQ ID NO: 19361 - protein, 70 aa, Synthetic construct
GTAVLTSPVLVPGCPSKAVDPGLPSVKQEPPDPEEDKEENKDDSASKLAPEEEAGGAGTPVITEIFSLGG

SEQ ID NO: 19362 - protein, 70 aa, Synthetic construct
QQHLHNMPPSALSQLGACTSTHLSQSSNLSLPSTQSLNIKSEPVSPPRDRTTTPSRYPQHTRHEAGRSPV

SEQ ID NO: 19363 - protein, 70 aa, Synthetic construct
LHLGSNMPPSALSQLGACTSTHLSQSSNLSLPSTQSLNIKSEPVSPPRDRTTTPSRYPQHTRHEAGRSPV

SEQ ID NO: 19364 - protein, 70 aa, Synthetic construct
LHLGSVTGWQALSQLGACTSTHLSQSSNLSLPSTQSLNIKSEPVSPPRDRTTTPSRYPQHTRHEAGRSPV

SEQ ID NO: 19365 - protein, 70 aa, Synthetic construct
LHLGSVTGWQQQHLHGACTSTHLSQSSNLSLPSTQSLNIKSEPVSPPRDRTTTPSRYPQHTRHEAGRSPV

SEQ ID NO: 19366 - protein, 70 aa, Synthetic construct
LHLGSVTGWQQQHLHNMPPSTHLSQSSNLSLPSTQSLNIKSEPVSPPRDRTTTPSRYPQHTRHEAGRSPV

SEQ ID NO: 19367 - protein, 70 aa, Synthetic construct
LHLGSVTGWQQQHLHNMPPSALSQLSSNLSLPSTQSLNIKSEPVSPPRDRTTTPSRYPQHTRHEAGRSPV

SEQ ID NO: 19368 - protein, 70 aa, Synthetic construct
LHLGSVTGWQQQHLHNMPPSALSQLGACTSLPSTQSLNIKSEPVSPPRDRTTTPSRYPQHTRHEAGRSPV

SEQ ID NO: 19369 - protein, 70 aa, Synthetic construct
LHLGSVTGWQQQHLHNMPPSALSQLGACTSTHLSQSLNIKSEPVSPPRDRTTTPSRYPQHTRHEAGRSPV

SEQ ID NO: 19370 - protein, 70 aa, Synthetic construct
LHLGSVTGWQQQHLHNMPPSALSQLGACTSTHLSQSSNLSLPSTQSLNIKSEPVSRYPQHTRHEAGRSPV

SEQ ID NO: 19371 - protein, 70 aa, Synthetic construct
LHLGSVTGWQQQHLHNMPPSALSQLGACTSTHLSQSSNLSLPSTQSLNIKSEPVSPPRDRTRHEAGRSPV

SEQ ID NO: 19372 - protein, 70 aa, Synthetic construct
LHLGSVTGWQQQHLHNMPPSALSQLGACTSTHLSQSSNLSLPSTQSLNIKSEPVSPPRDRTTTPSGRSPV

SEQ ID NO: 19373 - protein, 70 aa, Synthetic construct
LHLGSVTGWQQQHLHNMPPSALSQLGACTSTHLSQSSNLSLPSTQSLNIKSEPVSPPRDRTTTPSRYPQH

SEQ ID NO: 19374 - protein, 70 aa, Synthetic construct
GLVLSKPALEEEEAPRALSLLSLPPKKRSILGLGQARPLEFLRTCYGGSFLVHESFLYKREKAVGDKVYW

SEQ ID NO: 19375 - protein, 70 aa, Synthetic construct
QCPEEKPALEEEEAPRALSLLSLPPKKRSILGLGQARPLEFLRTCYGGSFLVHESFLYKREKAVGDKVYW

SEQ ID NO: 19376 - protein, 70 aa, Synthetic construct
QCPEEPEPTPEEEAPRALSLLSLPPKKRSILGLGQARPLEFLRTCYGGSFLVHESFLYKREKAVGDKVYW

SEQ ID NO: 19377 - protein, 70 aa, Synthetic construct
QCPEEPEPTPGLVLSRALSLLSLPPKKRSILGLGQARPLEFLRTCYGGSFLVHESFLYKREKAVGDKVYW

SEQ ID NO: 19378 - protein, 70 aa, Synthetic construct
QCPEEPEPTPGLVLSKPALELSLPPKKRSILGLGQARPLEFLRTCYGGSFLVHESFLYKREKAVGDKVYW

SEQ ID NO: 19379 - protein, 70 aa, Synthetic construct
QCPEEPEPTPGLVLSKPALEEEEAPRALSLLSLPPKKRSIFLRTCYGGSFLVHESFLYKREKAVGDKVYW

SEQ ID NO: 19380 - protein, 70 aa, Synthetic construct
QCPEEPEPTPGLVLSKPALEEEEAPRALSLLSLPPKKRSILGLGQYGGSFLVHESFLYKREKAVGDKVYW

SEQ ID NO: 19381 - protein, 70 aa, Synthetic construct
QCPEEPEPTPGLVLSKPALEEEEAPRALSLLSLPPKKRSILGLGQARPLELVHESFLYKREKAVGDKVYW

SEQ ID NO: 19382 - protein, 70 aa, Synthetic construct
QCPEEPEPTPGLVLSKPALEEEEAPRALSLLSLPPKKRSILGLGQARPLEFLRTCFLYKREKAVGDKVYW

SEQ ID NO: 19383 - protein, 70 aa, Synthetic construct
QCPEEPEPTPGLVLSKPALEEEEAPRALSLLSLPPKKRSILGLGQARPLEFLRTCYGGSFEKAVGDKVYW

SEQ ID NO: 19384 - protein, 70 aa, Synthetic construct
QCPEEPEPTPGLVLSKPALEEEEAPRALSLLSLPPKKRSILGLGQARPLEFLRTCYGGSFLVHESDKVYW

SEQ ID NO: 19385 - protein, 70 aa, Synthetic construct
QCPEEPEPTPGLVLSKPALEEEEAPRALSLLSLPPKKRSILGLGQARPLEFLRTCYGGSFLVHESFLYKR

SEQ ID NO: 19386 - protein, 70 aa, Synthetic construct
KLPGRLRIQPALWSREDVLHWLRWAEQEYSLPCTAEHGFEMNGRALCILTKDDFRHRAPSSGDVLYELLQ

SEQ ID NO: 19387 - protein, 70 aa, Synthetic construct
TKTRPLRQGSKKPLLEDDPQGARKISSEPVPGEIIAVRVKEEHLDVASPDKASSPELPVSVENIKQETDD

SEQ ID NO: 19388 - protein, 70 aa, Synthetic construct
FGKKRLRQGSKKPLLEDDPQGARKISSEPVPGEIIAVRVKEEHLDVASPDKASSPELPVSVENIKQETDD

SEQ ID NO: 19389 - protein, 70 aa, Synthetic construct
FGKKRKRIPPKKPLLEDDPQGARKISSEPVPGEIIAVRVKEEHLDVASPDKASSPELPVSVENIKQETDD

SEQ ID NO: 19390 - protein, 70 aa, Synthetic construct
FGKKRKRIPPTKTRPEDDPQGARKISSEPVPGEIIAVRVKEEHLDVASPDKASSPELPVSVENIKQETDD

SEQ ID NO: 19391 - protein, 70 aa, Synthetic construct
FGKKRKRIPPTKTRPLRQGSGARKISSEPVPGEIIAVRVKEEHLDVASPDKASSPELPVSVENIKQETDD

SEQ ID NO: 19392 - protein, 70 aa, Synthetic construct
FGKKRKRIPPTKTRPLRQGSKKPLLSSEPVPGEIIAVRVKEEHLDVASPDKASSPELPVSVENIKQETDD

SEQ ID NO: 19393 - protein, 70 aa, Synthetic construct
FGKKRKRIPPTKTRPLRQGSKKPLLEDDPQPGEIIAVRVKEEHLDVASPDKASSPELPVSVENIKQETDD

SEQ ID NO: 19394 - protein, 70 aa, Synthetic construct
FGKKRKRIPPTKTRPLRQGSKKPLLEDDPQGARKIAVRVKEEHLDVASPDKASSPELPVSVENIKQETDD

SEQ ID NO: 19395 - protein, 70 aa, Synthetic construct
FGKKRKRIPPTKTRPLRQGSKKPLLEDDPQGARKISSEPVEEHLDVASPDKASSPELPVSVENIKQETDD

SEQ ID NO: 19396 - protein, 70 aa, Synthetic construct
FGKKRKRIPPTKTRPLRQGSKKPLLEDDPQGARKISSEPVPGEIIVASPDKASSPELPVSVENIKQETDD

SEQ ID NO: 19397 - protein, 70 aa, Synthetic construct
FGKKRKRIPPTKTRPLRQGSKKPLLEDDPQGARKISSEPVPGEIIAVRVKKASSPELPVSVENIKQETDD

SEQ ID NO: 19398 - protein, 70 aa, Synthetic construct
FGKKRKRIPPTKTRPLRQGSKKPLLEDDPQGARKISSEPVPGEIIAVRVKEEHLDELPVSVENIKQETDD

SEQ ID NO: 19399 - protein, 70 aa, Synthetic construct
FGKKRKRIPPTKTRPLRQGSKKPLLEDDPQGARKISSEPVPGEIIAVRVKEEHLDVASPDVENIKQETDD

SEQ ID NO: 19400 - protein, 70 aa, Synthetic construct
FGKKRKRIPPTKTRPLRQGSKKPLLEDDPQGARKISSEPVPGEIIAVRVKEEHLDVASPDKASSPQETDD

SEQ ID NO: 19401 - protein, 70 aa, Synthetic construct
FGKKRKRIPPTKTRPLRQGSKKPLLEDDPQGARKISSEPVPGEIIAVRVKEEHLDVASPDKASSPELPVS

SEQ ID NO: 19402 - protein, 70 aa, Synthetic construct
SSAPDEIQHPHIKFSEWKFKLFRVRSFEKTPEEAQKEKKDSFEGKPSLEQSPAVLDKADGQKPVPTQPLL

SEQ ID NO: 19403 - protein, 70 aa, Synthetic construct
AASFPEIQHPHIKFSEWKFKLFRVRSFEKTPEEAQKEKKDSFEGKPSLEQSPAVLDKADGQKPVPTQPLL

SEQ ID NO: 19404 - protein, 70 aa, Synthetic construct
AASFPPTLGLHIKFSEWKFKLFRVRSFEKTPEEAQKEKKDSFEGKPSLEQSPAVLDKADGQKPVPTQPLL

SEQ ID NO: 19405 - protein, 70 aa, Synthetic construct
AASFPPTLGLSSAPDEIQHPHIKFSEWKFKLFRVRKEKKDSFEGKPSLEQSPAVLDKADGQKPVPTQPLL

SEQ ID NO: 19406 - protein, 70 aa, Synthetic construct
AASFPPTLGLSSAPDEIQHPHIKFSEWKFKLFRVRSFEKTSFEGKPSLEQSPAVLDKADGQKPVPTQPLL

SEQ ID NO: 19407 - protein, 70 aa, Synthetic construct
AASFPPTLGLSSAPDEIQHPHIKFSEWKFKLFRVRSFEKTPEEAQPSLEQSPAVLDKADGQKPVPTQPLL

SEQ ID NO: 19408 - protein, 70 aa, Synthetic construct
AASFPPTLGLSSAPDEIQHPHIKFSEWKFKLFRVRSFEKTPEEAQKEKKDSPAVLDKADGQKPVPTQPLL

SEQ ID NO: 19409 - protein, 70 aa, Synthetic construct
AASFPPTLGLSSAPDEIQHPHIKFSEWKFKLFRVRSFEKTPEEAQKEKKDSFEGKDKADGQKPVPTQPLL

SEQ ID NO: 19410 - protein, 70 aa, Synthetic construct
AASFPPTLGLSSAPDEIQHPHIKFSEWKFKLFRVRSFEKTPEEAQKEKKDSFEGKPSLEQQKPVPTQPLL

SEQ ID NO: 19411 - protein, 70 aa, Synthetic construct
AASFPPTLGLSSAPDEIQHPHIKFSEWKFKLFRVRSFEKTPEEAQKEKKDSFEGKPSLEQSPAVLTQPLL

SEQ ID NO: 19412 - protein, 70 aa, Synthetic construct
AASFPPTLGLSSAPDEIQHPHIKFSEWKFKLFRVRSFEKTPEEAQKEKKDSFEGKPSLEQSPAVLDKADG

SEQ ID NO: 19413 - protein, 70 aa, Synthetic construct
WQPPLKNVSSSTDVGIIDGLSGLSSSVDDYPVDTIAKRFRYDSALVSALMDMEEDILEGMRSQDLDDYLN

SEQ ID NO: 19414 - protein, 70 aa, Synthetic construct
VLLPGKNVSSSTDVGIIDGLSGLSSSVDDYPVDTIAKRFRYDSALVSALMDMEEDILEGMRSQDLDDYLN

SEQ ID NO: 19415 - protein, 70 aa, Synthetic construct
VLLPGYHHFESTDVGIIDGLSGLSSSVDDYPVDTIAKRFRYDSALVSALMDMEEDILEGMRSQDLDDYLN

SEQ ID NO: 19416 - protein, 70 aa, Synthetic construct
VLLPGYHHFEWQPPLIIDGLSGLSSSVDDYPVDTIAKRFRYDSALVSALMDMEEDILEGMRSQDLDDYLN

SEQ ID NO: 19417 - protein, 70 aa, Synthetic construct
VLLPGYHHFEWQPPLKNVSSSGLSSSVDDYPVDTIAKRFRYDSALVSALMDMEEDILEGMRSQDLDDYLN

SEQ ID NO: 19418 - protein, 70 aa, Synthetic construct
VLLPGYHHFEWQPPLKNVSSSTDVGSVDDYPVDTIAKRFRYDSALVSALMDMEEDILEGMRSQDLDDYLN

SEQ ID NO: 19419 - protein, 70 aa, Synthetic construct
VLLPGYHHFEWQPPLKNVSSSTDVGIIDGLPVDTIAKRFRYDSALVSALMDMEEDILEGMRSQDLDDYLN

SEQ ID NO: 19420 - protein, 70 aa, Synthetic construct
VLLPGYHHFEWQPPLKNVSSSTDVGIIDGLSGLSSAKRFRYDSALVSALMDMEEDILEGMRSQDLDDYLN

SEQ ID NO: 19421 - protein, 70 aa, Synthetic construct
VLLPGYHHFEWQPPLKNVSSSTDVGIIDGLSGLSSSVDDYYDSALVSALMDMEEDILEGMRSQDLDDYLN

SEQ ID NO: 19422 - protein, 70 aa, Synthetic construct
VLLPGYHHFEWQPPLKNVSSSTDVGIIDGLSGLSSSVDDYPVDTIVSALMDMEEDILEGMRSQDLDDYLN

SEQ ID NO: 19423 - protein, 70 aa, Synthetic construct
VLLPGYHHFEWQPPLKNVSSSTDVGIIDGLSGLSSSVDDYPVDTIAKRFRYDSALVSALMDMEEDILEGM

SEQ ID NO: 19424 - protein, 70 aa, Synthetic construct
ITFAHPAPSVIVHGGSSSGGGGSGTASTGGSQAASVITYTAPPRPPKKREYPPPPPEPAATPTSPATAVS

SEQ ID NO: 19425 - protein, 70 aa, Synthetic construct
APEPGPAPSVIVHGGSSSGGGGSGTASTGGSQAASVITYTAPPRPPKKREYPPPPPEPAATPTSPATAVS

SEQ ID NO: 19426 - protein, 70 aa, Synthetic construct
APEPGPPPSVIVHGGSSSGGGGSGTASTGGSQAASVITYTAPPRPPKKREYPPPPPEPAATPTSPATAVS

SEQ ID NO: 19427 - protein, 70 aa, Synthetic construct
APEPGPPPSVITFAHSSSGGGGSGTASTGGSQAASVITYTAPPRPPKKREYPPPPPEPAATPTSPATAVS

SEQ ID NO: 19428 - protein, 70 aa, Synthetic construct
APEPGPPPSVITFAHPAPSVGGSGTASTGGSQAASVITYTAPPRPPKKREYPPPPPEPAATPTSPATAVS

SEQ ID NO: 19429 - protein, 70 aa, Synthetic construct
APEPGPPPSVITFAHPAPSVIVHGGASTGGSQAASVITYTAPPRPPKKREYPPPPPEPAATPTSPATAVS

SEQ ID NO: 19430 - protein, 70 aa, Synthetic construct
APEPGPPPSVITFAHPAPSVIVHGGSSSGGSQAASVITYTAPPRPPKKREYPPPPPEPAATPTSPATAVS

SEQ ID NO: 19431 - protein, 70 aa, Synthetic construct
APEPGPPPSVITFAHPAPSVIVHGGSSSGGGGSGTVITYTAPPRPPKKREYPPPPPEPAATPTSPATAVS

SEQ ID NO: 19432 - protein, 70 aa, Synthetic construct
APEPGPPPSVITFAHPAPSVIVHGGSSSGGGGSGTASTGGAPPRPPKKREYPPPPPEPAATPTSPATAVS

SEQ ID NO: 19433 - protein, 70 aa, Synthetic construct
APEPGPPPSVITFAHPAPSVIVHGGSSSGGGGSGTASTGGSQAASVITYTYPPPPPEPAATPTSPATAVS

(The sequence listing continues in the following parts.)
